United States Patent Application Publication US 2015/0141320 A1 - sequence listing, part 18

SEQ ID NO: 560276 - DNA, 15 bp, Homo sapiens
aacaggaaaggcaca

SEQ ID NO: 560277 - DNA, 15 bp, Homo sapiens
aaacaggaaaggcac

SEQ ID NO: 560278 - DNA, 15 bp, Homo sapiens
gaaacaggaaaggca

SEQ ID NO: 560279 - DNA, 15 bp, Homo sapiens
ggaaacaggaaaggc

SEQ ID NO: 560280 - DNA, 15 bp, Homo sapiens
aggaaacaggaaagg

SEQ ID NO: 560281 - DNA, 15 bp, Homo sapiens
gaggaaacaggaaag

SEQ ID NO: 560282 - DNA, 15 bp, Homo sapiens
agaggaaacaggaaa

SEQ ID NO: 560283 - DNA, 15 bp, Homo sapiens
aagaggaaacaggaa

SEQ ID NO: 560284 - DNA, 15 bp, Homo sapiens
aaagaggaaacagga

SEQ ID NO: 560285 - DNA, 15 bp, Homo sapiens
caaagaggaaacagg

SEQ ID NO: 560286 - DNA, 15 bp, Homo sapiens
gcaaagaggaaacag

SEQ ID NO: 560287 - DNA, 15 bp, Homo sapiens
ggcaaagaggaaaca

SEQ ID NO: 560288 - DNA, 15 bp, Homo sapiens
aggcaaagaggaaac

SEQ ID NO: 560289 - DNA, 15 bp, Homo sapiens
aaggcaaagaggaaa

SEQ ID NO: 560290 - DNA, 15 bp, Homo sapiens
aaaggcaaagaggaa

SEQ ID NO: 560291 - DNA, 15 bp, Homo sapiens
aaaaggcaaagagga

SEQ ID NO: 560292 - DNA, 15 bp, Homo sapiens
caaaaggcaaagagg

SEQ ID NO: 560293 - DNA, 15 bp, Homo sapiens
gcaaaaggcaaagag

SEQ ID NO: 560294 - DNA, 15 bp, Homo sapiens
tgcaaaaggcaaaga

SEQ ID NO: 560295 - DNA, 15 bp, Homo sapiens
ttgcaaaaggcaaag

SEQ ID NO: 560296 - DNA, 15 bp, Homo sapiens
tttgcaaaaggcaaa

SEQ ID NO: 560297 - DNA, 15 bp, Homo sapiens
atttgcaaaaggcaa

SEQ ID NO: 560298 - DNA, 15 bp, Homo sapiens
aatttgcaaaaggca

SEQ ID NO: 560299 - DNA, 15 bp, Homo sapiens
caatttgcaaaaggc

SEQ ID NO: 560300 - DNA, 15 bp, Homo sapiens
tcaatttgcaaaagg

SEQ ID NO: 560301 - DNA, 15 bp, Homo sapiens
ttcaatttgcaaaag

SEQ ID NO: 560302 - DNA, 15 bp, Homo sapiens
cttcaatttgcaaaa

SEQ ID NO: 560303 - DNA, 15 bp, Homo sapiens
tcttcaatttgcaaa

SEQ ID NO: 560304 - DNA, 15 bp, Homo sapiens
ttcttcaatttgcaa

SEQ ID NO: 560305 - DNA, 15 bp, Homo sapiens
gttcttcaatttgca

SEQ ID NO: 560306 - DNA, 15 bp, Homo sapiens
ggttcttcaatttgc

SEQ ID NO: 560307 - DNA, 15 bp, Homo sapiens
cggttcttcaatttg

SEQ ID NO: 560308 - DNA, 15 bp, Homo sapiens
acggttcttcaattt

SEQ ID NO: 560309 - DNA, 15 bp, Homo sapiens
cacggttcttcaatt

SEQ ID NO: 560310 - DNA, 15 bp, Homo sapiens
acacggttcttcaat

SEQ ID NO: 560311 - DNA, 15 bp, Homo sapiens
tacacggttcttcaa

SEQ ID NO: 560312 - DNA, 15 bp, Homo sapiens
ttacacggttcttca

SEQ ID NO: 560313 - DNA, 15 bp, Homo sapiens
tttacacggttcttc

SEQ ID NO: 560314 - DNA, 15 bp, Homo sapiens
ttttacacggttctt

SEQ ID NO: 560315 - DNA, 15 bp, Homo sapiens
gttttacacggttct

SEQ ID NO: 560316 - DNA, 15 bp, Homo sapiens
ggttttacacggttc

SEQ ID NO: 560317 - DNA, 15 bp, Homo sapiens
tggttttacacggtt

SEQ ID NO: 560318 - DNA, 15 bp, Homo sapiens
atggttttacacggt

SEQ ID NO: 560319 - DNA, 15 bp, Homo sapiens
aatggttttacacgg

SEQ ID NO: 560320 - DNA, 15 bp, Homo sapiens
aaatggttttacacg

SEQ ID NO: 560321 - DNA, 15 bp, Homo sapiens
aaaatggttttacac

SEQ ID NO: 560322 - DNA, 15 bp, Homo sapiens
aaaaatggttttaca

SEQ ID NO: 560323 - DNA, 15 bp, Homo sapiens
taaaaatggttttac

SEQ ID NO: 560324 - DNA, 15 bp, Homo sapiens
ataaaaatggtttta

SEQ ID NO: 560325 - DNA, 15 bp, Homo sapiens
cataaaaatggtttt

SEQ ID NO: 560326 - DNA, 15 bp, Homo sapiens
acataaaaatggttt

SEQ ID NO: 560327 - DNA, 15 bp, Homo sapiens
cacataaaaatggtt

SEQ ID NO: 560328 - DNA, 15 bp, Homo sapiens
ccacataaaaatggt

SEQ ID NO: 560329 - DNA, 15 bp, Homo sapiens
gccacataaaaatgg

SEQ ID NO: 560330 - DNA, 15 bp, Homo sapiens
agccacataaaaatg

SEQ ID NO: 560331 - DNA, 15 bp, Homo sapiens
aagccacataaaaat

SEQ ID NO: 560332 - DNA, 15 bp, Homo sapiens
gaagccacataaaaa

SEQ ID NO: 560333 - DNA, 15 bp, Homo sapiens
tgaagccacataaaa

SEQ ID NO: 560334 - DNA, 15 bp, Homo sapiens
ttgaagccacataaa

SEQ ID NO: 560335 - DNA, 15 bp, Homo sapiens
gttgaagccacataa

SEQ ID NO: 560336 - DNA, 15 bp, Homo sapiens
cgttgaagccacata

SEQ ID NO: 560337 - DNA, 15 bp, Homo sapiens
acgttgaagccacat

SEQ ID NO: 560338 - DNA, 15 bp, Homo sapiens
gacgttgaagccaca

SEQ ID NO: 560339 - DNA, 15 bp, Homo sapiens
tgacgttgaagccac

SEQ ID NO: 560340 - DNA, 15 bp, Homo sapiens
ttgacgttgaagcca

SEQ ID NO: 560341 - DNA, 15 bp, Homo sapiens
gttgacgttgaagcc

SEQ ID NO: 560342 - DNA, 15 bp, Homo sapiens
agttgacgttgaagc

SEQ ID NO: 560343 - DNA, 15 bp, Homo sapiens
tagttgacgttgaag

SEQ ID NO: 560344 - DNA, 15 bp, Homo sapiens
atagttgacgttgaa

SEQ ID NO: 560345 - DNA, 15 bp, Homo sapiens
tatagttgacgttga

SEQ ID NO: 560346 - DNA, 15 bp, Homo sapiens
ttatagttgacgttg

SEQ ID NO: 560347 - DNA, 15 bp, Homo sapiens
tttatagttgacgtt

SEQ ID NO: 560348 - DNA, 15 bp, Homo sapiens
atttatagttgacgt

SEQ ID NO: 560349 - DNA, 15 bp, Homo sapiens
aatttatagttgacg

SEQ ID NO: 560350 - DNA, 15 bp, Homo sapiens
taatttatagttgac

SEQ ID NO: 560351 - DNA, 15 bp, Homo sapiens
ctaatttatagttga

SEQ ID NO: 560352 - DNA, 15 bp, Homo sapiens
gctaatttatagttg

SEQ ID NO: 560353 - DNA, 15 bp, Homo sapiens
agctaatttatagtt

SEQ ID NO: 560354 - DNA, 15 bp, Homo sapiens
aagctaatttatagt

SEQ ID NO: 560355 - DNA, 15 bp, Homo sapiens
caagctaatttatag

SEQ ID NO: 560356 - DNA, 15 bp, Homo sapiens
ccaagctaatttata

SEQ ID NO: 560357 - DNA, 15 bp, Homo sapiens
accaagctaatttat

SEQ ID NO: 560358 - DNA, 15 bp, Homo sapiens
aaccaagctaattta

SEQ ID NO: 560359 - DNA, 15 bp, Homo sapiens
taaccaagctaattt

SEQ ID NO: 560360 - DNA, 15 bp, Homo sapiens
ataaccaagctaatt

SEQ ID NO: 560361 - DNA, 15 bp, Homo sapiens
gataaccaagctaat

SEQ ID NO: 560362 - DNA, 15 bp, Homo sapiens
agataaccaagctaa

SEQ ID NO: 560363 - DNA, 15 bp, Homo sapiens
aagataaccaagcta

SEQ ID NO: 560364 - DNA, 15 bp, Homo sapiens
gaagataaccaagct

SEQ ID NO: 560365 - DNA, 15 bp, Homo sapiens
agaagataaccaagc

SEQ ID NO: 560366 - DNA, 15 bp, Homo sapiens
tagaagataaccaag

SEQ ID NO: 560367 - DNA, 15 bp, Homo sapiens
ctagaagataaccaa

SEQ ID NO: 560368 - DNA, 15 bp, Homo sapiens
cctagaagataacca

SEQ ID NO: 560369 - DNA, 15 bp, Homo sapiens
tcctagaagataacc

SEQ ID NO: 560370 - DNA, 15 bp, Homo sapiens
ctcctagaagataac

SEQ ID NO: 560371 - DNA, 15 bp, Homo sapiens
tctcctagaagataa

SEQ ID NO: 560372 - DNA, 15 bp, Homo sapiens
ttctcctagaagata

SEQ ID NO: 560373 - DNA, 15 bp, Homo sapiens
tttctcctagaagat

SEQ ID NO: 560374 - DNA, 15 bp, Homo sapiens
atttctcctagaaga

SEQ ID NO: 560375 - DNA, 15 bp, Homo sapiens
catttctcctagaag

SEQ ID NO: 560376 - DNA, 15 bp, Homo sapiens
gcatttctcctagaa

SEQ ID NO: 560377 - DNA, 15 bp, Homo sapiens
agcatttctcctaga

SEQ ID NO: 560378 - DNA, 15 bp, Homo sapiens
tagcatttctcctag

SEQ ID NO: 560379 - DNA, 15 bp, Homo sapiens
atagcatttctccta

SEQ ID NO: 560380 - DNA, 15 bp, Homo sapiens
aatagcatttctcct

SEQ ID NO: 560381 - DNA, 15 bp, Homo sapiens
aaatagcatttctcc

SEQ ID NO: 560382 - DNA, 15 bp, Homo sapiens
taaatagcatttctc

SEQ ID NO: 560383 - DNA, 15 bp, Homo sapiens
ataaatagcatttct

SEQ ID NO: 560384 - DNA, 15 bp, Homo sapiens
aataaatagcatttc

SEQ ID NO: 560385 - DNA, 15 bp, Homo sapiens
aaataaatagcattt

SEQ ID NO: 560386 - DNA, 15 bp, Homo sapiens
aaaataaatagcatt

SEQ ID NO: 560387 - DNA, 15 bp, Homo sapiens
caaaataaatagcat

SEQ ID NO: 560388 - DNA, 15 bp, Homo sapiens
ccaaaataaatagca

SEQ ID NO: 560389 - DNA, 15 bp, Homo sapiens
tccaaaataaatagc

SEQ ID NO: 560390 - DNA, 15 bp, Homo sapiens
ctccaaaataaatag

SEQ ID NO: 560391 - DNA, 15 bp, Homo sapiens
actccaaaataaata

SEQ ID NO: 560392 - DNA, 15 bp, Homo sapiens
tactccaaaataaat

SEQ ID NO: 560393 - DNA, 15 bp, Homo sapiens
ctactccaaaataaa

SEQ ID NO: 560394 - DNA, 15 bp, Homo sapiens
actactccaaaataa

SEQ ID NO: 560395 - DNA, 15 bp, Homo sapiens
tactactccaaaata

SEQ ID NO: 560396 - DNA, 15 bp, Homo sapiens
ctactactccaaaat

SEQ ID NO: 560397 - DNA, 15 bp, Homo sapiens
actactactccaaaa

SEQ ID NO: 560398 - DNA, 15 bp, Homo sapiens
tactactactccaaa

SEQ ID NO: 560399 - DNA, 15 bp, Homo sapiens
ttactactactccaa

SEQ ID NO: 560400 - DNA, 15 bp, Homo sapiens
tttactactactcca

SEQ ID NO: 560401 - DNA, 15 bp, Homo sapiens
ttttactactactcc

SEQ ID NO: 560402 - DNA, 15 bp, Homo sapiens
tttttactactactc

SEQ ID NO: 560403 - DNA, 15 bp, Homo sapiens
ctttttactactact

SEQ ID NO: 560404 - DNA, 15 bp, Homo sapiens
cctttttactactac

SEQ ID NO: 560405 - DNA, 15 bp, Homo sapiens
ccctttttactacta

SEQ ID NO: 560406 - DNA, 15 bp, Homo sapiens
gccctttttactact

SEQ ID NO: 560407 - DNA, 15 bp, Homo sapiens
agccctttttactac

SEQ ID NO: 560408 - DNA, 15 bp, Homo sapiens
gagccctttttacta

SEQ ID NO: 560409 - DNA, 15 bp, Homo sapiens
tgagccctttttact

SEQ ID NO: 560410 - DNA, 15 bp, Homo sapiens
ttgagccctttttac

SEQ ID NO: 560411 - DNA, 15 bp, Homo sapiens
tttgagcccttttta

SEQ ID NO: 560412 - DNA, 15 bp, Homo sapiens
ctttgagcccttttt

SEQ ID NO: 560413 - DNA, 15 bp, Homo sapiens
cctttgagccctttt

SEQ ID NO: 560414 - DNA, 15 bp, Homo sapiens
tcctttgagcccttt

SEQ ID NO: 560415 - DNA, 15 bp, Homo sapiens
atcctttgagccctt

SEQ ID NO: 560416 - DNA, 15 bp, Homo sapiens
tatcctttgagccct

SEQ ID NO: 560417 - DNA, 15 bp, Homo sapiens
ttatcctttgagccc

SEQ ID NO: 560418 - DNA, 15 bp, Homo sapiens
cttatcctttgagcc

SEQ ID NO: 560419 - DNA, 15 bp, Homo sapiens
ccttatcctttgagc

SEQ ID NO: 560420 - DNA, 15 bp, Homo sapiens
tccttatcctttgag

SEQ ID NO: 560421 - DNA, 15 bp, Homo sapiens
ctccttatcctttga

SEQ ID NO: 560422 - DNA, 15 bp, Homo sapiens
cctccttatcctttg

SEQ ID NO: 560423 - DNA, 15 bp, Homo sapiens
gcctccttatccttt

SEQ ID NO: 560424 - DNA, 15 bp, Homo sapiens
ggcctccttatcctt

SEQ ID NO: 560425 - DNA, 15 bp, Homo sapiens
tggcctccttatcct

SEQ ID NO: 560426 - DNA, 15 bp, Homo sapiens
atggcctccttatcc

SEQ ID NO: 560427 - DNA, 15 bp, Homo sapiens
aatggcctccttatc

SEQ ID NO: 560428 - DNA, 15 bp, Homo sapiens
gaatggcctccttat

SEQ ID NO: 560429 - DNA, 15 bp, Homo sapiens
tgaatggcctcctta

SEQ ID NO: 560430 - DNA, 15 bp, Homo sapiens
ctgaatggcctcctt

SEQ ID NO: 560431 - DNA, 15 bp, Homo sapiens
cctgaatggcctcct

SEQ ID NO: 560432 - DNA, 15 bp, Homo sapiens
gcctgaatggcctcc

SEQ ID NO: 560433 - DNA, 15 bp, Homo sapiens
ggcctgaatggcctc

SEQ ID NO: 560434 - DNA, 15 bp, Homo sapiens
aggcctgaatggcct

SEQ ID NO: 560435 - DNA, 15 bp, Homo sapiens
taggcctgaatggcc

SEQ ID NO: 560436 - DNA, 15 bp, Homo sapiens
ataggcctgaatggc

SEQ ID NO: 560437 - DNA, 15 bp, Homo sapiens
aataggcctgaatgg

SEQ ID NO: 560438 - DNA, 15 bp, Homo sapiens
gaataggcctgaatg

SEQ ID NO: 560439 - DNA, 15 bp, Homo sapiens
agaataggcctgaat

SEQ ID NO: 560440 - DNA, 15 bp, Homo sapiens
cagaataggcctgaa

SEQ ID NO: 560441 - DNA, 15 bp, Homo sapiens
tcagaataggcctga

SEQ ID NO: 560442 - DNA, 15 bp, Homo sapiens
ttcagaataggcctg

SEQ ID NO: 560443 - DNA, 15 bp, Homo sapiens
attcagaataggcct

SEQ ID NO: 560444 - DNA, 15 bp, Homo sapiens
gattcagaataggcc

SEQ ID NO: 560445 - DNA, 15 bp, Homo sapiens
ggattcagaataggc

SEQ ID NO: 560446 - DNA, 15 bp, Homo sapiens
gggattcagaatagg

SEQ ID NO: 560447 - DNA, 15 bp, Homo sapiens
agggattcagaatag

SEQ ID NO: 560448 - DNA, 15 bp, Homo sapiens
cagggattcagaata

SEQ ID NO: 560449 - DNA, 15 bp, Homo sapiens
tcagggattcagaat

SEQ ID NO: 560450 - DNA, 15 bp, Homo sapiens
atcagggattcagaa

SEQ ID NO: 560451 - DNA, 15 bp, Homo sapiens
catcagggattcaga

SEQ ID NO: 560452 - DNA, 15 bp, Homo sapiens
tcatcagggattcag

SEQ ID NO: 560453 - DNA, 15 bp, Homo sapiens
gtcatcagggattca

SEQ ID NO: 560454 - DNA, 15 bp, Homo sapiens
tgtcatcagggattc

SEQ ID NO: 560455 - DNA, 15 bp, Homo sapiens
atgtcatcagggatt

SEQ ID NO: 560456 - DNA, 15 bp, Homo sapiens
gatgtcatcagggat

SEQ ID NO: 560457 - DNA, 15 bp, Homo sapiens
tgatgtcatcaggga

SEQ ID NO: 560458 - DNA, 15 bp, Homo sapiens
ctgatgtcatcaggg

SEQ ID NO: 560459 - DNA, 15 bp, Homo sapiens
gctgatgtcatcagg

SEQ ID NO: 560460 - DNA, 15 bp, Homo sapiens
agctgatgtcatcag

SEQ ID NO: 560461 - DNA, 15 bp, Homo sapiens
gagctgatgtcatca

SEQ ID NO: 560462 - DNA, 15 bp, Homo sapiens
ggagctgatgtcatc

SEQ ID NO: 560463 - DNA, 15 bp, Homo sapiens
gggagctgatgtcat

SEQ ID NO: 560464 - DNA, 15 bp, Homo sapiens
tgggagctgatgtca

SEQ ID NO: 560465 - DNA, 15 bp, Homo sapiens
ttgggagctgatgtc

SEQ ID NO: 560466 - DNA, 15 bp, Homo sapiens
cttgggagctgatgt

SEQ ID NO: 560467 - DNA, 15 bp, Homo sapiens
ccttgggagctgatg

SEQ ID NO: 560468 - DNA, 15 bp, Homo sapiens
cccttgggagctgat

SEQ ID NO: 560469 - DNA, 15 bp, Homo sapiens
gcccttgggagctga

SEQ ID NO: 560470 - DNA, 15 bp, Homo sapiens
agcccttgggagctg

SEQ ID NO: 560471 - DNA, 15 bp, Homo sapiens
gagcccttgggagct

SEQ ID NO: 560472 - DNA, 15 bp, Homo sapiens
agagcccttgggagc

SEQ ID NO: 560473 - DNA, 15 bp, Homo sapiens
cagagcccttgggag

SEQ ID NO: 560474 - DNA, 15 bp, Homo sapiens
acagagcccttggga

SEQ ID NO: 560475 - DNA, 15 bp, Homo sapiens
cacagagcccttggg

SEQ ID NO: 560476 - DNA, 15 bp, Homo sapiens
gcacagagcccttgg

SEQ ID NO: 560477 - DNA, 15 bp, Homo sapiens
agcacagagcccttg

SEQ ID NO: 560478 - DNA, 15 bp, Homo sapiens
cagcacagagccctt

SEQ ID NO: 560479 - DNA, 15 bp, Homo sapiens
gcagcacagagccct

SEQ ID NO: 560480 - DNA, 15 bp, Homo sapiens
tgcagcacagagccc

SEQ ID NO: 560481 - DNA, 15 bp, Homo sapiens
ctgcagcacagagcc

SEQ ID NO: 560482 - DNA, 15 bp, Homo sapiens
cctgcagcacagagc

SEQ ID NO: 560483 - DNA, 15 bp, Homo sapiens
tcctgcagcacagag

SEQ ID NO: 560484 - DNA, 15 bp, Homo sapiens
ttcctgcagcacaga

SEQ ID NO: 560485 - DNA, 15 bp, Homo sapiens
cttcctgcagcacag

SEQ ID NO: 560486 - DNA, 15 bp, Homo sapiens
gcttcctgcagcaca

SEQ ID NO: 560487 - DNA, 15 bp, Homo sapiens
tgcttcctgcagcac

SEQ ID NO: 560488 - DNA, 15 bp, Homo sapiens
ttgcttcctgcagca

SEQ ID NO: 560489 - DNA, 15 bp, Homo sapiens
tttgcttcctgcagc

SEQ ID NO: 560490 - DNA, 15 bp, Homo sapiens
ttttgcttcctgcag

SEQ ID NO: 560491 - DNA, 15 bp, Homo sapiens
gttttgcttcctgca

SEQ ID NO: 560492 - DNA, 15 bp, Homo sapiens
agttttgcttcctgc

SEQ ID NO: 560493 - DNA, 15 bp, Homo sapiens
cagttttgcttcctg

SEQ ID NO: 560494 - DNA, 15 bp, Homo sapiens
acagttttgcttcct

SEQ ID NO: 560495 - DNA, 15 bp, Homo sapiens
tacagttttgcttcc

SEQ ID NO: 560496 - DNA, 15 bp, Homo sapiens
ctacagttttgcttc

SEQ ID NO: 560497 - DNA, 15 bp, Homo sapiens
cctacagttttgctt

SEQ ID NO: 560498 - DNA, 15 bp, Homo sapiens
acctacagttttgct

SEQ ID NO: 560499 - DNA, 15 bp, Homo sapiens
cacctacagttttgc

SEQ ID NO: 560500 - DNA, 15 bp, Homo sapiens
ccacctacagttttg

SEQ ID NO: 560501 - DNA, 15 bp, Homo sapiens
cccacctacagtttt

SEQ ID NO: 560502 - DNA, 15 bp, Homo sapiens
acccacctacagttt

SEQ ID NO: 560503 - DNA, 15 bp, Homo sapiens
tacccacctacagtt

SEQ ID NO: 560504 - DNA, 15 bp, Homo sapiens
gtacccacctacagt

SEQ ID NO: 560505 - DNA, 15 bp, Homo sapiens
ggtacccacctacag

SEQ ID NO: 560506 - DNA, 15 bp, Homo sapiens
tggtacccacctaca

SEQ ID NO: 560507 - DNA, 15 bp, Homo sapiens
ctggtacccacctac

SEQ ID NO: 560508 - DNA, 15 bp, Homo sapiens
cctggtacccaccta

SEQ ID NO: 560509 - DNA, 15 bp, Homo sapiens
acctggtacccacct

SEQ ID NO: 560510 - DNA, 15 bp, Homo sapiens
tacctggtacccacc

SEQ ID NO: 560511 - DNA, 15 bp, Homo sapiens
ttacctggtacccac

SEQ ID NO: 560512 - DNA, 15 bp, Homo sapiens
attacctggtaccca

SEQ ID NO: 560513 - DNA, 15 bp, Homo sapiens
cattacctggtaccc

SEQ ID NO: 560514 - DNA, 15 bp, Homo sapiens
gcattacctggtacc

SEQ ID NO: 560515 - DNA, 15 bp, Homo sapiens
ggcattacctggtac

SEQ ID NO: 560516 - DNA, 15 bp, Homo sapiens
cggcattacctggta

SEQ ID NO: 560517 - DNA, 15 bp, Homo sapiens
acggcattacctggt

SEQ ID NO: 560518 - DNA, 15 bp, Homo sapiens
cacggcattacctgg

SEQ ID NO: 560519 - DNA, 15 bp, Homo sapiens
gcacggcattacctg

SEQ ID NO: 560520 - DNA, 15 bp, Homo sapiens
cgcacggcattacct

SEQ ID NO: 560521 - DNA, 15 bp, Homo sapiens
gcgcacggcattacc

SEQ ID NO: 560522 - DNA, 15 bp, Homo sapiens
ggcgcacggcattac

SEQ ID NO: 560523 - DNA, 15 bp, Homo sapiens
aggcgcacggcatta

SEQ ID NO: 560524 - DNA, 15 bp, Homo sapiens
gaggcgcacggcatt

SEQ ID NO: 560525 - DNA, 15 bp, Homo sapiens
ggaggcgcacggcat

SEQ ID NO: 560526 - DNA, 15 bp, Homo sapiens
gggaggcgcacggca

SEQ ID NO: 560527 - DNA, 15 bp, Homo sapiens
ggggaggcgcacggc

SEQ ID NO: 560528 - DNA, 15 bp, Homo sapiens
cggggaggcgcacgg

SEQ ID NO: 560529 - DNA, 15 bp, Homo sapiens
gcggggaggcgcacg

SEQ ID NO: 560530 - DNA, 15 bp, Homo sapiens
ggcggggaggcgcac

SEQ ID NO: 560531 - DNA, 15 bp, Homo sapiens
gggcggggaggcgca

SEQ ID NO: 560532 - DNA, 15 bp, Homo sapiens
ggggcggggaggcgc

SEQ ID NO: 560533 - DNA, 15 bp, Homo sapiens
gggggcggggaggcg

SEQ ID NO: 560534 - DNA, 15 bp, Homo sapiens
agggggcggggaggc

SEQ ID NO: 560535 - DNA, 15 bp, Homo sapiens
gagggggcggggagg

SEQ ID NO: 560536 - DNA, 15 bp, Homo sapiens
tgggagggggcgggg

SEQ ID NO: 560537 - DNA, 15 bp, Homo sapiens
atgggagggggcggg

SEQ ID NO: 560538 - DNA, 15 bp, Homo sapiens
tatgggagggggcgg

SEQ ID NO: 560539 - DNA, 15 bp, Homo sapiens
atatgggagggggcg

SEQ ID NO: 560540 - DNA, 15 bp, Homo sapiens
gatatgggagggggc

SEQ ID NO: 560541 - DNA, 15 bp, Homo sapiens
tgatatgggaggggg

SEQ ID NO: 560542 - DNA, 15 bp, Homo sapiens
ttgatatgggagggg

SEQ ID NO: 560543 - DNA, 15 bp, Homo sapiens
cttgatatgggaggg

SEQ ID NO: 560544 - DNA, 15 bp, Homo sapiens
acttgatatgggagg

SEQ ID NO: 560545 - DNA, 15 bp, Homo sapiens
tacttgatatgggag

SEQ ID NO: 560546 - DNA, 15 bp, Homo sapiens
ctacttgatatggga

SEQ ID NO: 560547 - DNA, 15 bp, Homo sapiens
tctacttgatatggg

SEQ ID NO: 560548 - DNA, 15 bp, Homo sapiens
ttctacttgatatgg

SEQ ID NO: 560549 - DNA, 15 bp, Homo sapiens
attctacttgatatg

SEQ ID NO: 560550 - DNA, 15 bp, Homo sapiens
cattctacttgatat

SEQ ID NO: 560551 - DNA, 15 bp, Homo sapiens
gcattctacttgata

SEQ ID NO: 560552 - DNA, 15 bp, Homo sapiens
agcattctacttgat

SEQ ID NO: 560553 - DNA, 15 bp, Homo sapiens
cagcattctacttga

SEQ ID NO: 560554 - DNA, 15 bp, Homo sapiens
ccagcattctacttg

SEQ ID NO: 560555 - DNA, 15 bp, Homo sapiens
gccagcattctactt

SEQ ID NO: 560556 - DNA, 15 bp, Homo sapiens
cgccagcattctact

SEQ ID NO: 560557 - DNA, 15 bp, Homo sapiens
ccgccagcattctac

SEQ ID NO: 560558 - DNA, 15 bp, Homo sapiens
gccgccagcattcta

SEQ ID NO: 560559 - DNA, 15 bp, Homo sapiens
agccgccagcattct

SEQ ID NO: 560560 - DNA, 15 bp, Homo sapiens
aagccgccagcattc

SEQ ID NO: 560561 - DNA, 15 bp, Homo sapiens
taagccgccagcatt

SEQ ID NO: 560562 - DNA, 15 bp, Homo sapiens
ttaagccgccagcat

SEQ ID NO: 560563 - DNA, 15 bp, Homo sapiens
tttaagccgccagca

SEQ ID NO: 560564 - DNA, 15 bp, Homo sapiens
ttttaagccgccagc

SEQ ID NO: 560565 - DNA, 15 bp, Homo sapiens
gttttaagccgccag

SEQ ID NO: 560566 - DNA, 15 bp, Homo sapiens
tgttttaagccgcca

SEQ ID NO: 560567 - DNA, 15 bp, Homo sapiens
atgttttaagccgcc

SEQ ID NO: 560568 - DNA, 15 bp, Homo sapiens
aatgttttaagccgc

SEQ ID NO: 560569 - DNA, 15 bp, Homo sapiens
aaatgttttaagccg

SEQ ID NO: 560570 - DNA, 15 bp, Homo sapiens
caaatgttttaagcc

SEQ ID NO: 560571 - DNA, 15 bp, Homo sapiens
ccaaatgttttaagc

SEQ ID NO: 560572 - DNA, 15 bp, Homo sapiens
cccaaatgttttaag

SEQ ID NO: 560573 - DNA, 15 bp, Homo sapiens
ccccaaatgttttaa

SEQ ID NO: 560574 - DNA, 15 bp, Homo sapiens
accccaaatgtttta

SEQ ID NO: 560575 - DNA, 15 bp, Homo sapiens
gaccccaaatgtttt

SEQ ID NO: 560576 - DNA, 15 bp, Homo sapiens
ggaccccaaatgttt

SEQ ID NO: 560577 - DNA, 15 bp, Homo sapiens
aggaccccaaatgtt

SEQ ID NO: 560578 - DNA, 15 bp, Homo sapiens
caggaccccaaatgt

SEQ ID NO: 560579 - DNA, 15 bp, Homo sapiens
gcaggaccccaaatg

SEQ ID NO: 560580 - DNA, 15 bp, Homo sapiens
agcaggaccccaaat

SEQ ID NO: 560581 - DNA, 15 bp, Homo sapiens
gagcaggaccccaaa

SEQ ID NO: 560582 - DNA, 15 bp, Homo sapiens
tgagcaggaccccaa

SEQ ID NO: 560583 - DNA, 15 bp, Homo sapiens
atgagcaggacccca

SEQ ID NO: 560584 - DNA, 15 bp, Homo sapiens
aatgagcaggacccc

SEQ ID NO: 560585 - DNA, 15 bp, Homo sapiens
gaatgagcaggaccc

SEQ ID NO: 560586 - DNA, 15 bp, Homo sapiens
ggaatgagcaggacc

SEQ ID NO: 560587 - DNA, 15 bp, Homo sapiens
aggaatgagcaggac

SEQ ID NO: 560588 - DNA, 15 bp, Homo sapiens
aaggaatgagcagga

SEQ ID NO: 560589 - DNA, 15 bp, Homo sapiens
gaaggaatgagcagg

SEQ ID NO: 560590 - DNA, 15 bp, Homo sapiens
tgaaggaatgagcag

SEQ ID NO: 560591 - DNA, 15 bp, Homo sapiens
ctgaaggaatgagca

SEQ ID NO: 560592 - DNA, 15 bp, Homo sapiens
gctgaaggaatgagc

SEQ ID NO: 560593 - DNA, 15 bp, Homo sapiens
ggctgaaggaatgag

SEQ ID NO: 560594 - DNA, 15 bp, Homo sapiens
aggctgaaggaatga

SEQ ID NO: 560595 - DNA, 15 bp, Homo sapiens
gaggctgaaggaatg

SEQ ID NO: 560596 - DNA, 15 bp, Homo sapiens
tgaggctgaaggaat

SEQ ID NO: 560597 - DNA, 15 bp, Homo sapiens
ttgaggctgaaggaa

SEQ ID NO: 560598 - DNA, 15 bp, Homo sapiens
gttgaggctgaagga

SEQ ID NO: 560599 - DNA, 15 bp, Homo sapiens
agttgaggctgaagg

SEQ ID NO: 560600 - DNA, 15 bp, Homo sapiens
aagttgaggctgaag

SEQ ID NO: 560601 - DNA, 15 bp, Homo sapiens
gaagttgaggctgaa

SEQ ID NO: 560602 - DNA, 15 bp, Homo sapiens
tgaagttgaggctga

SEQ ID NO: 560603 - DNA, 15 bp, Homo sapiens
gtgaagttgaggctg

SEQ ID NO: 560604 - DNA, 15 bp, Homo sapiens
ggtgaagttgaggct

SEQ ID NO: 560605 - DNA, 15 bp, Homo sapiens
aggtgaagttgaggc

SEQ ID NO: 560606 - DNA, 15 bp, Homo sapiens
caggtgaagttgagg

SEQ ID NO: 560607 - DNA, 15 bp, Homo sapiens
ccaggtgaagttgag

SEQ ID NO: 560608 - DNA, 15 bp, Homo sapiens
tccaggtgaagttga

SEQ ID NO: 560609 - DNA, 15 bp, Homo sapiens
ctccaggtgaagttg

SEQ ID NO: 560610 - DNA, 15 bp, Homo sapiens
actccaggtgaagtt

SEQ ID NO: 560611 - DNA, 15 bp, Homo sapiens
cactccaggtgaagt

SEQ ID NO: 560612 - DNA, 15 bp, Homo sapiens
acactccaggtgaag

SEQ ID NO: 560613 - DNA, 15 bp, Homo sapiens
gacactccaggtgaa

SEQ ID NO: 560614 - DNA, 15 bp, Homo sapiens
agacactccaggtga

SEQ ID NO: 560615 - DNA, 15 bp, Homo sapiens
tagacactccaggtg

SEQ ID NO: 560616 - DNA, 15 bp, Homo sapiens
gtagacactccaggt

SEQ ID NO: 560617 - DNA, 15 bp, Homo sapiens
tgtagacactccagg

SEQ ID NO: 560618 - DNA, 15 bp, Homo sapiens
ctgtagacactccag

SEQ ID NO: 560619 - DNA, 15 bp, Homo sapiens
tctgtagacactcca

SEQ ID NO: 560620 - DNA, 15 bp, Homo sapiens
gtctgtagacactcc

SEQ ID NO: 560621 - DNA, 15 bp, Homo sapiens
agtctgtagacactc

SEQ ID NO: 560622 - DNA, 15 bp, Homo sapiens
cagtctgtagacact

SEQ ID NO: 560623 - DNA, 15 bp, Homo sapiens
tcagtctgtagacac

SEQ ID NO: 560624 - DNA, 15 bp, Homo sapiens
ttcagtctgtagaca

SEQ ID NO: 560625 - DNA, 15 bp, Homo sapiens
cttcagtctgtagac

SEQ ID NO: 560626 - DNA, 15 bp, Homo sapiens
tcttcagtctgtaga

SEQ ID NO: 560627 - DNA, 15 bp, Homo sapiens
atcttcagtctgtag

SEQ ID NO: 560628 - DNA, 15 bp, Homo sapiens
catcttcagtctgta

SEQ ID NO: 560629 - DNA, 15 bp, Homo sapiens
gcatcttcagtctgt

SEQ ID NO: 560630 - DNA, 15 bp, Homo sapiens
tgcatcttcagtctg

SEQ ID NO: 560631 - DNA, 15 bp, Homo sapiens
atgcatcttcagtct

SEQ ID NO: 560632 - DNA, 15 bp, Homo sapiens
tatgcatcttcagtc

SEQ ID NO: 560633 - DNA, 15 bp, Homo sapiens
atatgcatcttcagt

SEQ ID NO: 560634 - DNA, 15 bp, Homo sapiens
aatatgcatcttcag

SEQ ID NO: 560635 - DNA, 15 bp, Homo sapiens
aaatatgcatcttca

SEQ ID NO: 560636 - DNA, 15 bp, Homo sapiens
caaatatgcatcttc

SEQ ID NO: 560637 - DNA, 15 bp, Homo sapiens
acaaatatgcatctt

SEQ ID NO: 560638 - DNA, 15 bp, Homo sapiens
cacaaatatgcatct

SEQ ID NO: 560639 - DNA, 15 bp, Homo sapiens
acacaaatatgcatc

SEQ ID NO: 560640 - DNA, 15 bp, Homo sapiens
tacacaaatatgcat

SEQ ID NO: 560641 - DNA, 15 bp, Homo sapiens
atacacaaatatgca

SEQ ID NO: 560642 - DNA, 15 bp, Homo sapiens
aatacacaaatatgc

SEQ ID NO: 560643 - DNA, 15 bp, Homo sapiens
aaatacacaaatatg

SEQ ID NO: 560644 - DNA, 15 bp, Homo sapiens
aaaatacacaaatat

SEQ ID NO: 560645 - DNA, 15 bp, Homo sapiens
caaaatacacaaata

SEQ ID NO: 560646 - DNA, 15 bp, Homo sapiens
gcaaaatacacaaat

SEQ ID NO: 560647 - DNA, 15 bp, Homo sapiens
agcaaaatacacaaa

SEQ ID NO: 560648 - DNA, 15 bp, Homo sapiens
aagcaaaatacacaa

SEQ ID NO: 560649 - DNA, 15 bp, Homo sapiens
aaagcaaaatacaca

SEQ ID NO: 560650 - DNA, 15 bp, Homo sapiens
aaaagcaaaatacac

SEQ ID NO: 560651 - DNA, 15 bp, Homo sapiens
caaaagcaaaataca

SEQ ID NO: 560652 - DNA, 15 bp, Homo sapiens
ccaaaagcaaaatac

SEQ ID NO: 560653 - DNA, 15 bp, Homo sapiens
tccaaaagcaaaata

SEQ ID NO: 560654 - DNA, 15 bp, Homo sapiens
ctccaaaagcaaaat

SEQ ID NO: 560655 - DNA, 15 bp, Homo sapiens
tctccaaaagcaaaa

SEQ ID NO: 560656 - DNA, 15 bp, Homo sapiens
ttctccaaaagcaaa

SEQ ID NO: 560657 - DNA, 15 bp, Homo sapiens
tttctccaaaagcaa

SEQ ID NO: 560658 - DNA, 15 bp, Homo sapiens
gtttctccaaaagca

SEQ ID NO: 560659 - DNA, 15 bp, Homo sapiens
agtttctccaaaagc

SEQ ID NO: 560660 - DNA, 15 bp, Homo sapiens
cagtttctccaaaag

SEQ ID NO: 560661 - DNA, 15 bp, Homo sapiens
gcagtttctccaaaa

SEQ ID NO: 560662 - DNA, 15 bp, Homo sapiens
ggcagtttctccaaa

SEQ ID NO: 560663 - DNA, 15 bp, Homo sapiens
gggcagtttctccaa

SEQ ID NO: 560664 - DNA, 15 bp, Homo sapiens
agggcagtttctcca

SEQ ID NO: 560665 - DNA, 15 bp, Homo sapiens
aagggcagtttctcc

SEQ ID NO: 560666 - DNA, 15 bp, Homo sapiens
gaagggcagtttctc

SEQ ID NO: 560667 - DNA, 15 bp, Homo sapiens
ggaagggcagtttct

SEQ ID NO: 560668 - DNA, 15 bp, Homo sapiens
aggaagggcagtttc

SEQ ID NO: 560669 - DNA, 15 bp, Homo sapiens
taggaagggcagttt

SEQ ID NO: 560670 - DNA, 15 bp, Homo sapiens
ataggaagggcagtt

SEQ ID NO: 560671 - DNA, 15 bp, Homo sapiens
cataggaagggcagt

SEQ ID NO: 560672 - DNA, 15 bp, Homo sapiens
acataggaagggcag

SEQ ID NO: 560673 - DNA, 15 bp, Homo sapiens
aacataggaagggca

SEQ ID NO: 560674 - DNA, 15 bp, Homo sapiens
gaacataggaagggc

SEQ ID NO: 560675 - DNA, 15 bp, Homo sapiens
agaacataggaaggg

SEQ ID NO: 560676 - DNA, 15 bp, Homo sapiens
cagaacataggaagg

SEQ ID NO: 560677 - DNA, 15 bp, Homo sapiens
tcagaacataggaag

SEQ ID NO: 560678 - DNA, 15 bp, Homo sapiens
ctcagaacataggaa

SEQ ID NO: 560679 - DNA, 15 bp, Homo sapiens
actcagaacatagga

SEQ ID NO: 560680 - DNA, 15 bp, Homo sapiens
cactcagaacatagg

SEQ ID NO: 560681 - DNA, 15 bp, Homo sapiens
tcactcagaacatag

SEQ ID NO: 560682 - DNA, 15 bp, Homo sapiens
ttcactcagaacata

SEQ ID NO: 560683 - DNA, 15 bp, Homo sapiens
attcactcagaacat

SEQ ID NO: 560684 - DNA, 15 bp, Homo sapiens
tattcactcagaaca

SEQ ID NO: 560685 - DNA, 15 bp, Homo sapiens
ctattcactcagaac

SEQ ID NO: 560686 - DNA, 15 bp, Homo sapiens
gctattcactcagaa

SEQ ID NO: 560687 - DNA, 15 bp, Homo sapiens
tgctattcactcaga

SEQ ID NO: 560688 - DNA, 15 bp, Homo sapiens
ctgctattcactcag

SEQ ID NO: 560689 - DNA, 15 bp, Homo sapiens
actgctattcactca

SEQ ID NO: 560690 - DNA, 15 bp, Homo sapiens
aactgctattcactc

SEQ ID NO: 560691 - DNA, 15 bp, Homo sapiens
aaactgctattcact

SEQ ID NO: 560692 - DNA, 15 bp, Homo sapiens
aaaactgctattcac

SEQ ID NO: 560693 - DNA, 15 bp, Homo sapiens
aaaaactgctattca

SEQ ID NO: 560694 - DNA, 15 bp, Homo sapiens
aaaaaactgctattc

SEQ ID NO: 560695 - DNA, 15 bp, Homo sapiens
aaaaaaactgctatt

SEQ ID NO: 560696 - DNA, 15 bp, Homo sapiens
caaaaaaactgctat

SEQ ID NO: 560697 - DNA, 15 bp, Homo sapiens
tcaaaaaaactgcta

SEQ ID NO: 560698 - DNA, 15 bp, Homo sapiens
atcaaaaaaactgct

SEQ ID NO: 560699 - DNA, 15 bp, Homo sapiens
gatcaaaaaaactgc

SEQ ID NO: 560700 - DNA, 15 bp, Homo sapiens
ggatcaaaaaaactg

SEQ ID NO: 560701 - DNA, 15 bp, Homo sapiens
gggatcaaaaaaact

SEQ ID NO: 560702 - DNA, 15 bp, Homo sapiens
tgggatcaaaaaaac

SEQ ID NO: 560703 - DNA, 15 bp, Homo sapiens
ctgggatcaaaaaaa

SEQ ID NO: 560704 - DNA, 15 bp, Homo sapiens
tctgggatcaaaaaa

SEQ ID NO: 560705 - DNA, 15 bp, Homo sapiens
ctctgggatcaaaaa

SEQ ID NO: 560706 - DNA, 15 bp, Homo sapiens
cctctgggatcaaaa

SEQ ID NO: 560707 - DNA, 15 bp, Homo sapiens
ccctctgggatcaaa

SEQ ID NO: 560708 - DNA, 15 bp, Homo sapiens
gccctctgggatcaa

SEQ ID NO: 560709 - DNA, 15 bp, Homo sapiens
tgccctctgggatca

SEQ ID NO: 560710 - DNA, 15 bp, Homo sapiens
ttgccctctgggatc

SEQ ID NO: 560711 - DNA, 15 bp, Homo sapiens
gttgccctctgggat

SEQ ID NO: 560712 - DNA, 15 bp, Homo sapiens
agttgccctctggga

SEQ ID NO: 560713 - DNA, 15 bp, Homo sapiens
aagttgccctctggg

SEQ ID NO: 560714 - DNA, 15 bp, Homo sapiens
caagttgccctctgg

SEQ ID NO: 560715 - DNA, 15 bp, Homo sapiens
acaagttgccctctg

SEQ ID NO: 560716 - DNA, 15 bp, Homo sapiens
tacaagttgccctct

SEQ ID NO: 560717 - DNA, 15 bp, Homo sapiens
atacaagttgccctc

SEQ ID NO: 560718 - DNA, 15 bp, Homo sapiens
aatacaagttgccct

SEQ ID NO: 560719 - DNA, 15 bp, Homo sapiens
gaatacaagttgccc

SEQ ID NO: 560720 - DNA, 15 bp, Homo sapiens
agaatacaagttgcc

SEQ ID NO: 560721 - DNA, 15 bp, Homo sapiens
cagaatacaagttgc

SEQ ID NO: 560722 - DNA, 15 bp, Homo sapiens
acagaatacaagttg

SEQ ID NO: 560723 - DNA, 15 bp, Homo sapiens
cacagaatacaagtt

SEQ ID NO: 560724 - DNA, 15 bp, Homo sapiens
ccacagaatacaagt

SEQ ID NO: 560725 - DNA, 15 bp, Homo sapiens
cccacagaatacaag

SEQ ID NO: 560726 - DNA, 15 bp, Homo sapiens
gcccacagaatacaa

SEQ ID NO: 560727 - DNA, 15 bp, Homo sapiens
agcccacagaataca

SEQ ID NO: 560728 - DNA, 15 bp, Homo sapiens
cagcccacagaatac

SEQ ID NO: 560729 - DNA, 15 bp, Homo sapiens
ccagcccacagaata

SEQ ID NO: 560730 - DNA, 15 bp, Homo sapiens
accagcccacagaat

SEQ ID NO: 560731 - DNA, 15 bp, Homo sapiens
caccagcccacagaa

SEQ ID NO: 560732 - DNA, 15 bp, Homo sapiens
gcaccagcccacaga

SEQ ID NO: 560733 - DNA, 15 bp, Homo sapiens
ggcaccagcccacag

SEQ ID NO: 560734 - DNA, 15 bp, Homo sapiens
aggcaccagcccaca

SEQ ID NO: 560735 - DNA, 15 bp, Homo sapiens
taggcaccagcccac

SEQ ID NO: 560736 - DNA, 15 bp, Homo sapiens
ataggcaccagccca

SEQ ID NO: 560737 - DNA, 15 bp, Homo sapiens
aataggcaccagccc

SEQ ID NO: 560738 - DNA, 15 bp, Homo sapiens
aaataggcaccagcc

SEQ ID NO: 560739 - DNA, 15 bp, Homo sapiens
caaataggcaccagc

SEQ ID NO: 560740 - DNA, 15 bp, Homo sapiens
gcaaataggcaccag

SEQ ID NO: 560741 - DNA, 15 bp, Homo sapiens
tgcaaataggcacca

SEQ ID NO: 560742 - DNA, 15 bp, Homo sapiens
ttgcaaataggcacc

SEQ ID NO: 560743 - DNA, 15 bp, Homo sapiens
cttgcaaataggcac

SEQ ID NO: 560744 - DNA, 15 bp, Homo sapiens
ccttgcaaataggca

SEQ ID NO: 560745 - DNA, 15 bp, Homo sapiens
accttgcaaataggc

SEQ ID NO: 560746 - DNA, 15 bp, Homo sapiens
gaccttgcaaatagg

SEQ ID NO: 560747 - DNA, 15 bp, Homo sapiens
tgaccttgcaaatag

SEQ ID NO: 560748 - DNA, 15 bp, Homo sapiens
gtgaccttgcaaata

SEQ ID NO: 560749 - DNA, 15 bp, Homo sapiens
tgtgaccttgcaaat

SEQ ID NO: 560750 - DNA, 15 bp, Homo sapiens
atgtgaccttgcaaa

SEQ ID NO: 560751 - DNA, 15 bp, Homo sapiens
aatgtgaccttgcaa

SEQ ID NO: 560752 - DNA, 15 bp, Homo sapiens
taatgtgaccttgca

SEQ ID NO: 560753 - DNA, 15 bp, Homo sapiens
ctaatgtgaccttgc

SEQ ID NO: 560754 - DNA, 15 bp, Homo sapiens
tctaatgtgaccttg

SEQ ID NO: 560755 - DNA, 15 bp, Homo sapiens
ttctaatgtgacctt

SEQ ID NO: 560756 - DNA, 15 bp, Homo sapiens
tttctaatgtgacct

SEQ ID NO: 560757 - DNA, 15 bp, Homo sapiens
ctttctaatgtgacc

SEQ ID NO: 560758 - DNA, 15 bp, Homo sapiens
tctttctaatgtgac

SEQ ID NO: 560759 - DNA, 15 bp, Homo sapiens
gtctttctaatgtga

SEQ ID NO: 560760 - DNA, 15 bp, Homo sapiens
tgtctttctaatgtg

SEQ ID NO: 560761 - DNA, 15 bp, Homo sapiens
ctgtctttctaatgt

SEQ ID NO: 560762 - DNA, 15 bp, Homo sapiens
cctgtctttctaatg

SEQ ID NO: 560763 - DNA, 15 bp, Homo sapiens
tcctgtctttctaat

SEQ ID NO: 560764 - DNA, 15 bp, Homo sapiens
ctcctgtctttctaa

SEQ ID NO: 560765 - DNA, 15 bp, Homo sapiens
gctcctgtctttcta

SEQ ID NO: 560766 - DNA, 15 bp, Homo sapiens
tgctcctgtctttct

SEQ ID NO: 560767 - DNA, 15 bp, Homo sapiens
ttgctcctgtctttc

SEQ ID NO: 560768 - DNA, 15 bp, Homo sapiens
cttgctcctgtcttt

SEQ ID NO: 560769 - DNA, 15 bp, Homo sapiens
ccttgctcctgtctt

SEQ ID NO: 560770 - DNA, 15 bp, Homo sapiens
gccttgctcctgtct

SEQ ID NO: 560771 - DNA, 15 bp, Homo sapiens
agccttgctcctgtc

SEQ ID NO: 560772 - DNA, 15 bp, Homo sapiens
aagccttgctcctgt

SEQ ID NO: 560773 - DNA, 15 bp, Homo sapiens
taagccttgctcctg

SEQ ID NO: 560774 - DNA, 15 bp, Homo sapiens
ctaagccttgctcct

SEQ ID NO: 560775 - DNA, 15 bp, Homo sapiens
cctaagccttgctcc

SEQ ID NO: 560776 - DNA, 15 bp, Homo sapiens
gcctaagccttgctc

SEQ ID NO: 560777 - DNA, 15 bp, Homo sapiens
ggcctaagccttgct

SEQ ID NO: 560778 - DNA, 15 bp, Homo sapiens
aggcctaagccttgc

SEQ ID NO: 560779 - DNA, 15 bp, Homo sapiens
caggcctaagccttg

SEQ ID NO: 560780 - DNA, 15 bp, Homo sapiens
gcaggcctaagcctt

SEQ ID NO: 560781 - DNA, 15 bp, Homo sapiens
agcaggcctaagcct

SEQ ID NO: 560782 - DNA, 15 bp, Homo sapiens
cagcaggcctaagcc

SEQ ID NO: 560783 - DNA, 15 bp, Homo sapiens
gcagcaggcctaagc

SEQ ID NO: 560784 - DNA, 15 bp, Homo sapiens
agcagcaggcctaag

SEQ ID NO: 560785 - DNA, 15 bp, Homo sapiens
aagcagcaggcctaa

SEQ ID NO: 560786 - DNA, 15 bp, Homo sapiens
gaagcagcaggccta

SEQ ID NO: 560787 - DNA, 15 bp, Homo sapiens
agaagcagcaggcct

SEQ ID NO: 560788 - DNA, 15 bp, Homo sapiens
cagaagcagcaggcc

SEQ ID NO: 560789 - DNA, 15 bp, Homo sapiens
ccagaagcagcaggc

SEQ ID NO: 560790 - DNA, 15 bp, Homo sapiens
tccagaagcagcagg

SEQ ID NO: 560791 - DNA, 15 bp, Homo sapiens
ttccagaagcagcag

SEQ ID NO: 560792 - DNA, 15 bp, Homo sapiens
attccagaagcagca

SEQ ID NO: 560793 - DNA, 15 bp, Homo sapiens
gattccagaagcagc

SEQ ID NO: 560794 - DNA, 15 bp, Homo sapiens
agattccagaagcag

SEQ ID NO: 560795 - DNA, 15 bp, Homo sapiens
gagattccagaagca

SEQ ID NO: 560796 - DNA, 15 bp, Homo sapiens
agagattccagaagc

SEQ ID NO: 560797 - DNA, 15 bp, Homo sapiens
aagagattccagaag

SEQ ID NO: 560798 - DNA, 15 bp, Homo sapiens
caagagattccagaa

SEQ ID NO: 560799 - DNA, 15 bp, Homo sapiens
acaagagattccaga

SEQ ID NO: 560800 - DNA, 15 bp, Homo sapiens
cacaagagattccag

SEQ ID NO: 560801 - DNA, 15 bp, Homo sapiens
gcacaagagattcca

SEQ ID NO: 560802 - DNA, 15 bp, Homo sapiens
tgcacaagagattcc

SEQ ID NO: 560803 - DNA, 15 bp, Homo sapiens
ttgcacaagagattc

SEQ ID NO: 560804 - DNA, 15 bp, Homo sapiens
attgcacaagagatt

SEQ ID NO: 560805 - DNA, 15 bp, Homo sapiens
tattgcacaagagat

SEQ ID NO: 560806 - DNA, 15 bp, Homo sapiens
ctattgcacaagaga

SEQ ID NO: 560807 - DNA, 15 bp, Homo sapiens
tctattgcacaagag

SEQ ID NO: 560808 - DNA, 15 bp, Homo sapiens
gtctattgcacaaga

SEQ ID NO: 560809 - DNA, 15 bp, Homo sapiens
agtctattgcacaag

SEQ ID NO: 560810 - DNA, 15 bp, Homo sapiens
gagtctattgcacaa

SEQ ID NO: 560811 - DNA, 15 bp, Homo sapiens
ggagtctattgcaca

SEQ ID NO: 560812 - DNA, 15 bp, Homo sapiens
gggagtctattgcac

SEQ ID NO: 560813 - DNA, 15 bp, Homo sapiens
ggggagtctattgca

SEQ ID NO: 560814 - DNA, 15 bp, Homo sapiens
aggggagtctattgc

SEQ ID NO: 560815 - DNA, 15 bp, Homo sapiens
caggggagtctattg

SEQ ID NO: 560816 - DNA, 15 bp, Homo sapiens
ccaggggagtctatt

SEQ ID NO: 560817 - DNA, 15 bp, Homo sapiens
cccaggggagtctat

SEQ ID NO: 560818 - DNA, 15 bp, Homo sapiens
ccccaggggagtcta

SEQ ID NO: 560819 - DNA, 15 bp, Homo sapiens
tccccaggggagtct

SEQ ID NO: 560820 - DNA, 15 bp, Homo sapiens
ttccccaggggagtc

SEQ ID NO: 560821 - DNA, 15 bp, Homo sapiens
cttccccaggggagt

SEQ ID NO: 560822 - DNA, 15 bp, Homo sapiens
acttccccaggggag

SEQ ID NO: 560823 - DNA, 15 bp, Homo sapiens
gacttccccagggga

SEQ ID NO: 560824 - DNA, 15 bp, Homo sapiens
agacttccccagggg

SEQ ID NO: 560825 - DNA, 15 bp, Homo sapiens
cagacttccccaggg

SEQ ID NO: 560826 - DNA, 15 bp, Homo sapiens
gcagacttccccagg

SEQ ID NO: 560827 - DNA, 15 bp, Homo sapiens
agcagacttccccag

SEQ ID NO: 560828 - DNA, 15 bp, Homo sapiens
tagcagacttcccca

SEQ ID NO: 560829 - DNA, 15 bp, Homo sapiens
ctagcagacttcccc

SEQ ID NO: 560830 - DNA, 15 bp, Homo sapiens
tctagcagacttccc

SEQ ID NO: 560831 - DNA, 15 bp, Homo sapiens
ttctagcagacttcc

SEQ ID NO: 560832 - DNA, 15 bp, Homo sapiens
tttctagcagacttc

SEQ ID NO: 560833 - DNA, 15 bp, Homo sapiens
atttctagcagactt

SEQ ID NO: 560834 - DNA, 15 bp, Homo sapiens
catttctagcagact

SEQ ID NO: 560835 - DNA, 15 bp, Homo sapiens
gcatttctagcagac

SEQ ID NO: 560836 - DNA, 15 bp, Homo sapiens
tgcatttctagcaga

SEQ ID NO: 560837 - DNA, 15 bp, Homo sapiens
ctgcatttctagcag

SEQ ID NO: 560838 - DNA, 15 bp, Homo sapiens
tctgcatttctagca

SEQ ID NO: 560839 - DNA, 15 bp, Homo sapiens
atctgcatttctagc

SEQ ID NO: 560840 - DNA, 15 bp, Homo sapiens
gatctgcatttctag

SEQ ID NO: 560841 - DNA, 15 bp, Homo sapiens
ggatctgcatttcta

SEQ ID NO: 560842 - DNA, 15 bp, Homo sapiens
gggatctgcatttct

SEQ ID NO: 560843 - DNA, 15 bp, Homo sapiens
agggatctgcatttc

SEQ ID NO: 560844 - DNA, 15 bp, Homo sapiens
cagggatctgcattt

SEQ ID NO: 560845 - DNA, 15 bp, Homo sapiens
ccagggatctgcatt

SEQ ID NO: 560846 - DNA, 15 bp, Homo sapiens
cccagggatctgcat

SEQ ID NO: 560847 - DNA, 15 bp, Homo sapiens
gcccagggatctgca

SEQ ID NO: 560848 - DNA, 15 bp, Homo sapiens
tgcccagggatctgc

SEQ ID NO: 560849 - DNA, 15 bp, Homo sapiens
ctgcccagggatctg

SEQ ID NO: 560850 - DNA, 15 bp, Homo sapiens
gctgcccagggatct

SEQ ID NO: 560851 - DNA, 15 bp, Homo sapiens
ggctgcccagggatc

SEQ ID NO: 560852 - DNA, 15 bp, Homo sapiens
aggctgcccagggat

SEQ ID NO: 560853 - DNA, 15 bp, Homo sapiens
aaggctgcccaggga

SEQ ID NO: 560854 - DNA, 15 bp, Homo sapiens
gaaggctgcccaggg

SEQ ID NO: 560855 - DNA, 15 bp, Homo sapiens
agaaggctgcccagg

SEQ ID NO: 560856 - DNA, 15 bp, Homo sapiens
tagaaggctgcccag

SEQ ID NO: 560857 - DNA, 15 bp, Homo sapiens
ctagaaggctgccca

SEQ ID NO: 560858 - DNA, 15 bp, Homo sapiens
gctagaaggctgccc

SEQ ID NO: 560859 - DNA, 15 bp, Homo sapiens
ggctagaaggctgcc

SEQ ID NO: 560860 - DNA, 15 bp, Homo sapiens
aggctagaaggctgc

SEQ ID NO: 560861 - DNA, 15 bp, Homo sapiens
aaggctagaaggctg

SEQ ID NO: 560862 - DNA, 15 bp, Homo sapiens
gaaggctagaaggct

SEQ ID NO: 560863 - DNA, 15 bp, Homo sapiens
agaaggctagaaggc

SEQ ID NO: 560864 - DNA, 15 bp, Homo sapiens
cagaaggctagaagg

SEQ ID NO: 560865 - DNA, 15 bp, Homo sapiens
ccagaaggctagaag

SEQ ID NO: 560866 - DNA, 15 bp, Homo sapiens
tccagaaggctagaa

SEQ ID NO: 560867 - DNA, 15 bp, Homo sapiens
ttccagaaggctaga

SEQ ID NO: 560868 - DNA, 15 bp, Homo sapiens
attccagaaggctag

SEQ ID NO: 560869 - DNA, 15 bp, Homo sapiens
tattccagaaggcta

SEQ ID NO: 560870 - DNA, 15 bp, Homo sapiens
ctattccagaaggct

SEQ ID NO: 560871 - DNA, 15 bp, Homo sapiens
cctattccagaaggc

SEQ ID NO: 560872 - DNA, 15 bp, Homo sapiens
tcctattccagaagg

SEQ ID NO: 560873 - DNA, 15 bp, Homo sapiens
atcctattccagaag

SEQ ID NO: 560874 - DNA, 15 bp, Homo sapiens
gatcctattccagaa

SEQ ID NO: 560875 - DNA, 15 bp, Homo sapiens
tgatcctattccaga

SEQ ID NO: 560876 - DNA, 15 bp, Homo sapiens
atgatcctattccag

SEQ ID NO: 560877 - DNA, 15 bp, Homo sapiens
catgatcctattcca

SEQ ID NO: 560878 - DNA, 15 bp, Homo sapiens
ccatgatcctattcc

SEQ ID NO: 560879 - DNA, 15 bp, Homo sapiens
accatgatcctattc

SEQ ID NO: 560880 - DNA, 15 bp, Homo sapiens
caccatgatcctatt

SEQ ID NO: 560881 - DNA, 15 bp, Homo sapiens
ccaccatgatcctat

SEQ ID NO: 560882 - DNA, 15 bp, Homo sapiens
cccaccatgatccta

SEQ ID NO: 560883 - DNA, 15 bp, Homo sapiens
tcccaccatgatcct

SEQ ID NO: 560884 - DNA, 15 bp, Homo sapiens
gtcccaccatgatcc

SEQ ID NO: 560885 - DNA, 15 bp, Homo sapiens
ggtcccaccatgatc

SEQ ID NO: 560886 - DNA, 15 bp, Homo sapiens
gggtcccaccatgat

SEQ ID NO: 560887 - DNA, 15 bp, Homo sapiens
agggtcccaccatga

SEQ ID NO: 560888 - DNA, 15 bp, Homo sapiens
cagggtcccaccatg

SEQ ID NO: 560889 - DNA, 15 bp, Homo sapiens
ccagggtcccaccat

SEQ ID NO: 560890 - DNA, 15 bp, Homo sapiens
tccagggtcccacca

SEQ ID NO: 560891 - DNA, 15 bp, Homo sapiens
ttccagggtcccacc

SEQ ID NO: 560892 - DNA, 15 bp, Homo sapiens
attccagggtcccac

SEQ ID NO: 560893 - DNA, 15 bp, Homo sapiens
gattccagggtccca

SEQ ID NO: 560894 - DNA, 15 bp, Homo sapiens
agattccagggtccc

SEQ ID NO: 560895 - DNA, 15 bp, Homo sapiens
cagattccagggtcc

SEQ ID NO: 560896 - DNA, 15 bp, Homo sapiens
acagattccagggtc

SEQ ID NO: 560897 - DNA, 15 bp, Homo sapiens
tacagattccagggt

SEQ ID NO: 560898 - DNA, 15 bp, Homo sapiens
atacagattccaggg

SEQ ID NO: 560899 - DNA, 15 bp, Homo sapiens
aatacagattccagg

SEQ ID NO: 560900 - DNA, 15 bp, Homo sapiens
aaatacagattccag

SEQ ID NO: 560901 - DNA, 15 bp, Homo sapiens
aaaatacagattcca

SEQ ID NO: 560902 - DNA, 15 bp, Homo sapiens
taaaatacagattcc

SEQ ID NO: 560903 - DNA, 15 bp, Homo sapiens
ttaaaatacagattc

SEQ ID NO: 560904 - DNA, 15 bp, Homo sapiens
attaaaatacagatt

SEQ ID NO: 560905 - DNA, 15 bp, Homo sapiens
cattaaaatacagat

SEQ ID NO: 560906 - DNA, 15 bp, Homo sapiens
ccattaaaatacaga

SEQ ID NO: 560907 - DNA, 15 bp, Homo sapiens
tccattaaaatacag

SEQ ID NO: 560908 - DNA, 15 bp, Homo sapiens
gtccattaaaataca

SEQ ID NO: 560909 - DNA, 15 bp, Homo sapiens
ggtccattaaaatac

SEQ ID NO: 560910 - DNA, 15 bp, Homo sapiens
gggtccattaaaata

SEQ ID NO: 560911 - DNA, 15 bp, Homo sapiens
agggtccattaaaat

SEQ ID NO: 560912 - DNA, 15 bp, Homo sapiens
tagggtccattaaaa

SEQ ID NO: 560913 - DNA, 15 bp, Homo sapiens
ttagggtccattaaa

SEQ ID NO: 560914 - DNA, 15 bp, Homo sapiens
attagggtccattaa

SEQ ID NO: 560915 - DNA, 15 bp, Homo sapiens
cattagggtccatta

SEQ ID NO: 560916 - DNA, 15 bp, Homo sapiens
tcattagggtccatt

SEQ ID NO: 560917 - DNA, 15 bp, Homo sapiens
ctcattagggtccat

SEQ ID NO: 560918 - DNA, 15 bp, Homo sapiens
tctcattagggtcca

SEQ ID NO: 560919 - DNA, 15 bp, Homo sapiens
atctcattagggtcc

SEQ ID NO: 560920 - DNA, 15 bp, Homo sapiens
aatctcattagggtc

SEQ ID NO: 560921 - DNA, 15 bp, Homo sapiens
gaatctcattagggt

SEQ ID NO: 560922 - DNA, 15 bp, Homo sapiens
agaatctcattaggg

SEQ ID NO: 560923 - DNA, 15 bp, Homo sapiens
cagaatctcattagg

SEQ ID NO: 560924 - DNA, 15 bp, Homo sapiens
tcagaatctcattag

SEQ ID NO: 560925 - DNA, 15 bp, Homo sapiens
atcagaatctcatta

SEQ ID NO: 560926 - DNA, 15 bp, Homo sapiens
catcagaatctcatt

SEQ ID NO: 560927 - DNA, 15 bp, Homo sapiens
acatcagaatctcat

SEQ ID NO: 560928 - DNA, 15 bp, Homo sapiens
tacatcagaatctca

SEQ ID NO: 560929 - DNA, 15 bp, Homo sapiens
ctacatcagaatctc

SEQ ID NO: 560930 - DNA, 15 bp, Homo sapiens
tctacatcagaatct

SEQ ID NO: 560931 - DNA, 15 bp, Homo sapiens
ttctacatcagaatc

SEQ ID NO: 560932 - DNA, 15 bp, Homo sapiens
tttctacatcagaat

SEQ ID NO: 560933 - DNA, 15 bp, Homo sapiens
gtttctacatcagaa

SEQ ID NO: 560934 - DNA, 15 bp, Homo sapiens
tgtttctacatcaga

SEQ ID NO: 560935 - DNA, 15 bp, Homo sapiens
atgtttctacatcag

SEQ ID NO: 560936 - DNA, 15 bp, Homo sapiens
catgtttctacatca

SEQ ID NO: 560937 - DNA, 15 bp, Homo sapiens
acatgtttctacatc

SEQ ID NO: 560938 - DNA, 15 bp, Homo sapiens
aacatgtttctacat

SEQ ID NO: 560939 - DNA, 15 bp, Homo sapiens
aaacatgtttctaca

SEQ ID NO: 560940 - DNA, 15 bp, Homo sapiens
caaacatgtttctac

SEQ ID NO: 560941 - DNA, 15 bp, Homo sapiens
tcaaacatgtttcta

SEQ ID NO: 560942 - DNA, 15 bp, Homo sapiens
ctcaaacatgtttct

SEQ ID NO: 560943 - DNA, 15 bp, Homo sapiens
tctcaaacatgtttc

SEQ ID NO: 560944 - DNA, 15 bp, Homo sapiens
ctctcaaacatgttt

SEQ ID NO: 560945 - DNA, 15 bp, Homo sapiens
cctctcaaacatgtt

SEQ ID NO: 560946 - DNA, 15 bp, Homo sapiens
gcctctcaaacatgt

SEQ ID NO: 560947 - DNA, 15 bp, Homo sapiens
tgcctctcaaacatg

SEQ ID NO: 560948 - DNA, 15 bp, Homo sapiens
atgcctctcaaacat

SEQ ID NO: 560949 - DNA, 15 bp, Homo sapiens
aatgcctctcaaaca

SEQ ID NO: 560950 - DNA, 15 bp, Homo sapiens
caatgcctctcaaac

SEQ ID NO: 560951 - DNA, 15 bp, Homo sapiens
tcaatgcctctcaaa

SEQ ID NO: 560952 - DNA, 15 bp, Homo sapiens
atcaatgcctctcaa

SEQ ID NO: 560953 - DNA, 15 bp, Homo sapiens
gatcaatgcctctca

SEQ ID NO: 560954 - DNA, 15 bp, Homo sapiens
agatcaatgcctctc

SEQ ID NO: 560955 - DNA, 15 bp, Homo sapiens
tagatcaatgcctct

SEQ ID NO: 560956 - DNA, 15 bp, Homo sapiens
ttagatcaatgcctc

SEQ ID NO: 560957 - DNA, 15 bp, Homo sapiens
tttagatcaatgcct

SEQ ID NO: 560958 - DNA, 15 bp, Homo sapiens
atttagatcaatgcc

SEQ ID NO: 560959 - DNA, 15 bp, Homo sapiens
gatttagatcaatgc

SEQ ID NO: 560960 - DNA, 15 bp, Homo sapiens
agatttagatcaatg

SEQ ID NO: 560961 - DNA, 15 bp, Homo sapiens
cagatttagatcaat

SEQ ID NO: 560962 - DNA, 15 bp, Homo sapiens
ccagatttagatcaa

SEQ ID NO: 560963 - DNA, 15 bp, Homo sapiens
cccagatttagatca

SEQ ID NO: 560964 - DNA, 15 bp, Homo sapiens
tcccagatttagatc

SEQ ID NO: 560965 - DNA, 15 bp, Homo sapiens
atcccagatttagat

SEQ ID NO: 560966 - DNA, 15 bp, Homo sapiens
catcccagatttaga

SEQ ID NO: 560967 - DNA, 15 bp, Homo sapiens
tcatcccagatttag

SEQ ID NO: 560968 - DNA, 15 bp, Homo sapiens
gtcatcccagattta

SEQ ID NO: 560969 - DNA, 15 bp, Homo sapiens
agtcatcccagattt

SEQ ID NO: 560970 - DNA, 15 bp, Homo sapiens
cagtcatcccagatt

SEQ ID NO: 560971 - DNA, 15 bp, Homo sapiens
ccagtcatcccagat

SEQ ID NO: 560972 - DNA, 15 bp, Homo sapiens
gccagtcatcccaga

SEQ ID NO: 560973 - DNA, 15 bp, Homo sapiens
ggccagtcatcccag

SEQ ID NO: 560974 - DNA, 15 bp, Homo sapiens
tggccagtcatccca

SEQ ID NO: 560975 - DNA, 15 bp, Homo sapiens
ctggccagtcatccc

SEQ ID NO: 560976 - DNA, 15 bp, Homo sapiens
cctggccagtcatcc

SEQ ID NO: 560977 - DNA, 15 bp, Homo sapiens
acctggccagtcatc

SEQ ID NO: 560978 - DNA, 15 bp, Homo sapiens
cacctggccagtcat

SEQ ID NO: 560979 - DNA, 15 bp, Homo sapiens
gcacctggccagtca

SEQ ID NO: 560980 - DNA, 15 bp, Homo sapiens
cgcacctggccagtc

SEQ ID NO: 560981 - DNA, 15 bp, Homo sapiens
ccgcacctggccagt

SEQ ID NO: 560982 - DNA, 15 bp, Homo sapiens
accgcacctggccag

SEQ ID NO: 560983 - DNA, 15 bp, Homo sapiens
caccgcacctggcca

SEQ ID NO: 560984 - DNA, 15 bp, Homo sapiens
ccaccgcacctggcc

SEQ ID NO: 560985 - DNA, 15 bp, Homo sapiens
gccaccgcacctggc

SEQ ID NO: 560986 - DNA, 15 bp, Homo sapiens
agccaccgcacctgg

SEQ ID NO: 560987 - DNA, 15 bp, Homo sapiens
gagccaccgcacctg

SEQ ID NO: 560988 - DNA, 15 bp, Homo sapiens
tgagccaccgcacct

SEQ ID NO: 560989 - DNA, 15 bp, Homo sapiens
gtgagccaccgcacc

SEQ ID NO: 560990 - DNA, 15 bp, Homo sapiens
tgtgagccaccgcac

SEQ ID NO: 560991 - DNA, 15 bp, Homo sapiens
gtgtgagccaccgca

SEQ ID NO: 560992 - DNA, 15 bp, Homo sapiens
ggtgtgagccaccgc

SEQ ID NO: 560993 - DNA, 15 bp, Homo sapiens
aggtgtgagccaccg

SEQ ID NO: 560994 - DNA, 15 bp, Homo sapiens
caggtgtgagccacc

SEQ ID NO: 560995 - DNA, 15 bp, Homo sapiens
tggattacaggtgtg

SEQ ID NO: 560996 - DNA, 15 bp, Homo sapiens
ctggattacaggtgt

SEQ ID NO: 560997 - DNA, 15 bp, Homo sapiens
gctggattacaggtg

SEQ ID NO: 560998 - DNA, 15 bp, Homo sapiens
tgctggattacaggt

SEQ ID NO: 560999 - DNA, 15 bp, Homo sapiens
gtgctggattacagg

SEQ ID NO: 561000 - DNA, 15 bp, Homo sapiens
agtgctggattacag

SEQ ID NO: 561001 - DNA, 15 bp, Homo sapiens
aagtgctggattaca

SEQ ID NO: 561002 - DNA, 15 bp, Homo sapiens
aaagtgctggattac

SEQ ID NO: 561003 - DNA, 15 bp, Homo sapiens
caaagtgctggatta

SEQ ID NO: 561004 - DNA, 15 bp, Homo sapiens
ccaaagtgctggatt

SEQ ID NO: 561005 - DNA, 15 bp, Homo sapiens
cccaaagtgctggat

SEQ ID NO: 561006 - DNA, 15 bp, Homo sapiens
tcccaaagtgctgga

SEQ ID NO: 561007 - DNA, 15 bp, Homo sapiens
gcttcggcctcccaa

SEQ ID NO: 561008 - DNA, 15 bp, Homo sapiens
tgcttcggcctccca

SEQ ID NO: 561009 - DNA, 15 bp, Homo sapiens
ctgcttcggcctccc

SEQ ID NO: 561010 - DNA, 15 bp, Homo sapiens
cctgcttcggcctcc

SEQ ID NO: 561011 - DNA, 15 bp, Homo sapiens
acctgcttcggcctc

SEQ ID NO: 561012 - DNA, 15 bp, Homo sapiens
cacctgcttcggcct

SEQ ID NO: 561013 - DNA, 15 bp, Homo sapiens
ccacctgcttcggcc

SEQ ID NO: 561014 - DNA, 15 bp, Homo sapiens
tccacctgcttcggc

SEQ ID NO: 561015 - DNA, 15 bp, Homo sapiens
atccacctgcttcgg

SEQ ID NO: 561016 - DNA, 15 bp, Homo sapiens
gatccacctgcttcg

SEQ ID NO: 561017 - DNA, 15 bp, Homo sapiens
tgatccacctgcttc

SEQ ID NO: 561018 - DNA, 15 bp, Homo sapiens
atgatccacctgctt

SEQ ID NO: 561019 - DNA, 15 bp, Homo sapiens
aatgatccacctgct

SEQ ID NO: 561020 - DNA, 15 bp, Homo sapiens
aaatgatccacctgc

SEQ ID NO: 561021 - DNA, 15 bp, Homo sapiens
caaatgatccacctg

SEQ ID NO: 561022 - DNA, 15 bp, Homo sapiens
tcaaatgatccacct

SEQ ID NO: 561023 - DNA, 15 bp, Homo sapiens
gacctcaaatgatcc

SEQ ID NO: 561024 - DNA, 15 bp, Homo sapiens
tgacctcaaatgatc

SEQ ID NO: 561025 - DNA, 15 bp, Homo sapiens
ctgacctcaaatgat

SEQ ID NO: 561026 - DNA, 15 bp, Homo sapiens
cctgacctcaaatga

SEQ ID NO: 561027 - DNA, 15 bp, Homo sapiens
tcctgacctcaaatg

SEQ ID NO: 561028 - DNA, 15 bp, Homo sapiens
ctcctgacctcaaat

SEQ ID NO: 561029 - DNA, 15 bp, Homo sapiens
actcctgacctcaaa

SEQ ID NO: 561030 - DNA, 15 bp, Homo sapiens
aactcctgacctcaa

SEQ ID NO: 561031 - DNA, 15 bp, Homo sapiens
ttttcaccatgttgg

SEQ ID NO: 561032 - DNA, 15 bp, Homo sapiens
gttttcaccatgttg

SEQ ID NO: 561033 - DNA, 15 bp, Homo sapiens
ggttttcaccatgtt

SEQ ID NO: 561034 - DNA, 15 bp, Homo sapiens
aggttttcaccatgt

SEQ ID NO: 561035 - DNA, 15 bp, Homo sapiens
caggttttcaccatg

SEQ ID NO: 561036 - DNA, 15 bp, Homo sapiens
acaggttttcaccat

SEQ ID NO: 561037 - DNA, 15 bp, Homo sapiens
gacaggttttcacca

SEQ ID NO: 561038 - DNA, 15 bp, Homo sapiens
agacaggttttcacc

SEQ ID NO: 561039 - DNA, 15 bp, Homo sapiens
gagacaggttttcac

SEQ ID NO: 561040 - DNA, 15 bp, Homo sapiens
agagacaggttttca

SEQ ID NO: 561041 - DNA, 15 bp, Homo sapiens
tagagacaggttttc

SEQ ID NO: 561042 - DNA, 15 bp, Homo sapiens
gtagagacaggtttt

SEQ ID NO: 561043 - DNA, 15 bp, Homo sapiens
agtagagacaggttt

SEQ ID NO: 561044 - DNA, 15 bp, Homo sapiens
tagtagagacaggtt

SEQ ID NO: 561045 - DNA, 15 bp, Homo sapiens
ttagtagagacaggt

SEQ ID NO: 561046 - DNA, 15 bp, Homo sapiens
ttttttgtattttta

SEQ ID NO: 561047 - DNA, 15 bp, Homo sapiens
tttttttgtattttt

SEQ ID NO: 561048 - DNA, 15 bp, Homo sapiens
ttttttttgtatttt

SEQ ID NO: 561049 - DNA, 15 bp, Homo sapiens
attttttttgtattt

SEQ ID NO: 561050 - DNA, 15 bp, Homo sapiens
aattttttttgtatt

SEQ ID NO: 561051 - DNA, 15 bp, Homo sapiens
taattttttttgtat

SEQ ID NO: 561052 - DNA, 15 bp, Homo sapiens
ctaattttttttgta

SEQ ID NO: 561053 - DNA, 15 bp, Homo sapiens
gctaattttttttgt

SEQ ID NO: 561054 - DNA, 15 bp, Homo sapiens
agctaattttttttg

SEQ ID NO: 561055 - DNA, 15 bp, Homo sapiens
cagctaatttttttt

SEQ ID NO: 561056 - DNA, 15 bp, Homo sapiens
ccagctaattttttt

SEQ ID NO: 561057 - DNA, 15 bp, Homo sapiens
ccaccacacccagct

SEQ ID NO: 561058 - DNA, 15 bp, Homo sapiens
tgccaccacacccag

SEQ ID NO: 561059 - DNA, 15 bp, Homo sapiens
gtgccaccacaccca

SEQ ID NO: 561060 - DNA, 15 bp, Homo sapiens
tgtgccaccacaccc

SEQ ID NO: 561061 - DNA, 15 bp, Homo sapiens
gtgtgccaccacacc

SEQ ID NO: 561062 - DNA, 15 bp, Homo sapiens
cgtgtgccaccacac

SEQ ID NO: 561063 - DNA, 15 bp, Homo sapiens
gcgtgtgccaccaca

SEQ ID NO: 561064 - DNA, 15 bp, Homo sapiens
agcgtgtgccaccac

SEQ ID NO: 561065 - DNA, 15 bp, Homo sapiens
aagcgtgtgccacca

SEQ ID NO: 561066 - DNA, 15 bp, Homo sapiens
caagcgtgtgccacc

SEQ ID NO: 561067 - DNA, 15 bp, Homo sapiens
acaagcgtgtgccac

SEQ ID NO: 561068 - DNA, 15 bp, Homo sapiens
tacaagcgtgtgcca

SEQ ID NO: 561069 - DNA, 15 bp, Homo sapiens
ttacaagcgtgtgcc

SEQ ID NO: 561070 - DNA, 15 bp, Homo sapiens
attacaagcgtgtgc

SEQ ID NO: 561071 - DNA, 15 bp, Homo sapiens
gattacaagcgtgtg

SEQ ID NO: 561072 - DNA, 15 bp, Homo sapiens
ggattacaagcgtgt

SEQ ID NO: 561073 - DNA, 15 bp, Homo sapiens
agctgggattacaag

SEQ ID NO: 561074 - DNA, 15 bp, Homo sapiens
tagctgggattacaa

SEQ ID NO: 561075 - DNA, 15 bp, Homo sapiens
tctcccgggttcaag

SEQ ID NO: 561076 - DNA, 15 bp, Homo sapiens
atctcccgggttcaa

SEQ ID NO: 561077 - DNA, 15 bp, Homo sapiens
catctcccgggttca

SEQ ID NO: 561078 - DNA, 15 bp, Homo sapiens
ccatctcccgggttc

SEQ ID NO: 561079 - DNA, 15 bp, Homo sapiens
tccatctcccgggtt

SEQ ID NO: 561080 - DNA, 15 bp, Homo sapiens
ctccatctcccgggt

SEQ ID NO: 561081 - DNA, 15 bp, Homo sapiens
cctccatctcccggg

SEQ ID NO: 561082 - DNA, 15 bp, Homo sapiens
acctccatctcccgg

SEQ ID NO: 561083 - DNA, 15 bp, Homo sapiens
aacctccatctcccg

SEQ ID NO: 561084 - DNA, 15 bp, Homo sapiens
caacctccatctccc

SEQ ID NO: 561085 - DNA, 15 bp, Homo sapiens
gcaacctccatctcc

SEQ ID NO: 561086 - DNA, 15 bp, Homo sapiens
tgcaacctccatctc

SEQ ID NO: 561087 - DNA, 15 bp, Homo sapiens
ctgcaacctccatct

SEQ ID NO: 561088 - DNA, 15 bp, Homo sapiens
actgcaacctccatc

SEQ ID NO: 561089 - DNA, 15 bp, Homo sapiens
cactgcaacctccat

SEQ ID NO: 561090 - DNA, 15 bp, Homo sapiens
atcttggctcactgc

SEQ ID NO: 561091 - DNA, 15 bp, Homo sapiens
gatcttggctcactg

SEQ ID NO: 561092 - DNA, 15 bp, Homo sapiens
cgatcttggctcact

SEQ ID NO: 561093 - DNA, 15 bp, Homo sapiens
acgatcttggctcac

SEQ ID NO: 561094 - DNA, 15 bp, Homo sapiens
cacgatcttggctca

SEQ ID NO: 561095 - DNA, 15 bp, Homo sapiens
gcacgatcttggctc

SEQ ID NO: 561096 - DNA, 15 bp, Homo sapiens
ggcacgatcttggct

SEQ ID NO: 561097 - DNA, 15 bp, Homo sapiens
tggcacgatcttggc

SEQ ID NO: 561098 - DNA, 15 bp, Homo sapiens
gtggcacgatcttgg

SEQ ID NO: 561099 - DNA, 15 bp, Homo sapiens
agtggcacgatcttg

SEQ ID NO: 561100 - DNA, 15 bp, Homo sapiens
cagtggcacgatctt

SEQ ID NO: 561101 - DNA, 15 bp, Homo sapiens
agtctcactctgtca

SEQ ID NO: 561102 - DNA, 15 bp, Homo sapiens
cggagtctcactctg

SEQ ID NO: 561103 - DNA, 15 bp, Homo sapiens
acggagtctcactct

SEQ ID NO: 561104 - DNA, 15 bp, Homo sapiens
gacggagtctcactc

SEQ ID NO: 561105 - DNA, 15 bp, Homo sapiens
agacggagtctcact

SEQ ID NO: 561106 - DNA, 15 bp, Homo sapiens
gagacggagtctcac

SEQ ID NO: 561107 - DNA, 15 bp, Homo sapiens
tgagacggagtctca

SEQ ID NO: 561108 - DNA, 15 bp, Homo sapiens
ttgagacggagtctc

SEQ ID NO: 561109 - DNA, 15 bp, Homo sapiens
atttttttgagacgg

SEQ ID NO: 561110 - DNA, 15 bp, Homo sapiens
tatttttttgagacg

SEQ ID NO: 561111 - DNA, 15 bp, Homo sapiens
ttatttttttgagac

SEQ ID NO: 561112 - DNA, 15 bp, Homo sapiens
gttttatttttttga

SEQ ID NO: 561113 - DNA, 15 bp, Homo sapiens
agttttatttttttg

SEQ ID NO: 561114 - DNA, 15 bp, Homo sapiens
tagttttattttttt

SEQ ID NO: 561115 - DNA, 15 bp, Homo sapiens
ttagttttatttttt

SEQ ID NO: 561116 - DNA, 15 bp, Homo sapiens
tttagttttattttt

SEQ ID NO: 561117 - DNA, 15 bp, Homo sapiens
ttttagttttatttt

SEQ ID NO: 561118 - DNA, 15 bp, Homo sapiens
attttagttttattt

SEQ ID NO: 561119 - DNA, 15 bp, Homo sapiens
tattttagttttatt

SEQ ID NO: 561120 - DNA, 15 bp, Homo sapiens
ttattttagttttat

SEQ ID NO: 561121 - DNA, 15 bp, Homo sapiens
tttattttagtttta

SEQ ID NO: 561122 - DNA, 15 bp, Homo sapiens
atttattttagtttt

SEQ ID NO: 561123 - DNA, 15 bp, Homo sapiens
tatttattttagttt

SEQ ID NO: 561124 - DNA, 15 bp, Homo sapiens
ttatttattttagtt

SEQ ID NO: 561125 - DNA, 15 bp, Homo sapiens
tttatttattttagt

SEQ ID NO: 561126 - DNA, 15 bp, Homo sapiens
atttatttattttag

SEQ ID NO: 561127 - DNA, 15 bp, Homo sapiens
tatttatttatttta

SEQ ID NO: 561128 - DNA, 15 bp, Homo sapiens
gtatttatttattta

SEQ ID NO: 561129 - DNA, 15 bp, Homo sapiens
tgtatttatttattt

SEQ ID NO: 561130 - DNA, 15 bp, Homo sapiens
atgtatttatttatt

SEQ ID NO: 561131 - DNA, 15 bp, Homo sapiens
gatgtatttatttat

SEQ ID NO: 561132 - DNA, 15 bp, Homo sapiens
agatgtatttattta

SEQ ID NO: 561133 - DNA, 15 bp, Homo sapiens
cagatgtatttattt

SEQ ID NO: 561134 - DNA, 15 bp, Homo sapiens
ccagatgtatttatt

SEQ ID NO: 561135 - DNA, 15 bp, Homo sapiens
cccagatgtatttat

SEQ ID NO: 561136 - DNA, 15 bp, Homo sapiens
tcccagatgtattta

SEQ ID NO: 561137 - DNA, 15 bp, Homo sapiens
atcccagatgtattt

SEQ ID NO: 561138 - DNA, 15 bp, Homo sapiens
catcccagatgtatt

SEQ ID NO: 561139 - DNA, 15 bp, Homo sapiens
tcatcccagatgtat

SEQ ID NO: 561140 - DNA, 15 bp, Homo sapiens
gtcatcccagatgta

SEQ ID NO: 561141 - DNA, 15 bp, Homo sapiens
agtcatcccagatgt

SEQ ID NO: 561142 - DNA, 15 bp, Homo sapiens
cagtcatcccagatg

SEQ ID NO: 561143 - DNA, 15 bp, Homo sapiens
tcagtcatcccagat

SEQ ID NO: 561144 - DNA, 15 bp, Homo sapiens
gtcagtcatcccaga

SEQ ID NO: 561145 - DNA, 15 bp, Homo sapiens
ggtcagtcatcccag

SEQ ID NO: 561146 - DNA, 15 bp, Homo sapiens
tggtcagtcatccca

SEQ ID NO: 561147 - DNA, 15 bp, Homo sapiens
ttggtcagtcatccc

SEQ ID NO: 561148 - DNA, 15 bp, Homo sapiens
cttggtcagtcatcc

SEQ ID NO: 561149 - DNA, 15 bp, Homo sapiens
tcttggtcagtcatc

SEQ ID NO: 561150 - DNA, 15 bp, Homo sapiens
ttcttggtcagtcat

SEQ ID NO: 561151 - DNA, 15 bp, Homo sapiens
gttcttggtcagtca

SEQ ID NO: 561152 - DNA, 15 bp, Homo sapiens
tgttcttggtcagtc

SEQ ID NO: 561153 - DNA, 15 bp, Homo sapiens
ttgttcttggtcagt

SEQ ID NO: 561154 - DNA, 15 bp, Homo sapiens
tttgttcttggtcag

SEQ ID NO: 561155 - DNA, 15 bp, Homo sapiens
ctttgttcttggtca

SEQ ID NO: 561156 - DNA, 15 bp, Homo sapiens
tctttgttcttggtc

SEQ ID NO: 561157 - DNA, 15 bp, Homo sapiens
ttctttgttcttggt

SEQ ID NO: 561158 - DNA, 15 bp, Homo sapiens
attctttgttcttgg

SEQ ID NO: 561159 - DNA, 15 bp, Homo sapiens
cattctttgttcttg

SEQ ID NO: 561160 - DNA, 15 bp, Homo sapiens
acattctttgttctt

SEQ ID NO: 561161 - DNA, 15 bp, Homo sapiens
tacattctttgttct

SEQ ID NO: 561162 - DNA, 15 bp, Homo sapiens
ctacattctttgttc

SEQ ID NO: 561163 - DNA, 15 bp, Homo sapiens
cctacattctttgtt

SEQ ID NO: 561164 - DNA, 15 bp, Homo sapiens
gcctacattctttgt

SEQ ID NO: 561165 - DNA, 15 bp, Homo sapiens
tgcctacattctttg

SEQ ID NO: 561166 - DNA, 15 bp, Homo sapiens
atgcctacattcttt

SEQ ID NO: 561167 - DNA, 15 bp, Homo sapiens
gatgcctacattctt

SEQ ID NO: 561168 - DNA, 15 bp, Homo sapiens
tgatgcctacattct

SEQ ID NO: 561169 - DNA, 15 bp, Homo sapiens
ttgatgcctacattc

SEQ ID NO: 561170 - DNA, 15 bp, Homo sapiens
gttgatgcctacatt

SEQ ID NO: 561171 - DNA, 15 bp, Homo sapiens
agttgatgcctacat

SEQ ID NO: 561172 - DNA, 15 bp, Homo sapiens
cagttgatgcctaca

SEQ ID NO: 561173 - DNA, 15 bp, Homo sapiens
tcagttgatgcctac

SEQ ID NO: 561174 - DNA, 15 bp, Homo sapiens
ttcagttgatgccta

SEQ ID NO: 561175 - DNA, 15 bp, Homo sapiens
gttcagttgatgcct

SEQ ID NO: 561176 - DNA, 15 bp, Homo sapiens
tgttcagttgatgcc

SEQ ID NO: 561177 - DNA, 15 bp, Homo sapiens
gtgttcagttgatgc

SEQ ID NO: 561178 - DNA, 15 bp, Homo sapiens
ggtgttcagttgatg

SEQ ID NO: 561179 - DNA, 15 bp, Homo sapiens
tggtgttcagttgat

SEQ ID NO: 561180 - DNA, 15 bp, Homo sapiens
ttggtgttcagttga

SEQ ID NO: 561181 - DNA, 15 bp, Homo sapiens
gttggtgttcagttg

SEQ ID NO: 561182 - DNA, 15 bp, Homo sapiens
agttggtgttcagtt

SEQ ID NO: 561183 - DNA, 15 bp, Homo sapiens
cagttggtgttcagt

SEQ ID NO: 561184 - DNA, 15 bp, Homo sapiens
acagttggtgttcag

SEQ ID NO: 561185 - DNA, 15 bp, Homo sapiens
tacagttggtgttca

SEQ ID NO: 561186 - DNA, 15 bp, Homo sapiens
atacagttggtgttc

SEQ ID NO: 561187 - DNA, 15 bp, Homo sapiens
tatacagttggtgtt

SEQ ID NO: 561188 - DNA, 15 bp, Homo sapiens
gtatacagttggtgt

SEQ ID NO: 561189 - DNA, 15 bp, Homo sapiens
ggtatacagttggtg

SEQ ID NO: 561190 - DNA, 15 bp, Homo sapiens
aggtatacagttggt

SEQ ID NO: 561191 - DNA, 15 bp, Homo sapiens
caggtatacagttgg

SEQ ID NO: 561192 - DNA, 15 bp, Homo sapiens
ccaggtatacagttg

SEQ ID NO: 561193 - DNA, 15 bp, Homo sapiens
cccaggtatacagtt

SEQ ID NO: 561194 - DNA, 15 bp, Homo sapiens
tcccaggtatacagt

SEQ ID NO: 561195 - DNA, 15 bp, Homo sapiens
gtcccaggtatacag

SEQ ID NO: 561196 - DNA, 15 bp, Homo sapiens
agtcccaggtataca

SEQ ID NO: 561197 - DNA, 15 bp, Homo sapiens
cagtcccaggtatac

SEQ ID NO: 561198 - DNA, 15 bp, Homo sapiens
ccagtcccaggtata

SEQ ID NO: 561199 - DNA, 15 bp, Homo sapiens
tccagtcccaggtat

SEQ ID NO: 561200 - DNA, 15 bp, Homo sapiens
atccagtcccaggta

SEQ ID NO: 561201 - DNA, 15 bp, Homo sapiens
gatccagtcccaggt

SEQ ID NO: 561202 - DNA, 15 bp, Homo sapiens
agatccagtcccagg

SEQ ID NO: 561203 - DNA, 15 bp, Homo sapiens
cagatccagtcccag

SEQ ID NO: 561204 - DNA, 15 bp, Homo sapiens
tcagatccagtccca

SEQ ID NO: 561205 - DNA, 15 bp, Homo sapiens
ctcagatccagtccc

SEQ ID NO: 561206 - DNA, 15 bp, Homo sapiens
cctcagatccagtcc

SEQ ID NO: 561207 - DNA, 15 bp, Homo sapiens
ccctcagatccagtc

SEQ ID NO: 561208 - DNA, 15 bp, Homo sapiens
accctcagatccagt

SEQ ID NO: 561209 - DNA, 15 bp, Homo sapiens
taccctcagatccag

SEQ ID NO: 561210 - DNA, 15 bp, Homo sapiens
ctaccctcagatcca

SEQ ID NO: 561211 - DNA, 15 bp, Homo sapiens
cctaccctcagatcc

SEQ ID NO: 561212 - DNA, 15 bp, Homo sapiens
tcctaccctcagatc

SEQ ID NO: 561213 - DNA, 15 bp, Homo sapiens
atcctaccctcagat

SEQ ID NO: 561214 - DNA, 15 bp, Homo sapiens
aatcctaccctcaga

SEQ ID NO: 561215 - DNA, 15 bp, Homo sapiens
caatcctaccctcag

SEQ ID NO: 561216 - DNA, 15 bp, Homo sapiens
gcaatcctaccctca

SEQ ID NO: 561217 - DNA, 15 bp, Homo sapiens
ggcaatcctaccctc

SEQ ID NO: 561218 - DNA, 15 bp, Homo sapiens
tggcaatcctaccct

SEQ ID NO: 561219 - DNA, 15 bp, Homo sapiens
ctggcaatcctaccc

SEQ ID NO: 561220 - DNA, 15 bp, Homo sapiens
tctggcaatcctacc

SEQ ID NO: 561221 - DNA, 15 bp, Homo sapiens
atctggcaatcctac

SEQ ID NO: 561222 - DNA, 15 bp, Homo sapiens
aatctggcaatccta

SEQ ID NO: 561223 - DNA, 15 bp, Homo sapiens
caatctggcaatcct

SEQ ID NO: 561224 - DNA, 15 bp, Homo sapiens
tcaatctggcaatcc

SEQ ID NO: 561225 - DNA, 15 bp, Homo sapiens
ctcaatctggcaatc

SEQ ID NO: 561226 - DNA, 15 bp, Homo sapiens
gctcaatctggcaat

SEQ ID NO: 561227 - DNA, 15 bp, Homo sapiens
tgctcaatctggcaa

SEQ ID NO: 561228 - DNA, 15 bp, Homo sapiens
gtgctcaatctggca

SEQ ID NO: 561229 - DNA, 15 bp, Homo sapiens
tgtgctcaatctggc

SEQ ID NO: 561230 - DNA, 15 bp, Homo sapiens
ttgtgctcaatctgg

SEQ ID NO: 561231 - DNA, 15 bp, Homo sapiens
tttgtgctcaatctg

SEQ ID NO: 561232 - DNA, 15 bp, Homo sapiens
gtttgtgctcaatct

SEQ ID NO: 561233 - DNA, 15 bp, Homo sapiens
tgtttgtgctcaatc

SEQ ID NO: 561234 - DNA, 15 bp, Homo sapiens
ttgtttgtgctcaat

SEQ ID NO: 561235 - DNA, 15 bp, Homo sapiens
tttgtttgtgctcaa

SEQ ID NO: 561236 - DNA, 15 bp, Homo sapiens
gtttgtttgtgctca

SEQ ID NO: 561237 - DNA, 15 bp, Homo sapiens
tgtttgtttgtgctc

SEQ ID NO: 561238 - DNA, 15 bp, Homo sapiens
ttgtttgtttgtgct

SEQ ID NO: 561239 - DNA, 15 bp, Homo sapiens
tttgtttgtttgtgc

SEQ ID NO: 561240 - DNA, 15 bp, Homo sapiens
gtttgtttgtttgtg

SEQ ID NO: 561241 - DNA, 15 bp, Homo sapiens
cgtttgtttgtttgt

SEQ ID NO: 561242 - DNA, 15 bp, Homo sapiens
tcgtttgtttgtttg

SEQ ID NO: 561243 - DNA, 15 bp, Homo sapiens
ttcgtttgtttgttt

SEQ ID NO: 561244 - DNA, 15 bp, Homo sapiens
tttcgtttgtttgtt

SEQ ID NO: 561245 - DNA, 15 bp, Homo sapiens
gtttcgtttgtttgt

SEQ ID NO: 561246 - DNA, 15 bp, Homo sapiens
tgtttcgtttgtttg

SEQ ID NO: 561247 - DNA, 15 bp, Homo sapiens
gtgtttcgtttgttt

SEQ ID NO: 561248 - DNA, 15 bp, Homo sapiens
tgtgtttcgtttgtt

SEQ ID NO: 561249 - DNA, 15 bp, Homo sapiens
ttgtgtttcgtttgt

SEQ ID NO: 561250 - DNA, 15 bp, Homo sapiens
cttgtgtttcgtttg

SEQ ID NO: 561251 - DNA, 15 bp, Homo sapiens
tcttgtgtttcgttt

SEQ ID NO: 561252 - DNA, 15 bp, Homo sapiens
ttcttgtgtttcgtt

SEQ ID NO: 561253 - DNA, 15 bp, Homo sapiens
tttcttgtgtttcgt

SEQ ID NO: 561254 - DNA, 15 bp, Homo sapiens
gtttcttgtgtttcg

SEQ ID NO: 561255 - DNA, 15 bp, Homo sapiens
tgtttcttgtgtttc

SEQ ID NO: 561256 - DNA, 15 bp, Homo sapiens
ttgtttcttgtgttt

SEQ ID NO: 561257 - DNA, 15 bp, Homo sapiens
gttgtttcttgtgtt

SEQ ID NO: 561258 - DNA, 15 bp, Homo sapiens
tgttgtttcttgtgt

SEQ ID NO: 561259 - DNA, 15 bp, Homo sapiens
ctgttgtttcttgtg

SEQ ID NO: 561260 - DNA, 15 bp, Homo sapiens
tctgttgtttcttgt

SEQ ID NO: 561261 - DNA, 15 bp, Homo sapiens
ttctgttgtttcttg

SEQ ID NO: 561262 - DNA, 15 bp, Homo sapiens
cttctgttgtttctt

SEQ ID NO: 561263 - DNA, 15 bp, Homo sapiens
ccttctgttgtttct

SEQ ID NO: 561264 - DNA, 15 bp, Homo sapiens
cccttctgttgtttc

SEQ ID NO: 561265 - DNA, 15 bp, Homo sapiens
acccttctgttgttt

SEQ ID NO: 561266 - DNA, 15 bp, Homo sapiens
cacccttctgttgtt

SEQ ID NO: 561267 - DNA, 15 bp, Homo sapiens
gcacccttctgttgt

SEQ ID NO: 561268 - DNA, 15 bp, Homo sapiens
ggcacccttctgttg

SEQ ID NO: 561269 - DNA, 15 bp, Homo sapiens
aggcacccttctgtt

SEQ ID NO: 561270 - DNA, 15 bp, Homo sapiens
caggcacccttctgt

SEQ ID NO: 561271 - DNA, 15 bp, Homo sapiens
acaggcacccttctg

SEQ ID NO: 561272 - DNA, 15 bp, Homo sapiens
aacaggcacccttct

SEQ ID NO: 561273 - DNA, 15 bp, Homo sapiens
taacaggcacccttc

SEQ ID NO: 561274 - DNA, 15 bp, Homo sapiens
ttaacaggcaccctt

SEQ ID NO: 561275 - DNA, 15 bp, Homo sapiens
tttaacaggcaccct

SEQ ID NO: 561276 - DNA, 15 bp, Homo sapiens
atttaacaggcaccc

SEQ ID NO: 561277 - DNA, 15 bp, Homo sapiens
tatttaacaggcacc

SEQ ID NO: 561278 - DNA, 15 bp, Homo sapiens
atatttaacaggcac

SEQ ID NO: 561279 - DNA, 15 bp, Homo sapiens
catatttaacaggca

SEQ ID NO: 561280 - DNA, 15 bp, Homo sapiens
tcatatttaacaggc

SEQ ID NO: 561281 - DNA, 15 bp, Homo sapiens
ttcatatttaacagg

SEQ ID NO: 561282 - DNA, 15 bp, Homo sapiens
attcatatttaacag

SEQ ID NO: 561283 - DNA, 15 bp, Homo sapiens
aattcatatttaaca

SEQ ID NO: 561284 - DNA, 15 bp, Homo sapiens
aaattcatatttaac

SEQ ID NO: 561285 - DNA, 15 bp, Homo sapiens
gaaattcatatttaa

SEQ ID NO: 561286 - DNA, 15 bp, Homo sapiens
agaaattcatattta

SEQ ID NO: 561287 - DNA, 15 bp, Homo sapiens
cagaaattcatattt

SEQ ID NO: 561288 - DNA, 15 bp, Homo sapiens
ccagaaattcatatt

SEQ ID NO: 561289 - DNA, 15 bp, Homo sapiens
accagaaattcatat

SEQ ID NO: 561290 - DNA, 15 bp, Homo sapiens
taccagaaattcata

SEQ ID NO: 561291 - DNA, 15 bp, Homo sapiens
ttaccagaaattcat

SEQ ID NO: 561292 - DNA, 15 bp, Homo sapiens
cttaccagaaattca

SEQ ID NO: 561293 - DNA, 15 bp, Homo sapiens
gcttaccagaaattc

SEQ ID NO: 561294 - DNA, 15 bp, Homo sapiens
tgcttaccagaaatt

SEQ ID NO: 561295 - DNA, 15 bp, Homo sapiens
ttgcttaccagaaat

SEQ ID NO: 561296 - DNA, 15 bp, Homo sapiens
attgcttaccagaaa

SEQ ID NO: 561297 - DNA, 15 bp, Homo sapiens
tattgcttaccagaa

SEQ ID NO: 561298 - DNA, 15 bp, Homo sapiens
ttattgcttaccaga

SEQ ID NO: 561299 - DNA, 15 bp, Homo sapiens
cttattgcttaccag

SEQ ID NO: 561300 - DNA, 15 bp, Homo sapiens
acttattgcttacca

SEQ ID NO: 561301 - DNA, 15 bp, Homo sapiens
tacttattgcttacc

SEQ ID NO: 561302 - DNA, 15 bp, Homo sapiens
ttacttattgcttac

SEQ ID NO: 561303 - DNA, 15 bp, Homo sapiens
attacttattgctta

SEQ ID NO: 561304 - DNA, 15 bp, Homo sapiens
aattacttattgctt

SEQ ID NO: 561305 - DNA, 15 bp, Homo sapiens
aaattacttattgct

SEQ ID NO: 561306 - DNA, 15 bp, Homo sapiens
aaaattacttattgc

SEQ ID NO: 561307 - DNA, 15 bp, Homo sapiens
aaaaattacttattg

SEQ ID NO: 561308 - DNA, 15 bp, Homo sapiens
taaaaattacttatt

SEQ ID NO: 561309 - DNA, 15 bp, Homo sapiens
ataaaaattacttat

SEQ ID NO: 561310 - DNA, 15 bp, Homo sapiens
aataaaaattactta

SEQ ID NO: 561311 - DNA, 15 bp, Homo sapiens
caataaaaattactt

SEQ ID NO: 561312 - DNA, 15 bp, Homo sapiens
acaataaaaattact

SEQ ID NO: 561313 - DNA, 15 bp, Homo sapiens
cacaataaaaattac

SEQ ID NO: 561314 - DNA, 15 bp, Homo sapiens
acacaataaaaatta

SEQ ID NO: 561315 - DNA, 15 bp, Homo sapiens
aacacaataaaaatt

SEQ ID NO: 561316 - DNA, 15 bp, Homo sapiens
gaacacaataaaaat

SEQ ID NO: 561317 - DNA, 15 bp, Homo sapiens
ggaacacaataaaaa

SEQ ID NO: 561318 - DNA, 15 bp, Homo sapiens
aggaacacaataaaa

SEQ ID NO: 561319 - DNA, 15 bp, Homo sapiens
caggaacacaataaa

SEQ ID NO: 561320 - DNA, 15 bp, Homo sapiens
acaggaacacaataa

SEQ ID NO: 561321 - DNA, 15 bp, Homo sapiens
cacaggaacacaata

SEQ ID NO: 561322 - DNA, 15 bp, Homo sapiens
gcacaggaacacaat

SEQ ID NO: 561323 - DNA, 15 bp, Homo sapiens
tgcacaggaacacaa

SEQ ID NO: 561324 - DNA, 15 bp, Homo sapiens
ttgcacaggaacaca

SEQ ID NO: 561325 - DNA, 15 bp, Homo sapiens
attgcacaggaacac

SEQ ID NO: 561326 - DNA, 15 bp, Homo sapiens
cattgcacaggaaca

SEQ ID NO: 561327 - DNA, 15 bp, Homo sapiens
tcattgcacaggaac

SEQ ID NO: 561328 - DNA, 15 bp, Homo sapiens
atcattgcacaggaa

SEQ ID NO: 561329 - DNA, 15 bp, Homo sapiens
tatcattgcacagga

SEQ ID NO: 561330 - DNA, 15 bp, Homo sapiens
ctatcattgcacagg

SEQ ID NO: 561331 - DNA, 15 bp, Homo sapiens
cctatcattgcacag

SEQ ID NO: 561332 - DNA, 15 bp, Homo sapiens
tcctatcattgcaca

SEQ ID NO: 561333 - DNA, 15 bp, Homo sapiens
gtcctatcattgcac

SEQ ID NO: 561334 - DNA, 15 bp, Homo sapiens
cgtcctatcattgca

SEQ ID NO: 561335 - DNA, 15 bp, Homo sapiens
gcgtcctatcattgc

SEQ ID NO: 561336 - DNA, 15 bp, Homo sapiens
tgcgtcctatcattg

SEQ ID NO: 561337 - DNA, 15 bp, Homo sapiens
gtgcgtcctatcatt

SEQ ID NO: 561338 - DNA, 15 bp, Homo sapiens
cgtgcgtcctatcat

SEQ ID NO: 561339 - DNA, 15 bp, Homo sapiens
acgtgcgtcctatca

SEQ ID NO: 561340 - DNA, 15 bp, Homo sapiens
tacgtgcgtcctatc

SEQ ID NO: 561341 - DNA, 15 bp, Homo sapiens
atacgtgcgtcctat

SEQ ID NO: 561342 - DNA, 15 bp, Homo sapiens
gatacgtgcgtccta

SEQ ID NO: 561343 - DNA, 15 bp, Homo sapiens
ggatacgtgcgtcct

SEQ ID NO: 561344 - DNA, 15 bp, Homo sapiens
aggatacgtgcgtcc

SEQ ID NO: 561345 - DNA, 15 bp, Homo sapiens
caggatacgtgcgtc

SEQ ID NO: 561346 - DNA, 15 bp, Homo sapiens
tcaggatacgtgcgt

SEQ ID NO: 561347 - DNA, 15 bp, Homo sapiens
ttcaggatacgtgcg

SEQ ID NO: 561348 - DNA, 15 bp, Homo sapiens
tttcaggatacgtgc

SEQ ID NO: 561349 - DNA, 15 bp, Homo sapiens
ttttcaggatacgtg

SEQ ID NO: 561350 - DNA, 15 bp, Homo sapiens
gttttcaggatacgt

SEQ ID NO: 561351 - DNA, 15 bp, Homo sapiens
ggttttcaggatacg

SEQ ID NO: 561352 - DNA, 15 bp, Homo sapiens
aggttttcaggatac

SEQ ID NO: 561353 - DNA, 15 bp, Homo sapiens
caggttttcaggata

SEQ ID NO: 561354 - DNA, 15 bp, Homo sapiens
acaggttttcaggat

SEQ ID NO: 561355 - DNA, 15 bp, Homo sapiens
gacaggttttcagga

SEQ ID NO: 561356 - DNA, 15 bp, Homo sapiens
agacaggttttcagg

SEQ ID NO: 561357 - DNA, 15 bp, Homo sapiens
cagacaggttttcag

SEQ ID NO: 561358 - DNA, 15 bp, Homo sapiens
acagacaggttttca

SEQ ID NO: 561359 - DNA, 15 bp, Homo sapiens
tacagacaggttttc

SEQ ID NO: 561360 - DNA, 15 bp, Homo sapiens
ctacagacaggtttt

SEQ ID NO: 561361 - DNA, 15 bp, Homo sapiens
actacagacaggttt

SEQ ID NO: 561362 - DNA, 15 bp, Homo sapiens
aactacagacaggtt

SEQ ID NO: 561363 - DNA, 15 bp, Homo sapiens
gaactacagacaggt

SEQ ID NO: 561364 - DNA, 15 bp, Homo sapiens
tgaactacagacagg

SEQ ID NO: 561365 - DNA, 15 bp, Homo sapiens
gtgaactacagacag

SEQ ID NO: 561366 - DNA, 15 bp, Homo sapiens
ggtgaactacagaca

SEQ ID NO: 561367 - DNA, 15 bp, Homo sapiens
aggtgaactacagac

SEQ ID NO: 561368 - DNA, 15 bp, Homo sapiens
caggtgaactacaga

SEQ ID NO: 561369 - DNA, 15 bp, Homo sapiens
tcaggtgaactacag

SEQ ID NO: 561370 - DNA, 15 bp, Homo sapiens
ttcaggtgaactaca

SEQ ID NO: 561371 - DNA, 15 bp, Homo sapiens
tttcaggtgaactac

SEQ ID NO: 561372 - DNA, 15 bp, Homo sapiens
atttcaggtgaacta

SEQ ID NO: 561373 - DNA, 15 bp, Homo sapiens
aatttcaggtgaact

SEQ ID NO: 561374 - DNA, 15 bp, Homo sapiens
gaatttcaggtgaac

SEQ ID NO: 561375 - DNA, 15 bp, Homo sapiens
tgaatttcaggtgaa

SEQ ID NO: 561376 - DNA, 15 bp, Homo sapiens
gtgaatttcaggtga

SEQ ID NO: 561377 - DNA, 15 bp, Homo sapiens
tgtgaatttcaggtg

SEQ ID NO: 561378 - DNA, 15 bp, Homo sapiens
atgtgaatttcaggt

SEQ ID NO: 561379 - DNA, 15 bp, Homo sapiens
aatgtgaatttcagg

SEQ ID NO: 561380 - DNA, 15 bp, Homo sapiens
aaatgtgaatttcag

SEQ ID NO: 561381 - DNA, 15 bp, Homo sapiens
taaatgtgaatttca

SEQ ID NO: 561382 - DNA, 15 bp, Homo sapiens
ttaaatgtgaatttc

SEQ ID NO: 561383 - DNA, 15 bp, Homo sapiens
gttaaatgtgaattt

SEQ ID NO: 561384 - DNA, 15 bp, Homo sapiens
agttaaatgtgaatt

SEQ ID NO: 561385 - DNA, 15 bp, Homo sapiens
tagttaaatgtgaat

SEQ ID NO: 561386 - DNA, 15 bp, Homo sapiens
ctagttaaatgtgaa

SEQ ID NO: 561387 - DNA, 15 bp, Homo sapiens
cctagttaaatgtga

SEQ ID NO: 561388 - DNA, 15 bp, Homo sapiens
gcctagttaaatgtg

SEQ ID NO: 561389 - DNA, 15 bp, Homo sapiens
cgcctagttaaatgt

SEQ ID NO: 561390 - DNA, 15 bp, Homo sapiens
acgcctagttaaatg

SEQ ID NO: 561391 - DNA, 15 bp, Homo sapiens
aacgcctagttaaat

SEQ ID NO: 561392 - DNA, 15 bp, Homo sapiens
gaacgcctagttaaa

SEQ ID NO: 561393 - DNA, 15 bp, Homo sapiens
agaacgcctagttaa

SEQ ID NO: 561394 - DNA, 15 bp, Homo sapiens
cagaacgcctagtta

SEQ ID NO: 561395 - DNA, 15 bp, Homo sapiens
tcagaacgcctagtt

SEQ ID NO: 561396 - DNA, 15 bp, Homo sapiens
atcagaacgcctagt

SEQ ID NO: 561397 - DNA, 15 bp, Homo sapiens
aatcagaacgcctag

SEQ ID NO: 561398 - DNA, 15 bp, Homo sapiens
aaatcagaacgccta

SEQ ID NO: 561399 - DNA, 15 bp, Homo sapiens
aaaatcagaacgcct

SEQ ID NO: 561400 - DNA, 15 bp, Homo sapiens
taaaatcagaacgcc

SEQ ID NO: 561401 - DNA, 15 bp, Homo sapiens
ataaaatcagaacgc

SEQ ID NO: 561402 - DNA, 15 bp, Homo sapiens
cataaaatcagaacg

SEQ ID NO: 561403 - DNA, 15 bp, Homo sapiens
acataaaatcagaac

SEQ ID NO: 561404 - DNA, 15 bp, Homo sapiens
cacataaaatcagaa

SEQ ID NO: 561405 - DNA, 15 bp, Homo sapiens
ccacataaaatcaga

SEQ ID NO: 561406 - DNA, 15 bp, Homo sapiens
gccacataaaatcag

SEQ ID NO: 561407 - DNA, 15 bp, Homo sapiens
ggccacataaaatca

SEQ ID NO: 561408 - DNA, 15 bp, Homo sapiens
cggccacataaaatc

SEQ ID NO: 561409 - DNA, 15 bp, Homo sapiens
gcggccacataaaat

SEQ ID NO: 561410 - DNA, 15 bp, Homo sapiens
ggcggccacataaaa

SEQ ID NO: 561411 - DNA, 15 bp, Homo sapiens
gggcggccacataaa

SEQ ID NO: 561412 - DNA, 15 bp, Homo sapiens
agggcggccacataa

SEQ ID NO: 561413 - DNA, 15 bp, Homo sapiens
tagggcggccacata

SEQ ID NO: 561414 - DNA, 15 bp, Homo sapiens
atagggcggccacat

SEQ ID NO: 561415 - DNA, 15 bp, Homo sapiens
gatagggcggccaca

SEQ ID NO: 561416 - DNA, 15 bp, Homo sapiens
agatagggcggccac

SEQ ID NO: 561417 - DNA, 15 bp, Homo sapiens
cagatagggcggcca

SEQ ID NO: 561418 - DNA, 15 bp, Homo sapiens
gcagatagggcggcc

SEQ ID NO: 561419 - DNA, 15 bp, Homo sapiens
agcagatagggcggc

SEQ ID NO: 561420 - DNA, 15 bp, Homo sapiens
cagcagatagggcgg

SEQ ID NO: 561421 - DNA, 15 bp, Homo sapiens
ccagcagatagggcg

SEQ ID NO: 561422 - DNA, 15 bp, Homo sapiens
cccagcagatagggc

SEQ ID NO: 561423 - DNA, 15 bp, Homo sapiens
tcccagcagataggg

SEQ ID NO: 561424 - DNA, 15 bp, Homo sapiens
ttcccagcagatagg

SEQ ID NO: 561425 - DNA, 15 bp, Homo sapiens
gttcccagcagatag

SEQ ID NO: 561426 - DNA, 15 bp, Homo sapiens
tgttcccagcagata

SEQ ID NO: 561427 - DNA, 15 bp, Homo sapiens
atgttcccagcagat

SEQ ID NO: 561428 - DNA, 15 bp, Homo sapiens
tatgttcccagcaga

SEQ ID NO: 561429 - DNA, 15 bp, Homo sapiens
ctatgttcccagcag

SEQ ID NO: 561430 - DNA, 15 bp, Homo sapiens
cctatgttcccagca

SEQ ID NO: 561431 - DNA, 15 bp, Homo sapiens
gcctatgttcccagc

SEQ ID NO: 561432 - DNA, 15 bp, Homo sapiens
agcctatgttcccag

SEQ ID NO: 561433 - DNA, 15 bp, Homo sapiens
cagcctatgttccca

SEQ ID NO: 561434 - DNA, 15 bp, Homo sapiens
tcagcctatgttccc

SEQ ID NO: 561435 - DNA, 15 bp, Homo sapiens
atcagcctatgttcc

SEQ ID NO: 561436 - DNA, 15 bp, Homo sapiens
catcagcctatgttc

SEQ ID NO: 561437 - DNA, 15 bp, Homo sapiens
gcatcagcctatgtt

SEQ ID NO: 561438 - DNA, 15 bp, Homo sapiens
ggcatcagcctatgt

SEQ ID NO: 561439 - DNA, 15 bp, Homo sapiens
gggcatcagcctatg

SEQ ID NO: 561440 - DNA, 15 bp, Homo sapiens
ggggcatcagcctat

SEQ ID NO: 561441 - DNA, 15 bp, Homo sapiens
aggggcatcagccta

SEQ ID NO: 561442 - DNA, 15 bp, Homo sapiens
caggggcatcagcct

SEQ ID NO: 561443 - DNA, 15 bp, Homo sapiens
ccaggggcatcagcc

SEQ ID NO: 561444 - DNA, 15 bp, Homo sapiens
cccaggggcatcagc

SEQ ID NO: 561445 - DNA, 15 bp, Homo sapiens
ccccaggggcatcag

SEQ ID NO: 561446 - DNA, 15 bp, Homo sapiens
cccccaggggcatca

SEQ ID NO: 561447 - DNA, 15 bp, Homo sapiens
acccccaggggcatc

SEQ ID NO: 561448 - DNA, 15 bp, Homo sapiens
aacccccaggggcat

SEQ ID NO: 561449 - DNA, 15 bp, Homo sapiens
gaacccccaggggca

SEQ ID NO: 561450 - DNA, 15 bp, Homo sapiens
agaacccccaggggc

SEQ ID NO: 561451 - DNA, 15 bp, Homo sapiens
cagaacccccagggg

SEQ ID NO: 561452 - DNA, 15 bp, Homo sapiens
gcagaacccccaggg

SEQ ID NO: 561453 - DNA, 15 bp, Homo sapiens
cgcagaacccccagg

SEQ ID NO: 561454 - DNA, 15 bp, Homo sapiens
acgcagaacccccag

SEQ ID NO: 561455 - DNA, 15 bp, Homo sapiens
aacgcagaaccccca

SEQ ID NO: 561456 - DNA, 15 bp, Homo sapiens
aaacgcagaaccccc

SEQ ID NO: 561457 - DNA, 15 bp, Homo sapiens
gaaacgcagaacccc

SEQ ID NO: 561458 - DNA, 15 bp, Homo sapiens
ggaaacgcagaaccc

SEQ ID NO: 561459 - DNA, 15 bp, Homo sapiens
aggaaacgcagaacc

SEQ ID NO: 561460 - DNA, 15 bp, Homo sapiens
aaggaaacgcagaac

SEQ ID NO: 561461 - DNA, 15 bp, Homo sapiens
caaggaaacgcagaa

SEQ ID NO: 561462 - DNA, 15 bp, Homo sapiens
ccaaggaaacgcaga

SEQ ID NO: 561463 - DNA, 15 bp, Homo sapiens
gccaaggaaacgcag

SEQ ID NO: 561464 - DNA, 15 bp, Homo sapiens
ggccaaggaaacgca

SEQ ID NO: 561465 - DNA, 15 bp, Homo sapiens
tggccaaggaaacgc

SEQ ID NO: 561466 - DNA, 15 bp, Homo sapiens
ctggccaaggaaacg

SEQ ID NO: 561467 - DNA, 15 bp, Homo sapiens
cctggccaaggaaac

SEQ ID NO: 561468 - DNA, 15 bp, Homo sapiens
acctggccaaggaaa

SEQ ID NO: 561469 - DNA, 15 bp, Homo sapiens
aacctggccaaggaa

SEQ ID NO: 561470 - DNA, 15 bp, Homo sapiens
gaacctggccaagga

SEQ ID NO: 561471 - DNA, 15 bp, Homo sapiens
ggaacctggccaagg

SEQ ID NO: 561472 - DNA, 15 bp, Homo sapiens
aggaacctggccaag

SEQ ID NO: 561473 - DNA, 15 bp, Homo sapiens
caggaacctggccaa

SEQ ID NO: 561474 - DNA, 15 bp, Homo sapiens
acaggaacctggcca

SEQ ID NO: 561475 - DNA, 15 bp, Homo sapiens
tacaggaacctggcc

SEQ ID NO: 561476 - DNA, 15 bp, Homo sapiens
ctacaggaacctggc

SEQ ID NO: 561477 - DNA, 15 bp, Homo sapiens
cctacaggaacctgg

SEQ ID NO: 561478 - DNA, 15 bp, Homo sapiens
ccctacaggaacctg

SEQ ID NO: 561479 - DNA, 15 bp, Homo sapiens
gccctacaggaacct

SEQ ID NO: 561480 - DNA, 15 bp, Homo sapiens
agccctacaggaacc

SEQ ID NO: 561481 - DNA, 15 bp, Homo sapiens
cagccctacaggaac

SEQ ID NO: 561482 - DNA, 15 bp, Homo sapiens
tcagccctacaggaa

SEQ ID NO: 561483 - DNA, 15 bp, Homo sapiens
ctcagccctacagga

SEQ ID NO: 561484 - DNA, 15 bp, Homo sapiens
cctcagccctacagg

SEQ ID NO: 561485 - DNA, 15 bp, Homo sapiens
acctcagccctacag

SEQ ID NO: 561486 - DNA, 15 bp, Homo sapiens
gacctcagccctaca

SEQ ID NO: 561487 - DNA, 15 bp, Homo sapiens
tgacctcagccctac

SEQ ID NO: 561488 - DNA, 15 bp, Homo sapiens
atgacctcagcccta

SEQ ID NO: 561489 - DNA, 15 bp, Homo sapiens
catgacctcagccct

SEQ ID NO: 561490 - DNA, 15 bp, Homo sapiens
ccatgacctcagccc

SEQ ID NO: 561491 - DNA, 15 bp, Homo sapiens
cccatgacctcagcc

SEQ ID NO: 561492 - DNA, 15 bp, Homo sapiens
ccccatgacctcagc

SEQ ID NO: 561493 - DNA, 15 bp, Homo sapiens
cccccatgacctcag

SEQ ID NO: 561494 - DNA, 15 bp, Homo sapiens
tcccccatgacctca

SEQ ID NO: 561495 - DNA, 15 bp, Homo sapiens
ctcccccatgacctc

SEQ ID NO: 561496 - DNA, 15 bp, Homo sapiens
gctcccccatgacct

SEQ ID NO: 561497 - DNA, 15 bp, Homo sapiens
ggctcccccatgacc

SEQ ID NO: 561498 - DNA, 15 bp, Homo sapiens
cggctcccccatgac

SEQ ID NO: 561499 - DNA, 15 bp, Homo sapiens
acggctcccccatga

SEQ ID NO: 561500 - DNA, 15 bp, Homo sapiens
cacggctcccccatg

SEQ ID NO: 561501 - DNA, 15 bp, Homo sapiens
ccacggctcccccat

SEQ ID NO: 561502 - DNA, 15 bp, Homo sapiens
gccacggctccccca

SEQ ID NO: 561503 - DNA, 15 bp, Homo sapiens
ggccacggctccccc

SEQ ID NO: 561504 - DNA, 15 bp, Homo sapiens
tggccacggctcccc

SEQ ID NO: 561505 - DNA, 15 bp, Homo sapiens
ctggccacggctccc

SEQ ID NO: 561506 - DNA, 15 bp, Homo sapiens
cctggccacggctcc

SEQ ID NO: 561507 - DNA, 15 bp, Homo sapiens
ccctggccacggctc

SEQ ID NO: 561508 - DNA, 15 bp, Homo sapiens
tccctggccacggct

SEQ ID NO: 561509 - DNA, 15 bp, Homo sapiens
atccctggccacggc

SEQ ID NO: 561510 - DNA, 15 bp, Homo sapiens
catccctggccacgg

SEQ ID NO: 561511 - DNA, 15 bp, Homo sapiens
ccatccctggccacg

SEQ ID NO: 561512 - DNA, 15 bp, Homo sapiens
accatccctggccac

SEQ ID NO: 561513 - DNA, 15 bp, Homo sapiens
caccatccctggcca

SEQ ID NO: 561514 - DNA, 15 bp, Homo sapiens
acaccatccctggcc

SEQ ID NO: 561515 - DNA, 15 bp, Homo sapiens
gacaccatccctggc

SEQ ID NO: 561516 - DNA, 15 bp, Homo sapiens
ggacaccatccctgg

SEQ ID NO: 561517 - DNA, 15 bp, Homo sapiens
aggacaccatccctg

SEQ ID NO: 561518 - DNA, 15 bp, Homo sapiens
aaggacaccatccct

SEQ ID NO: 561519 - DNA, 15 bp, Homo sapiens
caaggacaccatccc

SEQ ID NO: 561520 - DNA, 15 bp, Homo sapiens
gcaaggacaccatcc

SEQ ID NO: 561521 - DNA, 15 bp, Homo sapiens
ggcaaggacaccatc

SEQ ID NO: 561522 - DNA, 15 bp, Homo sapiens
tggcaaggacaccat

SEQ ID NO: 561523 - DNA, 15 bp, Homo sapiens
ctggcaaggacacca

SEQ ID NO: 561524 - DNA, 15 bp, Homo sapiens
cctggcaaggacacc

SEQ ID NO: 561525 - DNA, 15 bp, Homo sapiens
ccctggcaaggacac

SEQ ID NO: 561526 - DNA, 15 bp, Homo sapiens
cccctggcaaggaca

SEQ ID NO: 561527 - DNA, 15 bp, Homo sapiens
tcccctggcaaggac

SEQ ID NO: 561528 - DNA, 15 bp, Homo sapiens
ctcccctggcaagga

SEQ ID NO: 561529 - DNA, 15 bp, Homo sapiens
cctcccctggcaagg

SEQ ID NO: 561530 - DNA, 15 bp, Homo sapiens
acctcccctggcaag

SEQ ID NO: 561531 - DNA, 15 bp, Homo sapiens
cacctcccctggcaa

SEQ ID NO: 561532 - DNA, 15 bp, Homo sapiens
tcacctcccctggca

SEQ ID NO: 561533 - DNA, 15 bp, Homo sapiens
gtcacctcccctggc

SEQ ID NO: 561534 - DNA, 15 bp, Homo sapiens
cgtcacctcccctgg

SEQ ID NO: 561535 - DNA, 15 bp, Homo sapiens
ccgtcacctcccctg

SEQ ID NO: 561536 - DNA, 15 bp, Homo sapiens
cccgtcacctcccct

SEQ ID NO: 561537 - DNA, 15 bp, Homo sapiens
gcccgtcacctcccc

SEQ ID NO: 561538 - DNA, 15 bp, Homo sapiens
tgcccgtcacctccc

SEQ ID NO: 561539 - DNA, 15 bp, Homo sapiens
ctgcccgtcacctcc

SEQ ID NO: 561540 - DNA, 15 bp, Homo sapiens
tctgcccgtcacctc

SEQ ID NO: 561541 - DNA, 15 bp, Homo sapiens
ctctgcccgtcacct

SEQ ID NO: 561542 - DNA, 15 bp, Homo sapiens
gctctgcccgtcacc

SEQ ID NO: 561543 - DNA, 15 bp, Homo sapiens
agctctgcccgtcac

SEQ ID NO: 561544 - DNA, 15 bp, Homo sapiens
cagctctgcccgtca

SEQ ID NO: 561545 - DNA, 15 bp, Homo sapiens
gcagctctgcccgtc

SEQ ID NO: 561546 - DNA, 15 bp, Homo sapiens
tgcagctctgcccgt

SEQ ID NO: 561547 - DNA, 15 bp, Homo sapiens
ctgcagctctgcccg

SEQ ID NO: 561548 - DNA, 15 bp, Homo sapiens
cctgcagctctgccc

SEQ ID NO: 561549 - DNA, 15 bp, Homo sapiens
gcctgcagctctgcc

SEQ ID NO: 561550 - DNA, 15 bp, Homo sapiens
ggcctgcagctctgc

SEQ ID NO: 561551 - DNA, 15 bp, Homo sapiens
gggcctgcagctctg

SEQ ID NO: 561552 - DNA, 15 bp, Homo sapiens
agggcctgcagctct

SEQ ID NO: 561553 - DNA, 15 bp, Homo sapiens
tagggcctgcagctc

SEQ ID NO: 561554 - DNA, 15 bp, Homo sapiens
gtagggcctgcagct

SEQ ID NO: 561555 - DNA, 15 bp, Homo sapiens
tgtagggcctgcagc

SEQ ID NO: 561556 - DNA, 15 bp, Homo sapiens
ttgtagggcctgcag

SEQ ID NO: 561557 - DNA, 15 bp, Homo sapiens
gttgtagggcctgca

SEQ ID NO: 561558 - DNA, 15 bp, Homo sapiens
agttgtagggcctgc

SEQ ID NO: 561559 - DNA, 15 bp, Homo sapiens
aagttgtagggcctg

SEQ ID NO: 561560 - DNA, 15 bp, Homo sapiens
caagttgtagggcct

SEQ ID NO: 561561 - DNA, 15 bp, Homo sapiens
ccaagttgtagggcc

SEQ ID NO: 561562 - DNA, 15 bp, Homo sapiens
cccaagttgtagggc

SEQ ID NO: 561563 - DNA, 15 bp, Homo sapiens
ccccaagttgtaggg

SEQ ID NO: 561564 - DNA, 15 bp, Homo sapiens
accccaagttgtagg

SEQ ID NO: 561565 - DNA, 15 bp, Homo sapiens
aaccccaagttgtag

SEQ ID NO: 561566 - DNA, 15 bp, Homo sapiens
caaccccaagttgta

SEQ ID NO: 561567 - DNA, 15 bp, Homo sapiens
ccaaccccaagttgt

SEQ ID NO: 561568 - DNA, 15 bp, Homo sapiens
cccaaccccaagttg

SEQ ID NO: 561569 - DNA, 15 bp, Homo sapiens
gcccaaccccaagtt

SEQ ID NO: 561570 - DNA, 15 bp, Homo sapiens
tgcccaaccccaagt

SEQ ID NO: 561571 - DNA, 15 bp, Homo sapiens
ctgcccaaccccaag

SEQ ID NO: 561572 - DNA, 15 bp, Homo sapiens
cctgcccaaccccaa

SEQ ID NO: 561573 - DNA, 15 bp, Homo sapiens
ccctgcccaacccca

SEQ ID NO: 561574 - DNA, 15 bp, Homo sapiens
tccctgcccaacccc

SEQ ID NO: 561575 - DNA, 15 bp, Homo sapiens
atccctgcccaaccc

SEQ ID NO: 561576 - DNA, 15 bp, Homo sapiens
catccctgcccaacc

SEQ ID NO: 561577 - DNA, 15 bp, Homo sapiens
tcatccctgcccaac

SEQ ID NO: 561578 - DNA, 15 bp, Homo sapiens
ctcatccctgcccaa

SEQ ID NO: 561579 - DNA, 15 bp, Homo sapiens
actcatccctgccca

SEQ ID NO: 561580 - DNA, 15 bp, Homo sapiens
gactcatccctgccc

SEQ ID NO: 561581 - DNA, 15 bp, Homo sapiens
cgactcatccctgcc

SEQ ID NO: 561582 - DNA, 15 bp, Homo sapiens
gcgactcatccctgc

SEQ ID NO: 561583 - DNA, 15 bp, Homo sapiens
agcgactcatccctg

SEQ ID NO: 561584 - DNA, 15 bp, Homo sapiens
gagcgactcatccct

SEQ ID NO: 561585 - DNA, 15 bp, Homo sapiens
agagcgactcatccc

SEQ ID NO: 561586 - DNA, 15 bp, Homo sapiens
tagagcgactcatcc

SEQ ID NO: 561587 - DNA, 15 bp, Homo sapiens
gtagagcgactcatc

SEQ ID NO: 561588 - DNA, 15 bp, Homo sapiens
ggtagagcgactcat

SEQ ID NO: 561589 - DNA, 15 bp, Homo sapiens
cggtagagcgactca

SEQ ID NO: 561590 - DNA, 15 bp, Homo sapiens
acggtagagcgactc

SEQ ID NO: 561591 - DNA, 15 bp, Homo sapiens
cacggtagagcgact

SEQ ID NO: 561592 - DNA, 15 bp, Homo sapiens
ccacggtagagcgac

SEQ ID NO: 561593 - DNA, 15 bp, Homo sapiens
accacggtagagcga

SEQ ID NO: 561594 - DNA, 15 bp, Homo sapiens
caccacggtagagcg

SEQ ID NO: 561595 - DNA, 15 bp, Homo sapiens
gcaccacggtagagc

SEQ ID NO: 561596 - DNA, 15 bp, Homo sapiens
ggcaccacggtagag

SEQ ID NO: 561597 - DNA, 15 bp, Homo sapiens
aggcaccacggtaga

SEQ ID NO: 561598 - DNA, 15 bp, Homo sapiens
gaggcaccacggtag

SEQ ID NO: 561599 - DNA, 15 bp, Homo sapiens
agaggcaccacggta

SEQ ID NO: 561600 - DNA, 15 bp, Homo sapiens
cagaggcaccacggt

SEQ ID NO: 561601 - DNA, 15 bp, Homo sapiens
tcagaggcaccacgg

SEQ ID NO: 561602 - DNA, 15 bp, Homo sapiens
atcagaggcaccacg

SEQ ID NO: 561603 - DNA, 15 bp, Homo sapiens
tatcagaggcaccac

SEQ ID NO: 561604 - DNA, 15 bp, Homo sapiens
ttatcagaggcacca

SEQ ID NO: 561605 - DNA, 15 bp, Homo sapiens
attatcagaggcacc

SEQ ID NO: 561606 - DNA, 15 bp, Homo sapiens
tattatcagaggcac

SEQ ID NO: 561607 - DNA, 15 bp, Homo sapiens
ctattatcagaggca

SEQ ID NO: 561608 - DNA, 15 bp, Homo sapiens
gctattatcagaggc

SEQ ID NO: 561609 - DNA, 15 bp, Homo sapiens
agctattatcagagg

SEQ ID NO: 561610 - DNA, 15 bp, Homo sapiens
cagctattatcagag

SEQ ID NO: 561611 - DNA, 15 bp, Homo sapiens
acagctattatcaga

SEQ ID NO: 561612 - DNA, 15 bp, Homo sapiens
aacagctattatcag

SEQ ID NO: 561613 - DNA, 15 bp, Homo sapiens
taacagctattatca

SEQ ID NO: 561614 - DNA, 15 bp, Homo sapiens
ataacagctattatc

SEQ ID NO: 561615 - DNA, 15 bp, Homo sapiens
aataacagctattat

SEQ ID NO: 561616 - DNA, 15 bp, Homo sapiens
aaataacagctatta

SEQ ID NO: 561617 - DNA, 15 bp, Homo sapiens
aaaataacagctatt

SEQ ID NO: 561618 - DNA, 15 bp, Homo sapiens
taaaataacagctat

SEQ ID NO: 561619 - DNA, 15 bp, Homo sapiens
ctaaaataacagcta

SEQ ID NO: 561620 - DNA, 15 bp, Homo sapiens
actaaaataacagct

SEQ ID NO: 561621 - DNA, 15 bp, Homo sapiens
aactaaaataacagc

SEQ ID NO: 561622 - DNA, 15 bp, Homo sapiens
aaactaaaataacag

SEQ ID NO: 561623 - DNA, 15 bp, Homo sapiens
gaaactaaaataaca

SEQ ID NO: 561624 - DNA, 15 bp, Homo sapiens
agaaactaaaataac

SEQ ID NO: 561625 - DNA, 15 bp, Homo sapiens
cagaaactaaaataa

SEQ ID NO: 561626 - DNA, 15 bp, Homo sapiens
tcagaaactaaaata

SEQ ID NO: 561627 - DNA, 15 bp, Homo sapiens
ttcagaaactaaaat

SEQ ID NO: 561628 - DNA, 15 bp, Homo sapiens
tttcagaaactaaaa

SEQ ID NO: 561629 - DNA, 15 bp, Homo sapiens
ttttcagaaactaaa

SEQ ID NO: 561630 - DNA, 15 bp, Homo sapiens
tttttcagaaactaa

SEQ ID NO: 561631 - DNA, 15 bp, Homo sapiens
atttttcagaaacta

SEQ ID NO: 561632 - DNA, 15 bp, Homo sapiens
catttttcagaaact

SEQ ID NO: 561633 - DNA, 15 bp, Homo sapiens
acatttttcagaaac

SEQ ID NO: 561634 - DNA, 15 bp, Homo sapiens
cacatttttcagaaa

SEQ ID NO: 561635 - DNA, 15 bp, Homo sapiens
gcacatttttcagaa

SEQ ID NO: 561636 - DNA, 15 bp, Homo sapiens
agcacatttttcaga

SEQ ID NO: 561637 - DNA, 15 bp, Homo sapiens
cagcacatttttcag

SEQ ID NO: 561638 - DNA, 15 bp, Homo sapiens
gcagcacatttttca

SEQ ID NO: 561639 - DNA, 15 bp, Homo sapiens
ggcagcacatttttc

SEQ ID NO: 561640 - DNA, 15 bp, Homo sapiens
gggcagcacattttt

SEQ ID NO: 561641 - DNA, 15 bp, Homo sapiens
agggcagcacatttt

SEQ ID NO: 561642 - DNA, 15 bp, Homo sapiens
gagggcagcacattt

SEQ ID NO: 561643 - DNA, 15 bp, Homo sapiens
tgagggcagcacatt

SEQ ID NO: 561644 - DNA, 15 bp, Homo sapiens
ttgagggcagcacat

SEQ ID NO: 561645 - DNA, 15 bp, Homo sapiens
cttgagggcagcaca

SEQ ID NO: 561646 - DNA, 15 bp, Homo sapiens
tcttgagggcagcac

SEQ ID NO: 561647 - DNA, 15 bp, Homo sapiens
ctcttgagggcagca

SEQ ID NO: 561648 - DNA, 15 bp, Homo sapiens
gctcttgagggcagc

SEQ ID NO: 561649 - DNA, 15 bp, Homo sapiens
agctcttgagggcag

SEQ ID NO: 561650 - DNA, 15 bp, Homo sapiens
aagctcttgagggca

SEQ ID NO: 561651 - DNA, 15 bp, Homo sapiens
gaagctcttgagggc

SEQ ID NO: 561652 - DNA, 15 bp, Homo sapiens
agaagctcttgaggg

SEQ ID NO: 561653 - DNA, 15 bp, Homo sapiens
cagaagctcttgagg

SEQ ID NO: 561654 - DNA, 15 bp, Homo sapiens
tcagaagctcttgag

SEQ ID NO: 561655 - DNA, 15 bp, Homo sapiens
ctcagaagctcttga

SEQ ID NO: 561656 - DNA, 15 bp, Homo sapiens
cctcagaagctcttg

SEQ ID NO: 561657 - DNA, 15 bp, Homo sapiens
gcctcagaagctctt

SEQ ID NO: 561658 - DNA, 15 bp, Homo sapiens
agcctcagaagctct

SEQ ID NO: 561659 - DNA, 15 bp, Homo sapiens
tagcctcagaagctc

SEQ ID NO: 561660 - DNA, 15 bp, Homo sapiens
ctagcctcagaagct

SEQ ID NO: 561661 - DNA, 15 bp, Homo sapiens
cctagcctcagaagc

SEQ ID NO: 561662 - DNA, 15 bp, Homo sapiens
gcctagcctcagaag

SEQ ID NO: 561663 - DNA, 15 bp, Homo sapiens
ggcctagcctcagaa

SEQ ID NO: 561664 - DNA, 15 bp, Homo sapiens
aggcctagcctcaga

SEQ ID NO: 561665 - DNA, 15 bp, Homo sapiens
taggcctagcctcag

SEQ ID NO: 561666 - DNA, 15 bp, Homo sapiens
gtaggcctagcctca

SEQ ID NO: 561667 - DNA, 15 bp, Homo sapiens
agtaggcctagcctc

SEQ ID NO: 561668 - DNA, 15 bp, Homo sapiens
aagtaggcctagcct

SEQ ID NO: 561669 - DNA, 15 bp, Homo sapiens
caagtaggcctagcc

SEQ ID NO: 561670 - DNA, 15 bp, Homo sapiens
ccaagtaggcctagc

SEQ ID NO: 561671 - DNA, 15 bp, Homo sapiens
cccaagtaggcctag

SEQ ID NO: 561672 - DNA, 15 bp, Homo sapiens
acccaagtaggccta

SEQ ID NO: 561673 - DNA, 15 bp, Homo sapiens
cacccaagtaggcct

SEQ ID NO: 561674 - DNA, 15 bp, Homo sapiens
tcacccaagtaggcc

SEQ ID NO: 561675 - DNA, 15 bp, Homo sapiens
ttcacccaagtaggc

SEQ ID NO: 561676 - DNA, 15 bp, Homo sapiens
tttcacccaagtagg

SEQ ID NO: 561677 - DNA, 15 bp, Homo sapiens
ttttcacccaagtag

SEQ ID NO: 561678 - DNA, 15 bp, Homo sapiens
attttcacccaagta

SEQ ID NO: 561679 - DNA, 15 bp, Homo sapiens
tattttcacccaagt

SEQ ID NO: 561680 - DNA, 15 bp, Homo sapiens
ctattttcacccaag

SEQ ID NO: 561681 - DNA, 15 bp, Homo sapiens
gctattttcacccaa

SEQ ID NO: 561682 - DNA, 15 bp, Homo sapiens
agctattttcaccca

SEQ ID NO: 561683 - DNA, 15 bp, Homo sapiens
aagctattttcaccc

SEQ ID NO: 561684 - DNA, 15 bp, Homo sapiens
aaagctattttcacc

SEQ ID NO: 561685 - DNA, 15 bp, Homo sapiens
gaaagctattttcac

SEQ ID NO: 561686 - DNA, 15 bp, Homo sapiens
ggaaagctattttca

SEQ ID NO: 561687 - DNA, 15 bp, Homo sapiens
tggaaagctattttc

SEQ ID NO: 561688 - DNA, 15 bp, Homo sapiens
ctggaaagctatttt

SEQ ID NO: 561689 - DNA, 15 bp, Homo sapiens
cctggaaagctattt

SEQ ID NO: 561690 - DNA, 15 bp, Homo sapiens
ccctggaaagctatt

SEQ ID NO: 561691 - DNA, 15 bp, Homo sapiens
tccctggaaagctat

SEQ ID NO: 561692 - DNA, 15 bp, Homo sapiens
ctccctggaaagcta

SEQ ID NO: 561693 - DNA, 15 bp, Homo sapiens
gctccctggaaagct

SEQ ID NO: 561694 - DNA, 15 bp, Homo sapiens
ggctccctggaaagc

SEQ ID NO: 561695 - DNA, 15 bp, Homo sapiens
tggctccctggaaag

SEQ ID NO: 561696 - DNA, 15 bp, Homo sapiens
gtggctccctggaaa

SEQ ID NO: 561697 - DNA, 15 bp, Homo sapiens
tgtggctccctggaa

SEQ ID NO: 561698 - DNA, 15 bp, Homo sapiens
atgtggctccctgga

SEQ ID NO: 561699 - DNA, 15 bp, Homo sapiens
aatgtggctccctgg

SEQ ID NO: 561700 - DNA, 15 bp, Homo sapiens
caatgtggctccctg

SEQ ID NO: 561701 - DNA, 15 bp, Homo sapiens
acaatgtggctccct

SEQ ID NO: 561702 - DNA, 15 bp, Homo sapiens
cacaatgtggctccc

SEQ ID NO: 561703 - DNA, 15 bp, Homo sapiens
ccacaatgtggctcc

SEQ ID NO: 561704 - DNA, 15 bp, Homo sapiens
cccacaatgtggctc

SEQ ID NO: 561705 - DNA, 15 bp, Homo sapiens
ccccacaatgtggct

SEQ ID NO: 561706 - DNA, 15 bp, Homo sapiens
tccccacaatgtggc

SEQ ID NO: 561707 - DNA, 15 bp, Homo sapiens
gtccccacaatgtgg

SEQ ID NO: 561708 - DNA, 15 bp, Homo sapiens
cgtccccacaatgtg

SEQ ID NO: 561709 - DNA, 15 bp, Homo sapiens
acgtccccacaatgt

SEQ ID NO: 561710 - DNA, 15 bp, Homo sapiens
cacgtccccacaatg

SEQ ID NO: 561711 - DNA, 15 bp, Homo sapiens
tcacgtccccacaat

SEQ ID NO: 561712 - DNA, 15 bp, Homo sapiens
ctcacgtccccacaa

SEQ ID NO: 561713 - DNA, 15 bp, Homo sapiens
cctcacgtccccaca

SEQ ID NO: 561714 - DNA, 15 bp, Homo sapiens
gcctcacgtccccac

SEQ ID NO: 561715 - DNA, 15 bp, Homo sapiens
tgcctcacgtcccca

SEQ ID NO: 561716 - DNA, 15 bp, Homo sapiens
ctgcctcacgtcccc

SEQ ID NO: 561717 - DNA, 15 bp, Homo sapiens
gctgcctcacgtccc

SEQ ID NO: 561718 - DNA, 15 bp, Homo sapiens
tgctgcctcacgtcc

SEQ ID NO: 561719 - DNA, 15 bp, Homo sapiens
ctgctgcctcacgtc

SEQ ID NO: 561720 - DNA, 15 bp, Homo sapiens
gctgctgcctcacgt

SEQ ID NO: 561721 - DNA, 15 bp, Homo sapiens
ggctgctgcctcacg

SEQ ID NO: 561722 - DNA, 15 bp, Homo sapiens
gggctgctgcctcac

SEQ ID NO: 561723 - DNA, 15 bp, Homo sapiens
ggggctgctgcctca

SEQ ID NO: 561724 - DNA, 15 bp, Homo sapiens
tggggctgctgcctc

SEQ ID NO: 561725 - DNA, 15 bp, Homo sapiens
gtggggctgctgcct

SEQ ID NO: 561726 - DNA, 15 bp, Homo sapiens
agtggggctgctgcc

SEQ ID NO: 561727 - DNA, 15 bp, Homo sapiens
gagtggggctgctgc

SEQ ID NO: 561728 - DNA, 15 bp, Homo sapiens
agagtggggctgctg

SEQ ID NO: 561729 - DNA, 15 bp, Homo sapiens
aagagtggggctgct

SEQ ID NO: 561730 - DNA, 15 bp, Homo sapiens
aaagagtggggctgc

SEQ ID NO: 561731 - DNA, 15 bp, Homo sapiens
caaagagtggggctg

SEQ ID NO: 561732 - DNA, 15 bp, Homo sapiens
ccaaagagtggggct

SEQ ID NO: 561733 - DNA, 15 bp, Homo sapiens
cccaaagagtggggc

SEQ ID NO: 561734 - DNA, 15 bp, Homo sapiens
ccccaaagagtgggg

SEQ ID NO: 561735 - DNA, 15 bp, Homo sapiens
gccccaaagagtggg

SEQ ID NO: 561736 - DNA, 15 bp, Homo sapiens
ggccccaaagagtgg

SEQ ID NO: 561737 - DNA, 15 bp, Homo sapiens
tggccccaaagagtg

SEQ ID NO: 561738 - DNA, 15 bp, Homo sapiens
gtggccccaaagagt

SEQ ID NO: 561739 - DNA, 15 bp, Homo sapiens
agtggccccaaagag

SEQ ID NO: 561740 - DNA, 15 bp, Homo sapiens
aagtggccccaaaga

SEQ ID NO: 561741 - DNA, 15 bp, Homo sapiens
caagtggccccaaag

SEQ ID NO: 561742 - DNA, 15 bp, Homo sapiens
ccaagtggccccaaa

SEQ ID NO: 561743 - DNA, 15 bp, Homo sapiens
gccaagtggccccaa

SEQ ID NO: 561744 - DNA, 15 bp, Homo sapiens
agccaagtggcccca

SEQ ID NO: 561745 - DNA, 15 bp, Homo sapiens
cagccaagtggcccc

SEQ ID NO: 561746 - DNA, 15 bp, Homo sapiens
acagccaagtggccc

SEQ ID NO: 561747 - DNA, 15 bp, Homo sapiens
gacagccaagtggcc

SEQ ID NO: 561748 - DNA, 15 bp, Homo sapiens
agacagccaagtggc

SEQ ID NO: 561749 - DNA, 15 bp, Homo sapiens
gagacagccaagtgg

SEQ ID NO: 561750 - DNA, 15 bp, Homo sapiens
agagacagccaagtg

SEQ ID NO: 561751 - DNA, 15 bp, Homo sapiens
tagagacagccaagt

SEQ ID NO: 561752 - DNA, 15 bp, Homo sapiens
ttagagacagccaag

SEQ ID NO: 561753 - DNA, 15 bp, Homo sapiens
gttagagacagccaa

SEQ ID NO: 561754 - DNA, 15 bp, Homo sapiens
agttagagacagcca

SEQ ID NO: 561755 - DNA, 15 bp, Homo sapiens
gagttagagacagcc

SEQ ID NO: 561756 - DNA, 15 bp, Homo sapiens
tgagttagagacagc

SEQ ID NO: 561757 - DNA, 15 bp, Homo sapiens
atgagttagagacag

SEQ ID NO: 561758 - DNA, 15 bp, Homo sapiens
gatgagttagagaca

SEQ ID NO: 561759 - DNA, 15 bp, Homo sapiens
agatgagttagagac

SEQ ID NO: 561760 - DNA, 15 bp, Homo sapiens
gagatgagttagaga

SEQ ID NO: 561761 - DNA, 15 bp, Homo sapiens
tgagatgagttagag

SEQ ID NO: 561762 - DNA, 15 bp, Homo sapiens
gtgagatgagttaga

SEQ ID NO: 561763 - DNA, 15 bp, Homo sapiens
agtgagatgagttag

SEQ ID NO: 561764 - DNA, 15 bp, Homo sapiens
aagtgagatgagtta

SEQ ID NO: 561765 - DNA, 15 bp, Homo sapiens
caagtgagatgagtt

SEQ ID NO: 561766 - DNA, 15 bp, Homo sapiens
gcaagtgagatgagt

SEQ ID NO: 561767 - DNA, 15 bp, Homo sapiens
ggcaagtgagatgag

SEQ ID NO: 561768 - DNA, 15 bp, Homo sapiens
tggcaagtgagatga

SEQ ID NO: 561769 - DNA, 15 bp, Homo sapiens
ctggcaagtgagatg

SEQ ID NO: 561770 - DNA, 15 bp, Homo sapiens
cctggcaagtgagat

SEQ ID NO: 561771 - DNA, 15 bp, Homo sapiens
ccctggcaagtgaga

SEQ ID NO: 561772 - DNA, 15 bp, Homo sapiens
gccctggcaagtgag

SEQ ID NO: 561773 - DNA, 15 bp, Homo sapiens
agccctggcaagtga

SEQ ID NO: 561774 - DNA, 15 bp, Homo sapiens
cagccctggcaagtg

SEQ ID NO: 561775 - DNA, 15 bp, Homo sapiens
ccagccctggcaagt

SEQ ID NO: 561776 - DNA, 15 bp, Homo sapiens
tccagccctggcaag

SEQ ID NO: 561777 - DNA, 15 bp, Homo sapiens
gtccagccctggcaa

SEQ ID NO: 561778 - DNA, 15 bp, Homo sapiens
tgtccagccctggca

SEQ ID NO: 561779 - DNA, 15 bp, Homo sapiens
ttgtccagccctggc

SEQ ID NO: 561780 - DNA, 15 bp, Homo sapiens
cttgtccagccctgg

SEQ ID NO: 561781 - DNA, 15 bp, Homo sapiens
ccttgtccagccctg

SEQ ID NO: 561782 - DNA, 15 bp, Homo sapiens
tccttgtccagccct

SEQ ID NO: 561783 - DNA, 15 bp, Homo sapiens
ctccttgtccagccc

SEQ ID NO: 561784 - DNA, 15 bp, Homo sapiens
tctccttgtccagcc

SEQ ID NO: 561785 - DNA, 15 bp, Homo sapiens
atctccttgtccagc

SEQ ID NO: 561786 - DNA, 15 bp, Homo sapiens
catctccttgtccag

SEQ ID NO: 561787 - DNA, 15 bp, Homo sapiens
tcatctccttgtcca

SEQ ID NO: 561788 - DNA, 15 bp, Homo sapiens
ttcatctccttgtcc

SEQ ID NO: 561789 - DNA, 15 bp, Homo sapiens
tttcatctccttgtc

SEQ ID NO: 561790 - DNA, 15 bp, Homo sapiens
ttttcatctccttgt

SEQ ID NO: 561791 - DNA, 15 bp, Homo sapiens
tttttcatctccttg

SEQ ID NO: 561792 - DNA, 15 bp, Homo sapiens
ctttttcatctcctt

SEQ ID NO: 561793 - DNA, 15 bp, Homo sapiens
tctttttcatctcct

SEQ ID NO: 561794 - DNA, 15 bp, Homo sapiens
ttctttttcatctcc

SEQ ID NO: 561795 - DNA, 15 bp, Homo sapiens
tttctttttcatctc

SEQ ID NO: 561796 - DNA, 15 bp, Homo sapiens
ttttctttttcatct

SEQ ID NO: 561797 - DNA, 15 bp, Homo sapiens
attttctttttcatc

SEQ ID NO: 561798 - DNA, 15 bp, Homo sapiens
cattttctttttcat

SEQ ID NO: 561799 - DNA, 15 bp, Homo sapiens
gcattttctttttca

SEQ ID NO: 561800 - DNA, 15 bp, Homo sapiens
ggcattttctttttc

SEQ ID NO: 561801 - DNA, 15 bp, Homo sapiens
tggcattttcttttt

SEQ ID NO: 561802 - DNA, 15 bp, Homo sapiens
ttggcattttctttt

SEQ ID NO: 561803 - DNA, 15 bp, Homo sapiens
cttggcattttcttt

SEQ ID NO: 561804 - DNA, 15 bp, Homo sapiens
ccttggcattttctt

SEQ ID NO: 561805 - DNA, 15 bp, Homo sapiens
cccttggcattttct

SEQ ID NO: 561806 - DNA, 15 bp, Homo sapiens
ccccttggcattttc

SEQ ID NO: 561807 - DNA, 15 bp, Homo sapiens
accccttggcatttt

SEQ ID NO: 561808 - DNA, 15 bp, Homo sapiens
caccccttggcattt

SEQ ID NO: 561809 - DNA, 15 bp, Homo sapiens
ccaccccttggcatt

SEQ ID NO: 561810 - DNA, 15 bp, Homo sapiens
cccaccccttggcat

SEQ ID NO: 561811 - DNA, 15 bp, Homo sapiens
gcccaccccttggca

SEQ ID NO: 561812 - DNA, 15 bp, Homo sapiens
tgcccaccccttggc

SEQ ID NO: 561813 - DNA, 15 bp, Homo sapiens
ctgcccaccccttgg

SEQ ID NO: 561814 - DNA, 15 bp, Homo sapiens
cctgcccaccccttg

SEQ ID NO: 561815 - DNA, 15 bp, Homo sapiens
gcctgcccacccctt

SEQ ID NO: 561816 - DNA, 15 bp, Homo sapiens
tgcctgcccacccct

SEQ ID NO: 561817 - DNA, 15 bp, Homo sapiens
ctgcctgcccacccc

SEQ ID NO: 561818 - DNA, 15 bp, Homo sapiens
cctgcctgcccaccc

SEQ ID NO: 561819 - DNA, 15 bp, Homo sapiens
tcctgcctgcccacc

SEQ ID NO: 561820 - DNA, 15 bp, Homo sapiens
ctcctgcctgcccac

SEQ ID NO: 561821 - DNA, 15 bp, Homo sapiens
gctcctgcctgccca

SEQ ID NO: 561822 - DNA, 15 bp, Homo sapiens
ggctcctgcctgccc

SEQ ID NO: 561823 - DNA, 15 bp, Homo sapiens
aggctcctgcctgcc

SEQ ID NO: 561824 - DNA, 15 bp, Homo sapiens
caggctcctgcctgc

SEQ ID NO: 561825 - DNA, 15 bp, Homo sapiens
acaggctcctgcctg

SEQ ID NO: 561826 - DNA, 15 bp, Homo sapiens
aacaggctcctgcct

SEQ ID NO: 561827 - DNA, 15 bp, Homo sapiens
caacaggctcctgcc

SEQ ID NO: 561828 - DNA, 15 bp, Homo sapiens
ccaacaggctcctgc

SEQ ID NO: 561829 - DNA, 15 bp, Homo sapiens
gccaacaggctcctg

SEQ ID NO: 561830 - DNA, 15 bp, Homo sapiens
cgccaacaggctcct

SEQ ID NO: 561831 - DNA, 15 bp, Homo sapiens
acgccaacaggctcc

SEQ ID NO: 561832 - DNA, 15 bp, Homo sapiens
aacgccaacaggctc

SEQ ID NO: 561833 - DNA, 15 bp, Homo sapiens
caacgccaacaggct

SEQ ID NO: 561834 - DNA, 15 bp, Homo sapiens
ccaacgccaacaggc

SEQ ID NO: 561835 - DNA, 15 bp, Homo sapiens
gccaacgccaacagg

SEQ ID NO: 561836 - DNA, 15 bp, Homo sapiens
tgccaacgccaacag

SEQ ID NO: 561837 - DNA, 15 bp, Homo sapiens
ctgccaacgccaaca

SEQ ID NO: 561838 - DNA, 15 bp, Homo sapiens
cctgccaacgccaac

SEQ ID NO: 561839 - DNA, 15 bp, Homo sapiens
gcctgccaacgccaa

SEQ ID NO: 561840 - DNA, 15 bp, Homo sapiens
cgcctgccaacgcca

SEQ ID NO: 561841 - DNA, 15 bp, Homo sapiens
gcgcctgccaacgcc

SEQ ID NO: 561842 - DNA, 15 bp, Homo sapiens
agcgcctgccaacgc

SEQ ID NO: 561843 - DNA, 15 bp, Homo sapiens
cagcgcctgccaacg

SEQ ID NO: 561844 - DNA, 15 bp, Homo sapiens
gcagcgcctgccaac

SEQ ID NO: 561845 - DNA, 15 bp, Homo sapiens
ggcagcgcctgccaa

SEQ ID NO: 561846 - DNA, 15 bp, Homo sapiens
tggcagcgcctgcca

SEQ ID NO: 561847 - DNA, 15 bp, Homo sapiens
ctggcagcgcctgcc

SEQ ID NO: 561848 - DNA, 15 bp, Homo sapiens
gctggcagcgcctgc

SEQ ID NO: 561849 - DNA, 15 bp, Homo sapiens
ggctggcagcgcctg

SEQ ID NO: 561850 - DNA, 15 bp, Homo sapiens
gggctggcagcgcct

SEQ ID NO: 561851 - DNA, 15 bp, Homo sapiens
agggctggcagcgcc

SEQ ID NO: 561852 - DNA, 15 bp, Homo sapiens
cagggctggcagcgc

SEQ ID NO: 561853 - DNA, 15 bp, Homo sapiens
acagggctggcagcg

SEQ ID NO: 561854 - DNA, 15 bp, Homo sapiens
cacagggctggcagc

SEQ ID NO: 561855 - DNA, 15 bp, Homo sapiens
acacagggctggcag

SEQ ID NO: 561856 - DNA, 15 bp, Homo sapiens
gacacagggctggca

SEQ ID NO: 561857 - DNA, 15 bp, Homo sapiens
ggacacagggctggc

SEQ ID NO: 561858 - DNA, 15 bp, Homo sapiens
gggacacagggctgg

SEQ ID NO: 561859 - DNA, 15 bp, Homo sapiens
tgggacacagggctg

SEQ ID NO: 561860 - DNA, 15 bp, Homo sapiens
ctgggacacagggct

SEQ ID NO: 561861 - DNA, 15 bp, Homo sapiens
actgggacacagggc

SEQ ID NO: 561862 - DNA, 15 bp, Homo sapiens
gactgggacacaggg

SEQ ID NO: 561863 - DNA, 15 bp, Homo sapiens
tgactgggacacagg

SEQ ID NO: 561864 - DNA, 15 bp, Homo sapiens
ttgactgggacacag

SEQ ID NO: 561865 - DNA, 15 bp, Homo sapiens
cttgactgggacaca

SEQ ID NO: 561866 - DNA, 15 bp, Homo sapiens
gcttgactgggacac

SEQ ID NO: 561867 - DNA, 15 bp, Homo sapiens
agcttgactgggaca

SEQ ID NO: 561868 - DNA, 15 bp, Homo sapiens
gagcttgactgggac

SEQ ID NO: 561869 - DNA, 15 bp, Homo sapiens
agagcttgactggga

SEQ ID NO: 561870 - DNA, 15 bp, Homo sapiens
cagagcttgactggg

SEQ ID NO: 561871 - DNA, 15 bp, Homo sapiens
ccagagcttgactgg

SEQ ID NO: 561872 - DNA, 15 bp, Homo sapiens
cccagagcttgactg

SEQ ID NO: 561873 - DNA, 15 bp, Homo sapiens
ccccagagcttgact

SEQ ID NO: 561874 - DNA, 15 bp, Homo sapiens
gccccagagcttgac

SEQ ID NO: 561875 - DNA, 15 bp, Homo sapiens
cgccccagagcttga

SEQ ID NO: 561876 - DNA, 15 bp, Homo sapiens
gcgccccagagcttg

SEQ ID NO: 561877 - DNA, 15 bp, Homo sapiens
ggcgccccagagctt

SEQ ID NO: 561878 - DNA, 15 bp, Homo sapiens
gggcgccccagagct

SEQ ID NO: 561879 - DNA, 15 bp, Homo sapiens
agggcgccccagagc

SEQ ID NO: 561880 - DNA, 15 bp, Homo sapiens
aagggcgccccagag

SEQ ID NO: 561881 - DNA, 15 bp, Homo sapiens
gaagggcgccccaga

SEQ ID NO: 561882 - DNA, 15 bp, Homo sapiens
ggaagggcgccccag

SEQ ID NO: 561883 - DNA, 15 bp, Homo sapiens
aggaagggcgcccca

SEQ ID NO: 561884 - DNA, 15 bp, Homo sapiens
caggaagggcgcccc

SEQ ID NO: 561885 - DNA, 15 bp, Homo sapiens
acaggaagggcgccc

SEQ ID NO: 561886 - DNA, 15 bp, Homo sapiens
gacaggaagggcgcc

SEQ ID NO: 561887 - DNA, 15 bp, Homo sapiens
ggacaggaagggcgc

SEQ ID NO: 561888 - DNA, 15 bp, Homo sapiens
tggacaggaagggcg

SEQ ID NO: 561889 - DNA, 15 bp, Homo sapiens
atggacaggaagggc

SEQ ID NO: 561890 - DNA, 15 bp, Homo sapiens
gatggacaggaaggg

SEQ ID NO: 561891 - DNA, 15 bp, Homo sapiens
agatggacaggaagg

SEQ ID NO: 561892 - DNA, 15 bp, Homo sapiens
cagatggacaggaag

SEQ ID NO: 561893 - DNA, 15 bp, Homo sapiens
ccagatggacaggaa

SEQ ID NO: 561894 - DNA, 15 bp, Homo sapiens
cccagatggacagga

SEQ ID NO: 561895 - DNA, 15 bp, Homo sapiens
tcccagatggacagg

SEQ ID NO: 561896 - DNA, 15 bp, Homo sapiens
ctcccagatggacag

SEQ ID NO: 561897 - DNA, 15 bp, Homo sapiens
actcccagatggaca

SEQ ID NO: 561898 - DNA, 15 bp, Homo sapiens
tactcccagatggac

SEQ ID NO: 561899 - DNA, 15 bp, Homo sapiens
ctactcccagatgga

SEQ ID NO: 561900 - DNA, 15 bp, Homo sapiens
cctactcccagatgg

SEQ ID NO: 561901 - DNA, 15 bp, Homo sapiens
ccctactcccagatg

SEQ ID NO: 561902 - DNA, 15 bp, Homo sapiens
cccctactcccagat

SEQ ID NO: 561903 - DNA, 15 bp, Homo sapiens
ccccctactcccaga

SEQ ID NO: 561904 - DNA, 15 bp, Homo sapiens
accccctactcccag

SEQ ID NO: 561905 - DNA, 15 bp, Homo sapiens
caccccctactccca

SEQ ID NO: 561906 - DNA, 15 bp, Homo sapiens
ccaccccctactccc

SEQ ID NO: 561907 - DNA, 15 bp, Homo sapiens
tccaccccctactcc

SEQ ID NO: 561908 - DNA, 15 bp, Homo sapiens
ctccaccccctactc

SEQ ID NO: 561909 - DNA, 15 bp, Homo sapiens
actccaccccctact

SEQ ID NO: 561910 - DNA, 15 bp, Homo sapiens
gactccaccccctac

SEQ ID NO: 561911 - DNA, 15 bp, Homo sapiens
agactccacccccta

SEQ ID NO: 561912 - DNA, 15 bp, Homo sapiens
cagactccaccccct

SEQ ID NO: 561913 - DNA, 15 bp, Homo sapiens
tcagactccaccccc

SEQ ID NO: 561914 - DNA, 15 bp, Homo sapiens
gtcagactccacccc

SEQ ID NO: 561915 - DNA, 15 bp, Homo sapiens
ggtcagactccaccc

SEQ ID NO: 561916 - DNA, 15 bp, Homo sapiens
tggtcagactccacc

SEQ ID NO: 561917 - DNA, 15 bp, Homo sapiens
atggtcagactccac

SEQ ID NO: 561918 - DNA, 15 bp, Homo sapiens
catggtcagactcca

SEQ ID NO: 561919 - DNA, 15 bp, Homo sapiens
acatggtcagactcc

SEQ ID NO: 561920 - DNA, 15 bp, Homo sapiens
aacatggtcagactc

SEQ ID NO: 561921 - DNA, 15 bp, Homo sapiens
caacatggtcagact

SEQ ID NO: 561922 - DNA, 15 bp, Homo sapiens
ccaacatggtcagac

SEQ ID NO: 561923 - DNA, 15 bp, Homo sapiens
cccaacatggtcaga

SEQ ID NO: 561924 - DNA, 15 bp, Homo sapiens
ccccaacatggtcag

SEQ ID NO: 561925 - DNA, 15 bp, Homo sapiens
accccaacatggtca

SEQ ID NO: 561926 - DNA, 15 bp, Homo sapiens
caccccaacatggtc

SEQ ID NO: 561927 - DNA, 15 bp, Homo sapiens
ccaccccaacatggt

SEQ ID NO: 561928 - DNA, 15 bp, Homo sapiens
tccaccccaacatgg

SEQ ID NO: 561929 - DNA, 15 bp, Homo sapiens
ctccaccccaacatg

SEQ ID NO: 561930 - DNA, 15 bp, Homo sapiens
actccaccccaacat

SEQ ID NO: 561931 - DNA, 15 bp, Homo sapiens
cactccaccccaaca

SEQ ID NO: 561932 - DNA, 15 bp, Homo sapiens
acactccaccccaac

SEQ ID NO: 561933 - DNA, 15 bp, Homo sapiens
aacactccaccccaa

SEQ ID NO: 561934 - DNA, 15 bp, Homo sapiens
taacactccacccca

SEQ ID NO: 561935 - DNA, 15 bp, Homo sapiens
ttaacactccacccc

SEQ ID NO: 561936 - DNA, 15 bp, Homo sapiens
attaacactccaccc

SEQ ID NO: 561937 - DNA, 15 bp, Homo sapiens
tattaacactccacc

SEQ ID NO: 561938 - DNA, 15 bp, Homo sapiens
atattaacactccac

SEQ ID NO: 561939 - DNA, 15 bp, Homo sapiens
aatattaacactcca

SEQ ID NO: 561940 - DNA, 15 bp, Homo sapiens
taatattaacactcc

SEQ ID NO: 561941 - DNA, 15 bp, Homo sapiens
ctaatattaacactc

SEQ ID NO: 561942 - DNA, 15 bp, Homo sapiens
cctaatattaacact

SEQ ID NO: 561943 - DNA, 15 bp, Homo sapiens
tcctaatattaacac

SEQ ID NO: 561944 - DNA, 15 bp, Homo sapiens
ctcctaatattaaca

SEQ ID NO: 561945 - DNA, 15 bp, Homo sapiens
tctcctaatattaac

SEQ ID NO: 561946 - DNA, 15 bp, Homo sapiens
ctctcctaatattaa

SEQ ID NO: 561947 - DNA, 15 bp, Homo sapiens
cctctcctaatatta

SEQ ID NO: 561948 - DNA, 15 bp, Homo sapiens
tcctctcctaatatt

SEQ ID NO: 561949 - DNA, 15 bp, Homo sapiens
atcctctcctaatat

SEQ ID NO: 561950 - DNA, 15 bp, Homo sapiens
gatcctctcctaata

SEQ ID NO: 561951 - DNA, 15 bp, Homo sapiens
ggatcctctcctaat

SEQ ID NO: 561952 - DNA, 15 bp, Homo sapiens
aggatcctctcctaa

SEQ ID NO: 561953 - DNA, 15 bp, Homo sapiens
gaggatcctctccta

SEQ ID NO: 561954 - DNA, 15 bp, Homo sapiens
ggaggatcctctcct

SEQ ID NO: 561955 - DNA, 15 bp, Homo sapiens
gggaggatcctctcc

SEQ ID NO: 561956 - DNA, 15 bp, Homo sapiens
agggaggatcctctc

SEQ ID NO: 561957 - DNA, 15 bp, Homo sapiens
cagggaggatcctct

SEQ ID NO: 561958 - DNA, 15 bp, Homo sapiens
ccagggaggatcctc

SEQ ID NO: 561959 - DNA, 15 bp, Homo sapiens
cccagggaggatcct

SEQ ID NO: 561960 - DNA, 15 bp, Homo sapiens
tcccagggaggatcc

SEQ ID NO: 561961 - DNA, 15 bp, Homo sapiens
gtcccagggaggatc

SEQ ID NO: 561962 - DNA, 15 bp, Homo sapiens
tgtcccagggaggat

SEQ ID NO: 561963 - DNA, 15 bp, Homo sapiens
ctgtcccagggagga

SEQ ID NO: 561964 - DNA, 15 bp, Homo sapiens
cctgtcccagggagg

SEQ ID NO: 561965 - DNA, 15 bp, Homo sapiens
ccctgtcccagggag

SEQ ID NO: 561966 - DNA, 15 bp, Homo sapiens
accctgtcccaggga

SEQ ID NO: 561967 - DNA, 15 bp, Homo sapiens
gaccctgtcccaggg

SEQ ID NO: 561968 - DNA, 15 bp, Homo sapiens
ggaccctgtcccagg

SEQ ID NO: 561969 - DNA, 15 bp, Homo sapiens
gggaccctgtcccag

SEQ ID NO: 561970 - DNA, 15 bp, Homo sapiens
ggggaccctgtccca

SEQ ID NO: 561971 - DNA, 15 bp, Homo sapiens
tggggaccctgtccc

SEQ ID NO: 561972 - DNA, 15 bp, Homo sapiens
ctggggaccctgtcc

SEQ ID NO: 561973 - DNA, 15 bp, Homo sapiens
cctggggaccctgtc

SEQ ID NO: 561974 - DNA, 15 bp, Homo sapiens
gcctggggaccctgt

SEQ ID NO: 561975 - DNA, 15 bp, Homo sapiens
agcctggggaccctg

SEQ ID NO: 561976 - DNA, 15 bp, Homo sapiens
aagcctggggaccct

SEQ ID NO: 561977 - DNA, 15 bp, Homo sapiens
caagcctggggaccc

SEQ ID NO: 561978 - DNA, 15 bp, Homo sapiens
ccaagcctggggacc

SEQ ID NO: 561979 - DNA, 15 bp, Homo sapiens
cccaagcctggggac

SEQ ID NO: 561980 - DNA, 15 bp, Homo sapiens
ccccaagcctgggga

SEQ ID NO: 561981 - DNA, 15 bp, Homo sapiens
cccccaagcctgggg

SEQ ID NO: 561982 - DNA, 15 bp, Homo sapiens
gcccccaagcctggg

SEQ ID NO: 561983 - DNA, 15 bp, Homo sapiens
tgcccccaagcctgg

SEQ ID NO: 561984 - DNA, 15 bp, Homo sapiens
ttgcccccaagcctg

SEQ ID NO: 561985 - DNA, 15 bp, Homo sapiens
cttgcccccaagcct

SEQ ID NO: 561986 - DNA, 15 bp, Homo sapiens
ccttgcccccaagcc

SEQ ID NO: 561987 - DNA, 15 bp, Homo sapiens
gccttgcccccaagc

SEQ ID NO: 561988 - DNA, 15 bp, Homo sapiens
ggccttgcccccaag

SEQ ID NO: 561989 - DNA, 15 bp, Homo sapiens
aggccttgcccccaa

SEQ ID NO: 561990 - DNA, 15 bp, Homo sapiens
aaggccttgccccca

SEQ ID NO: 561991 - DNA, 15 bp, Homo sapiens
gaaggccttgccccc

SEQ ID NO: 561992 - DNA, 15 bp, Homo sapiens
agaaggccttgcccc

SEQ ID NO: 561993 - DNA, 15 bp, Homo sapiens
cagaaggccttgccc

SEQ ID NO: 561994 - DNA, 15 bp, Homo sapiens
gcagaaggccttgcc

SEQ ID NO: 561995 - DNA, 15 bp, Homo sapiens
ggcagaaggccttgc

SEQ ID NO: 561996 - DNA, 15 bp, Homo sapiens
aggcagaaggccttg

SEQ ID NO: 561997 - DNA, 15 bp, Homo sapiens
caggcagaaggcctt

SEQ ID NO: 561998 - DNA, 15 bp, Homo sapiens
ccaggcagaaggcct

SEQ ID NO: 561999 - DNA, 15 bp, Homo sapiens
tccaggcagaaggcc

SEQ ID NO: 562000 - DNA, 15 bp, Homo sapiens
gtccaggcagaaggc

SEQ ID NO: 562001 - DNA, 15 bp, Homo sapiens
ggtccaggcagaagg

SEQ ID NO: 562002 - DNA, 15 bp, Homo sapiens
gggtccaggcagaag

SEQ ID NO: 562003 - DNA, 15 bp, Homo sapiens
ggggtccaggcagaa

SEQ ID NO: 562004 - DNA, 15 bp, Homo sapiens
gggggtccaggcaga

SEQ ID NO: 562005 - DNA, 15 bp, Homo sapiens
aagggggtccaggca

SEQ ID NO: 562006 - DNA, 15 bp, Homo sapiens
gaagggggtccaggc

SEQ ID NO: 562007 - DNA, 15 bp, Homo sapiens
ggaagggggtccagg

SEQ ID NO: 562008 - DNA, 15 bp, Homo sapiens
aggaagggggtccag

SEQ ID NO: 562009 - DNA, 15 bp, Homo sapiens
aaggaagggggtcca

SEQ ID NO: 562010 - DNA, 15 bp, Homo sapiens
aaaggaagggggtcc

SEQ ID NO: 562011 - DNA, 15 bp, Homo sapiens
gaaaggaagggggtc

SEQ ID NO: 562012 - DNA, 15 bp, Homo sapiens
ggaaaggaagggggt

SEQ ID NO: 562013 - DNA, 15 bp, Homo sapiens
aggaaaggaaggggg

SEQ ID NO: 562014 - DNA, 15 bp, Homo sapiens
gaggaaaggaagggg

SEQ ID NO: 562015 - DNA, 15 bp, Homo sapiens
agaggaaaggaaggg

SEQ ID NO: 562016 - DNA, 15 bp, Homo sapiens
gagaggaaaggaagg

SEQ ID NO: 562017 - DNA, 15 bp, Homo sapiens
agagaggaaaggaag

SEQ ID NO: 562018 - DNA, 15 bp, Homo sapiens
gagagaggaaaggaa

SEQ ID NO: 562019 - DNA, 15 bp, Homo sapiens
ggagagaggaaagga

SEQ ID NO: 562020 - DNA, 15 bp, Homo sapiens
gggagagaggaaagg

SEQ ID NO: 562021 - DNA, 15 bp, Homo sapiens
tgggagagaggaaag

SEQ ID NO: 562022 - DNA, 15 bp, Homo sapiens
ctgggagagaggaaa

SEQ ID NO: 562023 - DNA, 15 bp, Homo sapiens
cctgggagagaggaa

SEQ ID NO: 562024 - DNA, 15 bp, Homo sapiens
tcctgggagagagga

SEQ ID NO: 562025 - DNA, 15 bp, Homo sapiens
atcctgggagagagg

SEQ ID NO: 562026 - DNA, 15 bp, Homo sapiens
aatcctgggagagag

SEQ ID NO: 562027 - DNA, 15 bp, Homo sapiens
gaatcctgggagaga

SEQ ID NO: 562028 - DNA, 15 bp, Homo sapiens
ggaatcctgggagag

SEQ ID NO: 562029 - DNA, 15 bp, Homo sapiens
aggaatcctgggaga

SEQ ID NO: 562030 - DNA, 15 bp, Homo sapiens
gaggaatcctgggag

SEQ ID NO: 562031 - DNA, 15 bp, Homo sapiens
ggaggaatcctggga

SEQ ID NO: 562032 - DNA, 15 bp, Homo sapiens
tggaggaatcctggg

SEQ ID NO: 562033 - DNA, 15 bp, Homo sapiens
ctggaggaatcctgg

SEQ ID NO: 562034 - DNA, 15 bp, Homo sapiens
cctggaggaatcctg

SEQ ID NO: 562035 - DNA, 15 bp, Homo sapiens
tcctggaggaatcct

SEQ ID NO: 562036 - DNA, 15 bp, Homo sapiens
gtcctggaggaatcc

SEQ ID NO: 562037 - DNA, 15 bp, Homo sapiens
tgtcctggaggaatc

SEQ ID NO: 562038 - DNA, 15 bp, Homo sapiens
gtgtcctggaggaat

SEQ ID NO: 562039 - DNA, 15 bp, Homo sapiens
ggtgtcctggaggaa

SEQ ID NO: 562040 - DNA, 15 bp, Homo sapiens
cggtgtcctggagga

SEQ ID NO: 562041 - DNA, 15 bp, Homo sapiens
acggtgtcctggagg

SEQ ID NO: 562042 - DNA, 15 bp, Homo sapiens
tacggtgtcctggag

SEQ ID NO: 562043 - DNA, 15 bp, Homo sapiens
ctacggtgtcctgga

SEQ ID NO: 562044 - DNA, 15 bp, Homo sapiens
actacggtgtcctgg

SEQ ID NO: 562045 - DNA, 15 bp, Homo sapiens
cactacggtgtcctg

SEQ ID NO: 562046 - DNA, 15 bp, Homo sapiens
gcactacggtgtcct

SEQ ID NO: 562047 - DNA, 15 bp, Homo sapiens
agcactacggtgtcc

SEQ ID NO: 562048 - DNA, 15 bp, Homo sapiens
cagcactacggtgtc

SEQ ID NO: 562049 - DNA, 15 bp, Homo sapiens
acagcactacggtgt

SEQ ID NO: 562050 - DNA, 15 bp, Homo sapiens
cacagcactacggtg

SEQ ID NO: 562051 - DNA, 15 bp, Homo sapiens
gcacagcactacggt

SEQ ID NO: 562052 - DNA, 15 bp, Homo sapiens
tgcacagcactacgg

SEQ ID NO: 562053 - DNA, 15 bp, Homo sapiens
gtgcacagcactacg

SEQ ID NO: 562054 - DNA, 15 bp, Homo sapiens
cgtgcacagcactac

SEQ ID NO: 562055 - DNA, 15 bp, Homo sapiens
ccgtgcacagcacta

SEQ ID NO: 562056 - DNA, 15 bp, Homo sapiens
accgtgcacagcact

SEQ ID NO: 562057 - DNA, 15 bp, Homo sapiens
aaccgtgcacagcac

SEQ ID NO: 562058 - DNA, 15 bp, Homo sapiens
aaaccgtgcacagca

SEQ ID NO: 562059 - DNA, 15 bp, Homo sapiens
caaaccgtgcacagc

SEQ ID NO: 562060 - DNA, 15 bp, Homo sapiens
ccaaaccgtgcacag

SEQ ID NO: 562061 - DNA, 15 bp, Homo sapiens
gccaaaccgtgcaca

SEQ ID NO: 562062 - DNA, 15 bp, Homo sapiens
ggccaaaccgtgcac

SEQ ID NO: 562063 - DNA, 15 bp, Homo sapiens
gggccaaaccgtgca

SEQ ID NO: 562064 - DNA, 15 bp, Homo sapiens
ggggccaaaccgtgc

SEQ ID NO: 562065 - DNA, 15 bp, Homo sapiens
tggggccaaaccgtg

SEQ ID NO: 562066 - DNA, 15 bp, Homo sapiens
atggggccaaaccgt

SEQ ID NO: 562067 - DNA, 15 bp, Homo sapiens
gatggggccaaaccg

SEQ ID NO: 562068 - DNA, 15 bp, Homo sapiens
cgatggggccaaacc

SEQ ID NO: 562069 - DNA, 15 bp, Homo sapiens
ccgatggggccaaac

SEQ ID NO: 562070 - DNA, 15 bp, Homo sapiens
accgatggggccaaa

SEQ ID NO: 562071 - DNA, 15 bp, Homo sapiens
caccgatggggccaa

SEQ ID NO: 562072 - DNA, 15 bp, Homo sapiens
acaccgatggggcca

SEQ ID NO: 562073 - DNA, 15 bp, Homo sapiens
cacaccgatggggcc

SEQ ID NO: 562074 - DNA, 15 bp, Homo sapiens
gcacaccgatggggc

SEQ ID NO: 562075 - DNA, 15 bp, Homo sapiens
ggcacaccgatgggg

SEQ ID NO: 562076 - DNA, 15 bp, Homo sapiens
aggcacaccgatggg

SEQ ID NO: 562077 - DNA, 15 bp, Homo sapiens
caggcacaccgatgg

SEQ ID NO: 562078 - DNA, 15 bp, Homo sapiens
gcaggcacaccgatg

SEQ ID NO: 562079 - DNA, 15 bp, Homo sapiens
agcaggcacaccgat

SEQ ID NO: 562080 - DNA, 15 bp, Homo sapiens
gagcaggcacaccga

SEQ ID NO: 562081 - DNA, 15 bp, Homo sapiens
ggagcaggcacaccg

SEQ ID NO: 562082 - DNA, 15 bp, Homo sapiens
aggagcaggcacacc

SEQ ID NO: 562083 - DNA, 15 bp, Homo sapiens
aaggagcaggcacac

SEQ ID NO: 562084 - DNA, 15 bp, Homo sapiens
gaaggagcaggcaca

SEQ ID NO: 562085 - DNA, 15 bp, Homo sapiens
ggaaggagcaggcac

SEQ ID NO: 562086 - DNA, 15 bp, Homo sapiens
tggaaggagcaggca

SEQ ID NO: 562087 - DNA, 15 bp, Homo sapiens
ctggaaggagcaggc

SEQ ID NO: 562088 - DNA, 15 bp, Homo sapiens
gctggaaggagcagg

SEQ ID NO: 562089 - DNA, 15 bp, Homo sapiens
ggctggaaggagcag

SEQ ID NO: 562090 - DNA, 15 bp, Homo sapiens
tggctggaaggagca

SEQ ID NO: 562091 - DNA, 15 bp, Homo sapiens
gtggctggaaggagc

SEQ ID NO: 562092 - DNA, 15 bp, Homo sapiens
agtggctggaaggag

SEQ ID NO: 562093 - DNA, 15 bp, Homo sapiens
cagtggctggaagga

SEQ ID NO: 562094 - DNA, 15 bp, Homo sapiens
gcagtggctggaagg

SEQ ID NO: 562095 - DNA, 15 bp, Homo sapiens
agcagtggctggaag

SEQ ID NO: 562096 - DNA, 15 bp, Homo sapiens
gagcagtggctggaa

SEQ ID NO: 562097 - DNA, 15 bp, Homo sapiens
ggagcagtggctgga

SEQ ID NO: 562098 - DNA, 15 bp, Homo sapiens
gggagcagtggctgg

SEQ ID NO: 562099 - DNA, 15 bp, Homo sapiens
agggagcagtggctg

SEQ ID NO: 562100 - DNA, 15 bp, Homo sapiens
aagggagcagtggct

SEQ ID NO: 562101 - DNA, 15 bp, Homo sapiens
gaagggagcagtggc

SEQ ID NO: 562102 - DNA, 15 bp, Homo sapiens
agaagggagcagtgg

SEQ ID NO: 562103 - DNA, 15 bp, Homo sapiens
cagaagggagcagtg

SEQ ID NO: 562104 - DNA, 15 bp, Homo sapiens
gcagaagggagcagt

SEQ ID NO: 562105 - DNA, 15 bp, Homo sapiens
tgcagaagggagcag

SEQ ID NO: 562106 - DNA, 15 bp, Homo sapiens
ctgcagaagggagca

SEQ ID NO: 562107 - DNA, 15 bp, Homo sapiens
tctgcagaagggagc

SEQ ID NO: 562108 - DNA, 15 bp, Homo sapiens
ttctgcagaagggag

SEQ ID NO: 562109 - DNA, 15 bp, Homo sapiens
tttctgcagaaggga

SEQ ID NO: 562110 - DNA, 15 bp, Homo sapiens
gtttctgcagaaggg

SEQ ID NO: 562111 - DNA, 15 bp, Homo sapiens
agtttctgcagaagg

SEQ ID NO: 562112 - DNA, 15 bp, Homo sapiens
aagtttctgcagaag

SEQ ID NO: 562113 - DNA, 15 bp, Homo sapiens
caagtttctgcagaa

SEQ ID NO: 562114 - DNA, 15 bp, Homo sapiens
gcaagtttctgcaga

SEQ ID NO: 562115 - DNA, 15 bp, Homo sapiens
ggcaagtttctgcag

SEQ ID NO: 562116 - DNA, 15 bp, Homo sapiens
aggcaagtttctgca

SEQ ID NO: 562117 - DNA, 15 bp, Homo sapiens
cccaggcaagtttct

SEQ ID NO: 562118 - DNA, 15 bp, Homo sapiens
tcccaggcaagtttc

SEQ ID NO: 562119 - DNA, 15 bp, Homo sapiens
atcccaggcaagttt

SEQ ID NO: 562120 - DNA, 15 bp, Homo sapiens
aatcccaggcaagtt

SEQ ID NO: 562121 - DNA, 15 bp, Homo sapiens
gaatcccaggcaagt

SEQ ID NO: 562122 - DNA, 15 bp, Homo sapiens
ggaatcccaggcaag

SEQ ID NO: 562123 - DNA, 15 bp, Homo sapiens
gggaatcccaggcaa

SEQ ID NO: 562124 - DNA, 15 bp, Homo sapiens
tgggaatcccaggca

SEQ ID NO: 562125 - DNA, 15 bp, Homo sapiens
ctgggaatcccaggc

SEQ ID NO: 562126 - DNA, 15 bp, Homo sapiens
cctgggaatcccagg

SEQ ID NO: 562127 - DNA, 15 bp, Homo sapiens
ccctgggaatcccag

SEQ ID NO: 562128 - DNA, 15 bp, Homo sapiens
accctgggaatccca

SEQ ID NO: 562129 - DNA, 15 bp, Homo sapiens
caccctgggaatccc

SEQ ID NO: 562130 - DNA, 15 bp, Homo sapiens
gcaccctgggaatcc

SEQ ID NO: 562131 - DNA, 15 bp, Homo sapiens
tgcaccctgggaatc

SEQ ID NO: 562132 - DNA, 15 bp, Homo sapiens
ctgcaccctgggaat

SEQ ID NO: 562133 - DNA, 15 bp, Homo sapiens
cctgcaccctgggaa

SEQ ID NO: 562134 - DNA, 15 bp, Homo sapiens
ccctgcaccctggga

SEQ ID NO: 562135 - DNA, 15 bp, Homo sapiens
cccctgcaccctggg

SEQ ID NO: 562136 - DNA, 15 bp, Homo sapiens
acccctgcaccctgg

SEQ ID NO: 562137 - DNA, 15 bp, Homo sapiens
cacccctgcaccctg

SEQ ID NO: 562138 - DNA, 15 bp, Homo sapiens
ccacccctgcaccct

SEQ ID NO: 562139 - DNA, 15 bp, Homo sapiens
cccacccctgcaccc

SEQ ID NO: 562140 - DNA, 15 bp, Homo sapiens
ccccacccctgcacc

SEQ ID NO: 562141 - DNA, 15 bp, Homo sapiens
cccccacccctgcac

SEQ ID NO: 562142 - DNA, 15 bp, Homo sapiens
gcccccacccctgca

SEQ ID NO: 562143 - DNA, 15 bp, Homo sapiens
agcccccacccctgc

SEQ ID NO: 562144 - DNA, 15 bp, Homo sapiens
cagcccccacccctg

SEQ ID NO: 562145 - DNA, 15 bp, Homo sapiens
ccagcccccacccct

SEQ ID NO: 562146 - DNA, 15 bp, Homo sapiens
accagcccccacccc

SEQ ID NO: 562147 - DNA, 15 bp, Homo sapiens
gaccagcccccaccc

SEQ ID NO: 562148 - DNA, 15 bp, Homo sapiens
tgaccagcccccacc

SEQ ID NO: 562149 - DNA, 15 bp, Homo sapiens
ctgaccagcccccac

SEQ ID NO: 562150 - DNA, 15 bp, Homo sapiens
cctgaccagccccca

SEQ ID NO: 562151 - DNA, 15 bp, Homo sapiens
ccctgaccagccccc

SEQ ID NO: 562152 - DNA, 15 bp, Homo sapiens
cccctgaccagcccc

SEQ ID NO: 562153 - DNA, 15 bp, Homo sapiens
gcccctgaccagccc

SEQ ID NO: 562154 - DNA, 15 bp, Homo sapiens
agcccctgaccagcc

SEQ ID NO: 562155 - DNA, 15 bp, Homo sapiens
cagcccctgaccagc

SEQ ID NO: 562156 - DNA, 15 bp, Homo sapiens
ccagcccctgaccag

SEQ ID NO: 562157 - DNA, 15 bp, Homo sapiens
accagcccctgacca

SEQ ID NO: 562158 - DNA, 15 bp, Homo sapiens
gaccagcccctgacc

SEQ ID NO: 562159 - DNA, 15 bp, Homo sapiens
tgaccagcccctgac

SEQ ID NO: 562160 - DNA, 15 bp, Homo sapiens
ctgaccagcccctga

SEQ ID NO: 562161 - DNA, 15 bp, Homo sapiens
cctgaccagcccctg

SEQ ID NO: 562162 - DNA, 15 bp, Homo sapiens
ccctgaccagcccct

SEQ ID NO: 562163 - DNA, 15 bp, Homo sapiens
gccctgaccagcccc

SEQ ID NO: 562164 - DNA, 15 bp, Homo sapiens
ggccctgaccagccc

SEQ ID NO: 562165 - DNA, 15 bp, Homo sapiens
aggccctgaccagcc

SEQ ID NO: 562166 - DNA, 15 bp, Homo sapiens
caggccctgaccagc

SEQ ID NO: 562167 - DNA, 15 bp, Homo sapiens
ccaggccctgaccag

SEQ ID NO: 562168 - DNA, 15 bp, Homo sapiens
accaggccctgacca

SEQ ID NO: 562169 - DNA, 15 bp, Homo sapiens
gaccaggccctgacc

SEQ ID NO: 562170 - DNA, 15 bp, Homo sapiens
tgaccaggccctgac

SEQ ID NO: 562171 - DNA, 15 bp, Homo sapiens
ctgaccaggccctga

SEQ ID NO: 562172 - DNA, 15 bp, Homo sapiens
actgaccaggccctg

SEQ ID NO: 562173 - DNA, 15 bp, Homo sapiens
cactgaccaggccct

SEQ ID NO: 562174 - DNA, 15 bp, Homo sapiens
acactgaccaggccc

SEQ ID NO: 562175 - DNA, 15 bp, Homo sapiens
tacactgaccaggcc

SEQ ID NO: 562176 - DNA, 15 bp, Homo sapiens
ctacactgaccaggc

SEQ ID NO: 562177 - DNA, 15 bp, Homo sapiens
tctacactgaccagg

SEQ ID NO: 562178 - DNA, 15 bp, Homo sapiens
ctctacactgaccag

SEQ ID NO: 562179 - DNA, 15 bp, Homo sapiens
gctctacactgacca

SEQ ID NO: 562180 - DNA, 15 bp, Homo sapiens
tgctctacactgacc

SEQ ID NO: 562181 - DNA, 15 bp, Homo sapiens
ctgctctacactgac

SEQ ID NO: 562182 - DNA, 15 bp, Homo sapiens
cctgctctacactga

SEQ ID NO: 562183 - DNA, 15 bp, Homo sapiens
ccctgctctacactg

SEQ ID NO: 562184 - DNA, 15 bp, Homo sapiens
tccctgctctacact

SEQ ID NO: 562185 - DNA, 15 bp, Homo sapiens
ctccctgctctacac

SEQ ID NO: 562186 - DNA, 15 bp, Homo sapiens
gctccctgctctaca

SEQ ID NO: 562187 - DNA, 15 bp, Homo sapiens
cactggaggacactg

SEQ ID NO: 562188 - DNA, 15 bp, Homo sapiens
ccactggaggacact

SEQ ID NO: 562189 - DNA, 15 bp, Homo sapiens
gccactggaggacac

SEQ ID NO: 562190 - DNA, 15 bp, Homo sapiens
agccactggaggaca

SEQ ID NO: 562191 - DNA, 15 bp, Homo sapiens
cagccactggaggac

SEQ ID NO: 562192 - DNA, 15 bp, Homo sapiens
ccagccactggagga

SEQ ID NO: 562193 - DNA, 15 bp, Homo sapiens
gccagccactggagg

SEQ ID NO: 562194 - DNA, 15 bp, Homo sapiens
agccagccactggag

SEQ ID NO: 562195 - DNA, 15 bp, Homo sapiens
cagccagccactgga

SEQ ID NO: 562196 - DNA, 15 bp, Homo sapiens
gcagccagccactgg

SEQ ID NO: 562197 - DNA, 15 bp, Homo sapiens
tgcagccagccactg

SEQ ID NO: 562198 - DNA, 15 bp, Homo sapiens
ctgcagccagccact

SEQ ID NO: 562199 - DNA, 15 bp, Homo sapiens
gctgcagccagccac

SEQ ID NO: 562200 - DNA, 15 bp, Homo sapiens
agctgcagccagcca

SEQ ID NO: 562201 - DNA, 15 bp, Homo sapiens
aagctgcagccagcc

SEQ ID NO: 562202 - DNA, 15 bp, Homo sapiens
caagctgcagccagc

SEQ ID NO: 562203 - DNA, 15 bp, Homo sapiens
ccaagctgcagccag

SEQ ID NO: 562204 - DNA, 15 bp, Homo sapiens
cccaagctgcagcca

SEQ ID NO: 562205 - DNA, 15 bp, Homo sapiens
ccccaagctgcagcc

SEQ ID NO: 562206 - DNA, 15 bp, Homo sapiens
accccaagctgcagc

SEQ ID NO: 562207 - DNA, 15 bp, Homo sapiens
caccccaagctgcag

SEQ ID NO: 562208 - DNA, 15 bp, Homo sapiens
ccaccccaagctgca

SEQ ID NO: 562209 - DNA, 15 bp, Homo sapiens
cccaccccaagctgc

SEQ ID NO: 562210 - DNA, 15 bp, Homo sapiens
gcccaccccaagctg

SEQ ID NO: 562211 - DNA, 15 bp, Homo sapiens
tgcccaccccaagct

SEQ ID NO: 562212 - DNA, 15 bp, Homo sapiens
gtgcccaccccaagc

SEQ ID NO: 562213 - DNA, 15 bp, Homo sapiens
ggtgcccaccccaag

SEQ ID NO: 562214 - DNA, 15 bp, Homo sapiens
aggtgcccaccccaa

SEQ ID NO: 562215 - DNA, 15 bp, Homo sapiens
caggtgcccacccca

SEQ ID NO: 562216 - DNA, 15 bp, Homo sapiens
ccaggtgcccacccc

SEQ ID NO: 562217 - DNA, 15 bp, Homo sapiens
cccaggtgcccaccc

SEQ ID NO: 562218 - DNA, 15 bp, Homo sapiens
acccaggtgcccacc

SEQ ID NO: 562219 - DNA, 15 bp, Homo sapiens
cacccaggtgcccac

SEQ ID NO: 562220 - DNA, 15 bp, Homo sapiens
ccacccaggtgccca

SEQ ID NO: 562221 - DNA, 15 bp, Homo sapiens
accacccaggtgccc

SEQ ID NO: 562222 - DNA, 15 bp, Homo sapiens
caccacccaggtgcc

SEQ ID NO: 562223 - DNA, 15 bp, Homo sapiens
ccaccacccaggtgc

SEQ ID NO: 562224 - DNA, 15 bp, Homo sapiens
gccaccacccaggtg

SEQ ID NO: 562225 - DNA, 15 bp, Homo sapiens
agccaccacccaggt

SEQ ID NO: 562226 - DNA, 15 bp, Homo sapiens
cagccaccacccagg

SEQ ID NO: 562227 - DNA, 15 bp, Homo sapiens
ccagccaccacccag

SEQ ID NO: 562228 - DNA, 15 bp, Homo sapiens
accagccaccaccca

SEQ ID NO: 562229 - DNA, 15 bp, Homo sapiens
caccagccaccaccc

SEQ ID NO: 562230 - DNA, 15 bp, Homo sapiens
ccaccagccaccacc

SEQ ID NO: 562231 - DNA, 15 bp, Homo sapiens
accaccagccaccac

SEQ ID NO: 562232 - DNA, 15 bp, Homo sapiens
gaccaccagccacca

SEQ ID NO: 562233 - DNA, 15 bp, Homo sapiens
ggaccaccagccacc

SEQ ID NO: 562234 - DNA, 15 bp, Homo sapiens
gggaccaccagccac

SEQ ID NO: 562235 - DNA, 15 bp, Homo sapiens
ggggaccaccagcca

SEQ ID NO: 562236 - DNA, 15 bp, Homo sapiens
gggggaccaccagcc

SEQ ID NO: 562237 - DNA, 15 bp, Homo sapiens
agggggaccaccagc

SEQ ID NO: 562238 - DNA, 15 bp, Homo sapiens
cagggggaccaccag

SEQ ID NO: 562239 - DNA, 15 bp, Homo sapiens
gcagggggaccacca

SEQ ID NO: 562240 - DNA, 15 bp, Homo sapiens
tgcagggggaccacc

SEQ ID NO: 562241 - DNA, 15 bp, Homo sapiens
ctgcagggggaccac

SEQ ID NO: 562242 - DNA, 15 bp, Homo sapiens
cctgcagggggacca

SEQ ID NO: 562243 - DNA, 15 bp, Homo sapiens
gcctgcagggggacc

SEQ ID NO: 562244 - DNA, 15 bp, Homo sapiens
ggcctgcagggggac

SEQ ID NO: 562245 - DNA, 15 bp, Homo sapiens
tggcctgcaggggga

SEQ ID NO: 562246 - DNA, 15 bp, Homo sapiens
gtggcctgcaggggg

SEQ ID NO: 562247 - DNA, 15 bp, Homo sapiens
agtggcctgcagggg

SEQ ID NO: 562248 - DNA, 15 bp, Homo sapiens
cagtggcctgcaggg

SEQ ID NO: 562249 - DNA, 15 bp, Homo sapiens
gcagtggcctgcagg

SEQ ID NO: 562250 - DNA, 15 bp, Homo sapiens
agcagtggcctgcag

SEQ ID NO: 562251 - DNA, 15 bp, Homo sapiens
cagcagtggcctgca

SEQ ID NO: 562252 - DNA, 15 bp, Homo sapiens
gcagcagtggcctgc

SEQ ID NO: 562253 - DNA, 15 bp, Homo sapiens
ggcagcagtggcctg

SEQ ID NO: 562254 - DNA, 15 bp, Homo sapiens
gggcagcagtggcct

SEQ ID NO: 562255 - DNA, 15 bp, Homo sapiens
ggggcagcagtggcc

SEQ ID NO: 562256 - DNA, 15 bp, Homo sapiens
gggggcagcagtggc

SEQ ID NO: 562257 - DNA, 15 bp, Homo sapiens
agggggcagcagtgg

SEQ ID NO: 562258 - DNA, 15 bp, Homo sapiens
gagggggcagcagtg

SEQ ID NO: 562259 - DNA, 15 bp, Homo sapiens
agagggggcagcagt

SEQ ID NO: 562260 - DNA, 15 bp, Homo sapiens
aagagggggcagcag

SEQ ID NO: 562261 - DNA, 15 bp, Homo sapiens
caagagggggcagca

SEQ ID NO: 562262 - DNA, 15 bp, Homo sapiens
ccaagagggggcagc

SEQ ID NO: 562263 - DNA, 15 bp, Homo sapiens
cccaagagggggcag

SEQ ID NO: 562264 - DNA, 15 bp, Homo sapiens
acccaagagggggca

SEQ ID NO: 562265 - DNA, 15 bp, Homo sapiens
gacccaagagggggc

SEQ ID NO: 562266 - DNA, 15 bp, Homo sapiens
ggacccaagaggggg

SEQ ID NO: 562267 - DNA, 15 bp, Homo sapiens
aggacccaagagggg

SEQ ID NO: 562268 - DNA, 15 bp, Homo sapiens
caggacccaagaggg

SEQ ID NO: 562269 - DNA, 15 bp, Homo sapiens
acaggacccaagagg

SEQ ID NO: 562270 - DNA, 15 bp, Homo sapiens
aacaggacccaagag

SEQ ID NO: 562271 - DNA, 15 bp, Homo sapiens
gaacaggacccaaga

SEQ ID NO: 562272 - DNA, 15 bp, Homo sapiens
agaacaggacccaag

SEQ ID NO: 562273 - DNA, 15 bp, Homo sapiens
cagaacaggacccaa

SEQ ID NO: 562274 - DNA, 15 bp, Homo sapiens
tcagaacaggaccca

SEQ ID NO: 562275 - DNA, 15 bp, Homo sapiens
ctcagaacaggaccc

SEQ ID NO: 562276 - DNA, 15 bp, Homo sapiens
actcagaacaggacc

SEQ ID NO: 562277 - DNA, 15 bp, Homo sapiens
gactcagaacaggac

SEQ ID NO: 562278 - DNA, 15 bp, Homo sapiens
agactcagaacagga

SEQ ID NO: 562279 - DNA, 15 bp, Homo sapiens
gagactcagaacagg

SEQ ID NO: 562280 - DNA, 15 bp, Homo sapiens
tgagactcagaacag

SEQ ID NO: 562281 - DNA, 15 bp, Homo sapiens
ctgagactcagaaca

SEQ ID NO: 562282 - DNA, 15 bp, Homo sapiens
cctgagactcagaac

SEQ ID NO: 562283 - DNA, 15 bp, Homo sapiens
gcctgagactcagaa

SEQ ID NO: 562284 - DNA, 15 bp, Homo sapiens
ggcctgagactcaga

SEQ ID NO: 562285 - DNA, 15 bp, Homo sapiens
aggcctgagactcag

SEQ ID NO: 562286 - DNA, 15 bp, Homo sapiens
caggcctgagactca

SEQ ID NO: 562287 - DNA, 15 bp, Homo sapiens
tcaggcctgagactc

SEQ ID NO: 562288 - DNA, 15 bp, Homo sapiens
ctcaggcctgagact

SEQ ID NO: 562289 - DNA, 15 bp, Homo sapiens
actcaggcctgagac

SEQ ID NO: 562290 - DNA, 15 bp, Homo sapiens
gactcaggcctgaga

SEQ ID NO: 562291 - DNA, 15 bp, Homo sapiens
ggactcaggcctgag

SEQ ID NO: 562292 - DNA, 15 bp, Homo sapiens
gggactcaggcctga

SEQ ID NO: 562293 - DNA, 15 bp, Homo sapiens
agggactcaggcctg

SEQ ID NO: 562294 - DNA, 15 bp, Homo sapiens
cagggactcaggcct

SEQ ID NO: 562295 - DNA, 15 bp, Homo sapiens
ccagggactcaggcc

SEQ ID NO: 562296 - DNA, 15 bp, Homo sapiens
cccagggactcaggc

SEQ ID NO: 562297 - DNA, 15 bp, Homo sapiens
ccccagggactcagg

SEQ ID NO: 562298 - DNA, 15 bp, Homo sapiens
tccccagggactcag

SEQ ID NO: 562299 - DNA, 15 bp, Homo sapiens
ttccccagggactca

SEQ ID NO: 562300 - DNA, 15 bp, Homo sapiens
cttccccagggactc

SEQ ID NO: 562301 - DNA, 15 bp, Homo sapiens
ccttccccagggact

SEQ ID NO: 562302 - DNA, 15 bp, Homo sapiens
gccttccccagggac

SEQ ID NO: 562303 - DNA, 15 bp, Homo sapiens
ggccttccccaggga

SEQ ID NO: 562304 - DNA, 15 bp, Homo sapiens
gggccttccccaggg

SEQ ID NO: 562305 - DNA, 15 bp, Homo sapiens
ggggccttccccagg

SEQ ID NO: 562306 - DNA, 15 bp, Homo sapiens
tggggccttccccag

SEQ ID NO: 562307 - DNA, 15 bp, Homo sapiens
gtggggccttcccca

SEQ ID NO: 562308 - DNA, 15 bp, Homo sapiens
tgtggggccttcccc

SEQ ID NO: 562309 - DNA, 15 bp, Homo sapiens
gtgtggggccttccc

SEQ ID NO: 562310 - DNA, 15 bp, Homo sapiens
ggtgtggggccttcc

SEQ ID NO: 562311 - DNA, 15 bp, Homo sapiens
aggtgtggggccttc

SEQ ID NO: 562312 - DNA, 15 bp, Homo sapiens
aaggtgtggggcctt

SEQ ID NO: 562313 - DNA, 15 bp, Homo sapiens
aaaggtgtggggcct

SEQ ID NO: 562314 - DNA, 15 bp, Homo sapiens
caaaggtgtggggcc

SEQ ID NO: 562315 - DNA, 15 bp, Homo sapiens
gcaaaggtgtggggc

SEQ ID NO: 562316 - DNA, 15 bp, Homo sapiens
ggcaaaggtgtgggg

SEQ ID NO: 562317 - DNA, 15 bp, Homo sapiens
gggcaaaggtgtggg

SEQ ID NO: 562318 - DNA, 15 bp, Homo sapiens
agggcaaaggtgtgg

SEQ ID NO: 562319 - DNA, 15 bp, Homo sapiens
cagggcaaaggtgtg

SEQ ID NO: 562320 - DNA, 15 bp, Homo sapiens
acagggcaaaggtgt

SEQ ID NO: 562321 - DNA, 15 bp, Homo sapiens
tacagggcaaaggtg

SEQ ID NO: 562322 - DNA, 15 bp, Homo sapiens
gtacagggcaaaggt

SEQ ID NO: 562323 - DNA, 15 bp, Homo sapiens
ggtacagggcaaagg

SEQ ID NO: 562324 - DNA, 15 bp, Homo sapiens
aggtacagggcaaag

SEQ ID NO: 562325 - DNA, 15 bp, Homo sapiens
caggtacagggcaaa

SEQ ID NO: 562326 - DNA, 15 bp, Homo sapiens
ccaggtacagggcaa

SEQ ID NO: 562327 - DNA, 15 bp, Homo sapiens
cccaggtacagggca

SEQ ID NO: 562328 - DNA, 15 bp, Homo sapiens
acccaggtacagggc

SEQ ID NO: 562329 - DNA, 15 bp, Homo sapiens
tacccaggtacaggg

SEQ ID NO: 562330 - DNA, 15 bp, Homo sapiens
atacccaggtacagg

SEQ ID NO: 562331 - DNA, 15 bp, Homo sapiens
catacccaggtacag

SEQ ID NO: 562332 - DNA, 15 bp, Homo sapiens
ccatacccaggtaca

SEQ ID NO: 562333 - DNA, 15 bp, Homo sapiens
cccatacccaggtac

SEQ ID NO: 562334 - DNA, 15 bp, Homo sapiens
ccccatacccaggta

SEQ ID NO: 562335 - DNA, 15 bp, Homo sapiens
tccccatacccaggt

SEQ ID NO: 562336 - DNA, 15 bp, Homo sapiens
atccccatacccagg

SEQ ID NO: 562337 - DNA, 15 bp, Homo sapiens
catccccatacccag

SEQ ID NO: 562338 - DNA, 15 bp, Homo sapiens
ccatccccataccca

SEQ ID NO: 562339 - DNA, 15 bp, Homo sapiens
gccatccccataccc

SEQ ID NO: 562340 - DNA, 15 bp, Homo sapiens
ggccatccccatacc

SEQ ID NO: 562341 - DNA, 15 bp, Homo sapiens
gggccatccccatac

SEQ ID NO: 562342 - DNA, 15 bp, Homo sapiens
agggccatccccata

SEQ ID NO: 562343 - DNA, 15 bp, Homo sapiens
cagggccatccccat

SEQ ID NO: 562344 - DNA, 15 bp, Homo sapiens
tcagggccatcccca

SEQ ID NO: 562345 - DNA, 15 bp, Homo sapiens
ctcagggccatcccc

SEQ ID NO: 562346 - DNA, 15 bp, Homo sapiens
cctcagggccatccc

SEQ ID NO: 562347 - DNA, 15 bp, Homo sapiens
ccctcagggccatcc

SEQ ID NO: 562348 - DNA, 15 bp, Homo sapiens
cccctcagggccatc

SEQ ID NO: 562349 - DNA, 15 bp, Homo sapiens
gcccctcagggccat

SEQ ID NO: 562350 - DNA, 15 bp, Homo sapiens
agcccctcagggcca

SEQ ID NO: 562351 - DNA, 15 bp, Homo sapiens
cagcccctcagggcc

SEQ ID NO: 562352 - DNA, 15 bp, Homo sapiens
gcagcccctcagggc

SEQ ID NO: 562353 - DNA, 15 bp, Homo sapiens
ggcagcccctcaggg

SEQ ID NO: 562354 - DNA, 15 bp, Homo sapiens
aggcagcccctcagg

SEQ ID NO: 562355 - DNA, 15 bp, Homo sapiens
aaggcagcccctcag

SEQ ID NO: 562356 - DNA, 15 bp, Homo sapiens
caaggcagcccctca

SEQ ID NO: 562357 - DNA, 15 bp, Homo sapiens
gcaaggcagcccctc

SEQ ID NO: 562358 - DNA, 15 bp, Homo sapiens
agcaaggcagcccct

SEQ ID NO: 562359 - DNA, 15 bp, Homo sapiens
aagcaaggcagcccc

SEQ ID NO: 562360 - DNA, 15 bp, Homo sapiens
caagcaaggcagccc

SEQ ID NO: 562361 - DNA, 15 bp, Homo sapiens
ccaagcaaggcagcc

SEQ ID NO: 562362 - DNA, 15 bp, Homo sapiens
cccaagcaaggcagc

SEQ ID NO: 562363 - DNA, 15 bp, Homo sapiens
tcccaagcaaggcag

SEQ ID NO: 562364 - DNA, 15 bp, Homo sapiens
ctcccaagcaaggca

SEQ ID NO: 562365 - DNA, 15 bp, Homo sapiens
tctcccaagcaaggc

SEQ ID NO: 562366 - DNA, 15 bp, Homo sapiens
ttctcccaagcaagg

SEQ ID NO: 562367 - DNA, 15 bp, Homo sapiens
cttctcccaagcaag

SEQ ID NO: 562368 - DNA, 15 bp, Homo sapiens
ccttctcccaagcaa

SEQ ID NO: 562369 - DNA, 15 bp, Homo sapiens
cccttctcccaagca

SEQ ID NO: 562370 - DNA, 15 bp, Homo sapiens
ccccttctcccaagc

SEQ ID NO: 562371 - DNA, 15 bp, Homo sapiens
cccccttctcccaag

SEQ ID NO: 562372 - DNA, 15 bp, Homo sapiens
ccccccttctcccaa

SEQ ID NO: 562373 - DNA, 15 bp, Homo sapiens
tccccccttctccca

SEQ ID NO: 562374 - DNA, 15 bp, Homo sapiens
ttccccccttctccc

SEQ ID NO: 562375 - DNA, 15 bp, Homo sapiens
tttccccccttctcc

SEQ ID NO: 562376 - DNA, 15 bp, Homo sapiens
ttttccccccttctc

SEQ ID NO: 562377 - DNA, 15 bp, Homo sapiens
gttttccccccttct

SEQ ID NO: 562378 - DNA, 15 bp, Homo sapiens
tgttttccccccttc

SEQ ID NO: 562379 - DNA, 15 bp, Homo sapiens
ctgttttcccccctt

SEQ ID NO: 562380 - DNA, 15 bp, Homo sapiens
tctgttttcccccct

SEQ ID NO: 562381 - DNA, 15 bp, Homo sapiens
atctgttttcccccc

SEQ ID NO: 562382 - DNA, 15 bp, Homo sapiens
tatctgttttccccc

SEQ ID NO: 562383 - DNA, 15 bp, Homo sapiens
atatctgttttcccc

SEQ ID NO: 562384 - DNA, 15 bp, Homo sapiens
aatatctgttttccc

SEQ ID NO: 562385 - DNA, 15 bp, Homo sapiens
aaatatctgttttcc

SEQ ID NO: 562386 - DNA, 15 bp, Homo sapiens
aaaatatctgttttc

SEQ ID NO: 562387 - DNA, 15 bp, Homo sapiens
aaaaatatctgtttt

SEQ ID NO: 562388 - DNA, 15 bp, Homo sapiens
taaaaatatctgttt

SEQ ID NO: 562389 - DNA, 15 bp, Homo sapiens
ataaaaatatctgtt

SEQ ID NO: 562390 - DNA, 15 bp, Homo sapiens
tataaaaatatctgt

SEQ ID NO: 562391 - DNA, 15 bp, Homo sapiens
atataaaaatatctg

SEQ ID NO: 562392 - DNA, 15 bp, Homo sapiens
tatataaaaatatct

SEQ ID NO: 562393 - DNA, 15 bp, Homo sapiens
ttatataaaaatatc

SEQ ID NO: 562394 - DNA, 15 bp, Homo sapiens
tttatataaaaatat

SEQ ID NO: 562395 - DNA, 15 bp, Homo sapiens
atttatataaaaata

SEQ ID NO: 562396 - DNA, 15 bp, Homo sapiens
tatttatataaaaat

SEQ ID NO: 562397 - DNA, 15 bp, Homo sapiens
ttatttatataaaaa

SEQ ID NO: 562398 - DNA, 15 bp, Homo sapiens
cttatttatataaaa

SEQ ID NO: 562399 - DNA, 15 bp, Homo sapiens
tcttatttatataaa

SEQ ID NO: 562400 - DNA, 15 bp, Homo sapiens
ttcttatttatataa

SEQ ID NO: 562401 - DNA, 15 bp, Homo sapiens
tttcttatttatata

SEQ ID NO: 562402 - DNA, 15 bp, Homo sapiens
ttttcttatttatat

SEQ ID NO: 562403 - DNA, 15 bp, Homo sapiens
tttttcttatttata

SEQ ID NO: 562404 - DNA, 15 bp, Homo sapiens
ctttttcttatttat

SEQ ID NO: 562405 - DNA, 15 bp, Homo sapiens
tctttttcttattta

SEQ ID NO: 562406 - DNA, 15 bp, Homo sapiens
gtctttttcttattt

SEQ ID NO: 562407 - DNA, 15 bp, Homo sapiens
tgtctttttcttatt

SEQ ID NO: 562408 - DNA, 15 bp, Homo sapiens
ctgtctttttcttat

SEQ ID NO: 562409 - DNA, 15 bp, Homo sapiens
gctgtctttttctta

SEQ ID NO: 562410 - DNA, 15 bp, Homo sapiens
ggctgtctttttctt

SEQ ID NO: 562411 - DNA, 15 bp, Homo sapiens
gggctgtctttttct

SEQ ID NO: 562412 - DNA, 15 bp, Homo sapiens
ggggctgtctttttc

SEQ ID NO: 562413 - DNA, 15 bp, Homo sapiens
aggggctgtcttttt

SEQ ID NO: 562414 - DNA, 15 bp, Homo sapiens
gaggggctgtctttt

SEQ ID NO: 562415 - DNA, 15 bp, Homo sapiens
agaggggctgtcttt

SEQ ID NO: 562416 - DNA, 15 bp, Homo sapiens
cagaggggctgtctt

SEQ ID NO: 562417 - DNA, 15 bp, Homo sapiens
ccagaggggctgtct

SEQ ID NO: 562418 - DNA, 15 bp, Homo sapiens
cccagaggggctgtc

SEQ ID NO: 562419 - DNA, 15 bp, Homo sapiens
gcccagaggggctgt

SEQ ID NO: 562420 - DNA, 15 bp, Homo sapiens
tgcccagaggggctg

SEQ ID NO: 562421 - DNA, 15 bp, Homo sapiens
ctgcccagaggggct

SEQ ID NO: 562422 - DNA, 15 bp, Homo sapiens
tctgcccagaggggc

SEQ ID NO: 562423 - DNA, 15 bp, Homo sapiens
atctgcccagagggg

SEQ ID NO: 562424 - DNA, 15 bp, Homo sapiens
catctgcccagaggg

SEQ ID NO: 562425 - DNA, 15 bp, Homo sapiens
tcatctgcccagagg

SEQ ID NO: 562426 - DNA, 15 bp, Homo sapiens
ctcatctgcccagag

SEQ ID NO: 562427 - DNA, 15 bp, Homo sapiens
cctcatctgcccaga

SEQ ID NO: 562428 - DNA, 15 bp, Homo sapiens
gcctcatctgcccag

SEQ ID NO: 562429 - DNA, 15 bp, Homo sapiens
ggcctcatctgccca

SEQ ID NO: 562430 - DNA, 15 bp, Homo sapiens
aggcctcatctgccc

SEQ ID NO: 562431 - DNA, 15 bp, Homo sapiens
caggcctcatctgcc

SEQ ID NO: 562432 - DNA, 15 bp, Homo sapiens
gcaggcctcatctgc

SEQ ID NO: 562433 - DNA, 15 bp, Homo sapiens
agcaggcctcatctg

SEQ ID NO: 562434 - DNA, 15 bp, Homo sapiens
cagcaggcctcatct

SEQ ID NO: 562435 - DNA, 15 bp, Homo sapiens
acagcaggcctcatc

SEQ ID NO: 562436 - DNA, 15 bp, Homo sapiens
tacagcaggcctcat

SEQ ID NO: 562437 - DNA, 15 bp, Homo sapiens
ctacagcaggcctca

SEQ ID NO: 562438 - DNA, 15 bp, Homo sapiens
cctacagcaggcctc

SEQ ID NO: 562439 - DNA, 15 bp, Homo sapiens
ccctacagcaggcct

SEQ ID NO: 562440 - DNA, 15 bp, Homo sapiens
gccctacagcaggcc

SEQ ID NO: 562441 - DNA, 15 bp, Homo sapiens
tgccctacagcaggc

SEQ ID NO: 562442 - DNA, 15 bp, Homo sapiens
ctgccctacagcagg

SEQ ID NO: 562443 - DNA, 15 bp, Homo sapiens
cctgccctacagcag

SEQ ID NO: 562444 - DNA, 15 bp, Homo sapiens
ccctgccctacagca

SEQ ID NO: 562445 - DNA, 15 bp, Homo sapiens
cccctgccctacagc

SEQ ID NO: 562446 - DNA, 15 bp, Homo sapiens
ccccctgccctacag

SEQ ID NO: 562447 - DNA, 15 bp, Homo sapiens
gccccctgccctaca

SEQ ID NO: 562448 - DNA, 15 bp, Homo sapiens
agccccctgccctac

SEQ ID NO: 562449 - DNA, 15 bp, Homo sapiens
aagccccctgcccta

SEQ ID NO: 562450 - DNA, 15 bp, Homo sapiens
caagccccctgccct

SEQ ID NO: 562451 - DNA, 15 bp, Homo sapiens
ccaagccccctgccc

SEQ ID NO: 562452 - DNA, 15 bp, Homo sapiens
accaagccccctgcc

SEQ ID NO: 562453 - DNA, 15 bp, Homo sapiens
taccaagccccctgc

SEQ ID NO: 562454 - DNA, 15 bp, Homo sapiens
ttaccaagccccctg

SEQ ID NO: 562455 - DNA, 15 bp, Homo sapiens
tttaccaagccccct

SEQ ID NO: 562456 - DNA, 15 bp, Homo sapiens
gtttaccaagccccc

SEQ ID NO: 562457 - DNA, 15 bp, Homo sapiens
agtttaccaagcccc

SEQ ID NO: 562458 - DNA, 15 bp, Homo sapiens
cagtttaccaagccc

SEQ ID NO: 562459 - DNA, 15 bp, Homo sapiens
acagtttaccaagcc

SEQ ID NO: 562460 - DNA, 15 bp, Homo sapiens
cacagtttaccaagc

SEQ ID NO: 562461 - DNA, 15 bp, Homo sapiens
acacagtttaccaag

SEQ ID NO: 562462 - DNA, 15 bp, Homo sapiens
cacacagtttaccaa

SEQ ID NO: 562463 - DNA, 15 bp, Homo sapiens
acacacagtttacca

SEQ ID NO: 562464 - DNA, 15 bp, Homo sapiens
gacacacagtttacc

SEQ ID NO: 562465 - DNA, 15 bp, Homo sapiens
ggacacacagtttac

SEQ ID NO: 562466 - DNA, 15 bp, Homo sapiens
tggacacacagttta

SEQ ID NO: 562467 - DNA, 15 bp, Homo sapiens
gtggacacacagttt

SEQ ID NO: 562468 - DNA, 15 bp, Homo sapiens
agtggacacacagtt

SEQ ID NO: 562469 - DNA, 15 bp, Homo sapiens
cagtggacacacagt

SEQ ID NO: 562470 - DNA, 15 bp, Homo sapiens
ccagtggacacacag

SEQ ID NO: 562471 - DNA, 15 bp, Homo sapiens
accagtggacacaca

SEQ ID NO: 562472 - DNA, 15 bp, Homo sapiens
gaccagtggacacac

SEQ ID NO: 562473 - DNA, 15 bp, Homo sapiens
agaccagtggacaca

SEQ ID NO: 562474 - DNA, 15 bp, Homo sapiens
cagaccagtggacac

SEQ ID NO: 562475 - DNA, 15 bp, Homo sapiens
acagaccagtggaca

SEQ ID NO: 562476 - DNA, 15 bp, Homo sapiens
tacagaccagtggac

SEQ ID NO: 562477 - DNA, 15 bp, Homo sapiens
ttacagaccagtgga

SEQ ID NO: 562478 - DNA, 15 bp, Homo sapiens
gttacagaccagtgg

SEQ ID NO: 562479 - DNA, 15 bp, Homo sapiens
ggttacagaccagtg

SEQ ID NO: 562480 - DNA, 15 bp, Homo sapiens
gggttacagaccagt

SEQ ID NO: 562481 - DNA, 15 bp, Homo sapiens
agggttacagaccag

SEQ ID NO: 562482 - DNA, 15 bp, Homo sapiens
aagggttacagacca

SEQ ID NO: 562483 - DNA, 15 bp, Homo sapiens
gaagggttacagacc

SEQ ID NO: 562484 - DNA, 15 bp, Homo sapiens
tgaagggttacagac

SEQ ID NO: 562485 - DNA, 15 bp, Homo sapiens
ctgaagggttacaga

SEQ ID NO: 562486 - DNA, 15 bp, Homo sapiens
gctgaagggttacag

SEQ ID NO: 562487 - DNA, 15 bp, Homo sapiens
agctgaagggttaca

SEQ ID NO: 562488 - DNA, 15 bp, Homo sapiens
cagctgaagggttac

SEQ ID NO: 562489 - DNA, 15 bp, Homo sapiens
ccagctgaagggtta

SEQ ID NO: 562490 - DNA, 15 bp, Homo sapiens
cccagctgaagggtt

SEQ ID NO: 562491 - DNA, 15 bp, Homo sapiens
acccagctgaagggt

SEQ ID NO: 562492 - DNA, 15 bp, Homo sapiens
gacccagctgaaggg

SEQ ID NO: 562493 - DNA, 15 bp, Homo sapiens
ggacccagctgaagg

SEQ ID NO: 562494 - DNA, 15 bp, Homo sapiens
aggacccagctgaag

SEQ ID NO: 562495 - DNA, 15 bp, Homo sapiens
aaggacccagctgaa

SEQ ID NO: 562496 - DNA, 15 bp, Homo sapiens
aaaggacccagctga

SEQ ID NO: 562497 - DNA, 15 bp, Homo sapiens
aaaaggacccagctg

SEQ ID NO: 562498 - DNA, 15 bp, Homo sapiens
caaaaggacccagct

SEQ ID NO: 562499 - DNA, 15 bp, Homo sapiens
acaaaaggacccagc

SEQ ID NO: 562500 - DNA, 15 bp, Homo sapiens
cacaaaaggacccag

SEQ ID NO: 562501 - DNA, 15 bp, Homo sapiens
gcacaaaaggaccca

SEQ ID NO: 562502 - DNA, 15 bp, Homo sapiens
tgcacaaaaggaccc

SEQ ID NO: 562503 - DNA, 15 bp, Homo sapiens
ctgcacaaaaggacc

SEQ ID NO: 562504 - DNA, 15 bp, Homo sapiens
actgcacaaaaggac

SEQ ID NO: 562505 - DNA, 15 bp, Homo sapiens
cactgcacaaaagga

SEQ ID NO: 562506 - DNA, 15 bp, Homo sapiens
tcactgcacaaaagg

SEQ ID NO: 562507 - DNA, 15 bp, Homo sapiens
ttcactgcacaaaag

SEQ ID NO: 562508 - DNA, 15 bp, Homo sapiens
gttcactgcacaaaa

SEQ ID NO: 562509 - DNA, 15 bp, Homo sapiens
tgttcactgcacaaa

SEQ ID NO: 562510 - DNA, 15 bp, Homo sapiens
ctgttcactgcacaa

SEQ ID NO: 562511 - DNA, 15 bp, Homo sapiens
gctgttcactgcaca

SEQ ID NO: 562512 - DNA, 15 bp, Homo sapiens
ggctgttcactgcac

SEQ ID NO: 562513 - DNA, 15 bp, Homo sapiens
aggctgttcactgca

SEQ ID NO: 562514 - DNA, 15 bp, Homo sapiens
caggctgttcactgc

SEQ ID NO: 562515 - DNA, 15 bp, Homo sapiens
ccaggctgttcactg

SEQ ID NO: 562516 - DNA, 15 bp, Homo sapiens
tccaggctgttcact

SEQ ID NO: 562517 - DNA, 15 bp, Homo sapiens
gtccaggctgttcac

SEQ ID NO: 562518 - DNA, 15 bp, Homo sapiens
tgtccaggctgttca

SEQ ID NO: 562519 - DNA, 15 bp, Homo sapiens
ttgtccaggctgttc

SEQ ID NO: 562520 - DNA, 15 bp, Homo sapiens
gttgtccaggctgtt

SEQ ID NO: 562521 - DNA, 15 bp, Homo sapiens
agttgtccaggctgt

SEQ ID NO: 562522 - DNA, 15 bp, Homo sapiens
cagttgtccaggctg

SEQ ID NO: 562523 - DNA, 15 bp, Homo sapiens
acagttgtccaggct

SEQ ID NO: 562524 - DNA, 15 bp, Homo sapiens
gacagttgtccaggc

SEQ ID NO: 562525 - DNA, 15 bp, Homo sapiens
ggacagttgtccagg

SEQ ID NO: 562526 - DNA, 15 bp, Homo sapiens
tggacagttgtccag

SEQ ID NO: 562527 - DNA, 15 bp, Homo sapiens
ctggacagttgtcca

SEQ ID NO: 562528 - DNA, 15 bp, Homo sapiens
cctggacagttgtcc

SEQ ID NO: 562529 - DNA, 15 bp, Homo sapiens
acctggacagttgtc

SEQ ID NO: 562530 - DNA, 15 bp, Homo sapiens
cacctggacagttgt

SEQ ID NO: 562531 - DNA, 15 bp, Homo sapiens
ccacctggacagttg

SEQ ID NO: 562532 - DNA, 15 bp, Homo sapiens
gccacctggacagtt

SEQ ID NO: 562533 - DNA, 15 bp, Homo sapiens
ggccacctggacagt

SEQ ID NO: 562534 - DNA, 15 bp, Homo sapiens
gggccacctggacag

SEQ ID NO: 562535 - DNA, 15 bp, Homo sapiens
agggccacctggaca

SEQ ID NO: 562536 - DNA, 15 bp, Homo sapiens
aagggccacctggac

SEQ ID NO: 562537 - DNA, 15 bp, Homo sapiens
gaagggccacctgga

SEQ ID NO: 562538 - DNA, 15 bp, Homo sapiens
tgaagggccacctgg

SEQ ID NO: 562539 - DNA, 15 bp, Homo sapiens
ctgaagggccacctg

SEQ ID NO: 562540 - DNA, 15 bp, Homo sapiens
cctgaagggccacct

SEQ ID NO: 562541 - DNA, 15 bp, Homo sapiens
ccctgaagggccacc

SEQ ID NO: 562542 - DNA, 15 bp, Homo sapiens
tccctgaagggccac

SEQ ID NO: 562543 - DNA, 15 bp, Homo sapiens
atccctgaagggcca

SEQ ID NO: 562544 - DNA, 15 bp, Homo sapiens
tatccctgaagggcc

SEQ ID NO: 562545 - DNA, 15 bp, Homo sapiens
atatccctgaagggc

SEQ ID NO: 562546 - DNA, 15 bp, Homo sapiens
catatccctgaaggg

SEQ ID NO: 562547 - DNA, 15 bp, Homo sapiens
acatatccctgaagg

SEQ ID NO: 562548 - DNA, 15 bp, Homo sapiens
aacatatccctgaag

SEQ ID NO: 562549 - DNA, 15 bp, Homo sapiens
gaacatatccctgaa

SEQ ID NO: 562550 - DNA, 15 bp, Homo sapiens
ggaacatatccctga

SEQ ID NO: 562551 - DNA, 15 bp, Homo sapiens
aggaacatatccctg

SEQ ID NO: 562552 - DNA, 15 bp, Homo sapiens
caggaacatatccct

SEQ ID NO: 562553 - DNA, 15 bp, Homo sapiens
ccaggaacatatccc

SEQ ID NO: 562554 - DNA, 15 bp, Homo sapiens
tccaggaacatatcc

SEQ ID NO: 562555 - DNA, 15 bp, Homo sapiens
gtccaggaacatatc

SEQ ID NO: 562556 - DNA, 15 bp, Homo sapiens
ggtccaggaacatat

SEQ ID NO: 562557 - DNA, 15 bp, Homo sapiens
aggtccaggaacata

SEQ ID NO: 562558 - DNA, 15 bp, Homo sapiens
aaggtccaggaacat

SEQ ID NO: 562559 - DNA, 15 bp, Homo sapiens
aaaggtccaggaaca

SEQ ID NO: 562560 - DNA, 15 bp, Homo sapiens
gaaaggtccaggaac

SEQ ID NO: 562561 - DNA, 15 bp, Homo sapiens
agaaaggtccaggaa

SEQ ID NO: 562562 - DNA, 15 bp, Homo sapiens
aagaaaggtccagga

SEQ ID NO: 562563 - DNA, 15 bp, Homo sapiens
taagaaaggtccagg

SEQ ID NO: 562564 - DNA, 15 bp, Homo sapiens
ctaagaaaggtccag

SEQ ID NO: 562565 - DNA, 15 bp, Homo sapiens
gctaagaaaggtcca

SEQ ID NO: 562566 - DNA, 15 bp, Homo sapiens
agctaagaaaggtcc

SEQ ID NO: 562567 - DNA, 15 bp, Homo sapiens
aagctaagaaaggtc

SEQ ID NO: 562568 - DNA, 15 bp, Homo sapiens
gaagctaagaaaggt

SEQ ID NO: 562569 - DNA, 15 bp, Homo sapiens
agaagctaagaaagg

SEQ ID NO: 562570 - DNA, 15 bp, Homo sapiens
gagaagctaagaaag

SEQ ID NO: 562571 - DNA, 15 bp, Homo sapiens
tgagaagctaagaaa

SEQ ID NO: 562572 - DNA, 15 bp, Homo sapiens
gtgagaagctaagaa

SEQ ID NO: 562573 - DNA, 15 bp, Homo sapiens
ggtgagaagctaaga

SEQ ID NO: 562574 - DNA, 15 bp, Homo sapiens
cggtgagaagctaag

SEQ ID NO: 562575 - DNA, 15 bp, Homo sapiens
tcggtgagaagctaa

SEQ ID NO: 562576 - DNA, 15 bp, Homo sapiens
atcggtgagaagcta

SEQ ID NO: 562577 - DNA, 15 bp, Homo sapiens
gatcggtgagaagct

SEQ ID NO: 562578 - DNA, 15 bp, Homo sapiens
agatcggtgagaagc

SEQ ID NO: 562579 - DNA, 15 bp, Homo sapiens
aagatcggtgagaag

SEQ ID NO: 562580 - DNA, 15 bp, Homo sapiens
aaagatcggtgagaa

SEQ ID NO: 562581 - DNA, 15 bp, Homo sapiens
gaaagatcggtgaga

SEQ ID NO: 562582 - DNA, 15 bp, Homo sapiens
agaaagatcggtgag

SEQ ID NO: 562583 - DNA, 15 bp, Homo sapiens
aagaaagatcggtga

SEQ ID NO: 562584 - DNA, 15 bp, Homo sapiens
gaagaaagatcggtg

SEQ ID NO: 562585 - DNA, 15 bp, Homo sapiens
ggaagaaagatcggt

SEQ ID NO: 562586 - DNA, 15 bp, Homo sapiens
tggaagaaagatcgg

SEQ ID NO: 562587 - DNA, 15 bp, Homo sapiens
gtggaagaaagatcg

SEQ ID NO: 562588 - DNA, 15 bp, Homo sapiens
cgtggaagaaagatc

SEQ ID NO: 562589 - DNA, 15 bp, Homo sapiens
gcgtggaagaaagat

SEQ ID NO: 562590 - DNA, 15 bp, Homo sapiens
ggcgtggaagaaaga

SEQ ID NO: 562591 - DNA, 15 bp, Homo sapiens
tggcgtggaagaaag

SEQ ID NO: 562592 - DNA, 15 bp, Homo sapiens
ttggcgtggaagaaa

SEQ ID NO: 562593 - DNA, 15 bp, Homo sapiens
cttggcgtggaagaa

SEQ ID NO: 562594 - DNA, 15 bp, Homo sapiens
acttggcgtggaaga

SEQ ID NO: 562595 - DNA, 15 bp, Homo sapiens
gacttggcgtggaag

SEQ ID NO: 562596 - DNA, 15 bp, Homo sapiens
ggacttggcgtggaa

SEQ ID NO: 562597 - DNA, 15 bp, Homo sapiens
tggacttggcgtgga

SEQ ID NO: 562598 - DNA, 15 bp, Homo sapiens
atggacttggcgtgg

SEQ ID NO: 562599 - DNA, 15 bp, Homo sapiens
catggacttggcgtg

SEQ ID NO: 562600 - DNA, 15 bp, Homo sapiens
acatggacttggcgt

SEQ ID NO: 562601 - DNA, 15 bp, Homo sapiens
aacatggacttggcg

SEQ ID NO: 562602 - DNA, 15 bp, Homo sapiens
gaacatggacttggc

SEQ ID NO: 562603 - DNA, 15 bp, Homo sapiens
ggaacatggacttgg

SEQ ID NO: 562604 - DNA, 15 bp, Homo sapiens
aggaacatggacttg

SEQ ID NO: 562605 - DNA, 15 bp, Homo sapiens
gaggaacatggactt

SEQ ID NO: 562606 - DNA, 15 bp, Homo sapiens
tgaggaacatggact

SEQ ID NO: 562607 - DNA, 15 bp, Homo sapiens
ctgaggaacatggac

SEQ ID NO: 562608 - DNA, 15 bp, Homo sapiens
actgaggaacatgga

SEQ ID NO: 562609 - DNA, 15 bp, Homo sapiens
gactgaggaacatgg

SEQ ID NO: 562610 - DNA, 15 bp, Homo sapiens
tgactgaggaacatg

SEQ ID NO: 562611 - DNA, 15 bp, Homo sapiens
ttgactgaggaacat

SEQ ID NO: 562612 - DNA, 15 bp, Homo sapiens
tttgactgaggaaca

SEQ ID NO: 562613 - DNA, 15 bp, Homo sapiens
gtttgactgaggaac

SEQ ID NO: 562614 - DNA, 15 bp, Homo sapiens
tgtttgactgaggaa

SEQ ID NO: 562615 - DNA, 15 bp, Homo sapiens
ttgtttgactgagga

SEQ ID NO: 562616 - DNA, 15 bp, Homo sapiens
cttgtttgactgagg

SEQ ID NO: 562617 - DNA, 15 bp, Homo sapiens
acttgtttgactgag

SEQ ID NO: 562618 - DNA, 15 bp, Homo sapiens
cacttgtttgactga

SEQ ID NO: 562619 - DNA, 15 bp, Homo sapiens
ccacttgtttgactg

SEQ ID NO: 562620 - DNA, 15 bp, Homo sapiens
gccacttgtttgact

SEQ ID NO: 562621 - DNA, 15 bp, Homo sapiens
tgccacttgtttgac

SEQ ID NO: 562622 - DNA, 15 bp, Homo sapiens
ttgccacttgtttga

SEQ ID NO: 562623 - DNA, 15 bp, Homo sapiens
tttgccacttgtttg

SEQ ID NO: 562624 - DNA, 15 bp, Homo sapiens
ctttgccacttgttt

SEQ ID NO: 562625 - DNA, 15 bp, Homo sapiens
tctttgccacttgtt

SEQ ID NO: 562626 - DNA, 15 bp, Homo sapiens
ctctttgccacttgt

SEQ ID NO: 562627 - DNA, 15 bp, Homo sapiens
cctctttgccacttg

SEQ ID NO: 562628 - DNA, 15 bp, Homo sapiens
tcctctttgccactt

SEQ ID NO: 562629 - DNA, 15 bp, Homo sapiens
ctcctctttgccact

SEQ ID NO: 562630 - DNA, 15 bp, Homo sapiens
cctcctctttgccac

SEQ ID NO: 562631 - DNA, 15 bp, Homo sapiens
tcctcctctttgcca

SEQ ID NO: 562632 - DNA, 15 bp, Homo sapiens
ctcctcctctttgcc

SEQ ID NO: 562633 - DNA, 15 bp, Homo sapiens
cctcctcctctttgc

SEQ ID NO: 562634 - DNA, 15 bp, Homo sapiens
tcctcctcctctttg

SEQ ID NO: 562635 - DNA, 15 bp, Homo sapiens
ctcctcctcctcttt

SEQ ID NO: 562636 - DNA, 15 bp, Homo sapiens
cctcctcctcctctt

SEQ ID NO: 562637 - DNA, 15 bp, Homo sapiens
tcctcctcctcctct

SEQ ID NO: 562638 - DNA, 15 bp, Homo sapiens
ctcctcctcctcctc

SEQ ID NO: 562639 - DNA, 15 bp, Homo sapiens
cctcctcctcctcct

SEQ ID NO: 562640 - DNA, 15 bp, Homo sapiens
cccctcctcctcctc

SEQ ID NO: 562641 - DNA, 15 bp, Homo sapiens
tcccctcctcctcct

SEQ ID NO: 562642 - DNA, 15 bp, Homo sapiens
ttcccctcctcctcc

SEQ ID NO: 562643 - DNA, 15 bp, Homo sapiens
cttcccctcctcctc

SEQ ID NO: 562644 - DNA, 15 bp, Homo sapiens
ccttcccctcctcct

SEQ ID NO: 562645 - DNA, 15 bp, Homo sapiens
tccttcccctcctcc

SEQ ID NO: 562646 - DNA, 15 bp, Homo sapiens
ctccttcccctcctc

SEQ ID NO: 562647 - DNA, 15 bp, Homo sapiens
cctccttcccctcct

SEQ ID NO: 562648 - DNA, 15 bp, Homo sapiens
tcctccttcccctcc

SEQ ID NO: 562649 - DNA, 15 bp, Homo sapiens
ctcctccttcccctc

SEQ ID NO: 562650 - DNA, 15 bp, Homo sapiens
cctcctccttcccct

SEQ ID NO: 562651 - DNA, 15 bp, Homo sapiens
tcctcctccttcccc

SEQ ID NO: 562652 - DNA, 15 bp, Homo sapiens
ttcctcctccttccc

SEQ ID NO: 562653 - DNA, 15 bp, Homo sapiens
gttcctcctccttcc

SEQ ID NO: 562654 - DNA, 15 bp, Homo sapiens
ggttcctcctccttc

SEQ ID NO: 562655 - DNA, 15 bp, Homo sapiens
aggttcctcctcctt

SEQ ID NO: 562656 - DNA, 15 bp, Homo sapiens
caggttcctcctcct

SEQ ID NO: 562657 - DNA, 15 bp, Homo sapiens
gcaggttcctcctcc

SEQ ID NO: 562658 - DNA, 15 bp, Homo sapiens
agcaggttcctcctc

SEQ ID NO: 562659 - DNA, 15 bp, Homo sapiens
aagcaggttcctcct

SEQ ID NO: 562660 - DNA, 15 bp, Homo sapiens
gaagcaggttcctcc

SEQ ID NO: 562661 - DNA, 15 bp, Homo sapiens
tgaagcaggttcctc

SEQ ID NO: 562662 - DNA, 15 bp, Homo sapiens
gtgaagcaggttcct

SEQ ID NO: 562663 - DNA, 15 bp, Homo sapiens
ggtgaagcaggttcc

SEQ ID NO: 562664 - DNA, 15 bp, Homo sapiens
gggtgaagcaggttc

SEQ ID NO: 562665 - DNA, 15 bp, Homo sapiens
agggtgaagcaggtt

SEQ ID NO: 562666 - DNA, 15 bp, Homo sapiens
gagggtgaagcaggt

SEQ ID NO: 562667 - DNA, 15 bp, Homo sapiens
agagggtgaagcagg

SEQ ID NO: 562668 - DNA, 15 bp, Homo sapiens
cagagggtgaagcag

SEQ ID NO: 562669 - DNA, 15 bp, Homo sapiens
ccagagggtgaagca

SEQ ID NO: 562670 - DNA, 15 bp, Homo sapiens
gccagagggtgaagc

SEQ ID NO: 562671 - DNA, 15 bp, Homo sapiens
tgccagagggtgaag

SEQ ID NO: 562672 - DNA, 15 bp, Homo sapiens
gtgccagagggtgaa

SEQ ID NO: 562673 - DNA, 15 bp, Homo sapiens
ggtgccagagggtga

SEQ ID NO: 562674 - DNA, 15 bp, Homo sapiens
aggtgccagagggtg

SEQ ID NO: 562675 - DNA, 15 bp, Homo sapiens
caggtgccagagggt

SEQ ID NO: 562676 - DNA, 15 bp, Homo sapiens
gcaggtgccagaggg

SEQ ID NO: 562677 - DNA, 15 bp, Homo sapiens
cgcaggtgccagagg

SEQ ID NO: 562678 - DNA, 15 bp, Homo sapiens
ccgcaggtgccagag

SEQ ID NO: 562679 - DNA, 15 bp, Homo sapiens
cccgcaggtgccaga

SEQ ID NO: 562680 - DNA, 15 bp, Homo sapiens
acccgcaggtgccag

SEQ ID NO: 562681 - DNA, 15 bp, Homo sapiens
aacccgcaggtgcca

SEQ ID NO: 562682 - DNA, 15 bp, Homo sapiens
aaacccgcaggtgcc

SEQ ID NO: 562683 - DNA, 15 bp, Homo sapiens
aaaacccgcaggtgc

SEQ ID NO: 562684 - DNA, 15 bp, Homo sapiens
caaaacccgcaggtg

SEQ ID NO: 562685 - DNA, 15 bp, Homo sapiens
acaaaacccgcaggt

SEQ ID NO: 562686 - DNA, 15 bp, Homo sapiens
aacaaaacccgcagg

SEQ ID NO: 562687 - DNA, 15 bp, Homo sapiens
gaacaaaacccgcag

SEQ ID NO: 562688 - DNA, 15 bp, Homo sapiens
ggaacaaaacccgca

SEQ ID NO: 562689 - DNA, 15 bp, Homo sapiens
tggaacaaaacccgc

SEQ ID NO: 562690 - DNA, 15 bp, Homo sapiens
gtggaacaaaacccg

SEQ ID NO: 562691 - DNA, 15 bp, Homo sapiens
cgtggaacaaaaccc

SEQ ID NO: 562692 - DNA, 15 bp, Homo sapiens
acgtggaacaaaacc

SEQ ID NO: 562693 - DNA, 15 bp, Homo sapiens
cacgtggaacaaaac

SEQ ID NO: 562694 - DNA, 15 bp, Homo sapiens
acacgtggaacaaaa

SEQ ID NO: 562695 - DNA, 15 bp, Homo sapiens
gacacgtggaacaaa

SEQ ID NO: 562696 - DNA, 15 bp, Homo sapiens
agacacgtggaacaa

SEQ ID NO: 562697 - DNA, 15 bp, Homo sapiens
aagacacgtggaaca

SEQ ID NO: 562698 - DNA, 15 bp, Homo sapiens
gaagacacgtggaac

SEQ ID NO: 562699 - DNA, 15 bp, Homo sapiens
ggaagacacgtggaa

SEQ ID NO: 562700 - DNA, 15 bp, Homo sapiens
aggaagacacgtgga

SEQ ID NO: 562701 - DNA, 15 bp, Homo sapiens
aaggaagacacgtgg

SEQ ID NO: 562702 - DNA, 15 bp, Homo sapiens
caaggaagacacgtg

SEQ ID NO: 562703 - DNA, 15 bp, Homo sapiens
ccaaggaagacacgt

SEQ ID NO: 562704 - DNA, 15 bp, Homo sapiens
cccaaggaagacacg

SEQ ID NO: 562705 - DNA, 15 bp, Homo sapiens
tcccaaggaagacac

SEQ ID NO: 562706 - DNA, 15 bp, Homo sapiens
ttcccaaggaagaca

SEQ ID NO: 562707 - DNA, 15 bp, Homo sapiens
tttcccaaggaagac

SEQ ID NO: 562708 - DNA, 15 bp, Homo sapiens
ctttcccaaggaaga

SEQ ID NO: 562709 - DNA, 15 bp, Homo sapiens
tctttcccaaggaag

SEQ ID NO: 562710 - DNA, 15 bp, Homo sapiens
gtctttcccaaggaa

SEQ ID NO: 562711 - DNA, 15 bp, Homo sapiens
tgtctttcccaagga

SEQ ID NO: 562712 - DNA, 15 bp, Homo sapiens
ttgtctttcccaagg

SEQ ID NO: 562713 - DNA, 15 bp, Homo sapiens
cttgtctttcccaag

SEQ ID NO: 562714 - DNA, 15 bp, Homo sapiens
ccttgtctttcccaa

SEQ ID NO: 562715 - DNA, 15 bp, Homo sapiens
cccttgtctttccca

SEQ ID NO: 562716 - DNA, 15 bp, Homo sapiens
ccccttgtctttccc

SEQ ID NO: 562717 - DNA, 15 bp, Homo sapiens
accccttgtctttcc

SEQ ID NO: 562718 - DNA, 15 bp, Homo sapiens
aaccccttgtctttc

SEQ ID NO: 562719 - DNA, 15 bp, Homo sapiens
gaaccccttgtcttt

SEQ ID NO: 562720 - DNA, 15 bp, Homo sapiens
agaaccccttgtctt

SEQ ID NO: 562721 - DNA, 15 bp, Homo sapiens
aagaaccccttgtct

SEQ ID NO: 562722 - DNA, 15 bp, Homo sapiens
aaagaaccccttgtc

SEQ ID NO: 562723 - DNA, 15 bp, Homo sapiens
aaaagaaccccttgt

SEQ ID NO: 562724 - DNA, 15 bp, Homo sapiens
taaaagaaccccttg

SEQ ID NO: 562725 - DNA, 15 bp, Homo sapiens
gtaaaagaacccctt

SEQ ID NO: 562726 - DNA, 15 bp, Homo sapiens
tgtaaaagaacccct

SEQ ID NO: 562727 - DNA, 15 bp, Homo sapiens
ctgtaaaagaacccc

SEQ ID NO: 562728 - DNA, 15 bp, Homo sapiens
gctgtaaaagaaccc

SEQ ID NO: 562729 - DNA, 15 bp, Homo sapiens
ggctgtaaaagaacc

SEQ ID NO: 562730 - DNA, 15 bp, Homo sapiens
aggctgtaaaagaac

SEQ ID NO: 562731 - DNA, 15 bp, Homo sapiens
taggctgtaaaagaa

SEQ ID NO: 562732 - DNA, 15 bp, Homo sapiens
ctaggctgtaaaaga

SEQ ID NO: 562733 - DNA, 15 bp, Homo sapiens
cctaggctgtaaaag

SEQ ID NO: 562734 - DNA, 15 bp, Homo sapiens
ccctaggctgtaaaa

SEQ ID NO: 562735 - DNA, 15 bp, Homo sapiens
cccctaggctgtaaa

SEQ ID NO: 562736 - DNA, 15 bp, Homo sapiens
acccctaggctgtaa

SEQ ID NO: 562737 - DNA, 15 bp, Homo sapiens
cacccctaggctgta

SEQ ID NO: 562738 - DNA, 15 bp, Homo sapiens
ccacccctaggctgt

SEQ ID NO: 562739 - DNA, 15 bp, Homo sapiens
accacccctaggctg

SEQ ID NO: 562740 - DNA, 15 bp, Homo sapiens
aaccacccctaggct

SEQ ID NO: 562741 - DNA, 15 bp, Homo sapiens
aaaccacccctaggc

SEQ ID NO: 562742 - DNA, 15 bp, Homo sapiens
gaaaccacccctagg

SEQ ID NO: 562743 - DNA, 15 bp, Homo sapiens
ggaaaccacccctag

SEQ ID NO: 562744 - DNA, 15 bp, Homo sapiens
gggaaaccaccccta

SEQ ID NO: 562745 - DNA, 15 bp, Homo sapiens
ggggaaaccacccct

SEQ ID NO: 562746 - DNA, 15 bp, Homo sapiens
aggggaaaccacccc

SEQ ID NO: 562747 - DNA, 15 bp, Homo sapiens
aaggggaaaccaccc

SEQ ID NO: 562748 - DNA, 15 bp, Homo sapiens
aaaggggaaaccacc

SEQ ID NO: 562749 - DNA, 15 bp, Homo sapiens
gaaaggggaaaccac

SEQ ID NO: 562750 - DNA, 15 bp, Homo sapiens
agaaaggggaaacca

SEQ ID NO: 562751 - DNA, 15 bp, Homo sapiens
tagaaaggggaaacc

SEQ ID NO: 562752 - DNA, 15 bp, Homo sapiens
gtagaaaggggaaac

SEQ ID NO: 562753 - DNA, 15 bp, Homo sapiens
agtagaaaggggaaa

SEQ ID NO: 562754 - DNA, 15 bp, Homo sapiens
aagtagaaaggggaa

SEQ ID NO: 562755 - DNA, 15 bp, Homo sapiens
gaagtagaaagggga

SEQ ID NO: 562756 - DNA, 15 bp, Homo sapiens
agaagtagaaagggg

SEQ ID NO: 562757 - DNA, 15 bp, Homo sapiens
cagaagtagaaaggg

SEQ ID NO: 562758 - DNA, 15 bp, Homo sapiens
tcagaagtagaaagg

SEQ ID NO: 562759 - DNA, 15 bp, Homo sapiens
ctcagaagtagaaag

SEQ ID NO: 562760 - DNA, 15 bp, Homo sapiens
actcagaagtagaaa

SEQ ID NO: 562761 - DNA, 15 bp, Homo sapiens
cactcagaagtagaa

SEQ ID NO: 562762 - DNA, 15 bp, Homo sapiens
tcactcagaagtaga

SEQ ID NO: 562763 - DNA, 15 bp, Homo sapiens
ctcactcagaagtag

SEQ ID NO: 562764 - DNA, 15 bp, Homo sapiens
tctcactcagaagta

SEQ ID NO: 562765 - DNA, 15 bp, Homo sapiens
gtctcactcagaagt

SEQ ID NO: 562766 - DNA, 15 bp, Homo sapiens
ggtctcactcagaag

SEQ ID NO: 562767 - DNA, 15 bp, Homo sapiens
aggtctcactcagaa

SEQ ID NO: 562768 - DNA, 15 bp, Homo sapiens
aaggtctcactcaga

SEQ ID NO: 562769 - DNA, 15 bp, Homo sapiens
gaaggtctcactcag

SEQ ID NO: 562770 - DNA, 15 bp, Homo sapiens
agaaggtctcactca

SEQ ID NO: 562771 - DNA, 15 bp, Homo sapiens
gagaaggtctcactc

SEQ ID NO: 562772 - DNA, 15 bp, Homo sapiens
tgagaaggtctcact

SEQ ID NO: 562773 - DNA, 15 bp, Homo sapiens
ttgagaaggtctcac

SEQ ID NO: 562774 - DNA, 15 bp, Homo sapiens
cttgagaaggtctca

SEQ ID NO: 562775 - DNA, 15 bp, Homo sapiens
acttgagaaggtctc

SEQ ID NO: 562776 - DNA, 15 bp, Homo sapiens
gacttgagaaggtct

SEQ ID NO: 562777 - DNA, 15 bp, Homo sapiens
tgacttgagaaggtc

SEQ ID NO: 562778 - DNA, 15 bp, Homo sapiens
gtgacttgagaaggt

SEQ ID NO: 562779 - DNA, 15 bp, Homo sapiens
cgtgacttgagaagg

SEQ ID NO: 562780 - DNA, 15 bp, Homo sapiens
ccgtgacttgagaag

SEQ ID NO: 562781 - DNA, 15 bp, Homo sapiens
gccgtgacttgagaa

SEQ ID NO: 562782 - DNA, 15 bp, Homo sapiens
agccgtgacttgaga

SEQ ID NO: 562783 - DNA, 15 bp, Homo sapiens
gagccgtgacttgag

SEQ ID NO: 562784 - DNA, 15 bp, Homo sapiens
agagccgtgacttga

SEQ ID NO: 562785 - DNA, 15 bp, Homo sapiens
aagagccgtgacttg

SEQ ID NO: 562786 - DNA, 15 bp, Homo sapiens
aaagagccgtgactt

SEQ ID NO: 562787 - DNA, 15 bp, Homo sapiens
caaagagccgtgact

SEQ ID NO: 562788 - DNA, 15 bp, Homo sapiens
ccaaagagccgtgac

SEQ ID NO: 562789 - DNA, 15 bp, Homo sapiens
cccaaagagccgtga

SEQ ID NO: 562790 - DNA, 15 bp, Homo sapiens
gcccaaagagccgtg

SEQ ID NO: 562791 - DNA, 15 bp, Homo sapiens
ggcccaaagagccgt

SEQ ID NO: 562792 - DNA, 15 bp, Homo sapiens
gggcccaaagagccg

SEQ ID NO: 562793 - DNA, 15 bp, Homo sapiens
tgggcccaaagagcc

SEQ ID NO: 562794 - DNA, 15 bp, Homo sapiens
gtgggcccaaagagc

SEQ ID NO: 562795 - DNA, 15 bp, Homo sapiens
tgtgggcccaaagag

SEQ ID NO: 562796 - DNA, 15 bp, Homo sapiens
atgtgggcccaaaga

SEQ ID NO: 562797 - DNA, 15 bp, Homo sapiens
catgtgggcccaaag

SEQ ID NO: 562798 - DNA, 15 bp, Homo sapiens
ccatgtgggcccaaa

SEQ ID NO: 562799 - DNA, 15 bp, Homo sapiens
gccatgtgggcccaa

SEQ ID NO: 562800 - DNA, 15 bp, Homo sapiens
agccatgtgggccca

SEQ ID NO: 562801 - DNA, 15 bp, Homo sapiens
tagccatgtgggccc

SEQ ID NO: 562802 - DNA, 15 bp, Homo sapiens
ttagccatgtgggcc

SEQ ID NO: 562803 - DNA, 15 bp, Homo sapiens
cttagccatgtgggc

SEQ ID NO: 562804 - DNA, 15 bp, Homo sapiens
ccttagccatgtggg

SEQ ID NO: 562805 - DNA, 15 bp, Homo sapiens
accttagccatgtgg

SEQ ID NO: 562806 - DNA, 15 bp, Homo sapiens
gaccttagccatgtg

SEQ ID NO: 562807 - DNA, 15 bp, Homo sapiens
agaccttagccatgt

SEQ ID NO: 562808 - DNA, 15 bp, Homo sapiens
tagaccttagccatg

SEQ ID NO: 562809 - DNA, 15 bp, Homo sapiens
ctagaccttagccat

SEQ ID NO: 562810 - DNA, 15 bp, Homo sapiens
gctagaccttagcca

SEQ ID NO: 562811 - DNA, 15 bp, Homo sapiens
ggctagaccttagcc

SEQ ID NO: 562812 - DNA, 15 bp, Homo sapiens
tggctagaccttagc

SEQ ID NO: 562813 - DNA, 15 bp, Homo sapiens
gtggctagaccttag

SEQ ID NO: 562814 - DNA, 15 bp, Homo sapiens
ggtggctagacctta

SEQ ID NO: 562815 - DNA, 15 bp, Homo sapiens
aggtggctagacctt

SEQ ID NO: 562816 - DNA, 15 bp, Homo sapiens
caggtggctagacct

SEQ ID NO: 562817 - DNA, 15 bp, Homo sapiens
acaggtggctagacc

SEQ ID NO: 562818 - DNA, 15 bp, Homo sapiens
cacaggtggctagac

SEQ ID NO: 562819 - DNA, 15 bp, Homo sapiens
ccacaggtggctaga

SEQ ID NO: 562820 - DNA, 15 bp, Homo sapiens
cccacaggtggctag

SEQ ID NO: 562821 - DNA, 15 bp, Homo sapiens
acccacaggtggcta

SEQ ID NO: 562822 - DNA, 15 bp, Homo sapiens
cacccacaggtggct

SEQ ID NO: 562823 - DNA, 15 bp, Homo sapiens
acacccacaggtggc

SEQ ID NO: 562824 - DNA, 15 bp, Homo sapiens
gacacccacaggtgg

SEQ ID NO: 562825 - DNA, 15 bp, Homo sapiens
ggacacccacaggtg

SEQ ID NO: 562826 - DNA, 15 bp, Homo sapiens
aggacacccacaggt

SEQ ID NO: 562827 - DNA, 15 bp, Homo sapiens
caggacacccacagg

SEQ ID NO: 562828 - DNA, 15 bp, Homo sapiens
acaggacacccacag

SEQ ID NO: 562829 - DNA, 15 bp, Homo sapiens
cacaggacacccaca

SEQ ID NO: 562830 - DNA, 15 bp, Homo sapiens
gcacaggacacccac

SEQ ID NO: 562831 - DNA, 15 bp, Homo sapiens
agcacaggacaccca

SEQ ID NO: 562832 - DNA, 15 bp, Homo sapiens
cagcacaggacaccc

SEQ ID NO: 562833 - DNA, 15 bp, Homo sapiens
gcagcacaggacacc

SEQ ID NO: 562834 - DNA, 15 bp, Homo sapiens
ggcagcacaggacac

SEQ ID NO: 562835 - DNA, 15 bp, Homo sapiens
aggcagcacaggaca

SEQ ID NO: 562836 - DNA, 15 bp, Homo sapiens
gaggcagcacaggac

SEQ ID NO: 562837 - DNA, 15 bp, Homo sapiens
tgaggcagcacagga

SEQ ID NO: 562838 - DNA, 15 bp, Homo sapiens
ctgaggcagcacagg

SEQ ID NO: 562839 - DNA, 15 bp, Homo sapiens
actgaggcagcacag

SEQ ID NO: 562840 - DNA, 15 bp, Homo sapiens
cactgaggcagcaca

SEQ ID NO: 562841 - DNA, 15 bp, Homo sapiens
ccactgaggcagcac

SEQ ID NO: 562842 - DNA, 15 bp, Homo sapiens
cccactgaggcagca

SEQ ID NO: 562843 - DNA, 15 bp, Homo sapiens
acccactgaggcagc

SEQ ID NO: 562844 - DNA, 15 bp, Homo sapiens
cacccactgaggcag

SEQ ID NO: 562845 - DNA, 15 bp, Homo sapiens
ccacccactgaggca

SEQ ID NO: 562846 - DNA, 15 bp, Homo sapiens
accacccactgaggc

SEQ ID NO: 562847 - DNA, 15 bp, Homo sapiens
caccacccactgagg

SEQ ID NO: 562848 - DNA, 15 bp, Homo sapiens
acaccacccactgag

SEQ ID NO: 562849 - DNA, 15 bp, Homo sapiens
cacaccacccactga

SEQ ID NO: 562850 - DNA, 15 bp, Homo sapiens
ccacaccacccactg

SEQ ID NO: 562851 - DNA, 15 bp, Homo sapiens
cccacaccacccact

SEQ ID NO: 562852 - DNA, 15 bp, Homo sapiens
ccccacaccacccac

SEQ ID NO: 562853 - DNA, 15 bp, Homo sapiens
cccccacaccaccca

SEQ ID NO: 562854 - DNA, 15 bp, Homo sapiens
gcccccacaccaccc

SEQ ID NO: 562855 - DNA, 15 bp, Homo sapiens
cgcccccacaccacc

SEQ ID NO: 562856 - DNA, 15 bp, Homo sapiens
ccgcccccacaccac

SEQ ID NO: 562857 - DNA, 15 bp, Homo sapiens
cccgcccccacacca

SEQ ID NO: 562858 - DNA, 15 bp, Homo sapiens
ccccgcccccacacc

SEQ ID NO: 562859 - DNA, 15 bp, Homo sapiens
gccccgcccccacac

SEQ ID NO: 562860 - DNA, 15 bp, Homo sapiens
agccccgcccccaca

SEQ ID NO: 562861 - DNA, 15 bp, Homo sapiens
cagccccgcccccac

SEQ ID NO: 562862 - DNA, 15 bp, Homo sapiens
tcagccccgccccca

SEQ ID NO: 562863 - DNA, 15 bp, Homo sapiens
gtcagccccgccccc

SEQ ID NO: 562864 - DNA, 15 bp, Homo sapiens
ggtcagccccgcccc

SEQ ID NO: 562865 - DNA, 15 bp, Homo sapiens
aggtcagccccgccc

SEQ ID NO: 562866 - DNA, 15 bp, Homo sapiens
gaggtcagccccgcc

SEQ ID NO: 562867 - DNA, 15 bp, Homo sapiens
ggaggtcagccccgc

SEQ ID NO: 562868 - DNA, 15 bp, Homo sapiens
gggaggtcagccccg

SEQ ID NO: 562869 - DNA, 15 bp, Homo sapiens
ggggaggtcagcccc

SEQ ID NO: 562870 - DNA, 15 bp, Homo sapiens
gggggaggtcagccc

SEQ ID NO: 562871 - DNA, 15 bp, Homo sapiens
cgggggaggtcagcc

SEQ ID NO: 562872 - DNA, 15 bp, Homo sapiens
gcgggggaggtcagc

SEQ ID NO: 562873 - DNA, 15 bp, Homo sapiens
cgcgggggaggtcag

SEQ ID NO: 562874 - DNA, 15 bp, Homo sapiens
gcgcgggggaggtca

SEQ ID NO: 562875 - DNA, 15 bp, Homo sapiens
ggcgcgggggaggtc

SEQ ID NO: 562876 - DNA, 15 bp, Homo sapiens
aggcgcgggggaggt

SEQ ID NO: 562877 - DNA, 15 bp, Homo sapiens
caggcgcgggggagg

SEQ ID NO: 562878 - DNA, 15 bp, Homo sapiens
ccaggcgcgggggag

SEQ ID NO: 562879 - DNA, 15 bp, Homo sapiens
gccaggcgcggggga

SEQ ID NO: 562880 - DNA, 15 bp, Homo sapiens
agccaggcgcggggg

SEQ ID NO: 562881 - DNA, 15 bp, Homo sapiens
gagccaggcgcgggg

SEQ ID NO: 562882 - DNA, 15 bp, Homo sapiens
tgagccaggcgcggg

SEQ ID NO: 562883 - DNA, 15 bp, Homo sapiens
ctgagccaggcgcgg

SEQ ID NO: 562884 - DNA, 15 bp, Homo sapiens
actgagccaggcgcg

SEQ ID NO: 562885 - DNA, 15 bp, Homo sapiens
cactgagccaggcgc

SEQ ID NO: 562886 - DNA, 15 bp, Homo sapiens
gcactgagccaggcg

SEQ ID NO: 562887 - DNA, 15 bp, Homo sapiens
tgcactgagccaggc

SEQ ID NO: 562888 - DNA, 15 bp, Homo sapiens
ctgcactgagccagg

SEQ ID NO: 562889 - DNA, 15 bp, Homo sapiens
gctgcactgagccag

SEQ ID NO: 562890 - DNA, 15 bp, Homo sapiens
tgctgcactgagcca

SEQ ID NO: 562891 - DNA, 15 bp, Homo sapiens
ctgctgcactgagcc

SEQ ID NO: 562892 - DNA, 15 bp, Homo sapiens
tctgctgcactgagc

SEQ ID NO: 562893 - DNA, 15 bp, Homo sapiens
gtctgctgcactgag

SEQ ID NO: 562894 - DNA, 15 bp, Homo sapiens
ggtctgctgcactga

SEQ ID NO: 562895 - DNA, 15 bp, Homo sapiens
gggtctgctgcactg

SEQ ID NO: 562896 - DNA, 15 bp, Homo sapiens
agggtctgctgcact

SEQ ID NO: 562897 - DNA, 15 bp, Homo sapiens
cagggtctgctgcac

SEQ ID NO: 562898 - DNA, 15 bp, Homo sapiens
ccagggtctgctgca

SEQ ID NO: 562899 - DNA, 15 bp, Homo sapiens
gccagggtctgctgc

SEQ ID NO: 562900 - DNA, 15 bp, Homo sapiens
ggccagggtctgctg

SEQ ID NO: 562901 - DNA, 15 bp, Homo sapiens
gggccagggtctgct

SEQ ID NO: 562902 - DNA, 15 bp, Homo sapiens
ggggccagggtctgc

SEQ ID NO: 562903 - DNA, 15 bp, Homo sapiens
aggggccagggtctg

SEQ ID NO: 562904 - DNA, 15 bp, Homo sapiens
caggggccagggtct

SEQ ID NO: 562905 - DNA, 15 bp, Homo sapiens
acaggggccagggtc

SEQ ID NO: 562906 - DNA, 15 bp, Homo sapiens
cacaggggccagggt

SEQ ID NO: 562907 - DNA, 15 bp, Homo sapiens
gcacaggggccaggg

SEQ ID NO: 562908 - DNA, 15 bp, Homo sapiens
ggcacaggggccagg

SEQ ID NO: 562909 - DNA, 15 bp, Homo sapiens
gggcacaggggccag

SEQ ID NO: 562910 - DNA, 15 bp, Homo sapiens
cgggcacaggggcca

SEQ ID NO: 562911 - DNA, 15 bp, Homo sapiens
gcgggcacaggggcc

SEQ ID NO: 562912 - DNA, 15 bp, Homo sapiens
agcgggcacaggggc

SEQ ID NO: 562913 - DNA, 15 bp, Homo sapiens
gagcgggcacagggg

SEQ ID NO: 562914 - DNA, 15 bp, Homo sapiens
agagcgggcacaggg

SEQ ID NO: 562915 - DNA, 15 bp, Homo sapiens
gagagcgggcacagg

SEQ ID NO: 562916 - DNA, 15 bp, Homo sapiens
agagagcgggcacag

SEQ ID NO: 562917 - DNA, 15 bp, Homo sapiens
cagagagcgggcaca

SEQ ID NO: 562918 - DNA, 15 bp, Homo sapiens
gcagagagcgggcac

SEQ ID NO: 562919 - DNA, 15 bp, Homo sapiens
ggcagagagcgggca

SEQ ID NO: 562920 - DNA, 15 bp, Homo sapiens
gggcagagagcgggc

SEQ ID NO: 562921 - DNA, 15 bp, Homo sapiens
agggcagagagcggg

SEQ ID NO: 562922 - DNA, 15 bp, Homo sapiens
cagggcagagagcgg

SEQ ID NO: 562923 - DNA, 15 bp, Homo sapiens
tcagggcagagagcg

SEQ ID NO: 562924 - DNA, 15 bp, Homo sapiens
ctcagggcagagagc

SEQ ID NO: 562925 - DNA, 15 bp, Homo sapiens
gctcagggcagagag

SEQ ID NO: 562926 - DNA, 15 bp, Homo sapiens
tgctcagggcagaga

SEQ ID NO: 562927 - DNA, 15 bp, Homo sapiens
ctgctcagggcagag

SEQ ID NO: 562928 - DNA, 15 bp, Homo sapiens
cctgctcagggcaga

SEQ ID NO: 562929 - DNA, 15 bp, Homo sapiens
tcctgctcagggcag

SEQ ID NO: 562930 - DNA, 15 bp, Homo sapiens
ctcctgctcagggca

SEQ ID NO: 562931 - DNA, 15 bp, Homo sapiens
actcctgctcagggc

SEQ ID NO: 562932 - DNA, 15 bp, Homo sapiens
aactcctgctcaggg

SEQ ID NO: 562933 - DNA, 15 bp, Homo sapiens
aaactcctgctcagg

SEQ ID NO: 562934 - DNA, 15 bp, Homo sapiens
caaactcctgctcag

SEQ ID NO: 562935 - DNA, 15 bp, Homo sapiens
tcaaactcctgctca

SEQ ID NO: 562936 - DNA, 15 bp, Homo sapiens
atcaaactcctgctc

SEQ ID NO: 562937 - DNA, 15 bp, Homo sapiens
aatcaaactcctgct

SEQ ID NO: 562938 - DNA, 15 bp, Homo sapiens
aaatcaaactcctgc

SEQ ID NO: 562939 - DNA, 15 bp, Homo sapiens
aaaatcaaactcctg

SEQ ID NO: 562940 - DNA, 15 bp, Homo sapiens
gaaaatcaaactcct

SEQ ID NO: 562941 - DNA, 15 bp, Homo sapiens
ggaaaatcaaactcc

SEQ ID NO: 562942 - DNA, 15 bp, Homo sapiens
aggaaaatcaaactc

SEQ ID NO: 562943 - DNA, 15 bp, Homo sapiens
taggaaaatcaaact

SEQ ID NO: 562944 - DNA, 15 bp, Homo sapiens
gtaggaaaatcaaac

SEQ ID NO: 562945 - DNA, 15 bp, Homo sapiens
ggtaggaaaatcaaa

SEQ ID NO: 562946 - DNA, 15 bp, Homo sapiens
gggtaggaaaatcaa

SEQ ID NO: 562947 - DNA, 15 bp, Homo sapiens
ggggtaggaaaatca

SEQ ID NO: 562948 - DNA, 15 bp, Homo sapiens
cggggtaggaaaatc

SEQ ID NO: 562949 - DNA, 15 bp, Homo sapiens
acggggtaggaaaat

SEQ ID NO: 562950 - DNA, 15 bp, Homo sapiens
cacggggtaggaaaa

SEQ ID NO: 562951 - DNA, 15 bp, Homo sapiens
ccacggggtaggaaa

SEQ ID NO: 562952 - DNA, 15 bp, Homo sapiens
accacggggtaggaa

SEQ ID NO: 562953 - DNA, 15 bp, Homo sapiens
caccacggggtagga

SEQ ID NO: 562954 - DNA, 15 bp, Homo sapiens
tcaccacggggtagg

SEQ ID NO: 562955 - DNA, 15 bp, Homo sapiens
ttcaccacggggtag

SEQ ID NO: 562956 - DNA, 15 bp, Homo sapiens
cttcaccacggggta

SEQ ID NO: 562957 - DNA, 15 bp, Homo sapiens
gcttcaccacggggt

SEQ ID NO: 562958 - DNA, 15 bp, Homo sapiens
tgcttcaccacgggg

SEQ ID NO: 562959 - DNA, 15 bp, Homo sapiens
ttgcttcaccacggg

SEQ ID NO: 562960 - DNA, 15 bp, Homo sapiens
cttgcttcaccacgg

SEQ ID NO: 562961 - DNA, 15 bp, Homo sapiens
gcttgcttcaccacg

SEQ ID NO: 562962 - DNA, 15 bp, Homo sapiens
tgcttgcttcaccac

SEQ ID NO: 562963 - DNA, 15 bp, Homo sapiens
gtgcttgcttcacca

SEQ ID NO: 562964 - DNA, 15 bp, Homo sapiens
tgtgcttgcttcacc

SEQ ID NO: 562965 - DNA, 15 bp, Homo sapiens
ctgtgcttgcttcac

SEQ ID NO: 562966 - DNA, 15 bp, Homo sapiens
cctgtgcttgcttca

SEQ ID NO: 562967 - DNA, 15 bp, Homo sapiens
acctgtgcttgcttc

SEQ ID NO: 562968 - DNA, 15 bp, Homo sapiens
cacctgtgcttgctt

SEQ ID NO: 562969 - DNA, 15 bp, Homo sapiens
ccacctgtgcttgct

SEQ ID NO: 562970 - DNA, 15 bp, Homo sapiens
cccacctgtgcttgc

SEQ ID NO: 562971 - DNA, 15 bp, Homo sapiens
gcccacctgtgcttg

SEQ ID NO: 562972 - DNA, 15 bp, Homo sapiens
cgcccacctgtgctt

SEQ ID NO: 562973 - DNA, 15 bp, Homo sapiens
ccgcccacctgtgct

SEQ ID NO: 562974 - DNA, 15 bp, Homo sapiens
tccgcccacctgtgc

SEQ ID NO: 562975 - DNA, 15 bp, Homo sapiens
ctccgcccacctgtg

SEQ ID NO: 562976 - DNA, 15 bp, Homo sapiens
cctccgcccacctgt

SEQ ID NO: 562977 - DNA, 15 bp, Homo sapiens
acctccgcccacctg

SEQ ID NO: 562978 - DNA, 15 bp, Homo sapiens
cacctccgcccacct

SEQ ID NO: 562979 - DNA, 15 bp, Homo sapiens
ccacctccgcccacc

SEQ ID NO: 562980 - DNA, 15 bp, Homo sapiens
cccacctccgcccac

SEQ ID NO: 562981 - DNA, 15 bp, Homo sapiens
gcccacctccgccca

SEQ ID NO: 562982 - DNA, 15 bp, Homo sapiens
tgcccacctccgccc

SEQ ID NO: 562983 - DNA, 15 bp, Homo sapiens
ctgcccacctccgcc

SEQ ID NO: 562984 - DNA, 15 bp, Homo sapiens
gctgcccacctccgc

SEQ ID NO: 562985 - DNA, 15 bp, Homo sapiens
cgctgcccacctccg

SEQ ID NO: 562986 - DNA, 15 bp, Homo sapiens
ccgctgcccacctcc

SEQ ID NO: 562987 - DNA, 15 bp, Homo sapiens
accgctgcccacctc

SEQ ID NO: 562988 - DNA, 15 bp, Homo sapiens
aaccgctgcccacct

SEQ ID NO: 562989 - DNA, 15 bp, Homo sapiens
aaaccgctgcccacc

SEQ ID NO: 562990 - DNA, 15 bp, Homo sapiens
gaaaccgctgcccac

SEQ ID NO: 562991 - DNA, 15 bp, Homo sapiens
ggaaaccgctgccca

SEQ ID NO: 562992 - DNA, 15 bp, Homo sapiens
tggaaaccgctgccc

SEQ ID NO: 562993 - DNA, 15 bp, Homo sapiens
ctggaaaccgctgcc

SEQ ID NO: 562994 - DNA, 15 bp, Homo sapiens
gctggaaaccgctgc

SEQ ID NO: 562995 - DNA, 15 bp, Homo sapiens
ggctggaaaccgctg

SEQ ID NO: 562996 - DNA, 15 bp, Homo sapiens
gggctggaaaccgct

SEQ ID NO: 562997 - DNA, 15 bp, Homo sapiens
ggggctggaaaccgc

SEQ ID NO: 562998 - DNA, 15 bp, Homo sapiens
tggggctggaaaccg

SEQ ID NO: 562999 - DNA, 15 bp, Homo sapiens
ctggggctggaaacc

SEQ ID NO: 563000 - DNA, 15 bp, Homo sapiens
gctggggctggaaac

SEQ ID NO: 563001 - DNA, 15 bp, Homo sapiens
ggctggggctggaaa

SEQ ID NO: 563002 - DNA, 15 bp, Homo sapiens
tggctggggctggaa

SEQ ID NO: 563003 - DNA, 15 bp, Homo sapiens
gtggctggggctgga

SEQ ID NO: 563004 - DNA, 15 bp, Homo sapiens
ggtggctggggctgg

SEQ ID NO: 563005 - DNA, 15 bp, Homo sapiens
cggtggctggggctg

SEQ ID NO: 563006 - DNA, 15 bp, Homo sapiens
ccggtggctggggct

SEQ ID NO: 563007 - DNA, 15 bp, Homo sapiens
cccggtggctggggc

SEQ ID NO: 563008 - DNA, 15 bp, Homo sapiens
ccccggtggctgggg

SEQ ID NO: 563009 - DNA, 15 bp, Homo sapiens
gccccggtggctggg

SEQ ID NO: 563010 - DNA, 15 bp, Homo sapiens
tgccccggtggctgg

SEQ ID NO: 563011 - DNA, 15 bp, Homo sapiens
ctgccccggtggctg

SEQ ID NO: 563012 - DNA, 15 bp, Homo sapiens
cctgccccggtggct

SEQ ID NO: 563013 - DNA, 15 bp, Homo sapiens
ccctgccccggtggc

SEQ ID NO: 563014 - DNA, 15 bp, Homo sapiens
tccctgccccggtgg

SEQ ID NO: 563015 - DNA, 15 bp, Homo sapiens
ctccctgccccggtg

SEQ ID NO: 563016 - DNA, 15 bp, Homo sapiens
cctccctgccccggt

SEQ ID NO: 563017 - DNA, 15 bp, Homo sapiens
gcctccctgccccgg

SEQ ID NO: 563018 - DNA, 15 bp, Homo sapiens
ggcctccctgccccg

SEQ ID NO: 563019 - DNA, 15 bp, Homo sapiens
aggcctccctgcccc

SEQ ID NO: 563020 - DNA, 15 bp, Homo sapiens
gaggcctccctgccc

SEQ ID NO: 563021 - DNA, 15 bp, Homo sapiens
agaggcctccctgcc

SEQ ID NO: 563022 - DNA, 15 bp, Homo sapiens
cagaggcctccctgc

SEQ ID NO: 563023 - DNA, 15 bp, Homo sapiens
acagaggcctccctg

SEQ ID NO: 563024 - DNA, 15 bp, Homo sapiens
aacagaggcctccct

SEQ ID NO: 563025 - DNA, 15 bp, Homo sapiens
caacagaggcctccc

SEQ ID NO: 563026 - DNA, 15 bp, Homo sapiens
gcaacagaggcctcc

SEQ ID NO: 563027 - DNA, 15 bp, Homo sapiens
agcaacagaggcctc

SEQ ID NO: 563028 - DNA, 15 bp, Homo sapiens
gagcaacagaggcct

SEQ ID NO: 563029 - DNA, 15 bp, Homo sapiens
tgagcaacagaggcc

SEQ ID NO: 563030 - DNA, 15 bp, Homo sapiens
ctgagcaacagaggc

SEQ ID NO: 563031 - DNA, 15 bp, Homo sapiens
cctgagcaacagagg

SEQ ID NO: 563032 - DNA, 15 bp, Homo sapiens
ccctgagcaacagag

SEQ ID NO: 563033 - DNA, 15 bp, Homo sapiens
gccctgagcaacaga

SEQ ID NO: 563034 - DNA, 15 bp, Homo sapiens
tgccctgagcaacag

SEQ ID NO: 563035 - DNA, 15 bp, Homo sapiens
ttgccctgagcaaca

SEQ ID NO: 563036 - DNA, 15 bp, Homo sapiens
cttgccctgagcaac

SEQ ID NO: 563037 - DNA, 15 bp, Homo sapiens
ccttgccctgagcaa

SEQ ID NO: 563038 - DNA, 15 bp, Homo sapiens
cccttgccctgagca

SEQ ID NO: 563039 - DNA, 15 bp, Homo sapiens
tcccttgccctgagc

SEQ ID NO: 563040 - DNA, 15 bp, Homo sapiens
ctcccttgccctgag

SEQ ID NO: 563041 - DNA, 15 bp, Homo sapiens
cctcccttgccctga

SEQ ID NO: 563042 - DNA, 15 bp, Homo sapiens
gcctcccttgccctg

SEQ ID NO: 563043 - DNA, 15 bp, Homo sapiens
tgcctcccttgccct

SEQ ID NO: 563044 - DNA, 15 bp, Homo sapiens
ctgcctcccttgccc

SEQ ID NO: 563045 - DNA, 15 bp, Homo sapiens
cctgcctcccttgcc

SEQ ID NO: 563046 - DNA, 15 bp, Homo sapiens
ccctgcctcccttgc

SEQ ID NO: 563047 - DNA, 15 bp, Homo sapiens
cccctgcctcccttg

SEQ ID NO: 563048 - DNA, 15 bp, Homo sapiens
ccccctgcctccctt

SEQ ID NO: 563049 - DNA, 15 bp, Homo sapiens
gccccctgcctccct

SEQ ID NO: 563050 - DNA, 15 bp, Homo sapiens
agccccctgcctccc

SEQ ID NO: 563051 - DNA, 15 bp, Homo sapiens
aagccccctgcctcc

SEQ ID NO: 563052 - DNA, 15 bp, Homo sapiens
taagccccctgcctc

SEQ ID NO: 563053 - DNA, 15 bp, Homo sapiens
ctaagccccctgcct

SEQ ID NO: 563054 - DNA, 15 bp, Homo sapiens
actaagccccctgcc

SEQ ID NO: 563055 - DNA, 15 bp, Homo sapiens
cactaagccccctgc

SEQ ID NO: 563056 - DNA, 15 bp, Homo sapiens
ccactaagccccctg

SEQ ID NO: 563057 - DNA, 15 bp, Homo sapiens
cccactaagccccct

SEQ ID NO: 563058 - DNA, 15 bp, Homo sapiens
tcccactaagccccc

SEQ ID NO: 563059 - DNA, 15 bp, Homo sapiens
gtcccactaagcccc

SEQ ID NO: 563060 - DNA, 15 bp, Homo sapiens
cgtcccactaagccc

SEQ ID NO: 563061 - DNA, 15 bp, Homo sapiens
tcgtcccactaagcc

SEQ ID NO: 563062 - DNA, 15 bp, Homo sapiens
ttcgtcccactaagc

SEQ ID NO: 563063 - DNA, 15 bp, Homo sapiens
cttcgtcccactaag

SEQ ID NO: 563064 - DNA, 15 bp, Homo sapiens
ccttcgtcccactaa

SEQ ID NO: 563065 - DNA, 15 bp, Homo sapiens
gccttcgtcccacta

SEQ ID NO: 563066 - DNA, 15 bp, Homo sapiens
agccttcgtcccact

SEQ ID NO: 563067 - DNA, 15 bp, Homo sapiens
gagccttcgtcccac

SEQ ID NO: 563068 - DNA, 15 bp, Homo sapiens
tgagccttcgtccca

SEQ ID NO: 563069 - DNA, 15 bp, Homo sapiens
gtgagccttcgtccc

SEQ ID NO: 563070 - DNA, 15 bp, Homo sapiens
ggtgagccttcgtcc

SEQ ID NO: 563071 - DNA, 15 bp, Homo sapiens
gggtgagccttcgtc

SEQ ID NO: 563072 - DNA, 15 bp, Homo sapiens
ggggtgagccttcgt

SEQ ID NO: 563073 - DNA, 15 bp, Homo sapiens
tggggtgagccttcg

SEQ ID NO: 563074 - DNA, 15 bp, Homo sapiens
gtggggtgagccttc

SEQ ID NO: 563075 - DNA, 15 bp, Homo sapiens
tgtggggtgagcctt

SEQ ID NO: 563076 - DNA, 15 bp, Homo sapiens
gtgtggggtgagcct

SEQ ID NO: 563077 - DNA, 15 bp, Homo sapiens
agtgtggggtgagcc

SEQ ID NO: 563078 - DNA, 15 bp, Homo sapiens
gagtgtggggtgagc

SEQ ID NO: 563079 - DNA, 15 bp, Homo sapiens
agagtgtggggtgag

SEQ ID NO: 563080 - DNA, 15 bp, Homo sapiens
aagagtgtggggtga

SEQ ID NO: 563081 - DNA, 15 bp, Homo sapiens
taagagtgtggggtg

SEQ ID NO: 563082 - DNA, 15 bp, Homo sapiens
ataagagtgtggggt

SEQ ID NO: 563083 - DNA, 15 bp, Homo sapiens
gataagagtgtgggg

SEQ ID NO: 563084 - DNA, 15 bp, Homo sapiens
tgataagagtgtggg

SEQ ID NO: 563085 - DNA, 15 bp, Homo sapiens
atgataagagtgtgg

SEQ ID NO: 563086 - DNA, 15 bp, Homo sapiens
aatgataagagtgtg

SEQ ID NO: 563087 - DNA, 15 bp, Homo sapiens
taatgataagagtgt

SEQ ID NO: 563088 - DNA, 15 bp, Homo sapiens
ctaatgataagagtg

SEQ ID NO: 563089 - DNA, 15 bp, Homo sapiens
gctaatgataagagt

SEQ ID NO: 563090 - DNA, 15 bp, Homo sapiens
tgctaatgataagag

SEQ ID NO: 563091 - DNA, 15 bp, Homo sapiens
atgctaatgataaga

SEQ ID NO: 563092 - DNA, 15 bp, Homo sapiens
aatgctaatgataag

SEQ ID NO: 563093 - DNA, 15 bp, Homo sapiens
taatgctaatgataa

SEQ ID NO: 563094 - DNA, 15 bp, Homo sapiens
ataatgctaatgata

SEQ ID NO: 563095 - DNA, 15 bp, Homo sapiens
gataatgctaatgat

SEQ ID NO: 563096 - DNA, 15 bp, Homo sapiens
agataatgctaatga

SEQ ID NO: 563097 - DNA, 15 bp, Homo sapiens
cagataatgctaatg

SEQ ID NO: 563098 - DNA, 15 bp, Homo sapiens
acagataatgctaat

SEQ ID NO: 563099 - DNA, 15 bp, Homo sapiens
tacagataatgctaa

SEQ ID NO: 563100 - DNA, 15 bp, Homo sapiens
atacagataatgcta

SEQ ID NO: 563101 - DNA, 15 bp, Homo sapiens
aatacagataatgct

SEQ ID NO: 563102 - DNA, 15 bp, Homo sapiens
aaatacagataatgc

SEQ ID NO: 563103 - DNA, 15 bp, Homo sapiens
aaaatacagataatg

SEQ ID NO: 563104 - DNA, 15 bp, Homo sapiens
aaaaatacagataat

SEQ ID NO: 563105 - DNA, 15 bp, Homo sapiens
taaaaatacagataa

SEQ ID NO: 563106 - DNA, 15 bp, Homo sapiens
ttaaaaatacagata

SEQ ID NO: 563107 - DNA, 15 bp, Homo sapiens
attaaaaatacagat

SEQ ID NO: 563108 - DNA, 15 bp, Homo sapiens
aattaaaaatacaga

SEQ ID NO: 563109 - DNA, 15 bp, Homo sapiens
aaattaaaaatacag

SEQ ID NO: 563110 - DNA, 15 bp, Homo sapiens
aaaattaaaaataca

SEQ ID NO: 563111 - DNA, 15 bp, Homo sapiens
aaaaattaaaaatac

SEQ ID NO: 563112 - DNA, 15 bp, Homo sapiens
taaaaattaaaaata

SEQ ID NO: 563113 - DNA, 15 bp, Homo sapiens
ttaaaaattaaaaat

SEQ ID NO: 563114 - DNA, 15 bp, Homo sapiens
cttaaaaattaaaaa

SEQ ID NO: 563115 - DNA, 15 bp, Homo sapiens
acttaaaaattaaaa

SEQ ID NO: 563116 - DNA, 15 bp, Homo sapiens
aacttaaaaattaaa

SEQ ID NO: 563117 - DNA, 15 bp, Homo sapiens
caacttaaaaattaa

SEQ ID NO: 563118 - DNA, 15 bp, Homo sapiens
tcaacttaaaaatta

SEQ ID NO: 563119 - DNA, 15 bp, Homo sapiens
ctcaacttaaaaatt

SEQ ID NO: 563120 - DNA, 15 bp, Homo sapiens
tctcaacttaaaaat

SEQ ID NO: 563121 - DNA, 15 bp, Homo sapiens
ttctcaacttaaaaa

SEQ ID NO: 563122 - DNA, 15 bp, Homo sapiens
tttctcaacttaaaa

SEQ ID NO: 563123 - DNA, 15 bp, Homo sapiens
atttctcaacttaaa

SEQ ID NO: 563124 - DNA, 15 bp, Homo sapiens
aatttctcaacttaa

SEQ ID NO: 563125 - DNA, 15 bp, Homo sapiens
aaatttctcaactta

SEQ ID NO: 563126 - DNA, 15 bp, Homo sapiens
aaaatttctcaactt

SEQ ID NO: 563127 - DNA, 15 bp, Homo sapiens
gaaaatttctcaact

SEQ ID NO: 563128 - DNA, 15 bp, Homo sapiens
agaaaatttctcaac

SEQ ID NO: 563129 - DNA, 15 bp, Homo sapiens
tagaaaatttctcaa

SEQ ID NO: 563130 - DNA, 15 bp, Homo sapiens
gtagaaaatttctca

SEQ ID NO: 563131 - DNA, 15 bp, Homo sapiens
tgtagaaaatttctc

SEQ ID NO: 563132 - DNA, 15 bp, Homo sapiens
ttgtagaaaatttct

SEQ ID NO: 563133 - DNA, 15 bp, Homo sapiens
gttgtagaaaatttc

SEQ ID NO: 563134 - DNA, 15 bp, Homo sapiens
agttgtagaaaattt

SEQ ID NO: 563135 - DNA, 15 bp, Homo sapiens
cagttgtagaaaatt

SEQ ID NO: 563136 - DNA, 15 bp, Homo sapiens
acagttgtagaaaat

SEQ ID NO: 563137 - DNA, 15 bp, Homo sapiens
gacagttgtagaaaa

SEQ ID NO: 563138 - DNA, 15 bp, Homo sapiens
tgacagttgtagaaa

SEQ ID NO: 563139 - DNA, 15 bp, Homo sapiens
ttgacagttgtagaa

SEQ ID NO: 563140 - DNA, 15 bp, Homo sapiens
tttgacagttgtaga

SEQ ID NO: 563141 - DNA, 15 bp, Homo sapiens
gtttgacagttgtag

SEQ ID NO: 563142 - DNA, 15 bp, Homo sapiens
agtttgacagttgta

SEQ ID NO: 563143 - DNA, 15 bp, Homo sapiens
tagtttgacagttgt

SEQ ID NO: 563144 - DNA, 15 bp, Homo sapiens
ctagtttgacagttg

SEQ ID NO: 563145 - DNA, 15 bp, Homo sapiens
tctagtttgacagtt

SEQ ID NO: 563146 - DNA, 15 bp, Homo sapiens
gtctagtttgacagt

SEQ ID NO: 563147 - DNA, 15 bp, Homo sapiens
tgtctagtttgacag

SEQ ID NO: 563148 - DNA, 15 bp, Homo sapiens
ttgtctagtttgaca

SEQ ID NO: 563149 - DNA, 15 bp, Homo sapiens
tttgtctagtttgac

SEQ ID NO: 563150 - DNA, 15 bp, Homo sapiens
atttgtctagtttga

SEQ ID NO: 563151 - DNA, 15 bp, Homo sapiens
catttgtctagtttg

SEQ ID NO: 563152 - DNA, 15 bp, Homo sapiens
tcatttgtctagttt

SEQ ID NO: 563153 - DNA, 15 bp, Homo sapiens
gtcatttgtctagtt

SEQ ID NO: 563154 - DNA, 15 bp, Homo sapiens
tgtcatttgtctagt

SEQ ID NO: 563155 - DNA, 15 bp, Homo sapiens
ctgtcatttgtctag

SEQ ID NO: 563156 - DNA, 15 bp, Homo sapiens
actgtcatttgtcta

SEQ ID NO: 563157 - DNA, 15 bp, Homo sapiens
tactgtcatttgtct

SEQ ID NO: 563158 - DNA, 15 bp, Homo sapiens
atactgtcatttgtc

SEQ ID NO: 563159 - DNA, 15 bp, Homo sapiens
gatactgtcatttgt

SEQ ID NO: 563160 - DNA, 15 bp, Homo sapiens
ggatactgtcatttg

SEQ ID NO: 563161 - DNA, 15 bp, Homo sapiens
tggatactgtcattt

SEQ ID NO: 563162 - DNA, 15 bp, Homo sapiens
ctggatactgtcatt

SEQ ID NO: 563163 - DNA, 15 bp, Homo sapiens
actggatactgtcat

SEQ ID NO: 563164 - DNA, 15 bp, Homo sapiens
aactggatactgtca

SEQ ID NO: 563165 - DNA, 15 bp, Homo sapiens
gaactggatactgtc

SEQ ID NO: 563166 - DNA, 15 bp, Homo sapiens
ggaactggatactgt

SEQ ID NO: 563167 - DNA, 15 bp, Homo sapiens
gggaactggatactg

SEQ ID NO: 563168 - DNA, 15 bp, Homo sapiens
ggggaactggatact

SEQ ID NO: 563169 - DNA, 15 bp, Homo sapiens
aggggaactggatac

SEQ ID NO: 563170 - DNA, 15 bp, Homo sapiens
gaggggaactggata

SEQ ID NO: 563171 - DNA, 15 bp, Homo sapiens
tgaggggaactggat

SEQ ID NO: 563172 - DNA, 15 bp, Homo sapiens
gtgaggggaactgga

SEQ ID NO: 563173 - DNA, 15 bp, Homo sapiens
ggtgaggggaactgg

SEQ ID NO: 563174 - DNA, 15 bp, Homo sapiens
gggtgaggggaactg

SEQ ID NO: 563175 - DNA, 15 bp, Homo sapiens
tgggtgaggggaact

SEQ ID NO: 563176 - DNA, 15 bp, Homo sapiens
ctgggtgaggggaac

SEQ ID NO: 563177 - DNA, 15 bp, Homo sapiens
tctgggtgaggggaa

SEQ ID NO: 563178 - DNA, 15 bp, Homo sapiens
gtctgggtgagggga

SEQ ID NO: 563179 - DNA, 15 bp, Homo sapiens
cgtctgggtgagggg

SEQ ID NO: 563180 - DNA, 15 bp, Homo sapiens
gcgtctgggtgaggg

SEQ ID NO: 563181 - DNA, 15 bp, Homo sapiens
tgcgtctgggtgagg

SEQ ID NO: 563182 - DNA, 15 bp, Homo sapiens
ctgcgtctgggtgag

SEQ ID NO: 563183 - DNA, 15 bp, Homo sapiens
gctgcgtctgggtga

SEQ ID NO: 563184 - DNA, 15 bp, Homo sapiens
ggctgcgtctgggtg

SEQ ID NO: 563185 - DNA, 15 bp, Homo sapiens
tggctgcgtctgggt

SEQ ID NO: 563186 - DNA, 15 bp, Homo sapiens
atggctgcgtctggg

SEQ ID NO: 563187 - DNA, 15 bp, Homo sapiens
aatggctgcgtctgg

SEQ ID NO: 563188 - DNA, 15 bp, Homo sapiens
caatggctgcgtctg

SEQ ID NO: 563189 - DNA, 15 bp, Homo sapiens
gcaatggctgcgtct

SEQ ID NO: 563190 - DNA, 15 bp, Homo sapiens
agcaatggctgcgtc

SEQ ID NO: 563191 - DNA, 15 bp, Homo sapiens
cagcaatggctgcgt

SEQ ID NO: 563192 - DNA, 15 bp, Homo sapiens
tcagcaatggctgcg

SEQ ID NO: 563193 - DNA, 15 bp, Homo sapiens
gtcagcaatggctgc

SEQ ID NO: 563194 - DNA, 15 bp, Homo sapiens
tgtcagcaatggctg

SEQ ID NO: 563195 - DNA, 15 bp, Homo sapiens
ctgtcagcaatggct

SEQ ID NO: 563196 - DNA, 15 bp, Homo sapiens
gctgtcagcaatggc

SEQ ID NO: 563197 - DNA, 15 bp, Homo sapiens
agctgtcagcaatgg

SEQ ID NO: 563198 - DNA, 15 bp, Homo sapiens
cagctgtcagcaatg

SEQ ID NO: 563199 - DNA, 15 bp, Homo sapiens
acagctgtcagcaat

SEQ ID NO: 563200 - DNA, 15 bp, Homo sapiens
gacagctgtcagcaa

SEQ ID NO: 563201 - DNA, 15 bp, Homo sapiens
tgacagctgtcagca

SEQ ID NO: 563202 - DNA, 15 bp, Homo sapiens
ctgacagctgtcagc

SEQ ID NO: 563203 - DNA, 15 bp, Homo sapiens
actgacagctgtcag

SEQ ID NO: 563204 - DNA, 15 bp, Homo sapiens
cactgacagctgtca

SEQ ID NO: 563205 - DNA, 15 bp, Homo sapiens
acactgacagctgtc

SEQ ID NO: 563206 - DNA, 15 bp, Homo sapiens
aacactgacagctgt

SEQ ID NO: 563207 - DNA, 15 bp, Homo sapiens
caacactgacagctg

SEQ ID NO: 563208 - DNA, 15 bp, Homo sapiens
tcaacactgacagct

SEQ ID NO: 563209 - DNA, 15 bp, Homo sapiens
ttcaacactgacagc

SEQ ID NO: 563210 - DNA, 15 bp, Homo sapiens
cttcaacactgacag

SEQ ID NO: 563211 - DNA, 15 bp, Homo sapiens
tcttcaacactgaca

SEQ ID NO: 563212 - DNA, 15 bp, Homo sapiens
atcttcaacactgac

SEQ ID NO: 563213 - DNA, 15 bp, Homo sapiens
catcttcaacactga

SEQ ID NO: 563214 - DNA, 15 bp, Homo sapiens
ccatcttcaacactg

SEQ ID NO: 563215 - DNA, 15 bp, Homo sapiens
gccatcttcaacact

SEQ ID NO: 563216 - DNA, 15 bp, Homo sapiens
ggccatcttcaacac

SEQ ID NO: 563217 - DNA, 15 bp, Homo sapiens
tggccatcttcaaca

SEQ ID NO: 563218 - DNA, 15 bp, Homo sapiens
ctggccatcttcaac

SEQ ID NO: 563219 - DNA, 15 bp, Homo sapiens
gctggccatcttcaa

SEQ ID NO: 563220 - DNA, 15 bp, Homo sapiens
tgctggccatcttca

SEQ ID NO: 563221 - DNA, 15 bp, Homo sapiens
atgctggccatcttc

SEQ ID NO: 563222 - DNA, 15 bp, Homo sapiens
gatgctggccatctt

SEQ ID NO: 563223 - DNA, 15 bp, Homo sapiens
agatgctggccatct

SEQ ID NO: 563224 - DNA, 15 bp, Homo sapiens
gagatgctggccatc

SEQ ID NO: 563225 - DNA, 15 bp, Homo sapiens
tgagatgctggccat

SEQ ID NO: 563226 - DNA, 15 bp, Homo sapiens
atgagatgctggcca

SEQ ID NO: 563227 - DNA, 15 bp, Homo sapiens
catgagatgctggcc

SEQ ID NO: 563228 - DNA, 15 bp, Homo sapiens
gcatgagatgctggc

SEQ ID NO: 563229 - DNA, 15 bp, Homo sapiens
ggcatgagatgctgg

SEQ ID NO: 563230 - DNA, 15 bp, Homo sapiens
gggcatgagatgctg

SEQ ID NO: 563231 - DNA, 15 bp, Homo sapiens
agggcatgagatgct

SEQ ID NO: 563232 - DNA, 15 bp, Homo sapiens
aagggcatgagatgc

SEQ ID NO: 563233 - DNA, 15 bp, Homo sapiens
caagggcatgagatg

SEQ ID NO: 563234 - DNA, 15 bp, Homo sapiens
ccaagggcatgagat

SEQ ID NO: 563235 - DNA, 15 bp, Homo sapiens
accaagggcatgaga

SEQ ID NO: 563236 - DNA, 15 bp, Homo sapiens
aaccaagggcatgag

SEQ ID NO: 563237 - DNA, 15 bp, Homo sapiens
aaaccaagggcatga

SEQ ID NO: 563238 - DNA, 15 bp, Homo sapiens
gaaaccaagggcatg

SEQ ID NO: 563239 - DNA, 15 bp, Homo sapiens
tgaaaccaagggcat

SEQ ID NO: 563240 - DNA, 15 bp, Homo sapiens
gtgaaaccaagggca

SEQ ID NO: 563241 - DNA, 15 bp, Homo sapiens
agtgaaaccaagggc

SEQ ID NO: 563242 - DNA, 15 bp, Homo sapiens
gagtgaaaccaaggg

SEQ ID NO: 563243 - DNA, 15 bp, Homo sapiens
cgagtgaaaccaagg

SEQ ID NO: 563244 - DNA, 15 bp, Homo sapiens
acgagtgaaaccaag

SEQ ID NO: 563245 - DNA, 15 bp, Homo sapiens
aacgagtgaaaccaa

SEQ ID NO: 563246 - DNA, 15 bp, Homo sapiens
gaacgagtgaaacca

SEQ ID NO: 563247 - DNA, 15 bp, Homo sapiens
ggaacgagtgaaacc

SEQ ID NO: 563248 - DNA, 15 bp, Homo sapiens
gggaacgagtgaaac

SEQ ID NO: 563249 - DNA, 15 bp, Homo sapiens
agggaacgagtgaaa

SEQ ID NO: 563250 - DNA, 15 bp, Homo sapiens
cagggaacgagtgaa

SEQ ID NO: 563251 - DNA, 15 bp, Homo sapiens
ccagggaacgagtga

SEQ ID NO: 563252 - DNA, 15 bp, Homo sapiens
cccagggaacgagtg

SEQ ID NO: 563253 - DNA, 15 bp, Homo sapiens
acccagggaacgagt

SEQ ID NO: 563254 - DNA, 15 bp, Homo sapiens
cacccagggaacgag

SEQ ID NO: 563255 - DNA, 15 bp, Homo sapiens
ccacccagggaacga

SEQ ID NO: 563256 - DNA, 15 bp, Homo sapiens
gccacccagggaacg

SEQ ID NO: 563257 - DNA, 15 bp, Homo sapiens
ggccacccagggaac

SEQ ID NO: 563258 - DNA, 15 bp, Homo sapiens
gggccacccagggaa

SEQ ID NO: 563259 - DNA, 15 bp, Homo sapiens
agggccacccaggga

SEQ ID NO: 563260 - DNA, 15 bp, Homo sapiens
gagggccacccaggg

SEQ ID NO: 563261 - DNA, 15 bp, Homo sapiens
cgagggccacccagg

SEQ ID NO: 563262 - DNA, 15 bp, Homo sapiens
acgagggccacccag

SEQ ID NO: 563263 - DNA, 15 bp, Homo sapiens
gacgagggccaccca

SEQ ID NO: 563264 - DNA, 15 bp, Homo sapiens
ggacgagggccaccc

SEQ ID NO: 563265 - DNA, 15 bp, Homo sapiens
gggacgagggccacc

SEQ ID NO: 563266 - DNA, 15 bp, Homo sapiens
ggggacgagggccac

SEQ ID NO: 563267 - DNA, 15 bp, Homo sapiens
gggggacgagggcca

SEQ ID NO: 563268 - DNA, 15 bp, Homo sapiens
agggggacgagggcc

SEQ ID NO: 563269 - DNA, 15 bp, Homo sapiens
gagggggacgagggc

SEQ ID NO: 563270 - DNA, 15 bp, Homo sapiens
ggagggggacgaggg

SEQ ID NO: 563271 - DNA, 15 bp, Homo sapiens
gggagggggacgagg

SEQ ID NO: 563272 - DNA, 15 bp, Homo sapiens
ggggagggggacgag

SEQ ID NO: 563273 - DNA, 15 bp, Homo sapiens
tggggagggggacga

SEQ ID NO: 563274 - DNA, 15 bp, Homo sapiens
gtggggagggggacg

SEQ ID NO: 563275 - DNA, 15 bp, Homo sapiens
cgtggggagggggac

SEQ ID NO: 563276 - DNA, 15 bp, Homo sapiens
acgtggggaggggga

SEQ ID NO: 563277 - DNA, 15 bp, Homo sapiens
gacgtggggaggggg

SEQ ID NO: 563278 - DNA, 15 bp, Homo sapiens
ggacgtggggagggg

SEQ ID NO: 563279 - DNA, 15 bp, Homo sapiens
aggacgtggggaggg

SEQ ID NO: 563280 - DNA, 15 bp, Homo sapiens
caggacgtggggagg

SEQ ID NO: 563281 - DNA, 15 bp, Homo sapiens
gcaggacgtggggag

SEQ ID NO: 563282 - DNA, 15 bp, Homo sapiens
cgcaggacgtgggga

SEQ ID NO: 563283 - DNA, 15 bp, Homo sapiens
gcgcaggacgtgggg

SEQ ID NO: 563284 - DNA, 15 bp, Homo sapiens
ggcgcaggacgtggg

SEQ ID NO: 563285 - DNA, 15 bp, Homo sapiens
gggcgcaggacgtgg

SEQ ID NO: 563286 - DNA, 15 bp, Homo sapiens
ggggcgcaggacgtg

SEQ ID NO: 563287 - DNA, 15 bp, Homo sapiens
cggggcgcaggacgt

SEQ ID NO: 563288 - DNA, 15 bp, Homo sapiens
gcggggcgcaggacg

SEQ ID NO: 563289 - DNA, 15 bp, Homo sapiens
tgcggggcgcaggac

SEQ ID NO: 563290 - DNA, 15 bp, Homo sapiens
atgcggggcgcagga

SEQ ID NO: 563291 - DNA, 15 bp, Homo sapiens
tatgcggggcgcagg

SEQ ID NO: 563292 - DNA, 15 bp, Homo sapiens
gtatgcggggcgcag

SEQ ID NO: 563293 - DNA, 15 bp, Homo sapiens
ggtatgcggggcgca

SEQ ID NO: 563294 - DNA, 15 bp, Homo sapiens
gggtatgcggggcgc

SEQ ID NO: 563295 - DNA, 15 bp, Homo sapiens
agggtatgcggggcg

SEQ ID NO: 563296 - DNA, 15 bp, Homo sapiens
cagggtatgcggggc

SEQ ID NO: 563297 - DNA, 15 bp, Homo sapiens
tcagggtatgcgggg

SEQ ID NO: 563298 - DNA, 15 bp, Homo sapiens
ctcagggtatgcggg

SEQ ID NO: 563299 - DNA, 15 bp, Homo sapiens
gctcagggtatgcgg

SEQ ID NO: 563300 - DNA, 15 bp, Homo sapiens
tgctcagggtatgcg

SEQ ID NO: 563301 - DNA, 15 bp, Homo sapiens
ctgctcagggtatgc

SEQ ID NO: 563302 - DNA, 15 bp, Homo sapiens
gctgctcagggtatg

SEQ ID NO: 563303 - DNA, 15 bp, Homo sapiens
ggctgctcagggtat

SEQ ID NO: 563304 - DNA, 15 bp, Homo sapiens
tggctgctcagggta

SEQ ID NO: 563305 - DNA, 15 bp, Homo sapiens
atggctgctcagggt

SEQ ID NO: 563306 - DNA, 15 bp, Homo sapiens
catggctgctcaggg

SEQ ID NO: 563307 - DNA, 15 bp, Homo sapiens
ccatggctgctcagg

SEQ ID NO: 563308 - DNA, 15 bp, Homo sapiens
gccatggctgctcag

SEQ ID NO: 563309 - DNA, 15 bp, Homo sapiens
ggccatggctgctca

SEQ ID NO: 563310 - DNA, 15 bp, Homo sapiens
tggccatggctgctc

SEQ ID NO: 563311 - DNA, 15 bp, Homo sapiens
ctggccatggctgct

SEQ ID NO: 563312 - DNA, 15 bp, Homo sapiens
cctggccatggctgc

SEQ ID NO: 563313 - DNA, 15 bp, Homo sapiens
tcctggccatggctg

SEQ ID NO: 563314 - DNA, 15 bp, Homo sapiens
ttcctggccatggct

SEQ ID NO: 563315 - DNA, 15 bp, Homo sapiens
gttcctggccatggc

SEQ ID NO: 563316 - DNA, 15 bp, Homo sapiens
agttcctggccatgg

SEQ ID NO: 563317 - DNA, 15 bp, Homo sapiens
aagttcctggccatg

SEQ ID NO: 563318 - DNA, 15 bp, Homo sapiens
caagttcctggccat

SEQ ID NO: 563319 - DNA, 15 bp, Homo sapiens
ccaagttcctggcca

SEQ ID NO: 563320 - DNA, 15 bp, Homo sapiens
gccaagttcctggcc

SEQ ID NO: 563321 - DNA, 15 bp, Homo sapiens
tgccaagttcctggc

SEQ ID NO: 563322 - DNA, 15 bp, Homo sapiens
gtgccaagttcctgg

SEQ ID NO: 563323 - DNA, 15 bp, Homo sapiens
cgtgccaagttcctg

SEQ ID NO: 563324 - DNA, 15 bp, Homo sapiens
acgtgccaagttcct

SEQ ID NO: 563325 - DNA, 15 bp, Homo sapiens
cacgtgccaagttcc

SEQ ID NO: 563326 - DNA, 15 bp, Homo sapiens
ccacgtgccaagttc

SEQ ID NO: 563327 - DNA, 15 bp, Homo sapiens
cccacgtgccaagtt

SEQ ID NO: 563328 - DNA, 15 bp, Homo sapiens
acccacgtgccaagt

SEQ ID NO: 563329 - DNA, 15 bp, Homo sapiens
aacccacgtgccaag

SEQ ID NO: 563330 - DNA, 15 bp, Homo sapiens
aaacccacgtgccaa

SEQ ID NO: 563331 - DNA, 15 bp, Homo sapiens
caaacccacgtgcca

SEQ ID NO: 563332 - DNA, 15 bp, Homo sapiens
acaaacccacgtgcc

SEQ ID NO: 563333 - DNA, 15 bp, Homo sapiens
aacaaacccacgtgc

SEQ ID NO: 563334 - DNA, 15 bp, Homo sapiens
aaacaaacccacgtg

SEQ ID NO: 563335 - DNA, 15 bp, Homo sapiens
aaaacaaacccacgt

SEQ ID NO: 563336 - DNA, 15 bp, Homo sapiens
aaaaacaaacccacg

SEQ ID NO: 563337 - DNA, 15 bp, Homo sapiens
aaaaaacaaacccac

SEQ ID NO: 563338 - DNA, 15 bp, Homo sapiens
gaaaaaacaaaccca

SEQ ID NO: 563339 - DNA, 15 bp, Homo sapiens
agaaaaaacaaaccc

SEQ ID NO: 563340 - DNA, 15 bp, Homo sapiens
cagaaaaaacaaacc

SEQ ID NO: 563341 - DNA, 15 bp, Homo sapiens
tcagaaaaaacaaac

SEQ ID NO: 563342 - DNA, 15 bp, Homo sapiens
ttcagaaaaaacaaa

SEQ ID NO: 563343 - DNA, 15 bp, Homo sapiens
attcagaaaaaacaa

SEQ ID NO: 563344 - DNA, 15 bp, Homo sapiens
gattcagaaaaaaca

SEQ ID NO: 563345 - DNA, 15 bp, Homo sapiens
agattcagaaaaaac

SEQ ID NO: 563346 - DNA, 15 bp, Homo sapiens
cagattcagaaaaaa

SEQ ID NO: 563347 - DNA, 15 bp, Homo sapiens
gcagattcagaaaaa

SEQ ID NO: 563348 - DNA, 15 bp, Homo sapiens
tgcagattcagaaaa

SEQ ID NO: 563349 - DNA, 15 bp, Homo sapiens
atgcagattcagaaa

SEQ ID NO: 563350 - DNA, 15 bp, Homo sapiens
catgcagattcagaa

SEQ ID NO: 563351 - DNA, 15 bp, Homo sapiens
acatgcagattcaga

SEQ ID NO: 563352 - DNA, 15 bp, Homo sapiens
cacatgcagattcag

SEQ ID NO: 563353 - DNA, 15 bp, Homo sapiens
gcacatgcagattca

SEQ ID NO: 563354 - DNA, 15 bp, Homo sapiens
cgcacatgcagattc

SEQ ID NO: 563355 - DNA, 15 bp, Homo sapiens
gcgcacatgcagatt

SEQ ID NO: 563356 - DNA, 15 bp, Homo sapiens
tgcgcacatgcagat

SEQ ID NO: 563357 - DNA, 15 bp, Homo sapiens
ctgcgcacatgcaga

SEQ ID NO: 563358 - DNA, 15 bp, Homo sapiens
gctgcgcacatgcag

SEQ ID NO: 563359 - DNA, 15 bp, Homo sapiens
ggctgcgcacatgca

SEQ ID NO: 563360 - DNA, 15 bp, Homo sapiens
tggctgcgcacatgc

SEQ ID NO: 563361 - DNA, 15 bp, Homo sapiens
atggctgcgcacatg

SEQ ID NO: 563362 - DNA, 15 bp, Homo sapiens
catggctgcgcacat

SEQ ID NO: 563363 - DNA, 15 bp, Homo sapiens
tcatggctgcgcaca

SEQ ID NO: 563364 - DNA, 15 bp, Homo sapiens
ctcatggctgcgcac

SEQ ID NO: 563365 - DNA, 15 bp, Homo sapiens
gctcatggctgcgca

SEQ ID NO: 563366 - DNA, 15 bp, Homo sapiens
tgctcatggctgcgc

SEQ ID NO: 563367 - DNA, 15 bp, Homo sapiens
atgctcatggctgcg

SEQ ID NO: 563368 - DNA, 15 bp, Homo sapiens
catgctcatggctgc

SEQ ID NO: 563369 - DNA, 15 bp, Homo sapiens
tcatgctcatggctg

SEQ ID NO: 563370 - DNA, 15 bp, Homo sapiens
ctcatgctcatggct

SEQ ID NO: 563371 - DNA, 15 bp, Homo sapiens
cctcatgctcatggc

SEQ ID NO: 563372 - DNA, 15 bp, Homo sapiens
acctcatgctcatgg

SEQ ID NO: 563373 - DNA, 15 bp, Homo sapiens
gacctcatgctcatg

SEQ ID NO: 563374 - DNA, 15 bp, Homo sapiens
tgacctcatgctcat

SEQ ID NO: 563375 - DNA, 15 bp, Homo sapiens
gtgacctcatgctca

SEQ ID NO: 563376 - DNA, 15 bp, Homo sapiens
agtgacctcatgctc

SEQ ID NO: 563377 - DNA, 15 bp, Homo sapiens
aagtgacctcatgct

SEQ ID NO: 563378 - DNA, 15 bp, Homo sapiens
aaagtgacctcatgc

SEQ ID NO: 563379 - DNA, 15 bp, Homo sapiens
aaaagtgacctcatg

SEQ ID NO: 563380 - DNA, 15 bp, Homo sapiens
aaaaagtgacctcat

SEQ ID NO: 563381 - DNA, 15 bp, Homo sapiens
caaaaagtgacctca

SEQ ID NO: 563382 - DNA, 15 bp, Homo sapiens
tcaaaaagtgacctc

SEQ ID NO: 563383 - DNA, 15 bp, Homo sapiens
ttcaaaaagtgacct

SEQ ID NO: 563384 - DNA, 15 bp, Homo sapiens
attcaaaaagtgacc

SEQ ID NO: 563385 - DNA, 15 bp, Homo sapiens
cattcaaaaagtgac

SEQ ID NO: 563386 - DNA, 15 bp, Homo sapiens
acattcaaaaagtga

SEQ ID NO: 563387 - DNA, 15 bp, Homo sapiens
cacattcaaaaagtg

SEQ ID NO: 563388 - DNA, 15 bp, Homo sapiens
tcacattcaaaaagt

SEQ ID NO: 563389 - DNA, 15 bp, Homo sapiens
gtcacattcaaaaag

SEQ ID NO: 563390 - DNA, 15 bp, Homo sapiens
ggtcacattcaaaaa

SEQ ID NO: 563391 - DNA, 15 bp, Homo sapiens
cggtcacattcaaaa

SEQ ID NO: 563392 - DNA, 15 bp, Homo sapiens
tcggtcacattcaaa

SEQ ID NO: 563393 - DNA, 15 bp, Homo sapiens
ttcggtcacattcaa

SEQ ID NO: 563394 - DNA, 15 bp, Homo sapiens
cttcggtcacattca

SEQ ID NO: 563395 - DNA, 15 bp, Homo sapiens
gcttcggtcacattc

SEQ ID NO: 563396 - DNA, 15 bp, Homo sapiens
agcttcggtcacatt

SEQ ID NO: 563397 - DNA, 15 bp, Homo sapiens
cagcttcggtcacat

SEQ ID NO: 563398 - DNA, 15 bp, Homo sapiens
gcagcttcggtcaca

SEQ ID NO: 563399 - DNA, 15 bp, Homo sapiens
tgcagcttcggtcac

SEQ ID NO: 563400 - DNA, 15 bp, Homo sapiens
atgcagcttcggtca

SEQ ID NO: 563401 - DNA, 15 bp, Homo sapiens
gatgcagcttcggtc

SEQ ID NO: 563402 - DNA, 15 bp, Homo sapiens
ggatgcagcttcggt

SEQ ID NO: 563403 - DNA, 15 bp, Homo sapiens
aggatgcagcttcgg

SEQ ID NO: 563404 - DNA, 15 bp, Homo sapiens
caggatgcagcttcg

SEQ ID NO: 563405 - DNA, 15 bp, Homo sapiens
gcaggatgcagcttc

SEQ ID NO: 563406 - DNA, 15 bp, Homo sapiens
agcaggatgcagctt

SEQ ID NO: 563407 - DNA, 15 bp, Homo sapiens
cagcaggatgcagct

SEQ ID NO: 563408 - DNA, 15 bp, Homo sapiens
gcagcaggatgcagc

SEQ ID NO: 563409 - DNA, 15 bp, Homo sapiens
cgcagcaggatgcag

SEQ ID NO: 563410 - DNA, 15 bp, Homo sapiens
acgcagcaggatgca

SEQ ID NO: 563411 - DNA, 15 bp, Homo sapiens
cacgcagcaggatgc

SEQ ID NO: 563412 - DNA, 15 bp, Homo sapiens
acacgcagcaggatg

SEQ ID NO: 563413 - DNA, 15 bp, Homo sapiens
tacacgcagcaggat

SEQ ID NO: 563414 - DNA, 15 bp, Homo sapiens
atacacgcagcagga

SEQ ID NO: 563415 - DNA, 15 bp, Homo sapiens
aatacacgcagcagg

SEQ ID NO: 563416 - DNA, 15 bp, Homo sapiens
caatacacgcagcag

SEQ ID NO: 563417 - DNA, 15 bp, Homo sapiens
gcaatacacgcagca

SEQ ID NO: 563418 - DNA, 15 bp, Homo sapiens
agcaatacacgcagc

SEQ ID NO: 563419 - DNA, 15 bp, Homo sapiens
cagcaatacacgcag

SEQ ID NO: 563420 - DNA, 15 bp, Homo sapiens
acagcaatacacgca

SEQ ID NO: 563421 - DNA, 15 bp, Homo sapiens
cacagcaatacacgc

SEQ ID NO: 563422 - DNA, 15 bp, Homo sapiens
acacagcaatacacg

SEQ ID NO: 563423 - DNA, 15 bp, Homo sapiens
cacacagcaatacac

SEQ ID NO: 563424 - DNA, 15 bp, Homo sapiens
ccacacagcaataca

SEQ ID NO: 563425 - DNA, 15 bp, Homo sapiens
gccacacagcaatac

SEQ ID NO: 563426 - DNA, 15 bp, Homo sapiens
agccacacagcaata

SEQ ID NO: 563427 - DNA, 15 bp, Homo sapiens
cagccacacagcaat

SEQ ID NO: 563428 - DNA, 15 bp, Homo sapiens
ccagccacacagcaa

SEQ ID NO: 563429 - DNA, 15 bp, Homo sapiens
gccagccacacagca

SEQ ID NO: 563430 - DNA, 15 bp, Homo sapiens
agccagccacacagc

SEQ ID NO: 563431 - DNA, 15 bp, Homo sapiens
aagccagccacacag

SEQ ID NO: 563432 - DNA, 15 bp, Homo sapiens
aaagccagccacaca

SEQ ID NO: 563433 - DNA, 15 bp, Homo sapiens
gaaagccagccacac

SEQ ID NO: 563434 - DNA, 15 bp, Homo sapiens
ggaaagccagccaca

SEQ ID NO: 563435 - DNA, 15 bp, Homo sapiens
aggaaagccagccac

SEQ ID NO: 563436 - DNA, 15 bp, Homo sapiens
gaggaaagccagcca

SEQ ID NO: 563437 - DNA, 15 bp, Homo sapiens
ggaggaaagccagcc

SEQ ID NO: 563438 - DNA, 15 bp, Homo sapiens
gggaggaaagccagc

SEQ ID NO: 563439 - DNA, 15 bp, Homo sapiens
agggaggaaagccag

SEQ ID NO: 563440 - DNA, 15 bp, Homo sapiens
cagggaggaaagcca

SEQ ID NO: 563441 - DNA, 15 bp, Homo sapiens
acagggaggaaagcc

SEQ ID NO: 563442 - DNA, 15 bp, Homo sapiens
gacagggaggaaagc

SEQ ID NO: 563443 - DNA, 15 bp, Homo sapiens
agacagggaggaaag

SEQ ID NO: 563444 - DNA, 15 bp, Homo sapiens
aagacagggaggaaa

SEQ ID NO: 563445 - DNA, 15 bp, Homo sapiens
gaagacagggaggaa

SEQ ID NO: 563446 - DNA, 15 bp, Homo sapiens
agaagacagggagga

SEQ ID NO: 563447 - DNA, 15 bp, Homo sapiens
cagaagacagggagg

SEQ ID NO: 563448 - DNA, 15 bp, Homo sapiens
acagaagacagggag

SEQ ID NO: 563449 - DNA, 15 bp, Homo sapiens
aacagaagacaggga

SEQ ID NO: 563450 - DNA, 15 bp, Homo sapiens
gaacagaagacaggg

SEQ ID NO: 563451 - DNA, 15 bp, Homo sapiens
tgaacagaagacagg

SEQ ID NO: 563452 - DNA, 15 bp, Homo sapiens
ctgaacagaagacag

SEQ ID NO: 563453 - DNA, 15 bp, Homo sapiens
cctgaacagaagaca

SEQ ID NO: 563454 - DNA, 15 bp, Homo sapiens
tcctgaacagaagac

SEQ ID NO: 563455 - DNA, 15 bp, Homo sapiens
ttcctgaacagaaga

SEQ ID NO: 563456 - DNA, 15 bp, Homo sapiens
attcctgaacagaag

SEQ ID NO: 563457 - DNA, 15 bp, Homo sapiens
tattcctgaacagaa

SEQ ID NO: 563458 - DNA, 15 bp, Homo sapiens
gtattcctgaacaga

SEQ ID NO: 563459 - DNA, 15 bp, Homo sapiens
agtattcctgaacag

SEQ ID NO: 563460 - DNA, 15 bp, Homo sapiens
cagtattcctgaaca

SEQ ID NO: 563461 - DNA, 15 bp, Homo sapiens
acagtattcctgaac

SEQ ID NO: 563462 - DNA, 15 bp, Homo sapiens
aacagtattcctgaa

SEQ ID NO: 563463 - DNA, 15 bp, Homo sapiens
gaacagtattcctga

SEQ ID NO: 563464 - DNA, 15 bp, Homo sapiens
tgaacagtattcctg

SEQ ID NO: 563465 - DNA, 15 bp, Homo sapiens
ctgaacagtattcct

SEQ ID NO: 563466 - DNA, 15 bp, Homo sapiens
cctgaacagtattcc

SEQ ID NO: 563467 - DNA, 15 bp, Homo sapiens
gcctgaacagtattc

SEQ ID NO: 563468 - DNA, 15 bp, Homo sapiens
agcctgaacagtatt

SEQ ID NO: 563469 - DNA, 15 bp, Homo sapiens
cagcctgaacagtat

SEQ ID NO: 563470 - DNA, 15 bp, Homo sapiens
tcagcctgaacagta

SEQ ID NO: 563471 - DNA, 15 bp, Homo sapiens
ttcagcctgaacagt

SEQ ID NO: 563472 - DNA, 15 bp, Homo sapiens
attcagcctgaacag

SEQ ID NO: 563473 - DNA, 15 bp, Homo sapiens
tattcagcctgaaca

SEQ ID NO: 563474 - DNA, 15 bp, Homo sapiens
gtattcagcctgaac

SEQ ID NO: 563475 - DNA, 15 bp, Homo sapiens
ggtattcagcctgaa

SEQ ID NO: 563476 - DNA, 15 bp, Homo sapiens
cggtattcagcctga

SEQ ID NO: 563477 - DNA, 15 bp, Homo sapiens
acggtattcagcctg

SEQ ID NO: 563478 - DNA, 15 bp, Homo sapiens
gacggtattcagcct

SEQ ID NO: 563479 - DNA, 15 bp, Homo sapiens
ggacggtattcagcc

SEQ ID NO: 563480 - DNA, 15 bp, Homo sapiens
aggacggtattcagc

SEQ ID NO: 563481 - DNA, 15 bp, Homo sapiens
caggacggtattcag

SEQ ID NO: 563482 - DNA, 15 bp, Homo sapiens
acaggacggtattca

SEQ ID NO: 563483 - DNA, 15 bp, Homo sapiens
cacaggacggtattc

SEQ ID NO: 563484 - DNA, 15 bp, Homo sapiens
tcacaggacggtatt

SEQ ID NO: 563485 - DNA, 15 bp, Homo sapiens
gtcacaggacggtat

SEQ ID NO: 563486 - DNA, 15 bp, Homo sapiens
tgtcacaggacggta

SEQ ID NO: 563487 - DNA, 15 bp, Homo sapiens
atgtcacaggacggt

SEQ ID NO: 563488 - DNA, 15 bp, Homo sapiens
catgtcacaggacgg

SEQ ID NO: 563489 - DNA, 15 bp, Homo sapiens
ccatgtcacaggacg

SEQ ID NO: 563490 - DNA, 15 bp, Homo sapiens
cccatgtcacaggac

SEQ ID NO: 563491 - DNA, 15 bp, Homo sapiens
acccatgtcacagga

SEQ ID NO: 563492 - DNA, 15 bp, Homo sapiens
aacccatgtcacagg

SEQ ID NO: 563493 - DNA, 15 bp, Homo sapiens
aaacccatgtcacag

SEQ ID NO: 563494 - DNA, 15 bp, Homo sapiens
taaacccatgtcaca

SEQ ID NO: 563495 - DNA, 15 bp, Homo sapiens
ttaaacccatgtcac

SEQ ID NO: 563496 - DNA, 15 bp, Homo sapiens
tttaaacccatgtca

SEQ ID NO: 563497 - DNA, 15 bp, Homo sapiens
ttttaaacccatgtc

SEQ ID NO: 563498 - DNA, 15 bp, Homo sapiens
tttttaaacccatgt

SEQ ID NO: 563499 - DNA, 15 bp, Homo sapiens
gtttttaaacccatg

SEQ ID NO: 563500 - DNA, 15 bp, Homo sapiens
tgtttttaaacccat

SEQ ID NO: 563501 - DNA, 15 bp, Homo sapiens
gtgtttttaaaccca

SEQ ID NO: 563502 - DNA, 15 bp, Homo sapiens
tgtgtttttaaaccc

SEQ ID NO: 563503 - DNA, 15 bp, Homo sapiens
ctgtgtttttaaacc

SEQ ID NO: 563504 - DNA, 15 bp, Homo sapiens
cctgtgtttttaaac

SEQ ID NO: 563505 - DNA, 15 bp, Homo sapiens
gcctgtgtttttaaa

SEQ ID NO: 563506 - DNA, 15 bp, Homo sapiens
ggcctgtgtttttaa

SEQ ID NO: 563507 - DNA, 15 bp, Homo sapiens
tggcctgtgttttta

SEQ ID NO: 563508 - DNA, 15 bp, Homo sapiens
ctggcctgtgttttt

SEQ ID NO: 563509 - DNA, 15 bp, Homo sapiens
cctggcctgtgtttt

SEQ ID NO: 563510 - DNA, 15 bp, Homo sapiens
gcctggcctgtgttt

SEQ ID NO: 563511 - DNA, 15 bp, Homo sapiens
tgcctggcctgtgtt

SEQ ID NO: 563512 - DNA, 15 bp, Homo sapiens
atgcctggcctgtgt

SEQ ID NO: 563513 - DNA, 15 bp, Homo sapiens
catgcctggcctgtg

SEQ ID NO: 563514 - DNA, 15 bp, Homo sapiens
ccatgcctggcctgt

SEQ ID NO: 563515 - DNA, 15 bp, Homo sapiens
accatgcctggcctg

SEQ ID NO: 563516 - DNA, 15 bp, Homo sapiens
caccatgcctggcct

SEQ ID NO: 563517 - DNA, 15 bp, Homo sapiens
acaccatgcctggcc

SEQ ID NO: 563518 - DNA, 15 bp, Homo sapiens
gacaccatgcctggc

SEQ ID NO: 563519 - DNA, 15 bp, Homo sapiens
agacaccatgcctgg

SEQ ID NO: 563520 - DNA, 15 bp, Homo sapiens
gagacaccatgcctg

SEQ ID NO: 563521 - DNA, 15 bp, Homo sapiens
tgagacaccatgcct

SEQ ID NO: 563522 - DNA, 15 bp, Homo sapiens
gtgagacaccatgcc

SEQ ID NO: 563523 - DNA, 15 bp, Homo sapiens
cgtgagacaccatgc

SEQ ID NO: 563524 - DNA, 15 bp, Homo sapiens
gcgtgagacaccatg

SEQ ID NO: 563525 - DNA, 15 bp, Homo sapiens
ggcgtgagacaccat

SEQ ID NO: 563526 - DNA, 15 bp, Homo sapiens
aggcgtgagacacca

SEQ ID NO: 563527 - DNA, 15 bp, Homo sapiens
caggcgtgagacacc

SEQ ID NO: 563528 - DNA, 15 bp, Homo sapiens
ccaggcgtgagacac

SEQ ID NO: 563529 - DNA, 15 bp, Homo sapiens
tccaggcgtgagaca

SEQ ID NO: 563530 - DNA, 15 bp, Homo sapiens
ttccaggcgtgagac

SEQ ID NO: 563531 - DNA, 15 bp, Homo sapiens
attccaggcgtgaga

SEQ ID NO: 563532 - DNA, 15 bp, Homo sapiens
gattccaggcgtgag

SEQ ID NO: 563533 - DNA, 15 bp, Homo sapiens
ggattccaggcgtga

SEQ ID NO: 563534 - DNA, 15 bp, Homo sapiens
gggattccaggcgtg

SEQ ID NO: 563535 - DNA, 15 bp, Homo sapiens
tgggattccaggcgt

SEQ ID NO: 563536 - DNA, 15 bp, Homo sapiens
ctgggattccaggcg

SEQ ID NO: 563537 - DNA, 15 bp, Homo sapiens
gctgggattccaggc

SEQ ID NO: 563538 - DNA, 15 bp, Homo sapiens
cgctgggattccagg

SEQ ID NO: 563539 - DNA, 15 bp, Homo sapiens
gcgctgggattccag

SEQ ID NO: 563540 - DNA, 15 bp, Homo sapiens
agcgctgggattcca

SEQ ID NO: 563541 - DNA, 15 bp, Homo sapiens
aagcgctgggattcc

SEQ ID NO: 563542 - DNA, 15 bp, Homo sapiens
aaagcgctgggattc

SEQ ID NO: 563543 - DNA, 15 bp, Homo sapiens
agcctcccaaagcgc

SEQ ID NO: 563544 - DNA, 15 bp, Homo sapiens
cagcctcccaaagcg

SEQ ID NO: 563545 - DNA, 15 bp, Homo sapiens
acctcagcctcccaa

SEQ ID NO: 563546 - DNA, 15 bp, Homo sapiens
cacctcagcctccca

SEQ ID NO: 563547 - DNA, 15 bp, Homo sapiens
tcacctcagcctccc

SEQ ID NO: 563548 - DNA, 15 bp, Homo sapiens
gatcctctcacctca

SEQ ID NO: 563549 - DNA, 15 bp, Homo sapiens
cgatcctctcacctc

SEQ ID NO: 563550 - DNA, 15 bp, Homo sapiens
gcgatcctctcacct

SEQ ID NO: 563551 - DNA, 15 bp, Homo sapiens
ggcgatcctctcacc

SEQ ID NO: 563552 - DNA, 15 bp, Homo sapiens
aggcgatcctctcac

SEQ ID NO: 563553 - DNA, 15 bp, Homo sapiens
caggcgatcctctca

SEQ ID NO: 563554 - DNA, 15 bp, Homo sapiens
tcaggcgatcctctc

SEQ ID NO: 563555 - DNA, 15 bp, Homo sapiens
ctcaggcgatcctct

SEQ ID NO: 563556 - DNA, 15 bp, Homo sapiens
gctcaggcgatcctc

SEQ ID NO: 563557 - DNA, 15 bp, Homo sapiens
ggctcaggcgatcct

SEQ ID NO: 563558 - DNA, 15 bp, Homo sapiens
gggctcaggcgatcc

SEQ ID NO: 563559 - DNA, 15 bp, Homo sapiens
tgggctcaggcgatc

SEQ ID NO: 563560 - DNA, 15 bp, Homo sapiens
ctgggctcaggcgat

SEQ ID NO: 563561 - DNA, 15 bp, Homo sapiens
cctgggctcaggcga

SEQ ID NO: 563562 - DNA, 15 bp, Homo sapiens
tcctgggctcaggcg

SEQ ID NO: 563563 - DNA, 15 bp, Homo sapiens
ctcctgggctcaggc

SEQ ID NO: 563564 - DNA, 15 bp, Homo sapiens
actcctgggctcagg

SEQ ID NO: 563565 - DNA, 15 bp, Homo sapiens
aactcctgggctcag

SEQ ID NO: 563566 - DNA, 15 bp, Homo sapiens
tctatgttgcccagg

SEQ ID NO: 563567 - DNA, 15 bp, Homo sapiens
gtctatgttgcccag

SEQ ID NO: 563568 - DNA, 15 bp, Homo sapiens
ggtctatgttgccca

SEQ ID NO: 563569 - DNA, 15 bp, Homo sapiens
aggtctatgttgccc

SEQ ID NO: 563570 - DNA, 15 bp, Homo sapiens
caggtctatgttgcc

SEQ ID NO: 563571 - DNA, 15 bp, Homo sapiens
tcaggtctatgttgc

SEQ ID NO: 563572 - DNA, 15 bp, Homo sapiens
atcaggtctatgttg

SEQ ID NO: 563573 - DNA, 15 bp, Homo sapiens
gatcaggtctatgtt

SEQ ID NO: 563574 - DNA, 15 bp, Homo sapiens
agatcaggtctatgt

SEQ ID NO: 563575 - DNA, 15 bp, Homo sapiens
gagatcaggtctatg

SEQ ID NO: 563576 - DNA, 15 bp, Homo sapiens
agagatcaggtctat

SEQ ID NO: 563577 - DNA, 15 bp, Homo sapiens
tagagatcaggtcta

SEQ ID NO: 563578 - DNA, 15 bp, Homo sapiens
gtagagatcaggtct

SEQ ID NO: 563579 - DNA, 15 bp, Homo sapiens
tgtagagatcaggtc

SEQ ID NO: 563580 - DNA, 15 bp, Homo sapiens
ttgtagagatcaggt

SEQ ID NO: 563581 - DNA, 15 bp, Homo sapiens
tttgtagagatcagg

SEQ ID NO: 563582 - DNA, 15 bp, Homo sapiens
ttttgtagagatcag

SEQ ID NO: 563583 - DNA, 15 bp, Homo sapiens
tttttgtagagatca

SEQ ID NO: 563584 - DNA, 15 bp, Homo sapiens
ttttttgtagagatc

SEQ ID NO: 563585 - DNA, 15 bp, Homo sapiens
attttttgtagagat

SEQ ID NO: 563586 - DNA, 15 bp, Homo sapiens
aattttttgtagaga

SEQ ID NO: 563587 - DNA, 15 bp, Homo sapiens
taattttttgtagag

SEQ ID NO: 563588 - DNA, 15 bp, Homo sapiens
ttaattttttgtaga

SEQ ID NO: 563589 - DNA, 15 bp, Homo sapiens
tttaattttttgtag

SEQ ID NO: 563590 - DNA, 15 bp, Homo sapiens
ttttaattttttgta

SEQ ID NO: 563591 - DNA, 15 bp, Homo sapiens
tttttaattttttgt

SEQ ID NO: 563592 - DNA, 15 bp, Homo sapiens
ttttttaattttttg

SEQ ID NO: 563593 - DNA, 15 bp, Homo sapiens
attttttaatttttt

SEQ ID NO: 563594 - DNA, 15 bp, Homo sapiens
cattttttaattttt

SEQ ID NO: 563595 - DNA, 15 bp, Homo sapiens
tcattttttaatttt

SEQ ID NO: 563596 - DNA, 15 bp, Homo sapiens
ctcattttttaattt

SEQ ID NO: 563597 - DNA, 15 bp, Homo sapiens
gctcattttttaatt

SEQ ID NO: 563598 - DNA, 15 bp, Homo sapiens
ggctcattttttaat

SEQ ID NO: 563599 - DNA, 15 bp, Homo sapiens
cggctcattttttaa

SEQ ID NO: 563600 - DNA, 15 bp, Homo sapiens
ccggctcatttttta

SEQ ID NO: 563601 - DNA, 15 bp, Homo sapiens
cccggctcatttttt

SEQ ID NO: 563602 - DNA, 15 bp, Homo sapiens
gcccggctcattttt

SEQ ID NO: 563603 - DNA, 15 bp, Homo sapiens
cgcccggctcatttt

SEQ ID NO: 563604 - DNA, 15 bp, Homo sapiens
acgcccggctcattt

SEQ ID NO: 563605 - DNA, 15 bp, Homo sapiens
cacgcccggctcatt

SEQ ID NO: 563606 - DNA, 15 bp, Homo sapiens
ccacgcccggctcat

SEQ ID NO: 563607 - DNA, 15 bp, Homo sapiens
accacgcccggctca

SEQ ID NO: 563608 - DNA, 15 bp, Homo sapiens
caccacgcccggctc

SEQ ID NO: 563609 - DNA, 15 bp, Homo sapiens
caccaccacgcccgg

SEQ ID NO: 563610 - DNA, 15 bp, Homo sapiens
ccaccaccacgcccg

SEQ ID NO: 563611 - DNA, 15 bp, Homo sapiens
gccaccaccacgccc

SEQ ID NO: 563612 - DNA, 15 bp, Homo sapiens
tgccaccaccacgcc

SEQ ID NO: 563613 - DNA, 15 bp, Homo sapiens
gtgccaccaccacgc

SEQ ID NO: 563614 - DNA, 15 bp, Homo sapiens
cgtgccaccaccacg

SEQ ID NO: 563615 - DNA, 15 bp, Homo sapiens
acgtgccaccaccac

SEQ ID NO: 563616 - DNA, 15 bp, Homo sapiens
cacgtgccaccacca

SEQ ID NO: 563617 - DNA, 15 bp, Homo sapiens
acacgtgccaccacc

SEQ ID NO: 563618 - DNA, 15 bp, Homo sapiens
gacacgtgccaccac

SEQ ID NO: 563619 - DNA, 15 bp, Homo sapiens
tgacacgtgccacca

SEQ ID NO: 563620 - DNA, 15 bp, Homo sapiens
atgacacgtgccacc

SEQ ID NO: 563621 - DNA, 15 bp, Homo sapiens
aatgacacgtgccac

SEQ ID NO: 563622 - DNA, 15 bp, Homo sapiens
caatgacacgtgcca

SEQ ID NO: 563623 - DNA, 15 bp, Homo sapiens
acaatgacacgtgcc

SEQ ID NO: 563624 - DNA, 15 bp, Homo sapiens
gacaatgacacgtgc

SEQ ID NO: 563625 - DNA, 15 bp, Homo sapiens
ggacaatgacacgtg

SEQ ID NO: 563626 - DNA, 15 bp, Homo sapiens
gggacaatgacacgt

SEQ ID NO: 563627 - DNA, 15 bp, Homo sapiens
cgggacaatgacacg

SEQ ID NO: 563628 - DNA, 15 bp, Homo sapiens
ccgggacaatgacac

SEQ ID NO: 563629 - DNA, 15 bp, Homo sapiens
gccgggacaatgaca

SEQ ID NO: 563630 - DNA, 15 bp, Homo sapiens
ggccgggacaatgac

SEQ ID NO: 563631 - DNA, 15 bp, Homo sapiens
tggccgggacaatga

SEQ ID NO: 563632 - DNA, 15 bp, Homo sapiens
gtggccgggacaatg

SEQ ID NO: 563633 - DNA, 15 bp, Homo sapiens
agtggccgggacaat

SEQ ID NO: 563634 - DNA, 15 bp, Homo sapiens
aagtggccgggacaa

SEQ ID NO: 563635 - DNA, 15 bp, Homo sapiens
caagtggccgggaca

SEQ ID NO: 563636 - DNA, 15 bp, Homo sapiens
ccaagtggccgggac

SEQ ID NO: 563637 - DNA, 15 bp, Homo sapiens
cccaagtggccggga

SEQ ID NO: 563638 - DNA, 15 bp, Homo sapiens
tcccaagtggccggg

SEQ ID NO: 563639 - DNA, 15 bp, Homo sapiens
ctcccaagtggccgg

SEQ ID NO: 563640 - DNA, 15 bp, Homo sapiens
cctcccaagtggccg

SEQ ID NO: 563641 - DNA, 15 bp, Homo sapiens
gcctcccaagtggcc

SEQ ID NO: 563642 - DNA, 15 bp, Homo sapiens
ggcctcccaagtggc

SEQ ID NO: 563643 - DNA, 15 bp, Homo sapiens
cggcctcccaagtgg

SEQ ID NO: 563644 - DNA, 15 bp, Homo sapiens
tcggcctcccaagtg

SEQ ID NO: 563645 - DNA, 15 bp, Homo sapiens
ctcggcctcccaagt

SEQ ID NO: 563646 - DNA, 15 bp, Homo sapiens
cctcggcctcccaag

SEQ ID NO: 563647 - DNA, 15 bp, Homo sapiens
ggccttgaactcctg

SEQ ID NO: 563648 - DNA, 15 bp, Homo sapiens
cggccttgaactcct

SEQ ID NO: 563649 - DNA, 15 bp, Homo sapiens
acggccttgaactcc

SEQ ID NO: 563650 - DNA, 15 bp, Homo sapiens
cacggccttgaactc

SEQ ID NO: 563651 - DNA, 15 bp, Homo sapiens
ccacggccttgaact

SEQ ID NO: 563652 - DNA, 15 bp, Homo sapiens
accacggccttgaac

SEQ ID NO: 563653 - DNA, 15 bp, Homo sapiens
caccacggccttgaa

SEQ ID NO: 563654 - DNA, 15 bp, Homo sapiens
tcaccacggccttga

SEQ ID NO: 563655 - DNA, 15 bp, Homo sapiens
ctcaccacggccttg

SEQ ID NO: 563656 - DNA, 15 bp, Homo sapiens
gctcaccacggcctt

SEQ ID NO: 563657 - DNA, 15 bp, Homo sapiens
ggctcaccacggcct

SEQ ID NO: 563658 - DNA, 15 bp, Homo sapiens
tggctcaccacggcc

SEQ ID NO: 563659 - DNA, 15 bp, Homo sapiens
atggctcaccacggc

SEQ ID NO: 563660 - DNA, 15 bp, Homo sapiens
catggctcaccacgg

SEQ ID NO: 563661 - DNA, 15 bp, Homo sapiens
tcatggctcaccacg

SEQ ID NO: 563662 - DNA, 15 bp, Homo sapiens
atcatggctcaccac

SEQ ID NO: 563663 - DNA, 15 bp, Homo sapiens
catcatggctcacca

SEQ ID NO: 563664 - DNA, 15 bp, Homo sapiens
ccatcatggctcacc

SEQ ID NO: 563665 - DNA, 15 bp, Homo sapiens
gccatcatggctcac

SEQ ID NO: 563666 - DNA, 15 bp, Homo sapiens
tgccatcatggctca

SEQ ID NO: 563667 - DNA, 15 bp, Homo sapiens
gtgccatcatggctc

SEQ ID NO: 563668 - DNA, 15 bp, Homo sapiens
ggtgccatcatggct

SEQ ID NO: 563669 - DNA, 15 bp, Homo sapiens
tggtgccatcatggc

SEQ ID NO: 563670 - DNA, 15 bp, Homo sapiens
gtggtgccatcatgg

SEQ ID NO: 563671 - DNA, 15 bp, Homo sapiens
ggtggtgccatcatg

SEQ ID NO: 563672 - DNA, 15 bp, Homo sapiens
cggtggtgccatcat

SEQ ID NO: 563673 - DNA, 15 bp, Homo sapiens
acggtggtgccatca

SEQ ID NO: 563674 - DNA, 15 bp, Homo sapiens
tacggtggtgccatc

SEQ ID NO: 563675 - DNA, 15 bp, Homo sapiens
gtacggtggtgccat

SEQ ID NO: 563676 - DNA, 15 bp, Homo sapiens
agtacggtggtgcca

SEQ ID NO: 563677 - DNA, 15 bp, Homo sapiens
gagtacggtggtgcc

SEQ ID NO: 563678 - DNA, 15 bp, Homo sapiens
ggagtacggtggtgc

SEQ ID NO: 563679 - DNA, 15 bp, Homo sapiens
tggagtacggtggtg

SEQ ID NO: 563680 - DNA, 15 bp, Homo sapiens
ctggagtacggtggt

SEQ ID NO: 563681 - DNA, 15 bp, Homo sapiens
gctggagtacggtgg

SEQ ID NO: 563682 - DNA, 15 bp, Homo sapiens
ggctggagtacggtg

SEQ ID NO: 563683 - DNA, 15 bp, Homo sapiens
aggctggagtacggt

SEQ ID NO: 563684 - DNA, 15 bp, Homo sapiens
caggctggagtacgg

SEQ ID NO: 563685 - DNA, 15 bp, Homo sapiens
ccaggctggagtacg

SEQ ID NO: 563686 - DNA, 15 bp, Homo sapiens
tctctgtcgcccagg

SEQ ID NO: 563687 - DNA, 15 bp, Homo sapiens
ctctctgtcgcccag

SEQ ID NO: 563688 - DNA, 15 bp, Homo sapiens
tctctctgtcgccca

SEQ ID NO: 563689 - DNA, 15 bp, Homo sapiens
ctctctctgtcgccc

SEQ ID NO: 563690 - DNA, 15 bp, Homo sapiens
tctctctctgtcgcc

SEQ ID NO: 563691 - DNA, 15 bp, Homo sapiens
gtctctctctgtcgc

SEQ ID NO: 563692 - DNA, 15 bp, Homo sapiens
ggtctctctctgtcg

SEQ ID NO: 563693 - DNA, 15 bp, Homo sapiens
cggtctctctctgtc

SEQ ID NO: 563694 - DNA, 15 bp, Homo sapiens
acggtctctctctgt

SEQ ID NO: 563695 - DNA, 15 bp, Homo sapiens
gacggtctctctctg

SEQ ID NO: 563696 - DNA, 15 bp, Homo sapiens
agacggtctctctct

SEQ ID NO: 563697 - DNA, 15 bp, Homo sapiens
gagacggtctctctc

SEQ ID NO: 563698 - DNA, 15 bp, Homo sapiens
agagacggtctctct

SEQ ID NO: 563699 - DNA, 15 bp, Homo sapiens
tagagacggtctctc

SEQ ID NO: 563700 - DNA, 15 bp, Homo sapiens
ttagagacggtctct

SEQ ID NO: 563701 - DNA, 15 bp, Homo sapiens
tttagagacggtctc

SEQ ID NO: 563702 - DNA, 15 bp, Homo sapiens
ttttagagacggtct

SEQ ID NO: 563703 - DNA, 15 bp, Homo sapiens
tttttagagacggtc

SEQ ID NO: 563704 - DNA, 15 bp, Homo sapiens
ttttttagagacggt

SEQ ID NO: 563705 - DNA, 15 bp, Homo sapiens
attttttagagacgg

SEQ ID NO: 563706 - DNA, 15 bp, Homo sapiens
tattttttagagacg

SEQ ID NO: 563707 - DNA, 15 bp, Homo sapiens
ttattttttagagac

SEQ ID NO: 563708 - DNA, 15 bp, Homo sapiens
tttattttttagaga

SEQ ID NO: 563709 - DNA, 15 bp, Homo sapiens
ttttattttttagag

SEQ ID NO: 563710 - DNA, 15 bp, Homo sapiens
tttttattttttaga

SEQ ID NO: 563711 - DNA, 15 bp, Homo sapiens
ttttttattttttag

SEQ ID NO: 563712 - DNA, 15 bp, Homo sapiens
attttttatttttta

SEQ ID NO: 563713 - DNA, 15 bp, Homo sapiens
tattttttatttttt

SEQ ID NO: 563714 - DNA, 15 bp, Homo sapiens
ttattttttattttt

SEQ ID NO: 563715 - DNA, 15 bp, Homo sapiens
tttattttttatttt

SEQ ID NO: 563716 - DNA, 15 bp, Homo sapiens
atttattttttattt

SEQ ID NO: 563717 - DNA, 15 bp, Homo sapiens
gatttattttttatt

SEQ ID NO: 563718 - DNA, 15 bp, Homo sapiens
tgatttattttttat

SEQ ID NO: 563719 - DNA, 15 bp, Homo sapiens
ttgatttatttttta

SEQ ID NO: 563720 - DNA, 15 bp, Homo sapiens
gttgatttatttttt

SEQ ID NO: 563721 - DNA, 15 bp, Homo sapiens
tgttgatttattttt

SEQ ID NO: 563722 - DNA, 15 bp, Homo sapiens
gtgttgatttatttt

SEQ ID NO: 563723 - DNA, 15 bp, Homo sapiens
tgtgttgatttattt

SEQ ID NO: 563724 - DNA, 15 bp, Homo sapiens
atgtgttgatttatt

SEQ ID NO: 563725 - DNA, 15 bp, Homo sapiens
tatgtgttgatttat

SEQ ID NO: 563726 - DNA, 15 bp, Homo sapiens
ttatgtgttgattta

SEQ ID NO: 563727 - DNA, 15 bp, Homo sapiens
tttatgtgttgattt

SEQ ID NO: 563728 - DNA, 15 bp, Homo sapiens
gtttatgtgttgatt

SEQ ID NO: 563729 - DNA, 15 bp, Homo sapiens
tgtttatgtgttgat

SEQ ID NO: 563730 - DNA, 15 bp, Homo sapiens
atgtttatgtgttga

SEQ ID NO: 563731 - DNA, 15 bp, Homo sapiens
tatgtttatgtgttg

SEQ ID NO: 563732 - DNA, 15 bp, Homo sapiens
gtatgtttatgtgtt

SEQ ID NO: 563733 - DNA, 15 bp, Homo sapiens
cgtatgtttatgtgt

SEQ ID NO: 563734 - DNA, 15 bp, Homo sapiens
acgtatgtttatgtg

SEQ ID NO: 563735 - DNA, 15 bp, Homo sapiens
aacgtatgtttatgt

SEQ ID NO: 563736 - DNA, 15 bp, Homo sapiens
gaacgtatgtttatg

SEQ ID NO: 563737 - DNA, 15 bp, Homo sapiens
agaacgtatgtttat

SEQ ID NO: 563738 - DNA, 15 bp, Homo sapiens
gagaacgtatgttta

SEQ ID NO: 563739 - DNA, 15 bp, Homo sapiens
ggagaacgtatgttt

SEQ ID NO: 563740 - DNA, 15 bp, Homo sapiens
aggagaacgtatgtt

SEQ ID NO: 563741 - DNA, 15 bp, Homo sapiens
gaggagaacgtatgt

SEQ ID NO: 563742 - DNA, 15 bp, Homo sapiens
ggaggagaacgtatg

SEQ ID NO: 563743 - DNA, 15 bp, Homo sapiens
aggaggagaacgtat

SEQ ID NO: 563744 - DNA, 15 bp, Homo sapiens
caggaggagaacgta

SEQ ID NO: 563745 - DNA, 15 bp, Homo sapiens
tcaggaggagaacgt

SEQ ID NO: 563746 - DNA, 15 bp, Homo sapiens
ctcaggaggagaacg

SEQ ID NO: 563747 - DNA, 15 bp, Homo sapiens
cctcaggaggagaac

SEQ ID NO: 563748 - DNA, 15 bp, Homo sapiens
ccctcaggaggagaa

SEQ ID NO: 563749 - DNA, 15 bp, Homo sapiens
tccctcaggaggaga

SEQ ID NO: 563750 - DNA, 15 bp, Homo sapiens
gtccctcaggaggag

SEQ ID NO: 563751 - DNA, 15 bp, Homo sapiens
tgtccctcaggagga

SEQ ID NO: 563752 - DNA, 15 bp, Homo sapiens
ctgtccctcaggagg

SEQ ID NO: 563753 - DNA, 15 bp, Homo sapiens
tctgtccctcaggag

SEQ ID NO: 563754 - DNA, 15 bp, Homo sapiens
ctctgtccctcagga

SEQ ID NO: 563755 - DNA, 15 bp, Homo sapiens
gctctgtccctcagg

SEQ ID NO: 563756 - DNA, 15 bp, Homo sapiens
agctctgtccctcag

SEQ ID NO: 563757 - DNA, 15 bp, Homo sapiens
aagctctgtccctca

SEQ ID NO: 563758 - DNA, 15 bp, Homo sapiens
caagctctgtccctc

SEQ ID NO: 563759 - DNA, 15 bp, Homo sapiens
gcaagctctgtccct

SEQ ID NO: 563760 - DNA, 15 bp, Homo sapiens
ggcaagctctgtccc

SEQ ID NO: 563761 - DNA, 15 bp, Homo sapiens
gggcaagctctgtcc

SEQ ID NO: 563762 - DNA, 15 bp, Homo sapiens
ggggcaagctctgtc

SEQ ID NO: 563763 - DNA, 15 bp, Homo sapiens
cggggcaagctctgt

SEQ ID NO: 563764 - DNA, 15 bp, Homo sapiens
ccggggcaagctctg

SEQ ID NO: 563765 - DNA, 15 bp, Homo sapiens
accggggcaagctct

SEQ ID NO: 563766 - DNA, 15 bp, Homo sapiens
aaccggggcaagctc

SEQ ID NO: 563767 - DNA, 15 bp, Homo sapiens
caaccggggcaagct

SEQ ID NO: 563768 - DNA, 15 bp, Homo sapiens
acaaccggggcaagc

SEQ ID NO: 563769 - DNA, 15 bp, Homo sapiens
aacaaccggggcaag

SEQ ID NO: 563770 - DNA, 15 bp, Homo sapiens
gaacaaccggggcaa

SEQ ID NO: 563771 - DNA, 15 bp, Homo sapiens
ggaacaaccggggca

SEQ ID NO: 563772 - DNA, 15 bp, Homo sapiens
tggaacaaccggggc

SEQ ID NO: 563773 - DNA, 15 bp, Homo sapiens
atggaacaaccgggg

SEQ ID NO: 563774 - DNA, 15 bp, Homo sapiens
catggaacaaccggg

SEQ ID NO: 563775 - DNA, 15 bp, Homo sapiens
acatggaacaaccgg

SEQ ID NO: 563776 - DNA, 15 bp, Homo sapiens
aacatggaacaaccg

SEQ ID NO: 563777 - DNA, 15 bp, Homo sapiens
caacatggaacaacc

SEQ ID NO: 563778 - DNA, 15 bp, Homo sapiens
tcaacatggaacaac

SEQ ID NO: 563779 - DNA, 15 bp, Homo sapiens
gtcaacatggaacaa

SEQ ID NO: 563780 - DNA, 15 bp, Homo sapiens
agtcaacatggaaca

SEQ ID NO: 563781 - DNA, 15 bp, Homo sapiens
cagtcaacatggaac

SEQ ID NO: 563782 - DNA, 15 bp, Homo sapiens
acagtcaacatggaa

SEQ ID NO: 563783 - DNA, 15 bp, Homo sapiens
cacagtcaacatgga

SEQ ID NO: 563784 - DNA, 15 bp, Homo sapiens
gcacagtcaacatgg

SEQ ID NO: 563785 - DNA, 15 bp, Homo sapiens
agcacagtcaacatg

SEQ ID NO: 563786 - DNA, 15 bp, Homo sapiens
cagcacagtcaacat

SEQ ID NO: 563787 - DNA, 15 bp, Homo sapiens
gcagcacagtcaaca

SEQ ID NO: 563788 - DNA, 15 bp, Homo sapiens
tgcagcacagtcaac

SEQ ID NO: 563789 - DNA, 15 bp, Homo sapiens
gtgcagcacagtcaa

SEQ ID NO: 563790 - DNA, 15 bp, Homo sapiens
tgtgcagcacagtca

SEQ ID NO: 563791 - DNA, 15 bp, Homo sapiens
gtgtgcagcacagtc

SEQ ID NO: 563792 - DNA, 15 bp, Homo sapiens
tgtgtgcagcacagt

SEQ ID NO: 563793 - DNA, 15 bp, Homo sapiens
ctgtgtgcagcacag

SEQ ID NO: 563794 - DNA, 15 bp, Homo sapiens
cctgtgtgcagcaca

SEQ ID NO: 563795 - DNA, 15 bp, Homo sapiens
gcctgtgtgcagcac

SEQ ID NO: 563796 - DNA, 15 bp, Homo sapiens
ggcctgtgtgcagca

SEQ ID NO: 563797 - DNA, 15 bp, Homo sapiens
cggcctgtgtgcagc

SEQ ID NO: 563798 - DNA, 15 bp, Homo sapiens
gcggcctgtgtgcag

SEQ ID NO: 563799 - DNA, 15 bp, Homo sapiens
ggcggcctgtgtgca

SEQ ID NO: 563800 - DNA, 15 bp, Homo sapiens
gggcggcctgtgtgc

SEQ ID NO: 563801 - DNA, 15 bp, Homo sapiens
ggggcggcctgtgtg

SEQ ID NO: 563802 - DNA, 15 bp, Homo sapiens
gggggcggcctgtgt

SEQ ID NO: 563803 - DNA, 15 bp, Homo sapiens
ggggggcggcctgtg

SEQ ID NO: 563804 - DNA, 15 bp, Homo sapiens
aggggggcggcctgt

SEQ ID NO: 563805 - DNA, 15 bp, Homo sapiens
aaggggggcggcctg

SEQ ID NO: 563806 - DNA, 15 bp, Homo sapiens
caaggggggcggcct

SEQ ID NO: 563807 - DNA, 15 bp, Homo sapiens
gcaaggggggcggcc

SEQ ID NO: 563808 - DNA, 15 bp, Homo sapiens
agcaaggggggcggc

SEQ ID NO: 563809 - DNA, 15 bp, Homo sapiens
gagcaaggggggcgg

SEQ ID NO: 563810 - DNA, 15 bp, Homo sapiens
agagcaaggggggcg

SEQ ID NO: 563811 - DNA, 15 bp, Homo sapiens
cagagcaaggggggc

SEQ ID NO: 563812 - DNA, 15 bp, Homo sapiens
gcagagcaagggggg

SEQ ID NO: 563813 - DNA, 15 bp, Homo sapiens
ggcagagcaaggggg

SEQ ID NO: 563814 - DNA, 15 bp, Homo sapiens
gggcagagcaagggg

SEQ ID NO: 563815 - DNA, 15 bp, Homo sapiens
ggggcagagcaaggg

SEQ ID NO: 563816 - DNA, 15 bp, Homo sapiens
aggggcagagcaagg

SEQ ID NO: 563817 - DNA, 15 bp, Homo sapiens
gaggggcagagcaag

SEQ ID NO: 563818 - DNA, 15 bp, Homo sapiens
tgaggggcagagcaa

SEQ ID NO: 563819 - DNA, 15 bp, Homo sapiens
gtgaggggcagagca

SEQ ID NO: 563820 - DNA, 15 bp, Homo sapiens
agtgaggggcagagc

SEQ ID NO: 563821 - DNA, 15 bp, Homo sapiens
cagtgaggggcagag

SEQ ID NO: 563822 - DNA, 15 bp, Homo sapiens
acagtgaggggcaga

SEQ ID NO: 563823 - DNA, 15 bp, Homo sapiens
tacagtgaggggcag

SEQ ID NO: 563824 - DNA, 15 bp, Homo sapiens
atacagtgaggggca

SEQ ID NO: 563825 - DNA, 15 bp, Homo sapiens
aatacagtgaggggc

SEQ ID NO: 563826 - DNA, 15 bp, Homo sapiens
taatacagtgagggg

SEQ ID NO: 563827 - DNA, 15 bp, Homo sapiens
ttaatacagtgaggg

SEQ ID NO: 563828 - DNA, 15 bp, Homo sapiens
cttaatacagtgagg

SEQ ID NO: 563829 - DNA, 15 bp, Homo sapiens
acttaatacagtgag

SEQ ID NO: 563830 - DNA, 15 bp, Homo sapiens
gacttaatacagtga

SEQ ID NO: 563831 - DNA, 15 bp, Homo sapiens
agacttaatacagtg

SEQ ID NO: 563832 - DNA, 15 bp, Homo sapiens
gagacttaatacagt

SEQ ID NO: 563833 - DNA, 15 bp, Homo sapiens
agagacttaatacag

SEQ ID NO: 563834 - DNA, 15 bp, Homo sapiens
aagagacttaataca

SEQ ID NO: 563835 - DNA, 15 bp, Homo sapiens
aaagagacttaatac

SEQ ID NO: 563836 - DNA, 15 bp, Homo sapiens
caaagagacttaata

SEQ ID NO: 563837 - DNA, 15 bp, Homo sapiens
ccaaagagacttaat

SEQ ID NO: 563838 - DNA, 15 bp, Homo sapiens
cccaaagagacttaa

SEQ ID NO: 563839 - DNA, 15 bp, Homo sapiens
gcccaaagagactta

SEQ ID NO: 563840 - DNA, 15 bp, Homo sapiens
ggcccaaagagactt

SEQ ID NO: 563841 - DNA, 15 bp, Homo sapiens
aggcccaaagagact

SEQ ID NO: 563842 - DNA, 15 bp, Homo sapiens
gaggcccaaagagac

SEQ ID NO: 563843 - DNA, 15 bp, Homo sapiens
tgaggcccaaagaga

SEQ ID NO: 563844 - DNA, 15 bp, Homo sapiens
ctgaggcccaaagag

SEQ ID NO: 563845 - DNA, 15 bp, Homo sapiens
actgaggcccaaaga

SEQ ID NO: 563846 - DNA, 15 bp, Homo sapiens
aactgaggcccaaag

SEQ ID NO: 563847 - DNA, 15 bp, Homo sapiens
aaactgaggcccaaa

SEQ ID NO: 563848 - DNA, 15 bp, Homo sapiens
gaaactgaggcccaa

SEQ ID NO: 563849 - DNA, 15 bp, Homo sapiens
agaaactgaggccca

SEQ ID NO: 563850 - DNA, 15 bp, Homo sapiens
gagaaactgaggccc

SEQ ID NO: 563851 - DNA, 15 bp, Homo sapiens
ggagaaactgaggcc

SEQ ID NO: 563852 - DNA, 15 bp, Homo sapiens
tggagaaactgaggc

SEQ ID NO: 563853 - DNA, 15 bp, Homo sapiens
atggagaaactgagg

SEQ ID NO: 563854 - DNA, 15 bp, Homo sapiens
gatggagaaactgag

SEQ ID NO: 563855 - DNA, 15 bp, Homo sapiens
agatggagaaactga

SEQ ID NO: 563856 - DNA, 15 bp, Homo sapiens
gagatggagaaactg

SEQ ID NO: 563857 - DNA, 15 bp, Homo sapiens
agagatggagaaact

SEQ ID NO: 563858 - DNA, 15 bp, Homo sapiens
tagagatggagaaac

SEQ ID NO: 563859 - DNA, 15 bp, Homo sapiens
ttagagatggagaaa

SEQ ID NO: 563860 - DNA, 15 bp, Homo sapiens
tttagagatggagaa

SEQ ID NO: 563861 - DNA, 15 bp, Homo sapiens
ctttagagatggaga

SEQ ID NO: 563862 - DNA, 15 bp, Homo sapiens
cctttagagatggag

SEQ ID NO: 563863 - DNA, 15 bp, Homo sapiens
tcctttagagatgga

SEQ ID NO: 563864 - DNA, 15 bp, Homo sapiens
ctcctttagagatgg

SEQ ID NO: 563865 - DNA, 15 bp, Homo sapiens
cctcctttagagatg

SEQ ID NO: 563866 - DNA, 15 bp, Homo sapiens
acctcctttagagat

SEQ ID NO: 563867 - DNA, 15 bp, Homo sapiens
gacctcctttagaga

SEQ ID NO: 563868 - DNA, 15 bp, Homo sapiens
cgacctcctttagag

SEQ ID NO: 563869 - DNA, 15 bp, Homo sapiens
ccgacctcctttaga

SEQ ID NO: 563870 - DNA, 15 bp, Homo sapiens
cccgacctcctttag

SEQ ID NO: 563871 - DNA, 15 bp, Homo sapiens
ccccgacctccttta

SEQ ID NO: 563872 - DNA, 15 bp, Homo sapiens
tccccgacctccttt

SEQ ID NO: 563873 - DNA, 15 bp, Homo sapiens
ctccccgacctcctt

SEQ ID NO: 563874 - DNA, 15 bp, Homo sapiens
cctccccgacctcct

SEQ ID NO: 563875 - DNA, 15 bp, Homo sapiens
gcctccccgacctcc

SEQ ID NO: 563876 - DNA, 15 bp, Homo sapiens
ggcctccccgacctc

SEQ ID NO: 563877 - DNA, 15 bp, Homo sapiens
tggcctccccgacct

SEQ ID NO: 563878 - DNA, 15 bp, Homo sapiens
ctggcctccccgacc

SEQ ID NO: 563879 - DNA, 15 bp, Homo sapiens
cctggcctccccgac

SEQ ID NO: 563880 - DNA, 15 bp, Homo sapiens
gcctggcctccccga

SEQ ID NO: 563881 - DNA, 15 bp, Homo sapiens
cgcctggcctccccg

SEQ ID NO: 563882 - DNA, 15 bp, Homo sapiens
ccgcctggcctcccc

SEQ ID NO: 563883 - DNA, 15 bp, Homo sapiens
cccgcctggcctccc

SEQ ID NO: 563884 - DNA, 15 bp, Homo sapiens
acccgcctggcctcc

SEQ ID NO: 563885 - DNA, 15 bp, Homo sapiens
cacccgcctggcctc

SEQ ID NO: 563886 - DNA, 15 bp, Homo sapiens
acacccgcctggcct

SEQ ID NO: 563887 - DNA, 15 bp, Homo sapiens
aacacccgcctggcc

SEQ ID NO: 563888 - DNA, 15 bp, Homo sapiens
caacacccgcctggc

SEQ ID NO: 563889 - DNA, 15 bp, Homo sapiens
tcaacacccgcctgg

SEQ ID NO: 563890 - DNA, 15 bp, Homo sapiens
ctcaacacccgcctg

SEQ ID NO: 563891 - DNA, 15 bp, Homo sapiens
actcaacacccgcct

SEQ ID NO: 563892 - DNA, 15 bp, Homo sapiens
cactcaacacccgcc

SEQ ID NO: 563893 - DNA, 15 bp, Homo sapiens
tcactcaacacccgc

SEQ ID NO: 563894 - DNA, 15 bp, Homo sapiens
ctcactcaacacccg

SEQ ID NO: 563895 - DNA, 15 bp, Homo sapiens
tctcactcaacaccc

SEQ ID NO: 563896 - DNA, 15 bp, Homo sapiens
atctcactcaacacc

SEQ ID NO: 563897 - DNA, 15 bp, Homo sapiens
catctcactcaacac

SEQ ID NO: 563898 - DNA, 15 bp, Homo sapiens
tcatctcactcaaca

SEQ ID NO: 563899 - DNA, 15 bp, Homo sapiens
ttcatctcactcaac

SEQ ID NO: 563900 - DNA, 15 bp, Homo sapiens
cttcatctcactcaa

SEQ ID NO: 563901 - DNA, 15 bp, Homo sapiens
tcttcatctcactca

SEQ ID NO: 563902 - DNA, 15 bp, Homo sapiens
ctcttcatctcactc

SEQ ID NO: 563903 - DNA, 15 bp, Homo sapiens
cctcttcatctcact

SEQ ID NO: 563904 - DNA, 15 bp, Homo sapiens
gcctcttcatctcac

SEQ ID NO: 563905 - DNA, 15 bp, Homo sapiens
ggcctcttcatctca

SEQ ID NO: 563906 - DNA, 15 bp, Homo sapiens
gggcctcttcatctc

SEQ ID NO: 563907 - DNA, 15 bp, Homo sapiens
agggcctcttcatct

SEQ ID NO: 563908 - DNA, 15 bp, Homo sapiens
aagggcctcttcatc

SEQ ID NO: 563909 - DNA, 15 bp, Homo sapiens
caagggcctcttcat

SEQ ID NO: 563910 - DNA, 15 bp, Homo sapiens
ccaagggcctcttca

SEQ ID NO: 563911 - DNA, 15 bp, Homo sapiens
tccaagggcctcttc

SEQ ID NO: 563912 - DNA, 15 bp, Homo sapiens
ctccaagggcctctt

SEQ ID NO: 563913 - DNA, 15 bp, Homo sapiens
actccaagggcctct

SEQ ID NO: 563914 - DNA, 15 bp, Homo sapiens
gactccaagggcctc

SEQ ID NO: 563915 - DNA, 15 bp, Homo sapiens
tgactccaagggcct

SEQ ID NO: 563916 - DNA, 15 bp, Homo sapiens
atgactccaagggcc

SEQ ID NO: 563917 - DNA, 15 bp, Homo sapiens
aatgactccaagggc

SEQ ID NO: 563918 - DNA, 15 bp, Homo sapiens
gaatgactccaaggg

SEQ ID NO: 563919 - DNA, 15 bp, Homo sapiens
ggaatgactccaagg

SEQ ID NO: 563920 - DNA, 15 bp, Homo sapiens
tggaatgactccaag

SEQ ID NO: 563921 - DNA, 15 bp, Homo sapiens
ctggaatgactccaa

SEQ ID NO: 563922 - DNA, 15 bp, Homo sapiens
cctggaatgactcca

SEQ ID NO: 563923 - DNA, 15 bp, Homo sapiens
tcctggaatgactcc

SEQ ID NO: 563924 - DNA, 15 bp, Homo sapiens
ctcctggaatgactc

SEQ ID NO: 563925 - DNA, 15 bp, Homo sapiens
actcctggaatgact

SEQ ID NO: 563926 - DNA, 15 bp, Homo sapiens
gactcctggaatgac

SEQ ID NO: 563927 - DNA, 15 bp, Homo sapiens
agactcctggaatga

SEQ ID NO: 563928 - DNA, 15 bp, Homo sapiens
tagactcctggaatg

SEQ ID NO: 563929 - DNA, 15 bp, Homo sapiens
atagactcctggaat

SEQ ID NO: 563930 - DNA, 15 bp, Homo sapiens
tatagactcctggaa

SEQ ID NO: 563931 - DNA, 15 bp, Homo sapiens
ctatagactcctgga

SEQ ID NO: 563932 - DNA, 15 bp, Homo sapiens
cctatagactcctgg

SEQ ID NO: 563933 - DNA, 15 bp, Homo sapiens
acctatagactcctg

SEQ ID NO: 563934 - DNA, 15 bp, Homo sapiens
cacctatagactcct

SEQ ID NO: 563935 - DNA, 15 bp, Homo sapiens
tcacctatagactcc

SEQ ID NO: 563936 - DNA, 15 bp, Homo sapiens
gtcacctatagactc

SEQ ID NO: 563937 - DNA, 15 bp, Homo sapiens
agtcacctatagact

SEQ ID NO: 563938 - DNA, 15 bp, Homo sapiens
gagtcacctatagac

SEQ ID NO: 563939 - DNA, 15 bp, Homo sapiens
ggagtcacctataga

SEQ ID NO: 563940 - DNA, 15 bp, Homo sapiens
tggagtcacctatag

SEQ ID NO: 563941 - DNA, 15 bp, Homo sapiens
ctggagtcacctata

SEQ ID NO: 563942 - DNA, 15 bp, Homo sapiens
actggagtcacctat

SEQ ID NO: 563943 - DNA, 15 bp, Homo sapiens
gactggagtcaccta

SEQ ID NO: 563944 - DNA, 15 bp, Homo sapiens
agactggagtcacct

SEQ ID NO: 563945 - DNA, 15 bp, Homo sapiens
gagactggagtcacc

SEQ ID NO: 563946 - DNA, 15 bp, Homo sapiens
agagactggagtcac

SEQ ID NO: 563947 - DNA, 15 bp, Homo sapiens
aagagactggagtca

SEQ ID NO: 563948 - DNA, 15 bp, Homo sapiens
gaagagactggagtc

SEQ ID NO: 563949 - DNA, 15 bp, Homo sapiens
agaagagactggagt

SEQ ID NO: 563950 - DNA, 15 bp, Homo sapiens
gagaagagactggag

SEQ ID NO: 563951 - DNA, 15 bp, Homo sapiens
tgagaagagactgga

SEQ ID NO: 563952 - DNA, 15 bp, Homo sapiens
gtgagaagagactgg

SEQ ID NO: 563953 - DNA, 15 bp, Homo sapiens
agtgagaagagactg

SEQ ID NO: 563954 - DNA, 15 bp, Homo sapiens
aagtgagaagagact

SEQ ID NO: 563955 - DNA, 15 bp, Homo sapiens
gaagtgagaagagac

SEQ ID NO: 563956 - DNA, 15 bp, Homo sapiens
agaagtgagaagaga

SEQ ID NO: 563957 - DNA, 15 bp, Homo sapiens
cagaagtgagaagag

SEQ ID NO: 563958 - DNA, 15 bp, Homo sapiens
tcagaagtgagaaga

SEQ ID NO: 563959 - DNA, 15 bp, Homo sapiens
gtcagaagtgagaag

SEQ ID NO: 563960 - DNA, 15 bp, Homo sapiens
tgtcagaagtgagaa

SEQ ID NO: 563961 - DNA, 15 bp, Homo sapiens
ctgtcagaagtgaga

SEQ ID NO: 563962 - DNA, 15 bp, Homo sapiens
gctgtcagaagtgag

SEQ ID NO: 563963 - DNA, 15 bp, Homo sapiens
ggctgtcagaagtga

SEQ ID NO: 563964 - DNA, 15 bp, Homo sapiens
aggctgtcagaagtg

SEQ ID NO: 563965 - DNA, 15 bp, Homo sapiens
caggctgtcagaagt

SEQ ID NO: 563966 - DNA, 15 bp, Homo sapiens
ccaggctgtcagaag

SEQ ID NO: 563967 - DNA, 15 bp, Homo sapiens
accaggctgtcagaa

SEQ ID NO: 563968 - DNA, 15 bp, Homo sapiens
caccaggctgtcaga

SEQ ID NO: 563969 - DNA, 15 bp, Homo sapiens
ccaccaggctgtcag

SEQ ID NO: 563970 - DNA, 15 bp, Homo sapiens
gccaccaggctgtca

SEQ ID NO: 563971 - DNA, 15 bp, Homo sapiens
cgccaccaggctgtc

SEQ ID NO: 563972 - DNA, 15 bp, Homo sapiens
ccgccaccaggctgt

SEQ ID NO: 563973 - DNA, 15 bp, Homo sapiens
cccgccaccaggctg

SEQ ID NO: 563974 - DNA, 15 bp, Homo sapiens
ccccgccaccaggct

SEQ ID NO: 563975 - DNA, 15 bp, Homo sapiens
cccccgccaccaggc

SEQ ID NO: 563976 - DNA, 15 bp, Homo sapiens
acccccgccaccagg

SEQ ID NO: 563977 - DNA, 15 bp, Homo sapiens
cacccccgccaccag

SEQ ID NO: 563978 - DNA, 15 bp, Homo sapiens
ccacccccgccacca

SEQ ID NO: 563979 - DNA, 15 bp, Homo sapiens
tccacccccgccacc

SEQ ID NO: 563980 - DNA, 15 bp, Homo sapiens
ctccacccccgccac

SEQ ID NO: 563981 - DNA, 15 bp, Homo sapiens
actccacccccgcca

SEQ ID NO: 563982 - DNA, 15 bp, Homo sapiens
gactccacccccgcc

SEQ ID NO: 563983 - DNA, 15 bp, Homo sapiens
agactccacccccgc

SEQ ID NO: 563984 - DNA, 15 bp, Homo sapiens
gagactccacccccg

SEQ ID NO: 563985 - DNA, 15 bp, Homo sapiens
agagactccaccccc

SEQ ID NO: 563986 - DNA, 15 bp, Homo sapiens
cagagactccacccc

SEQ ID NO: 563987 - DNA, 15 bp, Homo sapiens
gcagagactccaccc

SEQ ID NO: 563988 - DNA, 15 bp, Homo sapiens
agcagagactccacc

SEQ ID NO: 563989 - DNA, 15 bp, Homo sapiens
cagcagagactccac

SEQ ID NO: 563990 - DNA, 15 bp, Homo sapiens
ccagcagagactcca

SEQ ID NO: 563991 - DNA, 15 bp, Homo sapiens
cccagcagagactcc

SEQ ID NO: 563992 - DNA, 15 bp, Homo sapiens
ccccagcagagactc

SEQ ID NO: 563993 - DNA, 15 bp, Homo sapiens
tccccagcagagact

SEQ ID NO: 563994 - DNA, 15 bp, Homo sapiens
atccccagcagagac

SEQ ID NO: 563995 - DNA, 15 bp, Homo sapiens
catccccagcagaga

SEQ ID NO: 563996 - DNA, 15 bp, Homo sapiens
acatccccagcagag

SEQ ID NO: 563997 - DNA, 15 bp, Homo sapiens
cacatccccagcaga

SEQ ID NO: 563998 - DNA, 15 bp, Homo sapiens
ccacatccccagcag

SEQ ID NO: 563999 - DNA, 15 bp, Homo sapiens
cccacatccccagca

SEQ ID NO: 564000 - DNA, 15 bp, Homo sapiens
acccacatccccagc

SEQ ID NO: 564001 - DNA, 15 bp, Homo sapiens
tacccacatccccag

SEQ ID NO: 564002 - DNA, 15 bp, Homo sapiens
gtacccacatcccca

SEQ ID NO: 564003 - DNA, 15 bp, Homo sapiens
tgtacccacatcccc

SEQ ID NO: 564004 - DNA, 15 bp, Homo sapiens
ctgtacccacatccc

SEQ ID NO: 564005 - DNA, 15 bp, Homo sapiens
cctgtacccacatcc

SEQ ID NO: 564006 - DNA, 15 bp, Homo sapiens
ccctgtacccacatc

SEQ ID NO: 564007 - DNA, 15 bp, Homo sapiens
gccctgtacccacat

SEQ ID NO: 564008 - DNA, 15 bp, Homo sapiens
agccctgtacccaca

SEQ ID NO: 564009 - DNA, 15 bp, Homo sapiens
cagccctgtacccac

SEQ ID NO: 564010 - DNA, 15 bp, Homo sapiens
acagccctgtaccca

SEQ ID NO: 564011 - DNA, 15 bp, Homo sapiens
cacagccctgtaccc

SEQ ID NO: 564012 - DNA, 15 bp, Homo sapiens
ccacagccctgtacc

SEQ ID NO: 564013 - DNA, 15 bp, Homo sapiens
accacagccctgtac

SEQ ID NO: 564014 - DNA, 15 bp, Homo sapiens
caccacagccctgta

SEQ ID NO: 564015 - DNA, 15 bp, Homo sapiens
ccaccacagccctgt

SEQ ID NO: 564016 - DNA, 15 bp, Homo sapiens
cccaccacagccctg

SEQ ID NO: 564017 - DNA, 15 bp, Homo sapiens
gcccaccacagccct

SEQ ID NO: 564018 - DNA, 15 bp, Homo sapiens
cgcccaccacagccc

SEQ ID NO: 564019 - DNA, 15 bp, Homo sapiens
ccgcccaccacagcc

SEQ ID NO: 564020 - DNA, 15 bp, Homo sapiens
cccgcccaccacagc

SEQ ID NO: 564021 - DNA, 15 bp, Homo sapiens
ccccgcccaccacag

SEQ ID NO: 564022 - DNA, 15 bp, Homo sapiens
tccccgcccaccaca

SEQ ID NO: 564023 - DNA, 15 bp, Homo sapiens
atccccgcccaccac

SEQ ID NO: 564024 - DNA, 15 bp, Homo sapiens
catccccgcccacca

SEQ ID NO: 564025 - DNA, 15 bp, Homo sapiens
tcatccccgcccacc

SEQ ID NO: 564026 - DNA, 15 bp, Homo sapiens
ctcatccccgcccac

SEQ ID NO: 564027 - DNA, 15 bp, Homo sapiens
cctcatccccgccca

SEQ ID NO: 564028 - DNA, 15 bp, Homo sapiens
ccctcatccccgccc

SEQ ID NO: 564029 - DNA, 15 bp, Homo sapiens
accctcatccccgcc

SEQ ID NO: 564030 - DNA, 15 bp, Homo sapiens
caccctcatccccgc

SEQ ID NO: 564031 - DNA, 15 bp, Homo sapiens
ccaccctcatccccg

SEQ ID NO: 564032 - DNA, 15 bp, Homo sapiens
cccaccctcatcccc

SEQ ID NO: 564033 - DNA, 15 bp, Homo sapiens
ccccaccctcatccc

SEQ ID NO: 564034 - DNA, 15 bp, Homo sapiens
accccaccctcatcc

SEQ ID NO: 564035 - DNA, 15 bp, Homo sapiens
aaccccaccctcatc

SEQ ID NO: 564036 - DNA, 15 bp, Homo sapiens
aaaccccaccctcat

SEQ ID NO: 564037 - DNA, 15 bp, Homo sapiens
caaaccccaccctca

SEQ ID NO: 564038 - DNA, 15 bp, Homo sapiens
ccaaaccccaccctc

SEQ ID NO: 564039 - DNA, 15 bp, Homo sapiens
accaaaccccaccct

SEQ ID NO: 564040 - DNA, 15 bp, Homo sapiens
caccaaaccccaccc

SEQ ID NO: 564041 - DNA, 15 bp, Homo sapiens
tcaccaaaccccacc

SEQ ID NO: 564042 - DNA, 15 bp, Homo sapiens
gtcaccaaaccccac

SEQ ID NO: 564043 - DNA, 15 bp, Homo sapiens
tgtcaccaaacccca

SEQ ID NO: 564044 - DNA, 15 bp, Homo sapiens
ctgtcaccaaacccc

SEQ ID NO: 564045 - DNA, 15 bp, Homo sapiens
cctgtcaccaaaccc

SEQ ID NO: 564046 - DNA, 15 bp, Homo sapiens
ccctgtcaccaaacc

SEQ ID NO: 564047 - DNA, 15 bp, Homo sapiens
gccctgtcaccaaac

SEQ ID NO: 564048 - DNA, 15 bp, Homo sapiens
cgccctgtcaccaaa

SEQ ID NO: 564049 - DNA, 15 bp, Homo sapiens
acgccctgtcaccaa

SEQ ID NO: 564050 - DNA, 15 bp, Homo sapiens
cacgccctgtcacca

SEQ ID NO: 564051 - DNA, 15 bp, Homo sapiens
ccacgccctgtcacc

SEQ ID NO: 564052 - DNA, 15 bp, Homo sapiens
cccacgccctgtcac

SEQ ID NO: 564053 - DNA, 15 bp, Homo sapiens
acccacgccctgtca

SEQ ID NO: 564054 - DNA, 15 bp, Homo sapiens
cacccacgccctgtc

SEQ ID NO: 564055 - DNA, 15 bp, Homo sapiens
ccacccacgccctgt

SEQ ID NO: 564056 - DNA, 15 bp, Homo sapiens
accacccacgccctg

SEQ ID NO: 564057 - DNA, 15 bp, Homo sapiens
gaccacccacgccct

SEQ ID NO: 564058 - DNA, 15 bp, Homo sapiens
tgaccacccacgccc

SEQ ID NO: 564059 - DNA, 15 bp, Homo sapiens
gtgaccacccacgcc

SEQ ID NO: 564060 - DNA, 15 bp, Homo sapiens
ggtgaccacccacgc

SEQ ID NO: 564061 - DNA, 15 bp, Homo sapiens
gggtgaccacccacg

SEQ ID NO: 564062 - DNA, 15 bp, Homo sapiens
tgggtgaccacccac

SEQ ID NO: 564063 - DNA, 15 bp, Homo sapiens
ctgggtgaccaccca

SEQ ID NO: 564064 - DNA, 15 bp, Homo sapiens
gctgggtgaccaccc

SEQ ID NO: 564065 - DNA, 15 bp, Homo sapiens
agctgggtgaccacc

SEQ ID NO: 564066 - DNA, 15 bp, Homo sapiens
aagctgggtgaccac

SEQ ID NO: 564067 - DNA, 15 bp, Homo sapiens
aaagctgggtgacca

SEQ ID NO: 564068 - DNA, 15 bp, Homo sapiens
caaagctgggtgacc

SEQ ID NO: 564069 - DNA, 15 bp, Homo sapiens
gcaaagctgggtgac

SEQ ID NO: 564070 - DNA, 15 bp, Homo sapiens
ggcaaagctgggtga

SEQ ID NO: 564071 - DNA, 15 bp, Homo sapiens
aggcaaagctgggtg

SEQ ID NO: 564072 - DNA, 15 bp, Homo sapiens
aaggcaaagctgggt

SEQ ID NO: 564073 - DNA, 15 bp, Homo sapiens
aaaggcaaagctggg

SEQ ID NO: 564074 - DNA, 15 bp, Homo sapiens
gaaaggcaaagctgg

SEQ ID NO: 564075 - DNA, 15 bp, Homo sapiens
agaaaggcaaagctg

SEQ ID NO: 564076 - DNA, 15 bp, Homo sapiens
gagaaaggcaaagct

SEQ ID NO: 564077 - DNA, 15 bp, Homo sapiens
ggagaaaggcaaagc

SEQ ID NO: 564078 - DNA, 15 bp, Homo sapiens
tggagaaaggcaaag

SEQ ID NO: 564079 - DNA, 15 bp, Homo sapiens
gtggagaaaggcaaa

SEQ ID NO: 564080 - DNA, 15 bp, Homo sapiens
tgtggagaaaggcaa

SEQ ID NO: 564081 - DNA, 15 bp, Homo sapiens
ctgtggagaaaggca

SEQ ID NO: 564082 - DNA, 15 bp, Homo sapiens
cctgtggagaaaggc

SEQ ID NO: 564083 - DNA, 15 bp, Homo sapiens
ccctgtggagaaagg

SEQ ID NO: 564084 - DNA, 15 bp, Homo sapiens
accctgtggagaaag

SEQ ID NO: 564085 - DNA, 15 bp, Homo sapiens
gaccctgtggagaaa

SEQ ID NO: 564086 - DNA, 15 bp, Homo sapiens
ggaccctgtggagaa

SEQ ID NO: 564087 - DNA, 15 bp, Homo sapiens
aggaccctgtggaga

SEQ ID NO: 564088 - DNA, 15 bp, Homo sapiens
caggaccctgtggag

SEQ ID NO: 564089 - DNA, 15 bp, Homo sapiens
tcaggaccctgtgga

SEQ ID NO: 564090 - DNA, 15 bp, Homo sapiens
ctcaggaccctgtgg

SEQ ID NO: 564091 - DNA, 15 bp, Homo sapiens
cctcaggaccctgtg

SEQ ID NO: 564092 - DNA, 15 bp, Homo sapiens
tcctcaggaccctgt

SEQ ID NO: 564093 - DNA, 15 bp, Homo sapiens
gtcctcaggaccctg

SEQ ID NO: 564094 - DNA, 15 bp, Homo sapiens
tgtcctcaggaccct

SEQ ID NO: 564095 - DNA, 15 bp, Homo sapiens
gtgtcctcaggaccc

SEQ ID NO: 564096 - DNA, 15 bp, Homo sapiens
ggtgtcctcaggacc

SEQ ID NO: 564097 - DNA, 15 bp, Homo sapiens
cggtgtcctcaggac

SEQ ID NO: 564098 - DNA, 15 bp, Homo sapiens
acggtgtcctcagga

SEQ ID NO: 564099 - DNA, 15 bp, Homo sapiens
cacggtgtcctcagg

SEQ ID NO: 564100 - DNA, 15 bp, Homo sapiens
tcacggtgtcctcag

SEQ ID NO: 564101 - DNA, 15 bp, Homo sapiens
ctcacggtgtcctca

SEQ ID NO: 564102 - DNA, 15 bp, Homo sapiens
gctcacggtgtcctc

SEQ ID NO: 564103 - DNA, 15 bp, Homo sapiens
ggctcacggtgtcct

SEQ ID NO: 564104 - DNA, 15 bp, Homo sapiens
tggctcacggtgtcc

SEQ ID NO: 564105 - DNA, 15 bp, Homo sapiens
ctggctcacggtgtc

SEQ ID NO: 564106 - DNA, 15 bp, Homo sapiens
gctggctcacggtgt

SEQ ID NO: 564107 - DNA, 15 bp, Homo sapiens
ggctggctcacggtg

SEQ ID NO: 564108 - DNA, 15 bp, Homo sapiens
tggctggctcacggt

SEQ ID NO: 564109 - DNA, 15 bp, Homo sapiens
ctggctggctcacgg

SEQ ID NO: 564110 - DNA, 15 bp, Homo sapiens
cctggctggctcacg

SEQ ID NO: 564111 - DNA, 15 bp, Homo sapiens
gcctggctggctcac

SEQ ID NO: 564112 - DNA, 15 bp, Homo sapiens
ggcctggctggctca

SEQ ID NO: 564113 - DNA, 15 bp, Homo sapiens
aggcctggctggctc

SEQ ID NO: 564114 - DNA, 15 bp, Homo sapiens
caggcctggctggct

SEQ ID NO: 564115 - DNA, 15 bp, Homo sapiens
ccaggcctggctggc

SEQ ID NO: 564116 - DNA, 15 bp, Homo sapiens
gccaggcctggctgg

SEQ ID NO: 564117 - DNA, 15 bp, Homo sapiens
ggccaggcctggctg

SEQ ID NO: 564118 - DNA, 15 bp, Homo sapiens
cggccaggcctggct

SEQ ID NO: 564119 - DNA, 15 bp, Homo sapiens
gcggccaggcctggc

SEQ ID NO: 564120 - DNA, 15 bp, Homo sapiens
agcggccaggcctgg

SEQ ID NO: 564121 - DNA, 15 bp, Homo sapiens
cagcggccaggcctg

SEQ ID NO: 564122 - DNA, 15 bp, Homo sapiens
ccagcggccaggcct

SEQ ID NO: 564123 - DNA, 15 bp, Homo sapiens
cccagcggccaggcc

SEQ ID NO: 564124 - DNA, 15 bp, Homo sapiens
gcccagcggccaggc

SEQ ID NO: 564125 - DNA, 15 bp, Homo sapiens
ggcccagcggccagg

SEQ ID NO: 564126 - DNA, 15 bp, Homo sapiens
aggcccagcggccag

SEQ ID NO: 564127 - DNA, 15 bp, Homo sapiens
caggcccagcggcca

SEQ ID NO: 564128 - DNA, 15 bp, Homo sapiens
tcaggcccagcggcc

SEQ ID NO: 564129 - DNA, 15 bp, Homo sapiens
gtcaggcccagcggc

SEQ ID NO: 564130 - DNA, 15 bp, Homo sapiens
ggtcaggcccagcgg

SEQ ID NO: 564131 - DNA, 15 bp, Homo sapiens
cggtcaggcccagcg

SEQ ID NO: 564132 - DNA, 15 bp, Homo sapiens
ccggtcaggcccagc

SEQ ID NO: 564133 - DNA, 15 bp, Homo sapiens
gccggtcaggcccag

SEQ ID NO: 564134 - DNA, 15 bp, Homo sapiens
ggccggtcaggccca

SEQ ID NO: 564135 - DNA, 15 bp, Homo sapiens
gggccggtcaggccc

SEQ ID NO: 564136 - DNA, 15 bp, Homo sapiens
ggggccggtcaggcc

SEQ ID NO: 564137 - DNA, 15 bp, Homo sapiens
gggggccggtcaggc

SEQ ID NO: 564138 - DNA, 15 bp, Homo sapiens
ggggggccggtcagg

SEQ ID NO: 564139 - DNA, 15 bp, Homo sapiens
tggggggccggtcag

SEQ ID NO: 564140 - DNA, 15 bp, Homo sapiens
ctggggggccggtca

SEQ ID NO: 564141 - DNA, 15 bp, Homo sapiens
gctggggggccggtc

SEQ ID NO: 564142 - DNA, 15 bp, Homo sapiens
ggctggggggccggt

SEQ ID NO: 564143 - DNA, 15 bp, Homo sapiens
gggctggggggccgg

SEQ ID NO: 564144 - DNA, 15 bp, Homo sapiens
ggggctggggggccg

SEQ ID NO: 564145 - DNA, 15 bp, Homo sapiens
aggggctggggggcc

SEQ ID NO: 564146 - DNA, 15 bp, Homo sapiens
taggggctggggggc

SEQ ID NO: 564147 - DNA, 15 bp, Homo sapiens
gtaggggctgggggg

SEQ ID NO: 564148 - DNA, 15 bp, Homo sapiens
tgtaggggctggggg

SEQ ID NO: 564149 - DNA, 15 bp, Homo sapiens
gtgtaggggctgggg

SEQ ID NO: 564150 - DNA, 15 bp, Homo sapiens
ggtgtaggggctggg

SEQ ID NO: 564151 - DNA, 15 bp, Homo sapiens
gggtgtaggggctgg

SEQ ID NO: 564152 - DNA, 15 bp, Homo sapiens
ggggtgtaggggctg

SEQ ID NO: 564153 - DNA, 15 bp, Homo sapiens
cggggtgtaggggct

SEQ ID NO: 564154 - DNA, 15 bp, Homo sapiens
gcggggtgtaggggc

SEQ ID NO: 564155 - DNA, 15 bp, Homo sapiens
agcggggtgtagggg

SEQ ID NO: 564156 - DNA, 15 bp, Homo sapiens
aagcggggtgtaggg

SEQ ID NO: 564157 - DNA, 15 bp, Homo sapiens
gaagcggggtgtagg

SEQ ID NO: 564158 - DNA, 15 bp, Homo sapiens
agaagcggggtgtag

SEQ ID NO: 564159 - DNA, 15 bp, Homo sapiens
gagaagcggggtgta

SEQ ID NO: 564160 - DNA, 15 bp, Homo sapiens
ggagaagcggggtgt

SEQ ID NO: 564161 - DNA, 15 bp, Homo sapiens
gggagaagcggggtg

SEQ ID NO: 564162 - DNA, 15 bp, Homo sapiens
cgggagaagcggggt

SEQ ID NO: 564163 - DNA, 15 bp, Homo sapiens
ccgggagaagcgggg

SEQ ID NO: 564164 - DNA, 15 bp, Homo sapiens
ttaaaaaagcacttg

SEQ ID NO: 564165 - DNA, 15 bp, Homo sapiens
attaaaaaagcactt

SEQ ID NO: 564166 - DNA, 15 bp, Homo sapiens
tattaaaaaagcact

SEQ ID NO: 564167 - DNA, 15 bp, Homo sapiens
gtattaaaaaagcac

SEQ ID NO: 564168 - DNA, 15 bp, Homo sapiens
tgtattaaaaaagca

SEQ ID NO: 564169 - DNA, 15 bp, Homo sapiens
atgtattaaaaaagc

SEQ ID NO: 564170 - DNA, 15 bp, Homo sapiens
aatgtattaaaaaag

SEQ ID NO: 564171 - DNA, 15 bp, Homo sapiens
caatgtattaaaaaa

SEQ ID NO: 564172 - DNA, 15 bp, Homo sapiens
tcaatgtattaaaaa

SEQ ID NO: 564173 - DNA, 15 bp, Homo sapiens
atcaatgtattaaaa

SEQ ID NO: 564174 - DNA, 15 bp, Homo sapiens
tatcaatgtattaaa

SEQ ID NO: 564175 - DNA, 15 bp, Homo sapiens
gtatcaatgtattaa

SEQ ID NO: 564176 - DNA, 15 bp, Homo sapiens
ggtatcaatgtatta

SEQ ID NO: 564177 - DNA, 15 bp, Homo sapiens
tggtatcaatgtatt

SEQ ID NO: 564178 - DNA, 15 bp, Homo sapiens
ttggtatcaatgtat

SEQ ID NO: 564179 - DNA, 15 bp, Homo sapiens
tttggtatcaatgta

SEQ ID NO: 564180 - DNA, 15 bp, Homo sapiens
atttggtatcaatgt

SEQ ID NO: 564181 - DNA, 15 bp, Homo sapiens
gatttggtatcaatg

SEQ ID NO: 564182 - DNA, 15 bp, Homo sapiens
agatttggtatcaat

SEQ ID NO: 564183 - DNA, 15 bp, Homo sapiens
gagatttggtatcaa

SEQ ID NO: 564184 - DNA, 15 bp, Homo sapiens
agagatttggtatca

SEQ ID NO: 564185 - DNA, 15 bp, Homo sapiens
gagagatttggtatc

SEQ ID NO: 564186 - DNA, 15 bp, Homo sapiens
ggagagatttggtat

SEQ ID NO: 564187 - DNA, 15 bp, Homo sapiens
aggagagatttggta

SEQ ID NO: 564188 - DNA, 15 bp, Homo sapiens
caggagagatttggt

SEQ ID NO: 564189 - DNA, 15 bp, Homo sapiens
gcaggagagatttgg

SEQ ID NO: 564190 - DNA, 15 bp, Homo sapiens
agcaggagagatttg

SEQ ID NO: 564191 - DNA, 15 bp, Homo sapiens
gagcaggagagattt

SEQ ID NO: 564192 - DNA, 15 bp, Homo sapiens
agagcaggagagatt

SEQ ID NO: 564193 - DNA, 15 bp, Homo sapiens
gagagcaggagagat

SEQ ID NO: 564194 - DNA, 15 bp, Homo sapiens
tgagagcaggagaga

SEQ ID NO: 564195 - DNA, 15 bp, Homo sapiens
ttgagagcaggagag

SEQ ID NO: 564196 - DNA, 15 bp, Homo sapiens
tttgagagcaggaga

SEQ ID NO: 564197 - DNA, 15 bp, Homo sapiens
ttttgagagcaggag

SEQ ID NO: 564198 - DNA, 15 bp, Homo sapiens
tttttgagagcagga

SEQ ID NO: 564199 - DNA, 15 bp, Homo sapiens
ttttttgagagcagg

SEQ ID NO: 564200 - DNA, 15 bp, Homo sapiens
tttttttgagagcag

SEQ ID NO: 564201 - DNA, 15 bp, Homo sapiens
ttttttttgagagca

SEQ ID NO: 564202 - DNA, 15 bp, Homo sapiens
tttttttttgagagc

SEQ ID NO: 564203 - DNA, 15 bp, Homo sapiens
gcttttttttttgag

SEQ ID NO: 564204 - DNA, 15 bp, Homo sapiens
ggcttttttttttga

SEQ ID NO: 564205 - DNA, 15 bp, Homo sapiens
gggcttttttttttg

SEQ ID NO: 564206 - DNA, 15 bp, Homo sapiens
tgggctttttttttt

SEQ ID NO: 564207 - DNA, 15 bp, Homo sapiens
ttgggcttttttttt

SEQ ID NO: 564208 - DNA, 15 bp, Homo sapiens
cttgggctttttttt

SEQ ID NO: 564209 - DNA, 15 bp, Homo sapiens
ccttgggcttttttt

SEQ ID NO: 564210 - DNA, 15 bp, Homo sapiens
gccttgggctttttt

SEQ ID NO: 564211 - DNA, 15 bp, Homo sapiens
tgccttgggcttttt

SEQ ID NO: 564212 - DNA, 15 bp, Homo sapiens
ttgccttgggctttt

SEQ ID NO: 564213 - DNA, 15 bp, Homo sapiens
tttgccttgggcttt

SEQ ID NO: 564214 - DNA, 15 bp, Homo sapiens
ttttgccttgggctt

SEQ ID NO: 564215 - DNA, 15 bp, Homo sapiens
tttttgccttgggct

SEQ ID NO: 564216 - DNA, 15 bp, Homo sapiens
atttttgccttgggc

SEQ ID NO: 564217 - DNA, 15 bp, Homo sapiens
aatttttgccttggg

SEQ ID NO: 564218 - DNA, 15 bp, Homo sapiens
aaatttttgccttgg

SEQ ID NO: 564219 - DNA, 15 bp, Homo sapiens
aaaatttttgccttg

SEQ ID NO: 564220 - DNA, 15 bp, Homo sapiens
aaaaatttttgcctt

SEQ ID NO: 564221 - DNA, 15 bp, Homo sapiens
caaaaatttttgcct

SEQ ID NO: 564222 - DNA, 15 bp, Homo sapiens
tcaaaaatttttgcc

SEQ ID NO: 564223 - DNA, 15 bp, Homo sapiens
atcaaaaatttttgc

SEQ ID NO: 564224 - DNA, 15 bp, Homo sapiens
aatcaaaaatttttg

SEQ ID NO: 564225 - DNA, 15 bp, Homo sapiens
taatcaaaaattttt

SEQ ID NO: 564226 - DNA, 15 bp, Homo sapiens
ctaatcaaaaatttt

SEQ ID NO: 564227 - DNA, 15 bp, Homo sapiens
gctaatcaaaaattt

SEQ ID NO: 564228 - DNA, 15 bp, Homo sapiens
ggctaatcaaaaatt

SEQ ID NO: 564229 - DNA, 15 bp, Homo sapiens
aggctaatcaaaaat

SEQ ID NO: 564230 - DNA, 15 bp, Homo sapiens
caggctaatcaaaaa

SEQ ID NO: 564231 - DNA, 15 bp, Homo sapiens
acaggctaatcaaaa

SEQ ID NO: 564232 - DNA, 15 bp, Homo sapiens
tacaggctaatcaaa

SEQ ID NO: 564233 - DNA, 15 bp, Homo sapiens
atacaggctaatcaa

SEQ ID NO: 564234 - DNA, 15 bp, Homo sapiens
gatacaggctaatca

SEQ ID NO: 564235 - DNA, 15 bp, Homo sapiens
ggatacaggctaatc

SEQ ID NO: 564236 - DNA, 15 bp, Homo sapiens
cggatacaggctaat

SEQ ID NO: 564237 - DNA, 15 bp, Homo sapiens
gcggatacaggctaa

SEQ ID NO: 564238 - DNA, 15 bp, Homo sapiens
tgcggatacaggcta

SEQ ID NO: 564239 - DNA, 15 bp, Homo sapiens
ttgcggatacaggct

SEQ ID NO: 564240 - DNA, 15 bp, Homo sapiens
tttgcggatacaggc

SEQ ID NO: 564241 - DNA, 15 bp, Homo sapiens
atttgcggatacagg

SEQ ID NO: 564242 - DNA, 15 bp, Homo sapiens
aatttgcggatacag

SEQ ID NO: 564243 - DNA, 15 bp, Homo sapiens
gaatttgcggataca

SEQ ID NO: 564244 - DNA, 15 bp, Homo sapiens
tgaatttgcggatac

SEQ ID NO: 564245 - DNA, 15 bp, Homo sapiens
atgaatttgcggata

SEQ ID NO: 564246 - DNA, 15 bp, Homo sapiens
tatgaatttgcggat

SEQ ID NO: 564247 - DNA, 15 bp, Homo sapiens
ctatgaatttgcgga

SEQ ID NO: 564248 - DNA, 15 bp, Homo sapiens
actatgaatttgcgg

SEQ ID NO: 564249 - DNA, 15 bp, Homo sapiens
cactatgaatttgcg

SEQ ID NO: 564250 - DNA, 15 bp, Homo sapiens
gcactatgaatttgc

SEQ ID NO: 564251 - DNA, 15 bp, Homo sapiens
tgcactatgaatttg

SEQ ID NO: 564252 - DNA, 15 bp, Homo sapiens
atgcactatgaattt

SEQ ID NO: 564253 - DNA, 15 bp, Homo sapiens
catgcactatgaatt

SEQ ID NO: 564254 - DNA, 15 bp, Homo sapiens
ccatgcactatgaat

SEQ ID NO: 564255 - DNA, 15 bp, Homo sapiens
gccatgcactatgaa

SEQ ID NO: 564256 - DNA, 15 bp, Homo sapiens
tgccatgcactatga

SEQ ID NO: 564257 - DNA, 15 bp, Homo sapiens
atgccatgcactatg

SEQ ID NO: 564258 - DNA, 15 bp, Homo sapiens
catgccatgcactat

SEQ ID NO: 564259 - DNA, 15 bp, Homo sapiens
tcatgccatgcacta

SEQ ID NO: 564260 - DNA, 15 bp, Homo sapiens
atcatgccatgcact

SEQ ID NO: 564261 - DNA, 15 bp, Homo sapiens
catcatgccatgcac

SEQ ID NO: 564262 - DNA, 15 bp, Homo sapiens
ccatcatgccatgca

SEQ ID NO: 564263 - DNA, 15 bp, Homo sapiens
cccatcatgccatgc

SEQ ID NO: 564264 - DNA, 15 bp, Homo sapiens
acccatcatgccatg

SEQ ID NO: 564265 - DNA, 15 bp, Homo sapiens
tacccatcatgccat

SEQ ID NO: 564266 - DNA, 15 bp, Homo sapiens
gtacccatcatgcca

SEQ ID NO: 564267 - DNA, 15 bp, Homo sapiens
agtacccatcatgcc

SEQ ID NO: 564268 - DNA, 15 bp, Homo sapiens
gagtacccatcatgc

SEQ ID NO: 564269 - DNA, 15 bp, Homo sapiens
agagtacccatcatg

SEQ ID NO: 564270 - DNA, 15 bp, Homo sapiens
tagagtacccatcat

SEQ ID NO: 564271 - DNA, 15 bp, Homo sapiens
gtagagtacccatca

SEQ ID NO: 564272 - DNA, 15 bp, Homo sapiens
tgtagagtacccatc

SEQ ID NO: 564273 - DNA, 15 bp, Homo sapiens
atgtagagtacccat

SEQ ID NO: 564274 - DNA, 15 bp, Homo sapiens
gatgtagagtaccca

SEQ ID NO: 564275 - DNA, 15 bp, Homo sapiens
ggatgtagagtaccc

SEQ ID NO: 564276 - DNA, 15 bp, Homo sapiens
gggatgtagagtacc

SEQ ID NO: 564277 - DNA, 15 bp, Homo sapiens
agggatgtagagtac

SEQ ID NO: 564278 - DNA, 15 bp, Homo sapiens
gagggatgtagagta

SEQ ID NO: 564279 - DNA, 15 bp, Homo sapiens
ggagggatgtagagt

SEQ ID NO: 564280 - DNA, 15 bp, Homo sapiens
aggagggatgtagag

SEQ ID NO: 564281 - DNA, 15 bp, Homo sapiens
gaggagggatgtaga

SEQ ID NO: 564282 - DNA, 15 bp, Homo sapiens
ggaggagggatgtag

SEQ ID NO: 564283 - DNA, 15 bp, Homo sapiens
aggaggagggatgta

SEQ ID NO: 564284 - DNA, 15 bp, Homo sapiens
taggaggagggatgt

SEQ ID NO: 564285 - DNA, 15 bp, Homo sapiens
ataggaggagggatg

SEQ ID NO: 564286 - DNA, 15 bp, Homo sapiens
aataggaggagggat

SEQ ID NO: 564287 - DNA, 15 bp, Homo sapiens
caataggaggaggga

SEQ ID NO: 564288 - DNA, 15 bp, Homo sapiens
gcaataggaggaggg

SEQ ID NO: 564289 - DNA, 15 bp, Homo sapiens
tgcaataggaggagg

SEQ ID NO: 564290 - DNA, 15 bp, Homo sapiens
gtgcaataggaggag

SEQ ID NO: 564291 - DNA, 15 bp, Homo sapiens
agtgcaataggagga

SEQ ID NO: 564292 - DNA, 15 bp, Homo sapiens
gagtgcaataggagg

SEQ ID NO: 564293 - DNA, 15 bp, Homo sapiens
tgagtgcaataggag

SEQ ID NO: 564294 - DNA, 15 bp, Homo sapiens
gtgagtgcaatagga

SEQ ID NO: 564295 - DNA, 15 bp, Homo sapiens
agtgagtgcaatagg

SEQ ID NO: 564296 - DNA, 15 bp, Homo sapiens
cagtgagtgcaatag

SEQ ID NO: 564297 - DNA, 15 bp, Homo sapiens
acagtgagtgcaata

SEQ ID NO: 564298 - DNA, 15 bp, Homo sapiens
cacagtgagtgcaat

SEQ ID NO: 564299 - DNA, 15 bp, Homo sapiens
gcacagtgagtgcaa

SEQ ID NO: 564300 - DNA, 15 bp, Homo sapiens
ggcacagtgagtgca

SEQ ID NO: 564301 - DNA, 15 bp, Homo sapiens
gggcacagtgagtgc

SEQ ID NO: 564302 - DNA, 15 bp, Homo sapiens
tgggcacagtgagtg

SEQ ID NO: 564303 - DNA, 15 bp, Homo sapiens
ctgggcacagtgagt

SEQ ID NO: 564304 - DNA, 15 bp, Homo sapiens
tctgggcacagtgag

SEQ ID NO: 564305 - DNA, 15 bp, Homo sapiens
atctgggcacagtga

SEQ ID NO: 564306 - DNA, 15 bp, Homo sapiens
catctgggcacagtg

SEQ ID NO: 564307 - DNA, 15 bp, Homo sapiens
tcatctgggcacagt

SEQ ID NO: 564308 - DNA, 15 bp, Homo sapiens
ttcatctgggcacag

SEQ ID NO: 564309 - DNA, 15 bp, Homo sapiens
gttcatctgggcaca

SEQ ID NO: 564310 - DNA, 15 bp, Homo sapiens
ggttcatctgggcac

SEQ ID NO: 564311 - DNA, 15 bp, Homo sapiens
aggttcatctgggca

SEQ ID NO: 564312 - DNA, 15 bp, Homo sapiens
taggttcatctgggc

SEQ ID NO: 564313 - DNA, 15 bp, Homo sapiens
ttaggttcatctggg

SEQ ID NO: 564314 - DNA, 15 bp, Homo sapiens
tttaggttcatctgg

SEQ ID NO: 564315 - DNA, 15 bp, Homo sapiens
ctttaggttcatctg

SEQ ID NO: 564316 - DNA, 15 bp, Homo sapiens
actttaggttcatct

SEQ ID NO: 564317 - DNA, 15 bp, Homo sapiens
gactttaggttcatc

SEQ ID NO: 564318 - DNA, 15 bp, Homo sapiens
tgactttaggttcat

SEQ ID NO: 564319 - DNA, 15 bp, Homo sapiens
gtgactttaggttca

SEQ ID NO: 564320 - DNA, 15 bp, Homo sapiens
ggtgactttaggttc

SEQ ID NO: 564321 - DNA, 15 bp, Homo sapiens
tggtgactttaggtt

SEQ ID NO: 564322 - DNA, 15 bp, Homo sapiens
ctggtgactttaggt

SEQ ID NO: 564323 - DNA, 15 bp, Homo sapiens
actggtgactttagg

SEQ ID NO: 564324 - DNA, 15 bp, Homo sapiens
tactggtgactttag

SEQ ID NO: 564325 - DNA, 15 bp, Homo sapiens
ttactggtgacttta

SEQ ID NO: 564326 - DNA, 15 bp, Homo sapiens
attactggtgacttt

SEQ ID NO: 564327 - DNA, 15 bp, Homo sapiens
tattactggtgactt

SEQ ID NO: 564328 - DNA, 15 bp, Homo sapiens
ctattactggtgact

SEQ ID NO: 564329 - DNA, 15 bp, Homo sapiens
actattactggtgac

SEQ ID NO: 564330 - DNA, 15 bp, Homo sapiens
cactattactggtga

SEQ ID NO: 564331 - DNA, 15 bp, Homo sapiens
gcactattactggtg

SEQ ID NO: 564332 - DNA, 15 bp, Homo sapiens
agcactattactggt

SEQ ID NO: 564333 - DNA, 15 bp, Homo sapiens
tagcactattactgg

SEQ ID NO: 564334 - DNA, 15 bp, Homo sapiens
ttagcactattactg

SEQ ID NO: 564335 - DNA, 15 bp, Homo sapiens
attagcactattact

SEQ ID NO: 564336 - DNA, 15 bp, Homo sapiens
cattagcactattac

SEQ ID NO: 564337 - DNA, 15 bp, Homo sapiens
acattagcactatta

SEQ ID NO: 564338 - DNA, 15 bp, Homo sapiens
tacattagcactatt

SEQ ID NO: 564339 - DNA, 15 bp, Homo sapiens
ctacattagcactat

SEQ ID NO: 564340 - DNA, 15 bp, Homo sapiens
actacattagcacta

SEQ ID NO: 564341 - DNA, 15 bp, Homo sapiens
tactacattagcact

SEQ ID NO: 564342 - DNA, 15 bp, Homo sapiens
ttactacattagcac

SEQ ID NO: 564343 - DNA, 15 bp, Homo sapiens
attactacattagca

SEQ ID NO: 564344 - DNA, 15 bp, Homo sapiens
cattactacattagc

SEQ ID NO: 564345 - DNA, 15 bp, Homo sapiens
ccattactacattag

SEQ ID NO: 564346 - DNA, 15 bp, Homo sapiens
cccattactacatta

SEQ ID NO: 564347 - DNA, 15 bp, Homo sapiens
gcccattactacatt

SEQ ID NO: 564348 - DNA, 15 bp, Homo sapiens
ggcccattactacat

SEQ ID NO: 564349 - DNA, 15 bp, Homo sapiens
gggcccattactaca

SEQ ID NO: 564350 - DNA, 15 bp, Homo sapiens
tgggcccattactac

SEQ ID NO: 564351 - DNA, 15 bp, Homo sapiens
ttgggcccattacta

SEQ ID NO: 564352 - DNA, 15 bp, Homo sapiens
cttgggcccattact

SEQ ID NO: 564353 - DNA, 15 bp, Homo sapiens
gcttgggcccattac

SEQ ID NO: 564354 - DNA, 15 bp, Homo sapiens
agcttgggcccatta

SEQ ID NO: 564355 - DNA, 15 bp, Homo sapiens
aagcttgggcccatt

SEQ ID NO: 564356 - DNA, 15 bp, Homo sapiens
ctaattttccttctt

SEQ ID NO: 564357 - DNA, 15 bp, Homo sapiens
actaattttccttct

SEQ ID NO: 564358 - DNA, 15 bp, Homo sapiens
tactaattttccttc

SEQ ID NO: 564359 - DNA, 15 bp, Homo sapiens
atactaattttcctt

SEQ ID NO: 564360 - DNA, 15 bp, Homo sapiens
aatactaattttcct

SEQ ID NO: 564361 - DNA, 15 bp, Homo sapiens
gaatactaattttcc

SEQ ID NO: 564362 - DNA, 15 bp, Homo sapiens
tgaatactaattttc

SEQ ID NO: 564363 - DNA, 15 bp, Homo sapiens
ctgaatactaatttt

SEQ ID NO: 564364 - DNA, 15 bp, Homo sapiens
actgaatactaattt

SEQ ID NO: 564365 - DNA, 15 bp, Homo sapiens
tactgaatactaatt

SEQ ID NO: 564366 - DNA, 15 bp, Homo sapiens
atactgaatactaat

SEQ ID NO: 564367 - DNA, 15 bp, Homo sapiens
aatactgaatactaa

SEQ ID NO: 564368 - DNA, 15 bp, Homo sapiens
aaatactgaatacta

SEQ ID NO: 564369 - DNA, 15 bp, Homo sapiens
taaatactgaatact

SEQ ID NO: 564370 - DNA, 15 bp, Homo sapiens
ttaaatactgaatac

SEQ ID NO: 564371 - DNA, 15 bp, Homo sapiens
tttaaatactgaata

SEQ ID NO: 564372 - DNA, 15 bp, Homo sapiens
atttaaatactgaat

SEQ ID NO: 564373 - DNA, 15 bp, Homo sapiens
catttaaatactgaa

SEQ ID NO: 564374 - DNA, 15 bp, Homo sapiens
acatttaaatactga

SEQ ID NO: 564375 - DNA, 15 bp, Homo sapiens
cacatttaaatactg

SEQ ID NO: 564376 - DNA, 15 bp, Homo sapiens
ccacatttaaatact

SEQ ID NO: 564377 - DNA, 15 bp, Homo sapiens
cccacatttaaatac

SEQ ID NO: 564378 - DNA, 15 bp, Homo sapiens
tcccacatttaaata

SEQ ID NO: 564379 - DNA, 15 bp, Homo sapiens
ttcccacatttaaat

SEQ ID NO: 564380 - DNA, 15 bp, Homo sapiens
tttcccacatttaaa

SEQ ID NO: 564381 - DNA, 15 bp, Homo sapiens
ctttcccacatttaa

SEQ ID NO: 564382 - DNA, 15 bp, Homo sapiens
tctttcccacattta

SEQ ID NO: 564383 - DNA, 15 bp, Homo sapiens
ctctttcccacattt

SEQ ID NO: 564384 - DNA, 15 bp, Homo sapiens
cctctttcccacatt

SEQ ID NO: 564385 - DNA, 15 bp, Homo sapiens
tcctctttcccacat

SEQ ID NO: 564386 - DNA, 15 bp, Homo sapiens
ttcctctttcccaca

SEQ ID NO: 564387 - DNA, 15 bp, Homo sapiens
cttcctctttcccac

SEQ ID NO: 564388 - DNA, 15 bp, Homo sapiens
tcttcctctttccca

SEQ ID NO: 564389 - DNA, 15 bp, Homo sapiens
ttcttcctctttccc

SEQ ID NO: 564390 - DNA, 15 bp, Homo sapiens
attcttcctctttcc

SEQ ID NO: 564391 - DNA, 15 bp, Homo sapiens
tattcttcctctttc

SEQ ID NO: 564392 - DNA, 15 bp, Homo sapiens
atattcttcctcttt

SEQ ID NO: 564393 - DNA, 15 bp, Homo sapiens
catattcttcctctt

SEQ ID NO: 564394 - DNA, 15 bp, Homo sapiens
ccatattcttcctct

SEQ ID NO: 564395 - DNA, 15 bp, Homo sapiens
tccatattcttcctc

SEQ ID NO: 564396 - DNA, 15 bp, Homo sapiens
ttccatattcttcct

SEQ ID NO: 564397 - DNA, 15 bp, Homo sapiens
tttccatattcttcc

SEQ ID NO: 564398 - DNA, 15 bp, Homo sapiens
atttccatattcttc

SEQ ID NO: 564399 - DNA, 15 bp, Homo sapiens
aatttccatattctt

SEQ ID NO: 564400 - DNA, 15 bp, Homo sapiens
taatttccatattct

SEQ ID NO: 564401 - DNA, 15 bp, Homo sapiens
ataatttccatattc

SEQ ID NO: 564402 - DNA, 15 bp, Homo sapiens
gataatttccatatt

SEQ ID NO: 564403 - DNA, 15 bp, Homo sapiens
tgataatttccatat

SEQ ID NO: 564404 - DNA, 15 bp, Homo sapiens
ttgataatttccata

SEQ ID NO: 564405 - DNA, 15 bp, Homo sapiens
attgataatttccat

SEQ ID NO: 564406 - DNA, 15 bp, Homo sapiens
aattgataatttcca

SEQ ID NO: 564407 - DNA, 15 bp, Homo sapiens
aaattgataatttcc

SEQ ID NO: 564408 - DNA, 15 bp, Homo sapiens
aaaattgataatttc

SEQ ID NO: 564409 - DNA, 15 bp, Homo sapiens
taaaattgataattt

SEQ ID NO: 564410 - DNA, 15 bp, Homo sapiens
ataaaattgataatt

SEQ ID NO: 564411 - DNA, 15 bp, Homo sapiens
tataaaattgataat

SEQ ID NO: 564412 - DNA, 15 bp, Homo sapiens
ttataaaattgataa

SEQ ID NO: 564413 - DNA, 15 bp, Homo sapiens
attataaaattgata

SEQ ID NO: 564414 - DNA, 15 bp, Homo sapiens
tattataaaattgat

SEQ ID NO: 564415 - DNA, 15 bp, Homo sapiens
gtattataaaattga

SEQ ID NO: 564416 - DNA, 15 bp, Homo sapiens
ggtattataaaattg

SEQ ID NO: 564417 - DNA, 15 bp, Homo sapiens
aggtattataaaatt

SEQ ID NO: 564418 - DNA, 15 bp, Homo sapiens
taggtattataaaat

SEQ ID NO: 564419 - DNA, 15 bp, Homo sapiens
ataggtattataaaa

SEQ ID NO: 564420 - DNA, 15 bp, Homo sapiens
tataggtattataaa

SEQ ID NO: 564421 - DNA, 15 bp, Homo sapiens
gtataggtattataa

SEQ ID NO: 564422 - DNA, 15 bp, Homo sapiens
tgtataggtattata

SEQ ID NO: 564423 - DNA, 15 bp, Homo sapiens
atgtataggtattat

SEQ ID NO: 564424 - DNA, 15 bp, Homo sapiens
tatgtataggtatta

SEQ ID NO: 564425 - DNA, 15 bp, Homo sapiens
atatgtataggtatt

SEQ ID NO: 564426 - DNA, 15 bp, Homo sapiens
aatatgtataggtat

SEQ ID NO: 564427 - DNA, 15 bp, Homo sapiens
gaatatgtataggta

SEQ ID NO: 564428 - DNA, 15 bp, Homo sapiens
agaatatgtataggt

SEQ ID NO: 564429 - DNA, 15 bp, Homo sapiens
aagaatatgtatagg

SEQ ID NO: 564430 - DNA, 15 bp, Homo sapiens
taagaatatgtatag

SEQ ID NO: 564431 - DNA, 15 bp, Homo sapiens
gtaagaatatgtata

SEQ ID NO: 564432 - DNA, 15 bp, Homo sapiens
ggtaagaatatgtat

SEQ ID NO: 564433 - DNA, 15 bp, Homo sapiens
aggtaagaatatgta

SEQ ID NO: 564434 - DNA, 15 bp, Homo sapiens
caggtaagaatatgt

SEQ ID NO: 564435 - DNA, 15 bp, Homo sapiens
gcaggtaagaatatg

SEQ ID NO: 564436 - DNA, 15 bp, Homo sapiens
tgcaggtaagaatat

SEQ ID NO: 564437 - DNA, 15 bp, Homo sapiens
atgcaggtaagaata

SEQ ID NO: 564438 - DNA, 15 bp, Homo sapiens
aatgcaggtaagaat

SEQ ID NO: 564439 - DNA, 15 bp, Homo sapiens
taatgcaggtaagaa

SEQ ID NO: 564440 - DNA, 15 bp, Homo sapiens
ttaatgcaggtaaga

SEQ ID NO: 564441 - DNA, 15 bp, Homo sapiens
attaatgcaggtaag

SEQ ID NO: 564442 - DNA, 15 bp, Homo sapiens
cattaatgcaggtaa

SEQ ID NO: 564443 - DNA, 15 bp, Homo sapiens
acattaatgcaggta

SEQ ID NO: 564444 - DNA, 15 bp, Homo sapiens
cacattaatgcaggt

SEQ ID NO: 564445 - DNA, 15 bp, Homo sapiens
tcacattaatgcagg

SEQ ID NO: 564446 - DNA, 15 bp, Homo sapiens
ttcacattaatgcag

SEQ ID NO: 564447 - DNA, 15 bp, Homo sapiens
attcacattaatgca

SEQ ID NO: 564448 - DNA, 15 bp, Homo sapiens
tattcacattaatgc

SEQ ID NO: 564449 - DNA, 15 bp, Homo sapiens
ctattcacattaatg

SEQ ID NO: 564450 - DNA, 15 bp, Homo sapiens
tctattcacattaat

SEQ ID NO: 564451 - DNA, 15 bp, Homo sapiens
gtctattcacattaa

SEQ ID NO: 564452 - DNA, 15 bp, Homo sapiens
tgtctattcacatta

SEQ ID NO: 564453 - DNA, 15 bp, Homo sapiens
atgtctattcacatt

SEQ ID NO: 564454 - DNA, 15 bp, Homo sapiens
gatgtctattcacat

SEQ ID NO: 564455 - DNA, 15 bp, Homo sapiens
tgatgtctattcaca

SEQ ID NO: 564456 - DNA, 15 bp, Homo sapiens
ttgatgtctattcac

SEQ ID NO: 564457 - DNA, 15 bp, Homo sapiens
attgatgtctattca

SEQ ID NO: 564458 - DNA, 15 bp, Homo sapiens
cattgatgtctattc

SEQ ID NO: 564459 - DNA, 15 bp, Homo sapiens
tcattgatgtctatt

SEQ ID NO: 564460 - DNA, 15 bp, Homo sapiens
atcattgatgtctat

SEQ ID NO: 564461 - DNA, 15 bp, Homo sapiens
tatcattgatgtcta

SEQ ID NO: 564462 - DNA, 15 bp, Homo sapiens
ttatcattgatgtct

SEQ ID NO: 564463 - DNA, 15 bp, Homo sapiens
tttatcattgatgtc

SEQ ID NO: 564464 - DNA, 15 bp, Homo sapiens
gtttatcattgatgt

SEQ ID NO: 564465 - DNA, 15 bp, Homo sapiens
tgtttatcattgatg

SEQ ID NO: 564466 - DNA, 15 bp, Homo sapiens
ctgtttatcattgat

SEQ ID NO: 564467 - DNA, 15 bp, Homo sapiens
tctgtttatcattga

SEQ ID NO: 564468 - DNA, 15 bp, Homo sapiens
ttctgtttatcattg

SEQ ID NO: 564469 - DNA, 15 bp, Homo sapiens
attctgtttatcatt

SEQ ID NO: 564470 - DNA, 15 bp, Homo sapiens
tattctgtttatcat

SEQ ID NO: 564471 - DNA, 15 bp, Homo sapiens
ttattctgtttatca

SEQ ID NO: 564472 - DNA, 15 bp, Homo sapiens
attattctgtttatc

SEQ ID NO: 564473 - DNA, 15 bp, Homo sapiens
cattattctgtttat

SEQ ID NO: 564474 - DNA, 15 bp, Homo sapiens
gcattattctgttta

SEQ ID NO: 564475 - DNA, 15 bp, Homo sapiens
ggcattattctgttt

SEQ ID NO: 564476 - DNA, 15 bp, Homo sapiens
gggcattattctgtt

SEQ ID NO: 564477 - DNA, 15 bp, Homo sapiens
ggggcattattctgt

SEQ ID NO: 564478 - DNA, 15 bp, Homo sapiens
tggggcattattctg

SEQ ID NO: 564479 - DNA, 15 bp, Homo sapiens
atggggcattattct

SEQ ID NO: 564480 - DNA, 15 bp, Homo sapiens
tatggggcattattc

SEQ ID NO: 564481 - DNA, 15 bp, Homo sapiens
ttatggggcattatt

SEQ ID NO: 564482 - DNA, 15 bp, Homo sapiens
tttatggggcattat

SEQ ID NO: 564483 - DNA, 15 bp, Homo sapiens
ctttatggggcatta

SEQ ID NO: 564484 - DNA, 15 bp, Homo sapiens
tctttatggggcatt

SEQ ID NO: 564485 - DNA, 15 bp, Homo sapiens
atctttatggggcat

SEQ ID NO: 564486 - DNA, 15 bp, Homo sapiens
catctttatggggca

SEQ ID NO: 564487 - DNA, 15 bp, Homo sapiens
acatctttatggggc

SEQ ID NO: 564488 - DNA, 15 bp, Homo sapiens
gacatctttatgggg

SEQ ID NO: 564489 - DNA, 15 bp, Homo sapiens
agacatctttatggg

SEQ ID NO: 564490 - DNA, 15 bp, Homo sapiens
tagacatctttatgg

SEQ ID NO: 564491 - DNA, 15 bp, Homo sapiens
gtagacatctttatg

SEQ ID NO: 564492 - DNA, 15 bp, Homo sapiens
tgtagacatctttat

SEQ ID NO: 564493 - DNA, 15 bp, Homo sapiens
gtgtagacatcttta

SEQ ID NO: 564494 - DNA, 15 bp, Homo sapiens
agtgtagacatcttt

SEQ ID NO: 564495 - DNA, 15 bp, Homo sapiens
cagtgtagacatctt

SEQ ID NO: 564496 - DNA, 15 bp, Homo sapiens
acagtgtagacatct

SEQ ID NO: 564497 - DNA, 15 bp, Homo sapiens
tacagtgtagacatc

SEQ ID NO: 564498 - DNA, 15 bp, Homo sapiens
ttacagtgtagacat

SEQ ID NO: 564499 - DNA, 15 bp, Homo sapiens
attacagtgtagaca

SEQ ID NO: 564500 - DNA, 15 bp, Homo sapiens
gattacagtgtagac

SEQ ID NO: 564501 - DNA, 15 bp, Homo sapiens
agattacagtgtaga

SEQ ID NO: 564502 - DNA, 15 bp, Homo sapiens
gagattacagtgtag

SEQ ID NO: 564503 - DNA, 15 bp, Homo sapiens
ggagattacagtgta

SEQ ID NO: 564504 - DNA, 15 bp, Homo sapiens
tggagattacagtgt

SEQ ID NO: 564505 - DNA, 15 bp, Homo sapiens
ttggagattacagtg

SEQ ID NO: 564506 - DNA, 15 bp, Homo sapiens
tttggagattacagt

SEQ ID NO: 564507 - DNA, 15 bp, Homo sapiens
ttttggagattacag

SEQ ID NO: 564508 - DNA, 15 bp, Homo sapiens
gttttggagattaca

SEQ ID NO: 564509 - DNA, 15 bp, Homo sapiens
agttttggagattac

SEQ ID NO: 564510 - DNA, 15 bp, Homo sapiens
aagttttggagatta

SEQ ID NO: 564511 - DNA, 15 bp, Homo sapiens
taagttttggagatt

SEQ ID NO: 564512 - DNA, 15 bp, Homo sapiens
ataagttttggagat

SEQ ID NO: 564513 - DNA, 15 bp, Homo sapiens
tataagttttggaga

SEQ ID NO: 564514 - DNA, 15 bp, Homo sapiens
ttataagttttggag

SEQ ID NO: 564515 - DNA, 15 bp, Homo sapiens
gttataagttttgga

SEQ ID NO: 564516 - DNA, 15 bp, Homo sapiens
agttataagttttgg

SEQ ID NO: 564517 - DNA, 15 bp, Homo sapiens
tagttataagttttg

SEQ ID NO: 564518 - DNA, 15 bp, Homo sapiens
atagttataagtttt

SEQ ID NO: 564519 - DNA, 15 bp, Homo sapiens
tatagttataagttt

SEQ ID NO: 564520 - DNA, 15 bp, Homo sapiens
gtatagttataagtt

SEQ ID NO: 564521 - DNA, 15 bp, Homo sapiens
agtatagttataagt

SEQ ID NO: 564522 - DNA, 15 bp, Homo sapiens
tagtatagttataag

SEQ ID NO: 564523 - DNA, 15 bp, Homo sapiens
atagtatagttataa

SEQ ID NO: 564524 - DNA, 15 bp, Homo sapiens
tatagtatagttata

SEQ ID NO: 564525 - DNA, 15 bp, Homo sapiens
atatagtatagttat

SEQ ID NO: 564526 - DNA, 15 bp, Homo sapiens
gatatagtatagtta

SEQ ID NO: 564527 - DNA, 15 bp, Homo sapiens
tgatatagtatagtt

SEQ ID NO: 564528 - DNA, 15 bp, Homo sapiens
gtgatatagtatagt

SEQ ID NO: 564529 - DNA, 15 bp, Homo sapiens
tgtgatatagtatag

SEQ ID NO: 564530 - DNA, 15 bp, Homo sapiens
atgtgatatagtata

SEQ ID NO: 564531 - DNA, 15 bp, Homo sapiens
catgtgatatagtat

SEQ ID NO: 564532 - DNA, 15 bp, Homo sapiens
ccatgtgatatagta

SEQ ID NO: 564533 - DNA, 15 bp, Homo sapiens
gccatgtgatatagt

SEQ ID NO: 564534 - DNA, 15 bp, Homo sapiens
tgccatgtgatatag

SEQ ID NO: 564535 - DNA, 15 bp, Homo sapiens
ttgccatgtgatata

SEQ ID NO: 564536 - DNA, 15 bp, Homo sapiens
cttgccatgtgatat

SEQ ID NO: 564537 - DNA, 15 bp, Homo sapiens
tcttgccatgtgata

SEQ ID NO: 564538 - DNA, 15 bp, Homo sapiens
ctcttgccatgtgat

SEQ ID NO: 564539 - DNA, 15 bp, Homo sapiens
cctcttgccatgtga

SEQ ID NO: 564540 - DNA, 15 bp, Homo sapiens
ccctcttgccatgtg

SEQ ID NO: 564541 - DNA, 15 bp, Homo sapiens
tccctcttgccatgt

SEQ ID NO: 564542 - DNA, 15 bp, Homo sapiens
ttccctcttgccatg

SEQ ID NO: 564543 - DNA, 15 bp, Homo sapiens
attccctcttgccat

SEQ ID NO: 564544 - DNA, 15 bp, Homo sapiens
aattccctcttgcca

SEQ ID NO: 564545 - DNA, 15 bp, Homo sapiens
taattccctcttgcc

SEQ ID NO: 564546 - DNA, 15 bp, Homo sapiens
ttaattccctcttgc

SEQ ID NO: 564547 - DNA, 15 bp, Homo sapiens
cttaattccctcttg

SEQ ID NO: 564548 - DNA, 15 bp, Homo sapiens
ccttaattccctctt

SEQ ID NO: 564549 - DNA, 15 bp, Homo sapiens
accttaattccctct

SEQ ID NO: 564550 - DNA, 15 bp, Homo sapiens
aaccttaattccctc

SEQ ID NO: 564551 - DNA, 15 bp, Homo sapiens
taaccttaattccct

SEQ ID NO: 564552 - DNA, 15 bp, Homo sapiens
gtaaccttaattccc

SEQ ID NO: 564553 - DNA, 15 bp, Homo sapiens
agtaaccttaattcc

SEQ ID NO: 564554 - DNA, 15 bp, Homo sapiens
tagtaaccttaattc

SEQ ID NO: 564555 - DNA, 15 bp, Homo sapiens
ttagtaaccttaatt

SEQ ID NO: 564556 - DNA, 15 bp, Homo sapiens
attagtaaccttaat

SEQ ID NO: 564557 - DNA, 15 bp, Homo sapiens
gattagtaaccttaa

SEQ ID NO: 564558 - DNA, 15 bp, Homo sapiens
tgattagtaacctta

SEQ ID NO: 564559 - DNA, 15 bp, Homo sapiens
ctgattagtaacctt

SEQ ID NO: 564560 - DNA, 15 bp, Homo sapiens
gctgattagtaacct

SEQ ID NO: 564561 - DNA, 15 bp, Homo sapiens
agctgattagtaacc

SEQ ID NO: 564562 - DNA, 15 bp, Homo sapiens
cagctgattagtaac

SEQ ID NO: 564563 - DNA, 15 bp, Homo sapiens
tcagctgattagtaa

SEQ ID NO: 564564 - DNA, 15 bp, Homo sapiens
gtcagctgattagta

SEQ ID NO: 564565 - DNA, 15 bp, Homo sapiens
ggtcagctgattagt

SEQ ID NO: 564566 - DNA, 15 bp, Homo sapiens
aggtcagctgattag

SEQ ID NO: 564567 - DNA, 15 bp, Homo sapiens
aaggtcagctgatta

SEQ ID NO: 564568 - DNA, 15 bp, Homo sapiens
caaggtcagctgatt

SEQ ID NO: 564569 - DNA, 15 bp, Homo sapiens
tcaaggtcagctgat

SEQ ID NO: 564570 - DNA, 15 bp, Homo sapiens
ctcaaggtcagctga

SEQ ID NO: 564571 - DNA, 15 bp, Homo sapiens
tctcaaggtcagctg

SEQ ID NO: 564572 - DNA, 15 bp, Homo sapiens
atctcaaggtcagct

SEQ ID NO: 564573 - DNA, 15 bp, Homo sapiens
catctcaaggtcagc

SEQ ID NO: 564574 - DNA, 15 bp, Homo sapiens
ccatctcaaggtcag

SEQ ID NO: 564575 - DNA, 15 bp, Homo sapiens
cccatctcaaggtca

SEQ ID NO: 564576 - DNA, 15 bp, Homo sapiens
tcccatctcaaggtc

SEQ ID NO: 564577 - DNA, 15 bp, Homo sapiens
ctcccatctcaaggt

SEQ ID NO: 564578 - DNA, 15 bp, Homo sapiens
tctcccatctcaagg

SEQ ID NO: 564579 - DNA, 15 bp, Homo sapiens
atctcccatctcaag

SEQ ID NO: 564580 - DNA, 15 bp, Homo sapiens
aatctcccatctcaa

SEQ ID NO: 564581 - DNA, 15 bp, Homo sapiens
gaatctcccatctca

SEQ ID NO: 564582 - DNA, 15 bp, Homo sapiens
agaatctcccatctc

SEQ ID NO: 564583 - DNA, 15 bp, Homo sapiens
gagaatctcccatct

SEQ ID NO: 564584 - DNA, 15 bp, Homo sapiens
ggagaatctcccatc

SEQ ID NO: 564585 - DNA, 15 bp, Homo sapiens
aggagaatctcccat

SEQ ID NO: 564586 - DNA, 15 bp, Homo sapiens
caggagaatctccca

SEQ ID NO: 564587 - DNA, 15 bp, Homo sapiens
ccaggagaatctccc

SEQ ID NO: 564588 - DNA, 15 bp, Homo sapiens
accaggagaatctcc

SEQ ID NO: 564589 - DNA, 15 bp, Homo sapiens
aaccaggagaatctc

SEQ ID NO: 564590 - DNA, 15 bp, Homo sapiens
aaaccaggagaatct

SEQ ID NO: 564591 - DNA, 15 bp, Homo sapiens
caaaccaggagaatc

SEQ ID NO: 564592 - DNA, 15 bp, Homo sapiens
acaaaccaggagaat

SEQ ID NO: 564593 - DNA, 15 bp, Homo sapiens
tacaaaccaggagaa

SEQ ID NO: 564594 - DNA, 15 bp, Homo sapiens
atacaaaccaggaga

SEQ ID NO: 564595 - DNA, 15 bp, Homo sapiens
catacaaaccaggag

SEQ ID NO: 564596 - DNA, 15 bp, Homo sapiens
ccatacaaaccagga

SEQ ID NO: 564597 - DNA, 15 bp, Homo sapiens
cccatacaaaccagg

SEQ ID NO: 564598 - DNA, 15 bp, Homo sapiens
acccatacaaaccag

SEQ ID NO: 564599 - DNA, 15 bp, Homo sapiens
cacccatacaaacca

SEQ ID NO: 564600 - DNA, 15 bp, Homo sapiens
ccacccatacaaacc

SEQ ID NO: 564601 - DNA, 15 bp, Homo sapiens
cccacccatacaaac

SEQ ID NO: 564602 - DNA, 15 bp, Homo sapiens
gcccacccatacaaa

SEQ ID NO: 564603 - DNA, 15 bp, Homo sapiens
ggcccacccatacaa

SEQ ID NO: 564604 - DNA, 15 bp, Homo sapiens
gggcccacccataca

SEQ ID NO: 564605 - DNA, 15 bp, Homo sapiens
tgggcccacccatac

SEQ ID NO: 564606 - DNA, 15 bp, Homo sapiens
ttgggcccacccata

SEQ ID NO: 564607 - DNA, 15 bp, Homo sapiens
attgggcccacccat

SEQ ID NO: 564608 - DNA, 15 bp, Homo sapiens
cattgggcccaccca

SEQ ID NO: 564609 - DNA, 15 bp, Homo sapiens
acattgggcccaccc

SEQ ID NO: 564610 - DNA, 15 bp, Homo sapiens
tacattgggcccacc

SEQ ID NO: 564611 - DNA, 15 bp, Homo sapiens
ttacattgggcccac

SEQ ID NO: 564612 - DNA, 15 bp, Homo sapiens
attacattgggccca

SEQ ID NO: 564613 - DNA, 15 bp, Homo sapiens
gattacattgggccc

SEQ ID NO: 564614 - DNA, 15 bp, Homo sapiens
tgattacattgggcc

SEQ ID NO: 564615 - DNA, 15 bp, Homo sapiens
gtgattacattgggc

SEQ ID NO: 564616 - DNA, 15 bp, Homo sapiens
tgtgattacattggg

SEQ ID NO: 564617 - DNA, 15 bp, Homo sapiens
ctgtgattacattgg

SEQ ID NO: 564618 - DNA, 15 bp, Homo sapiens
cctgtgattacattg

SEQ ID NO: 564619 - DNA, 15 bp, Homo sapiens
ccctgtgattacatt

SEQ ID NO: 564620 - DNA, 15 bp, Homo sapiens
accctgtgattacat

SEQ ID NO: 564621 - DNA, 15 bp, Homo sapiens
gaccctgtgattaca

SEQ ID NO: 564622 - DNA, 15 bp, Homo sapiens
ggaccctgtgattac

SEQ ID NO: 564623 - DNA, 15 bp, Homo sapiens
aggaccctgtgatta

SEQ ID NO: 564624 - DNA, 15 bp, Homo sapiens
aaggaccctgtgatt

SEQ ID NO: 564625 - DNA, 15 bp, Homo sapiens
taaggaccctgtgat

SEQ ID NO: 564626 - DNA, 15 bp, Homo sapiens
ataaggaccctgtga

SEQ ID NO: 564627 - DNA, 15 bp, Homo sapiens
tataaggaccctgtg

SEQ ID NO: 564628 - DNA, 15 bp, Homo sapiens
ttataaggaccctgt

SEQ ID NO: 564629 - DNA, 15 bp, Homo sapiens
tttataaggaccctg

SEQ ID NO: 564630 - DNA, 15 bp, Homo sapiens
atttataaggaccct

SEQ ID NO: 564631 - DNA, 15 bp, Homo sapiens
catttataaggaccc

SEQ ID NO: 564632 - DNA, 15 bp, Homo sapiens
ccatttataaggacc

SEQ ID NO: 564633 - DNA, 15 bp, Homo sapiens
tccatttataaggac

SEQ ID NO: 564634 - DNA, 15 bp, Homo sapiens
ttccatttataagga

SEQ ID NO: 564635 - DNA, 15 bp, Homo sapiens
tttccatttataagg

SEQ ID NO: 564636 - DNA, 15 bp, Homo sapiens
ttttccatttataag

SEQ ID NO: 564637 - DNA, 15 bp, Homo sapiens
cttttccatttataa

SEQ ID NO: 564638 - DNA, 15 bp, Homo sapiens
ccttttccatttata

SEQ ID NO: 564639 - DNA, 15 bp, Homo sapiens
gccttttccatttat

SEQ ID NO: 564640 - DNA, 15 bp, Homo sapiens
tgccttttccattta

SEQ ID NO: 564641 - DNA, 15 bp, Homo sapiens
ctgccttttccattt

SEQ ID NO: 564642 - DNA, 15 bp, Homo sapiens
tctgccttttccatt

SEQ ID NO: 564643 - DNA, 15 bp, Homo sapiens
gtctgccttttccat

SEQ ID NO: 564644 - DNA, 15 bp, Homo sapiens
tgtctgccttttcca

SEQ ID NO: 564645 - DNA, 15 bp, Homo sapiens
ctgtctgccttttcc

SEQ ID NO: 564646 - DNA, 15 bp, Homo sapiens
cctgtctgccttttc

SEQ ID NO: 564647 - DNA, 15 bp, Homo sapiens
tcctgtctgcctttt

SEQ ID NO: 564648 - DNA, 15 bp, Homo sapiens
ctcctgtctgccttt

SEQ ID NO: 564649 - DNA, 15 bp, Homo sapiens
tctcctgtctgcctt

SEQ ID NO: 564650 - DNA, 15 bp, Homo sapiens
atctcctgtctgcct

SEQ ID NO: 564651 - DNA, 15 bp, Homo sapiens
aatctcctgtctgcc

SEQ ID NO: 564652 - DNA, 15 bp, Homo sapiens
gaatctcctgtctgc

SEQ ID NO: 564653 - DNA, 15 bp, Homo sapiens
tgaatctcctgtctg

SEQ ID NO: 564654 - DNA, 15 bp, Homo sapiens
ctgaatctcctgtct

SEQ ID NO: 564655 - DNA, 15 bp, Homo sapiens
actgaatctcctgtc

SEQ ID NO: 564656 - DNA, 15 bp, Homo sapiens
cactgaatctcctgt

SEQ ID NO: 564657 - DNA, 15 bp, Homo sapiens
acactgaatctcctg

SEQ ID NO: 564658 - DNA, 15 bp, Homo sapiens
gacactgaatctcct

SEQ ID NO: 564659 - DNA, 15 bp, Homo sapiens
tgacactgaatctcc

SEQ ID NO: 564660 - DNA, 15 bp, Homo sapiens
ctgacactgaatctc

SEQ ID NO: 564661 - DNA, 15 bp, Homo sapiens
tctgacactgaatct

SEQ ID NO: 564662 - DNA, 15 bp, Homo sapiens
gtctgacactgaatc

SEQ ID NO: 564663 - DNA, 15 bp, Homo sapiens
agtctgacactgaat

SEQ ID NO: 564664 - DNA, 15 bp, Homo sapiens
cagtctgacactgaa

SEQ ID NO: 564665 - DNA, 15 bp, Homo sapiens
tcagtctgacactga

SEQ ID NO: 564666 - DNA, 15 bp, Homo sapiens
atcagtctgacactg

SEQ ID NO: 564667 - DNA, 15 bp, Homo sapiens
tatcagtctgacact

SEQ ID NO: 564668 - DNA, 15 bp, Homo sapiens
gtatcagtctgacac

SEQ ID NO: 564669 - DNA, 15 bp, Homo sapiens
tgtatcagtctgaca

SEQ ID NO: 564670 - DNA, 15 bp, Homo sapiens
ttgtatcagtctgac

SEQ ID NO: 564671 - DNA, 15 bp, Homo sapiens
attgtatcagtctga

SEQ ID NO: 564672 - DNA, 15 bp, Homo sapiens
cattgtatcagtctg

SEQ ID NO: 564673 - DNA, 15 bp, Homo sapiens
tcattgtatcagtct

SEQ ID NO: 564674 - DNA, 15 bp, Homo sapiens
ctcattgtatcagtc

SEQ ID NO: 564675 - DNA, 15 bp, Homo sapiens
cctcattgtatcagt

SEQ ID NO: 564676 - DNA, 15 bp, Homo sapiens
ccctcattgtatcag

SEQ ID NO: 564677 - DNA, 15 bp, Homo sapiens
tccctcattgtatca

SEQ ID NO: 564678 - DNA, 15 bp, Homo sapiens
ttccctcattgtatc

SEQ ID NO: 564679 - DNA, 15 bp, Homo sapiens
tttccctcattgtat

SEQ ID NO: 564680 - DNA, 15 bp, Homo sapiens
ctttccctcattgta

SEQ ID NO: 564681 - DNA, 15 bp, Homo sapiens
tctttccctcattgt

SEQ ID NO: 564682 - DNA, 15 bp, Homo sapiens
gtctttccctcattg

SEQ ID NO: 564683 - DNA, 15 bp, Homo sapiens
agtctttccctcatt

SEQ ID NO: 564684 - DNA, 15 bp, Homo sapiens
tagtctttccctcat

SEQ ID NO: 564685 - DNA, 15 bp, Homo sapiens
gtagtctttccctca

SEQ ID NO: 564686 - DNA, 15 bp, Homo sapiens
ggtagtctttccctc

SEQ ID NO: 564687 - DNA, 15 bp, Homo sapiens
tggtagtctttccct

SEQ ID NO: 564688 - DNA, 15 bp, Homo sapiens
ctggtagtctttccc

SEQ ID NO: 564689 - DNA, 15 bp, Homo sapiens
gctggtagtctttcc

SEQ ID NO: 564690 - DNA, 15 bp, Homo sapiens
tgctggtagtctttc

SEQ ID NO: 564691 - DNA, 15 bp, Homo sapiens
ctgctggtagtcttt

SEQ ID NO: 564692 - DNA, 15 bp, Homo sapiens
actgctggtagtctt

SEQ ID NO: 564693 - DNA, 15 bp, Homo sapiens
aactgctggtagtct

SEQ ID NO: 564694 - DNA, 15 bp, Homo sapiens
caactgctggtagtc

SEQ ID NO: 564695 - DNA, 15 bp, Homo sapiens
tcaactgctggtagt

SEQ ID NO: 564696 - DNA, 15 bp, Homo sapiens
atcaactgctggtag

SEQ ID NO: 564697 - DNA, 15 bp, Homo sapiens
catcaactgctggta

SEQ ID NO: 564698 - DNA, 15 bp, Homo sapiens
ccatcaactgctggt

SEQ ID NO: 564699 - DNA, 15 bp, Homo sapiens
gccatcaactgctgg

SEQ ID NO: 564700 - DNA, 15 bp, Homo sapiens
agccatcaactgctg

SEQ ID NO: 564701 - DNA, 15 bp, Homo sapiens
aagccatcaactgct

SEQ ID NO: 564702 - DNA, 15 bp, Homo sapiens
aaagccatcaactgc

SEQ ID NO: 564703 - DNA, 15 bp, Homo sapiens
caaagccatcaactg

SEQ ID NO: 564704 - DNA, 15 bp, Homo sapiens
tcaaagccatcaact

SEQ ID NO: 564705 - DNA, 15 bp, Homo sapiens
ttcaaagccatcaac

SEQ ID NO: 564706 - DNA, 15 bp, Homo sapiens
cttcaaagccatcaa

SEQ ID NO: 564707 - DNA, 15 bp, Homo sapiens
tcttcaaagccatca

SEQ ID NO: 564708 - DNA, 15 bp, Homo sapiens
atcttcaaagccatc

SEQ ID NO: 564709 - DNA, 15 bp, Homo sapiens
tatcttcaaagccat

SEQ ID NO: 564710 - DNA, 15 bp, Homo sapiens
ctatcttcaaagcca

SEQ ID NO: 564711 - DNA, 15 bp, Homo sapiens
tctatcttcaaagcc

SEQ ID NO: 564712 - DNA, 15 bp, Homo sapiens
ttctatcttcaaagc

SEQ ID NO: 564713 - DNA, 15 bp, Homo sapiens
cttctatcttcaaag

SEQ ID NO: 564714 - DNA, 15 bp, Homo sapiens
tcttctatcttcaaa

SEQ ID NO: 564715 - DNA, 15 bp, Homo sapiens
ttcttctatcttcaa

SEQ ID NO: 564716 - DNA, 15 bp, Homo sapiens
cttcttctatcttca

SEQ ID NO: 564717 - DNA, 15 bp, Homo sapiens
ccttcttctatcttc

SEQ ID NO: 564718 - DNA, 15 bp, Homo sapiens
cccttcttctatctt

SEQ ID NO: 564719 - DNA, 15 bp, Homo sapiens
ccccttcttctatct

SEQ ID NO: 564720 - DNA, 15 bp, Homo sapiens
cccccttcttctatc

SEQ ID NO: 564721 - DNA, 15 bp, Homo sapiens
gcccccttcttctat

SEQ ID NO: 564722 - DNA, 15 bp, Homo sapiens
ggcccccttcttcta

SEQ ID NO: 564723 - DNA, 15 bp, Homo sapiens
tggcccccttcttct

SEQ ID NO: 564724 - DNA, 15 bp, Homo sapiens
atggcccccttcttc

SEQ ID NO: 564725 - DNA, 15 bp, Homo sapiens
catggcccccttctt

SEQ ID NO: 564726 - DNA, 15 bp, Homo sapiens
tcatggcccccttct

SEQ ID NO: 564727 - DNA, 15 bp, Homo sapiens
ctcatggcccccttc

SEQ ID NO: 564728 - DNA, 15 bp, Homo sapiens
gctcatggccccctt

SEQ ID NO: 564729 - DNA, 15 bp, Homo sapiens
ggctcatggccccct

SEQ ID NO: 564730 - DNA, 15 bp, Homo sapiens
tggctcatggccccc

SEQ ID NO: 564731 - DNA, 15 bp, Homo sapiens
ttggctcatggcccc

SEQ ID NO: 564732 - DNA, 15 bp, Homo sapiens
cttggctcatggccc

SEQ ID NO: 564733 - DNA, 15 bp, Homo sapiens
tcttggctcatggcc

SEQ ID NO: 564734 - DNA, 15 bp, Homo sapiens
ttcttggctcatggc

SEQ ID NO: 564735 - DNA, 15 bp, Homo sapiens
tttcttggctcatgg

SEQ ID NO: 564736 - DNA, 15 bp, Homo sapiens
atttcttggctcatg

SEQ ID NO: 564737 - DNA, 15 bp, Homo sapiens
catttcttggctcat

SEQ ID NO: 564738 - DNA, 15 bp, Homo sapiens
acatttcttggctca

SEQ ID NO: 564739 - DNA, 15 bp, Homo sapiens
cacatttcttggctc

SEQ ID NO: 564740 - DNA, 15 bp, Homo sapiens
tcacatttcttggct

SEQ ID NO: 564741 - DNA, 15 bp, Homo sapiens
ctcacatttcttggc

SEQ ID NO: 564742 - DNA, 15 bp, Homo sapiens
actcacatttcttgg

SEQ ID NO: 564743 - DNA, 15 bp, Homo sapiens
tactcacatttcttg

SEQ ID NO: 564744 - DNA, 15 bp, Homo sapiens
ctactcacatttctt

SEQ ID NO: 564745 - DNA, 15 bp, Homo sapiens
gctactcacatttct

SEQ ID NO: 564746 - DNA, 15 bp, Homo sapiens
ggctactcacatttc

SEQ ID NO: 564747 - DNA, 15 bp, Homo sapiens
aggctactcacattt

SEQ ID NO: 564748 - DNA, 15 bp, Homo sapiens
gaggctactcacatt

SEQ ID NO: 564749 - DNA, 15 bp, Homo sapiens
agaggctactcacat

SEQ ID NO: 564750 - DNA, 15 bp, Homo sapiens
tagaggctactcaca

SEQ ID NO: 564751 - DNA, 15 bp, Homo sapiens
ctagaggctactcac

SEQ ID NO: 564752 - DNA, 15 bp, Homo sapiens
tctagaggctactca

SEQ ID NO: 564753 - DNA, 15 bp, Homo sapiens
ttctagaggctactc

SEQ ID NO: 564754 - DNA, 15 bp, Homo sapiens
cttctagaggctact

SEQ ID NO: 564755 - DNA, 15 bp, Homo sapiens
gcttctagaggctac

SEQ ID NO: 564756 - DNA, 15 bp, Homo sapiens
agcttctagaggcta

SEQ ID NO: 564757 - DNA, 15 bp, Homo sapiens
cagcttctagaggct

SEQ ID NO: 564758 - DNA, 15 bp, Homo sapiens
tcagcttctagaggc

SEQ ID NO: 564759 - DNA, 15 bp, Homo sapiens
ttcagcttctagagg

SEQ ID NO: 564760 - DNA, 15 bp, Homo sapiens
tttcagcttctagag

SEQ ID NO: 564761 - DNA, 15 bp, Homo sapiens
ttttcagcttctaga

SEQ ID NO: 564762 - DNA, 15 bp, Homo sapiens
tttttcagcttctag

SEQ ID NO: 564763 - DNA, 15 bp, Homo sapiens
ctttttcagcttcta

SEQ ID NO: 564764 - DNA, 15 bp, Homo sapiens
cctttttcagcttct

SEQ ID NO: 564765 - DNA, 15 bp, Homo sapiens
gcctttttcagcttc

SEQ ID NO: 564766 - DNA, 15 bp, Homo sapiens
tgcctttttcagctt

SEQ ID NO: 564767 - DNA, 15 bp, Homo sapiens
ttgcctttttcagct

SEQ ID NO: 564768 - DNA, 15 bp, Homo sapiens
cttgcctttttcagc

SEQ ID NO: 564769 - DNA, 15 bp, Homo sapiens
tcttgcctttttcag

SEQ ID NO: 564770 - DNA, 15 bp, Homo sapiens
ttcttgcctttttca

SEQ ID NO: 564771 - DNA, 15 bp, Homo sapiens
tttcttgcctttttc

SEQ ID NO: 564772 - DNA, 15 bp, Homo sapiens
ttttcttgccttttt

SEQ ID NO: 564773 - DNA, 15 bp, Homo sapiens
gttttcttgcctttt

SEQ ID NO: 564774 - DNA, 15 bp, Homo sapiens
cgttttcttgccttt

SEQ ID NO: 564775 - DNA, 15 bp, Homo sapiens
ccgttttcttgcctt

SEQ ID NO: 564776 - DNA, 15 bp, Homo sapiens
tccgttttcttgcct

SEQ ID NO: 564777 - DNA, 15 bp, Homo sapiens
atccgttttcttgcc

SEQ ID NO: 564778 - DNA, 15 bp, Homo sapiens
aatccgttttcttgc

SEQ ID NO: 564779 - DNA, 15 bp, Homo sapiens
gaatccgttttcttg

SEQ ID NO: 564780 - DNA, 15 bp, Homo sapiens
agaatccgttttctt

SEQ ID NO: 564781 - DNA, 15 bp, Homo sapiens
aagaatccgttttct

SEQ ID NO: 564782 - DNA, 15 bp, Homo sapiens
gaagaatccgttttc

SEQ ID NO: 564783 - DNA, 15 bp, Homo sapiens
ggaagaatccgtttt

SEQ ID NO: 564784 - DNA, 15 bp, Homo sapiens
gggaagaatccgttt

SEQ ID NO: 564785 - DNA, 15 bp, Homo sapiens
agggaagaatccgtt

SEQ ID NO: 564786 - DNA, 15 bp, Homo sapiens
tagggaagaatccgt

SEQ ID NO: 564787 - DNA, 15 bp, Homo sapiens
ctagggaagaatccg

SEQ ID NO: 564788 - DNA, 15 bp, Homo sapiens
tctagggaagaatcc

SEQ ID NO: 564789 - DNA, 15 bp, Homo sapiens
ttctagggaagaatc

SEQ ID NO: 564790 - DNA, 15 bp, Homo sapiens
attctagggaagaat

SEQ ID NO: 564791 - DNA, 15 bp, Homo sapiens
gattctagggaagaa

SEQ ID NO: 564792 - DNA, 15 bp, Homo sapiens
agattctagggaaga

SEQ ID NO: 564793 - DNA, 15 bp, Homo sapiens
gagattctagggaag

SEQ ID NO: 564794 - DNA, 15 bp, Homo sapiens
ggagattctagggaa

SEQ ID NO: 564795 - DNA, 15 bp, Homo sapiens
tggagattctaggga

SEQ ID NO: 564796 - DNA, 15 bp, Homo sapiens
ctggagattctaggg

SEQ ID NO: 564797 - DNA, 15 bp, Homo sapiens
tctggagattctagg

SEQ ID NO: 564798 - DNA, 15 bp, Homo sapiens
ttctggagattctag

SEQ ID NO: 564799 - DNA, 15 bp, Homo sapiens
tttctggagattcta

SEQ ID NO: 564800 - DNA, 15 bp, Homo sapiens
atttctggagattct

SEQ ID NO: 564801 - DNA, 15 bp, Homo sapiens
catttctggagattc

SEQ ID NO: 564802 - DNA, 15 bp, Homo sapiens
gcatttctggagatt

SEQ ID NO: 564803 - DNA, 15 bp, Homo sapiens
tgcatttctggagat

SEQ ID NO: 564804 - DNA, 15 bp, Homo sapiens
ctgcatttctggaga

SEQ ID NO: 564805 - DNA, 15 bp, Homo sapiens
gctgcatttctggag

SEQ ID NO: 564806 - DNA, 15 bp, Homo sapiens
ggctgcatttctgga

SEQ ID NO: 564807 - DNA, 15 bp, Homo sapiens
gggctgcatttctgg

SEQ ID NO: 564808 - DNA, 15 bp, Homo sapiens
agggctgcatttctg

SEQ ID NO: 564809 - DNA, 15 bp, Homo sapiens
cagggctgcatttct

SEQ ID NO: 564810 - DNA, 15 bp, Homo sapiens
gcagggctgcatttc

SEQ ID NO: 564811 - DNA, 15 bp, Homo sapiens
ggcagggctgcattt

SEQ ID NO: 564812 - DNA, 15 bp, Homo sapiens
tggcagggctgcatt

SEQ ID NO: 564813 - DNA, 15 bp, Homo sapiens
ttggcagggctgcat

SEQ ID NO: 564814 - DNA, 15 bp, Homo sapiens
gttggcagggctgca

SEQ ID NO: 564815 - DNA, 15 bp, Homo sapiens
tgttggcagggctgc

SEQ ID NO: 564816 - DNA, 15 bp, Homo sapiens
atgttggcagggctg

SEQ ID NO: 564817 - DNA, 15 bp, Homo sapiens
catgttggcagggct

SEQ ID NO: 564818 - DNA, 15 bp, Homo sapiens
ccatgttggcagggc

SEQ ID NO: 564819 - DNA, 15 bp, Homo sapiens
accatgttggcaggg

SEQ ID NO: 564820 - DNA, 15 bp, Homo sapiens
caccatgttggcagg

SEQ ID NO: 564821 - DNA, 15 bp, Homo sapiens
tcaccatgttggcag

SEQ ID NO: 564822 - DNA, 15 bp, Homo sapiens
atcaccatgttggca

SEQ ID NO: 564823 - DNA, 15 bp, Homo sapiens
aatcaccatgttggc

SEQ ID NO: 564824 - DNA, 15 bp, Homo sapiens
aaatcaccatgttgg

SEQ ID NO: 564825 - DNA, 15 bp, Homo sapiens
aaaatcaccatgttg

SEQ ID NO: 564826 - DNA, 15 bp, Homo sapiens
taaaatcaccatgtt

SEQ ID NO: 564827 - DNA, 15 bp, Homo sapiens
ttaaaatcaccatgt

SEQ ID NO: 564828 - DNA, 15 bp, Homo sapiens
gttaaaatcaccatg

SEQ ID NO: 564829 - DNA, 15 bp, Homo sapiens
agttaaaatcaccat

SEQ ID NO: 564830 - DNA, 15 bp, Homo sapiens
gagttaaaatcacca

SEQ ID NO: 564831 - DNA, 15 bp, Homo sapiens
tgagttaaaatcacc

SEQ ID NO: 564832 - DNA, 15 bp, Homo sapiens
ttgagttaaaatcac

SEQ ID NO: 564833 - DNA, 15 bp, Homo sapiens
attgagttaaaatca

SEQ ID NO: 564834 - DNA, 15 bp, Homo sapiens
cattgagttaaaatc

SEQ ID NO: 564835 - DNA, 15 bp, Homo sapiens
tcattgagttaaaat

SEQ ID NO: 564836 - DNA, 15 bp, Homo sapiens
ctcattgagttaaaa

SEQ ID NO: 564837 - DNA, 15 bp, Homo sapiens
tctcattgagttaaa

SEQ ID NO: 564838 - DNA, 15 bp, Homo sapiens
atctcattgagttaa

SEQ ID NO: 564839 - DNA, 15 bp, Homo sapiens
catctcattgagtta

SEQ ID NO: 564840 - DNA, 15 bp, Homo sapiens
gcatctcattgagtt

SEQ ID NO: 564841 - DNA, 15 bp, Homo sapiens
tgcatctcattgagt

SEQ ID NO: 564842 - DNA, 15 bp, Homo sapiens
atgcatctcattgag

SEQ ID NO: 564843 - DNA, 15 bp, Homo sapiens
aatgcatctcattga

SEQ ID NO: 564844 - DNA, 15 bp, Homo sapiens
aaatgcatctcattg

SEQ ID NO: 564845 - DNA, 15 bp, Homo sapiens
aaaatgcatctcatt

SEQ ID NO: 564846 - DNA, 15 bp, Homo sapiens
taaaatgcatctcat

SEQ ID NO: 564847 - DNA, 15 bp, Homo sapiens
ctaaaatgcatctca

SEQ ID NO: 564848 - DNA, 15 bp, Homo sapiens
tctaaaatgcatctc

SEQ ID NO: 564849 - DNA, 15 bp, Homo sapiens
gtctaaaatgcatct

SEQ ID NO: 564850 - DNA, 15 bp, Homo sapiens
agtctaaaatgcatc

SEQ ID NO: 564851 - DNA, 15 bp, Homo sapiens
aagtctaaaatgcat

SEQ ID NO: 564852 - DNA, 15 bp, Homo sapiens
gaagtctaaaatgca

SEQ ID NO: 564853 - DNA, 15 bp, Homo sapiens
agaagtctaaaatgc

SEQ ID NO: 564854 - DNA, 15 bp, Homo sapiens
cagaagtctaaaatg

SEQ ID NO: 564855 - DNA, 15 bp, Homo sapiens
tcagaagtctaaaat

SEQ ID NO: 564856 - DNA, 15 bp, Homo sapiens
gtcagaagtctaaaa

SEQ ID NO: 564857 - DNA, 15 bp, Homo sapiens
tgtcagaagtctaaa

SEQ ID NO: 564858 - DNA, 15 bp, Homo sapiens
atgtcagaagtctaa

SEQ ID NO: 564859 - DNA, 15 bp, Homo sapiens
gatgtcagaagtcta

SEQ ID NO: 564860 - DNA, 15 bp, Homo sapiens
agatgtcagaagtct

SEQ ID NO: 564861 - DNA, 15 bp, Homo sapiens
tagatgtcagaagtc

SEQ ID NO: 564862 - DNA, 15 bp, Homo sapiens
ctagatgtcagaagt

SEQ ID NO: 564863 - DNA, 15 bp, Homo sapiens
tctagatgtcagaag

SEQ ID NO: 564864 - DNA, 15 bp, Homo sapiens
ttctagatgtcagaa

SEQ ID NO: 564865 - DNA, 15 bp, Homo sapiens
attctagatgtcaga

SEQ ID NO: 564866 - DNA, 15 bp, Homo sapiens
aattctagatgtcag

SEQ ID NO: 564867 - DNA, 15 bp, Homo sapiens
caattctagatgtca

SEQ ID NO: 564868 - DNA, 15 bp, Homo sapiens
acaattctagatgtc

SEQ ID NO: 564869 - DNA, 15 bp, Homo sapiens
cacaattctagatgt

SEQ ID NO: 564870 - DNA, 15 bp, Homo sapiens
acacaattctagatg

SEQ ID NO: 564871 - DNA, 15 bp, Homo sapiens
aacacaattctagat

SEQ ID NO: 564872 - DNA, 15 bp, Homo sapiens
taacacaattctaga

SEQ ID NO: 564873 - DNA, 15 bp, Homo sapiens
ataacacaattctag

SEQ ID NO: 564874 - DNA, 15 bp, Homo sapiens
aataacacaattcta

SEQ ID NO: 564875 - DNA, 15 bp, Homo sapiens
aaataacacaattct

SEQ ID NO: 564876 - DNA, 15 bp, Homo sapiens
aaaataacacaattc

SEQ ID NO: 564877 - DNA, 15 bp, Homo sapiens
gaaaataacacaatt

SEQ ID NO: 564878 - DNA, 15 bp, Homo sapiens
tgaaaataacacaat

SEQ ID NO: 564879 - DNA, 15 bp, Homo sapiens
ctgaaaataacacaa

SEQ ID NO: 564880 - DNA, 15 bp, Homo sapiens
gctgaaaataacaca

SEQ ID NO: 564881 - DNA, 15 bp, Homo sapiens
ggctgaaaataacac

SEQ ID NO: 564882 - DNA, 15 bp, Homo sapiens
gggctgaaaataaca

SEQ ID NO: 564883 - DNA, 15 bp, Homo sapiens
agggctgaaaataac

SEQ ID NO: 564884 - DNA, 15 bp, Homo sapiens
gagggctgaaaataa

SEQ ID NO: 564885 - DNA, 15 bp, Homo sapiens
tgagggctgaaaata

SEQ ID NO: 564886 - DNA, 15 bp, Homo sapiens
ttgagggctgaaaat

SEQ ID NO: 564887 - DNA, 15 bp, Homo sapiens
cttgagggctgaaaa

SEQ ID NO: 564888 - DNA, 15 bp, Homo sapiens
acttgagggctgaaa

SEQ ID NO: 564889 - DNA, 15 bp, Homo sapiens
aacttgagggctgaa

SEQ ID NO: 564890 - DNA, 15 bp, Homo sapiens
aaacttgagggctga

SEQ ID NO: 564891 - DNA, 15 bp, Homo sapiens
caaacttgagggctg

SEQ ID NO: 564892 - DNA, 15 bp, Homo sapiens
acaaacttgagggct

SEQ ID NO: 564893 - DNA, 15 bp, Homo sapiens
cacaaacttgagggc

SEQ ID NO: 564894 - DNA, 15 bp, Homo sapiens
ccacaaacttgaggg

SEQ ID NO: 564895 - DNA, 15 bp, Homo sapiens
accacaaacttgagg

SEQ ID NO: 564896 - DNA, 15 bp, Homo sapiens
taccacaaacttgag

SEQ ID NO: 564897 - DNA, 15 bp, Homo sapiens
ttaccacaaacttga

SEQ ID NO: 564898 - DNA, 15 bp, Homo sapiens
attaccacaaacttg

SEQ ID NO: 564899 - DNA, 15 bp, Homo sapiens
aattaccacaaactt

SEQ ID NO: 564900 - DNA, 15 bp, Homo sapiens
aaattaccacaaact

SEQ ID NO: 564901 - DNA, 15 bp, Homo sapiens
caaattaccacaaac

SEQ ID NO: 564902 - DNA, 15 bp, Homo sapiens
acaaattaccacaaa

SEQ ID NO: 564903 - DNA, 15 bp, Homo sapiens
aacaaattaccacaa

SEQ ID NO: 564904 - DNA, 15 bp, Homo sapiens
taacaaattaccaca

SEQ ID NO: 564905 - DNA, 15 bp, Homo sapiens
gtaacaaattaccac

SEQ ID NO: 564906 - DNA, 15 bp, Homo sapiens
tgtaacaaattacca

SEQ ID NO: 564907 - DNA, 15 bp, Homo sapiens
ctgtaacaaattacc

SEQ ID NO: 564908 - DNA, 15 bp, Homo sapiens
gctgtaacaaattac

SEQ ID NO: 564909 - DNA, 15 bp, Homo sapiens
tgctgtaacaaatta

SEQ ID NO: 564910 - DNA, 15 bp, Homo sapiens
ctgctgtaacaaatt

SEQ ID NO: 564911 - DNA, 15 bp, Homo sapiens
gctgctgtaacaaat

SEQ ID NO: 564912 - DNA, 15 bp, Homo sapiens
tgctgctgtaacaaa

SEQ ID NO: 564913 - DNA, 15 bp, Homo sapiens
atgctgctgtaacaa

SEQ ID NO: 564914 - DNA, 15 bp, Homo sapiens
aatgctgctgtaaca

SEQ ID NO: 564915 - DNA, 15 bp, Homo sapiens
taatgctgctgtaac

SEQ ID NO: 564916 - DNA, 15 bp, Homo sapiens
ttaatgctgctgtaa

SEQ ID NO: 564917 - DNA, 15 bp, Homo sapiens
cttaatgctgctgta

SEQ ID NO: 564918 - DNA, 15 bp, Homo sapiens
tcttaatgctgctgt

SEQ ID NO: 564919 - DNA, 15 bp, Homo sapiens
ttcttaatgctgctg

SEQ ID NO: 564920 - DNA, 15 bp, Homo sapiens
tttcttaatgctgct

SEQ ID NO: 564921 - DNA, 15 bp, Homo sapiens
ttttcttaatgctgc

SEQ ID NO: 564922 - DNA, 15 bp, Homo sapiens
attttcttaatgctg

SEQ ID NO: 564923 - DNA, 15 bp, Homo sapiens
cattttcttaatgct

SEQ ID NO: 564924 - DNA, 15 bp, Homo sapiens
acattttcttaatgc

SEQ ID NO: 564925 - DNA, 15 bp, Homo sapiens
tacattttcttaatg

SEQ ID NO: 564926 - DNA, 15 bp, Homo sapiens
gtacattttcttaat

SEQ ID NO: 564927 - DNA, 15 bp, Homo sapiens
tgtacattttcttaa

SEQ ID NO: 564928 - DNA, 15 bp, Homo sapiens
ttgtacattttctta

SEQ ID NO: 564929 - DNA, 15 bp, Homo sapiens
attgtacattttctt

SEQ ID NO: 564930 - DNA, 15 bp, Homo sapiens
cattgtacattttct

SEQ ID NO: 564931 - DNA, 15 bp, Homo sapiens
tcattgtacattttc

SEQ ID NO: 564932 - DNA, 15 bp, Homo sapiens
gtcattgtacatttt

SEQ ID NO: 564933 - DNA, 15 bp, Homo sapiens
ggtcattgtacattt

SEQ ID NO: 564934 - DNA, 15 bp, Homo sapiens
tggtcattgtacatt

SEQ ID NO: 564935 - DNA, 15 bp, Homo sapiens
atggtcattgtacat

SEQ ID NO: 564936 - DNA, 15 bp, Homo sapiens
catggtcattgtaca

SEQ ID NO: 564937 - DNA, 15 bp, Homo sapiens
acatggtcattgtac

SEQ ID NO: 564938 - DNA, 15 bp, Homo sapiens
cacatggtcattgta

SEQ ID NO: 564939 - DNA, 15 bp, Homo sapiens
gcacatggtcattgt

SEQ ID NO: 564940 - DNA, 15 bp, Homo sapiens
tgcacatggtcattg

SEQ ID NO: 564941 - DNA, 15 bp, Homo sapiens
ctgcacatggtcatt

SEQ ID NO: 564942 - DNA, 15 bp, Homo sapiens
actgcacatggtcat

SEQ ID NO: 564943 - DNA, 15 bp, Homo sapiens
cactgcacatggtca

SEQ ID NO: 564944 - DNA, 15 bp, Homo sapiens
gcactgcacatggtc

SEQ ID NO: 564945 - DNA, 15 bp, Homo sapiens
ggcactgcacatggt

SEQ ID NO: 564946 - DNA, 15 bp, Homo sapiens
aggcactgcacatgg

SEQ ID NO: 564947 - DNA, 15 bp, Homo sapiens
gaggcactgcacatg

SEQ ID NO: 564948 - DNA, 15 bp, Homo sapiens
tgaggcactgcacat

SEQ ID NO: 564949 - DNA, 15 bp, Homo sapiens
atgaggcactgcaca

SEQ ID NO: 564950 - DNA, 15 bp, Homo sapiens
catgaggcactgcac

SEQ ID NO: 564951 - DNA, 15 bp, Homo sapiens
gcatgaggcactgca

SEQ ID NO: 564952 - DNA, 15 bp, Homo sapiens
agcatgaggcactgc

SEQ ID NO: 564953 - DNA, 15 bp, Homo sapiens
aagcatgaggcactg

SEQ ID NO: 564954 - DNA, 15 bp, Homo sapiens
caagcatgaggcact

SEQ ID NO: 564955 - DNA, 15 bp, Homo sapiens
acaagcatgaggcac

SEQ ID NO: 564956 - DNA, 15 bp, Homo sapiens
tacaagcatgaggca

SEQ ID NO: 564957 - DNA, 15 bp, Homo sapiens
ttacaagcatgaggc

SEQ ID NO: 564958 - DNA, 15 bp, Homo sapiens
attacaagcatgagg

SEQ ID NO: 564959 - DNA, 15 bp, Homo sapiens
gattacaagcatgag

SEQ ID NO: 564960 - DNA, 15 bp, Homo sapiens
ggattacaagcatga

SEQ ID NO: 564961 - DNA, 15 bp, Homo sapiens
gggattacaagcatg

SEQ ID NO: 564962 - DNA, 15 bp, Homo sapiens
tgggattacaagcat

SEQ ID NO: 564963 - DNA, 15 bp, Homo sapiens
ctgggattacaagca

SEQ ID NO: 564964 - DNA, 15 bp, Homo sapiens
gctgggattacaagc

SEQ ID NO: 564965 - DNA, 15 bp, Homo sapiens
tgctgggattacaag

SEQ ID NO: 564966 - DNA, 15 bp, Homo sapiens
gtgctgggattacaa

SEQ ID NO: 564967 - DNA, 15 bp, Homo sapiens
tggcctcccaaagtg

SEQ ID NO: 564968 - DNA, 15 bp, Homo sapiens
ttggcctcccaaagt

SEQ ID NO: 564969 - DNA, 15 bp, Homo sapiens
cttggcctcccaaag

SEQ ID NO: 564970 - DNA, 15 bp, Homo sapiens
accttggcctcccaa

SEQ ID NO: 564971 - DNA, 15 bp, Homo sapiens
caccttggcctccca

SEQ ID NO: 564972 - DNA, 15 bp, Homo sapiens
ccaccttggcctccc

SEQ ID NO: 564973 - DNA, 15 bp, Homo sapiens
cccaccttggcctcc

SEQ ID NO: 564974 - DNA, 15 bp, Homo sapiens
acccaccttggcctc

SEQ ID NO: 564975 - DNA, 15 bp, Homo sapiens
cacccaccttggcct

SEQ ID NO: 564976 - DNA, 15 bp, Homo sapiens
ccacccaccttggcc

SEQ ID NO: 564977 - DNA, 15 bp, Homo sapiens
tccacccaccttggc

SEQ ID NO: 564978 - DNA, 15 bp, Homo sapiens
atccacccaccttgg

SEQ ID NO: 564979 - DNA, 15 bp, Homo sapiens
gatccacccaccttg

SEQ ID NO: 564980 - DNA, 15 bp, Homo sapiens
cgatccacccacctt

SEQ ID NO: 564981 - DNA, 15 bp, Homo sapiens
gcgatccacccacct

SEQ ID NO: 564982 - DNA, 15 bp, Homo sapiens
agcgatccacccacc

SEQ ID NO: 564983 - DNA, 15 bp, Homo sapiens
aagcgatccacccac

SEQ ID NO: 564984 - DNA, 15 bp, Homo sapiens
caagcgatccaccca

SEQ ID NO: 564985 - DNA, 15 bp, Homo sapiens
tcaagcgatccaccc

SEQ ID NO: 564986 - DNA, 15 bp, Homo sapiens
ctcaagcgatccacc

SEQ ID NO: 564987 - DNA, 15 bp, Homo sapiens
actcaagcgatccac

SEQ ID NO: 564988 - DNA, 15 bp, Homo sapiens
gactcaagcgatcca

SEQ ID NO: 564989 - DNA, 15 bp, Homo sapiens
ggactcaagcgatcc

SEQ ID NO: 564990 - DNA, 15 bp, Homo sapiens
tggactcaagcgatc

SEQ ID NO: 564991 - DNA, 15 bp, Homo sapiens
ttggactcaagcgat

SEQ ID NO: 564992 - DNA, 15 bp, Homo sapiens
cttggactcaagcga

SEQ ID NO: 564993 - DNA, 15 bp, Homo sapiens
tcttggactcaagcg

SEQ ID NO: 564994 - DNA, 15 bp, Homo sapiens
ctcttggactcaagc

SEQ ID NO: 564995 - DNA, 15 bp, Homo sapiens
actcttggactcaag

SEQ ID NO: 564996 - DNA, 15 bp, Homo sapiens
aactcttggactcaa

SEQ ID NO: 564997 - DNA, 15 bp, Homo sapiens
gaactcttggactca

SEQ ID NO: 564998 - DNA, 15 bp, Homo sapiens
cgaactcttggactc

SEQ ID NO: 564999 - DNA, 15 bp, Homo sapiens
tcgaactcttggact

SEQ ID NO: 565000 - DNA, 15 bp, Homo sapiens
ctcgaactcttggac

SEQ ID NO: 565001 - DNA, 15 bp, Homo sapiens
tctcgaactcttgga

SEQ ID NO: 565002 - DNA, 15 bp, Homo sapiens
gtctcgaactcttgg

SEQ ID NO: 565003 - DNA, 15 bp, Homo sapiens
ggtctcgaactcttg

SEQ ID NO: 565004 - DNA, 15 bp, Homo sapiens
tggtctcgaactctt

SEQ ID NO: 565005 - DNA, 15 bp, Homo sapiens
ctggtctcgaactct

SEQ ID NO: 565006 - DNA, 15 bp, Homo sapiens
gctggtctcgaactc

SEQ ID NO: 565007 - DNA, 15 bp, Homo sapiens
ggctggtctcgaact

SEQ ID NO: 565008 - DNA, 15 bp, Homo sapiens
aggctggtctcgaac

SEQ ID NO: 565009 - DNA, 15 bp, Homo sapiens
caggctggtctcgaa

SEQ ID NO: 565010 - DNA, 15 bp, Homo sapiens
ccaggctggtctcga

SEQ ID NO: 565011 - DNA, 15 bp, Homo sapiens
cccaggctggtctcg

SEQ ID NO: 565012 - DNA, 15 bp, Homo sapiens
tcccaggctggtctc

SEQ ID NO: 565013 - DNA, 15 bp, Homo sapiens
ttcccaggctggtct

SEQ ID NO: 565014 - DNA, 15 bp, Homo sapiens
tttcccaggctggtc

SEQ ID NO: 565015 - DNA, 15 bp, Homo sapiens
gtttcccaggctggt

SEQ ID NO: 565016 - DNA, 15 bp, Homo sapiens
tgtttcccaggctgg

SEQ ID NO: 565017 - DNA, 15 bp, Homo sapiens
atgtttcccaggctg

SEQ ID NO: 565018 - DNA, 15 bp, Homo sapiens
catgtttcccaggct

SEQ ID NO: 565019 - DNA, 15 bp, Homo sapiens
ccatgtttcccaggc

SEQ ID NO: 565020 - DNA, 15 bp, Homo sapiens
accatgtttcccagg

SEQ ID NO: 565021 - DNA, 15 bp, Homo sapiens
caccatgtttcccag

SEQ ID NO: 565022 - DNA, 15 bp, Homo sapiens
tcaccatgtttccca

SEQ ID NO: 565023 - DNA, 15 bp, Homo sapiens
ttcaccatgtttccc

SEQ ID NO: 565024 - DNA, 15 bp, Homo sapiens
tttcaccatgtttcc

SEQ ID NO: 565025 - DNA, 15 bp, Homo sapiens
gtttcaccatgtttc

SEQ ID NO: 565026 - DNA, 15 bp, Homo sapiens
ggtttcaccatgttt

SEQ ID NO: 565027 - DNA, 15 bp, Homo sapiens
aggtttcaccatgtt

SEQ ID NO: 565028 - DNA, 15 bp, Homo sapiens
aaggtttcaccatgt

SEQ ID NO: 565029 - DNA, 15 bp, Homo sapiens
caaggtttcaccatg

SEQ ID NO: 565030 - DNA, 15 bp, Homo sapiens
acaaggtttcaccat

SEQ ID NO: 565031 - DNA, 15 bp, Homo sapiens
gacaaggtttcacca

SEQ ID NO: 565032 - DNA, 15 bp, Homo sapiens
agacaaggtttcacc

SEQ ID NO: 565033 - DNA, 15 bp, Homo sapiens
gagacaaggtttcac

SEQ ID NO: 565034 - DNA, 15 bp, Homo sapiens
agagacaaggtttca

SEQ ID NO: 565035 - DNA, 15 bp, Homo sapiens
tagagacaaggtttc

SEQ ID NO: 565036 - DNA, 15 bp, Homo sapiens
gtagagacaaggttt

SEQ ID NO: 565037 - DNA, 15 bp, Homo sapiens
tgtagagacaaggtt

SEQ ID NO: 565038 - DNA, 15 bp, Homo sapiens
ttgtagagacaaggt

SEQ ID NO: 565039 - DNA, 15 bp, Homo sapiens
tttgtagagacaagg

SEQ ID NO: 565040 - DNA, 15 bp, Homo sapiens
ttttgtagagacaag

SEQ ID NO: 565041 - DNA, 15 bp, Homo sapiens
tttttgtagagacaa

SEQ ID NO: 565042 - DNA, 15 bp, Homo sapiens
gtttttgtagagaca

SEQ ID NO: 565043 - DNA, 15 bp, Homo sapiens
tgtttttgtagagac

SEQ ID NO: 565044 - DNA, 15 bp, Homo sapiens
gtgtttttgtagaga

SEQ ID NO: 565045 - DNA, 15 bp, Homo sapiens
tgtgtttttgtagag

SEQ ID NO: 565046 - DNA, 15 bp, Homo sapiens
ttgtgtttttgtaga

SEQ ID NO: 565047 - DNA, 15 bp, Homo sapiens
tttgtgtttttgtag

SEQ ID NO: 565048 - DNA, 15 bp, Homo sapiens
ttttgtgtttttgta

SEQ ID NO: 565049 - DNA, 15 bp, Homo sapiens
tttttgtgtttttgt

SEQ ID NO: 565050 - DNA, 15 bp, Homo sapiens
atttttgtgtttttg

SEQ ID NO: 565051 - DNA, 15 bp, Homo sapiens
aatttttgtgttttt

SEQ ID NO: 565052 - DNA, 15 bp, Homo sapiens
taatttttgtgtttt

SEQ ID NO: 565053 - DNA, 15 bp, Homo sapiens
ctaatttttgtgttt

SEQ ID NO: 565054 - DNA, 15 bp, Homo sapiens
gctaatttttgtgtt

SEQ ID NO: 565055 - DNA, 15 bp, Homo sapiens
ggctaatttttgtgt

SEQ ID NO: 565056 - DNA, 15 bp, Homo sapiens
aggctaatttttgtg

SEQ ID NO: 565057 - DNA, 15 bp, Homo sapiens
caggctaatttttgt

SEQ ID NO: 565058 - DNA, 15 bp, Homo sapiens
ccaggctaatttttg

SEQ ID NO: 565059 - DNA, 15 bp, Homo sapiens
accaggctaattttt

SEQ ID NO: 565060 - DNA, 15 bp, Homo sapiens
caccaggctaatttt

SEQ ID NO: 565061 - DNA, 15 bp, Homo sapiens
acaccaggctaattt

SEQ ID NO: 565062 - DNA, 15 bp, Homo sapiens
cacaccaggctaatt

SEQ ID NO: 565063 - DNA, 15 bp, Homo sapiens
ccacaccaggctaat

SEQ ID NO: 565064 - DNA, 15 bp, Homo sapiens
accacaccaggctaa

SEQ ID NO: 565065 - DNA, 15 bp, Homo sapiens
aaccacaccaggcta

SEQ ID NO: 565066 - DNA, 15 bp, Homo sapiens
caaccacaccaggct

SEQ ID NO: 565067 - DNA, 15 bp, Homo sapiens
acaaccacaccaggc

SEQ ID NO: 565068 - DNA, 15 bp, Homo sapiens
cacaaccacaccagg

SEQ ID NO: 565069 - DNA, 15 bp, Homo sapiens
acacaaccacaccag

SEQ ID NO: 565070 - DNA, 15 bp, Homo sapiens
cacacaaccacacca

SEQ ID NO: 565071 - DNA, 15 bp, Homo sapiens
ccacacaaccacacc

SEQ ID NO: 565072 - DNA, 15 bp, Homo sapiens
tccacacaaccacac

SEQ ID NO: 565073 - DNA, 15 bp, Homo sapiens
gtccacacaaccaca

SEQ ID NO: 565074 - DNA, 15 bp, Homo sapiens
ggtccacacaaccac

SEQ ID NO: 565075 - DNA, 15 bp, Homo sapiens
aggtccacacaacca

SEQ ID NO: 565076 - DNA, 15 bp, Homo sapiens
caggtccacacaacc

SEQ ID NO: 565077 - DNA, 15 bp, Homo sapiens
acaggtccacacaac

SEQ ID NO: 565078 - DNA, 15 bp, Homo sapiens
tacaggtccacacaa

SEQ ID NO: 565079 - DNA, 15 bp, Homo sapiens
ctacaggtccacaca

SEQ ID NO: 565080 - DNA, 15 bp, Homo sapiens
actacaggtccacac

SEQ ID NO: 565081 - DNA, 15 bp, Homo sapiens
gactacaggtccaca

SEQ ID NO: 565082 - DNA, 15 bp, Homo sapiens
ggactacaggtccac

SEQ ID NO: 565083 - DNA, 15 bp, Homo sapiens
gggactacaggtcca

SEQ ID NO: 565084 - DNA, 15 bp, Homo sapiens
tgggactacaggtcc

SEQ ID NO: 565085 - DNA, 15 bp, Homo sapiens
ctgggactacaggtc

SEQ ID NO: 565086 - DNA, 15 bp, Homo sapiens
agagtagctgggact

SEQ ID NO: 565087 - DNA, 15 bp, Homo sapiens
cagagtagctgggac

SEQ ID NO: 565088 - DNA, 15 bp, Homo sapiens
ccagagtagctggga

SEQ ID NO: 565089 - DNA, 15 bp, Homo sapiens
tccagagtagctggg

SEQ ID NO: 565090 - DNA, 15 bp, Homo sapiens
ctccagagtagctgg

SEQ ID NO: 565091 - DNA, 15 bp, Homo sapiens
cctccagagtagctg

SEQ ID NO: 565092 - DNA, 15 bp, Homo sapiens
gcctccagagtagct

SEQ ID NO: 565093 - DNA, 15 bp, Homo sapiens
agcctccagagtagc

SEQ ID NO: 565094 - DNA, 15 bp, Homo sapiens
cagcctccagagtag

SEQ ID NO: 565095 - DNA, 15 bp, Homo sapiens
tcagcctccagagta

SEQ ID NO: 565096 - DNA, 15 bp, Homo sapiens
ctcagcctccagagt

SEQ ID NO: 565097 - DNA, 15 bp, Homo sapiens
cctcagcctccagag

SEQ ID NO: 565098 - DNA, 15 bp, Homo sapiens
acctcagcctccaga

SEQ ID NO: 565099 - DNA, 15 bp, Homo sapiens
cacctcagcctccag

SEQ ID NO: 565100 - DNA, 15 bp, Homo sapiens
ccacctcagcctcca

SEQ ID NO: 565101 - DNA, 15 bp, Homo sapiens
tcccacctcagcctc

SEQ ID NO: 565102 - DNA, 15 bp, Homo sapiens
ctcccacctcagcct

SEQ ID NO: 565103 - DNA, 15 bp, Homo sapiens
cctcccacctcagcc

SEQ ID NO: 565104 - DNA, 15 bp, Homo sapiens
tcctcccacctcagc

SEQ ID NO: 565105 - DNA, 15 bp, Homo sapiens
atcctcccacctcag

SEQ ID NO: 565106 - DNA, 15 bp, Homo sapiens
catcctcccacctca

SEQ ID NO: 565107 - DNA, 15 bp, Homo sapiens
ccatcctcccacctc

SEQ ID NO: 565108 - DNA, 15 bp, Homo sapiens
tggatttggtgccag

SEQ ID NO: 565109 - DNA, 15 bp, Homo sapiens
ttggatttggtgcca

SEQ ID NO: 565110 - DNA, 15 bp, Homo sapiens
gttggatttggtgcc

SEQ ID NO: 565111 - DNA, 15 bp, Homo sapiens
agttggatttggtgc

SEQ ID NO: 565112 - DNA, 15 bp, Homo sapiens
tagttggatttggtg

SEQ ID NO: 565113 - DNA, 15 bp, Homo sapiens
gtagttggatttggt

SEQ ID NO: 565114 - DNA, 15 bp, Homo sapiens
tgtagttggatttgg

SEQ ID NO: 565115 - DNA, 15 bp, Homo sapiens
ttgtagttggatttg

SEQ ID NO: 565116 - DNA, 15 bp, Homo sapiens
cttgtagttggattt

SEQ ID NO: 565117 - DNA, 15 bp, Homo sapiens
gcttgtagttggatt

SEQ ID NO: 565118 - DNA, 15 bp, Homo sapiens
tgcttgtagttggat

SEQ ID NO: 565119 - DNA, 15 bp, Homo sapiens
atgcttgtagttgga

SEQ ID NO: 565120 - DNA, 15 bp, Homo sapiens
tatgcttgtagttgg

SEQ ID NO: 565121 - DNA, 15 bp, Homo sapiens
gtatgcttgtagttg

SEQ ID NO: 565122 - DNA, 15 bp, Homo sapiens
tgtatgcttgtagtt

SEQ ID NO: 565123 - DNA, 15 bp, Homo sapiens
ctgtatgcttgtagt

SEQ ID NO: 565124 - DNA, 15 bp, Homo sapiens
actgtatgcttgtag

SEQ ID NO: 565125 - DNA, 15 bp, Homo sapiens
cactgtatgcttgta

SEQ ID NO: 565126 - DNA, 15 bp, Homo sapiens
tcactgtatgcttgt

SEQ ID NO: 565127 - DNA, 15 bp, Homo sapiens
gtcactgtatgcttg

SEQ ID NO: 565128 - DNA, 15 bp, Homo sapiens
ggtcactgtatgctt

SEQ ID NO: 565129 - DNA, 15 bp, Homo sapiens
tggtcactgtatgct

SEQ ID NO: 565130 - DNA, 15 bp, Homo sapiens
gtggtcactgtatgc

SEQ ID NO: 565131 - DNA, 15 bp, Homo sapiens
agtggtcactgtatg

SEQ ID NO: 565132 - DNA, 15 bp, Homo sapiens
aagtggtcactgtat

SEQ ID NO: 565133 - DNA, 15 bp, Homo sapiens
gaagtggtcactgta

SEQ ID NO: 565134 - DNA, 15 bp, Homo sapiens
tgaagtggtcactgt

SEQ ID NO: 565135 - DNA, 15 bp, Homo sapiens
atgaagtggtcactg

SEQ ID NO: 565136 - DNA, 15 bp, Homo sapiens
tatgaagtggtcact

SEQ ID NO: 565137 - DNA, 15 bp, Homo sapiens
gtatgaagtggtcac

SEQ ID NO: 565138 - DNA, 15 bp, Homo sapiens
tgtatgaagtggtca

SEQ ID NO: 565139 - DNA, 15 bp, Homo sapiens
gtgtatgaagtggtc

SEQ ID NO: 565140 - DNA, 15 bp, Homo sapiens
tgtgtatgaagtggt

SEQ ID NO: 565141 - DNA, 15 bp, Homo sapiens
gtgtgtatgaagtgg

SEQ ID NO: 565142 - DNA, 15 bp, Homo sapiens
ggtgtgtatgaagtg

SEQ ID NO: 565143 - DNA, 15 bp, Homo sapiens
tggtgtgtatgaagt

SEQ ID NO: 565144 - DNA, 15 bp, Homo sapiens
gtggtgtgtatgaag

SEQ ID NO: 565145 - DNA, 15 bp, Homo sapiens
tgtggtgtgtatgaa

SEQ ID NO: 565146 - DNA, 15 bp, Homo sapiens
atgtggtgtgtatga

SEQ ID NO: 565147 - DNA, 15 bp, Homo sapiens
tatgtggtgtgtatg

SEQ ID NO: 565148 - DNA, 15 bp, Homo sapiens
ttatgtggtgtgtat

SEQ ID NO: 565149 - DNA, 15 bp, Homo sapiens
tttatgtggtgtgta

SEQ ID NO: 565150 - DNA, 15 bp, Homo sapiens
ttttatgtggtgtgt

SEQ ID NO: 565151 - DNA, 15 bp, Homo sapiens
tttttatgtggtgtg

SEQ ID NO: 565152 - DNA, 15 bp, Homo sapiens
ttttttatgtggtgt

SEQ ID NO: 565153 - DNA, 15 bp, Homo sapiens
attttttatgtggtg

SEQ ID NO: 565154 - DNA, 15 bp, Homo sapiens
tattttttatgtggt

SEQ ID NO: 565155 - DNA, 15 bp, Homo sapiens
gtattttttatgtgg

SEQ ID NO: 565156 - DNA, 15 bp, Homo sapiens
tgtattttttatgtg

SEQ ID NO: 565157 - DNA, 15 bp, Homo sapiens
ttgtattttttatgt

SEQ ID NO: 565158 - DNA, 15 bp, Homo sapiens
tttgtattttttatg

SEQ ID NO: 565159 - DNA, 15 bp, Homo sapiens
ttttgtattttttat

SEQ ID NO: 565160 - DNA, 15 bp, Homo sapiens
tttttgtatttttta

SEQ ID NO: 565161 - DNA, 15 bp, Homo sapiens
gtttttgtatttttt

SEQ ID NO: 565162 - DNA, 15 bp, Homo sapiens
agtttttgtattttt

SEQ ID NO: 565163 - DNA, 15 bp, Homo sapiens
cagtttttgtatttt

SEQ ID NO: 565164 - DNA, 15 bp, Homo sapiens
tcagtttttgtattt

SEQ ID NO: 565165 - DNA, 15 bp, Homo sapiens
ttcagtttttgtatt

SEQ ID NO: 565166 - DNA, 15 bp, Homo sapiens
tttcagtttttgtat

SEQ ID NO: 565167 - DNA, 15 bp, Homo sapiens
ttttcagtttttgta

SEQ ID NO: 565168 - DNA, 15 bp, Homo sapiens
tttttcagtttttgt

SEQ ID NO: 565169 - DNA, 15 bp, Homo sapiens
atttttcagtttttg

SEQ ID NO: 565170 - DNA, 15 bp, Homo sapiens
tatttttcagttttt

SEQ ID NO: 565171 - DNA, 15 bp, Homo sapiens
gtatttttcagtttt

SEQ ID NO: 565172 - DNA, 15 bp, Homo sapiens
agtatttttcagttt

SEQ ID NO: 565173 - DNA, 15 bp, Homo sapiens
tagtatttttcagtt

SEQ ID NO: 565174 - DNA, 15 bp, Homo sapiens
atagtatttttcagt

SEQ ID NO: 565175 - DNA, 15 bp, Homo sapiens
gatagtatttttcag

SEQ ID NO: 565176 - DNA, 15 bp, Homo sapiens
tgatagtatttttca

SEQ ID NO: 565177 - DNA, 15 bp, Homo sapiens
ttgatagtatttttc

SEQ ID NO: 565178 - DNA, 15 bp, Homo sapiens
tttgatagtattttt

SEQ ID NO: 565179 - DNA, 15 bp, Homo sapiens
atttgatagtatttt

SEQ ID NO: 565180 - DNA, 15 bp, Homo sapiens
catttgatagtattt

SEQ ID NO: 565181 - DNA, 15 bp, Homo sapiens
gcatttgatagtatt

SEQ ID NO: 565182 - DNA, 15 bp, Homo sapiens
agcatttgatagtat

SEQ ID NO: 565183 - DNA, 15 bp, Homo sapiens
aagcatttgatagta

SEQ ID NO: 565184 - DNA, 15 bp, Homo sapiens
aaagcatttgatagt

SEQ ID NO: 565185 - DNA, 15 bp, Homo sapiens
caaagcatttgatag

SEQ ID NO: 565186 - DNA, 15 bp, Homo sapiens
tcaaagcatttgata

SEQ ID NO: 565187 - DNA, 15 bp, Homo sapiens
gtcaaagcatttgat

SEQ ID NO: 565188 - DNA, 15 bp, Homo sapiens
tgtcaaagcatttga

SEQ ID NO: 565189 - DNA, 15 bp, Homo sapiens
atgtcaaagcatttg

SEQ ID NO: 565190 - DNA, 15 bp, Homo sapiens
aatgtcaaagcattt

SEQ ID NO: 565191 - DNA, 15 bp, Homo sapiens
aaatgtcaaagcatt

SEQ ID NO: 565192 - DNA, 15 bp, Homo sapiens
aaaatgtcaaagcat

SEQ ID NO: 565193 - DNA, 15 bp, Homo sapiens
gaaaatgtcaaagca

SEQ ID NO: 565194 - DNA, 15 bp, Homo sapiens
agaaaatgtcaaagc

SEQ ID NO: 565195 - DNA, 15 bp, Homo sapiens
tagaaaatgtcaaag

SEQ ID NO: 565196 - DNA, 15 bp, Homo sapiens
ttagaaaatgtcaaa

SEQ ID NO: 565197 - DNA, 15 bp, Homo sapiens
tttagaaaatgtcaa

SEQ ID NO: 565198 - DNA, 15 bp, Homo sapiens
atttagaaaatgtca

SEQ ID NO: 565199 - DNA, 15 bp, Homo sapiens
tatttagaaaatgtc

SEQ ID NO: 565200 - DNA, 15 bp, Homo sapiens
atatttagaaaatgt

SEQ ID NO: 565201 - DNA, 15 bp, Homo sapiens
aatatttagaaaatg

SEQ ID NO: 565202 - DNA, 15 bp, Homo sapiens
aaatatttagaaaat

SEQ ID NO: 565203 - DNA, 15 bp, Homo sapiens
gaaatatttagaaaa

SEQ ID NO: 565204 - DNA, 15 bp, Homo sapiens
agaaatatttagaaa

SEQ ID NO: 565205 - DNA, 15 bp, Homo sapiens
cagaaatatttagaa

SEQ ID NO: 565206 - DNA, 15 bp, Homo sapiens
gcagaaatatttaga

SEQ ID NO: 565207 - DNA, 15 bp, Homo sapiens
agcagaaatatttag

SEQ ID NO: 565208 - DNA, 15 bp, Homo sapiens
cagcagaaatattta

SEQ ID NO: 565209 - DNA, 15 bp, Homo sapiens
gcagcagaaatattt

SEQ ID NO: 565210 - DNA, 15 bp, Homo sapiens
ggcagcagaaatatt

SEQ ID NO: 565211 - DNA, 15 bp, Homo sapiens
gggcagcagaaatat

SEQ ID NO: 565212 - DNA, 15 bp, Homo sapiens
ggggcagcagaaata

SEQ ID NO: 565213 - DNA, 15 bp, Homo sapiens
aggggcagcagaaat

SEQ ID NO: 565214 - DNA, 15 bp, Homo sapiens
taggggcagcagaaa

SEQ ID NO: 565215 - DNA, 15 bp, Homo sapiens
ataggggcagcagaa

SEQ ID NO: 565216 - DNA, 15 bp, Homo sapiens
tataggggcagcaga

SEQ ID NO: 565217 - DNA, 15 bp, Homo sapiens
ttataggggcagcag

SEQ ID NO: 565218 - DNA, 15 bp, Homo sapiens
tttataggggcagca

SEQ ID NO: 565219 - DNA, 15 bp, Homo sapiens
ttttataggggcagc

SEQ ID NO: 565220 - DNA, 15 bp, Homo sapiens
attttataggggcag

SEQ ID NO: 565221 - DNA, 15 bp, Homo sapiens
aattttataggggca

SEQ ID NO: 565222 - DNA, 15 bp, Homo sapiens
caattttataggggc

SEQ ID NO: 565223 - DNA, 15 bp, Homo sapiens
gcaattttatagggg

SEQ ID NO: 565224 - DNA, 15 bp, Homo sapiens
ggcaattttataggg

SEQ ID NO: 565225 - DNA, 15 bp, Homo sapiens
aggcaattttatagg

SEQ ID NO: 565226 - DNA, 15 bp, Homo sapiens
aaggcaattttatag

SEQ ID NO: 565227 - DNA, 15 bp, Homo sapiens
caaggcaattttata

SEQ ID NO: 565228 - DNA, 15 bp, Homo sapiens
acaaggcaattttat

SEQ ID NO: 565229 - DNA, 15 bp, Homo sapiens
gacaaggcaatttta

SEQ ID NO: 565230 - DNA, 15 bp, Homo sapiens
agacaaggcaatttt

SEQ ID NO: 565231 - DNA, 15 bp, Homo sapiens
cagacaaggcaattt

SEQ ID NO: 565232 - DNA, 15 bp, Homo sapiens
tcagacaaggcaatt

SEQ ID NO: 565233 - DNA, 15 bp, Homo sapiens
gtcagacaaggcaat

SEQ ID NO: 565234 - DNA, 15 bp, Homo sapiens
ggtcagacaaggcaa

SEQ ID NO: 565235 - DNA, 15 bp, Homo sapiens
aggtcagacaaggca

SEQ ID NO: 565236 - DNA, 15 bp, Homo sapiens
aaggtcagacaaggc

SEQ ID NO: 565237 - DNA, 15 bp, Homo sapiens
aaaggtcagacaagg

SEQ ID NO: 565238 - DNA, 15 bp, Homo sapiens
gaaaggtcagacaag

SEQ ID NO: 565239 - DNA, 15 bp, Homo sapiens
ggaaaggtcagacaa

SEQ ID NO: 565240 - DNA, 15 bp, Homo sapiens
aggaaaggtcagaca

SEQ ID NO: 565241 - DNA, 15 bp, Homo sapiens
gaggaaaggtcagac

SEQ ID NO: 565242 - DNA, 15 bp, Homo sapiens
tgaggaaaggtcaga

SEQ ID NO: 565243 - DNA, 15 bp, Homo sapiens
gtgaggaaaggtcag

SEQ ID NO: 565244 - DNA, 15 bp, Homo sapiens
agtgaggaaaggtca

SEQ ID NO: 565245 - DNA, 15 bp, Homo sapiens
tagtgaggaaaggtc

SEQ ID NO: 565246 - DNA, 15 bp, Homo sapiens
ttagtgaggaaaggt

SEQ ID NO: 565247 - DNA, 15 bp, Homo sapiens
gttagtgaggaaagg

SEQ ID NO: 565248 - DNA, 15 bp, Homo sapiens
ggttagtgaggaaag

SEQ ID NO: 565249 - DNA, 15 bp, Homo sapiens
tggttagtgaggaaa

SEQ ID NO: 565250 - DNA, 15 bp, Homo sapiens
ctggttagtgaggaa

SEQ ID NO: 565251 - DNA, 15 bp, Homo sapiens
cctggttagtgagga

SEQ ID NO: 565252 - DNA, 15 bp, Homo sapiens
tcctggttagtgagg

SEQ ID NO: 565253 - DNA, 15 bp, Homo sapiens
ctcctggttagtgag

SEQ ID NO: 565254 - DNA, 15 bp, Homo sapiens
tctcctggttagtga

SEQ ID NO: 565255 - DNA, 15 bp, Homo sapiens
atctcctggttagtg

SEQ ID NO: 565256 - DNA, 15 bp, Homo sapiens
tatctcctggttagt

SEQ ID NO: 565257 - DNA, 15 bp, Homo sapiens
gtatctcctggttag

SEQ ID NO: 565258 - DNA, 15 bp, Homo sapiens
cgtatctcctggtta

SEQ ID NO: 565259 - DNA, 15 bp, Homo sapiens
ccgtatctcctggtt

SEQ ID NO: 565260 - DNA, 15 bp, Homo sapiens
accgtatctcctggt

SEQ ID NO: 565261 - DNA, 15 bp, Homo sapiens
caccgtatctcctgg

SEQ ID NO: 565262 - DNA, 15 bp, Homo sapiens
acaccgtatctcctg

SEQ ID NO: 565263 - DNA, 15 bp, Homo sapiens
aacaccgtatctcct

SEQ ID NO: 565264 - DNA, 15 bp, Homo sapiens
aaacaccgtatctcc

SEQ ID NO: 565265 - DNA, 15 bp, Homo sapiens
aaaacaccgtatctc

SEQ ID NO: 565266 - DNA, 15 bp, Homo sapiens
aaaaacaccgtatct

SEQ ID NO: 565267 - DNA, 15 bp, Homo sapiens
gaaaaacaccgtatc

SEQ ID NO: 565268 - DNA, 15 bp, Homo sapiens
tgaaaaacaccgtat

SEQ ID NO: 565269 - DNA, 15 bp, Homo sapiens
atgaaaaacaccgta

SEQ ID NO: 565270 - DNA, 15 bp, Homo sapiens
aatgaaaaacaccgt

SEQ ID NO: 565271 - DNA, 15 bp, Homo sapiens
aaatgaaaaacaccg

SEQ ID NO: 565272 - DNA, 15 bp, Homo sapiens
gaaatgaaaaacacc

SEQ ID NO: 565273 - DNA, 15 bp, Homo sapiens
ggaaatgaaaaacac

SEQ ID NO: 565274 - DNA, 15 bp, Homo sapiens
aggaaatgaaaaaca

SEQ ID NO: 565275 - DNA, 15 bp, Homo sapiens
gaggaaatgaaaaac

SEQ ID NO: 565276 - DNA, 15 bp, Homo sapiens
agaggaaatgaaaaa

SEQ ID NO: 565277 - DNA, 15 bp, Homo sapiens
gagaggaaatgaaaa

SEQ ID NO: 565278 - DNA, 15 bp, Homo sapiens
ggagaggaaatgaaa

SEQ ID NO: 565279 - DNA, 15 bp, Homo sapiens
gggagaggaaatgaa

SEQ ID NO: 565280 - DNA, 15 bp, Homo sapiens
agggagaggaaatga

SEQ ID NO: 565281 - DNA, 15 bp, Homo sapiens
aagggagaggaaatg

SEQ ID NO: 565282 - DNA, 15 bp, Homo sapiens
gaagggagaggaaat

SEQ ID NO: 565283 - DNA, 15 bp, Homo sapiens
tgaagggagaggaaa

SEQ ID NO: 565284 - DNA, 15 bp, Homo sapiens
ttgaagggagaggaa

SEQ ID NO: 565285 - DNA, 15 bp, Homo sapiens
tttgaagggagagga

SEQ ID NO: 565286 - DNA, 15 bp, Homo sapiens
atttgaagggagagg

SEQ ID NO: 565287 - DNA, 15 bp, Homo sapiens
aatttgaagggagag

SEQ ID NO: 565288 - DNA, 15 bp, Homo sapiens
aaatttgaagggaga

SEQ ID NO: 565289 - DNA, 15 bp, Homo sapiens
aaaatttgaagggag

SEQ ID NO: 565290 - DNA, 15 bp, Homo sapiens
taaaatttgaaggga

SEQ ID NO: 565291 - DNA, 15 bp, Homo sapiens
gtaaaatttgaaggg

SEQ ID NO: 565292 - DNA, 15 bp, Homo sapiens
tgtaaaatttgaagg

SEQ ID NO: 565293 - DNA, 15 bp, Homo sapiens
ttgtaaaatttgaag

SEQ ID NO: 565294 - DNA, 15 bp, Homo sapiens
cttgtaaaatttgaa

SEQ ID NO: 565295 - DNA, 15 bp, Homo sapiens
tcttgtaaaatttga

SEQ ID NO: 565296 - DNA, 15 bp, Homo sapiens
ctcttgtaaaatttg

SEQ ID NO: 565297 - DNA, 15 bp, Homo sapiens
tctcttgtaaaattt

SEQ ID NO: 565298 - DNA, 15 bp, Homo sapiens
ttctcttgtaaaatt

SEQ ID NO: 565299 - DNA, 15 bp, Homo sapiens
attctcttgtaaaat

SEQ ID NO: 565300 - DNA, 15 bp, Homo sapiens
gattctcttgtaaaa

SEQ ID NO: 565301 - DNA, 15 bp, Homo sapiens
tgattctcttgtaaa

SEQ ID NO: 565302 - DNA, 15 bp, Homo sapiens
ttgattctcttgtaa

SEQ ID NO: 565303 - DNA, 15 bp, Homo sapiens
cttgattctcttgta

SEQ ID NO: 565304 - DNA, 15 bp, Homo sapiens
ccttgattctcttgt

SEQ ID NO: 565305 - DNA, 15 bp, Homo sapiens
tccttgattctcttg

SEQ ID NO: 565306 - DNA, 15 bp, Homo sapiens
ttccttgattctctt

SEQ ID NO: 565307 - DNA, 15 bp, Homo sapiens
attccttgattctct

SEQ ID NO: 565308 - DNA, 15 bp, Homo sapiens
aattccttgattctc

SEQ ID NO: 565309 - DNA, 15 bp, Homo sapiens
aaattccttgattct

SEQ ID NO: 565310 - DNA, 15 bp, Homo sapiens
caaattccttgattc

SEQ ID NO: 565311 - DNA, 15 bp, Homo sapiens
tcaaattccttgatt

SEQ ID NO: 565312 - DNA, 15 bp, Homo sapiens
ctcaaattccttgat

SEQ ID NO: 565313 - DNA, 15 bp, Homo sapiens
cctcaaattccttga

SEQ ID NO: 565314 - DNA, 15 bp, Homo sapiens
tcctcaaattccttg

SEQ ID NO: 565315 - DNA, 15 bp, Homo sapiens
gtcctcaaattcctt

SEQ ID NO: 565316 - DNA, 15 bp, Homo sapiens
ggtcctcaaattcct

SEQ ID NO: 565317 - DNA, 15 bp, Homo sapiens
tggtcctcaaattcc

SEQ ID NO: 565318 - DNA, 15 bp, Homo sapiens
ttggtcctcaaattc

SEQ ID NO: 565319 - DNA, 15 bp, Homo sapiens
tttggtcctcaaatt

SEQ ID NO: 565320 - DNA, 15 bp, Homo sapiens
ctttggtcctcaaat

SEQ ID NO: 565321 - DNA, 15 bp, Homo sapiens
gctttggtcctcaaa

SEQ ID NO: 565322 - DNA, 15 bp, Homo sapiens
tgctttggtcctcaa

SEQ ID NO: 565323 - DNA, 15 bp, Homo sapiens
gtgctttggtcctca

SEQ ID NO: 565324 - DNA, 15 bp, Homo sapiens
ggtgctttggtcctc

SEQ ID NO: 565325 - DNA, 15 bp, Homo sapiens
tggtgctttggtcct

SEQ ID NO: 565326 - DNA, 15 bp, Homo sapiens
gtggtgctttggtcc

SEQ ID NO: 565327 - DNA, 15 bp, Homo sapiens
tgtggtgctttggtc

SEQ ID NO: 565328 - DNA, 15 bp, Homo sapiens
ttgtggtgctttggt

SEQ ID NO: 565329 - DNA, 15 bp, Homo sapiens
tttgtggtgctttgg

SEQ ID NO: 565330 - DNA, 15 bp, Homo sapiens
gtttgtggtgctttg

SEQ ID NO: 565331 - DNA, 15 bp, Homo sapiens
tgtttgtggtgcttt

SEQ ID NO: 565332 - DNA, 15 bp, Homo sapiens
gtgtttgtggtgctt

SEQ ID NO: 565333 - DNA, 15 bp, Homo sapiens
tgtgtttgtggtgct

SEQ ID NO: 565334 - DNA, 15 bp, Homo sapiens
ttgtgtttgtggtgc

SEQ ID NO: 565335 - DNA, 15 bp, Homo sapiens
cttgtgtttgtggtg

SEQ ID NO: 565336 - DNA, 15 bp, Homo sapiens
tcttgtgtttgtggt

SEQ ID NO: 565337 - DNA, 15 bp, Homo sapiens
ctcttgtgtttgtgg

SEQ ID NO: 565338 - DNA, 15 bp, Homo sapiens
actcttgtgtttgtg

SEQ ID NO: 565339 - DNA, 15 bp, Homo sapiens
tactcttgtgtttgt

SEQ ID NO: 565340 - DNA, 15 bp, Homo sapiens
ttactcttgtgtttg

SEQ ID NO: 565341 - DNA, 15 bp, Homo sapiens
cttactcttgtgttt

SEQ ID NO: 565342 - DNA, 15 bp, Homo sapiens
gcttactcttgtgtt

SEQ ID NO: 565343 - DNA, 15 bp, Homo sapiens
tgcttactcttgtgt

SEQ ID NO: 565344 - DNA, 15 bp, Homo sapiens
gtgcttactcttgtg

SEQ ID NO: 565345 - DNA, 15 bp, Homo sapiens
tgtgcttactcttgt

SEQ ID NO: 565346 - DNA, 15 bp, Homo sapiens
ctgtgcttactcttg

SEQ ID NO: 565347 - DNA, 15 bp, Homo sapiens
gctgtgcttactctt

SEQ ID NO: 565348 - DNA, 15 bp, Homo sapiens
tgctgtgcttactct

SEQ ID NO: 565349 - DNA, 15 bp, Homo sapiens
ttgctgtgcttactc

SEQ ID NO: 565350 - DNA, 15 bp, Homo sapiens
tttgctgtgcttact

SEQ ID NO: 565351 - DNA, 15 bp, Homo sapiens
atttgctgtgcttac

SEQ ID NO: 565352 - DNA, 15 bp, Homo sapiens
tatttgctgtgctta

SEQ ID NO: 565353 - DNA, 15 bp, Homo sapiens
atatttgctgtgctt

SEQ ID NO: 565354 - DNA, 15 bp, Homo sapiens
catatttgctgtgct

SEQ ID NO: 565355 - DNA, 15 bp, Homo sapiens
tcatatttgctgtgc

SEQ ID NO: 565356 - DNA, 15 bp, Homo sapiens
gtcatatttgctgtg

SEQ ID NO: 565357 - DNA, 15 bp, Homo sapiens
tgtcatatttgctgt

SEQ ID NO: 565358 - DNA, 15 bp, Homo sapiens
ttgtcatatttgctg

SEQ ID NO: 565359 - DNA, 15 bp, Homo sapiens
cttgtcatatttgct

SEQ ID NO: 565360 - DNA, 15 bp, Homo sapiens
ccttgtcatatttgc

SEQ ID NO: 565361 - DNA, 15 bp, Homo sapiens
cccttgtcatatttg

SEQ ID NO: 565362 - DNA, 15 bp, Homo sapiens
ccccttgtcatattt

SEQ ID NO: 565363 - DNA, 15 bp, Homo sapiens
tccccttgtcatatt

SEQ ID NO: 565364 - DNA, 15 bp, Homo sapiens
gtccccttgtcatat

SEQ ID NO: 565365 - DNA, 15 bp, Homo sapiens
agtccccttgtcata

SEQ ID NO: 565366 - DNA, 15 bp, Homo sapiens
cagtccccttgtcat

SEQ ID NO: 565367 - DNA, 15 bp, Homo sapiens
tcagtccccttgtca

SEQ ID NO: 565368 - DNA, 15 bp, Homo sapiens
ttcagtccccttgtc

SEQ ID NO: 565369 - DNA, 15 bp, Homo sapiens
cttcagtccccttgt

SEQ ID NO: 565370 - DNA, 15 bp, Homo sapiens
acttcagtccccttg

SEQ ID NO: 565371 - DNA, 15 bp, Homo sapiens
tacttcagtcccctt

SEQ ID NO: 565372 - DNA, 15 bp, Homo sapiens
ttacttcagtcccct

SEQ ID NO: 565373 - DNA, 15 bp, Homo sapiens
cttacttcagtcccc

SEQ ID NO: 565374 - DNA, 15 bp, Homo sapiens
gcttacttcagtccc

SEQ ID NO: 565375 - DNA, 15 bp, Homo sapiens
ggcttacttcagtcc

SEQ ID NO: 565376 - DNA, 15 bp, Homo sapiens
gggcttacttcagtc

SEQ ID NO: 565377 - DNA, 15 bp, Homo sapiens
ggggcttacttcagt

SEQ ID NO: 565378 - DNA, 15 bp, Homo sapiens
aggggcttacttcag

SEQ ID NO: 565379 - DNA, 15 bp, Homo sapiens
taggggcttacttca

SEQ ID NO: 565380 - DNA, 15 bp, Homo sapiens
ataggggcttacttc

SEQ ID NO: 565381 - DNA, 15 bp, Homo sapiens
cataggggcttactt

SEQ ID NO: 565382 - DNA, 15 bp, Homo sapiens
ccataggggcttact

SEQ ID NO: 565383 - DNA, 15 bp, Homo sapiens
cccataggggcttac

SEQ ID NO: 565384 - DNA, 15 bp, Homo sapiens
tcccataggggctta

SEQ ID NO: 565385 - DNA, 15 bp, Homo sapiens
ttcccataggggctt

SEQ ID NO: 565386 - DNA, 15 bp, Homo sapiens
attcccataggggct

SEQ ID NO: 565387 - DNA, 15 bp, Homo sapiens
tattcccataggggc

SEQ ID NO: 565388 - DNA, 15 bp, Homo sapiens
ctattcccatagggg

SEQ ID NO: 565389 - DNA, 15 bp, Homo sapiens
cctattcccataggg

SEQ ID NO: 565390 - DNA, 15 bp, Homo sapiens
tcctattcccatagg

SEQ ID NO: 565391 - DNA, 15 bp, Homo sapiens
atcctattcccatag

SEQ ID NO: 565392 - DNA, 15 bp, Homo sapiens
gatcctattcccata

SEQ ID NO: 565393 - DNA, 15 bp, Homo sapiens
agatcctattcccat

SEQ ID NO: 565394 - DNA, 15 bp, Homo sapiens
cagatcctattccca

SEQ ID NO: 565395 - DNA, 15 bp, Homo sapiens
gcagatcctattccc

SEQ ID NO: 565396 - DNA, 15 bp, Homo sapiens
agcagatcctattcc

SEQ ID NO: 565397 - DNA, 15 bp, Homo sapiens
cagcagatcctattc

SEQ ID NO: 565398 - DNA, 15 bp, Homo sapiens
tcagcagatcctatt

SEQ ID NO: 565399 - DNA, 15 bp, Homo sapiens
ttcagcagatcctat

SEQ ID NO: 565400 - DNA, 15 bp, Homo sapiens
cttcagcagatccta

SEQ ID NO: 565401 - DNA, 15 bp, Homo sapiens
ccttcagcagatcct

SEQ ID NO: 565402 - DNA, 15 bp, Homo sapiens
tccttcagcagatcc

SEQ ID NO: 565403 - DNA, 15 bp, Homo sapiens
ttccttcagcagatc

SEQ ID NO: 565404 - DNA, 15 bp, Homo sapiens
attccttcagcagat

SEQ ID NO: 565405 - DNA, 15 bp, Homo sapiens
gattccttcagcaga

SEQ ID NO: 565406 - DNA, 15 bp, Homo sapiens
tgattccttcagcag

SEQ ID NO: 565407 - DNA, 15 bp, Homo sapiens
ttgattccttcagca

SEQ ID NO: 565408 - DNA, 15 bp, Homo sapiens
cttgattccttcagc

SEQ ID NO: 565409 - DNA, 15 bp, Homo sapiens
tcttgattccttcag

SEQ ID NO: 565410 - DNA, 15 bp, Homo sapiens
ctcttgattccttca

SEQ ID NO: 565411 - DNA, 15 bp, Homo sapiens
cctcttgattccttc

SEQ ID NO: 565412 - DNA, 15 bp, Homo sapiens
ccctcttgattcctt

SEQ ID NO: 565413 - DNA, 15 bp, Homo sapiens
tccctcttgattcct

SEQ ID NO: 565414 - DNA, 15 bp, Homo sapiens
atccctcttgattcc

SEQ ID NO: 565415 - DNA, 15 bp, Homo sapiens
catccctcttgattc

SEQ ID NO: 565416 - DNA, 15 bp, Homo sapiens
ccatccctcttgatt

SEQ ID NO: 565417 - DNA, 15 bp, Homo sapiens
tccatccctcttgat

SEQ ID NO: 565418 - DNA, 15 bp, Homo sapiens
gtccatccctcttga

SEQ ID NO: 565419 - DNA, 15 bp, Homo sapiens
tgtccatccctcttg

SEQ ID NO: 565420 - DNA, 15 bp, Homo sapiens
ttgtccatccctctt

SEQ ID NO: 565421 - DNA, 15 bp, Homo sapiens
tttgtccatccctct

SEQ ID NO: 565422 - DNA, 15 bp, Homo sapiens
ctttgtccatccctc

SEQ ID NO: 565423 - DNA, 15 bp, Homo sapiens
cctttgtccatccct

SEQ ID NO: 565424 - DNA, 15 bp, Homo sapiens
tcctttgtccatccc

SEQ ID NO: 565425 - DNA, 15 bp, Homo sapiens
ttcctttgtccatcc

SEQ ID NO: 565426 - DNA, 15 bp, Homo sapiens
gttcctttgtccatc

SEQ ID NO: 565427 - DNA, 15 bp, Homo sapiens
tgttcctttgtccat

SEQ ID NO: 565428 - DNA, 15 bp, Homo sapiens
ctgttcctttgtcca

SEQ ID NO: 565429 - DNA, 15 bp, Homo sapiens
tctgttcctttgtcc

SEQ ID NO: 565430 - DNA, 15 bp, Homo sapiens
ttctgttcctttgtc

SEQ ID NO: 565431 - DNA, 15 bp, Homo sapiens
cttctgttcctttgt

SEQ ID NO: 565432 - DNA, 15 bp, Homo sapiens
tcttctgttcctttg

SEQ ID NO: 565433 - DNA, 15 bp, Homo sapiens
gtcttctgttccttt

SEQ ID NO: 565434 - DNA, 15 bp, Homo sapiens
tgtcttctgttcctt

SEQ ID NO: 565435 - DNA, 15 bp, Homo sapiens
gtgtcttctgttcct

SEQ ID NO: 565436 - DNA, 15 bp, Homo sapiens
agtgtcttctgttcc

SEQ ID NO: 565437 - DNA, 15 bp, Homo sapiens
gagtgtcttctgttc

SEQ ID NO: 565438 - DNA, 15 bp, Homo sapiens
tgagtgtcttctgtt

SEQ ID NO: 565439 - DNA, 15 bp, Homo sapiens
ttgagtgtcttctgt

SEQ ID NO: 565440 - DNA, 15 bp, Homo sapiens
cttgagtgtcttctg

SEQ ID NO: 565441 - DNA, 15 bp, Homo sapiens
tcttgagtgtcttct

SEQ ID NO: 565442 - DNA, 15 bp, Homo sapiens
ttcttgagtgtcttc

SEQ ID NO: 565443 - DNA, 15 bp, Homo sapiens
attcttgagtgtctt

SEQ ID NO: 565444 - DNA, 15 bp, Homo sapiens
tattcttgagtgtct

SEQ ID NO: 565445 - DNA, 15 bp, Homo sapiens
ttattcttgagtgtc

SEQ ID NO: 565446 - DNA, 15 bp, Homo sapiens
gttattcttgagtgt

SEQ ID NO: 565447 - DNA, 15 bp, Homo sapiens
agttattcttgagtg

SEQ ID NO: 565448 - DNA, 15 bp, Homo sapiens
aagttattcttgagt

SEQ ID NO: 565449 - DNA, 15 bp, Homo sapiens
gaagttattcttgag

SEQ ID NO: 565450 - DNA, 15 bp, Homo sapiens
tgaagttattcttga

SEQ ID NO: 565451 - DNA, 15 bp, Homo sapiens
ctgaagttattcttg

SEQ ID NO: 565452 - DNA, 15 bp, Homo sapiens
cctgaagttattctt

SEQ ID NO: 565453 - DNA, 15 bp, Homo sapiens
tcctgaagttattct

SEQ ID NO: 565454 - DNA, 15 bp, Homo sapiens
ttcctgaagttattc

SEQ ID NO: 565455 - DNA, 15 bp, Homo sapiens
cttcctgaagttatt

SEQ ID NO: 565456 - DNA, 15 bp, Homo sapiens
acttcctgaagttat

SEQ ID NO: 565457 - DNA, 15 bp, Homo sapiens
gacttcctgaagtta

SEQ ID NO: 565458 - DNA, 15 bp, Homo sapiens
agacttcctgaagtt

SEQ ID NO: 565459 - DNA, 15 bp, Homo sapiens
gagacttcctgaagt

SEQ ID NO: 565460 - DNA, 15 bp, Homo sapiens
ggagacttcctgaag

SEQ ID NO: 565461 - DNA, 15 bp, Homo sapiens
aggagacttcctgaa

SEQ ID NO: 565462 - DNA, 15 bp, Homo sapiens
aaggagacttcctga

SEQ ID NO: 565463 - DNA, 15 bp, Homo sapiens
taaggagacttcctg

SEQ ID NO: 565464 - DNA, 15 bp, Homo sapiens
gtaaggagacttcct

SEQ ID NO: 565465 - DNA, 15 bp, Homo sapiens
ggtaaggagacttcc

SEQ ID NO: 565466 - DNA, 15 bp, Homo sapiens
cggtaaggagacttc

SEQ ID NO: 565467 - DNA, 15 bp, Homo sapiens
gcggtaaggagactt

SEQ ID NO: 565468 - DNA, 15 bp, Homo sapiens
ggcggtaaggagact

SEQ ID NO: 565469 - DNA, 15 bp, Homo sapiens
aggcggtaaggagac

SEQ ID NO: 565470 - DNA, 15 bp, Homo sapiens
gaggcggtaaggaga

SEQ ID NO: 565471 - DNA, 15 bp, Homo sapiens
tgaggcggtaaggag

SEQ ID NO: 565472 - DNA, 15 bp, Homo sapiens
gtgaggcggtaagga

SEQ ID NO: 565473 - DNA, 15 bp, Homo sapiens
ggtgaggcggtaagg

SEQ ID NO: 565474 - DNA, 15 bp, Homo sapiens
aggtgaggcggtaag

SEQ ID NO: 565475 - DNA, 15 bp, Homo sapiens
caggtgaggcggtaa

SEQ ID NO: 565476 - DNA, 15 bp, Homo sapiens
gcaggtgaggcggta

SEQ ID NO: 565477 - DNA, 15 bp, Homo sapiens
agcaggtgaggcggt

SEQ ID NO: 565478 - DNA, 15 bp, Homo sapiens
aagcaggtgaggcgg

SEQ ID NO: 565479 - DNA, 15 bp, Homo sapiens
aaagcaggtgaggcg

SEQ ID NO: 565480 - DNA, 15 bp, Homo sapiens
gaaagcaggtgaggc

SEQ ID NO: 565481 - DNA, 15 bp, Homo sapiens
ggaaagcaggtgagg

SEQ ID NO: 565482 - DNA, 15 bp, Homo sapiens
gggaaagcaggtgag

SEQ ID NO: 565483 - DNA, 15 bp, Homo sapiens
agggaaagcaggtga

SEQ ID NO: 565484 - DNA, 15 bp, Homo sapiens
gagggaaagcaggtg

SEQ ID NO: 565485 - DNA, 15 bp, Homo sapiens
agagggaaagcaggt

SEQ ID NO: 565486 - DNA, 15 bp, Homo sapiens
cagagggaaagcagg

SEQ ID NO: 565487 - DNA, 15 bp, Homo sapiens
acagagggaaagcag

SEQ ID NO: 565488 - DNA, 15 bp, Homo sapiens
gacagagggaaagca

SEQ ID NO: 565489 - DNA, 15 bp, Homo sapiens
ggacagagggaaagc

SEQ ID NO: 565490 - DNA, 15 bp, Homo sapiens
aggacagagggaaag

SEQ ID NO: 565491 - DNA, 15 bp, Homo sapiens
taggacagagggaaa

SEQ ID NO: 565492 - DNA, 15 bp, Homo sapiens
gtaggacagagggaa

SEQ ID NO: 565493 - DNA, 15 bp, Homo sapiens
tgtaggacagaggga

SEQ ID NO: 565494 - DNA, 15 bp, Homo sapiens
gtgtaggacagaggg

SEQ ID NO: 565495 - DNA, 15 bp, Homo sapiens
tgtgtaggacagagg

SEQ ID NO: 565496 - DNA, 15 bp, Homo sapiens
atgtgtaggacagag

SEQ ID NO: 565497 - DNA, 15 bp, Homo sapiens
gatgtgtaggacaga

SEQ ID NO: 565498 - DNA, 15 bp, Homo sapiens
ggatgtgtaggacag

SEQ ID NO: 565499 - DNA, 15 bp, Homo sapiens
tggatgtgtaggaca

SEQ ID NO: 565500 - DNA, 15 bp, Homo sapiens
ctggatgtgtaggac

SEQ ID NO: 565501 - DNA, 15 bp, Homo sapiens
gctggatgtgtagga

SEQ ID NO: 565502 - DNA, 15 bp, Homo sapiens
ggctggatgtgtagg

SEQ ID NO: 565503 - DNA, 15 bp, Homo sapiens
aggctggatgtgtag

SEQ ID NO: 565504 - DNA, 15 bp, Homo sapiens
aaggctggatgtgta

SEQ ID NO: 565505 - DNA, 15 bp, Homo sapiens
caaggctggatgtgt

SEQ ID NO: 565506 - DNA, 15 bp, Homo sapiens
gcaaggctggatgtg

SEQ ID NO: 565507 - DNA, 15 bp, Homo sapiens
tgcaaggctggatgt

SEQ ID NO: 565508 - DNA, 15 bp, Homo sapiens
ttgcaaggctggatg

SEQ ID NO: 565509 - DNA, 15 bp, Homo sapiens
tttgcaaggctggat

SEQ ID NO: 565510 - DNA, 15 bp, Homo sapiens
ctttgcaaggctgga

SEQ ID NO: 565511 - DNA, 15 bp, Homo sapiens
tctttgcaaggctgg

SEQ ID NO: 565512 - DNA, 15 bp, Homo sapiens
ttctttgcaaggctg

SEQ ID NO: 565513 - DNA, 15 bp, Homo sapiens
tttctttgcaaggct

SEQ ID NO: 565514 - DNA, 15 bp, Homo sapiens
atttctttgcaaggc

SEQ ID NO: 565515 - DNA, 15 bp, Homo sapiens
tatttctttgcaagg

SEQ ID NO: 565516 - DNA, 15 bp, Homo sapiens
ttatttctttgcaag

SEQ ID NO: 565517 - DNA, 15 bp, Homo sapiens
cttatttctttgcaa

SEQ ID NO: 565518 - DNA, 15 bp, Homo sapiens
tcttatttctttgca

SEQ ID NO: 565519 - DNA, 15 bp, Homo sapiens
ctcttatttctttgc

SEQ ID NO: 565520 - DNA, 15 bp, Homo sapiens
actcttatttctttg

SEQ ID NO: 565521 - DNA, 15 bp, Homo sapiens
tactcttatttcttt

SEQ ID NO: 565522 - DNA, 15 bp, Homo sapiens
ttactcttatttctt

SEQ ID NO: 565523 - DNA, 15 bp, Homo sapiens
tttactcttatttct

SEQ ID NO: 565524 - DNA, 15 bp, Homo sapiens
ctttactcttatttc

SEQ ID NO: 565525 - DNA, 15 bp, Homo sapiens
tctttactcttattt

SEQ ID NO: 565526 - DNA, 15 bp, Homo sapiens
ctctttactcttatt

SEQ ID NO: 565527 - DNA, 15 bp, Homo sapiens
tctctttactcttat

SEQ ID NO: 565528 - DNA, 15 bp, Homo sapiens
ttctctttactctta

SEQ ID NO: 565529 - DNA, 15 bp, Homo sapiens
tttctctttactctt

SEQ ID NO: 565530 - DNA, 15 bp, Homo sapiens
ttttctctttactct

SEQ ID NO: 565531 - DNA, 15 bp, Homo sapiens
cttttctctttactc

SEQ ID NO: 565532 - DNA, 15 bp, Homo sapiens
acttttctctttact

SEQ ID NO: 565533 - DNA, 15 bp, Homo sapiens
gacttttctctttac

SEQ ID NO: 565534 - DNA, 15 bp, Homo sapiens
ggacttttctcttta

SEQ ID NO: 565535 - DNA, 15 bp, Homo sapiens
tggacttttctcttt

SEQ ID NO: 565536 - DNA, 15 bp, Homo sapiens
atggacttttctctt

SEQ ID NO: 565537 - DNA, 15 bp, Homo sapiens
catggacttttctct

SEQ ID NO: 565538 - DNA, 15 bp, Homo sapiens
acatggacttttctc

SEQ ID NO: 565539 - DNA, 15 bp, Homo sapiens
tacatggacttttct

SEQ ID NO: 565540 - DNA, 15 bp, Homo sapiens
ctacatggacttttc

SEQ ID NO: 565541 - DNA, 15 bp, Homo sapiens
gctacatggactttt

SEQ ID NO: 565542 - DNA, 15 bp, Homo sapiens
tgctacatggacttt

SEQ ID NO: 565543 - DNA, 15 bp, Homo sapiens
gtgctacatggactt

SEQ ID NO: 565544 - DNA, 15 bp, Homo sapiens
ggtgctacatggact

SEQ ID NO: 565545 - DNA, 15 bp, Homo sapiens
tggtgctacatggac

SEQ ID NO: 565546 - DNA, 15 bp, Homo sapiens
atggtgctacatgga

SEQ ID NO: 565547 - DNA, 15 bp, Homo sapiens
gatggtgctacatgg

SEQ ID NO: 565548 - DNA, 15 bp, Homo sapiens
ggatggtgctacatg

SEQ ID NO: 565549 - DNA, 15 bp, Homo sapiens
gggatggtgctacat

SEQ ID NO: 565550 - DNA, 15 bp, Homo sapiens
tgggatggtgctaca

SEQ ID NO: 565551 - DNA, 15 bp, Homo sapiens
ctgggatggtgctac

SEQ ID NO: 565552 - DNA, 15 bp, Homo sapiens
actgggatggtgcta

SEQ ID NO: 565553 - DNA, 15 bp, Homo sapiens
aactgggatggtgct

SEQ ID NO: 565554 - DNA, 15 bp, Homo sapiens
gaactgggatggtgc

SEQ ID NO: 565555 - DNA, 15 bp, Homo sapiens
tgaactgggatggtg

SEQ ID NO: 565556 - DNA, 15 bp, Homo sapiens
ctgaactgggatggt

SEQ ID NO: 565557 - DNA, 15 bp, Homo sapiens
tctgaactgggatgg

SEQ ID NO: 565558 - DNA, 15 bp, Homo sapiens
ttctgaactgggatg

SEQ ID NO: 565559 - DNA, 15 bp, Homo sapiens
cttctgaactgggat

SEQ ID NO: 565560 - DNA, 15 bp, Homo sapiens
gcttctgaactggga

SEQ ID NO: 565561 - DNA, 15 bp, Homo sapiens
tgcttctgaactggg

SEQ ID NO: 565562 - DNA, 15 bp, Homo sapiens
ttgcttctgaactgg

SEQ ID NO: 565563 - DNA, 15 bp, Homo sapiens
gttgcttctgaactg

SEQ ID NO: 565564 - DNA, 15 bp, Homo sapiens
ggttgcttctgaact

SEQ ID NO: 565565 - DNA, 15 bp, Homo sapiens
gggttgcttctgaac

SEQ ID NO: 565566 - DNA, 15 bp, Homo sapiens
ggggttgcttctgaa

SEQ ID NO: 565567 - DNA, 15 bp, Homo sapiens
gggggttgcttctga

SEQ ID NO: 565568 - DNA, 15 bp, Homo sapiens
tgggggttgcttctg

SEQ ID NO: 565569 - DNA, 15 bp, Homo sapiens
ttgggggttgcttct

SEQ ID NO: 565570 - DNA, 15 bp, Homo sapiens
cttgggggttgcttc

SEQ ID NO: 565571 - DNA, 15 bp, Homo sapiens
tcttgggggttgctt

SEQ ID NO: 565572 - DNA, 15 bp, Homo sapiens
atcttgggggttgct

SEQ ID NO: 565573 - DNA, 15 bp, Homo sapiens
tatcttgggggttgc

SEQ ID NO: 565574 - DNA, 15 bp, Homo sapiens
atatcttgggggttg

SEQ ID NO: 565575 - DNA, 15 bp, Homo sapiens
catatcttgggggtt

SEQ ID NO: 565576 - DNA, 15 bp, Homo sapiens
ccatatcttgggggt

SEQ ID NO: 565577 - DNA, 15 bp, Homo sapiens
cccatatcttggggg

SEQ ID NO: 565578 - DNA, 15 bp, Homo sapiens
acccatatcttgggg

SEQ ID NO: 565579 - DNA, 15 bp, Homo sapiens
gacccatatcttggg

SEQ ID NO: 565580 - DNA, 15 bp, Homo sapiens
tgacccatatcttgg

SEQ ID NO: 565581 - DNA, 15 bp, Homo sapiens
ttgacccatatcttg

SEQ ID NO: 565582 - DNA, 15 bp, Homo sapiens
gttgacccatatctt

SEQ ID NO: 565583 - DNA, 15 bp, Homo sapiens
agttgacccatatct

SEQ ID NO: 565584 - DNA, 15 bp, Homo sapiens
aagttgacccatatc

SEQ ID NO: 565585 - DNA, 15 bp, Homo sapiens
aaagttgacccatat

SEQ ID NO: 565586 - DNA, 15 bp, Homo sapiens
taaagttgacccata

SEQ ID NO: 565587 - DNA, 15 bp, Homo sapiens
ataaagttgacccat

SEQ ID NO: 565588 - DNA, 15 bp, Homo sapiens
gataaagttgaccca

SEQ ID NO: 565589 - DNA, 15 bp, Homo sapiens
tgataaagttgaccc

SEQ ID NO: 565590 - DNA, 15 bp, Homo sapiens
gtgataaagttgacc

SEQ ID NO: 565591 - DNA, 15 bp, Homo sapiens
ggtgataaagttgac

SEQ ID NO: 565592 - DNA, 15 bp, Homo sapiens
aggtgataaagttga

SEQ ID NO: 565593 - DNA, 15 bp, Homo sapiens
gaggtgataaagttg

SEQ ID NO: 565594 - DNA, 15 bp, Homo sapiens
tgaggtgataaagtt

SEQ ID NO: 565595 - DNA, 15 bp, Homo sapiens
ttgaggtgataaagt

SEQ ID NO: 565596 - DNA, 15 bp, Homo sapiens
tttgaggtgataaag

SEQ ID NO: 565597 - DNA, 15 bp, Homo sapiens
gtttgaggtgataaa

SEQ ID NO: 565598 - DNA, 15 bp, Homo sapiens
agtttgaggtgataa

SEQ ID NO: 565599 - DNA, 15 bp, Homo sapiens
gagtttgaggtgata

SEQ ID NO: 565600 - DNA, 15 bp, Homo sapiens
agagtttgaggtgat

SEQ ID NO: 565601 - DNA, 15 bp, Homo sapiens
tagagtttgaggtga

SEQ ID NO: 565602 - DNA, 15 bp, Homo sapiens
gtagagtttgaggtg

SEQ ID NO: 565603 - DNA, 15 bp, Homo sapiens
agtagagtttgaggt

SEQ ID NO: 565604 - DNA, 15 bp, Homo sapiens
gagtagagtttgagg

SEQ ID NO: 565605 - DNA, 15 bp, Homo sapiens
tgagtagagtttgag

SEQ ID NO: 565606 - DNA, 15 bp, Homo sapiens
atgagtagagtttga

SEQ ID NO: 565607 - DNA, 15 bp, Homo sapiens
aatgagtagagtttg

SEQ ID NO: 565608 - DNA, 15 bp, Homo sapiens
aaatgagtagagttt

SEQ ID NO: 565609 - DNA, 15 bp, Homo sapiens
taaatgagtagagtt

SEQ ID NO: 565610 - DNA, 15 bp, Homo sapiens
ataaatgagtagagt

SEQ ID NO: 565611 - DNA, 15 bp, Homo sapiens
tataaatgagtagag

SEQ ID NO: 565612 - DNA, 15 bp, Homo sapiens
ttataaatgagtaga

SEQ ID NO: 565613 - DNA, 15 bp, Homo sapiens
attataaatgagtag

SEQ ID NO: 565614 - DNA, 15 bp, Homo sapiens
cattataaatgagta

SEQ ID NO: 565615 - DNA, 15 bp, Homo sapiens
tcattataaatgagt

SEQ ID NO: 565616 - DNA, 15 bp, Homo sapiens
gtcattataaatgag

SEQ ID NO: 565617 - DNA, 15 bp, Homo sapiens
tgtcattataaatga

SEQ ID NO: 565618 - DNA, 15 bp, Homo sapiens
ttgtcattataaatg

SEQ ID NO: 565619 - DNA, 15 bp, Homo sapiens
tttgtcattataaat

SEQ ID NO: 565620 - DNA, 15 bp, Homo sapiens
ttttgtcattataaa

SEQ ID NO: 565621 - DNA, 15 bp, Homo sapiens
attttgtcattataa

SEQ ID NO: 565622 - DNA, 15 bp, Homo sapiens
aattttgtcattata

SEQ ID NO: 565623 - DNA, 15 bp, Homo sapiens
gaattttgtcattat

SEQ ID NO: 565624 - DNA, 15 bp, Homo sapiens
tgaattttgtcatta

SEQ ID NO: 565625 - DNA, 15 bp, Homo sapiens
ttgaattttgtcatt

SEQ ID NO: 565626 - DNA, 15 bp, Homo sapiens
gttgaattttgtcat

SEQ ID NO: 565627 - DNA, 15 bp, Homo sapiens
agttgaattttgtca

SEQ ID NO: 565628 - DNA, 15 bp, Homo sapiens
cagttgaattttgtc

SEQ ID NO: 565629 - DNA, 15 bp, Homo sapiens
acagttgaattttgt

SEQ ID NO: 565630 - DNA, 15 bp, Homo sapiens
aacagttgaattttg

SEQ ID NO: 565631 - DNA, 15 bp, Homo sapiens
taacagttgaatttt

SEQ ID NO: 565632 - DNA, 15 bp, Homo sapiens
ttaacagttgaattt

SEQ ID NO: 565633 - DNA, 15 bp, Homo sapiens
gttaacagttgaatt

SEQ ID NO: 565634 - DNA, 15 bp, Homo sapiens
tgttaacagttgaat

SEQ ID NO: 565635 - DNA, 15 bp, Homo sapiens
gtgttaacagttgaa

SEQ ID NO: 565636 - DNA, 15 bp, Homo sapiens
tgtgttaacagttga

SEQ ID NO: 565637 - DNA, 15 bp, Homo sapiens
atgtgttaacagttg

SEQ ID NO: 565638 - DNA, 15 bp, Homo sapiens
tatgtgttaacagtt

SEQ ID NO: 565639 - DNA, 15 bp, Homo sapiens
ctatgtgttaacagt

SEQ ID NO: 565640 - DNA, 15 bp, Homo sapiens
cctatgtgttaacag

SEQ ID NO: 565641 - DNA, 15 bp, Homo sapiens
acctatgtgttaaca

SEQ ID NO: 565642 - DNA, 15 bp, Homo sapiens
tacctatgtgttaac

SEQ ID NO: 565643 - DNA, 15 bp, Homo sapiens
ttacctatgtgttaa

SEQ ID NO: 565644 - DNA, 15 bp, Homo sapiens
cttacctatgtgtta

SEQ ID NO: 565645 - DNA, 15 bp, Homo sapiens
tcttacctatgtgtt

SEQ ID NO: 565646 - DNA, 15 bp, Homo sapiens
ctcttacctatgtgt

SEQ ID NO: 565647 - DNA, 15 bp, Homo sapiens
actcttacctatgtg

SEQ ID NO: 565648 - DNA, 15 bp, Homo sapiens
aactcttacctatgt

SEQ ID NO: 565649 - DNA, 15 bp, Homo sapiens
gaactcttacctatg

SEQ ID NO: 565650 - DNA, 15 bp, Homo sapiens
agaactcttacctat

SEQ ID NO: 565651 - DNA, 15 bp, Homo sapiens
aagaactcttaccta

SEQ ID NO: 565652 - DNA, 15 bp, Homo sapiens
gaagaactcttacct

SEQ ID NO: 565653 - DNA, 15 bp, Homo sapiens
tgaagaactcttacc

SEQ ID NO: 565654 - DNA, 15 bp, Homo sapiens
ctgaagaactcttac

SEQ ID NO: 565655 - DNA, 15 bp, Homo sapiens
cctgaagaactctta

SEQ ID NO: 565656 - DNA, 15 bp, Homo sapiens
gcctgaagaactctt

SEQ ID NO: 565657 - DNA, 15 bp, Homo sapiens
tgcctgaagaactct

SEQ ID NO: 565658 - DNA, 15 bp, Homo sapiens
atgcctgaagaactc

SEQ ID NO: 565659 - DNA, 15 bp, Homo sapiens
gatgcctgaagaact

SEQ ID NO: 565660 - DNA, 15 bp, Homo sapiens
cgatgcctgaagaac

SEQ ID NO: 565661 - DNA, 15 bp, Homo sapiens
ccgatgcctgaagaa

SEQ ID NO: 565662 - DNA, 15 bp, Homo sapiens
accgatgcctgaaga

SEQ ID NO: 565663 - DNA, 15 bp, Homo sapiens
aaccgatgcctgaag

SEQ ID NO: 565664 - DNA, 15 bp, Homo sapiens
aaaccgatgcctgaa

SEQ ID NO: 565665 - DNA, 15 bp, Homo sapiens
aaaaccgatgcctga

SEQ ID NO: 565666 - DNA, 15 bp, Homo sapiens
taaaaccgatgcctg

SEQ ID NO: 565667 - DNA, 15 bp, Homo sapiens
ttaaaaccgatgcct

SEQ ID NO: 565668 - DNA, 15 bp, Homo sapiens
tttaaaaccgatgcc

SEQ ID NO: 565669 - DNA, 15 bp, Homo sapiens
ctttaaaaccgatgc

SEQ ID NO: 565670 - DNA, 15 bp, Homo sapiens
cctttaaaaccgatg

SEQ ID NO: 565671 - DNA, 15 bp, Homo sapiens
acctttaaaaccgat

SEQ ID NO: 565672 - DNA, 15 bp, Homo sapiens
gacctttaaaaccga

SEQ ID NO: 565673 - DNA, 15 bp, Homo sapiens
ggacctttaaaaccg

SEQ ID NO: 565674 - DNA, 15 bp, Homo sapiens
tggacctttaaaacc

SEQ ID NO: 565675 - DNA, 15 bp, Homo sapiens
atggacctttaaaac

SEQ ID NO: 565676 - DNA, 15 bp, Homo sapiens
catggacctttaaaa

SEQ ID NO: 565677 - DNA, 15 bp, Homo sapiens
acatggacctttaaa

SEQ ID NO: 565678 - DNA, 15 bp, Homo sapiens
tacatggacctttaa

SEQ ID NO: 565679 - DNA, 15 bp, Homo sapiens
gtacatggaccttta

SEQ ID NO: 565680 - DNA, 15 bp, Homo sapiens
agtacatggaccttt

SEQ ID NO: 565681 - DNA, 15 bp, Homo sapiens
cagtacatggacctt

SEQ ID NO: 565682 - DNA, 15 bp, Homo sapiens
ccagtacatggacct

SEQ ID NO: 565683 - DNA, 15 bp, Homo sapiens
cccagtacatggacc

SEQ ID NO: 565684 - DNA, 15 bp, Homo sapiens
tcccagtacatggac

SEQ ID NO: 565685 - DNA, 15 bp, Homo sapiens
gtcccagtacatgga

SEQ ID NO: 565686 - DNA, 15 bp, Homo sapiens
cgtcccagtacatgg

SEQ ID NO: 565687 - DNA, 15 bp, Homo sapiens
ccgtcccagtacatg

SEQ ID NO: 565688 - DNA, 15 bp, Homo sapiens
cccgtcccagtacat

SEQ ID NO: 565689 - DNA, 15 bp, Homo sapiens
acccgtcccagtaca

SEQ ID NO: 565690 - DNA, 15 bp, Homo sapiens
cacccgtcccagtac

SEQ ID NO: 565691 - DNA, 15 bp, Homo sapiens
gcacccgtcccagta

SEQ ID NO: 565692 - DNA, 15 bp, Homo sapiens
cgcacccgtcccagt

SEQ ID NO: 565693 - DNA, 15 bp, Homo sapiens
ccgcacccgtcccag

SEQ ID NO: 565694 - DNA, 15 bp, Homo sapiens
gccgcacccgtccca

SEQ ID NO: 565695 - DNA, 15 bp, Homo sapiens
cgccgcacccgtccc

SEQ ID NO: 565696 - DNA, 15 bp, Homo sapiens
ccgccgcacccgtcc

SEQ ID NO: 565697 - DNA, 15 bp, Homo sapiens
gccgccgcacccgtc

SEQ ID NO: 565698 - DNA, 15 bp, Homo sapiens
agccgccgcacccgt

SEQ ID NO: 565699 - DNA, 15 bp, Homo sapiens
gagccgccgcacccg

SEQ ID NO: 565700 - DNA, 15 bp, Homo sapiens
tgagccgccgcaccc

SEQ ID NO: 565701 - DNA, 15 bp, Homo sapiens
gtgagccgccgcacc

SEQ ID NO: 565702 - DNA, 15 bp, Homo sapiens
tgtgagccgccgcac

SEQ ID NO: 565703 - DNA, 15 bp, Homo sapiens
gtgtgagccgccgca

SEQ ID NO: 565704 - DNA, 15 bp, Homo sapiens
ggtgtgagccgccgc

SEQ ID NO: 565705 - DNA, 15 bp, Homo sapiens
aggtgtgagccgccg

SEQ ID NO: 565706 - DNA, 15 bp, Homo sapiens
caggtgtgagccgcc

SEQ ID NO: 565707 - DNA, 15 bp, Homo sapiens
acaggtgtgagccgc

SEQ ID NO: 565708 - DNA, 15 bp, Homo sapiens
tacaggtgtgagccg

SEQ ID NO: 565709 - DNA, 15 bp, Homo sapiens
aggattacaggtgtg

SEQ ID NO: 565710 - DNA, 15 bp, Homo sapiens
taggattacaggtgt

SEQ ID NO: 565711 - DNA, 15 bp, Homo sapiens
ctaggattacaggtg

SEQ ID NO: 565712 - DNA, 15 bp, Homo sapiens
gctaggattacaggt

SEQ ID NO: 565713 - DNA, 15 bp, Homo sapiens
tgctaggattacagg

SEQ ID NO: 565714 - DNA, 15 bp, Homo sapiens
gtgctaggattacag

SEQ ID NO: 565715 - DNA, 15 bp, Homo sapiens
ggtgctaggattaca

SEQ ID NO: 565716 - DNA, 15 bp, Homo sapiens
aggtgctaggattac

SEQ ID NO: 565717 - DNA, 15 bp, Homo sapiens
aaggtgctaggatta

SEQ ID NO: 565718 - DNA, 15 bp, Homo sapiens
caaggtgctaggatt

SEQ ID NO: 565719 - DNA, 15 bp, Homo sapiens
ccaaggtgctaggat

SEQ ID NO: 565720 - DNA, 15 bp, Homo sapiens
cccaaggtgctagga

SEQ ID NO: 565721 - DNA, 15 bp, Homo sapiens
tcccaaggtgctagg

SEQ ID NO: 565722 - DNA, 15 bp, Homo sapiens
ctcccaaggtgctag

SEQ ID NO: 565723 - DNA, 15 bp, Homo sapiens
cctcccaaggtgcta

SEQ ID NO: 565724 - DNA, 15 bp, Homo sapiens
gcctcccaaggtgct

SEQ ID NO: 565725 - DNA, 15 bp, Homo sapiens
ggcctcccaaggtgc

SEQ ID NO: 565726 - DNA, 15 bp, Homo sapiens
tggcctcccaaggtg

SEQ ID NO: 565727 - DNA, 15 bp, Homo sapiens
ttggcctcccaaggt

SEQ ID NO: 565728 - DNA, 15 bp, Homo sapiens
cttggcctcccaagg

SEQ ID NO: 565729 - DNA, 15 bp, Homo sapiens
ccttggcctcccaag

SEQ ID NO: 565730 - DNA, 15 bp, Homo sapiens
agccttggcctccca

SEQ ID NO: 565731 - DNA, 15 bp, Homo sapiens
cagccttggcctccc

SEQ ID NO: 565732 - DNA, 15 bp, Homo sapiens
ccagccttggcctcc

SEQ ID NO: 565733 - DNA, 15 bp, Homo sapiens
accagccttggcctc

SEQ ID NO: 565734 - DNA, 15 bp, Homo sapiens
caccagccttggcct

SEQ ID NO: 565735 - DNA, 15 bp, Homo sapiens
ccaccagccttggcc

SEQ ID NO: 565736 - DNA, 15 bp, Homo sapiens
tccaccagccttggc

SEQ ID NO: 565737 - DNA, 15 bp, Homo sapiens
atccaccagccttgg

SEQ ID NO: 565738 - DNA, 15 bp, Homo sapiens
gatccaccagccttg

SEQ ID NO: 565739 - DNA, 15 bp, Homo sapiens
tgatccaccagcctt

SEQ ID NO: 565740 - DNA, 15 bp, Homo sapiens
gtgatccaccagcct

SEQ ID NO: 565741 - DNA, 15 bp, Homo sapiens
ggtgatccaccagcc

SEQ ID NO: 565742 - DNA, 15 bp, Homo sapiens
aggtgatccaccagc

SEQ ID NO: 565743 - DNA, 15 bp, Homo sapiens
caggtgatccaccag

SEQ ID NO: 565744 - DNA, 15 bp, Homo sapiens
tcaggtgatccacca

SEQ ID NO: 565745 - DNA, 15 bp, Homo sapiens
ctcaggtgatccacc

SEQ ID NO: 565746 - DNA, 15 bp, Homo sapiens
cctcaggtgatccac

SEQ ID NO: 565747 - DNA, 15 bp, Homo sapiens
acctcaggtgatcca

SEQ ID NO: 565748 - DNA, 15 bp, Homo sapiens
agtcttgaactcctg

SEQ ID NO: 565749 - DNA, 15 bp, Homo sapiens
tagtcttgaactcct

SEQ ID NO: 565750 - DNA, 15 bp, Homo sapiens
ctagtcttgaactcc

SEQ ID NO: 565751 - DNA, 15 bp, Homo sapiens
gctagtcttgaactc

SEQ ID NO: 565752 - DNA, 15 bp, Homo sapiens
ggctagtcttgaact

SEQ ID NO: 565753 - DNA, 15 bp, Homo sapiens
aggctagtcttgaac

SEQ ID NO: 565754 - DNA, 15 bp, Homo sapiens
caggctagtcttgaa

SEQ ID NO: 565755 - DNA, 15 bp, Homo sapiens
ccaggctagtcttga

SEQ ID NO: 565756 - DNA, 15 bp, Homo sapiens
gccaggctagtcttg

SEQ ID NO: 565757 - DNA, 15 bp, Homo sapiens
ggccaggctagtctt

SEQ ID NO: 565758 - DNA, 15 bp, Homo sapiens
tggccaggctagtct

SEQ ID NO: 565759 - DNA, 15 bp, Homo sapiens
ttggccaggctagtc

SEQ ID NO: 565760 - DNA, 15 bp, Homo sapiens
gttggccaggctagt

SEQ ID NO: 565761 - DNA, 15 bp, Homo sapiens
tgttggccaggctag

SEQ ID NO: 565762 - DNA, 15 bp, Homo sapiens
atgttggccaggcta

SEQ ID NO: 565763 - DNA, 15 bp, Homo sapiens
tgggtttcaccatgt

SEQ ID NO: 565764 - DNA, 15 bp, Homo sapiens
ctgggtttcaccatg

SEQ ID NO: 565765 - DNA, 15 bp, Homo sapiens
actgggtttcaccat

SEQ ID NO: 565766 - DNA, 15 bp, Homo sapiens
gactgggtttcacca

SEQ ID NO: 565767 - DNA, 15 bp, Homo sapiens
agactgggtttcacc

SEQ ID NO: 565768 - DNA, 15 bp, Homo sapiens
gagactgggtttcac

SEQ ID NO: 565769 - DNA, 15 bp, Homo sapiens
agagactgggtttca

SEQ ID NO: 565770 - DNA, 15 bp, Homo sapiens
tagagactgggtttc

SEQ ID NO: 565771 - DNA, 15 bp, Homo sapiens
gtagagactgggttt

SEQ ID NO: 565772 - DNA, 15 bp, Homo sapiens
agtagagactgggtt

SEQ ID NO: 565773 - DNA, 15 bp, Homo sapiens
tagtagagactgggt

SEQ ID NO: 565774 - DNA, 15 bp, Homo sapiens
ttagtagagactggg

SEQ ID NO: 565775 - DNA, 15 bp, Homo sapiens
tttagtagagactgg

SEQ ID NO: 565776 - DNA, 15 bp, Homo sapiens
ttttagtagagactg

SEQ ID NO: 565777 - DNA, 15 bp, Homo sapiens
attttagtagagact

SEQ ID NO: 565778 - DNA, 15 bp, Homo sapiens
tattttagtagagac

SEQ ID NO: 565779 - DNA, 15 bp, Homo sapiens
gtattttagtagaga

SEQ ID NO: 565780 - DNA, 15 bp, Homo sapiens
tgtattttagtagag

SEQ ID NO: 565781 - DNA, 15 bp, Homo sapiens
ttgtattttagtaga

SEQ ID NO: 565782 - DNA, 15 bp, Homo sapiens
tttgtattttagtag

SEQ ID NO: 565783 - DNA, 15 bp, Homo sapiens
ttttgtattttagta

SEQ ID NO: 565784 - DNA, 15 bp, Homo sapiens
cttttgtattttagt

SEQ ID NO: 565785 - DNA, 15 bp, Homo sapiens
acttttgtattttag

SEQ ID NO: 565786 - DNA, 15 bp, Homo sapiens
aacttttgtatttta

SEQ ID NO: 565787 - DNA, 15 bp, Homo sapiens
taacttttgtatttt

SEQ ID NO: 565788 - DNA, 15 bp, Homo sapiens
ctaacttttgtattt

SEQ ID NO: 565789 - DNA, 15 bp, Homo sapiens
gctaacttttgtatt

SEQ ID NO: 565790 - DNA, 15 bp, Homo sapiens
ggctaacttttgtat

SEQ ID NO: 565791 - DNA, 15 bp, Homo sapiens
cggctaacttttgta

SEQ ID NO: 565792 - DNA, 15 bp, Homo sapiens
ccggctaacttttgt

SEQ ID NO: 565793 - DNA, 15 bp, Homo sapiens
cccggctaacttttg

SEQ ID NO: 565794 - DNA, 15 bp, Homo sapiens
gcccggctaactttt

SEQ ID NO: 565795 - DNA, 15 bp, Homo sapiens
tgcccggctaacttt

SEQ ID NO: 565796 - DNA, 15 bp, Homo sapiens
atgcccggctaactt

SEQ ID NO: 565797 - DNA, 15 bp, Homo sapiens
catgcccggctaact

SEQ ID NO: 565798 - DNA, 15 bp, Homo sapiens
tcatgcccggctaac

SEQ ID NO: 565799 - DNA, 15 bp, Homo sapiens
atcatgcccggctaa

SEQ ID NO: 565800 - DNA, 15 bp, Homo sapiens
catcatgcccggcta

SEQ ID NO: 565801 - DNA, 15 bp, Homo sapiens
ccatcatgcccggct

SEQ ID NO: 565802 - DNA, 15 bp, Homo sapiens
gccatcatgcccggc

SEQ ID NO: 565803 - DNA, 15 bp, Homo sapiens
cgccatcatgcccgg

SEQ ID NO: 565804 - DNA, 15 bp, Homo sapiens
ccgccatcatgcccg

SEQ ID NO: 565805 - DNA, 15 bp, Homo sapiens
cccgccatcatgccc

SEQ ID NO: 565806 - DNA, 15 bp, Homo sapiens
acccgccatcatgcc

SEQ ID NO: 565807 - DNA, 15 bp, Homo sapiens
cacccgccatcatgc

SEQ ID NO: 565808 - DNA, 15 bp, Homo sapiens
gcacccgccatcatg

SEQ ID NO: 565809 - DNA, 15 bp, Homo sapiens
ggcacccgccatcat

SEQ ID NO: 565810 - DNA, 15 bp, Homo sapiens
aggcacccgccatca

SEQ ID NO: 565811 - DNA, 15 bp, Homo sapiens
caggcacccgccatc

SEQ ID NO: 565812 - DNA, 15 bp, Homo sapiens
acaggcacccgccat

SEQ ID NO: 565813 - DNA, 15 bp, Homo sapiens
tacaggcacccgcca

SEQ ID NO: 565814 - DNA, 15 bp, Homo sapiens
ttacaggcacccgcc

SEQ ID NO: 565815 - DNA, 15 bp, Homo sapiens
attacaggcacccgc

SEQ ID NO: 565816 - DNA, 15 bp, Homo sapiens
cattacaggcacccg

SEQ ID NO: 565817 - DNA, 15 bp, Homo sapiens
gcattacaggcaccc

SEQ ID NO: 565818 - DNA, 15 bp, Homo sapiens
ggcattacaggcacc

SEQ ID NO: 565819 - DNA, 15 bp, Homo sapiens
tggcattacaggcac

SEQ ID NO: 565820 - DNA, 15 bp, Homo sapiens
ctggcattacaggca

SEQ ID NO: 565821 - DNA, 15 bp, Homo sapiens
gctggcattacaggc

SEQ ID NO: 565822 - DNA, 15 bp, Homo sapiens
agctggcattacagg

SEQ ID NO: 565823 - DNA, 15 bp, Homo sapiens
cagctggcattacag

SEQ ID NO: 565824 - DNA, 15 bp, Homo sapiens
acagctggcattaca

SEQ ID NO: 565825 - DNA, 15 bp, Homo sapiens
aacagctggcattac

SEQ ID NO: 565826 - DNA, 15 bp, Homo sapiens
gaacagctggcatta

SEQ ID NO: 565827 - DNA, 15 bp, Homo sapiens
agaacagctggcatt

SEQ ID NO: 565828 - DNA, 15 bp, Homo sapiens
cagaacagctggcat

SEQ ID NO: 565829 - DNA, 15 bp, Homo sapiens
ccagaacagctggca

SEQ ID NO: 565830 - DNA, 15 bp, Homo sapiens
tccagaacagctggc

SEQ ID NO: 565831 - DNA, 15 bp, Homo sapiens
ctccagaacagctgg

SEQ ID NO: 565832 - DNA, 15 bp, Homo sapiens
cctccagaacagctg

SEQ ID NO: 565833 - DNA, 15 bp, Homo sapiens
gcctccagaacagct

SEQ ID NO: 565834 - DNA, 15 bp, Homo sapiens
agcctccagaacagc

SEQ ID NO: 565835 - DNA, 15 bp, Homo sapiens
cagcctccagaacag

SEQ ID NO: 565836 - DNA, 15 bp, Homo sapiens
ccagcctccagaaca

SEQ ID NO: 565837 - DNA, 15 bp, Homo sapiens
cccagcctccagaac

SEQ ID NO: 565838 - DNA, 15 bp, Homo sapiens
tcccagcctccagaa

SEQ ID NO: 565839 - DNA, 15 bp, Homo sapiens
gtcccagcctccaga

SEQ ID NO: 565840 - DNA, 15 bp, Homo sapiens
cgtcccagcctccag

SEQ ID NO: 565841 - DNA, 15 bp, Homo sapiens
ccgtcccagcctcca

SEQ ID NO: 565842 - DNA, 15 bp, Homo sapiens
cccgtcccagcctcc

SEQ ID NO: 565843 - DNA, 15 bp, Homo sapiens
tcccgtcccagcctc

SEQ ID NO: 565844 - DNA, 15 bp, Homo sapiens
ctcccgtcccagcct

SEQ ID NO: 565845 - DNA, 15 bp, Homo sapiens
tctcccgtcccagcc

SEQ ID NO: 565846 - DNA, 15 bp, Homo sapiens
ttctcccgtcccagc

SEQ ID NO: 565847 - DNA, 15 bp, Homo sapiens
attctcccgtcccag

SEQ ID NO: 565848 - DNA, 15 bp, Homo sapiens
gattctcccgtccca

SEQ ID NO: 565849 - DNA, 15 bp, Homo sapiens
tgattctcccgtccc

SEQ ID NO: 565850 - DNA, 15 bp, Homo sapiens
gtgattctcccgtcc

SEQ ID NO: 565851 - DNA, 15 bp, Homo sapiens
agtgattctcccgtc

SEQ ID NO: 565852 - DNA, 15 bp, Homo sapiens
aagtgattctcccgt

SEQ ID NO: 565853 - DNA, 15 bp, Homo sapiens
caagtgattctcccg

SEQ ID NO: 565854 - DNA, 15 bp, Homo sapiens
tcaagtgattctccc

SEQ ID NO: 565855 - DNA, 15 bp, Homo sapiens
aggttcaagtgattc

SEQ ID NO: 565856 - DNA, 15 bp, Homo sapiens
caggttcaagtgatt

SEQ ID NO: 565857 - DNA, 15 bp, Homo sapiens
ccaggttcaagtgat

SEQ ID NO: 565858 - DNA, 15 bp, Homo sapiens
cccaggttcaagtga

SEQ ID NO: 565859 - DNA, 15 bp, Homo sapiens
tcccaggttcaagtg

SEQ ID NO: 565860 - DNA, 15 bp, Homo sapiens
ctcccaggttcaagt

SEQ ID NO: 565861 - DNA, 15 bp, Homo sapiens
tctcccaggttcaag

SEQ ID NO: 565862 - DNA, 15 bp, Homo sapiens
gtctcccaggttcaa

SEQ ID NO: 565863 - DNA, 15 bp, Homo sapiens
tgtctcccaggttca

SEQ ID NO: 565864 - DNA, 15 bp, Homo sapiens
ctgtctcccaggttc

SEQ ID NO: 565865 - DNA, 15 bp, Homo sapiens
actgtctcccaggtt

SEQ ID NO: 565866 - DNA, 15 bp, Homo sapiens
cactgtctcccaggt

SEQ ID NO: 565867 - DNA, 15 bp, Homo sapiens
ccactgtctcccagg

SEQ ID NO: 565868 - DNA, 15 bp, Homo sapiens
gccactgtctcccag

SEQ ID NO: 565869 - DNA, 15 bp, Homo sapiens
agccactgtctccca

SEQ ID NO: 565870 - DNA, 15 bp, Homo sapiens
cagccactgtctccc

SEQ ID NO: 565871 - DNA, 15 bp, Homo sapiens
gcagccactgtctcc

SEQ ID NO: 565872 - DNA, 15 bp, Homo sapiens
tgcagccactgtctc

SEQ ID NO: 565873 - DNA, 15 bp, Homo sapiens
ctgcagccactgtct

SEQ ID NO: 565874 - DNA, 15 bp, Homo sapiens
actgcagccactgtc

SEQ ID NO: 565875 - DNA, 15 bp, Homo sapiens
cactgcagccactgt

SEQ ID NO: 565876 - DNA, 15 bp, Homo sapiens
tcactgcagccactg

SEQ ID NO: 565877 - DNA, 15 bp, Homo sapiens
ctcactgcagccact

SEQ ID NO: 565878 - DNA, 15 bp, Homo sapiens
gctcactgcagccac

SEQ ID NO: 565879 - DNA, 15 bp, Homo sapiens
ggctcactgcagcca

SEQ ID NO: 565880 - DNA, 15 bp, Homo sapiens
cggctcactgcagcc

SEQ ID NO: 565881 - DNA, 15 bp, Homo sapiens
tcggctcactgcagc

SEQ ID NO: 565882 - DNA, 15 bp, Homo sapiens
ctcggctcactgcag

SEQ ID NO: 565883 - DNA, 15 bp, Homo sapiens
tgatctcggctcact

SEQ ID NO: 565884 - DNA, 15 bp, Homo sapiens
gtgatctcggctcac

SEQ ID NO: 565885 - DNA, 15 bp, Homo sapiens
tgtgatctcggctca

SEQ ID NO: 565886 - DNA, 15 bp, Homo sapiens
gtgtgatctcggctc

SEQ ID NO: 565887 - DNA, 15 bp, Homo sapiens
ggtgtgatctcggct

SEQ ID NO: 565888 - DNA, 15 bp, Homo sapiens
tggtgtgatctcggc

SEQ ID NO: 565889 - DNA, 15 bp, Homo sapiens
gtggtgtgatctcgg

SEQ ID NO: 565890 - DNA, 15 bp, Homo sapiens
agtggtgtgatctcg

SEQ ID NO: 565891 - DNA, 15 bp, Homo sapiens
cagtggtgtgatctc

SEQ ID NO: 565892 - DNA, 15 bp, Homo sapiens
gtgcagtggtgtgat

SEQ ID NO: 565893 - DNA, 15 bp, Homo sapiens
agtgcagtggtgtga

SEQ ID NO: 565894 - DNA, 15 bp, Homo sapiens
gagtgcagtggtgtg

SEQ ID NO: 565895 - DNA, 15 bp, Homo sapiens
ggagtgcagtggtgt

SEQ ID NO: 565896 - DNA, 15 bp, Homo sapiens
ccacccaggctggag

SEQ ID NO: 565897 - DNA, 15 bp, Homo sapiens
gccacccaggctgga

SEQ ID NO: 565898 - DNA, 15 bp, Homo sapiens
agccacccaggctgg

SEQ ID NO: 565899 - DNA, 15 bp, Homo sapiens
cagccacccaggctg

SEQ ID NO: 565900 - DNA, 15 bp, Homo sapiens
tcagccacccaggct

SEQ ID NO: 565901 - DNA, 15 bp, Homo sapiens
ctcagccacccaggc

SEQ ID NO: 565902 - DNA, 15 bp, Homo sapiens
gctcagccacccagg

SEQ ID NO: 565903 - DNA, 15 bp, Homo sapiens
tgctcagccacccag

SEQ ID NO: 565904 - DNA, 15 bp, Homo sapiens
ttgctcagccaccca

SEQ ID NO: 565905 - DNA, 15 bp, Homo sapiens
cttgctcagccaccc

SEQ ID NO: 565906 - DNA, 15 bp, Homo sapiens
tcttgctcagccacc

SEQ ID NO: 565907 - DNA, 15 bp, Homo sapiens
gtcttgctcagccac

SEQ ID NO: 565908 - DNA, 15 bp, Homo sapiens
tgtcttgctcagcca

SEQ ID NO: 565909 - DNA, 15 bp, Homo sapiens
gtgtcttgctcagcc

SEQ ID NO: 565910 - DNA, 15 bp, Homo sapiens
agtgtcttgctcagc

SEQ ID NO: 565911 - DNA, 15 bp, Homo sapiens
cagtgtcttgctcag

SEQ ID NO: 565912 - DNA, 15 bp, Homo sapiens
acagtgtcttgctca

SEQ ID NO: 565913 - DNA, 15 bp, Homo sapiens
gacagtgtcttgctc

SEQ ID NO: 565914 - DNA, 15 bp, Homo sapiens
agacagtgtcttgct

SEQ ID NO: 565915 - DNA, 15 bp, Homo sapiens
tagacagtgtcttgc

SEQ ID NO: 565916 - DNA, 15 bp, Homo sapiens
ttagacagtgtcttg

SEQ ID NO: 565917 - DNA, 15 bp, Homo sapiens
tttagacagtgtctt

SEQ ID NO: 565918 - DNA, 15 bp, Homo sapiens
ttttagacagtgtct

SEQ ID NO: 565919 - DNA, 15 bp, Homo sapiens
tttttagacagtgtc

SEQ ID NO: 565920 - DNA, 15 bp, Homo sapiens
ttttttagacagtgt

SEQ ID NO: 565921 - DNA, 15 bp, Homo sapiens
tttttttagacagtg

SEQ ID NO: 565922 - DNA, 15 bp, Homo sapiens
ttttttttagacagt

SEQ ID NO: 565923 - DNA, 15 bp, Homo sapiens
tttttttttagacag

SEQ ID NO: 565924 - DNA, 15 bp, Homo sapiens
ttttttttttagaca

SEQ ID NO: 565925 - DNA, 15 bp, Homo sapiens
tttttttttttagac

SEQ ID NO: 565926 - DNA, 15 bp, Homo sapiens
tttttttttttttag

SEQ ID NO: 565927 - DNA, 15 bp, Homo sapiens
tttttttttttttta

SEQ ID NO: 565928 - DNA, 15 bp, Homo sapiens
ctttttttttttttt

SEQ ID NO: 565929 - DNA, 15 bp, Homo sapiens
acttttttttttttt

SEQ ID NO: 565930 - DNA, 15 bp, Homo sapiens
aactttttttttttt

SEQ ID NO: 565931 - DNA, 15 bp, Homo sapiens
gaacttttttttttt

SEQ ID NO: 565932 - DNA, 15 bp, Homo sapiens
tgaactttttttttt

SEQ ID NO: 565933 - DNA, 15 bp, Homo sapiens
atgaacttttttttt

SEQ ID NO: 565934 - DNA, 15 bp, Homo sapiens
tatgaactttttttt

SEQ ID NO: 565935 - DNA, 15 bp, Homo sapiens
atatgaacttttttt

SEQ ID NO: 565936 - DNA, 15 bp, Homo sapiens
tatatgaactttttt

SEQ ID NO: 565937 - DNA, 15 bp, Homo sapiens
gtatatgaacttttt

SEQ ID NO: 565938 - DNA, 15 bp, Homo sapiens
agtatatgaactttt

SEQ ID NO: 565939 - DNA, 15 bp, Homo sapiens
cagtatatgaacttt

SEQ ID NO: 565940 - DNA, 15 bp, Homo sapiens
tcagtatatgaactt

SEQ ID NO: 565941 - DNA, 15 bp, Homo sapiens
ttcagtatatgaact

SEQ ID NO: 565942 - DNA, 15 bp, Homo sapiens
attcagtatatgaac

SEQ ID NO: 565943 - DNA, 15 bp, Homo sapiens
tattcagtatatgaa

SEQ ID NO: 565944 - DNA, 15 bp, Homo sapiens
ttattcagtatatga

SEQ ID NO: 565945 - DNA, 15 bp, Homo sapiens
gttattcagtatatg

SEQ ID NO: 565946 - DNA, 15 bp, Homo sapiens
ggttattcagtatat

SEQ ID NO: 565947 - DNA, 15 bp, Homo sapiens
tggttattcagtata

SEQ ID NO: 565948 - DNA, 15 bp, Homo sapiens
atggttattcagtat

SEQ ID NO: 565949 - DNA, 15 bp, Homo sapiens
gatggttattcagta

SEQ ID NO: 565950 - DNA, 15 bp, Homo sapiens
agatggttattcagt

SEQ ID NO: 565951 - DNA, 15 bp, Homo sapiens
cagatggttattcag

SEQ ID NO: 565952 - DNA, 15 bp, Homo sapiens
ccagatggttattca

SEQ ID NO: 565953 - DNA, 15 bp, Homo sapiens
cccagatggttattc

SEQ ID NO: 565954 - DNA, 15 bp, Homo sapiens
gcccagatggttatt

SEQ ID NO: 565955 - DNA, 15 bp, Homo sapiens
ggcccagatggttat

SEQ ID NO: 565956 - DNA, 15 bp, Homo sapiens
gggcccagatggtta

SEQ ID NO: 565957 - DNA, 15 bp, Homo sapiens
tgggcccagatggtt

SEQ ID NO: 565958 - DNA, 15 bp, Homo sapiens
atgggcccagatggt

SEQ ID NO: 565959 - DNA, 15 bp, Homo sapiens
tatgggcccagatgg

SEQ ID NO: 565960 - DNA, 15 bp, Homo sapiens
ttatgggcccagatg

SEQ ID NO: 565961 - DNA, 15 bp, Homo sapiens
gttatgggcccagat

SEQ ID NO: 565962 - DNA, 15 bp, Homo sapiens
tgttatgggcccaga

SEQ ID NO: 565963 - DNA, 15 bp, Homo sapiens
ctgttatgggcccag

SEQ ID NO: 565964 - DNA, 15 bp, Homo sapiens
gctgttatgggccca

SEQ ID NO: 565965 - DNA, 15 bp, Homo sapiens
agctgttatgggccc

SEQ ID NO: 565966 - DNA, 15 bp, Homo sapiens
aagctgttatgggcc

SEQ ID NO: 565967 - DNA, 15 bp, Homo sapiens
taagctgttatgggc

SEQ ID NO: 565968 - DNA, 15 bp, Homo sapiens
ttaagctgttatggg

SEQ ID NO: 565969 - DNA, 15 bp, Homo sapiens
cttaagctgttatgg

SEQ ID NO: 565970 - DNA, 15 bp, Homo sapiens
tcttaagctgttatg

SEQ ID NO: 565971 - DNA, 15 bp, Homo sapiens
gtcttaagctgttat

SEQ ID NO: 565972 - DNA, 15 bp, Homo sapiens
agtcttaagctgtta

SEQ ID NO: 565973 - DNA, 15 bp, Homo sapiens
aagtcttaagctgtt

SEQ ID NO: 565974 - DNA, 15 bp, Homo sapiens
aaagtcttaagctgt

SEQ ID NO: 565975 - DNA, 15 bp, Homo sapiens
gaaagtcttaagctg

SEQ ID NO: 565976 - DNA, 15 bp, Homo sapiens
agaaagtcttaagct

SEQ ID NO: 565977 - DNA, 15 bp, Homo sapiens
cagaaagtcttaagc

SEQ ID NO: 565978 - DNA, 15 bp, Homo sapiens
ccagaaagtcttaag

SEQ ID NO: 565979 - DNA, 15 bp, Homo sapiens
tccagaaagtcttaa

SEQ ID NO: 565980 - DNA, 15 bp, Homo sapiens
ctccagaaagtctta

SEQ ID NO: 565981 - DNA, 15 bp, Homo sapiens
tctccagaaagtctt

SEQ ID NO: 565982 - DNA, 15 bp, Homo sapiens
ttctccagaaagtct

SEQ ID NO: 565983 - DNA, 15 bp, Homo sapiens
tttctccagaaagtc

SEQ ID NO: 565984 - DNA, 15 bp, Homo sapiens
ttttctccagaaagt

SEQ ID NO: 565985 - DNA, 15 bp, Homo sapiens
tttttctccagaaag

SEQ ID NO: 565986 - DNA, 15 bp, Homo sapiens
ttttttctccagaaa

SEQ ID NO: 565987 - DNA, 15 bp, Homo sapiens
tttttttctccagaa

SEQ ID NO: 565988 - DNA, 15 bp, Homo sapiens
ttttttttctccaga

SEQ ID NO: 565989 - DNA, 15 bp, Homo sapiens
tttttttttctccag

SEQ ID NO: 565990 - DNA, 15 bp, Homo sapiens
ttttttttttctcca

SEQ ID NO: 565991 - DNA, 15 bp, Homo sapiens
tttttttttttctcc

SEQ ID NO: 565992 - DNA, 15 bp, Homo sapiens
ttttttttttttctc

SEQ ID NO: 565993 - DNA, 15 bp, Homo sapiens
tttttttttttttct

SEQ ID NO: 565994 - DNA, 15 bp, Homo sapiens
gtttttttttttttc

SEQ ID NO: 565995 - DNA, 15 bp, Homo sapiens
ggttttttttttttt

SEQ ID NO: 565996 - DNA, 15 bp, Homo sapiens
tggtttttttttttt

SEQ ID NO: 565997 - DNA, 15 bp, Homo sapiens
ctggttttttttttt

SEQ ID NO: 565998 - DNA, 15 bp, Homo sapiens
actggtttttttttt

SEQ ID NO: 565999 - DNA, 15 bp, Homo sapiens
aactggttttttttt

SEQ ID NO: 566000 - DNA, 15 bp, Homo sapiens
aaactggtttttttt

SEQ ID NO: 566001 - DNA, 15 bp, Homo sapiens
gaaactggttttttt

SEQ ID NO: 566002 - DNA, 15 bp, Homo sapiens
ggaaactggtttttt

SEQ ID NO: 566003 - DNA, 15 bp, Homo sapiens
tggaaactggttttt

SEQ ID NO: 566004 - DNA, 15 bp, Homo sapiens
ctggaaactggtttt

SEQ ID NO: 566005 - DNA, 15 bp, Homo sapiens
actggaaactggttt

SEQ ID NO: 566006 - DNA, 15 bp, Homo sapiens
aactggaaactggtt

SEQ ID NO: 566007 - DNA, 15 bp, Homo sapiens
aaactggaaactggt

SEQ ID NO: 566008 - DNA, 15 bp, Homo sapiens
taaactggaaactgg

SEQ ID NO: 566009 - DNA, 15 bp, Homo sapiens
ttaaactggaaactg

SEQ ID NO: 566010 - DNA, 15 bp, Homo sapiens
attaaactggaaact

SEQ ID NO: 566011 - DNA, 15 bp, Homo sapiens
aattaaactggaaac

SEQ ID NO: 566012 - DNA, 15 bp, Homo sapiens
aaattaaactggaaa

SEQ ID NO: 566013 - DNA, 15 bp, Homo sapiens
gaaattaaactggaa

SEQ ID NO: 566014 - DNA, 15 bp, Homo sapiens
ggaaattaaactgga

SEQ ID NO: 566015 - DNA, 15 bp, Homo sapiens
tggaaattaaactgg

SEQ ID NO: 566016 - DNA, 15 bp, Homo sapiens
ttggaaattaaactg

SEQ ID NO: 566017 - DNA, 15 bp, Homo sapiens
gttggaaattaaact

SEQ ID NO: 566018 - DNA, 15 bp, Homo sapiens
tgttggaaattaaac

SEQ ID NO: 566019 - DNA, 15 bp, Homo sapiens
ttgttggaaattaaa

SEQ ID NO: 566020 - DNA, 15 bp, Homo sapiens
tttgttggaaattaa

SEQ ID NO: 566021 - DNA, 15 bp, Homo sapiens
ctttgttggaaatta

SEQ ID NO: 566022 - DNA, 15 bp, Homo sapiens
gctttgttggaaatt

SEQ ID NO: 566023 - DNA, 15 bp, Homo sapiens
tgctttgttggaaat

SEQ ID NO: 566024 - DNA, 15 bp, Homo sapiens
ctgctttgttggaaa

SEQ ID NO: 566025 - DNA, 15 bp, Homo sapiens
actgctttgttggaa

SEQ ID NO: 566026 - DNA, 15 bp, Homo sapiens
tactgctttgttgga

SEQ ID NO: 566027 - DNA, 15 bp, Homo sapiens
ctactgctttgttgg

SEQ ID NO: 566028 - DNA, 15 bp, Homo sapiens
cctactgctttgttg

SEQ ID NO: 566029 - DNA, 15 bp, Homo sapiens
tcctactgctttgtt

SEQ ID NO: 566030 - DNA, 15 bp, Homo sapiens
ttcctactgctttgt

SEQ ID NO: 566031 - DNA, 15 bp, Homo sapiens
gttcctactgctttg

SEQ ID NO: 566032 - DNA, 15 bp, Homo sapiens
agttcctactgcttt

SEQ ID NO: 566033 - DNA, 15 bp, Homo sapiens
gagttcctactgctt

SEQ ID NO: 566034 - DNA, 15 bp, Homo sapiens
agagttcctactgct

SEQ ID NO: 566035 - DNA, 15 bp, Homo sapiens
aagagttcctactgc

SEQ ID NO: 566036 - DNA, 15 bp, Homo sapiens
caagagttcctactg

SEQ ID NO: 566037 - DNA, 15 bp, Homo sapiens
gcaagagttcctact

SEQ ID NO: 566038 - DNA, 15 bp, Homo sapiens
ggcaagagttcctac

SEQ ID NO: 566039 - DNA, 15 bp, Homo sapiens
aggcaagagttccta

SEQ ID NO: 566040 - DNA, 15 bp, Homo sapiens
taggcaagagttcct

SEQ ID NO: 566041 - DNA, 15 bp, Homo sapiens
ataggcaagagttcc

SEQ ID NO: 566042 - DNA, 15 bp, Homo sapiens
tataggcaagagttc

SEQ ID NO: 566043 - DNA, 15 bp, Homo sapiens
ctataggcaagagtt

SEQ ID NO: 566044 - DNA, 15 bp, Homo sapiens
tctataggcaagagt

SEQ ID NO: 566045 - DNA, 15 bp, Homo sapiens
ttctataggcaagag

SEQ ID NO: 566046 - DNA, 15 bp, Homo sapiens
attctataggcaaga

SEQ ID NO: 566047 - DNA, 15 bp, Homo sapiens
tattctataggcaag

SEQ ID NO: 566048 - DNA, 15 bp, Homo sapiens
gtattctataggcaa

SEQ ID NO: 566049 - DNA, 15 bp, Homo sapiens
agtattctataggca

SEQ ID NO: 566050 - DNA, 15 bp, Homo sapiens
cagtattctataggc

SEQ ID NO: 566051 - DNA, 15 bp, Homo sapiens
acagtattctatagg

SEQ ID NO: 566052 - DNA, 15 bp, Homo sapiens
cacagtattctatag

SEQ ID NO: 566053 - DNA, 15 bp, Homo sapiens
gcacagtattctata

SEQ ID NO: 566054 - DNA, 15 bp, Homo sapiens
agcacagtattctat

SEQ ID NO: 566055 - DNA, 15 bp, Homo sapiens
cagcacagtattcta

SEQ ID NO: 566056 - DNA, 15 bp, Homo sapiens
ccagcacagtattct

SEQ ID NO: 566057 - DNA, 15 bp, Homo sapiens
cccagcacagtattc

SEQ ID NO: 566058 - DNA, 15 bp, Homo sapiens
ccccagcacagtatt

SEQ ID NO: 566059 - DNA, 15 bp, Homo sapiens
cccccagcacagtat

SEQ ID NO: 566060 - DNA, 15 bp, Homo sapiens
gcccccagcacagta

SEQ ID NO: 566061 - DNA, 15 bp, Homo sapiens
agcccccagcacagt

SEQ ID NO: 566062 - DNA, 15 bp, Homo sapiens
cagcccccagcacag

SEQ ID NO: 566063 - DNA, 15 bp, Homo sapiens
ccagcccccagcaca

SEQ ID NO: 566064 - DNA, 15 bp, Homo sapiens
cccagcccccagcac

SEQ ID NO: 566065 - DNA, 15 bp, Homo sapiens
gcccagcccccagca

SEQ ID NO: 566066 - DNA, 15 bp, Homo sapiens
tgcccagcccccagc

SEQ ID NO: 566067 - DNA, 15 bp, Homo sapiens
gtgcccagcccccag

SEQ ID NO: 566068 - DNA, 15 bp, Homo sapiens
cgtgcccagccccca

SEQ ID NO: 566069 - DNA, 15 bp, Homo sapiens
ccgtgcccagccccc

SEQ ID NO: 566070 - DNA, 15 bp, Homo sapiens
gccgtgcccagcccc

SEQ ID NO: 566071 - DNA, 15 bp, Homo sapiens
cgccgtgcccagccc

SEQ ID NO: 566072 - DNA, 15 bp, Homo sapiens
tcgccgtgcccagcc

SEQ ID NO: 566073 - DNA, 15 bp, Homo sapiens
gtcgccgtgcccagc

SEQ ID NO: 566074 - DNA, 15 bp, Homo sapiens
agtcgccgtgcccag

SEQ ID NO: 566075 - DNA, 15 bp, Homo sapiens
aagtcgccgtgccca

SEQ ID NO: 566076 - DNA, 15 bp, Homo sapiens
taagtcgccgtgccc

SEQ ID NO: 566077 - DNA, 15 bp, Homo sapiens
ataagtcgccgtgcc

SEQ ID NO: 566078 - DNA, 15 bp, Homo sapiens
cataagtcgccgtgc

SEQ ID NO: 566079 - DNA, 15 bp, Homo sapiens
gcataagtcgccgtg

SEQ ID NO: 566080 - DNA, 15 bp, Homo sapiens
ggcataagtcgccgt

SEQ ID NO: 566081 - DNA, 15 bp, Homo sapiens
gggcataagtcgccg

SEQ ID NO: 566082 - DNA, 15 bp, Homo sapiens
cgggcataagtcgcc

SEQ ID NO: 566083 - DNA, 15 bp, Homo sapiens
acgggcataagtcgc

SEQ ID NO: 566084 - DNA, 15 bp, Homo sapiens
tacgggcataagtcg

SEQ ID NO: 566085 - DNA, 15 bp, Homo sapiens
ttacgggcataagtc

SEQ ID NO: 566086 - DNA, 15 bp, Homo sapiens
attacgggcataagt

SEQ ID NO: 566087 - DNA, 15 bp, Homo sapiens
gattacgggcataag

SEQ ID NO: 566088 - DNA, 15 bp, Homo sapiens
ggattacgggcataa

SEQ ID NO: 566089 - DNA, 15 bp, Homo sapiens
gggattacgggcata

SEQ ID NO: 566090 - DNA, 15 bp, Homo sapiens
tgggattacgggcat

SEQ ID NO: 566091 - DNA, 15 bp, Homo sapiens
ctgggattacgggca

SEQ ID NO: 566092 - DNA, 15 bp, Homo sapiens
gctgggattacgggc

SEQ ID NO: 566093 - DNA, 15 bp, Homo sapiens
tgctgggattacggg

SEQ ID NO: 566094 - DNA, 15 bp, Homo sapiens
gtgctgggattacgg

SEQ ID NO: 566095 - DNA, 15 bp, Homo sapiens
agtgctgggattacg

SEQ ID NO: 566096 - DNA, 15 bp, Homo sapiens
atgatccacccgcct

SEQ ID NO: 566097 - DNA, 15 bp, Homo sapiens
aatgatccacccgcc

SEQ ID NO: 566098 - DNA, 15 bp, Homo sapiens
aaatgatccacccgc

SEQ ID NO: 566099 - DNA, 15 bp, Homo sapiens
caaatgatccacccg

SEQ ID NO: 566100 - DNA, 15 bp, Homo sapiens
tcaaatgatccaccc

SEQ ID NO: 566101 - DNA, 15 bp, Homo sapiens
ctcaaatgatccacc

SEQ ID NO: 566102 - DNA, 15 bp, Homo sapiens
cctcaaatgatccac

SEQ ID NO: 566103 - DNA, 15 bp, Homo sapiens
acctcaaatgatcca

SEQ ID NO: 566104 - DNA, 15 bp, Homo sapiens
gacctcaaatgatcc

SEQ ID NO: 566105 - DNA, 15 bp, Homo sapiens
tgacctcaaatgatc

SEQ ID NO: 566106 - DNA, 15 bp, Homo sapiens
ctgacctcaaatgat

SEQ ID NO: 566107 - DNA, 15 bp, Homo sapiens
cctgacctcaaatga

SEQ ID NO: 566108 - DNA, 15 bp, Homo sapiens
tcctgacctcaaatg

SEQ ID NO: 566109 - DNA, 15 bp, Homo sapiens
ctcctgacctcaaat

SEQ ID NO: 566110 - DNA, 15 bp, Homo sapiens
actcctgacctcaaa

SEQ ID NO: 566111 - DNA, 15 bp, Homo sapiens
taactcctgacctca

SEQ ID NO: 566112 - DNA, 15 bp, Homo sapiens
ttaactcctgacctc

SEQ ID NO: 566113 - DNA, 15 bp, Homo sapiens
cttaactcctgacct

SEQ ID NO: 566114 - DNA, 15 bp, Homo sapiens
tcttaactcctgacc

SEQ ID NO: 566115 - DNA, 15 bp, Homo sapiens
ctcttaactcctgac

SEQ ID NO: 566116 - DNA, 15 bp, Homo sapiens
tctcttaactcctga

SEQ ID NO: 566117 - DNA, 15 bp, Homo sapiens
gtctcttaactcctg

SEQ ID NO: 566118 - DNA, 15 bp, Homo sapiens
agtctcttaactcct

SEQ ID NO: 566119 - DNA, 15 bp, Homo sapiens
tagtctcttaactcc

SEQ ID NO: 566120 - DNA, 15 bp, Homo sapiens
ctagtctcttaactc

SEQ ID NO: 566121 - DNA, 15 bp, Homo sapiens
gctagtctcttaact

SEQ ID NO: 566122 - DNA, 15 bp, Homo sapiens
ggctagtctcttaac

SEQ ID NO: 566123 - DNA, 15 bp, Homo sapiens
aggctagtctcttaa

SEQ ID NO: 566124 - DNA, 15 bp, Homo sapiens
caggctagtctctta

SEQ ID NO: 566125 - DNA, 15 bp, Homo sapiens
ccaggctagtctctt

SEQ ID NO: 566126 - DNA, 15 bp, Homo sapiens
gccaggctagtctct

SEQ ID NO: 566127 - DNA, 15 bp, Homo sapiens
ggccaggctagtctc

SEQ ID NO: 566128 - DNA, 15 bp, Homo sapiens
tttggccaggctagt

SEQ ID NO: 566129 - DNA, 15 bp, Homo sapiens
ttttggccaggctag

SEQ ID NO: 566130 - DNA, 15 bp, Homo sapiens
attttggccaggcta

SEQ ID NO: 566131 - DNA, 15 bp, Homo sapiens
cattttggccaggct

SEQ ID NO: 566132 - DNA, 15 bp, Homo sapiens
ccattttggccaggc

SEQ ID NO: 566133 - DNA, 15 bp, Homo sapiens
accattttggccagg

SEQ ID NO: 566134 - DNA, 15 bp, Homo sapiens
caccattttggccag

SEQ ID NO: 566135 - DNA, 15 bp, Homo sapiens
tcaccattttggcca

SEQ ID NO: 566136 - DNA, 15 bp, Homo sapiens
ttcaccattttggcc

SEQ ID NO: 566137 - DNA, 15 bp, Homo sapiens
tttcaccattttggc

SEQ ID NO: 566138 - DNA, 15 bp, Homo sapiens
gtttcaccattttgg

SEQ ID NO: 566139 - DNA, 15 bp, Homo sapiens
ggtttcaccattttg

SEQ ID NO: 566140 - DNA, 15 bp, Homo sapiens
gggtttcaccatttt

SEQ ID NO: 566141 - DNA, 15 bp, Homo sapiens
agggtttcaccattt

SEQ ID NO: 566142 - DNA, 15 bp, Homo sapiens
gagggtttcaccatt

SEQ ID NO: 566143 - DNA, 15 bp, Homo sapiens
agagggtttcaccat

SEQ ID NO: 566144 - DNA, 15 bp, Homo sapiens
gagagggtttcacca

SEQ ID NO: 566145 - DNA, 15 bp, Homo sapiens
agagagggtttcacc

SEQ ID NO: 566146 - DNA, 15 bp, Homo sapiens
gagagagggtttcac

SEQ ID NO: 566147 - DNA, 15 bp, Homo sapiens
agagagagggtttca

SEQ ID NO: 566148 - DNA, 15 bp, Homo sapiens
tagagagagggtttc

SEQ ID NO: 566149 - DNA, 15 bp, Homo sapiens
gtagagagagggttt

SEQ ID NO: 566150 - DNA, 15 bp, Homo sapiens
agtagagagagggtt

SEQ ID NO: 566151 - DNA, 15 bp, Homo sapiens
tagtagagagagggt

SEQ ID NO: 566152 - DNA, 15 bp, Homo sapiens
ttagtagagagaggg

SEQ ID NO: 566153 - DNA, 15 bp, Homo sapiens
tttagtagagagagg

SEQ ID NO: 566154 - DNA, 15 bp, Homo sapiens
atttagtagagagag

SEQ ID NO: 566155 - DNA, 15 bp, Homo sapiens
aatttagtagagaga

SEQ ID NO: 566156 - DNA, 15 bp, Homo sapiens
taatttagtagagag

SEQ ID NO: 566157 - DNA, 15 bp, Homo sapiens
ttaatttagtagaga

SEQ ID NO: 566158 - DNA, 15 bp, Homo sapiens
tttaatttagtagag

SEQ ID NO: 566159 - DNA, 15 bp, Homo sapiens
atttaatttagtaga

SEQ ID NO: 566160 - DNA, 15 bp, Homo sapiens
tatttaatttagtag

SEQ ID NO: 566161 - DNA, 15 bp, Homo sapiens
gtatttaatttagta

SEQ ID NO: 566162 - DNA, 15 bp, Homo sapiens
tgtatttaatttagt

SEQ ID NO: 566163 - DNA, 15 bp, Homo sapiens
ttgtatttaatttag

SEQ ID NO: 566164 - DNA, 15 bp, Homo sapiens
tttgtatttaattta

SEQ ID NO: 566165 - DNA, 15 bp, Homo sapiens
ttttgtatttaattt

SEQ ID NO: 566166 - DNA, 15 bp, Homo sapiens
tttttgtatttaatt

SEQ ID NO: 566167 - DNA, 15 bp, Homo sapiens
atttttgtatttaat

SEQ ID NO: 566168 - DNA, 15 bp, Homo sapiens
aatttttgtatttaa

SEQ ID NO: 566169 - DNA, 15 bp, Homo sapiens
taatttttgtattta

SEQ ID NO: 566170 - DNA, 15 bp, Homo sapiens
aggctaatttttgta

SEQ ID NO: 566171 - DNA, 15 bp, Homo sapiens
gcaggctaatttttg

SEQ ID NO: 566172 - DNA, 15 bp, Homo sapiens
agcaggctaattttt

SEQ ID NO: 566173 - DNA, 15 bp, Homo sapiens
cagcaggctaatttt

SEQ ID NO: 566174 - DNA, 15 bp, Homo sapiens
acagcaggctaattt

SEQ ID NO: 566175 - DNA, 15 bp, Homo sapiens
gacagcaggctaatt

SEQ ID NO: 566176 - DNA, 15 bp, Homo sapiens
cgacagcaggctaat

SEQ ID NO: 566177 - DNA, 15 bp, Homo sapiens
acgacagcaggctaa

SEQ ID NO: 566178 - DNA, 15 bp, Homo sapiens
tacgacagcaggcta

SEQ ID NO: 566179 - DNA, 15 bp, Homo sapiens
gtacgacagcaggct

SEQ ID NO: 566180 - DNA, 15 bp, Homo sapiens
agtacgacagcaggc

SEQ ID NO: 566181 - DNA, 15 bp, Homo sapiens
tagtacgacagcagg

SEQ ID NO: 566182 - DNA, 15 bp, Homo sapiens
gtagtacgacagcag

SEQ ID NO: 566183 - DNA, 15 bp, Homo sapiens
tgtagtacgacagca

SEQ ID NO: 566184 - DNA, 15 bp, Homo sapiens
gtgtagtacgacagc

SEQ ID NO: 566185 - DNA, 15 bp, Homo sapiens
cgtgtagtacgacag

SEQ ID NO: 566186 - DNA, 15 bp, Homo sapiens
gcgtgtagtacgaca

SEQ ID NO: 566187 - DNA, 15 bp, Homo sapiens
ggcgtgtagtacgac

SEQ ID NO: 566188 - DNA, 15 bp, Homo sapiens
aggcgtgtagtacga

SEQ ID NO: 566189 - DNA, 15 bp, Homo sapiens
aaggcgtgtagtacg

SEQ ID NO: 566190 - DNA, 15 bp, Homo sapiens
aaaggcgtgtagtac

SEQ ID NO: 566191 - DNA, 15 bp, Homo sapiens
taaaggcgtgtagta

SEQ ID NO: 566192 - DNA, 15 bp, Homo sapiens
ttaaaggcgtgtagt

SEQ ID NO: 566193 - DNA, 15 bp, Homo sapiens
attaaaggcgtgtag

SEQ ID NO: 566194 - DNA, 15 bp, Homo sapiens
gattaaaggcgtgta

SEQ ID NO: 566195 - DNA, 15 bp, Homo sapiens
ggattaaaggcgtgt

SEQ ID NO: 566196 - DNA, 15 bp, Homo sapiens
gggattaaaggcgtg

SEQ ID NO: 566197 - DNA, 15 bp, Homo sapiens
tgggattaaaggcgt

SEQ ID NO: 566198 - DNA, 15 bp, Homo sapiens
ctgggattaaaggcg

SEQ ID NO: 566199 - DNA, 15 bp, Homo sapiens
gctgggattaaaggc

SEQ ID NO: 566200 - DNA, 15 bp, Homo sapiens
agctgggattaaagg

SEQ ID NO: 566201 - DNA, 15 bp, Homo sapiens
tagctgggattaaag

SEQ ID NO: 566202 - DNA, 15 bp, Homo sapiens
atagctgggattaaa

SEQ ID NO: 566203 - DNA, 15 bp, Homo sapiens
aatagctgggattaa

SEQ ID NO: 566204 - DNA, 15 bp, Homo sapiens
gaatagctgggatta

SEQ ID NO: 566205 - DNA, 15 bp, Homo sapiens
cgaatagctgggatt

SEQ ID NO: 566206 - DNA, 15 bp, Homo sapiens
ccgaatagctgggat

SEQ ID NO: 566207 - DNA, 15 bp, Homo sapiens
cccgaatagctggga

SEQ ID NO: 566208 - DNA, 15 bp, Homo sapiens
tcccgaatagctggg

SEQ ID NO: 566209 - DNA, 15 bp, Homo sapiens
ctcccgaatagctgg

SEQ ID NO: 566210 - DNA, 15 bp, Homo sapiens
cctcccgaatagctg

SEQ ID NO: 566211 - DNA, 15 bp, Homo sapiens
gcctcccgaatagct

SEQ ID NO: 566212 - DNA, 15 bp, Homo sapiens
agcctcccgaatagc

SEQ ID NO: 566213 - DNA, 15 bp, Homo sapiens
cagcctcccgaatag

SEQ ID NO: 566214 - DNA, 15 bp, Homo sapiens
tcagcctcccgaata

SEQ ID NO: 566215 - DNA, 15 bp, Homo sapiens
ctcagcctcccgaat

SEQ ID NO: 566216 - DNA, 15 bp, Homo sapiens
cctcagcctcccgaa

SEQ ID NO: 566217 - DNA, 15 bp, Homo sapiens
gtgcctcagcctccc

SEQ ID NO: 566218 - DNA, 15 bp, Homo sapiens
tgtgcctcagcctcc

SEQ ID NO: 566219 - DNA, 15 bp, Homo sapiens
ttgtgcctcagcctc

SEQ ID NO: 566220 - DNA, 15 bp, Homo sapiens
attgtgcctcagcct

SEQ ID NO: 566221 - DNA, 15 bp, Homo sapiens
aattgtgcctcagcc

SEQ ID NO: 566222 - DNA, 15 bp, Homo sapiens
caattgtgcctcagc

SEQ ID NO: 566223 - DNA, 15 bp, Homo sapiens
gcaattgtgcctcag

SEQ ID NO: 566224 - DNA, 15 bp, Homo sapiens
agcaattgtgcctca

SEQ ID NO: 566225 - DNA, 15 bp, Homo sapiens
aagcaattgtgcctc

SEQ ID NO: 566226 - DNA, 15 bp, Homo sapiens
caagcaattgtgcct

SEQ ID NO: 566227 - DNA, 15 bp, Homo sapiens
tcaagcaattgtgcc

SEQ ID NO: 566228 - DNA, 15 bp, Homo sapiens
ttcaagcaattgtgc

SEQ ID NO: 566229 - DNA, 15 bp, Homo sapiens
gttcaagcaattgtg

SEQ ID NO: 566230 - DNA, 15 bp, Homo sapiens
ggttcaagcaattgt

SEQ ID NO: 566231 - DNA, 15 bp, Homo sapiens
aggttcaagcaattg

SEQ ID NO: 566232 - DNA, 15 bp, Homo sapiens
caggttcaagcaatt

SEQ ID NO: 566233 - DNA, 15 bp, Homo sapiens
ccaggttcaagcaat

SEQ ID NO: 566234 - DNA, 15 bp, Homo sapiens
cccaggttcaagcaa

SEQ ID NO: 566235 - DNA, 15 bp, Homo sapiens
acccaggttcaagca

SEQ ID NO: 566236 - DNA, 15 bp, Homo sapiens
cacccaggttcaagc

SEQ ID NO: 566237 - DNA, 15 bp, Homo sapiens
ccacccaggttcaag

SEQ ID NO: 566238 - DNA, 15 bp, Homo sapiens
gccacccaggttcaa

SEQ ID NO: 566239 - DNA, 15 bp, Homo sapiens
tgccacccaggttca

SEQ ID NO: 566240 - DNA, 15 bp, Homo sapiens
ctgccacccaggttc

SEQ ID NO: 566241 - DNA, 15 bp, Homo sapiens
tctgccacccaggtt

SEQ ID NO: 566242 - DNA, 15 bp, Homo sapiens
ctctgccacccaggt

SEQ ID NO: 566243 - DNA, 15 bp, Homo sapiens
cctctgccacccagg

SEQ ID NO: 566244 - DNA, 15 bp, Homo sapiens
acctctgccacccag

SEQ ID NO: 566245 - DNA, 15 bp, Homo sapiens
aacctctgccaccca

SEQ ID NO: 566246 - DNA, 15 bp, Homo sapiens
caacctctgccaccc

SEQ ID NO: 566247 - DNA, 15 bp, Homo sapiens
gcaacctctgccacc

SEQ ID NO: 566248 - DNA, 15 bp, Homo sapiens
tgcaacctctgccac

SEQ ID NO: 566249 - DNA, 15 bp, Homo sapiens
ctgcaacctctgcca

SEQ ID NO: 566250 - DNA, 15 bp, Homo sapiens
atcggctcactgcaa

SEQ ID NO: 566251 - DNA, 15 bp, Homo sapiens
gatcggctcactgca

SEQ ID NO: 566252 - DNA, 15 bp, Homo sapiens
tgatcggctcactgc

SEQ ID NO: 566253 - DNA, 15 bp, Homo sapiens
gtgatcggctcactg

SEQ ID NO: 566254 - DNA, 15 bp, Homo sapiens
tgtgatcggctcact

SEQ ID NO: 566255 - DNA, 15 bp, Homo sapiens
gtgtgatcggctcac

SEQ ID NO: 566256 - DNA, 15 bp, Homo sapiens
ggtgtgatcggctca

SEQ ID NO: 566257 - DNA, 15 bp, Homo sapiens
tggtgtgatcggctc

SEQ ID NO: 566258 - DNA, 15 bp, Homo sapiens
gtggtgtgatcggct

SEQ ID NO: 566259 - DNA, 15 bp, Homo sapiens
ggtggtgtgatcggc

SEQ ID NO: 566260 - DNA, 15 bp, Homo sapiens
cggtggtgtgatcgg

SEQ ID NO: 566261 - DNA, 15 bp, Homo sapiens
gcggtggtgtgatcg

SEQ ID NO: 566262 - DNA, 15 bp, Homo sapiens
tgcggtggtgtgatc

SEQ ID NO: 566263 - DNA, 15 bp, Homo sapiens
gtgcggtggtgtgat

SEQ ID NO: 566264 - DNA, 15 bp, Homo sapiens
agtgcggtggtgtga

SEQ ID NO: 566265 - DNA, 15 bp, Homo sapiens
gagtgcggtggtgtg

SEQ ID NO: 566266 - DNA, 15 bp, Homo sapiens
ggagtgcggtggtgt

SEQ ID NO: 566267 - DNA, 15 bp, Homo sapiens
tggagtgcggtggtg

SEQ ID NO: 566268 - DNA, 15 bp, Homo sapiens
ctggagtgcggtggt

SEQ ID NO: 566269 - DNA, 15 bp, Homo sapiens
gctggagtgcggtgg

SEQ ID NO: 566270 - DNA, 15 bp, Homo sapiens
ggctggagtgcggtg

SEQ ID NO: 566271 - DNA, 15 bp, Homo sapiens
aggctggagtgcggt

SEQ ID NO: 566272 - DNA, 15 bp, Homo sapiens
caggctggagtgcgg

SEQ ID NO: 566273 - DNA, 15 bp, Homo sapiens
ccaggctggagtgcg

SEQ ID NO: 566274 - DNA, 15 bp, Homo sapiens
ctccaggctggagtg

SEQ ID NO: 566275 - DNA, 15 bp, Homo sapiens
tctccaggctggagt

SEQ ID NO: 566276 - DNA, 15 bp, Homo sapiens
gtctccaggctggag

SEQ ID NO: 566277 - DNA, 15 bp, Homo sapiens
tgtctccaggctgga

SEQ ID NO: 566278 - DNA, 15 bp, Homo sapiens
ctgtctccaggctgg

SEQ ID NO: 566279 - DNA, 15 bp, Homo sapiens
tctgtctccaggctg

SEQ ID NO: 566280 - DNA, 15 bp, Homo sapiens
ctctgtctccaggct

SEQ ID NO: 566281 - DNA, 15 bp, Homo sapiens
gctctgtctccaggc

SEQ ID NO: 566282 - DNA, 15 bp, Homo sapiens
cgctctgtctccagg

SEQ ID NO: 566283 - DNA, 15 bp, Homo sapiens
tcgctctgtctccag

SEQ ID NO: 566284 - DNA, 15 bp, Homo sapiens
ctcgctctgtctcca

SEQ ID NO: 566285 - DNA, 15 bp, Homo sapiens
tctcgctctgtctcc

SEQ ID NO: 566286 - DNA, 15 bp, Homo sapiens
gtctcgctctgtctc

SEQ ID NO: 566287 - DNA, 15 bp, Homo sapiens
agtctcgctctgtct

SEQ ID NO: 566288 - DNA, 15 bp, Homo sapiens
tattttttttttttt

SEQ ID NO: 566289 - DNA, 15 bp, Homo sapiens
gtatttttttttttt

SEQ ID NO: 566290 - DNA, 15 bp, Homo sapiens
agtattttttttttt

SEQ ID NO: 566291 - DNA, 15 bp, Homo sapiens
cagtatttttttttt

SEQ ID NO: 566292 - DNA, 15 bp, Homo sapiens
acagtattttttttt

SEQ ID NO: 566293 - DNA, 15 bp, Homo sapiens
cacagtatttttttt

SEQ ID NO: 566294 - DNA, 15 bp, Homo sapiens
gcacagtattttttt

SEQ ID NO: 566295 - DNA, 15 bp, Homo sapiens
agcacagtatttttt

SEQ ID NO: 566296 - DNA, 15 bp, Homo sapiens
cagcacagtattttt

SEQ ID NO: 566297 - DNA, 15 bp, Homo sapiens
ccagcacagtatttt

SEQ ID NO: 566298 - DNA, 15 bp, Homo sapiens
accagcacagtattt

SEQ ID NO: 566299 - DNA, 15 bp, Homo sapiens
aaccagcacagtatt

SEQ ID NO: 566300 - DNA, 15 bp, Homo sapiens
gaaccagcacagtat

SEQ ID NO: 566301 - DNA, 15 bp, Homo sapiens
tgaaccagcacagta

SEQ ID NO: 566302 - DNA, 15 bp, Homo sapiens
atgaaccagcacagt

SEQ ID NO: 566303 - DNA, 15 bp, Homo sapiens
aatgaaccagcacag

SEQ ID NO: 566304 - DNA, 15 bp, Homo sapiens
aaatgaaccagcaca

SEQ ID NO: 566305 - DNA, 15 bp, Homo sapiens
caaatgaaccagcac

SEQ ID NO: 566306 - DNA, 15 bp, Homo sapiens
gcaaatgaaccagca

SEQ ID NO: 566307 - DNA, 15 bp, Homo sapiens
ggcaaatgaaccagc

SEQ ID NO: 566308 - DNA, 15 bp, Homo sapiens
aggcaaatgaaccag

SEQ ID NO: 566309 - DNA, 15 bp, Homo sapiens
taggcaaatgaacca

SEQ ID NO: 566310 - DNA, 15 bp, Homo sapiens
ataggcaaatgaacc

SEQ ID NO: 566311 - DNA, 15 bp, Homo sapiens
tataggcaaatgaac

SEQ ID NO: 566312 - DNA, 15 bp, Homo sapiens
ttataggcaaatgaa

SEQ ID NO: 566313 - DNA, 15 bp, Homo sapiens
tttataggcaaatga

SEQ ID NO: 566314 - DNA, 15 bp, Homo sapiens
ctttataggcaaatg

SEQ ID NO: 566315 - DNA, 15 bp, Homo sapiens
actttataggcaaat

SEQ ID NO: 566316 - DNA, 15 bp, Homo sapiens
gactttataggcaaa

SEQ ID NO: 566317 - DNA, 15 bp, Homo sapiens
tgactttataggcaa

SEQ ID NO: 566318 - DNA, 15 bp, Homo sapiens
gtgactttataggca

SEQ ID NO: 566319 - DNA, 15 bp, Homo sapiens
ggtgactttataggc

SEQ ID NO: 566320 - DNA, 15 bp, Homo sapiens
tggtgactttatagg

SEQ ID NO: 566321 - DNA, 15 bp, Homo sapiens
ttggtgactttatag

SEQ ID NO: 566322 - DNA, 15 bp, Homo sapiens
attggtgactttata

SEQ ID NO: 566323 - DNA, 15 bp, Homo sapiens
gattggtgactttat

SEQ ID NO: 566324 - DNA, 15 bp, Homo sapiens
agattggtgacttta

SEQ ID NO: 566325 - DNA, 15 bp, Homo sapiens
tagattggtgacttt

SEQ ID NO: 566326 - DNA, 15 bp, Homo sapiens
ttagattggtgactt

SEQ ID NO: 566327 - DNA, 15 bp, Homo sapiens
attagattggtgact

SEQ ID NO: 566328 - DNA, 15 bp, Homo sapiens
cattagattggtgac

SEQ ID NO: 566329 - DNA, 15 bp, Homo sapiens
acattagattggtga

SEQ ID NO: 566330 - DNA, 15 bp, Homo sapiens
aacattagattggtg

SEQ ID NO: 566331 - DNA, 15 bp, Homo sapiens
aaacattagattggt

SEQ ID NO: 566332 - DNA, 15 bp, Homo sapiens
caaacattagattgg

SEQ ID NO: 566333 - DNA, 15 bp, Homo sapiens
ccaaacattagattg

SEQ ID NO: 566334 - DNA, 15 bp, Homo sapiens
cccaaacattagatt

SEQ ID NO: 566335 - DNA, 15 bp, Homo sapiens
acccaaacattagat

SEQ ID NO: 566336 - DNA, 15 bp, Homo sapiens
tacccaaacattaga

SEQ ID NO: 566337 - DNA, 15 bp, Homo sapiens
atacccaaacattag

SEQ ID NO: 566338 - DNA, 15 bp, Homo sapiens
aatacccaaacatta

SEQ ID NO: 566339 - DNA, 15 bp, Homo sapiens
aaatacccaaacatt

SEQ ID NO: 566340 - DNA, 15 bp, Homo sapiens
caaatacccaaacat

SEQ ID NO: 566341 - DNA, 15 bp, Homo sapiens
tcaaatacccaaaca

SEQ ID NO: 566342 - DNA, 15 bp, Homo sapiens
atcaaatacccaaac

SEQ ID NO: 566343 - DNA, 15 bp, Homo sapiens
gatcaaatacccaaa

SEQ ID NO: 566344 - DNA, 15 bp, Homo sapiens
tgatcaaatacccaa

SEQ ID NO: 566345 - DNA, 15 bp, Homo sapiens
atgatcaaataccca

SEQ ID NO: 566346 - DNA, 15 bp, Homo sapiens
aatgatcaaataccc

SEQ ID NO: 566347 - DNA, 15 bp, Homo sapiens
gaatgatcaaatacc

SEQ ID NO: 566348 - DNA, 15 bp, Homo sapiens
tgaatgatcaaatac

SEQ ID NO: 566349 - DNA, 15 bp, Homo sapiens
ctgaatgatcaaata

SEQ ID NO: 566350 - DNA, 15 bp, Homo sapiens
tctgaatgatcaaat

SEQ ID NO: 566351 - DNA, 15 bp, Homo sapiens
ttctgaatgatcaaa

SEQ ID NO: 566352 - DNA, 15 bp, Homo sapiens
attctgaatgatcaa

SEQ ID NO: 566353 - DNA, 15 bp, Homo sapiens
aattctgaatgatca

SEQ ID NO: 566354 - DNA, 15 bp, Homo sapiens
gaattctgaatgatc

SEQ ID NO: 566355 - DNA, 15 bp, Homo sapiens
agaattctgaatgat

SEQ ID NO: 566356 - DNA, 15 bp, Homo sapiens
tagaattctgaatga

SEQ ID NO: 566357 - DNA, 15 bp, Homo sapiens
ctagaattctgaatg

SEQ ID NO: 566358 - DNA, 15 bp, Homo sapiens
tctagaattctgaat

SEQ ID NO: 566359 - DNA, 15 bp, Homo sapiens
ttctagaattctgaa

SEQ ID NO: 566360 - DNA, 15 bp, Homo sapiens
tttctagaattctga

SEQ ID NO: 566361 - DNA, 15 bp, Homo sapiens
gtttctagaattctg

SEQ ID NO: 566362 - DNA, 15 bp, Homo sapiens
tgtttctagaattct

SEQ ID NO: 566363 - DNA, 15 bp, Homo sapiens
gtgtttctagaattc

SEQ ID NO: 566364 - DNA, 15 bp, Homo sapiens
agtgtttctagaatt

SEQ ID NO: 566365 - DNA, 15 bp, Homo sapiens
cagtgtttctagaat

SEQ ID NO: 566366 - DNA, 15 bp, Homo sapiens
tcagtgtttctagaa

SEQ ID NO: 566367 - DNA, 15 bp, Homo sapiens
ttcagtgtttctaga

SEQ ID NO: 566368 - DNA, 15 bp, Homo sapiens
cttcagtgtttctag

SEQ ID NO: 566369 - DNA, 15 bp, Homo sapiens
tcttcagtgtttcta

SEQ ID NO: 566370 - DNA, 15 bp, Homo sapiens
atcttcagtgtttct

SEQ ID NO: 566371 - DNA, 15 bp, Homo sapiens
gatcttcagtgtttc

SEQ ID NO: 566372 - DNA, 15 bp, Homo sapiens
ggatcttcagtgttt

SEQ ID NO: 566373 - DNA, 15 bp, Homo sapiens
gggatcttcagtgtt

SEQ ID NO: 566374 - DNA, 15 bp, Homo sapiens
agggatcttcagtgt

SEQ ID NO: 566375 - DNA, 15 bp, Homo sapiens
aagggatcttcagtg

SEQ ID NO: 566376 - DNA, 15 bp, Homo sapiens
gaagggatcttcagt

SEQ ID NO: 566377 - DNA, 15 bp, Homo sapiens
tgaagggatcttcag

SEQ ID NO: 566378 - DNA, 15 bp, Homo sapiens
gtgaagggatcttca

SEQ ID NO: 566379 - DNA, 15 bp, Homo sapiens
ggtgaagggatcttc

SEQ ID NO: 566380 - DNA, 15 bp, Homo sapiens
aggtgaagggatctt

SEQ ID NO: 566381 - DNA, 15 bp, Homo sapiens
taggtgaagggatct

SEQ ID NO: 566382 - DNA, 15 bp, Homo sapiens
gtaggtgaagggatc

SEQ ID NO: 566383 - DNA, 15 bp, Homo sapiens
agtaggtgaagggat

SEQ ID NO: 566384 - DNA, 15 bp, Homo sapiens
gagtaggtgaaggga

SEQ ID NO: 566385 - DNA, 15 bp, Homo sapiens
tgagtaggtgaaggg

SEQ ID NO: 566386 - DNA, 15 bp, Homo sapiens
ctgagtaggtgaagg

SEQ ID NO: 566387 - DNA, 15 bp, Homo sapiens
cctgagtaggtgaag

SEQ ID NO: 566388 - DNA, 15 bp, Homo sapiens
ccctgagtaggtgaa

SEQ ID NO: 566389 - DNA, 15 bp, Homo sapiens
accctgagtaggtga

SEQ ID NO: 566390 - DNA, 15 bp, Homo sapiens
gaccctgagtaggtg

SEQ ID NO: 566391 - DNA, 15 bp, Homo sapiens
agaccctgagtaggt

SEQ ID NO: 566392 - DNA, 15 bp, Homo sapiens
cagaccctgagtagg

SEQ ID NO: 566393 - DNA, 15 bp, Homo sapiens
ccagaccctgagtag

SEQ ID NO: 566394 - DNA, 15 bp, Homo sapiens
cccagaccctgagta

SEQ ID NO: 566395 - DNA, 15 bp, Homo sapiens
gcccagaccctgagt

SEQ ID NO: 566396 - DNA, 15 bp, Homo sapiens
ggcccagaccctgag

SEQ ID NO: 566397 - DNA, 15 bp, Homo sapiens
aggcccagaccctga

SEQ ID NO: 566398 - DNA, 15 bp, Homo sapiens
gaggcccagaccctg

SEQ ID NO: 566399 - DNA, 15 bp, Homo sapiens
agaggcccagaccct

SEQ ID NO: 566400 - DNA, 15 bp, Homo sapiens
aagaggcccagaccc

SEQ ID NO: 566401 - DNA, 15 bp, Homo sapiens
aaagaggcccagacc

SEQ ID NO: 566402 - DNA, 15 bp, Homo sapiens
gaaagaggcccagac

SEQ ID NO: 566403 - DNA, 15 bp, Homo sapiens
tgaaagaggcccaga

SEQ ID NO: 566404 - DNA, 15 bp, Homo sapiens
atgaaagaggcccag

SEQ ID NO: 566405 - DNA, 15 bp, Homo sapiens
catgaaagaggccca

SEQ ID NO: 566406 - DNA, 15 bp, Homo sapiens
tcatgaaagaggccc

SEQ ID NO: 566407 - DNA, 15 bp, Homo sapiens
ttcatgaaagaggcc

SEQ ID NO: 566408 - DNA, 15 bp, Homo sapiens
attcatgaaagaggc

SEQ ID NO: 566409 - DNA, 15 bp, Homo sapiens
cattcatgaaagagg

SEQ ID NO: 566410 - DNA, 15 bp, Homo sapiens
gcattcatgaaagag

SEQ ID NO: 566411 - DNA, 15 bp, Homo sapiens
agcattcatgaaaga

SEQ ID NO: 566412 - DNA, 15 bp, Homo sapiens
aagcattcatgaaag

SEQ ID NO: 566413 - DNA, 15 bp, Homo sapiens
taagcattcatgaaa

SEQ ID NO: 566414 - DNA, 15 bp, Homo sapiens
ttaagcattcatgaa

SEQ ID NO: 566415 - DNA, 15 bp, Homo sapiens
attaagcattcatga

SEQ ID NO: 566416 - DNA, 15 bp, Homo sapiens
aattaagcattcatg

SEQ ID NO: 566417 - DNA, 15 bp, Homo sapiens
gaattaagcattcat

SEQ ID NO: 566418 - DNA, 15 bp, Homo sapiens
ggaattaagcattca

SEQ ID NO: 566419 - DNA, 15 bp, Homo sapiens
gggaattaagcattc

SEQ ID NO: 566420 - DNA, 15 bp, Homo sapiens
tgggaattaagcatt

SEQ ID NO: 566421 - DNA, 15 bp, Homo sapiens
gtgggaattaagcat

SEQ ID NO: 566422 - DNA, 15 bp, Homo sapiens
tgtgggaattaagca

SEQ ID NO: 566423 - DNA, 15 bp, Homo sapiens
ctgtgggaattaagc

SEQ ID NO: 566424 - DNA, 15 bp, Homo sapiens
gctgtgggaattaag

SEQ ID NO: 566425 - DNA, 15 bp, Homo sapiens
ggctgtgggaattaa

SEQ ID NO: 566426 - DNA, 15 bp, Homo sapiens
aggctgtgggaatta

SEQ ID NO: 566427 - DNA, 15 bp, Homo sapiens
aaggctgtgggaatt

SEQ ID NO: 566428 - DNA, 15 bp, Homo sapiens
taaggctgtgggaat

SEQ ID NO: 566429 - DNA, 15 bp, Homo sapiens
gtaaggctgtgggaa

SEQ ID NO: 566430 - DNA, 15 bp, Homo sapiens
tgtaaggctgtggga

SEQ ID NO: 566431 - DNA, 15 bp, Homo sapiens
ctgtaaggctgtggg

SEQ ID NO: 566432 - DNA, 15 bp, Homo sapiens
actgtaaggctgtgg

SEQ ID NO: 566433 - DNA, 15 bp, Homo sapiens
aactgtaaggctgtg

SEQ ID NO: 566434 - DNA, 15 bp, Homo sapiens
aaactgtaaggctgt

SEQ ID NO: 566435 - DNA, 15 bp, Homo sapiens
taaactgtaaggctg

SEQ ID NO: 566436 - DNA, 15 bp, Homo sapiens
ataaactgtaaggct

SEQ ID NO: 566437 - DNA, 15 bp, Homo sapiens
tataaactgtaaggc

SEQ ID NO: 566438 - DNA, 15 bp, Homo sapiens
gtataaactgtaagg

SEQ ID NO: 566439 - DNA, 15 bp, Homo sapiens
ggtataaactgtaag

SEQ ID NO: 566440 - DNA, 15 bp, Homo sapiens
gggtataaactgtaa

SEQ ID NO: 566441 - DNA, 15 bp, Homo sapiens
agggtataaactgta

SEQ ID NO: 566442 - DNA, 15 bp, Homo sapiens
aagggtataaactgt

SEQ ID NO: 566443 - DNA, 15 bp, Homo sapiens
gaagggtataaactg

SEQ ID NO: 566444 - DNA, 15 bp, Homo sapiens
agaagggtataaact

SEQ ID NO: 566445 - DNA, 15 bp, Homo sapiens
gagaagggtataaac

SEQ ID NO: 566446 - DNA, 15 bp, Homo sapiens
ggagaagggtataaa

SEQ ID NO: 566447 - DNA, 15 bp, Homo sapiens
aggagaagggtataa

SEQ ID NO: 566448 - DNA, 15 bp, Homo sapiens
gaggagaagggtata

SEQ ID NO: 566449 - DNA, 15 bp, Homo sapiens
agaggagaagggtat

SEQ ID NO: 566450 - DNA, 15 bp, Homo sapiens
gagaggagaagggta

SEQ ID NO: 566451 - DNA, 15 bp, Homo sapiens
ggagaggagaagggt

SEQ ID NO: 566452 - DNA, 15 bp, Homo sapiens
gggagaggagaaggg

SEQ ID NO: 566453 - DNA, 15 bp, Homo sapiens
tgggagaggagaagg

SEQ ID NO: 566454 - DNA, 15 bp, Homo sapiens
gtgggagaggagaag

SEQ ID NO: 566455 - DNA, 15 bp, Homo sapiens
agtgggagaggagaa

SEQ ID NO: 566456 - DNA, 15 bp, Homo sapiens
aagtgggagaggaga

SEQ ID NO: 566457 - DNA, 15 bp, Homo sapiens
aaagtgggagaggag

SEQ ID NO: 566458 - DNA, 15 bp, Homo sapiens
aaaagtgggagagga

SEQ ID NO: 566459 - DNA, 15 bp, Homo sapiens
caaaagtgggagagg

SEQ ID NO: 566460 - DNA, 15 bp, Homo sapiens
tcaaaagtgggagag

SEQ ID NO: 566461 - DNA, 15 bp, Homo sapiens
atcaaaagtgggaga

SEQ ID NO: 566462 - DNA, 15 bp, Homo sapiens
gatcaaaagtgggag

SEQ ID NO: 566463 - DNA, 15 bp, Homo sapiens
ggatcaaaagtggga

SEQ ID NO: 566464 - DNA, 15 bp, Homo sapiens
aggatcaaaagtggg

SEQ ID NO: 566465 - DNA, 15 bp, Homo sapiens
gaggatcaaaagtgg

SEQ ID NO: 566466 - DNA, 15 bp, Homo sapiens
tgaggatcaaaagtg

SEQ ID NO: 566467 - DNA, 15 bp, Homo sapiens
ttgaggatcaaaagt

SEQ ID NO: 566468 - DNA, 15 bp, Homo sapiens
cttgaggatcaaaag

SEQ ID NO: 566469 - DNA, 15 bp, Homo sapiens
acttgaggatcaaaa

SEQ ID NO: 566470 - DNA, 15 bp, Homo sapiens
aacttgaggatcaaa

SEQ ID NO: 566471 - DNA, 15 bp, Homo sapiens
aaacttgaggatcaa

SEQ ID NO: 566472 - DNA, 15 bp, Homo sapiens
aaaacttgaggatca

SEQ ID NO: 566473 - DNA, 15 bp, Homo sapiens
aaaaacttgaggatc

SEQ ID NO: 566474 - DNA, 15 bp, Homo sapiens
aaaaaacttgaggat

SEQ ID NO: 566475 - DNA, 15 bp, Homo sapiens
caaaaaacttgagga

SEQ ID NO: 566476 - DNA, 15 bp, Homo sapiens
gcaaaaaacttgagg

SEQ ID NO: 566477 - DNA, 15 bp, Homo sapiens
agcaaaaaacttgag

SEQ ID NO: 566478 - DNA, 15 bp, Homo sapiens
aagcaaaaaacttga

SEQ ID NO: 566479 - DNA, 15 bp, Homo sapiens
gaagcaaaaaacttg

SEQ ID NO: 566480 - DNA, 15 bp, Homo sapiens
agaagcaaaaaactt

SEQ ID NO: 566481 - DNA, 15 bp, Homo sapiens
gagaagcaaaaaact

SEQ ID NO: 566482 - DNA, 15 bp, Homo sapiens
tgagaagcaaaaaac

SEQ ID NO: 566483 - DNA, 15 bp, Homo sapiens
gtgagaagcaaaaaa

SEQ ID NO: 566484 - DNA, 15 bp, Homo sapiens
tgtgagaagcaaaaa

SEQ ID NO: 566485 - DNA, 15 bp, Homo sapiens
atgtgagaagcaaaa

SEQ ID NO: 566486 - DNA, 15 bp, Homo sapiens
aatgtgagaagcaaa

SEQ ID NO: 566487 - DNA, 15 bp, Homo sapiens
aaatgtgagaagcaa

SEQ ID NO: 566488 - DNA, 15 bp, Homo sapiens
aaaatgtgagaagca

SEQ ID NO: 566489 - DNA, 15 bp, Homo sapiens
aaaaatgtgagaagc

SEQ ID NO: 566490 - DNA, 15 bp, Homo sapiens
aaaaaatgtgagaag

SEQ ID NO: 566491 - DNA, 15 bp, Homo sapiens
taaaaaatgtgagaa

SEQ ID NO: 566492 - DNA, 15 bp, Homo sapiens
gtaaaaaatgtgaga

SEQ ID NO: 566493 - DNA, 15 bp, Homo sapiens
agtaaaaaatgtgag

SEQ ID NO: 566494 - DNA, 15 bp, Homo sapiens
cagtaaaaaatgtga

SEQ ID NO: 566495 - DNA, 15 bp, Homo sapiens
ccagtaaaaaatgtg

SEQ ID NO: 566496 - DNA, 15 bp, Homo sapiens
cccagtaaaaaatgt

SEQ ID NO: 566497 - DNA, 15 bp, Homo sapiens
acccagtaaaaaatg

SEQ ID NO: 566498 - DNA, 15 bp, Homo sapiens
aacccagtaaaaaat

SEQ ID NO: 566499 - DNA, 15 bp, Homo sapiens
aaacccagtaaaaaa

SEQ ID NO: 566500 - DNA, 15 bp, Homo sapiens
caaacccagtaaaaa

SEQ ID NO: 566501 - DNA, 15 bp, Homo sapiens
acaaacccagtaaaa

SEQ ID NO: 566502 - DNA, 15 bp, Homo sapiens
cacaaacccagtaaa

SEQ ID NO: 566503 - DNA, 15 bp, Homo sapiens
gcacaaacccagtaa

SEQ ID NO: 566504 - DNA, 15 bp, Homo sapiens
agcacaaacccagta

SEQ ID NO: 566505 - DNA, 15 bp, Homo sapiens
aagcacaaacccagt

SEQ ID NO: 566506 - DNA, 15 bp, Homo sapiens
gaagcacaaacccag

SEQ ID NO: 566507 - DNA, 15 bp, Homo sapiens
agaagcacaaaccca

SEQ ID NO: 566508 - DNA, 15 bp, Homo sapiens
gagaagcacaaaccc

SEQ ID NO: 566509 - DNA, 15 bp, Homo sapiens
tgagaagcacaaacc

SEQ ID NO: 566510 - DNA, 15 bp, Homo sapiens
ctgagaagcacaaac

SEQ ID NO: 566511 - DNA, 15 bp, Homo sapiens
actgagaagcacaaa

SEQ ID NO: 566512 - DNA, 15 bp, Homo sapiens
tactgagaagcacaa

SEQ ID NO: 566513 - DNA, 15 bp, Homo sapiens
atactgagaagcaca

SEQ ID NO: 566514 - DNA, 15 bp, Homo sapiens
gatactgagaagcac

SEQ ID NO: 566515 - DNA, 15 bp, Homo sapiens
ggatactgagaagca

SEQ ID NO: 566516 - DNA, 15 bp, Homo sapiens
aggatactgagaagc

SEQ ID NO: 566517 - DNA, 15 bp, Homo sapiens
aaggatactgagaag

SEQ ID NO: 566518 - DNA, 15 bp, Homo sapiens
caaggatactgagaa

SEQ ID NO: 566519 - DNA, 15 bp, Homo sapiens
tcaaggatactgaga

SEQ ID NO: 566520 - DNA, 15 bp, Homo sapiens
gtcaaggatactgag

SEQ ID NO: 566521 - DNA, 15 bp, Homo sapiens
ggtcaaggatactga

SEQ ID NO: 566522 - DNA, 15 bp, Homo sapiens
tggtcaaggatactg

SEQ ID NO: 566523 - DNA, 15 bp, Homo sapiens
ttggtcaaggatact

SEQ ID NO: 566524 - DNA, 15 bp, Homo sapiens
tttggtcaaggatac

SEQ ID NO: 566525 - DNA, 15 bp, Homo sapiens
ctttggtcaaggata

SEQ ID NO: 566526 - DNA, 15 bp, Homo sapiens
gctttggtcaaggat

SEQ ID NO: 566527 - DNA, 15 bp, Homo sapiens
tgctttggtcaagga

SEQ ID NO: 566528 - DNA, 15 bp, Homo sapiens
ttgctttggtcaagg

SEQ ID NO: 566529 - DNA, 15 bp, Homo sapiens
gttgctttggtcaag

SEQ ID NO: 566530 - DNA, 15 bp, Homo sapiens
agttgctttggtcaa

SEQ ID NO: 566531 - DNA, 15 bp, Homo sapiens
cagttgctttggtca

SEQ ID NO: 566532 - DNA, 15 bp, Homo sapiens
tcagttgctttggtc

SEQ ID NO: 566533 - DNA, 15 bp, Homo sapiens
atcagttgctttggt

SEQ ID NO: 566534 - DNA, 15 bp, Homo sapiens
catcagttgctttgg

SEQ ID NO: 566535 - DNA, 15 bp, Homo sapiens
gcatcagttgctttg

SEQ ID NO: 566536 - DNA, 15 bp, Homo sapiens
agcatcagttgcttt

SEQ ID NO: 566537 - DNA, 15 bp, Homo sapiens
cagcatcagttgctt

SEQ ID NO: 566538 - DNA, 15 bp, Homo sapiens
acagcatcagttgct

SEQ ID NO: 566539 - DNA, 15 bp, Homo sapiens
tacagcatcagttgc

SEQ ID NO: 566540 - DNA, 15 bp, Homo sapiens
ttacagcatcagttg

SEQ ID NO: 566541 - DNA, 15 bp, Homo sapiens
cttacagcatcagtt

SEQ ID NO: 566542 - DNA, 15 bp, Homo sapiens
tcttacagcatcagt

SEQ ID NO: 566543 - DNA, 15 bp, Homo sapiens
ttcttacagcatcag

SEQ ID NO: 566544 - DNA, 15 bp, Homo sapiens
tttcttacagcatca

SEQ ID NO: 566545 - DNA, 15 bp, Homo sapiens
atttcttacagcatc

SEQ ID NO: 566546 - DNA, 15 bp, Homo sapiens
catttcttacagcat

SEQ ID NO: 566547 - DNA, 15 bp, Homo sapiens
tcatttcttacagca

SEQ ID NO: 566548 - DNA, 15 bp, Homo sapiens
ctcatttcttacagc

SEQ ID NO: 566549 - DNA, 15 bp, Homo sapiens
tctcatttcttacag

SEQ ID NO: 566550 - DNA, 15 bp, Homo sapiens
gtctcatttcttaca

SEQ ID NO: 566551 - DNA, 15 bp, Homo sapiens
agtctcatttcttac

SEQ ID NO: 566552 - DNA, 15 bp, Homo sapiens
aagtctcatttctta

SEQ ID NO: 566553 - DNA, 15 bp, Homo sapiens
gaagtctcatttctt

SEQ ID NO: 566554 - DNA, 15 bp, Homo sapiens
tgaagtctcatttct

SEQ ID NO: 566555 - DNA, 15 bp, Homo sapiens
ttgaagtctcatttc

SEQ ID NO: 566556 - DNA, 15 bp, Homo sapiens
tttgaagtctcattt

SEQ ID NO: 566557 - DNA, 15 bp, Homo sapiens
gtttgaagtctcatt

SEQ ID NO: 566558 - DNA, 15 bp, Homo sapiens
ggtttgaagtctcat

SEQ ID NO: 566559 - DNA, 15 bp, Homo sapiens
tggtttgaagtctca

SEQ ID NO: 566560 - DNA, 15 bp, Homo sapiens
atggtttgaagtctc

SEQ ID NO: 566561 - DNA, 15 bp, Homo sapiens
aatggtttgaagtct

SEQ ID NO: 566562 - DNA, 15 bp, Homo sapiens
aaatggtttgaagtc

SEQ ID NO: 566563 - DNA, 15 bp, Homo sapiens
taaatggtttgaagt

SEQ ID NO: 566564 - DNA, 15 bp, Homo sapiens
gtaaatggtttgaag

SEQ ID NO: 566565 - DNA, 15 bp, Homo sapiens
ggtaaatggtttgaa

SEQ ID NO: 566566 - DNA, 15 bp, Homo sapiens
gggtaaatggtttga

SEQ ID NO: 566567 - DNA, 15 bp, Homo sapiens
tgggtaaatggtttg

SEQ ID NO: 566568 - DNA, 15 bp, Homo sapiens
gtgggtaaatggttt

SEQ ID NO: 566569 - DNA, 15 bp, Homo sapiens
tgtgggtaaatggtt

SEQ ID NO: 566570 - DNA, 15 bp, Homo sapiens
gtgtgggtaaatggt

SEQ ID NO: 566571 - DNA, 15 bp, Homo sapiens
agtgtgggtaaatgg

SEQ ID NO: 566572 - DNA, 15 bp, Homo sapiens
cagtgtgggtaaatg

SEQ ID NO: 566573 - DNA, 15 bp, Homo sapiens
ccagtgtgggtaaat

SEQ ID NO: 566574 - DNA, 15 bp, Homo sapiens
cccagtgtgggtaaa

SEQ ID NO: 566575 - DNA, 15 bp, Homo sapiens
acccagtgtgggtaa

SEQ ID NO: 566576 - DNA, 15 bp, Homo sapiens
cacccagtgtgggta

SEQ ID NO: 566577 - DNA, 15 bp, Homo sapiens
tcacccagtgtgggt

SEQ ID NO: 566578 - DNA, 15 bp, Homo sapiens
atcacccagtgtggg

SEQ ID NO: 566579 - DNA, 15 bp, Homo sapiens
aatcacccagtgtgg

SEQ ID NO: 566580 - DNA, 15 bp, Homo sapiens
taatcacccagtgtg

SEQ ID NO: 566581 - DNA, 15 bp, Homo sapiens
ttaatcacccagtgt

SEQ ID NO: 566582 - DNA, 15 bp, Homo sapiens
cttaatcacccagtg

SEQ ID NO: 566583 - DNA, 15 bp, Homo sapiens
ccttaatcacccagt

SEQ ID NO: 566584 - DNA, 15 bp, Homo sapiens
accttaatcacccag

SEQ ID NO: 566585 - DNA, 15 bp, Homo sapiens
taccttaatcaccca

SEQ ID NO: 566586 - DNA, 15 bp, Homo sapiens
ctaccttaatcaccc

SEQ ID NO: 566587 - DNA, 15 bp, Homo sapiens
actaccttaatcacc

SEQ ID NO: 566588 - DNA, 15 bp, Homo sapiens
aactaccttaatcac

SEQ ID NO: 566589 - DNA, 15 bp, Homo sapiens
aaactaccttaatca

SEQ ID NO: 566590 - DNA, 15 bp, Homo sapiens
taaactaccttaatc

SEQ ID NO: 566591 - DNA, 15 bp, Homo sapiens
ttaaactaccttaat

SEQ ID NO: 566592 - DNA, 15 bp, Homo sapiens
tttaaactaccttaa

SEQ ID NO: 566593 - DNA, 15 bp, Homo sapiens
ttttaaactacctta

SEQ ID NO: 566594 - DNA, 15 bp, Homo sapiens
tttttaaactacctt

SEQ ID NO: 566595 - DNA, 15 bp, Homo sapiens
ttttttaaactacct

SEQ ID NO: 566596 - DNA, 15 bp, Homo sapiens
tttttttaaactacc

SEQ ID NO: 566597 - DNA, 15 bp, Homo sapiens
ctttttttaaactac

SEQ ID NO: 566598 - DNA, 15 bp, Homo sapiens
tctttttttaaacta

SEQ ID NO: 566599 - DNA, 15 bp, Homo sapiens
ttctttttttaaact

SEQ ID NO: 566600 - DNA, 15 bp, Homo sapiens
tttctttttttaaac

SEQ ID NO: 566601 - DNA, 15 bp, Homo sapiens
atttctttttttaaa

SEQ ID NO: 566602 - DNA, 15 bp, Homo sapiens
catttctttttttaa

SEQ ID NO: 566603 - DNA, 15 bp, Homo sapiens
tcatttcttttttta

SEQ ID NO: 566604 - DNA, 15 bp, Homo sapiens
ctcatttcttttttt

SEQ ID NO: 566605 - DNA, 15 bp, Homo sapiens
cctcatttctttttt

SEQ ID NO: 566606 - DNA, 15 bp, Homo sapiens
gcctcatttcttttt

SEQ ID NO: 566607 - DNA, 15 bp, Homo sapiens
ggcctcatttctttt

SEQ ID NO: 566608 - DNA, 15 bp, Homo sapiens
tggcctcatttcttt

SEQ ID NO: 566609 - DNA, 15 bp, Homo sapiens
ctggcctcatttctt

SEQ ID NO: 566610 - DNA, 15 bp, Homo sapiens
cctggcctcatttct

SEQ ID NO: 566611 - DNA, 15 bp, Homo sapiens
gcctggcctcatttc

SEQ ID NO: 566612 - DNA, 15 bp, Homo sapiens
tgcctggcctcattt

SEQ ID NO: 566613 - DNA, 15 bp, Homo sapiens
gtgcctggcctcatt

SEQ ID NO: 566614 - DNA, 15 bp, Homo sapiens
cgtgcctggcctcat

SEQ ID NO: 566615 - DNA, 15 bp, Homo sapiens
ccgtgcctggcctca

SEQ ID NO: 566616 - DNA, 15 bp, Homo sapiens
accgtgcctggcctc

SEQ ID NO: 566617 - DNA, 15 bp, Homo sapiens
caccgtgcctggcct

SEQ ID NO: 566618 - DNA, 15 bp, Homo sapiens
ccaccgtgcctggcc

SEQ ID NO: 566619 - DNA, 15 bp, Homo sapiens
gccaccgtgcctggc

SEQ ID NO: 566620 - DNA, 15 bp, Homo sapiens
agccaccgtgcctgg

SEQ ID NO: 566621 - DNA, 15 bp, Homo sapiens
gagccaccgtgcctg

SEQ ID NO: 566622 - DNA, 15 bp, Homo sapiens
ggagccaccgtgcct

SEQ ID NO: 566623 - DNA, 15 bp, Homo sapiens
gggagccaccgtgcc

SEQ ID NO: 566624 - DNA, 15 bp, Homo sapiens
cgggagccaccgtgc

SEQ ID NO: 566625 - DNA, 15 bp, Homo sapiens
gcgggagccaccgtg

SEQ ID NO: 566626 - DNA, 15 bp, Homo sapiens
ggcgggagccaccgt

SEQ ID NO: 566627 - DNA, 15 bp, Homo sapiens
aggcgggagccaccg

SEQ ID NO: 566628 - DNA, 15 bp, Homo sapiens
caggcgggagccacc

SEQ ID NO: 566629 - DNA, 15 bp, Homo sapiens
acaggcgggagccac

SEQ ID NO: 566630 - DNA, 15 bp, Homo sapiens
tacaggcgggagcca

SEQ ID NO: 566631 - DNA, 15 bp, Homo sapiens
ttacaggcgggagcc

SEQ ID NO: 566632 - DNA, 15 bp, Homo sapiens
attacaggcgggagc

SEQ ID NO: 566633 - DNA, 15 bp, Homo sapiens
gattacaggcgggag

SEQ ID NO: 566634 - DNA, 15 bp, Homo sapiens
ggattacaggcggga

SEQ ID NO: 566635 - DNA, 15 bp, Homo sapiens
gggattacaggcggg

SEQ ID NO: 566636 - DNA, 15 bp, Homo sapiens
tgggattacaggcgg

SEQ ID NO: 566637 - DNA, 15 bp, Homo sapiens
tctgggattacaggc

SEQ ID NO: 566638 - DNA, 15 bp, Homo sapiens
ttctgggattacagg

SEQ ID NO: 566639 - DNA, 15 bp, Homo sapiens
gttctgggattacag

SEQ ID NO: 566640 - DNA, 15 bp, Homo sapiens
agttctgggattaca

SEQ ID NO: 566641 - DNA, 15 bp, Homo sapiens
aagttctgggattac

SEQ ID NO: 566642 - DNA, 15 bp, Homo sapiens
aaagttctgggatta

SEQ ID NO: 566643 - DNA, 15 bp, Homo sapiens
caaagttctgggatt

SEQ ID NO: 566644 - DNA, 15 bp, Homo sapiens
ccaaagttctgggat

SEQ ID NO: 566645 - DNA, 15 bp, Homo sapiens
cccaaagttctggga

SEQ ID NO: 566646 - DNA, 15 bp, Homo sapiens
tcccaaagttctggg

SEQ ID NO: 566647 - DNA, 15 bp, Homo sapiens
ctcccaaagttctgg

SEQ ID NO: 566648 - DNA, 15 bp, Homo sapiens
cctcccaaagttctg

SEQ ID NO: 566649 - DNA, 15 bp, Homo sapiens
gcctcccaaagttct

SEQ ID NO: 566650 - DNA, 15 bp, Homo sapiens
ggcctcccaaagttc

SEQ ID NO: 566651 - DNA, 15 bp, Homo sapiens
cggcctcccaaagtt

SEQ ID NO: 566652 - DNA, 15 bp, Homo sapiens
tgcctcggcctccca

SEQ ID NO: 566653 - DNA, 15 bp, Homo sapiens
ctgcctcggcctccc

SEQ ID NO: 566654 - DNA, 15 bp, Homo sapiens
cctgcctcggcctcc

SEQ ID NO: 566655 - DNA, 15 bp, Homo sapiens
acctgcctcggcctc

SEQ ID NO: 566656 - DNA, 15 bp, Homo sapiens
cacctgcctcggcct

SEQ ID NO: 566657 - DNA, 15 bp, Homo sapiens
acacctgcctcggcc

SEQ ID NO: 566658 - DNA, 15 bp, Homo sapiens
aacacctgcctcggc

SEQ ID NO: 566659 - DNA, 15 bp, Homo sapiens
aaacacctgcctcgg

SEQ ID NO: 566660 - DNA, 15 bp, Homo sapiens
gaaacacctgcctcg

SEQ ID NO: 566661 - DNA, 15 bp, Homo sapiens
tgaaacacctgcctc

SEQ ID NO: 566662 - DNA, 15 bp, Homo sapiens
gtgaaacacctgcct

SEQ ID NO: 566663 - DNA, 15 bp, Homo sapiens
agtgaaacacctgcc

SEQ ID NO: 566664 - DNA, 15 bp, Homo sapiens
aagtgaaacacctgc

SEQ ID NO: 566665 - DNA, 15 bp, Homo sapiens
aaagtgaaacacctg

SEQ ID NO: 566666 - DNA, 15 bp, Homo sapiens
taaagtgaaacacct

SEQ ID NO: 566667 - DNA, 15 bp, Homo sapiens
ttaaagtgaaacacc

SEQ ID NO: 566668 - DNA, 15 bp, Homo sapiens
cttaaagtgaaacac

SEQ ID NO: 566669 - DNA, 15 bp, Homo sapiens
acttaaagtgaaaca

SEQ ID NO: 566670 - DNA, 15 bp, Homo sapiens
gacttaaagtgaaac

SEQ ID NO: 566671 - DNA, 15 bp, Homo sapiens
tgacttaaagtgaaa

SEQ ID NO: 566672 - DNA, 15 bp, Homo sapiens
ctgacttaaagtgaa

SEQ ID NO: 566673 - DNA, 15 bp, Homo sapiens
cctgacttaaagtga

SEQ ID NO: 566674 - DNA, 15 bp, Homo sapiens
tcctgacttaaagtg

SEQ ID NO: 566675 - DNA, 15 bp, Homo sapiens
ctcctgacttaaagt

SEQ ID NO: 566676 - DNA, 15 bp, Homo sapiens
actcctgacttaaag

SEQ ID NO: 566677 - DNA, 15 bp, Homo sapiens
aactcctgacttaaa

SEQ ID NO: 566678 - DNA, 15 bp, Homo sapiens
gaactcctgacttaa

SEQ ID NO: 566679 - DNA, 15 bp, Homo sapiens
cgaactcctgactta

SEQ ID NO: 566680 - DNA, 15 bp, Homo sapiens
acgaactcctgactt

SEQ ID NO: 566681 - DNA, 15 bp, Homo sapiens
cacgaactcctgact

SEQ ID NO: 566682 - DNA, 15 bp, Homo sapiens
tcacgaactcctgac

SEQ ID NO: 566683 - DNA, 15 bp, Homo sapiens
gtcacgaactcctga

SEQ ID NO: 566684 - DNA, 15 bp, Homo sapiens
ggtcacgaactcctg

SEQ ID NO: 566685 - DNA, 15 bp, Homo sapiens
tggtcacgaactcct

SEQ ID NO: 566686 - DNA, 15 bp, Homo sapiens
ctggtcacgaactcc

SEQ ID NO: 566687 - DNA, 15 bp, Homo sapiens
gctggtcacgaactc

SEQ ID NO: 566688 - DNA, 15 bp, Homo sapiens
ggctggtcacgaact

SEQ ID NO: 566689 - DNA, 15 bp, Homo sapiens
aggctggtcacgaac

SEQ ID NO: 566690 - DNA, 15 bp, Homo sapiens
caggctggtcacgaa

SEQ ID NO: 566691 - DNA, 15 bp, Homo sapiens
ccaggctggtcacga

SEQ ID NO: 566692 - DNA, 15 bp, Homo sapiens
gccaggctggtcacg

SEQ ID NO: 566693 - DNA, 15 bp, Homo sapiens
ggccaggctggtcac

SEQ ID NO: 566694 - DNA, 15 bp, Homo sapiens
tggccaggctggtca

SEQ ID NO: 566695 - DNA, 15 bp, Homo sapiens
gccatgttggccagg

SEQ ID NO: 566696 - DNA, 15 bp, Homo sapiens
tgccatgttggccag

SEQ ID NO: 566697 - DNA, 15 bp, Homo sapiens
ttgccatgttggcca

SEQ ID NO: 566698 - DNA, 15 bp, Homo sapiens
tttgccatgttggcc

SEQ ID NO: 566699 - DNA, 15 bp, Homo sapiens
ttttgccatgttggc

SEQ ID NO: 566700 - DNA, 15 bp, Homo sapiens
gttttgccatgttgg

SEQ ID NO: 566701 - DNA, 15 bp, Homo sapiens
ggttttgccatgttg

SEQ ID NO: 566702 - DNA, 15 bp, Homo sapiens
gggttttgccatgtt

SEQ ID NO: 566703 - DNA, 15 bp, Homo sapiens
ggggttttgccatgt

SEQ ID NO: 566704 - DNA, 15 bp, Homo sapiens
cggggttttgccatg

SEQ ID NO: 566705 - DNA, 15 bp, Homo sapiens
acggggttttgccat

SEQ ID NO: 566706 - DNA, 15 bp, Homo sapiens
gacggggttttgcca

SEQ ID NO: 566707 - DNA, 15 bp, Homo sapiens
agacggggttttgcc

SEQ ID NO: 566708 - DNA, 15 bp, Homo sapiens
gagacggggttttgc

SEQ ID NO: 566709 - DNA, 15 bp, Homo sapiens
agagacggggttttg

SEQ ID NO: 566710 - DNA, 15 bp, Homo sapiens
tagagacggggtttt

SEQ ID NO: 566711 - DNA, 15 bp, Homo sapiens
gtagagacggggttt

SEQ ID NO: 566712 - DNA, 15 bp, Homo sapiens
agtagagacggggtt

SEQ ID NO: 566713 - DNA, 15 bp, Homo sapiens
tagtagagacggggt

SEQ ID NO: 566714 - DNA, 15 bp, Homo sapiens
gttgtatttttagta

SEQ ID NO: 566715 - DNA, 15 bp, Homo sapiens
ggttgtatttttagt

SEQ ID NO: 566716 - DNA, 15 bp, Homo sapiens
tggttgtatttttag

SEQ ID NO: 566717 - DNA, 15 bp, Homo sapiens
atggttgtattttta

SEQ ID NO: 566718 - DNA, 15 bp, Homo sapiens
aatggttgtattttt

SEQ ID NO: 566719 - DNA, 15 bp, Homo sapiens
taatggttgtatttt

SEQ ID NO: 566720 - DNA, 15 bp, Homo sapiens
ctaatggttgtattt

SEQ ID NO: 566721 - DNA, 15 bp, Homo sapiens
gctaatggttgtatt

SEQ ID NO: 566722 - DNA, 15 bp, Homo sapiens
ggctaatggttgtat

SEQ ID NO: 566723 - DNA, 15 bp, Homo sapiens
tggctaatggttgta

SEQ ID NO: 566724 - DNA, 15 bp, Homo sapiens
ctggctaatggttgt

SEQ ID NO: 566725 - DNA, 15 bp, Homo sapiens
cctggctaatggttg

SEQ ID NO: 566726 - DNA, 15 bp, Homo sapiens
gcctggctaatggtt

SEQ ID NO: 566727 - DNA, 15 bp, Homo sapiens
tgcctggctaatggt

SEQ ID NO: 566728 - DNA, 15 bp, Homo sapiens
atgcctggctaatgg

SEQ ID NO: 566729 - DNA, 15 bp, Homo sapiens
catgcctggctaatg

SEQ ID NO: 566730 - DNA, 15 bp, Homo sapiens
ccatgcctggctaat

SEQ ID NO: 566731 - DNA, 15 bp, Homo sapiens
accatgcctggctaa

SEQ ID NO: 566732 - DNA, 15 bp, Homo sapiens
caccatgcctggcta

SEQ ID NO: 566733 - DNA, 15 bp, Homo sapiens
agccaccatgcctgg

SEQ ID NO: 566734 - DNA, 15 bp, Homo sapiens
gagccaccatgcctg

SEQ ID NO: 566735 - DNA, 15 bp, Homo sapiens
tgagccaccatgcct

SEQ ID NO: 566736 - DNA, 15 bp, Homo sapiens
tcatgagccaccatg

SEQ ID NO: 566737 - DNA, 15 bp, Homo sapiens
gtcatgagccaccat

SEQ ID NO: 566738 - DNA, 15 bp, Homo sapiens
agtcatgagccacca

SEQ ID NO: 566739 - DNA, 15 bp, Homo sapiens
cagtcatgagccacc

SEQ ID NO: 566740 - DNA, 15 bp, Homo sapiens
acagtcatgagccac

SEQ ID NO: 566741 - DNA, 15 bp, Homo sapiens
tacagtcatgagcca

SEQ ID NO: 566742 - DNA, 15 bp, Homo sapiens
ttacagtcatgagcc

SEQ ID NO: 566743 - DNA, 15 bp, Homo sapiens
attacagtcatgagc

SEQ ID NO: 566744 - DNA, 15 bp, Homo sapiens
gattacagtcatgag

SEQ ID NO: 566745 - DNA, 15 bp, Homo sapiens
ggattacagtcatga

SEQ ID NO: 566746 - DNA, 15 bp, Homo sapiens
gggattacagtcatg

SEQ ID NO: 566747 - DNA, 15 bp, Homo sapiens
tgggattacagtcat

SEQ ID NO: 566748 - DNA, 15 bp, Homo sapiens
ctgggattacagtca

SEQ ID NO: 566749 - DNA, 15 bp, Homo sapiens
gctgggattacagtc

SEQ ID NO: 566750 - DNA, 15 bp, Homo sapiens
cagtagctgggatta

SEQ ID NO: 566751 - DNA, 15 bp, Homo sapiens
ccagtagctgggatt

SEQ ID NO: 566752 - DNA, 15 bp, Homo sapiens
accagtagctgggat

SEQ ID NO: 566753 - DNA, 15 bp, Homo sapiens
caccagtagctggga

SEQ ID NO: 566754 - DNA, 15 bp, Homo sapiens
tcaccagtagctggg

SEQ ID NO: 566755 - DNA, 15 bp, Homo sapiens
ctcaccagtagctgg

SEQ ID NO: 566756 - DNA, 15 bp, Homo sapiens
cctcaccagtagctg

SEQ ID NO: 566757 - DNA, 15 bp, Homo sapiens
gcctcaccagtagct

SEQ ID NO: 566758 - DNA, 15 bp, Homo sapiens
agcctcaccagtagc

SEQ ID NO: 566759 - DNA, 15 bp, Homo sapiens
cagcctcaccagtag

SEQ ID NO: 566760 - DNA, 15 bp, Homo sapiens
tcagcctcaccagta

SEQ ID NO: 566761 - DNA, 15 bp, Homo sapiens
ctcagcctcaccagt

SEQ ID NO: 566762 - DNA, 15 bp, Homo sapiens
cctcagcctcaccag

SEQ ID NO: 566763 - DNA, 15 bp, Homo sapiens
gcctcagcctcacca

SEQ ID NO: 566764 - DNA, 15 bp, Homo sapiens
tgcctcagcctcacc

SEQ ID NO: 566765 - DNA, 15 bp, Homo sapiens
ctgcctcagcctcac

SEQ ID NO: 566766 - DNA, 15 bp, Homo sapiens
cctgcctcagcctca

SEQ ID NO: 566767 - DNA, 15 bp, Homo sapiens
gattctcctgcctca

SEQ ID NO: 566768 - DNA, 15 bp, Homo sapiens
cgattctcctgcctc

SEQ ID NO: 566769 - DNA, 15 bp, Homo sapiens
gcgattctcctgcct

SEQ ID NO: 566770 - DNA, 15 bp, Homo sapiens
agcgattctcctgcc

SEQ ID NO: 566771 - DNA, 15 bp, Homo sapiens
aagcgattctcctgc

SEQ ID NO: 566772 - DNA, 15 bp, Homo sapiens
caagcgattctcctg

SEQ ID NO: 566773 - DNA, 15 bp, Homo sapiens
tcaagcgattctcct

SEQ ID NO: 566774 - DNA, 15 bp, Homo sapiens
ttcaagcgattctcc

SEQ ID NO: 566775 - DNA, 15 bp, Homo sapiens
gttcaagcgattctc

SEQ ID NO: 566776 - DNA, 15 bp, Homo sapiens
gggttcaagcgattc

SEQ ID NO: 566777 - DNA, 15 bp, Homo sapiens
tgggttcaagcgatt

SEQ ID NO: 566778 - DNA, 15 bp, Homo sapiens
ctgggttcaagcgat

SEQ ID NO: 566779 - DNA, 15 bp, Homo sapiens
cctgggttcaagcga

SEQ ID NO: 566780 - DNA, 15 bp, Homo sapiens
tcctgggttcaagcg

SEQ ID NO: 566781 - DNA, 15 bp, Homo sapiens
taacctctgcctcct

SEQ ID NO: 566782 - DNA, 15 bp, Homo sapiens
gtaacctctgcctcc

SEQ ID NO: 566783 - DNA, 15 bp, Homo sapiens
tgtaacctctgcctc

SEQ ID NO: 566784 - DNA, 15 bp, Homo sapiens
ctgtaacctctgcct

SEQ ID NO: 566785 - DNA, 15 bp, Homo sapiens
actgtaacctctgcc

SEQ ID NO: 566786 - DNA, 15 bp, Homo sapiens
cactgtaacctctgc

SEQ ID NO: 566787 - DNA, 15 bp, Homo sapiens
tcactgtaacctctg

SEQ ID NO: 566788 - DNA, 15 bp, Homo sapiens
ctcactgtaacctct

SEQ ID NO: 566789 - DNA, 15 bp, Homo sapiens
gctcactgtaacctc

SEQ ID NO: 566790 - DNA, 15 bp, Homo sapiens
ggctcactgtaacct

SEQ ID NO: 566791 - DNA, 15 bp, Homo sapiens
tggctcactgtaacc

SEQ ID NO: 566792 - DNA, 15 bp, Homo sapiens
ttggctcactgtaac

SEQ ID NO: 566793 - DNA, 15 bp, Homo sapiens
cttggctcactgtaa

SEQ ID NO: 566794 - DNA, 15 bp, Homo sapiens
tcttggctcactgta

SEQ ID NO: 566795 - DNA, 15 bp, Homo sapiens
atcttggctcactgt

SEQ ID NO: 566796 - DNA, 15 bp, Homo sapiens
catcttggctcactg

SEQ ID NO: 566797 - DNA, 15 bp, Homo sapiens
ccatcttggctcact

SEQ ID NO: 566798 - DNA, 15 bp, Homo sapiens
gccatcttggctcac

SEQ ID NO: 566799 - DNA, 15 bp, Homo sapiens
tgccatcttggctca

SEQ ID NO: 566800 - DNA, 15 bp, Homo sapiens
gtgccatcttggctc

SEQ ID NO: 566801 - DNA, 15 bp, Homo sapiens
ggtgccatcttggct

SEQ ID NO: 566802 - DNA, 15 bp, Homo sapiens
tggtgccatcttggc

SEQ ID NO: 566803 - DNA, 15 bp, Homo sapiens
gtggtgccatcttgg

SEQ ID NO: 566804 - DNA, 15 bp, Homo sapiens
agtggtgccatcttg

SEQ ID NO: 566805 - DNA, 15 bp, Homo sapiens
cagtggtgccatctt

SEQ ID NO: 566806 - DNA, 15 bp, Homo sapiens
gcagtggtgccatct

SEQ ID NO: 566807 - DNA, 15 bp, Homo sapiens
tgcagtggtgccatc

SEQ ID NO: 566808 - DNA, 15 bp, Homo sapiens
gtgcagtggtgccat

SEQ ID NO: 566809 - DNA, 15 bp, Homo sapiens
agtgcagtggtgcca

SEQ ID NO: 566810 - DNA, 15 bp, Homo sapiens
gagtgcagtggtgcc

SEQ ID NO: 566811 - DNA, 15 bp, Homo sapiens
tttgttgcccaggct

SEQ ID NO: 566812 - DNA, 15 bp, Homo sapiens
ctttgttgcccaggc

SEQ ID NO: 566813 - DNA, 15 bp, Homo sapiens
gctttgttgcccagg

SEQ ID NO: 566814 - DNA, 15 bp, Homo sapiens
cgctttgttgcccag

SEQ ID NO: 566815 - DNA, 15 bp, Homo sapiens
tcgctttgttgccca

SEQ ID NO: 566816 - DNA, 15 bp, Homo sapiens
ctcgctttgttgccc

SEQ ID NO: 566817 - DNA, 15 bp, Homo sapiens
tctcgctttgttgcc

SEQ ID NO: 566818 - DNA, 15 bp, Homo sapiens
gtctcgctttgttgc

SEQ ID NO: 566819 - DNA, 15 bp, Homo sapiens
agtctcgctttgttg

SEQ ID NO: 566820 - DNA, 15 bp, Homo sapiens
gagtctcgctttgtt

SEQ ID NO: 566821 - DNA, 15 bp, Homo sapiens
ggagtctcgctttgt

SEQ ID NO: 566822 - DNA, 15 bp, Homo sapiens
tggagtctcgctttg

SEQ ID NO: 566823 - DNA, 15 bp, Homo sapiens
atggagtctcgcttt

SEQ ID NO: 566824 - DNA, 15 bp, Homo sapiens
gatggagtctcgctt

SEQ ID NO: 566825 - DNA, 15 bp, Homo sapiens
agatggagtctcgct

SEQ ID NO: 566826 - DNA, 15 bp, Homo sapiens
gagatggagtctcgc

SEQ ID NO: 566827 - DNA, 15 bp, Homo sapiens
ggagatggagtctcg

SEQ ID NO: 566828 - DNA, 15 bp, Homo sapiens
tggagatggagtctc

SEQ ID NO: 566829 - DNA, 15 bp, Homo sapiens
ttggagatggagtct

SEQ ID NO: 566830 - DNA, 15 bp, Homo sapiens
tttggagatggagtc

SEQ ID NO: 566831 - DNA, 15 bp, Homo sapiens
ttttggagatggagt

SEQ ID NO: 566832 - DNA, 15 bp, Homo sapiens
tttttggagatggag

SEQ ID NO: 566833 - DNA, 15 bp, Homo sapiens
ttttttggagatgga

SEQ ID NO: 566834 - DNA, 15 bp, Homo sapiens
attttttggagatgg

SEQ ID NO: 566835 - DNA, 15 bp, Homo sapiens
tattttttggagatg

SEQ ID NO: 566836 - DNA, 15 bp, Homo sapiens
ttattttttggagat

SEQ ID NO: 566837 - DNA, 15 bp, Homo sapiens
tttattttttggaga

SEQ ID NO: 566838 - DNA, 15 bp, Homo sapiens
atttattttttggag

SEQ ID NO: 566839 - DNA, 15 bp, Homo sapiens
aatttattttttgga

SEQ ID NO: 566840 - DNA, 15 bp, Homo sapiens
taatttattttttgg

SEQ ID NO: 566841 - DNA, 15 bp, Homo sapiens
ttaatttattttttg

SEQ ID NO: 566842 - DNA, 15 bp, Homo sapiens
attaatttatttttt

SEQ ID NO: 566843 - DNA, 15 bp, Homo sapiens
aattaatttattttt

SEQ ID NO: 566844 - DNA, 15 bp, Homo sapiens
aaattaatttatttt

SEQ ID NO: 566845 - DNA, 15 bp, Homo sapiens
taaattaatttattt

SEQ ID NO: 566846 - DNA, 15 bp, Homo sapiens
ataaattaatttatt

SEQ ID NO: 566847 - DNA, 15 bp, Homo sapiens
aataaattaatttat

SEQ ID NO: 566848 - DNA, 15 bp, Homo sapiens
taataaattaattta

SEQ ID NO: 566849 - DNA, 15 bp, Homo sapiens
ttaataaattaattt

SEQ ID NO: 566850 - DNA, 15 bp, Homo sapiens
attaataaattaatt

SEQ ID NO: 566851 - DNA, 15 bp, Homo sapiens
aattaataaattaat

SEQ ID NO: 566852 - DNA, 15 bp, Homo sapiens
aaattaataaattaa

SEQ ID NO: 566853 - DNA, 15 bp, Homo sapiens
taaattaataaatta

SEQ ID NO: 566854 - DNA, 15 bp, Homo sapiens
ttaaattaataaatt

SEQ ID NO: 566855 - DNA, 15 bp, Homo sapiens
tttaaattaataaat

SEQ ID NO: 566856 - DNA, 15 bp, Homo sapiens
ttttaaattaataaa

SEQ ID NO: 566857 - DNA, 15 bp, Homo sapiens
tttttaaattaataa

SEQ ID NO: 566858 - DNA, 15 bp, Homo sapiens
ctttttaaattaata

SEQ ID NO: 566859 - DNA, 15 bp, Homo sapiens
tctttttaaattaat

SEQ ID NO: 566860 - DNA, 15 bp, Homo sapiens
ttctttttaaattaa

SEQ ID NO: 566861 - DNA, 15 bp, Homo sapiens
tttctttttaaatta

SEQ ID NO: 566862 - DNA, 15 bp, Homo sapiens
ttttctttttaaatt

SEQ ID NO: 566863 - DNA, 15 bp, Homo sapiens
tttttctttttaaat

SEQ ID NO: 566864 - DNA, 15 bp, Homo sapiens
ctttttctttttaaa

SEQ ID NO: 566865 - DNA, 15 bp, Homo sapiens
tctttttctttttaa

SEQ ID NO: 566866 - DNA, 15 bp, Homo sapiens
ttctttttcttttta

SEQ ID NO: 566867 - DNA, 15 bp, Homo sapiens
tttttctttttcttt

SEQ ID NO: 566868 - DNA, 15 bp, Homo sapiens
ttttttctttttctt

SEQ ID NO: 566869 - DNA, 15 bp, Homo sapiens
cttttttctttttct

SEQ ID NO: 566870 - DNA, 15 bp, Homo sapiens
tcttttttctttttc

SEQ ID NO: 566871 - DNA, 15 bp, Homo sapiens
ttcttttttcttttt

SEQ ID NO: 566872 - DNA, 15 bp, Homo sapiens
atttcttttttcttt

SEQ ID NO: 566873 - DNA, 15 bp, Homo sapiens
catttcttttttctt

SEQ ID NO: 566874 - DNA, 15 bp, Homo sapiens
tcatttcttttttct

SEQ ID NO: 566875 - DNA, 15 bp, Homo sapiens
ttcatttcttttttc

SEQ ID NO: 566876 - DNA, 15 bp, Homo sapiens
cttcatttctttttt

SEQ ID NO: 566877 - DNA, 15 bp, Homo sapiens
tcttcatttcttttt

SEQ ID NO: 566878 - DNA, 15 bp, Homo sapiens
ttcttcatttctttt

SEQ ID NO: 566879 - DNA, 15 bp, Homo sapiens
gttcttcatttcttt

SEQ ID NO: 566880 - DNA, 15 bp, Homo sapiens
agttcttcatttctt

SEQ ID NO: 566881 - DNA, 15 bp, Homo sapiens
aagttcttcatttct

SEQ ID NO: 566882 - DNA, 15 bp, Homo sapiens
taagttcttcatttc

SEQ ID NO: 566883 - DNA, 15 bp, Homo sapiens
gtaagttcttcattt

SEQ ID NO: 566884 - DNA, 15 bp, Homo sapiens
cgtaagttcttcatt

SEQ ID NO: 566885 - DNA, 15 bp, Homo sapiens
ccgtaagttcttcat

SEQ ID NO: 566886 - DNA, 15 bp, Homo sapiens
accgtaagttcttca

SEQ ID NO: 566887 - DNA, 15 bp, Homo sapiens
taccgtaagttcttc

SEQ ID NO: 566888 - DNA, 15 bp, Homo sapiens
ttaccgtaagttctt

SEQ ID NO: 566889 - DNA, 15 bp, Homo sapiens
attaccgtaagttct

SEQ ID NO: 566890 - DNA, 15 bp, Homo sapiens
aattaccgtaagttc

SEQ ID NO: 566891 - DNA, 15 bp, Homo sapiens
taattaccgtaagtt

SEQ ID NO: 566892 - DNA, 15 bp, Homo sapiens
ctaattaccgtaagt

SEQ ID NO: 566893 - DNA, 15 bp, Homo sapiens
actaattaccgtaag

SEQ ID NO: 566894 - DNA, 15 bp, Homo sapiens
cactaattaccgtaa

SEQ ID NO: 566895 - DNA, 15 bp, Homo sapiens
acactaattaccgta

SEQ ID NO: 566896 - DNA, 15 bp, Homo sapiens
cacactaattaccgt

SEQ ID NO: 566897 - DNA, 15 bp, Homo sapiens
ccacactaattaccg

SEQ ID NO: 566898 - DNA, 15 bp, Homo sapiens
accacactaattacc

SEQ ID NO: 566899 - DNA, 15 bp, Homo sapiens
aaccacactaattac

SEQ ID NO: 566900 - DNA, 15 bp, Homo sapiens
taaccacactaatta

SEQ ID NO: 566901 - DNA, 15 bp, Homo sapiens
ctaaccacactaatt

SEQ ID NO: 566902 - DNA, 15 bp, Homo sapiens
cctaaccacactaat

SEQ ID NO: 566903 - DNA, 15 bp, Homo sapiens
ccctaaccacactaa

SEQ ID NO: 566904 - DNA, 15 bp, Homo sapiens
tccctaaccacacta

SEQ ID NO: 566905 - DNA, 15 bp, Homo sapiens
gtccctaaccacact

SEQ ID NO: 566906 - DNA, 15 bp, Homo sapiens
tgtccctaaccacac

SEQ ID NO: 566907 - DNA, 15 bp, Homo sapiens
ctgtccctaaccaca

SEQ ID NO: 566908 - DNA, 15 bp, Homo sapiens
actgtccctaaccac

SEQ ID NO: 566909 - DNA, 15 bp, Homo sapiens
cactgtccctaacca

SEQ ID NO: 566910 - DNA, 15 bp, Homo sapiens
tcactgtccctaacc

SEQ ID NO: 566911 - DNA, 15 bp, Homo sapiens
ctcactgtccctaac

SEQ ID NO: 566912 - DNA, 15 bp, Homo sapiens
actcactgtccctaa

SEQ ID NO: 566913 - DNA, 15 bp, Homo sapiens
aactcactgtcccta

SEQ ID NO: 566914 - DNA, 15 bp, Homo sapiens
taactcactgtccct

SEQ ID NO: 566915 - DNA, 15 bp, Homo sapiens
ctaactcactgtccc

SEQ ID NO: 566916 - DNA, 15 bp, Homo sapiens
tctaactcactgtcc

SEQ ID NO: 566917 - DNA, 15 bp, Homo sapiens
ttctaactcactgtc

SEQ ID NO: 566918 - DNA, 15 bp, Homo sapiens
tttctaactcactgt

SEQ ID NO: 566919 - DNA, 15 bp, Homo sapiens
atttctaactcactg

SEQ ID NO: 566920 - DNA, 15 bp, Homo sapiens
aatttctaactcact

SEQ ID NO: 566921 - DNA, 15 bp, Homo sapiens
caatttctaactcac

SEQ ID NO: 566922 - DNA, 15 bp, Homo sapiens
acaatttctaactca

SEQ ID NO: 566923 - DNA, 15 bp, Homo sapiens
gacaatttctaactc

SEQ ID NO: 566924 - DNA, 15 bp, Homo sapiens
tgacaatttctaact

SEQ ID NO: 566925 - DNA, 15 bp, Homo sapiens
gtgacaatttctaac

SEQ ID NO: 566926 - DNA, 15 bp, Homo sapiens
tgtgacaatttctaa

SEQ ID NO: 566927 - DNA, 15 bp, Homo sapiens
atgtgacaatttcta

SEQ ID NO: 566928 - DNA, 15 bp, Homo sapiens
gatgtgacaatttct

SEQ ID NO: 566929 - DNA, 15 bp, Homo sapiens
tgatgtgacaatttc

SEQ ID NO: 566930 - DNA, 15 bp, Homo sapiens
ttgatgtgacaattt

SEQ ID NO: 566931 - DNA, 15 bp, Homo sapiens
tttgatgtgacaatt

SEQ ID NO: 566932 - DNA, 15 bp, Homo sapiens
ttttgatgtgacaat

SEQ ID NO: 566933 - DNA, 15 bp, Homo sapiens
attttgatgtgacaa

SEQ ID NO: 566934 - DNA, 15 bp, Homo sapiens
tattttgatgtgaca

SEQ ID NO: 566935 - DNA, 15 bp, Homo sapiens
gtattttgatgtgac

SEQ ID NO: 566936 - DNA, 15 bp, Homo sapiens
tgtattttgatgtga

SEQ ID NO: 566937 - DNA, 15 bp, Homo sapiens
ttgtattttgatgtg

SEQ ID NO: 566938 - DNA, 15 bp, Homo sapiens
tttgtattttgatgt

SEQ ID NO: 566939 - DNA, 15 bp, Homo sapiens
ctttgtattttgatg

SEQ ID NO: 566940 - DNA, 15 bp, Homo sapiens
actttgtattttgat

SEQ ID NO: 566941 - DNA, 15 bp, Homo sapiens
aactttgtattttga

SEQ ID NO: 566942 - DNA, 15 bp, Homo sapiens
aaactttgtattttg

SEQ ID NO: 566943 - DNA, 15 bp, Homo sapiens
aaaactttgtatttt

SEQ ID NO: 566944 - DNA, 15 bp, Homo sapiens
gaaaactttgtattt

SEQ ID NO: 566945 - DNA, 15 bp, Homo sapiens
tgaaaactttgtatt

SEQ ID NO: 566946 - DNA, 15 bp, Homo sapiens
ttgaaaactttgtat

SEQ ID NO: 566947 - DNA, 15 bp, Homo sapiens
tttgaaaactttgta

SEQ ID NO: 566948 - DNA, 15 bp, Homo sapiens
ttttgaaaactttgt

SEQ ID NO: 566949 - DNA, 15 bp, Homo sapiens
gttttgaaaactttg

SEQ ID NO: 566950 - DNA, 15 bp, Homo sapiens
tgttttgaaaacttt

SEQ ID NO: 566951 - DNA, 15 bp, Homo sapiens
ctgttttgaaaactt

SEQ ID NO: 566952 - DNA, 15 bp, Homo sapiens
actgttttgaaaact

SEQ ID NO: 566953 - DNA, 15 bp, Homo sapiens
tactgttttgaaaac

SEQ ID NO: 566954 - DNA, 15 bp, Homo sapiens
atactgttttgaaaa

SEQ ID NO: 566955 - DNA, 15 bp, Homo sapiens
tatactgttttgaaa

SEQ ID NO: 566956 - DNA, 15 bp, Homo sapiens
atatactgttttgaa

SEQ ID NO: 566957 - DNA, 15 bp, Homo sapiens
aatatactgttttga

SEQ ID NO: 566958 - DNA, 15 bp, Homo sapiens
aaatatactgttttg

SEQ ID NO: 566959 - DNA, 15 bp, Homo sapiens
aaaatatactgtttt

SEQ ID NO: 566960 - DNA, 15 bp, Homo sapiens
taaaatatactgttt

SEQ ID NO: 566961 - DNA, 15 bp, Homo sapiens
ataaaatatactgtt

SEQ ID NO: 566962 - DNA, 15 bp, Homo sapiens
aataaaatatactgt

SEQ ID NO: 566963 - DNA, 15 bp, Homo sapiens
aaataaaatatactg

SEQ ID NO: 566964 - DNA, 15 bp, Homo sapiens
aaaataaaatatact

SEQ ID NO: 566965 - DNA, 15 bp, Homo sapiens
taaaataaaatatac

SEQ ID NO: 566966 - DNA, 15 bp, Homo sapiens
gtaaaataaaatata

SEQ ID NO: 566967 - DNA, 15 bp, Homo sapiens
tgtaaaataaaatat

SEQ ID NO: 566968 - DNA, 15 bp, Homo sapiens
ttgtaaaataaaata

SEQ ID NO: 566969 - DNA, 15 bp, Homo sapiens
attgtaaaataaaat

SEQ ID NO: 566970 - DNA, 15 bp, Homo sapiens
tattgtaaaataaaa

SEQ ID NO: 566971 - DNA, 15 bp, Homo sapiens
ctattgtaaaataaa

SEQ ID NO: 566972 - DNA, 15 bp, Homo sapiens
gctattgtaaaataa

SEQ ID NO: 566973 - DNA, 15 bp, Homo sapiens
tgctattgtaaaata

SEQ ID NO: 566974 - DNA, 15 bp, Homo sapiens
ttgctattgtaaaat

SEQ ID NO: 566975 - DNA, 15 bp, Homo sapiens
gttgctattgtaaaa

SEQ ID NO: 566976 - DNA, 15 bp, Homo sapiens
ggttgctattgtaaa

SEQ ID NO: 566977 - DNA, 15 bp, Homo sapiens
tggttgctattgtaa

SEQ ID NO: 566978 - DNA, 15 bp, Homo sapiens
ttggttgctattgta

SEQ ID NO: 566979 - DNA, 15 bp, Homo sapiens
gttggttgctattgt

SEQ ID NO: 566980 - DNA, 15 bp, Homo sapiens
agttggttgctattg

SEQ ID NO: 566981 - DNA, 15 bp, Homo sapiens
gagttggttgctatt

SEQ ID NO: 566982 - DNA, 15 bp, Homo sapiens
ggagttggttgctat

SEQ ID NO: 566983 - DNA, 15 bp, Homo sapiens
gggagttggttgcta

SEQ ID NO: 566984 - DNA, 15 bp, Homo sapiens
ggggagttggttgct

SEQ ID NO: 566985 - DNA, 15 bp, Homo sapiens
tggggagttggttgc

SEQ ID NO: 566986 - DNA, 15 bp, Homo sapiens
ctggggagttggttg

SEQ ID NO: 566987 - DNA, 15 bp, Homo sapiens
actggggagttggtt

SEQ ID NO: 566988 - DNA, 15 bp, Homo sapiens
aactggggagttggt

SEQ ID NO: 566989 - DNA, 15 bp, Homo sapiens
aaactggggagttgg

SEQ ID NO: 566990 - DNA, 15 bp, Homo sapiens
caaactggggagttg

SEQ ID NO: 566991 - DNA, 15 bp, Homo sapiens
acaaactggggagtt

SEQ ID NO: 566992 - DNA, 15 bp, Homo sapiens
aacaaactggggagt

SEQ ID NO: 566993 - DNA, 15 bp, Homo sapiens
aaacaaactggggag

SEQ ID NO: 566994 - DNA, 15 bp, Homo sapiens
gaaacaaactgggga

SEQ ID NO: 566995 - DNA, 15 bp, Homo sapiens
tgaaacaaactgggg

SEQ ID NO: 566996 - DNA, 15 bp, Homo sapiens
ttgaaacaaactggg

SEQ ID NO: 566997 - DNA, 15 bp, Homo sapiens
attgaaacaaactgg

SEQ ID NO: 566998 - DNA, 15 bp, Homo sapiens
aattgaaacaaactg

SEQ ID NO: 566999 - DNA, 15 bp, Homo sapiens
caattgaaacaaact

SEQ ID NO: 567000 - DNA, 15 bp, Homo sapiens
acaattgaaacaaac

SEQ ID NO: 567001 - DNA, 15 bp, Homo sapiens
cacaattgaaacaaa

SEQ ID NO: 567002 - DNA, 15 bp, Homo sapiens
tcacaattgaaacaa

SEQ ID NO: 567003 - DNA, 15 bp, Homo sapiens
gtcacaattgaaaca

SEQ ID NO: 567004 - DNA, 15 bp, Homo sapiens
tgtcacaattgaaac

SEQ ID NO: 567005 - DNA, 15 bp, Homo sapiens
atgtcacaattgaaa

SEQ ID NO: 567006 - DNA, 15 bp, Homo sapiens
gatgtcacaattgaa

SEQ ID NO: 567007 - DNA, 15 bp, Homo sapiens
agatgtcacaattga

SEQ ID NO: 567008 - DNA, 15 bp, Homo sapiens
tagatgtcacaattg

SEQ ID NO: 567009 - DNA, 15 bp, Homo sapiens
ctagatgtcacaatt

SEQ ID NO: 567010 - DNA, 15 bp, Homo sapiens
tctagatgtcacaat

SEQ ID NO: 567011 - DNA, 15 bp, Homo sapiens
atctagatgtcacaa

SEQ ID NO: 567012 - DNA, 15 bp, Homo sapiens
catctagatgtcaca

SEQ ID NO: 567013 - DNA, 15 bp, Homo sapiens
ccatctagatgtcac

SEQ ID NO: 567014 - DNA, 15 bp, Homo sapiens
gccatctagatgtca

SEQ ID NO: 567015 - DNA, 15 bp, Homo sapiens
agccatctagatgtc

SEQ ID NO: 567016 - DNA, 15 bp, Homo sapiens
aagccatctagatgt

SEQ ID NO: 567017 - DNA, 15 bp, Homo sapiens
taagccatctagatg

SEQ ID NO: 567018 - DNA, 15 bp, Homo sapiens
ttaagccatctagat

SEQ ID NO: 567019 - DNA, 15 bp, Homo sapiens
cttaagccatctaga

SEQ ID NO: 567020 - DNA, 15 bp, Homo sapiens
tcttaagccatctag

SEQ ID NO: 567021 - DNA, 15 bp, Homo sapiens
atcttaagccatcta

SEQ ID NO: 567022 - DNA, 15 bp, Homo sapiens
aatcttaagccatct

SEQ ID NO: 567023 - DNA, 15 bp, Homo sapiens
taatcttaagccatc

SEQ ID NO: 567024 - DNA, 15 bp, Homo sapiens
gtaatcttaagccat

SEQ ID NO: 567025 - DNA, 15 bp, Homo sapiens
agtaatcttaagcca

SEQ ID NO: 567026 - DNA, 15 bp, Homo sapiens
aagtaatcttaagcc

SEQ ID NO: 567027 - DNA, 15 bp, Homo sapiens
aaagtaatcttaagc

SEQ ID NO: 567028 - DNA, 15 bp, Homo sapiens
gaaagtaatcttaag

SEQ ID NO: 567029 - DNA, 15 bp, Homo sapiens
agaaagtaatcttaa

SEQ ID NO: 567030 - DNA, 15 bp, Homo sapiens
cagaaagtaatctta

SEQ ID NO: 567031 - DNA, 15 bp, Homo sapiens
ccagaaagtaatctt

SEQ ID NO: 567032 - DNA, 15 bp, Homo sapiens
accagaaagtaatct

SEQ ID NO: 567033 - DNA, 15 bp, Homo sapiens
caccagaaagtaatc

SEQ ID NO: 567034 - DNA, 15 bp, Homo sapiens
ccaccagaaagtaat

SEQ ID NO: 567035 - DNA, 15 bp, Homo sapiens
accaccagaaagtaa

SEQ ID NO: 567036 - DNA, 15 bp, Homo sapiens
gaccaccagaaagta

SEQ ID NO: 567037 - DNA, 15 bp, Homo sapiens
tgaccaccagaaagt

SEQ ID NO: 567038 - DNA, 15 bp, Homo sapiens
gtgaccaccagaaag

SEQ ID NO: 567039 - DNA, 15 bp, Homo sapiens
ggtgaccaccagaaa

SEQ ID NO: 567040 - DNA, 15 bp, Homo sapiens
gggtgaccaccagaa

SEQ ID NO: 567041 - DNA, 15 bp, Homo sapiens
tgggtgaccaccaga

SEQ ID NO: 567042 - DNA, 15 bp, Homo sapiens
atgggtgaccaccag

SEQ ID NO: 567043 - DNA, 15 bp, Homo sapiens
catgggtgaccacca

SEQ ID NO: 567044 - DNA, 15 bp, Homo sapiens
gcatgggtgaccacc

SEQ ID NO: 567045 - DNA, 15 bp, Homo sapiens
agcatgggtgaccac

SEQ ID NO: 567046 - DNA, 15 bp, Homo sapiens
cagcatgggtgacca

SEQ ID NO: 567047 - DNA, 15 bp, Homo sapiens
tcagcatgggtgacc

SEQ ID NO: 567048 - DNA, 15 bp, Homo sapiens
ttcagcatgggtgac

SEQ ID NO: 567049 - DNA, 15 bp, Homo sapiens
gttcagcatgggtga

SEQ ID NO: 567050 - DNA, 15 bp, Homo sapiens
tgttcagcatgggtg

SEQ ID NO: 567051 - DNA, 15 bp, Homo sapiens
ttgttcagcatgggt

SEQ ID NO: 567052 - DNA, 15 bp, Homo sapiens
attgttcagcatggg

SEQ ID NO: 567053 - DNA, 15 bp, Homo sapiens
tattgttcagcatgg

SEQ ID NO: 567054 - DNA, 15 bp, Homo sapiens
atattgttcagcatg

SEQ ID NO: 567055 - DNA, 15 bp, Homo sapiens
aatattgttcagcat

SEQ ID NO: 567056 - DNA, 15 bp, Homo sapiens
aaatattgttcagca

SEQ ID NO: 567057 - DNA, 15 bp, Homo sapiens
aaaatattgttcagc

SEQ ID NO: 567058 - DNA, 15 bp, Homo sapiens
aaaaatattgttcag

SEQ ID NO: 567059 - DNA, 15 bp, Homo sapiens
gaaaaatattgttca

SEQ ID NO: 567060 - DNA, 15 bp, Homo sapiens
tgaaaaatattgttc

SEQ ID NO: 567061 - DNA, 15 bp, Homo sapiens
ttgaaaaatattgtt

SEQ ID NO: 567062 - DNA, 15 bp, Homo sapiens
attgaaaaatattgt

SEQ ID NO: 567063 - DNA, 15 bp, Homo sapiens
gattgaaaaatattg

SEQ ID NO: 567064 - DNA, 15 bp, Homo sapiens
agattgaaaaatatt

SEQ ID NO: 567065 - DNA, 15 bp, Homo sapiens
aagattgaaaaatat

SEQ ID NO: 567066 - DNA, 15 bp, Homo sapiens
gaagattgaaaaata

SEQ ID NO: 567067 - DNA, 15 bp, Homo sapiens
ggaagattgaaaaat

SEQ ID NO: 567068 - DNA, 15 bp, Homo sapiens
tggaagattgaaaaa

SEQ ID NO: 567069 - DNA, 15 bp, Homo sapiens
ttggaagattgaaaa

SEQ ID NO: 567070 - DNA, 15 bp, Homo sapiens
tttggaagattgaaa

SEQ ID NO: 567071 - DNA, 15 bp, Homo sapiens
gtttggaagattgaa

SEQ ID NO: 567072 - DNA, 15 bp, Homo sapiens
tgtttggaagattga

SEQ ID NO: 567073 - DNA, 15 bp, Homo sapiens
ctgtttggaagattg

SEQ ID NO: 567074 - DNA, 15 bp, Homo sapiens
gctgtttggaagatt

SEQ ID NO: 567075 - DNA, 15 bp, Homo sapiens
tgctgtttggaagat

SEQ ID NO: 567076 - DNA, 15 bp, Homo sapiens
ttgctgtttggaaga

SEQ ID NO: 567077 - DNA, 15 bp, Homo sapiens
tttgctgtttggaag

SEQ ID NO: 567078 - DNA, 15 bp, Homo sapiens
ctttgctgtttggaa

SEQ ID NO: 567079 - DNA, 15 bp, Homo sapiens
tctttgctgtttgga

SEQ ID NO: 567080 - DNA, 15 bp, Homo sapiens
gtctttgctgtttgg

SEQ ID NO: 567081 - DNA, 15 bp, Homo sapiens
agtctttgctgtttg

SEQ ID NO: 567082 - DNA, 15 bp, Homo sapiens
gagtctttgctgttt

SEQ ID NO: 567083 - DNA, 15 bp, Homo sapiens
tgagtctttgctgtt

SEQ ID NO: 567084 - DNA, 15 bp, Homo sapiens
ttgagtctttgctgt

SEQ ID NO: 567085 - DNA, 15 bp, Homo sapiens
tttgagtctttgctg

SEQ ID NO: 567086 - DNA, 15 bp, Homo sapiens
ttttgagtctttgct

SEQ ID NO: 567087 - DNA, 15 bp, Homo sapiens
cttttgagtctttgc

SEQ ID NO: 567088 - DNA, 15 bp, Homo sapiens
tcttttgagtctttg

SEQ ID NO: 567089 - DNA, 15 bp, Homo sapiens
ctcttttgagtcttt

SEQ ID NO: 567090 - DNA, 15 bp, Homo sapiens
tctcttttgagtctt

SEQ ID NO: 567091 - DNA, 15 bp, Homo sapiens
atctcttttgagtct

SEQ ID NO: 567092 - DNA, 15 bp, Homo sapiens
aatctcttttgagtc

SEQ ID NO: 567093 - DNA, 15 bp, Homo sapiens
gaatctcttttgagt

SEQ ID NO: 567094 - DNA, 15 bp, Homo sapiens
agaatctcttttgag

SEQ ID NO: 567095 - DNA, 15 bp, Homo sapiens
cagaatctcttttga

SEQ ID NO: 567096 - DNA, 15 bp, Homo sapiens
gcagaatctcttttg

SEQ ID NO: 567097 - DNA, 15 bp, Homo sapiens
tgcagaatctctttt

SEQ ID NO: 567098 - DNA, 15 bp, Homo sapiens
atgcagaatctcttt

SEQ ID NO: 567099 - DNA, 15 bp, Homo sapiens
aatgcagaatctctt

SEQ ID NO: 567100 - DNA, 15 bp, Homo sapiens
aaatgcagaatctct

SEQ ID NO: 567101 - DNA, 15 bp, Homo sapiens
gaaatgcagaatctc

SEQ ID NO: 567102 - DNA, 15 bp, Homo sapiens
tgaaatgcagaatct

SEQ ID NO: 567103 - DNA, 15 bp, Homo sapiens
gtgaaatgcagaatc

SEQ ID NO: 567104 - DNA, 15 bp, Homo sapiens
tgtgaaatgcagaat

SEQ ID NO: 567105 - DNA, 15 bp, Homo sapiens
atgtgaaatgcagaa

SEQ ID NO: 567106 - DNA, 15 bp, Homo sapiens
gatgtgaaatgcaga

SEQ ID NO: 567107 - DNA, 15 bp, Homo sapiens
tgatgtgaaatgcag

SEQ ID NO: 567108 - DNA, 15 bp, Homo sapiens
ctgatgtgaaatgca

SEQ ID NO: 567109 - DNA, 15 bp, Homo sapiens
actgatgtgaaatgc

SEQ ID NO: 567110 - DNA, 15 bp, Homo sapiens
aactgatgtgaaatg

SEQ ID NO: 567111 - DNA, 15 bp, Homo sapiens
gaactgatgtgaaat

SEQ ID NO: 567112 - DNA, 15 bp, Homo sapiens
tgaactgatgtgaaa

SEQ ID NO: 567113 - DNA, 15 bp, Homo sapiens
gtgaactgatgtgaa

SEQ ID NO: 567114 - DNA, 15 bp, Homo sapiens
tgtgaactgatgtga

SEQ ID NO: 567115 - DNA, 15 bp, Homo sapiens
ttgtgaactgatgtg

SEQ ID NO: 567116 - DNA, 15 bp, Homo sapiens
cttgtgaactgatgt

SEQ ID NO: 567117 - DNA, 15 bp, Homo sapiens
acttgtgaactgatg

SEQ ID NO: 567118 - DNA, 15 bp, Homo sapiens
aacttgtgaactgat

SEQ ID NO: 567119 - DNA, 15 bp, Homo sapiens
gaacttgtgaactga

SEQ ID NO: 567120 - DNA, 15 bp, Homo sapiens
tgaacttgtgaactg

SEQ ID NO: 567121 - DNA, 15 bp, Homo sapiens
ttgaacttgtgaact

SEQ ID NO: 567122 - DNA, 15 bp, Homo sapiens
cttgaacttgtgaac

SEQ ID NO: 567123 - DNA, 15 bp, Homo sapiens
tcttgaacttgtgaa

SEQ ID NO: 567124 - DNA, 15 bp, Homo sapiens
ctcttgaacttgtga

SEQ ID NO: 567125 - DNA, 15 bp, Homo sapiens
actcttgaacttgtg

SEQ ID NO: 567126 - DNA, 15 bp, Homo sapiens
gactcttgaacttgt

SEQ ID NO: 567127 - DNA, 15 bp, Homo sapiens
agactcttgaacttg

SEQ ID NO: 567128 - DNA, 15 bp, Homo sapiens
aagactcttgaactt

SEQ ID NO: 567129 - DNA, 15 bp, Homo sapiens
gaagactcttgaact

SEQ ID NO: 567130 - DNA, 15 bp, Homo sapiens
ggaagactcttgaac

SEQ ID NO: 567131 - DNA, 15 bp, Homo sapiens
tggaagactcttgaa

SEQ ID NO: 567132 - DNA, 15 bp, Homo sapiens
atggaagactcttga

SEQ ID NO: 567133 - DNA, 15 bp, Homo sapiens
aatggaagactcttg

SEQ ID NO: 567134 - DNA, 15 bp, Homo sapiens
aaatggaagactctt

SEQ ID NO: 567135 - DNA, 15 bp, Homo sapiens
taaatggaagactct

SEQ ID NO: 567136 - DNA, 15 bp, Homo sapiens
ataaatggaagactc

SEQ ID NO: 567137 - DNA, 15 bp, Homo sapiens
gataaatggaagact

SEQ ID NO: 567138 - DNA, 15 bp, Homo sapiens
agataaatggaagac

SEQ ID NO: 567139 - DNA, 15 bp, Homo sapiens
aagataaatggaaga

SEQ ID NO: 567140 - DNA, 15 bp, Homo sapiens
taagataaatggaag

SEQ ID NO: 567141 - DNA, 15 bp, Homo sapiens
ctaagataaatggaa

SEQ ID NO: 567142 - DNA, 15 bp, Homo sapiens
gctaagataaatgga

SEQ ID NO: 567143 - DNA, 15 bp, Homo sapiens
agctaagataaatgg

SEQ ID NO: 567144 - DNA, 15 bp, Homo sapiens
aagctaagataaatg

SEQ ID NO: 567145 - DNA, 15 bp, Homo sapiens
aaagctaagataaat

SEQ ID NO: 567146 - DNA, 15 bp, Homo sapiens
aaaagctaagataaa

SEQ ID NO: 567147 - DNA, 15 bp, Homo sapiens
caaaagctaagataa

SEQ ID NO: 567148 - DNA, 15 bp, Homo sapiens
ccaaaagctaagata

SEQ ID NO: 567149 - DNA, 15 bp, Homo sapiens
tccaaaagctaagat

SEQ ID NO: 567150 - DNA, 15 bp, Homo sapiens
ttccaaaagctaaga

SEQ ID NO: 567151 - DNA, 15 bp, Homo sapiens
attccaaaagctaag

SEQ ID NO: 567152 - DNA, 15 bp, Homo sapiens
tattccaaaagctaa

SEQ ID NO: 567153 - DNA, 15 bp, Homo sapiens
ttattccaaaagcta

SEQ ID NO: 567154 - DNA, 15 bp, Homo sapiens
tttattccaaaagct

SEQ ID NO: 567155 - DNA, 15 bp, Homo sapiens
atttattccaaaagc

SEQ ID NO: 567156 - DNA, 15 bp, Homo sapiens
aatttattccaaaag

SEQ ID NO: 567157 - DNA, 15 bp, Homo sapiens
taatttattccaaaa

SEQ ID NO: 567158 - DNA, 15 bp, Homo sapiens
ataatttattccaaa

SEQ ID NO: 567159 - DNA, 15 bp, Homo sapiens
gataatttattccaa

SEQ ID NO: 567160 - DNA, 15 bp, Homo sapiens
agataatttattcca

SEQ ID NO: 567161 - DNA, 15 bp, Homo sapiens
aagataatttattcc

SEQ ID NO: 567162 - DNA, 15 bp, Homo sapiens
aaagataatttattc

SEQ ID NO: 567163 - DNA, 15 bp, Homo sapiens
caaagataatttatt

SEQ ID NO: 567164 - DNA, 15 bp, Homo sapiens
tcaaagataatttat

SEQ ID NO: 567165 - DNA, 15 bp, Homo sapiens
ctcaaagataattta

SEQ ID NO: 567166 - DNA, 15 bp, Homo sapiens
cctcaaagataattt

SEQ ID NO: 567167 - DNA, 15 bp, Homo sapiens
acctcaaagataatt

SEQ ID NO: 567168 - DNA, 15 bp, Homo sapiens
tacctcaaagataat

SEQ ID NO: 567169 - DNA, 15 bp, Homo sapiens
ctacctcaaagataa

SEQ ID NO: 567170 - DNA, 15 bp, Homo sapiens
tctacctcaaagata

SEQ ID NO: 567171 - DNA, 15 bp, Homo sapiens
ttctacctcaaagat

SEQ ID NO: 567172 - DNA, 15 bp, Homo sapiens
cttctacctcaaaga

SEQ ID NO: 567173 - DNA, 15 bp, Homo sapiens
ccttctacctcaaag

SEQ ID NO: 567174 - DNA, 15 bp, Homo sapiens
tccttctacctcaaa

SEQ ID NO: 567175 - DNA, 15 bp, Homo sapiens
gtccttctacctcaa

SEQ ID NO: 567176 - DNA, 15 bp, Homo sapiens
tgtccttctacctca

SEQ ID NO: 567177 - DNA, 15 bp, Homo sapiens
ttgtccttctacctc

SEQ ID NO: 567178 - DNA, 15 bp, Homo sapiens
attgtccttctacct

SEQ ID NO: 567179 - DNA, 15 bp, Homo sapiens
cattgtccttctacc

SEQ ID NO: 567180 - DNA, 15 bp, Homo sapiens
tcattgtccttctac

SEQ ID NO: 567181 - DNA, 15 bp, Homo sapiens
gtcattgtccttcta

SEQ ID NO: 567182 - DNA, 15 bp, Homo sapiens
cgtcattgtccttct

SEQ ID NO: 567183 - DNA, 15 bp, Homo sapiens
tcgtcattgtccttc

SEQ ID NO: 567184 - DNA, 15 bp, Homo sapiens
ttcgtcattgtcctt

SEQ ID NO: 567185 - DNA, 15 bp, Homo sapiens
cttcgtcattgtcct

SEQ ID NO: 567186 - DNA, 15 bp, Homo sapiens
gcttcgtcattgtcc

SEQ ID NO: 567187 - DNA, 15 bp, Homo sapiens
ggcttcgtcattgtc

SEQ ID NO: 567188 - DNA, 15 bp, Homo sapiens
tggcttcgtcattgt

SEQ ID NO: 567189 - DNA, 15 bp, Homo sapiens
gtggcttcgtcattg

SEQ ID NO: 567190 - DNA, 15 bp, Homo sapiens
agtggcttcgtcatt

SEQ ID NO: 567191 - DNA, 15 bp, Homo sapiens
aagtggcttcgtcat

SEQ ID NO: 567192 - DNA, 15 bp, Homo sapiens
taagtggcttcgtca

SEQ ID NO: 567193 - DNA, 15 bp, Homo sapiens
ttaagtggcttcgtc

SEQ ID NO: 567194 - DNA, 15 bp, Homo sapiens
attaagtggcttcgt

SEQ ID NO: 567195 - DNA, 15 bp, Homo sapiens
aattaagtggcttcg

SEQ ID NO: 567196 - DNA, 15 bp, Homo sapiens
gaattaagtggcttc

SEQ ID NO: 567197 - DNA, 15 bp, Homo sapiens
ggaattaagtggctt

SEQ ID NO: 567198 - DNA, 15 bp, Homo sapiens
aggaattaagtggct

SEQ ID NO: 567199 - DNA, 15 bp, Homo sapiens
aaggaattaagtggc

SEQ ID NO: 567200 - DNA, 15 bp, Homo sapiens
caaggaattaagtgg

SEQ ID NO: 567201 - DNA, 15 bp, Homo sapiens
acaaggaattaagtg

SEQ ID NO: 567202 - DNA, 15 bp, Homo sapiens
cacaaggaattaagt

SEQ ID NO: 567203 - DNA, 15 bp, Homo sapiens
acacaaggaattaag

SEQ ID NO: 567204 - DNA, 15 bp, Homo sapiens
gacacaaggaattaa

SEQ ID NO: 567205 - DNA, 15 bp, Homo sapiens
agacacaaggaatta

SEQ ID NO: 567206 - DNA, 15 bp, Homo sapiens
cagacacaaggaatt

SEQ ID NO: 567207 - DNA, 15 bp, Homo sapiens
gcagacacaaggaat

SEQ ID NO: 567208 - DNA, 15 bp, Homo sapiens
tgcagacacaaggaa

SEQ ID NO: 567209 - DNA, 15 bp, Homo sapiens
atgcagacacaagga

SEQ ID NO: 567210 - DNA, 15 bp, Homo sapiens
tatgcagacacaagg

SEQ ID NO: 567211 - DNA, 15 bp, Homo sapiens
ttatgcagacacaag

SEQ ID NO: 567212 - DNA, 15 bp, Homo sapiens
tttatgcagacacaa

SEQ ID NO: 567213 - DNA, 15 bp, Homo sapiens
ttttatgcagacaca

SEQ ID NO: 567214 - DNA, 15 bp, Homo sapiens
cttttatgcagacac

SEQ ID NO: 567215 - DNA, 15 bp, Homo sapiens
gcttttatgcagaca

SEQ ID NO: 567216 - DNA, 15 bp, Homo sapiens
tgcttttatgcagac

SEQ ID NO: 567217 - DNA, 15 bp, Homo sapiens
ctgcttttatgcaga

SEQ ID NO: 567218 - DNA, 15 bp, Homo sapiens
tctgcttttatgcag

SEQ ID NO: 567219 - DNA, 15 bp, Homo sapiens
atctgcttttatgca

SEQ ID NO: 567220 - DNA, 15 bp, Homo sapiens
aatctgcttttatgc

SEQ ID NO: 567221 - DNA, 15 bp, Homo sapiens
aaatctgcttttatg

SEQ ID NO: 567222 - DNA, 15 bp, Homo sapiens
taaatctgcttttat

SEQ ID NO: 567223 - DNA, 15 bp, Homo sapiens
ataaatctgctttta

SEQ ID NO: 567224 - DNA, 15 bp, Homo sapiens
aataaatctgctttt

SEQ ID NO: 567225 - DNA, 15 bp, Homo sapiens
gaataaatctgcttt

SEQ ID NO: 567226 - DNA, 15 bp, Homo sapiens
tgaataaatctgctt

SEQ ID NO: 567227 - DNA, 15 bp, Homo sapiens
atgaataaatctgct

SEQ ID NO: 567228 - DNA, 15 bp, Homo sapiens
gatgaataaatctgc

SEQ ID NO: 567229 - DNA, 15 bp, Homo sapiens
tgatgaataaatctg

SEQ ID NO: 567230 - DNA, 15 bp, Homo sapiens
gtgatgaataaatct

SEQ ID NO: 567231 - DNA, 15 bp, Homo sapiens
tgtgatgaataaatc

SEQ ID NO: 567232 - DNA, 15 bp, Homo sapiens
ttgtgatgaataaat

SEQ ID NO: 567233 - DNA, 15 bp, Homo sapiens
gttgtgatgaataaa

SEQ ID NO: 567234 - DNA, 15 bp, Homo sapiens
agttgtgatgaataa

SEQ ID NO: 567235 - DNA, 15 bp, Homo sapiens
aagttgtgatgaata

SEQ ID NO: 567236 - DNA, 15 bp, Homo sapiens
gaagttgtgatgaat

SEQ ID NO: 567237 - DNA, 15 bp, Homo sapiens
tgaagttgtgatgaa

SEQ ID NO: 567238 - DNA, 15 bp, Homo sapiens
atgaagttgtgatga

SEQ ID NO: 567239 - DNA, 15 bp, Homo sapiens
aatgaagttgtgatg

SEQ ID NO: 567240 - DNA, 15 bp, Homo sapiens
aaatgaagttgtgat

SEQ ID NO: 567241 - DNA, 15 bp, Homo sapiens
taaatgaagttgtga

SEQ ID NO: 567242 - DNA, 15 bp, Homo sapiens
ataaatgaagttgtg

SEQ ID NO: 567243 - DNA, 15 bp, Homo sapiens
cataaatgaagttgt

SEQ ID NO: 567244 - DNA, 15 bp, Homo sapiens
acataaatgaagttg

SEQ ID NO: 567245 - DNA, 15 bp, Homo sapiens
cacataaatgaagtt

SEQ ID NO: 567246 - DNA, 15 bp, Homo sapiens
tcacataaatgaagt

SEQ ID NO: 567247 - DNA, 15 bp, Homo sapiens
ttcacataaatgaag

SEQ ID NO: 567248 - DNA, 15 bp, Homo sapiens
attcacataaatgaa

SEQ ID NO: 567249 - DNA, 15 bp, Homo sapiens
tattcacataaatga

SEQ ID NO: 567250 - DNA, 15 bp, Homo sapiens
ttattcacataaatg

SEQ ID NO: 567251 - DNA, 15 bp, Homo sapiens
tttattcacataaat

SEQ ID NO: 567252 - DNA, 15 bp, Homo sapiens
ctttattcacataaa

SEQ ID NO: 567253 - DNA, 15 bp, Homo sapiens
gctttattcacataa

SEQ ID NO: 567254 - DNA, 15 bp, Homo sapiens
tgctttattcacata

SEQ ID NO: 567255 - DNA, 15 bp, Homo sapiens
ctgctttattcacat

SEQ ID NO: 567256 - DNA, 15 bp, Homo sapiens
tctgctttattcaca

SEQ ID NO: 567257 - DNA, 15 bp, Homo sapiens
atctgctttattcac

SEQ ID NO: 567258 - DNA, 15 bp, Homo sapiens
catctgctttattca

SEQ ID NO: 567259 - DNA, 15 bp, Homo sapiens
tcatctgctttattc

SEQ ID NO: 567260 - DNA, 15 bp, Homo sapiens
atcatctgctttatt

SEQ ID NO: 567261 - DNA, 15 bp, Homo sapiens
catcatctgctttat

SEQ ID NO: 567262 - DNA, 15 bp, Homo sapiens
tcatcatctgcttta

SEQ ID NO: 567263 - DNA, 15 bp, Homo sapiens
atcatcatctgcttt

SEQ ID NO: 567264 - DNA, 15 bp, Homo sapiens
tatcatcatctgctt

SEQ ID NO: 567265 - DNA, 15 bp, Homo sapiens
ttatcatcatctgct

SEQ ID NO: 567266 - DNA, 15 bp, Homo sapiens
tttatcatcatctgc

SEQ ID NO: 567267 - DNA, 15 bp, Homo sapiens
ttttatcatcatctg

SEQ ID NO: 567268 - DNA, 15 bp, Homo sapiens
attttatcatcatct

SEQ ID NO: 567269 - DNA, 15 bp, Homo sapiens
cattttatcatcatc

SEQ ID NO: 567270 - DNA, 15 bp, Homo sapiens
acattttatcatcat

SEQ ID NO: 567271 - DNA, 15 bp, Homo sapiens
aacattttatcatca

SEQ ID NO: 567272 - DNA, 15 bp, Homo sapiens
gaacattttatcatc

SEQ ID NO: 567273 - DNA, 15 bp, Homo sapiens
agaacattttatcat

SEQ ID NO: 567274 - DNA, 15 bp, Homo sapiens
gagaacattttatca

SEQ ID NO: 567275 - DNA, 15 bp, Homo sapiens
agagaacattttatc

SEQ ID NO: 567276 - DNA, 15 bp, Homo sapiens
aagagaacattttat

SEQ ID NO: 567277 - DNA, 15 bp, Homo sapiens
taagagaacatttta

SEQ ID NO: 567278 - DNA, 15 bp, Homo sapiens
ataagagaacatttt

SEQ ID NO: 567279 - DNA, 15 bp, Homo sapiens
aataagagaacattt

SEQ ID NO: 567280 - DNA, 15 bp, Homo sapiens
gaataagagaacatt

SEQ ID NO: 567281 - DNA, 15 bp, Homo sapiens
agaataagagaacat

SEQ ID NO: 567282 - DNA, 15 bp, Homo sapiens
aagaataagagaaca

SEQ ID NO: 567283 - DNA, 15 bp, Homo sapiens
caagaataagagaac

SEQ ID NO: 567284 - DNA, 15 bp, Homo sapiens
acaagaataagagaa

SEQ ID NO: 567285 - DNA, 15 bp, Homo sapiens
aacaagaataagaga

SEQ ID NO: 567286 - DNA, 15 bp, Homo sapiens
aaacaagaataagag

SEQ ID NO: 567287 - DNA, 15 bp, Homo sapiens
taaacaagaataaga

SEQ ID NO: 567288 - DNA, 15 bp, Homo sapiens
ttaaacaagaataag

SEQ ID NO: 567289 - DNA, 15 bp, Homo sapiens
attaaacaagaataa

SEQ ID NO: 567290 - DNA, 15 bp, Homo sapiens
gattaaacaagaata

SEQ ID NO: 567291 - DNA, 15 bp, Homo sapiens
tgattaaacaagaat

SEQ ID NO: 567292 - DNA, 15 bp, Homo sapiens
ctgattaaacaagaa

SEQ ID NO: 567293 - DNA, 15 bp, Homo sapiens
actgattaaacaaga

SEQ ID NO: 567294 - DNA, 15 bp, Homo sapiens
tactgattaaacaag

SEQ ID NO: 567295 - DNA, 15 bp, Homo sapiens
ctactgattaaacaa

SEQ ID NO: 567296 - DNA, 15 bp, Homo sapiens
actactgattaaaca

SEQ ID NO: 567297 - DNA, 15 bp, Homo sapiens
cactactgattaaac

SEQ ID NO: 567298 - DNA, 15 bp, Homo sapiens
ccactactgattaaa

SEQ ID NO: 567299 - DNA, 15 bp, Homo sapiens
accactactgattaa

SEQ ID NO: 567300 - DNA, 15 bp, Homo sapiens
taccactactgatta

SEQ ID NO: 567301 - DNA, 15 bp, Homo sapiens
ctaccactactgatt

SEQ ID NO: 567302 - DNA, 15 bp, Homo sapiens
actaccactactgat

SEQ ID NO: 567303 - DNA, 15 bp, Homo sapiens
cactaccactactga

SEQ ID NO: 567304 - DNA, 15 bp, Homo sapiens
tcactaccactactg

SEQ ID NO: 567305 - DNA, 15 bp, Homo sapiens
atcactaccactact

SEQ ID NO: 567306 - DNA, 15 bp, Homo sapiens
catcactaccactac

SEQ ID NO: 567307 - DNA, 15 bp, Homo sapiens
gcatcactaccacta

SEQ ID NO: 567308 - DNA, 15 bp, Homo sapiens
ggcatcactaccact

SEQ ID NO: 567309 - DNA, 15 bp, Homo sapiens
tggcatcactaccac

SEQ ID NO: 567310 - DNA, 15 bp, Homo sapiens
ctggcatcactacca

SEQ ID NO: 567311 - DNA, 15 bp, Homo sapiens
tctggcatcactacc

SEQ ID NO: 567312 - DNA, 15 bp, Homo sapiens
ttctggcatcactac

SEQ ID NO: 567313 - DNA, 15 bp, Homo sapiens
tttctggcatcacta

SEQ ID NO: 567314 - DNA, 15 bp, Homo sapiens
gtttctggcatcact

SEQ ID NO: 567315 - DNA, 15 bp, Homo sapiens
agtttctggcatcac

SEQ ID NO: 567316 - DNA, 15 bp, Homo sapiens
cagtttctggcatca

SEQ ID NO: 567317 - DNA, 15 bp, Homo sapiens
acagtttctggcatc

SEQ ID NO: 567318 - DNA, 15 bp, Homo sapiens
cacagtttctggcat

SEQ ID NO: 567319 - DNA, 15 bp, Homo sapiens
tcacagtttctggca

SEQ ID NO: 567320 - DNA, 15 bp, Homo sapiens
ttcacagtttctggc

SEQ ID NO: 567321 - DNA, 15 bp, Homo sapiens
tttcacagtttctgg

SEQ ID NO: 567322 - DNA, 15 bp, Homo sapiens
ctttcacagtttctg

SEQ ID NO: 567323 - DNA, 15 bp, Homo sapiens
cctttcacagtttct

SEQ ID NO: 567324 - DNA, 15 bp, Homo sapiens
tcctttcacagtttc

SEQ ID NO: 567325 - DNA, 15 bp, Homo sapiens
ttcctttcacagttt

SEQ ID NO: 567326 - DNA, 15 bp, Homo sapiens
cttcctttcacagtt

SEQ ID NO: 567327 - DNA, 15 bp, Homo sapiens
ccttcctttcacagt

SEQ ID NO: 567328 - DNA, 15 bp, Homo sapiens
gccttcctttcacag

SEQ ID NO: 567329 - DNA, 15 bp, Homo sapiens
agccttcctttcaca

SEQ ID NO: 567330 - DNA, 15 bp, Homo sapiens
aagccttcctttcac

SEQ ID NO: 567331 - DNA, 15 bp, Homo sapiens
aaagccttcctttca

SEQ ID NO: 567332 - DNA, 15 bp, Homo sapiens
aaaagccttcctttc

SEQ ID NO: 567333 - DNA, 15 bp, Homo sapiens
taaaagccttccttt

SEQ ID NO: 567334 - DNA, 15 bp, Homo sapiens
ctaaaagccttcctt

SEQ ID NO: 567335 - DNA, 15 bp, Homo sapiens
actaaaagccttcct

SEQ ID NO: 567336 - DNA, 15 bp, Homo sapiens
aactaaaagccttcc

SEQ ID NO: 567337 - DNA, 15 bp, Homo sapiens
taactaaaagccttc

SEQ ID NO: 567338 - DNA, 15 bp, Homo sapiens
gtaactaaaagcctt

SEQ ID NO: 567339 - DNA, 15 bp, Homo sapiens
agtaactaaaagcct

SEQ ID NO: 567340 - DNA, 15 bp, Homo sapiens
aagtaactaaaagcc

SEQ ID NO: 567341 - DNA, 15 bp, Homo sapiens
aaagtaactaaaagc

SEQ ID NO: 567342 - DNA, 15 bp, Homo sapiens
gaaagtaactaaaag

SEQ ID NO: 567343 - DNA, 15 bp, Homo sapiens
agaaagtaactaaaa

SEQ ID NO: 567344 - DNA, 15 bp, Homo sapiens
aagaaagtaactaaa

SEQ ID NO: 567345 - DNA, 15 bp, Homo sapiens
gaagaaagtaactaa

SEQ ID NO: 567346 - DNA, 15 bp, Homo sapiens
agaagaaagtaacta

SEQ ID NO: 567347 - DNA, 15 bp, Homo sapiens
aagaagaaagtaact

SEQ ID NO: 567348 - DNA, 15 bp, Homo sapiens
aaagaagaaagtaac

SEQ ID NO: 567349 - DNA, 15 bp, Homo sapiens
gaaagaagaaagtaa

SEQ ID NO: 567350 - DNA, 15 bp, Homo sapiens
ggaaagaagaaagta

SEQ ID NO: 567351 - DNA, 15 bp, Homo sapiens
tggaaagaagaaagt

SEQ ID NO: 567352 - DNA, 15 bp, Homo sapiens
atggaaagaagaaag

SEQ ID NO: 567353 - DNA, 15 bp, Homo sapiens
aatggaaagaagaaa

SEQ ID NO: 567354 - DNA, 15 bp, Homo sapiens
aaatggaaagaagaa

SEQ ID NO: 567355 - DNA, 15 bp, Homo sapiens
aaaatggaaagaaga

SEQ ID NO: 567356 - DNA, 15 bp, Homo sapiens
gaaaatggaaagaag

SEQ ID NO: 567357 - DNA, 15 bp, Homo sapiens
ggaaaatggaaagaa

SEQ ID NO: 567358 - DNA, 15 bp, Homo sapiens
tggaaaatggaaaga

SEQ ID NO: 567359 - DNA, 15 bp, Homo sapiens
ttggaaaatggaaag

SEQ ID NO: 567360 - DNA, 15 bp, Homo sapiens
attggaaaatggaaa

SEQ ID NO: 567361 - DNA, 15 bp, Homo sapiens
tattggaaaatggaa

SEQ ID NO: 567362 - DNA, 15 bp, Homo sapiens
ttattggaaaatgga

SEQ ID NO: 567363 - DNA, 15 bp, Homo sapiens
attattggaaaatgg

SEQ ID NO: 567364 - DNA, 15 bp, Homo sapiens
gattattggaaaatg

SEQ ID NO: 567365 - DNA, 15 bp, Homo sapiens
ggattattggaaaat

SEQ ID NO: 567366 - DNA, 15 bp, Homo sapiens
tggattattggaaaa

SEQ ID NO: 567367 - DNA, 15 bp, Homo sapiens
atggattattggaaa

SEQ ID NO: 567368 - DNA, 15 bp, Homo sapiens
aatggattattggaa

SEQ ID NO: 567369 - DNA, 15 bp, Homo sapiens
gaatggattattgga

SEQ ID NO: 567370 - DNA, 15 bp, Homo sapiens
ggaatggattattgg

SEQ ID NO: 567371 - DNA, 15 bp, Homo sapiens
gggaatggattattg

SEQ ID NO: 567372 - DNA, 15 bp, Homo sapiens
ggggaatggattatt

SEQ ID NO: 567373 - DNA, 15 bp, Homo sapiens
tggggaatggattat

SEQ ID NO: 567374 - DNA, 15 bp, Homo sapiens
atggggaatggatta

SEQ ID NO: 567375 - DNA, 15 bp, Homo sapiens
gatggggaatggatt

SEQ ID NO: 567376 - DNA, 15 bp, Homo sapiens
ggatggggaatggat

SEQ ID NO: 567377 - DNA, 15 bp, Homo sapiens
gggatggggaatgga

SEQ ID NO: 567378 - DNA, 15 bp, Homo sapiens
ggggatggggaatgg

SEQ ID NO: 567379 - DNA, 15 bp, Homo sapiens
tggggatggggaatg

SEQ ID NO: 567380 - DNA, 15 bp, Homo sapiens
ctggggatggggaat

SEQ ID NO: 567381 - DNA, 15 bp, Homo sapiens
gctggggatggggaa

SEQ ID NO: 567382 - DNA, 15 bp, Homo sapiens
agctggggatgggga

SEQ ID NO: 567383 - DNA, 15 bp, Homo sapiens
cagctggggatgggg

SEQ ID NO: 567384 - DNA, 15 bp, Homo sapiens
tcagctggggatggg

SEQ ID NO: 567385 - DNA, 15 bp, Homo sapiens
ttcagctggggatgg

SEQ ID NO: 567386 - DNA, 15 bp, Homo sapiens
cttcagctggggatg

SEQ ID NO: 567387 - DNA, 15 bp, Homo sapiens
tcttcagctggggat

SEQ ID NO: 567388 - DNA, 15 bp, Homo sapiens
ttcttcagctgggga

SEQ ID NO: 567389 - DNA, 15 bp, Homo sapiens
tttcttcagctgggg

SEQ ID NO: 567390 - DNA, 15 bp, Homo sapiens
ctttcttcagctggg

SEQ ID NO: 567391 - DNA, 15 bp, Homo sapiens
cctttcttcagctgg

SEQ ID NO: 567392 - DNA, 15 bp, Homo sapiens
ccctttcttcagctg

SEQ ID NO: 567393 - DNA, 15 bp, Homo sapiens
cccctttcttcagct

SEQ ID NO: 567394 - DNA, 15 bp, Homo sapiens
acccctttcttcagc

SEQ ID NO: 567395 - DNA, 15 bp, Homo sapiens
cacccctttcttcag

SEQ ID NO: 567396 - DNA, 15 bp, Homo sapiens
acacccctttcttca

SEQ ID NO: 567397 - DNA, 15 bp, Homo sapiens
aacacccctttcttc

SEQ ID NO: 567398 - DNA, 15 bp, Homo sapiens
taacacccctttctt

SEQ ID NO: 567399 - DNA, 15 bp, Homo sapiens
gtaacacccctttct

SEQ ID NO: 567400 - DNA, 15 bp, Homo sapiens
agtaacacccctttc

SEQ ID NO: 567401 - DNA, 15 bp, Homo sapiens
cagtaacaccccttt

SEQ ID NO: 567402 - DNA, 15 bp, Homo sapiens
tcagtaacacccctt

SEQ ID NO: 567403 - DNA, 15 bp, Homo sapiens
ctcagtaacacccct

SEQ ID NO: 567404 - DNA, 15 bp, Homo sapiens
actcagtaacacccc

SEQ ID NO: 567405 - DNA, 15 bp, Homo sapiens
gactcagtaacaccc

SEQ ID NO: 567406 - DNA, 15 bp, Homo sapiens
ggactcagtaacacc

SEQ ID NO: 567407 - DNA, 15 bp, Homo sapiens
tggactcagtaacac

SEQ ID NO: 567408 - DNA, 15 bp, Homo sapiens
ctggactcagtaaca

SEQ ID NO: 567409 - DNA, 15 bp, Homo sapiens
gctggactcagtaac

SEQ ID NO: 567410 - DNA, 15 bp, Homo sapiens
agctggactcagtaa

SEQ ID NO: 567411 - DNA, 15 bp, Homo sapiens
cagctggactcagta

SEQ ID NO: 567412 - DNA, 15 bp, Homo sapiens
tcagctggactcagt

SEQ ID NO: 567413 - DNA, 15 bp, Homo sapiens
atcagctggactcag

SEQ ID NO: 567414 - DNA, 15 bp, Homo sapiens
tatcagctggactca

SEQ ID NO: 567415 - DNA, 15 bp, Homo sapiens
gtatcagctggactc

SEQ ID NO: 567416 - DNA, 15 bp, Homo sapiens
ggtatcagctggact

SEQ ID NO: 567417 - DNA, 15 bp, Homo sapiens
tggtatcagctggac

SEQ ID NO: 567418 - DNA, 15 bp, Homo sapiens
gtggtatcagctgga

SEQ ID NO: 567419 - DNA, 15 bp, Homo sapiens
tgtggtatcagctgg

SEQ ID NO: 567420 - DNA, 15 bp, Homo sapiens
gtgtggtatcagctg

SEQ ID NO: 567421 - DNA, 15 bp, Homo sapiens
tgtgtggtatcagct

SEQ ID NO: 567422 - DNA, 15 bp, Homo sapiens
atgtgtggtatcagc

SEQ ID NO: 567423 - DNA, 15 bp, Homo sapiens
aatgtgtggtatcag

SEQ ID NO: 567424 - DNA, 15 bp, Homo sapiens
caatgtgtggtatca

SEQ ID NO: 567425 - DNA, 15 bp, Homo sapiens
tcaatgtgtggtatc

SEQ ID NO: 567426 - DNA, 15 bp, Homo sapiens
ttcaatgtgtggtat

SEQ ID NO: 567427 - DNA, 15 bp, Homo sapiens
tttcaatgtgtggta

SEQ ID NO: 567428 - DNA, 15 bp, Homo sapiens
ctttcaatgtgtggt

SEQ ID NO: 567429 - DNA, 15 bp, Homo sapiens
cctttcaatgtgtgg

SEQ ID NO: 567430 - DNA, 15 bp, Homo sapiens
acctttcaatgtgtg

SEQ ID NO: 567431 - DNA, 15 bp, Homo sapiens
tacctttcaatgtgt

SEQ ID NO: 567432 - DNA, 15 bp, Homo sapiens
ttacctttcaatgtg

SEQ ID NO: 567433 - DNA, 15 bp, Homo sapiens
tttacctttcaatgt

SEQ ID NO: 567434 - DNA, 15 bp, Homo sapiens
gtttacctttcaatg

SEQ ID NO: 567435 - DNA, 15 bp, Homo sapiens
tgtttacctttcaat

SEQ ID NO: 567436 - DNA, 15 bp, Homo sapiens
atgtttacctttcaa

SEQ ID NO: 567437 - DNA, 15 bp, Homo sapiens
aatgtttacctttca

SEQ ID NO: 567438 - DNA, 15 bp, Homo sapiens
taatgtttacctttc

SEQ ID NO: 567439 - DNA, 15 bp, Homo sapiens
ttaatgtttaccttt

SEQ ID NO: 567440 - DNA, 15 bp, Homo sapiens
attaatgtttacctt

SEQ ID NO: 567441 - DNA, 15 bp, Homo sapiens
tattaatgtttacct

SEQ ID NO: 567442 - DNA, 15 bp, Homo sapiens
atattaatgtttacc

SEQ ID NO: 567443 - DNA, 15 bp, Homo sapiens
aatattaatgtttac

SEQ ID NO: 567444 - DNA, 15 bp, Homo sapiens
aaatattaatgttta

SEQ ID NO: 567445 - DNA, 15 bp, Homo sapiens
gaaatattaatgttt

SEQ ID NO: 567446 - DNA, 15 bp, Homo sapiens
tgaaatattaatgtt

SEQ ID NO: 567447 - DNA, 15 bp, Homo sapiens
ttgaaatattaatgt

SEQ ID NO: 567448 - DNA, 15 bp, Homo sapiens
tttgaaatattaatg

SEQ ID NO: 567449 - DNA, 15 bp, Homo sapiens
atttgaaatattaat

SEQ ID NO: 567450 - DNA, 15 bp, Homo sapiens
gatttgaaatattaa

SEQ ID NO: 567451 - DNA, 15 bp, Homo sapiens
agatttgaaatatta

SEQ ID NO: 567452 - DNA, 15 bp, Homo sapiens
cagatttgaaatatt

SEQ ID NO: 567453 - DNA, 15 bp, Homo sapiens
tcagatttgaaatat

SEQ ID NO: 567454 - DNA, 15 bp, Homo sapiens
atcagatttgaaata

SEQ ID NO: 567455 - DNA, 15 bp, Homo sapiens
catcagatttgaaat

SEQ ID NO: 567456 - DNA, 15 bp, Homo sapiens
acatcagatttgaaa

SEQ ID NO: 567457 - DNA, 15 bp, Homo sapiens
gacatcagatttgaa

SEQ ID NO: 567458 - DNA, 15 bp, Homo sapiens
agacatcagatttga

SEQ ID NO: 567459 - DNA, 15 bp, Homo sapiens
tagacatcagatttg

SEQ ID NO: 567460 - DNA, 15 bp, Homo sapiens
ttagacatcagattt

SEQ ID NO: 567461 - DNA, 15 bp, Homo sapiens
gttagacatcagatt

SEQ ID NO: 567462 - DNA, 15 bp, Homo sapiens
agttagacatcagat

SEQ ID NO: 567463 - DNA, 15 bp, Homo sapiens
tagttagacatcaga

SEQ ID NO: 567464 - DNA, 15 bp, Homo sapiens
ttagttagacatcag

SEQ ID NO: 567465 - DNA, 15 bp, Homo sapiens
tttagttagacatca

SEQ ID NO: 567466 - DNA, 15 bp, Homo sapiens
ttttagttagacatc

SEQ ID NO: 567467 - DNA, 15 bp, Homo sapiens
tttttagttagacat

SEQ ID NO: 567468 - DNA, 15 bp, Homo sapiens
atttttagttagaca

SEQ ID NO: 567469 - DNA, 15 bp, Homo sapiens
catttttagttagac

SEQ ID NO: 567470 - DNA, 15 bp, Homo sapiens
cataagattatctta

SEQ ID NO: 567471 - DNA, 15 bp, Homo sapiens
tcataagattatctt

SEQ ID NO: 567472 - DNA, 15 bp, Homo sapiens
gtcataagattatct

SEQ ID NO: 567473 - DNA, 15 bp, Homo sapiens
tgtcataagattatc

SEQ ID NO: 567474 - DNA, 15 bp, Homo sapiens
ttgtcataagattat

SEQ ID NO: 567475 - DNA, 15 bp, Homo sapiens
cttgtcataagatta

SEQ ID NO: 567476 - DNA, 15 bp, Homo sapiens
tcttgtcataagatt

SEQ ID NO: 567477 - DNA, 15 bp, Homo sapiens
ttcttgtcataagat

SEQ ID NO: 567478 - DNA, 15 bp, Homo sapiens
cttcttgtcataaga

SEQ ID NO: 567479 - DNA, 15 bp, Homo sapiens
ccttcttgtcataag

SEQ ID NO: 567480 - DNA, 15 bp, Homo sapiens
cccttcttgtcataa

SEQ ID NO: 567481 - DNA, 15 bp, Homo sapiens
acccttcttgtcata

SEQ ID NO: 567482 - DNA, 15 bp, Homo sapiens
gacccttcttgtcat

SEQ ID NO: 567483 - DNA, 15 bp, Homo sapiens
tgacccttcttgtca

SEQ ID NO: 567484 - DNA, 15 bp, Homo sapiens
gtgacccttcttgtc

SEQ ID NO: 567485 - DNA, 15 bp, Homo sapiens
tgtgacccttcttgt

SEQ ID NO: 567486 - DNA, 15 bp, Homo sapiens
gtgtgacccttcttg

SEQ ID NO: 567487 - DNA, 15 bp, Homo sapiens
agtgtgacccttctt

SEQ ID NO: 567488 - DNA, 15 bp, Homo sapiens
cagtgtgacccttct

SEQ ID NO: 567489 - DNA, 15 bp, Homo sapiens
tcagtgtgacccttc

SEQ ID NO: 567490 - DNA, 15 bp, Homo sapiens
atcagtgtgaccctt

SEQ ID NO: 567491 - DNA, 15 bp, Homo sapiens
aatcagtgtgaccct

SEQ ID NO: 567492 - DNA, 15 bp, Homo sapiens
gaatcagtgtgaccc

SEQ ID NO: 567493 - DNA, 15 bp, Homo sapiens
tgaatcagtgtgacc

SEQ ID NO: 567494 - DNA, 15 bp, Homo sapiens
gtgaatcagtgtgac

SEQ ID NO: 567495 - DNA, 15 bp, Homo sapiens
agtgaatcagtgtga

SEQ ID NO: 567496 - DNA, 15 bp, Homo sapiens
aagtgaatcagtgtg

SEQ ID NO: 567497 - DNA, 15 bp, Homo sapiens
taagtgaatcagtgt

SEQ ID NO: 567498 - DNA, 15 bp, Homo sapiens
ttaagtgaatcagtg

SEQ ID NO: 567499 - DNA, 15 bp, Homo sapiens
attaagtgaatcagt

SEQ ID NO: 567500 - DNA, 15 bp, Homo sapiens
tattaagtgaatcag

SEQ ID NO: 567501 - DNA, 15 bp, Homo sapiens
ttattaagtgaatca

SEQ ID NO: 567502 - DNA, 15 bp, Homo sapiens
tttattaagtgaatc

SEQ ID NO: 567503 - DNA, 15 bp, Homo sapiens
atttattaagtgaat

SEQ ID NO: 567504 - DNA, 15 bp, Homo sapiens
aatttattaagtgaa

SEQ ID NO: 567505 - DNA, 15 bp, Homo sapiens
gaatttattaagtga

SEQ ID NO: 567506 - DNA, 15 bp, Homo sapiens
ggaatttattaagtg

SEQ ID NO: 567507 - DNA, 15 bp, Homo sapiens
tggaatttattaagt

SEQ ID NO: 567508 - DNA, 15 bp, Homo sapiens
atggaatttattaag

SEQ ID NO: 567509 - DNA, 15 bp, Homo sapiens
aatggaatttattaa

SEQ ID NO: 567510 - DNA, 15 bp, Homo sapiens
gaatggaatttatta

SEQ ID NO: 567511 - DNA, 15 bp, Homo sapiens
agaatggaatttatt

SEQ ID NO: 567512 - DNA, 15 bp, Homo sapiens
aagaatggaatttat

SEQ ID NO: 567513 - DNA, 15 bp, Homo sapiens
taagaatggaattta

SEQ ID NO: 567514 - DNA, 15 bp, Homo sapiens
gtaagaatggaattt

SEQ ID NO: 567515 - DNA, 15 bp, Homo sapiens
ggtaagaatggaatt

SEQ ID NO: 567516 - DNA, 15 bp, Homo sapiens
aggtaagaatggaat

SEQ ID NO: 567517 - DNA, 15 bp, Homo sapiens
taggtaagaatggaa

SEQ ID NO: 567518 - DNA, 15 bp, Homo sapiens
ttaggtaagaatgga

SEQ ID NO: 567519 - DNA, 15 bp, Homo sapiens
gttaggtaagaatgg

SEQ ID NO: 567520 - DNA, 15 bp, Homo sapiens
tgttaggtaagaatg

SEQ ID NO: 567521 - DNA, 15 bp, Homo sapiens
gtgttaggtaagaat

SEQ ID NO: 567522 - DNA, 15 bp, Homo sapiens
tgtgttaggtaagaa

SEQ ID NO: 567523 - DNA, 15 bp, Homo sapiens
ttgtgttaggtaaga

SEQ ID NO: 567524 - DNA, 15 bp, Homo sapiens
cttgtgttaggtaag

SEQ ID NO: 567525 - DNA, 15 bp, Homo sapiens
ccttgtgttaggtaa

SEQ ID NO: 567526 - DNA, 15 bp, Homo sapiens
accttgtgttaggta

SEQ ID NO: 567527 - DNA, 15 bp, Homo sapiens
aaccttgtgttaggt

SEQ ID NO: 567528 - DNA, 15 bp, Homo sapiens
aaaccttgtgttagg

SEQ ID NO: 567529 - DNA, 15 bp, Homo sapiens
taaaccttgtgttag

SEQ ID NO: 567530 - DNA, 15 bp, Homo sapiens
ctaaaccttgtgtta

SEQ ID NO: 567531 - DNA, 15 bp, Homo sapiens
actaaaccttgtgtt

SEQ ID NO: 567532 - DNA, 15 bp, Homo sapiens
aactaaaccttgtgt

SEQ ID NO: 567533 - DNA, 15 bp, Homo sapiens
caactaaaccttgtg

SEQ ID NO: 567534 - DNA, 15 bp, Homo sapiens
tcaactaaaccttgt

SEQ ID NO: 567535 - DNA, 15 bp, Homo sapiens
atcaactaaaccttg

SEQ ID NO: 567536 - DNA, 15 bp, Homo sapiens
tatcaactaaacctt

SEQ ID NO: 567537 - DNA, 15 bp, Homo sapiens
ttatcaactaaacct

SEQ ID NO: 567538 - DNA, 15 bp, Homo sapiens
cttatcaactaaacc

SEQ ID NO: 567539 - DNA, 15 bp, Homo sapiens
gcttatcaactaaac

SEQ ID NO: 567540 - DNA, 15 bp, Homo sapiens
tgcttatcaactaaa

SEQ ID NO: 567541 - DNA, 15 bp, Homo sapiens
gtgcttatcaactaa

SEQ ID NO: 567542 - DNA, 15 bp, Homo sapiens
agtgcttatcaacta

SEQ ID NO: 567543 - DNA, 15 bp, Homo sapiens
aagtgcttatcaact

SEQ ID NO: 567544 - DNA, 15 bp, Homo sapiens
caagtgcttatcaac

SEQ ID NO: 567545 - DNA, 15 bp, Homo sapiens
ccaagtgcttatcaa

SEQ ID NO: 567546 - DNA, 15 bp, Homo sapiens
tccaagtgcttatca

SEQ ID NO: 567547 - DNA, 15 bp, Homo sapiens
gtccaagtgcttatc

SEQ ID NO: 567548 - DNA, 15 bp, Homo sapiens
tgtccaagtgcttat

SEQ ID NO: 567549 - DNA, 15 bp, Homo sapiens
ttgtccaagtgctta

SEQ ID NO: 567550 - DNA, 15 bp, Homo sapiens
tttgtccaagtgctt

SEQ ID NO: 567551 - DNA, 15 bp, Homo sapiens
ttttgtccaagtgct

SEQ ID NO: 567552 - DNA, 15 bp, Homo sapiens
tttttgtccaagtgc

SEQ ID NO: 567553 - DNA, 15 bp, Homo sapiens
atttttgtccaagtg

SEQ ID NO: 567554 - DNA, 15 bp, Homo sapiens
tatttttgtccaagt

SEQ ID NO: 567555 - DNA, 15 bp, Homo sapiens
ttatttttgtccaag

SEQ ID NO: 567556 - DNA, 15 bp, Homo sapiens
attatttttgtccaa

SEQ ID NO: 567557 - DNA, 15 bp, Homo sapiens
tattatttttgtcca

SEQ ID NO: 567558 - DNA, 15 bp, Homo sapiens
gtattatttttgtcc

SEQ ID NO: 567559 - DNA, 15 bp, Homo sapiens
agtattatttttgtc

SEQ ID NO: 567560 - DNA, 15 bp, Homo sapiens
aagtattatttttgt

SEQ ID NO: 567561 - DNA, 15 bp, Homo sapiens
aaagtattatttttg

SEQ ID NO: 567562 - DNA, 15 bp, Homo sapiens
aaaagtattattttt

SEQ ID NO: 567563 - DNA, 15 bp, Homo sapiens
gaaaagtattatttt

SEQ ID NO: 567564 - DNA, 15 bp, Homo sapiens
tgaaaagtattattt

SEQ ID NO: 567565 - DNA, 15 bp, Homo sapiens
ttgaaaagtattatt

SEQ ID NO: 567566 - DNA, 15 bp, Homo sapiens
tttgaaaagtattat

SEQ ID NO: 567567 - DNA, 15 bp, Homo sapiens
ttttgaaaagtatta

SEQ ID NO: 567568 - DNA, 15 bp, Homo sapiens
tttttgaaaagtatt

SEQ ID NO: 567569 - DNA, 15 bp, Homo sapiens
atttttgaaaagtat

SEQ ID NO: 567570 - DNA, 15 bp, Homo sapiens
catttttgaaaagta

SEQ ID NO: 567571 - DNA, 15 bp, Homo sapiens
acatttttgaaaagt

SEQ ID NO: 567572 - DNA, 15 bp, Homo sapiens
tacatttttgaaaag

SEQ ID NO: 567573 - DNA, 15 bp, Homo sapiens
ttacatttttgaaaa

SEQ ID NO: 567574 - DNA, 15 bp, Homo sapiens
tttacatttttgaaa

SEQ ID NO: 567575 - DNA, 15 bp, Homo sapiens
ctttacatttttgaa

SEQ ID NO: 567576 - DNA, 15 bp, Homo sapiens
gctttacatttttga

SEQ ID NO: 567577 - DNA, 15 bp, Homo sapiens
tgctttacatttttg

SEQ ID NO: 567578 - DNA, 15 bp, Homo sapiens
ttgctttacattttt

SEQ ID NO: 567579 - DNA, 15 bp, Homo sapiens
tttgctttacatttt

SEQ ID NO: 567580 - DNA, 15 bp, Homo sapiens
gtttgctttacattt

SEQ ID NO: 567581 - DNA, 15 bp, Homo sapiens
agtttgctttacatt

SEQ ID NO: 567582 - DNA, 15 bp, Homo sapiens
tagtttgctttacat

SEQ ID NO: 567583 - DNA, 15 bp, Homo sapiens
ctagtttgctttaca

SEQ ID NO: 567584 - DNA, 15 bp, Homo sapiens
actagtttgctttac

SEQ ID NO: 567585 - DNA, 15 bp, Homo sapiens
cactagtttgcttta

SEQ ID NO: 567586 - DNA, 15 bp, Homo sapiens
tcactagtttgcttt

SEQ ID NO: 567587 - DNA, 15 bp, Homo sapiens
ctcactagtttgctt

SEQ ID NO: 567588 - DNA, 15 bp, Homo sapiens
cctcactagtttgct

SEQ ID NO: 567589 - DNA, 15 bp, Homo sapiens
tcctcactagtttgc

SEQ ID NO: 567590 - DNA, 15 bp, Homo sapiens
gtcctcactagtttg

SEQ ID NO: 567591 - DNA, 15 bp, Homo sapiens
tgtcctcactagttt

SEQ ID NO: 567592 - DNA, 15 bp, Homo sapiens
ttgtcctcactagtt

SEQ ID NO: 567593 - DNA, 15 bp, Homo sapiens
tttgtcctcactagt

SEQ ID NO: 567594 - DNA, 15 bp, Homo sapiens
ctttgtcctcactag

SEQ ID NO: 567595 - DNA, 15 bp, Homo sapiens
cctttgtcctcacta

SEQ ID NO: 567596 - DNA, 15 bp, Homo sapiens
tcctttgtcctcact

SEQ ID NO: 567597 - DNA, 15 bp, Homo sapiens
atcctttgtcctcac

SEQ ID NO: 567598 - DNA, 15 bp, Homo sapiens
aatcctttgtcctca

SEQ ID NO: 567599 - DNA, 15 bp, Homo sapiens
aaatcctttgtcctc

SEQ ID NO: 567600 - DNA, 15 bp, Homo sapiens
aaaatcctttgtcct

SEQ ID NO: 567601 - DNA, 15 bp, Homo sapiens
caaaatcctttgtcc

SEQ ID NO: 567602 - DNA, 15 bp, Homo sapiens
acaaaatcctttgtc

SEQ ID NO: 567603 - DNA, 15 bp, Homo sapiens
gacaaaatcctttgt

SEQ ID NO: 567604 - DNA, 15 bp, Homo sapiens
ggacaaaatcctttg

SEQ ID NO: 567605 - DNA, 15 bp, Homo sapiens
aggacaaaatccttt

SEQ ID NO: 567606 - DNA, 15 bp, Homo sapiens
gaggacaaaatcctt

SEQ ID NO: 567607 - DNA, 15 bp, Homo sapiens
tgaggacaaaatcct

SEQ ID NO: 567608 - DNA, 15 bp, Homo sapiens
atgaggacaaaatcc

SEQ ID NO: 567609 - DNA, 15 bp, Homo sapiens
gatgaggacaaaatc

SEQ ID NO: 567610 - DNA, 15 bp, Homo sapiens
agatgaggacaaaat

SEQ ID NO: 567611 - DNA, 15 bp, Homo sapiens
gagatgaggacaaaa

SEQ ID NO: 567612 - DNA, 15 bp, Homo sapiens
tgagatgaggacaaa

SEQ ID NO: 567613 - DNA, 15 bp, Homo sapiens
ttgagatgaggacaa

SEQ ID NO: 567614 - DNA, 15 bp, Homo sapiens
gttgagatgaggaca

SEQ ID NO: 567615 - DNA, 15 bp, Homo sapiens
tgttgagatgaggac

SEQ ID NO: 567616 - DNA, 15 bp, Homo sapiens
ttgttgagatgagga

SEQ ID NO: 567617 - DNA, 15 bp, Homo sapiens
attgttgagatgagg

SEQ ID NO: 567618 - DNA, 15 bp, Homo sapiens
cattgttgagatgag

SEQ ID NO: 567619 - DNA, 15 bp, Homo sapiens
tcattgttgagatga

SEQ ID NO: 567620 - DNA, 15 bp, Homo sapiens
atcattgttgagatg

SEQ ID NO: 567621 - DNA, 15 bp, Homo sapiens
gatcattgttgagat

SEQ ID NO: 567622 - DNA, 15 bp, Homo sapiens
tgatcattgttgaga

SEQ ID NO: 567623 - DNA, 15 bp, Homo sapiens
ctgatcattgttgag

SEQ ID NO: 567624 - DNA, 15 bp, Homo sapiens
gctgatcattgttga

SEQ ID NO: 567625 - DNA, 15 bp, Homo sapiens
agctgatcattgttg

SEQ ID NO: 567626 - DNA, 15 bp, Homo sapiens
tagctgatcattgtt

SEQ ID NO: 567627 - DNA, 15 bp, Homo sapiens
atagctgatcattgt

SEQ ID NO: 567628 - DNA, 15 bp, Homo sapiens
aatagctgatcattg

SEQ ID NO: 567629 - DNA, 15 bp, Homo sapiens
caatagctgatcatt

SEQ ID NO: 567630 - DNA, 15 bp, Homo sapiens
ccaatagctgatcat

SEQ ID NO: 567631 - DNA, 15 bp, Homo sapiens
tccaatagctgatca

SEQ ID NO: 567632 - DNA, 15 bp, Homo sapiens
ttccaatagctgatc

SEQ ID NO: 567633 - DNA, 15 bp, Homo sapiens
gttccaatagctgat

SEQ ID NO: 567634 - DNA, 15 bp, Homo sapiens
agttccaatagctga

SEQ ID NO: 567635 - DNA, 15 bp, Homo sapiens
cagttccaatagctg

SEQ ID NO: 567636 - DNA, 15 bp, Homo sapiens
gcagttccaatagct

SEQ ID NO: 567637 - DNA, 15 bp, Homo sapiens
tgcagttccaatagc

SEQ ID NO: 567638 - DNA, 15 bp, Homo sapiens
atgcagttccaatag

SEQ ID NO: 567639 - DNA, 15 bp, Homo sapiens
catgcagttccaata

SEQ ID NO: 567640 - DNA, 15 bp, Homo sapiens
tcatgcagttccaat

SEQ ID NO: 567641 - DNA, 15 bp, Homo sapiens
ttcatgcagttccaa

SEQ ID NO: 567642 - DNA, 15 bp, Homo sapiens
tttcatgcagttcca

SEQ ID NO: 567643 - DNA, 15 bp, Homo sapiens
gtttcatgcagttcc

SEQ ID NO: 567644 - DNA, 15 bp, Homo sapiens
agtttcatgcagttc

SEQ ID NO: 567645 - DNA, 15 bp, Homo sapiens
cagtttcatgcagtt

SEQ ID NO: 567646 - DNA, 15 bp, Homo sapiens
tcagtttcatgcagt

SEQ ID NO: 567647 - DNA, 15 bp, Homo sapiens
ttcagtttcatgcag

SEQ ID NO: 567648 - DNA, 15 bp, Homo sapiens
gttcagtttcatgca

SEQ ID NO: 567649 - DNA, 15 bp, Homo sapiens
tgttcagtttcatgc

SEQ ID NO: 567650 - DNA, 15 bp, Homo sapiens
ttgttcagtttcatg

SEQ ID NO: 567651 - DNA, 15 bp, Homo sapiens
attgttcagtttcat

SEQ ID NO: 567652 - DNA, 15 bp, Homo sapiens
aattgttcagtttca

SEQ ID NO: 567653 - DNA, 15 bp, Homo sapiens
aaattgttcagtttc

SEQ ID NO: 567654 - DNA, 15 bp, Homo sapiens
taaattgttcagttt

SEQ ID NO: 567655 - DNA, 15 bp, Homo sapiens
ttaaattgttcagtt

SEQ ID NO: 567656 - DNA, 15 bp, Homo sapiens
tttaaattgttcagt

SEQ ID NO: 567657 - DNA, 15 bp, Homo sapiens
gtttaaattgttcag

SEQ ID NO: 567658 - DNA, 15 bp, Homo sapiens
ggtttaaattgttca

SEQ ID NO: 567659 - DNA, 15 bp, Homo sapiens
aggtttaaattgttc

SEQ ID NO: 567660 - DNA, 15 bp, Homo sapiens
caggtttaaattgtt

SEQ ID NO: 567661 - DNA, 15 bp, Homo sapiens
ccaggtttaaattgt

SEQ ID NO: 567662 - DNA, 15 bp, Homo sapiens
tccaggtttaaattg

SEQ ID NO: 567663 - DNA, 15 bp, Homo sapiens
ctccaggtttaaatt

SEQ ID NO: 567664 - DNA, 15 bp, Homo sapiens
gctccaggtttaaat

SEQ ID NO: 567665 - DNA, 15 bp, Homo sapiens
agctccaggtttaaa

SEQ ID NO: 567666 - DNA, 15 bp, Homo sapiens
cagctccaggtttaa

SEQ ID NO: 567667 - DNA, 15 bp, Homo sapiens
ccagctccaggttta

SEQ ID NO: 567668 - DNA, 15 bp, Homo sapiens
accagctccaggttt

SEQ ID NO: 567669 - DNA, 15 bp, Homo sapiens
taccagctccaggtt

SEQ ID NO: 567670 - DNA, 15 bp, Homo sapiens
ttaccagctccaggt

SEQ ID NO: 567671 - DNA, 15 bp, Homo sapiens
attaccagctccagg

SEQ ID NO: 567672 - DNA, 15 bp, Homo sapiens
cattaccagctccag

SEQ ID NO: 567673 - DNA, 15 bp, Homo sapiens
acattaccagctcca

SEQ ID NO: 567674 - DNA, 15 bp, Homo sapiens
aacattaccagctcc

SEQ ID NO: 567675 - DNA, 15 bp, Homo sapiens
gaacattaccagctc

SEQ ID NO: 567676 - DNA, 15 bp, Homo sapiens
agaacattaccagct

SEQ ID NO: 567677 - DNA, 15 bp, Homo sapiens
aagaacattaccagc

SEQ ID NO: 567678 - DNA, 15 bp, Homo sapiens
taagaacattaccag

SEQ ID NO: 567679 - DNA, 15 bp, Homo sapiens
ttaagaacattacca

SEQ ID NO: 567680 - DNA, 15 bp, Homo sapiens
cttaagaacattacc

SEQ ID NO: 567681 - DNA, 15 bp, Homo sapiens
tcttaagaacattac

SEQ ID NO: 567682 - DNA, 15 bp, Homo sapiens
gtcttaagaacatta

SEQ ID NO: 567683 - DNA, 15 bp, Homo sapiens
ggtcttaagaacatt

SEQ ID NO: 567684 - DNA, 15 bp, Homo sapiens
tggtcttaagaacat

SEQ ID NO: 567685 - DNA, 15 bp, Homo sapiens
ttggtcttaagaaca

SEQ ID NO: 567686 - DNA, 15 bp, Homo sapiens
attggtcttaagaac

SEQ ID NO: 567687 - DNA, 15 bp, Homo sapiens
aattggtcttaagaa

SEQ ID NO: 567688 - DNA, 15 bp, Homo sapiens
gaattggtcttaaga

SEQ ID NO: 567689 - DNA, 15 bp, Homo sapiens
tgaattggtcttaag

SEQ ID NO: 567690 - DNA, 15 bp, Homo sapiens
ctgaattggtcttaa

SEQ ID NO: 567691 - DNA, 15 bp, Homo sapiens
tctgaattggtctta

SEQ ID NO: 567692 - DNA, 15 bp, Homo sapiens
ttctgaattggtctt

SEQ ID NO: 567693 - DNA, 15 bp, Homo sapiens
gttctgaattggtct

SEQ ID NO: 567694 - DNA, 15 bp, Homo sapiens
tgttctgaattggtc

SEQ ID NO: 567695 - DNA, 15 bp, Homo sapiens
ttgttctgaattggt

SEQ ID NO: 567696 - DNA, 15 bp, Homo sapiens
tttgttctgaattgg

SEQ ID NO: 567697 - DNA, 15 bp, Homo sapiens
ctttgttctgaattg

SEQ ID NO: 567698 - DNA, 15 bp, Homo sapiens
cctttgttctgaatt

SEQ ID NO: 567699 - DNA, 15 bp, Homo sapiens
gcctttgttctgaat

SEQ ID NO: 567700 - DNA, 15 bp, Homo sapiens
tgcctttgttctgaa

SEQ ID NO: 567701 - DNA, 15 bp, Homo sapiens
ctgcctttgttctga

SEQ ID NO: 567702 - DNA, 15 bp, Homo sapiens
cctgcctttgttctg

SEQ ID NO: 567703 - DNA, 15 bp, Homo sapiens
acctgcctttgttct

SEQ ID NO: 567704 - DNA, 15 bp, Homo sapiens
aacctgcctttgttc

SEQ ID NO: 567705 - DNA, 15 bp, Homo sapiens
caacctgcctttgtt

SEQ ID NO: 567706 - DNA, 15 bp, Homo sapiens
gcaacctgcctttgt

SEQ ID NO: 567707 - DNA, 15 bp, Homo sapiens
ggcaacctgcctttg

SEQ ID NO: 567708 - DNA, 15 bp, Homo sapiens
gggcaacctgccttt

SEQ ID NO: 567709 - DNA, 15 bp, Homo sapiens
agggcaacctgcctt

SEQ ID NO: 567710 - DNA, 15 bp, Homo sapiens
aagggcaacctgcct

SEQ ID NO: 567711 - DNA, 15 bp, Homo sapiens
taagggcaacctgcc

SEQ ID NO: 567712 - DNA, 15 bp, Homo sapiens
ttaagggcaacctgc

SEQ ID NO: 567713 - DNA, 15 bp, Homo sapiens
tttaagggcaacctg

SEQ ID NO: 567714 - DNA, 15 bp, Homo sapiens
ttttaagggcaacct

SEQ ID NO: 567715 - DNA, 15 bp, Homo sapiens
gttttaagggcaacc

SEQ ID NO: 567716 - DNA, 15 bp, Homo sapiens
tgttttaagggcaac

SEQ ID NO: 567717 - DNA, 15 bp, Homo sapiens
ctgttttaagggcaa

SEQ ID NO: 567718 - DNA, 15 bp, Homo sapiens
ctctaattatacctt

SEQ ID NO: 567719 - DNA, 15 bp, Homo sapiens
tctctaattatacct

SEQ ID NO: 567720 - DNA, 15 bp, Homo sapiens
ttctctaattatacc

SEQ ID NO: 567721 - DNA, 15 bp, Homo sapiens
cttctctaattatac

SEQ ID NO: 567722 - DNA, 15 bp, Homo sapiens
gcttctctaattata

SEQ ID NO: 567723 - DNA, 15 bp, Homo sapiens
agcttctctaattat

SEQ ID NO: 567724 - DNA, 15 bp, Homo sapiens
cagcttctctaatta

SEQ ID NO: 567725 - DNA, 15 bp, Homo sapiens
acagcttctctaatt

SEQ ID NO: 567726 - DNA, 15 bp, Homo sapiens
aacagcttctctaat

SEQ ID NO: 567727 - DNA, 15 bp, Homo sapiens
caacagcttctctaa

SEQ ID NO: 567728 - DNA, 15 bp, Homo sapiens
gcaacagcttctcta

SEQ ID NO: 567729 - DNA, 15 bp, Homo sapiens
tgcaacagcttctct

SEQ ID NO: 567730 - DNA, 15 bp, Homo sapiens
atgcaacagcttctc

SEQ ID NO: 567731 - DNA, 15 bp, Homo sapiens
catgcaacagcttct

SEQ ID NO: 567732 - DNA, 15 bp, Homo sapiens
tcatgcaacagcttc

SEQ ID NO: 567733 - DNA, 15 bp, Homo sapiens
ctcatgcaacagctt

SEQ ID NO: 567734 - DNA, 15 bp, Homo sapiens
tctcatgcaacagct

SEQ ID NO: 567735 - DNA, 15 bp, Homo sapiens
ttctcatgcaacagc

SEQ ID NO: 567736 - DNA, 15 bp, Homo sapiens
tttctcatgcaacag

SEQ ID NO: 567737 - DNA, 15 bp, Homo sapiens
atttctcatgcaaca

SEQ ID NO: 567738 - DNA, 15 bp, Homo sapiens
gatttctcatgcaac

SEQ ID NO: 567739 - DNA, 15 bp, Homo sapiens
tgatttctcatgcaa

SEQ ID NO: 567740 - DNA, 15 bp, Homo sapiens
atgatttctcatgca

SEQ ID NO: 567741 - DNA, 15 bp, Homo sapiens
catgatttctcatgc

SEQ ID NO: 567742 - DNA, 15 bp, Homo sapiens
acatgatttctcatg

SEQ ID NO: 567743 - DNA, 15 bp, Homo sapiens
gacatgatttctcat

SEQ ID NO: 567744 - DNA, 15 bp, Homo sapiens
agacatgatttctca

SEQ ID NO: 567745 - DNA, 15 bp, Homo sapiens
gagacatgatttctc

SEQ ID NO: 567746 - DNA, 15 bp, Homo sapiens
ggagacatgatttct

SEQ ID NO: 567747 - DNA, 15 bp, Homo sapiens
tggagacatgatttc

SEQ ID NO: 567748 - DNA, 15 bp, Homo sapiens
atggagacatgattt

SEQ ID NO: 567749 - DNA, 15 bp, Homo sapiens
gatggagacatgatt

SEQ ID NO: 567750 - DNA, 15 bp, Homo sapiens
agatggagacatgat

SEQ ID NO: 567751 - DNA, 15 bp, Homo sapiens
gagatggagacatga

SEQ ID NO: 567752 - DNA, 15 bp, Homo sapiens
ggagatggagacatg

SEQ ID NO: 567753 - DNA, 15 bp, Homo sapiens
tggagatggagacat

SEQ ID NO: 567754 - DNA, 15 bp, Homo sapiens
atggagatggagaca

SEQ ID NO: 567755 - DNA, 15 bp, Homo sapiens
aatggagatggagac

SEQ ID NO: 567756 - DNA, 15 bp, Homo sapiens
aaatggagatggaga

SEQ ID NO: 567757 - DNA, 15 bp, Homo sapiens
aaaatggagatggag

SEQ ID NO: 567758 - DNA, 15 bp, Homo sapiens
caaaatggagatgga

SEQ ID NO: 567759 - DNA, 15 bp, Homo sapiens
gcaaaatggagatgg

SEQ ID NO: 567760 - DNA, 15 bp, Homo sapiens
agcaaaatggagatg

SEQ ID NO: 567761 - DNA, 15 bp, Homo sapiens
tagcaaaatggagat

SEQ ID NO: 567762 - DNA, 15 bp, Homo sapiens
atagcaaaatggaga

SEQ ID NO: 567763 - DNA, 15 bp, Homo sapiens
catagcaaaatggag

SEQ ID NO: 567764 - DNA, 15 bp, Homo sapiens
gcatagcaaaatgga

SEQ ID NO: 567765 - DNA, 15 bp, Homo sapiens
cgcatagcaaaatgg

SEQ ID NO: 567766 - DNA, 15 bp, Homo sapiens
acgcatagcaaaatg

SEQ ID NO: 567767 - DNA, 15 bp, Homo sapiens
aacgcatagcaaaat

SEQ ID NO: 567768 - DNA, 15 bp, Homo sapiens
taacgcatagcaaaa

SEQ ID NO: 567769 - DNA, 15 bp, Homo sapiens
ataacgcatagcaaa

SEQ ID NO: 567770 - DNA, 15 bp, Homo sapiens
gataacgcatagcaa

SEQ ID NO: 567771 - DNA, 15 bp, Homo sapiens
agataacgcatagca

SEQ ID NO: 567772 - DNA, 15 bp, Homo sapiens
cagataacgcatagc

SEQ ID NO: 567773 - DNA, 15 bp, Homo sapiens
tcagataacgcatag

SEQ ID NO: 567774 - DNA, 15 bp, Homo sapiens
ctcagataacgcata

SEQ ID NO: 567775 - DNA, 15 bp, Homo sapiens
cctcagataacgcat

SEQ ID NO: 567776 - DNA, 15 bp, Homo sapiens
tcctcagataacgca

SEQ ID NO: 567777 - DNA, 15 bp, Homo sapiens
atcctcagataacgc

SEQ ID NO: 567778 - DNA, 15 bp, Homo sapiens
aatcctcagataacg

SEQ ID NO: 567779 - DNA, 15 bp, Homo sapiens
caatcctcagataac

SEQ ID NO: 567780 - DNA, 15 bp, Homo sapiens
acaatcctcagataa

SEQ ID NO: 567781 - DNA, 15 bp, Homo sapiens
aacaatcctcagata

SEQ ID NO: 567782 - DNA, 15 bp, Homo sapiens
aaacaatcctcagat

SEQ ID NO: 567783 - DNA, 15 bp, Homo sapiens
gaaacaatcctcaga

SEQ ID NO: 567784 - DNA, 15 bp, Homo sapiens
agaaacaatcctcag

SEQ ID NO: 567785 - DNA, 15 bp, Homo sapiens
cagaaacaatcctca

SEQ ID NO: 567786 - DNA, 15 bp, Homo sapiens
tcagaaacaatcctc

SEQ ID NO: 567787 - DNA, 15 bp, Homo sapiens
ttcagaaacaatcct

SEQ ID NO: 567788 - DNA, 15 bp, Homo sapiens
tttcagaaacaatcc

SEQ ID NO: 567789 - DNA, 15 bp, Homo sapiens
ctttcagaaacaatc

SEQ ID NO: 567790 - DNA, 15 bp, Homo sapiens
tctttcagaaacaat

SEQ ID NO: 567791 - DNA, 15 bp, Homo sapiens
ctctttcagaaacaa

SEQ ID NO: 567792 - DNA, 15 bp, Homo sapiens
tctctttcagaaaca

SEQ ID NO: 567793 - DNA, 15 bp, Homo sapiens
atctctttcagaaac

SEQ ID NO: 567794 - DNA, 15 bp, Homo sapiens
gatctctttcagaaa

SEQ ID NO: 567795 - DNA, 15 bp, Homo sapiens
agatctctttcagaa

SEQ ID NO: 567796 - DNA, 15 bp, Homo sapiens
tagatctctttcaga

SEQ ID NO: 567797 - DNA, 15 bp, Homo sapiens
atagatctctttcag

SEQ ID NO: 567798 - DNA, 15 bp, Homo sapiens
aatagatctctttca

SEQ ID NO: 567799 - DNA, 15 bp, Homo sapiens
aaatagatctctttc

SEQ ID NO: 567800 - DNA, 15 bp, Homo sapiens
taaatagatctcttt

SEQ ID NO: 567801 - DNA, 15 bp, Homo sapiens
ctaaatagatctctt

SEQ ID NO: 567802 - DNA, 15 bp, Homo sapiens
cctaaatagatctct

SEQ ID NO: 567803 - DNA, 15 bp, Homo sapiens
gcctaaatagatctc

SEQ ID NO: 567804 - DNA, 15 bp, Homo sapiens
tgcctaaatagatct

SEQ ID NO: 567805 - DNA, 15 bp, Homo sapiens
ctgcctaaatagatc

SEQ ID NO: 567806 - DNA, 15 bp, Homo sapiens
actgcctaaatagat

SEQ ID NO: 567807 - DNA, 15 bp, Homo sapiens
cactgcctaaataga

SEQ ID NO: 567808 - DNA, 15 bp, Homo sapiens
acactgcctaaatag

SEQ ID NO: 567809 - DNA, 15 bp, Homo sapiens
tacactgcctaaata

SEQ ID NO: 567810 - DNA, 15 bp, Homo sapiens
atacactgcctaaat

SEQ ID NO: 567811 - DNA, 15 bp, Homo sapiens
catacactgcctaaa

SEQ ID NO: 567812 - DNA, 15 bp, Homo sapiens
acatacactgcctaa

SEQ ID NO: 567813 - DNA, 15 bp, Homo sapiens
tacatacactgccta

SEQ ID NO: 567814 - DNA, 15 bp, Homo sapiens
atacatacactgcct

SEQ ID NO: 567815 - DNA, 15 bp, Homo sapiens
catacatacactgcc

SEQ ID NO: 567816 - DNA, 15 bp, Homo sapiens
acatacatacactgc

SEQ ID NO: 567817 - DNA, 15 bp, Homo sapiens
cacatacatacactg

SEQ ID NO: 567818 - DNA, 15 bp, Homo sapiens
acacatacatacact

SEQ ID NO: 567819 - DNA, 15 bp, Homo sapiens
gacacatacatacac

SEQ ID NO: 567820 - DNA, 15 bp, Homo sapiens
tgacacatacataca

SEQ ID NO: 567821 - DNA, 15 bp, Homo sapiens
ctgacacatacatac

SEQ ID NO: 567822 - DNA, 15 bp, Homo sapiens
gctgacacatacata

SEQ ID NO: 567823 - DNA, 15 bp, Homo sapiens
tgctgacacatacat

SEQ ID NO: 567824 - DNA, 15 bp, Homo sapiens
atgctgacacataca

SEQ ID NO: 567825 - DNA, 15 bp, Homo sapiens
catgctgacacatac

SEQ ID NO: 567826 - DNA, 15 bp, Homo sapiens
acatgctgacacata

SEQ ID NO: 567827 - DNA, 15 bp, Homo sapiens
tacatgctgacacat

SEQ ID NO: 567828 - DNA, 15 bp, Homo sapiens
ttacatgctgacaca

SEQ ID NO: 567829 - DNA, 15 bp, Homo sapiens
tttacatgctgacac

SEQ ID NO: 567830 - DNA, 15 bp, Homo sapiens
ttttacatgctgaca

SEQ ID NO: 567831 - DNA, 15 bp, Homo sapiens
tttttacatgctgac

SEQ ID NO: 567832 - DNA, 15 bp, Homo sapiens
ctttttacatgctga

SEQ ID NO: 567833 - DNA, 15 bp, Homo sapiens
actttttacatgctg

SEQ ID NO: 567834 - DNA, 15 bp, Homo sapiens
tactttttacatgct

SEQ ID NO: 567835 - DNA, 15 bp, Homo sapiens
ttactttttacatgc

SEQ ID NO: 567836 - DNA, 15 bp, Homo sapiens
tttactttttacatg

SEQ ID NO: 567837 - DNA, 15 bp, Homo sapiens
ctttactttttacat

SEQ ID NO: 567838 - DNA, 15 bp, Homo sapiens
tctttactttttaca

SEQ ID NO: 567839 - DNA, 15 bp, Homo sapiens
ttctttactttttac

SEQ ID NO: 567840 - DNA, 15 bp, Homo sapiens
gttctttacttttta

SEQ ID NO: 567841 - DNA, 15 bp, Homo sapiens
agttctttacttttt

SEQ ID NO: 567842 - DNA, 15 bp, Homo sapiens
cagttctttactttt

SEQ ID NO: 567843 - DNA, 15 bp, Homo sapiens
tcagttctttacttt

SEQ ID NO: 567844 - DNA, 15 bp, Homo sapiens
ttcagttctttactt

SEQ ID NO: 567845 - DNA, 15 bp, Homo sapiens
tttcagttctttact

SEQ ID NO: 567846 - DNA, 15 bp, Homo sapiens
ttttcagttctttac

SEQ ID NO: 567847 - DNA, 15 bp, Homo sapiens
attttcagttcttta

SEQ ID NO: 567848 - DNA, 15 bp, Homo sapiens
tattttcagttcttt

SEQ ID NO: 567849 - DNA, 15 bp, Homo sapiens
ctattttcagttctt

SEQ ID NO: 567850 - DNA, 15 bp, Homo sapiens
tctattttcagttct

SEQ ID NO: 567851 - DNA, 15 bp, Homo sapiens
gtctattttcagttc

SEQ ID NO: 567852 - DNA, 15 bp, Homo sapiens
tgtctattttcagtt

SEQ ID NO: 567853 - DNA, 15 bp, Homo sapiens
ttgtctattttcagt

SEQ ID NO: 567854 - DNA, 15 bp, Homo sapiens
tttgtctattttcag

SEQ ID NO: 567855 - DNA, 15 bp, Homo sapiens
gtttgtctattttca

SEQ ID NO: 567856 - DNA, 15 bp, Homo sapiens
ggtttgtctattttc

SEQ ID NO: 567857 - DNA, 15 bp, Homo sapiens
aggtttgtctatttt

SEQ ID NO: 567858 - DNA, 15 bp, Homo sapiens
aaggtttgtctattt

SEQ ID NO: 567859 - DNA, 15 bp, Homo sapiens
caaggtttgtctatt

SEQ ID NO: 567860 - DNA, 15 bp, Homo sapiens
acaaggtttgtctat

SEQ ID NO: 567861 - DNA, 15 bp, Homo sapiens
tacaaggtttgtcta

SEQ ID NO: 567862 - DNA, 15 bp, Homo sapiens
ttacaaggtttgtct

SEQ ID NO: 567863 - DNA, 15 bp, Homo sapiens
tttacaaggtttgtc

SEQ ID NO: 567864 - DNA, 15 bp, Homo sapiens
atttacaaggtttgt

SEQ ID NO: 567865 - DNA, 15 bp, Homo sapiens
catttacaaggtttg

SEQ ID NO: 567866 - DNA, 15 bp, Homo sapiens
gcatttacaaggttt

SEQ ID NO: 567867 - DNA, 15 bp, Homo sapiens
tgcatttacaaggtt

SEQ ID NO: 567868 - DNA, 15 bp, Homo sapiens
gtgcatttacaaggt

SEQ ID NO: 567869 - DNA, 15 bp, Homo sapiens
agtgcatttacaagg

SEQ ID NO: 567870 - DNA, 15 bp, Homo sapiens
aagtgcatttacaag

SEQ ID NO: 567871 - DNA, 15 bp, Homo sapiens
gaagtgcatttacaa

SEQ ID NO: 567872 - DNA, 15 bp, Homo sapiens
tgaagtgcatttaca

SEQ ID NO: 567873 - DNA, 15 bp, Homo sapiens
ttgaagtgcatttac

SEQ ID NO: 567874 - DNA, 15 bp, Homo sapiens
tttgaagtgcattta

SEQ ID NO: 567875 - DNA, 15 bp, Homo sapiens
ttttgaagtgcattt

SEQ ID NO: 567876 - DNA, 15 bp, Homo sapiens
gttttgaagtgcatt

SEQ ID NO: 567877 - DNA, 15 bp, Homo sapiens
ggttttgaagtgcat

SEQ ID NO: 567878 - DNA, 15 bp, Homo sapiens
tggttttgaagtgca

SEQ ID NO: 567879 - DNA, 15 bp, Homo sapiens
ttggttttgaagtgc

SEQ ID NO: 567880 - DNA, 15 bp, Homo sapiens
attggttttgaagtg

SEQ ID NO: 567881 - DNA, 15 bp, Homo sapiens
aattggttttgaagt

SEQ ID NO: 567882 - DNA, 15 bp, Homo sapiens
caattggttttgaag

SEQ ID NO: 567883 - DNA, 15 bp, Homo sapiens
acaattggttttgaa

SEQ ID NO: 567884 - DNA, 15 bp, Homo sapiens
cacaattggttttga

SEQ ID NO: 567885 - DNA, 15 bp, Homo sapiens
ccacaattggttttg

SEQ ID NO: 567886 - DNA, 15 bp, Homo sapiens
gccacaattggtttt

SEQ ID NO: 567887 - DNA, 15 bp, Homo sapiens
agccacaattggttt

SEQ ID NO: 567888 - DNA, 15 bp, Homo sapiens
gagccacaattggtt

SEQ ID NO: 567889 - DNA, 15 bp, Homo sapiens
tgagccacaattggt

SEQ ID NO: 567890 - DNA, 15 bp, Homo sapiens
ttgagccacaattgg

SEQ ID NO: 567891 - DNA, 15 bp, Homo sapiens
cttgagccacaattg

SEQ ID NO: 567892 - DNA, 15 bp, Homo sapiens
acttgagccacaatt

SEQ ID NO: 567893 - DNA, 15 bp, Homo sapiens
cacttgagccacaat

SEQ ID NO: 567894 - DNA, 15 bp, Homo sapiens
acacttgagccacaa

SEQ ID NO: 567895 - DNA, 15 bp, Homo sapiens
tacacttgagccaca

SEQ ID NO: 567896 - DNA, 15 bp, Homo sapiens
ctacacttgagccac

SEQ ID NO: 567897 - DNA, 15 bp, Homo sapiens
cctacacttgagcca

SEQ ID NO: 567898 - DNA, 15 bp, Homo sapiens
acctacacttgagcc

SEQ ID NO: 567899 - DNA, 15 bp, Homo sapiens
cacctacacttgagc

SEQ ID NO: 567900 - DNA, 15 bp, Homo sapiens
ccacctacacttgag

SEQ ID NO: 567901 - DNA, 15 bp, Homo sapiens
accacctacacttga

SEQ ID NO: 567902 - DNA, 15 bp, Homo sapiens
aaccacctacacttg

SEQ ID NO: 567903 - DNA, 15 bp, Homo sapiens
gaaccacctacactt

SEQ ID NO: 567904 - DNA, 15 bp, Homo sapiens
ggaaccacctacact

SEQ ID NO: 567905 - DNA, 15 bp, Homo sapiens
gggaaccacctacac

SEQ ID NO: 567906 - DNA, 15 bp, Homo sapiens
ggggaaccacctaca

SEQ ID NO: 567907 - DNA, 15 bp, Homo sapiens
tggggaaccacctac

SEQ ID NO: 567908 - DNA, 15 bp, Homo sapiens
ttggggaaccaccta

SEQ ID NO: 567909 - DNA, 15 bp, Homo sapiens
cttggggaaccacct

SEQ ID NO: 567910 - DNA, 15 bp, Homo sapiens
ccttggggaaccacc

SEQ ID NO: 567911 - DNA, 15 bp, Homo sapiens
gccttggggaaccac

SEQ ID NO: 567912 - DNA, 15 bp, Homo sapiens
agccttggggaacca

SEQ ID NO: 567913 - DNA, 15 bp, Homo sapiens
cagccttggggaacc

SEQ ID NO: 567914 - DNA, 15 bp, Homo sapiens
ccagccttggggaac

SEQ ID NO: 567915 - DNA, 15 bp, Homo sapiens
accagccttggggaa

SEQ ID NO: 567916 - DNA, 15 bp, Homo sapiens
taccagccttgggga

SEQ ID NO: 567917 - DNA, 15 bp, Homo sapiens
gtaccagccttgggg

SEQ ID NO: 567918 - DNA, 15 bp, Homo sapiens
ggtaccagccttggg

SEQ ID NO: 567919 - DNA, 15 bp, Homo sapiens
tggtaccagccttgg

SEQ ID NO: 567920 - DNA, 15 bp, Homo sapiens
ttggtaccagccttg

SEQ ID NO: 567921 - DNA, 15 bp, Homo sapiens
attggtaccagcctt

SEQ ID NO: 567922 - DNA, 15 bp, Homo sapiens
cattggtaccagcct

SEQ ID NO: 567923 - DNA, 15 bp, Homo sapiens
tcattggtaccagcc

SEQ ID NO: 567924 - DNA, 15 bp, Homo sapiens
ctcattggtaccagc

SEQ ID NO: 567925 - DNA, 15 bp, Homo sapiens
tctcattggtaccag

SEQ ID NO: 567926 - DNA, 15 bp, Homo sapiens
gtctcattggtacca

SEQ ID NO: 567927 - DNA, 15 bp, Homo sapiens
agtctcattggtacc

SEQ ID NO: 567928 - DNA, 15 bp, Homo sapiens
cagtctcattggtac

SEQ ID NO: 567929 - DNA, 15 bp, Homo sapiens
ccagtctcattggta

SEQ ID NO: 567930 - DNA, 15 bp, Homo sapiens
cccagtctcattggt

SEQ ID NO: 567931 - DNA, 15 bp, Homo sapiens
ccccagtctcattgg

SEQ ID NO: 567932 - DNA, 15 bp, Homo sapiens
accccagtctcattg

SEQ ID NO: 567933 - DNA, 15 bp, Homo sapiens
aaccccagtctcatt

SEQ ID NO: 567934 - DNA, 15 bp, Homo sapiens
aaaccccagtctcat

SEQ ID NO: 567935 - DNA, 15 bp, Homo sapiens
caaaccccagtctca

SEQ ID NO: 567936 - DNA, 15 bp, Homo sapiens
ccaaaccccagtctc

SEQ ID NO: 567937 - DNA, 15 bp, Homo sapiens
cccaaaccccagtct

SEQ ID NO: 567938 - DNA, 15 bp, Homo sapiens
tcccaaaccccagtc

SEQ ID NO: 567939 - DNA, 15 bp, Homo sapiens
ttcccaaaccccagt

SEQ ID NO: 567940 - DNA, 15 bp, Homo sapiens
attcccaaaccccag

SEQ ID NO: 567941 - DNA, 15 bp, Homo sapiens
aattcccaaacccca

SEQ ID NO: 567942 - DNA, 15 bp, Homo sapiens
taattcccaaacccc

SEQ ID NO: 567943 - DNA, 15 bp, Homo sapiens
ctaattcccaaaccc

SEQ ID NO: 567944 - DNA, 15 bp, Homo sapiens
actaattcccaaacc

SEQ ID NO: 567945 - DNA, 15 bp, Homo sapiens
aactaattcccaaac

SEQ ID NO: 567946 - DNA, 15 bp, Homo sapiens
caactaattcccaaa

SEQ ID NO: 567947 - DNA, 15 bp, Homo sapiens
ccaactaattcccaa

SEQ ID NO: 567948 - DNA, 15 bp, Homo sapiens
accaactaattccca

SEQ ID NO: 567949 - DNA, 15 bp, Homo sapiens
gaccaactaattccc

SEQ ID NO: 567950 - DNA, 15 bp, Homo sapiens
tgaccaactaattcc

SEQ ID NO: 567951 - DNA, 15 bp, Homo sapiens
atgaccaactaattc

SEQ ID NO: 567952 - DNA, 15 bp, Homo sapiens
taagcaggtagctgg

SEQ ID NO: 567953 - DNA, 15 bp, Homo sapiens
ataagcaggtagctg

SEQ ID NO: 567954 - DNA, 15 bp, Homo sapiens
gataagcaggtagct

SEQ ID NO: 567955 - DNA, 15 bp, Homo sapiens
cgataagcaggtagc

SEQ ID NO: 567956 - DNA, 15 bp, Homo sapiens
acgataagcaggtag

SEQ ID NO: 567957 - DNA, 15 bp, Homo sapiens
tacgataagcaggta

SEQ ID NO: 567958 - DNA, 15 bp, Homo sapiens
ctacgataagcaggt

SEQ ID NO: 567959 - DNA, 15 bp, Homo sapiens
actacgataagcagg

SEQ ID NO: 567960 - DNA, 15 bp, Homo sapiens
cactacgataagcag

SEQ ID NO: 567961 - DNA, 15 bp, Homo sapiens
ccactacgataagca

SEQ ID NO: 567962 - DNA, 15 bp, Homo sapiens
gccactacgataagc

SEQ ID NO: 567963 - DNA, 15 bp, Homo sapiens
ggccactacgataag

SEQ ID NO: 567964 - DNA, 15 bp, Homo sapiens
tggccactacgataa

SEQ ID NO: 567965 - DNA, 15 bp, Homo sapiens
ctggccactacgata

SEQ ID NO: 567966 - DNA, 15 bp, Homo sapiens
tctggccactacgat

SEQ ID NO: 567967 - DNA, 15 bp, Homo sapiens
ctctggccactacga

SEQ ID NO: 567968 - DNA, 15 bp, Homo sapiens
actctggccactacg

SEQ ID NO: 567969 - DNA, 15 bp, Homo sapiens
cactctggccactac

SEQ ID NO: 567970 - DNA, 15 bp, Homo sapiens
ccactctggccacta

SEQ ID NO: 567971 - DNA, 15 bp, Homo sapiens
accactctggccact

SEQ ID NO: 567972 - DNA, 15 bp, Homo sapiens
taccactctggccac

SEQ ID NO: 567973 - DNA, 15 bp, Homo sapiens
ctaccactctggcca

SEQ ID NO: 567974 - DNA, 15 bp, Homo sapiens
tctaccactctggcc

SEQ ID NO: 567975 - DNA, 15 bp, Homo sapiens
ttctaccactctggc

SEQ ID NO: 567976 - DNA, 15 bp, Homo sapiens
cttctaccactctgg

SEQ ID NO: 567977 - DNA, 15 bp, Homo sapiens
tcttctaccactctg

SEQ ID NO: 567978 - DNA, 15 bp, Homo sapiens
ctcttctaccactct

SEQ ID NO: 567979 - DNA, 15 bp, Homo sapiens
tctcttctaccactc

SEQ ID NO: 567980 - DNA, 15 bp, Homo sapiens
atctcttctaccact

SEQ ID NO: 567981 - DNA, 15 bp, Homo sapiens
tatctcttctaccac

SEQ ID NO: 567982 - DNA, 15 bp, Homo sapiens
gtatctcttctacca

SEQ ID NO: 567983 - DNA, 15 bp, Homo sapiens
cgtatctcttctacc

SEQ ID NO: 567984 - DNA, 15 bp, Homo sapiens
ccgtatctcttctac

SEQ ID NO: 567985 - DNA, 15 bp, Homo sapiens
tccgtatctcttcta

SEQ ID NO: 567986 - DNA, 15 bp, Homo sapiens
ctccgtatctcttct

SEQ ID NO: 567987 - DNA, 15 bp, Homo sapiens
actccgtatctcttc

SEQ ID NO: 567988 - DNA, 15 bp, Homo sapiens
tactccgtatctctt

SEQ ID NO: 567989 - DNA, 15 bp, Homo sapiens
ctactccgtatctct

SEQ ID NO: 567990 - DNA, 15 bp, Homo sapiens
cctactccgtatctc

SEQ ID NO: 567991 - DNA, 15 bp, Homo sapiens
tcctactccgtatct

SEQ ID NO: 567992 - DNA, 15 bp, Homo sapiens
ttcctactccgtatc

SEQ ID NO: 567993 - DNA, 15 bp, Homo sapiens
attcctactccgtat

SEQ ID NO: 567994 - DNA, 15 bp, Homo sapiens
aattcctactccgta

SEQ ID NO: 567995 - DNA, 15 bp, Homo sapiens
taattcctactccgt

SEQ ID NO: 567996 - DNA, 15 bp, Homo sapiens
ttaattcctactccg

SEQ ID NO: 567997 - DNA, 15 bp, Homo sapiens
tttaattcctactcc

SEQ ID NO: 567998 - DNA, 15 bp, Homo sapiens
gtttaattcctactc

SEQ ID NO: 567999 - DNA, 15 bp, Homo sapiens
ggtttaattcctact

SEQ ID NO: 568000 - DNA, 15 bp, Homo sapiens
tggtttaattcctac

SEQ ID NO: 568001 - DNA, 15 bp, Homo sapiens
gtggtttaattccta

SEQ ID NO: 568002 - DNA, 15 bp, Homo sapiens
tgtggtttaattcct

SEQ ID NO: 568003 - DNA, 15 bp, Homo sapiens
gtgtggtttaattcc

SEQ ID NO: 568004 - DNA, 15 bp, Homo sapiens
tgtgtggtttaattc

SEQ ID NO: 568005 - DNA, 15 bp, Homo sapiens
ttgtgtggtttaatt

SEQ ID NO: 568006 - DNA, 15 bp, Homo sapiens
attgtgtggtttaat

SEQ ID NO: 568007 - DNA, 15 bp, Homo sapiens
cattgtgtggtttaa

SEQ ID NO: 568008 - DNA, 15 bp, Homo sapiens
acattgtgtggttta

SEQ ID NO: 568009 - DNA, 15 bp, Homo sapiens
aacattgtgtggttt

SEQ ID NO: 568010 - DNA, 15 bp, Homo sapiens
taacattgtgtggtt

SEQ ID NO: 568011 - DNA, 15 bp, Homo sapiens
ataacattgtgtggt

SEQ ID NO: 568012 - DNA, 15 bp, Homo sapiens
aataacattgtgtgg

SEQ ID NO: 568013 - DNA, 15 bp, Homo sapiens
aaataacattgtgtg

SEQ ID NO: 568014 - DNA, 15 bp, Homo sapiens
taaataacattgtgt

SEQ ID NO: 568015 - DNA, 15 bp, Homo sapiens
ctaaataacattgtg

SEQ ID NO: 568016 - DNA, 15 bp, Homo sapiens
cctaaataacattgt

SEQ ID NO: 568017 - DNA, 15 bp, Homo sapiens
ccctaaataacattg

SEQ ID NO: 568018 - DNA, 15 bp, Homo sapiens
tccctaaataacatt

SEQ ID NO: 568019 - DNA, 15 bp, Homo sapiens
gtccctaaataacat

SEQ ID NO: 568020 - DNA, 15 bp, Homo sapiens
agtccctaaataaca

SEQ ID NO: 568021 - DNA, 15 bp, Homo sapiens
tagtccctaaataac

SEQ ID NO: 568022 - DNA, 15 bp, Homo sapiens
ttagtccctaaataa

SEQ ID NO: 568023 - DNA, 15 bp, Homo sapiens
cttagtccctaaata

SEQ ID NO: 568024 - DNA, 15 bp, Homo sapiens
gcttagtccctaaat

SEQ ID NO: 568025 - DNA, 15 bp, Homo sapiens
ggcttagtccctaaa

SEQ ID NO: 568026 - DNA, 15 bp, Homo sapiens
tggcttagtccctaa

SEQ ID NO: 568027 - DNA, 15 bp, Homo sapiens
atggcttagtcccta

SEQ ID NO: 568028 - DNA, 15 bp, Homo sapiens
catggcttagtccct

SEQ ID NO: 568029 - DNA, 15 bp, Homo sapiens
gcatggcttagtccc

SEQ ID NO: 568030 - DNA, 15 bp, Homo sapiens
ggcatggcttagtcc

SEQ ID NO: 568031 - DNA, 15 bp, Homo sapiens
gggcatggcttagtc

SEQ ID NO: 568032 - DNA, 15 bp, Homo sapiens
ggggcatggcttagt

SEQ ID NO: 568033 - DNA, 15 bp, Homo sapiens
aggggcatggcttag

SEQ ID NO: 568034 - DNA, 15 bp, Homo sapiens
taggggcatggctta

SEQ ID NO: 568035 - DNA, 15 bp, Homo sapiens
ttaggggcatggctt

SEQ ID NO: 568036 - DNA, 15 bp, Homo sapiens
gttaggggcatggct

SEQ ID NO: 568037 - DNA, 15 bp, Homo sapiens
tgttaggggcatggc

SEQ ID NO: 568038 - DNA, 15 bp, Homo sapiens
ttgttaggggcatgg

SEQ ID NO: 568039 - DNA, 15 bp, Homo sapiens
cttgttaggggcatg

SEQ ID NO: 568040 - DNA, 15 bp, Homo sapiens
tcttgttaggggcat

SEQ ID NO: 568041 - DNA, 15 bp, Homo sapiens
ttcttgttaggggca

SEQ ID NO: 568042 - DNA, 15 bp, Homo sapiens
tttcttgttaggggc

SEQ ID NO: 568043 - DNA, 15 bp, Homo sapiens
ttttcttgttagggg

SEQ ID NO: 568044 - DNA, 15 bp, Homo sapiens
gttttcttgttaggg

SEQ ID NO: 568045 - DNA, 15 bp, Homo sapiens
tgttttcttgttagg

SEQ ID NO: 568046 - DNA, 15 bp, Homo sapiens
ttgttttcttgttag

SEQ ID NO: 568047 - DNA, 15 bp, Homo sapiens
cttgttttcttgtta

SEQ ID NO: 568048 - DNA, 15 bp, Homo sapiens
gcttgttttcttgtt

SEQ ID NO: 568049 - DNA, 15 bp, Homo sapiens
ggcttgttttcttgt

SEQ ID NO: 568050 - DNA, 15 bp, Homo sapiens
tggcttgttttcttg

SEQ ID NO: 568051 - DNA, 15 bp, Homo sapiens
ttggcttgttttctt

SEQ ID NO: 568052 - DNA, 15 bp, Homo sapiens
tttggcttgttttct

SEQ ID NO: 568053 - DNA, 15 bp, Homo sapiens
ttttggcttgttttc

SEQ ID NO: 568054 - DNA, 15 bp, Homo sapiens
cttttggcttgtttt

SEQ ID NO: 568055 - DNA, 15 bp, Homo sapiens
ccttttggcttgttt

SEQ ID NO: 568056 - DNA, 15 bp, Homo sapiens
tccttttggcttgtt

SEQ ID NO: 568057 - DNA, 15 bp, Homo sapiens
ttccttttggcttgt

SEQ ID NO: 568058 - DNA, 15 bp, Homo sapiens
tttccttttggcttg

SEQ ID NO: 568059 - DNA, 15 bp, Homo sapiens
ctttccttttggctt

SEQ ID NO: 568060 - DNA, 15 bp, Homo sapiens
actttccttttggct

SEQ ID NO: 568061 - DNA, 15 bp, Homo sapiens
tactttccttttggc

SEQ ID NO: 568062 - DNA, 15 bp, Homo sapiens
atactttccttttgg

SEQ ID NO: 568063 - DNA, 15 bp, Homo sapiens
aatactttccttttg

SEQ ID NO: 568064 - DNA, 15 bp, Homo sapiens
taatactttcctttt

SEQ ID NO: 568065 - DNA, 15 bp, Homo sapiens
ctaatactttccttt

SEQ ID NO: 568066 - DNA, 15 bp, Homo sapiens
cctaatactttcctt

SEQ ID NO: 568067 - DNA, 15 bp, Homo sapiens
gcctaatactttcct

SEQ ID NO: 568068 - DNA, 15 bp, Homo sapiens
tgcctaatactttcc

SEQ ID NO: 568069 - DNA, 15 bp, Homo sapiens
atgcctaatactttc

SEQ ID NO: 568070 - DNA, 15 bp, Homo sapiens
aatgcctaatacttt

SEQ ID NO: 568071 - DNA, 15 bp, Homo sapiens
gaatgcctaatactt

SEQ ID NO: 568072 - DNA, 15 bp, Homo sapiens
agaatgcctaatact

SEQ ID NO: 568073 - DNA, 15 bp, Homo sapiens
tatctcaaccatttt

SEQ ID NO: 568074 - DNA, 15 bp, Homo sapiens
ttatctcaaccattt

SEQ ID NO: 568075 - DNA, 15 bp, Homo sapiens
gttatctcaaccatt

SEQ ID NO: 568076 - DNA, 15 bp, Homo sapiens
tgttatctcaaccat

SEQ ID NO: 568077 - DNA, 15 bp, Homo sapiens
ctgttatctcaacca

SEQ ID NO: 568078 - DNA, 15 bp, Homo sapiens
actgttatctcaacc

SEQ ID NO: 568079 - DNA, 15 bp, Homo sapiens
gactgttatctcaac

SEQ ID NO: 568080 - DNA, 15 bp, Homo sapiens
tgactgttatctcaa

SEQ ID NO: 568081 - DNA, 15 bp, Homo sapiens
gtgactgttatctca

SEQ ID NO: 568082 - DNA, 15 bp, Homo sapiens
agtgactgttatctc

SEQ ID NO: 568083 - DNA, 15 bp, Homo sapiens
aagtgactgttatct

SEQ ID NO: 568084 - DNA, 15 bp, Homo sapiens
gaagtgactgttatc

SEQ ID NO: 568085 - DNA, 15 bp, Homo sapiens
agaagtgactgttat

SEQ ID NO: 568086 - DNA, 15 bp, Homo sapiens
cagaagtgactgtta

SEQ ID NO: 568087 - DNA, 15 bp, Homo sapiens
acagaagtgactgtt

SEQ ID NO: 568088 - DNA, 15 bp, Homo sapiens
aacagaagtgactgt

SEQ ID NO: 568089 - DNA, 15 bp, Homo sapiens
aaacagaagtgactg

SEQ ID NO: 568090 - DNA, 15 bp, Homo sapiens
caaacagaagtgact

SEQ ID NO: 568091 - DNA, 15 bp, Homo sapiens
tcaaacagaagtgac

SEQ ID NO: 568092 - DNA, 15 bp, Homo sapiens
atcaaacagaagtga

SEQ ID NO: 568093 - DNA, 15 bp, Homo sapiens
catcaaacagaagtg

SEQ ID NO: 568094 - DNA, 15 bp, Homo sapiens
tcatcaaacagaagt

SEQ ID NO: 568095 - DNA, 15 bp, Homo sapiens
ttcatcaaacagaag

SEQ ID NO: 568096 - DNA, 15 bp, Homo sapiens
cttcatcaaacagaa

SEQ ID NO: 568097 - DNA, 15 bp, Homo sapiens
tcttcatcaaacaga

SEQ ID NO: 568098 - DNA, 15 bp, Homo sapiens
ctcttcatcaaacag

SEQ ID NO: 568099 - DNA, 15 bp, Homo sapiens
actcttcatcaaaca

SEQ ID NO: 568100 - DNA, 15 bp, Homo sapiens
tactcttcatcaaac

SEQ ID NO: 568101 - DNA, 15 bp, Homo sapiens
atactcttcatcaaa

SEQ ID NO: 568102 - DNA, 15 bp, Homo sapiens
gatactcttcatcaa

SEQ ID NO: 568103 - DNA, 15 bp, Homo sapiens
tgatactcttcatca

SEQ ID NO: 568104 - DNA, 15 bp, Homo sapiens
gtgatactcttcatc

SEQ ID NO: 568105 - DNA, 15 bp, Homo sapiens
agtgatactcttcat

SEQ ID NO: 568106 - DNA, 15 bp, Homo sapiens
aagtgatactcttca

SEQ ID NO: 568107 - DNA, 15 bp, Homo sapiens
gaagtgatactcttc

SEQ ID NO: 568108 - DNA, 15 bp, Homo sapiens
tgaagtgatactctt

SEQ ID NO: 568109 - DNA, 15 bp, Homo sapiens
atgaagtgatactct

SEQ ID NO: 568110 - DNA, 15 bp, Homo sapiens
aatgaagtgatactc

SEQ ID NO: 568111 - DNA, 15 bp, Homo sapiens
gaatgaagtgatact

SEQ ID NO: 568112 - DNA, 15 bp, Homo sapiens
ggaatgaagtgatac

SEQ ID NO: 568113 - DNA, 15 bp, Homo sapiens
tggaatgaagtgata

SEQ ID NO: 568114 - DNA, 15 bp, Homo sapiens
atggaatgaagtgat

SEQ ID NO: 568115 - DNA, 15 bp, Homo sapiens
aatggaatgaagtga

SEQ ID NO: 568116 - DNA, 15 bp, Homo sapiens
aaatggaatgaagtg

SEQ ID NO: 568117 - DNA, 15 bp, Homo sapiens
aaaatggaatgaagt

SEQ ID NO: 568118 - DNA, 15 bp, Homo sapiens
aaaaatggaatgaag

SEQ ID NO: 568119 - DNA, 15 bp, Homo sapiens
caaaaatggaatgaa

SEQ ID NO: 568120 - DNA, 15 bp, Homo sapiens
acaaaaatggaatga

SEQ ID NO: 568121 - DNA, 15 bp, Homo sapiens
cacaaaaatggaatg

SEQ ID NO: 568122 - DNA, 15 bp, Homo sapiens
acacaaaaatggaat

SEQ ID NO: 568123 - DNA, 15 bp, Homo sapiens
aacacaaaaatggaa

SEQ ID NO: 568124 - DNA, 15 bp, Homo sapiens
aaacacaaaaatgga

SEQ ID NO: 568125 - DNA, 15 bp, Homo sapiens
caaaaacacaaaaat

SEQ ID NO: 568126 - DNA, 15 bp, Homo sapiens
acaaaaacacaaaaa

SEQ ID NO: 568127 - DNA, 15 bp, Homo sapiens
aacaaaaacacaaaa

SEQ ID NO: 568128 - DNA, 15 bp, Homo sapiens
caacaaaaacacaaa

SEQ ID NO: 568129 - DNA, 15 bp, Homo sapiens
gcaacaaaaacacaa

SEQ ID NO: 568130 - DNA, 15 bp, Homo sapiens
tgcaacaaaaacaca

SEQ ID NO: 568131 - DNA, 15 bp, Homo sapiens
atgcaacaaaaacac

SEQ ID NO: 568132 - DNA, 15 bp, Homo sapiens
gatgcaacaaaaaca

SEQ ID NO: 568133 - DNA, 15 bp, Homo sapiens
agatgcaacaaaaac

SEQ ID NO: 568134 - DNA, 15 bp, Homo sapiens
gagatgcaacaaaaa

SEQ ID NO: 568135 - DNA, 15 bp, Homo sapiens
ggagatgcaacaaaa

SEQ ID NO: 568136 - DNA, 15 bp, Homo sapiens
tggagatgcaacaaa

SEQ ID NO: 568137 - DNA, 15 bp, Homo sapiens
ttggagatgcaacaa

SEQ ID NO: 568138 - DNA, 15 bp, Homo sapiens
cttggagatgcaaca

SEQ ID NO: 568139 - DNA, 15 bp, Homo sapiens
acttggagatgcaac

SEQ ID NO: 568140 - DNA, 15 bp, Homo sapiens
gacttggagatgcaa

SEQ ID NO: 568141 - DNA, 15 bp, Homo sapiens
tgacttggagatgca

SEQ ID NO: 568142 - DNA, 15 bp, Homo sapiens
ctgacttggagatgc

SEQ ID NO: 568143 - DNA, 15 bp, Homo sapiens
tctgacttggagatg

SEQ ID NO: 568144 - DNA, 15 bp, Homo sapiens
ttctgacttggagat

SEQ ID NO: 568145 - DNA, 15 bp, Homo sapiens
attctgacttggaga

SEQ ID NO: 568146 - DNA, 15 bp, Homo sapiens
tattctgacttggag

SEQ ID NO: 568147 - DNA, 15 bp, Homo sapiens
ttattctgacttgga

SEQ ID NO: 568148 - DNA, 15 bp, Homo sapiens
tttattctgacttgg

SEQ ID NO: 568149 - DNA, 15 bp, Homo sapiens
atttattctgacttg

SEQ ID NO: 568150 - DNA, 15 bp, Homo sapiens
catttattctgactt

SEQ ID NO: 568151 - DNA, 15 bp, Homo sapiens
gcatttattctgact

SEQ ID NO: 568152 - DNA, 15 bp, Homo sapiens
ggcatttattctgac

SEQ ID NO: 568153 - DNA, 15 bp, Homo sapiens
aggcatttattctga

SEQ ID NO: 568154 - DNA, 15 bp, Homo sapiens
aaggcatttattctg

SEQ ID NO: 568155 - DNA, 15 bp, Homo sapiens
aaaggcatttattct

SEQ ID NO: 568156 - DNA, 15 bp, Homo sapiens
aaaaggcatttattc

SEQ ID NO: 568157 - DNA, 15 bp, Homo sapiens
caaaaggcatttatt

SEQ ID NO: 568158 - DNA, 15 bp, Homo sapiens
ccaaaaggcatttat

SEQ ID NO: 568159 - DNA, 15 bp, Homo sapiens
tccaaaaggcattta

SEQ ID NO: 568160 - DNA, 15 bp, Homo sapiens
ctccaaaaggcattt

SEQ ID NO: 568161 - DNA, 15 bp, Homo sapiens
gctccaaaaggcatt

SEQ ID NO: 568162 - DNA, 15 bp, Homo sapiens
tgctccaaaaggcat

SEQ ID NO: 568163 - DNA, 15 bp, Homo sapiens
ctgctccaaaaggca

SEQ ID NO: 568164 - DNA, 15 bp, Homo sapiens
tctgctccaaaaggc

SEQ ID NO: 568165 - DNA, 15 bp, Homo sapiens
atctgctccaaaagg

SEQ ID NO: 568166 - DNA, 15 bp, Homo sapiens
tatctgctccaaaag

SEQ ID NO: 568167 - DNA, 15 bp, Homo sapiens
atatctgctccaaaa

SEQ ID NO: 568168 - DNA, 15 bp, Homo sapiens
tatatctgctccaaa

SEQ ID NO: 568169 - DNA, 15 bp, Homo sapiens
atatatctgctccaa

SEQ ID NO: 568170 - DNA, 15 bp, Homo sapiens
aatatatctgctcca

SEQ ID NO: 568171 - DNA, 15 bp, Homo sapiens
aaatatatctgctcc

SEQ ID NO: 568172 - DNA, 15 bp, Homo sapiens
gaaatatatctgctc

SEQ ID NO: 568173 - DNA, 15 bp, Homo sapiens
tgaaatatatctgct

SEQ ID NO: 568174 - DNA, 15 bp, Homo sapiens
atgaaatatatctgc

SEQ ID NO: 568175 - DNA, 15 bp, Homo sapiens
aatgaaatatatctg

SEQ ID NO: 568176 - DNA, 15 bp, Homo sapiens
aaatgaaatatatct

SEQ ID NO: 568177 - DNA, 15 bp, Homo sapiens
taaatgaaatatatc

SEQ ID NO: 568178 - DNA, 15 bp, Homo sapiens
ctaaatgaaatatat

SEQ ID NO: 568179 - DNA, 15 bp, Homo sapiens
gctaaatgaaatata

SEQ ID NO: 568180 - DNA, 15 bp, Homo sapiens
tgctaaatgaaatat

SEQ ID NO: 568181 - DNA, 15 bp, Homo sapiens
atgctaaatgaaata

SEQ ID NO: 568182 - DNA, 15 bp, Homo sapiens
aatgctaaatgaaat

SEQ ID NO: 568183 - DNA, 15 bp, Homo sapiens
aaatgctaaatgaaa

SEQ ID NO: 568184 - DNA, 15 bp, Homo sapiens
taaatgctaaatgaa

SEQ ID NO: 568185 - DNA, 15 bp, Homo sapiens
ctaaatgctaaatga

SEQ ID NO: 568186 - DNA, 15 bp, Homo sapiens
actaaatgctaaatg

SEQ ID NO: 568187 - DNA, 15 bp, Homo sapiens
tactaaatgctaaat

SEQ ID NO: 568188 - DNA, 15 bp, Homo sapiens
atactaaatgctaaa

SEQ ID NO: 568189 - DNA, 15 bp, Homo sapiens
gatactaaatgctaa

SEQ ID NO: 568190 - DNA, 15 bp, Homo sapiens
tgatactaaatgcta

SEQ ID NO: 568191 - DNA, 15 bp, Homo sapiens
atgatactaaatgct

SEQ ID NO: 568192 - DNA, 15 bp, Homo sapiens
gatgatactaaatgc

SEQ ID NO: 568193 - DNA, 15 bp, Homo sapiens
agatgatactaaatg

SEQ ID NO: 568194 - DNA, 15 bp, Homo sapiens
aagatgatactaaat

SEQ ID NO: 568195 - DNA, 15 bp, Homo sapiens
gaagatgatactaaa

SEQ ID NO: 568196 - DNA, 15 bp, Homo sapiens
tgaagatgatactaa

SEQ ID NO: 568197 - DNA, 15 bp, Homo sapiens
atgaagatgatacta

SEQ ID NO: 568198 - DNA, 15 bp, Homo sapiens
gatgaagatgatact

SEQ ID NO: 568199 - DNA, 15 bp, Homo sapiens
tgatgaagatgatac

SEQ ID NO: 568200 - DNA, 15 bp, Homo sapiens
ttgatgaagatgata

SEQ ID NO: 568201 - DNA, 15 bp, Homo sapiens
attgatgaagatgat

SEQ ID NO: 568202 - DNA, 15 bp, Homo sapiens
tattgatgaagatga

SEQ ID NO: 568203 - DNA, 15 bp, Homo sapiens
gtattgatgaagatg

SEQ ID NO: 568204 - DNA, 15 bp, Homo sapiens
agtattgatgaagat

SEQ ID NO: 568205 - DNA, 15 bp, Homo sapiens
gagtattgatgaaga

SEQ ID NO: 568206 - DNA, 15 bp, Homo sapiens
cgagtattgatgaag

SEQ ID NO: 568207 - DNA, 15 bp, Homo sapiens
acgagtattgatgaa

SEQ ID NO: 568208 - DNA, 15 bp, Homo sapiens
tacgagtattgatga

SEQ ID NO: 568209 - DNA, 15 bp, Homo sapiens
atacgagtattgatg

SEQ ID NO: 568210 - DNA, 15 bp, Homo sapiens
catacgagtattgat

SEQ ID NO: 568211 - DNA, 15 bp, Homo sapiens
tcatacgagtattga

SEQ ID NO: 568212 - DNA, 15 bp, Homo sapiens
ttcatacgagtattg

SEQ ID NO: 568213 - DNA, 15 bp, Homo sapiens
gttcatacgagtatt

SEQ ID NO: 568214 - DNA, 15 bp, Homo sapiens
cgttcatacgagtat

SEQ ID NO: 568215 - DNA, 15 bp, Homo sapiens
tcgttcatacgagta

SEQ ID NO: 568216 - DNA, 15 bp, Homo sapiens
ttcgttcatacgagt

SEQ ID NO: 568217 - DNA, 15 bp, Homo sapiens
tttcgttcatacgag

SEQ ID NO: 568218 - DNA, 15 bp, Homo sapiens
ttttcgttcatacga

SEQ ID NO: 568219 - DNA, 15 bp, Homo sapiens
tttttcgttcatacg

SEQ ID NO: 568220 - DNA, 15 bp, Homo sapiens
ttttttcgttcatac

SEQ ID NO: 568221 - DNA, 15 bp, Homo sapiens
attttttcgttcata

SEQ ID NO: 568222 - DNA, 15 bp, Homo sapiens
tattttttcgttcat

SEQ ID NO: 568223 - DNA, 15 bp, Homo sapiens
ttattttttcgttca

SEQ ID NO: 568224 - DNA, 15 bp, Homo sapiens
tttattttttcgttc

SEQ ID NO: 568225 - DNA, 15 bp, Homo sapiens
ttttattttttcgtt

SEQ ID NO: 568226 - DNA, 15 bp, Homo sapiens
tttttattttttcgt

SEQ ID NO: 568227 - DNA, 15 bp, Homo sapiens
ctttttattttttcg

SEQ ID NO: 568228 - DNA, 15 bp, Homo sapiens
gctttttattttttc

SEQ ID NO: 568229 - DNA, 15 bp, Homo sapiens
ggctttttatttttt

SEQ ID NO: 568230 - DNA, 15 bp, Homo sapiens
gggctttttattttt

SEQ ID NO: 568231 - DNA, 15 bp, Homo sapiens
agggctttttatttt

SEQ ID NO: 568232 - DNA, 15 bp, Homo sapiens
gagggctttttattt

SEQ ID NO: 568233 - DNA, 15 bp, Homo sapiens
agagggctttttatt

SEQ ID NO: 568234 - DNA, 15 bp, Homo sapiens
gagagggctttttat

SEQ ID NO: 568235 - DNA, 15 bp, Homo sapiens
agagagggcttttta

SEQ ID NO: 568236 - DNA, 15 bp, Homo sapiens
aagagagggcttttt

SEQ ID NO: 568237 - DNA, 15 bp, Homo sapiens
taagagagggctttt

SEQ ID NO: 568238 - DNA, 15 bp, Homo sapiens
ataagagagggcttt

SEQ ID NO: 568239 - DNA, 15 bp, Homo sapiens
aataagagagggctt

SEQ ID NO: 568240 - DNA, 15 bp, Homo sapiens
gaataagagagggct

SEQ ID NO: 568241 - DNA, 15 bp, Homo sapiens
ggaataagagagggc

SEQ ID NO: 568242 - DNA, 15 bp, Homo sapiens
gggaataagagaggg

SEQ ID NO: 568243 - DNA, 15 bp, Homo sapiens
tgggaataagagagg

SEQ ID NO: 568244 - DNA, 15 bp, Homo sapiens
gtgggaataagagag

SEQ ID NO: 568245 - DNA, 15 bp, Homo sapiens
agtgggaataagaga

SEQ ID NO: 568246 - DNA, 15 bp, Homo sapiens
gagtgggaataagag

SEQ ID NO: 568247 - DNA, 15 bp, Homo sapiens
agagtgggaataaga

SEQ ID NO: 568248 - DNA, 15 bp, Homo sapiens
tagagtgggaataag

SEQ ID NO: 568249 - DNA, 15 bp, Homo sapiens
gtagagtgggaataa

SEQ ID NO: 568250 - DNA, 15 bp, Homo sapiens
tgtagagtgggaata

SEQ ID NO: 568251 - DNA, 15 bp, Homo sapiens
ttgtagagtgggaat

SEQ ID NO: 568252 - DNA, 15 bp, Homo sapiens
gttgtagagtgggaa

SEQ ID NO: 568253 - DNA, 15 bp, Homo sapiens
cgttgtagagtggga

SEQ ID NO: 568254 - DNA, 15 bp, Homo sapiens
gcgttgtagagtggg

SEQ ID NO: 568255 - DNA, 15 bp, Homo sapiens
tgcgttgtagagtgg

SEQ ID NO: 568256 - DNA, 15 bp, Homo sapiens
atgcgttgtagagtg

SEQ ID NO: 568257 - DNA, 15 bp, Homo sapiens
catgcgttgtagagt

SEQ ID NO: 568258 - DNA, 15 bp, Homo sapiens
acatgcgttgtagag

SEQ ID NO: 568259 - DNA, 15 bp, Homo sapiens
gacatgcgttgtaga

SEQ ID NO: 568260 - DNA, 15 bp, Homo sapiens
tgacatgcgttgtag

SEQ ID NO: 568261 - DNA, 15 bp, Homo sapiens
ttgacatgcgttgta

SEQ ID NO: 568262 - DNA, 15 bp, Homo sapiens
tttgacatgcgttgt

SEQ ID NO: 568263 - DNA, 15 bp, Homo sapiens
ctttgacatgcgttg

SEQ ID NO: 568264 - DNA, 15 bp, Homo sapiens
cctttgacatgcgtt

SEQ ID NO: 568265 - DNA, 15 bp, Homo sapiens
tgatatgttcgatac

SEQ ID NO: 568266 - DNA, 15 bp, Homo sapiens
gtgatatgttcgata

SEQ ID NO: 568267 - DNA, 15 bp, Homo sapiens
tgtgatatgttcgat

SEQ ID NO: 568268 - DNA, 15 bp, Homo sapiens
ctgtgatatgttcga

SEQ ID NO: 568269 - DNA, 15 bp, Homo sapiens
gctgtgatatgttcg

SEQ ID NO: 568270 - DNA, 15 bp, Homo sapiens
agctgtgatatgttc

SEQ ID NO: 568271 - DNA, 15 bp, Homo sapiens
tagctgtgatatgtt

SEQ ID NO: 568272 - DNA, 15 bp, Homo sapiens
gtagctgtgatatgt

SEQ ID NO: 568273 - DNA, 15 bp, Homo sapiens
agtagctgtgatatg

SEQ ID NO: 568274 - DNA, 15 bp, Homo sapiens
gagtagctgtgatat

SEQ ID NO: 568275 - DNA, 15 bp, Homo sapiens
tgagtagctgtgata

SEQ ID NO: 568276 - DNA, 15 bp, Homo sapiens
ttgagtagctgtgat

SEQ ID NO: 568277 - DNA, 15 bp, Homo sapiens
attgagtagctgtga

SEQ ID NO: 568278 - DNA, 15 bp, Homo sapiens
cattgagtagctgtg

SEQ ID NO: 568279 - DNA, 15 bp, Homo sapiens
tcattgagtagctgt

SEQ ID NO: 568280 - DNA, 15 bp, Homo sapiens
ttcattgagtagctg

SEQ ID NO: 568281 - DNA, 15 bp, Homo sapiens
cttcattgagtagct

SEQ ID NO: 568282 - DNA, 15 bp, Homo sapiens
acttcattgagtagc

SEQ ID NO: 568283 - DNA, 15 bp, Homo sapiens
aacttcattgagtag

SEQ ID NO: 568284 - DNA, 15 bp, Homo sapiens
aaacttcattgagta

SEQ ID NO: 568285 - DNA, 15 bp, Homo sapiens
gaaacttcattgagt

SEQ ID NO: 568286 - DNA, 15 bp, Homo sapiens
agaaacttcattgag

SEQ ID NO: 568287 - DNA, 15 bp, Homo sapiens
aagaaacttcattga

SEQ ID NO: 568288 - DNA, 15 bp, Homo sapiens
gaagaaacttcattg

SEQ ID NO: 568289 - DNA, 15 bp, Homo sapiens
agaagaaacttcatt

SEQ ID NO: 568290 - DNA, 15 bp, Homo sapiens
gagaagaaacttcat

SEQ ID NO: 568291 - DNA, 15 bp, Homo sapiens
tgagaagaaacttca

SEQ ID NO: 568292 - DNA, 15 bp, Homo sapiens
ttgagaagaaacttc

SEQ ID NO: 568293 - DNA, 15 bp, Homo sapiens
gttgagaagaaactt

SEQ ID NO: 568294 - DNA, 15 bp, Homo sapiens
agttgagaagaaact

SEQ ID NO: 568295 - DNA, 15 bp, Homo sapiens
tagttgagaagaaac

SEQ ID NO: 568296 - DNA, 15 bp, Homo sapiens
ttagttgagaagaaa

SEQ ID NO: 568297 - DNA, 15 bp, Homo sapiens
tttagttgagaagaa

SEQ ID NO: 568298 - DNA, 15 bp, Homo sapiens
ctttagttgagaaga

SEQ ID NO: 568299 - DNA, 15 bp, Homo sapiens
tctttagttgagaag

SEQ ID NO: 568300 - DNA, 15 bp, Homo sapiens
ttctttagttgagaa

SEQ ID NO: 568301 - DNA, 15 bp, Homo sapiens
tttctttagttgaga

SEQ ID NO: 568302 - DNA, 15 bp, Homo sapiens
gtttctttagttgag

SEQ ID NO: 568303 - DNA, 15 bp, Homo sapiens
tgtttctttagttga

SEQ ID NO: 568304 - DNA, 15 bp, Homo sapiens
gtgtttctttagttg

SEQ ID NO: 568305 - DNA, 15 bp, Homo sapiens
tgtgtttctttagtt

SEQ ID NO: 568306 - DNA, 15 bp, Homo sapiens
ctgtgtttctttagt

SEQ ID NO: 568307 - DNA, 15 bp, Homo sapiens
actgtgtttctttag

SEQ ID NO: 568308 - DNA, 15 bp, Homo sapiens
gactgtgtttcttta

SEQ ID NO: 568309 - DNA, 15 bp, Homo sapiens
agactgtgtttcttt

SEQ ID NO: 568310 - DNA, 15 bp, Homo sapiens
gagactgtgtttctt

SEQ ID NO: 568311 - DNA, 15 bp, Homo sapiens
agagactgtgtttct

SEQ ID NO: 568312 - DNA, 15 bp, Homo sapiens
aagagactgtgtttc

SEQ ID NO: 568313 - DNA, 15 bp, Homo sapiens
taagagactgtgttt

SEQ ID NO: 568314 - DNA, 15 bp, Homo sapiens
ctaagagactgtgtt

SEQ ID NO: 568315 - DNA, 15 bp, Homo sapiens
tctaagagactgtgt

SEQ ID NO: 568316 - DNA, 15 bp, Homo sapiens
ctctaagagactgtg

SEQ ID NO: 568317 - DNA, 15 bp, Homo sapiens
tctctaagagactgt

SEQ ID NO: 568318 - DNA, 15 bp, Homo sapiens
ttctctaagagactg

SEQ ID NO: 568319 - DNA, 15 bp, Homo sapiens
attctctaagagact

SEQ ID NO: 568320 - DNA, 15 bp, Homo sapiens
aattctctaagagac

SEQ ID NO: 568321 - DNA, 15 bp, Homo sapiens
aaattctctaagaga

SEQ ID NO: 568322 - DNA, 15 bp, Homo sapiens
caaattctctaagag

SEQ ID NO: 568323 - DNA, 15 bp, Homo sapiens
acaaattctctaaga

SEQ ID NO: 568324 - DNA, 15 bp, Homo sapiens
aacaaattctctaag

SEQ ID NO: 568325 - DNA, 15 bp, Homo sapiens
gaacaaattctctaa

SEQ ID NO: 568326 - DNA, 15 bp, Homo sapiens
ggaacaaattctcta

SEQ ID NO: 568327 - DNA, 15 bp, Homo sapiens
aggaacaaattctct

SEQ ID NO: 568328 - DNA, 15 bp, Homo sapiens
caggaacaaattctc

SEQ ID NO: 568329 - DNA, 15 bp, Homo sapiens
acaggaacaaattct

SEQ ID NO: 568330 - DNA, 15 bp, Homo sapiens
cacaggaacaaattc

SEQ ID NO: 568331 - DNA, 15 bp, Homo sapiens
acacaggaacaaatt

SEQ ID NO: 568332 - DNA, 15 bp, Homo sapiens
aacacaggaacaaat

SEQ ID NO: 568333 - DNA, 15 bp, Homo sapiens
aaacacaggaacaaa

SEQ ID NO: 568334 - DNA, 15 bp, Homo sapiens
gaaacacaggaacaa

SEQ ID NO: 568335 - DNA, 15 bp, Homo sapiens
ggaaacacaggaaca

SEQ ID NO: 568336 - DNA, 15 bp, Homo sapiens
tggaaacacaggaac

SEQ ID NO: 568337 - DNA, 15 bp, Homo sapiens
gtggaaacacaggaa

SEQ ID NO: 568338 - DNA, 15 bp, Homo sapiens
ggtggaaacacagga

SEQ ID NO: 568339 - DNA, 15 bp, Homo sapiens
tggtggaaacacagg

SEQ ID NO: 568340 - DNA, 15 bp, Homo sapiens
atggtggaaacacag

SEQ ID NO: 568341 - DNA, 15 bp, Homo sapiens
tatggtggaaacaca

SEQ ID NO: 568342 - DNA, 15 bp, Homo sapiens
ttatggtggaaacac

SEQ ID NO: 568343 - DNA, 15 bp, Homo sapiens
cttatggtggaaaca

SEQ ID NO: 568344 - DNA, 15 bp, Homo sapiens
tcttatggtggaaac

SEQ ID NO: 568345 - DNA, 15 bp, Homo sapiens
atcttatggtggaaa

SEQ ID NO: 568346 - DNA, 15 bp, Homo sapiens
tatcttatggtggaa

SEQ ID NO: 568347 - DNA, 15 bp, Homo sapiens
ttatcttatggtgga

SEQ ID NO: 568348 - DNA, 15 bp, Homo sapiens
tttatcttatggtgg

SEQ ID NO: 568349 - DNA, 15 bp, Homo sapiens
atttatcttatggtg

SEQ ID NO: 568350 - DNA, 15 bp, Homo sapiens
catttatcttatggt

SEQ ID NO: 568351 - DNA, 15 bp, Homo sapiens
tcatttatcttatgg

SEQ ID NO: 568352 - DNA, 15 bp, Homo sapiens
ctcatttatcttatg

SEQ ID NO: 568353 - DNA, 15 bp, Homo sapiens
tctcatttatcttat

SEQ ID NO: 568354 - DNA, 15 bp, Homo sapiens
atctcatttatctta

SEQ ID NO: 568355 - DNA, 15 bp, Homo sapiens
tatctcatttatctt

SEQ ID NO: 568356 - DNA, 15 bp, Homo sapiens
ttatctcatttatct

SEQ ID NO: 568357 - DNA, 15 bp, Homo sapiens
tttatctcatttatc

SEQ ID NO: 568358 - DNA, 15 bp, Homo sapiens
ctttatctcatttat

SEQ ID NO: 568359 - DNA, 15 bp, Homo sapiens
actttatctcattta

SEQ ID NO: 568360 - DNA, 15 bp, Homo sapiens
cactttatctcattt

SEQ ID NO: 568361 - DNA, 15 bp, Homo sapiens
gcactttatctcatt

SEQ ID NO: 568362 - DNA, 15 bp, Homo sapiens
tgcactttatctcat

SEQ ID NO: 568363 - DNA, 15 bp, Homo sapiens
gtgcactttatctca

SEQ ID NO: 568364 - DNA, 15 bp, Homo sapiens
agtgcactttatctc

SEQ ID NO: 568365 - DNA, 15 bp, Homo sapiens
aagtgcactttatct

SEQ ID NO: 568366 - DNA, 15 bp, Homo sapiens
aaagtgcactttatc

SEQ ID NO: 568367 - DNA, 15 bp, Homo sapiens
caaagtgcactttat

SEQ ID NO: 568368 - DNA, 15 bp, Homo sapiens
ccaaagtgcacttta

SEQ ID NO: 568369 - DNA, 15 bp, Homo sapiens
accaaagtgcacttt

SEQ ID NO: 568370 - DNA, 15 bp, Homo sapiens
aaccaaagtgcactt

SEQ ID NO: 568371 - DNA, 15 bp, Homo sapiens
aaaccaaagtgcact

SEQ ID NO: 568372 - DNA, 15 bp, Homo sapiens
taaaccaaagtgcac

SEQ ID NO: 568373 - DNA, 15 bp, Homo sapiens
gtaaaccaaagtgca

SEQ ID NO: 568374 - DNA, 15 bp, Homo sapiens
cgtaaaccaaagtgc

SEQ ID NO: 568375 - DNA, 15 bp, Homo sapiens
acgtaaaccaaagtg

SEQ ID NO: 568376 - DNA, 15 bp, Homo sapiens
gacgtaaaccaaagt

SEQ ID NO: 568377 - DNA, 15 bp, Homo sapiens
agacgtaaaccaaag

SEQ ID NO: 568378 - DNA, 15 bp, Homo sapiens
aagacgtaaaccaaa

SEQ ID NO: 568379 - DNA, 15 bp, Homo sapiens
aaagacgtaaaccaa

SEQ ID NO: 568380 - DNA, 15 bp, Homo sapiens
gaaagacgtaaacca

SEQ ID NO: 568381 - DNA, 15 bp, Homo sapiens
tgaaagacgtaaacc

SEQ ID NO: 568382 - DNA, 15 bp, Homo sapiens
ttgaaagacgtaaac

SEQ ID NO: 568383 - DNA, 15 bp, Homo sapiens
cttgaaagacgtaaa

SEQ ID NO: 568384 - DNA, 15 bp, Homo sapiens
gcttgaaagacgtaa

SEQ ID NO: 568385 - DNA, 15 bp, Homo sapiens
tgcttgaaagacgta

SEQ ID NO: 568386 - DNA, 15 bp, Homo sapiens
gtgcttgaaagacgt

SEQ ID NO: 568387 - DNA, 15 bp, Homo sapiens
agtgcttgaaagacg

SEQ ID NO: 568388 - DNA, 15 bp, Homo sapiens
aagtgcttgaaagac

SEQ ID NO: 568389 - DNA, 15 bp, Homo sapiens
taagtgcttgaaaga

SEQ ID NO: 568390 - DNA, 15 bp, Homo sapiens
ttaagtgcttgaaag

SEQ ID NO: 568391 - DNA, 15 bp, Homo sapiens
cttaagtgcttgaaa

SEQ ID NO: 568392 - DNA, 15 bp, Homo sapiens
tcttaagtgcttgaa

SEQ ID NO: 568393 - DNA, 15 bp, Homo sapiens
ttcttaagtgcttga

SEQ ID NO: 568394 - DNA, 15 bp, Homo sapiens
gttcttaagtgcttg

SEQ ID NO: 568395 - DNA, 15 bp, Homo sapiens
tgttcttaagtgctt

SEQ ID NO: 568396 - DNA, 15 bp, Homo sapiens
ctgttcttaagtgct

SEQ ID NO: 568397 - DNA, 15 bp, Homo sapiens
gctgttcttaagtgc

SEQ ID NO: 568398 - DNA, 15 bp, Homo sapiens
tgctgttcttaagtg

SEQ ID NO: 568399 - DNA, 15 bp, Homo sapiens
gtgctgttcttaagt

SEQ ID NO: 568400 - DNA, 15 bp, Homo sapiens
agtgctgttcttaag

SEQ ID NO: 568401 - DNA, 15 bp, Homo sapiens
aagtgctgttcttaa

SEQ ID NO: 568402 - DNA, 15 bp, Homo sapiens
aaagtgctgttctta

SEQ ID NO: 568403 - DNA, 15 bp, Homo sapiens
taaagtgctgttctt

SEQ ID NO: 568404 - DNA, 15 bp, Homo sapiens
ataaagtgctgttct

SEQ ID NO: 568405 - DNA, 15 bp, Homo sapiens
aataaagtgctgttc

SEQ ID NO: 568406 - DNA, 15 bp, Homo sapiens
gaataaagtgctgtt

SEQ ID NO: 568407 - DNA, 15 bp, Homo sapiens
tgaataaagtgctgt

SEQ ID NO: 568408 - DNA, 15 bp, Homo sapiens
ctgaataaagtgctg

SEQ ID NO: 568409 - DNA, 15 bp, Homo sapiens
actgaataaagtgct

SEQ ID NO: 568410 - DNA, 15 bp, Homo sapiens
aactgaataaagtgc

SEQ ID NO: 568411 - DNA, 15 bp, Homo sapiens
aaactgaataaagtg

SEQ ID NO: 568412 - DNA, 15 bp, Homo sapiens
aaaactgaataaagt

SEQ ID NO: 568413 - DNA, 15 bp, Homo sapiens
taaaactgaataaag

SEQ ID NO: 568414 - DNA, 15 bp, Homo sapiens
ttaaaactgaataaa

SEQ ID NO: 568415 - DNA, 15 bp, Homo sapiens
attaaaactgaataa

SEQ ID NO: 568416 - DNA, 15 bp, Homo sapiens
tattaaaactgaata

SEQ ID NO: 568417 - DNA, 15 bp, Homo sapiens
ttattaaaactgaat

SEQ ID NO: 568418 - DNA, 15 bp, Homo sapiens
tttattaaaactgaa

SEQ ID NO: 568419 - DNA, 15 bp, Homo sapiens
atttattaaaactga

SEQ ID NO: 568420 - DNA, 15 bp, Homo sapiens
aatttattaaaactg

SEQ ID NO: 568421 - DNA, 15 bp, Homo sapiens
aaatttattaaaact

SEQ ID NO: 568422 - DNA, 15 bp, Homo sapiens
aaaatttattaaaac

SEQ ID NO: 568423 - DNA, 15 bp, Homo sapiens
aaaaatttattaaaa

SEQ ID NO: 568424 - DNA, 15 bp, Homo sapiens
taaaaatttattaaa

SEQ ID NO: 568425 - DNA, 15 bp, Homo sapiens
gtaaaaatttattaa

SEQ ID NO: 568426 - DNA, 15 bp, Homo sapiens
agtaaaaatttatta

SEQ ID NO: 568427 - DNA, 15 bp, Homo sapiens
tagtaaaaatttatt

SEQ ID NO: 568428 - DNA, 15 bp, Homo sapiens
ttagtaaaaatttat

SEQ ID NO: 568429 - DNA, 15 bp, Homo sapiens
tttagtaaaaattta

SEQ ID NO: 568430 - DNA, 15 bp, Homo sapiens
atttagtaaaaattt

SEQ ID NO: 568431 - DNA, 15 bp, Homo sapiens
aatttagtaaaaatt

SEQ ID NO: 568432 - DNA, 15 bp, Homo sapiens
caatttagtaaaaat

SEQ ID NO: 568433 - DNA, 15 bp, Homo sapiens
ccaatttagtaaaaa

SEQ ID NO: 568434 - DNA, 15 bp, Homo sapiens
accaatttagtaaaa

SEQ ID NO: 568435 - DNA, 15 bp, Homo sapiens
taccaatttagtaaa

SEQ ID NO: 568436 - DNA, 15 bp, Homo sapiens
ttaccaatttagtaa

SEQ ID NO: 568437 - DNA, 15 bp, Homo sapiens
tttaccaatttagta

SEQ ID NO: 568438 - DNA, 15 bp, Homo sapiens
atttaccaatttagt

SEQ ID NO: 568439 - DNA, 15 bp, Homo sapiens
catttaccaatttag

SEQ ID NO: 568440 - DNA, 15 bp, Homo sapiens
gcatttaccaattta

SEQ ID NO: 568441 - DNA, 15 bp, Homo sapiens
tgcatttaccaattt

SEQ ID NO: 568442 - DNA, 15 bp, Homo sapiens
ttgcatttaccaatt

SEQ ID NO: 568443 - DNA, 15 bp, Homo sapiens
tttgcatttaccaat

SEQ ID NO: 568444 - DNA, 15 bp, Homo sapiens
ttttgcatttaccaa

SEQ ID NO: 568445 - DNA, 15 bp, Homo sapiens
cttttgcatttacca

SEQ ID NO: 568446 - DNA, 15 bp, Homo sapiens
tcttttgcatttacc

SEQ ID NO: 568447 - DNA, 15 bp, Homo sapiens
ttcttttgcatttac

SEQ ID NO: 568448 - DNA, 15 bp, Homo sapiens
attcttttgcattta

SEQ ID NO: 568449 - DNA, 15 bp, Homo sapiens
gattcttttgcattt

SEQ ID NO: 568450 - DNA, 15 bp, Homo sapiens
agattcttttgcatt

SEQ ID NO: 568451 - DNA, 15 bp, Homo sapiens
aagattcttttgcat

SEQ ID NO: 568452 - DNA, 15 bp, Homo sapiens
aaagattcttttgca

SEQ ID NO: 568453 - DNA, 15 bp, Homo sapiens
aaaagattcttttgc

SEQ ID NO: 568454 - DNA, 15 bp, Homo sapiens
aaaaagattcttttg

SEQ ID NO: 568455 - DNA, 15 bp, Homo sapiens
aaaaaagattctttt

SEQ ID NO: 568456 - DNA, 15 bp, Homo sapiens
aaaaaaagattcttt

SEQ ID NO: 568457 - DNA, 15 bp, Homo sapiens
aaaaaaaagattctt

SEQ ID NO: 568458 - DNA, 15 bp, Homo sapiens
taaaaaaaagattct

SEQ ID NO: 568459 - DNA, 15 bp, Homo sapiens
ataaaaaaaagattc

SEQ ID NO: 568460 - DNA, 15 bp, Homo sapiens
aataaaaaaaagatt

SEQ ID NO: 568461 - DNA, 15 bp, Homo sapiens
caataaaaaaaagat

SEQ ID NO: 568462 - DNA, 15 bp, Homo sapiens
gcaataaaaaaaaga

SEQ ID NO: 568463 - DNA, 15 bp, Homo sapiens
agcaataaaaaaaag

SEQ ID NO: 568464 - DNA, 15 bp, Homo sapiens
gagcaataaaaaaaa

SEQ ID NO: 568465 - DNA, 15 bp, Homo sapiens
tgagcaataaaaaaa

SEQ ID NO: 568466 - DNA, 15 bp, Homo sapiens
atgagcaataaaaaa

SEQ ID NO: 568467 - DNA, 15 bp, Homo sapiens
tatgagcaataaaaa

SEQ ID NO: 568468 - DNA, 15 bp, Homo sapiens
atatgagcaataaaa

SEQ ID NO: 568469 - DNA, 15 bp, Homo sapiens
catatgagcaataaa

SEQ ID NO: 568470 - DNA, 15 bp, Homo sapiens
acatatgagcaataa

SEQ ID NO: 568471 - DNA, 15 bp, Homo sapiens
gacatatgagcaata

SEQ ID NO: 568472 - DNA, 15 bp, Homo sapiens
agacatatgagcaat

SEQ ID NO: 568473 - DNA, 15 bp, Homo sapiens
aagacatatgagcaa

SEQ ID NO: 568474 - DNA, 15 bp, Homo sapiens
gaagacatatgagca

SEQ ID NO: 568475 - DNA, 15 bp, Homo sapiens
ggaagacatatgagc

SEQ ID NO: 568476 - DNA, 15 bp, Homo sapiens
aggaagacatatgag

SEQ ID NO: 568477 - DNA, 15 bp, Homo sapiens
caggaagacatatga

SEQ ID NO: 568478 - DNA, 15 bp, Homo sapiens
acaggaagacatatg

SEQ ID NO: 568479 - DNA, 15 bp, Homo sapiens
gacaggaagacatat

SEQ ID NO: 568480 - DNA, 15 bp, Homo sapiens
agacaggaagacata

SEQ ID NO: 568481 - DNA, 15 bp, Homo sapiens
gagacaggaagacat

SEQ ID NO: 568482 - DNA, 15 bp, Homo sapiens
agagacaggaagaca

SEQ ID NO: 568483 - DNA, 15 bp, Homo sapiens
tagagacaggaagac

SEQ ID NO: 568484 - DNA, 15 bp, Homo sapiens
ttagagacaggaaga

SEQ ID NO: 568485 - DNA, 15 bp, Homo sapiens
cttagagacaggaag

SEQ ID NO: 568486 - DNA, 15 bp, Homo sapiens
gcttagagacaggaa

SEQ ID NO: 568487 - DNA, 15 bp, Homo sapiens
ggcttagagacagga

SEQ ID NO: 568488 - DNA, 15 bp, Homo sapiens
tggcttagagacagg

SEQ ID NO: 568489 - DNA, 15 bp, Homo sapiens
ctggcttagagacag

SEQ ID NO: 568490 - DNA, 15 bp, Homo sapiens
tctggcttagagaca

SEQ ID NO: 568491 - DNA, 15 bp, Homo sapiens
gtctggcttagagac

SEQ ID NO: 568492 - DNA, 15 bp, Homo sapiens
ggtctggcttagaga

SEQ ID NO: 568493 - DNA, 15 bp, Homo sapiens
tggtctggcttagag

SEQ ID NO: 568494 - DNA, 15 bp, Homo sapiens
ttggtctggcttaga

SEQ ID NO: 568495 - DNA, 15 bp, Homo sapiens
attggtctggcttag

SEQ ID NO: 568496 - DNA, 15 bp, Homo sapiens
cattggtctggctta

SEQ ID NO: 568497 - DNA, 15 bp, Homo sapiens
tcattggtctggctt

SEQ ID NO: 568498 - DNA, 15 bp, Homo sapiens
ctcattggtctggct

SEQ ID NO: 568499 - DNA, 15 bp, Homo sapiens
gctcattggtctggc

SEQ ID NO: 568500 - DNA, 15 bp, Homo sapiens
tgctcattggtctgg

SEQ ID NO: 568501 - DNA, 15 bp, Homo sapiens
ttgctcattggtctg

SEQ ID NO: 568502 - DNA, 15 bp, Homo sapiens
tttgctcattggtct

SEQ ID NO: 568503 - DNA, 15 bp, Homo sapiens
atttgctcattggtc

SEQ ID NO: 568504 - DNA, 15 bp, Homo sapiens
tatttgctcattggt

SEQ ID NO: 568505 - DNA, 15 bp, Homo sapiens
gtatttgctcattgg

SEQ ID NO: 568506 - DNA, 15 bp, Homo sapiens
ggtatttgctcattg

SEQ ID NO: 568507 - DNA, 15 bp, Homo sapiens
aggtatttgctcatt

SEQ ID NO: 568508 - DNA, 15 bp, Homo sapiens
aaggtatttgctcat

SEQ ID NO: 568509 - DNA, 15 bp, Homo sapiens
aaaggtatttgctca

SEQ ID NO: 568510 - DNA, 15 bp, Homo sapiens
taaaggtatttgctc

SEQ ID NO: 568511 - DNA, 15 bp, Homo sapiens
ttaaaggtatttgct

SEQ ID NO: 568512 - DNA, 15 bp, Homo sapiens
tttaaaggtatttgc

SEQ ID NO: 568513 - DNA, 15 bp, Homo sapiens
ttttaaaggtatttg

SEQ ID NO: 568514 - DNA, 15 bp, Homo sapiens
gttttaaaggtattt

SEQ ID NO: 568515 - DNA, 15 bp, Homo sapiens
agttttaaaggtatt

SEQ ID NO: 568516 - DNA, 15 bp, Homo sapiens
tagttttaaaggtat

SEQ ID NO: 568517 - DNA, 15 bp, Homo sapiens
ctagttttaaaggta

SEQ ID NO: 568518 - DNA, 15 bp, Homo sapiens
actagttttaaaggt

SEQ ID NO: 568519 - DNA, 15 bp, Homo sapiens
aactagttttaaagg

SEQ ID NO: 568520 - DNA, 15 bp, Homo sapiens
caactagttttaaag

SEQ ID NO: 568521 - DNA, 15 bp, Homo sapiens
acaactagttttaaa

SEQ ID NO: 568522 - DNA, 15 bp, Homo sapiens
aacaactagttttaa

SEQ ID NO: 568523 - DNA, 15 bp, Homo sapiens
taacaactagtttta

SEQ ID NO: 568524 - DNA, 15 bp, Homo sapiens
gtaacaactagtttt

SEQ ID NO: 568525 - DNA, 15 bp, Homo sapiens
tgtaacaactagttt

SEQ ID NO: 568526 - DNA, 15 bp, Homo sapiens
atgtaacaactagtt

SEQ ID NO: 568527 - DNA, 15 bp, Homo sapiens
gatgtaacaactagt

SEQ ID NO: 568528 - DNA, 15 bp, Homo sapiens
agatgtaacaactag

SEQ ID NO: 568529 - DNA, 15 bp, Homo sapiens
aagatgtaacaacta

SEQ ID NO: 568530 - DNA, 15 bp, Homo sapiens
caagatgtaacaact

SEQ ID NO: 568531 - DNA, 15 bp, Homo sapiens
tcaagatgtaacaac

SEQ ID NO: 568532 - DNA, 15 bp, Homo sapiens
ttcaagatgtaacaa

SEQ ID NO: 568533 - DNA, 15 bp, Homo sapiens
gttcaagatgtaaca

SEQ ID NO: 568534 - DNA, 15 bp, Homo sapiens
ggttcaagatgtaac

SEQ ID NO: 568535 - DNA, 15 bp, Homo sapiens
tggttcaagatgtaa

SEQ ID NO: 568536 - DNA, 15 bp, Homo sapiens
atggttcaagatgta

SEQ ID NO: 568537 - DNA, 15 bp, Homo sapiens
aatggttcaagatgt

SEQ ID NO: 568538 - DNA, 15 bp, Homo sapiens
aaatggttcaagatg

SEQ ID NO: 568539 - DNA, 15 bp, Homo sapiens
taaatggttcaagat

SEQ ID NO: 568540 - DNA, 15 bp, Homo sapiens
ttaaatggttcaaga

SEQ ID NO: 568541 - DNA, 15 bp, Homo sapiens
gttaaatggttcaag

SEQ ID NO: 568542 - DNA, 15 bp, Homo sapiens
agttaaatggttcaa

SEQ ID NO: 568543 - DNA, 15 bp, Homo sapiens
cagttaaatggttca

SEQ ID NO: 568544 - DNA, 15 bp, Homo sapiens
acagttaaatggttc

SEQ ID NO: 568545 - DNA, 15 bp, Homo sapiens
tacagttaaatggtt

SEQ ID NO: 568546 - DNA, 15 bp, Homo sapiens
ttacagttaaatggt

SEQ ID NO: 568547 - DNA, 15 bp, Homo sapiens
attacagttaaatgg

SEQ ID NO: 568548 - DNA, 15 bp, Homo sapiens
tattacagttaaatg

SEQ ID NO: 568549 - DNA, 15 bp, Homo sapiens
ttattacagttaaat

SEQ ID NO: 568550 - DNA, 15 bp, Homo sapiens
tttattacagttaaa

SEQ ID NO: 568551 - DNA, 15 bp, Homo sapiens
ttttattacagttaa

SEQ ID NO: 568552 - DNA, 15 bp, Homo sapiens
cttttattacagtta

SEQ ID NO: 568553 - DNA, 15 bp, Homo sapiens
gcttttattacagtt

SEQ ID NO: 568554 - DNA, 15 bp, Homo sapiens
tgcttttattacagt

SEQ ID NO: 568555 - DNA, 15 bp, Homo sapiens
ctgcttttattacag

SEQ ID NO: 568556 - DNA, 15 bp, Homo sapiens
tctgcttttattaca

SEQ ID NO: 568557 - DNA, 15 bp, Homo sapiens
ttctgcttttattac

SEQ ID NO: 568558 - DNA, 15 bp, Homo sapiens
attctgcttttatta

SEQ ID NO: 568559 - DNA, 15 bp, Homo sapiens
cattctgcttttatt

SEQ ID NO: 568560 - DNA, 15 bp, Homo sapiens
acattctgcttttat

SEQ ID NO: 568561 - DNA, 15 bp, Homo sapiens
aacattctgctttta

SEQ ID NO: 568562 - DNA, 15 bp, Homo sapiens
aaacattctgctttt

SEQ ID NO: 568563 - DNA, 15 bp, Homo sapiens
taaacattctgcttt

SEQ ID NO: 568564 - DNA, 15 bp, Homo sapiens
ctaaacattctgctt

SEQ ID NO: 568565 - DNA, 15 bp, Homo sapiens
actaaacattctgct

SEQ ID NO: 568566 - DNA, 15 bp, Homo sapiens
aactaaacattctgc

SEQ ID NO: 568567 - DNA, 15 bp, Homo sapiens
taactaaacattctg

SEQ ID NO: 568568 - DNA, 15 bp, Homo sapiens
ttaactaaacattct

SEQ ID NO: 568569 - DNA, 15 bp, Homo sapiens
attaactaaacattc

SEQ ID NO: 568570 - DNA, 15 bp, Homo sapiens
cattaactaaacatt

SEQ ID NO: 568571 - DNA, 15 bp, Homo sapiens
tcattaactaaacat

SEQ ID NO: 568572 - DNA, 15 bp, Homo sapiens
ttcattaactaaaca

SEQ ID NO: 568573 - DNA, 15 bp, Homo sapiens
attcattaactaaac

SEQ ID NO: 568574 - DNA, 15 bp, Homo sapiens
aattcattaactaaa

SEQ ID NO: 568575 - DNA, 15 bp, Homo sapiens
taattcattaactaa

SEQ ID NO: 568576 - DNA, 15 bp, Homo sapiens
ttaattcattaacta

SEQ ID NO: 568577 - DNA, 15 bp, Homo sapiens
tttaattcattaact

SEQ ID NO: 568578 - DNA, 15 bp, Homo sapiens
ctttaattcattaac

SEQ ID NO: 568579 - DNA, 15 bp, Homo sapiens
tctttaattcattaa

SEQ ID NO: 568580 - DNA, 15 bp, Homo sapiens
ttctttaattcatta

SEQ ID NO: 568581 - DNA, 15 bp, Homo sapiens
gttctttaattcatt

SEQ ID NO: 568582 - DNA, 15 bp, Homo sapiens
tgttctttaattcat

SEQ ID NO: 568583 - DNA, 15 bp, Homo sapiens
ttgttctttaattca

SEQ ID NO: 568584 - DNA, 15 bp, Homo sapiens
tttgttctttaattc

SEQ ID NO: 568585 - DNA, 15 bp, Homo sapiens
gtttgttctttaatt

SEQ ID NO: 568586 - DNA, 15 bp, Homo sapiens
ggtttgttctttaat

SEQ ID NO: 568587 - DNA, 15 bp, Homo sapiens
gggtttgttctttaa

SEQ ID NO: 568588 - DNA, 15 bp, Homo sapiens
agggtttgttcttta

SEQ ID NO: 568589 - DNA, 15 bp, Homo sapiens
cagggtttgttcttt

SEQ ID NO: 568590 - DNA, 15 bp, Homo sapiens
tcagggtttgttctt

SEQ ID NO: 568591 - DNA, 15 bp, Homo sapiens
ctcagggtttgttct

SEQ ID NO: 568592 - DNA, 15 bp, Homo sapiens
gctcagggtttgttc

SEQ ID NO: 568593 - DNA, 15 bp, Homo sapiens
ggctcagggtttgtt

SEQ ID NO: 568594 - DNA, 15 bp, Homo sapiens
gggctcagggtttgt

SEQ ID NO: 568595 - DNA, 15 bp, Homo sapiens
agggctcagggtttg

SEQ ID NO: 568596 - DNA, 15 bp, Homo sapiens
aagggctcagggttt

SEQ ID NO: 568597 - DNA, 15 bp, Homo sapiens
aaagggctcagggtt

SEQ ID NO: 568598 - DNA, 15 bp, Homo sapiens
aaaagggctcagggt

SEQ ID NO: 568599 - DNA, 15 bp, Homo sapiens
taaaagggctcaggg

SEQ ID NO: 568600 - DNA, 15 bp, Homo sapiens
ataaaagggctcagg

SEQ ID NO: 568601 - DNA, 15 bp, Homo sapiens
gataaaagggctcag

SEQ ID NO: 568602 - DNA, 15 bp, Homo sapiens
tgataaaagggctca

SEQ ID NO: 568603 - DNA, 15 bp, Homo sapiens
ctgataaaagggctc

SEQ ID NO: 568604 - DNA, 15 bp, Homo sapiens
actgataaaagggct

SEQ ID NO: 568605 - DNA, 15 bp, Homo sapiens
gactgataaaagggc

SEQ ID NO: 568606 - DNA, 15 bp, Homo sapiens
agactgataaaaggg

SEQ ID NO: 568607 - DNA, 15 bp, Homo sapiens
gagactgataaaagg

SEQ ID NO: 568608 - DNA, 15 bp, Homo sapiens
ggagactgataaaag

SEQ ID NO: 568609 - DNA, 15 bp, Homo sapiens
aggagactgataaaa

SEQ ID NO: 568610 - DNA, 15 bp, Homo sapiens
caggagactgataaa

SEQ ID NO: 568611 - DNA, 15 bp, Homo sapiens
ccaggagactgataa

SEQ ID NO: 568612 - DNA, 15 bp, Homo sapiens
gccaggagactgata

SEQ ID NO: 568613 - DNA, 15 bp, Homo sapiens
agccaggagactgat

SEQ ID NO: 568614 - DNA, 15 bp, Homo sapiens
aagccaggagactga

SEQ ID NO: 568615 - DNA, 15 bp, Homo sapiens
aaagccaggagactg

SEQ ID NO: 568616 - DNA, 15 bp, Homo sapiens
taaagccaggagact

SEQ ID NO: 568617 - DNA, 15 bp, Homo sapiens
ttaaagccaggagac

SEQ ID NO: 568618 - DNA, 15 bp, Homo sapiens
tttaaagccaggaga

SEQ ID NO: 568619 - DNA, 15 bp, Homo sapiens
gtttaaagccaggag

SEQ ID NO: 568620 - DNA, 15 bp, Homo sapiens
agtttaaagccagga

SEQ ID NO: 568621 - DNA, 15 bp, Homo sapiens
tagtttaaagccagg

SEQ ID NO: 568622 - DNA, 15 bp, Homo sapiens
ttagtttaaagccag

SEQ ID NO: 568623 - DNA, 15 bp, Homo sapiens
cttagtttaaagcca

SEQ ID NO: 568624 - DNA, 15 bp, Homo sapiens
gcttagtttaaagcc

SEQ ID NO: 568625 - DNA, 15 bp, Homo sapiens
ggcttagtttaaagc

SEQ ID NO: 568626 - DNA, 15 bp, Homo sapiens
tggcttagtttaaag

SEQ ID NO: 568627 - DNA, 15 bp, Homo sapiens
ttggcttagtttaaa

SEQ ID NO: 568628 - DNA, 15 bp, Homo sapiens
attggcttagtttaa

SEQ ID NO: 568629 - DNA, 15 bp, Homo sapiens
cattggcttagttta

SEQ ID NO: 568630 - DNA, 15 bp, Homo sapiens
tcattggcttagttt

SEQ ID NO: 568631 - DNA, 15 bp, Homo sapiens
ctcattggcttagtt

SEQ ID NO: 568632 - DNA, 15 bp, Homo sapiens
cctcattggcttagt

SEQ ID NO: 568633 - DNA, 15 bp, Homo sapiens
tcctcattggcttag

SEQ ID NO: 568634 - DNA, 15 bp, Homo sapiens
ttcctcattggctta

SEQ ID NO: 568635 - DNA, 15 bp, Homo sapiens
cttcctcattggctt

SEQ ID NO: 568636 - DNA, 15 bp, Homo sapiens
acttcctcattggct

SEQ ID NO: 568637 - DNA, 15 bp, Homo sapiens
cacttcctcattggc

SEQ ID NO: 568638 - DNA, 15 bp, Homo sapiens
tcacttcctcattgg

SEQ ID NO: 568639 - DNA, 15 bp, Homo sapiens
atcacttcctcattg

SEQ ID NO: 568640 - DNA, 15 bp, Homo sapiens
aatcacttcctcatt

SEQ ID NO: 568641 - DNA, 15 bp, Homo sapiens
aaatcacttcctcat

SEQ ID NO: 568642 - DNA, 15 bp, Homo sapiens
caaatcacttcctca

SEQ ID NO: 568643 - DNA, 15 bp, Homo sapiens
ccaaatcacttcctc

SEQ ID NO: 568644 - DNA, 15 bp, Homo sapiens
cccaaatcacttcct

SEQ ID NO: 568645 - DNA, 15 bp, Homo sapiens
ccccaaatcacttcc

SEQ ID NO: 568646 - DNA, 15 bp, Homo sapiens
cccccaaatcacttc

SEQ ID NO: 568647 - DNA, 15 bp, Homo sapiens
tcccccaaatcactt

SEQ ID NO: 568648 - DNA, 15 bp, Homo sapiens
atcccccaaatcact

SEQ ID NO: 568649 - DNA, 15 bp, Homo sapiens
aatcccccaaatcac

SEQ ID NO: 568650 - DNA, 15 bp, Homo sapiens
gaatcccccaaatca

SEQ ID NO: 568651 - DNA, 15 bp, Homo sapiens
ggaatcccccaaatc

SEQ ID NO: 568652 - DNA, 15 bp, Homo sapiens
aggaatcccccaaat

SEQ ID NO: 568653 - DNA, 15 bp, Homo sapiens
caggaatcccccaaa

SEQ ID NO: 568654 - DNA, 15 bp, Homo sapiens
tcaggaatcccccaa

SEQ ID NO: 568655 - DNA, 15 bp, Homo sapiens
ttcaggaatccccca

SEQ ID NO: 568656 - DNA, 15 bp, Homo sapiens
tttcaggaatccccc

SEQ ID NO: 568657 - DNA, 15 bp, Homo sapiens
gtttcaggaatcccc

SEQ ID NO: 568658 - DNA, 15 bp, Homo sapiens
agtttcaggaatccc

SEQ ID NO: 568659 - DNA, 15 bp, Homo sapiens
tagtttcaggaatcc

SEQ ID NO: 568660 - DNA, 15 bp, Homo sapiens
ctagtttcaggaatc

SEQ ID NO: 568661 - DNA, 15 bp, Homo sapiens
cctagtttcaggaat

SEQ ID NO: 568662 - DNA, 15 bp, Homo sapiens
tcctagtttcaggaa

SEQ ID NO: 568663 - DNA, 15 bp, Homo sapiens
ttcctagtttcagga

SEQ ID NO: 568664 - DNA, 15 bp, Homo sapiens
tttcctagtttcagg

SEQ ID NO: 568665 - DNA, 15 bp, Homo sapiens
ttttcctagtttcag

SEQ ID NO: 568666 - DNA, 15 bp, Homo sapiens
tttttcctagtttca

SEQ ID NO: 568667 - DNA, 15 bp, Homo sapiens
atttttcctagtttc

SEQ ID NO: 568668 - DNA, 15 bp, Homo sapiens
catttttcctagttt

SEQ ID NO: 568669 - DNA, 15 bp, Homo sapiens
acatttttcctagtt

SEQ ID NO: 568670 - DNA, 15 bp, Homo sapiens
gacatttttcctagt

SEQ ID NO: 568671 - DNA, 15 bp, Homo sapiens
agacatttttcctag

SEQ ID NO: 568672 - DNA, 15 bp, Homo sapiens
gagacatttttccta

SEQ ID NO: 568673 - DNA, 15 bp, Homo sapiens
agagacatttttcct

SEQ ID NO: 568674 - DNA, 15 bp, Homo sapiens
aagagacatttttcc

SEQ ID NO: 568675 - DNA, 15 bp, Homo sapiens
aaagagacatttttc

SEQ ID NO: 568676 - DNA, 15 bp, Homo sapiens
taaagagacattttt

SEQ ID NO: 568677 - DNA, 15 bp, Homo sapiens
ataaagagacatttt

SEQ ID NO: 568678 - DNA, 15 bp, Homo sapiens
aataaagagacattt

SEQ ID NO: 568679 - DNA, 15 bp, Homo sapiens
aaataaagagacatt

SEQ ID NO: 568680 - DNA, 15 bp, Homo sapiens
aaaataaagagacat

SEQ ID NO: 568681 - DNA, 15 bp, Homo sapiens
caaaataaagagaca

SEQ ID NO: 568682 - DNA, 15 bp, Homo sapiens
tcaaaataaagagac

SEQ ID NO: 568683 - DNA, 15 bp, Homo sapiens
ttcaaaataaagaga

SEQ ID NO: 568684 - DNA, 15 bp, Homo sapiens
tttcaaaataaagag

SEQ ID NO: 568685 - DNA, 15 bp, Homo sapiens
ctttcaaaataaaga

SEQ ID NO: 568686 - DNA, 15 bp, Homo sapiens
tctttcaaaataaag

SEQ ID NO: 568687 - DNA, 15 bp, Homo sapiens
ttctttcaaaataaa

SEQ ID NO: 568688 - DNA, 15 bp, Homo sapiens
tttctttcaaaataa

SEQ ID NO: 568689 - DNA, 15 bp, Homo sapiens
gtttctttcaaaata

SEQ ID NO: 568690 - DNA, 15 bp, Homo sapiens
agtttctttcaaaat

SEQ ID NO: 568691 - DNA, 15 bp, Homo sapiens
aagtttctttcaaaa

SEQ ID NO: 568692 - DNA, 15 bp, Homo sapiens
caagtttctttcaaa

SEQ ID NO: 568693 - DNA, 15 bp, Homo sapiens
gcaagtttctttcaa

SEQ ID NO: 568694 - DNA, 15 bp, Homo sapiens
tgcaagtttctttca

SEQ ID NO: 568695 - DNA, 15 bp, Homo sapiens
atgcaagtttctttc

SEQ ID NO: 568696 - DNA, 15 bp, Homo sapiens
aatgcaagtttcttt

SEQ ID NO: 568697 - DNA, 15 bp, Homo sapiens
aaatgcaagtttctt

SEQ ID NO: 568698 - DNA, 15 bp, Homo sapiens
aaaatgcaagtttct

SEQ ID NO: 568699 - DNA, 15 bp, Homo sapiens
aaaaatgcaagtttc

SEQ ID NO: 568700 - DNA, 15 bp, Homo sapiens
gaaaaatgcaagttt

SEQ ID NO: 568701 - DNA, 15 bp, Homo sapiens
agaaaaatgcaagtt

SEQ ID NO: 568702 - DNA, 15 bp, Homo sapiens
aagaaaaatgcaagt

SEQ ID NO: 568703 - DNA, 15 bp, Homo sapiens
aaagaaaaatgcaag

SEQ ID NO: 568704 - DNA, 15 bp, Homo sapiens
gaaagaaaaatgcaa

SEQ ID NO: 568705 - DNA, 15 bp, Homo sapiens
agaaagaaaaatgca

SEQ ID NO: 568706 - DNA, 15 bp, Homo sapiens
aagaaagaaaaatgc

SEQ ID NO: 568707 - DNA, 15 bp, Homo sapiens
aaagaaagaaaaatg

SEQ ID NO: 568708 - DNA, 15 bp, Homo sapiens
aaaagaaagaaaaat

SEQ ID NO: 568709 - DNA, 15 bp, Homo sapiens
aaaaagaaagaaaaa

SEQ ID NO: 568710 - DNA, 15 bp, Homo sapiens
aaaaaagaaagaaaa

SEQ ID NO: 568711 - DNA, 15 bp, Homo sapiens
aaaaaaagaaagaaa

SEQ ID NO: 568712 - DNA, 15 bp, Homo sapiens
aaaaaaaagaaagaa

SEQ ID NO: 568713 - DNA, 15 bp, Homo sapiens
aaaaaaaaagaaaga

SEQ ID NO: 568714 - DNA, 15 bp, Homo sapiens
aaaaaaaaaagaaag

SEQ ID NO: 568715 - DNA, 15 bp, Homo sapiens
aaaaaaaaaaagaaa

SEQ ID NO: 568716 - DNA, 15 bp, Homo sapiens
aaaaaaaaaaaaaag

SEQ ID NO: 568717 - DNA, 15 bp, Homo sapiens
taaaaaaaaaaaaaa

SEQ ID NO: 568718 - DNA, 15 bp, Homo sapiens
ttaaaaaaaaaaaaa

SEQ ID NO: 568719 - DNA, 15 bp, Homo sapiens
attaaaaaaaaaaaa

SEQ ID NO: 568720 - DNA, 15 bp, Homo sapiens
gattaaaaaaaaaaa

SEQ ID NO: 568721 - DNA, 15 bp, Homo sapiens
agattaaaaaaaaaa

SEQ ID NO: 568722 - DNA, 15 bp, Homo sapiens
gagattaaaaaaaaa

SEQ ID NO: 568723 - DNA, 15 bp, Homo sapiens
tgagattaaaaaaaa

SEQ ID NO: 568724 - DNA, 15 bp, Homo sapiens
ttgagattaaaaaaa

SEQ ID NO: 568725 - DNA, 15 bp, Homo sapiens
tttgagattaaaaaa

SEQ ID NO: 568726 - DNA, 15 bp, Homo sapiens
ctttgagattaaaaa

SEQ ID NO: 568727 - DNA, 15 bp, Homo sapiens
cctttgagattaaaa

SEQ ID NO: 568728 - DNA, 15 bp, Homo sapiens
gcctttgagattaaa

SEQ ID NO: 568729 - DNA, 15 bp, Homo sapiens
tgcctttgagattaa

SEQ ID NO: 568730 - DNA, 15 bp, Homo sapiens
ttgcctttgagatta

SEQ ID NO: 568731 - DNA, 15 bp, Homo sapiens
attgcctttgagatt

SEQ ID NO: 568732 - DNA, 15 bp, Homo sapiens
aattgcctttgagat

SEQ ID NO: 568733 - DNA, 15 bp, Homo sapiens
caattgcctttgaga

SEQ ID NO: 568734 - DNA, 15 bp, Homo sapiens
tcaattgcctttgag

SEQ ID NO: 568735 - DNA, 15 bp, Homo sapiens
ctcaattgcctttga

SEQ ID NO: 568736 - DNA, 15 bp, Homo sapiens
actcaattgcctttg

SEQ ID NO: 568737 - DNA, 15 bp, Homo sapiens
cactcaattgccttt

SEQ ID NO: 568738 - DNA, 15 bp, Homo sapiens
ccactcaattgcctt

SEQ ID NO: 568739 - DNA, 15 bp, Homo sapiens
cccactcaattgcct

SEQ ID NO: 568740 - DNA, 15 bp, Homo sapiens
acccactcaattgcc

SEQ ID NO: 568741 - DNA, 15 bp, Homo sapiens
gacccactcaattgc

SEQ ID NO: 568742 - DNA, 15 bp, Homo sapiens
agacccactcaattg

SEQ ID NO: 568743 - DNA, 15 bp, Homo sapiens
aagacccactcaatt

SEQ ID NO: 568744 - DNA, 15 bp, Homo sapiens
gaagacccactcaat

SEQ ID NO: 568745 - DNA, 15 bp, Homo sapiens
agaagacccactcaa

SEQ ID NO: 568746 - DNA, 15 bp, Homo sapiens
cagaagacccactca

SEQ ID NO: 568747 - DNA, 15 bp, Homo sapiens
ccagaagacccactc

SEQ ID NO: 568748 - DNA, 15 bp, Homo sapiens
cccagaagacccact

SEQ ID NO: 568749 - DNA, 15 bp, Homo sapiens
gcccagaagacccac

SEQ ID NO: 568750 - DNA, 15 bp, Homo sapiens
ggcccagaagaccca

SEQ ID NO: 568751 - DNA, 15 bp, Homo sapiens
tggcccagaagaccc

SEQ ID NO: 568752 - DNA, 15 bp, Homo sapiens
ctggcccagaagacc

SEQ ID NO: 568753 - DNA, 15 bp, Homo sapiens
tctggcccagaagac

SEQ ID NO: 568754 - DNA, 15 bp, Homo sapiens
gtctggcccagaaga

SEQ ID NO: 568755 - DNA, 15 bp, Homo sapiens
ggtctggcccagaag

SEQ ID NO: 568756 - DNA, 15 bp, Homo sapiens
aggtctggcccagaa

SEQ ID NO: 568757 - DNA, 15 bp, Homo sapiens
taggtctggcccaga

SEQ ID NO: 568758 - DNA, 15 bp, Homo sapiens
ataggtctggcccag

SEQ ID NO: 568759 - DNA, 15 bp, Homo sapiens
aataggtctggccca

SEQ ID NO: 568760 - DNA, 15 bp, Homo sapiens
aaataggtctggccc

SEQ ID NO: 568761 - DNA, 15 bp, Homo sapiens
taaataggtctggcc

SEQ ID NO: 568762 - DNA, 15 bp, Homo sapiens
ttaaataggtctggc

SEQ ID NO: 568763 - DNA, 15 bp, Homo sapiens
attaaataggtctgg

SEQ ID NO: 568764 - DNA, 15 bp, Homo sapiens
aattaaataggtctg

SEQ ID NO: 568765 - DNA, 15 bp, Homo sapiens
aaattaaataggtct

SEQ ID NO: 568766 - DNA, 15 bp, Homo sapiens
taaattaaataggtc

SEQ ID NO: 568767 - DNA, 15 bp, Homo sapiens
gtaaattaaataggt

SEQ ID NO: 568768 - DNA, 15 bp, Homo sapiens
cgtaaattaaatagg

SEQ ID NO: 568769 - DNA, 15 bp, Homo sapiens
tcgtaaattaaatag

SEQ ID NO: 568770 - DNA, 15 bp, Homo sapiens
ttcgtaaattaaata

SEQ ID NO: 568771 - DNA, 15 bp, Homo sapiens
tttcgtaaattaaat

SEQ ID NO: 568772 - DNA, 15 bp, Homo sapiens
gtttcgtaaattaaa

SEQ ID NO: 568773 - DNA, 15 bp, Homo sapiens
tgtttcgtaaattaa

SEQ ID NO: 568774 - DNA, 15 bp, Homo sapiens
atgtttcgtaaatta

SEQ ID NO: 568775 - DNA, 15 bp, Homo sapiens
tatgtttcgtaaatt

SEQ ID NO: 568776 - DNA, 15 bp, Homo sapiens
ctatgtttcgtaaat

SEQ ID NO: 568777 - DNA, 15 bp, Homo sapiens
actatgtttcgtaaa

SEQ ID NO: 568778 - DNA, 15 bp, Homo sapiens
tactatgtttcgtaa

SEQ ID NO: 568779 - DNA, 15 bp, Homo sapiens
gtactatgtttcgta

SEQ ID NO: 568780 - DNA, 15 bp, Homo sapiens
ggtactatgtttcgt

SEQ ID NO: 568781 - DNA, 15 bp, Homo sapiens
aggtactatgtttcg

SEQ ID NO: 568782 - DNA, 15 bp, Homo sapiens
aaggtactatgtttc

SEQ ID NO: 568783 - DNA, 15 bp, Homo sapiens
caaggtactatgttt

SEQ ID NO: 568784 - DNA, 15 bp, Homo sapiens
gcaaggtactatgtt

SEQ ID NO: 568785 - DNA, 15 bp, Homo sapiens
tgcaaggtactatgt

SEQ ID NO: 568786 - DNA, 15 bp, Homo sapiens
ctgcaaggtactatg

SEQ ID NO: 568787 - DNA, 15 bp, Homo sapiens
tctgcaaggtactat

SEQ ID NO: 568788 - DNA, 15 bp, Homo sapiens
ctctgcaaggtacta

SEQ ID NO: 568789 - DNA, 15 bp, Homo sapiens
tctctgcaaggtact

SEQ ID NO: 568790 - DNA, 15 bp, Homo sapiens
ttctctgcaaggtac

SEQ ID NO: 568791 - DNA, 15 bp, Homo sapiens
attctctgcaaggta

SEQ ID NO: 568792 - DNA, 15 bp, Homo sapiens
tattctctgcaaggt

SEQ ID NO: 568793 - DNA, 15 bp, Homo sapiens
ctattctctgcaagg

SEQ ID NO: 568794 - DNA, 15 bp, Homo sapiens
cctattctctgcaag

SEQ ID NO: 568795 - DNA, 15 bp, Homo sapiens
gcctattctctgcaa

SEQ ID NO: 568796 - DNA, 15 bp, Homo sapiens
tgcctattctctgca

SEQ ID NO: 568797 - DNA, 15 bp, Homo sapiens
atgcctattctctgc

SEQ ID NO: 568798 - DNA, 15 bp, Homo sapiens
aatgcctattctctg

SEQ ID NO: 568799 - DNA, 15 bp, Homo sapiens
caatgcctattctct

SEQ ID NO: 568800 - DNA, 15 bp, Homo sapiens
tcaatgcctattctc

SEQ ID NO: 568801 - DNA, 15 bp, Homo sapiens
ttcaatgcctattct

SEQ ID NO: 568802 - DNA, 15 bp, Homo sapiens
tttcaatgcctattc

SEQ ID NO: 568803 - DNA, 15 bp, Homo sapiens
atttcaatgcctatt

SEQ ID NO: 568804 - DNA, 15 bp, Homo sapiens
tatttcaatgcctat

SEQ ID NO: 568805 - DNA, 15 bp, Homo sapiens
atatttcaatgccta

SEQ ID NO: 568806 - DNA, 15 bp, Homo sapiens
aatatttcaatgcct

SEQ ID NO: 568807 - DNA, 15 bp, Homo sapiens
taatatttcaatgcc

SEQ ID NO: 568808 - DNA, 15 bp, Homo sapiens
ataatatttcaatgc

SEQ ID NO: 568809 - DNA, 15 bp, Homo sapiens
aataatatttcaatg

SEQ ID NO: 568810 - DNA, 15 bp, Homo sapiens
aaataatatttcaat

SEQ ID NO: 568811 - DNA, 15 bp, Homo sapiens
taaataatatttcaa

SEQ ID NO: 568812 - DNA, 15 bp, Homo sapiens
ttaaataatatttca

SEQ ID NO: 568813 - DNA, 15 bp, Homo sapiens
tttaaataatatttc

SEQ ID NO: 568814 - DNA, 15 bp, Homo sapiens
gtttaaataatattt

SEQ ID NO: 568815 - DNA, 15 bp, Homo sapiens
tgtttaaataatatt

SEQ ID NO: 568816 - DNA, 15 bp, Homo sapiens
ttgtttaaataatat

SEQ ID NO: 568817 - DNA, 15 bp, Homo sapiens
attgtttaaataata

SEQ ID NO: 568818 - DNA, 15 bp, Homo sapiens
gattgtttaaataat

SEQ ID NO: 568819 - DNA, 15 bp, Homo sapiens
tgattgtttaaataa

SEQ ID NO: 568820 - DNA, 15 bp, Homo sapiens
ttgattgtttaaata

SEQ ID NO: 568821 - DNA, 15 bp, Homo sapiens
tttgattgtttaaat

SEQ ID NO: 568822 - DNA, 15 bp, Homo sapiens
gtttgattgtttaaa

SEQ ID NO: 568823 - DNA, 15 bp, Homo sapiens
ggtttgattgtttaa

SEQ ID NO: 568824 - DNA, 15 bp, Homo sapiens
tggtttgattgttta

SEQ ID NO: 568825 - DNA, 15 bp, Homo sapiens
ttggtttgattgttt

SEQ ID NO: 568826 - DNA, 15 bp, Homo sapiens
tttggtttgattgtt

SEQ ID NO: 568827 - DNA, 15 bp, Homo sapiens
ctttggtttgattgt

SEQ ID NO: 568828 - DNA, 15 bp, Homo sapiens
tctttggtttgattg

SEQ ID NO: 568829 - DNA, 15 bp, Homo sapiens
atctttggtttgatt

SEQ ID NO: 568830 - DNA, 15 bp, Homo sapiens
catctttggtttgat

SEQ ID NO: 568831 - DNA, 15 bp, Homo sapiens
acatctttggtttga

SEQ ID NO: 568832 - DNA, 15 bp, Homo sapiens
aacatctttggtttg

SEQ ID NO: 568833 - DNA, 15 bp, Homo sapiens
gaacatctttggttt

SEQ ID NO: 568834 - DNA, 15 bp, Homo sapiens
agaacatctttggtt

SEQ ID NO: 568835 - DNA, 15 bp, Homo sapiens
aagaacatctttggt

SEQ ID NO: 568836 - DNA, 15 bp, Homo sapiens
gaagaacatctttgg

SEQ ID NO: 568837 - DNA, 15 bp, Homo sapiens
agaagaacatctttg

SEQ ID NO: 568838 - DNA, 15 bp, Homo sapiens
tagaagaacatcttt

SEQ ID NO: 568839 - DNA, 15 bp, Homo sapiens
atagaagaacatctt

SEQ ID NO: 568840 - DNA, 15 bp, Homo sapiens
gatagaagaacatct

SEQ ID NO: 568841 - DNA, 15 bp, Homo sapiens
agatagaagaacatc

SEQ ID NO: 568842 - DNA, 15 bp, Homo sapiens
aagatagaagaacat

SEQ ID NO: 568843 - DNA, 15 bp, Homo sapiens
gaagatagaagaaca

SEQ ID NO: 568844 - DNA, 15 bp, Homo sapiens
tgaagatagaagaac

SEQ ID NO: 568845 - DNA, 15 bp, Homo sapiens
ctgaagatagaagaa

SEQ ID NO: 568846 - DNA, 15 bp, Homo sapiens
gctgaagatagaaga

SEQ ID NO: 568847 - DNA, 15 bp, Homo sapiens
agctgaagatagaag

SEQ ID NO: 568848 - DNA, 15 bp, Homo sapiens
cagctgaagatagaa

SEQ ID NO: 568849 - DNA, 15 bp, Homo sapiens
acagctgaagataga

SEQ ID NO: 568850 - DNA, 15 bp, Homo sapiens
gacagctgaagatag

SEQ ID NO: 568851 - DNA, 15 bp, Homo sapiens
tgacagctgaagata

SEQ ID NO: 568852 - DNA, 15 bp, Homo sapiens
ctgacagctgaagat

SEQ ID NO: 568853 - DNA, 15 bp, Homo sapiens
actgacagctgaaga

SEQ ID NO: 568854 - DNA, 15 bp, Homo sapiens
cactgacagctgaag

SEQ ID NO: 568855 - DNA, 15 bp, Homo sapiens
tcactgacagctgaa

SEQ ID NO: 568856 - DNA, 15 bp, Homo sapiens
atcactgacagctga

SEQ ID NO: 568857 - DNA, 15 bp, Homo sapiens
gatcactgacagctg

SEQ ID NO: 568858 - DNA, 15 bp, Homo sapiens
agatcactgacagct

SEQ ID NO: 568859 - DNA, 15 bp, Homo sapiens
tagatcactgacagc

SEQ ID NO: 568860 - DNA, 15 bp, Homo sapiens
ttagatcactgacag

SEQ ID NO: 568861 - DNA, 15 bp, Homo sapiens
attagatcactgaca

SEQ ID NO: 568862 - DNA, 15 bp, Homo sapiens
cattagatcactgac

SEQ ID NO: 568863 - DNA, 15 bp, Homo sapiens
gcattagatcactga

SEQ ID NO: 568864 - DNA, 15 bp, Homo sapiens
ggcattagatcactg

SEQ ID NO: 568865 - DNA, 15 bp, Homo sapiens
gggcattagatcact

SEQ ID NO: 568866 - DNA, 15 bp, Homo sapiens
agggcattagatcac

SEQ ID NO: 568867 - DNA, 15 bp, Homo sapiens
gagggcattagatca

SEQ ID NO: 568868 - DNA, 15 bp, Homo sapiens
tgagggcattagatc

SEQ ID NO: 568869 - DNA, 15 bp, Homo sapiens
atgagggcattagat

SEQ ID NO: 568870 - DNA, 15 bp, Homo sapiens
gatgagggcattaga

SEQ ID NO: 568871 - DNA, 15 bp, Homo sapiens
agatgagggcattag

SEQ ID NO: 568872 - DNA, 15 bp, Homo sapiens
gagatgagggcatta

SEQ ID NO: 568873 - DNA, 15 bp, Homo sapiens
agagatgagggcatt

SEQ ID NO: 568874 - DNA, 15 bp, Homo sapiens
gagagatgagggcat

SEQ ID NO: 568875 - DNA, 15 bp, Homo sapiens
agagagatgagggca

SEQ ID NO: 568876 - DNA, 15 bp, Homo sapiens
aagagagatgagggc

SEQ ID NO: 568877 - DNA, 15 bp, Homo sapiens
taagagagatgaggg

SEQ ID NO: 568878 - DNA, 15 bp, Homo sapiens
ataagagagatgagg

SEQ ID NO: 568879 - DNA, 15 bp, Homo sapiens
gataagagagatgag

SEQ ID NO: 568880 - DNA, 15 bp, Homo sapiens
ggataagagagatga

SEQ ID NO: 568881 - DNA, 15 bp, Homo sapiens
aggataagagagatg

SEQ ID NO: 568882 - DNA, 15 bp, Homo sapiens
gaggataagagagat

SEQ ID NO: 568883 - DNA, 15 bp, Homo sapiens
tgaggataagagaga

SEQ ID NO: 568884 - DNA, 15 bp, Homo sapiens
ctgaggataagagag

SEQ ID NO: 568885 - DNA, 15 bp, Homo sapiens
cctgaggataagaga

SEQ ID NO: 568886 - DNA, 15 bp, Homo sapiens
tcctgaggataagag

SEQ ID NO: 568887 - DNA, 15 bp, Homo sapiens
gtcctgaggataaga

SEQ ID NO: 568888 - DNA, 15 bp, Homo sapiens
ggtcctgaggataag

SEQ ID NO: 568889 - DNA, 15 bp, Homo sapiens
gggtcctgaggataa

SEQ ID NO: 568890 - DNA, 15 bp, Homo sapiens
tgggtcctgaggata

SEQ ID NO: 568891 - DNA, 15 bp, Homo sapiens
ctgggtcctgaggat

SEQ ID NO: 568892 - DNA, 15 bp, Homo sapiens
tctgggtcctgagga

SEQ ID NO: 568893 - DNA, 15 bp, Homo sapiens
ttctgggtcctgagg

SEQ ID NO: 568894 - DNA, 15 bp, Homo sapiens
attctgggtcctgag

SEQ ID NO: 568895 - DNA, 15 bp, Homo sapiens
cattctgggtcctga

SEQ ID NO: 568896 - DNA, 15 bp, Homo sapiens
ccattctgggtcctg

SEQ ID NO: 568897 - DNA, 15 bp, Homo sapiens
accattctgggtcct

SEQ ID NO: 568898 - DNA, 15 bp, Homo sapiens
taccattctgggtcc

SEQ ID NO: 568899 - DNA, 15 bp, Homo sapiens
ataccattctgggtc

SEQ ID NO: 568900 - DNA, 15 bp, Homo sapiens
tataccattctgggt

SEQ ID NO: 568901 - DNA, 15 bp, Homo sapiens
atataccattctggg

SEQ ID NO: 568902 - DNA, 15 bp, Homo sapiens
aatataccattctgg

SEQ ID NO: 568903 - DNA, 15 bp, Homo sapiens
gaatataccattctg

SEQ ID NO: 568904 - DNA, 15 bp, Homo sapiens
ggaatataccattct

SEQ ID NO: 568905 - DNA, 15 bp, Homo sapiens
tggaatataccattc

SEQ ID NO: 568906 - DNA, 15 bp, Homo sapiens
gtggaatataccatt

SEQ ID NO: 568907 - DNA, 15 bp, Homo sapiens
tgtggaatataccat

SEQ ID NO: 568908 - DNA, 15 bp, Homo sapiens
atgtggaatatacca

SEQ ID NO: 568909 - DNA, 15 bp, Homo sapiens
tatgtggaatatacc

SEQ ID NO: 568910 - DNA, 15 bp, Homo sapiens
ttatgtggaatatac

SEQ ID NO: 568911 - DNA, 15 bp, Homo sapiens
tttatgtggaatata

SEQ ID NO: 568912 - DNA, 15 bp, Homo sapiens
ttttatgtggaatat

SEQ ID NO: 568913 - DNA, 15 bp, Homo sapiens
cttttatgtggaata

SEQ ID NO: 568914 - DNA, 15 bp, Homo sapiens
tcttttatgtggaat

SEQ ID NO: 568915 - DNA, 15 bp, Homo sapiens
atcttttatgtggaa

SEQ ID NO: 568916 - DNA, 15 bp, Homo sapiens
catcttttatgtgga

SEQ ID NO: 568917 - DNA, 15 bp, Homo sapiens
gcatcttttatgtgg

SEQ ID NO: 568918 - DNA, 15 bp, Homo sapiens
agcatcttttatgtg

SEQ ID NO: 568919 - DNA, 15 bp, Homo sapiens
aagcatcttttatgt

SEQ ID NO: 568920 - DNA, 15 bp, Homo sapiens
aaagcatcttttatg

SEQ ID NO: 568921 - DNA, 15 bp, Homo sapiens
caaagcatcttttat

SEQ ID NO: 568922 - DNA, 15 bp, Homo sapiens
acaaagcatctttta

SEQ ID NO: 568923 - DNA, 15 bp, Homo sapiens
aacaaagcatctttt

SEQ ID NO: 568924 - DNA, 15 bp, Homo sapiens
aaacaaagcatcttt

SEQ ID NO: 568925 - DNA, 15 bp, Homo sapiens
taaacaaagcatctt

SEQ ID NO: 568926 - DNA, 15 bp, Homo sapiens
ataaacaaagcatct

SEQ ID NO: 568927 - DNA, 15 bp, Homo sapiens
gataaacaaagcatc

SEQ ID NO: 568928 - DNA, 15 bp, Homo sapiens
tgataaacaaagcat

SEQ ID NO: 568929 - DNA, 15 bp, Homo sapiens
ttgataaacaaagca

SEQ ID NO: 568930 - DNA, 15 bp, Homo sapiens
tttgataaacaaagc

SEQ ID NO: 568931 - DNA, 15 bp, Homo sapiens
atttgataaacaaag

SEQ ID NO: 568932 - DNA, 15 bp, Homo sapiens
catttgataaacaaa

SEQ ID NO: 568933 - DNA, 15 bp, Homo sapiens
tcatttgataaacaa

SEQ ID NO: 568934 - DNA, 15 bp, Homo sapiens
ttcatttgataaaca

SEQ ID NO: 568935 - DNA, 15 bp, Homo sapiens
attcatttgataaac

SEQ ID NO: 568936 - DNA, 15 bp, Homo sapiens
gattcatttgataaa

SEQ ID NO: 568937 - DNA, 15 bp, Homo sapiens
tgattcatttgataa

SEQ ID NO: 568938 - DNA, 15 bp, Homo sapiens
ttgattcatttgata

SEQ ID NO: 568939 - DNA, 15 bp, Homo sapiens
tttgattcatttgat

SEQ ID NO: 568940 - DNA, 15 bp, Homo sapiens
ttttgattcatttga

SEQ ID NO: 568941 - DNA, 15 bp, Homo sapiens
tttttgattcatttg

SEQ ID NO: 568942 - DNA, 15 bp, Homo sapiens
ctttttgattcattt

SEQ ID NO: 568943 - DNA, 15 bp, Homo sapiens
gctttttgattcatt

SEQ ID NO: 568944 - DNA, 15 bp, Homo sapiens
tgctttttgattcat

SEQ ID NO: 568945 - DNA, 15 bp, Homo sapiens
gtgctttttgattca

SEQ ID NO: 568946 - DNA, 15 bp, Homo sapiens
cgtgctttttgattc

SEQ ID NO: 568947 - DNA, 15 bp, Homo sapiens
gcgtgctttttgatt

SEQ ID NO: 568948 - DNA, 15 bp, Homo sapiens
ggcgtgctttttgat

SEQ ID NO: 568949 - DNA, 15 bp, Homo sapiens
aggcgtgctttttga

SEQ ID NO: 568950 - DNA, 15 bp, Homo sapiens
caggcgtgctttttg

SEQ ID NO: 568951 - DNA, 15 bp, Homo sapiens
tcaggcgtgcttttt

SEQ ID NO: 568952 - DNA, 15 bp, Homo sapiens
ctcaggcgtgctttt

SEQ ID NO: 568953 - DNA, 15 bp, Homo sapiens
cctcaggcgtgcttt

SEQ ID NO: 568954 - DNA, 15 bp, Homo sapiens
gcctcaggcgtgctt

SEQ ID NO: 568955 - DNA, 15 bp, Homo sapiens
tgcctcaggcgtgct

SEQ ID NO: 568956 - DNA, 15 bp, Homo sapiens
atgcctcaggcgtgc

SEQ ID NO: 568957 - DNA, 15 bp, Homo sapiens
aatgcctcaggcgtg

SEQ ID NO: 568958 - DNA, 15 bp, Homo sapiens
aaatgcctcaggcgt

SEQ ID NO: 568959 - DNA, 15 bp, Homo sapiens
taaatgcctcaggcg

SEQ ID NO: 568960 - DNA, 15 bp, Homo sapiens
ataaatgcctcaggc

SEQ ID NO: 568961 - DNA, 15 bp, Homo sapiens
aataaatgcctcagg

SEQ ID NO: 568962 - DNA, 15 bp, Homo sapiens
aaataaatgcctcag

SEQ ID NO: 568963 - DNA, 15 bp, Homo sapiens
aaaataaatgcctca

SEQ ID NO: 568964 - DNA, 15 bp, Homo sapiens
aaaaataaatgcctc

SEQ ID NO: 568965 - DNA, 15 bp, Homo sapiens
taaaaataaatgcct

SEQ ID NO: 568966 - DNA, 15 bp, Homo sapiens
gtaaaaataaatgcc

SEQ ID NO: 568967 - DNA, 15 bp, Homo sapiens
agtaaaaataaatgc

SEQ ID NO: 568968 - DNA, 15 bp, Homo sapiens
gagtaaaaataaatg

SEQ ID NO: 568969 - DNA, 15 bp, Homo sapiens
ggagtaaaaataaat

SEQ ID NO: 568970 - DNA, 15 bp, Homo sapiens
aggagtaaaaataaa

SEQ ID NO: 568971 - DNA, 15 bp, Homo sapiens
aaggagtaaaaataa

SEQ ID NO: 568972 - DNA, 15 bp, Homo sapiens
aaaggagtaaaaata

SEQ ID NO: 568973 - DNA, 15 bp, Homo sapiens
taaaggagtaaaaat

SEQ ID NO: 568974 - DNA, 15 bp, Homo sapiens
gtaaaggagtaaaaa

SEQ ID NO: 568975 - DNA, 15 bp, Homo sapiens
agtaaaggagtaaaa

SEQ ID NO: 568976 - DNA, 15 bp, Homo sapiens
aagtaaaggagtaaa

SEQ ID NO: 568977 - DNA, 15 bp, Homo sapiens
gaagtaaaggagtaa

SEQ ID NO: 568978 - DNA, 15 bp, Homo sapiens
agaagtaaaggagta

SEQ ID NO: 568979 - DNA, 15 bp, Homo sapiens
cagaagtaaaggagt

SEQ ID NO: 568980 - DNA, 15 bp, Homo sapiens
acagaagtaaaggag

SEQ ID NO: 568981 - DNA, 15 bp, Homo sapiens
tacagaagtaaagga

SEQ ID NO: 568982 - DNA, 15 bp, Homo sapiens
ctacagaagtaaagg

SEQ ID NO: 568983 - DNA, 15 bp, Homo sapiens
cctacagaagtaaag

SEQ ID NO: 568984 - DNA, 15 bp, Homo sapiens
gcctacagaagtaaa

SEQ ID NO: 568985 - DNA, 15 bp, Homo sapiens
ggcctacagaagtaa

SEQ ID NO: 568986 - DNA, 15 bp, Homo sapiens
tggcctacagaagta

SEQ ID NO: 568987 - DNA, 15 bp, Homo sapiens
ctggcctacagaagt

SEQ ID NO: 568988 - DNA, 15 bp, Homo sapiens
cctggcctacagaag

SEQ ID NO: 568989 - DNA, 15 bp, Homo sapiens
acctggcctacagaa

SEQ ID NO: 568990 - DNA, 15 bp, Homo sapiens
gacctggcctacaga

SEQ ID NO: 568991 - DNA, 15 bp, Homo sapiens
tgacctggcctacag

SEQ ID NO: 568992 - DNA, 15 bp, Homo sapiens
ttgacctggcctaca

SEQ ID NO: 568993 - DNA, 15 bp, Homo sapiens
cttgacctggcctac

SEQ ID NO: 568994 - DNA, 15 bp, Homo sapiens
ccttgacctggccta

SEQ ID NO: 568995 - DNA, 15 bp, Homo sapiens
accttgacctggcct

SEQ ID NO: 568996 - DNA, 15 bp, Homo sapiens
caccttgacctggcc

SEQ ID NO: 568997 - DNA, 15 bp, Homo sapiens
ccaccttgacctggc

SEQ ID NO: 568998 - DNA, 15 bp, Homo sapiens
cccaccttgacctgg

SEQ ID NO: 568999 - DNA, 15 bp, Homo sapiens
acccaccttgacctg

SEQ ID NO: 569000 - DNA, 15 bp, Homo sapiens
gacccaccttgacct

SEQ ID NO: 569001 - DNA, 15 bp, Homo sapiens
agacccaccttgacc

SEQ ID NO: 569002 - DNA, 15 bp, Homo sapiens
tagacccaccttgac

SEQ ID NO: 569003 - DNA, 15 bp, Homo sapiens
ttagacccaccttga

SEQ ID NO: 569004 - DNA, 15 bp, Homo sapiens
attagacccaccttg

SEQ ID NO: 569005 - DNA, 15 bp, Homo sapiens
aattagacccacctt

SEQ ID NO: 569006 - DNA, 15 bp, Homo sapiens
gaattagacccacct

SEQ ID NO: 569007 - DNA, 15 bp, Homo sapiens
tgaattagacccacc

SEQ ID NO: 569008 - DNA, 15 bp, Homo sapiens
gtgaattagacccac

SEQ ID NO: 569009 - DNA, 15 bp, Homo sapiens
agtgaattagaccca

SEQ ID NO: 569010 - DNA, 15 bp, Homo sapiens
aagtgaattagaccc

SEQ ID NO: 569011 - DNA, 15 bp, Homo sapiens
aaagtgaattagacc

SEQ ID NO: 569012 - DNA, 15 bp, Homo sapiens
aaaagtgaattagac

SEQ ID NO: 569013 - DNA, 15 bp, Homo sapiens
taaaagtgaattaga

SEQ ID NO: 569014 - DNA, 15 bp, Homo sapiens
ataaaagtgaattag

SEQ ID NO: 569015 - DNA, 15 bp, Homo sapiens
gataaaagtgaatta

SEQ ID NO: 569016 - DNA, 15 bp, Homo sapiens
tgataaaagtgaatt

SEQ ID NO: 569017 - DNA, 15 bp, Homo sapiens
atgataaaagtgaat

SEQ ID NO: 569018 - DNA, 15 bp, Homo sapiens
gatgataaaagtgaa

SEQ ID NO: 569019 - DNA, 15 bp, Homo sapiens
tgatgataaaagtga

SEQ ID NO: 569020 - DNA, 15 bp, Homo sapiens
ctgatgataaaagtg

SEQ ID NO: 569021 - DNA, 15 bp, Homo sapiens
gctgatgataaaagt

SEQ ID NO: 569022 - DNA, 15 bp, Homo sapiens
tgctgatgataaaag

SEQ ID NO: 569023 - DNA, 15 bp, Homo sapiens
gtgctgatgataaaa

SEQ ID NO: 569024 - DNA, 15 bp, Homo sapiens
agtgctgatgataaa

SEQ ID NO: 569025 - DNA, 15 bp, Homo sapiens
aagtgctgatgataa

SEQ ID NO: 569026 - DNA, 15 bp, Homo sapiens
taagtgctgatgata

SEQ ID NO: 569027 - DNA, 15 bp, Homo sapiens
ttaagtgctgatgat

SEQ ID NO: 569028 - DNA, 15 bp, Homo sapiens
cttaagtgctgatga

SEQ ID NO: 569029 - DNA, 15 bp, Homo sapiens
tcttaagtgctgatg

SEQ ID NO: 569030 - DNA, 15 bp, Homo sapiens
ttcttaagtgctgat

SEQ ID NO: 569031 - DNA, 15 bp, Homo sapiens
tttcttaagtgctga

SEQ ID NO: 569032 - DNA, 15 bp, Homo sapiens
gtttcttaagtgctg

SEQ ID NO: 569033 - DNA, 15 bp, Homo sapiens
agtttcttaagtgct

SEQ ID NO: 569034 - DNA, 15 bp, Homo sapiens
cagtttcttaagtgc

SEQ ID NO: 569035 - DNA, 15 bp, Homo sapiens
ccagtttcttaagtg

SEQ ID NO: 569036 - DNA, 15 bp, Homo sapiens
tccagtttcttaagt

SEQ ID NO: 569037 - DNA, 15 bp, Homo sapiens
atccagtttcttaag

SEQ ID NO: 569038 - DNA, 15 bp, Homo sapiens
catccagtttcttaa

SEQ ID NO: 569039 - DNA, 15 bp, Homo sapiens
ccatccagtttctta

SEQ ID NO: 569040 - DNA, 15 bp, Homo sapiens
tccatccagtttctt

SEQ ID NO: 569041 - DNA, 15 bp, Homo sapiens
ttccatccagtttct

SEQ ID NO: 569042 - DNA, 15 bp, Homo sapiens
cttccatccagtttc

SEQ ID NO: 569043 - DNA, 15 bp, Homo sapiens
tcttccatccagttt

SEQ ID NO: 569044 - DNA, 15 bp, Homo sapiens
gtcttccatccagtt

SEQ ID NO: 569045 - DNA, 15 bp, Homo sapiens
ggtcttccatccagt

SEQ ID NO: 569046 - DNA, 15 bp, Homo sapiens
tggtcttccatccag

SEQ ID NO: 569047 - DNA, 15 bp, Homo sapiens
gtggtcttccatcca

SEQ ID NO: 569048 - DNA, 15 bp, Homo sapiens
tgtggtcttccatcc

SEQ ID NO: 569049 - DNA, 15 bp, Homo sapiens
ttgtggtcttccatc

SEQ ID NO: 569050 - DNA, 15 bp, Homo sapiens
gttgtggtcttccat

SEQ ID NO: 569051 - DNA, 15 bp, Homo sapiens
tgttgtggtcttcca

SEQ ID NO: 569052 - DNA, 15 bp, Homo sapiens
gtgttgtggtcttcc

SEQ ID NO: 569053 - DNA, 15 bp, Homo sapiens
ggtgttgtggtcttc

SEQ ID NO: 569054 - DNA, 15 bp, Homo sapiens
aggtgttgtggtctt

SEQ ID NO: 569055 - DNA, 15 bp, Homo sapiens
aaggtgttgtggtct

SEQ ID NO: 569056 - DNA, 15 bp, Homo sapiens
caaggtgttgtggtc

SEQ ID NO: 569057 - DNA, 15 bp, Homo sapiens
acaaggtgttgtggt

SEQ ID NO: 569058 - DNA, 15 bp, Homo sapiens
aacaaggtgttgtgg

SEQ ID NO: 569059 - DNA, 15 bp, Homo sapiens
aaacaaggtgttgtg

SEQ ID NO: 569060 - DNA, 15 bp, Homo sapiens
aaaacaaggtgttgt

SEQ ID NO: 569061 - DNA, 15 bp, Homo sapiens
aaaaacaaggtgttg

SEQ ID NO: 569062 - DNA, 15 bp, Homo sapiens
aaaaaacaaggtgtt

SEQ ID NO: 569063 - DNA, 15 bp, Homo sapiens
caaaaaacaaggtgt

SEQ ID NO: 569064 - DNA, 15 bp, Homo sapiens
gcaaaaaacaaggtg

SEQ ID NO: 569065 - DNA, 15 bp, Homo sapiens
tgcaaaaaacaaggt

SEQ ID NO: 569066 - DNA, 15 bp, Homo sapiens
ttgcaaaaaacaagg

SEQ ID NO: 569067 - DNA, 15 bp, Homo sapiens
tttgcaaaaaacaag

SEQ ID NO: 569068 - DNA, 15 bp, Homo sapiens
ttttgcaaaaaacaa

SEQ ID NO: 569069 - DNA, 15 bp, Homo sapiens
tttttgcaaaaaaca

SEQ ID NO: 569070 - DNA, 15 bp, Homo sapiens
atttttgcaaaaaac

SEQ ID NO: 569071 - DNA, 15 bp, Homo sapiens
aatttttgcaaaaaa

SEQ ID NO: 569072 - DNA, 15 bp, Homo sapiens
aaatttttgcaaaaa

SEQ ID NO: 569073 - DNA, 15 bp, Homo sapiens
aaaatttttgcaaaa

SEQ ID NO: 569074 - DNA, 15 bp, Homo sapiens
gaaaatttttgcaaa

SEQ ID NO: 569075 - DNA, 15 bp, Homo sapiens
ggaaaatttttgcaa

SEQ ID NO: 569076 - DNA, 15 bp, Homo sapiens
tggaaaatttttgca

SEQ ID NO: 569077 - DNA, 15 bp, Homo sapiens
atggaaaatttttgc

SEQ ID NO: 569078 - DNA, 15 bp, Homo sapiens
gatggaaaatttttg

SEQ ID NO: 569079 - DNA, 15 bp, Homo sapiens
agatggaaaattttt

SEQ ID NO: 569080 - DNA, 15 bp, Homo sapiens
gagatggaaaatttt

SEQ ID NO: 569081 - DNA, 15 bp, Homo sapiens
ggagatggaaaattt

SEQ ID NO: 569082 - DNA, 15 bp, Homo sapiens
aggagatggaaaatt

SEQ ID NO: 569083 - DNA, 15 bp, Homo sapiens
gaggagatggaaaat

SEQ ID NO: 569084 - DNA, 15 bp, Homo sapiens
tgaggagatggaaaa

SEQ ID NO: 569085 - DNA, 15 bp, Homo sapiens
ttgaggagatggaaa

SEQ ID NO: 569086 - DNA, 15 bp, Homo sapiens
attgaggagatggaa

SEQ ID NO: 569087 - DNA, 15 bp, Homo sapiens
gattgaggagatgga

SEQ ID NO: 569088 - DNA, 15 bp, Homo sapiens
tgattgaggagatgg

SEQ ID NO: 569089 - DNA, 15 bp, Homo sapiens
ctgattgaggagatg

SEQ ID NO: 569090 - DNA, 15 bp, Homo sapiens
cctgattgaggagat

SEQ ID NO: 569091 - DNA, 15 bp, Homo sapiens
gcctgattgaggaga

SEQ ID NO: 569092 - DNA, 15 bp, Homo sapiens
ggcctgattgaggag

SEQ ID NO: 569093 - DNA, 15 bp, Homo sapiens
tggcctgattgagga

SEQ ID NO: 569094 - DNA, 15 bp, Homo sapiens
ctggcctgattgagg

SEQ ID NO: 569095 - DNA, 15 bp, Homo sapiens
cctggcctgattgag

SEQ ID NO: 569096 - DNA, 15 bp, Homo sapiens
tcctggcctgattga

SEQ ID NO: 569097 - DNA, 15 bp, Homo sapiens
ttcctggcctgattg

SEQ ID NO: 569098 - DNA, 15 bp, Homo sapiens
cttcctggcctgatt

SEQ ID NO: 569099 - DNA, 15 bp, Homo sapiens
gcttcctggcctgat

SEQ ID NO: 569100 - DNA, 15 bp, Homo sapiens
tgcttcctggcctga

SEQ ID NO: 569101 - DNA, 15 bp, Homo sapiens
atgcttcctggcctg

SEQ ID NO: 569102 - DNA, 15 bp, Homo sapiens
catgcttcctggcct

SEQ ID NO: 569103 - DNA, 15 bp, Homo sapiens
acatgcttcctggcc

SEQ ID NO: 569104 - DNA, 15 bp, Homo sapiens
tacatgcttcctggc

SEQ ID NO: 569105 - DNA, 15 bp, Homo sapiens
atacatgcttcctgg

SEQ ID NO: 569106 - DNA, 15 bp, Homo sapiens
gatacatgcttcctg

SEQ ID NO: 569107 - DNA, 15 bp, Homo sapiens
agatacatgcttcct

SEQ ID NO: 569108 - DNA, 15 bp, Homo sapiens
aagatacatgcttcc

SEQ ID NO: 569109 - DNA, 15 bp, Homo sapiens
gaagatacatgcttc

SEQ ID NO: 569110 - DNA, 15 bp, Homo sapiens
agaagatacatgctt

SEQ ID NO: 569111 - DNA, 15 bp, Homo sapiens
cagaagatacatgct

SEQ ID NO: 569112 - DNA, 15 bp, Homo sapiens
ccagaagatacatgc

SEQ ID NO: 569113 - DNA, 15 bp, Homo sapiens
tccagaagatacatg

SEQ ID NO: 569114 - DNA, 15 bp, Homo sapiens
gtccagaagatacat

SEQ ID NO: 569115 - DNA, 15 bp, Homo sapiens
tgtccagaagataca

SEQ ID NO: 569116 - DNA, 15 bp, Homo sapiens
ctgtccagaagatac

SEQ ID NO: 569117 - DNA, 15 bp, Homo sapiens
cctgtccagaagata

SEQ ID NO: 569118 - DNA, 15 bp, Homo sapiens
tcctgtccagaagat

SEQ ID NO: 569119 - DNA, 15 bp, Homo sapiens
gtcctgtccagaaga

SEQ ID NO: 569120 - DNA, 15 bp, Homo sapiens
agtcctgtccagaag

SEQ ID NO: 569121 - DNA, 15 bp, Homo sapiens
aagtcctgtccagaa

SEQ ID NO: 569122 - DNA, 15 bp, Homo sapiens
aaagtcctgtccaga

SEQ ID NO: 569123 - DNA, 15 bp, Homo sapiens
taaagtcctgtccag

SEQ ID NO: 569124 - DNA, 15 bp, Homo sapiens
ataaagtcctgtcca

SEQ ID NO: 569125 - DNA, 15 bp, Homo sapiens
gataaagtcctgtcc

SEQ ID NO: 569126 - DNA, 15 bp, Homo sapiens
agataaagtcctgtc

SEQ ID NO: 569127 - DNA, 15 bp, Homo sapiens
gagataaagtcctgt

SEQ ID NO: 569128 - DNA, 15 bp, Homo sapiens
agagataaagtcctg

SEQ ID NO: 569129 - DNA, 15 bp, Homo sapiens
gagagataaagtcct

SEQ ID NO: 569130 - DNA, 15 bp, Homo sapiens
agagagataaagtcc

SEQ ID NO: 569131 - DNA, 15 bp, Homo sapiens
tagagagataaagtc

SEQ ID NO: 569132 - DNA, 15 bp, Homo sapiens
gtagagagataaagt

SEQ ID NO: 569133 - DNA, 15 bp, Homo sapiens
agtagagagataaag

SEQ ID NO: 569134 - DNA, 15 bp, Homo sapiens
gagtagagagataaa

SEQ ID NO: 569135 - DNA, 15 bp, Homo sapiens
tgagtagagagataa

SEQ ID NO: 569136 - DNA, 15 bp, Homo sapiens
ctgagtagagagata

SEQ ID NO: 569137 - DNA, 15 bp, Homo sapiens
gctgagtagagagat

SEQ ID NO: 569138 - DNA, 15 bp, Homo sapiens
agctgagtagagaga

SEQ ID NO: 569139 - DNA, 15 bp, Homo sapiens
aagctgagtagagag

SEQ ID NO: 569140 - DNA, 15 bp, Homo sapiens
taagctgagtagaga

SEQ ID NO: 569141 - DNA, 15 bp, Homo sapiens
ctaagctgagtagag

SEQ ID NO: 569142 - DNA, 15 bp, Homo sapiens
actaagctgagtaga

SEQ ID NO: 569143 - DNA, 15 bp, Homo sapiens
tactaagctgagtag

SEQ ID NO: 569144 - DNA, 15 bp, Homo sapiens
gtactaagctgagta

SEQ ID NO: 569145 - DNA, 15 bp, Homo sapiens
tgtactaagctgagt

SEQ ID NO: 569146 - DNA, 15 bp, Homo sapiens
gtgtactaagctgag

SEQ ID NO: 569147 - DNA, 15 bp, Homo sapiens
agtgtactaagctga

SEQ ID NO: 569148 - DNA, 15 bp, Homo sapiens
cagtgtactaagctg

SEQ ID NO: 569149 - DNA, 15 bp, Homo sapiens
gcagtgtactaagct

SEQ ID NO: 569150 - DNA, 15 bp, Homo sapiens
ggcagtgtactaagc

SEQ ID NO: 569151 - DNA, 15 bp, Homo sapiens
aggcagtgtactaag

SEQ ID NO: 569152 - DNA, 15 bp, Homo sapiens
aaggcagtgtactaa

SEQ ID NO: 569153 - DNA, 15 bp, Homo sapiens
taaggcagtgtacta

SEQ ID NO: 569154 - DNA, 15 bp, Homo sapiens
ataaggcagtgtact

SEQ ID NO: 569155 - DNA, 15 bp, Homo sapiens
tataaggcagtgtac

SEQ ID NO: 569156 - DNA, 15 bp, Homo sapiens
atataaggcagtgta

SEQ ID NO: 569157 - DNA, 15 bp, Homo sapiens
aatataaggcagtgt

SEQ ID NO: 569158 - DNA, 15 bp, Homo sapiens
taatataaggcagtg

SEQ ID NO: 569159 - DNA, 15 bp, Homo sapiens
ctaatataaggcagt

SEQ ID NO: 569160 - DNA, 15 bp, Homo sapiens
actaatataaggcag

SEQ ID NO: 569161 - DNA, 15 bp, Homo sapiens
gactaatataaggca

SEQ ID NO: 569162 - DNA, 15 bp, Homo sapiens
ggactaatataaggc

SEQ ID NO: 569163 - DNA, 15 bp, Homo sapiens
tggactaatataagg

SEQ ID NO: 569164 - DNA, 15 bp, Homo sapiens
atggactaatataag

SEQ ID NO: 569165 - DNA, 15 bp, Homo sapiens
aatggactaatataa

SEQ ID NO: 569166 - DNA, 15 bp, Homo sapiens
aaatggactaatata

SEQ ID NO: 569167 - DNA, 15 bp, Homo sapiens
caaatggactaatat

SEQ ID NO: 569168 - DNA, 15 bp, Homo sapiens
acaaatggactaata

SEQ ID NO: 569169 - DNA, 15 bp, Homo sapiens
gacaaatggactaat

SEQ ID NO: 569170 - DNA, 15 bp, Homo sapiens
ggacaaatggactaa

SEQ ID NO: 569171 - DNA, 15 bp, Homo sapiens
gggacaaatggacta

SEQ ID NO: 569172 - DNA, 15 bp, Homo sapiens
tgggacaaatggact

SEQ ID NO: 569173 - DNA, 15 bp, Homo sapiens
atgggacaaatggac

SEQ ID NO: 569174 - DNA, 15 bp, Homo sapiens
catgggacaaatgga

SEQ ID NO: 569175 - DNA, 15 bp, Homo sapiens
acatgggacaaatgg

SEQ ID NO: 569176 - DNA, 15 bp, Homo sapiens
aacatgggacaaatg

SEQ ID NO: 569177 - DNA, 15 bp, Homo sapiens
aaacatgggacaaat

SEQ ID NO: 569178 - DNA, 15 bp, Homo sapiens
aaaacatgggacaaa

SEQ ID NO: 569179 - DNA, 15 bp, Homo sapiens
gaaaacatgggacaa

SEQ ID NO: 569180 - DNA, 15 bp, Homo sapiens
tgaaaacatgggaca

SEQ ID NO: 569181 - DNA, 15 bp, Homo sapiens
atgaaaacatgggac

SEQ ID NO: 569182 - DNA, 15 bp, Homo sapiens
gatgaaaacatggga

SEQ ID NO: 569183 - DNA, 15 bp, Homo sapiens
tgatgaaaacatggg

SEQ ID NO: 569184 - DNA, 15 bp, Homo sapiens
gtgatgaaaacatgg

SEQ ID NO: 569185 - DNA, 15 bp, Homo sapiens
agtgatgaaaacatg

SEQ ID NO: 569186 - DNA, 15 bp, Homo sapiens
cagtgatgaaaacat

SEQ ID NO: 569187 - DNA, 15 bp, Homo sapiens
tcagtgatgaaaaca

SEQ ID NO: 569188 - DNA, 15 bp, Homo sapiens
ttcagtgatgaaaac

SEQ ID NO: 569189 - DNA, 15 bp, Homo sapiens
attcagtgatgaaaa

SEQ ID NO: 569190 - DNA, 15 bp, Homo sapiens
tattcagtgatgaaa

SEQ ID NO: 569191 - DNA, 15 bp, Homo sapiens
ttattcagtgatgaa

SEQ ID NO: 569192 - DNA, 15 bp, Homo sapiens
tttattcagtgatga

SEQ ID NO: 569193 - DNA, 15 bp, Homo sapiens
gtttattcagtgatg

SEQ ID NO: 569194 - DNA, 15 bp, Homo sapiens
agtttattcagtgat

SEQ ID NO: 569195 - DNA, 15 bp, Homo sapiens
aagtttattcagtga

SEQ ID NO: 569196 - DNA, 15 bp, Homo sapiens
caagtttattcagtg

SEQ ID NO: 569197 - DNA, 15 bp, Homo sapiens
acaagtttattcagt

SEQ ID NO: 569198 - DNA, 15 bp, Homo sapiens
aacaagtttattcag

SEQ ID NO: 569199 - DNA, 15 bp, Homo sapiens
taacaagtttattca

SEQ ID NO: 569200 - DNA, 15 bp, Homo sapiens
ttaacaagtttattc

SEQ ID NO: 569201 - DNA, 15 bp, Homo sapiens
tttaacaagtttatt

SEQ ID NO: 569202 - DNA, 15 bp, Homo sapiens
atttaacaagtttat

SEQ ID NO: 569203 - DNA, 15 bp, Homo sapiens
catttaacaagttta

SEQ ID NO: 569204 - DNA, 15 bp, Homo sapiens
tcatttaacaagttt

SEQ ID NO: 569205 - DNA, 15 bp, Homo sapiens
gtcatttaacaagtt

SEQ ID NO: 569206 - DNA, 15 bp, Homo sapiens
agtcatttaacaagt

SEQ ID NO: 569207 - DNA, 15 bp, Homo sapiens
aagtcatttaacaag

SEQ ID NO: 569208 - DNA, 15 bp, Homo sapiens
aaagtcatttaacaa

SEQ ID NO: 569209 - DNA, 15 bp, Homo sapiens
aaaagtcatttaaca

SEQ ID NO: 569210 - DNA, 15 bp, Homo sapiens
caaaagtcatttaac

SEQ ID NO: 569211 - DNA, 15 bp, Homo sapiens
ccaaaagtcatttaa

SEQ ID NO: 569212 - DNA, 15 bp, Homo sapiens
accaaaagtcattta

SEQ ID NO: 569213 - DNA, 15 bp, Homo sapiens
gaccaaaagtcattt

SEQ ID NO: 569214 - DNA, 15 bp, Homo sapiens
agaccaaaagtcatt

SEQ ID NO: 569215 - DNA, 15 bp, Homo sapiens
cagaccaaaagtcat

SEQ ID NO: 569216 - DNA, 15 bp, Homo sapiens
ccagaccaaaagtca

SEQ ID NO: 569217 - DNA, 15 bp, Homo sapiens
tccagaccaaaagtc

SEQ ID NO: 569218 - DNA, 15 bp, Homo sapiens
atccagaccaaaagt

SEQ ID NO: 569219 - DNA, 15 bp, Homo sapiens
gatccagaccaaaag

SEQ ID NO: 569220 - DNA, 15 bp, Homo sapiens
agatccagaccaaaa

SEQ ID NO: 569221 - DNA, 15 bp, Homo sapiens
gagatccagaccaaa

SEQ ID NO: 569222 - DNA, 15 bp, Homo sapiens
tgagatccagaccaa

SEQ ID NO: 569223 - DNA, 15 bp, Homo sapiens
gtgagatccagacca

SEQ ID NO: 569224 - DNA, 15 bp, Homo sapiens
tgtgagatccagacc

SEQ ID NO: 569225 - DNA, 15 bp, Homo sapiens
gtgtgagatccagac

SEQ ID NO: 569226 - DNA, 15 bp, Homo sapiens
ggtgtgagatccaga

SEQ ID NO: 569227 - DNA, 15 bp, Homo sapiens
aggtgtgagatccag

SEQ ID NO: 569228 - DNA, 15 bp, Homo sapiens
taggtgtgagatcca

SEQ ID NO: 569229 - DNA, 15 bp, Homo sapiens
ataggtgtgagatcc

SEQ ID NO: 569230 - DNA, 15 bp, Homo sapiens
tataggtgtgagatc

SEQ ID NO: 569231 - DNA, 15 bp, Homo sapiens
atataggtgtgagat

SEQ ID NO: 569232 - DNA, 15 bp, Homo sapiens
aatataggtgtgaga

SEQ ID NO: 569233 - DNA, 15 bp, Homo sapiens
taatataggtgtgag

SEQ ID NO: 569234 - DNA, 15 bp, Homo sapiens
gtaatataggtgtga

SEQ ID NO: 569235 - DNA, 15 bp, Homo sapiens
agtaatataggtgtg

SEQ ID NO: 569236 - DNA, 15 bp, Homo sapiens
aagtaatataggtgt

SEQ ID NO: 569237 - DNA, 15 bp, Homo sapiens
gaagtaatataggtg

SEQ ID NO: 569238 - DNA, 15 bp, Homo sapiens
tgaagtaatataggt

SEQ ID NO: 569239 - DNA, 15 bp, Homo sapiens
atgaagtaatatagg

SEQ ID NO: 569240 - DNA, 15 bp, Homo sapiens
aatgaagtaatatag

SEQ ID NO: 569241 - DNA, 15 bp, Homo sapiens
aaatgaagtaatata

SEQ ID NO: 569242 - DNA, 15 bp, Homo sapiens
gaaatgaagtaatat

SEQ ID NO: 569243 - DNA, 15 bp, Homo sapiens
ggaaatgaagtaata

SEQ ID NO: 569244 - DNA, 15 bp, Homo sapiens
aggaaatgaagtaat

SEQ ID NO: 569245 - DNA, 15 bp, Homo sapiens
aaggaaatgaagtaa

SEQ ID NO: 569246 - DNA, 15 bp, Homo sapiens
gaaggaaatgaagta

SEQ ID NO: 569247 - DNA, 15 bp, Homo sapiens
agaaggaaatgaagt

SEQ ID NO: 569248 - DNA, 15 bp, Homo sapiens
cagaaggaaatgaag

SEQ ID NO: 569249 - DNA, 15 bp, Homo sapiens
acagaaggaaatgaa

SEQ ID NO: 569250 - DNA, 15 bp, Homo sapiens
cacagaaggaaatga

SEQ ID NO: 569251 - DNA, 15 bp, Homo sapiens
tcacagaaggaaatg

SEQ ID NO: 569252 - DNA, 15 bp, Homo sapiens
ctcacagaaggaaat

SEQ ID NO: 569253 - DNA, 15 bp, Homo sapiens
gctcacagaaggaaa

SEQ ID NO: 569254 - DNA, 15 bp, Homo sapiens
tgctcacagaaggaa

SEQ ID NO: 569255 - DNA, 15 bp, Homo sapiens
gtgctcacagaagga

SEQ ID NO: 569256 - DNA, 15 bp, Homo sapiens
agtgctcacagaagg

SEQ ID NO: 569257 - DNA, 15 bp, Homo sapiens
gagtgctcacagaag

SEQ ID NO: 569258 - DNA, 15 bp, Homo sapiens
agagtgctcacagaa

SEQ ID NO: 569259 - DNA, 15 bp, Homo sapiens
tagagtgctcacaga

SEQ ID NO: 569260 - DNA, 15 bp, Homo sapiens
atagagtgctcacag

SEQ ID NO: 569261 - DNA, 15 bp, Homo sapiens
tatagagtgctcaca

SEQ ID NO: 569262 - DNA, 15 bp, Homo sapiens
ttatagagtgctcac

SEQ ID NO: 569263 - DNA, 15 bp, Homo sapiens
attatagagtgctca

SEQ ID NO: 569264 - DNA, 15 bp, Homo sapiens
cattatagagtgctc

SEQ ID NO: 569265 - DNA, 15 bp, Homo sapiens
tcattatagagtgct

SEQ ID NO: 569266 - DNA, 15 bp, Homo sapiens
atcattatagagtgc

SEQ ID NO: 569267 - DNA, 15 bp, Homo sapiens
tatcattatagagtg

SEQ ID NO: 569268 - DNA, 15 bp, Homo sapiens
ttatcattatagagt

SEQ ID NO: 569269 - DNA, 15 bp, Homo sapiens
gttatcattatagag

SEQ ID NO: 569270 - DNA, 15 bp, Homo sapiens
tgttatcattataga

SEQ ID NO: 569271 - DNA, 15 bp, Homo sapiens
atgttatcattatag

SEQ ID NO: 569272 - DNA, 15 bp, Homo sapiens
gatgttatcattata

SEQ ID NO: 569273 - DNA, 15 bp, Homo sapiens
tgatgttatcattat

SEQ ID NO: 569274 - DNA, 15 bp, Homo sapiens
atgatgttatcatta

SEQ ID NO: 569275 - DNA, 15 bp, Homo sapiens
aatgatgttatcatt

SEQ ID NO: 569276 - DNA, 15 bp, Homo sapiens
aaatgatgttatcat

SEQ ID NO: 569277 - DNA, 15 bp, Homo sapiens
aaaatgatgttatca

SEQ ID NO: 569278 - DNA, 15 bp, Homo sapiens
aaaaatgatgttatc

SEQ ID NO: 569279 - DNA, 15 bp, Homo sapiens
taaaaatgatgttat

SEQ ID NO: 569280 - DNA, 15 bp, Homo sapiens
ataaaaatgatgtta

SEQ ID NO: 569281 - DNA, 15 bp, Homo sapiens
tataaaaatgatgtt

SEQ ID NO: 569282 - DNA, 15 bp, Homo sapiens
atataaaaatgatgt

SEQ ID NO: 569283 - DNA, 15 bp, Homo sapiens
gatataaaaatgatg

SEQ ID NO: 569284 - DNA, 15 bp, Homo sapiens
ggatataaaaatgat

SEQ ID NO: 569285 - DNA, 15 bp, Homo sapiens
aggatataaaaatga

SEQ ID NO: 569286 - DNA, 15 bp, Homo sapiens
taggatataaaaatg

SEQ ID NO: 569287 - DNA, 15 bp, Homo sapiens
ctaggatataaaaat

SEQ ID NO: 569288 - DNA, 15 bp, Homo sapiens
cctaggatataaaaa

SEQ ID NO: 569289 - DNA, 15 bp, Homo sapiens
ccctaggatataaaa

SEQ ID NO: 569290 - DNA, 15 bp, Homo sapiens
gccctaggatataaa

SEQ ID NO: 569291 - DNA, 15 bp, Homo sapiens
tgccctaggatataa

SEQ ID NO: 569292 - DNA, 15 bp, Homo sapiens
atgccctaggatata

SEQ ID NO: 569293 - DNA, 15 bp, Homo sapiens
catgccctaggatat

SEQ ID NO: 569294 - DNA, 15 bp, Homo sapiens
acatgccctaggata

SEQ ID NO: 569295 - DNA, 15 bp, Homo sapiens
tacatgccctaggat

SEQ ID NO: 569296 - DNA, 15 bp, Homo sapiens
ctacatgccctagga

SEQ ID NO: 569297 - DNA, 15 bp, Homo sapiens
actacatgccctagg

SEQ ID NO: 569298 - DNA, 15 bp, Homo sapiens
aactacatgccctag

SEQ ID NO: 569299 - DNA, 15 bp, Homo sapiens
gaactacatgcccta

SEQ ID NO: 569300 - DNA, 15 bp, Homo sapiens
ggaactacatgccct

SEQ ID NO: 569301 - DNA, 15 bp, Homo sapiens
cggaactacatgccc

SEQ ID NO: 569302 - DNA, 15 bp, Homo sapiens
tcggaactacatgcc

SEQ ID NO: 569303 - DNA, 15 bp, Homo sapiens
ctcggaactacatgc

SEQ ID NO: 569304 - DNA, 15 bp, Homo sapiens
gctcggaactacatg

SEQ ID NO: 569305 - DNA, 15 bp, Homo sapiens
ggctcggaactacat

SEQ ID NO: 569306 - DNA, 15 bp, Homo sapiens
gggctcggaactaca

SEQ ID NO: 569307 - DNA, 15 bp, Homo sapiens
ggggctcggaactac

SEQ ID NO: 569308 - DNA, 15 bp, Homo sapiens
tggggctcggaacta

SEQ ID NO: 569309 - DNA, 15 bp, Homo sapiens
gtggggctcggaact

SEQ ID NO: 569310 - DNA, 15 bp, Homo sapiens
tgtggggctcggaac

SEQ ID NO: 569311 - DNA, 15 bp, Homo sapiens
ctgtggggctcggaa

SEQ ID NO: 569312 - DNA, 15 bp, Homo sapiens
tctgtggggctcgga

SEQ ID NO: 569313 - DNA, 15 bp, Homo sapiens
ttctgtggggctcgg

SEQ ID NO: 569314 - DNA, 15 bp, Homo sapiens
tttctgtggggctcg

SEQ ID NO: 569315 - DNA, 15 bp, Homo sapiens
ctttctgtggggctc

SEQ ID NO: 569316 - DNA, 15 bp, Homo sapiens
actttctgtggggct

SEQ ID NO: 569317 - DNA, 15 bp, Homo sapiens
tactttctgtggggc

SEQ ID NO: 569318 - DNA, 15 bp, Homo sapiens
ttactttctgtgggg

SEQ ID NO: 569319 - DNA, 15 bp, Homo sapiens
attactttctgtggg

SEQ ID NO: 569320 - DNA, 15 bp, Homo sapiens
gattactttctgtgg

SEQ ID NO: 569321 - DNA, 15 bp, Homo sapiens
tgattactttctgtg

SEQ ID NO: 569322 - DNA, 15 bp, Homo sapiens
gtgattactttctgt

SEQ ID NO: 569323 - DNA, 15 bp, Homo sapiens
ggtgattactttctg

SEQ ID NO: 569324 - DNA, 15 bp, Homo sapiens
tggtgattactttct

SEQ ID NO: 569325 - DNA, 15 bp, Homo sapiens
atggtgattactttc

SEQ ID NO: 569326 - DNA, 15 bp, Homo sapiens
aatggtgattacttt

SEQ ID NO: 569327 - DNA, 15 bp, Homo sapiens
gaatggtgattactt

SEQ ID NO: 569328 - DNA, 15 bp, Homo sapiens
tgaatggtgattact

SEQ ID NO: 569329 - DNA, 15 bp, Homo sapiens
ctgaatggtgattac

SEQ ID NO: 569330 - DNA, 15 bp, Homo sapiens
actgaatggtgatta

SEQ ID NO: 569331 - DNA, 15 bp, Homo sapiens
tactgaatggtgatt

SEQ ID NO: 569332 - DNA, 15 bp, Homo sapiens
ttactgaatggtgat

SEQ ID NO: 569333 - DNA, 15 bp, Homo sapiens
cttactgaatggtga

SEQ ID NO: 569334 - DNA, 15 bp, Homo sapiens
gcttactgaatggtg

SEQ ID NO: 569335 - DNA, 15 bp, Homo sapiens
ggcttactgaatggt

SEQ ID NO: 569336 - DNA, 15 bp, Homo sapiens
tggcttactgaatgg

SEQ ID NO: 569337 - DNA, 15 bp, Homo sapiens
ttggcttactgaatg

SEQ ID NO: 569338 - DNA, 15 bp, Homo sapiens
attggcttactgaat

SEQ ID NO: 569339 - DNA, 15 bp, Homo sapiens
tattggcttactgaa

SEQ ID NO: 569340 - DNA, 15 bp, Homo sapiens
ctattggcttactga

SEQ ID NO: 569341 - DNA, 15 bp, Homo sapiens
actattggcttactg

SEQ ID NO: 569342 - DNA, 15 bp, Homo sapiens
aactattggcttact

SEQ ID NO: 569343 - DNA, 15 bp, Homo sapiens
gaactattggcttac

SEQ ID NO: 569344 - DNA, 15 bp, Homo sapiens
tgaactattggctta

SEQ ID NO: 569345 - DNA, 15 bp, Homo sapiens
atgaactattggctt

SEQ ID NO: 569346 - DNA, 15 bp, Homo sapiens
aatgaactattggct

SEQ ID NO: 569347 - DNA, 15 bp, Homo sapiens
gaatgaactattggc

SEQ ID NO: 569348 - DNA, 15 bp, Homo sapiens
ggaatgaactattgg

SEQ ID NO: 569349 - DNA, 15 bp, Homo sapiens
aggaatgaactattg

SEQ ID NO: 569350 - DNA, 15 bp, Homo sapiens
taggaatgaactatt

SEQ ID NO: 569351 - DNA, 15 bp, Homo sapiens
ataggaatgaactat

SEQ ID NO: 569352 - DNA, 15 bp, Homo sapiens
gataggaatgaacta

SEQ ID NO: 569353 - DNA, 15 bp, Homo sapiens
agataggaatgaact

SEQ ID NO: 569354 - DNA, 15 bp, Homo sapiens
cagataggaatgaac

SEQ ID NO: 569355 - DNA, 15 bp, Homo sapiens
acagataggaatgaa

SEQ ID NO: 569356 - DNA, 15 bp, Homo sapiens
tacagataggaatga

SEQ ID NO: 569357 - DNA, 15 bp, Homo sapiens
atacagataggaatg

SEQ ID NO: 569358 - DNA, 15 bp, Homo sapiens
tatacagataggaat

SEQ ID NO: 569359 - DNA, 15 bp, Homo sapiens
ctatacagataggaa

SEQ ID NO: 569360 - DNA, 15 bp, Homo sapiens
tctatacagatagga

SEQ ID NO: 569361 - DNA, 15 bp, Homo sapiens
ttctatacagatagg

SEQ ID NO: 569362 - DNA, 15 bp, Homo sapiens
gttctatacagatag

SEQ ID NO: 569363 - DNA, 15 bp, Homo sapiens
agttctatacagata

SEQ ID NO: 569364 - DNA, 15 bp, Homo sapiens
cagttctatacagat

SEQ ID NO: 569365 - DNA, 15 bp, Homo sapiens
acagttctatacaga

SEQ ID NO: 569366 - DNA, 15 bp, Homo sapiens
tacagttctatacag

SEQ ID NO: 569367 - DNA, 15 bp, Homo sapiens
ctacagttctataca

SEQ ID NO: 569368 - DNA, 15 bp, Homo sapiens
cctacagttctatac

SEQ ID NO: 569369 - DNA, 15 bp, Homo sapiens
gcctacagttctata

SEQ ID NO: 569370 - DNA, 15 bp, Homo sapiens
agcctacagttctat

SEQ ID NO: 569371 - DNA, 15 bp, Homo sapiens
aagcctacagttcta

SEQ ID NO: 569372 - DNA, 15 bp, Homo sapiens
aaagcctacagttct

SEQ ID NO: 569373 - DNA, 15 bp, Homo sapiens
caaagcctacagttc

SEQ ID NO: 569374 - DNA, 15 bp, Homo sapiens
acaaagcctacagtt

SEQ ID NO: 569375 - DNA, 15 bp, Homo sapiens
tacaaagcctacagt

SEQ ID NO: 569376 - DNA, 15 bp, Homo sapiens
ttacaaagcctacag

SEQ ID NO: 569377 - DNA, 15 bp, Homo sapiens
tttacaaagcctaca

SEQ ID NO: 569378 - DNA, 15 bp, Homo sapiens
atttacaaagcctac

SEQ ID NO: 569379 - DNA, 15 bp, Homo sapiens
gatttacaaagccta

SEQ ID NO: 569380 - DNA, 15 bp, Homo sapiens
agatttacaaagcct

SEQ ID NO: 569381 - DNA, 15 bp, Homo sapiens
tagatttacaaagcc

SEQ ID NO: 569382 - DNA, 15 bp, Homo sapiens
gtagatttacaaagc

SEQ ID NO: 569383 - DNA, 15 bp, Homo sapiens
tgtagatttacaaag

SEQ ID NO: 569384 - DNA, 15 bp, Homo sapiens
gtgtagatttacaaa

SEQ ID NO: 569385 - DNA, 15 bp, Homo sapiens
tgtgtagatttacaa

SEQ ID NO: 569386 - DNA, 15 bp, Homo sapiens
atgtgtagatttaca

SEQ ID NO: 569387 - DNA, 15 bp, Homo sapiens
tatgtgtagatttac

SEQ ID NO: 569388 - DNA, 15 bp, Homo sapiens
ctatgtgtagattta

SEQ ID NO: 569389 - DNA, 15 bp, Homo sapiens
tctatgtgtagattt

SEQ ID NO: 569390 - DNA, 15 bp, Homo sapiens
atctatgtgtagatt

SEQ ID NO: 569391 - DNA, 15 bp, Homo sapiens
gatctatgtgtagat

SEQ ID NO: 569392 - DNA, 15 bp, Homo sapiens
agatctatgtgtaga

SEQ ID NO: 569393 - DNA, 15 bp, Homo sapiens
gagatctatgtgtag

SEQ ID NO: 569394 - DNA, 15 bp, Homo sapiens
agagatctatgtgta

SEQ ID NO: 569395 - DNA, 15 bp, Homo sapiens
cagagatctatgtgt

SEQ ID NO: 569396 - DNA, 15 bp, Homo sapiens
acagagatctatgtg

SEQ ID NO: 569397 - DNA, 15 bp, Homo sapiens
aacagagatctatgt

SEQ ID NO: 569398 - DNA, 15 bp, Homo sapiens
caacagagatctatg

SEQ ID NO: 569399 - DNA, 15 bp, Homo sapiens
acaacagagatctat

SEQ ID NO: 569400 - DNA, 15 bp, Homo sapiens
tacaacagagatcta

SEQ ID NO: 569401 - DNA, 15 bp, Homo sapiens
ctacaacagagatct

SEQ ID NO: 569402 - DNA, 15 bp, Homo sapiens
cctacaacagagatc

SEQ ID NO: 569403 - DNA, 15 bp, Homo sapiens
acctacaacagagat

SEQ ID NO: 569404 - DNA, 15 bp, Homo sapiens
aacctacaacagaga

SEQ ID NO: 569405 - DNA, 15 bp, Homo sapiens
gaacctacaacagag

SEQ ID NO: 569406 - DNA, 15 bp, Homo sapiens
tgaacctacaacaga

SEQ ID NO: 569407 - DNA, 15 bp, Homo sapiens
ttgaacctacaacag

SEQ ID NO: 569408 - DNA, 15 bp, Homo sapiens
attgaacctacaaca

SEQ ID NO: 569409 - DNA, 15 bp, Homo sapiens
tattgaacctacaac

SEQ ID NO: 569410 - DNA, 15 bp, Homo sapiens
ttattgaacctacaa

SEQ ID NO: 569411 - DNA, 15 bp, Homo sapiens
attattgaacctaca

SEQ ID NO: 569412 - DNA, 15 bp, Homo sapiens
cattattgaacctac

SEQ ID NO: 569413 - DNA, 15 bp, Homo sapiens
tcattattgaaccta

SEQ ID NO: 569414 - DNA, 15 bp, Homo sapiens
atcattattgaacct

SEQ ID NO: 569415 - DNA, 15 bp, Homo sapiens
tatcattattgaacc

SEQ ID NO: 569416 - DNA, 15 bp, Homo sapiens
ttatcattattgaac

SEQ ID NO: 569417 - DNA, 15 bp, Homo sapiens
attatcattattgaa

SEQ ID NO: 569418 - DNA, 15 bp, Homo sapiens
tattatcattattga

SEQ ID NO: 569419 - DNA, 15 bp, Homo sapiens
ttattatcattattg

SEQ ID NO: 569420 - DNA, 15 bp, Homo sapiens
tttattatcattatt

SEQ ID NO: 569421 - DNA, 15 bp, Homo sapiens
atttattatcattat

SEQ ID NO: 569422 - DNA, 15 bp, Homo sapiens
catttattatcatta

SEQ ID NO: 569423 - DNA, 15 bp, Homo sapiens
acatttattatcatt

SEQ ID NO: 569424 - DNA, 15 bp, Homo sapiens
aacatttattatcat

SEQ ID NO: 569425 - DNA, 15 bp, Homo sapiens
aaacatttattatca

SEQ ID NO: 569426 - DNA, 15 bp, Homo sapiens
caaacatttattatc

SEQ ID NO: 569427 - DNA, 15 bp, Homo sapiens
acaaacatttattat

SEQ ID NO: 569428 - DNA, 15 bp, Homo sapiens
cacaaacatttatta

SEQ ID NO: 569429 - DNA, 15 bp, Homo sapiens
gcacaaacatttatt

SEQ ID NO: 569430 - DNA, 15 bp, Homo sapiens
ggcacaaacatttat

SEQ ID NO: 569431 - DNA, 15 bp, Homo sapiens
gggcacaaacattta

SEQ ID NO: 569432 - DNA, 15 bp, Homo sapiens
ggggcacaaacattt

SEQ ID NO: 569433 - DNA, 15 bp, Homo sapiens
gggggcacaaacatt

SEQ ID NO: 569434 - DNA, 15 bp, Homo sapiens
tgggggcacaaacat

SEQ ID NO: 569435 - DNA, 15 bp, Homo sapiens
ctgggggcacaaaca

SEQ ID NO: 569436 - DNA, 15 bp, Homo sapiens
actgggggcacaaac

SEQ ID NO: 569437 - DNA, 15 bp, Homo sapiens
aactgggggcacaaa

SEQ ID NO: 569438 - DNA, 15 bp, Homo sapiens
caactgggggcacaa

SEQ ID NO: 569439 - DNA, 15 bp, Homo sapiens
acaactgggggcaca

SEQ ID NO: 569440 - DNA, 15 bp, Homo sapiens
aacaactgggggcac

SEQ ID NO: 569441 - DNA, 15 bp, Homo sapiens
taacaactgggggca

SEQ ID NO: 569442 - DNA, 15 bp, Homo sapiens
ataacaactgggggc

SEQ ID NO: 569443 - DNA, 15 bp, Homo sapiens
gataacaactggggg

SEQ ID NO: 569444 - DNA, 15 bp, Homo sapiens
agataacaactgggg

SEQ ID NO: 569445 - DNA, 15 bp, Homo sapiens
gagataacaactggg

SEQ ID NO: 569446 - DNA, 15 bp, Homo sapiens
agagataacaactgg

SEQ ID NO: 569447 - DNA, 15 bp, Homo sapiens
tagagataacaactg

SEQ ID NO: 569448 - DNA, 15 bp, Homo sapiens
ttagagataacaact

SEQ ID NO: 569449 - DNA, 15 bp, Homo sapiens
cttagagataacaac

SEQ ID NO: 569450 - DNA, 15 bp, Homo sapiens
ccttagagataacaa

SEQ ID NO: 569451 - DNA, 15 bp, Homo sapiens
tccttagagataaca

SEQ ID NO: 569452 - DNA, 15 bp, Homo sapiens
atccttagagataac

SEQ ID NO: 569453 - DNA, 15 bp, Homo sapiens
tatccttagagataa

SEQ ID NO: 569454 - DNA, 15 bp, Homo sapiens
ttatccttagagata

SEQ ID NO: 569455 - DNA, 15 bp, Homo sapiens
cttatccttagagat

SEQ ID NO: 569456 - DNA, 15 bp, Homo sapiens
tcttatccttagaga

SEQ ID NO: 569457 - DNA, 15 bp, Homo sapiens
ctcttatccttagag

SEQ ID NO: 569458 - DNA, 15 bp, Homo sapiens
actcttatccttaga

SEQ ID NO: 569459 - DNA, 15 bp, Homo sapiens
tactcttatccttag

SEQ ID NO: 569460 - DNA, 15 bp, Homo sapiens
ttactcttatcctta

SEQ ID NO: 569461 - DNA, 15 bp, Homo sapiens
attactcttatcctt

SEQ ID NO: 569462 - DNA, 15 bp, Homo sapiens
gattactcttatcct

SEQ ID NO: 569463 - DNA, 15 bp, Homo sapiens
tgattactcttatcc

SEQ ID NO: 569464 - DNA, 15 bp, Homo sapiens
ttgattactcttatc

SEQ ID NO: 569465 - DNA, 15 bp, Homo sapiens
attgattactcttat

SEQ ID NO: 569466 - DNA, 15 bp, Homo sapiens
cattgattactctta

SEQ ID NO: 569467 - DNA, 15 bp, Homo sapiens
tcattgattactctt

SEQ ID NO: 569468 - DNA, 15 bp, Homo sapiens
atcattgattactct

SEQ ID NO: 569469 - DNA, 15 bp, Homo sapiens
gatcattgattactc

SEQ ID NO: 569470 - DNA, 15 bp, Homo sapiens
tgatcattgattact

SEQ ID NO: 569471 - DNA, 15 bp, Homo sapiens
atgatcattgattac

SEQ ID NO: 569472 - DNA, 15 bp, Homo sapiens
aatgatcattgatta

SEQ ID NO: 569473 - DNA, 15 bp, Homo sapiens
gaatgatcattgatt

SEQ ID NO: 569474 - DNA, 15 bp, Homo sapiens
tgaatgatcattgat

SEQ ID NO: 569475 - DNA, 15 bp, Homo sapiens
ctgaatgatcattga

SEQ ID NO: 569476 - DNA, 15 bp, Homo sapiens
gctgaatgatcattg

SEQ ID NO: 569477 - DNA, 15 bp, Homo sapiens
tgctgaatgatcatt

SEQ ID NO: 569478 - DNA, 15 bp, Homo sapiens
ctgctgaatgatcat

SEQ ID NO: 569479 - DNA, 15 bp, Homo sapiens
tctgctgaatgatca

SEQ ID NO: 569480 - DNA, 15 bp, Homo sapiens
atctgctgaatgatc

SEQ ID NO: 569481 - DNA, 15 bp, Homo sapiens
tatctgctgaatgat

SEQ ID NO: 569482 - DNA, 15 bp, Homo sapiens
atatctgctgaatga

SEQ ID NO: 569483 - DNA, 15 bp, Homo sapiens
tatatctgctgaatg

SEQ ID NO: 569484 - DNA, 15 bp, Homo sapiens
ctatatctgctgaat

SEQ ID NO: 569485 - DNA, 15 bp, Homo sapiens
gctatatctgctgaa

SEQ ID NO: 569486 - DNA, 15 bp, Homo sapiens
agctatatctgctga

SEQ ID NO: 569487 - DNA, 15 bp, Homo sapiens
aagctatatctgctg

SEQ ID NO: 569488 - DNA, 15 bp, Homo sapiens
taagctatatctgct

SEQ ID NO: 569489 - DNA, 15 bp, Homo sapiens
ataagctatatctgc

SEQ ID NO: 569490 - DNA, 15 bp, Homo sapiens
tataagctatatctg

SEQ ID NO: 569491 - DNA, 15 bp, Homo sapiens
atataagctatatct

SEQ ID NO: 569492 - DNA, 15 bp, Homo sapiens
tatataagctatatc

SEQ ID NO: 569493 - DNA, 15 bp, Homo sapiens
atatataagctatat

SEQ ID NO: 569494 - DNA, 15 bp, Homo sapiens
catatataagctata

SEQ ID NO: 569495 - DNA, 15 bp, Homo sapiens
ccatatataagctat

SEQ ID NO: 569496 - DNA, 15 bp, Homo sapiens
cccatatataagcta

SEQ ID NO: 569497 - DNA, 15 bp, Homo sapiens
acccatatataagct

SEQ ID NO: 569498 - DNA, 15 bp, Homo sapiens
cacccatatataagc

SEQ ID NO: 569499 - DNA, 15 bp, Homo sapiens
ccacccatatataag

SEQ ID NO: 569500 - DNA, 15 bp, Homo sapiens
gccacccatatataa

SEQ ID NO: 569501 - DNA, 15 bp, Homo sapiens
tgccacccatatata

SEQ ID NO: 569502 - DNA, 15 bp, Homo sapiens
ctgccacccatatat

SEQ ID NO: 569503 - DNA, 15 bp, Homo sapiens
actgccacccatata

SEQ ID NO: 569504 - DNA, 15 bp, Homo sapiens
aactgccacccatat

SEQ ID NO: 569505 - DNA, 15 bp, Homo sapiens
aaactgccacccata

SEQ ID NO: 569506 - DNA, 15 bp, Homo sapiens
taaactgccacccat

SEQ ID NO: 569507 - DNA, 15 bp, Homo sapiens
gtaaactgccaccca

SEQ ID NO: 569508 - DNA, 15 bp, Homo sapiens
tgtaaactgccaccc

SEQ ID NO: 569509 - DNA, 15 bp, Homo sapiens
ttgtaaactgccacc

SEQ ID NO: 569510 - DNA, 15 bp, Homo sapiens
tttgtaaactgccac

SEQ ID NO: 569511 - DNA, 15 bp, Homo sapiens
atttgtaaactgcca

SEQ ID NO: 569512 - DNA, 15 bp, Homo sapiens
aatttgtaaactgcc

SEQ ID NO: 569513 - DNA, 15 bp, Homo sapiens
taatttgtaaactgc

SEQ ID NO: 569514 - DNA, 15 bp, Homo sapiens
ataatttgtaaactg

SEQ ID NO: 569515 - DNA, 15 bp, Homo sapiens
tataatttgtaaact

SEQ ID NO: 569516 - DNA, 15 bp, Homo sapiens
ttataatttgtaaac

SEQ ID NO: 569517 - DNA, 15 bp, Homo sapiens
tttataatttgtaaa

SEQ ID NO: 569518 - DNA, 15 bp, Homo sapiens
atttataatttgtaa

SEQ ID NO: 569519 - DNA, 15 bp, Homo sapiens
aatttataatttgta

SEQ ID NO: 569520 - DNA, 15 bp, Homo sapiens
caatttataatttgt

SEQ ID NO: 569521 - DNA, 15 bp, Homo sapiens
tcaatttataatttg

SEQ ID NO: 569522 - DNA, 15 bp, Homo sapiens
atcaatttataattt

SEQ ID NO: 569523 - DNA, 15 bp, Homo sapiens
aatcaatttataatt

SEQ ID NO: 569524 - DNA, 15 bp, Homo sapiens
aaatcaatttataat

SEQ ID NO: 569525 - DNA, 15 bp, Homo sapiens
aaaatcaatttataa

SEQ ID NO: 569526 - DNA, 15 bp, Homo sapiens
taaaatcaatttata

SEQ ID NO: 569527 - DNA, 15 bp, Homo sapiens
gtaaaatcaatttat

SEQ ID NO: 569528 - DNA, 15 bp, Homo sapiens
tgtaaaatcaattta

SEQ ID NO: 569529 - DNA, 15 bp, Homo sapiens
gtgtaaaatcaattt

SEQ ID NO: 569530 - DNA, 15 bp, Homo sapiens
tgtgtaaaatcaatt

SEQ ID NO: 569531 - DNA, 15 bp, Homo sapiens
atgtgtaaaatcaat

SEQ ID NO: 569532 - DNA, 15 bp, Homo sapiens
tatgtgtaaaatcaa

SEQ ID NO: 569533 - DNA, 15 bp, Homo sapiens
atatgtgtaaaatca

SEQ ID NO: 569534 - DNA, 15 bp, Homo sapiens
aatatgtgtaaaatc

SEQ ID NO: 569535 - DNA, 15 bp, Homo sapiens
aaatatgtgtaaaat

SEQ ID NO: 569536 - DNA, 15 bp, Homo sapiens
aaaatatgtgtaaaa

SEQ ID NO: 569537 - DNA, 15 bp, Homo sapiens
gaaaatatgtgtaaa

SEQ ID NO: 569538 - DNA, 15 bp, Homo sapiens
agaaaatatgtgtaa

SEQ ID NO: 569539 - DNA, 15 bp, Homo sapiens
taccagctattttgg

SEQ ID NO: 569540 - DNA, 15 bp, Homo sapiens
ataccagctattttg

SEQ ID NO: 569541 - DNA, 15 bp, Homo sapiens
cataccagctatttt

SEQ ID NO: 569542 - DNA, 15 bp, Homo sapiens
acataccagctattt

SEQ ID NO: 569543 - DNA, 15 bp, Homo sapiens
tacataccagctatt

SEQ ID NO: 569544 - DNA, 15 bp, Homo sapiens
ttacataccagctat

SEQ ID NO: 569545 - DNA, 15 bp, Homo sapiens
cttacataccagcta

SEQ ID NO: 569546 - DNA, 15 bp, Homo sapiens
tcttacataccagct

SEQ ID NO: 569547 - DNA, 15 bp, Homo sapiens
ctcttacataccagc

SEQ ID NO: 569548 - DNA, 15 bp, Homo sapiens
cctcttacataccag

SEQ ID NO: 569549 - DNA, 15 bp, Homo sapiens
gcctcttacatacca

SEQ ID NO: 569550 - DNA, 15 bp, Homo sapiens
tgcctcttacatacc

SEQ ID NO: 569551 - DNA, 15 bp, Homo sapiens
gtgcctcttacatac

SEQ ID NO: 569552 - DNA, 15 bp, Homo sapiens
agtgcctcttacata

SEQ ID NO: 569553 - DNA, 15 bp, Homo sapiens
aagtgcctcttacat

SEQ ID NO: 569554 - DNA, 15 bp, Homo sapiens
taagtgcctcttaca

SEQ ID NO: 569555 - DNA, 15 bp, Homo sapiens
ttaagtgcctcttac

SEQ ID NO: 569556 - DNA, 15 bp, Homo sapiens
attaagtgcctctta

SEQ ID NO: 569557 - DNA, 15 bp, Homo sapiens
tattaagtgcctctt

SEQ ID NO: 569558 - DNA, 15 bp, Homo sapiens
atattaagtgcctct

SEQ ID NO: 569559 - DNA, 15 bp, Homo sapiens
aatattaagtgcctc

SEQ ID NO: 569560 - DNA, 15 bp, Homo sapiens
gaatattaagtgcct

SEQ ID NO: 569561 - DNA, 15 bp, Homo sapiens
tgaatattaagtgcc

SEQ ID NO: 569562 - DNA, 15 bp, Homo sapiens
atgaatattaagtgc

SEQ ID NO: 569563 - DNA, 15 bp, Homo sapiens
aatgaatattaagtg

SEQ ID NO: 569564 - DNA, 15 bp, Homo sapiens
gaatgaatattaagt

SEQ ID NO: 569565 - DNA, 15 bp, Homo sapiens
tgaatgaatattaag

SEQ ID NO: 569566 - DNA, 15 bp, Homo sapiens
atgaatgaatattaa

SEQ ID NO: 569567 - DNA, 15 bp, Homo sapiens
gatgaatgaatatta

SEQ ID NO: 569568 - DNA, 15 bp, Homo sapiens
ggatgaatgaatatt

SEQ ID NO: 569569 - DNA, 15 bp, Homo sapiens
tggatgaatgaatat

SEQ ID NO: 569570 - DNA, 15 bp, Homo sapiens
atggatgaatgaata

SEQ ID NO: 569571 - DNA, 15 bp, Homo sapiens
aatggatgaatgaat

SEQ ID NO: 569572 - DNA, 15 bp, Homo sapiens
gaatggatgaatgaa

SEQ ID NO: 569573 - DNA, 15 bp, Homo sapiens
tgaatggatgaatga

SEQ ID NO: 569574 - DNA, 15 bp, Homo sapiens
atgaatggatgaatg

SEQ ID NO: 569575 - DNA, 15 bp, Homo sapiens
aatgaatggatgaat

SEQ ID NO: 569576 - DNA, 15 bp, Homo sapiens
gaatgaatggatgaa

SEQ ID NO: 569577 - DNA, 15 bp, Homo sapiens
tgaatgaatggatga

SEQ ID NO: 569578 - DNA, 15 bp, Homo sapiens
atgaatgaatggatg

SEQ ID NO: 569579 - DNA, 15 bp, Homo sapiens
aatgaatgaatggat

SEQ ID NO: 569580 - DNA, 15 bp, Homo sapiens
gaatgaatgaatgga

SEQ ID NO: 569581 - DNA, 15 bp, Homo sapiens
tgaatgaatgaatgg

SEQ ID NO: 569582 - DNA, 15 bp, Homo sapiens
atgaatgaatgaatg

SEQ ID NO: 569583 - DNA, 15 bp, Homo sapiens
tatgaatgaatgaat

SEQ ID NO: 569584 - DNA, 15 bp, Homo sapiens
ttatgaatgaatgaa

SEQ ID NO: 569585 - DNA, 15 bp, Homo sapiens
tttatgaatgaatga

SEQ ID NO: 569586 - DNA, 15 bp, Homo sapiens
atttatgaatgaatg

SEQ ID NO: 569587 - DNA, 15 bp, Homo sapiens
tatttatgaatgaat

SEQ ID NO: 569588 - DNA, 15 bp, Homo sapiens
atatttatgaatgaa

SEQ ID NO: 569589 - DNA, 15 bp, Homo sapiens
catatttatgaatga

SEQ ID NO: 569590 - DNA, 15 bp, Homo sapiens
acatatttatgaatg

SEQ ID NO: 569591 - DNA, 15 bp, Homo sapiens
tacatatttatgaat

SEQ ID NO: 569592 - DNA, 15 bp, Homo sapiens
ctacatatttatgaa

SEQ ID NO: 569593 - DNA, 15 bp, Homo sapiens
gctacatatttatga

SEQ ID NO: 569594 - DNA, 15 bp, Homo sapiens
ggctacatatttatg

SEQ ID NO: 569595 - DNA, 15 bp, Homo sapiens
gggctacatatttat

SEQ ID NO: 569596 - DNA, 15 bp, Homo sapiens
tgggctacatattta

SEQ ID NO: 569597 - DNA, 15 bp, Homo sapiens
atgggctacatattt

SEQ ID NO: 569598 - DNA, 15 bp, Homo sapiens
aatgggctacatatt

SEQ ID NO: 569599 - DNA, 15 bp, Homo sapiens
caatgggctacatat

SEQ ID NO: 569600 - DNA, 15 bp, Homo sapiens
tcaatgggctacata

SEQ ID NO: 569601 - DNA, 15 bp, Homo sapiens
gtcaatgggctacat

SEQ ID NO: 569602 - DNA, 15 bp, Homo sapiens
tgtcaatgggctaca

SEQ ID NO: 569603 - DNA, 15 bp, Homo sapiens
atgtcaatgggctac

SEQ ID NO: 569604 - DNA, 15 bp, Homo sapiens
aatgtcaatgggcta

SEQ ID NO: 569605 - DNA, 15 bp, Homo sapiens
aaatgtcaatgggct

SEQ ID NO: 569606 - DNA, 15 bp, Homo sapiens
caaatgtcaatgggc

SEQ ID NO: 569607 - DNA, 15 bp, Homo sapiens
acaaatgtcaatggg

SEQ ID NO: 569608 - DNA, 15 bp, Homo sapiens
tacaaatgtcaatgg

SEQ ID NO: 569609 - DNA, 15 bp, Homo sapiens
atacaaatgtcaatg

SEQ ID NO: 569610 - DNA, 15 bp, Homo sapiens
gatacaaatgtcaat

SEQ ID NO: 569611 - DNA, 15 bp, Homo sapiens
tgatacaaatgtcaa

SEQ ID NO: 569612 - DNA, 15 bp, Homo sapiens
atgatacaaatgtca

SEQ ID NO: 569613 - DNA, 15 bp, Homo sapiens
catgatacaaatgtc

SEQ ID NO: 569614 - DNA, 15 bp, Homo sapiens
gcatgatacaaatgt

SEQ ID NO: 569615 - DNA, 15 bp, Homo sapiens
agcatgatacaaatg

SEQ ID NO: 569616 - DNA, 15 bp, Homo sapiens
aagcatgatacaaat

SEQ ID NO: 569617 - DNA, 15 bp, Homo sapiens
aaagcatgatacaaa

SEQ ID NO: 569618 - DNA, 15 bp, Homo sapiens
taaagcatgatacaa

SEQ ID NO: 569619 - DNA, 15 bp, Homo sapiens
ctaaagcatgataca

SEQ ID NO: 569620 - DNA, 15 bp, Homo sapiens
actaaagcatgatac

SEQ ID NO: 569621 - DNA, 15 bp, Homo sapiens
aactaaagcatgata

SEQ ID NO: 569622 - DNA, 15 bp, Homo sapiens
aaactaaagcatgat

SEQ ID NO: 569623 - DNA, 15 bp, Homo sapiens
taaactaaagcatga

SEQ ID NO: 569624 - DNA, 15 bp, Homo sapiens
gtaaactaaagcatg

SEQ ID NO: 569625 - DNA, 15 bp, Homo sapiens
tgtaaactaaagcat

SEQ ID NO: 569626 - DNA, 15 bp, Homo sapiens
ttgtaaactaaagca

SEQ ID NO: 569627 - DNA, 15 bp, Homo sapiens
tttgtaaactaaagc

SEQ ID NO: 569628 - DNA, 15 bp, Homo sapiens
ctttgtaaactaaag

SEQ ID NO: 569629 - DNA, 15 bp, Homo sapiens
gctttgtaaactaaa

SEQ ID NO: 569630 - DNA, 15 bp, Homo sapiens
tgctttgtaaactaa

SEQ ID NO: 569631 - DNA, 15 bp, Homo sapiens
gtgctttgtaaacta

SEQ ID NO: 569632 - DNA, 15 bp, Homo sapiens
agtgctttgtaaact

SEQ ID NO: 569633 - DNA, 15 bp, Homo sapiens
aagtgctttgtaaac

SEQ ID NO: 569634 - DNA, 15 bp, Homo sapiens
aaagtgctttgtaaa

SEQ ID NO: 569635 - DNA, 15 bp, Homo sapiens
taaagtgctttgtaa

SEQ ID NO: 569636 - DNA, 15 bp, Homo sapiens
ttaaagtgctttgta

SEQ ID NO: 569637 - DNA, 15 bp, Homo sapiens
attaaagtgctttgt

SEQ ID NO: 569638 - DNA, 15 bp, Homo sapiens
tattaaagtgctttg

SEQ ID NO: 569639 - DNA, 15 bp, Homo sapiens
atattaaagtgcttt

SEQ ID NO: 569640 - DNA, 15 bp, Homo sapiens
catattaaagtgctt

SEQ ID NO: 569641 - DNA, 15 bp, Homo sapiens
gcatattaaagtgct

SEQ ID NO: 569642 - DNA, 15 bp, Homo sapiens
tgcatattaaagtgc

SEQ ID NO: 569643 - DNA, 15 bp, Homo sapiens
gtgcatattaaagtg

SEQ ID NO: 569644 - DNA, 15 bp, Homo sapiens
ggtgcatattaaagt

SEQ ID NO: 569645 - DNA, 15 bp, Homo sapiens
aggtgcatattaaag

SEQ ID NO: 569646 - DNA, 15 bp, Homo sapiens
aaggtgcatattaaa

SEQ ID NO: 569647 - DNA, 15 bp, Homo sapiens
aaaggtgcatattaa

SEQ ID NO: 569648 - DNA, 15 bp, Homo sapiens
gaaaggtgcatatta

SEQ ID NO: 569649 - DNA, 15 bp, Homo sapiens
agaaaggtgcatatt

SEQ ID NO: 569650 - DNA, 15 bp, Homo sapiens
cagaaaggtgcatat

SEQ ID NO: 569651 - DNA, 15 bp, Homo sapiens
tcagaaaggtgcata

SEQ ID NO: 569652 - DNA, 15 bp, Homo sapiens
ttcagaaaggtgcat

SEQ ID NO: 569653 - DNA, 15 bp, Homo sapiens
tttcagaaaggtgca

SEQ ID NO: 569654 - DNA, 15 bp, Homo sapiens
atttcagaaaggtgc

SEQ ID NO: 569655 - DNA, 15 bp, Homo sapiens
aatttcagaaaggtg

SEQ ID NO: 569656 - DNA, 15 bp, Homo sapiens
aaatttcagaaaggt

SEQ ID NO: 569657 - DNA, 15 bp, Homo sapiens
aaaatttcagaaagg

SEQ ID NO: 569658 - DNA, 15 bp, Homo sapiens
aaaaatttcagaaag

SEQ ID NO: 569659 - DNA, 15 bp, Homo sapiens
aaaaaatttcagaaa

SEQ ID NO: 569660 - DNA, 15 bp, Homo sapiens
caaaaaatttcagaa

SEQ ID NO: 569661 - DNA, 15 bp, Homo sapiens
acaaaaaatttcaga

SEQ ID NO: 569662 - DNA, 15 bp, Homo sapiens
aacaaaaaatttcag

SEQ ID NO: 569663 - DNA, 15 bp, Homo sapiens
gaacaaaaaatttca

SEQ ID NO: 569664 - DNA, 15 bp, Homo sapiens
agaacaaaaaatttc

SEQ ID NO: 569665 - DNA, 15 bp, Homo sapiens
tagaacaaaaaattt

SEQ ID NO: 569666 - DNA, 15 bp, Homo sapiens
atagaacaaaaaatt

SEQ ID NO: 569667 - DNA, 15 bp, Homo sapiens
catagaacaaaaaat

SEQ ID NO: 569668 - DNA, 15 bp, Homo sapiens
tcatagaacaaaaaa

SEQ ID NO: 569669 - DNA, 15 bp, Homo sapiens
ctcatagaacaaaaa

SEQ ID NO: 569670 - DNA, 15 bp, Homo sapiens
tctcatagaacaaaa

SEQ ID NO: 569671 - DNA, 15 bp, Homo sapiens
ttctcatagaacaaa

SEQ ID NO: 569672 - DNA, 15 bp, Homo sapiens
attctcatagaacaa

SEQ ID NO: 569673 - DNA, 15 bp, Homo sapiens
tattctcatagaaca

SEQ ID NO: 569674 - DNA, 15 bp, Homo sapiens
gtattctcatagaac

SEQ ID NO: 569675 - DNA, 15 bp, Homo sapiens
agtattctcatagaa

SEQ ID NO: 569676 - DNA, 15 bp, Homo sapiens
aagtattctcataga

SEQ ID NO: 569677 - DNA, 15 bp, Homo sapiens
aaagtattctcatag

SEQ ID NO: 569678 - DNA, 15 bp, Homo sapiens
aaaagtattctcata

SEQ ID NO: 569679 - DNA, 15 bp, Homo sapiens
gaaaagtattctcat

SEQ ID NO: 569680 - DNA, 15 bp, Homo sapiens
ggaaaagtattctca

SEQ ID NO: 569681 - DNA, 15 bp, Homo sapiens
gggaaaagtattctc

SEQ ID NO: 569682 - DNA, 15 bp, Homo sapiens
ggggaaaagtattct

SEQ ID NO: 569683 - DNA, 15 bp, Homo sapiens
gggggaaaagtattc

SEQ ID NO: 569684 - DNA, 15 bp, Homo sapiens
agggggaaaagtatt

SEQ ID NO: 569685 - DNA, 15 bp, Homo sapiens
aagggggaaaagtat

SEQ ID NO: 569686 - DNA, 15 bp, Homo sapiens
aaagggggaaaagta

SEQ ID NO: 569687 - DNA, 15 bp, Homo sapiens
caaagggggaaaagt

SEQ ID NO: 569688 - DNA, 15 bp, Homo sapiens
ccaaagggggaaaag

SEQ ID NO: 569689 - DNA, 15 bp, Homo sapiens
accaaagggggaaaa

SEQ ID NO: 569690 - DNA, 15 bp, Homo sapiens
taccaaagggggaaa

SEQ ID NO: 569691 - DNA, 15 bp, Homo sapiens
ctaccaaagggggaa

SEQ ID NO: 569692 - DNA, 15 bp, Homo sapiens
gctaccaaaggggga

SEQ ID NO: 569693 - DNA, 15 bp, Homo sapiens
agctaccaaaggggg

SEQ ID NO: 569694 - DNA, 15 bp, Homo sapiens
gagctaccaaagggg

SEQ ID NO: 569695 - DNA, 15 bp, Homo sapiens
agagctaccaaaggg

SEQ ID NO: 569696 - DNA, 15 bp, Homo sapiens
tagagctaccaaagg

SEQ ID NO: 569697 - DNA, 15 bp, Homo sapiens
ctagagctaccaaag

SEQ ID NO: 569698 - DNA, 15 bp, Homo sapiens
gctagagctaccaaa

SEQ ID NO: 569699 - DNA, 15 bp, Homo sapiens
tgctagagctaccaa

SEQ ID NO: 569700 - DNA, 15 bp, Homo sapiens
gtgctagagctacca

SEQ ID NO: 569701 - DNA, 15 bp, Homo sapiens
ggtgctagagctacc

SEQ ID NO: 569702 - DNA, 15 bp, Homo sapiens
gggtgctagagctac

SEQ ID NO: 569703 - DNA, 15 bp, Homo sapiens
tgggtgctagagcta

SEQ ID NO: 569704 - DNA, 15 bp, Homo sapiens
ctgggtgctagagct

SEQ ID NO: 569705 - DNA, 15 bp, Homo sapiens
gctgggtgctagagc

SEQ ID NO: 569706 - DNA, 15 bp, Homo sapiens
tgctgggtgctagag

SEQ ID NO: 569707 - DNA, 15 bp, Homo sapiens
atgctgggtgctaga

SEQ ID NO: 569708 - DNA, 15 bp, Homo sapiens
catgctgggtgctag

SEQ ID NO: 569709 - DNA, 15 bp, Homo sapiens
ccatgctgggtgcta

SEQ ID NO: 569710 - DNA, 15 bp, Homo sapiens
accatgctgggtgct

SEQ ID NO: 569711 - DNA, 15 bp, Homo sapiens
taccatgctgggtgc

SEQ ID NO: 569712 - DNA, 15 bp, Homo sapiens
ataccatgctgggtg

SEQ ID NO: 569713 - DNA, 15 bp, Homo sapiens
gataccatgctgggt

SEQ ID NO: 569714 - DNA, 15 bp, Homo sapiens
agataccatgctggg

SEQ ID NO: 569715 - DNA, 15 bp, Homo sapiens
cagataccatgctgg

SEQ ID NO: 569716 - DNA, 15 bp, Homo sapiens
ccagataccatgctg

SEQ ID NO: 569717 - DNA, 15 bp, Homo sapiens
gccagataccatgct

SEQ ID NO: 569718 - DNA, 15 bp, Homo sapiens
tgccagataccatgc

SEQ ID NO: 569719 - DNA, 15 bp, Homo sapiens
gtgccagataccatg

SEQ ID NO: 569720 - DNA, 15 bp, Homo sapiens
tgtgccagataccat

SEQ ID NO: 569721 - DNA, 15 bp, Homo sapiens
atgtgccagatacca

SEQ ID NO: 569722 - DNA, 15 bp, Homo sapiens
aatgtgccagatacc

SEQ ID NO: 569723 - DNA, 15 bp, Homo sapiens
taatgtgccagatac

SEQ ID NO: 569724 - DNA, 15 bp, Homo sapiens
ataatgtgccagata

SEQ ID NO: 569725 - DNA, 15 bp, Homo sapiens
tataatgtgccagat

SEQ ID NO: 569726 - DNA, 15 bp, Homo sapiens
ctataatgtgccaga

SEQ ID NO: 569727 - DNA, 15 bp, Homo sapiens
cctataatgtgccag

SEQ ID NO: 569728 - DNA, 15 bp, Homo sapiens
acctataatgtgcca

SEQ ID NO: 569729 - DNA, 15 bp, Homo sapiens
cacctataatgtgcc

SEQ ID NO: 569730 - DNA, 15 bp, Homo sapiens
tcacctataatgtgc

SEQ ID NO: 569731 - DNA, 15 bp, Homo sapiens
gtcacctataatgtg

SEQ ID NO: 569732 - DNA, 15 bp, Homo sapiens
ggtcacctataatgt

SEQ ID NO: 569733 - DNA, 15 bp, Homo sapiens
tggtcacctataatg

SEQ ID NO: 569734 - DNA, 15 bp, Homo sapiens
gtggtcacctataat

SEQ ID NO: 569735 - DNA, 15 bp, Homo sapiens
tgtggtcacctataa

SEQ ID NO: 569736 - DNA, 15 bp, Homo sapiens
ttgtggtcacctata

SEQ ID NO: 569737 - DNA, 15 bp, Homo sapiens
gttgtggtcacctat

SEQ ID NO: 569738 - DNA, 15 bp, Homo sapiens
tgttgtggtcaccta

SEQ ID NO: 569739 - DNA, 15 bp, Homo sapiens
ttgttgtggtcacct

SEQ ID NO: 569740 - DNA, 15 bp, Homo sapiens
cttgttgtggtcacc

SEQ ID NO: 569741 - DNA, 15 bp, Homo sapiens
gcttgttgtggtcac

SEQ ID NO: 569742 - DNA, 15 bp, Homo sapiens
agcttgttgtggtca

SEQ ID NO: 569743 - DNA, 15 bp, Homo sapiens
aagcttgttgtggtc

SEQ ID NO: 569744 - DNA, 15 bp, Homo sapiens
taagcttgttgtggt

SEQ ID NO: 569745 - DNA, 15 bp, Homo sapiens
ctaagcttgttgtgg

SEQ ID NO: 569746 - DNA, 15 bp, Homo sapiens
actaagcttgttgtg

SEQ ID NO: 569747 - DNA, 15 bp, Homo sapiens
gactaagcttgttgt

SEQ ID NO: 569748 - DNA, 15 bp, Homo sapiens
ggactaagcttgttg

SEQ ID NO: 569749 - DNA, 15 bp, Homo sapiens
gggactaagcttgtt

SEQ ID NO: 569750 - DNA, 15 bp, Homo sapiens
agggactaagcttgt

SEQ ID NO: 569751 - DNA, 15 bp, Homo sapiens
aagggactaagcttg

SEQ ID NO: 569752 - DNA, 15 bp, Homo sapiens
taagggactaagctt

SEQ ID NO: 569753 - DNA, 15 bp, Homo sapiens
ataagggactaagct

SEQ ID NO: 569754 - DNA, 15 bp, Homo sapiens
cataagggactaagc

SEQ ID NO: 569755 - DNA, 15 bp, Homo sapiens
acataagggactaag

SEQ ID NO: 569756 - DNA, 15 bp, Homo sapiens
aacataagggactaa

SEQ ID NO: 569757 - DNA, 15 bp, Homo sapiens
aaacataagggacta

SEQ ID NO: 569758 - DNA, 15 bp, Homo sapiens
aaaacataagggact

SEQ ID NO: 569759 - DNA, 15 bp, Homo sapiens
gaaaacataagggac

SEQ ID NO: 569760 - DNA, 15 bp, Homo sapiens
tgaaaacataaggga

SEQ ID NO: 569761 - DNA, 15 bp, Homo sapiens
ctgaaaacataaggg

SEQ ID NO: 569762 - DNA, 15 bp, Homo sapiens
actgaaaacataagg

SEQ ID NO: 569763 - DNA, 15 bp, Homo sapiens
tactgaaaacataag

SEQ ID NO: 569764 - DNA, 15 bp, Homo sapiens
atactgaaaacataa

SEQ ID NO: 569765 - DNA, 15 bp, Homo sapiens
tatactgaaaacata

SEQ ID NO: 569766 - DNA, 15 bp, Homo sapiens
atatactgaaaacat

SEQ ID NO: 569767 - DNA, 15 bp, Homo sapiens
aatatactgaaaaca

SEQ ID NO: 569768 - DNA, 15 bp, Homo sapiens
aaatatactgaaaac

SEQ ID NO: 569769 - DNA, 15 bp, Homo sapiens
aaaatatactgaaaa

SEQ ID NO: 569770 - DNA, 15 bp, Homo sapiens
taaaatatactgaaa

SEQ ID NO: 569771 - DNA, 15 bp, Homo sapiens
ttaaaatatactgaa

SEQ ID NO: 569772 - DNA, 15 bp, Homo sapiens
tttaaaatatactga

SEQ ID NO: 569773 - DNA, 15 bp, Homo sapiens
ctttaaaatatactg

SEQ ID NO: 569774 - DNA, 15 bp, Homo sapiens
actttaaaatatact

SEQ ID NO: 569775 - DNA, 15 bp, Homo sapiens
aactttaaaatatac

SEQ ID NO: 569776 - DNA, 15 bp, Homo sapiens
aaactttaaaatata

SEQ ID NO: 569777 - DNA, 15 bp, Homo sapiens
taaactttaaaatat

SEQ ID NO: 569778 - DNA, 15 bp, Homo sapiens
ttaaactttaaaata

SEQ ID NO: 569779 - DNA, 15 bp, Homo sapiens
tttaaactttaaaat

SEQ ID NO: 569780 - DNA, 15 bp, Homo sapiens
ttttaaactttaaaa

SEQ ID NO: 569781 - DNA, 15 bp, Homo sapiens
cttttaaactttaaa

SEQ ID NO: 569782 - DNA, 15 bp, Homo sapiens
gcttttaaactttaa

SEQ ID NO: 569783 - DNA, 15 bp, Homo sapiens
tgcttttaaacttta

SEQ ID NO: 569784 - DNA, 15 bp, Homo sapiens
ctgcttttaaacttt

SEQ ID NO: 569785 - DNA, 15 bp, Homo sapiens
actgcttttaaactt

SEQ ID NO: 569786 - DNA, 15 bp, Homo sapiens
aactgcttttaaact

SEQ ID NO: 569787 - DNA, 15 bp, Homo sapiens
aaactgcttttaaac

SEQ ID NO: 569788 - DNA, 15 bp, Homo sapiens
gaaactgcttttaaa

SEQ ID NO: 569789 - DNA, 15 bp, Homo sapiens
ggaaactgcttttaa

SEQ ID NO: 569790 - DNA, 15 bp, Homo sapiens
tggaaactgctttta

SEQ ID NO: 569791 - DNA, 15 bp, Homo sapiens
atggaaactgctttt

SEQ ID NO: 569792 - DNA, 15 bp, Homo sapiens
catggaaactgcttt

SEQ ID NO: 569793 - DNA, 15 bp, Homo sapiens
acatggaaactgctt

SEQ ID NO: 569794 - DNA, 15 bp, Homo sapiens
cacatggaaactgct

SEQ ID NO: 569795 - DNA, 15 bp, Homo sapiens
acacatggaaactgc

SEQ ID NO: 569796 - DNA, 15 bp, Homo sapiens
aacacatggaaactg

SEQ ID NO: 569797 - DNA, 15 bp, Homo sapiens
aaacacatggaaact

SEQ ID NO: 569798 - DNA, 15 bp, Homo sapiens
aaaacacatggaaac

SEQ ID NO: 569799 - DNA, 15 bp, Homo sapiens
gaaaacacatggaaa

SEQ ID NO: 569800 - DNA, 15 bp, Homo sapiens
cgaaaacacatggaa

SEQ ID NO: 569801 - DNA, 15 bp, Homo sapiens
acgaaaacacatgga

SEQ ID NO: 569802 - DNA, 15 bp, Homo sapiens
aacgaaaacacatgg

SEQ ID NO: 569803 - DNA, 15 bp, Homo sapiens
aaacgaaaacacatg

SEQ ID NO: 569804 - DNA, 15 bp, Homo sapiens
gaaacgaaaacacat

SEQ ID NO: 569805 - DNA, 15 bp, Homo sapiens
agaaacgaaaacaca

SEQ ID NO: 569806 - DNA, 15 bp, Homo sapiens
cagaaacgaaaacac

SEQ ID NO: 569807 - DNA, 15 bp, Homo sapiens
tcagaaacgaaaaca

SEQ ID NO: 569808 - DNA, 15 bp, Homo sapiens
atcagaaacgaaaac

SEQ ID NO: 569809 - DNA, 15 bp, Homo sapiens
tatcagaaacgaaaa

SEQ ID NO: 569810 - DNA, 15 bp, Homo sapiens
gtatcagaaacgaaa

SEQ ID NO: 569811 - DNA, 15 bp, Homo sapiens
ggtatcagaaacgaa

SEQ ID NO: 569812 - DNA, 15 bp, Homo sapiens
aggtatcagaaacga

SEQ ID NO: 569813 - DNA, 15 bp, Homo sapiens
caggtatcagaaacg

SEQ ID NO: 569814 - DNA, 15 bp, Homo sapiens
ccaggtatcagaaac

SEQ ID NO: 569815 - DNA, 15 bp, Homo sapiens
tccaggtatcagaaa

SEQ ID NO: 569816 - DNA, 15 bp, Homo sapiens
ttccaggtatcagaa

SEQ ID NO: 569817 - DNA, 15 bp, Homo sapiens
attccaggtatcaga

SEQ ID NO: 569818 - DNA, 15 bp, Homo sapiens
tattccaggtatcag

SEQ ID NO: 569819 - DNA, 15 bp, Homo sapiens
gtattccaggtatca

SEQ ID NO: 569820 - DNA, 15 bp, Homo sapiens
agtattccaggtatc

SEQ ID NO: 569821 - DNA, 15 bp, Homo sapiens
cagtattccaggtat

SEQ ID NO: 569822 - DNA, 15 bp, Homo sapiens
gcagtattccaggta

SEQ ID NO: 569823 - DNA, 15 bp, Homo sapiens
tgcagtattccaggt

SEQ ID NO: 569824 - DNA, 15 bp, Homo sapiens
atgcagtattccagg

SEQ ID NO: 569825 - DNA, 15 bp, Homo sapiens
aatgcagtattccag

SEQ ID NO: 569826 - DNA, 15 bp, Homo sapiens
aaatgcagtattcca

SEQ ID NO: 569827 - DNA, 15 bp, Homo sapiens
aaaatgcagtattcc

SEQ ID NO: 569828 - DNA, 15 bp, Homo sapiens
aaaaatgcagtattc

SEQ ID NO: 569829 - DNA, 15 bp, Homo sapiens
taaaaatgcagtatt

SEQ ID NO: 569830 - DNA, 15 bp, Homo sapiens
gtaaaaatgcagtat

SEQ ID NO: 569831 - DNA, 15 bp, Homo sapiens
agtaaaaatgcagta

SEQ ID NO: 569832 - DNA, 15 bp, Homo sapiens
gagtaaaaatgcagt

SEQ ID NO: 569833 - DNA, 15 bp, Homo sapiens
tgagtaaaaatgcag

SEQ ID NO: 569834 - DNA, 15 bp, Homo sapiens
ttgagtaaaaatgca

SEQ ID NO: 569835 - DNA, 15 bp, Homo sapiens
tttgagtaaaaatgc

SEQ ID NO: 569836 - DNA, 15 bp, Homo sapiens
ttttgagtaaaaatg

SEQ ID NO: 569837 - DNA, 15 bp, Homo sapiens
attttgagtaaaaat

SEQ ID NO: 569838 - DNA, 15 bp, Homo sapiens
aattttgagtaaaaa

SEQ ID NO: 569839 - DNA, 15 bp, Homo sapiens
taattttgagtaaaa

SEQ ID NO: 569840 - DNA, 15 bp, Homo sapiens
gtaattttgagtaaa

SEQ ID NO: 569841 - DNA, 15 bp, Homo sapiens
ggtaattttgagtaa

SEQ ID NO: 569842 - DNA, 15 bp, Homo sapiens
tggtaattttgagta

SEQ ID NO: 569843 - DNA, 15 bp, Homo sapiens
ctggtaattttgagt

SEQ ID NO: 569844 - DNA, 15 bp, Homo sapiens
tctggtaattttgag

SEQ ID NO: 569845 - DNA, 15 bp, Homo sapiens
ctctggtaattttga

SEQ ID NO: 569846 - DNA, 15 bp, Homo sapiens
gctctggtaattttg

SEQ ID NO: 569847 - DNA, 15 bp, Homo sapiens
tgctctggtaatttt

SEQ ID NO: 569848 - DNA, 15 bp, Homo sapiens
ctgctctggtaattt

SEQ ID NO: 569849 - DNA, 15 bp, Homo sapiens
gctgctctggtaatt

SEQ ID NO: 569850 - DNA, 15 bp, Homo sapiens
tgctgctctggtaat

SEQ ID NO: 569851 - DNA, 15 bp, Homo sapiens
ttgctgctctggtaa

SEQ ID NO: 569852 - DNA, 15 bp, Homo sapiens
tttgctgctctggta

SEQ ID NO: 569853 - DNA, 15 bp, Homo sapiens
gtttgctgctctggt

SEQ ID NO: 569854 - DNA, 15 bp, Homo sapiens
tgtttgctgctctgg

SEQ ID NO: 569855 - DNA, 15 bp, Homo sapiens
gtgtttgctgctctg

SEQ ID NO: 569856 - DNA, 15 bp, Homo sapiens
tgtgtttgctgctct

SEQ ID NO: 569857 - DNA, 15 bp, Homo sapiens
ttgtgtttgctgctc

SEQ ID NO: 569858 - DNA, 15 bp, Homo sapiens
tttgtgtttgctgct

SEQ ID NO: 569859 - DNA, 15 bp, Homo sapiens
atttgtgtttgctgc

SEQ ID NO: 569860 - DNA, 15 bp, Homo sapiens
aatttgtgtttgctg

SEQ ID NO: 569861 - DNA, 15 bp, Homo sapiens
caatttgtgtttgct

SEQ ID NO: 569862 - DNA, 15 bp, Homo sapiens
ccaatttgtgtttgc

SEQ ID NO: 569863 - DNA, 15 bp, Homo sapiens
gccaatttgtgtttg

SEQ ID NO: 569864 - DNA, 15 bp, Homo sapiens
ggccaatttgtgttt

SEQ ID NO: 569865 - DNA, 15 bp, Homo sapiens
aggccaatttgtgtt

SEQ ID NO: 569866 - DNA, 15 bp, Homo sapiens
gaggccaatttgtgt

SEQ ID NO: 569867 - DNA, 15 bp, Homo sapiens
tgaggccaatttgtg

SEQ ID NO: 569868 - DNA, 15 bp, Homo sapiens
ttgaggccaatttgt

SEQ ID NO: 569869 - DNA, 15 bp, Homo sapiens
tttgaggccaatttg

SEQ ID NO: 569870 - DNA, 15 bp, Homo sapiens
atttgaggccaattt

SEQ ID NO: 569871 - DNA, 15 bp, Homo sapiens
tatttgaggccaatt

SEQ ID NO: 569872 - DNA, 15 bp, Homo sapiens
atatttgaggccaat

SEQ ID NO: 569873 - DNA, 15 bp, Homo sapiens
tatatttgaggccaa

SEQ ID NO: 569874 - DNA, 15 bp, Homo sapiens
gtatatttgaggcca

SEQ ID NO: 569875 - DNA, 15 bp, Homo sapiens
tgtatatttgaggcc

SEQ ID NO: 569876 - DNA, 15 bp, Homo sapiens
atgtatatttgaggc

SEQ ID NO: 569877 - DNA, 15 bp, Homo sapiens
tatgtatatttgagg

SEQ ID NO: 569878 - DNA, 15 bp, Homo sapiens
atatgtatatttgag

SEQ ID NO: 569879 - DNA, 15 bp, Homo sapiens
tatatgtatatttga

SEQ ID NO: 569880 - DNA, 15 bp, Homo sapiens
ttatatgtatatttg

SEQ ID NO: 569881 - DNA, 15 bp, Homo sapiens
attatatgtatattt

SEQ ID NO: 569882 - DNA, 15 bp, Homo sapiens
aattatatgtatatt

SEQ ID NO: 569883 - DNA, 15 bp, Homo sapiens
aaattatatgtatat

SEQ ID NO: 569884 - DNA, 15 bp, Homo sapiens
taaattatatgtata

SEQ ID NO: 569885 - DNA, 15 bp, Homo sapiens
ataaattatatgtat

SEQ ID NO: 569886 - DNA, 15 bp, Homo sapiens
aataaattatatgta

SEQ ID NO: 569887 - DNA, 15 bp, Homo sapiens
gaataaattatatgt

SEQ ID NO: 569888 - DNA, 15 bp, Homo sapiens
tgaataaattatatg

SEQ ID NO: 569889 - DNA, 15 bp, Homo sapiens
atgaataaattatat

SEQ ID NO: 569890 - DNA, 15 bp, Homo sapiens
aatgaataaattata

SEQ ID NO: 569891 - DNA, 15 bp, Homo sapiens
aaatgaataaattat

SEQ ID NO: 569892 - DNA, 15 bp, Homo sapiens
taaatgaataaatta

SEQ ID NO: 569893 - DNA, 15 bp, Homo sapiens
ataaatgaataaatt

SEQ ID NO: 569894 - DNA, 15 bp, Homo sapiens
gataaatgaataaat

SEQ ID NO: 569895 - DNA, 15 bp, Homo sapiens
tgataaatgaataaa

SEQ ID NO: 569896 - DNA, 15 bp, Homo sapiens
ttgataaatgaataa

SEQ ID NO: 569897 - DNA, 15 bp, Homo sapiens
tttgataaatgaata

SEQ ID NO: 569898 - DNA, 15 bp, Homo sapiens
gtttgataaatgaat

SEQ ID NO: 569899 - DNA, 15 bp, Homo sapiens
tgtttgataaatgaa

SEQ ID NO: 569900 - DNA, 15 bp, Homo sapiens
ttgtttgataaatga

SEQ ID NO: 569901 - DNA, 15 bp, Homo sapiens
attgtttgataaatg

SEQ ID NO: 569902 - DNA, 15 bp, Homo sapiens
aattgtttgataaat

SEQ ID NO: 569903 - DNA, 15 bp, Homo sapiens
gaattgtttgataaa

SEQ ID NO: 569904 - DNA, 15 bp, Homo sapiens
ggaattgtttgataa

SEQ ID NO: 569905 - DNA, 15 bp, Homo sapiens
aggaattgtttgata

SEQ ID NO: 569906 - DNA, 15 bp, Homo sapiens
aaggaattgtttgat

SEQ ID NO: 569907 - DNA, 15 bp, Homo sapiens
caaggaattgtttga

SEQ ID NO: 569908 - DNA, 15 bp, Homo sapiens
acaaggaattgtttg

SEQ ID NO: 569909 - DNA, 15 bp, Homo sapiens
cacaaggaattgttt

SEQ ID NO: 569910 - DNA, 15 bp, Homo sapiens
acacaaggaattgtt

SEQ ID NO: 569911 - DNA, 15 bp, Homo sapiens
gacacaaggaattgt

SEQ ID NO: 569912 - DNA, 15 bp, Homo sapiens
agacacaaggaattg

SEQ ID NO: 569913 - DNA, 15 bp, Homo sapiens
ctatgcagacacaag

SEQ ID NO: 569914 - DNA, 15 bp, Homo sapiens
actatgcagacacaa

SEQ ID NO: 569915 - DNA, 15 bp, Homo sapiens
tactatgcagacaca

SEQ ID NO: 569916 - DNA, 15 bp, Homo sapiens
gtactatgcagacac

SEQ ID NO: 569917 - DNA, 15 bp, Homo sapiens
agtactatgcagaca

SEQ ID NO: 569918 - DNA, 15 bp, Homo sapiens
tagtactatgcagac

SEQ ID NO: 569919 - DNA, 15 bp, Homo sapiens
atagtactatgcaga

SEQ ID NO: 569920 - DNA, 15 bp, Homo sapiens
tatagtactatgcag

SEQ ID NO: 569921 - DNA, 15 bp, Homo sapiens
atatagtactatgca

SEQ ID NO: 569922 - DNA, 15 bp, Homo sapiens
gatatagtactatgc

SEQ ID NO: 569923 - DNA, 15 bp, Homo sapiens
ggatatagtactatg

SEQ ID NO: 569924 - DNA, 15 bp, Homo sapiens
aggatatagtactat

SEQ ID NO: 569925 - DNA, 15 bp, Homo sapiens
aaggatatagtacta

SEQ ID NO: 569926 - DNA, 15 bp, Homo sapiens
aaaggatatagtact

SEQ ID NO: 569927 - DNA, 15 bp, Homo sapiens
aaaaggatatagtac

SEQ ID NO: 569928 - DNA, 15 bp, Homo sapiens
caaaaggatatagta

SEQ ID NO: 569929 - DNA, 15 bp, Homo sapiens
tcaaaaggatatagt

SEQ ID NO: 569930 - DNA, 15 bp, Homo sapiens
ttcaaaaggatatag

SEQ ID NO: 569931 - DNA, 15 bp, Homo sapiens
tttcaaaaggatata

SEQ ID NO: 569932 - DNA, 15 bp, Homo sapiens
ctttcaaaaggatat

SEQ ID NO: 569933 - DNA, 15 bp, Homo sapiens
tctttcaaaaggata

SEQ ID NO: 569934 - DNA, 15 bp, Homo sapiens
ctctttcaaaaggat

SEQ ID NO: 569935 - DNA, 15 bp, Homo sapiens
gctctttcaaaagga

SEQ ID NO: 569936 - DNA, 15 bp, Homo sapiens
tgctctttcaaaagg

SEQ ID NO: 569937 - DNA, 15 bp, Homo sapiens
gtgctctttcaaaag

SEQ ID NO: 569938 - DNA, 15 bp, Homo sapiens
agtgctctttcaaaa

SEQ ID NO: 569939 - DNA, 15 bp, Homo sapiens
aagtgctctttcaaa

SEQ ID NO: 569940 - DNA, 15 bp, Homo sapiens
aaagtgctctttcaa

SEQ ID NO: 569941 - DNA, 15 bp, Homo sapiens
aaaagtgctctttca

SEQ ID NO: 569942 - DNA, 15 bp, Homo sapiens
aaaaagtgctctttc

SEQ ID NO: 569943 - DNA, 15 bp, Homo sapiens
aaaaaagtgctcttt

SEQ ID NO: 569944 - DNA, 15 bp, Homo sapiens
taaaaaagtgctctt

SEQ ID NO: 569945 - DNA, 15 bp, Homo sapiens
ataaaaaagtgctct

SEQ ID NO: 569946 - DNA, 15 bp, Homo sapiens
cataaaaaagtgctc

SEQ ID NO: 569947 - DNA, 15 bp, Homo sapiens
gcataaaaaagtgct

SEQ ID NO: 569948 - DNA, 15 bp, Homo sapiens
agcataaaaaagtgc

SEQ ID NO: 569949 - DNA, 15 bp, Homo sapiens
aagcataaaaaagtg

SEQ ID NO: 569950 - DNA, 15 bp, Homo sapiens
caagcataaaaaagt

SEQ ID NO: 569951 - DNA, 15 bp, Homo sapiens
gcaagcataaaaaag

SEQ ID NO: 569952 - DNA, 15 bp, Homo sapiens
agcaagcataaaaaa

SEQ ID NO: 569953 - DNA, 15 bp, Homo sapiens
gagcaagcataaaaa

SEQ ID NO: 569954 - DNA, 15 bp, Homo sapiens
ggagcaagcataaaa

SEQ ID NO: 569955 - DNA, 15 bp, Homo sapiens
aggagcaagcataaa

SEQ ID NO: 569956 - DNA, 15 bp, Homo sapiens
aaggagcaagcataa

SEQ ID NO: 569957 - DNA, 15 bp, Homo sapiens
aaaggagcaagcata

SEQ ID NO: 569958 - DNA, 15 bp, Homo sapiens
gaaaggagcaagcat

SEQ ID NO: 569959 - DNA, 15 bp, Homo sapiens
agaaaggagcaagca

SEQ ID NO: 569960 - DNA, 15 bp, Homo sapiens
aagaaaggagcaagc

SEQ ID NO: 569961 - DNA, 15 bp, Homo sapiens
aaagaaaggagcaag

SEQ ID NO: 569962 - DNA, 15 bp, Homo sapiens
caaagaaaggagcaa

SEQ ID NO: 569963 - DNA, 15 bp, Homo sapiens
acaaagaaaggagca

SEQ ID NO: 569964 - DNA, 15 bp, Homo sapiens
tacaaagaaaggagc

SEQ ID NO: 569965 - DNA, 15 bp, Homo sapiens
atacaaagaaaggag

SEQ ID NO: 569966 - DNA, 15 bp, Homo sapiens
gatacaaagaaagga

SEQ ID NO: 569967 - DNA, 15 bp, Homo sapiens
ggatacaaagaaagg

SEQ ID NO: 569968 - DNA, 15 bp, Homo sapiens
tggatacaaagaaag

SEQ ID NO: 569969 - DNA, 15 bp, Homo sapiens
gtggatacaaagaaa

SEQ ID NO: 569970 - DNA, 15 bp, Homo sapiens
tgtgaagcattatgt

SEQ ID NO: 569971 - DNA, 15 bp, Homo sapiens
ttgtgaagcattatg

SEQ ID NO: 569972 - DNA, 15 bp, Homo sapiens
attgtgaagcattat

SEQ ID NO: 569973 - DNA, 15 bp, Homo sapiens
aattgtgaagcatta

SEQ ID NO: 569974 - DNA, 15 bp, Homo sapiens
aaattgtgaagcatt

SEQ ID NO: 569975 - DNA, 15 bp, Homo sapiens
taaattgtgaagcat

SEQ ID NO: 569976 - DNA, 15 bp, Homo sapiens
gtaaattgtgaagca

SEQ ID NO: 569977 - DNA, 15 bp, Homo sapiens
tgtaaattgtgaagc

SEQ ID NO: 569978 - DNA, 15 bp, Homo sapiens
gtgtaaattgtgaag

SEQ ID NO: 569979 - DNA, 15 bp, Homo sapiens
agtgtaaattgtgaa

SEQ ID NO: 569980 - DNA, 15 bp, Homo sapiens
cagtgtaaattgtga

SEQ ID NO: 569981 - DNA, 15 bp, Homo sapiens
gcagtgtaaattgtg

SEQ ID NO: 569982 - DNA, 15 bp, Homo sapiens
tgcagtgtaaattgt

SEQ ID NO: 569983 - DNA, 15 bp, Homo sapiens
gtgcagtgtaaattg

SEQ ID NO: 569984 - DNA, 15 bp, Homo sapiens
agtgcagtgtaaatt

SEQ ID NO: 569985 - DNA, 15 bp, Homo sapiens
aagtgcagtgtaaat

SEQ ID NO: 569986 - DNA, 15 bp, Homo sapiens
aaagtgcagtgtaaa

SEQ ID NO: 569987 - DNA, 15 bp, Homo sapiens
gaaagtgcagtgtaa

SEQ ID NO: 569988 - DNA, 15 bp, Homo sapiens
tgaaagtgcagtgta

SEQ ID NO: 569989 - DNA, 15 bp, Homo sapiens
ttgaaagtgcagtgt

SEQ ID NO: 569990 - DNA, 15 bp, Homo sapiens
tttgaaagtgcagtg

SEQ ID NO: 569991 - DNA, 15 bp, Homo sapiens
atttgaaagtgcagt

SEQ ID NO: 569992 - DNA, 15 bp, Homo sapiens
catttgaaagtgcag

SEQ ID NO: 569993 - DNA, 15 bp, Homo sapiens
acatttgaaagtgca

SEQ ID NO: 569994 - DNA, 15 bp, Homo sapiens
aacatttgaaagtgc

SEQ ID NO: 569995 - DNA, 15 bp, Homo sapiens
taacatttgaaagtg

SEQ ID NO: 569996 - DNA, 15 bp, Homo sapiens
ttaacatttgaaagt

SEQ ID NO: 569997 - DNA, 15 bp, Homo sapiens
gttaacatttgaaag

SEQ ID NO: 569998 - DNA, 15 bp, Homo sapiens
agttaacatttgaaa

SEQ ID NO: 569999 - DNA, 15 bp, Homo sapiens
cagttaacatttgaa

SEQ ID NO: 570000 - DNA, 15 bp, Homo sapiens
gcagttaacatttga

SEQ ID NO: 570001 - DNA, 15 bp, Homo sapiens
tgcagttaacatttg

SEQ ID NO: 570002 - DNA, 15 bp, Homo sapiens
atgcagttaacattt

SEQ ID NO: 570003 - DNA, 15 bp, Homo sapiens
catgcagttaacatt

SEQ ID NO: 570004 - DNA, 15 bp, Homo sapiens
tcatgcagttaacat

SEQ ID NO: 570005 - DNA, 15 bp, Homo sapiens
atcatgcagttaaca

SEQ ID NO: 570006 - DNA, 15 bp, Homo sapiens
aatcatgcagttaac

SEQ ID NO: 570007 - DNA, 15 bp, Homo sapiens
caatcatgcagttaa

SEQ ID NO: 570008 - DNA, 15 bp, Homo sapiens
gcaatcatgcagtta

SEQ ID NO: 570009 - DNA, 15 bp, Homo sapiens
ggcaatcatgcagtt

SEQ ID NO: 570010 - DNA, 15 bp, Homo sapiens
tggcaatcatgcagt

SEQ ID NO: 570011 - DNA, 15 bp, Homo sapiens
ttggcaatcatgcag

SEQ ID NO: 570012 - DNA, 15 bp, Homo sapiens
attggcaatcatgca

SEQ ID NO: 570013 - DNA, 15 bp, Homo sapiens
tattggcaatcatgc

SEQ ID NO: 570014 - DNA, 15 bp, Homo sapiens
gtattggcaatcatg

SEQ ID NO: 570015 - DNA, 15 bp, Homo sapiens
tgtattggcaatcat

SEQ ID NO: 570016 - DNA, 15 bp, Homo sapiens
gtgtattggcaatca

SEQ ID NO: 570017 - DNA, 15 bp, Homo sapiens
agtgtattggcaatc

SEQ ID NO: 570018 - DNA, 15 bp, Homo sapiens
tagtgtattggcaat

SEQ ID NO: 570019 - DNA, 15 bp, Homo sapiens
ttagtgtattggcaa

SEQ ID NO: 570020 - DNA, 15 bp, Homo sapiens
attagtgtattggca

SEQ ID NO: 570021 - DNA, 15 bp, Homo sapiens
aattagtgtattggc

SEQ ID NO: 570022 - DNA, 15 bp, Homo sapiens
caattagtgtattgg

SEQ ID NO: 570023 - DNA, 15 bp, Homo sapiens
ccaattagtgtattg

SEQ ID NO: 570024 - DNA, 15 bp, Homo sapiens
accaattagtgtatt

SEQ ID NO: 570025 - DNA, 15 bp, Homo sapiens
aaccaattagtgtat

SEQ ID NO: 570026 - DNA, 15 bp, Homo sapiens
aaaccaattagtgta

SEQ ID NO: 570027 - DNA, 15 bp, Homo sapiens
aaaaccaattagtgt

SEQ ID NO: 570028 - DNA, 15 bp, Homo sapiens
aaaaaccaattagtg

SEQ ID NO: 570029 - DNA, 15 bp, Homo sapiens
gaaaaaccaattagt

SEQ ID NO: 570030 - DNA, 15 bp, Homo sapiens
agaaaaaccaattag

SEQ ID NO: 570031 - DNA, 15 bp, Homo sapiens
gagaaaaaccaatta

SEQ ID NO: 570032 - DNA, 15 bp, Homo sapiens
agagaaaaaccaatt

SEQ ID NO: 570033 - DNA, 15 bp, Homo sapiens
aagagaaaaaccaat

SEQ ID NO: 570034 - DNA, 15 bp, Homo sapiens
taagagaaaaaccaa

SEQ ID NO: 570035 - DNA, 15 bp, Homo sapiens
ataagagaaaaacca

SEQ ID NO: 570036 - DNA, 15 bp, Homo sapiens
cataagagaaaaacc

SEQ ID NO: 570037 - DNA, 15 bp, Homo sapiens
acataagagaaaaac

SEQ ID NO: 570038 - DNA, 15 bp, Homo sapiens
aacataagagaaaaa

SEQ ID NO: 570039 - DNA, 15 bp, Homo sapiens
aaacataagagaaaa

SEQ ID NO: 570040 - DNA, 15 bp, Homo sapiens
aaaacataagagaaa

SEQ ID NO: 570041 - DNA, 15 bp, Homo sapiens
taaaacataagagaa

SEQ ID NO: 570042 - DNA, 15 bp, Homo sapiens
gtaaaacataagaga

SEQ ID NO: 570043 - DNA, 15 bp, Homo sapiens
tgtaaaacataagag

SEQ ID NO: 570044 - DNA, 15 bp, Homo sapiens
ctgtaaaacataaga

SEQ ID NO: 570045 - DNA, 15 bp, Homo sapiens
actgtaaaacataag

SEQ ID NO: 570046 - DNA, 15 bp, Homo sapiens
cactgtaaaacataa

SEQ ID NO: 570047 - DNA, 15 bp, Homo sapiens
gcactgtaaaacata

SEQ ID NO: 570048 - DNA, 15 bp, Homo sapiens
agcactgtaaaacat

SEQ ID NO: 570049 - DNA, 15 bp, Homo sapiens
aagcactgtaaaaca

SEQ ID NO: 570050 - DNA, 15 bp, Homo sapiens
aaagcactgtaaaac

SEQ ID NO: 570051 - DNA, 15 bp, Homo sapiens
gaaagcactgtaaaa

SEQ ID NO: 570052 - DNA, 15 bp, Homo sapiens
tgaaagcactgtaaa

SEQ ID NO: 570053 - DNA, 15 bp, Homo sapiens
atgaaagcactgtaa

SEQ ID NO: 570054 - DNA, 15 bp, Homo sapiens
tatgaaagcactgta

SEQ ID NO: 570055 - DNA, 15 bp, Homo sapiens
gtatgaaagcactgt

SEQ ID NO: 570056 - DNA, 15 bp, Homo sapiens
tgtatgaaagcactg

SEQ ID NO: 570057 - DNA, 15 bp, Homo sapiens
gtgtatgaaagcact

SEQ ID NO: 570058 - DNA, 15 bp, Homo sapiens
tgtgtatgaaagcac

SEQ ID NO: 570059 - DNA, 15 bp, Homo sapiens
atgtgtatgaaagca

SEQ ID NO: 570060 - DNA, 15 bp, Homo sapiens
aatgtgtatgaaagc

SEQ ID NO: 570061 - DNA, 15 bp, Homo sapiens
taatgtgtatgaaag

SEQ ID NO: 570062 - DNA, 15 bp, Homo sapiens
ataatgtgtatgaaa

SEQ ID NO: 570063 - DNA, 15 bp, Homo sapiens
gataatgtgtatgaa

SEQ ID NO: 570064 - DNA, 15 bp, Homo sapiens
tgataatgtgtatga

SEQ ID NO: 570065 - DNA, 15 bp, Homo sapiens
ctgataatgtgtatg

SEQ ID NO: 570066 - DNA, 15 bp, Homo sapiens
actgataatgtgtat

SEQ ID NO: 570067 - DNA, 15 bp, Homo sapiens
gactgataatgtgta

SEQ ID NO: 570068 - DNA, 15 bp, Homo sapiens
tgactgataatgtgt

SEQ ID NO: 570069 - DNA, 15 bp, Homo sapiens
atgactgataatgtg

SEQ ID NO: 570070 - DNA, 15 bp, Homo sapiens
aatgactgataatgt

SEQ ID NO: 570071 - DNA, 15 bp, Homo sapiens
aaatgactgataatg

SEQ ID NO: 570072 - DNA, 15 bp, Homo sapiens
taaatgactgataat

SEQ ID NO: 570073 - DNA, 15 bp, Homo sapiens
ttaaatgactgataa

SEQ ID NO: 570074 - DNA, 15 bp, Homo sapiens
tttaaatgactgata

SEQ ID NO: 570075 - DNA, 15 bp, Homo sapiens
atttaaatgactgat

SEQ ID NO: 570076 - DNA, 15 bp, Homo sapiens
gatttaaatgactga

SEQ ID NO: 570077 - DNA, 15 bp, Homo sapiens
tgatttaaatgactg

SEQ ID NO: 570078 - DNA, 15 bp, Homo sapiens
ttgatttaaatgact

SEQ ID NO: 570079 - DNA, 15 bp, Homo sapiens
gttgatttaaatgac

SEQ ID NO: 570080 - DNA, 15 bp, Homo sapiens
agttgatttaaatga

SEQ ID NO: 570081 - DNA, 15 bp, Homo sapiens
aagttgatttaaatg

SEQ ID NO: 570082 - DNA, 15 bp, Homo sapiens
gaagttgatttaaat

SEQ ID NO: 570083 - DNA, 15 bp, Homo sapiens
ggaagttgatttaaa

SEQ ID NO: 570084 - DNA, 15 bp, Homo sapiens
gggaagttgatttaa

SEQ ID NO: 570085 - DNA, 15 bp, Homo sapiens
tgggaagttgattta

SEQ ID NO: 570086 - DNA, 15 bp, Homo sapiens
gtgggaagttgattt

SEQ ID NO: 570087 - DNA, 15 bp, Homo sapiens
tgtgggaagttgatt

SEQ ID NO: 570088 - DNA, 15 bp, Homo sapiens
atgtgggaagttgat

SEQ ID NO: 570089 - DNA, 15 bp, Homo sapiens
tatgtgggaagttga

SEQ ID NO: 570090 - DNA, 15 bp, Homo sapiens
ttatgtgggaagttg

SEQ ID NO: 570091 - DNA, 15 bp, Homo sapiens
tttatgtgggaagtt

SEQ ID NO: 570092 - DNA, 15 bp, Homo sapiens
gtttatgtgggaagt

SEQ ID NO: 570093 - DNA, 15 bp, Homo sapiens
tgtttatgtgggaag

SEQ ID NO: 570094 - DNA, 15 bp, Homo sapiens
ctgtttatgtgggaa

SEQ ID NO: 570095 - DNA, 15 bp, Homo sapiens
cctgtttatgtggga

SEQ ID NO: 570096 - DNA, 15 bp, Homo sapiens
tcctgtttatgtggg

SEQ ID NO: 570097 - DNA, 15 bp, Homo sapiens
ttcctgtttatgtgg

SEQ ID NO: 570098 - DNA, 15 bp, Homo sapiens
cttcctgtttatgtg

SEQ ID NO: 570099 - DNA, 15 bp, Homo sapiens
tcttcctgtttatgt

SEQ ID NO: 570100 - DNA, 15 bp, Homo sapiens
ttcttcctgtttatg

SEQ ID NO: 570101 - DNA, 15 bp, Homo sapiens
tttcttcctgtttat

SEQ ID NO: 570102 - DNA, 15 bp, Homo sapiens
ttttcttcctgttta

SEQ ID NO: 570103 - DNA, 15 bp, Homo sapiens
tttttcttcctgttt

SEQ ID NO: 570104 - DNA, 15 bp, Homo sapiens
ttttttcttcctgtt

SEQ ID NO: 570105 - DNA, 15 bp, Homo sapiens
tttttttcttcctgt

SEQ ID NO: 570106 - DNA, 15 bp, Homo sapiens
atttttttcttcctg

SEQ ID NO: 570107 - DNA, 15 bp, Homo sapiens
gatttttttcttcct

SEQ ID NO: 570108 - DNA, 15 bp, Homo sapiens
tgatttttttcttcc

SEQ ID NO: 570109 - DNA, 15 bp, Homo sapiens
ttgatttttttcttc

SEQ ID NO: 570110 - DNA, 15 bp, Homo sapiens
cttgatttttttctt

SEQ ID NO: 570111 - DNA, 15 bp, Homo sapiens
ccttgatttttttct

SEQ ID NO: 570112 - DNA, 15 bp, Homo sapiens
tccttgatttttttc

SEQ ID NO: 570113 - DNA, 15 bp, Homo sapiens
ttccttgattttttt

SEQ ID NO: 570114 - DNA, 15 bp, Homo sapiens
tttccttgatttttt

SEQ ID NO: 570115 - DNA, 15 bp, Homo sapiens
ctttccttgattttt

SEQ ID NO: 570116 - DNA, 15 bp, Homo sapiens
actttccttgatttt

SEQ ID NO: 570117 - DNA, 15 bp, Homo sapiens
tactttccttgattt

SEQ ID NO: 570118 - DNA, 15 bp, Homo sapiens
atactttccttgatt

SEQ ID NO: 570119 - DNA, 15 bp, Homo sapiens
aatactttccttgat

SEQ ID NO: 570120 - DNA, 15 bp, Homo sapiens
taatactttccttga

SEQ ID NO: 570121 - DNA, 15 bp, Homo sapiens
ttaatactttccttg

SEQ ID NO: 570122 - DNA, 15 bp, Homo sapiens
tttaatactttcctt

SEQ ID NO: 570123 - DNA, 15 bp, Homo sapiens
gtttaatactttcct

SEQ ID NO: 570124 - DNA, 15 bp, Homo sapiens
tgtttaatactttcc

SEQ ID NO: 570125 - DNA, 15 bp, Homo sapiens
atgtttaatactttc

SEQ ID NO: 570126 - DNA, 15 bp, Homo sapiens
catgtttaatacttt

SEQ ID NO: 570127 - DNA, 15 bp, Homo sapiens
gcatgtttaatactt

SEQ ID NO: 570128 - DNA, 15 bp, Homo sapiens
agcatgtttaatact

SEQ ID NO: 570129 - DNA, 15 bp, Homo sapiens
gagcatgtttaatac

SEQ ID NO: 570130 - DNA, 15 bp, Homo sapiens
tgagcatgtttaata

SEQ ID NO: 570131 - DNA, 15 bp, Homo sapiens
ttgagcatgtttaat

SEQ ID NO: 570132 - DNA, 15 bp, Homo sapiens
gttgagcatgtttaa

SEQ ID NO: 570133 - DNA, 15 bp, Homo sapiens
tgttgagcatgttta

SEQ ID NO: 570134 - DNA, 15 bp, Homo sapiens
ctgttgagcatgttt

SEQ ID NO: 570135 - DNA, 15 bp, Homo sapiens
actgttgagcatgtt

SEQ ID NO: 570136 - DNA, 15 bp, Homo sapiens
gactgttgagcatgt

SEQ ID NO: 570137 - DNA, 15 bp, Homo sapiens
ggactgttgagcatg

SEQ ID NO: 570138 - DNA, 15 bp, Homo sapiens
gggactgttgagcat

SEQ ID NO: 570139 - DNA, 15 bp, Homo sapiens
tgggactgttgagca

SEQ ID NO: 570140 - DNA, 15 bp, Homo sapiens
ctgggactgttgagc

SEQ ID NO: 570141 - DNA, 15 bp, Homo sapiens
cctgggactgttgag

SEQ ID NO: 570142 - DNA, 15 bp, Homo sapiens
acctgggactgttga

SEQ ID NO: 570143 - DNA, 15 bp, Homo sapiens
aacctgggactgttg

SEQ ID NO: 570144 - DNA, 15 bp, Homo sapiens
gaacctgggactgtt

SEQ ID NO: 570145 - DNA, 15 bp, Homo sapiens
agaacctgggactgt

SEQ ID NO: 570146 - DNA, 15 bp, Homo sapiens
gagaacctgggactg

SEQ ID NO: 570147 - DNA, 15 bp, Homo sapiens
agagaacctgggact

SEQ ID NO: 570148 - DNA, 15 bp, Homo sapiens
gagagaacctgggac

SEQ ID NO: 570149 - DNA, 15 bp, Homo sapiens
tgagagaacctggga

SEQ ID NO: 570150 - DNA, 15 bp, Homo sapiens
atgagagaacctggg

SEQ ID NO: 570151 - DNA, 15 bp, Homo sapiens
gatgagagaacctgg

SEQ ID NO: 570152 - DNA, 15 bp, Homo sapiens
agatgagagaacctg

SEQ ID NO: 570153 - DNA, 15 bp, Homo sapiens
aagatgagagaacct

SEQ ID NO: 570154 - DNA, 15 bp, Homo sapiens
aaagatgagagaacc

SEQ ID NO: 570155 - DNA, 15 bp, Homo sapiens
taaagatgagagaac

SEQ ID NO: 570156 - DNA, 15 bp, Homo sapiens
ttaaagatgagagaa

SEQ ID NO: 570157 - DNA, 15 bp, Homo sapiens
cttaaagatgagaga

SEQ ID NO: 570158 - DNA, 15 bp, Homo sapiens
gcttaaagatgagag

SEQ ID NO: 570159 - DNA, 15 bp, Homo sapiens
ggcttaaagatgaga

SEQ ID NO: 570160 - DNA, 15 bp, Homo sapiens
aggcttaaagatgag

SEQ ID NO: 570161 - DNA, 15 bp, Homo sapiens
taggcttaaagatga

SEQ ID NO: 570162 - DNA, 15 bp, Homo sapiens
ctaggcttaaagatg

SEQ ID NO: 570163 - DNA, 15 bp, Homo sapiens
tctaggcttaaagat

SEQ ID NO: 570164 - DNA, 15 bp, Homo sapiens
ctctaggcttaaaga

SEQ ID NO: 570165 - DNA, 15 bp, Homo sapiens
tctctaggcttaaag

SEQ ID NO: 570166 - DNA, 15 bp, Homo sapiens
atctctaggcttaaa

SEQ ID NO: 570167 - DNA, 15 bp, Homo sapiens
catctctaggcttaa

SEQ ID NO: 570168 - DNA, 15 bp, Homo sapiens
ccatctctaggctta

SEQ ID NO: 570169 - DNA, 15 bp, Homo sapiens
cccatctctaggctt

SEQ ID NO: 570170 - DNA, 15 bp, Homo sapiens
acccatctctaggct

SEQ ID NO: 570171 - DNA, 15 bp, Homo sapiens
tacccatctctaggc

SEQ ID NO: 570172 - DNA, 15 bp, Homo sapiens
atacccatctctagg

SEQ ID NO: 570173 - DNA, 15 bp, Homo sapiens
aatacccatctctag

SEQ ID NO: 570174 - DNA, 15 bp, Homo sapiens
taatacccatctcta

SEQ ID NO: 570175 - DNA, 15 bp, Homo sapiens
ttaatacccatctct

SEQ ID NO: 570176 - DNA, 15 bp, Homo sapiens
tttaatacccatctc

SEQ ID NO: 570177 - DNA, 15 bp, Homo sapiens
gtttaatacccatct

SEQ ID NO: 570178 - DNA, 15 bp, Homo sapiens
ggtttaatacccatc

SEQ ID NO: 570179 - DNA, 15 bp, Homo sapiens
gggtttaatacccat

SEQ ID NO: 570180 - DNA, 15 bp, Homo sapiens
tgggtttaataccca

SEQ ID NO: 570181 - DNA, 15 bp, Homo sapiens
ctgggtttaataccc

SEQ ID NO: 570182 - DNA, 15 bp, Homo sapiens
cctgggtttaatacc

SEQ ID NO: 570183 - DNA, 15 bp, Homo sapiens
tcctgggtttaatac

SEQ ID NO: 570184 - DNA, 15 bp, Homo sapiens
ctcctgggtttaata

SEQ ID NO: 570185 - DNA, 15 bp, Homo sapiens
actcctgggtttaat

SEQ ID NO: 570186 - DNA, 15 bp, Homo sapiens
tactcctgggtttaa

SEQ ID NO: 570187 - DNA, 15 bp, Homo sapiens
ctactcctgggttta

SEQ ID NO: 570188 - DNA, 15 bp, Homo sapiens
gctactcctgggttt

SEQ ID NO: 570189 - DNA, 15 bp, Homo sapiens
cgctactcctgggtt

SEQ ID NO: 570190 - DNA, 15 bp, Homo sapiens
acgctactcctgggt

SEQ ID NO: 570191 - DNA, 15 bp, Homo sapiens
aacgctactcctggg

SEQ ID NO: 570192 - DNA, 15 bp, Homo sapiens
caacgctactcctgg

SEQ ID NO: 570193 - DNA, 15 bp, Homo sapiens
ccaacgctactcctg

SEQ ID NO: 570194 - DNA, 15 bp, Homo sapiens
gccaacgctactcct

SEQ ID NO: 570195 - DNA, 15 bp, Homo sapiens
tgccaacgctactcc

SEQ ID NO: 570196 - DNA, 15 bp, Homo sapiens
gtgccaacgctactc

SEQ ID NO: 570197 - DNA, 15 bp, Homo sapiens
tgtgccaacgctact

SEQ ID NO: 570198 - DNA, 15 bp, Homo sapiens
ctgtgccaacgctac

SEQ ID NO: 570199 - DNA, 15 bp, Homo sapiens
actgtgccaacgcta

SEQ ID NO: 570200 - DNA, 15 bp, Homo sapiens
gactgtgccaacgct

SEQ ID NO: 570201 - DNA, 15 bp, Homo sapiens
ggactgtgccaacgc

SEQ ID NO: 570202 - DNA, 15 bp, Homo sapiens
tggactgtgccaacg

SEQ ID NO: 570203 - DNA, 15 bp, Homo sapiens
gtggactgtgccaac

SEQ ID NO: 570204 - DNA, 15 bp, Homo sapiens
ggtggactgtgccaa

SEQ ID NO: 570205 - DNA, 15 bp, Homo sapiens
tggtggactgtgcca

SEQ ID NO: 570206 - DNA, 15 bp, Homo sapiens
ttggtggactgtgcc

SEQ ID NO: 570207 - DNA, 15 bp, Homo sapiens
tttggtggactgtgc

SEQ ID NO: 570208 - DNA, 15 bp, Homo sapiens
atttggtggactgtg

SEQ ID NO: 570209 - DNA, 15 bp, Homo sapiens
aatttggtggactgt

SEQ ID NO: 570210 - DNA, 15 bp, Homo sapiens
taatttggtggactg

SEQ ID NO: 570211 - DNA, 15 bp, Homo sapiens
ataatttggtggact

SEQ ID NO: 570212 - DNA, 15 bp, Homo sapiens
aataatttggtggac

SEQ ID NO: 570213 - DNA, 15 bp, Homo sapiens
aaataatttggtgga

SEQ ID NO: 570214 - DNA, 15 bp, Homo sapiens
caaataatttggtgg

SEQ ID NO: 570215 - DNA, 15 bp, Homo sapiens
ccaaataatttggtg

SEQ ID NO: 570216 - DNA, 15 bp, Homo sapiens
gccaaataatttggt

SEQ ID NO: 570217 - DNA, 15 bp, Homo sapiens
ggccaaataatttgg

SEQ ID NO: 570218 - DNA, 15 bp, Homo sapiens
tggccaaataatttg

SEQ ID NO: 570219 - DNA, 15 bp, Homo sapiens
gtggccaaataattt

SEQ ID NO: 570220 - DNA, 15 bp, Homo sapiens
agtggccaaataatt

SEQ ID NO: 570221 - DNA, 15 bp, Homo sapiens
tagtggccaaataat

SEQ ID NO: 570222 - DNA, 15 bp, Homo sapiens
gtagtggccaaataa

SEQ ID NO: 570223 - DNA, 15 bp, Homo sapiens
agtagtggccaaata

SEQ ID NO: 570224 - DNA, 15 bp, Homo sapiens
tagtagtggccaaat

SEQ ID NO: 570225 - DNA, 15 bp, Homo sapiens
atagtagtggccaaa

SEQ ID NO: 570226 - DNA, 15 bp, Homo sapiens
catagtagtggccaa

SEQ ID NO: 570227 - DNA, 15 bp, Homo sapiens
tcatagtagtggcca

SEQ ID NO: 570228 - DNA, 15 bp, Homo sapiens
ctcatagtagtggcc

SEQ ID NO: 570229 - DNA, 15 bp, Homo sapiens
gctcatagtagtggc

SEQ ID NO: 570230 - DNA, 15 bp, Homo sapiens
tgctcatagtagtgg

SEQ ID NO: 570231 - DNA, 15 bp, Homo sapiens
ctgctcatagtagtg

SEQ ID NO: 570232 - DNA, 15 bp, Homo sapiens
cctgctcatagtagt

SEQ ID NO: 570233 - DNA, 15 bp, Homo sapiens
ccctgctcatagtag

SEQ ID NO: 570234 - DNA, 15 bp, Homo sapiens
tccctgctcatagta

SEQ ID NO: 570235 - DNA, 15 bp, Homo sapiens
ctccctgctcatagt

SEQ ID NO: 570236 - DNA, 15 bp, Homo sapiens
actccctgctcatag

SEQ ID NO: 570237 - DNA, 15 bp, Homo sapiens
aactccctgctcata

SEQ ID NO: 570238 - DNA, 15 bp, Homo sapiens
gaactccctgctcat

SEQ ID NO: 570239 - DNA, 15 bp, Homo sapiens
tgaactccctgctca

SEQ ID NO: 570240 - DNA, 15 bp, Homo sapiens
ctgaactccctgctc

SEQ ID NO: 570241 - DNA, 15 bp, Homo sapiens
cctgaactccctgct

SEQ ID NO: 570242 - DNA, 15 bp, Homo sapiens
gcctgaactccctgc

SEQ ID NO: 570243 - DNA, 15 bp, Homo sapiens
agcctgaactccctg

SEQ ID NO: 570244 - DNA, 15 bp, Homo sapiens
cagcctgaactccct

SEQ ID NO: 570245 - DNA, 15 bp, Homo sapiens
acagcctgaactccc

SEQ ID NO: 570246 - DNA, 15 bp, Homo sapiens
gacagcctgaactcc

SEQ ID NO: 570247 - DNA, 15 bp, Homo sapiens
ggacagcctgaactc

SEQ ID NO: 570248 - DNA, 15 bp, Homo sapiens
gggacagcctgaact

SEQ ID NO: 570249 - DNA, 15 bp, Homo sapiens
ggggacagcctgaac

SEQ ID NO: 570250 - DNA, 15 bp, Homo sapiens
aggggacagcctgaa

SEQ ID NO: 570251 - DNA, 15 bp, Homo sapiens
aaggggacagcctga

SEQ ID NO: 570252 - DNA, 15 bp, Homo sapiens
caaggggacagcctg

SEQ ID NO: 570253 - DNA, 15 bp, Homo sapiens
ccaaggggacagcct

SEQ ID NO: 570254 - DNA, 15 bp, Homo sapiens
cccaaggggacagcc

SEQ ID NO: 570255 - DNA, 15 bp, Homo sapiens
tcccaaggggacagc

SEQ ID NO: 570256 - DNA, 15 bp, Homo sapiens
gtcccaaggggacag

SEQ ID NO: 570257 - DNA, 15 bp, Homo sapiens
ggtcccaaggggaca

SEQ ID NO: 570258 - DNA, 15 bp, Homo sapiens
aggtcccaaggggac

SEQ ID NO: 570259 - DNA, 15 bp, Homo sapiens
gaggtcccaagggga

SEQ ID NO: 570260 - DNA, 15 bp, Homo sapiens
cgaggtcccaagggg

SEQ ID NO: 570261 - DNA, 15 bp, Homo sapiens
gcgaggtcccaaggg

SEQ ID NO: 570262 - DNA, 15 bp, Homo sapiens
agcgaggtcccaagg

SEQ ID NO: 570263 - DNA, 15 bp, Homo sapiens
aagcgaggtcccaag

SEQ ID NO: 570264 - DNA, 15 bp, Homo sapiens
aaagcgaggtcccaa

SEQ ID NO: 570265 - DNA, 15 bp, Homo sapiens
caaagcgaggtccca

SEQ ID NO: 570266 - DNA, 15 bp, Homo sapiens
acaaagcgaggtccc

SEQ ID NO: 570267 - DNA, 15 bp, Homo sapiens
gacaaagcgaggtcc

SEQ ID NO: 570268 - DNA, 15 bp, Homo sapiens
ggacaaagcgaggtc

SEQ ID NO: 570269 - DNA, 15 bp, Homo sapiens
gggacaaagcgaggt

SEQ ID NO: 570270 - DNA, 15 bp, Homo sapiens
tgggacaaagcgagg

SEQ ID NO: 570271 - DNA, 15 bp, Homo sapiens
ctgggacaaagcgag

SEQ ID NO: 570272 - DNA, 15 bp, Homo sapiens
cctgggacaaagcga

SEQ ID NO: 570273 - DNA, 15 bp, Homo sapiens
gcctgggacaaagcg

SEQ ID NO: 570274 - DNA, 15 bp, Homo sapiens
tgcctgggacaaagc

SEQ ID NO: 570275 - DNA, 15 bp, Homo sapiens
gtgcctgggacaaag

SEQ ID NO: 570276 - DNA, 15 bp, Homo sapiens
tgtgcctgggacaaa

SEQ ID NO: 570277 - DNA, 15 bp, Homo sapiens
ctgtgcctgggacaa

SEQ ID NO: 570278 - DNA, 15 bp, Homo sapiens
actgtgcctgggaca

SEQ ID NO: 570279 - DNA, 15 bp, Homo sapiens
gactgtgcctgggac

SEQ ID NO: 570280 - DNA, 15 bp, Homo sapiens
tgactgtgcctggga

SEQ ID NO: 570281 - DNA, 15 bp, Homo sapiens
gtgactgtgcctggg

SEQ ID NO: 570282 - DNA, 15 bp, Homo sapiens
ggtgactgtgcctgg

SEQ ID NO: 570283 - DNA, 15 bp, Homo sapiens
gggtgactgtgcctg

SEQ ID NO: 570284 - DNA, 15 bp, Homo sapiens
agggtgactgtgcct

SEQ ID NO: 570285 - DNA, 15 bp, Homo sapiens
aagggtgactgtgcc

SEQ ID NO: 570286 - DNA, 15 bp, Homo sapiens
aaagggtgactgtgc

SEQ ID NO: 570287 - DNA, 15 bp, Homo sapiens
gaaagggtgactgtg

SEQ ID NO: 570288 - DNA, 15 bp, Homo sapiens
ggaaagggtgactgt

SEQ ID NO: 570289 - DNA, 15 bp, Homo sapiens
tggaaagggtgactg

SEQ ID NO: 570290 - DNA, 15 bp, Homo sapiens
atggaaagggtgact

SEQ ID NO: 570291 - DNA, 15 bp, Homo sapiens
tatggaaagggtgac

SEQ ID NO: 570292 - DNA, 15 bp, Homo sapiens
ttatggaaagggtga

SEQ ID NO: 570293 - DNA, 15 bp, Homo sapiens
gttatggaaagggtg

SEQ ID NO: 570294 - DNA, 15 bp, Homo sapiens
ggttatggaaagggt

SEQ ID NO: 570295 - DNA, 15 bp, Homo sapiens
tggttatggaaaggg

SEQ ID NO: 570296 - DNA, 15 bp, Homo sapiens
atggttatggaaagg

SEQ ID NO: 570297 - DNA, 15 bp, Homo sapiens
gatggttatggaaag

SEQ ID NO: 570298 - DNA, 15 bp, Homo sapiens
tgatggttatggaaa

SEQ ID NO: 570299 - DNA, 15 bp, Homo sapiens
gtgatggttatggaa

SEQ ID NO: 570300 - DNA, 15 bp, Homo sapiens
agtgatggttatgga

SEQ ID NO: 570301 - DNA, 15 bp, Homo sapiens
tagtgatggttatgg

SEQ ID NO: 570302 - DNA, 15 bp, Homo sapiens
ctagtgatggttatg

SEQ ID NO: 570303 - DNA, 15 bp, Homo sapiens
tctagtgatggttat

SEQ ID NO: 570304 - DNA, 15 bp, Homo sapiens
ttctagtgatggtta

SEQ ID NO: 570305 - DNA, 15 bp, Homo sapiens
tttctagtgatggtt

SEQ ID NO: 570306 - DNA, 15 bp, Homo sapiens
atttctagtgatggt

SEQ ID NO: 570307 - DNA, 15 bp, Homo sapiens
gatttctagtgatgg

SEQ ID NO: 570308 - DNA, 15 bp, Homo sapiens
ggatttctagtgatg

SEQ ID NO: 570309 - DNA, 15 bp, Homo sapiens
gggatttctagtgat

SEQ ID NO: 570310 - DNA, 15 bp, Homo sapiens
tgggatttctagtga

SEQ ID NO: 570311 - DNA, 15 bp, Homo sapiens
ttgggatttctagtg

SEQ ID NO: 570312 - DNA, 15 bp, Homo sapiens
tttgggatttctagt

SEQ ID NO: 570313 - DNA, 15 bp, Homo sapiens
gtttgggatttctag

SEQ ID NO: 570314 - DNA, 15 bp, Homo sapiens
ggtttgggatttcta

SEQ ID NO: 570315 - DNA, 15 bp, Homo sapiens
gggtttgggatttct

SEQ ID NO: 570316 - DNA, 15 bp, Homo sapiens
ggggtttgggatttc

SEQ ID NO: 570317 - DNA, 15 bp, Homo sapiens
tggggtttgggattt

SEQ ID NO: 570318 - DNA, 15 bp, Homo sapiens
ctggggtttgggatt

SEQ ID NO: 570319 - DNA, 15 bp, Homo sapiens
tctggggtttgggat

SEQ ID NO: 570320 - DNA, 15 bp, Homo sapiens
ttctggggtttggga

SEQ ID NO: 570321 - DNA, 15 bp, Homo sapiens
attctggggtttggg

SEQ ID NO: 570322 - DNA, 15 bp, Homo sapiens
gattctggggtttgg

SEQ ID NO: 570323 - DNA, 15 bp, Homo sapiens
ggattctggggtttg

SEQ ID NO: 570324 - DNA, 15 bp, Homo sapiens
aggattctggggttt

SEQ ID NO: 570325 - DNA, 15 bp, Homo sapiens
caggattctggggtt

SEQ ID NO: 570326 - DNA, 15 bp, Homo sapiens
gcaggattctggggt

SEQ ID NO: 570327 - DNA, 15 bp, Homo sapiens
agcaggattctgggg

SEQ ID NO: 570328 - DNA, 15 bp, Homo sapiens
gagcaggattctggg

SEQ ID NO: 570329 - DNA, 15 bp, Homo sapiens
tgagcaggattctgg

SEQ ID NO: 570330 - DNA, 15 bp, Homo sapiens
gtgagcaggattctg

SEQ ID NO: 570331 - DNA, 15 bp, Homo sapiens
ggtgagcaggattct

SEQ ID NO: 570332 - DNA, 15 bp, Homo sapiens
aggtgagcaggattc

SEQ ID NO: 570333 - DNA, 15 bp, Homo sapiens
taggtgagcaggatt

SEQ ID NO: 570334 - DNA, 15 bp, Homo sapiens
ttaggtgagcaggat

SEQ ID NO: 570335 - DNA, 15 bp, Homo sapiens
cttaggtgagcagga

SEQ ID NO: 570336 - DNA, 15 bp, Homo sapiens
gcttaggtgagcagg

SEQ ID NO: 570337 - DNA, 15 bp, Homo sapiens
agcttaggtgagcag

SEQ ID NO: 570338 - DNA, 15 bp, Homo sapiens
gagcttaggtgagca

SEQ ID NO: 570339 - DNA, 15 bp, Homo sapiens
tgagcttaggtgagc

SEQ ID NO: 570340 - DNA, 15 bp, Homo sapiens
ttgagcttaggtgag

SEQ ID NO: 570341 - DNA, 15 bp, Homo sapiens
tttgagcttaggtga

SEQ ID NO: 570342 - DNA, 15 bp, Homo sapiens
ctttgagcttaggtg

SEQ ID NO: 570343 - DNA, 15 bp, Homo sapiens
tctttgagcttaggt

SEQ ID NO: 570344 - DNA, 15 bp, Homo sapiens
ttctttgagcttagg

SEQ ID NO: 570345 - DNA, 15 bp, Homo sapiens
cttctttgagcttag

SEQ ID NO: 570346 - DNA, 15 bp, Homo sapiens
ccttctttgagctta

SEQ ID NO: 570347 - DNA, 15 bp, Homo sapiens
tccttctttgagctt

SEQ ID NO: 570348 - DNA, 15 bp, Homo sapiens
ttccttctttgagct

SEQ ID NO: 570349 - DNA, 15 bp, Homo sapiens
cttccttctttgagc

SEQ ID NO: 570350 - DNA, 15 bp, Homo sapiens
gcttccttctttgag

SEQ ID NO: 570351 - DNA, 15 bp, Homo sapiens
agcttccttctttga

SEQ ID NO: 570352 - DNA, 15 bp, Homo sapiens
cagcttccttctttg

SEQ ID NO: 570353 - DNA, 15 bp, Homo sapiens
acagcttccttcttt

SEQ ID NO: 570354 - DNA, 15 bp, Homo sapiens
aacagcttccttctt

SEQ ID NO: 570355 - DNA, 15 bp, Homo sapiens
caacagcttccttct

SEQ ID NO: 570356 - DNA, 15 bp, Homo sapiens
gcaacagcttccttc

SEQ ID NO: 570357 - DNA, 15 bp, Homo sapiens
agcaacagcttcctt

SEQ ID NO: 570358 - DNA, 15 bp, Homo sapiens
cagcaacagcttcct

SEQ ID NO: 570359 - DNA, 15 bp, Homo sapiens
ccagcaacagcttcc

SEQ ID NO: 570360 - DNA, 15 bp, Homo sapiens
gccagcaacagcttc

SEQ ID NO: 570361 - DNA, 15 bp, Homo sapiens
tgccagcaacagctt

SEQ ID NO: 570362 - DNA, 15 bp, Homo sapiens
ctgccagcaacagct

SEQ ID NO: 570363 - DNA, 15 bp, Homo sapiens
cctgccagcaacagc

SEQ ID NO: 570364 - DNA, 15 bp, Homo sapiens
acctgccagcaacag

SEQ ID NO: 570365 - DNA, 15 bp, Homo sapiens
cacctgccagcaaca

SEQ ID NO: 570366 - DNA, 15 bp, Homo sapiens
gcacctgccagcaac

SEQ ID NO: 570367 - DNA, 15 bp, Homo sapiens
agcacctgccagcaa

SEQ ID NO: 570368 - DNA, 15 bp, Homo sapiens
aagcacctgccagca

SEQ ID NO: 570369 - DNA, 15 bp, Homo sapiens
gaagcacctgccagc

SEQ ID NO: 570370 - DNA, 15 bp, Homo sapiens
agaagcacctgccag

SEQ ID NO: 570371 - DNA, 15 bp, Homo sapiens
gagaagcacctgcca

SEQ ID NO: 570372 - DNA, 15 bp, Homo sapiens
tgagaagcacctgcc

SEQ ID NO: 570373 - DNA, 15 bp, Homo sapiens
ctgagaagcacctgc

SEQ ID NO: 570374 - DNA, 15 bp, Homo sapiens
tctgagaagcacctg

SEQ ID NO: 570375 - DNA, 15 bp, Homo sapiens
ttctgagaagcacct

SEQ ID NO: 570376 - DNA, 15 bp, Homo sapiens
cttctgagaagcacc

SEQ ID NO: 570377 - DNA, 15 bp, Homo sapiens
acttctgagaagcac

SEQ ID NO: 570378 - DNA, 15 bp, Homo sapiens
gacttctgagaagca

SEQ ID NO: 570379 - DNA, 15 bp, Homo sapiens
agacttctgagaagc

SEQ ID NO: 570380 - DNA, 15 bp, Homo sapiens
cagacttctgagaag

SEQ ID NO: 570381 - DNA, 15 bp, Homo sapiens
ccagacttctgagaa

SEQ ID NO: 570382 - DNA, 15 bp, Homo sapiens
gccagacttctgaga

SEQ ID NO: 570383 - DNA, 15 bp, Homo sapiens
tgccagacttctgag

SEQ ID NO: 570384 - DNA, 15 bp, Homo sapiens
gtgccagacttctga

SEQ ID NO: 570385 - DNA, 15 bp, Homo sapiens
tgtgccagacttctg

SEQ ID NO: 570386 - DNA, 15 bp, Homo sapiens
atgtgccagacttct

SEQ ID NO: 570387 - DNA, 15 bp, Homo sapiens
gatgtgccagacttc

SEQ ID NO: 570388 - DNA, 15 bp, Homo sapiens
agatgtgccagactt

SEQ ID NO: 570389 - DNA, 15 bp, Homo sapiens
cagatgtgccagact

SEQ ID NO: 570390 - DNA, 15 bp, Homo sapiens
acagatgtgccagac

SEQ ID NO: 570391 - DNA, 15 bp, Homo sapiens
cacagatgtgccaga

SEQ ID NO: 570392 - DNA, 15 bp, Homo sapiens
acacagatgtgccag

SEQ ID NO: 570393 - DNA, 15 bp, Homo sapiens
tacacagatgtgcca

SEQ ID NO: 570394 - DNA, 15 bp, Homo sapiens
atacacagatgtgcc

SEQ ID NO: 570395 - DNA, 15 bp, Homo sapiens
aatacacagatgtgc

SEQ ID NO: 570396 - DNA, 15 bp, Homo sapiens
aaatacacagatgtg

SEQ ID NO: 570397 - DNA, 15 bp, Homo sapiens
gaaatacacagatgt

SEQ ID NO: 570398 - DNA, 15 bp, Homo sapiens
agaaatacacagatg

SEQ ID NO: 570399 - DNA, 15 bp, Homo sapiens
aagaaatacacagat

SEQ ID NO: 570400 - DNA, 15 bp, Homo sapiens
caagaaatacacaga

SEQ ID NO: 570401 - DNA, 15 bp, Homo sapiens
acaagaaatacacag

SEQ ID NO: 570402 - DNA, 15 bp, Homo sapiens
gacaagaaatacaca

SEQ ID NO: 570403 - DNA, 15 bp, Homo sapiens
agacaagaaatacac

SEQ ID NO: 570404 - DNA, 15 bp, Homo sapiens
tagacaagaaataca

SEQ ID NO: 570405 - DNA, 15 bp, Homo sapiens
ttagacaagaaatac

SEQ ID NO: 570406 - DNA, 15 bp, Homo sapiens
attagacaagaaata

SEQ ID NO: 570407 - DNA, 15 bp, Homo sapiens
aattagacaagaaat

SEQ ID NO: 570408 - DNA, 15 bp, Homo sapiens
gaattagacaagaaa

SEQ ID NO: 570409 - DNA, 15 bp, Homo sapiens
agaattagacaagaa

SEQ ID NO: 570410 - DNA, 15 bp, Homo sapiens
aagaattagacaaga

SEQ ID NO: 570411 - DNA, 15 bp, Homo sapiens
gaagaattagacaag

SEQ ID NO: 570412 - DNA, 15 bp, Homo sapiens
agaagaattagacaa

SEQ ID NO: 570413 - DNA, 15 bp, Homo sapiens
gagaagaattagaca

SEQ ID NO: 570414 - DNA, 15 bp, Homo sapiens
tgagaagaattagac

SEQ ID NO: 570415 - DNA, 15 bp, Homo sapiens
atgagaagaattaga

SEQ ID NO: 570416 - DNA, 15 bp, Homo sapiens
aatgagaagaattag

SEQ ID NO: 570417 - DNA, 15 bp, Homo sapiens
caatgagaagaatta

SEQ ID NO: 570418 - DNA, 15 bp, Homo sapiens
ccaatgagaagaatt

SEQ ID NO: 570419 - DNA, 15 bp, Homo sapiens
gccaatgagaagaat

SEQ ID NO: 570420 - DNA, 15 bp, Homo sapiens
ggccaatgagaagaa

SEQ ID NO: 570421 - DNA, 15 bp, Homo sapiens
aggccaatgagaaga

SEQ ID NO: 570422 - DNA, 15 bp, Homo sapiens
caggccaatgagaag

SEQ ID NO: 570423 - DNA, 15 bp, Homo sapiens
ccaggccaatgagaa

SEQ ID NO: 570424 - DNA, 15 bp, Homo sapiens
tccaggccaatgaga

SEQ ID NO: 570425 - DNA, 15 bp, Homo sapiens
ctccaggccaatgag

SEQ ID NO: 570426 - DNA, 15 bp, Homo sapiens
gctccaggccaatga

SEQ ID NO: 570427 - DNA, 15 bp, Homo sapiens
tgctccaggccaatg

SEQ ID NO: 570428 - DNA, 15 bp, Homo sapiens
atgctccaggccaat

SEQ ID NO: 570429 - DNA, 15 bp, Homo sapiens
gatgctccaggccaa

SEQ ID NO: 570430 - DNA, 15 bp, Homo sapiens
agatgctccaggcca

SEQ ID NO: 570431 - DNA, 15 bp, Homo sapiens
gagatgctccaggcc

SEQ ID NO: 570432 - DNA, 15 bp, Homo sapiens
agagatgctccaggc

SEQ ID NO: 570433 - DNA, 15 bp, Homo sapiens
aagagatgctccagg

SEQ ID NO: 570434 - DNA, 15 bp, Homo sapiens
gaagagatgctccag

SEQ ID NO: 570435 - DNA, 15 bp, Homo sapiens
tgaagagatgctcca

SEQ ID NO: 570436 - DNA, 15 bp, Homo sapiens
gtgaagagatgctcc

SEQ ID NO: 570437 - DNA, 15 bp, Homo sapiens
tgtgaagagatgctc

SEQ ID NO: 570438 - DNA, 15 bp, Homo sapiens
atgtgaagagatgct

SEQ ID NO: 570439 - DNA, 15 bp, Homo sapiens
aatgtgaagagatgc

SEQ ID NO: 570440 - DNA, 15 bp, Homo sapiens
aaatgtgaagagatg

SEQ ID NO: 570441 - DNA, 15 bp, Homo sapiens
aaaatgtgaagagat

SEQ ID NO: 570442 - DNA, 15 bp, Homo sapiens
aaaaatgtgaagaga

SEQ ID NO: 570443 - DNA, 15 bp, Homo sapiens
gaaaaatgtgaagag

SEQ ID NO: 570444 - DNA, 15 bp, Homo sapiens
agaaaaatgtgaaga

SEQ ID NO: 570445 - DNA, 15 bp, Homo sapiens
gagaaaaatgtgaag

SEQ ID NO: 570446 - DNA, 15 bp, Homo sapiens
agagaaaaatgtgaa

SEQ ID NO: 570447 - DNA, 15 bp, Homo sapiens
tagagaaaaatgtga

SEQ ID NO: 570448 - DNA, 15 bp, Homo sapiens
ctagagaaaaatgtg

SEQ ID NO: 570449 - DNA, 15 bp, Homo sapiens
tctagagaaaaatgt

SEQ ID NO: 570450 - DNA, 15 bp, Homo sapiens
ctctagagaaaaatg

SEQ ID NO: 570451 - DNA, 15 bp, Homo sapiens
tctctagagaaaaat

SEQ ID NO: 570452 - DNA, 15 bp, Homo sapiens
ctctctagagaaaaa

SEQ ID NO: 570453 - DNA, 15 bp, Homo sapiens
gctctctagagaaaa

SEQ ID NO: 570454 - DNA, 15 bp, Homo sapiens
ggctctctagagaaa

SEQ ID NO: 570455 - DNA, 15 bp, Homo sapiens
aggctctctagagaa

SEQ ID NO: 570456 - DNA, 15 bp, Homo sapiens
caggctctctagaga

SEQ ID NO: 570457 - DNA, 15 bp, Homo sapiens
ccaggctctctagag

SEQ ID NO: 570458 - DNA, 15 bp, Homo sapiens
gccaggctctctaga

SEQ ID NO: 570459 - DNA, 15 bp, Homo sapiens
tgccaggctctctag

SEQ ID NO: 570460 - DNA, 15 bp, Homo sapiens
gtgccaggctctcta

SEQ ID NO: 570461 - DNA, 15 bp, Homo sapiens
agtgccaggctctct

SEQ ID NO: 570462 - DNA, 15 bp, Homo sapiens
aagtgccaggctctc

SEQ ID NO: 570463 - DNA, 15 bp, Homo sapiens
aaagtgccaggctct

SEQ ID NO: 570464 - DNA, 15 bp, Homo sapiens
aaaagtgccaggctc

SEQ ID NO: 570465 - DNA, 15 bp, Homo sapiens
aaaaagtgccaggct

SEQ ID NO: 570466 - DNA, 15 bp, Homo sapiens
aaaaaagtgccaggc

SEQ ID NO: 570467 - DNA, 15 bp, Homo sapiens
aaaaaaagtgccagg

SEQ ID NO: 570468 - DNA, 15 bp, Homo sapiens
aaaaaaaagtgccag

SEQ ID NO: 570469 - DNA, 15 bp, Homo sapiens
gaaaaaaaagtgcca

SEQ ID NO: 570470 - DNA, 15 bp, Homo sapiens
ggaaaaaaaagtgcc

SEQ ID NO: 570471 - DNA, 15 bp, Homo sapiens
gggaaaaaaaagtgc

SEQ ID NO: 570472 - DNA, 15 bp, Homo sapiens
ggggaaaaaaaagtg

SEQ ID NO: 570473 - DNA, 15 bp, Homo sapiens
tggggaaaaaaaagt

SEQ ID NO: 570474 - DNA, 15 bp, Homo sapiens
ttggggaaaaaaaag

SEQ ID NO: 570475 - DNA, 15 bp, Homo sapiens
gttggggaaaaaaaa

SEQ ID NO: 570476 - DNA, 15 bp, Homo sapiens
tgttggggaaaaaaa

SEQ ID NO: 570477 - DNA, 15 bp, Homo sapiens
ttgttggggaaaaaa

SEQ ID NO: 570478 - DNA, 15 bp, Homo sapiens
gttgttggggaaaaa

SEQ ID NO: 570479 - DNA, 15 bp, Homo sapiens
ggttgttggggaaaa

SEQ ID NO: 570480 - DNA, 15 bp, Homo sapiens
aggttgttggggaaa

SEQ ID NO: 570481 - DNA, 15 bp, Homo sapiens
caggttgttggggaa

SEQ ID NO: 570482 - DNA, 15 bp, Homo sapiens
tcaggttgttgggga

SEQ ID NO: 570483 - DNA, 15 bp, Homo sapiens
gtcaggttgttgggg

SEQ ID NO: 570484 - DNA, 15 bp, Homo sapiens
ggtcaggttgttggg

SEQ ID NO: 570485 - DNA, 15 bp, Homo sapiens
tggtcaggttgttgg

SEQ ID NO: 570486 - DNA, 15 bp, Homo sapiens
atggtcaggttgttg

SEQ ID NO: 570487 - DNA, 15 bp, Homo sapiens
aatggtcaggttgtt

SEQ ID NO: 570488 - DNA, 15 bp, Homo sapiens
aaatggtcaggttgt

SEQ ID NO: 570489 - DNA, 15 bp, Homo sapiens
aaaatggtcaggttg

SEQ ID NO: 570490 - DNA, 15 bp, Homo sapiens
taaaatggtcaggtt

SEQ ID NO: 570491 - DNA, 15 bp, Homo sapiens
ataaaatggtcaggt

SEQ ID NO: 570492 - DNA, 15 bp, Homo sapiens
gataaaatggtcagg

SEQ ID NO: 570493 - DNA, 15 bp, Homo sapiens
agataaaatggtcag

SEQ ID NO: 570494 - DNA, 15 bp, Homo sapiens
aagataaaatggtca

SEQ ID NO: 570495 - DNA, 15 bp, Homo sapiens
gaagataaaatggtc

SEQ ID NO: 570496 - DNA, 15 bp, Homo sapiens
agaagataaaatggt

SEQ ID NO: 570497 - DNA, 15 bp, Homo sapiens
gagaagataaaatgg

SEQ ID NO: 570498 - DNA, 15 bp, Homo sapiens
tgagaagataaaatg

SEQ ID NO: 570499 - DNA, 15 bp, Homo sapiens
ctgagaagataaaat

SEQ ID NO: 570500 - DNA, 15 bp, Homo sapiens
actgagaagataaaa

SEQ ID NO: 570501 - DNA, 15 bp, Homo sapiens
gactgagaagataaa

SEQ ID NO: 570502 - DNA, 15 bp, Homo sapiens
agactgagaagataa

SEQ ID NO: 570503 - DNA, 15 bp, Homo sapiens
tagactgagaagata

SEQ ID NO: 570504 - DNA, 15 bp, Homo sapiens
ctagactgagaagat

SEQ ID NO: 570505 - DNA, 15 bp, Homo sapiens
cctagactgagaaga

SEQ ID NO: 570506 - DNA, 15 bp, Homo sapiens
ccctagactgagaag

SEQ ID NO: 570507 - DNA, 15 bp, Homo sapiens
gccctagactgagaa

SEQ ID NO: 570508 - DNA, 15 bp, Homo sapiens
agccctagactgaga

SEQ ID NO: 570509 - DNA, 15 bp, Homo sapiens
aagccctagactgag

SEQ ID NO: 570510 - DNA, 15 bp, Homo sapiens
gaagccctagactga

SEQ ID NO: 570511 - DNA, 15 bp, Homo sapiens
agaagccctagactg

SEQ ID NO: 570512 - DNA, 15 bp, Homo sapiens
cagaagccctagact

SEQ ID NO: 570513 - DNA, 15 bp, Homo sapiens
ccagaagccctagac

SEQ ID NO: 570514 - DNA, 15 bp, Homo sapiens
cccagaagccctaga

SEQ ID NO: 570515 - DNA, 15 bp, Homo sapiens
ccccagaagccctag

SEQ ID NO: 570516 - DNA, 15 bp, Homo sapiens
accccagaagcccta

SEQ ID NO: 570517 - DNA, 15 bp, Homo sapiens
gaccccagaagccct

SEQ ID NO: 570518 - DNA, 15 bp, Homo sapiens
tgaccccagaagccc

SEQ ID NO: 570519 - DNA, 15 bp, Homo sapiens
ttgaccccagaagcc

SEQ ID NO: 570520 - DNA, 15 bp, Homo sapiens
tttgaccccagaagc

SEQ ID NO: 570521 - DNA, 15 bp, Homo sapiens
ttttgaccccagaag

SEQ ID NO: 570522 - DNA, 15 bp, Homo sapiens
cttttgaccccagaa

SEQ ID NO: 570523 - DNA, 15 bp, Homo sapiens
tcttttgaccccaga

SEQ ID NO: 570524 - DNA, 15 bp, Homo sapiens
ttcttttgaccccag

SEQ ID NO: 570525 - DNA, 15 bp, Homo sapiens
tttcttttgacccca

SEQ ID NO: 570526 - DNA, 15 bp, Homo sapiens
ctttcttttgacccc

SEQ ID NO: 570527 - DNA, 15 bp, Homo sapiens
cctttcttttgaccc

SEQ ID NO: 570528 - DNA, 15 bp, Homo sapiens
tcctttcttttgacc

SEQ ID NO: 570529 - DNA, 15 bp, Homo sapiens
gtcctttcttttgac

SEQ ID NO: 570530 - DNA, 15 bp, Homo sapiens
agtcctttcttttga

SEQ ID NO: 570531 - DNA, 15 bp, Homo sapiens
cagtcctttcttttg

SEQ ID NO: 570532 - DNA, 15 bp, Homo sapiens
tcagtcctttctttt

SEQ ID NO: 570533 - DNA, 15 bp, Homo sapiens
ttcagtcctttcttt

SEQ ID NO: 570534 - DNA, 15 bp, Homo sapiens
tttcagtcctttctt

SEQ ID NO: 570535 - DNA, 15 bp, Homo sapiens
atttcagtcctttct

SEQ ID NO: 570536 - DNA, 15 bp, Homo sapiens
tatttcagtcctttc

SEQ ID NO: 570537 - DNA, 15 bp, Homo sapiens
gtatttcagtccttt

SEQ ID NO: 570538 - DNA, 15 bp, Homo sapiens
tgtatttcagtcctt

SEQ ID NO: 570539 - DNA, 15 bp, Homo sapiens
ctgtatttcagtcct

SEQ ID NO: 570540 - DNA, 15 bp, Homo sapiens
actgtatttcagtcc

SEQ ID NO: 570541 - DNA, 15 bp, Homo sapiens
tactgtatttcagtc

SEQ ID NO: 570542 - DNA, 15 bp, Homo sapiens
atactgtatttcagt

SEQ ID NO: 570543 - DNA, 15 bp, Homo sapiens
gatactgtatttcag

SEQ ID NO: 570544 - DNA, 15 bp, Homo sapiens
tgatactgtatttca

SEQ ID NO: 570545 - DNA, 15 bp, Homo sapiens
gtgatactgtatttc

SEQ ID NO: 570546 - DNA, 15 bp, Homo sapiens
ggtgatactgtattt

SEQ ID NO: 570547 - DNA, 15 bp, Homo sapiens
aggtgatactgtatt

SEQ ID NO: 570548 - DNA, 15 bp, Homo sapiens
taggtgatactgtat

SEQ ID NO: 570549 - DNA, 15 bp, Homo sapiens
ataggtgatactgta

SEQ ID NO: 570550 - DNA, 15 bp, Homo sapiens
tataggtgatactgt

SEQ ID NO: 570551 - DNA, 15 bp, Homo sapiens
atataggtgatactg

SEQ ID NO: 570552 - DNA, 15 bp, Homo sapiens
catataggtgatact

SEQ ID NO: 570553 - DNA, 15 bp, Homo sapiens
tcatataggtgatac

SEQ ID NO: 570554 - DNA, 15 bp, Homo sapiens
ttcatataggtgata

SEQ ID NO: 570555 - DNA, 15 bp, Homo sapiens
attcatataggtgat

SEQ ID NO: 570556 - DNA, 15 bp, Homo sapiens
cattcatataggtga

SEQ ID NO: 570557 - DNA, 15 bp, Homo sapiens
acattcatataggtg

SEQ ID NO: 570558 - DNA, 15 bp, Homo sapiens
gacattcatataggt

SEQ ID NO: 570559 - DNA, 15 bp, Homo sapiens
agacattcatatagg

SEQ ID NO: 570560 - DNA, 15 bp, Homo sapiens
cagacattcatatag

SEQ ID NO: 570561 - DNA, 15 bp, Homo sapiens
gcagacattcatata

SEQ ID NO: 570562 - DNA, 15 bp, Homo sapiens
agcagacattcatat

SEQ ID NO: 570563 - DNA, 15 bp, Homo sapiens
gagcagacattcata

SEQ ID NO: 570564 - DNA, 15 bp, Homo sapiens
ggagcagacattcat

SEQ ID NO: 570565 - DNA, 15 bp, Homo sapiens
aggagcagacattca

SEQ ID NO: 570566 - DNA, 15 bp, Homo sapiens
caggagcagacattc

SEQ ID NO: 570567 - DNA, 15 bp, Homo sapiens
tcaggagcagacatt

SEQ ID NO: 570568 - DNA, 15 bp, Homo sapiens
ctcaggagcagacat

SEQ ID NO: 570569 - DNA, 15 bp, Homo sapiens
cctcaggagcagaca

SEQ ID NO: 570570 - DNA, 15 bp, Homo sapiens
ccctcaggagcagac

SEQ ID NO: 570571 - DNA, 15 bp, Homo sapiens
tccctcaggagcaga

SEQ ID NO: 570572 - DNA, 15 bp, Homo sapiens
ttccctcaggagcag

SEQ ID NO: 570573 - DNA, 15 bp, Homo sapiens
cttccctcaggagca

SEQ ID NO: 570574 - DNA, 15 bp, Homo sapiens
acttccctcaggagc

SEQ ID NO: 570575 - DNA, 15 bp, Homo sapiens
aacttccctcaggag

SEQ ID NO: 570576 - DNA, 15 bp, Homo sapiens
taacttccctcagga

SEQ ID NO: 570577 - DNA, 15 bp, Homo sapiens
ttaacttccctcagg

SEQ ID NO: 570578 - DNA, 15 bp, Homo sapiens
gttaacttccctcag

SEQ ID NO: 570579 - DNA, 15 bp, Homo sapiens
tgttaacttccctca

SEQ ID NO: 570580 - DNA, 15 bp, Homo sapiens
ttgttaacttccctc

SEQ ID NO: 570581 - DNA, 15 bp, Homo sapiens
tttgttaacttccct

SEQ ID NO: 570582 - DNA, 15 bp, Homo sapiens
ttttgttaacttccc

SEQ ID NO: 570583 - DNA, 15 bp, Homo sapiens
cttttgttaacttcc

SEQ ID NO: 570584 - DNA, 15 bp, Homo sapiens
gcttttgttaacttc

SEQ ID NO: 570585 - DNA, 15 bp, Homo sapiens
ggcttttgttaactt

SEQ ID NO: 570586 - DNA, 15 bp, Homo sapiens
tggcttttgttaact

SEQ ID NO: 570587 - DNA, 15 bp, Homo sapiens
ctggcttttgttaac

SEQ ID NO: 570588 - DNA, 15 bp, Homo sapiens
tctggcttttgttaa

SEQ ID NO: 570589 - DNA, 15 bp, Homo sapiens
atctggcttttgtta

SEQ ID NO: 570590 - DNA, 15 bp, Homo sapiens
aatctggcttttgtt

SEQ ID NO: 570591 - DNA, 15 bp, Homo sapiens
taatctggcttttgt

SEQ ID NO: 570592 - DNA, 15 bp, Homo sapiens
ctaatctggcttttg

SEQ ID NO: 570593 - DNA, 15 bp, Homo sapiens
tctaatctggctttt

SEQ ID NO: 570594 - DNA, 15 bp, Homo sapiens
atctaatctggcttt

SEQ ID NO: 570595 - DNA, 15 bp, Homo sapiens
tatctaatctggctt

SEQ ID NO: 570596 - DNA, 15 bp, Homo sapiens
gtatctaatctggct

SEQ ID NO: 570597 - DNA, 15 bp, Homo sapiens
agtatctaatctggc

SEQ ID NO: 570598 - DNA, 15 bp, Homo sapiens
cagtatctaatctgg

SEQ ID NO: 570599 - DNA, 15 bp, Homo sapiens
tcagtatctaatctg

SEQ ID NO: 570600 - DNA, 15 bp, Homo sapiens
gtcagtatctaatct

SEQ ID NO: 570601 - DNA, 15 bp, Homo sapiens
agtcagtatctaatc

SEQ ID NO: 570602 - DNA, 15 bp, Homo sapiens
cagtcagtatctaat

SEQ ID NO: 570603 - DNA, 15 bp, Homo sapiens
ccagtcagtatctaa

SEQ ID NO: 570604 - DNA, 15 bp, Homo sapiens
tccagtcagtatcta

SEQ ID NO: 570605 - DNA, 15 bp, Homo sapiens
atccagtcagtatct

SEQ ID NO: 570606 - DNA, 15 bp, Homo sapiens
aatccagtcagtatc

SEQ ID NO: 570607 - DNA, 15 bp, Homo sapiens
aaatccagtcagtat

SEQ ID NO: 570608 - DNA, 15 bp, Homo sapiens
aaaatccagtcagta

SEQ ID NO: 570609 - DNA, 15 bp, Homo sapiens
caaaatccagtcagt

SEQ ID NO: 570610 - DNA, 15 bp, Homo sapiens
ccaaaatccagtcag

SEQ ID NO: 570611 - DNA, 15 bp, Homo sapiens
accaaaatccagtca

SEQ ID NO: 570612 - DNA, 15 bp, Homo sapiens
caccaaaatccagtc

SEQ ID NO: 570613 - DNA, 15 bp, Homo sapiens
acaccaaaatccagt

SEQ ID NO: 570614 - DNA, 15 bp, Homo sapiens
gacaccaaaatccag

SEQ ID NO: 570615 - DNA, 15 bp, Homo sapiens
agacaccaaaatcca

SEQ ID NO: 570616 - DNA, 15 bp, Homo sapiens
gagacaccaaaatcc

SEQ ID NO: 570617 - DNA, 15 bp, Homo sapiens
agagacaccaaaatc

SEQ ID NO: 570618 - DNA, 15 bp, Homo sapiens
gagagacaccaaaat

SEQ ID NO: 570619 - DNA, 15 bp, Homo sapiens
agagagacaccaaaa

SEQ ID NO: 570620 - DNA, 15 bp, Homo sapiens
gagagagacaccaaa

SEQ ID NO: 570621 - DNA, 15 bp, Homo sapiens
tgagagagacaccaa

SEQ ID NO: 570622 - DNA, 15 bp, Homo sapiens
ttgagagagacacca

SEQ ID NO: 570623 - DNA, 15 bp, Homo sapiens
cttgagagagacacc

SEQ ID NO: 570624 - DNA, 15 bp, Homo sapiens
acttgagagagacac

SEQ ID NO: 570625 - DNA, 15 bp, Homo sapiens
cacttgagagagaca

SEQ ID NO: 570626 - DNA, 15 bp, Homo sapiens
ccacttgagagagac

SEQ ID NO: 570627 - DNA, 15 bp, Homo sapiens
tccacttgagagaga

SEQ ID NO: 570628 - DNA, 15 bp, Homo sapiens
ctccacttgagagag

SEQ ID NO: 570629 - DNA, 15 bp, Homo sapiens
tctccacttgagaga

SEQ ID NO: 570630 - DNA, 15 bp, Homo sapiens
ttctccacttgagag

SEQ ID NO: 570631 - DNA, 15 bp, Homo sapiens
cttctccacttgaga

SEQ ID NO: 570632 - DNA, 15 bp, Homo sapiens
tcttctccacttgag

SEQ ID NO: 570633 - DNA, 15 bp, Homo sapiens
atcttctccacttga

SEQ ID NO: 570634 - DNA, 15 bp, Homo sapiens
catcttctccacttg

SEQ ID NO: 570635 - DNA, 15 bp, Homo sapiens
acatcttctccactt

SEQ ID NO: 570636 - DNA, 15 bp, Homo sapiens
cacatcttctccact

SEQ ID NO: 570637 - DNA, 15 bp, Homo sapiens
tcacatcttctccac

SEQ ID NO: 570638 - DNA, 15 bp, Homo sapiens
ttcacatcttctcca

SEQ ID NO: 570639 - DNA, 15 bp, Homo sapiens
attcacatcttctcc

SEQ ID NO: 570640 - DNA, 15 bp, Homo sapiens
tattcacatcttctc

SEQ ID NO: 570641 - DNA, 15 bp, Homo sapiens
ctattcacatcttct

SEQ ID NO: 570642 - DNA, 15 bp, Homo sapiens
tctattcacatcttc

SEQ ID NO: 570643 - DNA, 15 bp, Homo sapiens
ttctattcacatctt

SEQ ID NO: 570644 - DNA, 15 bp, Homo sapiens
tttctattcacatct

SEQ ID NO: 570645 - DNA, 15 bp, Homo sapiens
gtttctattcacatc

SEQ ID NO: 570646 - DNA, 15 bp, Homo sapiens
tgtttctattcacat

SEQ ID NO: 570647 - DNA, 15 bp, Homo sapiens
ctgtttctattcaca

SEQ ID NO: 570648 - DNA, 15 bp, Homo sapiens
tctgtttctattcac

SEQ ID NO: 570649 - DNA, 15 bp, Homo sapiens
ttctgtttctattca

SEQ ID NO: 570650 - DNA, 15 bp, Homo sapiens
cttctgtttctattc

SEQ ID NO: 570651 - DNA, 15 bp, Homo sapiens
acttctgtttctatt

SEQ ID NO: 570652 - DNA, 15 bp, Homo sapiens
aacttctgtttctat

SEQ ID NO: 570653 - DNA, 15 bp, Homo sapiens
aaacttctgtttcta

SEQ ID NO: 570654 - DNA, 15 bp, Homo sapiens
taaacttctgtttct

SEQ ID NO: 570655 - DNA, 15 bp, Homo sapiens
gtaaacttctgtttc

SEQ ID NO: 570656 - DNA, 15 bp, Homo sapiens
tgtaaacttctgttt

SEQ ID NO: 570657 - DNA, 15 bp, Homo sapiens
ttgtaaacttctgtt

SEQ ID NO: 570658 - DNA, 15 bp, Homo sapiens
tttgtaaacttctgt

SEQ ID NO: 570659 - DNA, 15 bp, Homo sapiens
ttttgtaaacttctg

SEQ ID NO: 570660 - DNA, 15 bp, Homo sapiens
gttttgtaaacttct

SEQ ID NO: 570661 - DNA, 15 bp, Homo sapiens
tgttttgtaaacttc

SEQ ID NO: 570662 - DNA, 15 bp, Homo sapiens
gtgttttgtaaactt

SEQ ID NO: 570663 - DNA, 15 bp, Homo sapiens
agtgttttgtaaact

SEQ ID NO: 570664 - DNA, 15 bp, Homo sapiens
tagtgttttgtaaac

SEQ ID NO: 570665 - DNA, 15 bp, Homo sapiens
atagtgttttgtaaa

SEQ ID NO: 570666 - DNA, 15 bp, Homo sapiens
tatagtgttttgtaa

SEQ ID NO: 570667 - DNA, 15 bp, Homo sapiens
ctatagtgttttgta

SEQ ID NO: 570668 - DNA, 15 bp, Homo sapiens
gctatagtgttttgt

SEQ ID NO: 570669 - DNA, 15 bp, Homo sapiens
ggctatagtgttttg

SEQ ID NO: 570670 - DNA, 15 bp, Homo sapiens
aggctatagtgtttt

SEQ ID NO: 570671 - DNA, 15 bp, Homo sapiens
taggctatagtgttt

SEQ ID NO: 570672 - DNA, 15 bp, Homo sapiens
ttaggctatagtgtt

SEQ ID NO: 570673 - DNA, 15 bp, Homo sapiens
gttaggctatagtgt

SEQ ID NO: 570674 - DNA, 15 bp, Homo sapiens
tgttaggctatagtg

SEQ ID NO: 570675 - DNA, 15 bp, Homo sapiens
ttgttaggctatagt

SEQ ID NO: 570676 - DNA, 15 bp, Homo sapiens
tttgttaggctatag

SEQ ID NO: 570677 - DNA, 15 bp, Homo sapiens
atttgttaggctata

SEQ ID NO: 570678 - DNA, 15 bp, Homo sapiens
tatttgttaggctat

SEQ ID NO: 570679 - DNA, 15 bp, Homo sapiens
ctatttgttaggcta

SEQ ID NO: 570680 - DNA, 15 bp, Homo sapiens
cctatttgttaggct

SEQ ID NO: 570681 - DNA, 15 bp, Homo sapiens
acctatttgttaggc

SEQ ID NO: 570682 - DNA, 15 bp, Homo sapiens
tacctatttgttagg

SEQ ID NO: 570683 - DNA, 15 bp, Homo sapiens
ttacctatttgttag

SEQ ID NO: 570684 - DNA, 15 bp, Homo sapiens
tttacctatttgtta

SEQ ID NO: 570685 - DNA, 15 bp, Homo sapiens
ttttacctatttgtt

SEQ ID NO: 570686 - DNA, 15 bp, Homo sapiens
cttttacctatttgt

SEQ ID NO: 570687 - DNA, 15 bp, Homo sapiens
gcttttacctatttg

SEQ ID NO: 570688 - DNA, 15 bp, Homo sapiens
agcttttacctattt

SEQ ID NO: 570689 - DNA, 15 bp, Homo sapiens
cagcttttacctatt

SEQ ID NO: 570690 - DNA, 15 bp, Homo sapiens
acagcttttacctat

SEQ ID NO: 570691 - DNA, 15 bp, Homo sapiens
cacagcttttaccta

SEQ ID NO: 570692 - DNA, 15 bp, Homo sapiens
tcacagcttttacct

SEQ ID NO: 570693 - DNA, 15 bp, Homo sapiens
ctttgcatatgtggg

SEQ ID NO: 570694 - DNA, 15 bp, Homo sapiens
tctttgcatatgtgg

SEQ ID NO: 570695 - DNA, 15 bp, Homo sapiens
ttctttgcatatgtg

SEQ ID NO: 570696 - DNA, 15 bp, Homo sapiens
tttctttgcatatgt

SEQ ID NO: 570697 - DNA, 15 bp, Homo sapiens
atttctttgcatatg

SEQ ID NO: 570698 - DNA, 15 bp, Homo sapiens
tatttctttgcatat

SEQ ID NO: 570699 - DNA, 15 bp, Homo sapiens
atatttctttgcata

SEQ ID NO: 570700 - DNA, 15 bp, Homo sapiens
aatatttctttgcat

SEQ ID NO: 570701 - DNA, 15 bp, Homo sapiens
aaatatttctttgca

SEQ ID NO: 570702 - DNA, 15 bp, Homo sapiens
taaatatttctttgc

SEQ ID NO: 570703 - DNA, 15 bp, Homo sapiens
ttaaatatttctttg

SEQ ID NO: 570704 - DNA, 15 bp, Homo sapiens
cttaaatatttcttt

SEQ ID NO: 570705 - DNA, 15 bp, Homo sapiens
ccttaaatatttctt

SEQ ID NO: 570706 - DNA, 15 bp, Homo sapiens
tccttaaatatttct

SEQ ID NO: 570707 - DNA, 15 bp, Homo sapiens
ctccttaaatatttc

SEQ ID NO: 570708 - DNA, 15 bp, Homo sapiens
tctccttaaatattt

SEQ ID NO: 570709 - DNA, 15 bp, Homo sapiens
ctctccttaaatatt

SEQ ID NO: 570710 - DNA, 15 bp, Homo sapiens
tctctccttaaatat

SEQ ID NO: 570711 - DNA, 15 bp, Homo sapiens
atctctccttaaata

SEQ ID NO: 570712 - DNA, 15 bp, Homo sapiens
aatctctccttaaat

SEQ ID NO: 570713 - DNA, 15 bp, Homo sapiens
taatctctccttaaa

SEQ ID NO: 570714 - DNA, 15 bp, Homo sapiens
gtaatctctccttaa

SEQ ID NO: 570715 - DNA, 15 bp, Homo sapiens
tgtaatctctcctta

SEQ ID NO: 570716 - DNA, 15 bp, Homo sapiens
atgtaatctctcctt

SEQ ID NO: 570717 - DNA, 15 bp, Homo sapiens
catgtaatctctcct

SEQ ID NO: 570718 - DNA, 15 bp, Homo sapiens
tcatgtaatctctcc

SEQ ID NO: 570719 - DNA, 15 bp, Homo sapiens
ttcatgtaatctctc

SEQ ID NO: 570720 - DNA, 15 bp, Homo sapiens
tttcatgtaatctct

SEQ ID NO: 570721 - DNA, 15 bp, Homo sapiens
atttcatgtaatctc

SEQ ID NO: 570722 - DNA, 15 bp, Homo sapiens
gatttcatgtaatct

SEQ ID NO: 570723 - DNA, 15 bp, Homo sapiens
tgatttcatgtaatc

SEQ ID NO: 570724 - DNA, 15 bp, Homo sapiens
ttgatttcatgtaat

SEQ ID NO: 570725 - DNA, 15 bp, Homo sapiens
tttgatttcatgtaa

SEQ ID NO: 570726 - DNA, 15 bp, Homo sapiens
ctttgatttcatgta

SEQ ID NO: 570727 - DNA, 15 bp, Homo sapiens
tctttgatttcatgt

SEQ ID NO: 570728 - DNA, 15 bp, Homo sapiens
ctctttgatttcatg

SEQ ID NO: 570729 - DNA, 15 bp, Homo sapiens
tctctttgatttcat

SEQ ID NO: 570730 - DNA, 15 bp, Homo sapiens
ctctctttgatttca

SEQ ID NO: 570731 - DNA, 15 bp, Homo sapiens
cctctctttgatttc

SEQ ID NO: 570732 - DNA, 15 bp, Homo sapiens
ccctctctttgattt

SEQ ID NO: 570733 - DNA, 15 bp, Homo sapiens
tccctctctttgatt

SEQ ID NO: 570734 - DNA, 15 bp, Homo sapiens
ctccctctctttgat

SEQ ID NO: 570735 - DNA, 15 bp, Homo sapiens
tctccctctctttga

SEQ ID NO: 570736 - DNA, 15 bp, Homo sapiens
atctccctctctttg

SEQ ID NO: 570737 - DNA, 15 bp, Homo sapiens
tatctccctctcttt

SEQ ID NO: 570738 - DNA, 15 bp, Homo sapiens
ctatctccctctctt

SEQ ID NO: 570739 - DNA, 15 bp, Homo sapiens
tctatctccctctct

SEQ ID NO: 570740 - DNA, 15 bp, Homo sapiens
atctatctccctctc

SEQ ID NO: 570741 - DNA, 15 bp, Homo sapiens
aatctatctccctct

SEQ ID NO: 570742 - DNA, 15 bp, Homo sapiens
gaatctatctccctc

SEQ ID NO: 570743 - DNA, 15 bp, Homo sapiens
tgaatctatctccct

SEQ ID NO: 570744 - DNA, 15 bp, Homo sapiens
atgaatctatctccc

SEQ ID NO: 570745 - DNA, 15 bp, Homo sapiens
catgaatctatctcc

SEQ ID NO: 570746 - DNA, 15 bp, Homo sapiens
tcatgaatctatctc

SEQ ID NO: 570747 - DNA, 15 bp, Homo sapiens
ttcatgaatctatct

SEQ ID NO: 570748 - DNA, 15 bp, Homo sapiens
cttcatgaatctatc

SEQ ID NO: 570749 - DNA, 15 bp, Homo sapiens
tcttcatgaatctat

SEQ ID NO: 570750 - DNA, 15 bp, Homo sapiens
ctcttcatgaatcta

SEQ ID NO: 570751 - DNA, 15 bp, Homo sapiens
cctcttcatgaatct

SEQ ID NO: 570752 - DNA, 15 bp, Homo sapiens
gcctcttcatgaatc

SEQ ID NO: 570753 - DNA, 15 bp, Homo sapiens
agcctcttcatgaat

SEQ ID NO: 570754 - DNA, 15 bp, Homo sapiens
cagcctcttcatgaa

SEQ ID NO: 570755 - DNA, 15 bp, Homo sapiens
tcagcctcttcatga

SEQ ID NO: 570756 - DNA, 15 bp, Homo sapiens
ttcagcctcttcatg

SEQ ID NO: 570757 - DNA, 15 bp, Homo sapiens
tttcagcctcttcat

SEQ ID NO: 570758 - DNA, 15 bp, Homo sapiens
atttcagcctcttca

SEQ ID NO: 570759 - DNA, 15 bp, Homo sapiens
tatttcagcctcttc

SEQ ID NO: 570760 - DNA, 15 bp, Homo sapiens
gtatttcagcctctt

SEQ ID NO: 570761 - DNA, 15 bp, Homo sapiens
agtatttcagcctct

SEQ ID NO: 570762 - DNA, 15 bp, Homo sapiens
gagtatttcagcctc

SEQ ID NO: 570763 - DNA, 15 bp, Homo sapiens
tgagtatttcagcct

SEQ ID NO: 570764 - DNA, 15 bp, Homo sapiens
ttgagtatttcagcc

SEQ ID NO: 570765 - DNA, 15 bp, Homo sapiens
tttgagtatttcagc

SEQ ID NO: 570766 - DNA, 15 bp, Homo sapiens
ctttgagtatttcag

SEQ ID NO: 570767 - DNA, 15 bp, Homo sapiens
cctttgagtatttca

SEQ ID NO: 570768 - DNA, 15 bp, Homo sapiens
acctttgagtatttc

SEQ ID NO: 570769 - DNA, 15 bp, Homo sapiens
cacctttgagtattt

SEQ ID NO: 570770 - DNA, 15 bp, Homo sapiens
tcacctttgagtatt

SEQ ID NO: 570771 - DNA, 15 bp, Homo sapiens
ctcacctttgagtat

SEQ ID NO: 570772 - DNA, 15 bp, Homo sapiens
actcacctttgagta

SEQ ID NO: 570773 - DNA, 15 bp, Homo sapiens
tactcacctttgagt

SEQ ID NO: 570774 - DNA, 15 bp, Homo sapiens
ctactcacctttgag

SEQ ID NO: 570775 - DNA, 15 bp, Homo sapiens
tctactcacctttga

SEQ ID NO: 570776 - DNA, 15 bp, Homo sapiens
ttctactcacctttg

SEQ ID NO: 570777 - DNA, 15 bp, Homo sapiens
tttctactcaccttt

SEQ ID NO: 570778 - DNA, 15 bp, Homo sapiens
ctttctactcacctt

SEQ ID NO: 570779 - DNA, 15 bp, Homo sapiens
cctttctactcacct

SEQ ID NO: 570780 - DNA, 15 bp, Homo sapiens
ccctttctactcacc

SEQ ID NO: 570781 - DNA, 15 bp, Homo sapiens
tccctttctactcac

SEQ ID NO: 570782 - DNA, 15 bp, Homo sapiens
ttccctttctactca

SEQ ID NO: 570783 - DNA, 15 bp, Homo sapiens
cttccctttctactc

SEQ ID NO: 570784 - DNA, 15 bp, Homo sapiens
tcttccctttctact

SEQ ID NO: 570785 - DNA, 15 bp, Homo sapiens
ttcttccctttctac

SEQ ID NO: 570786 - DNA, 15 bp, Homo sapiens
cttcttccctttcta

SEQ ID NO: 570787 - DNA, 15 bp, Homo sapiens
gcttcttccctttct

SEQ ID NO: 570788 - DNA, 15 bp, Homo sapiens
tgcttcttccctttc

SEQ ID NO: 570789 - DNA, 15 bp, Homo sapiens
ctgcttcttcccttt

SEQ ID NO: 570790 - DNA, 15 bp, Homo sapiens
tctgcttcttccctt

SEQ ID NO: 570791 - DNA, 15 bp, Homo sapiens
ctctgcttcttccct

SEQ ID NO: 570792 - DNA, 15 bp, Homo sapiens
tctctgcttcttccc

SEQ ID NO: 570793 - DNA, 15 bp, Homo sapiens
ttctctgcttcttcc

SEQ ID NO: 570794 - DNA, 15 bp, Homo sapiens
gttctctgcttcttc

SEQ ID NO: 570795 - DNA, 15 bp, Homo sapiens
tgttctctgcttctt

SEQ ID NO: 570796 - DNA, 15 bp, Homo sapiens
ttgttctctgcttct

SEQ ID NO: 570797 - DNA, 15 bp, Homo sapiens
tttgttctctgcttc

SEQ ID NO: 570798 - DNA, 15 bp, Homo sapiens
atttgttctctgctt

SEQ ID NO: 570799 - DNA, 15 bp, Homo sapiens
tatttgttctctgct

SEQ ID NO: 570800 - DNA, 15 bp, Homo sapiens
gtatttgttctctgc

SEQ ID NO: 570801 - DNA, 15 bp, Homo sapiens
tgtatttgttctctg

SEQ ID NO: 570802 - DNA, 15 bp, Homo sapiens
ttgtatttgttctct

SEQ ID NO: 570803 - DNA, 15 bp, Homo sapiens
cttgtatttgttctc

SEQ ID NO: 570804 - DNA, 15 bp, Homo sapiens
gcttgtatttgttct

SEQ ID NO: 570805 - DNA, 15 bp, Homo sapiens
ggcttgtatttgttc

SEQ ID NO: 570806 - DNA, 15 bp, Homo sapiens
tggcttgtatttgtt

SEQ ID NO: 570807 - DNA, 15 bp, Homo sapiens
ttggcttgtatttgt

SEQ ID NO: 570808 - DNA, 15 bp, Homo sapiens
gttggcttgtatttg

SEQ ID NO: 570809 - DNA, 15 bp, Homo sapiens
tgttggcttgtattt

SEQ ID NO: 570810 - DNA, 15 bp, Homo sapiens
ctgttggcttgtatt

SEQ ID NO: 570811 - DNA, 15 bp, Homo sapiens
tctgttggcttgtat

SEQ ID NO: 570812 - DNA, 15 bp, Homo sapiens
ctctgttggcttgta

SEQ ID NO: 570813 - DNA, 15 bp, Homo sapiens
tctctgttggcttgt

SEQ ID NO: 570814 - DNA, 15 bp, Homo sapiens
atctctgttggcttg

SEQ ID NO: 570815 - DNA, 15 bp, Homo sapiens
aatctctgttggctt

SEQ ID NO: 570816 - DNA, 15 bp, Homo sapiens
taatctctgttggct

SEQ ID NO: 570817 - DNA, 15 bp, Homo sapiens
ttaatctctgttggc

SEQ ID NO: 570818 - DNA, 15 bp, Homo sapiens
attaatctctgttgg

SEQ ID NO: 570819 - DNA, 15 bp, Homo sapiens
tattaatctctgttg

SEQ ID NO: 570820 - DNA, 15 bp, Homo sapiens
gtattaatctctgtt

SEQ ID NO: 570821 - DNA, 15 bp, Homo sapiens
agtattaatctctgt

SEQ ID NO: 570822 - DNA, 15 bp, Homo sapiens
cagtattaatctctg

SEQ ID NO: 570823 - DNA, 15 bp, Homo sapiens
tcagtattaatctct

SEQ ID NO: 570824 - DNA, 15 bp, Homo sapiens
ttcagtattaatctc

SEQ ID NO: 570825 - DNA, 15 bp, Homo sapiens
tttcagtattaatct

SEQ ID NO: 570826 - DNA, 15 bp, Homo sapiens
atttcagtattaatc

SEQ ID NO: 570827 - DNA, 15 bp, Homo sapiens
tatttcagtattaat

SEQ ID NO: 570828 - DNA, 15 bp, Homo sapiens
ctatttcagtattaa

SEQ ID NO: 570829 - DNA, 15 bp, Homo sapiens
tctatttcagtatta

SEQ ID NO: 570830 - DNA, 15 bp, Homo sapiens
ttctatttcagtatt

SEQ ID NO: 570831 - DNA, 15 bp, Homo sapiens
tttctatttcagtat

SEQ ID NO: 570832 - DNA, 15 bp, Homo sapiens
ttttctatttcagta

SEQ ID NO: 570833 - DNA, 15 bp, Homo sapiens
attttctatttcagt

SEQ ID NO: 570834 - DNA, 15 bp, Homo sapiens
gattttctatttcag

SEQ ID NO: 570835 - DNA, 15 bp, Homo sapiens
tgattttctatttca

SEQ ID NO: 570836 - DNA, 15 bp, Homo sapiens
gtgattttctatttc

SEQ ID NO: 570837 - DNA, 15 bp, Homo sapiens
tgtgattttctattt

SEQ ID NO: 570838 - DNA, 15 bp, Homo sapiens
ttgtgattttctatt

SEQ ID NO: 570839 - DNA, 15 bp, Homo sapiens
tttgtgattttctat

SEQ ID NO: 570840 - DNA, 15 bp, Homo sapiens
gtttgtgattttcta

SEQ ID NO: 570841 - DNA, 15 bp, Homo sapiens
tgtttgtgattttct

SEQ ID NO: 570842 - DNA, 15 bp, Homo sapiens
ctgtttgtgattttc

SEQ ID NO: 570843 - DNA, 15 bp, Homo sapiens
gctgtttgtgatttt

SEQ ID NO: 570844 - DNA, 15 bp, Homo sapiens
tgctgtttgtgattt

SEQ ID NO: 570845 - DNA, 15 bp, Homo sapiens
ttgctgtttgtgatt

SEQ ID NO: 570846 - DNA, 15 bp, Homo sapiens
cttgctgtttgtgat

SEQ ID NO: 570847 - DNA, 15 bp, Homo sapiens
tcttgctgtttgtga

SEQ ID NO: 570848 - DNA, 15 bp, Homo sapiens
ctcttgctgtttgtg

SEQ ID NO: 570849 - DNA, 15 bp, Homo sapiens
tctcttgctgtttgt

SEQ ID NO: 570850 - DNA, 15 bp, Homo sapiens
atctcttgctgtttg

SEQ ID NO: 570851 - DNA, 15 bp, Homo sapiens
catctcttgctgttt

SEQ ID NO: 570852 - DNA, 15 bp, Homo sapiens
gcatctcttgctgtt

SEQ ID NO: 570853 - DNA, 15 bp, Homo sapiens
agcatctcttgctgt

SEQ ID NO: 570854 - DNA, 15 bp, Homo sapiens
cagcatctcttgctg

SEQ ID NO: 570855 - DNA, 15 bp, Homo sapiens
tcagcatctcttgct

SEQ ID NO: 570856 - DNA, 15 bp, Homo sapiens
ctcagcatctcttgc

SEQ ID NO: 570857 - DNA, 15 bp, Homo sapiens
cctcagcatctcttg

SEQ ID NO: 570858 - DNA, 15 bp, Homo sapiens
gcctcagcatctctt

SEQ ID NO: 570859 - DNA, 15 bp, Homo sapiens
tgcctcagcatctct

SEQ ID NO: 570860 - DNA, 15 bp, Homo sapiens
gtgcctcagcatctc

SEQ ID NO: 570861 - DNA, 15 bp, Homo sapiens
cgtgcctcagcatct

SEQ ID NO: 570862 - DNA, 15 bp, Homo sapiens
gcgtgcctcagcatc

SEQ ID NO: 570863 - DNA, 15 bp, Homo sapiens
tgcgtgcctcagcat

SEQ ID NO: 570864 - DNA, 15 bp, Homo sapiens
ctgcgtgcctcagca

SEQ ID NO: 570865 - DNA, 15 bp, Homo sapiens
cctgcgtgcctcagc

SEQ ID NO: 570866 - DNA, 15 bp, Homo sapiens
ccctgcgtgcctcag

SEQ ID NO: 570867 - DNA, 15 bp, Homo sapiens
cccctgcgtgcctca

SEQ ID NO: 570868 - DNA, 15 bp, Homo sapiens
tcccctgcgtgcctc

SEQ ID NO: 570869 - DNA, 15 bp, Homo sapiens
ctcccctgcgtgcct

SEQ ID NO: 570870 - DNA, 15 bp, Homo sapiens
cctcccctgcgtgcc

SEQ ID NO: 570871 - DNA, 15 bp, Homo sapiens
tcctcccctgcgtgc

SEQ ID NO: 570872 - DNA, 15 bp, Homo sapiens
ctcctcccctgcgtg

SEQ ID NO: 570873 - DNA, 15 bp, Homo sapiens
tctcctcccctgcgt

SEQ ID NO: 570874 - DNA, 15 bp, Homo sapiens
ctctcctcccctgcg

SEQ ID NO: 570875 - DNA, 15 bp, Homo sapiens
tctctcctcccctgc

SEQ ID NO: 570876 - DNA, 15 bp, Homo sapiens
ctctctcctcccctg

SEQ ID NO: 570877 - DNA, 15 bp, Homo sapiens
tctctctcctcccct

SEQ ID NO: 570878 - DNA, 15 bp, Homo sapiens
ctctctctcctcccc

SEQ ID NO: 570879 - DNA, 15 bp, Homo sapiens
tctctctctcctccc

SEQ ID NO: 570880 - DNA, 15 bp, Homo sapiens
ttctctctctcctcc

SEQ ID NO: 570881 - DNA, 15 bp, Homo sapiens
attctctctctcctc

SEQ ID NO: 570882 - DNA, 15 bp, Homo sapiens
tattctctctctcct

SEQ ID NO: 570883 - DNA, 15 bp, Homo sapiens
ctattctctctctcc

SEQ ID NO: 570884 - DNA, 15 bp, Homo sapiens
gctattctctctctc

SEQ ID NO: 570885 - DNA, 15 bp, Homo sapiens
ggctattctctctct

SEQ ID NO: 570886 - DNA, 15 bp, Homo sapiens
gggctattctctctc

SEQ ID NO: 570887 - DNA, 15 bp, Homo sapiens
tgggctattctctct

SEQ ID NO: 570888 - DNA, 15 bp, Homo sapiens
ttgggctattctctc

SEQ ID NO: 570889 - DNA, 15 bp, Homo sapiens
cttgggctattctct

SEQ ID NO: 570890 - DNA, 15 bp, Homo sapiens
tcttgggctattctc

SEQ ID NO: 570891 - DNA, 15 bp, Homo sapiens
ctcttgggctattct

SEQ ID NO: 570892 - DNA, 15 bp, Homo sapiens
tctcttgggctattc

SEQ ID NO: 570893 - DNA, 15 bp, Homo sapiens
ctctcttgggctatt

SEQ ID NO: 570894 - DNA, 15 bp, Homo sapiens
cctctcttgggctat

SEQ ID NO: 570895 - DNA, 15 bp, Homo sapiens
gcctctcttgggcta

SEQ ID NO: 570896 - DNA, 15 bp, Homo sapiens
tgcctctcttgggct

SEQ ID NO: 570897 - DNA, 15 bp, Homo sapiens
ctgcctctcttgggc

SEQ ID NO: 570898 - DNA, 15 bp, Homo sapiens
tctgcctctcttggg

SEQ ID NO: 570899 - DNA, 15 bp, Homo sapiens
ttctgcctctcttgg

SEQ ID NO: 570900 - DNA, 15 bp, Homo sapiens
tttctgcctctcttg

SEQ ID NO: 570901 - DNA, 15 bp, Homo sapiens
ctttctgcctctctt

SEQ ID NO: 570902 - DNA, 15 bp, Homo sapiens
cctttctgcctctct

SEQ ID NO: 570903 - DNA, 15 bp, Homo sapiens
tcctttctgcctctc

SEQ ID NO: 570904 - DNA, 15 bp, Homo sapiens
ttcctttctgcctct

SEQ ID NO: 570905 - DNA, 15 bp, Homo sapiens
tttcctttctgcctc

SEQ ID NO: 570906 - DNA, 15 bp, Homo sapiens
atttcctttctgcct

SEQ ID NO: 570907 - DNA, 15 bp, Homo sapiens
catttcctttctgcc

SEQ ID NO: 570908 - DNA, 15 bp, Homo sapiens
gcatttcctttctgc

SEQ ID NO: 570909 - DNA, 15 bp, Homo sapiens
tgcatttcctttctg

SEQ ID NO: 570910 - DNA, 15 bp, Homo sapiens
ctgcatttcctttct

SEQ ID NO: 570911 - DNA, 15 bp, Homo sapiens
tctgcatttcctttc

SEQ ID NO: 570912 - DNA, 15 bp, Homo sapiens
ttctgcatttccttt

SEQ ID NO: 570913 - DNA, 15 bp, Homo sapiens
tttctgcatttcctt

SEQ ID NO: 570914 - DNA, 15 bp, Homo sapiens
atttctgcatttcct

SEQ ID NO: 570915 - DNA, 15 bp, Homo sapiens
catttctgcatttcc

SEQ ID NO: 570916 - DNA, 15 bp, Homo sapiens
tcatttctgcatttc

SEQ ID NO: 570917 - DNA, 15 bp, Homo sapiens
ctcatttctgcattt

SEQ ID NO: 570918 - DNA, 15 bp, Homo sapiens
tctcatttctgcatt

SEQ ID NO: 570919 - DNA, 15 bp, Homo sapiens
ttctcatttctgcat

SEQ ID NO: 570920 - DNA, 15 bp, Homo sapiens
tttctcatttctgca

SEQ ID NO: 570921 - DNA, 15 bp, Homo sapiens
atttctcatttctgc

SEQ ID NO: 570922 - DNA, 15 bp, Homo sapiens
catttctcatttctg

SEQ ID NO: 570923 - DNA, 15 bp, Homo sapiens
acatttctcatttct

SEQ ID NO: 570924 - DNA, 15 bp, Homo sapiens
cacatttctcatttc

SEQ ID NO: 570925 - DNA, 15 bp, Homo sapiens
tcacatttctcattt

SEQ ID NO: 570926 - DNA, 15 bp, Homo sapiens
ctcacatttctcatt

SEQ ID NO: 570927 - DNA, 15 bp, Homo sapiens
tctcacatttctcat

SEQ ID NO: 570928 - DNA, 15 bp, Homo sapiens
atctcacatttctca

SEQ ID NO: 570929 - DNA, 15 bp, Homo sapiens
tatctcacatttctc

SEQ ID NO: 570930 - DNA, 15 bp, Homo sapiens
ttatctcacatttct

SEQ ID NO: 570931 - DNA, 15 bp, Homo sapiens
tttatctcacatttc

SEQ ID NO: 570932 - DNA, 15 bp, Homo sapiens
ttttatctcacattt

SEQ ID NO: 570933 - DNA, 15 bp, Homo sapiens
tttttatctcacatt

SEQ ID NO: 570934 - DNA, 15 bp, Homo sapiens
ctttttatctcacat

SEQ ID NO: 570935 - DNA, 15 bp, Homo sapiens
actttttatctcaca

SEQ ID NO: 570936 - DNA, 15 bp, Homo sapiens
tactttttatctcac

SEQ ID NO: 570937 - DNA, 15 bp, Homo sapiens
ctactttttatctca

SEQ ID NO: 570938 - DNA, 15 bp, Homo sapiens
tctactttttatctc

SEQ ID NO: 570939 - DNA, 15 bp, Homo sapiens
ttctactttttatct

SEQ ID NO: 570940 - DNA, 15 bp, Homo sapiens
tttctactttttatc

SEQ ID NO: 570941 - DNA, 15 bp, Homo sapiens
gtttctactttttat

SEQ ID NO: 570942 - DNA, 15 bp, Homo sapiens
tgtttctacttttta

SEQ ID NO: 570943 - DNA, 15 bp, Homo sapiens
ctgtttctacttttt

SEQ ID NO: 570944 - DNA, 15 bp, Homo sapiens
gctgtttctactttt

SEQ ID NO: 570945 - DNA, 15 bp, Homo sapiens
tgctgtttctacttt

SEQ ID NO: 570946 - DNA, 15 bp, Homo sapiens
ctgctgtttctactt

SEQ ID NO: 570947 - DNA, 15 bp, Homo sapiens
tctgctgtttctact

SEQ ID NO: 570948 - DNA, 15 bp, Homo sapiens
ttctgctgtttctac

SEQ ID NO: 570949 - DNA, 15 bp, Homo sapiens
tttctgctgtttcta

SEQ ID NO: 570950 - DNA, 15 bp, Homo sapiens
ctttctgctgtttct

SEQ ID NO: 570951 - DNA, 15 bp, Homo sapiens
cctttctgctgtttc

SEQ ID NO: 570952 - DNA, 15 bp, Homo sapiens
tcctttctgctgttt

SEQ ID NO: 570953 - DNA, 15 bp, Homo sapiens
ctcctttctgctgtt

SEQ ID NO: 570954 - DNA, 15 bp, Homo sapiens
cctcctttctgctgt

SEQ ID NO: 570955 - DNA, 15 bp, Homo sapiens
gcctcctttctgctg

SEQ ID NO: 570956 - DNA, 15 bp, Homo sapiens
ggcctcctttctgct

SEQ ID NO: 570957 - DNA, 15 bp, Homo sapiens
tggcctcctttctgc

SEQ ID NO: 570958 - DNA, 15 bp, Homo sapiens
ctggcctcctttctg

SEQ ID NO: 570959 - DNA, 15 bp, Homo sapiens
tctggcctcctttct

SEQ ID NO: 570960 - DNA, 15 bp, Homo sapiens
gtctggcctcctttc

SEQ ID NO: 570961 - DNA, 15 bp, Homo sapiens
agtctggcctccttt

SEQ ID NO: 570962 - DNA, 15 bp, Homo sapiens
gagtctggcctcctt

SEQ ID NO: 570963 - DNA, 15 bp, Homo sapiens
tgagtctggcctcct

SEQ ID NO: 570964 - DNA, 15 bp, Homo sapiens
ctgagtctggcctcc

SEQ ID NO: 570965 - DNA, 15 bp, Homo sapiens
tctgagtctggcctc

SEQ ID NO: 570966 - DNA, 15 bp, Homo sapiens
ttctgagtctggcct

SEQ ID NO: 570967 - DNA, 15 bp, Homo sapiens
tttctgagtctggcc

SEQ ID NO: 570968 - DNA, 15 bp, Homo sapiens
ttttctgagtctggc

SEQ ID NO: 570969 - DNA, 15 bp, Homo sapiens
tttttctgagtctgg

SEQ ID NO: 570970 - DNA, 15 bp, Homo sapiens
ttttttctgagtctg

SEQ ID NO: 570971 - DNA, 15 bp, Homo sapiens
cttttttctgagtct

SEQ ID NO: 570972 - DNA, 15 bp, Homo sapiens
ccttttttctgagtc

SEQ ID NO: 570973 - DNA, 15 bp, Homo sapiens
accttttttctgagt

SEQ ID NO: 570974 - DNA, 15 bp, Homo sapiens
caccttttttctgag

SEQ ID NO: 570975 - DNA, 15 bp, Homo sapiens
tcaccttttttctga

SEQ ID NO: 570976 - DNA, 15 bp, Homo sapiens
ttcaccttttttctg

SEQ ID NO: 570977 - DNA, 15 bp, Homo sapiens
tttcaccttttttct

SEQ ID NO: 570978 - DNA, 15 bp, Homo sapiens
atttcaccttttttc

SEQ ID NO: 570979 - DNA, 15 bp, Homo sapiens
aatttcacctttttt

SEQ ID NO: 570980 - DNA, 15 bp, Homo sapiens
aaatttcaccttttt

SEQ ID NO: 570981 - DNA, 15 bp, Homo sapiens
taaatttcacctttt

SEQ ID NO: 570982 - DNA, 15 bp, Homo sapiens
ttaaatttcaccttt

SEQ ID NO: 570983 - DNA, 15 bp, Homo sapiens
tttaaatttcacctt

SEQ ID NO: 570984 - DNA, 15 bp, Homo sapiens
ttttaaatttcacct

SEQ ID NO: 570985 - DNA, 15 bp, Homo sapiens
gttttaaatttcacc

SEQ ID NO: 570986 - DNA, 15 bp, Homo sapiens
cgttttaaatttcac

SEQ ID NO: 570987 - DNA, 15 bp, Homo sapiens
tcgttttaaatttca

SEQ ID NO: 570988 - DNA, 15 bp, Homo sapiens
ttcgttttaaatttc

SEQ ID NO: 570989 - DNA, 15 bp, Homo sapiens
gttcgttttaaattt

SEQ ID NO: 570990 - DNA, 15 bp, Homo sapiens
cgttcgttttaaatt

SEQ ID NO: 570991 - DNA, 15 bp, Homo sapiens
tcgttcgttttaaat

SEQ ID NO: 570992 - DNA, 15 bp, Homo sapiens
ctcgttcgttttaaa

SEQ ID NO: 570993 - DNA, 15 bp, Homo sapiens
tctcgttcgttttaa

SEQ ID NO: 570994 - DNA, 15 bp, Homo sapiens
ttctcgttcgtttta

SEQ ID NO: 570995 - DNA, 15 bp, Homo sapiens
cttctcgttcgtttt

SEQ ID NO: 570996 - DNA, 15 bp, Homo sapiens
ccttctcgttcgttt

SEQ ID NO: 570997 - DNA, 15 bp, Homo sapiens
cccttctcgttcgtt

SEQ ID NO: 570998 - DNA, 15 bp, Homo sapiens
ccccttctcgttcgt

SEQ ID NO: 570999 - DNA, 15 bp, Homo sapiens
tccccttctcgttcg

SEQ ID NO: 571000 - DNA, 15 bp, Homo sapiens
ttccccttctcgttc

SEQ ID NO: 571001 - DNA, 15 bp, Homo sapiens
cttccccttctcgtt

SEQ ID NO: 571002 - DNA, 15 bp, Homo sapiens
ccttccccttctcgt

SEQ ID NO: 571003 - DNA, 15 bp, Homo sapiens
cccttccccttctcg

SEQ ID NO: 571004 - DNA, 15 bp, Homo sapiens
ccccttccccttctc

SEQ ID NO: 571005 - DNA, 15 bp, Homo sapiens
accccttccccttct

SEQ ID NO: 571006 - DNA, 15 bp, Homo sapiens
taccccttccccttc

SEQ ID NO: 571007 - DNA, 15 bp, Homo sapiens
ttaccccttcccctt

SEQ ID NO: 571008 - DNA, 15 bp, Homo sapiens
gttaccccttcccct

SEQ ID NO: 571009 - DNA, 15 bp, Homo sapiens
tgttaccccttcccc

SEQ ID NO: 571010 - DNA, 15 bp, Homo sapiens
ttgttaccccttccc

SEQ ID NO: 571011 - DNA, 15 bp, Homo sapiens
tttgttaccccttcc

SEQ ID NO: 571012 - DNA, 15 bp, Homo sapiens
atttgttaccccttc

SEQ ID NO: 571013 - DNA, 15 bp, Homo sapiens
tatttgttacccctt

SEQ ID NO: 571014 - DNA, 15 bp, Homo sapiens
ttatttgttacccct

SEQ ID NO: 571015 - DNA, 15 bp, Homo sapiens
attatttgttacccc

SEQ ID NO: 571016 - DNA, 15 bp, Homo sapiens
gattatttgttaccc

SEQ ID NO: 571017 - DNA, 15 bp, Homo sapiens
tgattatttgttacc

SEQ ID NO: 571018 - DNA, 15 bp, Homo sapiens
gtgattatttgttac

SEQ ID NO: 571019 - DNA, 15 bp, Homo sapiens
tgtgattatttgtta

SEQ ID NO: 571020 - DNA, 15 bp, Homo sapiens
ctgtgattatttgtt

SEQ ID NO: 571021 - DNA, 15 bp, Homo sapiens
actgtgattatttgt

SEQ ID NO: 571022 - DNA, 15 bp, Homo sapiens
aactgtgattatttg

SEQ ID NO: 571023 - DNA, 15 bp, Homo sapiens
gaactgtgattattt

SEQ ID NO: 571024 - DNA, 15 bp, Homo sapiens
tgaactgtgattatt

SEQ ID NO: 571025 - DNA, 15 bp, Homo sapiens
gtgaactgtgattat

SEQ ID NO: 571026 - DNA, 15 bp, Homo sapiens
tgtgaactgtgatta

SEQ ID NO: 571027 - DNA, 15 bp, Homo sapiens
ttgtgaactgtgatt

SEQ ID NO: 571028 - DNA, 15 bp, Homo sapiens
tttgtgaactgtgat

SEQ ID NO: 571029 - DNA, 15 bp, Homo sapiens
ctttgtgaactgtga

SEQ ID NO: 571030 - DNA, 15 bp, Homo sapiens
tctttgtgaactgtg

SEQ ID NO: 571031 - DNA, 15 bp, Homo sapiens
ctctttgtgaactgt

SEQ ID NO: 571032 - DNA, 15 bp, Homo sapiens
tctctttgtgaactg

SEQ ID NO: 571033 - DNA, 15 bp, Homo sapiens
ttctctttgtgaact

SEQ ID NO: 571034 - DNA, 15 bp, Homo sapiens
tttctctttgtgaac

SEQ ID NO: 571035 - DNA, 15 bp, Homo sapiens
ttttctctttgtgaa

SEQ ID NO: 571036 - DNA, 15 bp, Homo sapiens
cttttctctttgtga

SEQ ID NO: 571037 - DNA, 15 bp, Homo sapiens
tcttttctctttgtg

SEQ ID NO: 571038 - DNA, 15 bp, Homo sapiens
ctcttttctctttgt

SEQ ID NO: 571039 - DNA, 15 bp, Homo sapiens
tctcttttctctttg

SEQ ID NO: 571040 - DNA, 15 bp, Homo sapiens
ctctcttttctcttt

SEQ ID NO: 571041 - DNA, 15 bp, Homo sapiens
cctctcttttctctt

SEQ ID NO: 571042 - DNA, 15 bp, Homo sapiens
acctctcttttctct

SEQ ID NO: 571043 - DNA, 15 bp, Homo sapiens
tacctctcttttctc

SEQ ID NO: 571044 - DNA, 15 bp, Homo sapiens
ctacctctcttttct

SEQ ID NO: 571045 - DNA, 15 bp, Homo sapiens
cctacctctcttttc

SEQ ID NO: 571046 - DNA, 15 bp, Homo sapiens
gcctacctctctttt

SEQ ID NO: 571047 - DNA, 15 bp, Homo sapiens
tgcctacctctcttt

SEQ ID NO: 571048 - DNA, 15 bp, Homo sapiens
ctgcctacctctctt

SEQ ID NO: 571049 - DNA, 15 bp, Homo sapiens
tctgcctacctctct

SEQ ID NO: 571050 - DNA, 15 bp, Homo sapiens
ctctgcctacctctc

SEQ ID NO: 571051 - DNA, 15 bp, Homo sapiens
tctctgcctacctct

SEQ ID NO: 571052 - DNA, 15 bp, Homo sapiens
ttctctgcctacctc

SEQ ID NO: 571053 - DNA, 15 bp, Homo sapiens
tttctctgcctacct

SEQ ID NO: 571054 - DNA, 15 bp, Homo sapiens
ctttctctgcctacc

SEQ ID NO: 571055 - DNA, 15 bp, Homo sapiens
cctttctctgcctac

SEQ ID NO: 571056 - DNA, 15 bp, Homo sapiens
tcctttctctgccta

SEQ ID NO: 571057 - DNA, 15 bp, Homo sapiens
ctcctttctctgcct

SEQ ID NO: 571058 - DNA, 15 bp, Homo sapiens
tctcctttctctgcc

SEQ ID NO: 571059 - DNA, 15 bp, Homo sapiens
ctctcctttctctgc

SEQ ID NO: 571060 - DNA, 15 bp, Homo sapiens
cctctcctttctctg

SEQ ID NO: 571061 - DNA, 15 bp, Homo sapiens
acctctcctttctct

SEQ ID NO: 571062 - DNA, 15 bp, Homo sapiens
tacctctcctttctc

SEQ ID NO: 571063 - DNA, 15 bp, Homo sapiens
ctacctctcctttct

SEQ ID NO: 571064 - DNA, 15 bp, Homo sapiens
tctacctctcctttc

SEQ ID NO: 571065 - DNA, 15 bp, Homo sapiens
gtctacctctccttt

SEQ ID NO: 571066 - DNA, 15 bp, Homo sapiens
tgtctacctctcctt

SEQ ID NO: 571067 - DNA, 15 bp, Homo sapiens
ctgtctacctctcct

SEQ ID NO: 571068 - DNA, 15 bp, Homo sapiens
tctgtctacctctcc

SEQ ID NO: 571069 - DNA, 15 bp, Homo sapiens
ttctgtctacctctc

SEQ ID NO: 571070 - DNA, 15 bp, Homo sapiens
gttctgtctacctct

SEQ ID NO: 571071 - DNA, 15 bp, Homo sapiens
tgttctgtctacctc

SEQ ID NO: 571072 - DNA, 15 bp, Homo sapiens
ttgttctgtctacct

SEQ ID NO: 571073 - DNA, 15 bp, Homo sapiens
cttgttctgtctacc

SEQ ID NO: 571074 - DNA, 15 bp, Homo sapiens
tcttgttctgtctac

SEQ ID NO: 571075 - DNA, 15 bp, Homo sapiens
ttcttgttctgtcta

SEQ ID NO: 571076 - DNA, 15 bp, Homo sapiens
tttcttgttctgtct

SEQ ID NO: 571077 - DNA, 15 bp, Homo sapiens
ttttcttgttctgtc

SEQ ID NO: 571078 - DNA, 15 bp, Homo sapiens
cttttcttgttctgt

SEQ ID NO: 571079 - DNA, 15 bp, Homo sapiens
ccttttcttgttctg

SEQ ID NO: 571080 - DNA, 15 bp, Homo sapiens
tccttttcttgttct

SEQ ID NO: 571081 - DNA, 15 bp, Homo sapiens
gtccttttcttgttc

SEQ ID NO: 571082 - DNA, 15 bp, Homo sapiens
tgtccttttcttgtt

SEQ ID NO: 571083 - DNA, 15 bp, Homo sapiens
ttgtccttttcttgt

SEQ ID NO: 571084 - DNA, 15 bp, Homo sapiens
tttgtccttttcttg

SEQ ID NO: 571085 - DNA, 15 bp, Homo sapiens
ttttgtccttttctt

SEQ ID NO: 571086 - DNA, 15 bp, Homo sapiens
tttttgtccttttct

SEQ ID NO: 571087 - DNA, 15 bp, Homo sapiens
ctttttgtccttttc

SEQ ID NO: 571088 - DNA, 15 bp, Homo sapiens
gctttttgtcctttt

SEQ ID NO: 571089 - DNA, 15 bp, Homo sapiens
tgctttttgtccttt

SEQ ID NO: 571090 - DNA, 15 bp, Homo sapiens
gtgctttttgtcctt

SEQ ID NO: 571091 - DNA, 15 bp, Homo sapiens
tgtgctttttgtcct

SEQ ID NO: 571092 - DNA, 15 bp, Homo sapiens
gtgtgctttttgtcc

SEQ ID NO: 571093 - DNA, 15 bp, Homo sapiens
tgtgtgctttttgtc

SEQ ID NO: 571094 - DNA, 15 bp, Homo sapiens
ctgtgtgctttttgt

SEQ ID NO: 571095 - DNA, 15 bp, Homo sapiens
gctgtgtgctttttg

SEQ ID NO: 571096 - DNA, 15 bp, Homo sapiens
tgctgtgtgcttttt

SEQ ID NO: 571097 - DNA, 15 bp, Homo sapiens
atgctgtgtgctttt

SEQ ID NO: 571098 - DNA, 15 bp, Homo sapiens
catgctgtgtgcttt

SEQ ID NO: 571099 - DNA, 15 bp, Homo sapiens
acatgctgtgtgctt

SEQ ID NO: 571100 - DNA, 15 bp, Homo sapiens
cacatgctgtgtgct

SEQ ID NO: 571101 - DNA, 15 bp, Homo sapiens
tcacatgctgtgtgc

SEQ ID NO: 571102 - DNA, 15 bp, Homo sapiens
gtcacatgctgtgtg

SEQ ID NO: 571103 - DNA, 15 bp, Homo sapiens
ggtcacatgctgtgt

SEQ ID NO: 571104 - DNA, 15 bp, Homo sapiens
gggtcacatgctgtg

SEQ ID NO: 571105 - DNA, 15 bp, Homo sapiens
tgggtcacatgctgt

SEQ ID NO: 571106 - DNA, 15 bp, Homo sapiens
ttgggtcacatgctg

SEQ ID NO: 571107 - DNA, 15 bp, Homo sapiens
tttgggtcacatgct

SEQ ID NO: 571108 - DNA, 15 bp, Homo sapiens
ttttgggtcacatgc

SEQ ID NO: 571109 - DNA, 15 bp, Homo sapiens
tttttgggtcacatg

SEQ ID NO: 571110 - DNA, 15 bp, Homo sapiens
ctttttgggtcacat

SEQ ID NO: 571111 - DNA, 15 bp, Homo sapiens
cctttttgggtcaca

SEQ ID NO: 571112 - DNA, 15 bp, Homo sapiens
tcctttttgggtcac

SEQ ID NO: 571113 - DNA, 15 bp, Homo sapiens
ctcctttttgggtca

SEQ ID NO: 571114 - DNA, 15 bp, Homo sapiens
tctcctttttgggtc

SEQ ID NO: 571115 - DNA, 15 bp, Homo sapiens
gtctcctttttgggt

SEQ ID NO: 571116 - DNA, 15 bp, Homo sapiens
tgtctcctttttggg

SEQ ID NO: 571117 - DNA, 15 bp, Homo sapiens
atgtctcctttttgg

SEQ ID NO: 571118 - DNA, 15 bp, Homo sapiens
catgtctcctttttg

SEQ ID NO: 571119 - DNA, 15 bp, Homo sapiens
tcatgtctccttttt

SEQ ID NO: 571120 - DNA, 15 bp, Homo sapiens
ttcatgtctcctttt

SEQ ID NO: 571121 - DNA, 15 bp, Homo sapiens
tttcatgtctccttt

SEQ ID NO: 571122 - DNA, 15 bp, Homo sapiens
atttcatgtctcctt

SEQ ID NO: 571123 - DNA, 15 bp, Homo sapiens
tatttcatgtctcct

SEQ ID NO: 571124 - DNA, 15 bp, Homo sapiens
ttatttcatgtctcc

SEQ ID NO: 571125 - DNA, 15 bp, Homo sapiens
tttatttcatgtctc

SEQ ID NO: 571126 - DNA, 15 bp, Homo sapiens
ctttatttcatgtct

SEQ ID NO: 571127 - DNA, 15 bp, Homo sapiens
gctttatttcatgtc

SEQ ID NO: 571128 - DNA, 15 bp, Homo sapiens
cgctttatttcatgt

SEQ ID NO: 571129 - DNA, 15 bp, Homo sapiens
acgctttatttcatg

SEQ ID NO: 571130 - DNA, 15 bp, Homo sapiens
cacgctttatttcat

SEQ ID NO: 571131 - DNA, 15 bp, Homo sapiens
tcacgctttatttca

SEQ ID NO: 571132 - DNA, 15 bp, Homo sapiens
ttcacgctttatttc

SEQ ID NO: 571133 - DNA, 15 bp, Homo sapiens
tttcacgctttattt

SEQ ID NO: 571134 - DNA, 15 bp, Homo sapiens
ctttcacgctttatt

SEQ ID NO: 571135 - DNA, 15 bp, Homo sapiens
tctttcacgctttat

SEQ ID NO: 571136 - DNA, 15 bp, Homo sapiens
ttctttcacgcttta

SEQ ID NO: 571137 - DNA, 15 bp, Homo sapiens
cttctttcacgcttt

SEQ ID NO: 571138 - DNA, 15 bp, Homo sapiens
tcttctttcacgctt

SEQ ID NO: 571139 - DNA, 15 bp, Homo sapiens
ctcttctttcacgct

SEQ ID NO: 571140 - DNA, 15 bp, Homo sapiens
gctcttctttcacgc

SEQ ID NO: 571141 - DNA, 15 bp, Homo sapiens
ggctcttctttcacg

SEQ ID NO: 571142 - DNA, 15 bp, Homo sapiens
tggctcttctttcac

SEQ ID NO: 571143 - DNA, 15 bp, Homo sapiens
gtggctcttctttca

SEQ ID NO: 571144 - DNA, 15 bp, Homo sapiens
tgtggctcttctttc

SEQ ID NO: 571145 - DNA, 15 bp, Homo sapiens
atgtggctcttcttt

SEQ ID NO: 571146 - DNA, 15 bp, Homo sapiens
gatgtggctcttctt

SEQ ID NO: 571147 - DNA, 15 bp, Homo sapiens
agatgtggctcttct

SEQ ID NO: 571148 - DNA, 15 bp, Homo sapiens
tagatgtggctcttc

SEQ ID NO: 571149 - DNA, 15 bp, Homo sapiens
ctagatgtggctctt

SEQ ID NO: 571150 - DNA, 15 bp, Homo sapiens
cctagatgtggctct

SEQ ID NO: 571151 - DNA, 15 bp, Homo sapiens
tcctagatgtggctc

SEQ ID NO: 571152 - DNA, 15 bp, Homo sapiens
ctcctagatgtggct

SEQ ID NO: 571153 - DNA, 15 bp, Homo sapiens
tctcctagatgtggc

SEQ ID NO: 571154 - DNA, 15 bp, Homo sapiens
ctctcctagatgtgg

SEQ ID NO: 571155 - DNA, 15 bp, Homo sapiens
gctctcctagatgtg

SEQ ID NO: 571156 - DNA, 15 bp, Homo sapiens
tgctctcctagatgt

SEQ ID NO: 571157 - DNA, 15 bp, Homo sapiens
ttgctctcctagatg

SEQ ID NO: 571158 - DNA, 15 bp, Homo sapiens
tttgctctcctagat

SEQ ID NO: 571159 - DNA, 15 bp, Homo sapiens
ctttgctctcctaga

SEQ ID NO: 571160 - DNA, 15 bp, Homo sapiens
tctttgctctcctag

SEQ ID NO: 571161 - DNA, 15 bp, Homo sapiens
ctctttgctctccta

SEQ ID NO: 571162 - DNA, 15 bp, Homo sapiens
tctctttgctctcct

SEQ ID NO: 571163 - DNA, 15 bp, Homo sapiens
ttctctttgctctcc

SEQ ID NO: 571164 - DNA, 15 bp, Homo sapiens
tttctctttgctctc

SEQ ID NO: 571165 - DNA, 15 bp, Homo sapiens
atttctctttgctct

SEQ ID NO: 571166 - DNA, 15 bp, Homo sapiens
tatttctctttgctc

SEQ ID NO: 571167 - DNA, 15 bp, Homo sapiens
ctatttctctttgct

SEQ ID NO: 571168 - DNA, 15 bp, Homo sapiens
gctatttctctttgc

SEQ ID NO: 571169 - DNA, 15 bp, Homo sapiens
tgctatttctctttg

SEQ ID NO: 571170 - DNA, 15 bp, Homo sapiens
ttgctatttctcttt

SEQ ID NO: 571171 - DNA, 15 bp, Homo sapiens
gttgctatttctctt

SEQ ID NO: 571172 - DNA, 15 bp, Homo sapiens
tgttgctatttctct

SEQ ID NO: 571173 - DNA, 15 bp, Homo sapiens
ttgttgctatttctc

SEQ ID NO: 571174 - DNA, 15 bp, Homo sapiens
tttgttgctatttct

SEQ ID NO: 571175 - DNA, 15 bp, Homo sapiens
ttttgttgctatttc

SEQ ID NO: 571176 - DNA, 15 bp, Homo sapiens
attttgttgctattt

SEQ ID NO: 571177 - DNA, 15 bp, Homo sapiens
cattttgttgctatt

SEQ ID NO: 571178 - DNA, 15 bp, Homo sapiens
tcattttgttgctat

SEQ ID NO: 571179 - DNA, 15 bp, Homo sapiens
ttcattttgttgcta

SEQ ID NO: 571180 - DNA, 15 bp, Homo sapiens
tttcattttgttgct

SEQ ID NO: 571181 - DNA, 15 bp, Homo sapiens
ttttcattttgttgc

SEQ ID NO: 571182 - DNA, 15 bp, Homo sapiens
tttttcattttgttg

SEQ ID NO: 571183 - DNA, 15 bp, Homo sapiens
atttttcattttgtt

SEQ ID NO: 571184 - DNA, 15 bp, Homo sapiens
catttttcattttgt

SEQ ID NO: 571185 - DNA, 15 bp, Homo sapiens
tcatttttcattttg

SEQ ID NO: 571186 - DNA, 15 bp, Homo sapiens
ctcatttttcatttt

SEQ ID NO: 571187 - DNA, 15 bp, Homo sapiens
tctcatttttcattt

SEQ ID NO: 571188 - DNA, 15 bp, Homo sapiens
ctctcatttttcatt

SEQ ID NO: 571189 - DNA, 15 bp, Homo sapiens
tctctcatttttcat

SEQ ID NO: 571190 - DNA, 15 bp, Homo sapiens
atctctcatttttca

SEQ ID NO: 571191 - DNA, 15 bp, Homo sapiens
tatctctcatttttc

SEQ ID NO: 571192 - DNA, 15 bp, Homo sapiens
atatctctcattttt

SEQ ID NO: 571193 - DNA, 15 bp, Homo sapiens
catatctctcatttt

SEQ ID NO: 571194 - DNA, 15 bp, Homo sapiens
acatatctctcattt

SEQ ID NO: 571195 - DNA, 15 bp, Homo sapiens
gacatatctctcatt

SEQ ID NO: 571196 - DNA, 15 bp, Homo sapiens
agacatatctctcat

SEQ ID NO: 571197 - DNA, 15 bp, Homo sapiens
tagacatatctctca

SEQ ID NO: 571198 - DNA, 15 bp, Homo sapiens
ttagacatatctctc

SEQ ID NO: 571199 - DNA, 15 bp, Homo sapiens
cttagacatatctct

SEQ ID NO: 571200 - DNA, 15 bp, Homo sapiens
tcttagacatatctc

SEQ ID NO: 571201 - DNA, 15 bp, Homo sapiens
gtcttagacatatct

SEQ ID NO: 571202 - DNA, 15 bp, Homo sapiens
tgtcttagacatatc

SEQ ID NO: 571203 - DNA, 15 bp, Homo sapiens
ttgtcttagacatat

SEQ ID NO: 571204 - DNA, 15 bp, Homo sapiens
cttgtcttagacata

SEQ ID NO: 571205 - DNA, 15 bp, Homo sapiens
tcttgtcttagacat

SEQ ID NO: 571206 - DNA, 15 bp, Homo sapiens
gtcttgtcttagaca

SEQ ID NO: 571207 - DNA, 15 bp, Homo sapiens
tgtcttgtcttagac

SEQ ID NO: 571208 - DNA, 15 bp, Homo sapiens
gtgtcttgtcttaga

SEQ ID NO: 571209 - DNA, 15 bp, Homo sapiens
tgtgtcttgtcttag

SEQ ID NO: 571210 - DNA, 15 bp, Homo sapiens
ctgtgtcttgtctta

SEQ ID NO: 571211 - DNA, 15 bp, Homo sapiens
tctgtgtcttgtctt

SEQ ID NO: 571212 - DNA, 15 bp, Homo sapiens
gtctgtgtcttgtct

SEQ ID NO: 571213 - DNA, 15 bp, Homo sapiens
ggtctgtgtcttgtc

SEQ ID NO: 571214 - DNA, 15 bp, Homo sapiens
tggtctgtgtcttgt

SEQ ID NO: 571215 - DNA, 15 bp, Homo sapiens
gtggtctgtgtcttg

SEQ ID NO: 571216 - DNA, 15 bp, Homo sapiens
agtggtctgtgtctt

SEQ ID NO: 571217 - DNA, 15 bp, Homo sapiens
gagtggtctgtgtct

SEQ ID NO: 571218 - DNA, 15 bp, Homo sapiens
agagtggtctgtgtc

SEQ ID NO: 571219 - DNA, 15 bp, Homo sapiens
aagagtggtctgtgt

SEQ ID NO: 571220 - DNA, 15 bp, Homo sapiens
caagagtggtctgtg

SEQ ID NO: 571221 - DNA, 15 bp, Homo sapiens
acaagagtggtctgt

SEQ ID NO: 571222 - DNA, 15 bp, Homo sapiens
cacaagagtggtctg

SEQ ID NO: 571223 - DNA, 15 bp, Homo sapiens
tcacaagagtggtct

SEQ ID NO: 571224 - DNA, 15 bp, Homo sapiens
ttcacaagagtggtc

SEQ ID NO: 571225 - DNA, 15 bp, Homo sapiens
gttcacaagagtggt

SEQ ID NO: 571226 - DNA, 15 bp, Homo sapiens
tgttcacaagagtgg

SEQ ID NO: 571227 - DNA, 15 bp, Homo sapiens
ttgttcacaagagtg

SEQ ID NO: 571228 - DNA, 15 bp, Homo sapiens
tttgttcacaagagt

SEQ ID NO: 571229 - DNA, 15 bp, Homo sapiens
ttttgttcacaagag

SEQ ID NO: 571230 - DNA, 15 bp, Homo sapiens
tttttgttcacaaga

SEQ ID NO: 571231 - DNA, 15 bp, Homo sapiens
ctttttgttcacaag

SEQ ID NO: 571232 - DNA, 15 bp, Homo sapiens
tctttttgttcacaa

SEQ ID NO: 571233 - DNA, 15 bp, Homo sapiens
ctctttttgttcaca

SEQ ID NO: 571234 - DNA, 15 bp, Homo sapiens
tctctttttgttcac

SEQ ID NO: 571235 - DNA, 15 bp, Homo sapiens
ttctctttttgttca

SEQ ID NO: 571236 - DNA, 15 bp, Homo sapiens
tttctctttttgttc

SEQ ID NO: 571237 - DNA, 15 bp, Homo sapiens
ttttctctttttgtt

SEQ ID NO: 571238 - DNA, 15 bp, Homo sapiens
attttctctttttgt

SEQ ID NO: 571239 - DNA, 15 bp, Homo sapiens
cattttctctttttg

SEQ ID NO: 571240 - DNA, 15 bp, Homo sapiens
tcattttctcttttt

SEQ ID NO: 571241 - DNA, 15 bp, Homo sapiens
ctcattttctctttt

SEQ ID NO: 571242 - DNA, 15 bp, Homo sapiens
cctcattttctcttt

SEQ ID NO: 571243 - DNA, 15 bp, Homo sapiens
gcctcattttctctt

SEQ ID NO: 571244 - DNA, 15 bp, Homo sapiens
tgcctcattttctct

SEQ ID NO: 571245 - DNA, 15 bp, Homo sapiens
ttgcctcattttctc

SEQ ID NO: 571246 - DNA, 15 bp, Homo sapiens
tttgcctcattttct

SEQ ID NO: 571247 - DNA, 15 bp, Homo sapiens
ctttgcctcattttc

SEQ ID NO: 571248 - DNA, 15 bp, Homo sapiens
cctttgcctcatttt

SEQ ID NO: 571249 - DNA, 15 bp, Homo sapiens
gcctttgcctcattt

SEQ ID NO: 571250 - DNA, 15 bp, Homo sapiens
tgcctttgcctcatt

SEQ ID NO: 571251 - DNA, 15 bp, Homo sapiens
gtgcctttgcctcat

SEQ ID NO: 571252 - DNA, 15 bp, Homo sapiens
tgtgcctttgcctca

SEQ ID NO: 571253 - DNA, 15 bp, Homo sapiens
gtgtgcctttgcctc

SEQ ID NO: 571254 - DNA, 15 bp, Homo sapiens
tgtgtgcctttgcct

SEQ ID NO: 571255 - DNA, 15 bp, Homo sapiens
gtgtgtgcctttgcc

SEQ ID NO: 571256 - DNA, 15 bp, Homo sapiens
cgtgtgtgcctttgc

SEQ ID NO: 571257 - DNA, 15 bp, Homo sapiens
tcgtgtgtgcctttg

SEQ ID NO: 571258 - DNA, 15 bp, Homo sapiens
ttcgtgtgtgccttt

SEQ ID NO: 571259 - DNA, 15 bp, Homo sapiens
tttcgtgtgtgcctt

SEQ ID NO: 571260 - DNA, 15 bp, Homo sapiens
ctttcgtgtgtgcct

SEQ ID NO: 571261 - DNA, 15 bp, Homo sapiens
tctttcgtgtgtgcc

SEQ ID NO: 571262 - DNA, 15 bp, Homo sapiens
ttctttcgtgtgtgc

SEQ ID NO: 571263 - DNA, 15 bp, Homo sapiens
tttctttcgtgtgtg

SEQ ID NO: 571264 - DNA, 15 bp, Homo sapiens
atttctttcgtgtgt

SEQ ID NO: 571265 - DNA, 15 bp, Homo sapiens
aatttctttcgtgtg

SEQ ID NO: 571266 - DNA, 15 bp, Homo sapiens
taatttctttcgtgt

SEQ ID NO: 571267 - DNA, 15 bp, Homo sapiens
ctaatttctttcgtg

SEQ ID NO: 571268 - DNA, 15 bp, Homo sapiens
gctaatttctttcgt

SEQ ID NO: 571269 - DNA, 15 bp, Homo sapiens
tgctaatttctttcg

SEQ ID NO: 571270 - DNA, 15 bp, Homo sapiens
ttgctaatttctttc

SEQ ID NO: 571271 - DNA, 15 bp, Homo sapiens
cttgctaatttcttt

SEQ ID NO: 571272 - DNA, 15 bp, Homo sapiens
tcttgctaatttctt

SEQ ID NO: 571273 - DNA, 15 bp, Homo sapiens
ctcttgctaatttct

SEQ ID NO: 571274 - DNA, 15 bp, Homo sapiens
tctcttgctaatttc

SEQ ID NO: 571275 - DNA, 15 bp, Homo sapiens
ttctcttgctaattt

SEQ ID NO: 571276 - DNA, 15 bp, Homo sapiens
tttctcttgctaatt

SEQ ID NO: 571277 - DNA, 15 bp, Homo sapiens
gtttctcttgctaat

SEQ ID NO: 571278 - DNA, 15 bp, Homo sapiens
tgtttctcttgctaa

SEQ ID NO: 571279 - DNA, 15 bp, Homo sapiens
atgtttctcttgcta

SEQ ID NO: 571280 - DNA, 15 bp, Homo sapiens
catgtttctcttgct

SEQ ID NO: 571281 - DNA, 15 bp, Homo sapiens
ccatgtttctcttgc

SEQ ID NO: 571282 - DNA, 15 bp, Homo sapiens
tccatgtttctcttg

SEQ ID NO: 571283 - DNA, 15 bp, Homo sapiens
ttccatgtttctctt

SEQ ID NO: 571284 - DNA, 15 bp, Homo sapiens
tttccatgtttctct

SEQ ID NO: 571285 - DNA, 15 bp, Homo sapiens
atttccatgtttctc

SEQ ID NO: 571286 - DNA, 15 bp, Homo sapiens
catttccatgtttct

SEQ ID NO: 571287 - DNA, 15 bp, Homo sapiens
ccatttccatgtttc

SEQ ID NO: 571288 - DNA, 15 bp, Homo sapiens
cccatttccatgttt

SEQ ID NO: 571289 - DNA, 15 bp, Homo sapiens
acccatttccatgtt

SEQ ID NO: 571290 - DNA, 15 bp, Homo sapiens
tacccatttccatgt

SEQ ID NO: 571291 - DNA, 15 bp, Homo sapiens
ttacccatttccatg

SEQ ID NO: 571292 - DNA, 15 bp, Homo sapiens
cttacccatttccat

SEQ ID NO: 571293 - DNA, 15 bp, Homo sapiens
tcttacccatttcca

SEQ ID NO: 571294 - DNA, 15 bp, Homo sapiens
gtcttacccatttcc

SEQ ID NO: 571295 - DNA, 15 bp, Homo sapiens
tgtcttacccatttc

SEQ ID NO: 571296 - DNA, 15 bp, Homo sapiens
gtgtcttacccattt

SEQ ID NO: 571297 - DNA, 15 bp, Homo sapiens
tgtgtcttacccatt

SEQ ID NO: 571298 - DNA, 15 bp, Homo sapiens
gtgtgtcttacccat

SEQ ID NO: 571299 - DNA, 15 bp, Homo sapiens
agtgtgtcttaccca

SEQ ID NO: 571300 - DNA, 15 bp, Homo sapiens
aagtgtgtcttaccc

SEQ ID NO: 571301 - DNA, 15 bp, Homo sapiens
aaagtgtgtcttacc

SEQ ID NO: 571302 - DNA, 15 bp, Homo sapiens
taaagtgtgtcttac

SEQ ID NO: 571303 - DNA, 15 bp, Homo sapiens
ctaaagtgtgtctta

SEQ ID NO: 571304 - DNA, 15 bp, Homo sapiens
tctaaagtgtgtctt

SEQ ID NO: 571305 - DNA, 15 bp, Homo sapiens
atctaaagtgtgtct

SEQ ID NO: 571306 - DNA, 15 bp, Homo sapiens
tatctaaagtgtgtc

SEQ ID NO: 571307 - DNA, 15 bp, Homo sapiens
ctatctaaagtgtgt

SEQ ID NO: 571308 - DNA, 15 bp, Homo sapiens
tctatctaaagtgtg

SEQ ID NO: 571309 - DNA, 15 bp, Homo sapiens
ctctatctaaagtgt

SEQ ID NO: 571310 - DNA, 15 bp, Homo sapiens
tctctatctaaagtg

SEQ ID NO: 571311 - DNA, 15 bp, Homo sapiens
ttctctatctaaagt

SEQ ID NO: 571312 - DNA, 15 bp, Homo sapiens
gttctctatctaaag

SEQ ID NO: 571313 - DNA, 15 bp, Homo sapiens
tgttctctatctaaa

SEQ ID NO: 571314 - DNA, 15 bp, Homo sapiens
ttgttctctatctaa

SEQ ID NO: 571315 - DNA, 15 bp, Homo sapiens
tttgttctctatcta

SEQ ID NO: 571316 - DNA, 15 bp, Homo sapiens
ctttgttctctatct

SEQ ID NO: 571317 - DNA, 15 bp, Homo sapiens
tctttgttctctatc

SEQ ID NO: 571318 - DNA, 15 bp, Homo sapiens
ctctttgttctctat

SEQ ID NO: 571319 - DNA, 15 bp, Homo sapiens
gctctttgttctcta

SEQ ID NO: 571320 - DNA, 15 bp, Homo sapiens
tgctctttgttctct

SEQ ID NO: 571321 - DNA, 15 bp, Homo sapiens
ttgctctttgttctc

SEQ ID NO: 571322 - DNA, 15 bp, Homo sapiens
tttgctctttgttct

SEQ ID NO: 571323 - DNA, 15 bp, Homo sapiens
ctttgctctttgttc

SEQ ID NO: 571324 - DNA, 15 bp, Homo sapiens
tctttgctctttgtt

SEQ ID NO: 571325 - DNA, 15 bp, Homo sapiens
gtctttgctctttgt

SEQ ID NO: 571326 - DNA, 15 bp, Homo sapiens
tgtctttgctctttg

SEQ ID NO: 571327 - DNA, 15 bp, Homo sapiens
ttgtctttgctcttt

SEQ ID NO: 571328 - DNA, 15 bp, Homo sapiens
cttgtctttgctctt

SEQ ID NO: 571329 - DNA, 15 bp, Homo sapiens
tcttgtctttgctct

SEQ ID NO: 571330 - DNA, 15 bp, Homo sapiens
ttcttgtctttgctc

SEQ ID NO: 571331 - DNA, 15 bp, Homo sapiens
tttcttgtctttgct

SEQ ID NO: 571332 - DNA, 15 bp, Homo sapiens
ctttcttgtctttgc

SEQ ID NO: 571333 - DNA, 15 bp, Homo sapiens
tctttcttgtctttg

SEQ ID NO: 571334 - DNA, 15 bp, Homo sapiens
ttctttcttgtcttt

SEQ ID NO: 571335 - DNA, 15 bp, Homo sapiens
tttctttcttgtctt

SEQ ID NO: 571336 - DNA, 15 bp, Homo sapiens
ctttctttcttgtct

SEQ ID NO: 571337 - DNA, 15 bp, Homo sapiens
tctttctttcttgtc

SEQ ID NO: 571338 - DNA, 15 bp, Homo sapiens
ctctttctttcttgt

SEQ ID NO: 571339 - DNA, 15 bp, Homo sapiens
tctctttctttcttg

SEQ ID NO: 571340 - DNA, 15 bp, Homo sapiens
gtctctttctttctt

SEQ ID NO: 571341 - DNA, 15 bp, Homo sapiens
tgtctctttctttct

SEQ ID NO: 571342 - DNA, 15 bp, Homo sapiens
ttgtctctttctttc

SEQ ID NO: 571343 - DNA, 15 bp, Homo sapiens
tttgtctctttcttt

SEQ ID NO: 571344 - DNA, 15 bp, Homo sapiens
ctttgtctctttctt

SEQ ID NO: 571345 - DNA, 15 bp, Homo sapiens
tctttgtctctttct

SEQ ID NO: 571346 - DNA, 15 bp, Homo sapiens
ttctttgtctctttc

SEQ ID NO: 571347 - DNA, 15 bp, Homo sapiens
tttctttgtctcttt

SEQ ID NO: 571348 - DNA, 15 bp, Homo sapiens
atttctttgtctctt

SEQ ID NO: 571349 - DNA, 15 bp, Homo sapiens
tatttctttgtctct

SEQ ID NO: 571350 - DNA, 15 bp, Homo sapiens
gtatttctttgtctc

SEQ ID NO: 571351 - DNA, 15 bp, Homo sapiens
tgtatttctttgtct

SEQ ID NO: 571352 - DNA, 15 bp, Homo sapiens
gtgtatttctttgtc

SEQ ID NO: 571353 - DNA, 15 bp, Homo sapiens
tgtgtatttctttgt

SEQ ID NO: 571354 - DNA, 15 bp, Homo sapiens
gtgtgtatttctttg

SEQ ID NO: 571355 - DNA, 15 bp, Homo sapiens
agtgtgtatttcttt

SEQ ID NO: 571356 - DNA, 15 bp, Homo sapiens
aagtgtgtatttctt

SEQ ID NO: 571357 - DNA, 15 bp, Homo sapiens
caagtgtgtatttct

SEQ ID NO: 571358 - DNA, 15 bp, Homo sapiens
tcaagtgtgtatttc

SEQ ID NO: 571359 - DNA, 15 bp, Homo sapiens
ctcaagtgtgtattt

SEQ ID NO: 571360 - DNA, 15 bp, Homo sapiens
actcaagtgtgtatt

SEQ ID NO: 571361 - DNA, 15 bp, Homo sapiens
cactcaagtgtgtat

SEQ ID NO: 571362 - DNA, 15 bp, Homo sapiens
gcactcaagtgtgta

SEQ ID NO: 571363 - DNA, 15 bp, Homo sapiens
tgcactcaagtgtgt

SEQ ID NO: 571364 - DNA, 15 bp, Homo sapiens
ttgcactcaagtgtg

SEQ ID NO: 571365 - DNA, 15 bp, Homo sapiens
cttgcactcaagtgt

SEQ ID NO: 571366 - DNA, 15 bp, Homo sapiens
tcttgcactcaagtg

SEQ ID NO: 571367 - DNA, 15 bp, Homo sapiens
ctcttgcactcaagt

SEQ ID NO: 571368 - DNA, 15 bp, Homo sapiens
tctcttgcactcaag

SEQ ID NO: 571369 - DNA, 15 bp, Homo sapiens
atctcttgcactcaa

SEQ ID NO: 571370 - DNA, 15 bp, Homo sapiens
tatctcttgcactca

SEQ ID NO: 571371 - DNA, 15 bp, Homo sapiens
ttatctcttgcactc

SEQ ID NO: 571372 - DNA, 15 bp, Homo sapiens
cttatctcttgcact

SEQ ID NO: 571373 - DNA, 15 bp, Homo sapiens
gcttatctcttgcac

SEQ ID NO: 571374 - DNA, 15 bp, Homo sapiens
tgcttatctcttgca

SEQ ID NO: 571375 - DNA, 15 bp, Homo sapiens
ttgcttatctcttgc

SEQ ID NO: 571376 - DNA, 15 bp, Homo sapiens
tttgcttatctcttg

SEQ ID NO: 571377 - DNA, 15 bp, Homo sapiens
ctttgcttatctctt

SEQ ID NO: 571378 - DNA, 15 bp, Homo sapiens
cctttgcttatctct

SEQ ID NO: 571379 - DNA, 15 bp, Homo sapiens
gcctttgcttatctc

SEQ ID NO: 571380 - DNA, 15 bp, Homo sapiens
tgcctttgcttatct

SEQ ID NO: 571381 - DNA, 15 bp, Homo sapiens
ctgcctttgcttatc

SEQ ID NO: 571382 - DNA, 15 bp, Homo sapiens
tctgcctttgcttat

SEQ ID NO: 571383 - DNA, 15 bp, Homo sapiens
gtctgcctttgctta

SEQ ID NO: 571384 - DNA, 15 bp, Homo sapiens
tgtctgcctttgctt

SEQ ID NO: 571385 - DNA, 15 bp, Homo sapiens
atgtctgcctttgct

SEQ ID NO: 571386 - DNA, 15 bp, Homo sapiens
aatgtctgcctttgc

SEQ ID NO: 571387 - DNA, 15 bp, Homo sapiens
gaatgtctgcctttg

SEQ ID NO: 571388 - DNA, 15 bp, Homo sapiens
tgaatgtctgccttt

SEQ ID NO: 571389 - DNA, 15 bp, Homo sapiens
ctgaatgtctgcctt

SEQ ID NO: 571390 - DNA, 15 bp, Homo sapiens
tctgaatgtctgcct

SEQ ID NO: 571391 - DNA, 15 bp, Homo sapiens
ctctgaatgtctgcc

SEQ ID NO: 571392 - DNA, 15 bp, Homo sapiens
cctctgaatgtctgc

SEQ ID NO: 571393 - DNA, 15 bp, Homo sapiens
tcctctgaatgtctg

SEQ ID NO: 571394 - DNA, 15 bp, Homo sapiens
ttcctctgaatgtct

SEQ ID NO: 571395 - DNA, 15 bp, Homo sapiens
cttcctctgaatgtc

SEQ ID NO: 571396 - DNA, 15 bp, Homo sapiens
acttcctctgaatgt

SEQ ID NO: 571397 - DNA, 15 bp, Homo sapiens
tacttcctctgaatg

SEQ ID NO: 571398 - DNA, 15 bp, Homo sapiens
ttacttcctctgaat

SEQ ID NO: 571399 - DNA, 15 bp, Homo sapiens
cttacttcctctgaa

SEQ ID NO: 571400 - DNA, 15 bp, Homo sapiens
acttacttcctctga

SEQ ID NO: 571401 - DNA, 15 bp, Homo sapiens
tacttacttcctctg

SEQ ID NO: 571402 - DNA, 15 bp, Homo sapiens
ctacttacttcctct

SEQ ID NO: 571403 - DNA, 15 bp, Homo sapiens
actacttacttcctc

SEQ ID NO: 571404 - DNA, 15 bp, Homo sapiens
tactacttacttcct

SEQ ID NO: 571405 - DNA, 15 bp, Homo sapiens
ctactacttacttcc

SEQ ID NO: 571406 - DNA, 15 bp, Homo sapiens
tctactacttacttc

SEQ ID NO: 571407 - DNA, 15 bp, Homo sapiens
ttctactacttactt

SEQ ID NO: 571408 - DNA, 15 bp, Homo sapiens
cttctactacttact

SEQ ID NO: 571409 - DNA, 15 bp, Homo sapiens
tcttctactacttac

SEQ ID NO: 571410 - DNA, 15 bp, Homo sapiens
ctcttctactactta

SEQ ID NO: 571411 - DNA, 15 bp, Homo sapiens
cctcttctactactt

SEQ ID NO: 571412 - DNA, 15 bp, Homo sapiens
gcctcttctactact

SEQ ID NO: 571413 - DNA, 15 bp, Homo sapiens
tgcctcttctactac

SEQ ID NO: 571414 - DNA, 15 bp, Homo sapiens
ttgcctcttctacta

SEQ ID NO: 571415 - DNA, 15 bp, Homo sapiens
cttgcctcttctact

SEQ ID NO: 571416 - DNA, 15 bp, Homo sapiens
tcttgcctcttctac

SEQ ID NO: 571417 - DNA, 15 bp, Homo sapiens
atcttgcctcttcta

SEQ ID NO: 571418 - DNA, 15 bp, Homo sapiens
tatcttgcctcttct

SEQ ID NO: 571419 - DNA, 15 bp, Homo sapiens
gtatcttgcctcttc

SEQ ID NO: 571420 - DNA, 15 bp, Homo sapiens
tgtatcttgcctctt

SEQ ID NO: 571421 - DNA, 15 bp, Homo sapiens
ctgtatcttgcctct

SEQ ID NO: 571422 - DNA, 15 bp, Homo sapiens
actgtatcttgcctc

SEQ ID NO: 571423 - DNA, 15 bp, Homo sapiens
cactgtatcttgcct

SEQ ID NO: 571424 - DNA, 15 bp, Homo sapiens
tcactgtatcttgcc

SEQ ID NO: 571425 - DNA, 15 bp, Homo sapiens
ctcactgtatcttgc

SEQ ID NO: 571426 - DNA, 15 bp, Homo sapiens
cctcactgtatcttg

SEQ ID NO: 571427 - DNA, 15 bp, Homo sapiens
ccctcactgtatctt

SEQ ID NO: 571428 - DNA, 15 bp, Homo sapiens
cccctcactgtatct

SEQ ID NO: 571429 - DNA, 15 bp, Homo sapiens
gcccctcactgtatc

SEQ ID NO: 571430 - DNA, 15 bp, Homo sapiens
tgcccctcactgtat

SEQ ID NO: 571431 - DNA, 15 bp, Homo sapiens
gtgcccctcactgta

SEQ ID NO: 571432 - DNA, 15 bp, Homo sapiens
tgtgcccctcactgt

SEQ ID NO: 571433 - DNA, 15 bp, Homo sapiens
ttgtgcccctcactg

SEQ ID NO: 571434 - DNA, 15 bp, Homo sapiens
cttgtgcccctcact

SEQ ID NO: 571435 - DNA, 15 bp, Homo sapiens
tcttgtgcccctcac

SEQ ID NO: 571436 - DNA, 15 bp, Homo sapiens
ctcttgtgcccctca

SEQ ID NO: 571437 - DNA, 15 bp, Homo sapiens
cctcttgtgcccctc

SEQ ID NO: 571438 - DNA, 15 bp, Homo sapiens
gcctcttgtgcccct

SEQ ID NO: 571439 - DNA, 15 bp, Homo sapiens
tgcctcttgtgcccc

SEQ ID NO: 571440 - DNA, 15 bp, Homo sapiens
atgcctcttgtgccc

SEQ ID NO: 571441 - DNA, 15 bp, Homo sapiens
catgcctcttgtgcc

SEQ ID NO: 571442 - DNA, 15 bp, Homo sapiens
tcatgcctcttgtgc

SEQ ID NO: 571443 - DNA, 15 bp, Homo sapiens
ttcatgcctcttgtg

SEQ ID NO: 571444 - DNA, 15 bp, Homo sapiens
tttcatgcctcttgt

SEQ ID NO: 571445 - DNA, 15 bp, Homo sapiens
ttttcatgcctcttg

SEQ ID NO: 571446 - DNA, 15 bp, Homo sapiens
cttttcatgcctctt

SEQ ID NO: 571447 - DNA, 15 bp, Homo sapiens
gcttttcatgcctct

SEQ ID NO: 571448 - DNA, 15 bp, Homo sapiens
tgcttttcatgcctc

SEQ ID NO: 571449 - DNA, 15 bp, Homo sapiens
atgcttttcatgcct

SEQ ID NO: 571450 - DNA, 15 bp, Homo sapiens
gatgcttttcatgcc

SEQ ID NO: 571451 - DNA, 15 bp, Homo sapiens
tgatgcttttcatgc

SEQ ID NO: 571452 - DNA, 15 bp, Homo sapiens
gtgatgcttttcatg

SEQ ID NO: 571453 - DNA, 15 bp, Homo sapiens
tgtgatgcttttcat

SEQ ID NO: 571454 - DNA, 15 bp, Homo sapiens
ctgtgatgcttttca

SEQ ID NO: 571455 - DNA, 15 bp, Homo sapiens
tctgtgatgcttttc

SEQ ID NO: 571456 - DNA, 15 bp, Homo sapiens
ttctgtgatgctttt

SEQ ID NO: 571457 - DNA, 15 bp, Homo sapiens
tttctgtgatgcttt

SEQ ID NO: 571458 - DNA, 15 bp, Homo sapiens
ctttctgtgatgctt

SEQ ID NO: 571459 - DNA, 15 bp, Homo sapiens
tctttctgtgatgct

SEQ ID NO: 571460 - DNA, 15 bp, Homo sapiens
atctttctgtgatgc

SEQ ID NO: 571461 - DNA, 15 bp, Homo sapiens
tatctttctgtgatg

SEQ ID NO: 571462 - DNA, 15 bp, Homo sapiens
ttatctttctgtgat

SEQ ID NO: 571463 - DNA, 15 bp, Homo sapiens
tttatctttctgtga

SEQ ID NO: 571464 - DNA, 15 bp, Homo sapiens
ttttatctttctgtg

SEQ ID NO: 571465 - DNA, 15 bp, Homo sapiens
tttttatctttctgt

SEQ ID NO: 571466 - DNA, 15 bp, Homo sapiens
ttttttatctttctg

SEQ ID NO: 571467 - DNA, 15 bp, Homo sapiens
tttttttatctttct

SEQ ID NO: 571468 - DNA, 15 bp, Homo sapiens
ttttttttatctttc

SEQ ID NO: 571469 - DNA, 15 bp, Homo sapiens
attttttttatcttt

SEQ ID NO: 571470 - DNA, 15 bp, Homo sapiens
gattttttttatctt

SEQ ID NO: 571471 - DNA, 15 bp, Homo sapiens
tgattttttttatct

SEQ ID NO: 571472 - DNA, 15 bp, Homo sapiens
ttgattttttttatc

SEQ ID NO: 571473 - DNA, 15 bp, Homo sapiens
tttgattttttttat

SEQ ID NO: 571474 - DNA, 15 bp, Homo sapiens
ttttgatttttttta

SEQ ID NO: 571475 - DNA, 15 bp, Homo sapiens
tttttgatttttttt

SEQ ID NO: 571476 - DNA, 15 bp, Homo sapiens
ctttttgattttttt

SEQ ID NO: 571477 - DNA, 15 bp, Homo sapiens
actttttgatttttt

SEQ ID NO: 571478 - DNA, 15 bp, Homo sapiens
cactttttgattttt

SEQ ID NO: 571479 - DNA, 15 bp, Homo sapiens
acactttttgatttt

SEQ ID NO: 571480 - DNA, 15 bp, Homo sapiens
gacactttttgattt

SEQ ID NO: 571481 - DNA, 15 bp, Homo sapiens
tgacactttttgatt

SEQ ID NO: 571482 - DNA, 15 bp, Homo sapiens
atgacactttttgat

SEQ ID NO: 571483 - DNA, 15 bp, Homo sapiens
aatgacactttttga

SEQ ID NO: 571484 - DNA, 15 bp, Homo sapiens
taatgacactttttg

SEQ ID NO: 571485 - DNA, 15 bp, Homo sapiens
ctaatgacacttttt

SEQ ID NO: 571486 - DNA, 15 bp, Homo sapiens
actaatgacactttt

SEQ ID NO: 571487 - DNA, 15 bp, Homo sapiens
tactaatgacacttt

SEQ ID NO: 571488 - DNA, 15 bp, Homo sapiens
ttactaatgacactt

SEQ ID NO: 571489 - DNA, 15 bp, Homo sapiens
attactaatgacact

SEQ ID NO: 571490 - DNA, 15 bp, Homo sapiens
aattactaatgacac

SEQ ID NO: 571491 - DNA, 15 bp, Homo sapiens
taattactaatgaca

SEQ ID NO: 571492 - DNA, 15 bp, Homo sapiens
ataattactaatgac

SEQ ID NO: 571493 - DNA, 15 bp, Homo sapiens
tataattactaatga

SEQ ID NO: 571494 - DNA, 15 bp, Homo sapiens
ttataattactaatg

SEQ ID NO: 571495 - DNA, 15 bp, Homo sapiens
attataattactaat

SEQ ID NO: 571496 - DNA, 15 bp, Homo sapiens
tattataattactaa

SEQ ID NO: 571497 - DNA, 15 bp, Homo sapiens
ttattataattacta

SEQ ID NO: 571498 - DNA, 15 bp, Homo sapiens
tttattataattact

SEQ ID NO: 571499 - DNA, 15 bp, Homo sapiens
gtttattataattac

SEQ ID NO: 571500 - DNA, 15 bp, Homo sapiens
agtttattataatta

SEQ ID NO: 571501 - DNA, 15 bp, Homo sapiens
tagtttattataatt

SEQ ID NO: 571502 - DNA, 15 bp, Homo sapiens
atagtttattataat

SEQ ID NO: 571503 - DNA, 15 bp, Homo sapiens
aatagtttattataa

SEQ ID NO: 571504 - DNA, 15 bp, Homo sapiens
caatagtttattata

SEQ ID NO: 571505 - DNA, 15 bp, Homo sapiens
acaatagtttattat

SEQ ID NO: 571506 - DNA, 15 bp, Homo sapiens
aacaatagtttatta

SEQ ID NO: 571507 - DNA, 15 bp, Homo sapiens
taacaatagtttatt

SEQ ID NO: 571508 - DNA, 15 bp, Homo sapiens
gtaacaatagtttat

SEQ ID NO: 571509 - DNA, 15 bp, Homo sapiens
agtaacaatagttta

SEQ ID NO: 571510 - DNA, 15 bp, Homo sapiens
tagtaacaatagttt

SEQ ID NO: 571511 - DNA, 15 bp, Homo sapiens
gtagtaacaatagtt

SEQ ID NO: 571512 - DNA, 15 bp, Homo sapiens
cgtagtaacaatagt

SEQ ID NO: 571513 - DNA, 15 bp, Homo sapiens
tcgtagtaacaatag

SEQ ID NO: 571514 - DNA, 15 bp, Homo sapiens
ttcgtagtaacaata

SEQ ID NO: 571515 - DNA, 15 bp, Homo sapiens
attcgtagtaacaat

SEQ ID NO: 571516 - DNA, 15 bp, Homo sapiens
tattcgtagtaacaa

SEQ ID NO: 571517 - DNA, 15 bp, Homo sapiens
gtattcgtagtaaca

SEQ ID NO: 571518 - DNA, 15 bp, Homo sapiens
agtattcgtagtaac

SEQ ID NO: 571519 - DNA, 15 bp, Homo sapiens
tagtattcgtagtaa

SEQ ID NO: 571520 - DNA, 15 bp, Homo sapiens
gtagtattcgtagta

SEQ ID NO: 571521 - DNA, 15 bp, Homo sapiens
agtagtattcgtagt

SEQ ID NO: 571522 - DNA, 15 bp, Homo sapiens
aagtagtattcgtag

SEQ ID NO: 571523 - DNA, 15 bp, Homo sapiens
taagtagtattcgta

SEQ ID NO: 571524 - DNA, 15 bp, Homo sapiens
ataagtagtattcgt

SEQ ID NO: 571525 - DNA, 15 bp, Homo sapiens
tataagtagtattcg

SEQ ID NO: 571526 - DNA, 15 bp, Homo sapiens
ctataagtagtattc

SEQ ID NO: 571527 - DNA, 15 bp, Homo sapiens
actataagtagtatt

SEQ ID NO: 571528 - DNA, 15 bp, Homo sapiens
tactataagtagtat

SEQ ID NO: 571529 - DNA, 15 bp, Homo sapiens
gtactataagtagta

SEQ ID NO: 571530 - DNA, 15 bp, Homo sapiens
agtactataagtagt

SEQ ID NO: 571531 - DNA, 15 bp, Homo sapiens
tagtactataagtag

SEQ ID NO: 571532 - DNA, 15 bp, Homo sapiens
gtagtactataagta

SEQ ID NO: 571533 - DNA, 15 bp, Homo sapiens
tgtagtactataagt

SEQ ID NO: 571534 - DNA, 15 bp, Homo sapiens
ttgtagtactataag

SEQ ID NO: 571535 - DNA, 15 bp, Homo sapiens
attgtagtactataa

SEQ ID NO: 571536 - DNA, 15 bp, Homo sapiens
tattgtagtactata

SEQ ID NO: 571537 - DNA, 15 bp, Homo sapiens
ttattgtagtactat

SEQ ID NO: 571538 - DNA, 15 bp, Homo sapiens
attattgtagtacta

SEQ ID NO: 571539 - DNA, 15 bp, Homo sapiens
tattattgtagtact

SEQ ID NO: 571540 - DNA, 15 bp, Homo sapiens
ttattattgtagtac

SEQ ID NO: 571541 - DNA, 15 bp, Homo sapiens
gttattattgtagta

SEQ ID NO: 571542 - DNA, 15 bp, Homo sapiens
tgttattattgtagt

SEQ ID NO: 571543 - DNA, 15 bp, Homo sapiens
ttgttattattgtag

SEQ ID NO: 571544 - DNA, 15 bp, Homo sapiens
gttgttattattgta

SEQ ID NO: 571545 - DNA, 15 bp, Homo sapiens
ggttgttattattgt

SEQ ID NO: 571546 - DNA, 15 bp, Homo sapiens
tggttgttattattg

SEQ ID NO: 571547 - DNA, 15 bp, Homo sapiens
gtggttgttattatt

SEQ ID NO: 571548 - DNA, 15 bp, Homo sapiens
ggtggttgttattat

SEQ ID NO: 571549 - DNA, 15 bp, Homo sapiens
tggtggttgttatta

SEQ ID NO: 571550 - DNA, 15 bp, Homo sapiens
ttggtggttgttatt

SEQ ID NO: 571551 - DNA, 15 bp, Homo sapiens
attggtggttgttat

SEQ ID NO: 571552 - DNA, 15 bp, Homo sapiens
tattggtggttgtta

SEQ ID NO: 571553 - DNA, 15 bp, Homo sapiens
gtattggtggttgtt

SEQ ID NO: 571554 - DNA, 15 bp, Homo sapiens
ggtattggtggttgt

SEQ ID NO: 571555 - DNA, 15 bp, Homo sapiens
tggtattggtggttg

SEQ ID NO: 571556 - DNA, 15 bp, Homo sapiens
ttggtattggtggtt

SEQ ID NO: 571557 - DNA, 15 bp, Homo sapiens
agatgaccagtcttc

SEQ ID NO: 571558 - DNA, 15 bp, Homo sapiens
aagatgaccagtctt

SEQ ID NO: 571559 - DNA, 15 bp, Homo sapiens
aaagatgaccagtct

SEQ ID NO: 571560 - DNA, 15 bp, Homo sapiens
gaaagatgaccagtc

SEQ ID NO: 571561 - DNA, 15 bp, Homo sapiens
ggaaagatgaccagt

SEQ ID NO: 571562 - DNA, 15 bp, Homo sapiens
tggaaagatgaccag

SEQ ID NO: 571563 - DNA, 15 bp, Homo sapiens
atggaaagatgacca

SEQ ID NO: 571564 - DNA, 15 bp, Homo sapiens
gatggaaagatgacc

SEQ ID NO: 571565 - DNA, 15 bp, Homo sapiens
agatggaaagatgac

SEQ ID NO: 571566 - DNA, 15 bp, Homo sapiens
gagatggaaagatga

SEQ ID NO: 571567 - DNA, 15 bp, Homo sapiens
tgagatggaaagatg

SEQ ID NO: 571568 - DNA, 15 bp, Homo sapiens
gtgagatggaaagat

SEQ ID NO: 571569 - DNA, 15 bp, Homo sapiens
tgtgagatggaaaga

SEQ ID NO: 571570 - DNA, 15 bp, Homo sapiens
atgtgagatggaaag

SEQ ID NO: 571571 - DNA, 15 bp, Homo sapiens
aatgtgagatggaaa

SEQ ID NO: 571572 - DNA, 15 bp, Homo sapiens
aaatgtgagatggaa

SEQ ID NO: 571573 - DNA, 15 bp, Homo sapiens
taaatgtgagatgga

SEQ ID NO: 571574 - DNA, 15 bp, Homo sapiens
ctaaatgtgagatgg

SEQ ID NO: 571575 - DNA, 15 bp, Homo sapiens
gctaaatgtgagatg

SEQ ID NO: 571576 - DNA, 15 bp, Homo sapiens
ggctaaatgtgagat

SEQ ID NO: 571577 - DNA, 15 bp, Homo sapiens
gggctaaatgtgaga

SEQ ID NO: 571578 - DNA, 15 bp, Homo sapiens
ggggctaaatgtgag

SEQ ID NO: 571579 - DNA, 15 bp, Homo sapiens
tggggctaaatgtga

SEQ ID NO: 571580 - DNA, 15 bp, Homo sapiens
gtggggctaaatgtg

SEQ ID NO: 571581 - DNA, 15 bp, Homo sapiens
agtggggctaaatgt

SEQ ID NO: 571582 - DNA, 15 bp, Homo sapiens
aagtggggctaaatg

SEQ ID NO: 571583 - DNA, 15 bp, Homo sapiens
gaagtggggctaaat

SEQ ID NO: 571584 - DNA, 15 bp, Homo sapiens
tgaagtggggctaaa

SEQ ID NO: 571585 - DNA, 15 bp, Homo sapiens
gtgaagtggggctaa

SEQ ID NO: 571586 - DNA, 15 bp, Homo sapiens
tgtgaagtggggcta

SEQ ID NO: 571587 - DNA, 15 bp, Homo sapiens
atgtgaagtggggct

SEQ ID NO: 571588 - DNA, 15 bp, Homo sapiens
aatgtgaagtggggc

SEQ ID NO: 571589 - DNA, 15 bp, Homo sapiens
taatgtgaagtgggg

SEQ ID NO: 571590 - DNA, 15 bp, Homo sapiens
ctaatgtgaagtggg

SEQ ID NO: 571591 - DNA, 15 bp, Homo sapiens
tctaatgtgaagtgg

SEQ ID NO: 571592 - DNA, 15 bp, Homo sapiens
gtctaatgtgaagtg

SEQ ID NO: 571593 - DNA, 15 bp, Homo sapiens
ggtctaatgtgaagt

SEQ ID NO: 571594 - DNA, 15 bp, Homo sapiens
tggtctaatgtgaag

SEQ ID NO: 571595 - DNA, 15 bp, Homo sapiens
ttggtctaatgtgaa

SEQ ID NO: 571596 - DNA, 15 bp, Homo sapiens
gttggtctaatgtga

SEQ ID NO: 571597 - DNA, 15 bp, Homo sapiens
tgttggtctaatgtg

SEQ ID NO: 571598 - DNA, 15 bp, Homo sapiens
gtgttggtctaatgt

SEQ ID NO: 571599 - DNA, 15 bp, Homo sapiens
tgtgttggtctaatg

SEQ ID NO: 571600 - DNA, 15 bp, Homo sapiens
gtgtgttggtctaat

SEQ ID NO: 571601 - DNA, 15 bp, Homo sapiens
ggtgtgttggtctaa

SEQ ID NO: 571602 - DNA, 15 bp, Homo sapiens
gggtgtgttggtcta

SEQ ID NO: 571603 - DNA, 15 bp, Homo sapiens
ggggtgtgttggtct

SEQ ID NO: 571604 - DNA, 15 bp, Homo sapiens
tggggtgtgttggtc

SEQ ID NO: 571605 - DNA, 15 bp, Homo sapiens
atggggtgtgttggt

SEQ ID NO: 571606 - DNA, 15 bp, Homo sapiens
gatggggtgtgttgg

SEQ ID NO: 571607 - DNA, 15 bp, Homo sapiens
ggatggggtgtgttg

SEQ ID NO: 571608 - DNA, 15 bp, Homo sapiens
tggatggggtgtgtt

SEQ ID NO: 571609 - DNA, 15 bp, Homo sapiens
ttggatggggtgtgt

SEQ ID NO: 571610 - DNA, 15 bp, Homo sapiens
gttggatggggtgtg

SEQ ID NO: 571611 - DNA, 15 bp, Homo sapiens
tgttggatggggtgt

SEQ ID NO: 571612 - DNA, 15 bp, Homo sapiens
gtgttggatggggtg

SEQ ID NO: 571613 - DNA, 15 bp, Homo sapiens
ggtgttggatggggt

SEQ ID NO: 571614 - DNA, 15 bp, Homo sapiens
tggtgttggatgggg

SEQ ID NO: 571615 - DNA, 15 bp, Homo sapiens
ctggtgttggatggg

SEQ ID NO: 571616 - DNA, 15 bp, Homo sapiens
gctggtgttggatgg

SEQ ID NO: 571617 - DNA, 15 bp, Homo sapiens
agctggtgttggatg

SEQ ID NO: 571618 - DNA, 15 bp, Homo sapiens
gagctggtgttggat

SEQ ID NO: 571619 - DNA, 15 bp, Homo sapiens
ggagctggtgttgga

SEQ ID NO: 571620 - DNA, 15 bp, Homo sapiens
gggagctggtgttgg

SEQ ID NO: 571621 - DNA, 15 bp, Homo sapiens
tgggagctggtgttg

SEQ ID NO: 571622 - DNA, 15 bp, Homo sapiens
ttgggagctggtgtt

SEQ ID NO: 571623 - DNA, 15 bp, Homo sapiens
tttgggagctggtgt

SEQ ID NO: 571624 - DNA, 15 bp, Homo sapiens
ttttgggagctggtg

SEQ ID NO: 571625 - DNA, 15 bp, Homo sapiens
tttttgggagctggt

SEQ ID NO: 571626 - DNA, 15 bp, Homo sapiens
ttttttgggagctgg

SEQ ID NO: 571627 - DNA, 15 bp, Homo sapiens
gttttttgggagctg

SEQ ID NO: 571628 - DNA, 15 bp, Homo sapiens
tgttttttgggagct

SEQ ID NO: 571629 - DNA, 15 bp, Homo sapiens
ctgttttttgggagc

SEQ ID NO: 571630 - DNA, 15 bp, Homo sapiens
gctgttttttgggag

SEQ ID NO: 571631 - DNA, 15 bp, Homo sapiens
agctgttttttggga

SEQ ID NO: 571632 - DNA, 15 bp, Homo sapiens
cagctgttttttggg

SEQ ID NO: 571633 - DNA, 15 bp, Homo sapiens
acagctgttttttgg

SEQ ID NO: 571634 - DNA, 15 bp, Homo sapiens
aacagctgttttttg

SEQ ID NO: 571635 - DNA, 15 bp, Homo sapiens
taacagctgtttttt

SEQ ID NO: 571636 - DNA, 15 bp, Homo sapiens
ataacagctgttttt

SEQ ID NO: 571637 - DNA, 15 bp, Homo sapiens
tataacagctgtttt

SEQ ID NO: 571638 - DNA, 15 bp, Homo sapiens
ttataacagctgttt

SEQ ID NO: 571639 - DNA, 15 bp, Homo sapiens
gttataacagctgtt

SEQ ID NO: 571640 - DNA, 15 bp, Homo sapiens
tgttataacagctgt

SEQ ID NO: 571641 - DNA, 15 bp, Homo sapiens
ctgttataacagctg

SEQ ID NO: 571642 - DNA, 15 bp, Homo sapiens
actgttataacagct

SEQ ID NO: 571643 - DNA, 15 bp, Homo sapiens
aactgttataacagc

SEQ ID NO: 571644 - DNA, 15 bp, Homo sapiens
gaactgttataacag

SEQ ID NO: 571645 - DNA, 15 bp, Homo sapiens
agaactgttataaca

SEQ ID NO: 571646 - DNA, 15 bp, Homo sapiens
cagaactgttataac

SEQ ID NO: 571647 - DNA, 15 bp, Homo sapiens
tcagaactgttataa

SEQ ID NO: 571648 - DNA, 15 bp, Homo sapiens
ttcagaactgttata

SEQ ID NO: 571649 - DNA, 15 bp, Homo sapiens
cttcagaactgttat

SEQ ID NO: 571650 - DNA, 15 bp, Homo sapiens
acttcagaactgtta

SEQ ID NO: 571651 - DNA, 15 bp, Homo sapiens
cacttcagaactgtt

SEQ ID NO: 571652 - DNA, 15 bp, Homo sapiens
tcacttcagaactgt

SEQ ID NO: 571653 - DNA, 15 bp, Homo sapiens
atcacttcagaactg

SEQ ID NO: 571654 - DNA, 15 bp, Homo sapiens
gatcacttcagaact

SEQ ID NO: 571655 - DNA, 15 bp, Homo sapiens
ggatcacttcagaac

SEQ ID NO: 571656 - DNA, 15 bp, Homo sapiens
aggatcacttcagaa

SEQ ID NO: 571657 - DNA, 15 bp, Homo sapiens
gaggatcacttcaga

SEQ ID NO: 571658 - DNA, 15 bp, Homo sapiens
tgaggatcacttcag

SEQ ID NO: 571659 - DNA, 15 bp, Homo sapiens
gtgaggatcacttca

SEQ ID NO: 571660 - DNA, 15 bp, Homo sapiens
tgtgaggatcacttc

SEQ ID NO: 571661 - DNA, 15 bp, Homo sapiens
ctgtgaggatcactt

SEQ ID NO: 571662 - DNA, 15 bp, Homo sapiens
cctgtgaggatcact

SEQ ID NO: 571663 - DNA, 15 bp, Homo sapiens
tcctgtgaggatcac

SEQ ID NO: 571664 - DNA, 15 bp, Homo sapiens
gtcctgtgaggatca

SEQ ID NO: 571665 - DNA, 15 bp, Homo sapiens
agtcctgtgaggatc

SEQ ID NO: 571666 - DNA, 15 bp, Homo sapiens
cagtcctgtgaggat

SEQ ID NO: 571667 - DNA, 15 bp, Homo sapiens
gcagtcctgtgagga

SEQ ID NO: 571668 - DNA, 15 bp, Homo sapiens
tgcagtcctgtgagg

SEQ ID NO: 571669 - DNA, 15 bp, Homo sapiens
ttgcagtcctgtgag

SEQ ID NO: 571670 - DNA, 15 bp, Homo sapiens
gttgcagtcctgtga

SEQ ID NO: 571671 - DNA, 15 bp, Homo sapiens
tgttgcagtcctgtg

SEQ ID NO: 571672 - DNA, 15 bp, Homo sapiens
atgttgcagtcctgt

SEQ ID NO: 571673 - DNA, 15 bp, Homo sapiens
gatgttgcagtcctg

SEQ ID NO: 571674 - DNA, 15 bp, Homo sapiens
tgatgttgcagtcct

SEQ ID NO: 571675 - DNA, 15 bp, Homo sapiens
ttgatgttgcagtcc

SEQ ID NO: 571676 - DNA, 15 bp, Homo sapiens
gttgatgttgcagtc

SEQ ID NO: 571677 - DNA, 15 bp, Homo sapiens
tgttgatgttgcagt

SEQ ID NO: 571678 - DNA, 15 bp, Homo sapiens
ttgttgatgttgcag

SEQ ID NO: 571679 - DNA, 15 bp, Homo sapiens
gttgttgatgttgca

SEQ ID NO: 571680 - DNA, 15 bp, Homo sapiens
agttgttgatgttgc

SEQ ID NO: 571681 - DNA, 15 bp, Homo sapiens
aagttgttgatgttg

SEQ ID NO: 571682 - DNA, 15 bp, Homo sapiens
taagttgttgatgtt

SEQ ID NO: 571683 - DNA, 15 bp, Homo sapiens
gtaagttgttgatgt

SEQ ID NO: 571684 - DNA, 15 bp, Homo sapiens
agtaagttgttgatg

SEQ ID NO: 571685 - DNA, 15 bp, Homo sapiens
aagtaagttgttgat

SEQ ID NO: 571686 - DNA, 15 bp, Homo sapiens
gaagtaagttgttga

SEQ ID NO: 571687 - DNA, 15 bp, Homo sapiens
tgaagtaagttgttg

SEQ ID NO: 571688 - DNA, 15 bp, Homo sapiens
atgaagtaagttgtt

SEQ ID NO: 571689 - DNA, 15 bp, Homo sapiens
aatgaagtaagttgt

SEQ ID NO: 571690 - DNA, 15 bp, Homo sapiens
gaatgaagtaagttg

SEQ ID NO: 571691 - DNA, 15 bp, Homo sapiens
tgaatgaagtaagtt

SEQ ID NO: 571692 - DNA, 15 bp, Homo sapiens
ctgaatgaagtaagt

SEQ ID NO: 571693 - DNA, 15 bp, Homo sapiens
gctgaatgaagtaag

SEQ ID NO: 571694 - DNA, 15 bp, Homo sapiens
agctgaatgaagtaa

SEQ ID NO: 571695 - DNA, 15 bp, Homo sapiens
tagctgaatgaagta

SEQ ID NO: 571696 - DNA, 15 bp, Homo sapiens
atagctgaatgaagt

SEQ ID NO: 571697 - DNA, 15 bp, Homo sapiens
gatagctgaatgaag

SEQ ID NO: 571698 - DNA, 15 bp, Homo sapiens
ggatagctgaatgaa

SEQ ID NO: 571699 - DNA, 15 bp, Homo sapiens
aggatagctgaatga

SEQ ID NO: 571700 - DNA, 15 bp, Homo sapiens
gaggatagctgaatg

SEQ ID NO: 571701 - DNA, 15 bp, Homo sapiens
tgaggatagctgaat

SEQ ID NO: 571702 - DNA, 15 bp, Homo sapiens
ttgaggatagctgaa

SEQ ID NO: 571703 - DNA, 15 bp, Homo sapiens
cttgaggatagctga

SEQ ID NO: 571704 - DNA, 15 bp, Homo sapiens
acttgaggatagctg

SEQ ID NO: 571705 - DNA, 15 bp, Homo sapiens
cacttgaggatagct

SEQ ID NO: 571706 - DNA, 15 bp, Homo sapiens
gcacttgaggatagc

SEQ ID NO: 571707 - DNA, 15 bp, Homo sapiens
agcacttgaggatag

SEQ ID NO: 571708 - DNA, 15 bp, Homo sapiens
tagcacttgaggata

SEQ ID NO: 571709 - DNA, 15 bp, Homo sapiens
ctagcacttgaggat

SEQ ID NO: 571710 - DNA, 15 bp, Homo sapiens
tctagcacttgagga

SEQ ID NO: 571711 - DNA, 15 bp, Homo sapiens
ctctagcacttgagg

SEQ ID NO: 571712 - DNA, 15 bp, Homo sapiens
actctagcacttgag

SEQ ID NO: 571713 - DNA, 15 bp, Homo sapiens
cactctagcacttga

SEQ ID NO: 571714 - DNA, 15 bp, Homo sapiens
gcactctagcacttg

SEQ ID NO: 571715 - DNA, 15 bp, Homo sapiens
ggcactctagcactt

SEQ ID NO: 571716 - DNA, 15 bp, Homo sapiens
tggcactctagcact

SEQ ID NO: 571717 - DNA, 15 bp, Homo sapiens
ctggcactctagcac

SEQ ID NO: 571718 - DNA, 15 bp, Homo sapiens
cctggcactctagca

SEQ ID NO: 571719 - DNA, 15 bp, Homo sapiens
gcctggcactctagc

SEQ ID NO: 571720 - DNA, 15 bp, Homo sapiens
tgcctggcactctag

SEQ ID NO: 571721 - DNA, 15 bp, Homo sapiens
atgcctggcactcta

SEQ ID NO: 571722 - DNA, 15 bp, Homo sapiens
catgcctggcactct

SEQ ID NO: 571723 - DNA, 15 bp, Homo sapiens
acatgcctggcactc

SEQ ID NO: 571724 - DNA, 15 bp, Homo sapiens
aacatgcctggcact

SEQ ID NO: 571725 - DNA, 15 bp, Homo sapiens
caacatgcctggcac

SEQ ID NO: 571726 - DNA, 15 bp, Homo sapiens
tcaacatgcctggca

SEQ ID NO: 571727 - DNA, 15 bp, Homo sapiens
atcaacatgcctggc

SEQ ID NO: 571728 - DNA, 15 bp, Homo sapiens
gatcaacatgcctgg

SEQ ID NO: 571729 - DNA, 15 bp, Homo sapiens
agatcaacatgcctg

SEQ ID NO: 571730 - DNA, 15 bp, Homo sapiens
aagatcaacatgcct

SEQ ID NO: 571731 - DNA, 15 bp, Homo sapiens
gaagatcaacatgcc

SEQ ID NO: 571732 - DNA, 15 bp, Homo sapiens
tgaagatcaacatgc

SEQ ID NO: 571733 - DNA, 15 bp, Homo sapiens
ctgaagatcaacatg

SEQ ID NO: 571734 - DNA, 15 bp, Homo sapiens
cctgaagatcaacat

SEQ ID NO: 571735 - DNA, 15 bp, Homo sapiens
acctgaagatcaaca

SEQ ID NO: 571736 - DNA, 15 bp, Homo sapiens
cacctgaagatcaac

SEQ ID NO: 571737 - DNA, 15 bp, Homo sapiens
ccacctgaagatcaa

SEQ ID NO: 571738 - DNA, 15 bp, Homo sapiens
cccacctgaagatca

SEQ ID NO: 571739 - DNA, 15 bp, Homo sapiens
tcccacctgaagatc

SEQ ID NO: 571740 - DNA, 15 bp, Homo sapiens
ttcccacctgaagat

SEQ ID NO: 571741 - DNA, 15 bp, Homo sapiens
cttcccacctgaaga

SEQ ID NO: 571742 - DNA, 15 bp, Homo sapiens
ccttcccacctgaag

SEQ ID NO: 571743 - DNA, 15 bp, Homo sapiens
gccttcccacctgaa

SEQ ID NO: 571744 - DNA, 15 bp, Homo sapiens
agccttcccacctga

SEQ ID NO: 571745 - DNA, 15 bp, Homo sapiens
cagccttcccacctg

SEQ ID NO: 571746 - DNA, 15 bp, Homo sapiens
tcagccttcccacct

SEQ ID NO: 571747 - DNA, 15 bp, Homo sapiens
gtcagccttcccacc

SEQ ID NO: 571748 - DNA, 15 bp, Homo sapiens
agtcagccttcccac

SEQ ID NO: 571749 - DNA, 15 bp, Homo sapiens
aagtcagccttccca

SEQ ID NO: 571750 - DNA, 15 bp, Homo sapiens
gaagtcagccttccc

SEQ ID NO: 571751 - DNA, 15 bp, Homo sapiens
ggaagtcagccttcc

SEQ ID NO: 571752 - DNA, 15 bp, Homo sapiens
aggaagtcagccttc

SEQ ID NO: 571753 - DNA, 15 bp, Homo sapiens
aaggaagtcagcctt

SEQ ID NO: 571754 - DNA, 15 bp, Homo sapiens
gaaggaagtcagcct

SEQ ID NO: 571755 - DNA, 15 bp, Homo sapiens
tgaaggaagtcagcc

SEQ ID NO: 571756 - DNA, 15 bp, Homo sapiens
ctgaaggaagtcagc

SEQ ID NO: 571757 - DNA, 15 bp, Homo sapiens
actgaaggaagtcag

SEQ ID NO: 571758 - DNA, 15 bp, Homo sapiens
cactgaaggaagtca

SEQ ID NO: 571759 - DNA, 15 bp, Homo sapiens
acactgaaggaagtc

SEQ ID NO: 571760 - DNA, 15 bp, Homo sapiens
cacactgaaggaagt

SEQ ID NO: 571761 - DNA, 15 bp, Homo sapiens
acacactgaaggaag

SEQ ID NO: 571762 - DNA, 15 bp, Homo sapiens
aacacactgaaggaa

SEQ ID NO: 571763 - DNA, 15 bp, Homo sapiens
gaacacactgaagga

SEQ ID NO: 571764 - DNA, 15 bp, Homo sapiens
tgaacacactgaagg

SEQ ID NO: 571765 - DNA, 15 bp, Homo sapiens
ttgaacacactgaag

SEQ ID NO: 571766 - DNA, 15 bp, Homo sapiens
tttgaacacactgaa

SEQ ID NO: 571767 - DNA, 15 bp, Homo sapiens
atttgaacacactga

SEQ ID NO: 571768 - DNA, 15 bp, Homo sapiens
aatttgaacacactg

SEQ ID NO: 571769 - DNA, 15 bp, Homo sapiens
aaatttgaacacact

SEQ ID NO: 571770 - DNA, 15 bp, Homo sapiens
gaaatttgaacacac

SEQ ID NO: 571771 - DNA, 15 bp, Homo sapiens
agaaatttgaacaca

SEQ ID NO: 571772 - DNA, 15 bp, Homo sapiens
aagaaatttgaacac

SEQ ID NO: 571773 - DNA, 15 bp, Homo sapiens
caagaaatttgaaca

SEQ ID NO: 571774 - DNA, 15 bp, Homo sapiens
ccaagaaatttgaac

SEQ ID NO: 571775 - DNA, 15 bp, Homo sapiens
tccaagaaatttgaa

SEQ ID NO: 571776 - DNA, 15 bp, Homo sapiens
gtccaagaaatttga

SEQ ID NO: 571777 - DNA, 15 bp, Homo sapiens
ggtccaagaaatttg

SEQ ID NO: 571778 - DNA, 15 bp, Homo sapiens
aggtccaagaaattt

SEQ ID NO: 571779 - DNA, 15 bp, Homo sapiens
caggtccaagaaatt

SEQ ID NO: 571780 - DNA, 15 bp, Homo sapiens
gcaggtccaagaaat

SEQ ID NO: 571781 - DNA, 15 bp, Homo sapiens
agcaggtccaagaaa

SEQ ID NO: 571782 - DNA, 15 bp, Homo sapiens
cagcaggtccaagaa

SEQ ID NO: 571783 - DNA, 15 bp, Homo sapiens
tcagcaggtccaaga

SEQ ID NO: 571784 - DNA, 15 bp, Homo sapiens
ttcagcaggtccaag

SEQ ID NO: 571785 - DNA, 15 bp, Homo sapiens
cttcagcaggtccaa

SEQ ID NO: 571786 - DNA, 15 bp, Homo sapiens
tcttcagcaggtcca

SEQ ID NO: 571787 - DNA, 15 bp, Homo sapiens
gtcttcagcaggtcc

SEQ ID NO: 571788 - DNA, 15 bp, Homo sapiens
agtcttcagcaggtc

SEQ ID NO: 571789 - DNA, 15 bp, Homo sapiens
gagtcttcagcaggt

SEQ ID NO: 571790 - DNA, 15 bp, Homo sapiens
tgagtcttcagcagg

SEQ ID NO: 571791 - DNA, 15 bp, Homo sapiens
ctgagtcttcagcag

SEQ ID NO: 571792 - DNA, 15 bp, Homo sapiens
gctgagtcttcagca

SEQ ID NO: 571793 - DNA, 15 bp, Homo sapiens
agctgagtcttcagc

SEQ ID NO: 571794 - DNA, 15 bp, Homo sapiens
gagctgagtcttcag

SEQ ID NO: 571795 - DNA, 15 bp, Homo sapiens
agagctgagtcttca

SEQ ID NO: 571796 - DNA, 15 bp, Homo sapiens
gagagctgagtcttc

SEQ ID NO: 571797 - DNA, 15 bp, Homo sapiens
agagagctgagtctt

SEQ ID NO: 571798 - DNA, 15 bp, Homo sapiens
cagagagctgagtct

SEQ ID NO: 571799 - DNA, 15 bp, Homo sapiens
gcagagagctgagtc

SEQ ID NO: 571800 - DNA, 15 bp, Homo sapiens
tgcagagagctgagt

SEQ ID NO: 571801 - DNA, 15 bp, Homo sapiens
gtgcagagagctgag

SEQ ID NO: 571802 - DNA, 15 bp, Homo sapiens
agtgcagagagctga

SEQ ID NO: 571803 - DNA, 15 bp, Homo sapiens
cagtgcagagagctg

SEQ ID NO: 571804 - DNA, 15 bp, Homo sapiens
gcagtgcagagagct

SEQ ID NO: 571805 - DNA, 15 bp, Homo sapiens
agcagtgcagagagc

SEQ ID NO: 571806 - DNA, 15 bp, Homo sapiens
aagcagtgcagagag

SEQ ID NO: 571807 - DNA, 15 bp, Homo sapiens
caagcagtgcagaga

SEQ ID NO: 571808 - DNA, 15 bp, Homo sapiens
acaagcagtgcagag

SEQ ID NO: 571809 - DNA, 15 bp, Homo sapiens
tacaagcagtgcaga

SEQ ID NO: 571810 - DNA, 15 bp, Homo sapiens
ctacaagcagtgcag

SEQ ID NO: 571811 - DNA, 15 bp, Homo sapiens
cctacaagcagtgca

SEQ ID NO: 571812 - DNA, 15 bp, Homo sapiens
tcctacaagcagtgc

SEQ ID NO: 571813 - DNA, 15 bp, Homo sapiens
ttcctacaagcagtg

SEQ ID NO: 571814 - DNA, 15 bp, Homo sapiens
cttcctacaagcagt

SEQ ID NO: 571815 - DNA, 15 bp, Homo sapiens
acttcctacaagcag

SEQ ID NO: 571816 - DNA, 15 bp, Homo sapiens
tacttcctacaagca

SEQ ID NO: 571817 - DNA, 15 bp, Homo sapiens
atacttcctacaagc

SEQ ID NO: 571818 - DNA, 15 bp, Homo sapiens
tatacttcctacaag

SEQ ID NO: 571819 - DNA, 15 bp, Homo sapiens
ttatacttcctacaa

SEQ ID NO: 571820 - DNA, 15 bp, Homo sapiens
attatacttcctaca

SEQ ID NO: 571821 - DNA, 15 bp, Homo sapiens
cattatacttcctac

SEQ ID NO: 571822 - DNA, 15 bp, Homo sapiens
tcattatacttccta

SEQ ID NO: 571823 - DNA, 15 bp, Homo sapiens
atcattatacttcct

SEQ ID NO: 571824 - DNA, 15 bp, Homo sapiens
aatcattatacttcc

SEQ ID NO: 571825 - DNA, 15 bp, Homo sapiens
aaatcattatacttc

SEQ ID NO: 571826 - DNA, 15 bp, Homo sapiens
caaatcattatactt

SEQ ID NO: 571827 - DNA, 15 bp, Homo sapiens
ccaaatcattatact

SEQ ID NO: 571828 - DNA, 15 bp, Homo sapiens
gccaaatcattatac

SEQ ID NO: 571829 - DNA, 15 bp, Homo sapiens
tgccaaatcattata

SEQ ID NO: 571830 - DNA, 15 bp, Homo sapiens
ctgccaaatcattat

SEQ ID NO: 571831 - DNA, 15 bp, Homo sapiens
tctgccaaatcatta

SEQ ID NO: 571832 - DNA, 15 bp, Homo sapiens
atctgccaaatcatt

SEQ ID NO: 571833 - DNA, 15 bp, Homo sapiens
tatctgccaaatcat

SEQ ID NO: 571834 - DNA, 15 bp, Homo sapiens
ctatctgccaaatca

SEQ ID NO: 571835 - DNA, 15 bp, Homo sapiens
cctatctgccaaatc

SEQ ID NO: 571836 - DNA, 15 bp, Homo sapiens
tcctatctgccaaat

SEQ ID NO: 571837 - DNA, 15 bp, Homo sapiens
ttcctatctgccaaa

SEQ ID NO: 571838 - DNA, 15 bp, Homo sapiens
gttcctatctgccaa

SEQ ID NO: 571839 - DNA, 15 bp, Homo sapiens
tgttcctatctgcca

SEQ ID NO: 571840 - DNA, 15 bp, Homo sapiens
ttgttcctatctgcc

SEQ ID NO: 571841 - DNA, 15 bp, Homo sapiens
attgttcctatctgc

SEQ ID NO: 571842 - DNA, 15 bp, Homo sapiens
cattgttcctatctg

SEQ ID NO: 571843 - DNA, 15 bp, Homo sapiens
tcattgttcctatct

SEQ ID NO: 571844 - DNA, 15 bp, Homo sapiens
ttcattgttcctatc

SEQ ID NO: 571845 - DNA, 15 bp, Homo sapiens
cttcattgttcctat

SEQ ID NO: 571846 - DNA, 15 bp, Homo sapiens
tcttcattgttccta

SEQ ID NO: 571847 - DNA, 15 bp, Homo sapiens
ctcttcattgttcct

SEQ ID NO: 571848 - DNA, 15 bp, Homo sapiens
gctcttcattgttcc

SEQ ID NO: 571849 - DNA, 15 bp, Homo sapiens
agctcttcattgttc

SEQ ID NO: 571850 - DNA, 15 bp, Homo sapiens
tagctcttcattgtt

SEQ ID NO: 571851 - DNA, 15 bp, Homo sapiens
atagctcttcattgt

SEQ ID NO: 571852 - DNA, 15 bp, Homo sapiens
tatagctcttcattg

SEQ ID NO: 571853 - DNA, 15 bp, Homo sapiens
ttatagctcttcatt

SEQ ID NO: 571854 - DNA, 15 bp, Homo sapiens
tttatagctcttcat

SEQ ID NO: 571855 - DNA, 15 bp, Homo sapiens
ttttatagctcttca

SEQ ID NO: 571856 - DNA, 15 bp, Homo sapiens
tttttatagctcttc

SEQ ID NO: 571857 - DNA, 15 bp, Homo sapiens
ttttttatagctctt

SEQ ID NO: 571858 - DNA, 15 bp, Homo sapiens
tttttttatagctct

SEQ ID NO: 571859 - DNA, 15 bp, Homo sapiens
gtttttttatagctc

SEQ ID NO: 571860 - DNA, 15 bp, Homo sapiens
tgtttttttatagct

SEQ ID NO: 571861 - DNA, 15 bp, Homo sapiens
atgtttttttatagc

SEQ ID NO: 571862 - DNA, 15 bp, Homo sapiens
catgtttttttatag

SEQ ID NO: 571863 - DNA, 15 bp, Homo sapiens
tcatgtttttttata

SEQ ID NO: 571864 - DNA, 15 bp, Homo sapiens
ctcatgtttttttat

SEQ ID NO: 571865 - DNA, 15 bp, Homo sapiens
tctcatgttttttta

SEQ ID NO: 571866 - DNA, 15 bp, Homo sapiens
atctcatgttttttt

SEQ ID NO: 571867 - DNA, 15 bp, Homo sapiens
tatctcatgtttttt

SEQ ID NO: 571868 - DNA, 15 bp, Homo sapiens
ttatctcatgttttt

SEQ ID NO: 571869 - DNA, 15 bp, Homo sapiens
tttatctcatgtttt

SEQ ID NO: 571870 - DNA, 15 bp, Homo sapiens
gtttatctcatgttt

SEQ ID NO: 571871 - DNA, 15 bp, Homo sapiens
ggtttatctcatgtt

SEQ ID NO: 571872 - DNA, 15 bp, Homo sapiens
tggtttatctcatgt

SEQ ID NO: 571873 - DNA, 15 bp, Homo sapiens
atggtttatctcatg

SEQ ID NO: 571874 - DNA, 15 bp, Homo sapiens
catggtttatctcat

SEQ ID NO: 571875 - DNA, 15 bp, Homo sapiens
acatggtttatctca

SEQ ID NO: 571876 - DNA, 15 bp, Homo sapiens
tacatggtttatctc

SEQ ID NO: 571877 - DNA, 15 bp, Homo sapiens
ttacatggtttatct

SEQ ID NO: 571878 - DNA, 15 bp, Homo sapiens
tttacatggtttatc

SEQ ID NO: 571879 - DNA, 15 bp, Homo sapiens
atttacatggtttat

SEQ ID NO: 571880 - DNA, 15 bp, Homo sapiens
catttacatggttta

SEQ ID NO: 571881 - DNA, 15 bp, Homo sapiens
gcatttacatggttt

SEQ ID NO: 571882 - DNA, 15 bp, Homo sapiens
ggcatttacatggtt

SEQ ID NO: 571883 - DNA, 15 bp, Homo sapiens
tggcatttacatggt

SEQ ID NO: 571884 - DNA, 15 bp, Homo sapiens
atggcatttacatgg

SEQ ID NO: 571885 - DNA, 15 bp, Homo sapiens
tatggcatttacatg

SEQ ID NO: 571886 - DNA, 15 bp, Homo sapiens
ttatggcatttacat

SEQ ID NO: 571887 - DNA, 15 bp, Homo sapiens
tttatggcatttaca

SEQ ID NO: 571888 - DNA, 15 bp, Homo sapiens
atttatggcatttac

SEQ ID NO: 571889 - DNA, 15 bp, Homo sapiens
tatttatggcattta

SEQ ID NO: 571890 - DNA, 15 bp, Homo sapiens
atatttatggcattt

SEQ ID NO: 571891 - DNA, 15 bp, Homo sapiens
aatatttatggcatt

SEQ ID NO: 571892 - DNA, 15 bp, Homo sapiens
caatatttatggcat

SEQ ID NO: 571893 - DNA, 15 bp, Homo sapiens
tcaatatttatggca

SEQ ID NO: 571894 - DNA, 15 bp, Homo sapiens
ctcaatatttatggc

SEQ ID NO: 571895 - DNA, 15 bp, Homo sapiens
actcaatatttatgg

SEQ ID NO: 571896 - DNA, 15 bp, Homo sapiens
tactcaatatttatg

SEQ ID NO: 571897 - DNA, 15 bp, Homo sapiens
gtactcaatatttat

SEQ ID NO: 571898 - DNA, 15 bp, Homo sapiens
agtactcaatattta

SEQ ID NO: 571899 - DNA, 15 bp, Homo sapiens
cagtactcaatattt

SEQ ID NO: 571900 - DNA, 15 bp, Homo sapiens
acagtactcaatatt

SEQ ID NO: 571901 - DNA, 15 bp, Homo sapiens
cacagtactcaatat

SEQ ID NO: 571902 - DNA, 15 bp, Homo sapiens
gcacagtactcaata

SEQ ID NO: 571903 - DNA, 15 bp, Homo sapiens
agcacagtactcaat

SEQ ID NO: 571904 - DNA, 15 bp, Homo sapiens
tagcacagtactcaa

SEQ ID NO: 571905 - DNA, 15 bp, Homo sapiens
ctagcacagtactca

SEQ ID NO: 571906 - DNA, 15 bp, Homo sapiens
tctagcacagtactc

SEQ ID NO: 571907 - DNA, 15 bp, Homo sapiens
ctctagcacagtact

SEQ ID NO: 571908 - DNA, 15 bp, Homo sapiens
actctagcacagtac

SEQ ID NO: 571909 - DNA, 15 bp, Homo sapiens
aactctagcacagta

SEQ ID NO: 571910 - DNA, 15 bp, Homo sapiens
taactctagcacagt

SEQ ID NO: 571911 - DNA, 15 bp, Homo sapiens
gtaactctagcacag

SEQ ID NO: 571912 - DNA, 15 bp, Homo sapiens
tgtaactctagcaca

SEQ ID NO: 571913 - DNA, 15 bp, Homo sapiens
atgtaactctagcac

SEQ ID NO: 571914 - DNA, 15 bp, Homo sapiens
tatgtaactctagca

SEQ ID NO: 571915 - DNA, 15 bp, Homo sapiens
ttatgtaactctagc

SEQ ID NO: 571916 - DNA, 15 bp, Homo sapiens
cttatgtaactctag

SEQ ID NO: 571917 - DNA, 15 bp, Homo sapiens
tcttatgtaactcta

SEQ ID NO: 571918 - DNA, 15 bp, Homo sapiens
atcttatgtaactct

SEQ ID NO: 571919 - DNA, 15 bp, Homo sapiens
aatcttatgtaactc

SEQ ID NO: 571920 - DNA, 15 bp, Homo sapiens
gaatcttatgtaact

SEQ ID NO: 571921 - DNA, 15 bp, Homo sapiens
tgaatcttatgtaac

SEQ ID NO: 571922 - DNA, 15 bp, Homo sapiens
ttgaatcttatgtaa

SEQ ID NO: 571923 - DNA, 15 bp, Homo sapiens
tttgaatcttatgta

SEQ ID NO: 571924 - DNA, 15 bp, Homo sapiens
atttgaatcttatgt

SEQ ID NO: 571925 - DNA, 15 bp, Homo sapiens
aatttgaatcttatg

SEQ ID NO: 571926 - DNA, 15 bp, Homo sapiens
taatttgaatcttat

SEQ ID NO: 571927 - DNA, 15 bp, Homo sapiens
ttaatttgaatctta

SEQ ID NO: 571928 - DNA, 15 bp, Homo sapiens
attaatttgaatctt

SEQ ID NO: 571929 - DNA, 15 bp, Homo sapiens
tattaatttgaatct

SEQ ID NO: 571930 - DNA, 15 bp, Homo sapiens
ttattaatttgaatc

SEQ ID NO: 571931 - DNA, 15 bp, Homo sapiens
cttattaatttgaat

SEQ ID NO: 571932 - DNA, 15 bp, Homo sapiens
gcttattaatttgaa

SEQ ID NO: 571933 - DNA, 15 bp, Homo sapiens
tgcttattaatttga

SEQ ID NO: 571934 - DNA, 15 bp, Homo sapiens
ttgcttattaatttg

SEQ ID NO: 571935 - DNA, 15 bp, Homo sapiens
attgcttattaattt

SEQ ID NO: 571936 - DNA, 15 bp, Homo sapiens
tattgcttattaatt

SEQ ID NO: 571937 - DNA, 15 bp, Homo sapiens
ctattgcttattaat

SEQ ID NO: 571938 - DNA, 15 bp, Homo sapiens
tctattgcttattaa

SEQ ID NO: 571939 - DNA, 15 bp, Homo sapiens
ttctattgcttatta

SEQ ID NO: 571940 - DNA, 15 bp, Homo sapiens
tttctattgcttatt

SEQ ID NO: 571941 - DNA, 15 bp, Homo sapiens
ttttctattgcttat

SEQ ID NO: 571942 - DNA, 15 bp, Homo sapiens
attttctattgctta

SEQ ID NO: 571943 - DNA, 15 bp, Homo sapiens
cattttctattgctt

SEQ ID NO: 571944 - DNA, 15 bp, Homo sapiens
acattttctattgct

SEQ ID NO: 571945 - DNA, 15 bp, Homo sapiens
aacattttctattgc

SEQ ID NO: 571946 - DNA, 15 bp, Homo sapiens
aaacattttctattg

SEQ ID NO: 571947 - DNA, 15 bp, Homo sapiens
gaaacattttctatt

SEQ ID NO: 571948 - DNA, 15 bp, Homo sapiens
ggaaacattttctat

SEQ ID NO: 571949 - DNA, 15 bp, Homo sapiens
tggaaacattttcta

SEQ ID NO: 571950 - DNA, 15 bp, Homo sapiens
gtggaaacattttct

SEQ ID NO: 571951 - DNA, 15 bp, Homo sapiens
tgtggaaacattttc

SEQ ID NO: 571952 - DNA, 15 bp, Homo sapiens
ctgtggaaacatttt

SEQ ID NO: 571953 - DNA, 15 bp, Homo sapiens
tctgtggaaacattt

SEQ ID NO: 571954 - DNA, 15 bp, Homo sapiens
ttctgtggaaacatt

SEQ ID NO: 571955 - DNA, 15 bp, Homo sapiens
gttctgtggaaacat

SEQ ID NO: 571956 - DNA, 15 bp, Homo sapiens
agttctgtggaaaca

SEQ ID NO: 571957 - DNA, 15 bp, Homo sapiens
aagttctgtggaaac

SEQ ID NO: 571958 - DNA, 15 bp, Homo sapiens
aaagttctgtggaaa

SEQ ID NO: 571959 - DNA, 15 bp, Homo sapiens
caaagttctgtggaa

SEQ ID NO: 571960 - DNA, 15 bp, Homo sapiens
tcaaagttctgtgga

SEQ ID NO: 571961 - DNA, 15 bp, Homo sapiens
ttcaaagttctgtgg

SEQ ID NO: 571962 - DNA, 15 bp, Homo sapiens
tttcaaagttctgtg

SEQ ID NO: 571963 - DNA, 15 bp, Homo sapiens
gtttcaaagttctgt

SEQ ID NO: 571964 - DNA, 15 bp, Homo sapiens
ggtttcaaagttctg

SEQ ID NO: 571965 - DNA, 15 bp, Homo sapiens
aggtttcaaagttct

SEQ ID NO: 571966 - DNA, 15 bp, Homo sapiens
taggtttcaaagttc

SEQ ID NO: 571967 - DNA, 15 bp, Homo sapiens
ataggtttcaaagtt

SEQ ID NO: 571968 - DNA, 15 bp, Homo sapiens
tataggtttcaaagt

SEQ ID NO: 571969 - DNA, 15 bp, Homo sapiens
ttataggtttcaaag

SEQ ID NO: 571970 - DNA, 15 bp, Homo sapiens
tttataggtttcaaa

SEQ ID NO: 571971 - DNA, 15 bp, Homo sapiens
ctttataggtttcaa

SEQ ID NO: 571972 - DNA, 15 bp, Homo sapiens
actttataggtttca

SEQ ID NO: 571973 - DNA, 15 bp, Homo sapiens
gactttataggtttc

SEQ ID NO: 571974 - DNA, 15 bp, Homo sapiens
tgactttataggttt

SEQ ID NO: 571975 - DNA, 15 bp, Homo sapiens
ttgactttataggtt

SEQ ID NO: 571976 - DNA, 15 bp, Homo sapiens
tttgactttataggt

SEQ ID NO: 571977 - DNA, 15 bp, Homo sapiens
ttttgactttatagg

SEQ ID NO: 571978 - DNA, 15 bp, Homo sapiens
gttttgactttatag

SEQ ID NO: 571979 - DNA, 15 bp, Homo sapiens
agttttgactttata

SEQ ID NO: 571980 - DNA, 15 bp, Homo sapiens
aagttttgactttat

SEQ ID NO: 571981 - DNA, 15 bp, Homo sapiens
aaagttttgacttta

SEQ ID NO: 571982 - DNA, 15 bp, Homo sapiens
aaaagttttgacttt

SEQ ID NO: 571983 - DNA, 15 bp, Homo sapiens
taaaagttttgactt

SEQ ID NO: 571984 - DNA, 15 bp, Homo sapiens
ctaaaagttttgact

SEQ ID NO: 571985 - DNA, 15 bp, Homo sapiens
cctaaaagttttgac

SEQ ID NO: 571986 - DNA, 15 bp, Homo sapiens
acctaaaagttttga

SEQ ID NO: 571987 - DNA, 15 bp, Homo sapiens
gacctaaaagttttg

SEQ ID NO: 571988 - DNA, 15 bp, Homo sapiens
agacctaaaagtttt

SEQ ID NO: 571989 - DNA, 15 bp, Homo sapiens
aagacctaaaagttt

SEQ ID NO: 571990 - DNA, 15 bp, Homo sapiens
aaagacctaaaagtt

SEQ ID NO: 571991 - DNA, 15 bp, Homo sapiens
taaagacctaaaagt

SEQ ID NO: 571992 - DNA, 15 bp, Homo sapiens
ctaaagacctaaaag

SEQ ID NO: 571993 - DNA, 15 bp, Homo sapiens
tctaaagacctaaaa

SEQ ID NO: 571994 - DNA, 15 bp, Homo sapiens
ctctaaagacctaaa

SEQ ID NO: 571995 - DNA, 15 bp, Homo sapiens
tctctaaagacctaa

SEQ ID NO: 571996 - DNA, 15 bp, Homo sapiens
ctctctaaagaccta

SEQ ID NO: 571997 - DNA, 15 bp, Homo sapiens
tctctctaaagacct

SEQ ID NO: 571998 - DNA, 15 bp, Homo sapiens
ttctctctaaagacc

SEQ ID NO: 571999 - DNA, 15 bp, Homo sapiens
tttctctctaaagac

SEQ ID NO: 572000 - DNA, 15 bp, Homo sapiens
ttttctctctaaaga

SEQ ID NO: 572001 - DNA, 15 bp, Homo sapiens
attttctctctaaag

SEQ ID NO: 572002 - DNA, 15 bp, Homo sapiens
aattttctctctaaa

SEQ ID NO: 572003 - DNA, 15 bp, Homo sapiens
aaattttctctctaa

SEQ ID NO: 572004 - DNA, 15 bp, Homo sapiens
gaaattttctctcta

SEQ ID NO: 572005 - DNA, 15 bp, Homo sapiens
ggaaattttctctct

SEQ ID NO: 572006 - DNA, 15 bp, Homo sapiens
aggaaattttctctc

SEQ ID NO: 572007 - DNA, 15 bp, Homo sapiens
gaggaaattttctct

SEQ ID NO: 572008 - DNA, 15 bp, Homo sapiens
tgaggaaattttctc

SEQ ID NO: 572009 - DNA, 15 bp, Homo sapiens
atgaggaaattttct

SEQ ID NO: 572010 - DNA, 15 bp, Homo sapiens
aatgaggaaattttc

SEQ ID NO: 572011 - DNA, 15 bp, Homo sapiens
gaatgaggaaatttt

SEQ ID NO: 572012 - DNA, 15 bp, Homo sapiens
tgaatgaggaaattt

SEQ ID NO: 572013 - DNA, 15 bp, Homo sapiens
ttgaatgaggaaatt

SEQ ID NO: 572014 - DNA, 15 bp, Homo sapiens
gttgaatgaggaaat

SEQ ID NO: 572015 - DNA, 15 bp, Homo sapiens
tgttgaatgaggaaa

SEQ ID NO: 572016 - DNA, 15 bp, Homo sapiens
ctgttgaatgaggaa

SEQ ID NO: 572017 - DNA, 15 bp, Homo sapiens
tctgttgaatgagga

SEQ ID NO: 572018 - DNA, 15 bp, Homo sapiens
ttctgttgaatgagg

SEQ ID NO: 572019 - DNA, 15 bp, Homo sapiens
attctgttgaatgag

SEQ ID NO: 572020 - DNA, 15 bp, Homo sapiens
tattctgttgaatga

SEQ ID NO: 572021 - DNA, 15 bp, Homo sapiens
ctattctgttgaatg

SEQ ID NO: 572022 - DNA, 15 bp, Homo sapiens
cctattctgttgaat

SEQ ID NO: 572023 - DNA, 15 bp, Homo sapiens
tcctattctgttgaa

SEQ ID NO: 572024 - DNA, 15 bp, Homo sapiens
ttcctattctgttga

SEQ ID NO: 572025 - DNA, 15 bp, Homo sapiens
tttcctattctgttg

SEQ ID NO: 572026 - DNA, 15 bp, Homo sapiens
gtttcctattctgtt

SEQ ID NO: 572027 - DNA, 15 bp, Homo sapiens
agtttcctattctgt

SEQ ID NO: 572028 - DNA, 15 bp, Homo sapiens
cagtttcctattctg

SEQ ID NO: 572029 - DNA, 15 bp, Homo sapiens
ccagtttcctattct

SEQ ID NO: 572030 - DNA, 15 bp, Homo sapiens
gccagtttcctattc

SEQ ID NO: 572031 - DNA, 15 bp, Homo sapiens
tgccagtttcctatt

SEQ ID NO: 572032 - DNA, 15 bp, Homo sapiens
atgccagtttcctat

SEQ ID NO: 572033 - DNA, 15 bp, Homo sapiens
tatgccagtttccta

SEQ ID NO: 572034 - DNA, 15 bp, Homo sapiens
ttatgccagtttcct

SEQ ID NO: 572035 - DNA, 15 bp, Homo sapiens
tttatgccagtttcc

SEQ ID NO: 572036 - DNA, 15 bp, Homo sapiens
atttatgccagtttc

SEQ ID NO: 572037 - DNA, 15 bp, Homo sapiens
catttatgccagttt

SEQ ID NO: 572038 - DNA, 15 bp, Homo sapiens
ccatttatgccagtt

SEQ ID NO: 572039 - DNA, 15 bp, Homo sapiens
cccatttatgccagt

SEQ ID NO: 572040 - DNA, 15 bp, Homo sapiens
tcccatttatgccag

SEQ ID NO: 572041 - DNA, 15 bp, Homo sapiens
ttcccatttatgcca

SEQ ID NO: 572042 - DNA, 15 bp, Homo sapiens
tttcccatttatgcc

SEQ ID NO: 572043 - DNA, 15 bp, Homo sapiens
ttttcccatttatgc

SEQ ID NO: 572044 - DNA, 15 bp, Homo sapiens
attttcccatttatg

SEQ ID NO: 572045 - DNA, 15 bp, Homo sapiens
cattttcccatttat

SEQ ID NO: 572046 - DNA, 15 bp, Homo sapiens
acattttcccattta

SEQ ID NO: 572047 - DNA, 15 bp, Homo sapiens
gacattttcccattt

SEQ ID NO: 572048 - DNA, 15 bp, Homo sapiens
agacattttcccatt

SEQ ID NO: 572049 - DNA, 15 bp, Homo sapiens
aagacattttcccat

SEQ ID NO: 572050 - DNA, 15 bp, Homo sapiens
caagacattttccca

SEQ ID NO: 572051 - DNA, 15 bp, Homo sapiens
gcaagacattttccc

SEQ ID NO: 572052 - DNA, 15 bp, Homo sapiens
ggcaagacattttcc

SEQ ID NO: 572053 - DNA, 15 bp, Homo sapiens
tggcaagacattttc

SEQ ID NO: 572054 - DNA, 15 bp, Homo sapiens
ttggcaagacatttt

SEQ ID NO: 572055 - DNA, 15 bp, Homo sapiens
tttggcaagacattt

SEQ ID NO: 572056 - DNA, 15 bp, Homo sapiens
atttggcaagacatt

SEQ ID NO: 572057 - DNA, 15 bp, Homo sapiens
tatttggcaagacat

SEQ ID NO: 572058 - DNA, 15 bp, Homo sapiens
atatttggcaagaca

SEQ ID NO: 572059 - DNA, 15 bp, Homo sapiens
gatatttggcaagac

SEQ ID NO: 572060 - DNA, 15 bp, Homo sapiens
tgatatttggcaaga

SEQ ID NO: 572061 - DNA, 15 bp, Homo sapiens
gtgatatttggcaag

SEQ ID NO: 572062 - DNA, 15 bp, Homo sapiens
agtgatatttggcaa

SEQ ID NO: 572063 - DNA, 15 bp, Homo sapiens
aagtgatatttggca

SEQ ID NO: 572064 - DNA, 15 bp, Homo sapiens
caagtgatatttggc

SEQ ID NO: 572065 - DNA, 15 bp, Homo sapiens
tcaagtgatatttgg

SEQ ID NO: 572066 - DNA, 15 bp, Homo sapiens
atcaagtgatatttg

SEQ ID NO: 572067 - DNA, 15 bp, Homo sapiens
catcaagtgatattt

SEQ ID NO: 572068 - DNA, 15 bp, Homo sapiens
tcatcaagtgatatt

SEQ ID NO: 572069 - DNA, 15 bp, Homo sapiens
ctcatcaagtgatat

SEQ ID NO: 572070 - DNA, 15 bp, Homo sapiens
actcatcaagtgata

SEQ ID NO: 572071 - DNA, 15 bp, Homo sapiens
gactcatcaagtgat

SEQ ID NO: 572072 - DNA, 15 bp, Homo sapiens
tgactcatcaagtga

SEQ ID NO: 572073 - DNA, 15 bp, Homo sapiens
gtgactcatcaagtg

SEQ ID NO: 572074 - DNA, 15 bp, Homo sapiens
agtgactcatcaagt

SEQ ID NO: 572075 - DNA, 15 bp, Homo sapiens
tagtgactcatcaag

SEQ ID NO: 572076 - DNA, 15 bp, Homo sapiens
ctagtgactcatcaa

SEQ ID NO: 572077 - DNA, 15 bp, Homo sapiens
tctagtgactcatca

SEQ ID NO: 572078 - DNA, 15 bp, Homo sapiens
ctctagtgactcatc

SEQ ID NO: 572079 - DNA, 15 bp, Homo sapiens
tctctagtgactcat

SEQ ID NO: 572080 - DNA, 15 bp, Homo sapiens
gtctctagtgactca

SEQ ID NO: 572081 - DNA, 15 bp, Homo sapiens
tgtctctagtgactc

SEQ ID NO: 572082 - DNA, 15 bp, Homo sapiens
gtgtctctagtgact

SEQ ID NO: 572083 - DNA, 15 bp, Homo sapiens
ggtgtctctagtgac

SEQ ID NO: 572084 - DNA, 15 bp, Homo sapiens
tggtgtctctagtga

SEQ ID NO: 572085 - DNA, 15 bp, Homo sapiens
gtggtgtctctagtg

SEQ ID NO: 572086 - DNA, 15 bp, Homo sapiens
agtggtgtctctagt

SEQ ID NO: 572087 - DNA, 15 bp, Homo sapiens
tagtggtgtctctag

SEQ ID NO: 572088 - DNA, 15 bp, Homo sapiens
gtagtggtgtctcta

SEQ ID NO: 572089 - DNA, 15 bp, Homo sapiens
ggtagtggtgtctct

SEQ ID NO: 572090 - DNA, 15 bp, Homo sapiens
tggtagtggtgtctc

SEQ ID NO: 572091 - DNA, 15 bp, Homo sapiens
ctggtagtggtgtct

SEQ ID NO: 572092 - DNA, 15 bp, Homo sapiens
actggtagtggtgtc

SEQ ID NO: 572093 - DNA, 15 bp, Homo sapiens
gactggtagtggtgt

SEQ ID NO: 572094 - DNA, 15 bp, Homo sapiens
tgactggtagtggtg

SEQ ID NO: 572095 - DNA, 15 bp, Homo sapiens
atgactggtagtggt

SEQ ID NO: 572096 - DNA, 15 bp, Homo sapiens
tatgactggtagtgg

SEQ ID NO: 572097 - DNA, 15 bp, Homo sapiens
ctatgactggtagtg

SEQ ID NO: 572098 - DNA, 15 bp, Homo sapiens
gctatgactggtagt

SEQ ID NO: 572099 - DNA, 15 bp, Homo sapiens
ggctatgactggtag

SEQ ID NO: 572100 - DNA, 15 bp, Homo sapiens
aggctatgactggta

SEQ ID NO: 572101 - DNA, 15 bp, Homo sapiens
aaggctatgactggt

SEQ ID NO: 572102 - DNA, 15 bp, Homo sapiens
taaggctatgactgg

SEQ ID NO: 572103 - DNA, 15 bp, Homo sapiens
ataaggctatgactg

SEQ ID NO: 572104 - DNA, 15 bp, Homo sapiens
tataaggctatgact

SEQ ID NO: 572105 - DNA, 15 bp, Homo sapiens
gtataaggctatgac

SEQ ID NO: 572106 - DNA, 15 bp, Homo sapiens
ggtataaggctatga

SEQ ID NO: 572107 - DNA, 15 bp, Homo sapiens
aggtataaggctatg

SEQ ID NO: 572108 - DNA, 15 bp, Homo sapiens
aaggtataaggctat

SEQ ID NO: 572109 - DNA, 15 bp, Homo sapiens
taaggtataaggcta

SEQ ID NO: 572110 - DNA, 15 bp, Homo sapiens
ctaaggtataaggct

SEQ ID NO: 572111 - DNA, 15 bp, Homo sapiens
actaaggtataaggc

SEQ ID NO: 572112 - DNA, 15 bp, Homo sapiens
aactaaggtataagg

SEQ ID NO: 572113 - DNA, 15 bp, Homo sapiens
taactaaggtataag

SEQ ID NO: 572114 - DNA, 15 bp, Homo sapiens
ttaactaaggtataa

SEQ ID NO: 572115 - DNA, 15 bp, Homo sapiens
tttaactaaggtata

SEQ ID NO: 572116 - DNA, 15 bp, Homo sapiens
ctttaactaaggtat

SEQ ID NO: 572117 - DNA, 15 bp, Homo sapiens
tctttaactaaggta

SEQ ID NO: 572118 - DNA, 15 bp, Homo sapiens
gtctttaactaaggt

SEQ ID NO: 572119 - DNA, 15 bp, Homo sapiens
ggtctttaactaagg

SEQ ID NO: 572120 - DNA, 15 bp, Homo sapiens
tggtctttaactaag

SEQ ID NO: 572121 - DNA, 15 bp, Homo sapiens
ctggtctttaactaa

SEQ ID NO: 572122 - DNA, 15 bp, Homo sapiens
tctggtctttaacta

SEQ ID NO: 572123 - DNA, 15 bp, Homo sapiens
ttctggtctttaact

SEQ ID NO: 572124 - DNA, 15 bp, Homo sapiens
gttctggtctttaac

SEQ ID NO: 572125 - DNA, 15 bp, Homo sapiens
agttctggtctttaa

SEQ ID NO: 572126 - DNA, 15 bp, Homo sapiens
cagttctggtcttta

SEQ ID NO: 572127 - DNA, 15 bp, Homo sapiens
gcagttctggtcttt

SEQ ID NO: 572128 - DNA, 15 bp, Homo sapiens
ggcagttctggtctt

SEQ ID NO: 572129 - DNA, 15 bp, Homo sapiens
cggcagttctggtct

SEQ ID NO: 572130 - DNA, 15 bp, Homo sapiens
ccggcagttctggtc

SEQ ID NO: 572131 - DNA, 15 bp, Homo sapiens
cccggcagttctggt

SEQ ID NO: 572132 - DNA, 15 bp, Homo sapiens
gcccggcagttctgg

SEQ ID NO: 572133 - DNA, 15 bp, Homo sapiens
cgcccggcagttctg

SEQ ID NO: 572134 - DNA, 15 bp, Homo sapiens
gcgcccggcagttct

SEQ ID NO: 572135 - DNA, 15 bp, Homo sapiens
cgcgcccggcagttc

SEQ ID NO: 572136 - DNA, 15 bp, Homo sapiens
ccgcgcccggcagtt

SEQ ID NO: 572137 - DNA, 15 bp, Homo sapiens
accgcgcccggcagt

SEQ ID NO: 572138 - DNA, 15 bp, Homo sapiens
caccgcgcccggcag

SEQ ID NO: 572139 - DNA, 15 bp, Homo sapiens
ccaccgcgcccggca

SEQ ID NO: 572140 - DNA, 15 bp, Homo sapiens
gccaccgcgcccggc

SEQ ID NO: 572141 - DNA, 15 bp, Homo sapiens
agccaccgcgcccgg

SEQ ID NO: 572142 - DNA, 15 bp, Homo sapiens
gagccaccgcgcccg

SEQ ID NO: 572143 - DNA, 15 bp, Homo sapiens
tgagccaccgcgccc

SEQ ID NO: 572144 - DNA, 15 bp, Homo sapiens
gtgagccaccgcgcc

SEQ ID NO: 572145 - DNA, 15 bp, Homo sapiens
cgtgagccaccgcgc

SEQ ID NO: 572146 - DNA, 15 bp, Homo sapiens
gcgtgagccaccgcg

SEQ ID NO: 572147 - DNA, 15 bp, Homo sapiens
ggcgtgagccaccgc

SEQ ID NO: 572148 - DNA, 15 bp, Homo sapiens
gggcgtgagccaccg

SEQ ID NO: 572149 - DNA, 15 bp, Homo sapiens
tgggcgtgagccacc

SEQ ID NO: 572150 - DNA, 15 bp, Homo sapiens
atgggcgtgagccac

SEQ ID NO: 572151 - DNA, 15 bp, Homo sapiens
tatgggcgtgagcca

SEQ ID NO: 572152 - DNA, 15 bp, Homo sapiens
ttatgggcgtgagcc

SEQ ID NO: 572153 - DNA, 15 bp, Homo sapiens
attatgggcgtgagc

SEQ ID NO: 572154 - DNA, 15 bp, Homo sapiens
gattatgggcgtgag

SEQ ID NO: 572155 - DNA, 15 bp, Homo sapiens
ggattatgggcgtga

SEQ ID NO: 572156 - DNA, 15 bp, Homo sapiens
gggattatgggcgtg

SEQ ID NO: 572157 - DNA, 15 bp, Homo sapiens
tgggattatgggcgt

SEQ ID NO: 572158 - DNA, 15 bp, Homo sapiens
ctgggattatgggcg

SEQ ID NO: 572159 - DNA, 15 bp, Homo sapiens
gctgggattatgggc

SEQ ID NO: 572160 - DNA, 15 bp, Homo sapiens
acctcccaaagtgct

SEQ ID NO: 572161 - DNA, 15 bp, Homo sapiens
aacctcccaaagtgc

SEQ ID NO: 572162 - DNA, 15 bp, Homo sapiens
caacctcccaaagtg

SEQ ID NO: 572163 - DNA, 15 bp, Homo sapiens
tcaacctcccaaagt

SEQ ID NO: 572164 - DNA, 15 bp, Homo sapiens
ctcaacctcccaaag

SEQ ID NO: 572165 - DNA, 15 bp, Homo sapiens
cctcaacctcccaaa

SEQ ID NO: 572166 - DNA, 15 bp, Homo sapiens
acctcaacctcccaa

SEQ ID NO: 572167 - DNA, 15 bp, Homo sapiens
cacctcaacctccca

SEQ ID NO: 572168 - DNA, 15 bp, Homo sapiens
ccacctcaacctccc

SEQ ID NO: 572169 - DNA, 15 bp, Homo sapiens
cccacctcaacctcc

SEQ ID NO: 572170 - DNA, 15 bp, Homo sapiens
gcccacctcaacctc

SEQ ID NO: 572171 - DNA, 15 bp, Homo sapiens
cgcccacctcaacct

SEQ ID NO: 572172 - DNA, 15 bp, Homo sapiens
ccgcccacctcaacc

SEQ ID NO: 572173 - DNA, 15 bp, Homo sapiens
tccgcccacctcaac

SEQ ID NO: 572174 - DNA, 15 bp, Homo sapiens
atccgcccacctcaa

SEQ ID NO: 572175 - DNA, 15 bp, Homo sapiens
gatccgcccacctca

SEQ ID NO: 572176 - DNA, 15 bp, Homo sapiens
tgatccgcccacctc

SEQ ID NO: 572177 - DNA, 15 bp, Homo sapiens
gtgatccgcccacct

SEQ ID NO: 572178 - DNA, 15 bp, Homo sapiens
ggtgatccgcccacc

SEQ ID NO: 572179 - DNA, 15 bp, Homo sapiens
aggtgatccgcccac

SEQ ID NO: 572180 - DNA, 15 bp, Homo sapiens
caggtgatccgccca

SEQ ID NO: 572181 - DNA, 15 bp, Homo sapiens
tcaggtgatccgccc

SEQ ID NO: 572182 - DNA, 15 bp, Homo sapiens
ctcaggtgatccgcc

SEQ ID NO: 572183 - DNA, 15 bp, Homo sapiens
cctcaggtgatccgc

SEQ ID NO: 572184 - DNA, 15 bp, Homo sapiens
acctcaggtgatccg

SEQ ID NO: 572185 - DNA, 15 bp, Homo sapiens
gtctcaaactcctga

SEQ ID NO: 572186 - DNA, 15 bp, Homo sapiens
ggtctcaaactcctg

SEQ ID NO: 572187 - DNA, 15 bp, Homo sapiens
tggtctcaaactcct

SEQ ID NO: 572188 - DNA, 15 bp, Homo sapiens
ctggtctcaaactcc

SEQ ID NO: 572189 - DNA, 15 bp, Homo sapiens
gctggtctcaaactc

SEQ ID NO: 572190 - DNA, 15 bp, Homo sapiens
ggctggtctcaaact

SEQ ID NO: 572191 - DNA, 15 bp, Homo sapiens
aggctggtctcaaac

SEQ ID NO: 572192 - DNA, 15 bp, Homo sapiens
caggctggtctcaaa

SEQ ID NO: 572193 - DNA, 15 bp, Homo sapiens
tcaggctggtctcaa

SEQ ID NO: 572194 - DNA, 15 bp, Homo sapiens
gtcaggctggtctca

SEQ ID NO: 572195 - DNA, 15 bp, Homo sapiens
ggtcaggctggtctc

SEQ ID NO: 572196 - DNA, 15 bp, Homo sapiens
tggtcaggctggtct

SEQ ID NO: 572197 - DNA, 15 bp, Homo sapiens
ttggtcaggctggtc

SEQ ID NO: 572198 - DNA, 15 bp, Homo sapiens
gttggtcaggctggt

SEQ ID NO: 572199 - DNA, 15 bp, Homo sapiens
tgttggtcaggctgg

SEQ ID NO: 572200 - DNA, 15 bp, Homo sapiens
atgttggtcaggctg

SEQ ID NO: 572201 - DNA, 15 bp, Homo sapiens
catgttggtcaggct

SEQ ID NO: 572202 - DNA, 15 bp, Homo sapiens
ccatgttggtcaggc

SEQ ID NO: 572203 - DNA, 15 bp, Homo sapiens
tccatgttggtcagg

SEQ ID NO: 572204 - DNA, 15 bp, Homo sapiens
ctccatgttggtcag

SEQ ID NO: 572205 - DNA, 15 bp, Homo sapiens
tctccatgttggtca

SEQ ID NO: 572206 - DNA, 15 bp, Homo sapiens
ttctccatgttggtc

SEQ ID NO: 572207 - DNA, 15 bp, Homo sapiens
tttctccatgttggt

SEQ ID NO: 572208 - DNA, 15 bp, Homo sapiens
gtttctccatgttgg

SEQ ID NO: 572209 - DNA, 15 bp, Homo sapiens
tgtttctccatgttg

SEQ ID NO: 572210 - DNA, 15 bp, Homo sapiens
gtgtttctccatgtt

SEQ ID NO: 572211 - DNA, 15 bp, Homo sapiens
ggtgtttctccatgt

SEQ ID NO: 572212 - DNA, 15 bp, Homo sapiens
cggtgtttctccatg

SEQ ID NO: 572213 - DNA, 15 bp, Homo sapiens
acggtgtttctccat

SEQ ID NO: 572214 - DNA, 15 bp, Homo sapiens
gacggtgtttctcca

SEQ ID NO: 572215 - DNA, 15 bp, Homo sapiens
agacggtgtttctcc

SEQ ID NO: 572216 - DNA, 15 bp, Homo sapiens
gagacggtgtttctc

SEQ ID NO: 572217 - DNA, 15 bp, Homo sapiens
agagacggtgtttct

SEQ ID NO: 572218 - DNA, 15 bp, Homo sapiens
tagagacggtgtttc

SEQ ID NO: 572219 - DNA, 15 bp, Homo sapiens
atagagacggtgttt

SEQ ID NO: 572220 - DNA, 15 bp, Homo sapiens
aatagagacggtgtt

SEQ ID NO: 572221 - DNA, 15 bp, Homo sapiens
taatagagacggtgt

SEQ ID NO: 572222 - DNA, 15 bp, Homo sapiens
ttaatagagacggtg

SEQ ID NO: 572223 - DNA, 15 bp, Homo sapiens
tttaatagagacggt

SEQ ID NO: 572224 - DNA, 15 bp, Homo sapiens
ttttaatagagacgg

SEQ ID NO: 572225 - DNA, 15 bp, Homo sapiens
tttttaatagagacg

SEQ ID NO: 572226 - DNA, 15 bp, Homo sapiens
atttttaatagagac

SEQ ID NO: 572227 - DNA, 15 bp, Homo sapiens
tatttttaatagaga

SEQ ID NO: 572228 - DNA, 15 bp, Homo sapiens
gtatttttaatagag

SEQ ID NO: 572229 - DNA, 15 bp, Homo sapiens
tgtatttttaataga

SEQ ID NO: 572230 - DNA, 15 bp, Homo sapiens
ttgtatttttaatag

SEQ ID NO: 572231 - DNA, 15 bp, Homo sapiens
tttgtatttttaata

SEQ ID NO: 572232 - DNA, 15 bp, Homo sapiens
ttttgtatttttaat

SEQ ID NO: 572233 - DNA, 15 bp, Homo sapiens
attttgtatttttaa

SEQ ID NO: 572234 - DNA, 15 bp, Homo sapiens
aattttgtattttta

SEQ ID NO: 572235 - DNA, 15 bp, Homo sapiens
taattttgtattttt

SEQ ID NO: 572236 - DNA, 15 bp, Homo sapiens
ctaattttgtatttt

SEQ ID NO: 572237 - DNA, 15 bp, Homo sapiens
gctaattttgtattt

SEQ ID NO: 572238 - DNA, 15 bp, Homo sapiens
ggctaattttgtatt

SEQ ID NO: 572239 - DNA, 15 bp, Homo sapiens
cggctaattttgtat

SEQ ID NO: 572240 - DNA, 15 bp, Homo sapiens
ccggctaattttgta

SEQ ID NO: 572241 - DNA, 15 bp, Homo sapiens
cccggctaattttgt

SEQ ID NO: 572242 - DNA, 15 bp, Homo sapiens
gcccggctaattttg

SEQ ID NO: 572243 - DNA, 15 bp, Homo sapiens
cgcccggctaatttt

SEQ ID NO: 572244 - DNA, 15 bp, Homo sapiens
acgcccggctaattt

SEQ ID NO: 572245 - DNA, 15 bp, Homo sapiens
cacgcccggctaatt

SEQ ID NO: 572246 - DNA, 15 bp, Homo sapiens
ccacgcccggctaat

SEQ ID NO: 572247 - DNA, 15 bp, Homo sapiens
accacgcccggctaa

SEQ ID NO: 572248 - DNA, 15 bp, Homo sapiens
caccacgcccggcta

SEQ ID NO: 572249 - DNA, 15 bp, Homo sapiens
ccaccacgcccggct

SEQ ID NO: 572250 - DNA, 15 bp, Homo sapiens
accaccacgcccggc

SEQ ID NO: 572251 - DNA, 15 bp, Homo sapiens
caccaccacgcccgg

SEQ ID NO: 572252 - DNA, 15 bp, Homo sapiens
gcaccaccacgcccg

SEQ ID NO: 572253 - DNA, 15 bp, Homo sapiens
tgcaccaccacgccc

SEQ ID NO: 572254 - DNA, 15 bp, Homo sapiens
atgcaccaccacgcc

SEQ ID NO: 572255 - DNA, 15 bp, Homo sapiens
catgcaccaccacgc

SEQ ID NO: 572256 - DNA, 15 bp, Homo sapiens
tcatgcaccaccacg

SEQ ID NO: 572257 - DNA, 15 bp, Homo sapiens
gtcatgcaccaccac

SEQ ID NO: 572258 - DNA, 15 bp, Homo sapiens
agtcatgcaccacca

SEQ ID NO: 572259 - DNA, 15 bp, Homo sapiens
cagtcatgcaccacc

SEQ ID NO: 572260 - DNA, 15 bp, Homo sapiens
acagtcatgcaccac

SEQ ID NO: 572261 - DNA, 15 bp, Homo sapiens
tacagtcatgcacca

SEQ ID NO: 572262 - DNA, 15 bp, Homo sapiens
ttacagtcatgcacc

SEQ ID NO: 572263 - DNA, 15 bp, Homo sapiens
attacagtcatgcac

SEQ ID NO: 572264 - DNA, 15 bp, Homo sapiens
gattacagtcatgca

SEQ ID NO: 572265 - DNA, 15 bp, Homo sapiens
ggattacagtcatgc

SEQ ID NO: 572266 - DNA, 15 bp, Homo sapiens
agcctcccaagtagc

SEQ ID NO: 572267 - DNA, 15 bp, Homo sapiens
cagcctcccaagtag

SEQ ID NO: 572268 - DNA, 15 bp, Homo sapiens
tcagcctcccaagta

SEQ ID NO: 572269 - DNA, 15 bp, Homo sapiens
ctcagcctcccaagt

SEQ ID NO: 572270 - DNA, 15 bp, Homo sapiens
cctcagcctcccaag

SEQ ID NO: 572271 - DNA, 15 bp, Homo sapiens
gcctcagcctcccaa

SEQ ID NO: 572272 - DNA, 15 bp, Homo sapiens
tgcctcagcctccca

SEQ ID NO: 572273 - DNA, 15 bp, Homo sapiens
cgggttcaagcgatt

SEQ ID NO: 572274 - DNA, 15 bp, Homo sapiens
ccgggttcaagcgat

SEQ ID NO: 572275 - DNA, 15 bp, Homo sapiens
cccgggttcaagcga

SEQ ID NO: 572276 - DNA, 15 bp, Homo sapiens
tcccgggttcaagcg

SEQ ID NO: 572277 - DNA, 15 bp, Homo sapiens
ctcccgggttcaagc

SEQ ID NO: 572278 - DNA, 15 bp, Homo sapiens
cctcccgggttcaag

SEQ ID NO: 572279 - DNA, 15 bp, Homo sapiens
gcctcccgggttcaa

SEQ ID NO: 572280 - DNA, 15 bp, Homo sapiens
tgcctcccgggttca

SEQ ID NO: 572281 - DNA, 15 bp, Homo sapiens
ctgcctcccgggttc

SEQ ID NO: 572282 - DNA, 15 bp, Homo sapiens
tctgcctcccgggtt

SEQ ID NO: 572283 - DNA, 15 bp, Homo sapiens
ctctgcctcccgggt

SEQ ID NO: 572284 - DNA, 15 bp, Homo sapiens
cctctgcctcccggg

SEQ ID NO: 572285 - DNA, 15 bp, Homo sapiens
acctctgcctcccgg

SEQ ID NO: 572286 - DNA, 15 bp, Homo sapiens
aacctctgcctcccg

SEQ ID NO: 572287 - DNA, 15 bp, Homo sapiens
caacctctgcctccc

SEQ ID NO: 572288 - DNA, 15 bp, Homo sapiens
tgcaatctcagctca

SEQ ID NO: 572289 - DNA, 15 bp, Homo sapiens
gtgcaatctcagctc

SEQ ID NO: 572290 - DNA, 15 bp, Homo sapiens
ggtgcaatctcagct

SEQ ID NO: 572291 - DNA, 15 bp, Homo sapiens
tggtgcaatctcagc

SEQ ID NO: 572292 - DNA, 15 bp, Homo sapiens
atggtgcaatctcag

SEQ ID NO: 572293 - DNA, 15 bp, Homo sapiens
aatggtgcaatctca

SEQ ID NO: 572294 - DNA, 15 bp, Homo sapiens
caatggtgcaatctc

SEQ ID NO: 572295 - DNA, 15 bp, Homo sapiens
gcaatggtgcaatct

SEQ ID NO: 572296 - DNA, 15 bp, Homo sapiens
tgcaatggtgcaatc

SEQ ID NO: 572297 - DNA, 15 bp, Homo sapiens
gtgcaatggtgcaat

SEQ ID NO: 572298 - DNA, 15 bp, Homo sapiens
agtgcaatggtgcaa

SEQ ID NO: 572299 - DNA, 15 bp, Homo sapiens
gagtgcaatggtgca

SEQ ID NO: 572300 - DNA, 15 bp, Homo sapiens
ggagtgcaatggtgc

SEQ ID NO: 572301 - DNA, 15 bp, Homo sapiens
tggagtgcaatggtg

SEQ ID NO: 572302 - DNA, 15 bp, Homo sapiens
ctggagtgcaatggt

SEQ ID NO: 572303 - DNA, 15 bp, Homo sapiens
gctggagtgcaatgg

SEQ ID NO: 572304 - DNA, 15 bp, Homo sapiens
ggctggagtgcaatg

SEQ ID NO: 572305 - DNA, 15 bp, Homo sapiens
aggctggagtgcaat

SEQ ID NO: 572306 - DNA, 15 bp, Homo sapiens
caggctggagtgcaa

SEQ ID NO: 572307 - DNA, 15 bp, Homo sapiens
tcttgttgcccaggc

SEQ ID NO: 572308 - DNA, 15 bp, Homo sapiens
ctcttgttgcccagg

SEQ ID NO: 572309 - DNA, 15 bp, Homo sapiens
gctcttgttgcccag

SEQ ID NO: 572310 - DNA, 15 bp, Homo sapiens
tgctcttgttgccca

SEQ ID NO: 572311 - DNA, 15 bp, Homo sapiens
ttgctcttgttgccc

SEQ ID NO: 572312 - DNA, 15 bp, Homo sapiens
tttgctcttgttgcc

SEQ ID NO: 572313 - DNA, 15 bp, Homo sapiens
ttttgctcttgttgc

SEQ ID NO: 572314 - DNA, 15 bp, Homo sapiens
gttttgctcttgttg

SEQ ID NO: 572315 - DNA, 15 bp, Homo sapiens
agttttgctcttgtt

SEQ ID NO: 572316 - DNA, 15 bp, Homo sapiens
gagttttgctcttgt

SEQ ID NO: 572317 - DNA, 15 bp, Homo sapiens
ggagttttgctcttg

SEQ ID NO: 572318 - DNA, 15 bp, Homo sapiens
tggagttttgctctt

SEQ ID NO: 572319 - DNA, 15 bp, Homo sapiens
atggagttttgctct

SEQ ID NO: 572320 - DNA, 15 bp, Homo sapiens
gatggagttttgctc

SEQ ID NO: 572321 - DNA, 15 bp, Homo sapiens
agatggagttttgct

SEQ ID NO: 572322 - DNA, 15 bp, Homo sapiens
gagatggagttttgc

SEQ ID NO: 572323 - DNA, 15 bp, Homo sapiens
tgagatggagttttg

SEQ ID NO: 572324 - DNA, 15 bp, Homo sapiens
ttgagatggagtttt

SEQ ID NO: 572325 - DNA, 15 bp, Homo sapiens
tttgagatggagttt

SEQ ID NO: 572326 - DNA, 15 bp, Homo sapiens
ttttgagatggagtt

SEQ ID NO: 572327 - DNA, 15 bp, Homo sapiens
tttttgagatggagt

SEQ ID NO: 572328 - DNA, 15 bp, Homo sapiens
ttttttgagatggag

SEQ ID NO: 572329 - DNA, 15 bp, Homo sapiens
tttttttgagatgga

SEQ ID NO: 572330 - DNA, 15 bp, Homo sapiens
ttttttttgagatgg

SEQ ID NO: 572331 - DNA, 15 bp, Homo sapiens
tttttttttgagatg

SEQ ID NO: 572332 - DNA, 15 bp, Homo sapiens
ttttttttttgagat

SEQ ID NO: 572333 - DNA, 15 bp, Homo sapiens
gtctttttttttttt

SEQ ID NO: 572334 - DNA, 15 bp, Homo sapiens
agtcttttttttttt

SEQ ID NO: 572335 - DNA, 15 bp, Homo sapiens
aagtctttttttttt

SEQ ID NO: 572336 - DNA, 15 bp, Homo sapiens
gaagtcttttttttt

SEQ ID NO: 572337 - DNA, 15 bp, Homo sapiens
ggaagtctttttttt

SEQ ID NO: 572338 - DNA, 15 bp, Homo sapiens
tggaagtcttttttt

SEQ ID NO: 572339 - DNA, 15 bp, Homo sapiens
atggaagtctttttt

SEQ ID NO: 572340 - DNA, 15 bp, Homo sapiens
gatggaagtcttttt

SEQ ID NO: 572341 - DNA, 15 bp, Homo sapiens
ggatggaagtctttt

SEQ ID NO: 572342 - DNA, 15 bp, Homo sapiens
aggatggaagtcttt

SEQ ID NO: 572343 - DNA, 15 bp, Homo sapiens
caggatggaagtctt

SEQ ID NO: 572344 - DNA, 15 bp, Homo sapiens
acaggatggaagtct

SEQ ID NO: 572345 - DNA, 15 bp, Homo sapiens
aacaggatggaagtc

SEQ ID NO: 572346 - DNA, 15 bp, Homo sapiens
aaacaggatggaagt

SEQ ID NO: 572347 - DNA, 15 bp, Homo sapiens
aaaacaggatggaag

SEQ ID NO: 572348 - DNA, 15 bp, Homo sapiens
taaaacaggatggaa

SEQ ID NO: 572349 - DNA, 15 bp, Homo sapiens
ttaaaacaggatgga

SEQ ID NO: 572350 - DNA, 15 bp, Homo sapiens
cttaaaacaggatgg

SEQ ID NO: 572351 - DNA, 15 bp, Homo sapiens
acttaaaacaggatg

SEQ ID NO: 572352 - DNA, 15 bp, Homo sapiens
cacttaaaacaggat

SEQ ID NO: 572353 - DNA, 15 bp, Homo sapiens
gcacttaaaacagga

SEQ ID NO: 572354 - DNA, 15 bp, Homo sapiens
ggcacttaaaacagg

SEQ ID NO: 572355 - DNA, 15 bp, Homo sapiens
tggcacttaaaacag

SEQ ID NO: 572356 - DNA, 15 bp, Homo sapiens
ttggcacttaaaaca

SEQ ID NO: 572357 - DNA, 15 bp, Homo sapiens
attggcacttaaaac

SEQ ID NO: 572358 - DNA, 15 bp, Homo sapiens
gattggcacttaaaa

SEQ ID NO: 572359 - DNA, 15 bp, Homo sapiens
tgattggcacttaaa

SEQ ID NO: 572360 - DNA, 15 bp, Homo sapiens
ctgattggcacttaa

SEQ ID NO: 572361 - DNA, 15 bp, Homo sapiens
gctgattggcactta

SEQ ID NO: 572362 - DNA, 15 bp, Homo sapiens
agctgattggcactt

SEQ ID NO: 572363 - DNA, 15 bp, Homo sapiens
tagctgattggcact

SEQ ID NO: 572364 - DNA, 15 bp, Homo sapiens
ctagctgattggcac

SEQ ID NO: 572365 - DNA, 15 bp, Homo sapiens
cctagctgattggca

SEQ ID NO: 572366 - DNA, 15 bp, Homo sapiens
tcctagctgattggc

SEQ ID NO: 572367 - DNA, 15 bp, Homo sapiens
ttcctagctgattgg

SEQ ID NO: 572368 - DNA, 15 bp, Homo sapiens
tttcctagctgattg

SEQ ID NO: 572369 - DNA, 15 bp, Homo sapiens
ctttcctagctgatt

SEQ ID NO: 572370 - DNA, 15 bp, Homo sapiens
tctttcctagctgat

SEQ ID NO: 572371 - DNA, 15 bp, Homo sapiens
ctctttcctagctga

SEQ ID NO: 572372 - DNA, 15 bp, Homo sapiens
actctttcctagctg

SEQ ID NO: 572373 - DNA, 15 bp, Homo sapiens
gactctttcctagct

SEQ ID NO: 572374 - DNA, 15 bp, Homo sapiens
ggactctttcctagc

SEQ ID NO: 572375 - DNA, 15 bp, Homo sapiens
gggactctttcctag

SEQ ID NO: 572376 - DNA, 15 bp, Homo sapiens
agggactctttccta

SEQ ID NO: 572377 - DNA, 15 bp, Homo sapiens
aagggactctttcct

SEQ ID NO: 572378 - DNA, 15 bp, Homo sapiens
aaagggactctttcc

SEQ ID NO: 572379 - DNA, 15 bp, Homo sapiens
taaagggactctttc

SEQ ID NO: 572380 - DNA, 15 bp, Homo sapiens
ttaaagggactcttt

SEQ ID NO: 572381 - DNA, 15 bp, Homo sapiens
tttaaagggactctt

SEQ ID NO: 572382 - DNA, 15 bp, Homo sapiens
atttaaagggactct

SEQ ID NO: 572383 - DNA, 15 bp, Homo sapiens
catttaaagggactc

SEQ ID NO: 572384 - DNA, 15 bp, Homo sapiens
tcatttaaagggact

SEQ ID NO: 572385 - DNA, 15 bp, Homo sapiens
atcatttaaagggac

SEQ ID NO: 572386 - DNA, 15 bp, Homo sapiens
aatcatttaaaggga

SEQ ID NO: 572387 - DNA, 15 bp, Homo sapiens
taatcatttaaaggg

SEQ ID NO: 572388 - DNA, 15 bp, Homo sapiens
ttaatcatttaaagg

SEQ ID NO: 572389 - DNA, 15 bp, Homo sapiens
attaatcatttaaag

SEQ ID NO: 572390 - DNA, 15 bp, Homo sapiens
tattaatcatttaaa

SEQ ID NO: 572391 - DNA, 15 bp, Homo sapiens
ttattaatcatttaa

SEQ ID NO: 572392 - DNA, 15 bp, Homo sapiens
gttattaatcattta

SEQ ID NO: 572393 - DNA, 15 bp, Homo sapiens
agttattaatcattt

SEQ ID NO: 572394 - DNA, 15 bp, Homo sapiens
cagttattaatcatt

SEQ ID NO: 572395 - DNA, 15 bp, Homo sapiens
tcagttattaatcat

SEQ ID NO: 572396 - DNA, 15 bp, Homo sapiens
ctcagttattaatca

SEQ ID NO: 572397 - DNA, 15 bp, Homo sapiens
tctcagttattaatc

SEQ ID NO: 572398 - DNA, 15 bp, Homo sapiens
atctcagttattaat

SEQ ID NO: 572399 - DNA, 15 bp, Homo sapiens
gatctcagttattaa

SEQ ID NO: 572400 - DNA, 15 bp, Homo sapiens
tgatctcagttatta

SEQ ID NO: 572401 - DNA, 15 bp, Homo sapiens
gtgatctcagttatt

SEQ ID NO: 572402 - DNA, 15 bp, Homo sapiens
tgtgatctcagttat

SEQ ID NO: 572403 - DNA, 15 bp, Homo sapiens
ttgtgatctcagtta

SEQ ID NO: 572404 - DNA, 15 bp, Homo sapiens
tttgtgatctcagtt

SEQ ID NO: 572405 - DNA, 15 bp, Homo sapiens
ttttgtgatctcagt

SEQ ID NO: 572406 - DNA, 15 bp, Homo sapiens
tttttgtgatctcag

SEQ ID NO: 572407 - DNA, 15 bp, Homo sapiens
atttttgtgatctca

SEQ ID NO: 572408 - DNA, 15 bp, Homo sapiens
tatttttgtgatctc

SEQ ID NO: 572409 - DNA, 15 bp, Homo sapiens
ttatttttgtgatct

SEQ ID NO: 572410 - DNA, 15 bp, Homo sapiens
attatttttgtgatc

SEQ ID NO: 572411 - DNA, 15 bp, Homo sapiens
tattatttttgtgat

SEQ ID NO: 572412 - DNA, 15 bp, Homo sapiens
ctattatttttgtga

SEQ ID NO: 572413 - DNA, 15 bp, Homo sapiens
tctattatttttgtg

SEQ ID NO: 572414 - DNA, 15 bp, Homo sapiens
atctattatttttgt

SEQ ID NO: 572415 - DNA, 15 bp, Homo sapiens
tatctattatttttg

SEQ ID NO: 572416 - DNA, 15 bp, Homo sapiens
atatctattattttt

SEQ ID NO: 572417 - DNA, 15 bp, Homo sapiens
catatctattatttt

SEQ ID NO: 572418 - DNA, 15 bp, Homo sapiens
tcatatctattattt

SEQ ID NO: 572419 - DNA, 15 bp, Homo sapiens
ctcatatctattatt

SEQ ID NO: 572420 - DNA, 15 bp, Homo sapiens
tctcatatctattat

SEQ ID NO: 572421 - DNA, 15 bp, Homo sapiens
ctctcatatctatta

SEQ ID NO: 572422 - DNA, 15 bp, Homo sapiens
cctctcatatctatt

SEQ ID NO: 572423 - DNA, 15 bp, Homo sapiens
ccctctcatatctat

SEQ ID NO: 572424 - DNA, 15 bp, Homo sapiens
tccctctcatatcta

SEQ ID NO: 572425 - DNA, 15 bp, Homo sapiens
ttccctctcatatct

SEQ ID NO: 572426 - DNA, 15 bp, Homo sapiens
tttccctctcatatc

SEQ ID NO: 572427 - DNA, 15 bp, Homo sapiens
ttttccctctcatat

SEQ ID NO: 572428 - DNA, 15 bp, Homo sapiens
tttttccctctcata

SEQ ID NO: 572429 - DNA, 15 bp, Homo sapiens
gtttttccctctcat

SEQ ID NO: 572430 - DNA, 15 bp, Homo sapiens
tgtttttccctctca

SEQ ID NO: 572431 - DNA, 15 bp, Homo sapiens
atgtttttccctctc

SEQ ID NO: 572432 - DNA, 15 bp, Homo sapiens
tatgtttttccctct

SEQ ID NO: 572433 - DNA, 15 bp, Homo sapiens
ttatgtttttccctc

SEQ ID NO: 572434 - DNA, 15 bp, Homo sapiens
cttatgtttttccct

SEQ ID NO: 572435 - DNA, 15 bp, Homo sapiens
ccttatgtttttccc

SEQ ID NO: 572436 - DNA, 15 bp, Homo sapiens
accttatgtttttcc

SEQ ID NO: 572437 - DNA, 15 bp, Homo sapiens
gaccttatgtttttc

SEQ ID NO: 572438 - DNA, 15 bp, Homo sapiens
agaccttatgttttt

SEQ ID NO: 572439 - DNA, 15 bp, Homo sapiens
aagaccttatgtttt

SEQ ID NO: 572440 - DNA, 15 bp, Homo sapiens
gaagaccttatgttt

SEQ ID NO: 572441 - DNA, 15 bp, Homo sapiens
ggaagaccttatgtt

SEQ ID NO: 572442 - DNA, 15 bp, Homo sapiens
gggaagaccttatgt

SEQ ID NO: 572443 - DNA, 15 bp, Homo sapiens
tgggaagaccttatg

SEQ ID NO: 572444 - DNA, 15 bp, Homo sapiens
ttgggaagaccttat

SEQ ID NO: 572445 - DNA, 15 bp, Homo sapiens
attgggaagacctta

SEQ ID NO: 572446 - DNA, 15 bp, Homo sapiens
cattgggaagacctt

SEQ ID NO: 572447 - DNA, 15 bp, Homo sapiens
acattgggaagacct

SEQ ID NO: 572448 - DNA, 15 bp, Homo sapiens
aacattgggaagacc

SEQ ID NO: 572449 - DNA, 15 bp, Homo sapiens
aaacattgggaagac

SEQ ID NO: 572450 - DNA, 15 bp, Homo sapiens
taaacattgggaaga

SEQ ID NO: 572451 - DNA, 15 bp, Homo sapiens
ttaaacattgggaag

SEQ ID NO: 572452 - DNA, 15 bp, Homo sapiens
cttaaacattgggaa

SEQ ID NO: 572453 - DNA, 15 bp, Homo sapiens
ccttaaacattggga

SEQ ID NO: 572454 - DNA, 15 bp, Homo sapiens
gccttaaacattggg

SEQ ID NO: 572455 - DNA, 15 bp, Homo sapiens
agccttaaacattgg

SEQ ID NO: 572456 - DNA, 15 bp, Homo sapiens
gagccttaaacattg

SEQ ID NO: 572457 - DNA, 15 bp, Homo sapiens
tgagccttaaacatt

SEQ ID NO: 572458 - DNA, 15 bp, Homo sapiens
gtgagccttaaacat

SEQ ID NO: 572459 - DNA, 15 bp, Homo sapiens
agtgagccttaaaca

SEQ ID NO: 572460 - DNA, 15 bp, Homo sapiens
aagtgagccttaaac

SEQ ID NO: 572461 - DNA, 15 bp, Homo sapiens
gaagtgagccttaaa

SEQ ID NO: 572462 - DNA, 15 bp, Homo sapiens
cgaagtgagccttaa

SEQ ID NO: 572463 - DNA, 15 bp, Homo sapiens
tcgaagtgagcctta

SEQ ID NO: 572464 - DNA, 15 bp, Homo sapiens
atcgaagtgagcctt

SEQ ID NO: 572465 - DNA, 15 bp, Homo sapiens
catcgaagtgagcct

SEQ ID NO: 572466 - DNA, 15 bp, Homo sapiens
acatcgaagtgagcc

SEQ ID NO: 572467 - DNA, 15 bp, Homo sapiens
aacatcgaagtgagc

SEQ ID NO: 572468 - DNA, 15 bp, Homo sapiens
aaacatcgaagtgag

SEQ ID NO: 572469 - DNA, 15 bp, Homo sapiens
aaaacatcgaagtga

SEQ ID NO: 572470 - DNA, 15 bp, Homo sapiens
taaaacatcgaagtg

SEQ ID NO: 572471 - DNA, 15 bp, Homo sapiens
ttaaaacatcgaagt

SEQ ID NO: 572472 - DNA, 15 bp, Homo sapiens
cttaaaacatcgaag

SEQ ID NO: 572473 - DNA, 15 bp, Homo sapiens
tcttaaaacatcgaa

SEQ ID NO: 572474 - DNA, 15 bp, Homo sapiens
gtcttaaaacatcga

SEQ ID NO: 572475 - DNA, 15 bp, Homo sapiens
ggtcttaaaacatcg

SEQ ID NO: 572476 - DNA, 15 bp, Homo sapiens
gggtcttaaaacatc

SEQ ID NO: 572477 - DNA, 15 bp, Homo sapiens
ggggtcttaaaacat

SEQ ID NO: 572478 - DNA, 15 bp, Homo sapiens
aggggtcttaaaaca

SEQ ID NO: 572479 - DNA, 15 bp, Homo sapiens
gaggggtcttaaaac

SEQ ID NO: 572480 - DNA, 15 bp, Homo sapiens
tgaggggtcttaaaa

SEQ ID NO: 572481 - DNA, 15 bp, Homo sapiens
ttgaggggtcttaaa

SEQ ID NO: 572482 - DNA, 15 bp, Homo sapiens
cttgaggggtcttaa

SEQ ID NO: 572483 - DNA, 15 bp, Homo sapiens
acttgaggggtctta

SEQ ID NO: 572484 - DNA, 15 bp, Homo sapiens
aacttgaggggtctt

SEQ ID NO: 572485 - DNA, 15 bp, Homo sapiens
aaacttgaggggtct

SEQ ID NO: 572486 - DNA, 15 bp, Homo sapiens
caaacttgaggggtc

SEQ ID NO: 572487 - DNA, 15 bp, Homo sapiens
gcaaacttgaggggt

SEQ ID NO: 572488 - DNA, 15 bp, Homo sapiens
agcaaacttgagggg

SEQ ID NO: 572489 - DNA, 15 bp, Homo sapiens
aagcaaacttgaggg

SEQ ID NO: 572490 - DNA, 15 bp, Homo sapiens
aaagcaaacttgagg

SEQ ID NO: 572491 - DNA, 15 bp, Homo sapiens
taaagcaaacttgag

SEQ ID NO: 572492 - DNA, 15 bp, Homo sapiens
ttaaagcaaacttga

SEQ ID NO: 572493 - DNA, 15 bp, Homo sapiens
cttaaagcaaacttg

SEQ ID NO: 572494 - DNA, 15 bp, Homo sapiens
acttaaagcaaactt

SEQ ID NO: 572495 - DNA, 15 bp, Homo sapiens
gacttaaagcaaact

SEQ ID NO: 572496 - DNA, 15 bp, Homo sapiens
agacttaaagcaaac

SEQ ID NO: 572497 - DNA, 15 bp, Homo sapiens
gagacttaaagcaaa

SEQ ID NO: 572498 - DNA, 15 bp, Homo sapiens
ggagacttaaagcaa

SEQ ID NO: 572499 - DNA, 15 bp, Homo sapiens
aggagacttaaagca

SEQ ID NO: 572500 - DNA, 15 bp, Homo sapiens
caggagacttaaagc

SEQ ID NO: 572501 - DNA, 15 bp, Homo sapiens
ccaggagacttaaag

SEQ ID NO: 572502 - DNA, 15 bp, Homo sapiens
gccaggagacttaaa

SEQ ID NO: 572503 - DNA, 15 bp, Homo sapiens
agccaggagacttaa

SEQ ID NO: 572504 - DNA, 15 bp, Homo sapiens
gagccaggagactta

SEQ ID NO: 572505 - DNA, 15 bp, Homo sapiens
tgagccaggagactt

SEQ ID NO: 572506 - DNA, 15 bp, Homo sapiens
ctgagccaggagact

SEQ ID NO: 572507 - DNA, 15 bp, Homo sapiens
cctgagccaggagac

SEQ ID NO: 572508 - DNA, 15 bp, Homo sapiens
tcctgagccaggaga

SEQ ID NO: 572509 - DNA, 15 bp, Homo sapiens
gtcctgagccaggag

SEQ ID NO: 572510 - DNA, 15 bp, Homo sapiens
agtcctgagccagga

SEQ ID NO: 572511 - DNA, 15 bp, Homo sapiens
tagtcctgagccagg

SEQ ID NO: 572512 - DNA, 15 bp, Homo sapiens
ttagtcctgagccag

SEQ ID NO: 572513 - DNA, 15 bp, Homo sapiens
gttagtcctgagcca

SEQ ID NO: 572514 - DNA, 15 bp, Homo sapiens
tgttagtcctgagcc

SEQ ID NO: 572515 - DNA, 15 bp, Homo sapiens
ttgttagtcctgagc

SEQ ID NO: 572516 - DNA, 15 bp, Homo sapiens
tttgttagtcctgag

SEQ ID NO: 572517 - DNA, 15 bp, Homo sapiens
ttttgttagtcctga

SEQ ID NO: 572518 - DNA, 15 bp, Homo sapiens
gttttgttagtcctg

SEQ ID NO: 572519 - DNA, 15 bp, Homo sapiens
tgttttgttagtcct

SEQ ID NO: 572520 - DNA, 15 bp, Homo sapiens
gtgttttgttagtcc

SEQ ID NO: 572521 - DNA, 15 bp, Homo sapiens
tgtgttttgttagtc

SEQ ID NO: 572522 - DNA, 15 bp, Homo sapiens
ctgtgttttgttagt

SEQ ID NO: 572523 - DNA, 15 bp, Homo sapiens
gctgtgttttgttag

SEQ ID NO: 572524 - DNA, 15 bp, Homo sapiens
ggctgtgttttgtta

SEQ ID NO: 572525 - DNA, 15 bp, Homo sapiens
aggctgtgttttgtt

SEQ ID NO: 572526 - DNA, 15 bp, Homo sapiens
aaggctgtgttttgt

SEQ ID NO: 572527 - DNA, 15 bp, Homo sapiens
taaggctgtgttttg

SEQ ID NO: 572528 - DNA, 15 bp, Homo sapiens
ctaaggctgtgtttt

SEQ ID NO: 572529 - DNA, 15 bp, Homo sapiens
tctaaggctgtgttt

SEQ ID NO: 572530 - DNA, 15 bp, Homo sapiens
ctctaaggctgtgtt

SEQ ID NO: 572531 - DNA, 15 bp, Homo sapiens
gctctaaggctgtgt

SEQ ID NO: 572532 - DNA, 15 bp, Homo sapiens
tgctctaaggctgtg

SEQ ID NO: 572533 - DNA, 15 bp, Homo sapiens
ctgctctaaggctgt

SEQ ID NO: 572534 - DNA, 15 bp, Homo sapiens
gctgctctaaggctg

SEQ ID NO: 572535 - DNA, 15 bp, Homo sapiens
tgctgctctaaggct

SEQ ID NO: 572536 - DNA, 15 bp, Homo sapiens
atgctgctctaaggc

SEQ ID NO: 572537 - DNA, 15 bp, Homo sapiens
aatgctgctctaagg

SEQ ID NO: 572538 - DNA, 15 bp, Homo sapiens
aaatgctgctctaag

SEQ ID NO: 572539 - DNA, 15 bp, Homo sapiens
aaaatgctgctctaa

SEQ ID NO: 572540 - DNA, 15 bp, Homo sapiens
gaaaatgctgctcta

SEQ ID NO: 572541 - DNA, 15 bp, Homo sapiens
tgaaaatgctgctct

SEQ ID NO: 572542 - DNA, 15 bp, Homo sapiens
ttgaaaatgctgctc

SEQ ID NO: 572543 - DNA, 15 bp, Homo sapiens
tttgaaaatgctgct

SEQ ID NO: 572544 - DNA, 15 bp, Homo sapiens
ttttgaaaatgctgc

SEQ ID NO: 572545 - DNA, 15 bp, Homo sapiens
gttttgaaaatgctg

SEQ ID NO: 572546 - DNA, 15 bp, Homo sapiens
agttttgaaaatgct

SEQ ID NO: 572547 - DNA, 15 bp, Homo sapiens
gagttttgaaaatgc

SEQ ID NO: 572548 - DNA, 15 bp, Homo sapiens
tgagttttgaaaatg

SEQ ID NO: 572549 - DNA, 15 bp, Homo sapiens
gtgagttttgaaaat

SEQ ID NO: 572550 - DNA, 15 bp, Homo sapiens
tgtgagttttgaaaa

SEQ ID NO: 572551 - DNA, 15 bp, Homo sapiens
ttgtgagttttgaaa

SEQ ID NO: 572552 - DNA, 15 bp, Homo sapiens
attgtgagttttgaa

SEQ ID NO: 572553 - DNA, 15 bp, Homo sapiens
tattgtgagttttga

SEQ ID NO: 572554 - DNA, 15 bp, Homo sapiens
atattgtgagttttg

SEQ ID NO: 572555 - DNA, 15 bp, Homo sapiens
aatattgtgagtttt

SEQ ID NO: 572556 - DNA, 15 bp, Homo sapiens
caatattgtgagttt

SEQ ID NO: 572557 - DNA, 15 bp, Homo sapiens
gcaatattgtgagtt

SEQ ID NO: 572558 - DNA, 15 bp, Homo sapiens
agcaatattgtgagt

SEQ ID NO: 572559 - DNA, 15 bp, Homo sapiens
gagcaatattgtgag

SEQ ID NO: 572560 - DNA, 15 bp, Homo sapiens
agagcaatattgtga

SEQ ID NO: 572561 - DNA, 15 bp, Homo sapiens
aagagcaatattgtg

SEQ ID NO: 572562 - DNA, 15 bp, Homo sapiens
aaagagcaatattgt

SEQ ID NO: 572563 - DNA, 15 bp, Homo sapiens
caaagagcaatattg

SEQ ID NO: 572564 - DNA, 15 bp, Homo sapiens
tcaaagagcaatatt

SEQ ID NO: 572565 - DNA, 15 bp, Homo sapiens
ctcaaagagcaatat

SEQ ID NO: 572566 - DNA, 15 bp, Homo sapiens
tctcaaagagcaata

SEQ ID NO: 572567 - DNA, 15 bp, Homo sapiens
atctcaaagagcaat

SEQ ID NO: 572568 - DNA, 15 bp, Homo sapiens
tatctcaaagagcaa

SEQ ID NO: 572569 - DNA, 15 bp, Homo sapiens
ttatctcaaagagca

SEQ ID NO: 572570 - DNA, 15 bp, Homo sapiens
tttatctcaaagagc

SEQ ID NO: 572571 - DNA, 15 bp, Homo sapiens
ctttatctcaaagag

SEQ ID NO: 572572 - DNA, 15 bp, Homo sapiens
cctttatctcaaaga

SEQ ID NO: 572573 - DNA, 15 bp, Homo sapiens
acctttatctcaaag

SEQ ID NO: 572574 - DNA, 15 bp, Homo sapiens
cacctttatctcaaa

SEQ ID NO: 572575 - DNA, 15 bp, Homo sapiens
tcacctttatctcaa

SEQ ID NO: 572576 - DNA, 15 bp, Homo sapiens
ctcacctttatctca

SEQ ID NO: 572577 - DNA, 15 bp, Homo sapiens
actcacctttatctc

SEQ ID NO: 572578 - DNA, 15 bp, Homo sapiens
gactcacctttatct

SEQ ID NO: 572579 - DNA, 15 bp, Homo sapiens
tgactcacctttatc

SEQ ID NO: 572580 - DNA, 15 bp, Homo sapiens
gtgactcacctttat

SEQ ID NO: 572581 - DNA, 15 bp, Homo sapiens
agtgactcaccttta

SEQ ID NO: 572582 - DNA, 15 bp, Homo sapiens
gagtgactcaccttt

SEQ ID NO: 572583 - DNA, 15 bp, Homo sapiens
agagtgactcacctt

SEQ ID NO: 572584 - DNA, 15 bp, Homo sapiens
cagagtgactcacct

SEQ ID NO: 572585 - DNA, 15 bp, Homo sapiens
ccagagtgactcacc

SEQ ID NO: 572586 - DNA, 15 bp, Homo sapiens
tccagagtgactcac

SEQ ID NO: 572587 - DNA, 15 bp, Homo sapiens
ttccagagtgactca

SEQ ID NO: 572588 - DNA, 15 bp, Homo sapiens
cttccagagtgactc

SEQ ID NO: 572589 - DNA, 15 bp, Homo sapiens
ccttccagagtgact

SEQ ID NO: 572590 - DNA, 15 bp, Homo sapiens
gccttccagagtgac

SEQ ID NO: 572591 - DNA, 15 bp, Homo sapiens
tgccttccagagtga

SEQ ID NO: 572592 - DNA, 15 bp, Homo sapiens
ttgccttccagagtg

SEQ ID NO: 572593 - DNA, 15 bp, Homo sapiens
tttgccttccagagt

SEQ ID NO: 572594 - DNA, 15 bp, Homo sapiens
atttgccttccagag

SEQ ID NO: 572595 - DNA, 15 bp, Homo sapiens
tatttgccttccaga

SEQ ID NO: 572596 - DNA, 15 bp, Homo sapiens
atatttgccttccag

SEQ ID NO: 572597 - DNA, 15 bp, Homo sapiens
aatatttgccttcca

SEQ ID NO: 572598 - DNA, 15 bp, Homo sapiens
gaatatttgccttcc

SEQ ID NO: 572599 - DNA, 15 bp, Homo sapiens
agaatatttgccttc

SEQ ID NO: 572600 - DNA, 15 bp, Homo sapiens
gagaatatttgcctt

SEQ ID NO: 572601 - DNA, 15 bp, Homo sapiens
tgagaatatttgcct

SEQ ID NO: 572602 - DNA, 15 bp, Homo sapiens
gtgagaatatttgcc

SEQ ID NO: 572603 - DNA, 15 bp, Homo sapiens
tgtgagaatatttgc

SEQ ID NO: 572604 - DNA, 15 bp, Homo sapiens
ttgtgagaatatttg

SEQ ID NO: 572605 - DNA, 15 bp, Homo sapiens
attgtgagaatattt

SEQ ID NO: 572606 - DNA, 15 bp, Homo sapiens
tattgtgagaatatt

SEQ ID NO: 572607 - DNA, 15 bp, Homo sapiens
ttattgtgagaatat

SEQ ID NO: 572608 - DNA, 15 bp, Homo sapiens
cttattgtgagaata

SEQ ID NO: 572609 - DNA, 15 bp, Homo sapiens
tcttattgtgagaat

SEQ ID NO: 572610 - DNA, 15 bp, Homo sapiens
ttcttattgtgagaa

SEQ ID NO: 572611 - DNA, 15 bp, Homo sapiens
tttcttattgtgaga

SEQ ID NO: 572612 - DNA, 15 bp, Homo sapiens
ttttcttattgtgag

SEQ ID NO: 572613 - DNA, 15 bp, Homo sapiens
attttcttattgtga

SEQ ID NO: 572614 - DNA, 15 bp, Homo sapiens
aattttcttattgtg

SEQ ID NO: 572615 - DNA, 15 bp, Homo sapiens
gaattttcttattgt

SEQ ID NO: 572616 - DNA, 15 bp, Homo sapiens
tgaattttcttattg

SEQ ID NO: 572617 - DNA, 15 bp, Homo sapiens
gtgaattttcttatt

SEQ ID NO: 572618 - DNA, 15 bp, Homo sapiens
tgtgaattttcttat

SEQ ID NO: 572619 - DNA, 15 bp, Homo sapiens
atgtgaattttctta

SEQ ID NO: 572620 - DNA, 15 bp, Homo sapiens
tatgtgaattttctt

SEQ ID NO: 572621 - DNA, 15 bp, Homo sapiens
ctatgtgaattttct

SEQ ID NO: 572622 - DNA, 15 bp, Homo sapiens
cctatgtgaattttc

SEQ ID NO: 572623 - DNA, 15 bp, Homo sapiens
acctatgtgaatttt

SEQ ID NO: 572624 - DNA, 15 bp, Homo sapiens
aacctatgtgaattt

SEQ ID NO: 572625 - DNA, 15 bp, Homo sapiens
caacctatgtgaatt

SEQ ID NO: 572626 - DNA, 15 bp, Homo sapiens
acaacctatgtgaat

SEQ ID NO: 572627 - DNA, 15 bp, Homo sapiens
aacaacctatgtgaa

SEQ ID NO: 572628 - DNA, 15 bp, Homo sapiens
aaacaacctatgtga

SEQ ID NO: 572629 - DNA, 15 bp, Homo sapiens
taaacaacctatgtg

SEQ ID NO: 572630 - DNA, 15 bp, Homo sapiens
ttaaacaacctatgt

SEQ ID NO: 572631 - DNA, 15 bp, Homo sapiens
gttaaacaacctatg

SEQ ID NO: 572632 - DNA, 15 bp, Homo sapiens
tgttaaacaacctat

SEQ ID NO: 572633 - DNA, 15 bp, Homo sapiens
atgttaaacaaccta

SEQ ID NO: 572634 - DNA, 15 bp, Homo sapiens
aatgttaaacaacct

SEQ ID NO: 572635 - DNA, 15 bp, Homo sapiens
caatgttaaacaacc

SEQ ID NO: 572636 - DNA, 15 bp, Homo sapiens
gcaatgttaaacaac

SEQ ID NO: 572637 - DNA, 15 bp, Homo sapiens
tgcaatgttaaacaa

SEQ ID NO: 572638 - DNA, 15 bp, Homo sapiens
ctgcaatgttaaaca

SEQ ID NO: 572639 - DNA, 15 bp, Homo sapiens
gctgcaatgttaaac

SEQ ID NO: 572640 - DNA, 15 bp, Homo sapiens
agctgcaatgttaaa

SEQ ID NO: 572641 - DNA, 15 bp, Homo sapiens
tagctgcaatgttaa

SEQ ID NO: 572642 - DNA, 15 bp, Homo sapiens
ttagctgcaatgtta

SEQ ID NO: 572643 - DNA, 15 bp, Homo sapiens
tttagctgcaatgtt

SEQ ID NO: 572644 - DNA, 15 bp, Homo sapiens
ttttagctgcaatgt

SEQ ID NO: 572645 - DNA, 15 bp, Homo sapiens
attttagctgcaatg

SEQ ID NO: 572646 - DNA, 15 bp, Homo sapiens
tattttagctgcaat

SEQ ID NO: 572647 - DNA, 15 bp, Homo sapiens
gtattttagctgcaa

SEQ ID NO: 572648 - DNA, 15 bp, Homo sapiens
tgtattttagctgca

SEQ ID NO: 572649 - DNA, 15 bp, Homo sapiens
ttgtattttagctgc

SEQ ID NO: 572650 - DNA, 15 bp, Homo sapiens
tttgtattttagctg

SEQ ID NO: 572651 - DNA, 15 bp, Homo sapiens
ttttgtattttagct

SEQ ID NO: 572652 - DNA, 15 bp, Homo sapiens
tttttgtattttagc

SEQ ID NO: 572653 - DNA, 15 bp, Homo sapiens
ttttttgtattttag

SEQ ID NO: 572654 - DNA, 15 bp, Homo sapiens
tttttttgtatttta

SEQ ID NO: 572655 - DNA, 15 bp, Homo sapiens
ctttttttttgtatt

SEQ ID NO: 572656 - DNA, 15 bp, Homo sapiens
tctttttttttgtat

SEQ ID NO: 572657 - DNA, 15 bp, Homo sapiens
ttctttttttttgta

SEQ ID NO: 572658 - DNA, 15 bp, Homo sapiens
cttctttttttttgt

SEQ ID NO: 572659 - DNA, 15 bp, Homo sapiens
tcttctttttttttg

SEQ ID NO: 572660 - DNA, 15 bp, Homo sapiens
ttcttcttttttttt

SEQ ID NO: 572661 - DNA, 15 bp, Homo sapiens
cttcttctttttttt

SEQ ID NO: 572662 - DNA, 15 bp, Homo sapiens
tcttcttcttttttt

SEQ ID NO: 572663 - DNA, 15 bp, Homo sapiens
ttcttcttctttttt

SEQ ID NO: 572664 - DNA, 15 bp, Homo sapiens
cttcttcttcttttt

SEQ ID NO: 572665 - DNA, 15 bp, Homo sapiens
tcttcttcttctttt

SEQ ID NO: 572666 - DNA, 15 bp, Homo sapiens
ttcttcttcttcttt

SEQ ID NO: 572667 - DNA, 15 bp, Homo sapiens
cttcttcttcttctt

SEQ ID NO: 572668 - DNA, 15 bp, Homo sapiens
tcttcttcttcttct

SEQ ID NO: 572669 - DNA, 15 bp, Homo sapiens
ttcttcttcttcttc

SEQ ID NO: 572670 - DNA, 15 bp, Homo sapiens
tttcttcttcttctt

SEQ ID NO: 572671 - DNA, 15 bp, Homo sapiens
ttttcttcttcttct

SEQ ID NO: 572672 - DNA, 15 bp, Homo sapiens
tttttcttcttcttc

SEQ ID NO: 572673 - DNA, 15 bp, Homo sapiens
ctttttcttcttctt

SEQ ID NO: 572674 - DNA, 15 bp, Homo sapiens
tctttttcttcttct

SEQ ID NO: 572675 - DNA, 15 bp, Homo sapiens
ttctttttcttcttc

SEQ ID NO: 572676 - DNA, 15 bp, Homo sapiens
tttctttttcttctt

SEQ ID NO: 572677 - DNA, 15 bp, Homo sapiens
ttttctttttcttct

SEQ ID NO: 572678 - DNA, 15 bp, Homo sapiens
attttctttttcttc

SEQ ID NO: 572679 - DNA, 15 bp, Homo sapiens
aattttctttttctt

SEQ ID NO: 572680 - DNA, 15 bp, Homo sapiens
gaattttctttttct

SEQ ID NO: 572681 - DNA, 15 bp, Homo sapiens
tgaattttctttttc

SEQ ID NO: 572682 - DNA, 15 bp, Homo sapiens
gtgaattttcttttt

SEQ ID NO: 572683 - DNA, 15 bp, Homo sapiens
tgtgaattttctttt

SEQ ID NO: 572684 - DNA, 15 bp, Homo sapiens
atgtgaattttcttt

SEQ ID NO: 572685 - DNA, 15 bp, Homo sapiens
tctatgtgaattttc

SEQ ID NO: 572686 - DNA, 15 bp, Homo sapiens
gtctatgtgaatttt

SEQ ID NO: 572687 - DNA, 15 bp, Homo sapiens
agtctatgtgaattt

SEQ ID NO: 572688 - DNA, 15 bp, Homo sapiens
tagtctatgtgaatt

SEQ ID NO: 572689 - DNA, 15 bp, Homo sapiens
gtagtctatgtgaat

SEQ ID NO: 572690 - DNA, 15 bp, Homo sapiens
agtagtctatgtgaa

SEQ ID NO: 572691 - DNA, 15 bp, Homo sapiens
cagtagtctatgtga

SEQ ID NO: 572692 - DNA, 15 bp, Homo sapiens
ccagtagtctatgtg

SEQ ID NO: 572693 - DNA, 15 bp, Homo sapiens
gccagtagtctatgt

SEQ ID NO: 572694 - DNA, 15 bp, Homo sapiens
ggccagtagtctatg

SEQ ID NO: 572695 - DNA, 15 bp, Homo sapiens
gggccagtagtctat

SEQ ID NO: 572696 - DNA, 15 bp, Homo sapiens
agggccagtagtcta

SEQ ID NO: 572697 - DNA, 15 bp, Homo sapiens
tagggccagtagtct

SEQ ID NO: 572698 - DNA, 15 bp, Homo sapiens
ctagggccagtagtc

SEQ ID NO: 572699 - DNA, 15 bp, Homo sapiens
cctagggccagtagt

SEQ ID NO: 572700 - DNA, 15 bp, Homo sapiens
tcctagggccagtag

SEQ ID NO: 572701 - DNA, 15 bp, Homo sapiens
ctcctagggccagta

SEQ ID NO: 572702 - DNA, 15 bp, Homo sapiens
tctcctagggccagt

SEQ ID NO: 572703 - DNA, 15 bp, Homo sapiens
ttctcctagggccag

SEQ ID NO: 572704 - DNA, 15 bp, Homo sapiens
attctcctagggcca

SEQ ID NO: 572705 - DNA, 15 bp, Homo sapiens
aattctcctagggcc

SEQ ID NO: 572706 - DNA, 15 bp, Homo sapiens
aaattctcctagggc

SEQ ID NO: 572707 - DNA, 15 bp, Homo sapiens
taaattctcctaggg

SEQ ID NO: 572708 - DNA, 15 bp, Homo sapiens
ataaattctcctagg

SEQ ID NO: 572709 - DNA, 15 bp, Homo sapiens
gataaattctcctag

SEQ ID NO: 572710 - DNA, 15 bp, Homo sapiens
agataaattctccta

SEQ ID NO: 572711 - DNA, 15 bp, Homo sapiens
tagataaattctcct

SEQ ID NO: 572712 - DNA, 15 bp, Homo sapiens
ttagataaattctcc

SEQ ID NO: 572713 - DNA, 15 bp, Homo sapiens
tttagataaattctc

SEQ ID NO: 572714 - DNA, 15 bp, Homo sapiens
ctttagataaattct

SEQ ID NO: 572715 - DNA, 15 bp, Homo sapiens
tctttagataaattc

SEQ ID NO: 572716 - DNA, 15 bp, Homo sapiens
atctttagataaatt

SEQ ID NO: 572717 - DNA, 15 bp, Homo sapiens
aatctttagataaat

SEQ ID NO: 572718 - DNA, 15 bp, Homo sapiens
taatctttagataaa

SEQ ID NO: 572719 - DNA, 15 bp, Homo sapiens
ataatctttagataa

SEQ ID NO: 572720 - DNA, 15 bp, Homo sapiens
cataatctttagata

SEQ ID NO: 572721 - DNA, 15 bp, Homo sapiens
tcataatctttagat

SEQ ID NO: 572722 - DNA, 15 bp, Homo sapiens
ctcataatctttaga

SEQ ID NO: 572723 - DNA, 15 bp, Homo sapiens
actcataatctttag

SEQ ID NO: 572724 - DNA, 15 bp, Homo sapiens
tactcataatcttta

SEQ ID NO: 572725 - DNA, 15 bp, Homo sapiens
gtactcataatcttt

SEQ ID NO: 572726 - DNA, 15 bp, Homo sapiens
tgtactcataatctt

SEQ ID NO: 572727 - DNA, 15 bp, Homo sapiens
ttgtactcataatct

SEQ ID NO: 572728 - DNA, 15 bp, Homo sapiens
attgtactcataatc

SEQ ID NO: 572729 - DNA, 15 bp, Homo sapiens
tattgtactcataat

SEQ ID NO: 572730 - DNA, 15 bp, Homo sapiens
ctattgtactcataa

SEQ ID NO: 572731 - DNA, 15 bp, Homo sapiens
tctattgtactcata

SEQ ID NO: 572732 - DNA, 15 bp, Homo sapiens
atctattgtactcat

SEQ ID NO: 572733 - DNA, 15 bp, Homo sapiens
tatctattgtactca

SEQ ID NO: 572734 - DNA, 15 bp, Homo sapiens
ctatctattgtactc

SEQ ID NO: 572735 - DNA, 15 bp, Homo sapiens
tctatctattgtact

SEQ ID NO: 572736 - DNA, 15 bp, Homo sapiens
atctatctattgtac

SEQ ID NO: 572737 - DNA, 15 bp, Homo sapiens
gatctatctattgta

SEQ ID NO: 572738 - DNA, 15 bp, Homo sapiens
agatctatctattgt

SEQ ID NO: 572739 - DNA, 15 bp, Homo sapiens
aagatctatctattg

SEQ ID NO: 572740 - DNA, 15 bp, Homo sapiens
gaagatctatctatt

SEQ ID NO: 572741 - DNA, 15 bp, Homo sapiens
ggaagatctatctat

SEQ ID NO: 572742 - DNA, 15 bp, Homo sapiens
aggaagatctatcta

SEQ ID NO: 572743 - DNA, 15 bp, Homo sapiens
taggaagatctatct

SEQ ID NO: 572744 - DNA, 15 bp, Homo sapiens
ctaggaagatctatc

SEQ ID NO: 572745 - DNA, 15 bp, Homo sapiens
tctaggaagatctat

SEQ ID NO: 572746 - DNA, 15 bp, Homo sapiens
atctaggaagatcta

SEQ ID NO: 572747 - DNA, 15 bp, Homo sapiens
tatctaggaagatct

SEQ ID NO: 572748 - DNA, 15 bp, Homo sapiens
ttatctaggaagatc

SEQ ID NO: 572749 - DNA, 15 bp, Homo sapiens
gttatctaggaagat

SEQ ID NO: 572750 - DNA, 15 bp, Homo sapiens
agttatctaggaaga

SEQ ID NO: 572751 - DNA, 15 bp, Homo sapiens
gagttatctaggaag

SEQ ID NO: 572752 - DNA, 15 bp, Homo sapiens
agagttatctaggaa

SEQ ID NO: 572753 - DNA, 15 bp, Homo sapiens
gagagttatctagga

SEQ ID NO: 572754 - DNA, 15 bp, Homo sapiens
tgagagttatctagg

SEQ ID NO: 572755 - DNA, 15 bp, Homo sapiens
ttgagagttatctag

SEQ ID NO: 572756 - DNA, 15 bp, Homo sapiens
gttgagagttatcta

SEQ ID NO: 572757 - DNA, 15 bp, Homo sapiens
agttgagagttatct

SEQ ID NO: 572758 - DNA, 15 bp, Homo sapiens
aagttgagagttatc

SEQ ID NO: 572759 - DNA, 15 bp, Homo sapiens
taagttgagagttat

SEQ ID NO: 572760 - DNA, 15 bp, Homo sapiens
ctaagttgagagtta

SEQ ID NO: 572761 - DNA, 15 bp, Homo sapiens
gctaagttgagagtt

SEQ ID NO: 572762 - DNA, 15 bp, Homo sapiens
agctaagttgagagt

SEQ ID NO: 572763 - DNA, 15 bp, Homo sapiens
aagctaagttgagag

SEQ ID NO: 572764 - DNA, 15 bp, Homo sapiens
aaagctaagttgaga

SEQ ID NO: 572765 - DNA, 15 bp, Homo sapiens
gaaagctaagttgag

SEQ ID NO: 572766 - DNA, 15 bp, Homo sapiens
agaaagctaagttga

SEQ ID NO: 572767 - DNA, 15 bp, Homo sapiens
tagaaagctaagttg

SEQ ID NO: 572768 - DNA, 15 bp, Homo sapiens
ctagaaagctaagtt

SEQ ID NO: 572769 - DNA, 15 bp, Homo sapiens
actagaaagctaagt

SEQ ID NO: 572770 - DNA, 15 bp, Homo sapiens
aactagaaagctaag

SEQ ID NO: 572771 - DNA, 15 bp, Homo sapiens
gaactagaaagctaa

SEQ ID NO: 572772 - DNA, 15 bp, Homo sapiens
ggaactagaaagcta

SEQ ID NO: 572773 - DNA, 15 bp, Homo sapiens
aggaactagaaagct

SEQ ID NO: 572774 - DNA, 15 bp, Homo sapiens
taggaactagaaagc

SEQ ID NO: 572775 - DNA, 15 bp, Homo sapiens
ctaggaactagaaag

SEQ ID NO: 572776 - DNA, 15 bp, Homo sapiens
tctaggaactagaaa

SEQ ID NO: 572777 - DNA, 15 bp, Homo sapiens
gtctaggaactagaa

SEQ ID NO: 572778 - DNA, 15 bp, Homo sapiens
agtctaggaactaga

SEQ ID NO: 572779 - DNA, 15 bp, Homo sapiens
aagtctaggaactag

SEQ ID NO: 572780 - DNA, 15 bp, Homo sapiens
aaagtctaggaacta

SEQ ID NO: 572781 - DNA, 15 bp, Homo sapiens
gaaagtctaggaact

SEQ ID NO: 572782 - DNA, 15 bp, Homo sapiens
agaaagtctaggaac

SEQ ID NO: 572783 - DNA, 15 bp, Homo sapiens
tagaaagtctaggaa

SEQ ID NO: 572784 - DNA, 15 bp, Homo sapiens
ttagaaagtctagga

SEQ ID NO: 572785 - DNA, 15 bp, Homo sapiens
gttagaaagtctagg

SEQ ID NO: 572786 - DNA, 15 bp, Homo sapiens
tgttagaaagtctag

SEQ ID NO: 572787 - DNA, 15 bp, Homo sapiens
ttgttagaaagtcta

SEQ ID NO: 572788 - DNA, 15 bp, Homo sapiens
attgttagaaagtct

SEQ ID NO: 572789 - DNA, 15 bp, Homo sapiens
aattgttagaaagtc

SEQ ID NO: 572790 - DNA, 15 bp, Homo sapiens
aaattgttagaaagt

SEQ ID NO: 572791 - DNA, 15 bp, Homo sapiens
caaattgttagaaag

SEQ ID NO: 572792 - DNA, 15 bp, Homo sapiens
acaaattgttagaaa

SEQ ID NO: 572793 - DNA, 15 bp, Homo sapiens
aacaaattgttagaa

SEQ ID NO: 572794 - DNA, 15 bp, Homo sapiens
taacaaattgttaga

SEQ ID NO: 572795 - DNA, 15 bp, Homo sapiens
ctaacaaattgttag

SEQ ID NO: 572796 - DNA, 15 bp, Homo sapiens
actaacaaattgtta

SEQ ID NO: 572797 - DNA, 15 bp, Homo sapiens
tactaacaaattgtt

SEQ ID NO: 572798 - DNA, 15 bp, Homo sapiens
ttactaacaaattgt

SEQ ID NO: 572799 - DNA, 15 bp, Homo sapiens
gttactaacaaattg

SEQ ID NO: 572800 - DNA, 15 bp, Homo sapiens
agttactaacaaatt

SEQ ID NO: 572801 - DNA, 15 bp, Homo sapiens
gagttactaacaaat

SEQ ID NO: 572802 - DNA, 15 bp, Homo sapiens
agagttactaacaaa

SEQ ID NO: 572803 - DNA, 15 bp, Homo sapiens
gagagttactaacaa

SEQ ID NO: 572804 - DNA, 15 bp, Homo sapiens
agagagttactaaca

SEQ ID NO: 572805 - DNA, 15 bp, Homo sapiens
tagagagttactaac

SEQ ID NO: 572806 - DNA, 15 bp, Homo sapiens
atagagagttactaa

SEQ ID NO: 572807 - DNA, 15 bp, Homo sapiens
aatagagagttacta

SEQ ID NO: 572808 - DNA, 15 bp, Homo sapiens
aaatagagagttact

SEQ ID NO: 572809 - DNA, 15 bp, Homo sapiens
gaaatagagagttac

SEQ ID NO: 572810 - DNA, 15 bp, Homo sapiens
agaaatagagagtta

SEQ ID NO: 572811 - DNA, 15 bp, Homo sapiens
tagaaatagagagtt

SEQ ID NO: 572812 - DNA, 15 bp, Homo sapiens
ttagaaatagagagt

SEQ ID NO: 572813 - DNA, 15 bp, Homo sapiens
tttagaaatagagag

SEQ ID NO: 572814 - DNA, 15 bp, Homo sapiens
atttagaaatagaga

SEQ ID NO: 572815 - DNA, 15 bp, Homo sapiens
gatttagaaatagag

SEQ ID NO: 572816 - DNA, 15 bp, Homo sapiens
agatttagaaataga

SEQ ID NO: 572817 - DNA, 15 bp, Homo sapiens
tagatttagaaatag

SEQ ID NO: 572818 - DNA, 15 bp, Homo sapiens
gtagatttagaaata

SEQ ID NO: 572819 - DNA, 15 bp, Homo sapiens
tgtagatttagaaat

SEQ ID NO: 572820 - DNA, 15 bp, Homo sapiens
ctgtagatttagaaa

SEQ ID NO: 572821 - DNA, 15 bp, Homo sapiens
tctgtagatttagaa

SEQ ID NO: 572822 - DNA, 15 bp, Homo sapiens
ctctgtagatttaga

SEQ ID NO: 572823 - DNA, 15 bp, Homo sapiens
tctctgtagatttag

SEQ ID NO: 572824 - DNA, 15 bp, Homo sapiens
atctctgtagattta

SEQ ID NO: 572825 - DNA, 15 bp, Homo sapiens
aatctctgtagattt

SEQ ID NO: 572826 - DNA, 15 bp, Homo sapiens
aaatctctgtagatt

SEQ ID NO: 572827 - DNA, 15 bp, Homo sapiens
gaaatctctgtagat

SEQ ID NO: 572828 - DNA, 15 bp, Homo sapiens
agaaatctctgtaga

SEQ ID NO: 572829 - DNA, 15 bp, Homo sapiens
tagaaatctctgtag

SEQ ID NO: 572830 - DNA, 15 bp, Homo sapiens
ctagaaatctctgta

SEQ ID NO: 572831 - DNA, 15 bp, Homo sapiens
actagaaatctctgt

SEQ ID NO: 572832 - DNA, 15 bp, Homo sapiens
gactagaaatctctg

SEQ ID NO: 572833 - DNA, 15 bp, Homo sapiens
tgactagaaatctct

SEQ ID NO: 572834 - DNA, 15 bp, Homo sapiens
ttgactagaaatctc

SEQ ID NO: 572835 - DNA, 15 bp, Homo sapiens
attgactagaaatct

SEQ ID NO: 572836 - DNA, 15 bp, Homo sapiens
aattgactagaaatc

SEQ ID NO: 572837 - DNA, 15 bp, Homo sapiens
taattgactagaaat

SEQ ID NO: 572838 - DNA, 15 bp, Homo sapiens
ataattgactagaaa

SEQ ID NO: 572839 - DNA, 15 bp, Homo sapiens
tataattgactagaa

SEQ ID NO: 572840 - DNA, 15 bp, Homo sapiens
ttataattgactaga

SEQ ID NO: 572841 - DNA, 15 bp, Homo sapiens
gttataattgactag

SEQ ID NO: 572842 - DNA, 15 bp, Homo sapiens
tgttataattgacta

SEQ ID NO: 572843 - DNA, 15 bp, Homo sapiens
atgttataattgact

SEQ ID NO: 572844 - DNA, 15 bp, Homo sapiens
aatgttataattgac

SEQ ID NO: 572845 - DNA, 15 bp, Homo sapiens
aaatgttataattga

SEQ ID NO: 572846 - DNA, 15 bp, Homo sapiens
gaaatgttataattg

SEQ ID NO: 572847 - DNA, 15 bp, Homo sapiens
tgaaatgttataatt

SEQ ID NO: 572848 - DNA, 15 bp, Homo sapiens
ttgaaatgttataat

SEQ ID NO: 572849 - DNA, 15 bp, Homo sapiens
cttgaaatgttataa

SEQ ID NO: 572850 - DNA, 15 bp, Homo sapiens
tcttgaaatgttata

SEQ ID NO: 572851 - DNA, 15 bp, Homo sapiens
ctcttgaaatgttat

SEQ ID NO: 572852 - DNA, 15 bp, Homo sapiens
actcttgaaatgtta

SEQ ID NO: 572853 - DNA, 15 bp, Homo sapiens
aactcttgaaatgtt

SEQ ID NO: 572854 - DNA, 15 bp, Homo sapiens
gaactcttgaaatgt

SEQ ID NO: 572855 - DNA, 15 bp, Homo sapiens
agaactcttgaaatg

SEQ ID NO: 572856 - DNA, 15 bp, Homo sapiens
aagaactcttgaaat

SEQ ID NO: 572857 - DNA, 15 bp, Homo sapiens
taagaactcttgaaa

SEQ ID NO: 572858 - DNA, 15 bp, Homo sapiens
gtaagaactcttgaa

SEQ ID NO: 572859 - DNA, 15 bp, Homo sapiens
ggtaagaactcttga

SEQ ID NO: 572860 - DNA, 15 bp, Homo sapiens
gggtaagaactcttg

SEQ ID NO: 572861 - DNA, 15 bp, Homo sapiens
tgggtaagaactctt

SEQ ID NO: 572862 - DNA, 15 bp, Homo sapiens
atgggtaagaactct

SEQ ID NO: 572863 - DNA, 15 bp, Homo sapiens
catgggtaagaactc

SEQ ID NO: 572864 - DNA, 15 bp, Homo sapiens
tcatgggtaagaact

SEQ ID NO: 572865 - DNA, 15 bp, Homo sapiens
ttcatgggtaagaac

SEQ ID NO: 572866 - DNA, 15 bp, Homo sapiens
tttcatgggtaagaa

SEQ ID NO: 572867 - DNA, 15 bp, Homo sapiens
ttttcatgggtaaga

SEQ ID NO: 572868 - DNA, 15 bp, Homo sapiens
attttcatgggtaag

SEQ ID NO: 572869 - DNA, 15 bp, Homo sapiens
tattttcatgggtaa

SEQ ID NO: 572870 - DNA, 15 bp, Homo sapiens
atattttcatgggta

SEQ ID NO: 572871 - DNA, 15 bp, Homo sapiens
aatattttcatgggt

SEQ ID NO: 572872 - DNA, 15 bp, Homo sapiens
aaatattttcatggg

SEQ ID NO: 572873 - DNA, 15 bp, Homo sapiens
gaaatattttcatgg

SEQ ID NO: 572874 - DNA, 15 bp, Homo sapiens
tgaaatattttcatg

SEQ ID NO: 572875 - DNA, 15 bp, Homo sapiens
atgaaatattttcat

SEQ ID NO: 572876 - DNA, 15 bp, Homo sapiens
catgaaatattttca

SEQ ID NO: 572877 - DNA, 15 bp, Homo sapiens
tcatgaaatattttc

SEQ ID NO: 572878 - DNA, 15 bp, Homo sapiens
ttcatgaaatatttt

SEQ ID NO: 572879 - DNA, 15 bp, Homo sapiens
tttcatgaaatattt

SEQ ID NO: 572880 - DNA, 15 bp, Homo sapiens
atttcatgaaatatt

SEQ ID NO: 572881 - DNA, 15 bp, Homo sapiens
aatttcatgaaatat

SEQ ID NO: 572882 - DNA, 15 bp, Homo sapiens
aaatttcatgaaata

SEQ ID NO: 572883 - DNA, 15 bp, Homo sapiens
taaatttcatgaaat

SEQ ID NO: 572884 - DNA, 15 bp, Homo sapiens
ataaatttcatgaaa

SEQ ID NO: 572885 - DNA, 15 bp, Homo sapiens
tataaatttcatgaa

SEQ ID NO: 572886 - DNA, 15 bp, Homo sapiens
ctataaatttcatga

SEQ ID NO: 572887 - DNA, 15 bp, Homo sapiens
gctataaatttcatg

SEQ ID NO: 572888 - DNA, 15 bp, Homo sapiens
agctataaatttcat

SEQ ID NO: 572889 - DNA, 15 bp, Homo sapiens
tagctataaatttca

SEQ ID NO: 572890 - DNA, 15 bp, Homo sapiens
gtagctataaatttc

SEQ ID NO: 572891 - DNA, 15 bp, Homo sapiens
ggtagctataaattt

SEQ ID NO: 572892 - DNA, 15 bp, Homo sapiens
gggtagctataaatt

SEQ ID NO: 572893 - DNA, 15 bp, Homo sapiens
tgggtagctataaat

SEQ ID NO: 572894 - DNA, 15 bp, Homo sapiens
gtgggtagctataaa

SEQ ID NO: 572895 - DNA, 15 bp, Homo sapiens
agtgggtagctataa

SEQ ID NO: 572896 - DNA, 15 bp, Homo sapiens
tagtgggtagctata

SEQ ID NO: 572897 - DNA, 15 bp, Homo sapiens
atagtgggtagctat

SEQ ID NO: 572898 - DNA, 15 bp, Homo sapiens
aatagtgggtagcta

SEQ ID NO: 572899 - DNA, 15 bp, Homo sapiens
aaatagtgggtagct

SEQ ID NO: 572900 - DNA, 15 bp, Homo sapiens
taaatagtgggtagc

SEQ ID NO: 572901 - DNA, 15 bp, Homo sapiens
gtaaatagtgggtag

SEQ ID NO: 572902 - DNA, 15 bp, Homo sapiens
cgtaaatagtgggta

SEQ ID NO: 572903 - DNA, 15 bp, Homo sapiens
tcgtaaatagtgggt

SEQ ID NO: 572904 - DNA, 15 bp, Homo sapiens
ttcgtaaatagtggg

SEQ ID NO: 572905 - DNA, 15 bp, Homo sapiens
cttcgtaaatagtgg

SEQ ID NO: 572906 - DNA, 15 bp, Homo sapiens
tcttcgtaaatagtg

SEQ ID NO: 572907 - DNA, 15 bp, Homo sapiens
ttcttcgtaaatagt

SEQ ID NO: 572908 - DNA, 15 bp, Homo sapiens
attcttcgtaaatag

SEQ ID NO: 572909 - DNA, 15 bp, Homo sapiens
cattcttcgtaaata

SEQ ID NO: 572910 - DNA, 15 bp, Homo sapiens
gcattcttcgtaaat

SEQ ID NO: 572911 - DNA, 15 bp, Homo sapiens
agcattcttcgtaaa

SEQ ID NO: 572912 - DNA, 15 bp, Homo sapiens
cagcattcttcgtaa

SEQ ID NO: 572913 - DNA, 15 bp, Homo sapiens
ccagcattcttcgta

SEQ ID NO: 572914 - DNA, 15 bp, Homo sapiens
cccagcattcttcgt

SEQ ID NO: 572915 - DNA, 15 bp, Homo sapiens
gcccagcattcttcg

SEQ ID NO: 572916 - DNA, 15 bp, Homo sapiens
tgcccagcattcttc

SEQ ID NO: 572917 - DNA, 15 bp, Homo sapiens
ttgcccagcattctt

SEQ ID NO: 572918 - DNA, 15 bp, Homo sapiens
tttgcccagcattct

SEQ ID NO: 572919 - DNA, 15 bp, Homo sapiens
ctttgcccagcattc

SEQ ID NO: 572920 - DNA, 15 bp, Homo sapiens
gctttgcccagcatt

SEQ ID NO: 572921 - DNA, 15 bp, Homo sapiens
ggctttgcccagcat

SEQ ID NO: 572922 - DNA, 15 bp, Homo sapiens
aggctttgcccagca

SEQ ID NO: 572923 - DNA, 15 bp, Homo sapiens
taggctttgcccagc

SEQ ID NO: 572924 - DNA, 15 bp, Homo sapiens
ataggctttgcccag

SEQ ID NO: 572925 - DNA, 15 bp, Homo sapiens
tataggctttgccca

SEQ ID NO: 572926 - DNA, 15 bp, Homo sapiens
gtataggctttgccc

SEQ ID NO: 572927 - DNA, 15 bp, Homo sapiens
cgtataggctttgcc

SEQ ID NO: 572928 - DNA, 15 bp, Homo sapiens
acgtataggctttgc

SEQ ID NO: 572929 - DNA, 15 bp, Homo sapiens
aacgtataggctttg

SEQ ID NO: 572930 - DNA, 15 bp, Homo sapiens
gaacgtataggcttt

SEQ ID NO: 572931 - DNA, 15 bp, Homo sapiens
tgaacgtataggctt

SEQ ID NO: 572932 - DNA, 15 bp, Homo sapiens
ctgaacgtataggct

SEQ ID NO: 572933 - DNA, 15 bp, Homo sapiens
cctgaacgtataggc

SEQ ID NO: 572934 - DNA, 15 bp, Homo sapiens
tcctgaacgtatagg

SEQ ID NO: 572935 - DNA, 15 bp, Homo sapiens
atcctgaacgtatag

SEQ ID NO: 572936 - DNA, 15 bp, Homo sapiens
aatcctgaacgtata

SEQ ID NO: 572937 - DNA, 15 bp, Homo sapiens
aaatcctgaacgtat

SEQ ID NO: 572938 - DNA, 15 bp, Homo sapiens
taaatcctgaacgta

SEQ ID NO: 572939 - DNA, 15 bp, Homo sapiens
ataaatcctgaacgt

SEQ ID NO: 572940 - DNA, 15 bp, Homo sapiens
aataaatcctgaacg

SEQ ID NO: 572941 - DNA, 15 bp, Homo sapiens
caataaatcctgaac

SEQ ID NO: 572942 - DNA, 15 bp, Homo sapiens
gcaataaatcctgaa

SEQ ID NO: 572943 - DNA, 15 bp, Homo sapiens
tgcaataaatcctga

SEQ ID NO: 572944 - DNA, 15 bp, Homo sapiens
gtgcaataaatcctg

SEQ ID NO: 572945 - DNA, 15 bp, Homo sapiens
ggtgcaataaatcct

SEQ ID NO: 572946 - DNA, 15 bp, Homo sapiens
cggtgcaataaatcc

SEQ ID NO: 572947 - DNA, 15 bp, Homo sapiens
tcggtgcaataaatc

SEQ ID NO: 572948 - DNA, 15 bp, Homo sapiens
ttcggtgcaataaat

SEQ ID NO: 572949 - DNA, 15 bp, Homo sapiens
attcggtgcaataaa

SEQ ID NO: 572950 - DNA, 15 bp, Homo sapiens
cattcggtgcaataa

SEQ ID NO: 572951 - DNA, 15 bp, Homo sapiens
ccattcggtgcaata

SEQ ID NO: 572952 - DNA, 15 bp, Homo sapiens
accattcggtgcaat

SEQ ID NO: 572953 - DNA, 15 bp, Homo sapiens
gaccattcggtgcaa

SEQ ID NO: 572954 - DNA, 15 bp, Homo sapiens
tgaccattcggtgca

SEQ ID NO: 572955 - DNA, 15 bp, Homo sapiens
gtgaccattcggtgc

SEQ ID NO: 572956 - DNA, 15 bp, Homo sapiens
ggtgaccattcggtg

SEQ ID NO: 572957 - DNA, 15 bp, Homo sapiens
aggtgaccattcggt

SEQ ID NO: 572958 - DNA, 15 bp, Homo sapiens
aaggtgaccattcgg

SEQ ID NO: 572959 - DNA, 15 bp, Homo sapiens
aaaggtgaccattcg

SEQ ID NO: 572960 - DNA, 15 bp, Homo sapiens
taaaggtgaccattc

SEQ ID NO: 572961 - DNA, 15 bp, Homo sapiens
ataaaggtgaccatt

SEQ ID NO: 572962 - DNA, 15 bp, Homo sapiens
gataaaggtgaccat

SEQ ID NO: 572963 - DNA, 15 bp, Homo sapiens
agataaaggtgacca

SEQ ID NO: 572964 - DNA, 15 bp, Homo sapiens
cagataaaggtgacc

SEQ ID NO: 572965 - DNA, 15 bp, Homo sapiens
gcagataaaggtgac

SEQ ID NO: 572966 - DNA, 15 bp, Homo sapiens
ggcagataaaggtga

SEQ ID NO: 572967 - DNA, 15 bp, Homo sapiens
tggcagataaaggtg

SEQ ID NO: 572968 - DNA, 15 bp, Homo sapiens
ttggcagataaaggt

SEQ ID NO: 572969 - DNA, 15 bp, Homo sapiens
attggcagataaagg

SEQ ID NO: 572970 - DNA, 15 bp, Homo sapiens
aattggcagataaag

SEQ ID NO: 572971 - DNA, 15 bp, Homo sapiens
gaattggcagataaa

SEQ ID NO: 572972 - DNA, 15 bp, Homo sapiens
agaattggcagataa

SEQ ID NO: 572973 - DNA, 15 bp, Homo sapiens
gagaattggcagata

SEQ ID NO: 572974 - DNA, 15 bp, Homo sapiens
tgagaattggcagat

SEQ ID NO: 572975 - DNA, 15 bp, Homo sapiens
gtgagaattggcaga

SEQ ID NO: 572976 - DNA, 15 bp, Homo sapiens
agtgagaattggcag

SEQ ID NO: 572977 - DNA, 15 bp, Homo sapiens
gagtgagaattggca

SEQ ID NO: 572978 - DNA, 15 bp, Homo sapiens
cgagtgagaattggc

SEQ ID NO: 572979 - DNA, 15 bp, Homo sapiens
gcgagtgagaattgg

SEQ ID NO: 572980 - DNA, 15 bp, Homo sapiens
agcgagtgagaattg

SEQ ID NO: 572981 - DNA, 15 bp, Homo sapiens
tagcgagtgagaatt

SEQ ID NO: 572982 - DNA, 15 bp, Homo sapiens
ttagcgagtgagaat

SEQ ID NO: 572983 - DNA, 15 bp, Homo sapiens
attagcgagtgagaa

SEQ ID NO: 572984 - DNA, 15 bp, Homo sapiens
gattagcgagtgaga

SEQ ID NO: 572985 - DNA, 15 bp, Homo sapiens
tgattagcgagtgag

SEQ ID NO: 572986 - DNA, 15 bp, Homo sapiens
ctgattagcgagtga

SEQ ID NO: 572987 - DNA, 15 bp, Homo sapiens
gctgattagcgagtg

SEQ ID NO: 572988 - DNA, 15 bp, Homo sapiens
ggctgattagcgagt

SEQ ID NO: 572989 - DNA, 15 bp, Homo sapiens
aggctgattagcgag

SEQ ID NO: 572990 - DNA, 15 bp, Homo sapiens
gaggctgattagcga

SEQ ID NO: 572991 - DNA, 15 bp, Homo sapiens
agaggctgattagcg

SEQ ID NO: 572992 - DNA, 15 bp, Homo sapiens
gagaggctgattagc

SEQ ID NO: 572993 - DNA, 15 bp, Homo sapiens
ggagaggctgattag

SEQ ID NO: 572994 - DNA, 15 bp, Homo sapiens
gggagaggctgatta

SEQ ID NO: 572995 - DNA, 15 bp, Homo sapiens
tgggagaggctgatt

SEQ ID NO: 572996 - DNA, 15 bp, Homo sapiens
ttgggagaggctgat

SEQ ID NO: 572997 - DNA, 15 bp, Homo sapiens
gttgggagaggctga

SEQ ID NO: 572998 - DNA, 15 bp, Homo sapiens
tgttgggagaggctg

SEQ ID NO: 572999 - DNA, 15 bp, Homo sapiens
gtgttgggagaggct

SEQ ID NO: 573000 - DNA, 15 bp, Homo sapiens
agtgttgggagaggc

SEQ ID NO: 573001 - DNA, 15 bp, Homo sapiens
cagtgttgggagagg

SEQ ID NO: 573002 - DNA, 15 bp, Homo sapiens
tcagtgttgggagag

SEQ ID NO: 573003 - DNA, 15 bp, Homo sapiens
gtcagtgttgggaga

SEQ ID NO: 573004 - DNA, 15 bp, Homo sapiens
ggtcagtgttgggag

SEQ ID NO: 573005 - DNA, 15 bp, Homo sapiens
aggtcagtgttggga

SEQ ID NO: 573006 - DNA, 15 bp, Homo sapiens
taggtcagtgttggg

SEQ ID NO: 573007 - DNA, 15 bp, Homo sapiens
ctaggtcagtgttgg

SEQ ID NO: 573008 - DNA, 15 bp, Homo sapiens
tctaggtcagtgttg

SEQ ID NO: 573009 - DNA, 15 bp, Homo sapiens
ctctaggtcagtgtt

SEQ ID NO: 573010 - DNA, 15 bp, Homo sapiens
tctctaggtcagtgt

SEQ ID NO: 573011 - DNA, 15 bp, Homo sapiens
ttctctaggtcagtg

SEQ ID NO: 573012 - DNA, 15 bp, Homo sapiens
attctctaggtcagt

SEQ ID NO: 573013 - DNA, 15 bp, Homo sapiens
cattctctaggtcag

SEQ ID NO: 573014 - DNA, 15 bp, Homo sapiens
acattctctaggtca

SEQ ID NO: 573015 - DNA, 15 bp, Homo sapiens
tacattctctaggtc

SEQ ID NO: 573016 - DNA, 15 bp, Homo sapiens
ctacattctctaggt

SEQ ID NO: 573017 - DNA, 15 bp, Homo sapiens
cctacattctctagg

SEQ ID NO: 573018 - DNA, 15 bp, Homo sapiens
ccctacattctctag

SEQ ID NO: 573019 - DNA, 15 bp, Homo sapiens
accctacattctcta

SEQ ID NO: 573020 - DNA, 15 bp, Homo sapiens
gaccctacattctct

SEQ ID NO: 573021 - DNA, 15 bp, Homo sapiens
ggaccctacattctc

SEQ ID NO: 573022 - DNA, 15 bp, Homo sapiens
aggaccctacattct

SEQ ID NO: 573023 - DNA, 15 bp, Homo sapiens
caggaccctacattc

SEQ ID NO: 573024 - DNA, 15 bp, Homo sapiens
ccaggaccctacatt

SEQ ID NO: 573025 - DNA, 15 bp, Homo sapiens
accaggaccctacat

SEQ ID NO: 573026 - DNA, 15 bp, Homo sapiens
aaccaggaccctaca

SEQ ID NO: 573027 - DNA, 15 bp, Homo sapiens
gaaccaggaccctac

SEQ ID NO: 573028 - DNA, 15 bp, Homo sapiens
agaaccaggacccta

SEQ ID NO: 573029 - DNA, 15 bp, Homo sapiens
aagaaccaggaccct

SEQ ID NO: 573030 - DNA, 15 bp, Homo sapiens
aaagaaccaggaccc

SEQ ID NO: 573031 - DNA, 15 bp, Homo sapiens
taaagaaccaggacc

SEQ ID NO: 573032 - DNA, 15 bp, Homo sapiens
ctaaagaaccaggac

SEQ ID NO: 573033 - DNA, 15 bp, Homo sapiens
gctaaagaaccagga

SEQ ID NO: 573034 - DNA, 15 bp, Homo sapiens
agctaaagaaccagg

SEQ ID NO: 573035 - DNA, 15 bp, Homo sapiens
gagctaaagaaccag

SEQ ID NO: 573036 - DNA, 15 bp, Homo sapiens
ggagctaaagaacca

SEQ ID NO: 573037 - DNA, 15 bp, Homo sapiens
aggagctaaagaacc

SEQ ID NO: 573038 - DNA, 15 bp, Homo sapiens
caggagctaaagaac

SEQ ID NO: 573039 - DNA, 15 bp, Homo sapiens
gcaggagctaaagaa

SEQ ID NO: 573040 - DNA, 15 bp, Homo sapiens
ggcaggagctaaaga

SEQ ID NO: 573041 - DNA, 15 bp, Homo sapiens
aggcaggagctaaag

SEQ ID NO: 573042 - DNA, 15 bp, Homo sapiens
caggcaggagctaaa

SEQ ID NO: 573043 - DNA, 15 bp, Homo sapiens
tcaggcaggagctaa

SEQ ID NO: 573044 - DNA, 15 bp, Homo sapiens
atcaggcaggagcta

SEQ ID NO: 573045 - DNA, 15 bp, Homo sapiens
catcaggcaggagct

SEQ ID NO: 573046 - DNA, 15 bp, Homo sapiens
tcatcaggcaggagc

SEQ ID NO: 573047 - DNA, 15 bp, Homo sapiens
gtcatcaggcaggag

SEQ ID NO: 573048 - DNA, 15 bp, Homo sapiens
tgtcatcaggcagga

SEQ ID NO: 573049 - DNA, 15 bp, Homo sapiens
ctgtcatcaggcagg

SEQ ID NO: 573050 - DNA, 15 bp, Homo sapiens
tctgtcatcaggcag

SEQ ID NO: 573051 - DNA, 15 bp, Homo sapiens
atctgtcatcaggca

SEQ ID NO: 573052 - DNA, 15 bp, Homo sapiens
tatctgtcatcaggc

SEQ ID NO: 573053 - DNA, 15 bp, Homo sapiens
ttatctgtcatcagg

SEQ ID NO: 573054 - DNA, 15 bp, Homo sapiens
gttatctgtcatcag

SEQ ID NO: 573055 - DNA, 15 bp, Homo sapiens
agttatctgtcatca

SEQ ID NO: 573056 - DNA, 15 bp, Homo sapiens
aagttatctgtcatc

SEQ ID NO: 573057 - DNA, 15 bp, Homo sapiens
aaagttatctgtcat

SEQ ID NO: 573058 - DNA, 15 bp, Homo sapiens
caaagttatctgtca

SEQ ID NO: 573059 - DNA, 15 bp, Homo sapiens
acaaagttatctgtc

SEQ ID NO: 573060 - DNA, 15 bp, Homo sapiens
cacaaagttatctgt

SEQ ID NO: 573061 - DNA, 15 bp, Homo sapiens
gcacaaagttatctg

SEQ ID NO: 573062 - DNA, 15 bp, Homo sapiens
ggcacaaagttatct

SEQ ID NO: 573063 - DNA, 15 bp, Homo sapiens
tggcacaaagttatc

SEQ ID NO: 573064 - DNA, 15 bp, Homo sapiens
atggcacaaagttat

SEQ ID NO: 573065 - DNA, 15 bp, Homo sapiens
aatggcacaaagtta

SEQ ID NO: 573066 - DNA, 15 bp, Homo sapiens
aaatggcacaaagtt

SEQ ID NO: 573067 - DNA, 15 bp, Homo sapiens
aaaatggcacaaagt

SEQ ID NO: 573068 - DNA, 15 bp, Homo sapiens
aaaaatggcacaaag

SEQ ID NO: 573069 - DNA, 15 bp, Homo sapiens
taaaaatggcacaaa

SEQ ID NO: 573070 - DNA, 15 bp, Homo sapiens
ctaaaaatggcacaa

SEQ ID NO: 573071 - DNA, 15 bp, Homo sapiens
actaaaaatggcaca

SEQ ID NO: 573072 - DNA, 15 bp, Homo sapiens
gactaaaaatggcac

SEQ ID NO: 573073 - DNA, 15 bp, Homo sapiens
tgactaaaaatggca

SEQ ID NO: 573074 - DNA, 15 bp, Homo sapiens
ctgactaaaaatggc

SEQ ID NO: 573075 - DNA, 15 bp, Homo sapiens
cctgactaaaaatgg

SEQ ID NO: 573076 - DNA, 15 bp, Homo sapiens
acctgactaaaaatg

SEQ ID NO: 573077 - DNA, 15 bp, Homo sapiens
agtgggactatagca

SEQ ID NO: 573078 - DNA, 15 bp, Homo sapiens
gagtgggactatagc

SEQ ID NO: 573079 - DNA, 15 bp, Homo sapiens
ggagtgggactatag

SEQ ID NO: 573080 - DNA, 15 bp, Homo sapiens
tggagtgggactata

SEQ ID NO: 573081 - DNA, 15 bp, Homo sapiens
ttggagtgggactat

SEQ ID NO: 573082 - DNA, 15 bp, Homo sapiens
tttggagtgggacta

SEQ ID NO: 573083 - DNA, 15 bp, Homo sapiens
gtttggagtgggact

SEQ ID NO: 573084 - DNA, 15 bp, Homo sapiens
tgtttggagtgggac

SEQ ID NO: 573085 - DNA, 15 bp, Homo sapiens
gtgtttggagtggga

SEQ ID NO: 573086 - DNA, 15 bp, Homo sapiens
ggtgtttggagtggg

SEQ ID NO: 573087 - DNA, 15 bp, Homo sapiens
gggtgtttggagtgg

SEQ ID NO: 573088 - DNA, 15 bp, Homo sapiens
cgggtgtttggagtg

SEQ ID NO: 573089 - DNA, 15 bp, Homo sapiens
tcgggtgtttggagt

SEQ ID NO: 573090 - DNA, 15 bp, Homo sapiens
ttcgggtgtttggag

SEQ ID NO: 573091 - DNA, 15 bp, Homo sapiens
gttcgggtgtttgga

SEQ ID NO: 573092 - DNA, 15 bp, Homo sapiens
tgttcgggtgtttgg

SEQ ID NO: 573093 - DNA, 15 bp, Homo sapiens
gtgttcgggtgtttg

SEQ ID NO: 573094 - DNA, 15 bp, Homo sapiens
tgtgttcgggtgttt

SEQ ID NO: 573095 - DNA, 15 bp, Homo sapiens
atgtgttcgggtgtt

SEQ ID NO: 573096 - DNA, 15 bp, Homo sapiens
catgtgttcgggtgt

SEQ ID NO: 573097 - DNA, 15 bp, Homo sapiens
gcatgtgttcgggtg

SEQ ID NO: 573098 - DNA, 15 bp, Homo sapiens
tgcatgtgttcgggt

SEQ ID NO: 573099 - DNA, 15 bp, Homo sapiens
ttgcatgtgttcggg

SEQ ID NO: 573100 - DNA, 15 bp, Homo sapiens
gttgcatgtgttcgg

SEQ ID NO: 573101 - DNA, 15 bp, Homo sapiens
ggttgcatgtgttcg

SEQ ID NO: 573102 - DNA, 15 bp, Homo sapiens
gggttgcatgtgttc

SEQ ID NO: 573103 - DNA, 15 bp, Homo sapiens
cgggttgcatgtgtt

SEQ ID NO: 573104 - DNA, 15 bp, Homo sapiens
gcgggttgcatgtgt

SEQ ID NO: 573105 - DNA, 15 bp, Homo sapiens
agcgggttgcatgtg

SEQ ID NO: 573106 - DNA, 15 bp, Homo sapiens
tagcgggttgcatgt

SEQ ID NO: 573107 - DNA, 15 bp, Homo sapiens
gtagcgggttgcatg

SEQ ID NO: 573108 - DNA, 15 bp, Homo sapiens
ggtagcgggttgcat

SEQ ID NO: 573109 - DNA, 15 bp, Homo sapiens
gggtagcgggttgca

SEQ ID NO: 573110 - DNA, 15 bp, Homo sapiens
agggtagcgggttgc

SEQ ID NO: 573111 - DNA, 15 bp, Homo sapiens
gagggtagcgggttg

SEQ ID NO: 573112 - DNA, 15 bp, Homo sapiens
agagggtagcgggtt

SEQ ID NO: 573113 - DNA, 15 bp, Homo sapiens
aagagggtagcgggt

SEQ ID NO: 573114 - DNA, 15 bp, Homo sapiens
aaagagggtagcggg

SEQ ID NO: 573115 - DNA, 15 bp, Homo sapiens
taaagagggtagcgg

SEQ ID NO: 573116 - DNA, 15 bp, Homo sapiens
gtaaagagggtagcg

SEQ ID NO: 573117 - DNA, 15 bp, Homo sapiens
tgtaaagagggtagc

SEQ ID NO: 573118 - DNA, 15 bp, Homo sapiens
atgtaaagagggtag

SEQ ID NO: 573119 - DNA, 15 bp, Homo sapiens
gatgtaaagagggta

SEQ ID NO: 573120 - DNA, 15 bp, Homo sapiens
tgatgtaaagagggt

SEQ ID NO: 573121 - DNA, 15 bp, Homo sapiens
atgatgtaaagaggg

SEQ ID NO: 573122 - DNA, 15 bp, Homo sapiens
gatgatgtaaagagg

SEQ ID NO: 573123 - DNA, 15 bp, Homo sapiens
tgatgatgtaaagag

SEQ ID NO: 573124 - DNA, 15 bp, Homo sapiens
gtgatgatgtaaaga

SEQ ID NO: 573125 - DNA, 15 bp, Homo sapiens
agtgatgatgtaaag

SEQ ID NO: 573126 - DNA, 15 bp, Homo sapiens
aagtgatgatgtaaa

SEQ ID NO: 573127 - DNA, 15 bp, Homo sapiens
aaagtgatgatgtaa

SEQ ID NO: 573128 - DNA, 15 bp, Homo sapiens
taaagtgatgatgta

SEQ ID NO: 573129 - DNA, 15 bp, Homo sapiens
ttaaagtgatgatgt

SEQ ID NO: 573130 - DNA, 15 bp, Homo sapiens
gttaaagtgatgatg

SEQ ID NO: 573131 - DNA, 15 bp, Homo sapiens
ggttaaagtgatgat

SEQ ID NO: 573132 - DNA, 15 bp, Homo sapiens
tggttaaagtgatga

SEQ ID NO: 573133 - DNA, 15 bp, Homo sapiens
ctggttaaagtgatg

SEQ ID NO: 573134 - DNA, 15 bp, Homo sapiens
actggttaaagtgat

SEQ ID NO: 573135 - DNA, 15 bp, Homo sapiens
aactggttaaagtga

SEQ ID NO: 573136 - DNA, 15 bp, Homo sapiens
taactggttaaagtg

SEQ ID NO: 573137 - DNA, 15 bp, Homo sapiens
ttaactggttaaagt

SEQ ID NO: 573138 - DNA, 15 bp, Homo sapiens
attaactggttaaag

SEQ ID NO: 573139 - DNA, 15 bp, Homo sapiens
gattaactggttaaa

SEQ ID NO: 573140 - DNA, 15 bp, Homo sapiens
agattaactggttaa

SEQ ID NO: 573141 - DNA, 15 bp, Homo sapiens
gagattaactggtta

SEQ ID NO: 573142 - DNA, 15 bp, Homo sapiens
tgagattaactggtt

SEQ ID NO: 573143 - DNA, 15 bp, Homo sapiens
gtgagattaactggt

SEQ ID NO: 573144 - DNA, 15 bp, Homo sapiens
tgtgagattaactgg

SEQ ID NO: 573145 - DNA, 15 bp, Homo sapiens
gtgtgagattaactg

SEQ ID NO: 573146 - DNA, 15 bp, Homo sapiens
ggtgtgagattaact

SEQ ID NO: 573147 - DNA, 15 bp, Homo sapiens
gggtgtgagattaac

SEQ ID NO: 573148 - DNA, 15 bp, Homo sapiens
tgggtgtgagattaa

SEQ ID NO: 573149 - DNA, 15 bp, Homo sapiens
ctgggtgtgagatta

SEQ ID NO: 573150 - DNA, 15 bp, Homo sapiens
actgggtgtgagatt

SEQ ID NO: 573151 - DNA, 15 bp, Homo sapiens
aactgggtgtgagat

SEQ ID NO: 573152 - DNA, 15 bp, Homo sapiens
caactgggtgtgaga

SEQ ID NO: 573153 - DNA, 15 bp, Homo sapiens
gcaactgggtgtgag

SEQ ID NO: 573154 - DNA, 15 bp, Homo sapiens
agcaactgggtgtga

SEQ ID NO: 573155 - DNA, 15 bp, Homo sapiens
aagcaactgggtgtg

SEQ ID NO: 573156 - DNA, 15 bp, Homo sapiens
gaagcaactgggtgt

SEQ ID NO: 573157 - DNA, 15 bp, Homo sapiens
ggaagcaactgggtg

SEQ ID NO: 573158 - DNA, 15 bp, Homo sapiens
gggaagcaactgggt

SEQ ID NO: 573159 - DNA, 15 bp, Homo sapiens
tgggaagcaactggg

SEQ ID NO: 573160 - DNA, 15 bp, Homo sapiens
ctgggaagcaactgg

SEQ ID NO: 573161 - DNA, 15 bp, Homo sapiens
cctgggaagcaactg

SEQ ID NO: 573162 - DNA, 15 bp, Homo sapiens
acctgggaagcaact

SEQ ID NO: 573163 - DNA, 15 bp, Homo sapiens
aacctgggaagcaac

SEQ ID NO: 573164 - DNA, 15 bp, Homo sapiens
taacctgggaagcaa

SEQ ID NO: 573165 - DNA, 15 bp, Homo sapiens
ctaacctgggaagca

SEQ ID NO: 573166 - DNA, 15 bp, Homo sapiens
actaacctgggaagc

SEQ ID NO: 573167 - DNA, 15 bp, Homo sapiens
aactaacctgggaag

SEQ ID NO: 573168 - DNA, 15 bp, Homo sapiens
taactaacctgggaa

SEQ ID NO: 573169 - DNA, 15 bp, Homo sapiens
ctaactaacctggga

SEQ ID NO: 573170 - DNA, 15 bp, Homo sapiens
cctaactaacctggg

SEQ ID NO: 573171 - DNA, 15 bp, Homo sapiens
tcctaactaacctgg

SEQ ID NO: 573172 - DNA, 15 bp, Homo sapiens
ttcctaactaacctg

SEQ ID NO: 573173 - DNA, 15 bp, Homo sapiens
cttcctaactaacct

SEQ ID NO: 573174 - DNA, 15 bp, Homo sapiens
gcttcctaactaacc

SEQ ID NO: 573175 - DNA, 15 bp, Homo sapiens
agcttcctaactaac

SEQ ID NO: 573176 - DNA, 15 bp, Homo sapiens
cagcttcctaactaa

SEQ ID NO: 573177 - DNA, 15 bp, Homo sapiens
acagcttcctaacta

SEQ ID NO: 573178 - DNA, 15 bp, Homo sapiens
aacagcttcctaact

SEQ ID NO: 573179 - DNA, 15 bp, Homo sapiens
aaacagcttcctaac

SEQ ID NO: 573180 - DNA, 15 bp, Homo sapiens
aaaacagcttcctaa

SEQ ID NO: 573181 - DNA, 15 bp, Homo sapiens
aaaaacagcttccta

SEQ ID NO: 573182 - DNA, 15 bp, Homo sapiens
taaaaacagcttcct

SEQ ID NO: 573183 - DNA, 15 bp, Homo sapiens
gtaaaaacagcttcc

SEQ ID NO: 573184 - DNA, 15 bp, Homo sapiens
ggtaaaaacagcttc

SEQ ID NO: 573185 - DNA, 15 bp, Homo sapiens
tggtaaaaacagctt

SEQ ID NO: 573186 - DNA, 15 bp, Homo sapiens
ttggtaaaaacagct

SEQ ID NO: 573187 - DNA, 15 bp, Homo sapiens
tttggtaaaaacagc

SEQ ID NO: 573188 - DNA, 15 bp, Homo sapiens
atttggtaaaaacag

SEQ ID NO: 573189 - DNA, 15 bp, Homo sapiens
gatttggtaaaaaca

SEQ ID NO: 573190 - DNA, 15 bp, Homo sapiens
tgatttggtaaaaac

SEQ ID NO: 573191 - DNA, 15 bp, Homo sapiens
atgatttggtaaaaa

SEQ ID NO: 573192 - DNA, 15 bp, Homo sapiens
tatgatttggtaaaa

SEQ ID NO: 573193 - DNA, 15 bp, Homo sapiens
atatgatttggtaaa

SEQ ID NO: 573194 - DNA, 15 bp, Homo sapiens
catatgatttggtaa

SEQ ID NO: 573195 - DNA, 15 bp, Homo sapiens
gcatatgatttggta

SEQ ID NO: 573196 - DNA, 15 bp, Homo sapiens
tgcatatgatttggt

SEQ ID NO: 573197 - DNA, 15 bp, Homo sapiens
ctgcatatgatttgg

SEQ ID NO: 573198 - DNA, 15 bp, Homo sapiens
tctgcatatgatttg

SEQ ID NO: 573199 - DNA, 15 bp, Homo sapiens
ttctgcatatgattt

SEQ ID NO: 573200 - DNA, 15 bp, Homo sapiens
attctgcatatgatt

SEQ ID NO: 573201 - DNA, 15 bp, Homo sapiens
tattctgcatatgat

SEQ ID NO: 573202 - DNA, 15 bp, Homo sapiens
ttattctgcatatga

SEQ ID NO: 573203 - DNA, 15 bp, Homo sapiens
attattctgcatatg

SEQ ID NO: 573204 - DNA, 15 bp, Homo sapiens
cattattctgcatat

SEQ ID NO: 573205 - DNA, 15 bp, Homo sapiens
tcattattctgcata

SEQ ID NO: 573206 - DNA, 15 bp, Homo sapiens
atcattattctgcat

SEQ ID NO: 573207 - DNA, 15 bp, Homo sapiens
catcattattctgca

SEQ ID NO: 573208 - DNA, 15 bp, Homo sapiens
tcatcattattctgc

SEQ ID NO: 573209 - DNA, 15 bp, Homo sapiens
ttcatcattattctg

SEQ ID NO: 573210 - DNA, 15 bp, Homo sapiens
attcatcattattct

SEQ ID NO: 573211 - DNA, 15 bp, Homo sapiens
tattcatcattattc

SEQ ID NO: 573212 - DNA, 15 bp, Homo sapiens
gtattcatcattatt

SEQ ID NO: 573213 - DNA, 15 bp, Homo sapiens
cgtattcatcattat

SEQ ID NO: 573214 - DNA, 15 bp, Homo sapiens
tcgtattcatcatta

SEQ ID NO: 573215 - DNA, 15 bp, Homo sapiens
gtcgtattcatcatt

SEQ ID NO: 573216 - DNA, 15 bp, Homo sapiens
ggtcgtattcatcat

SEQ ID NO: 573217 - DNA, 15 bp, Homo sapiens
aggtcgtattcatca

SEQ ID NO: 573218 - DNA, 15 bp, Homo sapiens
gaggtcgtattcatc

SEQ ID NO: 573219 - DNA, 15 bp, Homo sapiens
tgaggtcgtattcat

SEQ ID NO: 573220 - DNA, 15 bp, Homo sapiens
ctgaggtcgtattca

SEQ ID NO: 573221 - DNA, 15 bp, Homo sapiens
actgaggtcgtattc

SEQ ID NO: 573222 - DNA, 15 bp, Homo sapiens
cactgaggtcgtatt

SEQ ID NO: 573223 - DNA, 15 bp, Homo sapiens
tcactgaggtcgtat

SEQ ID NO: 573224 - DNA, 15 bp, Homo sapiens
ttcactgaggtcgta

SEQ ID NO: 573225 - DNA, 15 bp, Homo sapiens
tttcactgaggtcgt

SEQ ID NO: 573226 - DNA, 15 bp, Homo sapiens
gtttcactgaggtcg

SEQ ID NO: 573227 - DNA, 15 bp, Homo sapiens
tgtttcactgaggtc

SEQ ID NO: 573228 - DNA, 15 bp, Homo sapiens
gtgtttcactgaggt

SEQ ID NO: 573229 - DNA, 15 bp, Homo sapiens
agtgtttcactgagg

SEQ ID NO: 573230 - DNA, 15 bp, Homo sapiens
tagtgtttcactgag

SEQ ID NO: 573231 - DNA, 15 bp, Homo sapiens
ttagtgtttcactga

SEQ ID NO: 573232 - DNA, 15 bp, Homo sapiens
cttagtgtttcactg

SEQ ID NO: 573233 - DNA, 15 bp, Homo sapiens
acttagtgtttcact

SEQ ID NO: 573234 - DNA, 15 bp, Homo sapiens
cacttagtgtttcac

SEQ ID NO: 573235 - DNA, 15 bp, Homo sapiens
gcacttagtgtttca

SEQ ID NO: 573236 - DNA, 15 bp, Homo sapiens
tgcacttagtgtttc

SEQ ID NO: 573237 - DNA, 15 bp, Homo sapiens
ttgcacttagtgttt

SEQ ID NO: 573238 - DNA, 15 bp, Homo sapiens
attgcacttagtgtt

SEQ ID NO: 573239 - DNA, 15 bp, Homo sapiens
cattgcacttagtgt

SEQ ID NO: 573240 - DNA, 15 bp, Homo sapiens
acattgcacttagtg

SEQ ID NO: 573241 - DNA, 15 bp, Homo sapiens
tacattgcacttagt

SEQ ID NO: 573242 - DNA, 15 bp, Homo sapiens
atacattgcacttag

SEQ ID NO: 573243 - DNA, 15 bp, Homo sapiens
tatacattgcactta

SEQ ID NO: 573244 - DNA, 15 bp, Homo sapiens
gtatacattgcactt

SEQ ID NO: 573245 - DNA, 15 bp, Homo sapiens
agtatacattgcact

SEQ ID NO: 573246 - DNA, 15 bp, Homo sapiens
cagtatacattgcac

SEQ ID NO: 573247 - DNA, 15 bp, Homo sapiens
ccagtatacattgca

SEQ ID NO: 573248 - DNA, 15 bp, Homo sapiens
tccagtatacattgc

SEQ ID NO: 573249 - DNA, 15 bp, Homo sapiens
ttccagtatacattg

SEQ ID NO: 573250 - DNA, 15 bp, Homo sapiens
tttccagtatacatt

SEQ ID NO: 573251 - DNA, 15 bp, Homo sapiens
ttttccagtatacat

SEQ ID NO: 573252 - DNA, 15 bp, Homo sapiens
gttttccagtataca

SEQ ID NO: 573253 - DNA, 15 bp, Homo sapiens
tgttttccagtatac

SEQ ID NO: 573254 - DNA, 15 bp, Homo sapiens
ttgttttccagtata

SEQ ID NO: 573255 - DNA, 15 bp, Homo sapiens
tttgttttccagtat

SEQ ID NO: 573256 - DNA, 15 bp, Homo sapiens
ttttgttttccagta

SEQ ID NO: 573257 - DNA, 15 bp, Homo sapiens
attttgttttccagt

SEQ ID NO: 573258 - DNA, 15 bp, Homo sapiens
gattttgttttccag

SEQ ID NO: 573259 - DNA, 15 bp, Homo sapiens
tgattttgttttcca

SEQ ID NO: 573260 - DNA, 15 bp, Homo sapiens
ttgattttgttttcc

SEQ ID NO: 573261 - DNA, 15 bp, Homo sapiens
tttgattttgttttc

SEQ ID NO: 573262 - DNA, 15 bp, Homo sapiens
ttttgattttgtttt

SEQ ID NO: 573263 - DNA, 15 bp, Homo sapiens
attttgattttgttt

SEQ ID NO: 573264 - DNA, 15 bp, Homo sapiens
aattttgattttgtt

SEQ ID NO: 573265 - DNA, 15 bp, Homo sapiens
taattttgattttgt

SEQ ID NO: 573266 - DNA, 15 bp, Homo sapiens
ttaattttgattttg

SEQ ID NO: 573267 - DNA, 15 bp, Homo sapiens
cttaattttgatttt

SEQ ID NO: 573268 - DNA, 15 bp, Homo sapiens
tcttaattttgattt

SEQ ID NO: 573269 - DNA, 15 bp, Homo sapiens
gtcttaattttgatt

SEQ ID NO: 573270 - DNA, 15 bp, Homo sapiens
agtcttaattttgat

SEQ ID NO: 573271 - DNA, 15 bp, Homo sapiens
tagtcttaattttga

SEQ ID NO: 573272 - DNA, 15 bp, Homo sapiens
gtagtcttaattttg

SEQ ID NO: 573273 - DNA, 15 bp, Homo sapiens
agtagtcttaatttt

SEQ ID NO: 573274 - DNA, 15 bp, Homo sapiens
aagtagtcttaattt

SEQ ID NO: 573275 - DNA, 15 bp, Homo sapiens
taagtagtcttaatt

SEQ ID NO: 573276 - DNA, 15 bp, Homo sapiens
ataagtagtcttaat

SEQ ID NO: 573277 - DNA, 15 bp, Homo sapiens
aataagtagtcttaa

SEQ ID NO: 573278 - DNA, 15 bp, Homo sapiens
taataagtagtctta

SEQ ID NO: 573279 - DNA, 15 bp, Homo sapiens
ataataagtagtctt

SEQ ID NO: 573280 - DNA, 15 bp, Homo sapiens
cataataagtagtct

SEQ ID NO: 573281 - DNA, 15 bp, Homo sapiens
gcataataagtagtc

SEQ ID NO: 573282 - DNA, 15 bp, Homo sapiens
agcataataagtagt

SEQ ID NO: 573283 - DNA, 15 bp, Homo sapiens
aagcataataagtag

SEQ ID NO: 573284 - DNA, 15 bp, Homo sapiens
aaagcataataagta

SEQ ID NO: 573285 - DNA, 15 bp, Homo sapiens
aaaagcataataagt

SEQ ID NO: 573286 - DNA, 15 bp, Homo sapiens
taaaagcataataag

SEQ ID NO: 573287 - DNA, 15 bp, Homo sapiens
ctaaaagcataataa

SEQ ID NO: 573288 - DNA, 15 bp, Homo sapiens
cctaaaagcataata

SEQ ID NO: 573289 - DNA, 15 bp, Homo sapiens
ccctaaaagcataat

SEQ ID NO: 573290 - DNA, 15 bp, Homo sapiens
tccctaaaagcataa

SEQ ID NO: 573291 - DNA, 15 bp, Homo sapiens
gtccctaaaagcata

SEQ ID NO: 573292 - DNA, 15 bp, Homo sapiens
tgtccctaaaagcat

SEQ ID NO: 573293 - DNA, 15 bp, Homo sapiens
ctgtccctaaaagca

SEQ ID NO: 573294 - DNA, 15 bp, Homo sapiens
gctgtccctaaaagc

SEQ ID NO: 573295 - DNA, 15 bp, Homo sapiens
agctgtccctaaaag

SEQ ID NO: 573296 - DNA, 15 bp, Homo sapiens
aagctgtccctaaaa

SEQ ID NO: 573297 - DNA, 15 bp, Homo sapiens
taagctgtccctaaa

SEQ ID NO: 573298 - DNA, 15 bp, Homo sapiens
gtaagctgtccctaa

SEQ ID NO: 573299 - DNA, 15 bp, Homo sapiens
cgtaagctgtcccta

SEQ ID NO: 573300 - DNA, 15 bp, Homo sapiens
gcgtaagctgtccct

SEQ ID NO: 573301 - DNA, 15 bp, Homo sapiens
tgcgtaagctgtccc

SEQ ID NO: 573302 - DNA, 15 bp, Homo sapiens
gtgcgtaagctgtcc

SEQ ID NO: 573303 - DNA, 15 bp, Homo sapiens
ggtgcgtaagctgtc

SEQ ID NO: 573304 - DNA, 15 bp, Homo sapiens
aggtgcgtaagctgt

SEQ ID NO: 573305 - DNA, 15 bp, Homo sapiens
aaggtgcgtaagctg

SEQ ID NO: 573306 - DNA, 15 bp, Homo sapiens
caaggtgcgtaagct

SEQ ID NO: 573307 - DNA, 15 bp, Homo sapiens
tcaaggtgcgtaagc

SEQ ID NO: 573308 - DNA, 15 bp, Homo sapiens
gtcaaggtgcgtaag

SEQ ID NO: 573309 - DNA, 15 bp, Homo sapiens
cgtcaaggtgcgtaa

SEQ ID NO: 573310 - DNA, 15 bp, Homo sapiens
acgtcaaggtgcgta

SEQ ID NO: 573311 - DNA, 15 bp, Homo sapiens
cacgtcaaggtgcgt

SEQ ID NO: 573312 - DNA, 15 bp, Homo sapiens
acacgtcaaggtgcg

SEQ ID NO: 573313 - DNA, 15 bp, Homo sapiens
cacacgtcaaggtgc

SEQ ID NO: 573314 - DNA, 15 bp, Homo sapiens
ccacacgtcaaggtg

SEQ ID NO: 573315 - DNA, 15 bp, Homo sapiens
accacacgtcaaggt

SEQ ID NO: 573316 - DNA, 15 bp, Homo sapiens
caccacacgtcaagg

SEQ ID NO: 573317 - DNA, 15 bp, Homo sapiens
ccaccacacgtcaag

SEQ ID NO: 573318 - DNA, 15 bp, Homo sapiens
accaccacacgtcaa

SEQ ID NO: 573319 - DNA, 15 bp, Homo sapiens
aaccaccacacgtca

SEQ ID NO: 573320 - DNA, 15 bp, Homo sapiens
caaccaccacacgtc

SEQ ID NO: 573321 - DNA, 15 bp, Homo sapiens
acaaccaccacacgt

SEQ ID NO: 573322 - DNA, 15 bp, Homo sapiens
aacaaccaccacacg

SEQ ID NO: 573323 - DNA, 15 bp, Homo sapiens
aaacaaccaccacac

SEQ ID NO: 573324 - DNA, 15 bp, Homo sapiens
aaaacaaccaccaca

SEQ ID NO: 573325 - DNA, 15 bp, Homo sapiens
aaaaacaaccaccac

SEQ ID NO: 573326 - DNA, 15 bp, Homo sapiens
caaaaacaaccacca

SEQ ID NO: 573327 - DNA, 15 bp, Homo sapiens
tcaaaaacaaccacc

SEQ ID NO: 573328 - DNA, 15 bp, Homo sapiens
ctcaaaaacaaccac

SEQ ID NO: 573329 - DNA, 15 bp, Homo sapiens
tctcaaaaacaacca

SEQ ID NO: 573330 - DNA, 15 bp, Homo sapiens
gtctcaaaaacaacc

SEQ ID NO: 573331 - DNA, 15 bp, Homo sapiens
agtctcaaaaacaac

SEQ ID NO: 573332 - DNA, 15 bp, Homo sapiens
aagtctcaaaaacaa

SEQ ID NO: 573333 - DNA, 15 bp, Homo sapiens
aaagtctcaaaaaca

SEQ ID NO: 573334 - DNA, 15 bp, Homo sapiens
taaagtctcaaaaac

SEQ ID NO: 573335 - DNA, 15 bp, Homo sapiens
ataaagtctcaaaaa

SEQ ID NO: 573336 - DNA, 15 bp, Homo sapiens
gataaagtctcaaaa

SEQ ID NO: 573337 - DNA, 15 bp, Homo sapiens
agataaagtctcaaa

SEQ ID NO: 573338 - DNA, 15 bp, Homo sapiens
aagataaagtctcaa

SEQ ID NO: 573339 - DNA, 15 bp, Homo sapiens
gaagataaagtctca

SEQ ID NO: 573340 - DNA, 15 bp, Homo sapiens
ggaagataaagtctc

SEQ ID NO: 573341 - DNA, 15 bp, Homo sapiens
aggaagataaagtct

SEQ ID NO: 573342 - DNA, 15 bp, Homo sapiens
taggaagataaagtc

SEQ ID NO: 573343 - DNA, 15 bp, Homo sapiens
ataggaagataaagt

SEQ ID NO: 573344 - DNA, 15 bp, Homo sapiens
gataggaagataaag

SEQ ID NO: 573345 - DNA, 15 bp, Homo sapiens
agataggaagataaa

SEQ ID NO: 573346 - DNA, 15 bp, Homo sapiens
cagataggaagataa

SEQ ID NO: 573347 - DNA, 15 bp, Homo sapiens
ccagataggaagata

SEQ ID NO: 573348 - DNA, 15 bp, Homo sapiens
cccagataggaagat

SEQ ID NO: 573349 - DNA, 15 bp, Homo sapiens
tcccagataggaaga

SEQ ID NO: 573350 - DNA, 15 bp, Homo sapiens
gtcccagataggaag

SEQ ID NO: 573351 - DNA, 15 bp, Homo sapiens
ggtcccagataggaa

SEQ ID NO: 573352 - DNA, 15 bp, Homo sapiens
tggtcccagatagga

SEQ ID NO: 573353 - DNA, 15 bp, Homo sapiens
ggcttgttgttttac

SEQ ID NO: 573354 - DNA, 15 bp, Homo sapiens
aggcttgttgtttta

SEQ ID NO: 573355 - DNA, 15 bp, Homo sapiens
taggcttgttgtttt

SEQ ID NO: 573356 - DNA, 15 bp, Homo sapiens
ataggcttgttgttt

SEQ ID NO: 573357 - DNA, 15 bp, Homo sapiens
aataggcttgttgtt

SEQ ID NO: 573358 - DNA, 15 bp, Homo sapiens
gaataggcttgttgt

SEQ ID NO: 573359 - DNA, 15 bp, Homo sapiens
agaataggcttgttg

SEQ ID NO: 573360 - DNA, 15 bp, Homo sapiens
aagaataggcttgtt

SEQ ID NO: 573361 - DNA, 15 bp, Homo sapiens
gaagaataggcttgt

SEQ ID NO: 573362 - DNA, 15 bp, Homo sapiens
agaagaataggcttg

SEQ ID NO: 573363 - DNA, 15 bp, Homo sapiens
cagaagaataggctt

SEQ ID NO: 573364 - DNA, 15 bp, Homo sapiens
tcagaagaataggct

SEQ ID NO: 573365 - DNA, 15 bp, Homo sapiens
ctcagaagaataggc

SEQ ID NO: 573366 - DNA, 15 bp, Homo sapiens
cctcagaagaatagg

SEQ ID NO: 573367 - DNA, 15 bp, Homo sapiens
tcctcagaagaatag

SEQ ID NO: 573368 - DNA, 15 bp, Homo sapiens
ttcctcagaagaata

SEQ ID NO: 573369 - DNA, 15 bp, Homo sapiens
cttcctcagaagaat

SEQ ID NO: 573370 - DNA, 15 bp, Homo sapiens
tcttcctcagaagaa

SEQ ID NO: 573371 - DNA, 15 bp, Homo sapiens
atcttcctcagaaga

SEQ ID NO: 573372 - DNA, 15 bp, Homo sapiens
gatcttcctcagaag

SEQ ID NO: 573373 - DNA, 15 bp, Homo sapiens
agatcttcctcagaa

SEQ ID NO: 573374 - DNA, 15 bp, Homo sapiens
cagatcttcctcaga

SEQ ID NO: 573375 - DNA, 15 bp, Homo sapiens
tcagatcttcctcag

SEQ ID NO: 573376 - DNA, 15 bp, Homo sapiens
ttcagatcttcctca

SEQ ID NO: 573377 - DNA, 15 bp, Homo sapiens
tttcagatcttcctc

SEQ ID NO: 573378 - DNA, 15 bp, Homo sapiens
ttttcagatcttcct

SEQ ID NO: 573379 - DNA, 15 bp, Homo sapiens
cttttcagatcttcc

SEQ ID NO: 573380 - DNA, 15 bp, Homo sapiens
tcttttcagatcttc

SEQ ID NO: 573381 - DNA, 15 bp, Homo sapiens
ctcttttcagatctt

SEQ ID NO: 573382 - DNA, 15 bp, Homo sapiens
tctcttttcagatct

SEQ ID NO: 573383 - DNA, 15 bp, Homo sapiens
atctcttttcagatc

SEQ ID NO: 573384 - DNA, 15 bp, Homo sapiens
tatctcttttcagat

SEQ ID NO: 573385 - DNA, 15 bp, Homo sapiens
ttatctcttttcaga

SEQ ID NO: 573386 - DNA, 15 bp, Homo sapiens
tttatctcttttcag

SEQ ID NO: 573387 - DNA, 15 bp, Homo sapiens
ttttatctcttttca

SEQ ID NO: 573388 - DNA, 15 bp, Homo sapiens
cttttatctcttttc

SEQ ID NO: 573389 - DNA, 15 bp, Homo sapiens
tcttttatctctttt

SEQ ID NO: 573390 - DNA, 15 bp, Homo sapiens
ttcttttatctcttt

SEQ ID NO: 573391 - DNA, 15 bp, Homo sapiens
tttcttttatctctt

SEQ ID NO: 573392 - DNA, 15 bp, Homo sapiens
ttttcttttatctct

SEQ ID NO: 573393 - DNA, 15 bp, Homo sapiens
tttttcttttatctc

SEQ ID NO: 573394 - DNA, 15 bp, Homo sapiens
ctttttcttttatct

SEQ ID NO: 573395 - DNA, 15 bp, Homo sapiens
actttttcttttatc

SEQ ID NO: 573396 - DNA, 15 bp, Homo sapiens
tactttttcttttat

SEQ ID NO: 573397 - DNA, 15 bp, Homo sapiens
atactttttctttta

SEQ ID NO: 573398 - DNA, 15 bp, Homo sapiens
aatactttttctttt

SEQ ID NO: 573399 - DNA, 15 bp, Homo sapiens
caatactttttcttt

SEQ ID NO: 573400 - DNA, 15 bp, Homo sapiens
tcaatactttttctt

SEQ ID NO: 573401 - DNA, 15 bp, Homo sapiens
ttcaatactttttct

SEQ ID NO: 573402 - DNA, 15 bp, Homo sapiens
tttcaatactttttc

SEQ ID NO: 573403 - DNA, 15 bp, Homo sapiens
atttcaatacttttt

SEQ ID NO: 573404 - DNA, 15 bp, Homo sapiens
catttcaatactttt

SEQ ID NO: 573405 - DNA, 15 bp, Homo sapiens
gcatttcaatacttt

SEQ ID NO: 573406 - DNA, 15 bp, Homo sapiens
tgcatttcaatactt

SEQ ID NO: 573407 - DNA, 15 bp, Homo sapiens
ctgcatttcaatact

SEQ ID NO: 573408 - DNA, 15 bp, Homo sapiens
actgcatttcaatac

SEQ ID NO: 573409 - DNA, 15 bp, Homo sapiens
tactgcatttcaata

SEQ ID NO: 573410 - DNA, 15 bp, Homo sapiens
gtactgcatttcaat

SEQ ID NO: 573411 - DNA, 15 bp, Homo sapiens
tgtactgcatttcaa

SEQ ID NO: 573412 - DNA, 15 bp, Homo sapiens
gtgtactgcatttca

SEQ ID NO: 573413 - DNA, 15 bp, Homo sapiens
agtgtactgcatttc

SEQ ID NO: 573414 - DNA, 15 bp, Homo sapiens
cagtgtactgcattt

SEQ ID NO: 573415 - DNA, 15 bp, Homo sapiens
ccagtgtactgcatt

SEQ ID NO: 573416 - DNA, 15 bp, Homo sapiens
cccagtgtactgcat

SEQ ID NO: 573417 - DNA, 15 bp, Homo sapiens
tcccagtgtactgca

SEQ ID NO: 573418 - DNA, 15 bp, Homo sapiens
ttcccagtgtactgc

SEQ ID NO: 573419 - DNA, 15 bp, Homo sapiens
tttcccagtgtactg

SEQ ID NO: 573420 - DNA, 15 bp, Homo sapiens
ctttcccagtgtact

SEQ ID NO: 573421 - DNA, 15 bp, Homo sapiens
actttcccagtgtac

SEQ ID NO: 573422 - DNA, 15 bp, Homo sapiens
gactttcccagtgta

SEQ ID NO: 573423 - DNA, 15 bp, Homo sapiens
agactttcccagtgt

SEQ ID NO: 573424 - DNA, 15 bp, Homo sapiens
cagactttcccagtg

SEQ ID NO: 573425 - DNA, 15 bp, Homo sapiens
acagactttcccagt

SEQ ID NO: 573426 - DNA, 15 bp, Homo sapiens
aacagactttcccag

SEQ ID NO: 573427 - DNA, 15 bp, Homo sapiens
gaacagactttccca

SEQ ID NO: 573428 - DNA, 15 bp, Homo sapiens
agaacagactttccc

SEQ ID NO: 573429 - DNA, 15 bp, Homo sapiens
tagaacagactttcc

SEQ ID NO: 573430 - DNA, 15 bp, Homo sapiens
ttagaacagactttc

SEQ ID NO: 573431 - DNA, 15 bp, Homo sapiens
attagaacagacttt

SEQ ID NO: 573432 - DNA, 15 bp, Homo sapiens
cattagaacagactt

SEQ ID NO: 573433 - DNA, 15 bp, Homo sapiens
ccattagaacagact

SEQ ID NO: 573434 - DNA, 15 bp, Homo sapiens
cccattagaacagac

SEQ ID NO: 573435 - DNA, 15 bp, Homo sapiens
gcccattagaacaga

SEQ ID NO: 573436 - DNA, 15 bp, Homo sapiens
tgcccattagaacag

SEQ ID NO: 573437 - DNA, 15 bp, Homo sapiens
ttgcccattagaaca

SEQ ID NO: 573438 - DNA, 15 bp, Homo sapiens
gttgcccattagaac

SEQ ID NO: 573439 - DNA, 15 bp, Homo sapiens
agttgcccattagaa

SEQ ID NO: 573440 - DNA, 15 bp, Homo sapiens
tagttgcccattaga

SEQ ID NO: 573441 - DNA, 15 bp, Homo sapiens
ctagttgcccattag

SEQ ID NO: 573442 - DNA, 15 bp, Homo sapiens
actagttgcccatta

SEQ ID NO: 573443 - DNA, 15 bp, Homo sapiens
cactagttgcccatt

SEQ ID NO: 573444 - DNA, 15 bp, Homo sapiens
ccactagttgcccat

SEQ ID NO: 573445 - DNA, 15 bp, Homo sapiens
accactagttgccca

SEQ ID NO: 573446 - DNA, 15 bp, Homo sapiens
aaccactagttgccc

SEQ ID NO: 573447 - DNA, 15 bp, Homo sapiens
caaccactagttgcc

SEQ ID NO: 573448 - DNA, 15 bp, Homo sapiens
tcaaccactagttgc

SEQ ID NO: 573449 - DNA, 15 bp, Homo sapiens
ctcaaccactagttg

SEQ ID NO: 573450 - DNA, 15 bp, Homo sapiens
actcaaccactagtt

SEQ ID NO: 573451 - DNA, 15 bp, Homo sapiens
aactcaaccactagt

SEQ ID NO: 573452 - DNA, 15 bp, Homo sapiens
gaactcaaccactag

SEQ ID NO: 573453 - DNA, 15 bp, Homo sapiens
tgaactcaaccacta

SEQ ID NO: 573454 - DNA, 15 bp, Homo sapiens
ttgaactcaaccact

SEQ ID NO: 573455 - DNA, 15 bp, Homo sapiens
gttgaactcaaccac

SEQ ID NO: 573456 - DNA, 15 bp, Homo sapiens
ggttgaactcaacca

SEQ ID NO: 573457 - DNA, 15 bp, Homo sapiens
tggttgaactcaacc

SEQ ID NO: 573458 - DNA, 15 bp, Homo sapiens
atggttgaactcaac

SEQ ID NO: 573459 - DNA, 15 bp, Homo sapiens
tatggttgaactcaa

SEQ ID NO: 573460 - DNA, 15 bp, Homo sapiens
atatggttgaactca

SEQ ID NO: 573461 - DNA, 15 bp, Homo sapiens
aatatggttgaactc

SEQ ID NO: 573462 - DNA, 15 bp, Homo sapiens
aaatatggttgaact

SEQ ID NO: 573463 - DNA, 15 bp, Homo sapiens
aaaatatggttgaac

SEQ ID NO: 573464 - DNA, 15 bp, Homo sapiens
aaaaatatggttgaa

SEQ ID NO: 573465 - DNA, 15 bp, Homo sapiens
taaaaatatggttga

SEQ ID NO: 573466 - DNA, 15 bp, Homo sapiens
gtaaaaatatggttg

SEQ ID NO: 573467 - DNA, 15 bp, Homo sapiens
ggtaaaaatatggtt

SEQ ID NO: 573468 - DNA, 15 bp, Homo sapiens
gggtaaaaatatggt

SEQ ID NO: 573469 - DNA, 15 bp, Homo sapiens
agggtaaaaatatgg

SEQ ID NO: 573470 - DNA, 15 bp, Homo sapiens
aagggtaaaaatatg

SEQ ID NO: 573471 - DNA, 15 bp, Homo sapiens
aaagggtaaaaatat

SEQ ID NO: 573472 - DNA, 15 bp, Homo sapiens
aaaagggtaaaaata

SEQ ID NO: 573473 - DNA, 15 bp, Homo sapiens
gaaaagggtaaaaat

SEQ ID NO: 573474 - DNA, 15 bp, Homo sapiens
agaaaagggtaaaaa

SEQ ID NO: 573475 - DNA, 15 bp, Homo sapiens
aagaaaagggtaaaa

SEQ ID NO: 573476 - DNA, 15 bp, Homo sapiens
gaagaaaagggtaaa

SEQ ID NO: 573477 - DNA, 15 bp, Homo sapiens
tgaagaaaagggtaa

SEQ ID NO: 573478 - DNA, 15 bp, Homo sapiens
atgaagaaaagggta

SEQ ID NO: 573479 - DNA, 15 bp, Homo sapiens
catgaagaaaagggt

SEQ ID NO: 573480 - DNA, 15 bp, Homo sapiens
acatgaagaaaaggg

SEQ ID NO: 573481 - DNA, 15 bp, Homo sapiens
cacatgaagaaaagg

SEQ ID NO: 573482 - DNA, 15 bp, Homo sapiens
ccacatgaagaaaag

SEQ ID NO: 573483 - DNA, 15 bp, Homo sapiens
tccacatgaagaaaa

SEQ ID NO: 573484 - DNA, 15 bp, Homo sapiens
atccacatgaagaaa

SEQ ID NO: 573485 - DNA, 15 bp, Homo sapiens
aatccacatgaagaa

SEQ ID NO: 573486 - DNA, 15 bp, Homo sapiens
caatccacatgaaga

SEQ ID NO: 573487 - DNA, 15 bp, Homo sapiens
tcaatccacatgaag

SEQ ID NO: 573488 - DNA, 15 bp, Homo sapiens
ttcaatccacatgaa

SEQ ID NO: 573489 - DNA, 15 bp, Homo sapiens
cttcaatccacatga

SEQ ID NO: 573490 - DNA, 15 bp, Homo sapiens
tcttcaatccacatg

SEQ ID NO: 573491 - DNA, 15 bp, Homo sapiens
ctcttcaatccacat

SEQ ID NO: 573492 - DNA, 15 bp, Homo sapiens
actcttcaatccaca

SEQ ID NO: 573493 - DNA, 15 bp, Homo sapiens
cactcttcaatccac

SEQ ID NO: 573494 - DNA, 15 bp, Homo sapiens
ccactcttcaatcca

SEQ ID NO: 573495 - DNA, 15 bp, Homo sapiens
tccactcttcaatcc

SEQ ID NO: 573496 - DNA, 15 bp, Homo sapiens
gtccactcttcaatc

SEQ ID NO: 573497 - DNA, 15 bp, Homo sapiens
tgtccactcttcaat

SEQ ID NO: 573498 - DNA, 15 bp, Homo sapiens
atgtccactcttcaa

SEQ ID NO: 573499 - DNA, 15 bp, Homo sapiens
aatgtccactcttca

SEQ ID NO: 573500 - DNA, 15 bp, Homo sapiens
aaatgtccactcttc

SEQ ID NO: 573501 - DNA, 15 bp, Homo sapiens
taaatgtccactctt

SEQ ID NO: 573502 - DNA, 15 bp, Homo sapiens
gtaaatgtccactct

SEQ ID NO: 573503 - DNA, 15 bp, Homo sapiens
tgtaaatgtccactc

SEQ ID NO: 573504 - DNA, 15 bp, Homo sapiens
ctgtaaatgtccact

SEQ ID NO: 573505 - DNA, 15 bp, Homo sapiens
actgtaaatgtccac

SEQ ID NO: 573506 - DNA, 15 bp, Homo sapiens
aactgtaaatgtcca

SEQ ID NO: 573507 - DNA, 15 bp, Homo sapiens
caactgtaaatgtcc

SEQ ID NO: 573508 - DNA, 15 bp, Homo sapiens
acaactgtaaatgtc

SEQ ID NO: 573509 - DNA, 15 bp, Homo sapiens
cacaactgtaaatgt

SEQ ID NO: 573510 - DNA, 15 bp, Homo sapiens
gcacaactgtaaatg

SEQ ID NO: 573511 - DNA, 15 bp, Homo sapiens
cgcacaactgtaaat

SEQ ID NO: 573512 - DNA, 15 bp, Homo sapiens
ccgcacaactgtaaa

SEQ ID NO: 573513 - DNA, 15 bp, Homo sapiens
tccgcacaactgtaa

SEQ ID NO: 573514 - DNA, 15 bp, Homo sapiens
ctccgcacaactgta

SEQ ID NO: 573515 - DNA, 15 bp, Homo sapiens
gctccgcacaactgt

SEQ ID NO: 573516 - DNA, 15 bp, Homo sapiens
agctccgcacaactg

SEQ ID NO: 573517 - DNA, 15 bp, Homo sapiens
cagctccgcacaact

SEQ ID NO: 573518 - DNA, 15 bp, Homo sapiens
acagctccgcacaac

SEQ ID NO: 573519 - DNA, 15 bp, Homo sapiens
aacagctccgcacaa

SEQ ID NO: 573520 - DNA, 15 bp, Homo sapiens
taacagctccgcaca

SEQ ID NO: 573521 - DNA, 15 bp, Homo sapiens
ataacagctccgcac

SEQ ID NO: 573522 - DNA, 15 bp, Homo sapiens
tataacagctccgca

SEQ ID NO: 573523 - DNA, 15 bp, Homo sapiens
atataacagctccgc

SEQ ID NO: 573524 - DNA, 15 bp, Homo sapiens
aatataacagctccg

SEQ ID NO: 573525 - DNA, 15 bp, Homo sapiens
gaatataacagctcc

SEQ ID NO: 573526 - DNA, 15 bp, Homo sapiens
agaatataacagctc

SEQ ID NO: 573527 - DNA, 15 bp, Homo sapiens
cagaatataacagct

SEQ ID NO: 573528 - DNA, 15 bp, Homo sapiens
ccagaatataacagc

SEQ ID NO: 573529 - DNA, 15 bp, Homo sapiens
gccagaatataacag

SEQ ID NO: 573530 - DNA, 15 bp, Homo sapiens
agccagaatataaca

SEQ ID NO: 573531 - DNA, 15 bp, Homo sapiens
tagccagaatataac

SEQ ID NO: 573532 - DNA, 15 bp, Homo sapiens
gtagccagaatataa

SEQ ID NO: 573533 - DNA, 15 bp, Homo sapiens
ggtagccagaatata

SEQ ID NO: 573534 - DNA, 15 bp, Homo sapiens
tggtagccagaatat

SEQ ID NO: 573535 - DNA, 15 bp, Homo sapiens
ttggtagccagaata

SEQ ID NO: 573536 - DNA, 15 bp, Homo sapiens
gttggtagccagaat

SEQ ID NO: 573537 - DNA, 15 bp, Homo sapiens
agttggtagccagaa

SEQ ID NO: 573538 - DNA, 15 bp, Homo sapiens
aagttggtagccaga

SEQ ID NO: 573539 - DNA, 15 bp, Homo sapiens
taagttggtagccag

SEQ ID NO: 573540 - DNA, 15 bp, Homo sapiens
ctaagttggtagcca

SEQ ID NO: 573541 - DNA, 15 bp, Homo sapiens
gctaagttggtagcc

SEQ ID NO: 573542 - DNA, 15 bp, Homo sapiens
tgctaagttggtagc

SEQ ID NO: 573543 - DNA, 15 bp, Homo sapiens
ttgctaagttggtag

SEQ ID NO: 573544 - DNA, 15 bp, Homo sapiens
tttgctaagttggta

SEQ ID NO: 573545 - DNA, 15 bp, Homo sapiens
ttttgctaagttggt

SEQ ID NO: 573546 - DNA, 15 bp, Homo sapiens
tttttgctaagttgg

SEQ ID NO: 573547 - DNA, 15 bp, Homo sapiens
ttttttgctaagttg

SEQ ID NO: 573548 - DNA, 15 bp, Homo sapiens
tttttttgctaagtt

SEQ ID NO: 573549 - DNA, 15 bp, Homo sapiens
ttttttttgctaagt

SEQ ID NO: 573550 - DNA, 15 bp, Homo sapiens
tttttttttgctaag

SEQ ID NO: 573551 - DNA, 15 bp, Homo sapiens
ttttttttttgctaa

SEQ ID NO: 573552 - DNA, 15 bp, Homo sapiens
tttttttttttgcta

SEQ ID NO: 573553 - DNA, 15 bp, Homo sapiens
ttttttttttttgct

SEQ ID NO: 573554 - DNA, 15 bp, Homo sapiens
tttttttttttttgc

SEQ ID NO: 573555 - DNA, 15 bp, Homo sapiens
ataattttttttttt

SEQ ID NO: 573556 - DNA, 15 bp, Homo sapiens
gataatttttttttt

SEQ ID NO: 573557 - DNA, 15 bp, Homo sapiens
ggataattttttttt

SEQ ID NO: 573558 - DNA, 15 bp, Homo sapiens
aggataatttttttt

SEQ ID NO: 573559 - DNA, 15 bp, Homo sapiens
taggataattttttt

SEQ ID NO: 573560 - DNA, 15 bp, Homo sapiens
ataggataatttttt

SEQ ID NO: 573561 - DNA, 15 bp, Homo sapiens
aataggataattttt

SEQ ID NO: 573562 - DNA, 15 bp, Homo sapiens
gaataggataatttt

SEQ ID NO: 573563 - DNA, 15 bp, Homo sapiens
tgaataggataattt

SEQ ID NO: 573564 - DNA, 15 bp, Homo sapiens
atgaataggataatt

SEQ ID NO: 573565 - DNA, 15 bp, Homo sapiens
aatgaataggataat

SEQ ID NO: 573566 - DNA, 15 bp, Homo sapiens
gaatgaataggataa

SEQ ID NO: 573567 - DNA, 15 bp, Homo sapiens
ggaatgaataggata

SEQ ID NO: 573568 - DNA, 15 bp, Homo sapiens
tggaatgaataggat

SEQ ID NO: 573569 - DNA, 15 bp, Homo sapiens
ctggaatgaatagga

SEQ ID NO: 573570 - DNA, 15 bp, Homo sapiens
gctggaatgaatagg

SEQ ID NO: 573571 - DNA, 15 bp, Homo sapiens
agctggaatgaatag

SEQ ID NO: 573572 - DNA, 15 bp, Homo sapiens
gagctggaatgaata

SEQ ID NO: 573573 - DNA, 15 bp, Homo sapiens
agagctggaatgaat

SEQ ID NO: 573574 - DNA, 15 bp, Homo sapiens
tagagctggaatgaa

SEQ ID NO: 573575 - DNA, 15 bp, Homo sapiens
atagagctggaatga

SEQ ID NO: 573576 - DNA, 15 bp, Homo sapiens
aatagagctggaatg

SEQ ID NO: 573577 - DNA, 15 bp, Homo sapiens
gaatagagctggaat

SEQ ID NO: 573578 - DNA, 15 bp, Homo sapiens
agaatagagctggaa

SEQ ID NO: 573579 - DNA, 15 bp, Homo sapiens
cagaatagagctgga

SEQ ID NO: 573580 - DNA, 15 bp, Homo sapiens
acagaatagagctgg

SEQ ID NO: 573581 - DNA, 15 bp, Homo sapiens
tacagaatagagctg

SEQ ID NO: 573582 - DNA, 15 bp, Homo sapiens
atacagaatagagct

SEQ ID NO: 573583 - DNA, 15 bp, Homo sapiens
catacagaatagagc

SEQ ID NO: 573584 - DNA, 15 bp, Homo sapiens
gcatacagaatagag

SEQ ID NO: 573585 - DNA, 15 bp, Homo sapiens
agcatacagaataga

SEQ ID NO: 573586 - DNA, 15 bp, Homo sapiens
aagcatacagaatag

SEQ ID NO: 573587 - DNA, 15 bp, Homo sapiens
aaagcatacagaata

SEQ ID NO: 573588 - DNA, 15 bp, Homo sapiens
gaaagcatacagaat

SEQ ID NO: 573589 - DNA, 15 bp, Homo sapiens
ggaaagcatacagaa

SEQ ID NO: 573590 - DNA, 15 bp, Homo sapiens
gggaaagcatacaga

SEQ ID NO: 573591 - DNA, 15 bp, Homo sapiens
agggaaagcatacag

SEQ ID NO: 573592 - DNA, 15 bp, Homo sapiens
gagggaaagcataca

SEQ ID NO: 573593 - DNA, 15 bp, Homo sapiens
tgagggaaagcatac

SEQ ID NO: 573594 - DNA, 15 bp, Homo sapiens
atgagggaaagcata

SEQ ID NO: 573595 - DNA, 15 bp, Homo sapiens
aatgagggaaagcat

SEQ ID NO: 573596 - DNA, 15 bp, Homo sapiens
aaatgagggaaagca

SEQ ID NO: 573597 - DNA, 15 bp, Homo sapiens
gaaatgagggaaagc

SEQ ID NO: 573598 - DNA, 15 bp, Homo sapiens
ggaaatgagggaaag

SEQ ID NO: 573599 - DNA, 15 bp, Homo sapiens
tggaaatgagggaaa

SEQ ID NO: 573600 - DNA, 15 bp, Homo sapiens
ttggaaatgagggaa

SEQ ID NO: 573601 - DNA, 15 bp, Homo sapiens
cttggaaatgaggga

SEQ ID NO: 573602 - DNA, 15 bp, Homo sapiens
tcttggaaatgaggg

SEQ ID NO: 573603 - DNA, 15 bp, Homo sapiens
ctcttggaaatgagg

SEQ ID NO: 573604 - DNA, 15 bp, Homo sapiens
tctcttggaaatgag

SEQ ID NO: 573605 - DNA, 15 bp, Homo sapiens
ttctcttggaaatga

SEQ ID NO: 573606 - DNA, 15 bp, Homo sapiens
tttctcttggaaatg

SEQ ID NO: 573607 - DNA, 15 bp, Homo sapiens
atttctcttggaaat

SEQ ID NO: 573608 - DNA, 15 bp, Homo sapiens
aatttctcttggaaa

SEQ ID NO: 573609 - DNA, 15 bp, Homo sapiens
aaatttctcttggaa

SEQ ID NO: 573610 - DNA, 15 bp, Homo sapiens
taaatttctcttgga

SEQ ID NO: 573611 - DNA, 15 bp, Homo sapiens
ctaaatttctcttgg

SEQ ID NO: 573612 - DNA, 15 bp, Homo sapiens
tctaaatttctcttg

SEQ ID NO: 573613 - DNA, 15 bp, Homo sapiens
ttctaaatttctctt

SEQ ID NO: 573614 - DNA, 15 bp, Homo sapiens
gttctaaatttctct

SEQ ID NO: 573615 - DNA, 15 bp, Homo sapiens
agttctaaatttctc

SEQ ID NO: 573616 - DNA, 15 bp, Homo sapiens
cagttctaaatttct

SEQ ID NO: 573617 - DNA, 15 bp, Homo sapiens
tcagttctaaatttc

SEQ ID NO: 573618 - DNA, 15 bp, Homo sapiens
ctcagttctaaattt

SEQ ID NO: 573619 - DNA, 15 bp, Homo sapiens
actcagttctaaatt

SEQ ID NO: 573620 - DNA, 15 bp, Homo sapiens
tactcagttctaaat

SEQ ID NO: 573621 - DNA, 15 bp, Homo sapiens
ttactcagttctaaa

SEQ ID NO: 573622 - DNA, 15 bp, Homo sapiens
attactcagttctaa

SEQ ID NO: 573623 - DNA, 15 bp, Homo sapiens
aattactcagttcta

SEQ ID NO: 573624 - DNA, 15 bp, Homo sapiens
caattactcagttct

SEQ ID NO: 573625 - DNA, 15 bp, Homo sapiens
gcaattactcagttc

SEQ ID NO: 573626 - DNA, 15 bp, Homo sapiens
ggcaattactcagtt

SEQ ID NO: 573627 - DNA, 15 bp, Homo sapiens
tggcaattactcagt

SEQ ID NO: 573628 - DNA, 15 bp, Homo sapiens
ttggcaattactcag

SEQ ID NO: 573629 - DNA, 15 bp, Homo sapiens
attggcaattactca

SEQ ID NO: 573630 - DNA, 15 bp, Homo sapiens
tattggcaattactc

SEQ ID NO: 573631 - DNA, 15 bp, Homo sapiens
atattggcaattact

SEQ ID NO: 573632 - DNA, 15 bp, Homo sapiens
aatattggcaattac

SEQ ID NO: 573633 - DNA, 15 bp, Homo sapiens
gaatattggcaatta

SEQ ID NO: 573634 - DNA, 15 bp, Homo sapiens
ggaatattggcaatt

SEQ ID NO: 573635 - DNA, 15 bp, Homo sapiens
gggaatattggcaat

SEQ ID NO: 573636 - DNA, 15 bp, Homo sapiens
tgggaatattggcaa

SEQ ID NO: 573637 - DNA, 15 bp, Homo sapiens
atgggaatattggca

SEQ ID NO: 573638 - DNA, 15 bp, Homo sapiens
catgggaatattggc

SEQ ID NO: 573639 - DNA, 15 bp, Homo sapiens
gcatgggaatattgg

SEQ ID NO: 573640 - DNA, 15 bp, Homo sapiens
agcatgggaatattg

SEQ ID NO: 573641 - DNA, 15 bp, Homo sapiens
cagcatgggaatatt

SEQ ID NO: 573642 - DNA, 15 bp, Homo sapiens
gcagcatgggaatat

SEQ ID NO: 573643 - DNA, 15 bp, Homo sapiens
tgcagcatgggaata

SEQ ID NO: 573644 - DNA, 15 bp, Homo sapiens
atgcagcatgggaat

SEQ ID NO: 573645 - DNA, 15 bp, Homo sapiens
aatgcagcatgggaa

SEQ ID NO: 573646 - DNA, 15 bp, Homo sapiens
aaatgcagcatggga

SEQ ID NO: 573647 - DNA, 15 bp, Homo sapiens
aaaatgcagcatggg

SEQ ID NO: 573648 - DNA, 15 bp, Homo sapiens
taaaatgcagcatgg

SEQ ID NO: 573649 - DNA, 15 bp, Homo sapiens
ataaaatgcagcatg

SEQ ID NO: 573650 - DNA, 15 bp, Homo sapiens
aataaaatgcagcat

SEQ ID NO: 573651 - DNA, 15 bp, Homo sapiens
gaataaaatgcagca

SEQ ID NO: 573652 - DNA, 15 bp, Homo sapiens
agaataaaatgcagc

SEQ ID NO: 573653 - DNA, 15 bp, Homo sapiens
gagaataaaatgcag

SEQ ID NO: 573654 - DNA, 15 bp, Homo sapiens
ggagaataaaatgca

SEQ ID NO: 573655 - DNA, 15 bp, Homo sapiens
tggagaataaaatgc

SEQ ID NO: 573656 - DNA, 15 bp, Homo sapiens
ctggagaataaaatg

SEQ ID NO: 573657 - DNA, 15 bp, Homo sapiens
actggagaataaaat

SEQ ID NO: 573658 - DNA, 15 bp, Homo sapiens
gactggagaataaaa

SEQ ID NO: 573659 - DNA, 15 bp, Homo sapiens
agactggagaataaa

SEQ ID NO: 573660 - DNA, 15 bp, Homo sapiens
aagactggagaataa

SEQ ID NO: 573661 - DNA, 15 bp, Homo sapiens
aaagactggagaata

SEQ ID NO: 573662 - DNA, 15 bp, Homo sapiens
taaagactggagaat

SEQ ID NO: 573663 - DNA, 15 bp, Homo sapiens
ataaagactggagaa

SEQ ID NO: 573664 - DNA, 15 bp, Homo sapiens
aataaagactggaga

SEQ ID NO: 573665 - DNA, 15 bp, Homo sapiens
taataaagactggag

SEQ ID NO: 573666 - DNA, 15 bp, Homo sapiens
gtaataaagactgga

SEQ ID NO: 573667 - DNA, 15 bp, Homo sapiens
agtaataaagactgg

SEQ ID NO: 573668 - DNA, 15 bp, Homo sapiens
cagtaataaagactg

SEQ ID NO: 573669 - DNA, 15 bp, Homo sapiens
tcagtaataaagact

SEQ ID NO: 573670 - DNA, 15 bp, Homo sapiens
ctcagtaataaagac

SEQ ID NO: 573671 - DNA, 15 bp, Homo sapiens
gctcagtaataaaga

SEQ ID NO: 573672 - DNA, 15 bp, Homo sapiens
cgctcagtaataaag

SEQ ID NO: 573673 - DNA, 15 bp, Homo sapiens
tcgctcagtaataaa

SEQ ID NO: 573674 - DNA, 15 bp, Homo sapiens
atcgctcagtaataa

SEQ ID NO: 573675 - DNA, 15 bp, Homo sapiens
gatcgctcagtaata

SEQ ID NO: 573676 - DNA, 15 bp, Homo sapiens
ggatcgctcagtaat

SEQ ID NO: 573677 - DNA, 15 bp, Homo sapiens
aggatcgctcagtaa

SEQ ID NO: 573678 - DNA, 15 bp, Homo sapiens
gaggatcgctcagta

SEQ ID NO: 573679 - DNA, 15 bp, Homo sapiens
agaggatcgctcagt

SEQ ID NO: 573680 - DNA, 15 bp, Homo sapiens
tagaggatcgctcag

SEQ ID NO: 573681 - DNA, 15 bp, Homo sapiens
gtagaggatcgctca

SEQ ID NO: 573682 - DNA, 15 bp, Homo sapiens
tgtagaggatcgctc

SEQ ID NO: 573683 - DNA, 15 bp, Homo sapiens
ttgtagaggatcgct

SEQ ID NO: 573684 - DNA, 15 bp, Homo sapiens
attgtagaggatcgc

SEQ ID NO: 573685 - DNA, 15 bp, Homo sapiens
cattgtagaggatcg

SEQ ID NO: 573686 - DNA, 15 bp, Homo sapiens
acattgtagaggatc

SEQ ID NO: 573687 - DNA, 15 bp, Homo sapiens
cacattgtagaggat

SEQ ID NO: 573688 - DNA, 15 bp, Homo sapiens
ccacattgtagagga

SEQ ID NO: 573689 - DNA, 15 bp, Homo sapiens
cccacattgtagagg

SEQ ID NO: 573690 - DNA, 15 bp, Homo sapiens
acccacattgtagag

SEQ ID NO: 573691 - DNA, 15 bp, Homo sapiens
aacccacattgtaga

SEQ ID NO: 573692 - DNA, 15 bp, Homo sapiens
caacccacattgtag

SEQ ID NO: 573693 - DNA, 15 bp, Homo sapiens
acaacccacattgta

SEQ ID NO: 573694 - DNA, 15 bp, Homo sapiens
aacaacccacattgt

SEQ ID NO: 573695 - DNA, 15 bp, Homo sapiens
taacaacccacattg

SEQ ID NO: 573696 - DNA, 15 bp, Homo sapiens
ttaacaacccacatt

SEQ ID NO: 573697 - DNA, 15 bp, Homo sapiens
attaacaacccacat

SEQ ID NO: 573698 - DNA, 15 bp, Homo sapiens
tattaacaacccaca

SEQ ID NO: 573699 - DNA, 15 bp, Homo sapiens
gtattaacaacccac

SEQ ID NO: 573700 - DNA, 15 bp, Homo sapiens
ggtattaacaaccca

SEQ ID NO: 573701 - DNA, 15 bp, Homo sapiens
gggtattaacaaccc

SEQ ID NO: 573702 - DNA, 15 bp, Homo sapiens
agggtattaacaacc

SEQ ID NO: 573703 - DNA, 15 bp, Homo sapiens
aagggtattaacaac

SEQ ID NO: 573704 - DNA, 15 bp, Homo sapiens
caagggtattaacaa

SEQ ID NO: 573705 - DNA, 15 bp, Homo sapiens
acaagggtattaaca

SEQ ID NO: 573706 - DNA, 15 bp, Homo sapiens
cacaagggtattaac

SEQ ID NO: 573707 - DNA, 15 bp, Homo sapiens
acacaagggtattaa

SEQ ID NO: 573708 - DNA, 15 bp, Homo sapiens
aacacaagggtatta

SEQ ID NO: 573709 - DNA, 15 bp, Homo sapiens
gaacacaagggtatt

SEQ ID NO: 573710 - DNA, 15 bp, Homo sapiens
agaacacaagggtat

SEQ ID NO: 573711 - DNA, 15 bp, Homo sapiens
gagaacacaagggta

SEQ ID NO: 573712 - DNA, 15 bp, Homo sapiens
tgagaacacaagggt

SEQ ID NO: 573713 - DNA, 15 bp, Homo sapiens
ctgagaacacaaggg

SEQ ID NO: 573714 - DNA, 15 bp, Homo sapiens
gctgagaacacaagg

SEQ ID NO: 573715 - DNA, 15 bp, Homo sapiens
tgctgagaacacaag

SEQ ID NO: 573716 - DNA, 15 bp, Homo sapiens
gtgctgagaacacaa

SEQ ID NO: 573717 - DNA, 15 bp, Homo sapiens
tgtgctgagaacaca

SEQ ID NO: 573718 - DNA, 15 bp, Homo sapiens
ttgtgctgagaacac

SEQ ID NO: 573719 - DNA, 15 bp, Homo sapiens
tttgtgctgagaaca

SEQ ID NO: 573720 - DNA, 15 bp, Homo sapiens
ttttgtgctgagaac

SEQ ID NO: 573721 - DNA, 15 bp, Homo sapiens
attttgtgctgagaa

SEQ ID NO: 573722 - DNA, 15 bp, Homo sapiens
tattttgtgctgaga

SEQ ID NO: 573723 - DNA, 15 bp, Homo sapiens
atattttgtgctgag

SEQ ID NO: 573724 - DNA, 15 bp, Homo sapiens
tatattttgtgctga

SEQ ID NO: 573725 - DNA, 15 bp, Homo sapiens
ctatattttgtgctg

SEQ ID NO: 573726 - DNA, 15 bp, Homo sapiens
actatattttgtgct

SEQ ID NO: 573727 - DNA, 15 bp, Homo sapiens
tactatattttgtgc

SEQ ID NO: 573728 - DNA, 15 bp, Homo sapiens
ctactatattttgtg

SEQ ID NO: 573729 - DNA, 15 bp, Homo sapiens
cctactatattttgt

SEQ ID NO: 573730 - DNA, 15 bp, Homo sapiens
ccctactatattttg

SEQ ID NO: 573731 - DNA, 15 bp, Homo sapiens
cccctactatatttt

SEQ ID NO: 573732 - DNA, 15 bp, Homo sapiens
ccccctactatattt

SEQ ID NO: 573733 - DNA, 15 bp, Homo sapiens
cccccctactatatt

SEQ ID NO: 573734 - DNA, 15 bp, Homo sapiens
acccccctactatat

SEQ ID NO: 573735 - DNA, 15 bp, Homo sapiens
gacccccctactata

SEQ ID NO: 573736 - DNA, 15 bp, Homo sapiens
tgacccccctactat

SEQ ID NO: 573737 - DNA, 15 bp, Homo sapiens
ttgacccccctacta

SEQ ID NO: 573738 - DNA, 15 bp, Homo sapiens
cttgacccccctact

SEQ ID NO: 573739 - DNA, 15 bp, Homo sapiens
tcttgacccccctac

SEQ ID NO: 573740 - DNA, 15 bp, Homo sapiens
ttcttgaccccccta

SEQ ID NO: 573741 - DNA, 15 bp, Homo sapiens
tttcttgacccccct

SEQ ID NO: 573742 - DNA, 15 bp, Homo sapiens
atttcttgacccccc

SEQ ID NO: 573743 - DNA, 15 bp, Homo sapiens
gatttcttgaccccc

SEQ ID NO: 573744 - DNA, 15 bp, Homo sapiens
tgatttcttgacccc

SEQ ID NO: 573745 - DNA, 15 bp, Homo sapiens
ttgatttcttgaccc

SEQ ID NO: 573746 - DNA, 15 bp, Homo sapiens
cttgatttcttgacc

SEQ ID NO: 573747 - DNA, 15 bp, Homo sapiens
tcttgatttcttgac

SEQ ID NO: 573748 - DNA, 15 bp, Homo sapiens
ctcttgatttcttga

SEQ ID NO: 573749 - DNA, 15 bp, Homo sapiens
cctcttgatttcttg

SEQ ID NO: 573750 - DNA, 15 bp, Homo sapiens
acctcttgatttctt

SEQ ID NO: 573751 - DNA, 15 bp, Homo sapiens
aacctcttgatttct

SEQ ID NO: 573752 - DNA, 15 bp, Homo sapiens
caacctcttgatttc

SEQ ID NO: 573753 - DNA, 15 bp, Homo sapiens
tcaacctcttgattt

SEQ ID NO: 573754 - DNA, 15 bp, Homo sapiens
ttcaacctcttgatt

SEQ ID NO: 573755 - DNA, 15 bp, Homo sapiens
tttcaacctcttgat

SEQ ID NO: 573756 - DNA, 15 bp, Homo sapiens
gtttcaacctcttga

SEQ ID NO: 573757 - DNA, 15 bp, Homo sapiens
agtttcaacctcttg

SEQ ID NO: 573758 - DNA, 15 bp, Homo sapiens
tagtttcaacctctt

SEQ ID NO: 573759 - DNA, 15 bp, Homo sapiens
ttagtttcaacctct

SEQ ID NO: 573760 - DNA, 15 bp, Homo sapiens
attagtttcaacctc

SEQ ID NO: 573761 - DNA, 15 bp, Homo sapiens
cattagtttcaacct

SEQ ID NO: 573762 - DNA, 15 bp, Homo sapiens
ccattagtttcaacc

SEQ ID NO: 573763 - DNA, 15 bp, Homo sapiens
tccattagtttcaac

SEQ ID NO: 573764 - DNA, 15 bp, Homo sapiens
ttccattagtttcaa

SEQ ID NO: 573765 - DNA, 15 bp, Homo sapiens
cttccattagtttca

SEQ ID NO: 573766 - DNA, 15 bp, Homo sapiens
ccttccattagtttc

SEQ ID NO: 573767 - DNA, 15 bp, Homo sapiens
tccttccattagttt

SEQ ID NO: 573768 - DNA, 15 bp, Homo sapiens
ctccttccattagtt

SEQ ID NO: 573769 - DNA, 15 bp, Homo sapiens
tctccttccattagt

SEQ ID NO: 573770 - DNA, 15 bp, Homo sapiens
ttctccttccattag

SEQ ID NO: 573771 - DNA, 15 bp, Homo sapiens
tttctccttccatta

SEQ ID NO: 573772 - DNA, 15 bp, Homo sapiens
gtttctccttccatt

SEQ ID NO: 573773 - DNA, 15 bp, Homo sapiens
agtttctccttccat

SEQ ID NO: 573774 - DNA, 15 bp, Homo sapiens
tagtttctccttcca

SEQ ID NO: 573775 - DNA, 15 bp, Homo sapiens
ttagtttctccttcc

SEQ ID NO: 573776 - DNA, 15 bp, Homo sapiens
attagtttctccttc

SEQ ID NO: 573777 - DNA, 15 bp, Homo sapiens
cattagtttctcctt

SEQ ID NO: 573778 - DNA, 15 bp, Homo sapiens
gcattagtttctcct

SEQ ID NO: 573779 - DNA, 15 bp, Homo sapiens
agcattagtttctcc

SEQ ID NO: 573780 - DNA, 15 bp, Homo sapiens
aagcattagtttctc

SEQ ID NO: 573781 - DNA, 15 bp, Homo sapiens
aaagcattagtttct

SEQ ID NO: 573782 - DNA, 15 bp, Homo sapiens
gaaagcattagtttc

SEQ ID NO: 573783 - DNA, 15 bp, Homo sapiens
agaaagcattagttt

SEQ ID NO: 573784 - DNA, 15 bp, Homo sapiens
gagaaagcattagtt

SEQ ID NO: 573785 - DNA, 15 bp, Homo sapiens
tgagaaagcattagt

SEQ ID NO: 573786 - DNA, 15 bp, Homo sapiens
ttgagaaagcattag

SEQ ID NO: 573787 - DNA, 15 bp, Homo sapiens
gttgagaaagcatta

SEQ ID NO: 573788 - DNA, 15 bp, Homo sapiens
ggttgagaaagcatt

SEQ ID NO: 573789 - DNA, 15 bp, Homo sapiens
tggttgagaaagcat

SEQ ID NO: 573790 - DNA, 15 bp, Homo sapiens
ttggttgagaaagca

SEQ ID NO: 573791 - DNA, 15 bp, Homo sapiens
cttggttgagaaagc

SEQ ID NO: 573792 - DNA, 15 bp, Homo sapiens
tcttggttgagaaag

SEQ ID NO: 573793 - DNA, 15 bp, Homo sapiens
ctcttggttgagaaa

SEQ ID NO: 573794 - DNA, 15 bp, Homo sapiens
tctcttggttgagaa

SEQ ID NO: 573795 - DNA, 15 bp, Homo sapiens
ctctcttggttgaga

SEQ ID NO: 573796 - DNA, 15 bp, Homo sapiens
gctctcttggttgag

SEQ ID NO: 573797 - DNA, 15 bp, Homo sapiens
ggctctcttggttga

SEQ ID NO: 573798 - DNA, 15 bp, Homo sapiens
tggctctcttggttg

SEQ ID NO: 573799 - DNA, 15 bp, Homo sapiens
atggctctcttggtt

SEQ ID NO: 573800 - DNA, 15 bp, Homo sapiens
catggctctcttggt

SEQ ID NO: 573801 - DNA, 15 bp, Homo sapiens
tcatggctctcttgg

SEQ ID NO: 573802 - DNA, 15 bp, Homo sapiens
ttcatggctctcttg

SEQ ID NO: 573803 - DNA, 15 bp, Homo sapiens
cttcatggctctctt

SEQ ID NO: 573804 - DNA, 15 bp, Homo sapiens
gcttcatggctctct

SEQ ID NO: 573805 - DNA, 15 bp, Homo sapiens
ggcttcatggctctc

SEQ ID NO: 573806 - DNA, 15 bp, Homo sapiens
tggcttcatggctct

SEQ ID NO: 573807 - DNA, 15 bp, Homo sapiens
gtggcttcatggctc

SEQ ID NO: 573808 - DNA, 15 bp, Homo sapiens
tgtggcttcatggct

SEQ ID NO: 573809 - DNA, 15 bp, Homo sapiens
gtgtggcttcatggc

SEQ ID NO: 573810 - DNA, 15 bp, Homo sapiens
tgtgtggcttcatgg

SEQ ID NO: 573811 - DNA, 15 bp, Homo sapiens
ctgtgtggcttcatg

SEQ ID NO: 573812 - DNA, 15 bp, Homo sapiens
tctgtgtggcttcat

SEQ ID NO: 573813 - DNA, 15 bp, Homo sapiens
ttctgtgtggcttca

SEQ ID NO: 573814 - DNA, 15 bp, Homo sapiens
tttctgtgtggcttc

SEQ ID NO: 573815 - DNA, 15 bp, Homo sapiens
ttttctgtgtggctt

SEQ ID NO: 573816 - DNA, 15 bp, Homo sapiens
cttttctgtgtggct

SEQ ID NO: 573817 - DNA, 15 bp, Homo sapiens
ccttttctgtgtggc

SEQ ID NO: 573818 - DNA, 15 bp, Homo sapiens
accttttctgtgtgg

SEQ ID NO: 573819 - DNA, 15 bp, Homo sapiens
gaccttttctgtgtg

SEQ ID NO: 573820 - DNA, 15 bp, Homo sapiens
cgaccttttctgtgt

SEQ ID NO: 573821 - DNA, 15 bp, Homo sapiens
ccgaccttttctgtg

SEQ ID NO: 573822 - DNA, 15 bp, Homo sapiens
tccgaccttttctgt

SEQ ID NO: 573823 - DNA, 15 bp, Homo sapiens
atccgaccttttctg

SEQ ID NO: 573824 - DNA, 15 bp, Homo sapiens
catccgaccttttct

SEQ ID NO: 573825 - DNA, 15 bp, Homo sapiens
acatccgaccttttc

SEQ ID NO: 573826 - DNA, 15 bp, Homo sapiens
cacatccgacctttt

SEQ ID NO: 573827 - DNA, 15 bp, Homo sapiens
ccacatccgaccttt

SEQ ID NO: 573828 - DNA, 15 bp, Homo sapiens
accacatccgacctt

SEQ ID NO: 573829 - DNA, 15 bp, Homo sapiens
gaccacatccgacct

SEQ ID NO: 573830 - DNA, 15 bp, Homo sapiens
agaccacatccgacc

SEQ ID NO: 573831 - DNA, 15 bp, Homo sapiens
tagaccacatccgac

SEQ ID NO: 573832 - DNA, 15 bp, Homo sapiens
ttagaccacatccga

SEQ ID NO: 573833 - DNA, 15 bp, Homo sapiens
gttagaccacatccg

SEQ ID NO: 573834 - DNA, 15 bp, Homo sapiens
ggttagaccacatcc

SEQ ID NO: 573835 - DNA, 15 bp, Homo sapiens
gggttagaccacatc

SEQ ID NO: 573836 - DNA, 15 bp, Homo sapiens
agggttagaccacat

SEQ ID NO: 573837 - DNA, 15 bp, Homo sapiens
tagggttagaccaca

SEQ ID NO: 573838 - DNA, 15 bp, Homo sapiens
atagggttagaccac

SEQ ID NO: 573839 - DNA, 15 bp, Homo sapiens
catagggttagacca

SEQ ID NO: 573840 - DNA, 15 bp, Homo sapiens
tcatagggttagacc

SEQ ID NO: 573841 - DNA, 15 bp, Homo sapiens
ctcatagggttagac

SEQ ID NO: 573842 - DNA, 15 bp, Homo sapiens
actcatagggttaga

SEQ ID NO: 573843 - DNA, 15 bp, Homo sapiens
aactcatagggttag

SEQ ID NO: 573844 - DNA, 15 bp, Homo sapiens
taactcatagggtta

SEQ ID NO: 573845 - DNA, 15 bp, Homo sapiens
ataactcatagggtt

SEQ ID NO: 573846 - DNA, 15 bp, Homo sapiens
cataactcatagggt

SEQ ID NO: 573847 - DNA, 15 bp, Homo sapiens
acataactcataggg

SEQ ID NO: 573848 - DNA, 15 bp, Homo sapiens
tacataactcatagg

SEQ ID NO: 573849 - DNA, 15 bp, Homo sapiens
ttacataactcatag

SEQ ID NO: 573850 - DNA, 15 bp, Homo sapiens
cttacataactcata

SEQ ID NO: 573851 - DNA, 15 bp, Homo sapiens
tcttacataactcat

SEQ ID NO: 573852 - DNA, 15 bp, Homo sapiens
ttcttacataactca

SEQ ID NO: 573853 - DNA, 15 bp, Homo sapiens
attcttacataactc

SEQ ID NO: 573854 - DNA, 15 bp, Homo sapiens
aattcttacataact

SEQ ID NO: 573855 - DNA, 15 bp, Homo sapiens
gaattcttacataac

SEQ ID NO: 573856 - DNA, 15 bp, Homo sapiens
agaattcttacataa

SEQ ID NO: 573857 - DNA, 15 bp, Homo sapiens
gagaattcttacata

SEQ ID NO: 573858 - DNA, 15 bp, Homo sapiens
ggagaattcttacat

SEQ ID NO: 573859 - DNA, 15 bp, Homo sapiens
aggagaattcttaca

SEQ ID NO: 573860 - DNA, 15 bp, Homo sapiens
gaggagaattcttac

SEQ ID NO: 573861 - DNA, 15 bp, Homo sapiens
ggaggagaattctta

SEQ ID NO: 573862 - DNA, 15 bp, Homo sapiens
tggaggagaattctt

SEQ ID NO: 573863 - DNA, 15 bp, Homo sapiens
gtggaggagaattct

SEQ ID NO: 573864 - DNA, 15 bp, Homo sapiens
tgtggaggagaattc

SEQ ID NO: 573865 - DNA, 15 bp, Homo sapiens
ttgtggaggagaatt

SEQ ID NO: 573866 - DNA, 15 bp, Homo sapiens
attgtggaggagaat

SEQ ID NO: 573867 - DNA, 15 bp, Homo sapiens
cattgtggaggagaa

SEQ ID NO: 573868 - DNA, 15 bp, Homo sapiens
gcattgtggaggaga

SEQ ID NO: 573869 - DNA, 15 bp, Homo sapiens
ggcattgtggaggag

SEQ ID NO: 573870 - DNA, 15 bp, Homo sapiens
aggcattgtggagga

SEQ ID NO: 573871 - DNA, 15 bp, Homo sapiens
gaggcattgtggagg

SEQ ID NO: 573872 - DNA, 15 bp, Homo sapiens
agaggcattgtggag

SEQ ID NO: 573873 - DNA, 15 bp, Homo sapiens
cagaggcattgtgga

SEQ ID NO: 573874 - DNA, 15 bp, Homo sapiens
ccagaggcattgtgg

SEQ ID NO: 573875 - DNA, 15 bp, Homo sapiens
gccagaggcattgtg

SEQ ID NO: 573876 - DNA, 15 bp, Homo sapiens
agccagaggcattgt

SEQ ID NO: 573877 - DNA, 15 bp, Homo sapiens
aagccagaggcattg

SEQ ID NO: 573878 - DNA, 15 bp, Homo sapiens
gaagccagaggcatt

SEQ ID NO: 573879 - DNA, 15 bp, Homo sapiens
ggaagccagaggcat

SEQ ID NO: 573880 - DNA, 15 bp, Homo sapiens
aggaagccagaggca

SEQ ID NO: 573881 - DNA, 15 bp, Homo sapiens
aaggaagccagaggc

SEQ ID NO: 573882 - DNA, 15 bp, Homo sapiens
aaaggaagccagagg

SEQ ID NO: 573883 - DNA, 15 bp, Homo sapiens
taaaggaagccagag

SEQ ID NO: 573884 - DNA, 15 bp, Homo sapiens
ataaaggaagccaga

SEQ ID NO: 573885 - DNA, 15 bp, Homo sapiens
tataaaggaagccag

SEQ ID NO: 573886 - DNA, 15 bp, Homo sapiens
ttataaaggaagcca

SEQ ID NO: 573887 - DNA, 15 bp, Homo sapiens
tttataaaggaagcc

SEQ ID NO: 573888 - DNA, 15 bp, Homo sapiens
ctttataaaggaagc

SEQ ID NO: 573889 - DNA, 15 bp, Homo sapiens
tctttataaaggaag

SEQ ID NO: 573890 - DNA, 15 bp, Homo sapiens
ctctttataaaggaa

SEQ ID NO: 573891 - DNA, 15 bp, Homo sapiens
gctctttataaagga

SEQ ID NO: 573892 - DNA, 15 bp, Homo sapiens
agctctttataaagg

SEQ ID NO: 573893 - DNA, 15 bp, Homo sapiens
tagctctttataaag

SEQ ID NO: 573894 - DNA, 15 bp, Homo sapiens
atagctctttataaa

SEQ ID NO: 573895 - DNA, 15 bp, Homo sapiens
aatagctctttataa

SEQ ID NO: 573896 - DNA, 15 bp, Homo sapiens
aaatagctctttata

SEQ ID NO: 573897 - DNA, 15 bp, Homo sapiens
aaaatagctctttat

SEQ ID NO: 573898 - DNA, 15 bp, Homo sapiens
taaaatagctcttta

SEQ ID NO: 573899 - DNA, 15 bp, Homo sapiens
ttaaaatagctcttt

SEQ ID NO: 573900 - DNA, 15 bp, Homo sapiens
cttaaaatagctctt

SEQ ID NO: 573901 - DNA, 15 bp, Homo sapiens
tcttaaaatagctct

SEQ ID NO: 573902 - DNA, 15 bp, Homo sapiens
ttcttaaaatagctc

SEQ ID NO: 573903 - DNA, 15 bp, Homo sapiens
gttcttaaaatagct

SEQ ID NO: 573904 - DNA, 15 bp, Homo sapiens
agttcttaaaatagc

SEQ ID NO: 573905 - DNA, 15 bp, Homo sapiens
cagttcttaaaatag

SEQ ID NO: 573906 - DNA, 15 bp, Homo sapiens
tcagttcttaaaata

SEQ ID NO: 573907 - DNA, 15 bp, Homo sapiens
ctcagttcttaaaat

SEQ ID NO: 573908 - DNA, 15 bp, Homo sapiens
tctcagttcttaaaa

SEQ ID NO: 573909 - DNA, 15 bp, Homo sapiens
ttctcagttcttaaa

SEQ ID NO: 573910 - DNA, 15 bp, Homo sapiens
tttctcagttcttaa

SEQ ID NO: 573911 - DNA, 15 bp, Homo sapiens
atttctcagttctta

SEQ ID NO: 573912 - DNA, 15 bp, Homo sapiens
gatttctcagttctt

SEQ ID NO: 573913 - DNA, 15 bp, Homo sapiens
ggatttctcagttct

SEQ ID NO: 573914 - DNA, 15 bp, Homo sapiens
tggatttctcagttc

SEQ ID NO: 573915 - DNA, 15 bp, Homo sapiens
gtggatttctcagtt

SEQ ID NO: 573916 - DNA, 15 bp, Homo sapiens
ggtggatttctcagt

SEQ ID NO: 573917 - DNA, 15 bp, Homo sapiens
aggtggatttctcag

SEQ ID NO: 573918 - DNA, 15 bp, Homo sapiens
gaggtggatttctca

SEQ ID NO: 573919 - DNA, 15 bp, Homo sapiens
agaggtggatttctc

SEQ ID NO: 573920 - DNA, 15 bp, Homo sapiens
tagaggtggatttct

SEQ ID NO: 573921 - DNA, 15 bp, Homo sapiens
atagaggtggatttc

SEQ ID NO: 573922 - DNA, 15 bp, Homo sapiens
gatagaggtggattt

SEQ ID NO: 573923 - DNA, 15 bp, Homo sapiens
tgatagaggtggatt

SEQ ID NO: 573924 - DNA, 15 bp, Homo sapiens
ttgatagaggtggat

SEQ ID NO: 573925 - DNA, 15 bp, Homo sapiens
tttgatagaggtgga

SEQ ID NO: 573926 - DNA, 15 bp, Homo sapiens
ctttgatagaggtgg

SEQ ID NO: 573927 - DNA, 15 bp, Homo sapiens
actttgatagaggtg

SEQ ID NO: 573928 - DNA, 15 bp, Homo sapiens
cactttgatagaggt

SEQ ID NO: 573929 - DNA, 15 bp, Homo sapiens
gcactttgatagagg

SEQ ID NO: 573930 - DNA, 15 bp, Homo sapiens
ggcactttgatagag

SEQ ID NO: 573931 - DNA, 15 bp, Homo sapiens
aggcactttgataga

SEQ ID NO: 573932 - DNA, 15 bp, Homo sapiens
caggcactttgatag

SEQ ID NO: 573933 - DNA, 15 bp, Homo sapiens
acaggcactttgata

SEQ ID NO: 573934 - DNA, 15 bp, Homo sapiens
gacaggcactttgat

SEQ ID NO: 573935 - DNA, 15 bp, Homo sapiens
tgacaggcactttga

SEQ ID NO: 573936 - DNA, 15 bp, Homo sapiens
ctgacaggcactttg

SEQ ID NO: 573937 - DNA, 15 bp, Homo sapiens
gctgacaggcacttt

SEQ ID NO: 573938 - DNA, 15 bp, Homo sapiens
agctgacaggcactt

SEQ ID NO: 573939 - DNA, 15 bp, Homo sapiens
tagctgacaggcact

SEQ ID NO: 573940 - DNA, 15 bp, Homo sapiens
ctagctgacaggcac

SEQ ID NO: 573941 - DNA, 15 bp, Homo sapiens
actagctgacaggca

SEQ ID NO: 573942 - DNA, 15 bp, Homo sapiens
aactagctgacaggc

SEQ ID NO: 573943 - DNA, 15 bp, Homo sapiens
gaactagctgacagg

SEQ ID NO: 573944 - DNA, 15 bp, Homo sapiens
agaactagctgacag

SEQ ID NO: 573945 - DNA, 15 bp, Homo sapiens
cagaactagctgaca

SEQ ID NO: 573946 - DNA, 15 bp, Homo sapiens
acagaactagctgac

SEQ ID NO: 573947 - DNA, 15 bp, Homo sapiens
tacagaactagctga

SEQ ID NO: 573948 - DNA, 15 bp, Homo sapiens
ctacagaactagctg

SEQ ID NO: 573949 - DNA, 15 bp, Homo sapiens
gctacagaactagct

SEQ ID NO: 573950 - DNA, 15 bp, Homo sapiens
tgctacagaactagc

SEQ ID NO: 573951 - DNA, 15 bp, Homo sapiens
atgctacagaactag

SEQ ID NO: 573952 - DNA, 15 bp, Homo sapiens
gatgctacagaacta

SEQ ID NO: 573953 - DNA, 15 bp, Homo sapiens
ggatgctacagaact

SEQ ID NO: 573954 - DNA, 15 bp, Homo sapiens
gggatgctacagaac

SEQ ID NO: 573955 - DNA, 15 bp, Homo sapiens
ggggatgctacagaa

SEQ ID NO: 573956 - DNA, 15 bp, Homo sapiens
gggggatgctacaga

SEQ ID NO: 573957 - DNA, 15 bp, Homo sapiens
agggggatgctacag

SEQ ID NO: 573958 - DNA, 15 bp, Homo sapiens
gagggggatgctaca

SEQ ID NO: 573959 - DNA, 15 bp, Homo sapiens
agagggggatgctac

SEQ ID NO: 573960 - DNA, 15 bp, Homo sapiens
aagagggggatgcta

SEQ ID NO: 573961 - DNA, 15 bp, Homo sapiens
aaagagggggatgct

SEQ ID NO: 573962 - DNA, 15 bp, Homo sapiens
aaaagagggggatgc

SEQ ID NO: 573963 - DNA, 15 bp, Homo sapiens
taaaagagggggatg

SEQ ID NO: 573964 - DNA, 15 bp, Homo sapiens
ttaaaagagggggat

SEQ ID NO: 573965 - DNA, 15 bp, Homo sapiens
attaaaagaggggga

SEQ ID NO: 573966 - DNA, 15 bp, Homo sapiens
aattaaaagaggggg

SEQ ID NO: 573967 - DNA, 15 bp, Homo sapiens
aaattaaaagagggg

SEQ ID NO: 573968 - DNA, 15 bp, Homo sapiens
caaattaaaagaggg

SEQ ID NO: 573969 - DNA, 15 bp, Homo sapiens
acaaattaaaagagg

SEQ ID NO: 573970 - DNA, 15 bp, Homo sapiens
tacaaattaaaagag

SEQ ID NO: 573971 - DNA, 15 bp, Homo sapiens
gtacaaattaaaaga

SEQ ID NO: 573972 - DNA, 15 bp, Homo sapiens
agtacaaattaaaag

SEQ ID NO: 573973 - DNA, 15 bp, Homo sapiens
aagtacaaattaaaa

SEQ ID NO: 573974 - DNA, 15 bp, Homo sapiens
aaagtacaaattaaa

SEQ ID NO: 573975 - DNA, 15 bp, Homo sapiens
taaagtacaaattaa

SEQ ID NO: 573976 - DNA, 15 bp, Homo sapiens
ttaaagtacaaatta

SEQ ID NO: 573977 - DNA, 15 bp, Homo sapiens
cttaaagtacaaatt

SEQ ID NO: 573978 - DNA, 15 bp, Homo sapiens
acttaaagtacaaat

SEQ ID NO: 573979 - DNA, 15 bp, Homo sapiens
tacttaaagtacaaa

SEQ ID NO: 573980 - DNA, 15 bp, Homo sapiens
ctacttaaagtacaa

SEQ ID NO: 573981 - DNA, 15 bp, Homo sapiens
actacttaaagtaca

SEQ ID NO: 573982 - DNA, 15 bp, Homo sapiens
cactacttaaagtac

SEQ ID NO: 573983 - DNA, 15 bp, Homo sapiens
gcactacttaaagta

SEQ ID NO: 573984 - DNA, 15 bp, Homo sapiens
ggcactacttaaagt

SEQ ID NO: 573985 - DNA, 15 bp, Homo sapiens
tggcactacttaaag

SEQ ID NO: 573986 - DNA, 15 bp, Homo sapiens
atggcactacttaaa

SEQ ID NO: 573987 - DNA, 15 bp, Homo sapiens
catggcactacttaa

SEQ ID NO: 573988 - DNA, 15 bp, Homo sapiens
gcatggcactactta

SEQ ID NO: 573989 - DNA, 15 bp, Homo sapiens
ggcatggcactactt

SEQ ID NO: 573990 - DNA, 15 bp, Homo sapiens
tggcatggcactact

SEQ ID NO: 573991 - DNA, 15 bp, Homo sapiens
atggcatggcactac

SEQ ID NO: 573992 - DNA, 15 bp, Homo sapiens
tatggcatggcacta

SEQ ID NO: 573993 - DNA, 15 bp, Homo sapiens
ttatggcatggcact

SEQ ID NO: 573994 - DNA, 15 bp, Homo sapiens
attatggcatggcac

SEQ ID NO: 573995 - DNA, 15 bp, Homo sapiens
tattatggcatggca

SEQ ID NO: 573996 - DNA, 15 bp, Homo sapiens
atattatggcatggc

SEQ ID NO: 573997 - DNA, 15 bp, Homo sapiens
aatattatggcatgg

SEQ ID NO: 573998 - DNA, 15 bp, Homo sapiens
caatattatggcatg

SEQ ID NO: 573999 - DNA, 15 bp, Homo sapiens
gcaatattatggcat

SEQ ID NO: 574000 - DNA, 15 bp, Homo sapiens
ggcaatattatggca

SEQ ID NO: 574001 - DNA, 15 bp, Homo sapiens
tggcaatattatggc

SEQ ID NO: 574002 - DNA, 15 bp, Homo sapiens
ttggcaatattatgg

SEQ ID NO: 574003 - DNA, 15 bp, Homo sapiens
cttggcaatattatg

SEQ ID NO: 574004 - DNA, 15 bp, Homo sapiens
tcttggcaatattat

SEQ ID NO: 574005 - DNA, 15 bp, Homo sapiens
atcttggcaatatta

SEQ ID NO: 574006 - DNA, 15 bp, Homo sapiens
tatcttggcaatatt

SEQ ID NO: 574007 - DNA, 15 bp, Homo sapiens
ttatcttggcaatat

SEQ ID NO: 574008 - DNA, 15 bp, Homo sapiens
tttatcttggcaata

SEQ ID NO: 574009 - DNA, 15 bp, Homo sapiens
ctttatcttggcaat

SEQ ID NO: 574010 - DNA, 15 bp, Homo sapiens
tctttatcttggcaa

SEQ ID NO: 574011 - DNA, 15 bp, Homo sapiens
ctctttatcttggca

SEQ ID NO: 574012 - DNA, 15 bp, Homo sapiens
tctctttatcttggc

SEQ ID NO: 574013 - DNA, 15 bp, Homo sapiens
ttctctttatcttgg

SEQ ID NO: 574014 - DNA, 15 bp, Homo sapiens
attctctttatcttg

SEQ ID NO: 574015 - DNA, 15 bp, Homo sapiens
aattctctttatctt

SEQ ID NO: 574016 - DNA, 15 bp, Homo sapiens
caattctctttatct

SEQ ID NO: 574017 - DNA, 15 bp, Homo sapiens
acaattctctttatc

SEQ ID NO: 574018 - DNA, 15 bp, Homo sapiens
aacaattctctttat

SEQ ID NO: 574019 - DNA, 15 bp, Homo sapiens
aaacaattctcttta

SEQ ID NO: 574020 - DNA, 15 bp, Homo sapiens
gaaacaattctcttt

SEQ ID NO: 574021 - DNA, 15 bp, Homo sapiens
ggaaacaattctctt

SEQ ID NO: 574022 - DNA, 15 bp, Homo sapiens
aggaaacaattctct

SEQ ID NO: 574023 - DNA, 15 bp, Homo sapiens
taggaaacaattctc

SEQ ID NO: 574024 - DNA, 15 bp, Homo sapiens
gtaggaaacaattct

SEQ ID NO: 574025 - DNA, 15 bp, Homo sapiens
agtaggaaacaattc

SEQ ID NO: 574026 - DNA, 15 bp, Homo sapiens
gagtaggaaacaatt

SEQ ID NO: 574027 - DNA, 15 bp, Homo sapiens
tgagtaggaaacaat

SEQ ID NO: 574028 - DNA, 15 bp, Homo sapiens
ttgagtaggaaacaa

SEQ ID NO: 574029 - DNA, 15 bp, Homo sapiens
attgagtaggaaaca

SEQ ID NO: 574030 - DNA, 15 bp, Homo sapiens
gattgagtaggaaac

SEQ ID NO: 574031 - DNA, 15 bp, Homo sapiens
ggattgagtaggaaa

SEQ ID NO: 574032 - DNA, 15 bp, Homo sapiens
tggattgagtaggaa

SEQ ID NO: 574033 - DNA, 15 bp, Homo sapiens
gtggattgagtagga

SEQ ID NO: 574034 - DNA, 15 bp, Homo sapiens
tgtggattgagtagg

SEQ ID NO: 574035 - DNA, 15 bp, Homo sapiens
atgtggattgagtag

SEQ ID NO: 574036 - DNA, 15 bp, Homo sapiens
catgtggattgagta

SEQ ID NO: 574037 - DNA, 15 bp, Homo sapiens
ccatgtggattgagt

SEQ ID NO: 574038 - DNA, 15 bp, Homo sapiens
accatgtggattgag

SEQ ID NO: 574039 - DNA, 15 bp, Homo sapiens
taccatgtggattga

SEQ ID NO: 574040 - DNA, 15 bp, Homo sapiens
ttaccatgtggattg

SEQ ID NO: 574041 - DNA, 15 bp, Homo sapiens
gttaccatgtggatt

SEQ ID NO: 574042 - DNA, 15 bp, Homo sapiens
tgttaccatgtggat

SEQ ID NO: 574043 - DNA, 15 bp, Homo sapiens
atgttaccatgtgga

SEQ ID NO: 574044 - DNA, 15 bp, Homo sapiens
aatgttaccatgtgg

SEQ ID NO: 574045 - DNA, 15 bp, Homo sapiens
aaatgttaccatgtg

SEQ ID NO: 574046 - DNA, 15 bp, Homo sapiens
gaaatgttaccatgt

SEQ ID NO: 574047 - DNA, 15 bp, Homo sapiens
agaaatgttaccatg

SEQ ID NO: 574048 - DNA, 15 bp, Homo sapiens
aagaaatgttaccat

SEQ ID NO: 574049 - DNA, 15 bp, Homo sapiens
gaagaaatgttacca

SEQ ID NO: 574050 - DNA, 15 bp, Homo sapiens
tgaagaaatgttacc

SEQ ID NO: 574051 - DNA, 15 bp, Homo sapiens
ttgaagaaatgttac

SEQ ID NO: 574052 - DNA, 15 bp, Homo sapiens
gttgaagaaatgtta

SEQ ID NO: 574053 - DNA, 15 bp, Homo sapiens
tgttgaagaaatgtt

SEQ ID NO: 574054 - DNA, 15 bp, Homo sapiens
ttgttgaagaaatgt

SEQ ID NO: 574055 - DNA, 15 bp, Homo sapiens
gttgttgaagaaatg

SEQ ID NO: 574056 - DNA, 15 bp, Homo sapiens
ggttgttgaagaaat

SEQ ID NO: 574057 - DNA, 15 bp, Homo sapiens
aggttgttgaagaaa

SEQ ID NO: 574058 - DNA, 15 bp, Homo sapiens
caggttgttgaagaa

SEQ ID NO: 574059 - DNA, 15 bp, Homo sapiens
acaggttgttgaaga

SEQ ID NO: 574060 - DNA, 15 bp, Homo sapiens
tacaggttgttgaag

SEQ ID NO: 574061 - DNA, 15 bp, Homo sapiens
atacaggttgttgaa

SEQ ID NO: 574062 - DNA, 15 bp, Homo sapiens
tatacaggttgttga

SEQ ID NO: 574063 - DNA, 15 bp, Homo sapiens
ttatacaggttgttg

SEQ ID NO: 574064 - DNA, 15 bp, Homo sapiens
attatacaggttgtt

SEQ ID NO: 574065 - DNA, 15 bp, Homo sapiens
tattatacaggttgt

SEQ ID NO: 574066 - DNA, 15 bp, Homo sapiens
ctattatacaggttg

SEQ ID NO: 574067 - DNA, 15 bp, Homo sapiens
cctattatacaggtt

SEQ ID NO: 574068 - DNA, 15 bp, Homo sapiens
ccctattatacaggt

SEQ ID NO: 574069 - DNA, 15 bp, Homo sapiens
gccctattatacagg

SEQ ID NO: 574070 - DNA, 15 bp, Homo sapiens
cgccctattatacag

SEQ ID NO: 574071 - DNA, 15 bp, Homo sapiens
gcgccctattataca

SEQ ID NO: 574072 - DNA, 15 bp, Homo sapiens
ggcgccctattatac

SEQ ID NO: 574073 - DNA, 15 bp, Homo sapiens
tggcgccctattata

SEQ ID NO: 574074 - DNA, 15 bp, Homo sapiens
gtggcgccctattat

SEQ ID NO: 574075 - DNA, 15 bp, Homo sapiens
ggtggcgccctatta

SEQ ID NO: 574076 - DNA, 15 bp, Homo sapiens
tggtggcgccctatt

SEQ ID NO: 574077 - DNA, 15 bp, Homo sapiens
ttggtggcgccctat

SEQ ID NO: 574078 - DNA, 15 bp, Homo sapiens
tttggtggcgcccta

SEQ ID NO: 574079 - DNA, 15 bp, Homo sapiens
ctttggtggcgccct

SEQ ID NO: 574080 - DNA, 15 bp, Homo sapiens
actttggtggcgccc

SEQ ID NO: 574081 - DNA, 15 bp, Homo sapiens
aactttggtggcgcc

SEQ ID NO: 574082 - DNA, 15 bp, Homo sapiens
gaactttggtggcgc

SEQ ID NO: 574083 - DNA, 15 bp, Homo sapiens
agaactttggtggcg

SEQ ID NO: 574084 - DNA, 15 bp, Homo sapiens
tagaactttggtggc

SEQ ID NO: 574085 - DNA, 15 bp, Homo sapiens
ctagaactttggtgg

SEQ ID NO: 574086 - DNA, 15 bp, Homo sapiens
cctagaactttggtg

SEQ ID NO: 574087 - DNA, 15 bp, Homo sapiens
tcctagaactttggt

SEQ ID NO: 574088 - DNA, 15 bp, Homo sapiens
atcctagaactttgg

SEQ ID NO: 574089 - DNA, 15 bp, Homo sapiens
tatcctagaactttg

SEQ ID NO: 574090 - DNA, 15 bp, Homo sapiens
atatcctagaacttt

SEQ ID NO: 574091 - DNA, 15 bp, Homo sapiens
aatatcctagaactt

SEQ ID NO: 574092 - DNA, 15 bp, Homo sapiens
gaatatcctagaact

SEQ ID NO: 574093 - DNA, 15 bp, Homo sapiens
cgaatatcctagaac

SEQ ID NO: 574094 - DNA, 15 bp, Homo sapiens
ccgaatatcctagaa

SEQ ID NO: 574095 - DNA, 15 bp, Homo sapiens
tccgaatatcctaga

SEQ ID NO: 574096 - DNA, 15 bp, Homo sapiens
ctccgaatatcctag

SEQ ID NO: 574097 - DNA, 15 bp, Homo sapiens
tctccgaatatccta

SEQ ID NO: 574098 - DNA, 15 bp, Homo sapiens
ttctccgaatatcct

SEQ ID NO: 574099 - DNA, 15 bp, Homo sapiens
tttctccgaatatcc

SEQ ID NO: 574100 - DNA, 15 bp, Homo sapiens
gtttctccgaatatc

SEQ ID NO: 574101 - DNA, 15 bp, Homo sapiens
ggtttctccgaatat

SEQ ID NO: 574102 - DNA, 15 bp, Homo sapiens
tggtttctccgaata

SEQ ID NO: 574103 - DNA, 15 bp, Homo sapiens
ttggtttctccgaat

SEQ ID NO: 574104 - DNA, 15 bp, Homo sapiens
cttggtttctccgaa

SEQ ID NO: 574105 - DNA, 15 bp, Homo sapiens
tcttggtttctccga

SEQ ID NO: 574106 - DNA, 15 bp, Homo sapiens
ttcttggtttctccg

SEQ ID NO: 574107 - DNA, 15 bp, Homo sapiens
attcttggtttctcc

SEQ ID NO: 574108 - DNA, 15 bp, Homo sapiens
cattcttggtttctc

SEQ ID NO: 574109 - DNA, 15 bp, Homo sapiens
ccattcttggtttct

SEQ ID NO: 574110 - DNA, 15 bp, Homo sapiens
accattcttggtttc

SEQ ID NO: 574111 - DNA, 15 bp, Homo sapiens
gaccattcttggttt

SEQ ID NO: 574112 - DNA, 15 bp, Homo sapiens
tgaccattcttggtt

SEQ ID NO: 574113 - DNA, 15 bp, Homo sapiens
gtgaccattcttggt

SEQ ID NO: 574114 - DNA, 15 bp, Homo sapiens
tgtgaccattcttgg

SEQ ID NO: 574115 - DNA, 15 bp, Homo sapiens
ttgtgaccattcttg

SEQ ID NO: 574116 - DNA, 15 bp, Homo sapiens
cttgtgaccattctt

SEQ ID NO: 574117 - DNA, 15 bp, Homo sapiens
gcttgtgaccattct

SEQ ID NO: 574118 - DNA, 15 bp, Homo sapiens
tgcttgtgaccattc

SEQ ID NO: 574119 - DNA, 15 bp, Homo sapiens
gtgcttgtgaccatt

SEQ ID NO: 574120 - DNA, 15 bp, Homo sapiens
tgtgcttgtgaccat

SEQ ID NO: 574121 - DNA, 15 bp, Homo sapiens
atgtgcttgtgacca

SEQ ID NO: 574122 - DNA, 15 bp, Homo sapiens
tatgtgcttgtgacc

SEQ ID NO: 574123 - DNA, 15 bp, Homo sapiens
ctatgtgcttgtgac

SEQ ID NO: 574124 - DNA, 15 bp, Homo sapiens
tctatgtgcttgtga

SEQ ID NO: 574125 - DNA, 15 bp, Homo sapiens
ttctatgtgcttgtg

SEQ ID NO: 574126 - DNA, 15 bp, Homo sapiens
gttctatgtgcttgt

SEQ ID NO: 574127 - DNA, 15 bp, Homo sapiens
agttctatgtgcttg

SEQ ID NO: 574128 - DNA, 15 bp, Homo sapiens
gagttctatgtgctt

SEQ ID NO: 574129 - DNA, 15 bp, Homo sapiens
ggagttctatgtgct

SEQ ID NO: 574130 - DNA, 15 bp, Homo sapiens
tggagttctatgtgc

SEQ ID NO: 574131 - DNA, 15 bp, Homo sapiens
ctggagttctatgtg

SEQ ID NO: 574132 - DNA, 15 bp, Homo sapiens
actggagttctatgt

SEQ ID NO: 574133 - DNA, 15 bp, Homo sapiens
aactggagttctatg

SEQ ID NO: 574134 - DNA, 15 bp, Homo sapiens
taactggagttctat

SEQ ID NO: 574135 - DNA, 15 bp, Homo sapiens
ataactggagttcta

SEQ ID NO: 574136 - DNA, 15 bp, Homo sapiens
tataactggagttct

SEQ ID NO: 574137 - DNA, 15 bp, Homo sapiens
ttataactggagttc

SEQ ID NO: 574138 - DNA, 15 bp, Homo sapiens
gttataactggagtt

SEQ ID NO: 574139 - DNA, 15 bp, Homo sapiens
tgttataactggagt

SEQ ID NO: 574140 - DNA, 15 bp, Homo sapiens
ttgttataactggag

SEQ ID NO: 574141 - DNA, 15 bp, Homo sapiens
gttgttataactgga

SEQ ID NO: 574142 - DNA, 15 bp, Homo sapiens
tgttgttataactgg

SEQ ID NO: 574143 - DNA, 15 bp, Homo sapiens
ctgttgttataactg

SEQ ID NO: 574144 - DNA, 15 bp, Homo sapiens
gctgttgttataact

SEQ ID NO: 574145 - DNA, 15 bp, Homo sapiens
agctgttgttataac

SEQ ID NO: 574146 - DNA, 15 bp, Homo sapiens
cagctgttgttataa

SEQ ID NO: 574147 - DNA, 15 bp, Homo sapiens
ccagctgttgttata

SEQ ID NO: 574148 - DNA, 15 bp, Homo sapiens
gccagctgttgttat

SEQ ID NO: 574149 - DNA, 15 bp, Homo sapiens
ggccagctgttgtta

SEQ ID NO: 574150 - DNA, 15 bp, Homo sapiens
tggccagctgttgtt

SEQ ID NO: 574151 - DNA, 15 bp, Homo sapiens
ctggccagctgttgt

SEQ ID NO: 574152 - DNA, 15 bp, Homo sapiens
cctggccagctgttg

SEQ ID NO: 574153 - DNA, 15 bp, Homo sapiens
gcctggccagctgtt

SEQ ID NO: 574154 - DNA, 15 bp, Homo sapiens
cgcctggccagctgt

SEQ ID NO: 574155 - DNA, 15 bp, Homo sapiens
acgcctggccagctg

SEQ ID NO: 574156 - DNA, 15 bp, Homo sapiens
cacgcctggccagct

SEQ ID NO: 574157 - DNA, 15 bp, Homo sapiens
ccacgcctggccagc

SEQ ID NO: 574158 - DNA, 15 bp, Homo sapiens
accacgcctggccag

SEQ ID NO: 574159 - DNA, 15 bp, Homo sapiens
caccacgcctggcca

SEQ ID NO: 574160 - DNA, 15 bp, Homo sapiens
ccaccacgcctggcc

SEQ ID NO: 574161 - DNA, 15 bp, Homo sapiens
agccaccacgcctgg

SEQ ID NO: 574162 - DNA, 15 bp, Homo sapiens
gagccaccacgcctg

SEQ ID NO: 574163 - DNA, 15 bp, Homo sapiens
tgagccaccacgcct

SEQ ID NO: 574164 - DNA, 15 bp, Homo sapiens
gtgagccaccacgcc

SEQ ID NO: 574165 - DNA, 15 bp, Homo sapiens
cgtgagccaccacgc

SEQ ID NO: 574166 - DNA, 15 bp, Homo sapiens
gcgtgagccaccacg

SEQ ID NO: 574167 - DNA, 15 bp, Homo sapiens
ggcgtgagccaccac

SEQ ID NO: 574168 - DNA, 15 bp, Homo sapiens
aggcgtgagccacca

SEQ ID NO: 574169 - DNA, 15 bp, Homo sapiens
caggcgtgagccacc

SEQ ID NO: 574170 - DNA, 15 bp, Homo sapiens
acaggcgtgagccac

SEQ ID NO: 574171 - DNA, 15 bp, Homo sapiens
ctgctgggattacag

SEQ ID NO: 574172 - DNA, 15 bp, Homo sapiens
actgctgggattaca

SEQ ID NO: 574173 - DNA, 15 bp, Homo sapiens
aactgctgggattac

SEQ ID NO: 574174 - DNA, 15 bp, Homo sapiens
aaactgctgggatta

SEQ ID NO: 574175 - DNA, 15 bp, Homo sapiens
caaactgctgggatt

SEQ ID NO: 574176 - DNA, 15 bp, Homo sapiens
ccaaactgctgggat

SEQ ID NO: 574177 - DNA, 15 bp, Homo sapiens
cccaaactgctggga

SEQ ID NO: 574178 - DNA, 15 bp, Homo sapiens
tcccaaactgctggg

SEQ ID NO: 574179 - DNA, 15 bp, Homo sapiens
ctcccaaactgctgg

SEQ ID NO: 574180 - DNA, 15 bp, Homo sapiens
cctcccaaactgctg

SEQ ID NO: 574181 - DNA, 15 bp, Homo sapiens
acctcccaaactgct

SEQ ID NO: 574182 - DNA, 15 bp, Homo sapiens
gacctcccaaactgc

SEQ ID NO: 574183 - DNA, 15 bp, Homo sapiens
cgacctcccaaactg

SEQ ID NO: 574184 - DNA, 15 bp, Homo sapiens
tcgacctcccaaact

SEQ ID NO: 574185 - DNA, 15 bp, Homo sapiens
ctcgacctcccaaac

SEQ ID NO: 574186 - DNA, 15 bp, Homo sapiens
cctcgacctcccaaa

SEQ ID NO: 574187 - DNA, 15 bp, Homo sapiens
gcctcgacctcccaa

SEQ ID NO: 574188 - DNA, 15 bp, Homo sapiens
cgcctcgacctccca

SEQ ID NO: 574189 - DNA, 15 bp, Homo sapiens
ccgcctcgacctccc

SEQ ID NO: 574190 - DNA, 15 bp, Homo sapiens
cccgcctcgacctcc

SEQ ID NO: 574191 - DNA, 15 bp, Homo sapiens
acccgcctcgacctc

SEQ ID NO: 574192 - DNA, 15 bp, Homo sapiens
cacccgcctcgacct

SEQ ID NO: 574193 - DNA, 15 bp, Homo sapiens
tcacccgcctcgacc

SEQ ID NO: 574194 - DNA, 15 bp, Homo sapiens
ttcacccgcctcgac

SEQ ID NO: 574195 - DNA, 15 bp, Homo sapiens
attcacccgcctcga

SEQ ID NO: 574196 - DNA, 15 bp, Homo sapiens
gattcacccgcctcg

SEQ ID NO: 574197 - DNA, 15 bp, Homo sapiens
tgattcacccgcctc

SEQ ID NO: 574198 - DNA, 15 bp, Homo sapiens
gtgattcacccgcct

SEQ ID NO: 574199 - DNA, 15 bp, Homo sapiens
ggtgattcacccgcc

SEQ ID NO: 574200 - DNA, 15 bp, Homo sapiens
aggtgattcacccgc

SEQ ID NO: 574201 - DNA, 15 bp, Homo sapiens
caggtgattcacccg

SEQ ID NO: 574202 - DNA, 15 bp, Homo sapiens
tcaggtgattcaccc

SEQ ID NO: 574203 - DNA, 15 bp, Homo sapiens
ctcaggtgattcacc

SEQ ID NO: 574204 - DNA, 15 bp, Homo sapiens
cctcaggtgattcac

SEQ ID NO: 574205 - DNA, 15 bp, Homo sapiens
acctcaggtgattca

SEQ ID NO: 574206 - DNA, 15 bp, Homo sapiens
gacctcaggtgattc

SEQ ID NO: 574207 - DNA, 15 bp, Homo sapiens
tgacctcaggtgatt

SEQ ID NO: 574208 - DNA, 15 bp, Homo sapiens
ggtttctccatgttg

SEQ ID NO: 574209 - DNA, 15 bp, Homo sapiens
gggtttctccatgtt

SEQ ID NO: 574210 - DNA, 15 bp, Homo sapiens
ggggtttctccatgt

SEQ ID NO: 574211 - DNA, 15 bp, Homo sapiens
cggggtttctccatg

SEQ ID NO: 574212 - DNA, 15 bp, Homo sapiens
acggggtttctccat

SEQ ID NO: 574213 - DNA, 15 bp, Homo sapiens
gacggggtttctcca

SEQ ID NO: 574214 - DNA, 15 bp, Homo sapiens
agacggggtttctcc

SEQ ID NO: 574215 - DNA, 15 bp, Homo sapiens
gagacggggtttctc

SEQ ID NO: 574216 - DNA, 15 bp, Homo sapiens
agagacggggtttct

SEQ ID NO: 574217 - DNA, 15 bp, Homo sapiens
tagagacggggtttc

SEQ ID NO: 574218 - DNA, 15 bp, Homo sapiens
attttgtatttttag

SEQ ID NO: 574219 - DNA, 15 bp, Homo sapiens
aggctaattttgtat

SEQ ID NO: 574220 - DNA, 15 bp, Homo sapiens
caggctaattttgta

SEQ ID NO: 574221 - DNA, 15 bp, Homo sapiens
ccaggctaattttgt

SEQ ID NO: 574222 - DNA, 15 bp, Homo sapiens
gccaggctaattttg

SEQ ID NO: 574223 - DNA, 15 bp, Homo sapiens
cgccaggctaatttt

SEQ ID NO: 574224 - DNA, 15 bp, Homo sapiens
acgccaggctaattt

SEQ ID NO: 574225 - DNA, 15 bp, Homo sapiens
cacgccaggctaatt

SEQ ID NO: 574226 - DNA, 15 bp, Homo sapiens
ccacgccaggctaat

SEQ ID NO: 574227 - DNA, 15 bp, Homo sapiens
accacgccaggctaa

SEQ ID NO: 574228 - DNA, 15 bp, Homo sapiens
gaccacgccaggcta

SEQ ID NO: 574229 - DNA, 15 bp, Homo sapiens
cgaccacgccaggct

SEQ ID NO: 574230 - DNA, 15 bp, Homo sapiens
gcgaccacgccaggc

SEQ ID NO: 574231 - DNA, 15 bp, Homo sapiens
cgcgaccacgccagg

SEQ ID NO: 574232 - DNA, 15 bp, Homo sapiens
gcgcgaccacgccag

SEQ ID NO: 574233 - DNA, 15 bp, Homo sapiens
tgcgcgaccacgcca

SEQ ID NO: 574234 - DNA, 15 bp, Homo sapiens
atgcgcgaccacgcc

SEQ ID NO: 574235 - DNA, 15 bp, Homo sapiens
catgcgcgaccacgc

SEQ ID NO: 574236 - DNA, 15 bp, Homo sapiens
gcatgcgcgaccacg

SEQ ID NO: 574237 - DNA, 15 bp, Homo sapiens
ggcatgcgcgaccac

SEQ ID NO: 574238 - DNA, 15 bp, Homo sapiens
aggcatgcgcgacca

SEQ ID NO: 574239 - DNA, 15 bp, Homo sapiens
caggcatgcgcgacc

SEQ ID NO: 574240 - DNA, 15 bp, Homo sapiens
acaggcatgcgcgac

SEQ ID NO: 574241 - DNA, 15 bp, Homo sapiens
tacaggcatgcgcga

SEQ ID NO: 574242 - DNA, 15 bp, Homo sapiens
ttacaggcatgcgcg

SEQ ID NO: 574243 - DNA, 15 bp, Homo sapiens
attacaggcatgcgc

SEQ ID NO: 574244 - DNA, 15 bp, Homo sapiens
gattacaggcatgcg

SEQ ID NO: 574245 - DNA, 15 bp, Homo sapiens
agattacaggcatgc

SEQ ID NO: 574246 - DNA, 15 bp, Homo sapiens
gagattacaggcatg

SEQ ID NO: 574247 - DNA, 15 bp, Homo sapiens
tgagattacaggcat

SEQ ID NO: 574248 - DNA, 15 bp, Homo sapiens
ctgagattacaggca

SEQ ID NO: 574249 - DNA, 15 bp, Homo sapiens
gctgagattacaggc

SEQ ID NO: 574250 - DNA, 15 bp, Homo sapiens
agctgagattacagg

SEQ ID NO: 574251 - DNA, 15 bp, Homo sapiens
tagctgagattacag

SEQ ID NO: 574252 - DNA, 15 bp, Homo sapiens
gtagctgagattaca

SEQ ID NO: 574253 - DNA, 15 bp, Homo sapiens
agtagctgagattac

SEQ ID NO: 574254 - DNA, 15 bp, Homo sapiens
gagtagctgagatta

SEQ ID NO: 574255 - DNA, 15 bp, Homo sapiens
cgagtagctgagatt

SEQ ID NO: 574256 - DNA, 15 bp, Homo sapiens
tcgagtagctgagat

SEQ ID NO: 574257 - DNA, 15 bp, Homo sapiens
ctcgagtagctgaga

SEQ ID NO: 574258 - DNA, 15 bp, Homo sapiens
tctcgagtagctgag

SEQ ID NO: 574259 - DNA, 15 bp, Homo sapiens
ctctcgagtagctga

SEQ ID NO: 574260 - DNA, 15 bp, Homo sapiens
cctctcgagtagctg

SEQ ID NO: 574261 - DNA, 15 bp, Homo sapiens
gcctctcgagtagct

SEQ ID NO: 574262 - DNA, 15 bp, Homo sapiens
agcctctcgagtagc

SEQ ID NO: 574263 - DNA, 15 bp, Homo sapiens
cagcctctcgagtag

SEQ ID NO: 574264 - DNA, 15 bp, Homo sapiens
tcagcctctcgagta

SEQ ID NO: 574265 - DNA, 15 bp, Homo sapiens
ctcagcctctcgagt

SEQ ID NO: 574266 - DNA, 15 bp, Homo sapiens
cctcagcctctcgag

SEQ ID NO: 574267 - DNA, 15 bp, Homo sapiens
gcctcagcctctcga

SEQ ID NO: 574268 - DNA, 15 bp, Homo sapiens
tgcctcagcctctcg

SEQ ID NO: 574269 - DNA, 15 bp, Homo sapiens
ctgcctcagcctctc

SEQ ID NO: 574270 - DNA, 15 bp, Homo sapiens
cctgcctcagcctct

SEQ ID NO: 574271 - DNA, 15 bp, Homo sapiens
tattctcctgcctca

SEQ ID NO: 574272 - DNA, 15 bp, Homo sapiens
ttattctcctgcctc

SEQ ID NO: 574273 - DNA, 15 bp, Homo sapiens
gttattctcctgcct

SEQ ID NO: 574274 - DNA, 15 bp, Homo sapiens
agttattctcctgcc

SEQ ID NO: 574275 - DNA, 15 bp, Homo sapiens
aagttattctcctgc

SEQ ID NO: 574276 - DNA, 15 bp, Homo sapiens
caagttattctcctg

SEQ ID NO: 574277 - DNA, 15 bp, Homo sapiens
tcaagttattctcct

SEQ ID NO: 574278 - DNA, 15 bp, Homo sapiens
ttcaagttattctcc

SEQ ID NO: 574279 - DNA, 15 bp, Homo sapiens
gttcaagttattctc

SEQ ID NO: 574280 - DNA, 15 bp, Homo sapiens
ggttcaagttattct

SEQ ID NO: 574281 - DNA, 15 bp, Homo sapiens
gggttcaagttattc

SEQ ID NO: 574282 - DNA, 15 bp, Homo sapiens
tgggttcaagttatt

SEQ ID NO: 574283 - DNA, 15 bp, Homo sapiens
ctgggttcaagttat

SEQ ID NO: 574284 - DNA, 15 bp, Homo sapiens
cctgggttcaagtta

SEQ ID NO: 574285 - DNA, 15 bp, Homo sapiens
tcctgggttcaagtt

SEQ ID NO: 574286 - DNA, 15 bp, Homo sapiens
tctcctgggttcaag

SEQ ID NO: 574287 - DNA, 15 bp, Homo sapiens
gtctcctgggttcaa

SEQ ID NO: 574288 - DNA, 15 bp, Homo sapiens
tgtctcctgggttca

SEQ ID NO: 574289 - DNA, 15 bp, Homo sapiens
ctgtctcctgggttc

SEQ ID NO: 574290 - DNA, 15 bp, Homo sapiens
tctgtctcctgggtt

SEQ ID NO: 574291 - DNA, 15 bp, Homo sapiens
ctctgtctcctgggt

SEQ ID NO: 574292 - DNA, 15 bp, Homo sapiens
cctctgtctcctggg

SEQ ID NO: 574293 - DNA, 15 bp, Homo sapiens
acctctgtctcctgg

SEQ ID NO: 574294 - DNA, 15 bp, Homo sapiens
aacctctgtctcctg

SEQ ID NO: 574295 - DNA, 15 bp, Homo sapiens
caacctctgtctcct

SEQ ID NO: 574296 - DNA, 15 bp, Homo sapiens
gcaacctctgtctcc

SEQ ID NO: 574297 - DNA, 15 bp, Homo sapiens
tgcaacctctgtctc

SEQ ID NO: 574298 - DNA, 15 bp, Homo sapiens
ctgcaacctctgtct

SEQ ID NO: 574299 - DNA, 15 bp, Homo sapiens
actgcaacctctgtc

SEQ ID NO: 574300 - DNA, 15 bp, Homo sapiens
cactgcaacctctgt

SEQ ID NO: 574301 - DNA, 15 bp, Homo sapiens
aatggcgcaatctca

SEQ ID NO: 574302 - DNA, 15 bp, Homo sapiens
caatggcgcaatctc

SEQ ID NO: 574303 - DNA, 15 bp, Homo sapiens
gcaatggcgcaatct

SEQ ID NO: 574304 - DNA, 15 bp, Homo sapiens
tgcaatggcgcaatc

SEQ ID NO: 574305 - DNA, 15 bp, Homo sapiens
gtgcaatggcgcaat

SEQ ID NO: 574306 - DNA, 15 bp, Homo sapiens
agtgcaatggcgcaa

SEQ ID NO: 574307 - DNA, 15 bp, Homo sapiens
gagtgcaatggcgca

SEQ ID NO: 574308 - DNA, 15 bp, Homo sapiens
ggagtgcaatggcgc

SEQ ID NO: 574309 - DNA, 15 bp, Homo sapiens
tggagtgcaatggcg

SEQ ID NO: 574310 - DNA, 15 bp, Homo sapiens
ctggagtgcaatggc

SEQ ID NO: 574311 - DNA, 15 bp, Homo sapiens
cgctcttgttgccca

SEQ ID NO: 574312 - DNA, 15 bp, Homo sapiens
tcgctcttgttgccc

SEQ ID NO: 574313 - DNA, 15 bp, Homo sapiens
ttcgctcttgttgcc

SEQ ID NO: 574314 - DNA, 15 bp, Homo sapiens
tttcgctcttgttgc

SEQ ID NO: 574315 - DNA, 15 bp, Homo sapiens
gtttcgctcttgttg

SEQ ID NO: 574316 - DNA, 15 bp, Homo sapiens
agtttcgctcttgtt

SEQ ID NO: 574317 - DNA, 15 bp, Homo sapiens
cagtttcgctcttgt

SEQ ID NO: 574318 - DNA, 15 bp, Homo sapiens
gcagtttcgctcttg

SEQ ID NO: 574319 - DNA, 15 bp, Homo sapiens
cgcagtttcgctctt

SEQ ID NO: 574320 - DNA, 15 bp, Homo sapiens
tcgcagtttcgctct

SEQ ID NO: 574321 - DNA, 15 bp, Homo sapiens
ttcgcagtttcgctc

SEQ ID NO: 574322 - DNA, 15 bp, Homo sapiens
tttcgcagtttcgct

SEQ ID NO: 574323 - DNA, 15 bp, Homo sapiens
ttttcgcagtttcgc

SEQ ID NO: 574324 - DNA, 15 bp, Homo sapiens
tttttcgcagtttcg

SEQ ID NO: 574325 - DNA, 15 bp, Homo sapiens
ttttttcgcagtttc

SEQ ID NO: 574326 - DNA, 15 bp, Homo sapiens
tttttttcgcagttt

SEQ ID NO: 574327 - DNA, 15 bp, Homo sapiens
ttttttttcgcagtt

SEQ ID NO: 574328 - DNA, 15 bp, Homo sapiens
tttttttttcgcagt

SEQ ID NO: 574329 - DNA, 15 bp, Homo sapiens
ttttttttttcgcag

SEQ ID NO: 574330 - DNA, 15 bp, Homo sapiens
tttttttttttcgca

SEQ ID NO: 574331 - DNA, 15 bp, Homo sapiens
ttttttttttttcgc

SEQ ID NO: 574332 - DNA, 15 bp, Homo sapiens
attttttttttttcg

SEQ ID NO: 574333 - DNA, 15 bp, Homo sapiens
tattttttttttttc

SEQ ID NO: 574334 - DNA, 15 bp, Homo sapiens
tgtattttttttttt

SEQ ID NO: 574335 - DNA, 15 bp, Homo sapiens
gtgtatttttttttt

SEQ ID NO: 574336 - DNA, 15 bp, Homo sapiens
cgtgtattttttttt

SEQ ID NO: 574337 - DNA, 15 bp, Homo sapiens
gcgtgtatttttttt

SEQ ID NO: 574338 - DNA, 15 bp, Homo sapiens
ggcgtgtattttttt

SEQ ID NO: 574339 - DNA, 15 bp, Homo sapiens
tggcgtgtatttttt

SEQ ID NO: 574340 - DNA, 15 bp, Homo sapiens
gtggcgtgtattttt

SEQ ID NO: 574341 - DNA, 15 bp, Homo sapiens
tgtggcgtgtatttt

SEQ ID NO: 574342 - DNA, 15 bp, Homo sapiens
ttgtggcgtgtattt

SEQ ID NO: 574343 - DNA, 15 bp, Homo sapiens
tttgtggcgtgtatt

SEQ ID NO: 574344 - DNA, 15 bp, Homo sapiens
ttttgtggcgtgtat

SEQ ID NO: 574345 - DNA, 15 bp, Homo sapiens
tttttgtggcgtgta

SEQ ID NO: 574346 - DNA, 15 bp, Homo sapiens
gtttttgtggcgtgt

SEQ ID NO: 574347 - DNA, 15 bp, Homo sapiens
tgtttttgtggcgtg

SEQ ID NO: 574348 - DNA, 15 bp, Homo sapiens
ctgtttttgtggcgt

SEQ ID NO: 574349 - DNA, 15 bp, Homo sapiens
actgtttttgtggcg

SEQ ID NO: 574350 - DNA, 15 bp, Homo sapiens
aactgtttttgtggc

SEQ ID NO: 574351 - DNA, 15 bp, Homo sapiens
taactgtttttgtgg

SEQ ID NO: 574352 - DNA, 15 bp, Homo sapiens
ttaactgtttttgtg

SEQ ID NO: 574353 - DNA, 15 bp, Homo sapiens
cttaactgtttttgt

SEQ ID NO: 574354 - DNA, 15 bp, Homo sapiens
gcttaactgtttttg

SEQ ID NO: 574355 - DNA, 15 bp, Homo sapiens
tgcttaactgttttt

SEQ ID NO: 574356 - DNA, 15 bp, Homo sapiens
ttgcttaactgtttt

SEQ ID NO: 574357 - DNA, 15 bp, Homo sapiens
tttgcttaactgttt

SEQ ID NO: 574358 - DNA, 15 bp, Homo sapiens
atttgcttaactgtt

SEQ ID NO: 574359 - DNA, 15 bp, Homo sapiens
gatttgcttaactgt

SEQ ID NO: 574360 - DNA, 15 bp, Homo sapiens
agatttgcttaactg

SEQ ID NO: 574361 - DNA, 15 bp, Homo sapiens
tagatttgcttaact

SEQ ID NO: 574362 - DNA, 15 bp, Homo sapiens
atagatttgcttaac

SEQ ID NO: 574363 - DNA, 15 bp, Homo sapiens
catagatttgcttaa

SEQ ID NO: 574364 - DNA, 15 bp, Homo sapiens
gcatagatttgctta

SEQ ID NO: 574365 - DNA, 15 bp, Homo sapiens
tgcatagatttgctt

SEQ ID NO: 574366 - DNA, 15 bp, Homo sapiens
ctgcatagatttgct

SEQ ID NO: 574367 - DNA, 15 bp, Homo sapiens
tctgcatagatttgc

SEQ ID NO: 574368 - DNA, 15 bp, Homo sapiens
ttctgcatagatttg

SEQ ID NO: 574369 - DNA, 15 bp, Homo sapiens
cttctgcatagattt

SEQ ID NO: 574370 - DNA, 15 bp, Homo sapiens
ccttctgcatagatt

SEQ ID NO: 574371 - DNA, 15 bp, Homo sapiens
tccttctgcatagat

SEQ ID NO: 574372 - DNA, 15 bp, Homo sapiens
ttccttctgcataga

SEQ ID NO: 574373 - DNA, 15 bp, Homo sapiens
tttccttctgcatag

SEQ ID NO: 574374 - DNA, 15 bp, Homo sapiens
ttttccttctgcata

SEQ ID NO: 574375 - DNA, 15 bp, Homo sapiens
tttttccttctgcat

SEQ ID NO: 574376 - DNA, 15 bp, Homo sapiens
gtttttccttctgca

SEQ ID NO: 574377 - DNA, 15 bp, Homo sapiens
tgtttttccttctgc

SEQ ID NO: 574378 - DNA, 15 bp, Homo sapiens
ttgtttttccttctg

SEQ ID NO: 574379 - DNA, 15 bp, Homo sapiens
cttgtttttccttct

SEQ ID NO: 574380 - DNA, 15 bp, Homo sapiens
ccttgtttttccttc

SEQ ID NO: 574381 - DNA, 15 bp, Homo sapiens
accttgtttttcctt

SEQ ID NO: 574382 - DNA, 15 bp, Homo sapiens
taccttgtttttcct

SEQ ID NO: 574383 - DNA, 15 bp, Homo sapiens
gtaccttgtttttcc

SEQ ID NO: 574384 - DNA, 15 bp, Homo sapiens
tgtaccttgtttttc

SEQ ID NO: 574385 - DNA, 15 bp, Homo sapiens
ctgtaccttgttttt

SEQ ID NO: 574386 - DNA, 15 bp, Homo sapiens
tctgtaccttgtttt

SEQ ID NO: 574387 - DNA, 15 bp, Homo sapiens
ttctgtaccttgttt

SEQ ID NO: 574388 - DNA, 15 bp, Homo sapiens
tttctgtaccttgtt

SEQ ID NO: 574389 - DNA, 15 bp, Homo sapiens
ttttctgtaccttgt

SEQ ID NO: 574390 - DNA, 15 bp, Homo sapiens
gttttctgtaccttg

SEQ ID NO: 574391 - DNA, 15 bp, Homo sapiens
ggttttctgtacctt

SEQ ID NO: 574392 - DNA, 15 bp, Homo sapiens
tggttttctgtacct

SEQ ID NO: 574393 - DNA, 15 bp, Homo sapiens
ctggttttctgtacc

SEQ ID NO: 574394 - DNA, 15 bp, Homo sapiens
cctggttttctgtac

SEQ ID NO: 574395 - DNA, 15 bp, Homo sapiens
ccctggttttctgta

SEQ ID NO: 574396 - DNA, 15 bp, Homo sapiens
tccctggttttctgt

SEQ ID NO: 574397 - DNA, 15 bp, Homo sapiens
atccctggttttctg

SEQ ID NO: 574398 - DNA, 15 bp, Homo sapiens
aatccctggttttct

SEQ ID NO: 574399 - DNA, 15 bp, Homo sapiens
gaatccctggttttc

SEQ ID NO: 574400 - DNA, 15 bp, Homo sapiens
tgaatccctggtttt

SEQ ID NO: 574401 - DNA, 15 bp, Homo sapiens
ctgaatccctggttt

SEQ ID NO: 574402 - DNA, 15 bp, Homo sapiens
actgaatccctggtt

SEQ ID NO: 574403 - DNA, 15 bp, Homo sapiens
tactgaatccctggt

SEQ ID NO: 574404 - DNA, 15 bp, Homo sapiens
ttactgaatccctgg

SEQ ID NO: 574405 - DNA, 15 bp, Homo sapiens
tttactgaatccctg

SEQ ID NO: 574406 - DNA, 15 bp, Homo sapiens
atttactgaatccct

SEQ ID NO: 574407 - DNA, 15 bp, Homo sapiens
aatttactgaatccc

SEQ ID NO: 574408 - DNA, 15 bp, Homo sapiens
gaatttactgaatcc

SEQ ID NO: 574409 - DNA, 15 bp, Homo sapiens
ggaatttactgaatc

SEQ ID NO: 574410 - DNA, 15 bp, Homo sapiens
aggaatttactgaat

SEQ ID NO: 574411 - DNA, 15 bp, Homo sapiens
aaggaatttactgaa

SEQ ID NO: 574412 - DNA, 15 bp, Homo sapiens
taaggaatttactga

SEQ ID NO: 574413 - DNA, 15 bp, Homo sapiens
ataaggaatttactg

SEQ ID NO: 574414 - DNA, 15 bp, Homo sapiens
tataaggaatttact

SEQ ID NO: 574415 - DNA, 15 bp, Homo sapiens
gtataaggaatttac

SEQ ID NO: 574416 - DNA, 15 bp, Homo sapiens
tgtataaggaattta

SEQ ID NO: 574417 - DNA, 15 bp, Homo sapiens
ctgtataaggaattt

SEQ ID NO: 574418 - DNA, 15 bp, Homo sapiens
cctgtataaggaatt

SEQ ID NO: 574419 - DNA, 15 bp, Homo sapiens
gcctgtataaggaat

SEQ ID NO: 574420 - DNA, 15 bp, Homo sapiens
ggcctgtataaggaa

SEQ ID NO: 574421 - DNA, 15 bp, Homo sapiens
gggcctgtataagga

SEQ ID NO: 574422 - DNA, 15 bp, Homo sapiens
ggggcctgtataagg

SEQ ID NO: 574423 - DNA, 15 bp, Homo sapiens
gggggcctgtataag

SEQ ID NO: 574424 - DNA, 15 bp, Homo sapiens
cgggggcctgtataa

SEQ ID NO: 574425 - DNA, 15 bp, Homo sapiens
ccgggggcctgtata

SEQ ID NO: 574426 - DNA, 15 bp, Homo sapiens
cccgggggcctgtat

SEQ ID NO: 574427 - DNA, 15 bp, Homo sapiens
ccccgggggcctgta

SEQ ID NO: 574428 - DNA, 15 bp, Homo sapiens
gccccgggggcctgt

SEQ ID NO: 574429 - DNA, 15 bp, Homo sapiens
agccccgggggcctg

SEQ ID NO: 574430 - DNA, 15 bp, Homo sapiens
gagccccgggggcct

SEQ ID NO: 574431 - DNA, 15 bp, Homo sapiens
agagccccgggggcc

SEQ ID NO: 574432 - DNA, 15 bp, Homo sapiens
gagagccccgggggc

SEQ ID NO: 574433 - DNA, 15 bp, Homo sapiens
ggagagccccggggg

SEQ ID NO: 574434 - DNA, 15 bp, Homo sapiens
aggagagccccgggg

SEQ ID NO: 574435 - DNA, 15 bp, Homo sapiens
taggagagccccggg

SEQ ID NO: 574436 - DNA, 15 bp, Homo sapiens
ataggagagccccgg

SEQ ID NO: 574437 - DNA, 15 bp, Homo sapiens
aataggagagccccg

SEQ ID NO: 574438 - DNA, 15 bp, Homo sapiens
gaataggagagcccc

SEQ ID NO: 574439 - DNA, 15 bp, Homo sapiens
ggaataggagagccc

SEQ ID NO: 574440 - DNA, 15 bp, Homo sapiens
tggaataggagagcc

SEQ ID NO: 574441 - DNA, 15 bp, Homo sapiens
gtggaataggagagc

SEQ ID NO: 574442 - DNA, 15 bp, Homo sapiens
agtggaataggagag

SEQ ID NO: 574443 - DNA, 15 bp, Homo sapiens
aagtggaataggaga

SEQ ID NO: 574444 - DNA, 15 bp, Homo sapiens
aaagtggaataggag

SEQ ID NO: 574445 - DNA, 15 bp, Homo sapiens
aaaagtggaatagga

SEQ ID NO: 574446 - DNA, 15 bp, Homo sapiens
aaaaagtggaatagg

SEQ ID NO: 574447 - DNA, 15 bp, Homo sapiens
taaaaagtggaatag

SEQ ID NO: 574448 - DNA, 15 bp, Homo sapiens
ttaaaaagtggaata

SEQ ID NO: 574449 - DNA, 15 bp, Homo sapiens
gttaaaaagtggaat

SEQ ID NO: 574450 - DNA, 15 bp, Homo sapiens
tgttaaaaagtggaa

SEQ ID NO: 574451 - DNA, 15 bp, Homo sapiens
ttgttaaaaagtgga

SEQ ID NO: 574452 - DNA, 15 bp, Homo sapiens
attgttaaaaagtgg

SEQ ID NO: 574453 - DNA, 15 bp, Homo sapiens
aattgttaaaaagtg

SEQ ID NO: 574454 - DNA, 15 bp, Homo sapiens
aaattgttaaaaagt

SEQ ID NO: 574455 - DNA, 15 bp, Homo sapiens
gaaattgttaaaaag

SEQ ID NO: 574456 - DNA, 15 bp, Homo sapiens
tgaaattgttaaaaa

SEQ ID NO: 574457 - DNA, 15 bp, Homo sapiens
ttgaaattgttaaaa

SEQ ID NO: 574458 - DNA, 15 bp, Homo sapiens
attgaaattgttaaa

SEQ ID NO: 574459 - DNA, 15 bp, Homo sapiens
aattgaaattgttaa

SEQ ID NO: 574460 - DNA, 15 bp, Homo sapiens
caattgaaattgtta

SEQ ID NO: 574461 - DNA, 15 bp, Homo sapiens
acaattgaaattgtt

SEQ ID NO: 574462 - DNA, 15 bp, Homo sapiens
aacaattgaaattgt

SEQ ID NO: 574463 - DNA, 15 bp, Homo sapiens
aaacaattgaaattg

SEQ ID NO: 574464 - DNA, 15 bp, Homo sapiens
aaaacaattgaaatt

SEQ ID NO: 574465 - DNA, 15 bp, Homo sapiens
aaaaacaattgaaat

SEQ ID NO: 574466 - DNA, 15 bp, Homo sapiens
gaaaaacaattgaaa

SEQ ID NO: 574467 - DNA, 15 bp, Homo sapiens
tgaaaaacaattgaa

SEQ ID NO: 574468 - DNA, 15 bp, Homo sapiens
ttgaaaaacaattga

SEQ ID NO: 574469 - DNA, 15 bp, Homo sapiens
cttgaaaaacaattg

SEQ ID NO: 574470 - DNA, 15 bp, Homo sapiens
gcttgaaaaacaatt

SEQ ID NO: 574471 - DNA, 15 bp, Homo sapiens
agcttgaaaaacaat

SEQ ID NO: 574472 - DNA, 15 bp, Homo sapiens
tagcttgaaaaacaa

SEQ ID NO: 574473 - DNA, 15 bp, Homo sapiens
ttagcttgaaaaaca

SEQ ID NO: 574474 - DNA, 15 bp, Homo sapiens
cttagcttgaaaaac

SEQ ID NO: 574475 - DNA, 15 bp, Homo sapiens
tcttagcttgaaaaa

SEQ ID NO: 574476 - DNA, 15 bp, Homo sapiens
ttcttagcttgaaaa

SEQ ID NO: 574477 - DNA, 15 bp, Homo sapiens
tttcttagcttgaaa

SEQ ID NO: 574478 - DNA, 15 bp, Homo sapiens
atttcttagcttgaa

SEQ ID NO: 574479 - DNA, 15 bp, Homo sapiens
aatttcttagcttga

SEQ ID NO: 574480 - DNA, 15 bp, Homo sapiens
aaatttcttagcttg

SEQ ID NO: 574481 - DNA, 15 bp, Homo sapiens
aaaatttcttagctt

SEQ ID NO: 574482 - DNA, 15 bp, Homo sapiens
caaaatttcttagct

SEQ ID NO: 574483 - DNA, 15 bp, Homo sapiens
tcaaaatttcttagc

SEQ ID NO: 574484 - DNA, 15 bp, Homo sapiens
atcaaaatttcttag

SEQ ID NO: 574485 - DNA, 15 bp, Homo sapiens
aatcaaaatttctta

SEQ ID NO: 574486 - DNA, 15 bp, Homo sapiens
aaatcaaaatttctt

SEQ ID NO: 574487 - DNA, 15 bp, Homo sapiens
gaaatcaaaatttct

SEQ ID NO: 574488 - DNA, 15 bp, Homo sapiens
agaaatcaaaatttc

SEQ ID NO: 574489 - DNA, 15 bp, Homo sapiens
aagaaatcaaaattt

SEQ ID NO: 574490 - DNA, 15 bp, Homo sapiens
taagaaatcaaaatt

SEQ ID NO: 574491 - DNA, 15 bp, Homo sapiens
ttaagaaatcaaaat

SEQ ID NO: 574492 - DNA, 15 bp, Homo sapiens
tttaagaaatcaaaa

SEQ ID NO: 574493 - DNA, 15 bp, Homo sapiens
ttttaagaaatcaaa

SEQ ID NO: 574494 - DNA, 15 bp, Homo sapiens
gttttaagaaatcaa

SEQ ID NO: 574495 - DNA, 15 bp, Homo sapiens
tgttttaagaaatca

SEQ ID NO: 574496 - DNA, 15 bp, Homo sapiens
ttgttttaagaaatc

SEQ ID NO: 574497 - DNA, 15 bp, Homo sapiens
cttgttttaagaaat

SEQ ID NO: 574498 - DNA, 15 bp, Homo sapiens
ccttgttttaagaaa

SEQ ID NO: 574499 - DNA, 15 bp, Homo sapiens
tccttgttttaagaa

SEQ ID NO: 574500 - DNA, 15 bp, Homo sapiens
ttccttgttttaaga

SEQ ID NO: 574501 - DNA, 15 bp, Homo sapiens
tttccttgttttaag

SEQ ID NO: 574502 - DNA, 15 bp, Homo sapiens
atttccttgttttaa

SEQ ID NO: 574503 - DNA, 15 bp, Homo sapiens
catttccttgtttta

SEQ ID NO: 574504 - DNA, 15 bp, Homo sapiens
ccatttccttgtttt

SEQ ID NO: 574505 - DNA, 15 bp, Homo sapiens
gccatttccttgttt

SEQ ID NO: 574506 - DNA, 15 bp, Homo sapiens
tgccatttccttgtt

SEQ ID NO: 574507 - DNA, 15 bp, Homo sapiens
ctgccatttccttgt

SEQ ID NO: 574508 - DNA, 15 bp, Homo sapiens
actgccatttccttg

SEQ ID NO: 574509 - DNA, 15 bp, Homo sapiens
cactgccatttcctt

SEQ ID NO: 574510 - DNA, 15 bp, Homo sapiens
tcactgccatttcct

SEQ ID NO: 574511 - DNA, 15 bp, Homo sapiens
atcactgccatttcc

SEQ ID NO: 574512 - DNA, 15 bp, Homo sapiens
tatcactgccatttc

SEQ ID NO: 574513 - DNA, 15 bp, Homo sapiens
ttatcactgccattt

SEQ ID NO: 574514 - DNA, 15 bp, Homo sapiens
attatcactgccatt

SEQ ID NO: 574515 - DNA, 15 bp, Homo sapiens
cattatcactgccat

SEQ ID NO: 574516 - DNA, 15 bp, Homo sapiens
ccattatcactgcca

SEQ ID NO: 574517 - DNA, 15 bp, Homo sapiens
tccattatcactgcc

SEQ ID NO: 574518 - DNA, 15 bp, Homo sapiens
ttccattatcactgc

SEQ ID NO: 574519 - DNA, 15 bp, Homo sapiens
attccattatcactg

SEQ ID NO: 574520 - DNA, 15 bp, Homo sapiens
aattccattatcact

SEQ ID NO: 574521 - DNA, 15 bp, Homo sapiens
taattccattatcac

SEQ ID NO: 574522 - DNA, 15 bp, Homo sapiens
ctaattccattatca

SEQ ID NO: 574523 - DNA, 15 bp, Homo sapiens
cctaattccattatc

SEQ ID NO: 574524 - DNA, 15 bp, Homo sapiens
gcctaattccattat

SEQ ID NO: 574525 - DNA, 15 bp, Homo sapiens
ggcctaattccatta

SEQ ID NO: 574526 - DNA, 15 bp, Homo sapiens
aggcctaattccatt

SEQ ID NO: 574527 - DNA, 15 bp, Homo sapiens
taggcctaattccat

SEQ ID NO: 574528 - DNA, 15 bp, Homo sapiens
gtaggcctaattcca

SEQ ID NO: 574529 - DNA, 15 bp, Homo sapiens
ggtaggcctaattcc

SEQ ID NO: 574530 - DNA, 15 bp, Homo sapiens
tggtaggcctaattc

SEQ ID NO: 574531 - DNA, 15 bp, Homo sapiens
ttggtaggcctaatt

SEQ ID NO: 574532 - DNA, 15 bp, Homo sapiens
tttggtaggcctaat

SEQ ID NO: 574533 - DNA, 15 bp, Homo sapiens
ttttggtaggcctaa

SEQ ID NO: 574534 - DNA, 15 bp, Homo sapiens
gttttggtaggccta

SEQ ID NO: 574535 - DNA, 15 bp, Homo sapiens
agttttggtaggcct

SEQ ID NO: 574536 - DNA, 15 bp, Homo sapiens
cagttttggtaggcc

SEQ ID NO: 574537 - DNA, 15 bp, Homo sapiens
tcagttttggtaggc

SEQ ID NO: 574538 - DNA, 15 bp, Homo sapiens
ctcagttttggtagg

SEQ ID NO: 574539 - DNA, 15 bp, Homo sapiens
gctcagttttggtag

SEQ ID NO: 574540 - DNA, 15 bp, Homo sapiens
agctcagttttggta

SEQ ID NO: 574541 - DNA, 15 bp, Homo sapiens
tagctcagttttggt

SEQ ID NO: 574542 - DNA, 15 bp, Homo sapiens
ttagctcagttttgg

SEQ ID NO: 574543 - DNA, 15 bp, Homo sapiens
attagctcagttttg

SEQ ID NO: 574544 - DNA, 15 bp, Homo sapiens
tattagctcagtttt

SEQ ID NO: 574545 - DNA, 15 bp, Homo sapiens
gtattagctcagttt

SEQ ID NO: 574546 - DNA, 15 bp, Homo sapiens
tgtattagctcagtt

SEQ ID NO: 574547 - DNA, 15 bp, Homo sapiens
ctgtattagctcagt

SEQ ID NO: 574548 - DNA, 15 bp, Homo sapiens
tctgtattagctcag

SEQ ID NO: 574549 - DNA, 15 bp, Homo sapiens
atctgtattagctca

SEQ ID NO: 574550 - DNA, 15 bp, Homo sapiens
catctgtattagctc

SEQ ID NO: 574551 - DNA, 15 bp, Homo sapiens
tcatctgtattagct

SEQ ID NO: 574552 - DNA, 15 bp, Homo sapiens
ttcatctgtattagc

SEQ ID NO: 574553 - DNA, 15 bp, Homo sapiens
cttcatctgtattag

SEQ ID NO: 574554 - DNA, 15 bp, Homo sapiens
acttcatctgtatta

SEQ ID NO: 574555 - DNA, 15 bp, Homo sapiens
aacttcatctgtatt

SEQ ID NO: 574556 - DNA, 15 bp, Homo sapiens
taacttcatctgtat

SEQ ID NO: 574557 - DNA, 15 bp, Homo sapiens
ctaacttcatctgta

SEQ ID NO: 574558 - DNA, 15 bp, Homo sapiens
actaacttcatctgt

SEQ ID NO: 574559 - DNA, 15 bp, Homo sapiens
gactaacttcatctg

SEQ ID NO: 574560 - DNA, 15 bp, Homo sapiens
agactaacttcatct

SEQ ID NO: 574561 - DNA, 15 bp, Homo sapiens
aagactaacttcatc

SEQ ID NO: 574562 - DNA, 15 bp, Homo sapiens
taagactaacttcat

SEQ ID NO: 574563 - DNA, 15 bp, Homo sapiens
ataagactaacttca

SEQ ID NO: 574564 - DNA, 15 bp, Homo sapiens
aataagactaacttc

SEQ ID NO: 574565 - DNA, 15 bp, Homo sapiens
aaataagactaactt

SEQ ID NO: 574566 - DNA, 15 bp, Homo sapiens
caaataagactaact

SEQ ID NO: 574567 - DNA, 15 bp, Homo sapiens
acaaataagactaac

SEQ ID NO: 574568 - DNA, 15 bp, Homo sapiens
tacaaataagactaa

SEQ ID NO: 574569 - DNA, 15 bp, Homo sapiens
ttacaaataagacta

SEQ ID NO: 574570 - DNA, 15 bp, Homo sapiens
tttacaaataagact

SEQ ID NO: 574571 - DNA, 15 bp, Homo sapiens
gtttacaaataagac

SEQ ID NO: 574572 - DNA, 15 bp, Homo sapiens
tgtttacaaataaga

SEQ ID NO: 574573 - DNA, 15 bp, Homo sapiens
ttgtttacaaataag

SEQ ID NO: 574574 - DNA, 15 bp, Homo sapiens
tttgtttacaaataa

SEQ ID NO: 574575 - DNA, 15 bp, Homo sapiens
atttgtttacaaata

SEQ ID NO: 574576 - DNA, 15 bp, Homo sapiens
gatttgtttacaaat

SEQ ID NO: 574577 - DNA, 15 bp, Homo sapiens
ggatttgtttacaaa

SEQ ID NO: 574578 - DNA, 15 bp, Homo sapiens
aggatttgtttacaa

SEQ ID NO: 574579 - DNA, 15 bp, Homo sapiens
caggatttgtttaca

SEQ ID NO: 574580 - DNA, 15 bp, Homo sapiens
tcaggatttgtttac

SEQ ID NO: 574581 - DNA, 15 bp, Homo sapiens
ctcaggatttgttta

SEQ ID NO: 574582 - DNA, 15 bp, Homo sapiens
tctcaggatttgttt

SEQ ID NO: 574583 - DNA, 15 bp, Homo sapiens
ttctcaggatttgtt

SEQ ID NO: 574584 - DNA, 15 bp, Homo sapiens
gttctcaggatttgt

SEQ ID NO: 574585 - DNA, 15 bp, Homo sapiens
agttctcaggatttg

SEQ ID NO: 574586 - DNA, 15 bp, Homo sapiens
aagttctcaggattt

SEQ ID NO: 574587 - DNA, 15 bp, Homo sapiens
taagttctcaggatt

SEQ ID NO: 574588 - DNA, 15 bp, Homo sapiens
ttaagttctcaggat

SEQ ID NO: 574589 - DNA, 15 bp, Homo sapiens
attaagttctcagga

SEQ ID NO: 574590 - DNA, 15 bp, Homo sapiens
tattaagttctcagg

SEQ ID NO: 574591 - DNA, 15 bp, Homo sapiens
gtattaagttctcag

SEQ ID NO: 574592 - DNA, 15 bp, Homo sapiens
ggtattaagttctca

SEQ ID NO: 574593 - DNA, 15 bp, Homo sapiens
gggtattaagttctc

SEQ ID NO: 574594 - DNA, 15 bp, Homo sapiens
tgggtattaagttct

SEQ ID NO: 574595 - DNA, 15 bp, Homo sapiens
atgggtattaagttc

SEQ ID NO: 574596 - DNA, 15 bp, Homo sapiens
gatgggtattaagtt

SEQ ID NO: 574597 - DNA, 15 bp, Homo sapiens
agatgggtattaagt

SEQ ID NO: 574598 - DNA, 15 bp, Homo sapiens
cagatgggtattaag

SEQ ID NO: 574599 - DNA, 15 bp, Homo sapiens
gcagatgggtattaa

SEQ ID NO: 574600 - DNA, 15 bp, Homo sapiens
ggcagatgggtatta

SEQ ID NO: 574601 - DNA, 15 bp, Homo sapiens
tggcagatgggtatt

SEQ ID NO: 574602 - DNA, 15 bp, Homo sapiens
ttggcagatgggtat

SEQ ID NO: 574603 - DNA, 15 bp, Homo sapiens
tttggcagatgggta

SEQ ID NO: 574604 - DNA, 15 bp, Homo sapiens
ctttggcagatgggt

SEQ ID NO: 574605 - DNA, 15 bp, Homo sapiens
cctttggcagatggg

SEQ ID NO: 574606 - DNA, 15 bp, Homo sapiens
tcctttggcagatgg

SEQ ID NO: 574607 - DNA, 15 bp, Homo sapiens
ttcctttggcagatg

SEQ ID NO: 574608 - DNA, 15 bp, Homo sapiens
tttcctttggcagat

SEQ ID NO: 574609 - DNA, 15 bp, Homo sapiens
ctttcctttggcaga

SEQ ID NO: 574610 - DNA, 15 bp, Homo sapiens
actttcctttggcag

SEQ ID NO: 574611 - DNA, 15 bp, Homo sapiens
cactttcctttggca

SEQ ID NO: 574612 - DNA, 15 bp, Homo sapiens
ccactttcctttggc

SEQ ID NO: 574613 - DNA, 15 bp, Homo sapiens
cccactttcctttgg

SEQ ID NO: 574614 - DNA, 15 bp, Homo sapiens
tcccactttcctttg

SEQ ID NO: 574615 - DNA, 15 bp, Homo sapiens
ttcccactttccttt

SEQ ID NO: 574616 - DNA, 15 bp, Homo sapiens
attcccactttcctt

SEQ ID NO: 574617 - DNA, 15 bp, Homo sapiens
tattcccactttcct

SEQ ID NO: 574618 - DNA, 15 bp, Homo sapiens
ttattcccactttcc

SEQ ID NO: 574619 - DNA, 15 bp, Homo sapiens
attattcccactttc

SEQ ID NO: 574620 - DNA, 15 bp, Homo sapiens
aattattcccacttt

SEQ ID NO: 574621 - DNA, 15 bp, Homo sapiens
aaattattcccactt

SEQ ID NO: 574622 - DNA, 15 bp, Homo sapiens
taaattattcccact

SEQ ID NO: 574623 - DNA, 15 bp, Homo sapiens
ttaaattattcccac

SEQ ID NO: 574624 - DNA, 15 bp, Homo sapiens
tttaaattattccca

SEQ ID NO: 574625 - DNA, 15 bp, Homo sapiens
ttttaaattattccc

SEQ ID NO: 574626 - DNA, 15 bp, Homo sapiens
cttttaaattattcc

SEQ ID NO: 574627 - DNA, 15 bp, Homo sapiens
ccttttaaattattc

SEQ ID NO: 574628 - DNA, 15 bp, Homo sapiens
gccttttaaattatt

SEQ ID NO: 574629 - DNA, 15 bp, Homo sapiens
ggccttttaaattat

SEQ ID NO: 574630 - DNA, 15 bp, Homo sapiens
tggccttttaaatta

SEQ ID NO: 574631 - DNA, 15 bp, Homo sapiens
gtggccttttaaatt

SEQ ID NO: 574632 - DNA, 15 bp, Homo sapiens
agtggccttttaaat

SEQ ID NO: 574633 - DNA, 15 bp, Homo sapiens
tagtggccttttaaa

SEQ ID NO: 574634 - DNA, 15 bp, Homo sapiens
ttagtggccttttaa

SEQ ID NO: 574635 - DNA, 15 bp, Homo sapiens
attagtggcctttta

SEQ ID NO: 574636 - DNA, 15 bp, Homo sapiens
gattagtggcctttt

SEQ ID NO: 574637 - DNA, 15 bp, Homo sapiens
tgattagtggccttt

SEQ ID NO: 574638 - DNA, 15 bp, Homo sapiens
ttgattagtggcctt

SEQ ID NO: 574639 - DNA, 15 bp, Homo sapiens
tttgattagtggcct

SEQ ID NO: 574640 - DNA, 15 bp, Homo sapiens
ttttgattagtggcc

SEQ ID NO: 574641 - DNA, 15 bp, Homo sapiens
cttttgattagtggc

SEQ ID NO: 574642 - DNA, 15 bp, Homo sapiens
ccttttgattagtgg

SEQ ID NO: 574643 - DNA, 15 bp, Homo sapiens
accttttgattagtg

SEQ ID NO: 574644 - DNA, 15 bp, Homo sapiens
caccttttgattagt

SEQ ID NO: 574645 - DNA, 15 bp, Homo sapiens
acaccttttgattag

SEQ ID NO: 574646 - DNA, 15 bp, Homo sapiens
aacaccttttgatta

SEQ ID NO: 574647 - DNA, 15 bp, Homo sapiens
taacaccttttgatt

SEQ ID NO: 574648 - DNA, 15 bp, Homo sapiens
ttaacaccttttgat

SEQ ID NO: 574649 - DNA, 15 bp, Homo sapiens
cttaacaccttttga

SEQ ID NO: 574650 - DNA, 15 bp, Homo sapiens
acttaacaccttttg

SEQ ID NO: 574651 - DNA, 15 bp, Homo sapiens
aacttaacacctttt

SEQ ID NO: 574652 - DNA, 15 bp, Homo sapiens
gaacttaacaccttt

SEQ ID NO: 574653 - DNA, 15 bp, Homo sapiens
tgaacttaacacctt

SEQ ID NO: 574654 - DNA, 15 bp, Homo sapiens
atgaacttaacacct

SEQ ID NO: 574655 - DNA, 15 bp, Homo sapiens
aatgaacttaacacc

SEQ ID NO: 574656 - DNA, 15 bp, Homo sapiens
taatgaacttaacac

SEQ ID NO: 574657 - DNA, 15 bp, Homo sapiens
ttaatgaacttaaca

SEQ ID NO: 574658 - DNA, 15 bp, Homo sapiens
tttaatgaacttaac

SEQ ID NO: 574659 - DNA, 15 bp, Homo sapiens
atttaatgaacttaa

SEQ ID NO: 574660 - DNA, 15 bp, Homo sapiens
gatttaatgaactta

SEQ ID NO: 574661 - DNA, 15 bp, Homo sapiens
agatttaatgaactt

SEQ ID NO: 574662 - DNA, 15 bp, Homo sapiens
tagatttaatgaact

SEQ ID NO: 574663 - DNA, 15 bp, Homo sapiens
atagatttaatgaac

SEQ ID NO: 574664 - DNA, 15 bp, Homo sapiens
gatagatttaatgaa

SEQ ID NO: 574665 - DNA, 15 bp, Homo sapiens
agatagatttaatga

SEQ ID NO: 574666 - DNA, 15 bp, Homo sapiens
aagatagatttaatg

SEQ ID NO: 574667 - DNA, 15 bp, Homo sapiens
caagatagatttaat

SEQ ID NO: 574668 - DNA, 15 bp, Homo sapiens
gcaagatagatttaa

SEQ ID NO: 574669 - DNA, 15 bp, Homo sapiens
agcaagatagattta

SEQ ID NO: 574670 - DNA, 15 bp, Homo sapiens
cagcaagatagattt

SEQ ID NO: 574671 - DNA, 15 bp, Homo sapiens
acagcaagatagatt

SEQ ID NO: 574672 - DNA, 15 bp, Homo sapiens
cacagcaagatagat

SEQ ID NO: 574673 - DNA, 15 bp, Homo sapiens
acacagcaagataga

SEQ ID NO: 574674 - DNA, 15 bp, Homo sapiens
cacacagcaagatag

SEQ ID NO: 574675 - DNA, 15 bp, Homo sapiens
ccacacagcaagata

SEQ ID NO: 574676 - DNA, 15 bp, Homo sapiens
accacacagcaagat

SEQ ID NO: 574677 - DNA, 15 bp, Homo sapiens
caccacacagcaaga

SEQ ID NO: 574678 - DNA, 15 bp, Homo sapiens
tcaccacacagcaag

SEQ ID NO: 574679 - DNA, 15 bp, Homo sapiens
ctcaccacacagcaa

SEQ ID NO: 574680 - DNA, 15 bp, Homo sapiens
tctcaccacacagca

SEQ ID NO: 574681 - DNA, 15 bp, Homo sapiens
ttctcaccacacagc

SEQ ID NO: 574682 - DNA, 15 bp, Homo sapiens
tttctcaccacacag

SEQ ID NO: 574683 - DNA, 15 bp, Homo sapiens
ttttctcaccacaca

SEQ ID NO: 574684 - DNA, 15 bp, Homo sapiens
cttttctcaccacac

SEQ ID NO: 574685 - DNA, 15 bp, Homo sapiens
tcttttctcaccaca

SEQ ID NO: 574686 - DNA, 15 bp, Homo sapiens
ttcttttctcaccac

SEQ ID NO: 574687 - DNA, 15 bp, Homo sapiens
tttcttttctcacca

SEQ ID NO: 574688 - DNA, 15 bp, Homo sapiens
atttcttttctcacc

SEQ ID NO: 574689 - DNA, 15 bp, Homo sapiens
tatttcttttctcac

SEQ ID NO: 574690 - DNA, 15 bp, Homo sapiens
ttatttcttttctca

SEQ ID NO: 574691 - DNA, 15 bp, Homo sapiens
attatttcttttctc

SEQ ID NO: 574692 - DNA, 15 bp, Homo sapiens
aattatttcttttct

SEQ ID NO: 574693 - DNA, 15 bp, Homo sapiens
aaattatttcttttc

SEQ ID NO: 574694 - DNA, 15 bp, Homo sapiens
taaattatttctttt

SEQ ID NO: 574695 - DNA, 15 bp, Homo sapiens
ctaaattatttcttt

SEQ ID NO: 574696 - DNA, 15 bp, Homo sapiens
actaaattatttctt

SEQ ID NO: 574697 - DNA, 15 bp, Homo sapiens
cactaaattatttct

SEQ ID NO: 574698 - DNA, 15 bp, Homo sapiens
gcactaaattatttc

SEQ ID NO: 574699 - DNA, 15 bp, Homo sapiens
agcactaaattattt

SEQ ID NO: 574700 - DNA, 15 bp, Homo sapiens
aagcactaaattatt

SEQ ID NO: 574701 - DNA, 15 bp, Homo sapiens
aaagcactaaattat

SEQ ID NO: 574702 - DNA, 15 bp, Homo sapiens
caaagcactaaatta

SEQ ID NO: 574703 - DNA, 15 bp, Homo sapiens
gcaaagcactaaatt

SEQ ID NO: 574704 - DNA, 15 bp, Homo sapiens
tgcaaagcactaaat

SEQ ID NO: 574705 - DNA, 15 bp, Homo sapiens
atgcaaagcactaaa

SEQ ID NO: 574706 - DNA, 15 bp, Homo sapiens
gatgcaaagcactaa

SEQ ID NO: 574707 - DNA, 15 bp, Homo sapiens
agatgcaaagcacta

SEQ ID NO: 574708 - DNA, 15 bp, Homo sapiens
gagatgcaaagcact

SEQ ID NO: 574709 - DNA, 15 bp, Homo sapiens
agagatgcaaagcac

SEQ ID NO: 574710 - DNA, 15 bp, Homo sapiens
gagagatgcaaagca

SEQ ID NO: 574711 - DNA, 15 bp, Homo sapiens
tgagagatgcaaagc

SEQ ID NO: 574712 - DNA, 15 bp, Homo sapiens
atgagagatgcaaag

SEQ ID NO: 574713 - DNA, 15 bp, Homo sapiens
aatgagagatgcaaa

SEQ ID NO: 574714 - DNA, 15 bp, Homo sapiens
gaatgagagatgcaa

SEQ ID NO: 574715 - DNA, 15 bp, Homo sapiens
agaatgagagatgca

SEQ ID NO: 574716 - DNA, 15 bp, Homo sapiens
aagaatgagagatgc

SEQ ID NO: 574717 - DNA, 15 bp, Homo sapiens
gaagaatgagagatg

SEQ ID NO: 574718 - DNA, 15 bp, Homo sapiens
tgaagaatgagagat

SEQ ID NO: 574719 - DNA, 15 bp, Homo sapiens
atgaagaatgagaga

SEQ ID NO: 574720 - DNA, 15 bp, Homo sapiens
aatgaagaatgagag

SEQ ID NO: 574721 - DNA, 15 bp, Homo sapiens
caatgaagaatgaga

SEQ ID NO: 574722 - DNA, 15 bp, Homo sapiens
ccaatgaagaatgag

SEQ ID NO: 574723 - DNA, 15 bp, Homo sapiens
cccaatgaagaatga

SEQ ID NO: 574724 - DNA, 15 bp, Homo sapiens
ccccaatgaagaatg

SEQ ID NO: 574725 - DNA, 15 bp, Homo sapiens
tccccaatgaagaat

SEQ ID NO: 574726 - DNA, 15 bp, Homo sapiens
atccccaatgaagaa

SEQ ID NO: 574727 - DNA, 15 bp, Homo sapiens
gatccccaatgaaga

SEQ ID NO: 574728 - DNA, 15 bp, Homo sapiens
tgatccccaatgaag

SEQ ID NO: 574729 - DNA, 15 bp, Homo sapiens
ttgatccccaatgaa

SEQ ID NO: 574730 - DNA, 15 bp, Homo sapiens
cttgatccccaatga

SEQ ID NO: 574731 - DNA, 15 bp, Homo sapiens
acttgatccccaatg

SEQ ID NO: 574732 - DNA, 15 bp, Homo sapiens
tacttgatccccaat

SEQ ID NO: 574733 - DNA, 15 bp, Homo sapiens
atacttgatccccaa

SEQ ID NO: 574734 - DNA, 15 bp, Homo sapiens
catacttgatcccca

SEQ ID NO: 574735 - DNA, 15 bp, Homo sapiens
gcatacttgatcccc

SEQ ID NO: 574736 - DNA, 15 bp, Homo sapiens
agcatacttgatccc

SEQ ID NO: 574737 - DNA, 15 bp, Homo sapiens
aagcatacttgatcc

SEQ ID NO: 574738 - DNA, 15 bp, Homo sapiens
caagcatacttgatc

SEQ ID NO: 574739 - DNA, 15 bp, Homo sapiens
gcaagcatacttgat

SEQ ID NO: 574740 - DNA, 15 bp, Homo sapiens
ggcaagcatacttga

SEQ ID NO: 574741 - DNA, 15 bp, Homo sapiens
gggcaagcatacttg

SEQ ID NO: 574742 - DNA, 15 bp, Homo sapiens
agggcaagcatactt

SEQ ID NO: 574743 - DNA, 15 bp, Homo sapiens
aagggcaagcatact

SEQ ID NO: 574744 - DNA, 15 bp, Homo sapiens
taagggcaagcatac

SEQ ID NO: 574745 - DNA, 15 bp, Homo sapiens
gtaagggcaagcata

SEQ ID NO: 574746 - DNA, 15 bp, Homo sapiens
tgtaagggcaagcat

SEQ ID NO: 574747 - DNA, 15 bp, Homo sapiens
ctgtaagggcaagca

SEQ ID NO: 574748 - DNA, 15 bp, Homo sapiens
tctgtaagggcaagc

SEQ ID NO: 574749 - DNA, 15 bp, Homo sapiens
gtctgtaagggcaag

SEQ ID NO: 574750 - DNA, 15 bp, Homo sapiens
ggtctgtaagggcaa

SEQ ID NO: 574751 - DNA, 15 bp, Homo sapiens
aggtctgtaagggca

SEQ ID NO: 574752 - DNA, 15 bp, Homo sapiens
gaggtctgtaagggc

SEQ ID NO: 574753 - DNA, 15 bp, Homo sapiens
tgaggtctgtaaggg

SEQ ID NO: 574754 - DNA, 15 bp, Homo sapiens
gtgaggtctgtaagg

SEQ ID NO: 574755 - DNA, 15 bp, Homo sapiens
agtgaggtctgtaag

SEQ ID NO: 574756 - DNA, 15 bp, Homo sapiens
cagtgaggtctgtaa

SEQ ID NO: 574757 - DNA, 15 bp, Homo sapiens
ccagtgaggtctgta

SEQ ID NO: 574758 - DNA, 15 bp, Homo sapiens
tccagtgaggtctgt

SEQ ID NO: 574759 - DNA, 15 bp, Homo sapiens
ctccagtgaggtctg

SEQ ID NO: 574760 - DNA, 15 bp, Homo sapiens
gctccagtgaggtct

SEQ ID NO: 574761 - DNA, 15 bp, Homo sapiens
ggctccagtgaggtc

SEQ ID NO: 574762 - DNA, 15 bp, Homo sapiens
gggctccagtgaggt

SEQ ID NO: 574763 - DNA, 15 bp, Homo sapiens
tgggctccagtgagg

SEQ ID NO: 574764 - DNA, 15 bp, Homo sapiens
ctgggctccagtgag

SEQ ID NO: 574765 - DNA, 15 bp, Homo sapiens
gctgggctccagtga

SEQ ID NO: 574766 - DNA, 15 bp, Homo sapiens
agctgggctccagtg

SEQ ID NO: 574767 - DNA, 15 bp, Homo sapiens
gagctgggctccagt

SEQ ID NO: 574768 - DNA, 15 bp, Homo sapiens
agagctgggctccag

SEQ ID NO: 574769 - DNA, 15 bp, Homo sapiens
cagagctgggctcca

SEQ ID NO: 574770 - DNA, 15 bp, Homo sapiens
tcagagctgggctcc

SEQ ID NO: 574771 - DNA, 15 bp, Homo sapiens
ctcagagctgggctc

SEQ ID NO: 574772 - DNA, 15 bp, Homo sapiens
cctcagagctgggct

SEQ ID NO: 574773 - DNA, 15 bp, Homo sapiens
ccctcagagctgggc

SEQ ID NO: 574774 - DNA, 15 bp, Homo sapiens
tccctcagagctggg

SEQ ID NO: 574775 - DNA, 15 bp, Homo sapiens
atccctcagagctgg

SEQ ID NO: 574776 - DNA, 15 bp, Homo sapiens
tatccctcagagctg

SEQ ID NO: 574777 - DNA, 15 bp, Homo sapiens
ttatccctcagagct

SEQ ID NO: 574778 - DNA, 15 bp, Homo sapiens
tttatccctcagagc

SEQ ID NO: 574779 - DNA, 15 bp, Homo sapiens
atttatccctcagag

SEQ ID NO: 574780 - DNA, 15 bp, Homo sapiens
catttatccctcaga

SEQ ID NO: 574781 - DNA, 15 bp, Homo sapiens
tcatttatccctcag

SEQ ID NO: 574782 - DNA, 15 bp, Homo sapiens
ttcatttatccctca

SEQ ID NO: 574783 - DNA, 15 bp, Homo sapiens
tttcatttatccctc

SEQ ID NO: 574784 - DNA, 15 bp, Homo sapiens
gtttcatttatccct

SEQ ID NO: 574785 - DNA, 15 bp, Homo sapiens
tgtttcatttatccc

SEQ ID NO: 574786 - DNA, 15 bp, Homo sapiens
ctgtttcatttatcc

SEQ ID NO: 574787 - DNA, 15 bp, Homo sapiens
cctgtttcatttatc

SEQ ID NO: 574788 - DNA, 15 bp, Homo sapiens
gcctgtttcatttat

SEQ ID NO: 574789 - DNA, 15 bp, Homo sapiens
ggcctgtttcattta

SEQ ID NO: 574790 - DNA, 15 bp, Homo sapiens
cggcctgtttcattt

SEQ ID NO: 574791 - DNA, 15 bp, Homo sapiens
tcggcctgtttcatt

SEQ ID NO: 574792 - DNA, 15 bp, Homo sapiens
ttcggcctgtttcat

SEQ ID NO: 574793 - DNA, 15 bp, Homo sapiens
gttcggcctgtttca

SEQ ID NO: 574794 - DNA, 15 bp, Homo sapiens
agttcggcctgtttc

SEQ ID NO: 574795 - DNA, 15 bp, Homo sapiens
gagttcggcctgttt

SEQ ID NO: 574796 - DNA, 15 bp, Homo sapiens
tgagttcggcctgtt

SEQ ID NO: 574797 - DNA, 15 bp, Homo sapiens
atgagttcggcctgt

SEQ ID NO: 574798 - DNA, 15 bp, Homo sapiens
aatgagttcggcctg

SEQ ID NO: 574799 - DNA, 15 bp, Homo sapiens
taatgagttcggcct

SEQ ID NO: 574800 - DNA, 15 bp, Homo sapiens
ataatgagttcggcc

SEQ ID NO: 574801 - DNA, 15 bp, Homo sapiens
cataatgagttcggc

SEQ ID NO: 574802 - DNA, 15 bp, Homo sapiens
acataatgagttcgg

SEQ ID NO: 574803 - DNA, 15 bp, Homo sapiens
tacataatgagttcg

SEQ ID NO: 574804 - DNA, 15 bp, Homo sapiens
ttacataatgagttc

SEQ ID NO: 574805 - DNA, 15 bp, Homo sapiens
tttacataatgagtt

SEQ ID NO: 574806 - DNA, 15 bp, Homo sapiens
ctttacataatgagt

SEQ ID NO: 574807 - DNA, 15 bp, Homo sapiens
actttacataatgag

SEQ ID NO: 574808 - DNA, 15 bp, Homo sapiens
aactttacataatga

SEQ ID NO: 574809 - DNA, 15 bp, Homo sapiens
taactttacataatg

SEQ ID NO: 574810 - DNA, 15 bp, Homo sapiens
ttaactttacataat

SEQ ID NO: 574811 - DNA, 15 bp, Homo sapiens
tttaactttacataa

SEQ ID NO: 574812 - DNA, 15 bp, Homo sapiens
ttttaactttacata

SEQ ID NO: 574813 - DNA, 15 bp, Homo sapiens
attttaactttacat

SEQ ID NO: 574814 - DNA, 15 bp, Homo sapiens
cattttaactttaca

SEQ ID NO: 574815 - DNA, 15 bp, Homo sapiens
acattttaactttac

SEQ ID NO: 574816 - DNA, 15 bp, Homo sapiens
tacattttaacttta

SEQ ID NO: 574817 - DNA, 15 bp, Homo sapiens
atacattttaacttt

SEQ ID NO: 574818 - DNA, 15 bp, Homo sapiens
catacattttaactt

SEQ ID NO: 574819 - DNA, 15 bp, Homo sapiens
acatacattttaact

SEQ ID NO: 574820 - DNA, 15 bp, Homo sapiens
cacatacattttaac

SEQ ID NO: 574821 - DNA, 15 bp, Homo sapiens
acacatacattttaa

SEQ ID NO: 574822 - DNA, 15 bp, Homo sapiens
tacacatacatttta

SEQ ID NO: 574823 - DNA, 15 bp, Homo sapiens
gtacacatacatttt

SEQ ID NO: 574824 - DNA, 15 bp, Homo sapiens
tgtacacatacattt

SEQ ID NO: 574825 - DNA, 15 bp, Homo sapiens
atgtacacatacatt

SEQ ID NO: 574826 - DNA, 15 bp, Homo sapiens
catgtacacatacat

SEQ ID NO: 574827 - DNA, 15 bp, Homo sapiens
gcatgtacacataca

SEQ ID NO: 574828 - DNA, 15 bp, Homo sapiens
tgcatgtacacatac

SEQ ID NO: 574829 - DNA, 15 bp, Homo sapiens
ttgcatgtacacata

SEQ ID NO: 574830 - DNA, 15 bp, Homo sapiens
tttgcatgtacacat

SEQ ID NO: 574831 - DNA, 15 bp, Homo sapiens
ttttgcatgtacaca

SEQ ID NO: 574832 - DNA, 15 bp, Homo sapiens
cttttgcatgtacac

SEQ ID NO: 574833 - DNA, 15 bp, Homo sapiens
tcttttgcatgtaca

SEQ ID NO: 574834 - DNA, 15 bp, Homo sapiens
ttcttttgcatgtac

SEQ ID NO: 574835 - DNA, 15 bp, Homo sapiens
tttcttttgcatgta

SEQ ID NO: 574836 - DNA, 15 bp, Homo sapiens
ttttcttttgcatgt

SEQ ID NO: 574837 - DNA, 15 bp, Homo sapiens
tttttcttttgcatg

SEQ ID NO: 574838 - DNA, 15 bp, Homo sapiens
ctttttcttttgcat

SEQ ID NO: 574839 - DNA, 15 bp, Homo sapiens
actttttcttttgca

SEQ ID NO: 574840 - DNA, 15 bp, Homo sapiens
tactttttcttttgc

SEQ ID NO: 574841 - DNA, 15 bp, Homo sapiens
atactttttcttttg

SEQ ID NO: 574842 - DNA, 15 bp, Homo sapiens
tatactttttctttt

SEQ ID NO: 574843 - DNA, 15 bp, Homo sapiens
ctatactttttcttt

SEQ ID NO: 574844 - DNA, 15 bp, Homo sapiens
cctatactttttctt

SEQ ID NO: 574845 - DNA, 15 bp, Homo sapiens
tcctatactttttct

SEQ ID NO: 574846 - DNA, 15 bp, Homo sapiens
ttcctatactttttc

SEQ ID NO: 574847 - DNA, 15 bp, Homo sapiens
attcctatacttttt

SEQ ID NO: 574848 - DNA, 15 bp, Homo sapiens
aattcctatactttt

SEQ ID NO: 574849 - DNA, 15 bp, Homo sapiens
caattcctatacttt

SEQ ID NO: 574850 - DNA, 15 bp, Homo sapiens
tcaattcctatactt

SEQ ID NO: 574851 - DNA, 15 bp, Homo sapiens
atcaattcctatact

SEQ ID NO: 574852 - DNA, 15 bp, Homo sapiens
catcaattcctatac

SEQ ID NO: 574853 - DNA, 15 bp, Homo sapiens
tcatcaattcctata

SEQ ID NO: 574854 - DNA, 15 bp, Homo sapiens
ttcatcaattcctat

SEQ ID NO: 574855 - DNA, 15 bp, Homo sapiens
tttcatcaattccta

SEQ ID NO: 574856 - DNA, 15 bp, Homo sapiens
ttttcatcaattcct

SEQ ID NO: 574857 - DNA, 15 bp, Homo sapiens
gttttcatcaattcc

SEQ ID NO: 574858 - DNA, 15 bp, Homo sapiens
agttttcatcaattc

SEQ ID NO: 574859 - DNA, 15 bp, Homo sapiens
cagttttcatcaatt

SEQ ID NO: 574860 - DNA, 15 bp, Homo sapiens
ccagttttcatcaat

SEQ ID NO: 574861 - DNA, 15 bp, Homo sapiens
gccagttttcatcaa

SEQ ID NO: 574862 - DNA, 15 bp, Homo sapiens
agccagttttcatca

SEQ ID NO: 574863 - DNA, 15 bp, Homo sapiens
gagccagttttcatc

SEQ ID NO: 574864 - DNA, 15 bp, Homo sapiens
tgagccagttttcat

SEQ ID NO: 574865 - DNA, 15 bp, Homo sapiens
gtgagccagttttca

SEQ ID NO: 574866 - DNA, 15 bp, Homo sapiens
cgtgagccagttttc

SEQ ID NO: 574867 - DNA, 15 bp, Homo sapiens
acgtgagccagtttt

SEQ ID NO: 574868 - DNA, 15 bp, Homo sapiens
aacgtgagccagttt

SEQ ID NO: 574869 - DNA, 15 bp, Homo sapiens
gaacgtgagccagtt

SEQ ID NO: 574870 - DNA, 15 bp, Homo sapiens
agaacgtgagccagt

SEQ ID NO: 574871 - DNA, 15 bp, Homo sapiens
cagaacgtgagccag

SEQ ID NO: 574872 - DNA, 15 bp, Homo sapiens
gcagaacgtgagcca

SEQ ID NO: 574873 - DNA, 15 bp, Homo sapiens
agcagaacgtgagcc

SEQ ID NO: 574874 - DNA, 15 bp, Homo sapiens
aagcagaacgtgagc

SEQ ID NO: 574875 - DNA, 15 bp, Homo sapiens
aaagcagaacgtgag

SEQ ID NO: 574876 - DNA, 15 bp, Homo sapiens
aaaagcagaacgtga

SEQ ID NO: 574877 - DNA, 15 bp, Homo sapiens
gaaaagcagaacgtg

SEQ ID NO: 574878 - DNA, 15 bp, Homo sapiens
agaaaagcagaacgt

SEQ ID NO: 574879 - DNA, 15 bp, Homo sapiens
aagaaaagcagaacg

SEQ ID NO: 574880 - DNA, 15 bp, Homo sapiens
aaagaaaagcagaac

SEQ ID NO: 574881 - DNA, 15 bp, Homo sapiens
gaaagaaaagcagaa

SEQ ID NO: 574882 - DNA, 15 bp, Homo sapiens
agaaagaaaagcaga

SEQ ID NO: 574883 - DNA, 15 bp, Homo sapiens
aagaaagaaaagcag

SEQ ID NO: 574884 - DNA, 15 bp, Homo sapiens
aaagaaagaaaagca

SEQ ID NO: 574885 - DNA, 15 bp, Homo sapiens
aaaagaaagaaaagc

SEQ ID NO: 574886 - DNA, 15 bp, Homo sapiens
aaaaagaaagaaaag

SEQ ID NO: 574887 - DNA, 15 bp, Homo sapiens
taaaaagaaagaaaa

SEQ ID NO: 574888 - DNA, 15 bp, Homo sapiens
ttaaaaagaaagaaa

SEQ ID NO: 574889 - DNA, 15 bp, Homo sapiens
cttaaaaagaaagaa

SEQ ID NO: 574890 - DNA, 15 bp, Homo sapiens
tcttaaaaagaaaga

SEQ ID NO: 574891 - DNA, 15 bp, Homo sapiens
ctcttaaaaagaaag

SEQ ID NO: 574892 - DNA, 15 bp, Homo sapiens
tctcttaaaaagaaa

SEQ ID NO: 574893 - DNA, 15 bp, Homo sapiens
gtctcttaaaaagaa

SEQ ID NO: 574894 - DNA, 15 bp, Homo sapiens
agtctcttaaaaaga

SEQ ID NO: 574895 - DNA, 15 bp, Homo sapiens
cagtctcttaaaaag

SEQ ID NO: 574896 - DNA, 15 bp, Homo sapiens
ccagtctcttaaaaa

SEQ ID NO: 574897 - DNA, 15 bp, Homo sapiens
cccagtctcttaaaa

SEQ ID NO: 574898 - DNA, 15 bp, Homo sapiens
acccagtctcttaaa

SEQ ID NO: 574899 - DNA, 15 bp, Homo sapiens
gacccagtctcttaa

SEQ ID NO: 574900 - DNA, 15 bp, Homo sapiens
ggacccagtctctta

SEQ ID NO: 574901 - DNA, 15 bp, Homo sapiens
gggacccagtctctt

SEQ ID NO: 574902 - DNA, 15 bp, Homo sapiens
cgggacccagtctct

SEQ ID NO: 574903 - DNA, 15 bp, Homo sapiens
gcgggacccagtctc

SEQ ID NO: 574904 - DNA, 15 bp, Homo sapiens
agcgggacccagtct

SEQ ID NO: 574905 - DNA, 15 bp, Homo sapiens
gagcgggacccagtc

SEQ ID NO: 574906 - DNA, 15 bp, Homo sapiens
agagcgggacccagt

SEQ ID NO: 574907 - DNA, 15 bp, Homo sapiens
cagagcgggacccag

SEQ ID NO: 574908 - DNA, 15 bp, Homo sapiens
gcagagcgggaccca

SEQ ID NO: 574909 - DNA, 15 bp, Homo sapiens
ggcagagcgggaccc

SEQ ID NO: 574910 - DNA, 15 bp, Homo sapiens
tggcagagcgggacc

SEQ ID NO: 574911 - DNA, 15 bp, Homo sapiens
gtggcagagcgggac

SEQ ID NO: 574912 - DNA, 15 bp, Homo sapiens
ggtggcagagcggga

SEQ ID NO: 574913 - DNA, 15 bp, Homo sapiens
aggtggcagagcggg

SEQ ID NO: 574914 - DNA, 15 bp, Homo sapiens
taggtggcagagcgg

SEQ ID NO: 574915 - DNA, 15 bp, Homo sapiens
ctaggtggcagagcg

SEQ ID NO: 574916 - DNA, 15 bp, Homo sapiens
cctaggtggcagagc

SEQ ID NO: 574917 - DNA, 15 bp, Homo sapiens
gcctaggtggcagag

SEQ ID NO: 574918 - DNA, 15 bp, Homo sapiens
agcctaggtggcaga

SEQ ID NO: 574919 - DNA, 15 bp, Homo sapiens
cagcctaggtggcag

SEQ ID NO: 574920 - DNA, 15 bp, Homo sapiens
ccagcctaggtggca

SEQ ID NO: 574921 - DNA, 15 bp, Homo sapiens
tccagcctaggtggc

SEQ ID NO: 574922 - DNA, 15 bp, Homo sapiens
ctccagcctaggtgg

SEQ ID NO: 574923 - DNA, 15 bp, Homo sapiens
ctgcactccagccta

SEQ ID NO: 574924 - DNA, 15 bp, Homo sapiens
actgcactccagcct

SEQ ID NO: 574925 - DNA, 15 bp, Homo sapiens
agccactgcactcca

SEQ ID NO: 574926 - DNA, 15 bp, Homo sapiens
tagccactgcactcc

SEQ ID NO: 574927 - DNA, 15 bp, Homo sapiens
ttagccactgcactc

SEQ ID NO: 574928 - DNA, 15 bp, Homo sapiens
attagccactgcact

SEQ ID NO: 574929 - DNA, 15 bp, Homo sapiens
cattagccactgcac

SEQ ID NO: 574930 - DNA, 15 bp, Homo sapiens
tcattagccactgca

SEQ ID NO: 574931 - DNA, 15 bp, Homo sapiens
atcattagccactgc

SEQ ID NO: 574932 - DNA, 15 bp, Homo sapiens
catcattagccactg

SEQ ID NO: 574933 - DNA, 15 bp, Homo sapiens
ccatcattagccact

SEQ ID NO: 574934 - DNA, 15 bp, Homo sapiens
gccatcattagccac

SEQ ID NO: 574935 - DNA, 15 bp, Homo sapiens
agccatcattagcca

SEQ ID NO: 574936 - DNA, 15 bp, Homo sapiens
gagccatcattagcc

SEQ ID NO: 574937 - DNA, 15 bp, Homo sapiens
tgagccatcattagc

SEQ ID NO: 574938 - DNA, 15 bp, Homo sapiens
gtgagccatcattag

SEQ ID NO: 574939 - DNA, 15 bp, Homo sapiens
agtgagccatcatta

SEQ ID NO: 574940 - DNA, 15 bp, Homo sapiens
cagtgagccatcatt

SEQ ID NO: 574941 - DNA, 15 bp, Homo sapiens
gcagtgagccatcat

SEQ ID NO: 574942 - DNA, 15 bp, Homo sapiens
tgcagtgagccatca

SEQ ID NO: 574943 - DNA, 15 bp, Homo sapiens
ctgcagtgagccatc

SEQ ID NO: 574944 - DNA, 15 bp, Homo sapiens
gctgcagtgagccat

SEQ ID NO: 574945 - DNA, 15 bp, Homo sapiens
ggctgcagtgagcca

SEQ ID NO: 574946 - DNA, 15 bp, Homo sapiens
aggctgcagtgagcc

SEQ ID NO: 574947 - DNA, 15 bp, Homo sapiens
aaggctgcagtgagc

SEQ ID NO: 574948 - DNA, 15 bp, Homo sapiens
caaggctgcagtgag

SEQ ID NO: 574949 - DNA, 15 bp, Homo sapiens
tcaaggctgcagtga

SEQ ID NO: 574950 - DNA, 15 bp, Homo sapiens
ttcaaggctgcagtg

SEQ ID NO: 574951 - DNA, 15 bp, Homo sapiens
gttcaaggctgcagt

SEQ ID NO: 574952 - DNA, 15 bp, Homo sapiens
agttcaaggctgcag

SEQ ID NO: 574953 - DNA, 15 bp, Homo sapiens
gagttcaaggctgca

SEQ ID NO: 574954 - DNA, 15 bp, Homo sapiens
ggagttcaaggctgc

SEQ ID NO: 574955 - DNA, 15 bp, Homo sapiens
aggagttcaaggctg

SEQ ID NO: 574956 - DNA, 15 bp, Homo sapiens
caggagttcaaggct

SEQ ID NO: 574957 - DNA, 15 bp, Homo sapiens
ccaggagttcaaggc

SEQ ID NO: 574958 - DNA, 15 bp, Homo sapiens
cccaggagttcaagg

SEQ ID NO: 574959 - DNA, 15 bp, Homo sapiens
gcccaggagttcaag

SEQ ID NO: 574960 - DNA, 15 bp, Homo sapiens
agcccaggagttcaa

SEQ ID NO: 574961 - DNA, 15 bp, Homo sapiens
gagcccaggagttca

SEQ ID NO: 574962 - DNA, 15 bp, Homo sapiens
tgagcccaggagttc

SEQ ID NO: 574963 - DNA, 15 bp, Homo sapiens
ttgagcccaggagtt

SEQ ID NO: 574964 - DNA, 15 bp, Homo sapiens
cttgagcccaggagt

SEQ ID NO: 574965 - DNA, 15 bp, Homo sapiens
gcttgagcccaggag

SEQ ID NO: 574966 - DNA, 15 bp, Homo sapiens
tgcttgagcccagga

SEQ ID NO: 574967 - DNA, 15 bp, Homo sapiens
ttgcttgagcccagg

SEQ ID NO: 574968 - DNA, 15 bp, Homo sapiens
attgcttgagcccag

SEQ ID NO: 574969 - DNA, 15 bp, Homo sapiens
gattgcttgagccca

SEQ ID NO: 574970 - DNA, 15 bp, Homo sapiens
ggattgcttgagccc

SEQ ID NO: 574971 - DNA, 15 bp, Homo sapiens
aggattgcttgagcc

SEQ ID NO: 574972 - DNA, 15 bp, Homo sapiens
caggattgcttgagc

SEQ ID NO: 574973 - DNA, 15 bp, Homo sapiens
gcaggattgcttgag

SEQ ID NO: 574974 - DNA, 15 bp, Homo sapiens
agcaggattgcttga

SEQ ID NO: 574975 - DNA, 15 bp, Homo sapiens
cagcaggattgcttg

SEQ ID NO: 574976 - DNA, 15 bp, Homo sapiens
gcagcaggattgctt

SEQ ID NO: 574977 - DNA, 15 bp, Homo sapiens
ggcagcaggattgct

SEQ ID NO: 574978 - DNA, 15 bp, Homo sapiens
aggcagcaggattgc

SEQ ID NO: 574979 - DNA, 15 bp, Homo sapiens
gaggcagcaggattg

SEQ ID NO: 574980 - DNA, 15 bp, Homo sapiens
tgaggcagcaggatt

SEQ ID NO: 574981 - DNA, 15 bp, Homo sapiens
ctgaggcagcaggat

SEQ ID NO: 574982 - DNA, 15 bp, Homo sapiens
gctgaggcagcagga

SEQ ID NO: 574983 - DNA, 15 bp, Homo sapiens
ggctgaggcagcagg

SEQ ID NO: 574984 - DNA, 15 bp, Homo sapiens
aggctgaggcagcag

SEQ ID NO: 574985 - DNA, 15 bp, Homo sapiens
gaggctgaggcagca

SEQ ID NO: 574986 - DNA, 15 bp, Homo sapiens
ggaggctgaggcagc

SEQ ID NO: 574987 - DNA, 15 bp, Homo sapiens
tggaggctgaggcag

SEQ ID NO: 574988 - DNA, 15 bp, Homo sapiens
ctggaggctgaggca

SEQ ID NO: 574989 - DNA, 15 bp, Homo sapiens
tctggaggctgaggc

SEQ ID NO: 574990 - DNA, 15 bp, Homo sapiens
ctctggaggctgagg

SEQ ID NO: 574991 - DNA, 15 bp, Homo sapiens
actctggaggctgag

SEQ ID NO: 574992 - DNA, 15 bp, Homo sapiens
tactctggaggctga

SEQ ID NO: 574993 - DNA, 15 bp, Homo sapiens
ctactctggaggctg

SEQ ID NO: 574994 - DNA, 15 bp, Homo sapiens
cctactctggaggct

SEQ ID NO: 574995 - DNA, 15 bp, Homo sapiens
acctactctggaggc

SEQ ID NO: 574996 - DNA, 15 bp, Homo sapiens
tacctactctggagg

SEQ ID NO: 574997 - DNA, 15 bp, Homo sapiens
ctacctactctggag

SEQ ID NO: 574998 - DNA, 15 bp, Homo sapiens
cctacctactctgga

SEQ ID NO: 574999 - DNA, 15 bp, Homo sapiens
tcctacctactctgg

SEQ ID NO: 575000 - DNA, 15 bp, Homo sapiens
gtcctacctactctg

SEQ ID NO: 575001 - DNA, 15 bp, Homo sapiens
agtcctacctactct

SEQ ID NO: 575002 - DNA, 15 bp, Homo sapiens
tagtcctacctactc

SEQ ID NO: 575003 - DNA, 15 bp, Homo sapiens
gtagtcctacctact

SEQ ID NO: 575004 - DNA, 15 bp, Homo sapiens
tgtagtcctacctac

SEQ ID NO: 575005 - DNA, 15 bp, Homo sapiens
ctgtagtcctaccta

SEQ ID NO: 575006 - DNA, 15 bp, Homo sapiens
cctgtagtcctacct

SEQ ID NO: 575007 - DNA, 15 bp, Homo sapiens
gcctgtagtcctacc

SEQ ID NO: 575008 - DNA, 15 bp, Homo sapiens
tgcctgtagtcctac

SEQ ID NO: 575009 - DNA, 15 bp, Homo sapiens
gtgcctgtagtccta

SEQ ID NO: 575010 - DNA, 15 bp, Homo sapiens
cgtgcctgtagtcct

SEQ ID NO: 575011 - DNA, 15 bp, Homo sapiens
acgtgcctgtagtcc

SEQ ID NO: 575012 - DNA, 15 bp, Homo sapiens
tacgtgcctgtagtc

SEQ ID NO: 575013 - DNA, 15 bp, Homo sapiens
gtacgtgcctgtagt

SEQ ID NO: 575014 - DNA, 15 bp, Homo sapiens
ggtacgtgcctgtag

SEQ ID NO: 575015 - DNA, 15 bp, Homo sapiens
tggtacgtgcctgta

SEQ ID NO: 575016 - DNA, 15 bp, Homo sapiens
gtggtacgtgcctgt

SEQ ID NO: 575017 - DNA, 15 bp, Homo sapiens
ggtggtacgtgcctg

SEQ ID NO: 575018 - DNA, 15 bp, Homo sapiens
tggtggtacgtgcct

SEQ ID NO: 575019 - DNA, 15 bp, Homo sapiens
atggtggtacgtgcc

SEQ ID NO: 575020 - DNA, 15 bp, Homo sapiens
catggtggtacgtgc

SEQ ID NO: 575021 - DNA, 15 bp, Homo sapiens
gcatggtggtacgtg

SEQ ID NO: 575022 - DNA, 15 bp, Homo sapiens
ggcatggtggtacgt

SEQ ID NO: 575023 - DNA, 15 bp, Homo sapiens
gggcatggtggtacg

SEQ ID NO: 575024 - DNA, 15 bp, Homo sapiens
tgggcatggtggtac

SEQ ID NO: 575025 - DNA, 15 bp, Homo sapiens
ttgggcatggtggta

SEQ ID NO: 575026 - DNA, 15 bp, Homo sapiens
gttgggcatggtggt

SEQ ID NO: 575027 - DNA, 15 bp, Homo sapiens
agttgggcatggtgg

SEQ ID NO: 575028 - DNA, 15 bp, Homo sapiens
tagttgggcatggtg

SEQ ID NO: 575029 - DNA, 15 bp, Homo sapiens
ttagttgggcatggt

SEQ ID NO: 575030 - DNA, 15 bp, Homo sapiens
attagttgggcatgg

SEQ ID NO: 575031 - DNA, 15 bp, Homo sapiens
aattagttgggcatg

SEQ ID NO: 575032 - DNA, 15 bp, Homo sapiens
aaattagttgggcat

SEQ ID NO: 575033 - DNA, 15 bp, Homo sapiens
aaaattagttgggca

SEQ ID NO: 575034 - DNA, 15 bp, Homo sapiens
taaaattagttgggc

SEQ ID NO: 575035 - DNA, 15 bp, Homo sapiens
ataaaattagttggg

SEQ ID NO: 575036 - DNA, 15 bp, Homo sapiens
aataaaattagttgg

SEQ ID NO: 575037 - DNA, 15 bp, Homo sapiens
aaataaaattagttg

SEQ ID NO: 575038 - DNA, 15 bp, Homo sapiens
aaaataaaattagtt

SEQ ID NO: 575039 - DNA, 15 bp, Homo sapiens
taaaataaaattagt

SEQ ID NO: 575040 - DNA, 15 bp, Homo sapiens
ataaaataaaattag

SEQ ID NO: 575041 - DNA, 15 bp, Homo sapiens
aataaaataaaatta

SEQ ID NO: 575042 - DNA, 15 bp, Homo sapiens
caataaaataaaatt

SEQ ID NO: 575043 - DNA, 15 bp, Homo sapiens
acaataaaataaaat

SEQ ID NO: 575044 - DNA, 15 bp, Homo sapiens
tacaataaaataaaa

SEQ ID NO: 575045 - DNA, 15 bp, Homo sapiens
ctacaataaaataaa

SEQ ID NO: 575046 - DNA, 15 bp, Homo sapiens
tctacaataaaataa

SEQ ID NO: 575047 - DNA, 15 bp, Homo sapiens
ctctacaataaaata

SEQ ID NO: 575048 - DNA, 15 bp, Homo sapiens
tctctacaataaaat

SEQ ID NO: 575049 - DNA, 15 bp, Homo sapiens
gtctctacaataaaa

SEQ ID NO: 575050 - DNA, 15 bp, Homo sapiens
tgtctctacaataaa

SEQ ID NO: 575051 - DNA, 15 bp, Homo sapiens
atgtctctacaataa

SEQ ID NO: 575052 - DNA, 15 bp, Homo sapiens
catgtctctacaata

SEQ ID NO: 575053 - DNA, 15 bp, Homo sapiens
ccatgtctctacaat

SEQ ID NO: 575054 - DNA, 15 bp, Homo sapiens
cccatgtctctacaa

SEQ ID NO: 575055 - DNA, 15 bp, Homo sapiens
acccatgtctctaca

SEQ ID NO: 575056 - DNA, 15 bp, Homo sapiens
gacccatgtctctac

SEQ ID NO: 575057 - DNA, 15 bp, Homo sapiens
agacccatgtctcta

SEQ ID NO: 575058 - DNA, 15 bp, Homo sapiens
aagacccatgtctct

SEQ ID NO: 575059 - DNA, 15 bp, Homo sapiens
gaagacccatgtctc

SEQ ID NO: 575060 - DNA, 15 bp, Homo sapiens
tgaagacccatgtct

SEQ ID NO: 575061 - DNA, 15 bp, Homo sapiens
ttgaagacccatgtc

SEQ ID NO: 575062 - DNA, 15 bp, Homo sapiens
gttgaagacccatgt

SEQ ID NO: 575063 - DNA, 15 bp, Homo sapiens
agttgaagacccatg

SEQ ID NO: 575064 - DNA, 15 bp, Homo sapiens
gagttgaagacccat

SEQ ID NO: 575065 - DNA, 15 bp, Homo sapiens
ggagttgaagaccca

SEQ ID NO: 575066 - DNA, 15 bp, Homo sapiens
aggagttgaagaccc

SEQ ID NO: 575067 - DNA, 15 bp, Homo sapiens
caggagttgaagacc

SEQ ID NO: 575068 - DNA, 15 bp, Homo sapiens
ccaggagttgaagac

SEQ ID NO: 575069 - DNA, 15 bp, Homo sapiens
gccaggagttgaaga

SEQ ID NO: 575070 - DNA, 15 bp, Homo sapiens
ggccaggagttgaag

SEQ ID NO: 575071 - DNA, 15 bp, Homo sapiens
aggccaggagttgaa

SEQ ID NO: 575072 - DNA, 15 bp, Homo sapiens
gaggccaggagttga

SEQ ID NO: 575073 - DNA, 15 bp, Homo sapiens
tgaggccaggagttg

SEQ ID NO: 575074 - DNA, 15 bp, Homo sapiens
ttgaggccaggagtt

SEQ ID NO: 575075 - DNA, 15 bp, Homo sapiens
cttgaggccaggagt

SEQ ID NO: 575076 - DNA, 15 bp, Homo sapiens
acttgaggccaggag

SEQ ID NO: 575077 - DNA, 15 bp, Homo sapiens
cacttgaggccagga

SEQ ID NO: 575078 - DNA, 15 bp, Homo sapiens
tcacttgaggccagg

SEQ ID NO: 575079 - DNA, 15 bp, Homo sapiens
atcacttgaggccag

SEQ ID NO: 575080 - DNA, 15 bp, Homo sapiens
gatcacttgaggcca

SEQ ID NO: 575081 - DNA, 15 bp, Homo sapiens
ggatcacttgaggcc

SEQ ID NO: 575082 - DNA, 15 bp, Homo sapiens
gggatcacttgaggc

SEQ ID NO: 575083 - DNA, 15 bp, Homo sapiens
ggggatcacttgagg

SEQ ID NO: 575084 - DNA, 15 bp, Homo sapiens
gggggatcacttgag

SEQ ID NO: 575085 - DNA, 15 bp, Homo sapiens
ggggggatcacttga

SEQ ID NO: 575086 - DNA, 15 bp, Homo sapiens
tggggggatcacttg

SEQ ID NO: 575087 - DNA, 15 bp, Homo sapiens
gtggggggatcactt

SEQ ID NO: 575088 - DNA, 15 bp, Homo sapiens
ggtggggggatcact

SEQ ID NO: 575089 - DNA, 15 bp, Homo sapiens
aggtggggggatcac

SEQ ID NO: 575090 - DNA, 15 bp, Homo sapiens
gaggtggggggatca

SEQ ID NO: 575091 - DNA, 15 bp, Homo sapiens
tgaggtggggggatc

SEQ ID NO: 575092 - DNA, 15 bp, Homo sapiens
ttgaggtggggggat

SEQ ID NO: 575093 - DNA, 15 bp, Homo sapiens
gttgaggtgggggga

SEQ ID NO: 575094 - DNA, 15 bp, Homo sapiens
ggttgaggtgggggg

SEQ ID NO: 575095 - DNA, 15 bp, Homo sapiens
aggttgaggtggggg

SEQ ID NO: 575096 - DNA, 15 bp, Homo sapiens
gaggttgaggtgggg

SEQ ID NO: 575097 - DNA, 15 bp, Homo sapiens
ggaggttgaggtggg

SEQ ID NO: 575098 - DNA, 15 bp, Homo sapiens
gggaggttgaggtgg

SEQ ID NO: 575099 - DNA, 15 bp, Homo sapiens
tgggaggttgaggtg

SEQ ID NO: 575100 - DNA, 15 bp, Homo sapiens
ttgggaggttgaggt

SEQ ID NO: 575101 - DNA, 15 bp, Homo sapiens
tttgggaggttgagg

SEQ ID NO: 575102 - DNA, 15 bp, Homo sapiens
ctttgggaggttgag

SEQ ID NO: 575103 - DNA, 15 bp, Homo sapiens
gctttgggaggttga

SEQ ID NO: 575104 - DNA, 15 bp, Homo sapiens
ggctttgggaggttg

SEQ ID NO: 575105 - DNA, 15 bp, Homo sapiens
gggctttgggaggtt

SEQ ID NO: 575106 - DNA, 15 bp, Homo sapiens
agggctttgggaggt

SEQ ID NO: 575107 - DNA, 15 bp, Homo sapiens
cagggctttgggagg

SEQ ID NO: 575108 - DNA, 15 bp, Homo sapiens
ccagggctttgggag

SEQ ID NO: 575109 - DNA, 15 bp, Homo sapiens
tccagggctttggga

SEQ ID NO: 575110 - DNA, 15 bp, Homo sapiens
ttccagggctttggg

SEQ ID NO: 575111 - DNA, 15 bp, Homo sapiens
attccagggctttgg

SEQ ID NO: 575112 - DNA, 15 bp, Homo sapiens
aattccagggctttg

SEQ ID NO: 575113 - DNA, 15 bp, Homo sapiens
taattccagggcttt

SEQ ID NO: 575114 - DNA, 15 bp, Homo sapiens
gtaattccagggctt

SEQ ID NO: 575115 - DNA, 15 bp, Homo sapiens
tgtaattccagggct

SEQ ID NO: 575116 - DNA, 15 bp, Homo sapiens
ttgtaattccagggc

SEQ ID NO: 575117 - DNA, 15 bp, Homo sapiens
cttgtaattccaggg

SEQ ID NO: 575118 - DNA, 15 bp, Homo sapiens
gcttgtaattccagg

SEQ ID NO: 575119 - DNA, 15 bp, Homo sapiens
tgcttgtaattccag

SEQ ID NO: 575120 - DNA, 15 bp, Homo sapiens
ctgcttgtaattcca

SEQ ID NO: 575121 - DNA, 15 bp, Homo sapiens
cctgcttgtaattcc

SEQ ID NO: 575122 - DNA, 15 bp, Homo sapiens
tcctgcttgtaattc

SEQ ID NO: 575123 - DNA, 15 bp, Homo sapiens
ctcctgcttgtaatt

SEQ ID NO: 575124 - DNA, 15 bp, Homo sapiens
gctcctgcttgtaat

SEQ ID NO: 575125 - DNA, 15 bp, Homo sapiens
ggctcctgcttgtaa

SEQ ID NO: 575126 - DNA, 15 bp, Homo sapiens
tggctcctgcttgta

SEQ ID NO: 575127 - DNA, 15 bp, Homo sapiens
gtggctcctgcttgt

SEQ ID NO: 575128 - DNA, 15 bp, Homo sapiens
ggtggctcctgcttg

SEQ ID NO: 575129 - DNA, 15 bp, Homo sapiens
tggtggctcctgctt

SEQ ID NO: 575130 - DNA, 15 bp, Homo sapiens
atggtggctcctgct

SEQ ID NO: 575131 - DNA, 15 bp, Homo sapiens
catggtggctcctgc

SEQ ID NO: 575132 - DNA, 15 bp, Homo sapiens
gcatggtggctcctg

SEQ ID NO: 575133 - DNA, 15 bp, Homo sapiens
ggcatggtggctcct

SEQ ID NO: 575134 - DNA, 15 bp, Homo sapiens
gggcatggtggctcc

SEQ ID NO: 575135 - DNA, 15 bp, Homo sapiens
tgggcatggtggctc

SEQ ID NO: 575136 - DNA, 15 bp, Homo sapiens
ctgggcatggtggct

SEQ ID NO: 575137 - DNA, 15 bp, Homo sapiens
gctgggcatggtggc

SEQ ID NO: 575138 - DNA, 15 bp, Homo sapiens
agctgggcatggtgg

SEQ ID NO: 575139 - DNA, 15 bp, Homo sapiens
cagctgggcatggtg

SEQ ID NO: 575140 - DNA, 15 bp, Homo sapiens
acagctgggcatggt

SEQ ID NO: 575141 - DNA, 15 bp, Homo sapiens
cacagctgggcatgg

SEQ ID NO: 575142 - DNA, 15 bp, Homo sapiens
acacagctgggcatg

SEQ ID NO: 575143 - DNA, 15 bp, Homo sapiens
aacacagctgggcat

SEQ ID NO: 575144 - DNA, 15 bp, Homo sapiens
gaacacagctgggca

SEQ ID NO: 575145 - DNA, 15 bp, Homo sapiens
agaacacagctgggc

SEQ ID NO: 575146 - DNA, 15 bp, Homo sapiens
cagaacacagctggg

SEQ ID NO: 575147 - DNA, 15 bp, Homo sapiens
gcagaacacagctgg

SEQ ID NO: 575148 - DNA, 15 bp, Homo sapiens
agcagaacacagctg

SEQ ID NO: 575149 - DNA, 15 bp, Homo sapiens
aagcagaacacagct

SEQ ID NO: 575150 - DNA, 15 bp, Homo sapiens
aaagcagaacacagc

SEQ ID NO: 575151 - DNA, 15 bp, Homo sapiens
taaagcagaacacag

SEQ ID NO: 575152 - DNA, 15 bp, Homo sapiens
ttaaagcagaacaca

SEQ ID NO: 575153 - DNA, 15 bp, Homo sapiens
tttaaagcagaacac

SEQ ID NO: 575154 - DNA, 15 bp, Homo sapiens
ttttaaagcagaaca

SEQ ID NO: 575155 - DNA, 15 bp, Homo sapiens
tttttaaagcagaac

SEQ ID NO: 575156 - DNA, 15 bp, Homo sapiens
ctttttaaagcagaa

SEQ ID NO: 575157 - DNA, 15 bp, Homo sapiens
cctttttaaagcaga

SEQ ID NO: 575158 - DNA, 15 bp, Homo sapiens
tcctttttaaagcag

SEQ ID NO: 575159 - DNA, 15 bp, Homo sapiens
ctcctttttaaagca

SEQ ID NO: 575160 - DNA, 15 bp, Homo sapiens
tctcctttttaaagc

SEQ ID NO: 575161 - DNA, 15 bp, Homo sapiens
ctctcctttttaaag

SEQ ID NO: 575162 - DNA, 15 bp, Homo sapiens
actctcctttttaaa

SEQ ID NO: 575163 - DNA, 15 bp, Homo sapiens
aactctcctttttaa

SEQ ID NO: 575164 - DNA, 15 bp, Homo sapiens
caactctccttttta

SEQ ID NO: 575165 - DNA, 15 bp, Homo sapiens
acaactctccttttt

SEQ ID NO: 575166 - DNA, 15 bp, Homo sapiens
cacaactctcctttt

SEQ ID NO: 575167 - DNA, 15 bp, Homo sapiens
ccacaactctccttt

SEQ ID NO: 575168 - DNA, 15 bp, Homo sapiens
cccacaactctcctt

SEQ ID NO: 575169 - DNA, 15 bp, Homo sapiens
tcccacaactctcct

SEQ ID NO: 575170 - DNA, 15 bp, Homo sapiens
ttcccacaactctcc

SEQ ID NO: 575171 - DNA, 15 bp, Homo sapiens
cttcccacaactctc

SEQ ID NO: 575172 - DNA, 15 bp, Homo sapiens
acttcccacaactct

SEQ ID NO: 575173 - DNA, 15 bp, Homo sapiens
aacttcccacaactc

SEQ ID NO: 575174 - DNA, 15 bp, Homo sapiens
gaacttcccacaact

SEQ ID NO: 575175 - DNA, 15 bp, Homo sapiens
tgaacttcccacaac

SEQ ID NO: 575176 - DNA, 15 bp, Homo sapiens
ttgaacttcccacaa

SEQ ID NO: 575177 - DNA, 15 bp, Homo sapiens
attgaacttcccaca

SEQ ID NO: 575178 - DNA, 15 bp, Homo sapiens
gattgaacttcccac

SEQ ID NO: 575179 - DNA, 15 bp, Homo sapiens
ggattgaacttccca

SEQ ID NO: 575180 - DNA, 15 bp, Homo sapiens
tggattgaacttccc

SEQ ID NO: 575181 - DNA, 15 bp, Homo sapiens
ttggattgaacttcc

SEQ ID NO: 575182 - DNA, 15 bp, Homo sapiens
tttggattgaacttc

SEQ ID NO: 575183 - DNA, 15 bp, Homo sapiens
ctttggattgaactt

SEQ ID NO: 575184 - DNA, 15 bp, Homo sapiens
tctttggattgaact

SEQ ID NO: 575185 - DNA, 15 bp, Homo sapiens
gtctttggattgaac

SEQ ID NO: 575186 - DNA, 15 bp, Homo sapiens
tgtctttggattgaa

SEQ ID NO: 575187 - DNA, 15 bp, Homo sapiens
ctgtctttggattga

SEQ ID NO: 575188 - DNA, 15 bp, Homo sapiens
tctgtctttggattg

SEQ ID NO: 575189 - DNA, 15 bp, Homo sapiens
ttctgtctttggatt

SEQ ID NO: 575190 - DNA, 15 bp, Homo sapiens
cttctgtctttggat

SEQ ID NO: 575191 - DNA, 15 bp, Homo sapiens
gcttctgtctttgga

SEQ ID NO: 575192 - DNA, 15 bp, Homo sapiens
tgcttctgtctttgg

SEQ ID NO: 575193 - DNA, 15 bp, Homo sapiens
gtgcttctgtctttg

SEQ ID NO: 575194 - DNA, 15 bp, Homo sapiens
agtgcttctgtcttt

SEQ ID NO: 575195 - DNA, 15 bp, Homo sapiens
tagtgcttctgtctt

SEQ ID NO: 575196 - DNA, 15 bp, Homo sapiens
gtagtgcttctgtct

SEQ ID NO: 575197 - DNA, 15 bp, Homo sapiens
tgtagtgcttctgtc

SEQ ID NO: 575198 - DNA, 15 bp, Homo sapiens
ttgtagtgcttctgt

SEQ ID NO: 575199 - DNA, 15 bp, Homo sapiens
gttgtagtgcttctg

SEQ ID NO: 575200 - DNA, 15 bp, Homo sapiens
tgttgtagtgcttct

SEQ ID NO: 575201 - DNA, 15 bp, Homo sapiens
ttgttgtagtgcttc

SEQ ID NO: 575202 - DNA, 15 bp, Homo sapiens
attgttgtagtgctt

SEQ ID NO: 575203 - DNA, 15 bp, Homo sapiens
tattgttgtagtgct

SEQ ID NO: 575204 - DNA, 15 bp, Homo sapiens
ttattgttgtagtgc

SEQ ID NO: 575205 - DNA, 15 bp, Homo sapiens
tttattgttgtagtg

SEQ ID NO: 575206 - DNA, 15 bp, Homo sapiens
atttattgttgtagt

SEQ ID NO: 575207 - DNA, 15 bp, Homo sapiens
aatttattgttgtag

SEQ ID NO: 575208 - DNA, 15 bp, Homo sapiens
gaatttattgttgta

SEQ ID NO: 575209 - DNA, 15 bp, Homo sapiens
ggaatttattgttgt

SEQ ID NO: 575210 - DNA, 15 bp, Homo sapiens
gggaatttattgttg

SEQ ID NO: 575211 - DNA, 15 bp, Homo sapiens
ggggaatttattgtt

SEQ ID NO: 575212 - DNA, 15 bp, Homo sapiens
tggggaatttattgt

SEQ ID NO: 575213 - DNA, 15 bp, Homo sapiens
ttggggaatttattg

SEQ ID NO: 575214 - DNA, 15 bp, Homo sapiens
tttggggaatttatt

SEQ ID NO: 575215 - DNA, 15 bp, Homo sapiens
gtttggggaatttat

SEQ ID NO: 575216 - DNA, 15 bp, Homo sapiens
agtttggggaattta

SEQ ID NO: 575217 - DNA, 15 bp, Homo sapiens
tagtttggggaattt

SEQ ID NO: 575218 - DNA, 15 bp, Homo sapiens
gtagtttggggaatt

SEQ ID NO: 575219 - DNA, 15 bp, Homo sapiens
ggtagtttggggaat

SEQ ID NO: 575220 - DNA, 15 bp, Homo sapiens
aggtagtttggggaa

SEQ ID NO: 575221 - DNA, 15 bp, Homo sapiens
aaggtagtttgggga

SEQ ID NO: 575222 - DNA, 15 bp, Homo sapiens
aaaggtagtttgggg

SEQ ID NO: 575223 - DNA, 15 bp, Homo sapiens
aaaaggtagtttggg

SEQ ID NO: 575224 - DNA, 15 bp, Homo sapiens
aaaaaggtagtttgg

SEQ ID NO: 575225 - DNA, 15 bp, Homo sapiens
gaaaaaggtagtttg

SEQ ID NO: 575226 - DNA, 15 bp, Homo sapiens
agaaaaaggtagttt

SEQ ID NO: 575227 - DNA, 15 bp, Homo sapiens
gagaaaaaggtagtt

SEQ ID NO: 575228 - DNA, 15 bp, Homo sapiens
ggagaaaaaggtagt

SEQ ID NO: 575229 - DNA, 15 bp, Homo sapiens
tggagaaaaaggtag

SEQ ID NO: 575230 - DNA, 15 bp, Homo sapiens
ctggagaaaaaggta

SEQ ID NO: 575231 - DNA, 15 bp, Homo sapiens
tctggagaaaaaggt

SEQ ID NO: 575232 - DNA, 15 bp, Homo sapiens
atctggagaaaaagg

SEQ ID NO: 575233 - DNA, 15 bp, Homo sapiens
tatctggagaaaaag

SEQ ID NO: 575234 - DNA, 15 bp, Homo sapiens
ctatctggagaaaaa

SEQ ID NO: 575235 - DNA, 15 bp, Homo sapiens
gctatctggagaaaa

SEQ ID NO: 575236 - DNA, 15 bp, Homo sapiens
agctatctggagaaa

SEQ ID NO: 575237 - DNA, 15 bp, Homo sapiens
cagctatctggagaa

SEQ ID NO: 575238 - DNA, 15 bp, Homo sapiens
ccagctatctggaga

SEQ ID NO: 575239 - DNA, 15 bp, Homo sapiens
gccagctatctggag

SEQ ID NO: 575240 - DNA, 15 bp, Homo sapiens
tgccagctatctgga

SEQ ID NO: 575241 - DNA, 15 bp, Homo sapiens
ttgccagctatctgg

SEQ ID NO: 575242 - DNA, 15 bp, Homo sapiens
gttgccagctatctg

SEQ ID NO: 575243 - DNA, 15 bp, Homo sapiens
ggttgccagctatct

SEQ ID NO: 575244 - DNA, 15 bp, Homo sapiens
gggttgccagctatc

SEQ ID NO: 575245 - DNA, 15 bp, Homo sapiens
tgggttgccagctat

SEQ ID NO: 575246 - DNA, 15 bp, Homo sapiens
atgggttgccagcta

SEQ ID NO: 575247 - DNA, 15 bp, Homo sapiens
gatgggttgccagct

SEQ ID NO: 575248 - DNA, 15 bp, Homo sapiens
ggatgggttgccagc

SEQ ID NO: 575249 - DNA, 15 bp, Homo sapiens
tggatgggttgccag

SEQ ID NO: 575250 - DNA, 15 bp, Homo sapiens
ttggatgggttgcca

SEQ ID NO: 575251 - DNA, 15 bp, Homo sapiens
cttggatgggttgcc

SEQ ID NO: 575252 - DNA, 15 bp, Homo sapiens
acttggatgggttgc

SEQ ID NO: 575253 - DNA, 15 bp, Homo sapiens
tacttggatgggttg

SEQ ID NO: 575254 - DNA, 15 bp, Homo sapiens
ctacttggatgggtt

SEQ ID NO: 575255 - DNA, 15 bp, Homo sapiens
tctacttggatgggt

SEQ ID NO: 575256 - DNA, 15 bp, Homo sapiens
atctacttggatggg

SEQ ID NO: 575257 - DNA, 15 bp, Homo sapiens
aatctacttggatgg

SEQ ID NO: 575258 - DNA, 15 bp, Homo sapiens
taatctacttggatg

SEQ ID NO: 575259 - DNA, 15 bp, Homo sapiens
ctaatctacttggat

SEQ ID NO: 575260 - DNA, 15 bp, Homo sapiens
gctaatctacttgga

SEQ ID NO: 575261 - DNA, 15 bp, Homo sapiens
agctaatctacttgg

SEQ ID NO: 575262 - DNA, 15 bp, Homo sapiens
cagctaatctacttg

SEQ ID NO: 575263 - DNA, 15 bp, Homo sapiens
ccagctaatctactt

SEQ ID NO: 575264 - DNA, 15 bp, Homo sapiens
tccagctaatctact

SEQ ID NO: 575265 - DNA, 15 bp, Homo sapiens
ctccagctaatctac

SEQ ID NO: 575266 - DNA, 15 bp, Homo sapiens
gctccagctaatcta

SEQ ID NO: 575267 - DNA, 15 bp, Homo sapiens
agctccagctaatct

SEQ ID NO: 575268 - DNA, 15 bp, Homo sapiens
aagctccagctaatc

SEQ ID NO: 575269 - DNA, 15 bp, Homo sapiens
caagctccagctaat

SEQ ID NO: 575270 - DNA, 15 bp, Homo sapiens
ccaagctccagctaa

SEQ ID NO: 575271 - DNA, 15 bp, Homo sapiens
gccaagctccagcta

SEQ ID NO: 575272 - DNA, 15 bp, Homo sapiens
ggccaagctccagct

SEQ ID NO: 575273 - DNA, 15 bp, Homo sapiens
tggccaagctccagc

SEQ ID NO: 575274 - DNA, 15 bp, Homo sapiens
ctggccaagctccag

SEQ ID NO: 575275 - DNA, 15 bp, Homo sapiens
tctggccaagctcca

SEQ ID NO: 575276 - DNA, 15 bp, Homo sapiens
atctggccaagctcc

SEQ ID NO: 575277 - DNA, 15 bp, Homo sapiens
aatctggccaagctc

SEQ ID NO: 575278 - DNA, 15 bp, Homo sapiens
gaatctggccaagct

SEQ ID NO: 575279 - DNA, 15 bp, Homo sapiens
agaatctggccaagc

SEQ ID NO: 575280 - DNA, 15 bp, Homo sapiens
gagaatctggccaag

SEQ ID NO: 575281 - DNA, 15 bp, Homo sapiens
tgagaatctggccaa

SEQ ID NO: 575282 - DNA, 15 bp, Homo sapiens
ttgagaatctggcca

SEQ ID NO: 575283 - DNA, 15 bp, Homo sapiens
tttgagaatctggcc

SEQ ID NO: 575284 - DNA, 15 bp, Homo sapiens
ctttgagaatctggc

SEQ ID NO: 575285 - DNA, 15 bp, Homo sapiens
cctttgagaatctgg

SEQ ID NO: 575286 - DNA, 15 bp, Homo sapiens
ccctttgagaatctg

SEQ ID NO: 575287 - DNA, 15 bp, Homo sapiens
tccctttgagaatct

SEQ ID NO: 575288 - DNA, 15 bp, Homo sapiens
ttccctttgagaatc

SEQ ID NO: 575289 - DNA, 15 bp, Homo sapiens
tttccctttgagaat

SEQ ID NO: 575290 - DNA, 15 bp, Homo sapiens
ctttccctttgagaa

SEQ ID NO: 575291 - DNA, 15 bp, Homo sapiens
tctttccctttgaga

SEQ ID NO: 575292 - DNA, 15 bp, Homo sapiens
atctttccctttgag

SEQ ID NO: 575293 - DNA, 15 bp, Homo sapiens
tatctttccctttga

SEQ ID NO: 575294 - DNA, 15 bp, Homo sapiens
atatctttccctttg

SEQ ID NO: 575295 - DNA, 15 bp, Homo sapiens
catatctttcccttt

SEQ ID NO: 575296 - DNA, 15 bp, Homo sapiens
tcatatctttccctt

SEQ ID NO: 575297 - DNA, 15 bp, Homo sapiens
atcatatctttccct

SEQ ID NO: 575298 - DNA, 15 bp, Homo sapiens
aatcatatctttccc

SEQ ID NO: 575299 - DNA, 15 bp, Homo sapiens
taatcatatctttcc

SEQ ID NO: 575300 - DNA, 15 bp, Homo sapiens
ttaatcatatctttc

SEQ ID NO: 575301 - DNA, 15 bp, Homo sapiens
attaatcatatcttt

SEQ ID NO: 575302 - DNA, 15 bp, Homo sapiens
aattaatcatatctt

SEQ ID NO: 575303 - DNA, 15 bp, Homo sapiens
aaattaatcatatct

SEQ ID NO: 575304 - DNA, 15 bp, Homo sapiens
caaattaatcatatc

SEQ ID NO: 575305 - DNA, 15 bp, Homo sapiens
ccaaattaatcatat

SEQ ID NO: 575306 - DNA, 15 bp, Homo sapiens
tccaaattaatcata

SEQ ID NO: 575307 - DNA, 15 bp, Homo sapiens
ctccaaattaatcat

SEQ ID NO: 575308 - DNA, 15 bp, Homo sapiens
gctccaaattaatca

SEQ ID NO: 575309 - DNA, 15 bp, Homo sapiens
ggctccaaattaatc

SEQ ID NO: 575310 - DNA, 15 bp, Homo sapiens
aggctccaaattaat

SEQ ID NO: 575311 - DNA, 15 bp, Homo sapiens
gaggctccaaattaa

SEQ ID NO: 575312 - DNA, 15 bp, Homo sapiens
agaggctccaaatta

SEQ ID NO: 575313 - DNA, 15 bp, Homo sapiens
aagaggctccaaatt

SEQ ID NO: 575314 - DNA, 15 bp, Homo sapiens
taagaggctccaaat

SEQ ID NO: 575315 - DNA, 15 bp, Homo sapiens
ataagaggctccaaa

SEQ ID NO: 575316 - DNA, 15 bp, Homo sapiens
tataagaggctccaa

SEQ ID NO: 575317 - DNA, 15 bp, Homo sapiens
ctataagaggctcca

SEQ ID NO: 575318 - DNA, 15 bp, Homo sapiens
gctataagaggctcc

SEQ ID NO: 575319 - DNA, 15 bp, Homo sapiens
agctataagaggctc

SEQ ID NO: 575320 - DNA, 15 bp, Homo sapiens
cagctataagaggct

SEQ ID NO: 575321 - DNA, 15 bp, Homo sapiens
acagctataagaggc

SEQ ID NO: 575322 - DNA, 15 bp, Homo sapiens
aacagctataagagg

SEQ ID NO: 575323 - DNA, 15 bp, Homo sapiens
aaacagctataagag

SEQ ID NO: 575324 - DNA, 15 bp, Homo sapiens
caaacagctataaga

SEQ ID NO: 575325 - DNA, 15 bp, Homo sapiens
gcaaacagctataag

SEQ ID NO: 575326 - DNA, 15 bp, Homo sapiens
tgcaaacagctataa

SEQ ID NO: 575327 - DNA, 15 bp, Homo sapiens
ctgcaaacagctata

SEQ ID NO: 575328 - DNA, 15 bp, Homo sapiens
actgcaaacagctat

SEQ ID NO: 575329 - DNA, 15 bp, Homo sapiens
gactgcaaacagcta

SEQ ID NO: 575330 - DNA, 15 bp, Homo sapiens
ggactgcaaacagct

SEQ ID NO: 575331 - DNA, 15 bp, Homo sapiens
aggactgcaaacagc

SEQ ID NO: 575332 - DNA, 15 bp, Homo sapiens
gaggactgcaaacag

SEQ ID NO: 575333 - DNA, 15 bp, Homo sapiens
tgaggactgcaaaca

SEQ ID NO: 575334 - DNA, 15 bp, Homo sapiens
ctgaggactgcaaac

SEQ ID NO: 575335 - DNA, 15 bp, Homo sapiens
cctgaggactgcaaa

SEQ ID NO: 575336 - DNA, 15 bp, Homo sapiens
acctgaggactgcaa

SEQ ID NO: 575337 - DNA, 15 bp, Homo sapiens
gacctgaggactgca

SEQ ID NO: 575338 - DNA, 15 bp, Homo sapiens
agacctgaggactgc

SEQ ID NO: 575339 - DNA, 15 bp, Homo sapiens
gagacctgaggactg

SEQ ID NO: 575340 - DNA, 15 bp, Homo sapiens
tgagacctgaggact

SEQ ID NO: 575341 - DNA, 15 bp, Homo sapiens
gtgagacctgaggac

SEQ ID NO: 575342 - DNA, 15 bp, Homo sapiens
tgtgagacctgagga

SEQ ID NO: 575343 - DNA, 15 bp, Homo sapiens
atgtgagacctgagg

SEQ ID NO: 575344 - DNA, 15 bp, Homo sapiens
catgtgagacctgag

SEQ ID NO: 575345 - DNA, 15 bp, Homo sapiens
gcatgtgagacctga

SEQ ID NO: 575346 - DNA, 15 bp, Homo sapiens
agcatgtgagacctg

SEQ ID NO: 575347 - DNA, 15 bp, Homo sapiens
gagcatgtgagacct

SEQ ID NO: 575348 - DNA, 15 bp, Homo sapiens
tgagcatgtgagacc

SEQ ID NO: 575349 - DNA, 15 bp, Homo sapiens
ctgagcatgtgagac

SEQ ID NO: 575350 - DNA, 15 bp, Homo sapiens
tctgagcatgtgaga

SEQ ID NO: 575351 - DNA, 15 bp, Homo sapiens
ttctgagcatgtgag

SEQ ID NO: 575352 - DNA, 15 bp, Homo sapiens
attctgagcatgtga

SEQ ID NO: 575353 - DNA, 15 bp, Homo sapiens
cattctgagcatgtg

SEQ ID NO: 575354 - DNA, 15 bp, Homo sapiens
acattctgagcatgt

SEQ ID NO: 575355 - DNA, 15 bp, Homo sapiens
gacattctgagcatg

SEQ ID NO: 575356 - DNA, 15 bp, Homo sapiens
ggacattctgagcat

SEQ ID NO: 575357 - DNA, 15 bp, Homo sapiens
aggacattctgagca

SEQ ID NO: 575358 - DNA, 15 bp, Homo sapiens
aaggacattctgagc

SEQ ID NO: 575359 - DNA, 15 bp, Homo sapiens
taaggacattctgag

SEQ ID NO: 575360 - DNA, 15 bp, Homo sapiens
ttaaggacattctga

SEQ ID NO: 575361 - DNA, 15 bp, Homo sapiens
cttaaggacattctg

SEQ ID NO: 575362 - DNA, 15 bp, Homo sapiens
tcttaaggacattct

SEQ ID NO: 575363 - DNA, 15 bp, Homo sapiens
ttcttaaggacattc

SEQ ID NO: 575364 - DNA, 15 bp, Homo sapiens
cttcttaaggacatt

SEQ ID NO: 575365 - DNA, 15 bp, Homo sapiens
tcttcttaaggacat

SEQ ID NO: 575366 - DNA, 15 bp, Homo sapiens
ttcttcttaaggaca

SEQ ID NO: 575367 - DNA, 15 bp, Homo sapiens
tttcttcttaaggac

SEQ ID NO: 575368 - DNA, 15 bp, Homo sapiens
ctttcttcttaagga

SEQ ID NO: 575369 - DNA, 15 bp, Homo sapiens
tctttcttcttaagg

SEQ ID NO: 575370 - DNA, 15 bp, Homo sapiens
gtctttcttcttaag

SEQ ID NO: 575371 - DNA, 15 bp, Homo sapiens
tgtctttcttcttaa

SEQ ID NO: 575372 - DNA, 15 bp, Homo sapiens
ctgtctttcttctta

SEQ ID NO: 575373 - DNA, 15 bp, Homo sapiens
cctgtctttcttctt

SEQ ID NO: 575374 - DNA, 15 bp, Homo sapiens
ccctgtctttcttct

SEQ ID NO: 575375 - DNA, 15 bp, Homo sapiens
accctgtctttcttc

SEQ ID NO: 575376 - DNA, 15 bp, Homo sapiens
aaccctgtctttctt

SEQ ID NO: 575377 - DNA, 15 bp, Homo sapiens
gaaccctgtctttct

SEQ ID NO: 575378 - DNA, 15 bp, Homo sapiens
tgaaccctgtctttc

SEQ ID NO: 575379 - DNA, 15 bp, Homo sapiens
ctgaaccctgtcttt

SEQ ID NO: 575380 - DNA, 15 bp, Homo sapiens
actgaaccctgtctt

SEQ ID NO: 575381 - DNA, 15 bp, Homo sapiens
tactgaaccctgtct

SEQ ID NO: 575382 - DNA, 15 bp, Homo sapiens
ctactgaaccctgtc

SEQ ID NO: 575383 - DNA, 15 bp, Homo sapiens
cctactgaaccctgt

SEQ ID NO: 575384 - DNA, 15 bp, Homo sapiens
gcctactgaaccctg

SEQ ID NO: 575385 - DNA, 15 bp, Homo sapiens
agcctactgaaccct

SEQ ID NO: 575386 - DNA, 15 bp, Homo sapiens
tagcctactgaaccc

SEQ ID NO: 575387 - DNA, 15 bp, Homo sapiens
gtagcctactgaacc

SEQ ID NO: 575388 - DNA, 15 bp, Homo sapiens
ggtagcctactgaac

SEQ ID NO: 575389 - DNA, 15 bp, Homo sapiens
tggtagcctactgaa

SEQ ID NO: 575390 - DNA, 15 bp, Homo sapiens
ttggtagcctactga

SEQ ID NO: 575391 - DNA, 15 bp, Homo sapiens
tttggtagcctactg

SEQ ID NO: 575392 - DNA, 15 bp, Homo sapiens
ctttggtagcctact

SEQ ID NO: 575393 - DNA, 15 bp, Homo sapiens
gctttggtagcctac

SEQ ID NO: 575394 - DNA, 15 bp, Homo sapiens
tgctttggtagccta

SEQ ID NO: 575395 - DNA, 15 bp, Homo sapiens
gtgctttggtagcct

SEQ ID NO: 575396 - DNA, 15 bp, Homo sapiens
ggtgctttggtagcc

SEQ ID NO: 575397 - DNA, 15 bp, Homo sapiens
cggtgctttggtagc

SEQ ID NO: 575398 - DNA, 15 bp, Homo sapiens
ccggtgctttggtag

SEQ ID NO: 575399 - DNA, 15 bp, Homo sapiens
accggtgctttggta

SEQ ID NO: 575400 - DNA, 15 bp, Homo sapiens
taccggtgctttggt

SEQ ID NO: 575401 - DNA, 15 bp, Homo sapiens
ctaccggtgctttgg

SEQ ID NO: 575402 - DNA, 15 bp, Homo sapiens
cctaccggtgctttg

SEQ ID NO: 575403 - DNA, 15 bp, Homo sapiens
tcctaccggtgcttt

SEQ ID NO: 575404 - DNA, 15 bp, Homo sapiens
atcctaccggtgctt

SEQ ID NO: 575405 - DNA, 15 bp, Homo sapiens
tatcctaccggtgct

SEQ ID NO: 575406 - DNA, 15 bp, Homo sapiens
gtatcctaccggtgc

SEQ ID NO: 575407 - DNA, 15 bp, Homo sapiens
ggtatcctaccggtg

SEQ ID NO: 575408 - DNA, 15 bp, Homo sapiens
tggtatcctaccggt

SEQ ID NO: 575409 - DNA, 15 bp, Homo sapiens
ttggtatcctaccgg

SEQ ID NO: 575410 - DNA, 15 bp, Homo sapiens
tttggtatcctaccg

SEQ ID NO: 575411 - DNA, 15 bp, Homo sapiens
ttttggtatcctacc

SEQ ID NO: 575412 - DNA, 15 bp, Homo sapiens
cttttggtatcctac

SEQ ID NO: 575413 - DNA, 15 bp, Homo sapiens
tcttttggtatccta

SEQ ID NO: 575414 - DNA, 15 bp, Homo sapiens
ctcttttggtatcct

SEQ ID NO: 575415 - DNA, 15 bp, Homo sapiens
actcttttggtatcc

SEQ ID NO: 575416 - DNA, 15 bp, Homo sapiens
aactcttttggtatc

SEQ ID NO: 575417 - DNA, 15 bp, Homo sapiens
taactcttttggtat

SEQ ID NO: 575418 - DNA, 15 bp, Homo sapiens
gtaactcttttggta

SEQ ID NO: 575419 - DNA, 15 bp, Homo sapiens
tgtaactcttttggt

SEQ ID NO: 575420 - DNA, 15 bp, Homo sapiens
ttgtaactcttttgg

SEQ ID NO: 575421 - DNA, 15 bp, Homo sapiens
tttgtaactcttttg

SEQ ID NO: 575422 - DNA, 15 bp, Homo sapiens
ttttgtaactctttt

SEQ ID NO: 575423 - DNA, 15 bp, Homo sapiens
tttttgtaactcttt

SEQ ID NO: 575424 - DNA, 15 bp, Homo sapiens
gtttttgtaactctt

SEQ ID NO: 575425 - DNA, 15 bp, Homo sapiens
ggtttttgtaactct

SEQ ID NO: 575426 - DNA, 15 bp, Homo sapiens
gggtttttgtaactc

SEQ ID NO: 575427 - DNA, 15 bp, Homo sapiens
ggggtttttgtaact

SEQ ID NO: 575428 - DNA, 15 bp, Homo sapiens
tggggtttttgtaac

SEQ ID NO: 575429 - DNA, 15 bp, Homo sapiens
ttggggtttttgtaa

SEQ ID NO: 575430 - DNA, 15 bp, Homo sapiens
attggggtttttgta

SEQ ID NO: 575431 - DNA, 15 bp, Homo sapiens
cattggggtttttgt

SEQ ID NO: 575432 - DNA, 15 bp, Homo sapiens
tcattggggtttttg

SEQ ID NO: 575433 - DNA, 15 bp, Homo sapiens
ttcattggggttttt

SEQ ID NO: 575434 - DNA, 15 bp, Homo sapiens
tttcattggggtttt

SEQ ID NO: 575435 - DNA, 15 bp, Homo sapiens
ttttcattggggttt

SEQ ID NO: 575436 - DNA, 15 bp, Homo sapiens
tttttcattggggtt

SEQ ID NO: 575437 - DNA, 15 bp, Homo sapiens
ttttttcattggggt

SEQ ID NO: 575438 - DNA, 15 bp, Homo sapiens
tttttttcattgggg

SEQ ID NO: 575439 - DNA, 15 bp, Homo sapiens
gtttttttcattggg

SEQ ID NO: 575440 - DNA, 15 bp, Homo sapiens
ggtttttttcattgg

SEQ ID NO: 575441 - DNA, 15 bp, Homo sapiens
aggtttttttcattg

SEQ ID NO: 575442 - DNA, 15 bp, Homo sapiens
taggtttttttcatt

SEQ ID NO: 575443 - DNA, 15 bp, Homo sapiens
ctaggtttttttcat

SEQ ID NO: 575444 - DNA, 15 bp, Homo sapiens
cctaggtttttttca

SEQ ID NO: 575445 - DNA, 15 bp, Homo sapiens
tcctaggtttttttc

SEQ ID NO: 575446 - DNA, 15 bp, Homo sapiens
ttcctaggttttttt

SEQ ID NO: 575447 - DNA, 15 bp, Homo sapiens
cttcctaggtttttt

SEQ ID NO: 575448 - DNA, 15 bp, Homo sapiens
acttcctaggttttt

SEQ ID NO: 575449 - DNA, 15 bp, Homo sapiens
tacttcctaggtttt

SEQ ID NO: 575450 - DNA, 15 bp, Homo sapiens
atacttcctaggttt

SEQ ID NO: 575451 - DNA, 15 bp, Homo sapiens
tatacttcctaggtt

SEQ ID NO: 575452 - DNA, 15 bp, Homo sapiens
ttatacttcctaggt

SEQ ID NO: 575453 - DNA, 15 bp, Homo sapiens
tttatacttcctagg

SEQ ID NO: 575454 - DNA, 15 bp, Homo sapiens
gtttatacttcctag

SEQ ID NO: 575455 - DNA, 15 bp, Homo sapiens
agtttatacttccta

SEQ ID NO: 575456 - DNA, 15 bp, Homo sapiens
cagtttatacttcct

SEQ ID NO: 575457 - DNA, 15 bp, Homo sapiens
tcagtttatacttcc

SEQ ID NO: 575458 - DNA, 15 bp, Homo sapiens
ttcagtttatacttc

SEQ ID NO: 575459 - DNA, 15 bp, Homo sapiens
cttcagtttatactt

SEQ ID NO: 575460 - DNA, 15 bp, Homo sapiens
gcttcagtttatact

SEQ ID NO: 575461 - DNA, 15 bp, Homo sapiens
tgcttcagtttatac

SEQ ID NO: 575462 - DNA, 15 bp, Homo sapiens
atgcttcagtttata

SEQ ID NO: 575463 - DNA, 15 bp, Homo sapiens
aatgcttcagtttat

SEQ ID NO: 575464 - DNA, 15 bp, Homo sapiens
taatgcttcagttta

SEQ ID NO: 575465 - DNA, 15 bp, Homo sapiens
ctaatgcttcagttt

SEQ ID NO: 575466 - DNA, 15 bp, Homo sapiens
tctaatgcttcagtt

SEQ ID NO: 575467 - DNA, 15 bp, Homo sapiens
gtctaatgcttcagt

SEQ ID NO: 575468 - DNA, 15 bp, Homo sapiens
tgtctaatgcttcag

SEQ ID NO: 575469 - DNA, 15 bp, Homo sapiens
atgtctaatgcttca

SEQ ID NO: 575470 - DNA, 15 bp, Homo sapiens
tatgtctaatgcttc

SEQ ID NO: 575471 - DNA, 15 bp, Homo sapiens
ctatgtctaatgctt

SEQ ID NO: 575472 - DNA, 15 bp, Homo sapiens
cctatgtctaatgct

SEQ ID NO: 575473 - DNA, 15 bp, Homo sapiens
acctatgtctaatgc

SEQ ID NO: 575474 - DNA, 15 bp, Homo sapiens
tacctatgtctaatg

SEQ ID NO: 575475 - DNA, 15 bp, Homo sapiens
atacctatgtctaat

SEQ ID NO: 575476 - DNA, 15 bp, Homo sapiens
gatacctatgtctaa

SEQ ID NO: 575477 - DNA, 15 bp, Homo sapiens
agatacctatgtcta

SEQ ID NO: 575478 - DNA, 15 bp, Homo sapiens
gagatacctatgtct

SEQ ID NO: 575479 - DNA, 15 bp, Homo sapiens
ggagatacctatgtc

SEQ ID NO: 575480 - DNA, 15 bp, Homo sapiens
aggagatacctatgt

SEQ ID NO: 575481 - DNA, 15 bp, Homo sapiens
caggagatacctatg

SEQ ID NO: 575482 - DNA, 15 bp, Homo sapiens
acaggagatacctat

SEQ ID NO: 575483 - DNA, 15 bp, Homo sapiens
gacaggagataccta

SEQ ID NO: 575484 - DNA, 15 bp, Homo sapiens
agacaggagatacct

SEQ ID NO: 575485 - DNA, 15 bp, Homo sapiens
gagacaggagatacc

SEQ ID NO: 575486 - DNA, 15 bp, Homo sapiens
agagacaggagatac

SEQ ID NO: 575487 - DNA, 15 bp, Homo sapiens
tagagacaggagata

SEQ ID NO: 575488 - DNA, 15 bp, Homo sapiens
gtagagacaggagat

SEQ ID NO: 575489 - DNA, 15 bp, Homo sapiens
agtagagacaggaga

SEQ ID NO: 575490 - DNA, 15 bp, Homo sapiens
aagtagagacaggag

SEQ ID NO: 575491 - DNA, 15 bp, Homo sapiens
aaagtagagacagga

SEQ ID NO: 575492 - DNA, 15 bp, Homo sapiens
gaaagtagagacagg

SEQ ID NO: 575493 - DNA, 15 bp, Homo sapiens
agaaagtagagacag

SEQ ID NO: 575494 - DNA, 15 bp, Homo sapiens
tagaaagtagagaca

SEQ ID NO: 575495 - DNA, 15 bp, Homo sapiens
ctagaaagtagagac

SEQ ID NO: 575496 - DNA, 15 bp, Homo sapiens
gctagaaagtagaga

SEQ ID NO: 575497 - DNA, 15 bp, Homo sapiens
ggctagaaagtagag

SEQ ID NO: 575498 - DNA, 15 bp, Homo sapiens
aggctagaaagtaga

SEQ ID NO: 575499 - DNA, 15 bp, Homo sapiens
caggctagaaagtag

SEQ ID NO: 575500 - DNA, 15 bp, Homo sapiens
gcaggctagaaagta

SEQ ID NO: 575501 - DNA, 15 bp, Homo sapiens
agcaggctagaaagt

SEQ ID NO: 575502 - DNA, 15 bp, Homo sapiens
aagcaggctagaaag

SEQ ID NO: 575503 - DNA, 15 bp, Homo sapiens
caagcaggctagaaa

SEQ ID NO: 575504 - DNA, 15 bp, Homo sapiens
ccaagcaggctagaa

SEQ ID NO: 575505 - DNA, 15 bp, Homo sapiens
accaagcaggctaga

SEQ ID NO: 575506 - DNA, 15 bp, Homo sapiens
gaccaagcaggctag

SEQ ID NO: 575507 - DNA, 15 bp, Homo sapiens
agaccaagcaggcta

SEQ ID NO: 575508 - DNA, 15 bp, Homo sapiens
gagaccaagcaggct

SEQ ID NO: 575509 - DNA, 15 bp, Homo sapiens
ggagaccaagcaggc

SEQ ID NO: 575510 - DNA, 15 bp, Homo sapiens
gggagaccaagcagg

SEQ ID NO: 575511 - DNA, 15 bp, Homo sapiens
agggagaccaagcag

SEQ ID NO: 575512 - DNA, 15 bp, Homo sapiens
tagggagaccaagca

SEQ ID NO: 575513 - DNA, 15 bp, Homo sapiens
ttagggagaccaagc

SEQ ID NO: 575514 - DNA, 15 bp, Homo sapiens
tttagggagaccaag

SEQ ID NO: 575515 - DNA, 15 bp, Homo sapiens
ctttagggagaccaa

SEQ ID NO: 575516 - DNA, 15 bp, Homo sapiens
actttagggagacca

SEQ ID NO: 575517 - DNA, 15 bp, Homo sapiens
gactttagggagacc

SEQ ID NO: 575518 - DNA, 15 bp, Homo sapiens
ggactttagggagac

SEQ ID NO: 575519 - DNA, 15 bp, Homo sapiens
aggactttagggaga

SEQ ID NO: 575520 - DNA, 15 bp, Homo sapiens
gaggactttagggag

SEQ ID NO: 575521 - DNA, 15 bp, Homo sapiens
agaggactttaggga

SEQ ID NO: 575522 - DNA, 15 bp, Homo sapiens
tagaggactttaggg

SEQ ID NO: 575523 - DNA, 15 bp, Homo sapiens
ttagaggactttagg

SEQ ID NO: 575524 - DNA, 15 bp, Homo sapiens
attagaggactttag

SEQ ID NO: 575525 - DNA, 15 bp, Homo sapiens
cattagaggacttta

SEQ ID NO: 575526 - DNA, 15 bp, Homo sapiens
tcattagaggacttt

SEQ ID NO: 575527 - DNA, 15 bp, Homo sapiens
gtcattagaggactt

SEQ ID NO: 575528 - DNA, 15 bp, Homo sapiens
tgtcattagaggact

SEQ ID NO: 575529 - DNA, 15 bp, Homo sapiens
ttgtcattagaggac

SEQ ID NO: 575530 - DNA, 15 bp, Homo sapiens
cttgtcattagagga

SEQ ID NO: 575531 - DNA, 15 bp, Homo sapiens
gcttgtcattagagg

SEQ ID NO: 575532 - DNA, 15 bp, Homo sapiens
ggcttgtcattagag

SEQ ID NO: 575533 - DNA, 15 bp, Homo sapiens
gggcttgtcattaga

SEQ ID NO: 575534 - DNA, 15 bp, Homo sapiens
agggcttgtcattag

SEQ ID NO: 575535 - DNA, 15 bp, Homo sapiens
cagggcttgtcatta

SEQ ID NO: 575536 - DNA, 15 bp, Homo sapiens
ccagggcttgtcatt

SEQ ID NO: 575537 - DNA, 15 bp, Homo sapiens
gccagggcttgtcat

SEQ ID NO: 575538 - DNA, 15 bp, Homo sapiens
tgccagggcttgtca

SEQ ID NO: 575539 - DNA, 15 bp, Homo sapiens
ctgccagggcttgtc

SEQ ID NO: 575540 - DNA, 15 bp, Homo sapiens
actgccagggcttgt

SEQ ID NO: 575541 - DNA, 15 bp, Homo sapiens
tactgccagggcttg

SEQ ID NO: 575542 - DNA, 15 bp, Homo sapiens
gtactgccagggctt

SEQ ID NO: 575543 - DNA, 15 bp, Homo sapiens
tgtactgccagggct

SEQ ID NO: 575544 - DNA, 15 bp, Homo sapiens
gtgtactgccagggc

SEQ ID NO: 575545 - DNA, 15 bp, Homo sapiens
cgtgtactgccaggg

SEQ ID NO: 575546 - DNA, 15 bp, Homo sapiens
ccgtgtactgccagg

SEQ ID NO: 575547 - DNA, 15 bp, Homo sapiens
cccgtgtactgccag

SEQ ID NO: 575548 - DNA, 15 bp, Homo sapiens
tcccgtgtactgcca

SEQ ID NO: 575549 - DNA, 15 bp, Homo sapiens
ttcccgtgtactgcc

SEQ ID NO: 575550 - DNA, 15 bp, Homo sapiens
cttcccgtgtactgc

SEQ ID NO: 575551 - DNA, 15 bp, Homo sapiens
tcttcccgtgtactg

SEQ ID NO: 575552 - DNA, 15 bp, Homo sapiens
atcttcccgtgtact

SEQ ID NO: 575553 - DNA, 15 bp, Homo sapiens
aatcttcccgtgtac

SEQ ID NO: 575554 - DNA, 15 bp, Homo sapiens
taatcttcccgtgta

SEQ ID NO: 575555 - DNA, 15 bp, Homo sapiens
ctaatcttcccgtgt

SEQ ID NO: 575556 - DNA, 15 bp, Homo sapiens
tctaatcttcccgtg

SEQ ID NO: 575557 - DNA, 15 bp, Homo sapiens
gtctaatcttcccgt

SEQ ID NO: 575558 - DNA, 15 bp, Homo sapiens
tgtctaatcttcccg

SEQ ID NO: 575559 - DNA, 15 bp, Homo sapiens
ttgtctaatcttccc

SEQ ID NO: 575560 - DNA, 15 bp, Homo sapiens
cttgtctaatcttcc

SEQ ID NO: 575561 - DNA, 15 bp, Homo sapiens
acttgtctaatcttc

SEQ ID NO: 575562 - DNA, 15 bp, Homo sapiens
cacttgtctaatctt

SEQ ID NO: 575563 - DNA, 15 bp, Homo sapiens
tcacttgtctaatct

SEQ ID NO: 575564 - DNA, 15 bp, Homo sapiens
ttcacttgtctaatc

SEQ ID NO: 575565 - DNA, 15 bp, Homo sapiens
cttcacttgtctaat

SEQ ID NO: 575566 - DNA, 15 bp, Homo sapiens
tcttcacttgtctaa

SEQ ID NO: 575567 - DNA, 15 bp, Homo sapiens
ttcttcacttgtcta

SEQ ID NO: 575568 - DNA, 15 bp, Homo sapiens
tttcttcacttgtct

SEQ ID NO: 575569 - DNA, 15 bp, Homo sapiens
ttttcttcacttgtc

SEQ ID NO: 575570 - DNA, 15 bp, Homo sapiens
tttttcttcacttgt

SEQ ID NO: 575571 - DNA, 15 bp, Homo sapiens
ctttttcttcacttg

SEQ ID NO: 575572 - DNA, 15 bp, Homo sapiens
tctttttcttcactt

SEQ ID NO: 575573 - DNA, 15 bp, Homo sapiens
ttctttttcttcact

SEQ ID NO: 575574 - DNA, 15 bp, Homo sapiens
gttctttttcttcac

SEQ ID NO: 575575 - DNA, 15 bp, Homo sapiens
agttctttttcttca

SEQ ID NO: 575576 - DNA, 15 bp, Homo sapiens
tagttctttttcttc

SEQ ID NO: 575577 - DNA, 15 bp, Homo sapiens
gtagttctttttctt

SEQ ID NO: 575578 - DNA, 15 bp, Homo sapiens
tgtagttctttttct

SEQ ID NO: 575579 - DNA, 15 bp, Homo sapiens
atgtagttctttttc

SEQ ID NO: 575580 - DNA, 15 bp, Homo sapiens
catgtagttcttttt

SEQ ID NO: 575581 - DNA, 15 bp, Homo sapiens
tcatgtagttctttt

SEQ ID NO: 575582 - DNA, 15 bp, Homo sapiens
ttcatgtagttcttt

SEQ ID NO: 575583 - DNA, 15 bp, Homo sapiens
tttcatgtagttctt

SEQ ID NO: 575584 - DNA, 15 bp, Homo sapiens
ttttcatgtagttct

SEQ ID NO: 575585 - DNA, 15 bp, Homo sapiens
attttcatgtagttc

SEQ ID NO: 575586 - DNA, 15 bp, Homo sapiens
tattttcatgtagtt

SEQ ID NO: 575587 - DNA, 15 bp, Homo sapiens
atattttcatgtagt

SEQ ID NO: 575588 - DNA, 15 bp, Homo sapiens
catattttcatgtag

SEQ ID NO: 575589 - DNA, 15 bp, Homo sapiens
ccatattttcatgta

SEQ ID NO: 575590 - DNA, 15 bp, Homo sapiens
cccatattttcatgt

SEQ ID NO: 575591 - DNA, 15 bp, Homo sapiens
acccatattttcatg

SEQ ID NO: 575592 - DNA, 15 bp, Homo sapiens
gacccatattttcat

SEQ ID NO: 575593 - DNA, 15 bp, Homo sapiens
tgacccatattttca

SEQ ID NO: 575594 - DNA, 15 bp, Homo sapiens
ttgacccatattttc

SEQ ID NO: 575595 - DNA, 15 bp, Homo sapiens
tttgacccatatttt

SEQ ID NO: 575596 - DNA, 15 bp, Homo sapiens
gtttgacccatattt

SEQ ID NO: 575597 - DNA, 15 bp, Homo sapiens
ggtttgacccatatt

SEQ ID NO: 575598 - DNA, 15 bp, Homo sapiens
tggtttgacccatat

SEQ ID NO: 575599 - DNA, 15 bp, Homo sapiens
ttggtttgacccata

SEQ ID NO: 575600 - DNA, 15 bp, Homo sapiens
attggtttgacccat

SEQ ID NO: 575601 - DNA, 15 bp, Homo sapiens
tattggtttgaccca

SEQ ID NO: 575602 - DNA, 15 bp, Homo sapiens
gtattggtttgaccc

SEQ ID NO: 575603 - DNA, 15 bp, Homo sapiens
ggtattggtttgacc

SEQ ID NO: 575604 - DNA, 15 bp, Homo sapiens
cggtattggtttgac

SEQ ID NO: 575605 - DNA, 15 bp, Homo sapiens
tcggtattggtttga

SEQ ID NO: 575606 - DNA, 15 bp, Homo sapiens
gtcggtattggtttg

SEQ ID NO: 575607 - DNA, 15 bp, Homo sapiens
ggtcggtattggttt

SEQ ID NO: 575608 - DNA, 15 bp, Homo sapiens
aggtcggtattggtt

SEQ ID NO: 575609 - DNA, 15 bp, Homo sapiens
aaggtcggtattggt

SEQ ID NO: 575610 - DNA, 15 bp, Homo sapiens
taaggtcggtattgg

SEQ ID NO: 575611 - DNA, 15 bp, Homo sapiens
ttaaggtcggtattg

SEQ ID NO: 575612 - DNA, 15 bp, Homo sapiens
cttaaggtcggtatt

SEQ ID NO: 575613 - DNA, 15 bp, Homo sapiens
ccttaaggtcggtat

SEQ ID NO: 575614 - DNA, 15 bp, Homo sapiens
cccttaaggtcggta

SEQ ID NO: 575615 - DNA, 15 bp, Homo sapiens
gcccttaaggtcggt

SEQ ID NO: 575616 - DNA, 15 bp, Homo sapiens
agcccttaaggtcgg

SEQ ID NO: 575617 - DNA, 15 bp, Homo sapiens
cagcccttaaggtcg

SEQ ID NO: 575618 - DNA, 15 bp, Homo sapiens
tcagcccttaaggtc

SEQ ID NO: 575619 - DNA, 15 bp, Homo sapiens
gtcagcccttaaggt

SEQ ID NO: 575620 - DNA, 15 bp, Homo sapiens
tgtcagcccttaagg

SEQ ID NO: 575621 - DNA, 15 bp, Homo sapiens
gtgtcagcccttaag

SEQ ID NO: 575622 - DNA, 15 bp, Homo sapiens
agtgtcagcccttaa

SEQ ID NO: 575623 - DNA, 15 bp, Homo sapiens
tagtgtcagccctta

SEQ ID NO: 575624 - DNA, 15 bp, Homo sapiens
ttagtgtcagccctt

SEQ ID NO: 575625 - DNA, 15 bp, Homo sapiens
tttagtgtcagccct

SEQ ID NO: 575626 - DNA, 15 bp, Homo sapiens
atttagtgtcagccc

SEQ ID NO: 575627 - DNA, 15 bp, Homo sapiens
aatttagtgtcagcc

SEQ ID NO: 575628 - DNA, 15 bp, Homo sapiens
aaatttagtgtcagc

SEQ ID NO: 575629 - DNA, 15 bp, Homo sapiens
caaatttagtgtcag

SEQ ID NO: 575630 - DNA, 15 bp, Homo sapiens
acaaatttagtgtca

SEQ ID NO: 575631 - DNA, 15 bp, Homo sapiens
cacaaatttagtgtc

SEQ ID NO: 575632 - DNA, 15 bp, Homo sapiens
ccacaaatttagtgt

SEQ ID NO: 575633 - DNA, 15 bp, Homo sapiens
gccacaaatttagtg

SEQ ID NO: 575634 - DNA, 15 bp, Homo sapiens
agccacaaatttagt

SEQ ID NO: 575635 - DNA, 15 bp, Homo sapiens
tagccacaaatttag

SEQ ID NO: 575636 - DNA, 15 bp, Homo sapiens
ttagccacaaattta

SEQ ID NO: 575637 - DNA, 15 bp, Homo sapiens
attagccacaaattt

SEQ ID NO: 575638 - DNA, 15 bp, Homo sapiens
cattagccacaaatt

SEQ ID NO: 575639 - DNA, 15 bp, Homo sapiens
ccattagccacaaat

SEQ ID NO: 575640 - DNA, 15 bp, Homo sapiens
accattagccacaaa

SEQ ID NO: 575641 - DNA, 15 bp, Homo sapiens
gaccattagccacaa

SEQ ID NO: 575642 - DNA, 15 bp, Homo sapiens
tgaccattagccaca

SEQ ID NO: 575643 - DNA, 15 bp, Homo sapiens
atgaccattagccac

SEQ ID NO: 575644 - DNA, 15 bp, Homo sapiens
gatgaccattagcca

SEQ ID NO: 575645 - DNA, 15 bp, Homo sapiens
ggatgaccattagcc

SEQ ID NO: 575646 - DNA, 15 bp, Homo sapiens
aggatgaccattagc

SEQ ID NO: 575647 - DNA, 15 bp, Homo sapiens
caggatgaccattag

SEQ ID NO: 575648 - DNA, 15 bp, Homo sapiens
acaggatgaccatta

SEQ ID NO: 575649 - DNA, 15 bp, Homo sapiens
aacaggatgaccatt

SEQ ID NO: 575650 - DNA, 15 bp, Homo sapiens
caacaggatgaccat

SEQ ID NO: 575651 - DNA, 15 bp, Homo sapiens
gcaacaggatgacca

SEQ ID NO: 575652 - DNA, 15 bp, Homo sapiens
agcaacaggatgacc

SEQ ID NO: 575653 - DNA, 15 bp, Homo sapiens
cagcaacaggatgac

SEQ ID NO: 575654 - DNA, 15 bp, Homo sapiens
tcagcaacaggatga

SEQ ID NO: 575655 - DNA, 15 bp, Homo sapiens
ttcagcaacaggatg

SEQ ID NO: 575656 - DNA, 15 bp, Homo sapiens
tttcagcaacaggat

SEQ ID NO: 575657 - DNA, 15 bp, Homo sapiens
ttttcagcaacagga

SEQ ID NO: 575658 - DNA, 15 bp, Homo sapiens
attttcagcaacagg

SEQ ID NO: 575659 - DNA, 15 bp, Homo sapiens
tattttcagcaacag

SEQ ID NO: 575660 - DNA, 15 bp, Homo sapiens
gtattttcagcaaca

SEQ ID NO: 575661 - DNA, 15 bp, Homo sapiens
agtattttcagcaac

SEQ ID NO: 575662 - DNA, 15 bp, Homo sapiens
aagtattttcagcaa

SEQ ID NO: 575663 - DNA, 15 bp, Homo sapiens
gaagtattttcagca

SEQ ID NO: 575664 - DNA, 15 bp, Homo sapiens
tgaagtattttcagc

SEQ ID NO: 575665 - DNA, 15 bp, Homo sapiens
ttgaagtattttcag

SEQ ID NO: 575666 - DNA, 15 bp, Homo sapiens
cttgaagtattttca

SEQ ID NO: 575667 - DNA, 15 bp, Homo sapiens
tcttgaagtattttc

SEQ ID NO: 575668 - DNA, 15 bp, Homo sapiens
atcttgaagtatttt

SEQ ID NO: 575669 - DNA, 15 bp, Homo sapiens
aatcttgaagtattt

SEQ ID NO: 575670 - DNA, 15 bp, Homo sapiens
gaatcttgaagtatt

SEQ ID NO: 575671 - DNA, 15 bp, Homo sapiens
tgaatcttgaagtat

SEQ ID NO: 575672 - DNA, 15 bp, Homo sapiens
ttgaatcttgaagta

SEQ ID NO: 575673 - DNA, 15 bp, Homo sapiens
cttgaatcttgaagt

SEQ ID NO: 575674 - DNA, 15 bp, Homo sapiens
ccttgaatcttgaag

SEQ ID NO: 575675 - DNA, 15 bp, Homo sapiens
accttgaatcttgaa

SEQ ID NO: 575676 - DNA, 15 bp, Homo sapiens
caccttgaatcttga

SEQ ID NO: 575677 - DNA, 15 bp, Homo sapiens
ccaccttgaatcttg

SEQ ID NO: 575678 - DNA, 15 bp, Homo sapiens
accaccttgaatctt

SEQ ID NO: 575679 - DNA, 15 bp, Homo sapiens
caccaccttgaatct

SEQ ID NO: 575680 - DNA, 15 bp, Homo sapiens
acaccaccttgaatc

SEQ ID NO: 575681 - DNA, 15 bp, Homo sapiens
cacaccaccttgaat

SEQ ID NO: 575682 - DNA, 15 bp, Homo sapiens
ccacaccaccttgaa

SEQ ID NO: 575683 - DNA, 15 bp, Homo sapiens
gccacaccaccttga

SEQ ID NO: 575684 - DNA, 15 bp, Homo sapiens
tgccacaccaccttg

SEQ ID NO: 575685 - DNA, 15 bp, Homo sapiens
ttgccacaccacctt

SEQ ID NO: 575686 - DNA, 15 bp, Homo sapiens
gttgccacaccacct

SEQ ID NO: 575687 - DNA, 15 bp, Homo sapiens
agttgccacaccacc

SEQ ID NO: 575688 - DNA, 15 bp, Homo sapiens
cagttgccacaccac

SEQ ID NO: 575689 - DNA, 15 bp, Homo sapiens
gcagttgccacacca

SEQ ID NO: 575690 - DNA, 15 bp, Homo sapiens
agcagttgccacacc

SEQ ID NO: 575691 - DNA, 15 bp, Homo sapiens
tagcagttgccacac

SEQ ID NO: 575692 - DNA, 15 bp, Homo sapiens
gtagcagttgccaca

SEQ ID NO: 575693 - DNA, 15 bp, Homo sapiens
agtagcagttgccac

SEQ ID NO: 575694 - DNA, 15 bp, Homo sapiens
tagtagcagttgcca

SEQ ID NO: 575695 - DNA, 15 bp, Homo sapiens
gtagtagcagttgcc

SEQ ID NO: 575696 - DNA, 15 bp, Homo sapiens
agtagtagcagttgc

SEQ ID NO: 575697 - DNA, 15 bp, Homo sapiens
cagtagtagcagttg

SEQ ID NO: 575698 - DNA, 15 bp, Homo sapiens
gcagtagtagcagtt

SEQ ID NO: 575699 - DNA, 15 bp, Homo sapiens
agcagtagtagcagt

SEQ ID NO: 575700 - DNA, 15 bp, Homo sapiens
aagcagtagtagcag

SEQ ID NO: 575701 - DNA, 15 bp, Homo sapiens
taagcagtagtagca

SEQ ID NO: 575702 - DNA, 15 bp, Homo sapiens
ctaagcagtagtagc

SEQ ID NO: 575703 - DNA, 15 bp, Homo sapiens
tctaagcagtagtag

SEQ ID NO: 575704 - DNA, 15 bp, Homo sapiens
ctctaagcagtagta

SEQ ID NO: 575705 - DNA, 15 bp, Homo sapiens
cctctaagcagtagt

SEQ ID NO: 575706 - DNA, 15 bp, Homo sapiens
acctctaagcagtag

SEQ ID NO: 575707 - DNA, 15 bp, Homo sapiens
cacctctaagcagta

SEQ ID NO: 575708 - DNA, 15 bp, Homo sapiens
gcacctctaagcagt

SEQ ID NO: 575709 - DNA, 15 bp, Homo sapiens
tgcacctctaagcag

SEQ ID NO: 575710 - DNA, 15 bp, Homo sapiens
ttgcacctctaagca

SEQ ID NO: 575711 - DNA, 15 bp, Homo sapiens
attgcacctctaagc

SEQ ID NO: 575712 - DNA, 15 bp, Homo sapiens
aattgcacctctaag

SEQ ID NO: 575713 - DNA, 15 bp, Homo sapiens
caattgcacctctaa

SEQ ID NO: 575714 - DNA, 15 bp, Homo sapiens
acaattgcacctcta

SEQ ID NO: 575715 - DNA, 15 bp, Homo sapiens
gacaattgcacctct

SEQ ID NO: 575716 - DNA, 15 bp, Homo sapiens
agacaattgcacctc

SEQ ID NO: 575717 - DNA, 15 bp, Homo sapiens
aagacaattgcacct

SEQ ID NO: 575718 - DNA, 15 bp, Homo sapiens
caagacaattgcacc

SEQ ID NO: 575719 - DNA, 15 bp, Homo sapiens
tcaagacaattgcac

SEQ ID NO: 575720 - DNA, 15 bp, Homo sapiens
gtcaagacaattgca

SEQ ID NO: 575721 - DNA, 15 bp, Homo sapiens
agtcaagacaattgc

SEQ ID NO: 575722 - DNA, 15 bp, Homo sapiens
cagtcaagacaattg

SEQ ID NO: 575723 - DNA, 15 bp, Homo sapiens
acagtcaagacaatt

SEQ ID NO: 575724 - DNA, 15 bp, Homo sapiens
aacagtcaagacaat

SEQ ID NO: 575725 - DNA, 15 bp, Homo sapiens
aaacagtcaagacaa

SEQ ID NO: 575726 - DNA, 15 bp, Homo sapiens
aaaacagtcaagaca

SEQ ID NO: 575727 - DNA, 15 bp, Homo sapiens
aaaaacagtcaagac

SEQ ID NO: 575728 - DNA, 15 bp, Homo sapiens
taaaaacagtcaaga

SEQ ID NO: 575729 - DNA, 15 bp, Homo sapiens
ttaaaaacagtcaag

SEQ ID NO: 575730 - DNA, 15 bp, Homo sapiens
attaaaaacagtcaa

SEQ ID NO: 575731 - DNA, 15 bp, Homo sapiens
tattaaaaacagtca

SEQ ID NO: 575732 - DNA, 15 bp, Homo sapiens
ttattaaaaacagtc

SEQ ID NO: 575733 - DNA, 15 bp, Homo sapiens
attattaaaaacagt

SEQ ID NO: 575734 - DNA, 15 bp, Homo sapiens
aattattaaaaacag

SEQ ID NO: 575735 - DNA, 15 bp, Homo sapiens
caattattaaaaaca

SEQ ID NO: 575736 - DNA, 15 bp, Homo sapiens
ccaattattaaaaac

SEQ ID NO: 575737 - DNA, 15 bp, Homo sapiens
gccaattattaaaaa

SEQ ID NO: 575738 - DNA, 15 bp, Homo sapiens
agccaattattaaaa

SEQ ID NO: 575739 - DNA, 15 bp, Homo sapiens
tagccaattattaaa

SEQ ID NO: 575740 - DNA, 15 bp, Homo sapiens
atagccaattattaa

SEQ ID NO: 575741 - DNA, 15 bp, Homo sapiens
gatagccaattatta

SEQ ID NO: 575742 - DNA, 15 bp, Homo sapiens
agatagccaattatt

SEQ ID NO: 575743 - DNA, 15 bp, Homo sapiens
tagatagccaattat

SEQ ID NO: 575744 - DNA, 15 bp, Homo sapiens
gtagatagccaatta

SEQ ID NO: 575745 - DNA, 15 bp, Homo sapiens
ggtagatagccaatt

SEQ ID NO: 575746 - DNA, 15 bp, Homo sapiens
aggtagatagccaat

SEQ ID NO: 575747 - DNA, 15 bp, Homo sapiens
aaggtagatagccaa

SEQ ID NO: 575748 - DNA, 15 bp, Homo sapiens
aaaggtagatagcca

SEQ ID NO: 575749 - DNA, 15 bp, Homo sapiens
taaaggtagatagcc

SEQ ID NO: 575750 - DNA, 15 bp, Homo sapiens
gtaaaggtagatagc

SEQ ID NO: 575751 - DNA, 15 bp, Homo sapiens
agtaaaggtagatag

SEQ ID NO: 575752 - DNA, 15 bp, Homo sapiens
tagtaaaggtagata

SEQ ID NO: 575753 - DNA, 15 bp, Homo sapiens
atagtaaaggtagat

SEQ ID NO: 575754 - DNA, 15 bp, Homo sapiens
tatagtaaaggtaga

SEQ ID NO: 575755 - DNA, 15 bp, Homo sapiens
ctatagtaaaggtag

SEQ ID NO: 575756 - DNA, 15 bp, Homo sapiens
gctatagtaaaggta

SEQ ID NO: 575757 - DNA, 15 bp, Homo sapiens
tgctatagtaaaggt

SEQ ID NO: 575758 - DNA, 15 bp, Homo sapiens
atgctatagtaaagg

SEQ ID NO: 575759 - DNA, 15 bp, Homo sapiens
tatgctatagtaaag

SEQ ID NO: 575760 - DNA, 15 bp, Homo sapiens
ctatgctatagtaaa

SEQ ID NO: 575761 - DNA, 15 bp, Homo sapiens
cctatgctatagtaa

SEQ ID NO: 575762 - DNA, 15 bp, Homo sapiens
tcctatgctatagta

SEQ ID NO: 575763 - DNA, 15 bp, Homo sapiens
ctcctatgctatagt

SEQ ID NO: 575764 - DNA, 15 bp, Homo sapiens
gctcctatgctatag

SEQ ID NO: 575765 - DNA, 15 bp, Homo sapiens
agctcctatgctata

SEQ ID NO: 575766 - DNA, 15 bp, Homo sapiens
gagctcctatgctat

SEQ ID NO: 575767 - DNA, 15 bp, Homo sapiens
tgagctcctatgcta

SEQ ID NO: 575768 - DNA, 15 bp, Homo sapiens
gtgagctcctatgct

SEQ ID NO: 575769 - DNA, 15 bp, Homo sapiens
agtgagctcctatgc

SEQ ID NO: 575770 - DNA, 15 bp, Homo sapiens
tagtgagctcctatg

SEQ ID NO: 575771 - DNA, 15 bp, Homo sapiens
ttagtgagctcctat

SEQ ID NO: 575772 - DNA, 15 bp, Homo sapiens
tttagtgagctccta

SEQ ID NO: 575773 - DNA, 15 bp, Homo sapiens
ctttagtgagctcct

SEQ ID NO: 575774 - DNA, 15 bp, Homo sapiens
cctttagtgagctcc

SEQ ID NO: 575775 - DNA, 15 bp, Homo sapiens
ccctttagtgagctc

SEQ ID NO: 575776 - DNA, 15 bp, Homo sapiens
cccctttagtgagct

SEQ ID NO: 575777 - DNA, 15 bp, Homo sapiens
tcccctttagtgagc

SEQ ID NO: 575778 - DNA, 15 bp, Homo sapiens
atcccctttagtgag

SEQ ID NO: 575779 - DNA, 15 bp, Homo sapiens
gatcccctttagtga

SEQ ID NO: 575780 - DNA, 15 bp, Homo sapiens
agatcccctttagtg

SEQ ID NO: 575781 - DNA, 15 bp, Homo sapiens
tagatcccctttagt

SEQ ID NO: 575782 - DNA, 15 bp, Homo sapiens
ttagatcccctttag

SEQ ID NO: 575783 - DNA, 15 bp, Homo sapiens
cttagatccccttta

SEQ ID NO: 575784 - DNA, 15 bp, Homo sapiens
gcttagatccccttt

SEQ ID NO: 575785 - DNA, 15 bp, Homo sapiens
ggcttagatcccctt

SEQ ID NO: 575786 - DNA, 15 bp, Homo sapiens
tggcttagatcccct

SEQ ID NO: 575787 - DNA, 15 bp, Homo sapiens
ttggcttagatcccc

SEQ ID NO: 575788 - DNA, 15 bp, Homo sapiens
tttggcttagatccc

SEQ ID NO: 575789 - DNA, 15 bp, Homo sapiens
atttggcttagatcc

SEQ ID NO: 575790 - DNA, 15 bp, Homo sapiens
aatttggcttagatc

SEQ ID NO: 575791 - DNA, 15 bp, Homo sapiens
aaatttggcttagat

SEQ ID NO: 575792 - DNA, 15 bp, Homo sapiens
caaatttggcttaga

SEQ ID NO: 575793 - DNA, 15 bp, Homo sapiens
gcaaatttggcttag

SEQ ID NO: 575794 - DNA, 15 bp, Homo sapiens
tgcaaatttggctta

SEQ ID NO: 575795 - DNA, 15 bp, Homo sapiens
ctgcaaatttggctt

SEQ ID NO: 575796 - DNA, 15 bp, Homo sapiens
actgcaaatttggct

SEQ ID NO: 575797 - DNA, 15 bp, Homo sapiens
gactgcaaatttggc

SEQ ID NO: 575798 - DNA, 15 bp, Homo sapiens
agactgcaaatttgg

SEQ ID NO: 575799 - DNA, 15 bp, Homo sapiens
aagactgcaaatttg

SEQ ID NO: 575800 - DNA, 15 bp, Homo sapiens
caagactgcaaattt

SEQ ID NO: 575801 - DNA, 15 bp, Homo sapiens
tcaagactgcaaatt

SEQ ID NO: 575802 - DNA, 15 bp, Homo sapiens
ttcaagactgcaaat

SEQ ID NO: 575803 - DNA, 15 bp, Homo sapiens
tttcaagactgcaaa

SEQ ID NO: 575804 - DNA, 15 bp, Homo sapiens
ctttcaagactgcaa

SEQ ID NO: 575805 - DNA, 15 bp, Homo sapiens
gctttcaagactgca

SEQ ID NO: 575806 - DNA, 15 bp, Homo sapiens
tgctttcaagactgc

SEQ ID NO: 575807 - DNA, 15 bp, Homo sapiens
gtgctttcaagactg

SEQ ID NO: 575808 - DNA, 15 bp, Homo sapiens
agtgctttcaagact

SEQ ID NO: 575809 - DNA, 15 bp, Homo sapiens
aagtgctttcaagac

SEQ ID NO: 575810 - DNA, 15 bp, Homo sapiens
aaagtgctttcaaga

SEQ ID NO: 575811 - DNA, 15 bp, Homo sapiens
caaagtgctttcaag

SEQ ID NO: 575812 - DNA, 15 bp, Homo sapiens
gcaaagtgctttcaa

SEQ ID NO: 575813 - DNA, 15 bp, Homo sapiens
tgcaaagtgctttca

SEQ ID NO: 575814 - DNA, 15 bp, Homo sapiens
atgcaaagtgctttc

SEQ ID NO: 575815 - DNA, 15 bp, Homo sapiens
catgcaaagtgcttt

SEQ ID NO: 575816 - DNA, 15 bp, Homo sapiens
ccatgcaaagtgctt

SEQ ID NO: 575817 - DNA, 15 bp, Homo sapiens
accatgcaaagtgct

SEQ ID NO: 575818 - DNA, 15 bp, Homo sapiens
taccatgcaaagtgc

SEQ ID NO: 575819 - DNA, 15 bp, Homo sapiens
gtaccatgcaaagtg

SEQ ID NO: 575820 - DNA, 15 bp, Homo sapiens
agtaccatgcaaagt

SEQ ID NO: 575821 - DNA, 15 bp, Homo sapiens
cagtaccatgcaaag

SEQ ID NO: 575822 - DNA, 15 bp, Homo sapiens
acagtaccatgcaaa

SEQ ID NO: 575823 - DNA, 15 bp, Homo sapiens
tacagtaccatgcaa

SEQ ID NO: 575824 - DNA, 15 bp, Homo sapiens
atacagtaccatgca

SEQ ID NO: 575825 - DNA, 15 bp, Homo sapiens
tatacagtaccatgc

SEQ ID NO: 575826 - DNA, 15 bp, Homo sapiens
ctatacagtaccatg

SEQ ID NO: 575827 - DNA, 15 bp, Homo sapiens
actatacagtaccat

SEQ ID NO: 575828 - DNA, 15 bp, Homo sapiens
tactatacagtacca

SEQ ID NO: 575829 - DNA, 15 bp, Homo sapiens
atactatacagtacc

SEQ ID NO: 575830 - DNA, 15 bp, Homo sapiens
catactatacagtac

SEQ ID NO: 575831 - DNA, 15 bp, Homo sapiens
ccatactatacagta

SEQ ID NO: 575832 - DNA, 15 bp, Homo sapiens
accatactatacagt

SEQ ID NO: 575833 - DNA, 15 bp, Homo sapiens
caccatactatacag

SEQ ID NO: 575834 - DNA, 15 bp, Homo sapiens
acaccatactataca

SEQ ID NO: 575835 - DNA, 15 bp, Homo sapiens
cacaccatactatac

SEQ ID NO: 575836 - DNA, 15 bp, Homo sapiens
tcacaccatactata

SEQ ID NO: 575837 - DNA, 15 bp, Homo sapiens
ttcacaccatactat

SEQ ID NO: 575838 - DNA, 15 bp, Homo sapiens
tttcacaccatacta

SEQ ID NO: 575839 - DNA, 15 bp, Homo sapiens
ttttcacaccatact

SEQ ID NO: 575840 - DNA, 15 bp, Homo sapiens
cttttcacaccatac

SEQ ID NO: 575841 - DNA, 15 bp, Homo sapiens
gcttttcacaccata

SEQ ID NO: 575842 - DNA, 15 bp, Homo sapiens
tgcttttcacaccat

SEQ ID NO: 575843 - DNA, 15 bp, Homo sapiens
gtgcttttcacacca

SEQ ID NO: 575844 - DNA, 15 bp, Homo sapiens
ggtgcttttcacacc

SEQ ID NO: 575845 - DNA, 15 bp, Homo sapiens
gggtgcttttcacac

SEQ ID NO: 575846 - DNA, 15 bp, Homo sapiens
tgggtgcttttcaca

SEQ ID NO: 575847 - DNA, 15 bp, Homo sapiens
ctgggtgcttttcac

SEQ ID NO: 575848 - DNA, 15 bp, Homo sapiens
actgggtgcttttca

SEQ ID NO: 575849 - DNA, 15 bp, Homo sapiens
tactgggtgcttttc

SEQ ID NO: 575850 - DNA, 15 bp, Homo sapiens
atactgggtgctttt

SEQ ID NO: 575851 - DNA, 15 bp, Homo sapiens
catactgggtgcttt

SEQ ID NO: 575852 - DNA, 15 bp, Homo sapiens
acatactgggtgctt

SEQ ID NO: 575853 - DNA, 15 bp, Homo sapiens
aacatactgggtgct

SEQ ID NO: 575854 - DNA, 15 bp, Homo sapiens
taacatactgggtgc

SEQ ID NO: 575855 - DNA, 15 bp, Homo sapiens
ttaacatactgggtg

SEQ ID NO: 575856 - DNA, 15 bp, Homo sapiens
tttaacatactgggt

SEQ ID NO: 575857 - DNA, 15 bp, Homo sapiens
gtttaacatactggg

SEQ ID NO: 575858 - DNA, 15 bp, Homo sapiens
ggtttaacatactgg

SEQ ID NO: 575859 - DNA, 15 bp, Homo sapiens
aggtttaacatactg

SEQ ID NO: 575860 - DNA, 15 bp, Homo sapiens
caggtttaacatact

SEQ ID NO: 575861 - DNA, 15 bp, Homo sapiens
tcaggtttaacatac

SEQ ID NO: 575862 - DNA, 15 bp, Homo sapiens
ctcaggtttaacata

SEQ ID NO: 575863 - DNA, 15 bp, Homo sapiens
actcaggtttaacat

SEQ ID NO: 575864 - DNA, 15 bp, Homo sapiens
tactcaggtttaaca

SEQ ID NO: 575865 - DNA, 15 bp, Homo sapiens
gtactcaggtttaac

SEQ ID NO: 575866 - DNA, 15 bp, Homo sapiens
ggtactcaggtttaa

SEQ ID NO: 575867 - DNA, 15 bp, Homo sapiens
aggtactcaggttta

SEQ ID NO: 575868 - DNA, 15 bp, Homo sapiens
aaggtactcaggttt

SEQ ID NO: 575869 - DNA, 15 bp, Homo sapiens
taaggtactcaggtt

SEQ ID NO: 575870 - DNA, 15 bp, Homo sapiens
ttaaggtactcaggt

SEQ ID NO: 575871 - DNA, 15 bp, Homo sapiens
tttaaggtactcagg

SEQ ID NO: 575872 - DNA, 15 bp, Homo sapiens
atttaaggtactcag

SEQ ID NO: 575873 - DNA, 15 bp, Homo sapiens
catttaaggtactca

SEQ ID NO: 575874 - DNA, 15 bp, Homo sapiens
tcatttaaggtactc

SEQ ID NO: 575875 - DNA, 15 bp, Homo sapiens
ttcatttaaggtact

SEQ ID NO: 575876 - DNA, 15 bp, Homo sapiens
attcatttaaggtac

SEQ ID NO: 575877 - DNA, 15 bp, Homo sapiens
tattcatttaaggta

SEQ ID NO: 575878 - DNA, 15 bp, Homo sapiens
gtattcatttaaggt

SEQ ID NO: 575879 - DNA, 15 bp, Homo sapiens
tgtattcatttaagg

SEQ ID NO: 575880 - DNA, 15 bp, Homo sapiens
ctgtattcatttaag

SEQ ID NO: 575881 - DNA, 15 bp, Homo sapiens
cctgtattcatttaa

SEQ ID NO: 575882 - DNA, 15 bp, Homo sapiens
gcctgtattcattta

SEQ ID NO: 575883 - DNA, 15 bp, Homo sapiens
agcctgtattcattt

SEQ ID NO: 575884 - DNA, 15 bp, Homo sapiens
aagcctgtattcatt

SEQ ID NO: 575885 - DNA, 15 bp, Homo sapiens
gaagcctgtattcat

SEQ ID NO: 575886 - DNA, 15 bp, Homo sapiens
ggaagcctgtattca

SEQ ID NO: 575887 - DNA, 15 bp, Homo sapiens
tggaagcctgtattc

SEQ ID NO: 575888 - DNA, 15 bp, Homo sapiens
ctggaagcctgtatt

SEQ ID NO: 575889 - DNA, 15 bp, Homo sapiens
tctggaagcctgtat

SEQ ID NO: 575890 - DNA, 15 bp, Homo sapiens
atctggaagcctgta

SEQ ID NO: 575891 - DNA, 15 bp, Homo sapiens
gatctggaagcctgt

SEQ ID NO: 575892 - DNA, 15 bp, Homo sapiens
ggatctggaagcctg

SEQ ID NO: 575893 - DNA, 15 bp, Homo sapiens
gggatctggaagcct

SEQ ID NO: 575894 - DNA, 15 bp, Homo sapiens
agggatctggaagcc

SEQ ID NO: 575895 - DNA, 15 bp, Homo sapiens
cagggatctggaagc

SEQ ID NO: 575896 - DNA, 15 bp, Homo sapiens
tcagggatctggaag

SEQ ID NO: 575897 - DNA, 15 bp, Homo sapiens
atcagggatctggaa

SEQ ID NO: 575898 - DNA, 15 bp, Homo sapiens
gatcagggatctgga

SEQ ID NO: 575899 - DNA, 15 bp, Homo sapiens
tgatcagggatctgg

SEQ ID NO: 575900 - DNA, 15 bp, Homo sapiens
ctgatcagggatctg

SEQ ID NO: 575901 - DNA, 15 bp, Homo sapiens
cctgatcagggatct

SEQ ID NO: 575902 - DNA, 15 bp, Homo sapiens
ccctgatcagggatc

SEQ ID NO: 575903 - DNA, 15 bp, Homo sapiens
tccctgatcagggat

SEQ ID NO: 575904 - DNA, 15 bp, Homo sapiens
atccctgatcaggga

SEQ ID NO: 575905 - DNA, 15 bp, Homo sapiens
aatccctgatcaggg

SEQ ID NO: 575906 - DNA, 15 bp, Homo sapiens
taatccctgatcagg

SEQ ID NO: 575907 - DNA, 15 bp, Homo sapiens
gtaatccctgatcag

SEQ ID NO: 575908 - DNA, 15 bp, Homo sapiens
agtaatccctgatca

SEQ ID NO: 575909 - DNA, 15 bp, Homo sapiens
cagtaatccctgatc

SEQ ID NO: 575910 - DNA, 15 bp, Homo sapiens
acagtaatccctgat

SEQ ID NO: 575911 - DNA, 15 bp, Homo sapiens
tacagtaatccctga

SEQ ID NO: 575912 - DNA, 15 bp, Homo sapiens
atacagtaatccctg

SEQ ID NO: 575913 - DNA, 15 bp, Homo sapiens
gatacagtaatccct

SEQ ID NO: 575914 - DNA, 15 bp, Homo sapiens
tgatacagtaatccc

SEQ ID NO: 575915 - DNA, 15 bp, Homo sapiens
atgatacagtaatcc

SEQ ID NO: 575916 - DNA, 15 bp, Homo sapiens
catgatacagtaatc

SEQ ID NO: 575917 - DNA, 15 bp, Homo sapiens
tcatgatacagtaat

SEQ ID NO: 575918 - DNA, 15 bp, Homo sapiens
ctcatgatacagtaa

SEQ ID NO: 575919 - DNA, 15 bp, Homo sapiens
cctcatgatacagta

SEQ ID NO: 575920 - DNA, 15 bp, Homo sapiens
tcctcatgatacagt

SEQ ID NO: 575921 - DNA, 15 bp, Homo sapiens
ttcctcatgatacag

SEQ ID NO: 575922 - DNA, 15 bp, Homo sapiens
tttcctcatgataca

SEQ ID NO: 575923 - DNA, 15 bp, Homo sapiens
gtttcctcatgatac

SEQ ID NO: 575924 - DNA, 15 bp, Homo sapiens
ggtttcctcatgata

SEQ ID NO: 575925 - DNA, 15 bp, Homo sapiens
aggtttcctcatgat

SEQ ID NO: 575926 - DNA, 15 bp, Homo sapiens
aaggtttcctcatga

SEQ ID NO: 575927 - DNA, 15 bp, Homo sapiens
aaaggtttcctcatg

SEQ ID NO: 575928 - DNA, 15 bp, Homo sapiens
taaaggtttcctcat

SEQ ID NO: 575929 - DNA, 15 bp, Homo sapiens
ataaaggtttcctca

SEQ ID NO: 575930 - DNA, 15 bp, Homo sapiens
cataaaggtttcctc

SEQ ID NO: 575931 - DNA, 15 bp, Homo sapiens
acataaaggtttcct

SEQ ID NO: 575932 - DNA, 15 bp, Homo sapiens
gacataaaggtttcc

SEQ ID NO: 575933 - DNA, 15 bp, Homo sapiens
tgacataaaggtttc

SEQ ID NO: 575934 - DNA, 15 bp, Homo sapiens
ttgacataaaggttt

SEQ ID NO: 575935 - DNA, 15 bp, Homo sapiens
attgacataaaggtt

SEQ ID NO: 575936 - DNA, 15 bp, Homo sapiens
cattgacataaaggt

SEQ ID NO: 575937 - DNA, 15 bp, Homo sapiens
acattgacataaagg

SEQ ID NO: 575938 - DNA, 15 bp, Homo sapiens
gacattgacataaag

SEQ ID NO: 575939 - DNA, 15 bp, Homo sapiens
tgacattgacataaa

SEQ ID NO: 575940 - DNA, 15 bp, Homo sapiens
ttgacattgacataa

SEQ ID NO: 575941 - DNA, 15 bp, Homo sapiens
tttgacattgacata

SEQ ID NO: 575942 - DNA, 15 bp, Homo sapiens
gtttgacattgacat

SEQ ID NO: 575943 - DNA, 15 bp, Homo sapiens
tgtttgacattgaca

SEQ ID NO: 575944 - DNA, 15 bp, Homo sapiens
ctgtttgacattgac

SEQ ID NO: 575945 - DNA, 15 bp, Homo sapiens
cctgtttgacattga

SEQ ID NO: 575946 - DNA, 15 bp, Homo sapiens
tcctgtttgacattg

SEQ ID NO: 575947 - DNA, 15 bp, Homo sapiens
ttcctgtttgacatt

SEQ ID NO: 575948 - DNA, 15 bp, Homo sapiens
attcctgtttgacat

SEQ ID NO: 575949 - DNA, 15 bp, Homo sapiens
tattcctgtttgaca

SEQ ID NO: 575950 - DNA, 15 bp, Homo sapiens
atattcctgtttgac

SEQ ID NO: 575951 - DNA, 15 bp, Homo sapiens
tatattcctgtttga

SEQ ID NO: 575952 - DNA, 15 bp, Homo sapiens
atatattcctgtttg

SEQ ID NO: 575953 - DNA, 15 bp, Homo sapiens
catatattcctgttt

SEQ ID NO: 575954 - DNA, 15 bp, Homo sapiens
ccatatattcctgtt

SEQ ID NO: 575955 - DNA, 15 bp, Homo sapiens
tccatatattcctgt

SEQ ID NO: 575956 - DNA, 15 bp, Homo sapiens
ttccatatattcctg

SEQ ID NO: 575957 - DNA, 15 bp, Homo sapiens
gttccatatattcct

SEQ ID NO: 575958 - DNA, 15 bp, Homo sapiens
tgttccatatattcc

SEQ ID NO: 575959 - DNA, 15 bp, Homo sapiens
atgttccatatattc

SEQ ID NO: 575960 - DNA, 15 bp, Homo sapiens
gatgttccatatatt

SEQ ID NO: 575961 - DNA, 15 bp, Homo sapiens
tgatgttccatatat

SEQ ID NO: 575962 - DNA, 15 bp, Homo sapiens
gtgatgttccatata

SEQ ID NO: 575963 - DNA, 15 bp, Homo sapiens
agtgatgttccatat

SEQ ID NO: 575964 - DNA, 15 bp, Homo sapiens
aagtgatgttccata

SEQ ID NO: 575965 - DNA, 15 bp, Homo sapiens
taagtgatgttccat

SEQ ID NO: 575966 - DNA, 15 bp, Homo sapiens
ataagtgatgttcca

SEQ ID NO: 575967 - DNA, 15 bp, Homo sapiens
aataagtgatgttcc

SEQ ID NO: 575968 - DNA, 15 bp, Homo sapiens
gaataagtgatgttc

SEQ ID NO: 575969 - DNA, 15 bp, Homo sapiens
tgaataagtgatgtt

SEQ ID NO: 575970 - DNA, 15 bp, Homo sapiens
ttgaataagtgatgt

SEQ ID NO: 575971 - DNA, 15 bp, Homo sapiens
gttgaataagtgatg

SEQ ID NO: 575972 - DNA, 15 bp, Homo sapiens
tgttgaataagtgat

SEQ ID NO: 575973 - DNA, 15 bp, Homo sapiens
gtgttgaataagtga

SEQ ID NO: 575974 - DNA, 15 bp, Homo sapiens
agtgttgaataagtg

SEQ ID NO: 575975 - DNA, 15 bp, Homo sapiens
tagtgttgaataagt

SEQ ID NO: 575976 - DNA, 15 bp, Homo sapiens
atagtgttgaataag

SEQ ID NO: 575977 - DNA, 15 bp, Homo sapiens
aatagtgttgaataa

SEQ ID NO: 575978 - DNA, 15 bp, Homo sapiens
gaatagtgttgaata

SEQ ID NO: 575979 - DNA, 15 bp, Homo sapiens
agaatagtgttgaat

SEQ ID NO: 575980 - DNA, 15 bp, Homo sapiens
gagaatagtgttgaa

SEQ ID NO: 575981 - DNA, 15 bp, Homo sapiens
agagaatagtgttga

SEQ ID NO: 575982 - DNA, 15 bp, Homo sapiens
tagagaatagtgttg

SEQ ID NO: 575983 - DNA, 15 bp, Homo sapiens
ctagagaatagtgtt

SEQ ID NO: 575984 - DNA, 15 bp, Homo sapiens
gctagagaatagtgt

SEQ ID NO: 575985 - DNA, 15 bp, Homo sapiens
agctagagaatagtg

SEQ ID NO: 575986 - DNA, 15 bp, Homo sapiens
aagctagagaatagt

SEQ ID NO: 575987 - DNA, 15 bp, Homo sapiens
aaagctagagaatag

SEQ ID NO: 575988 - DNA, 15 bp, Homo sapiens
taaagctagagaata

SEQ ID NO: 575989 - DNA, 15 bp, Homo sapiens
ttaaagctagagaat

SEQ ID NO: 575990 - DNA, 15 bp, Homo sapiens
tttaaagctagagaa

SEQ ID NO: 575991 - DNA, 15 bp, Homo sapiens
ttttaaagctagaga

SEQ ID NO: 575992 - DNA, 15 bp, Homo sapiens
tttttaaagctagag

SEQ ID NO: 575993 - DNA, 15 bp, Homo sapiens
ctttttaaagctaga

SEQ ID NO: 575994 - DNA, 15 bp, Homo sapiens
cctttttaaagctag

SEQ ID NO: 575995 - DNA, 15 bp, Homo sapiens
gcctttttaaagcta

SEQ ID NO: 575996 - DNA, 15 bp, Homo sapiens
ggcctttttaaagct

SEQ ID NO: 575997 - DNA, 15 bp, Homo sapiens
tggcctttttaaagc

SEQ ID NO: 575998 - DNA, 15 bp, Homo sapiens
ttggcctttttaaag

SEQ ID NO: 575999 - DNA, 15 bp, Homo sapiens
tttggcctttttaaa

SEQ ID NO: 576000 - DNA, 15 bp, Homo sapiens
gtttggcctttttaa

SEQ ID NO: 576001 - DNA, 15 bp, Homo sapiens
agtttggccttttta

SEQ ID NO: 576002 - DNA, 15 bp, Homo sapiens
cagtttggccttttt

SEQ ID NO: 576003 - DNA, 15 bp, Homo sapiens
acagtttggcctttt

SEQ ID NO: 576004 - DNA, 15 bp, Homo sapiens
aacagtttggccttt

SEQ ID NO: 576005 - DNA, 15 bp, Homo sapiens
gaacagtttggcctt

SEQ ID NO: 576006 - DNA, 15 bp, Homo sapiens
agaacagtttggcct

SEQ ID NO: 576007 - DNA, 15 bp, Homo sapiens
tagaacagtttggcc

SEQ ID NO: 576008 - DNA, 15 bp, Homo sapiens
atagaacagtttggc

SEQ ID NO: 576009 - DNA, 15 bp, Homo sapiens
catagaacagtttgg

SEQ ID NO: 576010 - DNA, 15 bp, Homo sapiens
tcatagaacagtttg

SEQ ID NO: 576011 - DNA, 15 bp, Homo sapiens
atcatagaacagttt

SEQ ID NO: 576012 - DNA, 15 bp, Homo sapiens
catcatagaacagtt

SEQ ID NO: 576013 - DNA, 15 bp, Homo sapiens
acatcatagaacagt

SEQ ID NO: 576014 - DNA, 15 bp, Homo sapiens
aacatcatagaacag

SEQ ID NO: 576015 - DNA, 15 bp, Homo sapiens
gaacatcatagaaca

SEQ ID NO: 576016 - DNA, 15 bp, Homo sapiens
agaacatcatagaac

SEQ ID NO: 576017 - DNA, 15 bp, Homo sapiens
gagaacatcatagaa

SEQ ID NO: 576018 - DNA, 15 bp, Homo sapiens
tgagaacatcataga

SEQ ID NO: 576019 - DNA, 15 bp, Homo sapiens
ttgagaacatcatag

SEQ ID NO: 576020 - DNA, 15 bp, Homo sapiens
attgagaacatcata

SEQ ID NO: 576021 - DNA, 15 bp, Homo sapiens
tattgagaacatcat

SEQ ID NO: 576022 - DNA, 15 bp, Homo sapiens
atattgagaacatca

SEQ ID NO: 576023 - DNA, 15 bp, Homo sapiens
tatattgagaacatc

SEQ ID NO: 576024 - DNA, 15 bp, Homo sapiens
ttatattgagaacat

SEQ ID NO: 576025 - DNA, 15 bp, Homo sapiens
cttatattgagaaca

SEQ ID NO: 576026 - DNA, 15 bp, Homo sapiens
gcttatattgagaac

SEQ ID NO: 576027 - DNA, 15 bp, Homo sapiens
tgcttatattgagaa

SEQ ID NO: 576028 - DNA, 15 bp, Homo sapiens
ctgcttatattgaga

SEQ ID NO: 576029 - DNA, 15 bp, Homo sapiens
tctgcttatattgag

SEQ ID NO: 576030 - DNA, 15 bp, Homo sapiens
ttctgcttatattga

SEQ ID NO: 576031 - DNA, 15 bp, Homo sapiens
gttctgcttatattg

SEQ ID NO: 576032 - DNA, 15 bp, Homo sapiens
tgttctgcttatatt

SEQ ID NO: 576033 - DNA, 15 bp, Homo sapiens
ttgttctgcttatat

SEQ ID NO: 576034 - DNA, 15 bp, Homo sapiens
cttgttctgcttata

SEQ ID NO: 576035 - DNA, 15 bp, Homo sapiens
gcttgttctgcttat

SEQ ID NO: 576036 - DNA, 15 bp, Homo sapiens
agcttgttctgctta

SEQ ID NO: 576037 - DNA, 15 bp, Homo sapiens
aagcttgttctgctt

SEQ ID NO: 576038 - DNA, 15 bp, Homo sapiens
gaagcttgttctgct

SEQ ID NO: 576039 - DNA, 15 bp, Homo sapiens
tgaagcttgttctgc

SEQ ID NO: 576040 - DNA, 15 bp, Homo sapiens
ttgaagcttgttctg

SEQ ID NO: 576041 - DNA, 15 bp, Homo sapiens
tttgaagcttgttct

SEQ ID NO: 576042 - DNA, 15 bp, Homo sapiens
ttttgaagcttgttc

SEQ ID NO: 576043 - DNA, 15 bp, Homo sapiens
attttgaagcttgtt

SEQ ID NO: 576044 - DNA, 15 bp, Homo sapiens
gattttgaagcttgt

SEQ ID NO: 576045 - DNA, 15 bp, Homo sapiens
agattttgaagcttg

SEQ ID NO: 576046 - DNA, 15 bp, Homo sapiens
gagattttgaagctt

SEQ ID NO: 576047 - DNA, 15 bp, Homo sapiens
agagattttgaagct

SEQ ID NO: 576048 - DNA, 15 bp, Homo sapiens
aagagattttgaagc

SEQ ID NO: 576049 - DNA, 15 bp, Homo sapiens
caagagattttgaag

SEQ ID NO: 576050 - DNA, 15 bp, Homo sapiens
gcaagagattttgaa

SEQ ID NO: 576051 - DNA, 15 bp, Homo sapiens
ggcaagagattttga

SEQ ID NO: 576052 - DNA, 15 bp, Homo sapiens
tggcaagagattttg

SEQ ID NO: 576053 - DNA, 15 bp, Homo sapiens
ttggcaagagatttt

SEQ ID NO: 576054 - DNA, 15 bp, Homo sapiens
gttggcaagagattt

SEQ ID NO: 576055 - DNA, 15 bp, Homo sapiens
tgttggcaagagatt

SEQ ID NO: 576056 - DNA, 15 bp, Homo sapiens
atgttggcaagagat

SEQ ID NO: 576057 - DNA, 15 bp, Homo sapiens
gatgttggcaagaga

SEQ ID NO: 576058 - DNA, 15 bp, Homo sapiens
ggatgttggcaagag

SEQ ID NO: 576059 - DNA, 15 bp, Homo sapiens
aggatgttggcaaga

SEQ ID NO: 576060 - DNA, 15 bp, Homo sapiens
aaggatgttggcaag

SEQ ID NO: 576061 - DNA, 15 bp, Homo sapiens
gaaggatgttggcaa

SEQ ID NO: 576062 - DNA, 15 bp, Homo sapiens
ggaaggatgttggca

SEQ ID NO: 576063 - DNA, 15 bp, Homo sapiens
gggaaggatgttggc

SEQ ID NO: 576064 - DNA, 15 bp, Homo sapiens
ggggaaggatgttgg

SEQ ID NO: 576065 - DNA, 15 bp, Homo sapiens
tggggaaggatgttg

SEQ ID NO: 576066 - DNA, 15 bp, Homo sapiens
atggggaaggatgtt

SEQ ID NO: 576067 - DNA, 15 bp, Homo sapiens
gatggggaaggatgt

SEQ ID NO: 576068 - DNA, 15 bp, Homo sapiens
ggatggggaaggatg

SEQ ID NO: 576069 - DNA, 15 bp, Homo sapiens
aggatggggaaggat

SEQ ID NO: 576070 - DNA, 15 bp, Homo sapiens
taggatggggaagga

SEQ ID NO: 576071 - DNA, 15 bp, Homo sapiens
ttaggatggggaagg

SEQ ID NO: 576072 - DNA, 15 bp, Homo sapiens
attaggatggggaag

SEQ ID NO: 576073 - DNA, 15 bp, Homo sapiens
aattaggatggggaa

SEQ ID NO: 576074 - DNA, 15 bp, Homo sapiens
aaattaggatgggga

SEQ ID NO: 576075 - DNA, 15 bp, Homo sapiens
taaattaggatgggg

SEQ ID NO: 576076 - DNA, 15 bp, Homo sapiens
ttaaattaggatggg

SEQ ID NO: 576077 - DNA, 15 bp, Homo sapiens
attaaattaggatgg

SEQ ID NO: 576078 - DNA, 15 bp, Homo sapiens
gattaaattaggatg

SEQ ID NO: 576079 - DNA, 15 bp, Homo sapiens
agattaaattaggat

SEQ ID NO: 576080 - DNA, 15 bp, Homo sapiens
tagattaaattagga

SEQ ID NO: 576081 - DNA, 15 bp, Homo sapiens
ttagattaaattagg

SEQ ID NO: 576082 - DNA, 15 bp, Homo sapiens
cttagattaaattag

SEQ ID NO: 576083 - DNA, 15 bp, Homo sapiens
tcttagattaaatta

SEQ ID NO: 576084 - DNA, 15 bp, Homo sapiens
atcttagattaaatt

SEQ ID NO: 576085 - DNA, 15 bp, Homo sapiens
aatcttagattaaat

SEQ ID NO: 576086 - DNA, 15 bp, Homo sapiens
taatcttagattaaa

SEQ ID NO: 576087 - DNA, 15 bp, Homo sapiens
ctaatcttagattaa

SEQ ID NO: 576088 - DNA, 15 bp, Homo sapiens
tctaatcttagatta

SEQ ID NO: 576089 - DNA, 15 bp, Homo sapiens
atctaatcttagatt

SEQ ID NO: 576090 - DNA, 15 bp, Homo sapiens
tatctaatcttagat

SEQ ID NO: 576091 - DNA, 15 bp, Homo sapiens
gtatctaatcttaga

SEQ ID NO: 576092 - DNA, 15 bp, Homo sapiens
agtatctaatcttag

SEQ ID NO: 576093 - DNA, 15 bp, Homo sapiens
aagtatctaatctta

SEQ ID NO: 576094 - DNA, 15 bp, Homo sapiens
caagtatctaatctt

SEQ ID NO: 576095 - DNA, 15 bp, Homo sapiens
tcaagtatctaatct

SEQ ID NO: 576096 - DNA, 15 bp, Homo sapiens
gtcaagtatctaatc

SEQ ID NO: 576097 - DNA, 15 bp, Homo sapiens
agtcaagtatctaat

SEQ ID NO: 576098 - DNA, 15 bp, Homo sapiens
aagtcaagtatctaa

SEQ ID NO: 576099 - DNA, 15 bp, Homo sapiens
gaagtcaagtatcta

SEQ ID NO: 576100 - DNA, 15 bp, Homo sapiens
ggaagtcaagtatct

SEQ ID NO: 576101 - DNA, 15 bp, Homo sapiens
tggaagtcaagtatc

SEQ ID NO: 576102 - DNA, 15 bp, Homo sapiens
ttggaagtcaagtat

SEQ ID NO: 576103 - DNA, 15 bp, Homo sapiens
tttggaagtcaagta

SEQ ID NO: 576104 - DNA, 15 bp, Homo sapiens
atttggaagtcaagt

SEQ ID NO: 576105 - DNA, 15 bp, Homo sapiens
catttggaagtcaag

SEQ ID NO: 576106 - DNA, 15 bp, Homo sapiens
gcatttggaagtcaa

SEQ ID NO: 576107 - DNA, 15 bp, Homo sapiens
tgcatttggaagtca

SEQ ID NO: 576108 - DNA, 15 bp, Homo sapiens
ctgcatttggaagtc

SEQ ID NO: 576109 - DNA, 15 bp, Homo sapiens
cctgcatttggaagt

SEQ ID NO: 576110 - DNA, 15 bp, Homo sapiens
gcctgcatttggaag

SEQ ID NO: 576111 - DNA, 15 bp, Homo sapiens
agcctgcatttggaa

SEQ ID NO: 576112 - DNA, 15 bp, Homo sapiens
aagcctgcatttgga

SEQ ID NO: 576113 - DNA, 15 bp, Homo sapiens
gaagcctgcatttgg

SEQ ID NO: 576114 - DNA, 15 bp, Homo sapiens
ggaagcctgcatttg

SEQ ID NO: 576115 - DNA, 15 bp, Homo sapiens
tggaagcctgcattt

SEQ ID NO: 576116 - DNA, 15 bp, Homo sapiens
ctggaagcctgcatt

SEQ ID NO: 576117 - DNA, 15 bp, Homo sapiens
actggaagcctgcat

SEQ ID NO: 576118 - DNA, 15 bp, Homo sapiens
aactggaagcctgca

SEQ ID NO: 576119 - DNA, 15 bp, Homo sapiens
taactggaagcctgc

SEQ ID NO: 576120 - DNA, 15 bp, Homo sapiens
ttaactggaagcctg

SEQ ID NO: 576121 - DNA, 15 bp, Homo sapiens
tttaactggaagcct

SEQ ID NO: 576122 - DNA, 15 bp, Homo sapiens
gtttaactggaagcc

SEQ ID NO: 576123 - DNA, 15 bp, Homo sapiens
tgtttaactggaagc

SEQ ID NO: 576124 - DNA, 15 bp, Homo sapiens
atgtttaactggaag

SEQ ID NO: 576125 - DNA, 15 bp, Homo sapiens
catgtttaactggaa

SEQ ID NO: 576126 - DNA, 15 bp, Homo sapiens
ccatgtttaactgga

SEQ ID NO: 576127 - DNA, 15 bp, Homo sapiens
gccatgtttaactgg

SEQ ID NO: 576128 - DNA, 15 bp, Homo sapiens
cgccatgtttaactg

SEQ ID NO: 576129 - DNA, 15 bp, Homo sapiens
ccgccatgtttaact

SEQ ID NO: 576130 - DNA, 15 bp, Homo sapiens
accgccatgtttaac

SEQ ID NO: 576131 - DNA, 15 bp, Homo sapiens
aaccgccatgtttaa

SEQ ID NO: 576132 - DNA, 15 bp, Homo sapiens
gaaccgccatgttta

SEQ ID NO: 576133 - DNA, 15 bp, Homo sapiens
tgaaccgccatgttt

SEQ ID NO: 576134 - DNA, 15 bp, Homo sapiens
atgaaccgccatgtt

SEQ ID NO: 576135 - DNA, 15 bp, Homo sapiens
tatgaaccgccatgt

SEQ ID NO: 576136 - DNA, 15 bp, Homo sapiens
gtatgaaccgccatg

SEQ ID NO: 576137 - DNA, 15 bp, Homo sapiens
tgtatgaaccgccat

SEQ ID NO: 576138 - DNA, 15 bp, Homo sapiens
atgtatgaaccgcca

SEQ ID NO: 576139 - DNA, 15 bp, Homo sapiens
catgtatgaaccgcc

SEQ ID NO: 576140 - DNA, 15 bp, Homo sapiens
acatgtatgaaccgc

SEQ ID NO: 576141 - DNA, 15 bp, Homo sapiens
aacatgtatgaaccg

SEQ ID NO: 576142 - DNA, 15 bp, Homo sapiens
aaacatgtatgaacc

SEQ ID NO: 576143 - DNA, 15 bp, Homo sapiens
taaacatgtatgaac

SEQ ID NO: 576144 - DNA, 15 bp, Homo sapiens
ataaacatgtatgaa

SEQ ID NO: 576145 - DNA, 15 bp, Homo sapiens
cataaacatgtatga

SEQ ID NO: 576146 - DNA, 15 bp, Homo sapiens
gcataaacatgtatg

SEQ ID NO: 576147 - DNA, 15 bp, Homo sapiens
tgcataaacatgtat

SEQ ID NO: 576148 - DNA, 15 bp, Homo sapiens
atgcataaacatgta

SEQ ID NO: 576149 - DNA, 15 bp, Homo sapiens
aatgcataaacatgt

SEQ ID NO: 576150 - DNA, 15 bp, Homo sapiens
aaatgcataaacatg

SEQ ID NO: 576151 - DNA, 15 bp, Homo sapiens
taaatgcataaacat

SEQ ID NO: 576152 - DNA, 15 bp, Homo sapiens
gtaaatgcataaaca

SEQ ID NO: 576153 - DNA, 15 bp, Homo sapiens
agtaaatgcataaac

SEQ ID NO: 576154 - DNA, 15 bp, Homo sapiens
gagtaaatgcataaa

SEQ ID NO: 576155 - DNA, 15 bp, Homo sapiens
agagtaaatgcataa

SEQ ID NO: 576156 - DNA, 15 bp, Homo sapiens
tagagtaaatgcata

SEQ ID NO: 576157 - DNA, 15 bp, Homo sapiens
gtagagtaaatgcat

SEQ ID NO: 576158 - DNA, 15 bp, Homo sapiens
agtagagtaaatgca

SEQ ID NO: 576159 - DNA, 15 bp, Homo sapiens
cagtagagtaaatgc

SEQ ID NO: 576160 - DNA, 15 bp, Homo sapiens
gcagtagagtaaatg

SEQ ID NO: 576161 - DNA, 15 bp, Homo sapiens
agcagtagagtaaat

SEQ ID NO: 576162 - DNA, 15 bp, Homo sapiens
aagcagtagagtaaa

SEQ ID NO: 576163 - DNA, 15 bp, Homo sapiens
gaagcagtagagtaa

SEQ ID NO: 576164 - DNA, 15 bp, Homo sapiens
ggaagcagtagagta

SEQ ID NO: 576165 - DNA, 15 bp, Homo sapiens
aggaagcagtagagt

SEQ ID NO: 576166 - DNA, 15 bp, Homo sapiens
taggaagcagtagag

SEQ ID NO: 576167 - DNA, 15 bp, Homo sapiens
ttaggaagcagtaga

SEQ ID NO: 576168 - DNA, 15 bp, Homo sapiens
tttaggaagcagtag

SEQ ID NO: 576169 - DNA, 15 bp, Homo sapiens
ttttaggaagcagta

SEQ ID NO: 576170 - DNA, 15 bp, Homo sapiens
gttttaggaagcagt

SEQ ID NO: 576171 - DNA, 15 bp, Homo sapiens
agttttaggaagcag

SEQ ID NO: 576172 - DNA, 15 bp, Homo sapiens
gagttttaggaagca

SEQ ID NO: 576173 - DNA, 15 bp, Homo sapiens
ggagttttaggaagc

SEQ ID NO: 576174 - DNA, 15 bp, Homo sapiens
tggagttttaggaag

SEQ ID NO: 576175 - DNA, 15 bp, Homo sapiens
atggagttttaggaa

SEQ ID NO: 576176 - DNA, 15 bp, Homo sapiens
aatggagttttagga

SEQ ID NO: 576177 - DNA, 15 bp, Homo sapiens
taatggagttttagg

SEQ ID NO: 576178 - DNA, 15 bp, Homo sapiens
ttaatggagttttag

SEQ ID NO: 576179 - DNA, 15 bp, Homo sapiens
attaatggagtttta

SEQ ID NO: 576180 - DNA, 15 bp, Homo sapiens
cattaatggagtttt

SEQ ID NO: 576181 - DNA, 15 bp, Homo sapiens
tcattaatggagttt

SEQ ID NO: 576182 - DNA, 15 bp, Homo sapiens
ctcattaatggagtt

SEQ ID NO: 576183 - DNA, 15 bp, Homo sapiens
tctcattaatggagt

SEQ ID NO: 576184 - DNA, 15 bp, Homo sapiens
ctctcattaatggag

SEQ ID NO: 576185 - DNA, 15 bp, Homo sapiens
actctcattaatgga

SEQ ID NO: 576186 - DNA, 15 bp, Homo sapiens
tactctcattaatgg

SEQ ID NO: 576187 - DNA, 15 bp, Homo sapiens
ttactctcattaatg

SEQ ID NO: 576188 - DNA, 15 bp, Homo sapiens
tttactctcattaat

SEQ ID NO: 576189 - DNA, 15 bp, Homo sapiens
atttactctcattaa

SEQ ID NO: 576190 - DNA, 15 bp, Homo sapiens
catttactctcatta

SEQ ID NO: 576191 - DNA, 15 bp, Homo sapiens
acatttactctcatt

SEQ ID NO: 576192 - DNA, 15 bp, Homo sapiens
cacatttactctcat

SEQ ID NO: 576193 - DNA, 15 bp, Homo sapiens
gcacatttactctca

SEQ ID NO: 576194 - DNA, 15 bp, Homo sapiens
tgcacatttactctc

SEQ ID NO: 576195 - DNA, 15 bp, Homo sapiens
gtgcacatttactct

SEQ ID NO: 576196 - DNA, 15 bp, Homo sapiens
agtgcacatttactc

SEQ ID NO: 576197 - DNA, 15 bp, Homo sapiens
gagtgcacatttact

SEQ ID NO: 576198 - DNA, 15 bp, Homo sapiens
ggagtgcacatttac

SEQ ID NO: 576199 - DNA, 15 bp, Homo sapiens
tggagtgcacattta

SEQ ID NO: 576200 - DNA, 15 bp, Homo sapiens
atggagtgcacattt

SEQ ID NO: 576201 - DNA, 15 bp, Homo sapiens
tatggagtgcacatt

SEQ ID NO: 576202 - DNA, 15 bp, Homo sapiens
atatggagtgcacat

SEQ ID NO: 576203 - DNA, 15 bp, Homo sapiens
catatggagtgcaca

SEQ ID NO: 576204 - DNA, 15 bp, Homo sapiens
gcatatggagtgcac

SEQ ID NO: 576205 - DNA, 15 bp, Homo sapiens
tgcatatggagtgca

SEQ ID NO: 576206 - DNA, 15 bp, Homo sapiens
ttgcatatggagtgc

SEQ ID NO: 576207 - DNA, 15 bp, Homo sapiens
cttgcatatggagtg

SEQ ID NO: 576208 - DNA, 15 bp, Homo sapiens
gcttgcatatggagt

SEQ ID NO: 576209 - DNA, 15 bp, Homo sapiens
tgcttgcatatggag

SEQ ID NO: 576210 - DNA, 15 bp, Homo sapiens
ttgcttgcatatgga

SEQ ID NO: 576211 - DNA, 15 bp, Homo sapiens
tttgcttgcatatgg

SEQ ID NO: 576212 - DNA, 15 bp, Homo sapiens
atttgcttgcatatg

SEQ ID NO: 576213 - DNA, 15 bp, Homo sapiens
tatttgcttgcatat

SEQ ID NO: 576214 - DNA, 15 bp, Homo sapiens
gtatttgcttgcata

SEQ ID NO: 576215 - DNA, 15 bp, Homo sapiens
tgtatttgcttgcat

SEQ ID NO: 576216 - DNA, 15 bp, Homo sapiens
gtgtatttgcttgca

SEQ ID NO: 576217 - DNA, 15 bp, Homo sapiens
ggtgtatttgcttgc

SEQ ID NO: 576218 - DNA, 15 bp, Homo sapiens
aggtgtatttgcttg

SEQ ID NO: 576219 - DNA, 15 bp, Homo sapiens
taggtgtatttgctt

SEQ ID NO: 576220 - DNA, 15 bp, Homo sapiens
ttaggtgtatttgct

SEQ ID NO: 576221 - DNA, 15 bp, Homo sapiens
tttaggtgtatttgc

SEQ ID NO: 576222 - DNA, 15 bp, Homo sapiens
ctttaggtgtatttg

SEQ ID NO: 576223 - DNA, 15 bp, Homo sapiens
tctttaggtgtattt

SEQ ID NO: 576224 - DNA, 15 bp, Homo sapiens
ttctttaggtgtatt

SEQ ID NO: 576225 - DNA, 15 bp, Homo sapiens
tttctttaggtgtat

SEQ ID NO: 576226 - DNA, 15 bp, Homo sapiens
atttctttaggtgta

SEQ ID NO: 576227 - DNA, 15 bp, Homo sapiens
aatttctttaggtgt

SEQ ID NO: 576228 - DNA, 15 bp, Homo sapiens
aaatttctttaggtg

SEQ ID NO: 576229 - DNA, 15 bp, Homo sapiens
aaaatttctttaggt

SEQ ID NO: 576230 - DNA, 15 bp, Homo sapiens
taaaatttctttagg

SEQ ID NO: 576231 - DNA, 15 bp, Homo sapiens
ttaaaatttctttag

SEQ ID NO: 576232 - DNA, 15 bp, Homo sapiens
tttaaaatttcttta

SEQ ID NO: 576233 - DNA, 15 bp, Homo sapiens
atttaaaatttcttt

SEQ ID NO: 576234 - DNA, 15 bp, Homo sapiens
tatttaaaatttctt

SEQ ID NO: 576235 - DNA, 15 bp, Homo sapiens
ttatttaaaatttct

SEQ ID NO: 576236 - DNA, 15 bp, Homo sapiens
tttatttaaaatttc

SEQ ID NO: 576237 - DNA, 15 bp, Homo sapiens
gtttatttaaaattt

SEQ ID NO: 576238 - DNA, 15 bp, Homo sapiens
cgtttatttaaaatt

SEQ ID NO: 576239 - DNA, 15 bp, Homo sapiens
ccgtttatttaaaat

SEQ ID NO: 576240 - DNA, 15 bp, Homo sapiens
tccgtttatttaaaa

SEQ ID NO: 576241 - DNA, 15 bp, Homo sapiens
atccgtttatttaaa

SEQ ID NO: 576242 - DNA, 15 bp, Homo sapiens
gatccgtttatttaa

SEQ ID NO: 576243 - DNA, 15 bp, Homo sapiens
ggatccgtttattta

SEQ ID NO: 576244 - DNA, 15 bp, Homo sapiens
aggatccgtttattt

SEQ ID NO: 576245 - DNA, 15 bp, Homo sapiens
taggatccgtttatt

SEQ ID NO: 576246 - DNA, 15 bp, Homo sapiens
ctaggatccgtttat

SEQ ID NO: 576247 - DNA, 15 bp, Homo sapiens
gctaggatccgttta

SEQ ID NO: 576248 - DNA, 15 bp, Homo sapiens
agctaggatccgttt

SEQ ID NO: 576249 - DNA, 15 bp, Homo sapiens
gagctaggatccgtt

SEQ ID NO: 576250 - DNA, 15 bp, Homo sapiens
tgagctaggatccgt

SEQ ID NO: 576251 - DNA, 15 bp, Homo sapiens
ttgagctaggatccg

SEQ ID NO: 576252 - DNA, 15 bp, Homo sapiens
tttgagctaggatcc

SEQ ID NO: 576253 - DNA, 15 bp, Homo sapiens
atttgagctaggatc

SEQ ID NO: 576254 - DNA, 15 bp, Homo sapiens
aatttgagctaggat

SEQ ID NO: 576255 - DNA, 15 bp, Homo sapiens
gaatttgagctagga

SEQ ID NO: 576256 - DNA, 15 bp, Homo sapiens
tgaatttgagctagg

SEQ ID NO: 576257 - DNA, 15 bp, Homo sapiens
atgaatttgagctag

SEQ ID NO: 576258 - DNA, 15 bp, Homo sapiens
aatgaatttgagcta

SEQ ID NO: 576259 - DNA, 15 bp, Homo sapiens
aaatgaatttgagct

SEQ ID NO: 576260 - DNA, 15 bp, Homo sapiens
taaatgaatttgagc

SEQ ID NO: 576261 - DNA, 15 bp, Homo sapiens
ataaatgaatttgag

SEQ ID NO: 576262 - DNA, 15 bp, Homo sapiens
tataaatgaatttga

SEQ ID NO: 576263 - DNA, 15 bp, Homo sapiens
gtataaatgaatttg

SEQ ID NO: 576264 - DNA, 15 bp, Homo sapiens
tgtataaatgaattt

SEQ ID NO: 576265 - DNA, 15 bp, Homo sapiens
gtgtataaatgaatt

SEQ ID NO: 576266 - DNA, 15 bp, Homo sapiens
agtgtataaatgaat

SEQ ID NO: 576267 - DNA, 15 bp, Homo sapiens
cagtgtataaatgaa

SEQ ID NO: 576268 - DNA, 15 bp, Homo sapiens
ccagtgtataaatga

SEQ ID NO: 576269 - DNA, 15 bp, Homo sapiens
gccagtgtataaatg

SEQ ID NO: 576270 - DNA, 15 bp, Homo sapiens
tgccagtgtataaat

SEQ ID NO: 576271 - DNA, 15 bp, Homo sapiens
atgccagtgtataaa

SEQ ID NO: 576272 - DNA, 15 bp, Homo sapiens
gatgccagtgtataa

SEQ ID NO: 576273 - DNA, 15 bp, Homo sapiens
agatgccagtgtata

SEQ ID NO: 576274 - DNA, 15 bp, Homo sapiens
tagatgccagtgtat

SEQ ID NO: 576275 - DNA, 15 bp, Homo sapiens
ttagatgccagtgta

SEQ ID NO: 576276 - DNA, 15 bp, Homo sapiens
tttagatgccagtgt

SEQ ID NO: 576277 - DNA, 15 bp, Homo sapiens
ttttagatgccagtg

SEQ ID NO: 576278 - DNA, 15 bp, Homo sapiens
cttttagatgccagt

SEQ ID NO: 576279 - DNA, 15 bp, Homo sapiens
ccttttagatgccag

SEQ ID NO: 576280 - DNA, 15 bp, Homo sapiens
cccttttagatgcca

SEQ ID NO: 576281 - DNA, 15 bp, Homo sapiens
tcccttttagatgcc

SEQ ID NO: 576282 - DNA, 15 bp, Homo sapiens
ttcccttttagatgc

SEQ ID NO: 576283 - DNA, 15 bp, Homo sapiens
gttcccttttagatg

SEQ ID NO: 576284 - DNA, 15 bp, Homo sapiens
tgttcccttttagat

SEQ ID NO: 576285 - DNA, 15 bp, Homo sapiens
ttgttcccttttaga

SEQ ID NO: 576286 - DNA, 15 bp, Homo sapiens
gttgttcccttttag

SEQ ID NO: 576287 - DNA, 15 bp, Homo sapiens
agttgttccctttta

SEQ ID NO: 576288 - DNA, 15 bp, Homo sapiens
tagttgttccctttt

SEQ ID NO: 576289 - DNA, 15 bp, Homo sapiens
atagttgttcccttt

SEQ ID NO: 576290 - DNA, 15 bp, Homo sapiens
aatagttgttccctt

SEQ ID NO: 576291 - DNA, 15 bp, Homo sapiens
gaatagttgttccct

SEQ ID NO: 576292 - DNA, 15 bp, Homo sapiens
ggaatagttgttccc

SEQ ID NO: 576293 - DNA, 15 bp, Homo sapiens
tggaatagttgttcc

SEQ ID NO: 576294 - DNA, 15 bp, Homo sapiens
ctggaatagttgttc

SEQ ID NO: 576295 - DNA, 15 bp, Homo sapiens
actggaatagttgtt

SEQ ID NO: 576296 - DNA, 15 bp, Homo sapiens
gactggaatagttgt

SEQ ID NO: 576297 - DNA, 15 bp, Homo sapiens
agactggaatagttg

SEQ ID NO: 576298 - DNA, 15 bp, Homo sapiens
gagactggaatagtt

SEQ ID NO: 576299 - DNA, 15 bp, Homo sapiens
ggagactggaatagt

SEQ ID NO: 576300 - DNA, 15 bp, Homo sapiens
gggagactggaatag

SEQ ID NO: 576301 - DNA, 15 bp, Homo sapiens
ggggagactggaata

SEQ ID NO: 576302 - DNA, 15 bp, Homo sapiens
tggggagactggaat

SEQ ID NO: 576303 - DNA, 15 bp, Homo sapiens
ttggggagactggaa

SEQ ID NO: 576304 - DNA, 15 bp, Homo sapiens
cttggggagactgga

SEQ ID NO: 576305 - DNA, 15 bp, Homo sapiens
acttggggagactgg

SEQ ID NO: 576306 - DNA, 15 bp, Homo sapiens
gacttggggagactg

SEQ ID NO: 576307 - DNA, 15 bp, Homo sapiens
agacttggggagact

SEQ ID NO: 576308 - DNA, 15 bp, Homo sapiens
aagacttggggagac

SEQ ID NO: 576309 - DNA, 15 bp, Homo sapiens
gaagacttggggaga

SEQ ID NO: 576310 - DNA, 15 bp, Homo sapiens
agaagacttggggag

SEQ ID NO: 576311 - DNA, 15 bp, Homo sapiens
aagaagacttgggga

SEQ ID NO: 576312 - DNA, 15 bp, Homo sapiens
taagaagacttgggg

SEQ ID NO: 576313 - DNA, 15 bp, Homo sapiens
ttaagaagacttggg

SEQ ID NO: 576314 - DNA, 15 bp, Homo sapiens
cttaagaagacttgg

SEQ ID NO: 576315 - DNA, 15 bp, Homo sapiens
gcttaagaagacttg

SEQ ID NO: 576316 - DNA, 15 bp, Homo sapiens
tgcttaagaagactt

SEQ ID NO: 576317 - DNA, 15 bp, Homo sapiens
atgcttaagaagact

SEQ ID NO: 576318 - DNA, 15 bp, Homo sapiens
tatgcttaagaagac

SEQ ID NO: 576319 - DNA, 15 bp, Homo sapiens
atatgcttaagaaga

SEQ ID NO: 576320 - DNA, 15 bp, Homo sapiens
aatatgcttaagaag

SEQ ID NO: 576321 - DNA, 15 bp, Homo sapiens
aaatatgcttaagaa

SEQ ID NO: 576322 - DNA, 15 bp, Homo sapiens
taaatatgcttaaga

SEQ ID NO: 576323 - DNA, 15 bp, Homo sapiens
ataaatatgcttaag

SEQ ID NO: 576324 - DNA, 15 bp, Homo sapiens
cataaatatgcttaa

SEQ ID NO: 576325 - DNA, 15 bp, Homo sapiens
ccataaatatgctta

SEQ ID NO: 576326 - DNA, 15 bp, Homo sapiens
tccataaatatgctt

SEQ ID NO: 576327 - DNA, 15 bp, Homo sapiens
ctccataaatatgct

SEQ ID NO: 576328 - DNA, 15 bp, Homo sapiens
actccataaatatgc

SEQ ID NO: 576329 - DNA, 15 bp, Homo sapiens
tactccataaatatg

SEQ ID NO: 576330 - DNA, 15 bp, Homo sapiens
atactccataaatat

SEQ ID NO: 576331 - DNA, 15 bp, Homo sapiens
gatactccataaata

SEQ ID NO: 576332 - DNA, 15 bp, Homo sapiens
agatactccataaat

SEQ ID NO: 576333 - DNA, 15 bp, Homo sapiens
aagatactccataaa

SEQ ID NO: 576334 - DNA, 15 bp, Homo sapiens
caagatactccataa

SEQ ID NO: 576335 - DNA, 15 bp, Homo sapiens
gcaagatactccata

SEQ ID NO: 576336 - DNA, 15 bp, Homo sapiens
agcaagatactccat

SEQ ID NO: 576337 - DNA, 15 bp, Homo sapiens
aagcaagatactcca

SEQ ID NO: 576338 - DNA, 15 bp, Homo sapiens
aaagcaagatactcc

SEQ ID NO: 576339 - DNA, 15 bp, Homo sapiens
taaagcaagatactc

SEQ ID NO: 576340 - DNA, 15 bp, Homo sapiens
ctaaagcaagatact

SEQ ID NO: 576341 - DNA, 15 bp, Homo sapiens
gctaaagcaagatac

SEQ ID NO: 576342 - DNA, 15 bp, Homo sapiens
tgctaaagcaagata

SEQ ID NO: 576343 - DNA, 15 bp, Homo sapiens
atgctaaagcaagat

SEQ ID NO: 576344 - DNA, 15 bp, Homo sapiens
gatgctaaagcaaga

SEQ ID NO: 576345 - DNA, 15 bp, Homo sapiens
tgatgctaaagcaag

SEQ ID NO: 576346 - DNA, 15 bp, Homo sapiens
ttgatgctaaagcaa

SEQ ID NO: 576347 - DNA, 15 bp, Homo sapiens
tttgatgctaaagca

SEQ ID NO: 576348 - DNA, 15 bp, Homo sapiens
ctttgatgctaaagc

SEQ ID NO: 576349 - DNA, 15 bp, Homo sapiens
gctttgatgctaaag

SEQ ID NO: 576350 - DNA, 15 bp, Homo sapiens
ggctttgatgctaaa

SEQ ID NO: 576351 - DNA, 15 bp, Homo sapiens
gggctttgatgctaa

SEQ ID NO: 576352 - DNA, 15 bp, Homo sapiens
agggctttgatgcta

SEQ ID NO: 576353 - DNA, 15 bp, Homo sapiens
gagggctttgatgct

SEQ ID NO: 576354 - DNA, 15 bp, Homo sapiens
agagggctttgatgc

SEQ ID NO: 576355 - DNA, 15 bp, Homo sapiens
tagagggctttgatg

SEQ ID NO: 576356 - DNA, 15 bp, Homo sapiens
ctagagggctttgat

SEQ ID NO: 576357 - DNA, 15 bp, Homo sapiens
actagagggctttga

SEQ ID NO: 576358 - DNA, 15 bp, Homo sapiens
aactagagggctttg

SEQ ID NO: 576359 - DNA, 15 bp, Homo sapiens
aaactagagggcttt

SEQ ID NO: 576360 - DNA, 15 bp, Homo sapiens
aaaactagagggctt

SEQ ID NO: 576361 - DNA, 15 bp, Homo sapiens
caaaactagagggct

SEQ ID NO: 576362 - DNA, 15 bp, Homo sapiens
gcaaaactagagggc

SEQ ID NO: 576363 - DNA, 15 bp, Homo sapiens
ggcaaaactagaggg

SEQ ID NO: 576364 - DNA, 15 bp, Homo sapiens
aggcaaaactagagg

SEQ ID NO: 576365 - DNA, 15 bp, Homo sapiens
caggcaaaactagag

SEQ ID NO: 576366 - DNA, 15 bp, Homo sapiens
acaggcaaaactaga

SEQ ID NO: 576367 - DNA, 15 bp, Homo sapiens
aacaggcaaaactag

SEQ ID NO: 576368 - DNA, 15 bp, Homo sapiens
taacaggcaaaacta

SEQ ID NO: 576369 - DNA, 15 bp, Homo sapiens
gtaacaggcaaaact

SEQ ID NO: 576370 - DNA, 15 bp, Homo sapiens
agtaacaggcaaaac

SEQ ID NO: 576371 - DNA, 15 bp, Homo sapiens
tagtaacaggcaaaa

SEQ ID NO: 576372 - DNA, 15 bp, Homo sapiens
atagtaacaggcaaa

SEQ ID NO: 576373 - DNA, 15 bp, Homo sapiens
catagtaacaggcaa

SEQ ID NO: 576374 - DNA, 15 bp, Homo sapiens
ccatagtaacaggca

SEQ ID NO: 576375 - DNA, 15 bp, Homo sapiens
accatagtaacaggc

SEQ ID NO: 576376 - DNA, 15 bp, Homo sapiens
caccatagtaacagg

SEQ ID NO: 576377 - DNA, 15 bp, Homo sapiens
tcaccatagtaacag

SEQ ID NO: 576378 - DNA, 15 bp, Homo sapiens
atcaccatagtaaca

SEQ ID NO: 576379 - DNA, 15 bp, Homo sapiens
catcaccatagtaac

SEQ ID NO: 576380 - DNA, 15 bp, Homo sapiens
tcatcaccatagtaa

SEQ ID NO: 576381 - DNA, 15 bp, Homo sapiens
gtcatcaccatagta

SEQ ID NO: 576382 - DNA, 15 bp, Homo sapiens
tgtcatcaccatagt

SEQ ID NO: 576383 - DNA, 15 bp, Homo sapiens
atgtcatcaccatag

SEQ ID NO: 576384 - DNA, 15 bp, Homo sapiens
tatgtcatcaccata

SEQ ID NO: 576385 - DNA, 15 bp, Homo sapiens
gtatgtcatcaccat

SEQ ID NO: 576386 - DNA, 15 bp, Homo sapiens
agtatgtcatcacca

SEQ ID NO: 576387 - DNA, 15 bp, Homo sapiens
gagtatgtcatcacc

SEQ ID NO: 576388 - DNA, 15 bp, Homo sapiens
tgagtatgtcatcac

SEQ ID NO: 576389 - DNA, 15 bp, Homo sapiens
ttgagtatgtcatca

SEQ ID NO: 576390 - DNA, 15 bp, Homo sapiens
tttgagtatgtcatc

SEQ ID NO: 576391 - DNA, 15 bp, Homo sapiens
ctttgagtatgtcat

SEQ ID NO: 576392 - DNA, 15 bp, Homo sapiens
tctttgagtatgtca

SEQ ID NO: 576393 - DNA, 15 bp, Homo sapiens
ctctttgagtatgtc

SEQ ID NO: 576394 - DNA, 15 bp, Homo sapiens
gctctttgagtatgt

SEQ ID NO: 576395 - DNA, 15 bp, Homo sapiens
tgctctttgagtatg

SEQ ID NO: 576396 - DNA, 15 bp, Homo sapiens
atgctctttgagtat

SEQ ID NO: 576397 - DNA, 15 bp, Homo sapiens
aatgctctttgagta

SEQ ID NO: 576398 - DNA, 15 bp, Homo sapiens
gaatgctctttgagt

SEQ ID NO: 576399 - DNA, 15 bp, Homo sapiens
ggaatgctctttgag

SEQ ID NO: 576400 - DNA, 15 bp, Homo sapiens
gggaatgctctttga

SEQ ID NO: 576401 - DNA, 15 bp, Homo sapiens
agggaatgctctttg

SEQ ID NO: 576402 - DNA, 15 bp, Homo sapiens
aagggaatgctcttt

SEQ ID NO: 576403 - DNA, 15 bp, Homo sapiens
aaagggaatgctctt

SEQ ID NO: 576404 - DNA, 15 bp, Homo sapiens
gaaagggaatgctct

SEQ ID NO: 576405 - DNA, 15 bp, Homo sapiens
ggaaagggaatgctc

SEQ ID NO: 576406 - DNA, 15 bp, Homo sapiens
gggaaagggaatgct

SEQ ID NO: 576407 - DNA, 15 bp, Homo sapiens
agggaaagggaatgc

SEQ ID NO: 576408 - DNA, 15 bp, Homo sapiens
attcctgagatgatt

SEQ ID NO: 576409 - DNA, 15 bp, Homo sapiens
cattcctgagatgat

SEQ ID NO: 576410 - DNA, 15 bp, Homo sapiens
tcattcctgagatga

SEQ ID NO: 576411 - DNA, 15 bp, Homo sapiens
ttcattcctgagatg

SEQ ID NO: 576412 - DNA, 15 bp, Homo sapiens
tttcattcctgagat

SEQ ID NO: 576413 - DNA, 15 bp, Homo sapiens
atttcattcctgaga

SEQ ID NO: 576414 - DNA, 15 bp, Homo sapiens
aatttcattcctgag

SEQ ID NO: 576415 - DNA, 15 bp, Homo sapiens
taatttcattcctga

SEQ ID NO: 576416 - DNA, 15 bp, Homo sapiens
ataatttcattcctg

SEQ ID NO: 576417 - DNA, 15 bp, Homo sapiens
tataatttcattcct

SEQ ID NO: 576418 - DNA, 15 bp, Homo sapiens
atataatttcattcc

SEQ ID NO: 576419 - DNA, 15 bp, Homo sapiens
tatataatttcattc

SEQ ID NO: 576420 - DNA, 15 bp, Homo sapiens
ctatataatttcatt

SEQ ID NO: 576421 - DNA, 15 bp, Homo sapiens
cctatataatttcat

SEQ ID NO: 576422 - DNA, 15 bp, Homo sapiens
tcctatataatttca

SEQ ID NO: 576423 - DNA, 15 bp, Homo sapiens
atcctatataatttc

SEQ ID NO: 576424 - DNA, 15 bp, Homo sapiens
catcctatataattt

SEQ ID NO: 576425 - DNA, 15 bp, Homo sapiens
tcatcctatataatt

SEQ ID NO: 576426 - DNA, 15 bp, Homo sapiens
atcatcctatataat

SEQ ID NO: 576427 - DNA, 15 bp, Homo sapiens
tatcatcctatataa

SEQ ID NO: 576428 - DNA, 15 bp, Homo sapiens
atatcatcctatata

SEQ ID NO: 576429 - DNA, 15 bp, Homo sapiens
gatatcatcctatat

SEQ ID NO: 576430 - DNA, 15 bp, Homo sapiens
tgatatcatcctata

SEQ ID NO: 576431 - DNA, 15 bp, Homo sapiens
atgatatcatcctat

SEQ ID NO: 576432 - DNA, 15 bp, Homo sapiens
aatgatatcatccta

SEQ ID NO: 576433 - DNA, 15 bp, Homo sapiens
gaatgatatcatcct

SEQ ID NO: 576434 - DNA, 15 bp, Homo sapiens
ggaatgatatcatcc

SEQ ID NO: 576435 - DNA, 15 bp, Homo sapiens
aggaatgatatcatc

SEQ ID NO: 576436 - DNA, 15 bp, Homo sapiens
taggaatgatatcat

SEQ ID NO: 576437 - DNA, 15 bp, Homo sapiens
gtaggaatgatatca

SEQ ID NO: 576438 - DNA, 15 bp, Homo sapiens
ggtaggaatgatatc

SEQ ID NO: 576439 - DNA, 15 bp, Homo sapiens
gggtaggaatgatat

SEQ ID NO: 576440 - DNA, 15 bp, Homo sapiens
tgggtaggaatgata

SEQ ID NO: 576441 - DNA, 15 bp, Homo sapiens
ctgggtaggaatgat

SEQ ID NO: 576442 - DNA, 15 bp, Homo sapiens
cctgggtaggaatga

SEQ ID NO: 576443 - DNA, 15 bp, Homo sapiens
acctgggtaggaatg

SEQ ID NO: 576444 - DNA, 15 bp, Homo sapiens
aacctgggtaggaat

SEQ ID NO: 576445 - DNA, 15 bp, Homo sapiens
taacctgggtaggaa

SEQ ID NO: 576446 - DNA, 15 bp, Homo sapiens
ataacctgggtagga

SEQ ID NO: 576447 - DNA, 15 bp, Homo sapiens
gataacctgggtagg

SEQ ID NO: 576448 - DNA, 15 bp, Homo sapiens
tgataacctgggtag

SEQ ID NO: 576449 - DNA, 15 bp, Homo sapiens
ctgataacctgggta

SEQ ID NO: 576450 - DNA, 15 bp, Homo sapiens
actgataacctgggt

SEQ ID NO: 576451 - DNA, 15 bp, Homo sapiens
cactgataacctggg

SEQ ID NO: 576452 - DNA, 15 bp, Homo sapiens
acactgataacctgg

SEQ ID NO: 576453 - DNA, 15 bp, Homo sapiens
tacactgataacctg

SEQ ID NO: 576454 - DNA, 15 bp, Homo sapiens
ttacactgataacct

SEQ ID NO: 576455 - DNA, 15 bp, Homo sapiens
gttacactgataacc

SEQ ID NO: 576456 - DNA, 15 bp, Homo sapiens
ggttacactgataac

SEQ ID NO: 576457 - DNA, 15 bp, Homo sapiens
aggttacactgataa

SEQ ID NO: 576458 - DNA, 15 bp, Homo sapiens
taggttacactgata

SEQ ID NO: 576459 - DNA, 15 bp, Homo sapiens
ctaggttacactgat

SEQ ID NO: 576460 - DNA, 15 bp, Homo sapiens
gctaggttacactga

SEQ ID NO: 576461 - DNA, 15 bp, Homo sapiens
tgctaggttacactg

SEQ ID NO: 576462 - DNA, 15 bp, Homo sapiens
atgctaggttacact

SEQ ID NO: 576463 - DNA, 15 bp, Homo sapiens
tatgctaggttacac

SEQ ID NO: 576464 - DNA, 15 bp, Homo sapiens
ctatgctaggttaca

SEQ ID NO: 576465 - DNA, 15 bp, Homo sapiens
tctatgctaggttac

SEQ ID NO: 576466 - DNA, 15 bp, Homo sapiens
ctctatgctaggtta

SEQ ID NO: 576467 - DNA, 15 bp, Homo sapiens
gctctatgctaggtt

SEQ ID NO: 576468 - DNA, 15 bp, Homo sapiens
agctctatgctaggt

SEQ ID NO: 576469 - DNA, 15 bp, Homo sapiens
cagctctatgctagg

SEQ ID NO: 576470 - DNA, 15 bp, Homo sapiens
ccagctctatgctag

SEQ ID NO: 576471 - DNA, 15 bp, Homo sapiens
cccagctctatgcta

SEQ ID NO: 576472 - DNA, 15 bp, Homo sapiens
acccagctctatgct

SEQ ID NO: 576473 - DNA, 15 bp, Homo sapiens
gacccagctctatgc

SEQ ID NO: 576474 - DNA, 15 bp, Homo sapiens
ggacccagctctatg

SEQ ID NO: 576475 - DNA, 15 bp, Homo sapiens
tggacccagctctat

SEQ ID NO: 576476 - DNA, 15 bp, Homo sapiens
gtggacccagctcta

SEQ ID NO: 576477 - DNA, 15 bp, Homo sapiens
tgtggacccagctct

SEQ ID NO: 576478 - DNA, 15 bp, Homo sapiens
ttgtggacccagctc

SEQ ID NO: 576479 - DNA, 15 bp, Homo sapiens
attgtggacccagct

SEQ ID NO: 576480 - DNA, 15 bp, Homo sapiens
tattgtggacccagc

SEQ ID NO: 576481 - DNA, 15 bp, Homo sapiens
atattgtggacccag

SEQ ID NO: 576482 - DNA, 15 bp, Homo sapiens
aatattgtggaccca

SEQ ID NO: 576483 - DNA, 15 bp, Homo sapiens
taatattgtggaccc

SEQ ID NO: 576484 - DNA, 15 bp, Homo sapiens
ttaatattgtggacc

SEQ ID NO: 576485 - DNA, 15 bp, Homo sapiens
attaatattgtggac

SEQ ID NO: 576486 - DNA, 15 bp, Homo sapiens
aattaatattgtgga

SEQ ID NO: 576487 - DNA, 15 bp, Homo sapiens
gaattaatattgtgg

SEQ ID NO: 576488 - DNA, 15 bp, Homo sapiens
agaattaatattgtg

SEQ ID NO: 576489 - DNA, 15 bp, Homo sapiens
tagaattaatattgt

SEQ ID NO: 576490 - DNA, 15 bp, Homo sapiens
gtagaattaatattg

SEQ ID NO: 576491 - DNA, 15 bp, Homo sapiens
tgtagaattaatatt

SEQ ID NO: 576492 - DNA, 15 bp, Homo sapiens
ctgtagaattaatat

SEQ ID NO: 576493 - DNA, 15 bp, Homo sapiens
actgtagaattaata

SEQ ID NO: 576494 - DNA, 15 bp, Homo sapiens
aactgtagaattaat

SEQ ID NO: 576495 - DNA, 15 bp, Homo sapiens
gaactgtagaattaa

SEQ ID NO: 576496 - DNA, 15 bp, Homo sapiens
agaactgtagaatta

SEQ ID NO: 576497 - DNA, 15 bp, Homo sapiens
cagaactgtagaatt

SEQ ID NO: 576498 - DNA, 15 bp, Homo sapiens
gcagaactgtagaat

SEQ ID NO: 576499 - DNA, 15 bp, Homo sapiens
agcagaactgtagaa

SEQ ID NO: 576500 - DNA, 15 bp, Homo sapiens
cagcagaactgtaga

SEQ ID NO: 576501 - DNA, 15 bp, Homo sapiens
ccagcagaactgtag

SEQ ID NO: 576502 - DNA, 15 bp, Homo sapiens
accagcagaactgta

SEQ ID NO: 576503 - DNA, 15 bp, Homo sapiens
aaccagcagaactgt

SEQ ID NO: 576504 - DNA, 15 bp, Homo sapiens
taaccagcagaactg

SEQ ID NO: 576505 - DNA, 15 bp, Homo sapiens
ttaaccagcagaact

SEQ ID NO: 576506 - DNA, 15 bp, Homo sapiens
gttaaccagcagaac

SEQ ID NO: 576507 - DNA, 15 bp, Homo sapiens
agttaaccagcagaa

SEQ ID NO: 576508 - DNA, 15 bp, Homo sapiens
gagttaaccagcaga

SEQ ID NO: 576509 - DNA, 15 bp, Homo sapiens
tgagttaaccagcag

SEQ ID NO: 576510 - DNA, 15 bp, Homo sapiens
gtgagttaaccagca

SEQ ID NO: 576511 - DNA, 15 bp, Homo sapiens
tgtgagttaaccagc

SEQ ID NO: 576512 - DNA, 15 bp, Homo sapiens
atgtgagttaaccag

SEQ ID NO: 576513 - DNA, 15 bp, Homo sapiens
tatgtgagttaacca

SEQ ID NO: 576514 - DNA, 15 bp, Homo sapiens
atatgtgagttaacc

SEQ ID NO: 576515 - DNA, 15 bp, Homo sapiens
catatgtgagttaac

SEQ ID NO: 576516 - DNA, 15 bp, Homo sapiens
acatatgtgagttaa

SEQ ID NO: 576517 - DNA, 15 bp, Homo sapiens
cacatatgtgagtta

SEQ ID NO: 576518 - DNA, 15 bp, Homo sapiens
acacatatgtgagtt

SEQ ID NO: 576519 - DNA, 15 bp, Homo sapiens
tacacatatgtgagt

SEQ ID NO: 576520 - DNA, 15 bp, Homo sapiens
atacacatatgtgag

SEQ ID NO: 576521 - DNA, 15 bp, Homo sapiens
aatacacatatgtga

SEQ ID NO: 576522 - DNA, 15 bp, Homo sapiens
aaatacacatatgtg

SEQ ID NO: 576523 - DNA, 15 bp, Homo sapiens
taaatacacatatgt

SEQ ID NO: 576524 - DNA, 15 bp, Homo sapiens
ataaatacacatatg

SEQ ID NO: 576525 - DNA, 15 bp, Homo sapiens
cataaatacacatat

SEQ ID NO: 576526 - DNA, 15 bp, Homo sapiens
gcataaatacacata

SEQ ID NO: 576527 - DNA, 15 bp, Homo sapiens
tgcataaatacacat

SEQ ID NO: 576528 - DNA, 15 bp, Homo sapiens
atgcataaatacaca

SEQ ID NO: 576529 - DNA, 15 bp, Homo sapiens
catgcataaatacac

SEQ ID NO: 576530 - DNA, 15 bp, Homo sapiens
acatgcataaataca

SEQ ID NO: 576531 - DNA, 15 bp, Homo sapiens
tacatgcataaatac

SEQ ID NO: 576532 - DNA, 15 bp, Homo sapiens
atacatgcataaata

SEQ ID NO: 576533 - DNA, 15 bp, Homo sapiens
catacatgcataaat

SEQ ID NO: 576534 - DNA, 15 bp, Homo sapiens
acatacatgcataaa

SEQ ID NO: 576535 - DNA, 15 bp, Homo sapiens
tacatacatgcataa

SEQ ID NO: 576536 - DNA, 15 bp, Homo sapiens
atacatacatgcata

SEQ ID NO: 576537 - DNA, 15 bp, Homo sapiens
catacatacatgcat

SEQ ID NO: 576538 - DNA, 15 bp, Homo sapiens
acatacatacatgca

SEQ ID NO: 576539 - DNA, 15 bp, Homo sapiens
tacatacatacatgc

SEQ ID NO: 576540 - DNA, 15 bp, Homo sapiens
atacatacatacatg

SEQ ID NO: 576541 - DNA, 15 bp, Homo sapiens
aaaaactgatccaca

SEQ ID NO: 576542 - DNA, 15 bp, Homo sapiens
aaaaaactgatccac

SEQ ID NO: 576543 - DNA, 15 bp, Homo sapiens
taaaaaactgatcca

SEQ ID NO: 576544 - DNA, 15 bp, Homo sapiens
gtaaaaaactgatcc

SEQ ID NO: 576545 - DNA, 15 bp, Homo sapiens
agtaaaaaactgatc

SEQ ID NO: 576546 - DNA, 15 bp, Homo sapiens
gagtaaaaaactgat

SEQ ID NO: 576547 - DNA, 15 bp, Homo sapiens
agagtaaaaaactga

SEQ ID NO: 576548 - DNA, 15 bp, Homo sapiens
aagagtaaaaaactg

SEQ ID NO: 576549 - DNA, 15 bp, Homo sapiens
gaagagtaaaaaact

SEQ ID NO: 576550 - DNA, 15 bp, Homo sapiens
ggaagagtaaaaaac

SEQ ID NO: 576551 - DNA, 15 bp, Homo sapiens
tggaagagtaaaaaa

SEQ ID NO: 576552 - DNA, 15 bp, Homo sapiens
gtggaagagtaaaaa

SEQ ID NO: 576553 - DNA, 15 bp, Homo sapiens
agtggaagagtaaaa

SEQ ID NO: 576554 - DNA, 15 bp, Homo sapiens
gagtggaagagtaaa

SEQ ID NO: 576555 - DNA, 15 bp, Homo sapiens
agagtggaagagtaa

SEQ ID NO: 576556 - DNA, 15 bp, Homo sapiens
gagagtggaagagta

SEQ ID NO: 576557 - DNA, 15 bp, Homo sapiens
agagagtggaagagt

SEQ ID NO: 576558 - DNA, 15 bp, Homo sapiens
aagagagtggaagag

SEQ ID NO: 576559 - DNA, 15 bp, Homo sapiens
aaagagagtggaaga

SEQ ID NO: 576560 - DNA, 15 bp, Homo sapiens
aaaagagagtggaag

SEQ ID NO: 576561 - DNA, 15 bp, Homo sapiens
gaaaagagagtggaa

SEQ ID NO: 576562 - DNA, 15 bp, Homo sapiens
agaaaagagagtgga

SEQ ID NO: 576563 - DNA, 15 bp, Homo sapiens
tagaaaagagagtgg

SEQ ID NO: 576564 - DNA, 15 bp, Homo sapiens
atagaaaagagagtg

SEQ ID NO: 576565 - DNA, 15 bp, Homo sapiens
tatagaaaagagagt

SEQ ID NO: 576566 - DNA, 15 bp, Homo sapiens
atatagaaaagagag

SEQ ID NO: 576567 - DNA, 15 bp, Homo sapiens
aatatagaaaagaga

SEQ ID NO: 576568 - DNA, 15 bp, Homo sapiens
aaatatagaaaagag

SEQ ID NO: 576569 - DNA, 15 bp, Homo sapiens
aaaatatagaaaaga

SEQ ID NO: 576570 - DNA, 15 bp, Homo sapiens
caaaatatagaaaag

SEQ ID NO: 576571 - DNA, 15 bp, Homo sapiens
gcaaaatatagaaaa

SEQ ID NO: 576572 - DNA, 15 bp, Homo sapiens
ggcaaaatatagaaa

SEQ ID NO: 576573 - DNA, 15 bp, Homo sapiens
gggcaaaatatagaa

SEQ ID NO: 576574 - DNA, 15 bp, Homo sapiens
tgggcaaaatataga

SEQ ID NO: 576575 - DNA, 15 bp, Homo sapiens
atgggcaaaatatag

SEQ ID NO: 576576 - DNA, 15 bp, Homo sapiens
gatgggcaaaatata

SEQ ID NO: 576577 - DNA, 15 bp, Homo sapiens
cgatgggcaaaatat

SEQ ID NO: 576578 - DNA, 15 bp, Homo sapiens
ccgatgggcaaaata

SEQ ID NO: 576579 - DNA, 15 bp, Homo sapiens
cccgatgggcaaaat

SEQ ID NO: 576580 - DNA, 15 bp, Homo sapiens
ccccgatgggcaaaa

SEQ ID NO: 576581 - DNA, 15 bp, Homo sapiens
gccccgatgggcaaa

SEQ ID NO: 576582 - DNA, 15 bp, Homo sapiens
agccccgatgggcaa

SEQ ID NO: 576583 - DNA, 15 bp, Homo sapiens
cagccccgatgggca

SEQ ID NO: 576584 - DNA, 15 bp, Homo sapiens
gcagccccgatgggc

SEQ ID NO: 576585 - DNA, 15 bp, Homo sapiens
cgcagccccgatggg

SEQ ID NO: 576586 - DNA, 15 bp, Homo sapiens
ccgcagccccgatgg

SEQ ID NO: 576587 - DNA, 15 bp, Homo sapiens
tccgcagccccgatg

SEQ ID NO: 576588 - DNA, 15 bp, Homo sapiens
atccgcagccccgat

SEQ ID NO: 576589 - DNA, 15 bp, Homo sapiens
tatccgcagccccga

SEQ ID NO: 576590 - DNA, 15 bp, Homo sapiens
gtatccgcagccccg

SEQ ID NO: 576591 - DNA, 15 bp, Homo sapiens
ggtatccgcagcccc

SEQ ID NO: 576592 - DNA, 15 bp, Homo sapiens
aggtatccgcagccc

SEQ ID NO: 576593 - DNA, 15 bp, Homo sapiens
caggtatccgcagcc

SEQ ID NO: 576594 - DNA, 15 bp, Homo sapiens
ccaggtatccgcagc

SEQ ID NO: 576595 - DNA, 15 bp, Homo sapiens
accaggtatccgcag

SEQ ID NO: 576596 - DNA, 15 bp, Homo sapiens
aaccaggtatccgca

SEQ ID NO: 576597 - DNA, 15 bp, Homo sapiens
aaaccaggtatccgc

SEQ ID NO: 576598 - DNA, 15 bp, Homo sapiens
aaaaccaggtatccg

SEQ ID NO: 576599 - DNA, 15 bp, Homo sapiens
taaaaccaggtatcc

SEQ ID NO: 576600 - DNA, 15 bp, Homo sapiens
ataaaaccaggtatc

SEQ ID NO: 576601 - DNA, 15 bp, Homo sapiens
aataaaaccaggtat

SEQ ID NO: 576602 - DNA, 15 bp, Homo sapiens
taataaaaccaggta

SEQ ID NO: 576603 - DNA, 15 bp, Homo sapiens
ataataaaaccaggt

SEQ ID NO: 576604 - DNA, 15 bp, Homo sapiens
aataataaaaccagg

SEQ ID NO: 576605 - DNA, 15 bp, Homo sapiens
aaataataaaaccag

SEQ ID NO: 576606 - DNA, 15 bp, Homo sapiens
aaaataataaaacca

SEQ ID NO: 576607 - DNA, 15 bp, Homo sapiens
aaaaataataaaacc

SEQ ID NO: 576608 - DNA, 15 bp, Homo sapiens
aaaaaataataaaac

SEQ ID NO: 576609 - DNA, 15 bp, Homo sapiens
gaaaaaataataaaa

SEQ ID NO: 576610 - DNA, 15 bp, Homo sapiens
agaaaaaataataaa

SEQ ID NO: 576611 - DNA, 15 bp, Homo sapiens
aagaaaaaataataa

SEQ ID NO: 576612 - DNA, 15 bp, Homo sapiens
aaagaaaaaataata

SEQ ID NO: 576613 - DNA, 15 bp, Homo sapiens
caaagaaaaaataat

SEQ ID NO: 576614 - DNA, 15 bp, Homo sapiens
aaaacaaaaattaaa

SEQ ID NO: 576615 - DNA, 15 bp, Homo sapiens
aaaaacaaaaattaa

SEQ ID NO: 576616 - DNA, 15 bp, Homo sapiens
gaaaaacaaaaatta

SEQ ID NO: 576617 - DNA, 15 bp, Homo sapiens
agaaaaacaaaaatt

SEQ ID NO: 576618 - DNA, 15 bp, Homo sapiens
cagaaaaacaaaaat

SEQ ID NO: 576619 - DNA, 15 bp, Homo sapiens
ccagaaaaacaaaaa

SEQ ID NO: 576620 - DNA, 15 bp, Homo sapiens
gccagaaaaacaaaa

SEQ ID NO: 576621 - DNA, 15 bp, Homo sapiens
ggccagaaaaacaaa

SEQ ID NO: 576622 - DNA, 15 bp, Homo sapiens
gggccagaaaaacaa

SEQ ID NO: 576623 - DNA, 15 bp, Homo sapiens
tgggccagaaaaaca

SEQ ID NO: 576624 - DNA, 15 bp, Homo sapiens
atgggccagaaaaac

SEQ ID NO: 576625 - DNA, 15 bp, Homo sapiens
gatgggccagaaaaa

SEQ ID NO: 576626 - DNA, 15 bp, Homo sapiens
cgatgggccagaaaa

SEQ ID NO: 576627 - DNA, 15 bp, Homo sapiens
ccgatgggccagaaa

SEQ ID NO: 576628 - DNA, 15 bp, Homo sapiens
cccgatgggccagaa

SEQ ID NO: 576629 - DNA, 15 bp, Homo sapiens
gccccgatgggccag

SEQ ID NO: 576630 - DNA, 15 bp, Homo sapiens
ggccccgatgggcca

SEQ ID NO: 576631 - DNA, 15 bp, Homo sapiens
cggccccgatgggcc

SEQ ID NO: 576632 - DNA, 15 bp, Homo sapiens
caaagcaggtatccg

SEQ ID NO: 576633 - DNA, 15 bp, Homo sapiens
tcaaagcaggtatcc

SEQ ID NO: 576634 - DNA, 15 bp, Homo sapiens
atcaaagcaggtatc

SEQ ID NO: 576635 - DNA, 15 bp, Homo sapiens
aatcaaagcaggtat

SEQ ID NO: 576636 - DNA, 15 bp, Homo sapiens
aaatcaaagcaggta

SEQ ID NO: 576637 - DNA, 15 bp, Homo sapiens
aaaatcaaagcaggt

SEQ ID NO: 576638 - DNA, 15 bp, Homo sapiens
aaaaatcaaagcagg

SEQ ID NO: 576639 - DNA, 15 bp, Homo sapiens
aaaaaatcaaagcag

SEQ ID NO: 576640 - DNA, 15 bp, Homo sapiens
aaaaaaatcaaagca

SEQ ID NO: 576641 - DNA, 15 bp, Homo sapiens
aaaaaaaatcaaagc

SEQ ID NO: 576642 - DNA, 15 bp, Homo sapiens
aaaaaaaaatcaaag

SEQ ID NO: 576643 - DNA, 15 bp, Homo sapiens
aaaaaaaaaatcaaa

SEQ ID NO: 576644 - DNA, 15 bp, Homo sapiens
aaaaaaaaaaatcaa

SEQ ID NO: 576645 - DNA, 15 bp, Homo sapiens
gaaaaaaaaaaatca

SEQ ID NO: 576646 - DNA, 15 bp, Homo sapiens
tgaaaaaaaaaaatc

SEQ ID NO: 576647 - DNA, 15 bp, Homo sapiens
atgaaaaaaaaaaat

SEQ ID NO: 576648 - DNA, 15 bp, Homo sapiens
gatgaaaaaaaaaaa

SEQ ID NO: 576649 - DNA, 15 bp, Homo sapiens
cgatgaaaaaaaaaa

SEQ ID NO: 576650 - DNA, 15 bp, Homo sapiens
gcgatgaaaaaaaaa

SEQ ID NO: 576651 - DNA, 15 bp, Homo sapiens
ggcgatgaaaaaaaa

SEQ ID NO: 576652 - DNA, 15 bp, Homo sapiens
gggcgatgaaaaaaa

SEQ ID NO: 576653 - DNA, 15 bp, Homo sapiens
tgggcgatgaaaaaa

SEQ ID NO: 576654 - DNA, 15 bp, Homo sapiens
atgggcgatgaaaaa

SEQ ID NO: 576655 - DNA, 15 bp, Homo sapiens
gatgggcgatgaaaa

SEQ ID NO: 576656 - DNA, 15 bp, Homo sapiens
cgatgggcgatgaaa

SEQ ID NO: 576657 - DNA, 15 bp, Homo sapiens
ccgatgggcgatgaa

SEQ ID NO: 576658 - DNA, 15 bp, Homo sapiens
accgatgggcgatga

SEQ ID NO: 576659 - DNA, 15 bp, Homo sapiens
caccgatgggcgatg

SEQ ID NO: 576660 - DNA, 15 bp, Homo sapiens
gcaccgatgggcgat

SEQ ID NO: 576661 - DNA, 15 bp, Homo sapiens
agcaccgatgggcga

SEQ ID NO: 576662 - DNA, 15 bp, Homo sapiens
aagcaccgatgggcg

SEQ ID NO: 576663 - DNA, 15 bp, Homo sapiens
aaagcaccgatgggc

SEQ ID NO: 576664 - DNA, 15 bp, Homo sapiens
aaaagcaccgatggg

SEQ ID NO: 576665 - DNA, 15 bp, Homo sapiens
aaaaagcaccgatgg

SEQ ID NO: 576666 - DNA, 15 bp, Homo sapiens
taaaaagcaccgatg

SEQ ID NO: 576667 - DNA, 15 bp, Homo sapiens
ataaaaagcaccgat

SEQ ID NO: 576668 - DNA, 15 bp, Homo sapiens
cataaaaagcaccga

SEQ ID NO: 576669 - DNA, 15 bp, Homo sapiens
ccataaaaagcaccg

SEQ ID NO: 576670 - DNA, 15 bp, Homo sapiens
tccataaaaagcacc

SEQ ID NO: 576671 - DNA, 15 bp, Homo sapiens
atccataaaaagcac

SEQ ID NO: 576672 - DNA, 15 bp, Homo sapiens
catccataaaaagca

SEQ ID NO: 576673 - DNA, 15 bp, Homo sapiens
tcatccataaaaagc

SEQ ID NO: 576674 - DNA, 15 bp, Homo sapiens
ttcatccataaaaag

SEQ ID NO: 576675 - DNA, 15 bp, Homo sapiens
tttcatccataaaaa

SEQ ID NO: 576676 - DNA, 15 bp, Homo sapiens
ttttcatccataaaa

SEQ ID NO: 576677 - DNA, 15 bp, Homo sapiens
tttttcatccataaa

SEQ ID NO: 576678 - DNA, 15 bp, Homo sapiens
ttttttcatccataa

SEQ ID NO: 576679 - DNA, 15 bp, Homo sapiens
attttttcatccata

SEQ ID NO: 576680 - DNA, 15 bp, Homo sapiens
cattttttcatccat

SEQ ID NO: 576681 - DNA, 15 bp, Homo sapiens
acattttttcatcca

SEQ ID NO: 576682 - DNA, 15 bp, Homo sapiens
aacattttttcatcc

SEQ ID NO: 576683 - DNA, 15 bp, Homo sapiens
caacattttttcatc

SEQ ID NO: 576684 - DNA, 15 bp, Homo sapiens
ccaacattttttcat

SEQ ID NO: 576685 - DNA, 15 bp, Homo sapiens
accaacattttttca

SEQ ID NO: 576686 - DNA, 15 bp, Homo sapiens
aaccaacattttttc

SEQ ID NO: 576687 - DNA, 15 bp, Homo sapiens
aaaccaacatttttt

SEQ ID NO: 576688 - DNA, 15 bp, Homo sapiens
aaaaccaacattttt

SEQ ID NO: 576689 - DNA, 15 bp, Homo sapiens
caaaaccaacatttt

SEQ ID NO: 576690 - DNA, 15 bp, Homo sapiens
acaaaaccaacattt

SEQ ID NO: 576691 - DNA, 15 bp, Homo sapiens
cacaaaaccaacatt

SEQ ID NO: 576692 - DNA, 15 bp, Homo sapiens
ccacaaaaccaacat

SEQ ID NO: 576693 - DNA, 15 bp, Homo sapiens
cccacaaaaccaaca

SEQ ID NO: 576694 - DNA, 15 bp, Homo sapiens
acccacaaaaccaac

SEQ ID NO: 576695 - DNA, 15 bp, Homo sapiens
aacccacaaaaccaa

SEQ ID NO: 576696 - DNA, 15 bp, Homo sapiens
caacccacaaaacca

SEQ ID NO: 576697 - DNA, 15 bp, Homo sapiens
acaacccacaaaacc

SEQ ID NO: 576698 - DNA, 15 bp, Homo sapiens
aacaacccacaaaac

SEQ ID NO: 576699 - DNA, 15 bp, Homo sapiens
caacaacccacaaaa

SEQ ID NO: 576700 - DNA, 15 bp, Homo sapiens
gcaacaacccacaaa

SEQ ID NO: 576701 - DNA, 15 bp, Homo sapiens
tgcaacaacccacaa

SEQ ID NO: 576702 - DNA, 15 bp, Homo sapiens
gtgcaacaacccaca

SEQ ID NO: 576703 - DNA, 15 bp, Homo sapiens
agtgcaacaacccac

SEQ ID NO: 576704 - DNA, 15 bp, Homo sapiens
gagtgcaacaaccca

SEQ ID NO: 576705 - DNA, 15 bp, Homo sapiens
agagtgcaacaaccc

SEQ ID NO: 576706 - DNA, 15 bp, Homo sapiens
gagagtgcaacaacc

SEQ ID NO: 576707 - DNA, 15 bp, Homo sapiens
agagagtgcaacaac

SEQ ID NO: 576708 - DNA, 15 bp, Homo sapiens
cagagagtgcaacaa

SEQ ID NO: 576709 - DNA, 15 bp, Homo sapiens
ccagagagtgcaaca

SEQ ID NO: 576710 - DNA, 15 bp, Homo sapiens
tccagagagtgcaac

SEQ ID NO: 576711 - DNA, 15 bp, Homo sapiens
ttccagagagtgcaa

SEQ ID NO: 576712 - DNA, 15 bp, Homo sapiens
attccagagagtgca

SEQ ID NO: 576713 - DNA, 15 bp, Homo sapiens
tattccagagagtgc

SEQ ID NO: 576714 - DNA, 15 bp, Homo sapiens
atattccagagagtg

SEQ ID NO: 576715 - DNA, 15 bp, Homo sapiens
gatattccagagagt

SEQ ID NO: 576716 - DNA, 15 bp, Homo sapiens
agatattccagagag

SEQ ID NO: 576717 - DNA, 15 bp, Homo sapiens
tagatattccagaga

SEQ ID NO: 576718 - DNA, 15 bp, Homo sapiens
gtagatattccagag

SEQ ID NO: 576719 - DNA, 15 bp, Homo sapiens
tgtagatattccaga

SEQ ID NO: 576720 - DNA, 15 bp, Homo sapiens
gtgtagatattccag

SEQ ID NO: 576721 - DNA, 15 bp, Homo sapiens
agtgtagatattcca

SEQ ID NO: 576722 - DNA, 15 bp, Homo sapiens
aagtgtagatattcc

SEQ ID NO: 576723 - DNA, 15 bp, Homo sapiens
aaagtgtagatattc

SEQ ID NO: 576724 - DNA, 15 bp, Homo sapiens
aaaagtgtagatatt

SEQ ID NO: 576725 - DNA, 15 bp, Homo sapiens
aaaaagtgtagatat

SEQ ID NO: 576726 - DNA, 15 bp, Homo sapiens
aaaaaagtgtagata

SEQ ID NO: 576727 - DNA, 15 bp, Homo sapiens
aaaaaaagtgtagat

SEQ ID NO: 576728 - DNA, 15 bp, Homo sapiens
aaaaaaaagtgtaga

SEQ ID NO: 576729 - DNA, 15 bp, Homo sapiens
caaaaaaaagtgtag

SEQ ID NO: 576730 - DNA, 15 bp, Homo sapiens
gcaaaaaaaagtgta

SEQ ID NO: 576731 - DNA, 15 bp, Homo sapiens
agcaaaaaaaagtgt

SEQ ID NO: 576732 - DNA, 15 bp, Homo sapiens
cagcaaaaaaaagtg

SEQ ID NO: 576733 - DNA, 15 bp, Homo sapiens
gcagcaaaaaaaagt

SEQ ID NO: 576734 - DNA, 15 bp, Homo sapiens
agcagcaaaaaaaag

SEQ ID NO: 576735 - DNA, 15 bp, Homo sapiens
cagcagcaaaaaaaa

SEQ ID NO: 576736 - DNA, 15 bp, Homo sapiens
tcagcagcaaaaaaa

SEQ ID NO: 576737 - DNA, 15 bp, Homo sapiens
atcagcagcaaaaaa

SEQ ID NO: 576738 - DNA, 15 bp, Homo sapiens
gatcagcagcaaaaa

SEQ ID NO: 576739 - DNA, 15 bp, Homo sapiens
tgatcagcagcaaaa

SEQ ID NO: 576740 - DNA, 15 bp, Homo sapiens
atgatcagcagcaaa

SEQ ID NO: 576741 - DNA, 15 bp, Homo sapiens
aatgatcagcagcaa

SEQ ID NO: 576742 - DNA, 15 bp, Homo sapiens
aaatgatcagcagca

SEQ ID NO: 576743 - DNA, 15 bp, Homo sapiens
caaatgatcagcagc

SEQ ID NO: 576744 - DNA, 15 bp, Homo sapiens
ccaaatgatcagcag

SEQ ID NO: 576745 - DNA, 15 bp, Homo sapiens
accaaatgatcagca

SEQ ID NO: 576746 - DNA, 15 bp, Homo sapiens
caccaaatgatcagc

SEQ ID NO: 576747 - DNA, 15 bp, Homo sapiens
ccaccaaatgatcag

SEQ ID NO: 576748 - DNA, 15 bp, Homo sapiens
accaccaaatgatca

SEQ ID NO: 576749 - DNA, 15 bp, Homo sapiens
caccaccaaatgatc

SEQ ID NO: 576750 - DNA, 15 bp, Homo sapiens
acaccaccaaatgat

SEQ ID NO: 576751 - DNA, 15 bp, Homo sapiens
cacaccaccaaatga

SEQ ID NO: 576752 - DNA, 15 bp, Homo sapiens
acacaccaccaaatg

SEQ ID NO: 576753 - DNA, 15 bp, Homo sapiens
cacacaccaccaaat

SEQ ID NO: 576754 - DNA, 15 bp, Homo sapiens
tcacacaccaccaaa

SEQ ID NO: 576755 - DNA, 15 bp, Homo sapiens
ctcacacaccaccaa

SEQ ID NO: 576756 - DNA, 15 bp, Homo sapiens
actcacacaccacca

SEQ ID NO: 576757 - DNA, 15 bp, Homo sapiens
cactcacacaccacc

SEQ ID NO: 576758 - DNA, 15 bp, Homo sapiens
acactcacacaccac

SEQ ID NO: 576759 - DNA, 15 bp, Homo sapiens
tacactcacacacca

SEQ ID NO: 576760 - DNA, 15 bp, Homo sapiens
gtacactcacacacc

SEQ ID NO: 576761 - DNA, 15 bp, Homo sapiens
ggtacactcacacac

SEQ ID NO: 576762 - DNA, 15 bp, Homo sapiens
aggtacactcacaca

SEQ ID NO: 576763 - DNA, 15 bp, Homo sapiens
taggtacactcacac

SEQ ID NO: 576764 - DNA, 15 bp, Homo sapiens
gtaggtacactcaca

SEQ ID NO: 576765 - DNA, 15 bp, Homo sapiens
ggtaggtacactcac

SEQ ID NO: 576766 - DNA, 15 bp, Homo sapiens
cggtaggtacactca

SEQ ID NO: 576767 - DNA, 15 bp, Homo sapiens
gcggtaggtacactc

SEQ ID NO: 576768 - DNA, 15 bp, Homo sapiens
agcggtaggtacact

SEQ ID NO: 576769 - DNA, 15 bp, Homo sapiens
aagcggtaggtacac

SEQ ID NO: 576770 - DNA, 15 bp, Homo sapiens
aaagcggtaggtaca

SEQ ID NO: 576771 - DNA, 15 bp, Homo sapiens
caaagcggtaggtac

SEQ ID NO: 576772 - DNA, 15 bp, Homo sapiens
ccaaagcggtaggta

SEQ ID NO: 576773 - DNA, 15 bp, Homo sapiens
gccaaagcggtaggt

SEQ ID NO: 576774 - DNA, 15 bp, Homo sapiens
tgccaaagcggtagg

SEQ ID NO: 576775 - DNA, 15 bp, Homo sapiens
ctgccaaagcggtag

SEQ ID NO: 576776 - DNA, 15 bp, Homo sapiens
tctgccaaagcggta

SEQ ID NO: 576777 - DNA, 15 bp, Homo sapiens
ctctgccaaagcggt

SEQ ID NO: 576778 - DNA, 15 bp, Homo sapiens
tctctgccaaagcgg

SEQ ID NO: 576779 - DNA, 15 bp, Homo sapiens
ttctctgccaaagcg

SEQ ID NO: 576780 - DNA, 15 bp, Homo sapiens
attctctgccaaagc

SEQ ID NO: 576781 - DNA, 15 bp, Homo sapiens
cattctctgccaaag

SEQ ID NO: 576782 - DNA, 15 bp, Homo sapiens
tcattctctgccaaa

SEQ ID NO: 576783 - DNA, 15 bp, Homo sapiens
gtcattctctgccaa

SEQ ID NO: 576784 - DNA, 15 bp, Homo sapiens
agtcattctctgcca

SEQ ID NO: 576785 - DNA, 15 bp, Homo sapiens
gagtcattctctgcc

SEQ ID NO: 576786 - DNA, 15 bp, Homo sapiens
agagtcattctctgc

SEQ ID NO: 576787 - DNA, 15 bp, Homo sapiens
cagagtcattctctg

SEQ ID NO: 576788 - DNA, 15 bp, Homo sapiens
gcagagtcattctct

SEQ ID NO: 576789 - DNA, 15 bp, Homo sapiens
tgcagagtcattctc

SEQ ID NO: 576790 - DNA, 15 bp, Homo sapiens
ctgcagagtcattct

SEQ ID NO: 576791 - DNA, 15 bp, Homo sapiens
actgcagagtcattc

SEQ ID NO: 576792 - DNA, 15 bp, Homo sapiens
aactgcagagtcatt

SEQ ID NO: 576793 - DNA, 15 bp, Homo sapiens
taactgcagagtcat

SEQ ID NO: 576794 - DNA, 15 bp, Homo sapiens
ttaactgcagagtca

SEQ ID NO: 576795 - DNA, 15 bp, Homo sapiens
cttaactgcagagtc

SEQ ID NO: 576796 - DNA, 15 bp, Homo sapiens
gcttaactgcagagt

SEQ ID NO: 576797 - DNA, 15 bp, Homo sapiens
agcttaactgcagag

SEQ ID NO: 576798 - DNA, 15 bp, Homo sapiens
tagcttaactgcaga

SEQ ID NO: 576799 - DNA, 15 bp, Homo sapiens
ttagcttaactgcag

SEQ ID NO: 576800 - DNA, 15 bp, Homo sapiens
cttagcttaactgca

SEQ ID NO: 576801 - DNA, 15 bp, Homo sapiens
ccttagcttaactgc

SEQ ID NO: 576802 - DNA, 15 bp, Homo sapiens
cccttagcttaactg

SEQ ID NO: 576803 - DNA, 15 bp, Homo sapiens
gcccttagcttaact

SEQ ID NO: 576804 - DNA, 15 bp, Homo sapiens
cgcccttagcttaac

SEQ ID NO: 576805 - DNA, 15 bp, Homo sapiens
acgcccttagcttaa

SEQ ID NO: 576806 - DNA, 15 bp, Homo sapiens
cacgcccttagctta

SEQ ID NO: 576807 - DNA, 15 bp, Homo sapiens
acacgcccttagctt

SEQ ID NO: 576808 - DNA, 15 bp, Homo sapiens
aacacgcccttagct

SEQ ID NO: 576809 - DNA, 15 bp, Homo sapiens
tgataaaagatgatt

SEQ ID NO: 576810 - DNA, 15 bp, Homo sapiens
ctgataaaagatgat

SEQ ID NO: 576811 - DNA, 15 bp, Homo sapiens
actgataaaagatga

SEQ ID NO: 576812 - DNA, 15 bp, Homo sapiens
tactgataaaagatg

SEQ ID NO: 576813 - DNA, 15 bp, Homo sapiens
gtactgataaaagat

SEQ ID NO: 576814 - DNA, 15 bp, Homo sapiens
tgtactgataaaaga

SEQ ID NO: 576815 - DNA, 15 bp, Homo sapiens
ttgtactgataaaag

SEQ ID NO: 576816 - DNA, 15 bp, Homo sapiens
cttgtactgataaaa

SEQ ID NO: 576817 - DNA, 15 bp, Homo sapiens
ccttgtactgataaa

SEQ ID NO: 576818 - DNA, 15 bp, Homo sapiens
cccttgtactgataa

SEQ ID NO: 576819 - DNA, 15 bp, Homo sapiens
tcccttgtactgata

SEQ ID NO: 576820 - DNA, 15 bp, Homo sapiens
gtcccttgtactgat

SEQ ID NO: 576821 - DNA, 15 bp, Homo sapiens
agtcccttgtactga

SEQ ID NO: 576822 - DNA, 15 bp, Homo sapiens
tagtcccttgtactg

SEQ ID NO: 576823 - DNA, 15 bp, Homo sapiens
ctagtcccttgtact

SEQ ID NO: 576824 - DNA, 15 bp, Homo sapiens
actagtcccttgtac

SEQ ID NO: 576825 - DNA, 15 bp, Homo sapiens
aactagtcccttgta

SEQ ID NO: 576826 - DNA, 15 bp, Homo sapiens
taactagtcccttgt

SEQ ID NO: 576827 - DNA, 15 bp, Homo sapiens
ttaactagtcccttg

SEQ ID NO: 576828 - DNA, 15 bp, Homo sapiens
tttaactagtccctt

SEQ ID NO: 576829 - DNA, 15 bp, Homo sapiens
ttttaactagtccct

SEQ ID NO: 576830 - DNA, 15 bp, Homo sapiens
tttttaactagtccc

SEQ ID NO: 576831 - DNA, 15 bp, Homo sapiens
atttttaactagtcc

SEQ ID NO: 576832 - DNA, 15 bp, Homo sapiens
catttttaactagtc

SEQ ID NO: 576833 - DNA, 15 bp, Homo sapiens
ccatttttaactagt

SEQ ID NO: 576834 - DNA, 15 bp, Homo sapiens
tccatttttaactag

SEQ ID NO: 576835 - DNA, 15 bp, Homo sapiens
ttccatttttaacta

SEQ ID NO: 576836 - DNA, 15 bp, Homo sapiens
cttccatttttaact

SEQ ID NO: 576837 - DNA, 15 bp, Homo sapiens
ccttccatttttaac

SEQ ID NO: 576838 - DNA, 15 bp, Homo sapiens
accttccatttttaa

SEQ ID NO: 576839 - DNA, 15 bp, Homo sapiens
aaccttccattttta

SEQ ID NO: 576840 - DNA, 15 bp, Homo sapiens
taaccttccattttt

SEQ ID NO: 576841 - DNA, 15 bp, Homo sapiens
ctaaccttccatttt

SEQ ID NO: 576842 - DNA, 15 bp, Homo sapiens
cctaaccttccattt

SEQ ID NO: 576843 - DNA, 15 bp, Homo sapiens
tcctaaccttccatt

SEQ ID NO: 576844 - DNA, 15 bp, Homo sapiens
ttcctaaccttccat

SEQ ID NO: 576845 - DNA, 15 bp, Homo sapiens
tttcctaaccttcca

SEQ ID NO: 576846 - DNA, 15 bp, Homo sapiens
ctttcctaaccttcc

SEQ ID NO: 576847 - DNA, 15 bp, Homo sapiens
tctttcctaaccttc

SEQ ID NO: 576848 - DNA, 15 bp, Homo sapiens
gtctttcctaacctt

SEQ ID NO: 576849 - DNA, 15 bp, Homo sapiens
agtctttcctaacct

SEQ ID NO: 576850 - DNA, 15 bp, Homo sapiens
tagtctttcctaacc

SEQ ID NO: 576851 - DNA, 15 bp, Homo sapiens
ttagtctttcctaac

SEQ ID NO: 576852 - DNA, 15 bp, Homo sapiens
cttagtctttcctaa

SEQ ID NO: 576853 - DNA, 15 bp, Homo sapiens
ccttagtctttccta

SEQ ID NO: 576854 - DNA, 15 bp, Homo sapiens
accttagtctttcct

SEQ ID NO: 576855 - DNA, 15 bp, Homo sapiens
caccttagtctttcc

SEQ ID NO: 576856 - DNA, 15 bp, Homo sapiens
gcaccttagtctttc

SEQ ID NO: 576857 - DNA, 15 bp, Homo sapiens
tgcaccttagtcttt

SEQ ID NO: 576858 - DNA, 15 bp, Homo sapiens
ctgcaccttagtctt

SEQ ID NO: 576859 - DNA, 15 bp, Homo sapiens
cctgcaccttagtct

SEQ ID NO: 576860 - DNA, 15 bp, Homo sapiens
ccctgcaccttagtc

SEQ ID NO: 576861 - DNA, 15 bp, Homo sapiens
gccctgcaccttagt

SEQ ID NO: 576862 - DNA, 15 bp, Homo sapiens
agccctgcaccttag

SEQ ID NO: 576863 - DNA, 15 bp, Homo sapiens
aagccctgcacctta

SEQ ID NO: 576864 - DNA, 15 bp, Homo sapiens
taagccctgcacctt

SEQ ID NO: 576865 - DNA, 15 bp, Homo sapiens
ttaagccctgcacct

SEQ ID NO: 576866 - DNA, 15 bp, Homo sapiens
tttaagccctgcacc

SEQ ID NO: 576867 - DNA, 15 bp, Homo sapiens
ttttaagccctgcac

SEQ ID NO: 576868 - DNA, 15 bp, Homo sapiens
attttaagccctgca

SEQ ID NO: 576869 - DNA, 15 bp, Homo sapiens
cgcacatgtccacca

SEQ ID NO: 576870 - DNA, 15 bp, Homo sapiens
ccgcacatgtccacc

SEQ ID NO: 576871 - DNA, 15 bp, Homo sapiens
accgcacatgtccac

SEQ ID NO: 576872 - DNA, 15 bp, Homo sapiens
gaccgcacatgtcca

SEQ ID NO: 576873 - DNA, 15 bp, Homo sapiens
tgaccgcacatgtcc

SEQ ID NO: 576874 - DNA, 15 bp, Homo sapiens
gtgaccgcacatgtc

SEQ ID NO: 576875 - DNA, 15 bp, Homo sapiens
tgtgaccgcacatgt

SEQ ID NO: 576876 - DNA, 15 bp, Homo sapiens
gtgtgaccgcacatg

SEQ ID NO: 576877 - DNA, 15 bp, Homo sapiens
tgtgtgaccgcacat

SEQ ID NO: 576878 - DNA, 15 bp, Homo sapiens
ctgtgtgaccgcaca

SEQ ID NO: 576879 - DNA, 15 bp, Homo sapiens
cctgtgtgaccgcac

SEQ ID NO: 576880 - DNA, 15 bp, Homo sapiens
tcctgtgtgaccgca

SEQ ID NO: 576881 - DNA, 15 bp, Homo sapiens
ttcctgtgtgaccgc

SEQ ID NO: 576882 - DNA, 15 bp, Homo sapiens
tttcctgtgtgaccg

SEQ ID NO: 576883 - DNA, 15 bp, Homo sapiens
ttttcctgtgtgacc

SEQ ID NO: 576884 - DNA, 15 bp, Homo sapiens
cttttcctgtgtgac

SEQ ID NO: 576885 - DNA, 15 bp, Homo sapiens
tcttttcctgtgtga

SEQ ID NO: 576886 - DNA, 15 bp, Homo sapiens
gcggcaagcccgcca

SEQ ID NO: 576887 - DNA, 15 bp, Homo sapiens
tgcggcaagcccgcc

SEQ ID NO: 576888 - DNA, 15 bp, Homo sapiens
atgcggcaagcccgc

SEQ ID NO: 576889 - DNA, 15 bp, Homo sapiens
aatgcggcaagcccg

SEQ ID NO: 576890 - DNA, 15 bp, Homo sapiens
caatgcggcaagccc

SEQ ID NO: 576891 - DNA, 15 bp, Homo sapiens
acaatgcggcaagcc

SEQ ID NO: 576892 - DNA, 15 bp, Homo sapiens
aacaatgcggcaagc

SEQ ID NO: 576893 - DNA, 15 bp, Homo sapiens
taacaatgcggcaag

SEQ ID NO: 576894 - DNA, 15 bp, Homo sapiens
ttaacaatgcggcaa

SEQ ID NO: 576895 - DNA, 15 bp, Homo sapiens
tttaacaatgcggca

SEQ ID NO: 576896 - DNA, 15 bp, Homo sapiens
ctttaacaatgcggc

SEQ ID NO: 576897 - DNA, 15 bp, Homo sapiens
tctttaacaatgcgg

SEQ ID NO: 576898 - DNA, 15 bp, Homo sapiens
atctttaacaatgcg

SEQ ID NO: 576899 - DNA, 15 bp, Homo sapiens
catctttaacaatgc

SEQ ID NO: 576900 - DNA, 15 bp, Homo sapiens
ccatctttaacaatg

SEQ ID NO: 576901 - DNA, 15 bp, Homo sapiens
gccatctttaacaat

SEQ ID NO: 576902 - DNA, 15 bp, Homo sapiens
cgccatctttaacaa

SEQ ID NO: 576903 - DNA, 15 bp, Homo sapiens
ccgccatctttaaca

SEQ ID NO: 576904 - DNA, 15 bp, Homo sapiens
cccgccatctttaac

SEQ ID NO: 576905 - DNA, 15 bp, Homo sapiens
acccgccatctttaa

SEQ ID NO: 576906 - DNA, 15 bp, Homo sapiens
aacccgccatcttta

SEQ ID NO: 576907 - DNA, 15 bp, Homo sapiens
aaacccgccatcttt

SEQ ID NO: 576908 - DNA, 15 bp, Homo sapiens
aaaacccgccatctt

SEQ ID NO: 576909 - DNA, 15 bp, Homo sapiens
caaaacccgccatct

SEQ ID NO: 576910 - DNA, 15 bp, Homo sapiens
gcaaaacccgccatc

SEQ ID NO: 576911 - DNA, 15 bp, Homo sapiens
ggcaaaacccgccat

SEQ ID NO: 576912 - DNA, 15 bp, Homo sapiens
cggcaaaacccgcca

SEQ ID NO: 576913 - DNA, 15 bp, Homo sapiens
gcggcaaaacccgcc

SEQ ID NO: 576914 - DNA, 15 bp, Homo sapiens
ggcggcaaaacccgc

SEQ ID NO: 576915 - DNA, 15 bp, Homo sapiens
aggcggcaaaacccg

SEQ ID NO: 576916 - DNA, 15 bp, Homo sapiens
taggcggcaaaaccc

SEQ ID NO: 576917 - DNA, 15 bp, Homo sapiens
ctaggcggcaaaacc

SEQ ID NO: 576918 - DNA, 15 bp, Homo sapiens
actaggcggcaaaac

SEQ ID NO: 576919 - DNA, 15 bp, Homo sapiens
cactaggcggcaaaa

SEQ ID NO: 576920 - DNA, 15 bp, Homo sapiens
gcactaggcggcaaa

SEQ ID NO: 576921 - DNA, 15 bp, Homo sapiens
ggcactaggcggcaa

SEQ ID NO: 576922 - DNA, 15 bp, Homo sapiens
tggcactaggcggca

SEQ ID NO: 576923 - DNA, 15 bp, Homo sapiens
gtggcactaggcggc

SEQ ID NO: 576924 - DNA, 15 bp, Homo sapiens
cgtggcactaggcgg

SEQ ID NO: 576925 - DNA, 15 bp, Homo sapiens
gcgtggcactaggcg

SEQ ID NO: 576926 - DNA, 15 bp, Homo sapiens
tgcgtggcactaggc

SEQ ID NO: 576927 - DNA, 15 bp, Homo sapiens
ctgcgtggcactagg

SEQ ID NO: 576928 - DNA, 15 bp, Homo sapiens
tctgcgtggcactag

SEQ ID NO: 576929 - DNA, 15 bp, Homo sapiens
ctctgcgtggcacta

SEQ ID NO: 576930 - DNA, 15 bp, Homo sapiens
gctctgcgtggcact

SEQ ID NO: 576931 - DNA, 15 bp, Homo sapiens
cgctctgcgtggcac

SEQ ID NO: 576932 - DNA, 15 bp, Homo sapiens
ccgctctgcgtggca

SEQ ID NO: 576933 - DNA, 15 bp, Homo sapiens
cccgctctgcgtggc

SEQ ID NO: 576934 - DNA, 15 bp, Homo sapiens
tcccgctctgcgtgg

SEQ ID NO: 576935 - DNA, 15 bp, Homo sapiens
ctcccgctctgcgtg

SEQ ID NO: 576936 - DNA, 15 bp, Homo sapiens
tctcccgctctgcgt

SEQ ID NO: 576937 - DNA, 15 bp, Homo sapiens
ttctcccgctctgcg

SEQ ID NO: 576938 - DNA, 15 bp, Homo sapiens
tttctcccgctctgc

SEQ ID NO: 576939 - DNA, 15 bp, Homo sapiens
ttttctcccgctctg

SEQ ID NO: 576940 - DNA, 15 bp, Homo sapiens
cttttctcccgctct

SEQ ID NO: 576941 - DNA, 15 bp, Homo sapiens
ccttttctcccgctc

SEQ ID NO: 576942 - DNA, 15 bp, Homo sapiens
accttttctcccgct

SEQ ID NO: 576943 - DNA, 15 bp, Homo sapiens
caccttttctcccgc

SEQ ID NO: 576944 - DNA, 15 bp, Homo sapiens
ccaccttttctcccg

SEQ ID NO: 576945 - DNA, 15 bp, Homo sapiens
cccaccttttctccc

SEQ ID NO: 576946 - DNA, 15 bp, Homo sapiens
tcccaccttttctcc

SEQ ID NO: 576947 - DNA, 15 bp, Homo sapiens
atcccaccttttctc

SEQ ID NO: 576948 - DNA, 15 bp, Homo sapiens
catcccaccttttct

SEQ ID NO: 576949 - DNA, 15 bp, Homo sapiens
ccatcccaccttttc

SEQ ID NO: 576950 - DNA, 15 bp, Homo sapiens
tccatcccacctttt

SEQ ID NO: 576951 - DNA, 15 bp, Homo sapiens
gtccatcccaccttt

SEQ ID NO: 576952 - DNA, 15 bp, Homo sapiens
tgtccatcccacctt

SEQ ID NO: 576953 - DNA, 15 bp, Homo sapiens
ctgtccatcccacct

SEQ ID NO: 576954 - DNA, 15 bp, Homo sapiens
actgtccatcccacc

SEQ ID NO: 576955 - DNA, 15 bp, Homo sapiens
cactgtccatcccac

SEQ ID NO: 576956 - DNA, 15 bp, Homo sapiens
gcactgtccatccca

SEQ ID NO: 576957 - DNA, 15 bp, Homo sapiens
agcactgtccatccc

SEQ ID NO: 576958 - DNA, 15 bp, Homo sapiens
cagcactgtccatcc

SEQ ID NO: 576959 - DNA, 15 bp, Homo sapiens
ccagcactgtccatc

SEQ ID NO: 576960 - DNA, 15 bp, Homo sapiens
tccagcactgtccat

SEQ ID NO: 576961 - DNA, 15 bp, Homo sapiens
atccagcactgtcca

SEQ ID NO: 576962 - DNA, 15 bp, Homo sapiens
aatccagcactgtcc

SEQ ID NO: 576963 - DNA, 15 bp, Homo sapiens
caatccagcactgtc

SEQ ID NO: 576964 - DNA, 15 bp, Homo sapiens
gcaatccagcactgt

SEQ ID NO: 576965 - DNA, 15 bp, Homo sapiens
agcaatccagcactg

SEQ ID NO: 576966 - DNA, 15 bp, Homo sapiens
cagcaatccagcact

SEQ ID NO: 576967 - DNA, 15 bp, Homo sapiens
gcagcaatccagcac

SEQ ID NO: 576968 - DNA, 15 bp, Homo sapiens
tgcagcaatccagca

SEQ ID NO: 576969 - DNA, 15 bp, Homo sapiens
atgcagcaatccagc

SEQ ID NO: 576970 - DNA, 15 bp, Homo sapiens
ctgtctgataagtag

SEQ ID NO: 576971 - DNA, 15 bp, Homo sapiens
cctgtctgataagta

SEQ ID NO: 576972 - DNA, 15 bp, Homo sapiens
tcctgtctgataagt

SEQ ID NO: 576973 - DNA, 15 bp, Homo sapiens
ttcctgtctgataag

SEQ ID NO: 576974 - DNA, 15 bp, Homo sapiens
tttcctgtctgataa

SEQ ID NO: 576975 - DNA, 15 bp, Homo sapiens
gtttcctgtctgata

SEQ ID NO: 576976 - DNA, 15 bp, Homo sapiens
agtttcctgtctgat

SEQ ID NO: 576977 - DNA, 15 bp, Homo sapiens
aagtttcctgtctga

SEQ ID NO: 576978 - DNA, 15 bp, Homo sapiens
caagtttcctgtctg

SEQ ID NO: 576979 - DNA, 15 bp, Homo sapiens
tcaagtttcctgtct

SEQ ID NO: 576980 - DNA, 15 bp, Homo sapiens
ttcaagtttcctgtc

SEQ ID NO: 576981 - DNA, 15 bp, Homo sapiens
attcaagtttcctgt

SEQ ID NO: 576982 - DNA, 15 bp, Homo sapiens
aattcaagtttcctg

SEQ ID NO: 576983 - DNA, 15 bp, Homo sapiens
caattcaagtttcct

SEQ ID NO: 576984 - DNA, 15 bp, Homo sapiens
gcaattcaagtttcc

SEQ ID NO: 576985 - DNA, 15 bp, Homo sapiens
agcaattcaagtttc

SEQ ID NO: 576986 - DNA, 15 bp, Homo sapiens
cagcaattcaagttt

SEQ ID NO: 576987 - DNA, 15 bp, Homo sapiens
acagcaattcaagtt

SEQ ID NO: 576988 - DNA, 15 bp, Homo sapiens
cacagcaattcaagt

SEQ ID NO: 576989 - DNA, 15 bp, Homo sapiens
ccacagcaattcaag

SEQ ID NO: 576990 - DNA, 15 bp, Homo sapiens
accacagcaattcaa

SEQ ID NO: 576991 - DNA, 15 bp, Homo sapiens
gaccacagcaattca

SEQ ID NO: 576992 - DNA, 15 bp, Homo sapiens
agaccacagcaattc

SEQ ID NO: 576993 - DNA, 15 bp, Homo sapiens
cagaccacagcaatt

SEQ ID NO: 576994 - DNA, 15 bp, Homo sapiens
ccagaccacagcaat

SEQ ID NO: 576995 - DNA, 15 bp, Homo sapiens
accagaccacagcaa

SEQ ID NO: 576996 - DNA, 15 bp, Homo sapiens
caccagaccacagca

SEQ ID NO: 576997 - DNA, 15 bp, Homo sapiens
acaccagaccacagc

SEQ ID NO: 576998 - DNA, 15 bp, Homo sapiens
gacaccagaccacag

SEQ ID NO: 576999 - DNA, 15 bp, Homo sapiens
ggacaccagaccaca

SEQ ID NO: 577000 - DNA, 15 bp, Homo sapiens
aggacaccagaccac

SEQ ID NO: 577001 - DNA, 15 bp, Homo sapiens
gaggacaccagacca

SEQ ID NO: 577002 - DNA, 15 bp, Homo sapiens
agaggacaccagacc

SEQ ID NO: 577003 - DNA, 15 bp, Homo sapiens
tagaggacaccagac

SEQ ID NO: 577004 - DNA, 15 bp, Homo sapiens
atagaggacaccaga

SEQ ID NO: 577005 - DNA, 15 bp, Homo sapiens
aatagaggacaccag

SEQ ID NO: 577006 - DNA, 15 bp, Homo sapiens
gaatagaggacacca

SEQ ID NO: 577007 - DNA, 15 bp, Homo sapiens
tgaatagaggacacc

SEQ ID NO: 577008 - DNA, 15 bp, Homo sapiens
ctgaatagaggacac

SEQ ID NO: 577009 - DNA, 15 bp, Homo sapiens
tctgaatagaggaca

SEQ ID NO: 577010 - DNA, 15 bp, Homo sapiens
gtctgaatagaggac

SEQ ID NO: 577011 - DNA, 15 bp, Homo sapiens
agtctgaatagagga

SEQ ID NO: 577012 - DNA, 15 bp, Homo sapiens
aagtctgaatagagg

SEQ ID NO: 577013 - DNA, 15 bp, Homo sapiens
taagtctgaatagag

SEQ ID NO: 577014 - DNA, 15 bp, Homo sapiens
ataagtctgaataga

SEQ ID NO: 577015 - DNA, 15 bp, Homo sapiens
aataagtctgaatag

SEQ ID NO: 577016 - DNA, 15 bp, Homo sapiens
taataagtctgaata

SEQ ID NO: 577017 - DNA, 15 bp, Homo sapiens
ataataagtctgaat

SEQ ID NO: 577018 - DNA, 15 bp, Homo sapiens
tataataagtctgaa

SEQ ID NO: 577019 - DNA, 15 bp, Homo sapiens
atataataagtctga

SEQ ID NO: 577020 - DNA, 15 bp, Homo sapiens
aatataataagtctg

SEQ ID NO: 577021 - DNA, 15 bp, Homo sapiens
caatataataagtct

SEQ ID NO: 577022 - DNA, 15 bp, Homo sapiens
ccaatataataagtc

SEQ ID NO: 577023 - DNA, 15 bp, Homo sapiens
tccaatataataagt

SEQ ID NO: 577024 - DNA, 15 bp, Homo sapiens
ctccaatataataag

SEQ ID NO: 577025 - DNA, 15 bp, Homo sapiens
actccaatataataa

SEQ ID NO: 577026 - DNA, 15 bp, Homo sapiens
tactccaatataata

SEQ ID NO: 577027 - DNA, 15 bp, Homo sapiens
atactccaatataat

SEQ ID NO: 577028 - DNA, 15 bp, Homo sapiens
aatactccaatataa

SEQ ID NO: 577029 - DNA, 15 bp, Homo sapiens
aaatactccaatata

SEQ ID NO: 577030 - DNA, 15 bp, Homo sapiens
gaaatactccaatat

SEQ ID NO: 577031 - DNA, 15 bp, Homo sapiens
tgaaatactccaata

SEQ ID NO: 577032 - DNA, 15 bp, Homo sapiens
ttgaaatactccaat

SEQ ID NO: 577033 - DNA, 15 bp, Homo sapiens
attgaaatactccaa

SEQ ID NO: 577034 - DNA, 15 bp, Homo sapiens
aattgaaatactcca

SEQ ID NO: 577035 - DNA, 15 bp, Homo sapiens
aaattgaaatactcc

SEQ ID NO: 577036 - DNA, 15 bp, Homo sapiens
aaaattgaaatactc

SEQ ID NO: 577037 - DNA, 15 bp, Homo sapiens
aaaaattgaaatact

SEQ ID NO: 577038 - DNA, 15 bp, Homo sapiens
gaaaaattgaaatac

SEQ ID NO: 577039 - DNA, 15 bp, Homo sapiens
cgaaaaattgaaata

SEQ ID NO: 577040 - DNA, 15 bp, Homo sapiens
acgaaaaattgaaat

SEQ ID NO: 577041 - DNA, 15 bp, Homo sapiens
aacgaaaaattgaaa

SEQ ID NO: 577042 - DNA, 15 bp, Homo sapiens
caacgaaaaattgaa

SEQ ID NO: 577043 - DNA, 15 bp, Homo sapiens
acaacgaaaaattga

SEQ ID NO: 577044 - DNA, 15 bp, Homo sapiens
tacaacgaaaaattg

SEQ ID NO: 577045 - DNA, 15 bp, Homo sapiens
atacaacgaaaaatt

SEQ ID NO: 577046 - DNA, 15 bp, Homo sapiens
gatacaacgaaaaat

SEQ ID NO: 577047 - DNA, 15 bp, Homo sapiens
ggatacaacgaaaaa

SEQ ID NO: 577048 - DNA, 15 bp, Homo sapiens
aggatacaacgaaaa

SEQ ID NO: 577049 - DNA, 15 bp, Homo sapiens
caggatacaacgaaa

SEQ ID NO: 577050 - DNA, 15 bp, Homo sapiens
gcaggatacaacgaa

SEQ ID NO: 577051 - DNA, 15 bp, Homo sapiens
ggcaggatacaacga

SEQ ID NO: 577052 - DNA, 15 bp, Homo sapiens
aggcaggatacaacg

SEQ ID NO: 577053 - DNA, 15 bp, Homo sapiens
caggcaggatacaac

SEQ ID NO: 577054 - DNA, 15 bp, Homo sapiens
gcaggcaggatacaa

SEQ ID NO: 577055 - DNA, 15 bp, Homo sapiens
ggcaggcaggataca

SEQ ID NO: 577056 - DNA, 15 bp, Homo sapiens
aggcaggcaggatac

SEQ ID NO: 577057 - DNA, 15 bp, Homo sapiens
taggcaggcaggata

SEQ ID NO: 577058 - DNA, 15 bp, Homo sapiens
ctaggcaggcaggat

SEQ ID NO: 577059 - DNA, 15 bp, Homo sapiens
gctaggcaggcagga

SEQ ID NO: 577060 - DNA, 15 bp, Homo sapiens
tgctaggcaggcagg

SEQ ID NO: 577061 - DNA, 15 bp, Homo sapiens
atgctaggcaggcag

SEQ ID NO: 577062 - DNA, 15 bp, Homo sapiens
gatgctaggcaggca

SEQ ID NO: 577063 - DNA, 15 bp, Homo sapiens
ggatgctaggcaggc

SEQ ID NO: 577064 - DNA, 15 bp, Homo sapiens
tggatgctaggcagg

SEQ ID NO: 577065 - DNA, 15 bp, Homo sapiens
ctggatgctaggcag

SEQ ID NO: 577066 - DNA, 15 bp, Homo sapiens
actggatgctaggca

SEQ ID NO: 577067 - DNA, 15 bp, Homo sapiens
aactggatgctaggc

SEQ ID NO: 577068 - DNA, 15 bp, Homo sapiens
gaactggatgctagg

SEQ ID NO: 577069 - DNA, 15 bp, Homo sapiens
ggaactggatgctag

SEQ ID NO: 577070 - DNA, 15 bp, Homo sapiens
aggaactggatgcta

SEQ ID NO: 577071 - DNA, 15 bp, Homo sapiens
gaggaactggatgct

SEQ ID NO: 577072 - DNA, 15 bp, Homo sapiens
ggaggaactggatgc

SEQ ID NO: 577073 - DNA, 15 bp, Homo sapiens
gggaggaactggatg

SEQ ID NO: 577074 - DNA, 15 bp, Homo sapiens
ggggaggaactggat

SEQ ID NO: 577075 - DNA, 15 bp, Homo sapiens
tggggaggaactgga

SEQ ID NO: 577076 - DNA, 15 bp, Homo sapiens
ctggggaggaactgg

SEQ ID NO: 577077 - DNA, 15 bp, Homo sapiens
gctggggaggaactg

SEQ ID NO: 577078 - DNA, 15 bp, Homo sapiens
ggctggggaggaact

SEQ ID NO: 577079 - DNA, 15 bp, Homo sapiens
gggctggggaggaac

SEQ ID NO: 577080 - DNA, 15 bp, Homo sapiens
agggctggggaggaa

SEQ ID NO: 577081 - DNA, 15 bp, Homo sapiens
cagggctggggagga

SEQ ID NO: 577082 - DNA, 15 bp, Homo sapiens
gcagggctggggagg

SEQ ID NO: 577083 - DNA, 15 bp, Homo sapiens
agcagggctggggag

SEQ ID NO: 577084 - DNA, 15 bp, Homo sapiens
gagcagggctgggga

SEQ ID NO: 577085 - DNA, 15 bp, Homo sapiens
ggagcagggctgggg

SEQ ID NO: 577086 - DNA, 15 bp, Homo sapiens
gggagcagggctggg

SEQ ID NO: 577087 - DNA, 15 bp, Homo sapiens
tgggagcagggctgg

SEQ ID NO: 577088 - DNA, 15 bp, Homo sapiens
ctgggagcagggctg

SEQ ID NO: 577089 - DNA, 15 bp, Homo sapiens
gctgggagcagggct

SEQ ID NO: 577090 - DNA, 15 bp, Homo sapiens
tgctgggagcagggc

SEQ ID NO: 577091 - DNA, 15 bp, Homo sapiens
ttgctgggagcaggg

SEQ ID NO: 577092 - DNA, 15 bp, Homo sapiens
tttgctgggagcagg

SEQ ID NO: 577093 - DNA, 15 bp, Homo sapiens
gtttgctgggagcag

SEQ ID NO: 577094 - DNA, 15 bp, Homo sapiens
ggtttgctgggagca

SEQ ID NO: 577095 - DNA, 15 bp, Homo sapiens
gggtttgctgggagc

SEQ ID NO: 577096 - DNA, 15 bp, Homo sapiens
ggggtttgctgggag

SEQ ID NO: 577097 - DNA, 15 bp, Homo sapiens
aggggtttgctggga

SEQ ID NO: 577098 - DNA, 15 bp, Homo sapiens
taggggtttgctggg

SEQ ID NO: 577099 - DNA, 15 bp, Homo sapiens
ctaggggtttgctgg

SEQ ID NO: 577100 - DNA, 15 bp, Homo sapiens
actaggggtttgctg

SEQ ID NO: 577101 - DNA, 15 bp, Homo sapiens
gactaggggtttgct

SEQ ID NO: 577102 - DNA, 15 bp, Homo sapiens
agactaggggtttgc

SEQ ID NO: 577103 - DNA, 15 bp, Homo sapiens
tagactaggggtttg

SEQ ID NO: 577104 - DNA, 15 bp, Homo sapiens
ctagactaggggttt

SEQ ID NO: 577105 - DNA, 15 bp, Homo sapiens
gctagactaggggtt

SEQ ID NO: 577106 - DNA, 15 bp, Homo sapiens
ggctagactaggggt

SEQ ID NO: 577107 - DNA, 15 bp, Homo sapiens
gggctagactagggg

SEQ ID NO: 577108 - DNA, 15 bp, Homo sapiens
ggggctagactaggg

SEQ ID NO: 577109 - DNA, 15 bp, Homo sapiens
tggggctagactagg

SEQ ID NO: 577110 - DNA, 15 bp, Homo sapiens
ctggggctagactag

SEQ ID NO: 577111 - DNA, 15 bp, Homo sapiens
gctggggctagacta

SEQ ID NO: 577112 - DNA, 15 bp, Homo sapiens
ggctggggctagact

SEQ ID NO: 577113 - DNA, 15 bp, Homo sapiens
gggctggggctagac

SEQ ID NO: 577114 - DNA, 15 bp, Homo sapiens
agggctggggctaga

SEQ ID NO: 577115 - DNA, 15 bp, Homo sapiens
tagggctggggctag

SEQ ID NO: 577116 - DNA, 15 bp, Homo sapiens
gtagggctggggcta

SEQ ID NO: 577117 - DNA, 15 bp, Homo sapiens
agtagggctggggct

SEQ ID NO: 577118 - DNA, 15 bp, Homo sapiens
gagtagggctggggc

SEQ ID NO: 577119 - DNA, 15 bp, Homo sapiens
ggagtagggctgggg

SEQ ID NO: 577120 - DNA, 15 bp, Homo sapiens
gggagtagggctggg

SEQ ID NO: 577121 - DNA, 15 bp, Homo sapiens
tgggagtagggctgg

SEQ ID NO: 577122 - DNA, 15 bp, Homo sapiens
gtgggagtagggctg

SEQ ID NO: 577123 - DNA, 15 bp, Homo sapiens
ggtgggagtagggct

SEQ ID NO: 577124 - DNA, 15 bp, Homo sapiens
gggtgggagtagggc

SEQ ID NO: 577125 - DNA, 15 bp, Homo sapiens
ggggtgggagtaggg

SEQ ID NO: 577126 - DNA, 15 bp, Homo sapiens
cggggtgggagtagg

SEQ ID NO: 577127 - DNA, 15 bp, Homo sapiens
gcggggtgggagtag

SEQ ID NO: 577128 - DNA, 15 bp, Homo sapiens
ggcggggtgggagta

SEQ ID NO: 577129 - DNA, 15 bp, Homo sapiens
gggcggggtgggagt

SEQ ID NO: 577130 - DNA, 15 bp, Homo sapiens
ggggcggggtgggag

SEQ ID NO: 577131 - DNA, 15 bp, Homo sapiens
tggggcggggtggga

SEQ ID NO: 577132 - DNA, 15 bp, Homo sapiens
ctggggcggggtggg

SEQ ID NO: 577133 - DNA, 15 bp, Homo sapiens
gctggggcggggtgg

SEQ ID NO: 577134 - DNA, 15 bp, Homo sapiens
ggctggggcggggtg

SEQ ID NO: 577135 - DNA, 15 bp, Homo sapiens
gggctggggcggggt

SEQ ID NO: 577136 - DNA, 15 bp, Homo sapiens
agggctggggcgggg

SEQ ID NO: 577137 - DNA, 15 bp, Homo sapiens
cagggctggggcggg

SEQ ID NO: 577138 - DNA, 15 bp, Homo sapiens
gcagggctggggcgg

SEQ ID NO: 577139 - DNA, 15 bp, Homo sapiens
ggcagggctggggcg

SEQ ID NO: 577140 - DNA, 15 bp, Homo sapiens
gggcagggctggggc

SEQ ID NO: 577141 - DNA, 15 bp, Homo sapiens
ggggcagggctgggg

SEQ ID NO: 577142 - DNA, 15 bp, Homo sapiens
tggggcagggctggg

SEQ ID NO: 577143 - DNA, 15 bp, Homo sapiens
ctggggcagggctgg

SEQ ID NO: 577144 - DNA, 15 bp, Homo sapiens
gctggggcagggctg

SEQ ID NO: 577145 - DNA, 15 bp, Homo sapiens
ggctggggcagggct

SEQ ID NO: 577146 - DNA, 15 bp, Homo sapiens
gggctggggcagggc

SEQ ID NO: 577147 - DNA, 15 bp, Homo sapiens
ggggctggggcaggg

SEQ ID NO: 577148 - DNA, 15 bp, Homo sapiens
tggggctggggcagg

SEQ ID NO: 577149 - DNA, 15 bp, Homo sapiens
ctggggctggggcag

SEQ ID NO: 577150 - DNA, 15 bp, Homo sapiens
actggggctggggca

SEQ ID NO: 577151 - DNA, 15 bp, Homo sapiens
gactggggctggggc

SEQ ID NO: 577152 - DNA, 15 bp, Homo sapiens
ggactggggctgggg

SEQ ID NO: 577153 - DNA, 15 bp, Homo sapiens
gggactggggctggg

SEQ ID NO: 577154 - DNA, 15 bp, Homo sapiens
ggggactggggctgg

SEQ ID NO: 577155 - DNA, 15 bp, Homo sapiens
aggggactggggctg

SEQ ID NO: 577156 - DNA, 15 bp, Homo sapiens
taggggactggggct

SEQ ID NO: 577157 - DNA, 15 bp, Homo sapiens
ttaggggactggggc

SEQ ID NO: 577158 - DNA, 15 bp, Homo sapiens
gttaggggactgggg

SEQ ID NO: 577159 - DNA, 15 bp, Homo sapiens
ggttaggggactggg

SEQ ID NO: 577160 - DNA, 15 bp, Homo sapiens
gggttaggggactgg

SEQ ID NO: 577161 - DNA, 15 bp, Homo sapiens
ggggttaggggactg

SEQ ID NO: 577162 - DNA, 15 bp, Homo sapiens
gggggttaggggact

SEQ ID NO: 577163 - DNA, 15 bp, Homo sapiens
ggggggttaggggac

SEQ ID NO: 577164 - DNA, 15 bp, Homo sapiens
tggggggttagggga

SEQ ID NO: 577165 - DNA, 15 bp, Homo sapiens
ctggggggttagggg

SEQ ID NO: 577166 - DNA, 15 bp, Homo sapiens
gctggggggttaggg

SEQ ID NO: 577167 - DNA, 15 bp, Homo sapiens
ggctggggggttagg

SEQ ID NO: 577168 - DNA, 15 bp, Homo sapiens
gggctggggggttag

SEQ ID NO: 577169 - DNA, 15 bp, Homo sapiens
agggctggggggtta

SEQ ID NO: 577170 - DNA, 15 bp, Homo sapiens
tagggctggggggtt

SEQ ID NO: 577171 - DNA, 15 bp, Homo sapiens
ggggccttggtgatc

SEQ ID NO: 577172 - DNA, 15 bp, Homo sapiens
aggggccttggtgat

SEQ ID NO: 577173 - DNA, 15 bp, Homo sapiens
aaggggccttggtga

SEQ ID NO: 577174 - DNA, 15 bp, Homo sapiens
aaaggggccttggtg

SEQ ID NO: 577175 - DNA, 15 bp, Homo sapiens
aaaaggggccttggt

SEQ ID NO: 577176 - DNA, 15 bp, Homo sapiens
gaaaaggggccttgg

SEQ ID NO: 577177 - DNA, 15 bp, Homo sapiens
agaaaaggggccttg

SEQ ID NO: 577178 - DNA, 15 bp, Homo sapiens
aagaaaaggggcctt

SEQ ID NO: 577179 - DNA, 15 bp, Homo sapiens
caagaaaaggggcct

SEQ ID NO: 577180 - DNA, 15 bp, Homo sapiens
ccaagaaaaggggcc

SEQ ID NO: 577181 - DNA, 15 bp, Homo sapiens
gccaagaaaaggggc

SEQ ID NO: 577182 - DNA, 15 bp, Homo sapiens
ggccaagaaaagggg

SEQ ID NO: 577183 - DNA, 15 bp, Homo sapiens
aggccaagaaaaggg

SEQ ID NO: 577184 - DNA, 15 bp, Homo sapiens
caggccaagaaaagg

SEQ ID NO: 577185 - DNA, 15 bp, Homo sapiens
acaggccaagaaaag

SEQ ID NO: 577186 - DNA, 15 bp, Homo sapiens
aacaggccaagaaaa

SEQ ID NO: 577187 - DNA, 15 bp, Homo sapiens
taacaggccaagaaa

SEQ ID NO: 577188 - DNA, 15 bp, Homo sapiens
ataacaggccaagaa

SEQ ID NO: 577189 - DNA, 15 bp, Homo sapiens
cataacaggccaaga

SEQ ID NO: 577190 - DNA, 15 bp, Homo sapiens
acataacaggccaag

SEQ ID NO: 577191 - DNA, 15 bp, Homo sapiens
cacataacaggccaa

SEQ ID NO: 577192 - DNA, 15 bp, Homo sapiens
gcacataacaggcca

SEQ ID NO: 577193 - DNA, 15 bp, Homo sapiens
cgcacataacaggcc

SEQ ID NO: 577194 - DNA, 15 bp, Homo sapiens
acgcacataacaggc

SEQ ID NO: 577195 - DNA, 15 bp, Homo sapiens
cacgcacataacagg

SEQ ID NO: 577196 - DNA, 15 bp, Homo sapiens
tcacgcacataacag

SEQ ID NO: 577197 - DNA, 15 bp, Homo sapiens
atcacgcacataaca

SEQ ID NO: 577198 - DNA, 15 bp, Homo sapiens
aatcacgcacataac

SEQ ID NO: 577199 - DNA, 15 bp, Homo sapiens
taatcacgcacataa

SEQ ID NO: 577200 - DNA, 15 bp, Homo sapiens
ataatcacgcacata

SEQ ID NO: 577201 - DNA, 15 bp, Homo sapiens
tataatcacgcacat

SEQ ID NO: 577202 - DNA, 15 bp, Homo sapiens
atataatcacgcaca

SEQ ID NO: 577203 - DNA, 15 bp, Homo sapiens
aatataatcacgcac

SEQ ID NO: 577204 - DNA, 15 bp, Homo sapiens
aaatataatcacgca

SEQ ID NO: 577205 - DNA, 15 bp, Homo sapiens
caaatataatcacgc

SEQ ID NO: 577206 - DNA, 15 bp, Homo sapiens
acaaatataatcacg

SEQ ID NO: 577207 - DNA, 15 bp, Homo sapiens
gacaaatataatcac

SEQ ID NO: 577208 - DNA, 15 bp, Homo sapiens
agacaaatataatca

SEQ ID NO: 577209 - DNA, 15 bp, Homo sapiens
cagacaaatataatc

SEQ ID NO: 577210 - DNA, 15 bp, Homo sapiens
ccagacaaatataat

SEQ ID NO: 577211 - DNA, 15 bp, Homo sapiens
cccagacaaatataa

SEQ ID NO: 577212 - DNA, 15 bp, Homo sapiens
acccagacaaatata

SEQ ID NO: 577213 - DNA, 15 bp, Homo sapiens
aacccagacaaatat

SEQ ID NO: 577214 - DNA, 15 bp, Homo sapiens
gaacccagacaaata

SEQ ID NO: 577215 - DNA, 15 bp, Homo sapiens
ggaacccagacaaat

SEQ ID NO: 577216 - DNA, 15 bp, Homo sapiens
aggaacccagacaaa

SEQ ID NO: 577217 - DNA, 15 bp, Homo sapiens
caggaacccagacaa

SEQ ID NO: 577218 - DNA, 15 bp, Homo sapiens
acaggaacccagaca

SEQ ID NO: 577219 - DNA, 15 bp, Homo sapiens
cacaggaacccagac

SEQ ID NO: 577220 - DNA, 15 bp, Homo sapiens
acacaggaacccaga

SEQ ID NO: 577221 - DNA, 15 bp, Homo sapiens
tacacaggaacccag

SEQ ID NO: 577222 - DNA, 15 bp, Homo sapiens
atacacaggaaccca

SEQ ID NO: 577223 - DNA, 15 bp, Homo sapiens
aatacacaggaaccc

SEQ ID NO: 577224 - DNA, 15 bp, Homo sapiens
ttgtctaatacacag

SEQ ID NO: 577225 - DNA, 15 bp, Homo sapiens
cttgtctaatacaca

SEQ ID NO: 577226 - DNA, 15 bp, Homo sapiens
ccttgtctaatacac

SEQ ID NO: 577227 - DNA, 15 bp, Homo sapiens
tccttgtctaataca

SEQ ID NO: 577228 - DNA, 15 bp, Homo sapiens
ttccttgtctaatac

SEQ ID NO: 577229 - DNA, 15 bp, Homo sapiens
cttccttgtctaata

SEQ ID NO: 577230 - DNA, 15 bp, Homo sapiens
gcttccttgtctaat

SEQ ID NO: 577231 - DNA, 15 bp, Homo sapiens
ggcttccttgtctaa

SEQ ID NO: 577232 - DNA, 15 bp, Homo sapiens
aggcttccttgtcta

SEQ ID NO: 577233 - DNA, 15 bp, Homo sapiens
aaggcttccttgtct

SEQ ID NO: 577234 - DNA, 15 bp, Homo sapiens
gaaggcttccttgtc

SEQ ID NO: 577235 - DNA, 15 bp, Homo sapiens
ggaaggcttccttgt

SEQ ID NO: 577236 - DNA, 15 bp, Homo sapiens
gggaaggcttccttg

SEQ ID NO: 577237 - DNA, 15 bp, Homo sapiens
ggggaaggcttcctt

SEQ ID NO: 577238 - DNA, 15 bp, Homo sapiens
gggggaaggcttcct

SEQ ID NO: 577239 - DNA, 15 bp, Homo sapiens
ggggggaaggcttcc

SEQ ID NO: 577240 - DNA, 15 bp, Homo sapiens
cggggggaaggcttc

SEQ ID NO: 577241 - DNA, 15 bp, Homo sapiens
gcggggggaaggctt

SEQ ID NO: 577242 - DNA, 15 bp, Homo sapiens
ggcggggggaaggct

SEQ ID NO: 577243 - DNA, 15 bp, Homo sapiens
gggcggggggaaggc

SEQ ID NO: 577244 - DNA, 15 bp, Homo sapiens
ggggcggggggaagg

SEQ ID NO: 577245 - DNA, 15 bp, Homo sapiens
gggggcggggggaag

SEQ ID NO: 577246 - DNA, 15 bp, Homo sapiens
tgggggcggggggaa

SEQ ID NO: 577247 - DNA, 15 bp, Homo sapiens
gtgggggcgggggga

SEQ ID NO: 577248 - DNA, 15 bp, Homo sapiens
ggtgggggcgggggg

SEQ ID NO: 577249 - DNA, 15 bp, Homo sapiens
gggtgggggcggggg

SEQ ID NO: 577250 - DNA, 15 bp, Homo sapiens
ggggtgggggcgggg

SEQ ID NO: 577251 - DNA, 15 bp, Homo sapiens
gggggtgggggcggg

SEQ ID NO: 577252 - DNA, 15 bp, Homo sapiens
tgggggtgggggcgg

SEQ ID NO: 577253 - DNA, 15 bp, Homo sapiens
gtgggggtgggggcg

SEQ ID NO: 577254 - DNA, 15 bp, Homo sapiens
agtgggggtgggggc

SEQ ID NO: 577255 - DNA, 15 bp, Homo sapiens
gagtgggggtggggg

SEQ ID NO: 577256 - DNA, 15 bp, Homo sapiens
ggagtgggggtgggg

SEQ ID NO: 577257 - DNA, 15 bp, Homo sapiens
gggagtgggggtggg

SEQ ID NO: 577258 - DNA, 15 bp, Homo sapiens
tgggagtgggggtgg

SEQ ID NO: 577259 - DNA, 15 bp, Homo sapiens
ctgggagtgggggtg

SEQ ID NO: 577260 - DNA, 15 bp, Homo sapiens
actgggagtgggggt

SEQ ID NO: 577261 - DNA, 15 bp, Homo sapiens
gactgggagtggggg

SEQ ID NO: 577262 - DNA, 15 bp, Homo sapiens
agactgggagtgggg

SEQ ID NO: 577263 - DNA, 15 bp, Homo sapiens
aagactgggagtggg

SEQ ID NO: 577264 - DNA, 15 bp, Homo sapiens
gaagactgggagtgg

SEQ ID NO: 577265 - DNA, 15 bp, Homo sapiens
ggaagactgggagtg

SEQ ID NO: 577266 - DNA, 15 bp, Homo sapiens
aggaagactgggagt

SEQ ID NO: 577267 - DNA, 15 bp, Homo sapiens
aaggaagactgggag

SEQ ID NO: 577268 - DNA, 15 bp, Homo sapiens
aaaggaagactggga

SEQ ID NO: 577269 - DNA, 15 bp, Homo sapiens
gaaaggaagactggg

SEQ ID NO: 577270 - DNA, 15 bp, Homo sapiens
ggaaaggaagactgg

SEQ ID NO: 577271 - DNA, 15 bp, Homo sapiens
gggaaaggaagactg

SEQ ID NO: 577272 - DNA, 15 bp, Homo sapiens
agggaaaggaagact

SEQ ID NO: 577273 - DNA, 15 bp, Homo sapiens
aagggaaaggaagac

SEQ ID NO: 577274 - DNA, 15 bp, Homo sapiens
tggaagggaaaggaa

SEQ ID NO: 577275 - DNA, 15 bp, Homo sapiens
ctggaagggaaagga

SEQ ID NO: 577276 - DNA, 15 bp, Homo sapiens
ggggcactccctgct

SEQ ID NO: 577277 - DNA, 15 bp, Homo sapiens
gggggcactccctgc

SEQ ID NO: 577278 - DNA, 15 bp, Homo sapiens
agggggcactccctg

SEQ ID NO: 577279 - DNA, 15 bp, Homo sapiens
gagggggcactccct

SEQ ID NO: 577280 - DNA, 15 bp, Homo sapiens
ggagggggcactccc

SEQ ID NO: 577281 - DNA, 15 bp, Homo sapiens
tggagggggcactcc

SEQ ID NO: 577282 - DNA, 15 bp, Homo sapiens
atggagggggcactc

SEQ ID NO: 577283 - DNA, 15 bp, Homo sapiens
tatggagggggcact

SEQ ID NO: 577284 - DNA, 15 bp, Homo sapiens
ttatggagggggcac

SEQ ID NO: 577285 - DNA, 15 bp, Homo sapiens
cttatggagggggca

SEQ ID NO: 577286 - DNA, 15 bp, Homo sapiens
tcttatggagggggc

SEQ ID NO: 577287 - DNA, 15 bp, Homo sapiens
atcttatggaggggg

SEQ ID NO: 577288 - DNA, 15 bp, Homo sapiens
gatcttatggagggg

SEQ ID NO: 577289 - DNA, 15 bp, Homo sapiens
tgatcttatggaggg

SEQ ID NO: 577290 - DNA, 15 bp, Homo sapiens
atgatcttatggagg

SEQ ID NO: 577291 - DNA, 15 bp, Homo sapiens
aatgatcttatggag

SEQ ID NO: 577292 - DNA, 15 bp, Homo sapiens
taatgatcttatgga

SEQ ID NO: 577293 - DNA, 15 bp, Homo sapiens
gtaatgatcttatgg

SEQ ID NO: 577294 - DNA, 15 bp, Homo sapiens
tgtaatgatcttatg

SEQ ID NO: 577295 - DNA, 15 bp, Homo sapiens
atgtaatgatcttat

SEQ ID NO: 577296 - DNA, 15 bp, Homo sapiens
aatgtaatgatctta

SEQ ID NO: 577297 - DNA, 15 bp, Homo sapiens
aaatgtaatgatctt

SEQ ID NO: 577298 - DNA, 15 bp, Homo sapiens
caaatgtaatgatct

SEQ ID NO: 577299 - DNA, 15 bp, Homo sapiens
ccaaatgtaatgatc

SEQ ID NO: 577300 - DNA, 15 bp, Homo sapiens
tccaaatgtaatgat

SEQ ID NO: 577301 - DNA, 15 bp, Homo sapiens
gtccaaatgtaatga

SEQ ID NO: 577302 - DNA, 15 bp, Homo sapiens
tgtccaaatgtaatg

SEQ ID NO: 577303 - DNA, 15 bp, Homo sapiens
ttgtccaaatgtaat

SEQ ID NO: 577304 - DNA, 15 bp, Homo sapiens
attgtccaaatgtaa

SEQ ID NO: 577305 - DNA, 15 bp, Homo sapiens
gattgtccaaatgta

SEQ ID NO: 577306 - DNA, 15 bp, Homo sapiens
tgattgtccaaatgt

SEQ ID NO: 577307 - DNA, 15 bp, Homo sapiens
ttgattgtccaaatg

SEQ ID NO: 577308 - DNA, 15 bp, Homo sapiens
cttgattgtccaaat

SEQ ID NO: 577309 - DNA, 15 bp, Homo sapiens
ttgtgcaccttgatt

SEQ ID NO: 577310 - DNA, 15 bp, Homo sapiens
attgtgcaccttgat

SEQ ID NO: 577311 - DNA, 15 bp, Homo sapiens
aattgtgcaccttga

SEQ ID NO: 577312 - DNA, 15 bp, Homo sapiens
taattgtgcaccttg

SEQ ID NO: 577313 - DNA, 15 bp, Homo sapiens
ataattgtgcacctt

SEQ ID NO: 577314 - DNA, 15 bp, Homo sapiens
tataattgtgcacct

SEQ ID NO: 577315 - DNA, 15 bp, Homo sapiens
ttataattgtgcacc

SEQ ID NO: 577316 - DNA, 15 bp, Homo sapiens
cttataattgtgcac

SEQ ID NO: 577317 - DNA, 15 bp, Homo sapiens
acttataattgtgca

SEQ ID NO: 577318 - DNA, 15 bp, Homo sapiens
cacttataattgtgc

SEQ ID NO: 577319 - DNA, 15 bp, Homo sapiens
tcacttataattgtg

SEQ ID NO: 577320 - DNA, 15 bp, Homo sapiens
gtcacttataattgt

SEQ ID NO: 577321 - DNA, 15 bp, Homo sapiens
ggtcacttataattg

SEQ ID NO: 577322 - DNA, 15 bp, Homo sapiens
tggtcacttataatt

SEQ ID NO: 577323 - DNA, 15 bp, Homo sapiens
gtggtcacttataat

SEQ ID NO: 577324 - DNA, 15 bp, Homo sapiens
tgtggtcacttataa

SEQ ID NO: 577325 - DNA, 15 bp, Homo sapiens
ctgtggtcacttata

SEQ ID NO: 577326 - DNA, 15 bp, Homo sapiens
gctgtggtcacttat

SEQ ID NO: 577327 - DNA, 15 bp, Homo sapiens
ggctgtggtcactta

SEQ ID NO: 577328 - DNA, 15 bp, Homo sapiens
tggctgtggtcactt

SEQ ID NO: 577329 - DNA, 15 bp, Homo sapiens
atggctgtggtcact

SEQ ID NO: 577330 - DNA, 15 bp, Homo sapiens
catggctgtggtcac

SEQ ID NO: 577331 - DNA, 15 bp, Homo sapiens
gcatggctgtggtca

SEQ ID NO: 577332 - DNA, 15 bp, Homo sapiens
tgcatggctgtggtc

SEQ ID NO: 577333 - DNA, 15 bp, Homo sapiens
gtgcatggctgtggt

SEQ ID NO: 577334 - DNA, 15 bp, Homo sapiens
ggtgcatggctgtgg

SEQ ID NO: 577335 - DNA, 15 bp, Homo sapiens
aggtgcatggctgtg

SEQ ID NO: 577336 - DNA, 15 bp, Homo sapiens
aaggtgcatggctgt

SEQ ID NO: 577337 - DNA, 15 bp, Homo sapiens
caaggtgcatggctg

SEQ ID NO: 577338 - DNA, 15 bp, Homo sapiens
ccaaggtgcatggct

SEQ ID NO: 577339 - DNA, 15 bp, Homo sapiens
tccaaggtgcatggc

SEQ ID NO: 577340 - DNA, 15 bp, Homo sapiens
gtccaaggtgcatgg

SEQ ID NO: 577341 - DNA, 15 bp, Homo sapiens
tgtccaaggtgcatg

SEQ ID NO: 577342 - DNA, 15 bp, Homo sapiens
atgtccaaggtgcat

SEQ ID NO: 577343 - DNA, 15 bp, Homo sapiens
aatgtccaaggtgca

SEQ ID NO: 577344 - DNA, 15 bp, Homo sapiens
taatgtccaaggtgc

SEQ ID NO: 577345 - DNA, 15 bp, Homo sapiens
ataatgtccaaggtg

SEQ ID NO: 577346 - DNA, 15 bp, Homo sapiens
aataatgtccaaggt

SEQ ID NO: 577347 - DNA, 15 bp, Homo sapiens
caataatgtccaagg

SEQ ID NO: 577348 - DNA, 15 bp, Homo sapiens
ccaataatgtccaag

SEQ ID NO: 577349 - DNA, 15 bp, Homo sapiens
tccaataatgtccaa

SEQ ID NO: 577350 - DNA, 15 bp, Homo sapiens
gtccaataatgtcca

SEQ ID NO: 577351 - DNA, 15 bp, Homo sapiens
tgtccaataatgtcc

SEQ ID NO: 577352 - DNA, 15 bp, Homo sapiens
atgtccaataatgtc

SEQ ID NO: 577353 - DNA, 15 bp, Homo sapiens
aatgtccaataatgt

SEQ ID NO: 577354 - DNA, 15 bp, Homo sapiens
taatgtccaataatg

SEQ ID NO: 577355 - DNA, 15 bp, Homo sapiens
ttaatgtccaataat

SEQ ID NO: 577356 - DNA, 15 bp, Homo sapiens
attaatgtccaataa

SEQ ID NO: 577357 - DNA, 15 bp, Homo sapiens
cattaatgtccaata

SEQ ID NO: 577358 - DNA, 15 bp, Homo sapiens
acattaatgtccaat

SEQ ID NO: 577359 - DNA, 15 bp, Homo sapiens
cgcacattaatgtcc

SEQ ID NO: 577360 - DNA, 15 bp, Homo sapiens
acgcacattaatgtc

SEQ ID NO: 577361 - DNA, 15 bp, Homo sapiens
tacgcacattaatgt

SEQ ID NO: 577362 - DNA, 15 bp, Homo sapiens
ttacgcacattaatg

SEQ ID NO: 577363 - DNA, 15 bp, Homo sapiens
gttacgcacattaat

SEQ ID NO: 577364 - DNA, 15 bp, Homo sapiens
agttacgcacattaa

SEQ ID NO: 577365 - DNA, 15 bp, Homo sapiens
cagttacgcacatta

SEQ ID NO: 577366 - DNA, 15 bp, Homo sapiens
gcagttacgcacatt

SEQ ID NO: 577367 - DNA, 15 bp, Homo sapiens
tgcagttacgcacat

SEQ ID NO: 577368 - DNA, 15 bp, Homo sapiens
gtgcagttacgcaca

SEQ ID NO: 577369 - DNA, 15 bp, Homo sapiens
tgtgcagttacgcac

SEQ ID NO: 577370 - DNA, 15 bp, Homo sapiens
atgtgcagttacgca

SEQ ID NO: 577371 - DNA, 15 bp, Homo sapiens
catgtgcagttacgc

SEQ ID NO: 577372 - DNA, 15 bp, Homo sapiens
ccatgtgcagttacg

SEQ ID NO: 577373 - DNA, 15 bp, Homo sapiens
gccatgtgcagttac

SEQ ID NO: 577374 - DNA, 15 bp, Homo sapiens
ggccatgtgcagtta

SEQ ID NO: 577375 - DNA, 15 bp, Homo sapiens
gggccatgtgcagtt

SEQ ID NO: 577376 - DNA, 15 bp, Homo sapiens
tgggccatgtgcagt

SEQ ID NO: 577377 - DNA, 15 bp, Homo sapiens
atgggccatgtgcag

SEQ ID NO: 577378 - DNA, 15 bp, Homo sapiens
gatgggccatgtgca

SEQ ID NO: 577379 - DNA, 15 bp, Homo sapiens
ggatgggccatgtgc

SEQ ID NO: 577380 - DNA, 15 bp, Homo sapiens
gggatgggccatgtg

SEQ ID NO: 577381 - DNA, 15 bp, Homo sapiens
tgggatgggccatgt

SEQ ID NO: 577382 - DNA, 15 bp, Homo sapiens
atgggatgggccatg

SEQ ID NO: 577383 - DNA, 15 bp, Homo sapiens
gatgggatgggccat

SEQ ID NO: 577384 - DNA, 15 bp, Homo sapiens
agatgggatgggcca

SEQ ID NO: 577385 - DNA, 15 bp, Homo sapiens
cagatgggatgggcc

SEQ ID NO: 577386 - DNA, 15 bp, Homo sapiens
tcagatgggatgggc

SEQ ID NO: 577387 - DNA, 15 bp, Homo sapiens
ttcagatgggatggg

SEQ ID NO: 577388 - DNA, 15 bp, Homo sapiens
attcagatgggatgg

SEQ ID NO: 577389 - DNA, 15 bp, Homo sapiens
tattcagatgggatg

SEQ ID NO: 577390 - DNA, 15 bp, Homo sapiens
ttattcagatgggat

SEQ ID NO: 577391 - DNA, 15 bp, Homo sapiens
cttattcagatggga

SEQ ID NO: 577392 - DNA, 15 bp, Homo sapiens
ccttattcagatggg

SEQ ID NO: 577393 - DNA, 15 bp, Homo sapiens
atctgagagtaggac

SEQ ID NO: 577394 - DNA, 15 bp, Homo sapiens
catctgagagtagga

SEQ ID NO: 577395 - DNA, 15 bp, Homo sapiens
gcatctgagagtagg

SEQ ID NO: 577396 - DNA, 15 bp, Homo sapiens
ggcatctgagagtag

SEQ ID NO: 577397 - DNA, 15 bp, Homo sapiens
gggcatctgagagta

SEQ ID NO: 577398 - DNA, 15 bp, Homo sapiens
agggcatctgagagt

SEQ ID NO: 577399 - DNA, 15 bp, Homo sapiens
aagggcatctgagag

SEQ ID NO: 577400 - DNA, 15 bp, Homo sapiens
aaagggcatctgaga

SEQ ID NO: 577401 - DNA, 15 bp, Homo sapiens
caaagggcatctgag

SEQ ID NO: 577402 - DNA, 15 bp, Homo sapiens
gcaaagggcatctga

SEQ ID NO: 577403 - DNA, 15 bp, Homo sapiens
tgcaaagggcatctg

SEQ ID NO: 577404 - DNA, 15 bp, Homo sapiens
ctgcaaagggcatct

SEQ ID NO: 577405 - DNA, 15 bp, Homo sapiens
actgcaaagggcatc

SEQ ID NO: 577406 - DNA, 15 bp, Homo sapiens
tactgcaaagggcat

SEQ ID NO: 577407 - DNA, 15 bp, Homo sapiens
gtactgcaaagggca

SEQ ID NO: 577408 - DNA, 15 bp, Homo sapiens
tgtactgcaaagggc

SEQ ID NO: 577409 - DNA, 15 bp, Homo sapiens
ctgtactgcaaaggg

SEQ ID NO: 577410 - DNA, 15 bp, Homo sapiens
gctgtactgcaaagg

SEQ ID NO: 577411 - DNA, 15 bp, Homo sapiens
tgctgtactgcaaag

SEQ ID NO: 577412 - DNA, 15 bp, Homo sapiens
tacccctgctgtact

SEQ ID NO: 577413 - DNA, 15 bp, Homo sapiens
gtacccctgctgtac

SEQ ID NO: 577414 - DNA, 15 bp, Homo sapiens
agtacccctgctgta

SEQ ID NO: 577415 - DNA, 15 bp, Homo sapiens
cagtacccctgctgt

SEQ ID NO: 577416 - DNA, 15 bp, Homo sapiens
tcagtacccctgctg

SEQ ID NO: 577417 - DNA, 15 bp, Homo sapiens
ttcagtacccctgct

SEQ ID NO: 577418 - DNA, 15 bp, Homo sapiens
attcagtacccctgc

SEQ ID NO: 577419 - DNA, 15 bp, Homo sapiens
gattcagtacccctg

SEQ ID NO: 577420 - DNA, 15 bp, Homo sapiens
tgattcagtacccct

SEQ ID NO: 577421 - DNA, 15 bp, Homo sapiens
gtgattcagtacccc

SEQ ID NO: 577422 - DNA, 15 bp, Homo sapiens
ggtgattcagtaccc

SEQ ID NO: 577423 - DNA, 15 bp, Homo sapiens
tggtgattcagtacc

SEQ ID NO: 577424 - DNA, 15 bp, Homo sapiens
ttggtgattcagtac

SEQ ID NO: 577425 - DNA, 15 bp, Homo sapiens
cttggtgattcagta

SEQ ID NO: 577426 - DNA, 15 bp, Homo sapiens
ccttggtgattcagt

SEQ ID NO: 577427 - DNA, 15 bp, Homo sapiens
gccttggtgattcag

SEQ ID NO: 577428 - DNA, 15 bp, Homo sapiens
ggccttggtgattca

SEQ ID NO: 577429 - DNA, 15 bp, Homo sapiens
gggccttggtgattc

SEQ ID NO: 577430 - DNA, 15 bp, Homo sapiens
agggccttggtgatt

SEQ ID NO: 577431 - DNA, 15 bp, Homo sapiens
agaaaaagggccttg

SEQ ID NO: 577432 - DNA, 15 bp, Homo sapiens
aagaaaaagggcctt

SEQ ID NO: 577433 - DNA, 15 bp, Homo sapiens
caagaaaaagggcct

SEQ ID NO: 577434 - DNA, 15 bp, Homo sapiens
ccaagaaaaagggcc

SEQ ID NO: 577435 - DNA, 15 bp, Homo sapiens
gccaagaaaaagggc

SEQ ID NO: 577436 - DNA, 15 bp, Homo sapiens
ggccaagaaaaaggg

SEQ ID NO: 577437 - DNA, 15 bp, Homo sapiens
aggccaagaaaaagg

SEQ ID NO: 577438 - DNA, 15 bp, Homo sapiens
caggccaagaaaaag

SEQ ID NO: 577439 - DNA, 15 bp, Homo sapiens
acaggccaagaaaaa

SEQ ID NO: 577440 - DNA, 15 bp, Homo sapiens
acacataacaggcca

SEQ ID NO: 577441 - DNA, 15 bp, Homo sapiens
cacacataacaggcc

SEQ ID NO: 577442 - DNA, 15 bp, Homo sapiens
acacacataacaggc

SEQ ID NO: 577443 - DNA, 15 bp, Homo sapiens
cacacacataacagg

SEQ ID NO: 577444 - DNA, 15 bp, Homo sapiens
tcacacacataacag

SEQ ID NO: 577445 - DNA, 15 bp, Homo sapiens
atcacacacataaca

SEQ ID NO: 577446 - DNA, 15 bp, Homo sapiens
aatcacacacataac

SEQ ID NO: 577447 - DNA, 15 bp, Homo sapiens
taatcacacacataa

SEQ ID NO: 577448 - DNA, 15 bp, Homo sapiens
ataatcacacacata

SEQ ID NO: 577449 - DNA, 15 bp, Homo sapiens
tataatcacacacat

SEQ ID NO: 577450 - DNA, 15 bp, Homo sapiens
atataatcacacaca

SEQ ID NO: 577451 - DNA, 15 bp, Homo sapiens
aatataatcacacac

SEQ ID NO: 577452 - DNA, 15 bp, Homo sapiens
aaatataatcacaca

SEQ ID NO: 577453 - DNA, 15 bp, Homo sapiens
taaatataatcacac

SEQ ID NO: 577454 - DNA, 15 bp, Homo sapiens
ataaatataatcaca

SEQ ID NO: 577455 - DNA, 15 bp, Homo sapiens
gataaatataatcac

SEQ ID NO: 577456 - DNA, 15 bp, Homo sapiens
ggataaatataatca

SEQ ID NO: 577457 - DNA, 15 bp, Homo sapiens
gggataaatataatc

SEQ ID NO: 577458 - DNA, 15 bp, Homo sapiens
tgggataaatataat

SEQ ID NO: 577459 - DNA, 15 bp, Homo sapiens
ctgggataaatataa

SEQ ID NO: 577460 - DNA, 15 bp, Homo sapiens
actgggataaatata

SEQ ID NO: 577461 - DNA, 15 bp, Homo sapiens
aactgggataaatat

SEQ ID NO: 577462 - DNA, 15 bp, Homo sapiens
aaactgggataaata

SEQ ID NO: 577463 - DNA, 15 bp, Homo sapiens
gaaactgggataaat

SEQ ID NO: 577464 - DNA, 15 bp, Homo sapiens
agaaactgggataaa

SEQ ID NO: 577465 - DNA, 15 bp, Homo sapiens
cagaaactgggataa

SEQ ID NO: 577466 - DNA, 15 bp, Homo sapiens
acagaaactgggata

SEQ ID NO: 577467 - DNA, 15 bp, Homo sapiens
cacagaaactgggat

SEQ ID NO: 577468 - DNA, 15 bp, Homo sapiens
acacagaaactggga

SEQ ID NO: 577469 - DNA, 15 bp, Homo sapiens
tacacagaaactggg

SEQ ID NO: 577470 - DNA, 15 bp, Homo sapiens
ttacacagaaactgg

SEQ ID NO: 577471 - DNA, 15 bp, Homo sapiens
attacacagaaactg

SEQ ID NO: 577472 - DNA, 15 bp, Homo sapiens
tattacacagaaact

SEQ ID NO: 577473 - DNA, 15 bp, Homo sapiens
ctattacacagaaac

SEQ ID NO: 577474 - DNA, 15 bp, Homo sapiens
tctattacacagaaa

SEQ ID NO: 577475 - DNA, 15 bp, Homo sapiens
gtctattacacagaa

SEQ ID NO: 577476 - DNA, 15 bp, Homo sapiens
tgtctattacacaga

SEQ ID NO: 577477 - DNA, 15 bp, Homo sapiens
atgtctattacacag

SEQ ID NO: 577478 - DNA, 15 bp, Homo sapiens
catgtctattacaca

SEQ ID NO: 577479 - DNA, 15 bp, Homo sapiens
tcatgtctattacac

SEQ ID NO: 577480 - DNA, 15 bp, Homo sapiens
ttcatgtctattaca

SEQ ID NO: 577481 - DNA, 15 bp, Homo sapiens
tttcatgtctattac

SEQ ID NO: 577482 - DNA, 15 bp, Homo sapiens
ctttcatgtctatta

SEQ ID NO: 577483 - DNA, 15 bp, Homo sapiens
gctttcatgtctatt

SEQ ID NO: 577484 - DNA, 15 bp, Homo sapiens
ggctttcatgtctat

SEQ ID NO: 577485 - DNA, 15 bp, Homo sapiens
aggctttcatgtcta

SEQ ID NO: 577486 - DNA, 15 bp, Homo sapiens
gaggctttcatgtct

SEQ ID NO: 577487 - DNA, 15 bp, Homo sapiens
ggaggctttcatgtc

SEQ ID NO: 577488 - DNA, 15 bp, Homo sapiens
gggaggctttcatgt

SEQ ID NO: 577489 - DNA, 15 bp, Homo sapiens
ggggaggctttcatg

SEQ ID NO: 577490 - DNA, 15 bp, Homo sapiens
aggggaggctttcat

SEQ ID NO: 577491 - DNA, 15 bp, Homo sapiens
caggggaggctttca

SEQ ID NO: 577492 - DNA, 15 bp, Homo sapiens
gcaggggaggctttc

SEQ ID NO: 577493 - DNA, 15 bp, Homo sapiens
ggcaggggaggcttt

SEQ ID NO: 577494 - DNA, 15 bp, Homo sapiens
ggtgtggcaggggag

SEQ ID NO: 577495 - DNA, 15 bp, Homo sapiens
gggtgtggcagggga

SEQ ID NO: 577496 - DNA, 15 bp, Homo sapiens
ggggtgtggcagggg

SEQ ID NO: 577497 - DNA, 15 bp, Homo sapiens
tggggtgtggcaggg

SEQ ID NO: 577498 - DNA, 15 bp, Homo sapiens
gtggggtgtggcagg

SEQ ID NO: 577499 - DNA, 15 bp, Homo sapiens
ggtggggtgtggcag

SEQ ID NO: 577500 - DNA, 15 bp, Homo sapiens
aggtggggtgtggca

SEQ ID NO: 577501 - DNA, 15 bp, Homo sapiens
gaggtggggtgtggc

SEQ ID NO: 577502 - DNA, 15 bp, Homo sapiens
ggaggtggggtgtgg

SEQ ID NO: 577503 - DNA, 15 bp, Homo sapiens
tggaggtggggtgtg

SEQ ID NO: 577504 - DNA, 15 bp, Homo sapiens
ttggaggtggggtgt

SEQ ID NO: 577505 - DNA, 15 bp, Homo sapiens
attggaggtggggtg

SEQ ID NO: 577506 - DNA, 15 bp, Homo sapiens
gattggaggtggggt

SEQ ID NO: 577507 - DNA, 15 bp, Homo sapiens
agattggaggtgggg

SEQ ID NO: 577508 - DNA, 15 bp, Homo sapiens
aagattggaggtggg

SEQ ID NO: 577509 - DNA, 15 bp, Homo sapiens
gaagattggaggtgg

SEQ ID NO: 577510 - DNA, 15 bp, Homo sapiens
ggaagattggaggtg

SEQ ID NO: 577511 - DNA, 15 bp, Homo sapiens
aggaagattggaggt

SEQ ID NO: 577512 - DNA, 15 bp, Homo sapiens
aaggaagattggagg

SEQ ID NO: 577513 - DNA, 15 bp, Homo sapiens
aaaggaagattggag

SEQ ID NO: 577514 - DNA, 15 bp, Homo sapiens
gaaaggaagattgga

SEQ ID NO: 577515 - DNA, 15 bp, Homo sapiens
gtggaagggaaagga

SEQ ID NO: 577516 - DNA, 15 bp, Homo sapiens
ggtggaagggaaagg

SEQ ID NO: 577517 - DNA, 15 bp, Homo sapiens
tggtggaagggaaag

SEQ ID NO: 577518 - DNA, 15 bp, Homo sapiens
ctggtggaagggaaa

SEQ ID NO: 577519 - DNA, 15 bp, Homo sapiens
cctggtggaagggaa

SEQ ID NO: 577520 - DNA, 15 bp, Homo sapiens
ccctggtggaaggga

SEQ ID NO: 577521 - DNA, 15 bp, Homo sapiens
tccctggtggaaggg

SEQ ID NO: 577522 - DNA, 15 bp, Homo sapiens
ctccctggtggaagg

SEQ ID NO: 577523 - DNA, 15 bp, Homo sapiens
actccctggtggaag

SEQ ID NO: 577524 - DNA, 15 bp, Homo sapiens
cactccctggtggaa

SEQ ID NO: 577525 - DNA, 15 bp, Homo sapiens
acactccctggtgga

SEQ ID NO: 577526 - DNA, 15 bp, Homo sapiens
gacactccctggtgg

SEQ ID NO: 577527 - DNA, 15 bp, Homo sapiens
ggacactccctggtg

SEQ ID NO: 577528 - DNA, 15 bp, Homo sapiens
tggacactccctggt

SEQ ID NO: 577529 - DNA, 15 bp, Homo sapiens
gtggacactccctgg

SEQ ID NO: 577530 - DNA, 15 bp, Homo sapiens
agtggacactccctg

SEQ ID NO: 577531 - DNA, 15 bp, Homo sapiens
gagtggacactccct

SEQ ID NO: 577532 - DNA, 15 bp, Homo sapiens
ggagtggacactccc

SEQ ID NO: 577533 - DNA, 15 bp, Homo sapiens
tggagtggacactcc

SEQ ID NO: 577534 - DNA, 15 bp, Homo sapiens
atggagtggacactc

SEQ ID NO: 577535 - DNA, 15 bp, Homo sapiens
tatggagtggacact

SEQ ID NO: 577536 - DNA, 15 bp, Homo sapiens
atatggagtggacac

SEQ ID NO: 577537 - DNA, 15 bp, Homo sapiens
tatatggagtggaca

SEQ ID NO: 577538 - DNA, 15 bp, Homo sapiens
gtatatggagtggac

SEQ ID NO: 577539 - DNA, 15 bp, Homo sapiens
ggtatatggagtgga

SEQ ID NO: 577540 - DNA, 15 bp, Homo sapiens
gggtatatggagtgg

SEQ ID NO: 577541 - DNA, 15 bp, Homo sapiens
agggtatatggagtg

SEQ ID NO: 577542 - DNA, 15 bp, Homo sapiens
aagggtatatggagt

SEQ ID NO: 577543 - DNA, 15 bp, Homo sapiens
taagggtatatggag

SEQ ID NO: 577544 - DNA, 15 bp, Homo sapiens
gtaagggtatatgga

SEQ ID NO: 577545 - DNA, 15 bp, Homo sapiens
tgtaagggtatatgg

SEQ ID NO: 577546 - DNA, 15 bp, Homo sapiens
atgtaagggtatatg

SEQ ID NO: 577547 - DNA, 15 bp, Homo sapiens
aatgtaagggtatat

SEQ ID NO: 577548 - DNA, 15 bp, Homo sapiens
aaatgtaagggtata

SEQ ID NO: 577549 - DNA, 15 bp, Homo sapiens
caaatgtaagggtat

SEQ ID NO: 577550 - DNA, 15 bp, Homo sapiens
ccaaatgtaagggta

SEQ ID NO: 577551 - DNA, 15 bp, Homo sapiens
tccaaatgtaagggt

SEQ ID NO: 577552 - DNA, 15 bp, Homo sapiens
gtccaaatgtaaggg

SEQ ID NO: 577553 - DNA, 15 bp, Homo sapiens
tgtccaaatgtaagg

SEQ ID NO: 577554 - DNA, 15 bp, Homo sapiens
ttgtccaaatgtaag

SEQ ID NO: 577555 - DNA, 15 bp, Homo sapiens
caattgtgcaccttg

SEQ ID NO: 577556 - DNA, 15 bp, Homo sapiens
acaattgtgcacctt

SEQ ID NO: 577557 - DNA, 15 bp, Homo sapiens
ctcacttacaattgt

SEQ ID NO: 577558 - DNA, 15 bp, Homo sapiens
gctcacttacaattg

SEQ ID NO: 577559 - DNA, 15 bp, Homo sapiens
tgctcacttacaatt

SEQ ID NO: 577560 - DNA, 15 bp, Homo sapiens
atgctcacttacaat

SEQ ID NO: 577561 - DNA, 15 bp, Homo sapiens
tatgctcacttacaa

SEQ ID NO: 577562 - DNA, 15 bp, Homo sapiens
ctatgctcacttaca

SEQ ID NO: 577563 - DNA, 15 bp, Homo sapiens
cctatgctcacttac

SEQ ID NO: 577564 - DNA, 15 bp, Homo sapiens
gcctatgctcactta

SEQ ID NO: 577565 - DNA, 15 bp, Homo sapiens
tgcctatgctcactt

SEQ ID NO: 577566 - DNA, 15 bp, Homo sapiens
gtgcctatgctcact

SEQ ID NO: 577567 - DNA, 15 bp, Homo sapiens
agtgcctatgctcac

SEQ ID NO: 577568 - DNA, 15 bp, Homo sapiens
gagtgcctatgctca

SEQ ID NO: 577569 - DNA, 15 bp, Homo sapiens
tgagtgcctatgctc

SEQ ID NO: 577570 - DNA, 15 bp, Homo sapiens
gtgagtgcctatgct

SEQ ID NO: 577571 - DNA, 15 bp, Homo sapiens
ggtgagtgcctatgc

SEQ ID NO: 577572 - DNA, 15 bp, Homo sapiens
aggtgagtgcctatg

SEQ ID NO: 577573 - DNA, 15 bp, Homo sapiens
aaggtgagtgcctat

SEQ ID NO: 577574 - DNA, 15 bp, Homo sapiens
caaggtgagtgccta

SEQ ID NO: 577575 - DNA, 15 bp, Homo sapiens
ccaaggtgagtgcct

SEQ ID NO: 577576 - DNA, 15 bp, Homo sapiens
tccaaggtgagtgcc

SEQ ID NO: 577577 - DNA, 15 bp, Homo sapiens
gtccaaggtgagtgc

SEQ ID NO: 577578 - DNA, 15 bp, Homo sapiens
tgtccaaggtgagtg

SEQ ID NO: 577579 - DNA, 15 bp, Homo sapiens
atgtccaaggtgagt

SEQ ID NO: 577580 - DNA, 15 bp, Homo sapiens
catgtccaaggtgag

SEQ ID NO: 577581 - DNA, 15 bp, Homo sapiens
tcatgtccaaggtga

SEQ ID NO: 577582 - DNA, 15 bp, Homo sapiens
ttcatgtccaaggtg

SEQ ID NO: 577583 - DNA, 15 bp, Homo sapiens
attcatgtccaaggt

SEQ ID NO: 577584 - DNA, 15 bp, Homo sapiens
cattcatgtccaagg

SEQ ID NO: 577585 - DNA, 15 bp, Homo sapiens
acattcatgtccaag

SEQ ID NO: 577586 - DNA, 15 bp, Homo sapiens
cacattcatgtccaa

SEQ ID NO: 577587 - DNA, 15 bp, Homo sapiens
gcacattcatgtcca

SEQ ID NO: 577588 - DNA, 15 bp, Homo sapiens
tgcacattcatgtcc

SEQ ID NO: 577589 - DNA, 15 bp, Homo sapiens
atgcacattcatgtc

SEQ ID NO: 577590 - DNA, 15 bp, Homo sapiens
tatgcacattcatgt

SEQ ID NO: 577591 - DNA, 15 bp, Homo sapiens
ttatgcacattcatg

SEQ ID NO: 577592 - DNA, 15 bp, Homo sapiens
gttatgcacattcat

SEQ ID NO: 577593 - DNA, 15 bp, Homo sapiens
agttatgcacattca

SEQ ID NO: 577594 - DNA, 15 bp, Homo sapiens
cagttatgcacattc

SEQ ID NO: 577595 - DNA, 15 bp, Homo sapiens
gcagttatgcacatt

SEQ ID NO: 577596 - DNA, 15 bp, Homo sapiens
tgcagttatgcacat

SEQ ID NO: 577597 - DNA, 15 bp, Homo sapiens
gtgcagttatgcaca

SEQ ID NO: 577598 - DNA, 15 bp, Homo sapiens
tgtgcagttatgcac

SEQ ID NO: 577599 - DNA, 15 bp, Homo sapiens
atgtgcagttatgca

SEQ ID NO: 577600 - DNA, 15 bp, Homo sapiens
catgtgcagttatgc

SEQ ID NO: 577601 - DNA, 15 bp, Homo sapiens
ccatgtgcagttatg

SEQ ID NO: 577602 - DNA, 15 bp, Homo sapiens
gccatgtgcagttat

SEQ ID NO: 577603 - DNA, 15 bp, Homo sapiens
agggtctgagagtag

SEQ ID NO: 577604 - DNA, 15 bp, Homo sapiens
aagggtctgagagta

SEQ ID NO: 577605 - DNA, 15 bp, Homo sapiens
aaagggtctgagagt

SEQ ID NO: 577606 - DNA, 15 bp, Homo sapiens
aaaagggtctgagag

SEQ ID NO: 577607 - DNA, 15 bp, Homo sapiens
aaaaagggtctgaga

SEQ ID NO: 577608 - DNA, 15 bp, Homo sapiens
caaaaagggtctgag

SEQ ID NO: 577609 - DNA, 15 bp, Homo sapiens
gcaaaaagggtctga

SEQ ID NO: 577610 - DNA, 15 bp, Homo sapiens
tgcaaaaagggtctg

SEQ ID NO: 577611 - DNA, 15 bp, Homo sapiens
ctgcaaaaagggtct

SEQ ID NO: 577612 - DNA, 15 bp, Homo sapiens
actgcaaaaagggtc

SEQ ID NO: 577613 - DNA, 15 bp, Homo sapiens
tactgcaaaaagggt

SEQ ID NO: 577614 - DNA, 15 bp, Homo sapiens
gtactgcaaaaaggg

SEQ ID NO: 577615 - DNA, 15 bp, Homo sapiens
tgtactgcaaaaagg

SEQ ID NO: 577616 - DNA, 15 bp, Homo sapiens
ctgtactgcaaaaag

SEQ ID NO: 577617 - DNA, 15 bp, Homo sapiens
gctgtactgcaaaaa

SEQ ID NO: 577618 - DNA, 15 bp, Homo sapiens
ggaaaaggggccttg

SEQ ID NO: 577619 - DNA, 15 bp, Homo sapiens
aggaaaaggggcctt

SEQ ID NO: 577620 - DNA, 15 bp, Homo sapiens
caggaaaaggggcct

SEQ ID NO: 577621 - DNA, 15 bp, Homo sapiens
ccaggaaaaggggcc

SEQ ID NO: 577622 - DNA, 15 bp, Homo sapiens
gccaggaaaaggggc

SEQ ID NO: 577623 - DNA, 15 bp, Homo sapiens
ggccaggaaaagggg

SEQ ID NO: 577624 - DNA, 15 bp, Homo sapiens
aggccaggaaaaggg

SEQ ID NO: 577625 - DNA, 15 bp, Homo sapiens
caggccaggaaaagg

SEQ ID NO: 577626 - DNA, 15 bp, Homo sapiens
acaggccaggaaaag

SEQ ID NO: 577627 - DNA, 15 bp, Homo sapiens
aacaggccaggaaaa

SEQ ID NO: 577628 - DNA, 15 bp, Homo sapiens
taacaggccaggaaa

SEQ ID NO: 577629 - DNA, 15 bp, Homo sapiens
ataacaggccaggaa

SEQ ID NO: 577630 - DNA, 15 bp, Homo sapiens
cataacaggccagga

SEQ ID NO: 577631 - DNA, 15 bp, Homo sapiens
acataacaggccagg

SEQ ID NO: 577632 - DNA, 15 bp, Homo sapiens
cacataacaggccag

SEQ ID NO: 577633 - DNA, 15 bp, Homo sapiens
caaatataatcacac

SEQ ID NO: 577634 - DNA, 15 bp, Homo sapiens
acaaatataatcaca

SEQ ID NO: 577635 - DNA, 15 bp, Homo sapiens
aacaaatataatcac

SEQ ID NO: 577636 - DNA, 15 bp, Homo sapiens
gaacaaatataatca

SEQ ID NO: 577637 - DNA, 15 bp, Homo sapiens
ggaacaaatataatc

SEQ ID NO: 577638 - DNA, 15 bp, Homo sapiens
tggaacaaatataat

SEQ ID NO: 577639 - DNA, 15 bp, Homo sapiens
ctggaacaaatataa

SEQ ID NO: 577640 - DNA, 15 bp, Homo sapiens
actggaacaaatata

SEQ ID NO: 577641 - DNA, 15 bp, Homo sapiens
aactggaacaaatat

SEQ ID NO: 577642 - DNA, 15 bp, Homo sapiens
gaactggaacaaata

SEQ ID NO: 577643 - DNA, 15 bp, Homo sapiens
ggaactggaacaaat

SEQ ID NO: 577644 - DNA, 15 bp, Homo sapiens
aggaactggaacaaa

SEQ ID NO: 577645 - DNA, 15 bp, Homo sapiens
caggaactggaacaa

SEQ ID NO: 577646 - DNA, 15 bp, Homo sapiens
acaggaactggaaca

SEQ ID NO: 577647 - DNA, 15 bp, Homo sapiens
cacaggaactggaac

SEQ ID NO: 577648 - DNA, 15 bp, Homo sapiens
acacaggaactggaa

SEQ ID NO: 577649 - DNA, 15 bp, Homo sapiens
tacacaggaactgga

SEQ ID NO: 577650 - DNA, 15 bp, Homo sapiens
ttacacaggaactgg

SEQ ID NO: 577651 - DNA, 15 bp, Homo sapiens
attacacaggaactg

SEQ ID NO: 577652 - DNA, 15 bp, Homo sapiens
tattacacaggaact

SEQ ID NO: 577653 - DNA, 15 bp, Homo sapiens
ctattacacaggaac

SEQ ID NO: 577654 - DNA, 15 bp, Homo sapiens
tctattacacaggaa

SEQ ID NO: 577655 - DNA, 15 bp, Homo sapiens
gtctattacacagga

SEQ ID NO: 577656 - DNA, 15 bp, Homo sapiens
tgtctattacacagg

SEQ ID NO: 577657 - DNA, 15 bp, Homo sapiens
ccatgtctattacac

SEQ ID NO: 577658 - DNA, 15 bp, Homo sapiens
tccatgtctattaca

SEQ ID NO: 577659 - DNA, 15 bp, Homo sapiens
ttccatgtctattac

SEQ ID NO: 577660 - DNA, 15 bp, Homo sapiens
cttccatgtctatta

SEQ ID NO: 577661 - DNA, 15 bp, Homo sapiens
gcttccatgtctatt

SEQ ID NO: 577662 - DNA, 15 bp, Homo sapiens
ggcttccatgtctat

SEQ ID NO: 577663 - DNA, 15 bp, Homo sapiens
agaagggaaaggaag

SEQ ID NO: 577664 - DNA, 15 bp, Homo sapiens
cagaagggaaaggaa

SEQ ID NO: 577665 - DNA, 15 bp, Homo sapiens
ccagaagggaaagga

SEQ ID NO: 577666 - DNA, 15 bp, Homo sapiens
gccagaagggaaagg

SEQ ID NO: 577667 - DNA, 15 bp, Homo sapiens
tgccagaagggaaag

SEQ ID NO: 577668 - DNA, 15 bp, Homo sapiens
ctgccagaagggaaa

SEQ ID NO: 577669 - DNA, 15 bp, Homo sapiens
cctgccagaagggaa

SEQ ID NO: 577670 - DNA, 15 bp, Homo sapiens
tcctgccagaaggga

SEQ ID NO: 577671 - DNA, 15 bp, Homo sapiens
ttcctgccagaaggg

SEQ ID NO: 577672 - DNA, 15 bp, Homo sapiens
cttcctgccagaagg

SEQ ID NO: 577673 - DNA, 15 bp, Homo sapiens
acttcctgccagaag

SEQ ID NO: 577674 - DNA, 15 bp, Homo sapiens
tacttcctgccagaa

SEQ ID NO: 577675 - DNA, 15 bp, Homo sapiens
gtacttcctgccaga

SEQ ID NO: 577676 - DNA, 15 bp, Homo sapiens
ggtacttcctgccag

SEQ ID NO: 577677 - DNA, 15 bp, Homo sapiens
gggtacttcctgcca

SEQ ID NO: 577678 - DNA, 15 bp, Homo sapiens
cgggtacttcctgcc

SEQ ID NO: 577679 - DNA, 15 bp, Homo sapiens
gcgggtacttcctgc

SEQ ID NO: 577680 - DNA, 15 bp, Homo sapiens
agcgggtacttcctg

SEQ ID NO: 577681 - DNA, 15 bp, Homo sapiens
gagcgggtacttcct

SEQ ID NO: 577682 - DNA, 15 bp, Homo sapiens
ggagcgggtacttcc

SEQ ID NO: 577683 - DNA, 15 bp, Homo sapiens
tggagcgggtacttc

SEQ ID NO: 577684 - DNA, 15 bp, Homo sapiens
atggagcgggtactt

SEQ ID NO: 577685 - DNA, 15 bp, Homo sapiens
tatggagcgggtact

SEQ ID NO: 577686 - DNA, 15 bp, Homo sapiens
ttatggagcgggtac

SEQ ID NO: 577687 - DNA, 15 bp, Homo sapiens
cttatggagcgggta

SEQ ID NO: 577688 - DNA, 15 bp, Homo sapiens
tcttatggagcgggt

SEQ ID NO: 577689 - DNA, 15 bp, Homo sapiens
gtcttatggagcggg

SEQ ID NO: 577690 - DNA, 15 bp, Homo sapiens
ggtcttatggagcgg

SEQ ID NO: 577691 - DNA, 15 bp, Homo sapiens
gggtcttatggagcg

SEQ ID NO: 577692 - DNA, 15 bp, Homo sapiens
agggtcttatggagc

SEQ ID NO: 577693 - DNA, 15 bp, Homo sapiens
aagggtcttatggag

SEQ ID NO: 577694 - DNA, 15 bp, Homo sapiens
taagggtcttatgga

SEQ ID NO: 577695 - DNA, 15 bp, Homo sapiens
gtaagggtcttatgg

SEQ ID NO: 577696 - DNA, 15 bp, Homo sapiens
tgtaagggtcttatg

SEQ ID NO: 577697 - DNA, 15 bp, Homo sapiens
atgtaagggtcttat

SEQ ID NO: 577698 - DNA, 15 bp, Homo sapiens
aatgtaagggtctta

SEQ ID NO: 577699 - DNA, 15 bp, Homo sapiens
aaatgtaagggtctt

SEQ ID NO: 577700 - DNA, 15 bp, Homo sapiens
caaatgtaagggtct

SEQ ID NO: 577701 - DNA, 15 bp, Homo sapiens
ccaaatgtaagggtc

SEQ ID NO: 577702 - DNA, 15 bp, Homo sapiens
ctgtccaaatgtaag

SEQ ID NO: 577703 - DNA, 15 bp, Homo sapiens
actgtccaaatgtaa

SEQ ID NO: 577704 - DNA, 15 bp, Homo sapiens
gactgtccaaatgta

SEQ ID NO: 577705 - DNA, 15 bp, Homo sapiens
tgcaccttgactgtc

SEQ ID NO: 577706 - DNA, 15 bp, Homo sapiens
gtgcaccttgactgt

SEQ ID NO: 577707 - DNA, 15 bp, Homo sapiens
tgtgcaccttgactg

SEQ ID NO: 577708 - DNA, 15 bp, Homo sapiens
ttgtgcaccttgact

SEQ ID NO: 577709 - DNA, 15 bp, Homo sapiens
attgtgcaccttgac

SEQ ID NO: 577710 - DNA, 15 bp, Homo sapiens
atacaattgtgcacc

SEQ ID NO: 577711 - DNA, 15 bp, Homo sapiens
catacaattgtgcac

SEQ ID NO: 577712 - DNA, 15 bp, Homo sapiens
acatacaattgtgca

SEQ ID NO: 577713 - DNA, 15 bp, Homo sapiens
cacatacaattgtgc

SEQ ID NO: 577714 - DNA, 15 bp, Homo sapiens
tcacatacaattgtg

SEQ ID NO: 577715 - DNA, 15 bp, Homo sapiens
gtcacatacaattgt

SEQ ID NO: 577716 - DNA, 15 bp, Homo sapiens
ggtcacatacaattg

SEQ ID NO: 577717 - DNA, 15 bp, Homo sapiens
tggtcacatacaatt

SEQ ID NO: 577718 - DNA, 15 bp, Homo sapiens
gtggtcacatacaat

SEQ ID NO: 577719 - DNA, 15 bp, Homo sapiens
tgtggtcacatacaa

SEQ ID NO: 577720 - DNA, 15 bp, Homo sapiens
ttgtggtcacataca

SEQ ID NO: 577721 - DNA, 15 bp, Homo sapiens
gttgtggtcacatac

SEQ ID NO: 577722 - DNA, 15 bp, Homo sapiens
ggttgtggtcacata

SEQ ID NO: 577723 - DNA, 15 bp, Homo sapiens
tggttgtggtcacat

SEQ ID NO: 577724 - DNA, 15 bp, Homo sapiens
atggttgtggtcaca

SEQ ID NO: 577725 - DNA, 15 bp, Homo sapiens
catggttgtggtcac

SEQ ID NO: 577726 - DNA, 15 bp, Homo sapiens
gcatggttgtggtca

SEQ ID NO: 577727 - DNA, 15 bp, Homo sapiens
tgcatggttgtggtc

SEQ ID NO: 577728 - DNA, 15 bp, Homo sapiens
gtgcatggttgtggt

SEQ ID NO: 577729 - DNA, 15 bp, Homo sapiens
ggtgcatggttgtgg

SEQ ID NO: 577730 - DNA, 15 bp, Homo sapiens
caaggtgcatggttg

SEQ ID NO: 577731 - DNA, 15 bp, Homo sapiens
ccaaggtgcatggtt

SEQ ID NO: 577732 - DNA, 15 bp, Homo sapiens
tccaaggtgcatggt

SEQ ID NO: 577733 - DNA, 15 bp, Homo sapiens
tatgtccaaggtgca

SEQ ID NO: 577734 - DNA, 15 bp, Homo sapiens
ttatgtccaaggtgc

SEQ ID NO: 577735 - DNA, 15 bp, Homo sapiens
tttatgtccaaggtg

SEQ ID NO: 577736 - DNA, 15 bp, Homo sapiens
atttatgtccaaggt

SEQ ID NO: 577737 - DNA, 15 bp, Homo sapiens
catttatgtccaagg

SEQ ID NO: 577738 - DNA, 15 bp, Homo sapiens
acatttatgtccaag

SEQ ID NO: 577739 - DNA, 15 bp, Homo sapiens
cacatttatgtccaa

SEQ ID NO: 577740 - DNA, 15 bp, Homo sapiens
acacatttatgtcca

SEQ ID NO: 577741 - DNA, 15 bp, Homo sapiens
cacacatttatgtcc

SEQ ID NO: 577742 - DNA, 15 bp, Homo sapiens
acacacatttatgtc

SEQ ID NO: 577743 - DNA, 15 bp, Homo sapiens
tacacacatttatgt

SEQ ID NO: 577744 - DNA, 15 bp, Homo sapiens
ttacacacatttatg

SEQ ID NO: 577745 - DNA, 15 bp, Homo sapiens
gttacacacatttat

SEQ ID NO: 577746 - DNA, 15 bp, Homo sapiens
agttacacacattta

SEQ ID NO: 577747 - DNA, 15 bp, Homo sapiens
cagttacacacattt

SEQ ID NO: 577748 - DNA, 15 bp, Homo sapiens
gcagttacacacatt

SEQ ID NO: 577749 - DNA, 15 bp, Homo sapiens
tgcagttacacacat

SEQ ID NO: 577750 - DNA, 15 bp, Homo sapiens
gtgcagttacacaca

SEQ ID NO: 577751 - DNA, 15 bp, Homo sapiens
tgtgcagttacacac

SEQ ID NO: 577752 - DNA, 15 bp, Homo sapiens
atgtgcagttacaca

SEQ ID NO: 577753 - DNA, 15 bp, Homo sapiens
catgtgcagttacac

SEQ ID NO: 577754 - DNA, 15 bp, Homo sapiens
ccatgtgcagttaca

SEQ ID NO: 577755 - DNA, 15 bp, Homo sapiens
actgtactgcaaaag

SEQ ID NO: 577756 - DNA, 15 bp, Homo sapiens
tactgtactgcaaaa

SEQ ID NO: 577757 - DNA, 15 bp, Homo sapiens
ctactgtactgcaaa

SEQ ID NO: 577758 - DNA, 15 bp, Homo sapiens
cctactgtactgcaa

SEQ ID NO: 577759 - DNA, 15 bp, Homo sapiens
acctactgtactgca

SEQ ID NO: 577760 - DNA, 15 bp, Homo sapiens
cacctactgtactgc

SEQ ID NO: 577761 - DNA, 15 bp, Homo sapiens
acacctactgtactg

SEQ ID NO: 577762 - DNA, 15 bp, Homo sapiens
cacacctactgtact

SEQ ID NO: 577763 - DNA, 15 bp, Homo sapiens
gcacacctactgtac

SEQ ID NO: 577764 - DNA, 15 bp, Homo sapiens
agcacacctactgta

SEQ ID NO: 577765 - DNA, 15 bp, Homo sapiens
cagcacacctactgt

SEQ ID NO: 577766 - DNA, 15 bp, Homo sapiens
tcagcacacctactg

SEQ ID NO: 577767 - DNA, 15 bp, Homo sapiens
atcagcacacctact

SEQ ID NO: 577768 - DNA, 15 bp, Homo sapiens
tatcagcacacctac

SEQ ID NO: 577769 - DNA, 15 bp, Homo sapiens
ttatcagcacaccta

SEQ ID NO: 577770 - DNA, 15 bp, Homo sapiens
gttatcagcacacct

SEQ ID NO: 577771 - DNA, 15 bp, Homo sapiens
ggttatcagcacacc

SEQ ID NO: 577772 - DNA, 15 bp, Homo sapiens
tggttatcagcacac

SEQ ID NO: 577773 - DNA, 15 bp, Homo sapiens
ttggttatcagcaca

SEQ ID NO: 577774 - DNA, 15 bp, Homo sapiens
cttggttatcagcac

SEQ ID NO: 577775 - DNA, 15 bp, Homo sapiens
ccttggttatcagca

SEQ ID NO: 577776 - DNA, 15 bp, Homo sapiens
gccttggttatcagc

SEQ ID NO: 577777 - DNA, 15 bp, Homo sapiens
ggccttggttatcag

SEQ ID NO: 577778 - DNA, 15 bp, Homo sapiens
gggccttggttatca

SEQ ID NO: 577779 - DNA, 15 bp, Homo sapiens
ggggccttggttatc

SEQ ID NO: 577780 - DNA, 15 bp, Homo sapiens
aggggccttggttat

SEQ ID NO: 577781 - DNA, 15 bp, Homo sapiens
gaggggccttggtta

SEQ ID NO: 577782 - DNA, 15 bp, Homo sapiens
agaggggccttggtt

SEQ ID NO: 577783 - DNA, 15 bp, Homo sapiens
aagaggggccttggt

SEQ ID NO: 577784 - DNA, 15 bp, Homo sapiens
gaagaggggccttgg

SEQ ID NO: 577785 - DNA, 15 bp, Homo sapiens
ggaagaggggccttg

SEQ ID NO: 577786 - DNA, 15 bp, Homo sapiens
aggaagaggggcctt

SEQ ID NO: 577787 - DNA, 15 bp, Homo sapiens
caggaagaggggcct

SEQ ID NO: 577788 - DNA, 15 bp, Homo sapiens
ccaggaagaggggcc

SEQ ID NO: 577789 - DNA, 15 bp, Homo sapiens
gccaggaagaggggc

SEQ ID NO: 577790 - DNA, 15 bp, Homo sapiens
ggccaggaagagggg

SEQ ID NO: 577791 - DNA, 15 bp, Homo sapiens
aggccaggaagaggg

SEQ ID NO: 577792 - DNA, 15 bp, Homo sapiens
caggccaggaagagg

SEQ ID NO: 577793 - DNA, 15 bp, Homo sapiens
acaggccaggaagag

SEQ ID NO: 577794 - DNA, 15 bp, Homo sapiens
aacaggccaggaaga

SEQ ID NO: 577795 - DNA, 15 bp, Homo sapiens
taacaggccaggaag

SEQ ID NO: 577796 - DNA, 15 bp, Homo sapiens
ttaacaggccaggaa

SEQ ID NO: 577797 - DNA, 15 bp, Homo sapiens
gttaacaggccagga

SEQ ID NO: 577798 - DNA, 15 bp, Homo sapiens
cgttaacaggccagg

SEQ ID NO: 577799 - DNA, 15 bp, Homo sapiens
acgttaacaggccag

SEQ ID NO: 577800 - DNA, 15 bp, Homo sapiens
tacgttaacaggcca

SEQ ID NO: 577801 - DNA, 15 bp, Homo sapiens
atacgttaacaggcc

SEQ ID NO: 577802 - DNA, 15 bp, Homo sapiens
catacgttaacaggc

SEQ ID NO: 577803 - DNA, 15 bp, Homo sapiens
acatacgttaacagg

SEQ ID NO: 577804 - DNA, 15 bp, Homo sapiens
cacatacgttaacag

SEQ ID NO: 577805 - DNA, 15 bp, Homo sapiens
tcacatacgttaaca

SEQ ID NO: 577806 - DNA, 15 bp, Homo sapiens
atcacatacgttaac

SEQ ID NO: 577807 - DNA, 15 bp, Homo sapiens
aatcacatacgttaa

SEQ ID NO: 577808 - DNA, 15 bp, Homo sapiens
taatcacatacgtta

SEQ ID NO: 577809 - DNA, 15 bp, Homo sapiens
ataatcacatacgtt

SEQ ID NO: 577810 - DNA, 15 bp, Homo sapiens
tataatcacatacgt

SEQ ID NO: 577811 - DNA, 15 bp, Homo sapiens
atataatcacatacg

SEQ ID NO: 577812 - DNA, 15 bp, Homo sapiens
aatataatcacatac

SEQ ID NO: 577813 - DNA, 15 bp, Homo sapiens
aaatataatcacata

SEQ ID NO: 577814 - DNA, 15 bp, Homo sapiens
caaatataatcacat

SEQ ID NO: 577815 - DNA, 15 bp, Homo sapiens
tggaacccagacaaa

SEQ ID NO: 577816 - DNA, 15 bp, Homo sapiens
ctggaacccagacaa

SEQ ID NO: 577817 - DNA, 15 bp, Homo sapiens
actggaacccagaca

SEQ ID NO: 577818 - DNA, 15 bp, Homo sapiens
cactggaacccagac

SEQ ID NO: 577819 - DNA, 15 bp, Homo sapiens
acactggaacccaga

SEQ ID NO: 577820 - DNA, 15 bp, Homo sapiens
tacactggaacccag

SEQ ID NO: 577821 - DNA, 15 bp, Homo sapiens
atacactggaaccca

SEQ ID NO: 577822 - DNA, 15 bp, Homo sapiens
tatacactggaaccc

SEQ ID NO: 577823 - DNA, 15 bp, Homo sapiens
ttatacactggaacc

SEQ ID NO: 577824 - DNA, 15 bp, Homo sapiens
cttatacactggaac

SEQ ID NO: 577825 - DNA, 15 bp, Homo sapiens
tcttatacactggaa

SEQ ID NO: 577826 - DNA, 15 bp, Homo sapiens
gtcttatacactgga

SEQ ID NO: 577827 - DNA, 15 bp, Homo sapiens
tgtcttatacactgg

SEQ ID NO: 577828 - DNA, 15 bp, Homo sapiens
atgtcttatacactg

SEQ ID NO: 577829 - DNA, 15 bp, Homo sapiens
catgtcttatacact

SEQ ID NO: 577830 - DNA, 15 bp, Homo sapiens
ccatgtcttatacac

SEQ ID NO: 577831 - DNA, 15 bp, Homo sapiens
tccatgtcttataca

SEQ ID NO: 577832 - DNA, 15 bp, Homo sapiens
ttccatgtcttatac

SEQ ID NO: 577833 - DNA, 15 bp, Homo sapiens
cttccatgtcttata

SEQ ID NO: 577834 - DNA, 15 bp, Homo sapiens
gcttccatgtcttat

SEQ ID NO: 577835 - DNA, 15 bp, Homo sapiens
ggcttccatgtctta

SEQ ID NO: 577836 - DNA, 15 bp, Homo sapiens
aggcttccatgtctt

SEQ ID NO: 577837 - DNA, 15 bp, Homo sapiens
gggcaggggaggctt

SEQ ID NO: 577838 - DNA, 15 bp, Homo sapiens
ggggcaggggaggct

SEQ ID NO: 577839 - DNA, 15 bp, Homo sapiens
tggggcaggggaggc

SEQ ID NO: 577840 - DNA, 15 bp, Homo sapiens
gtggggcaggggagg

SEQ ID NO: 577841 - DNA, 15 bp, Homo sapiens
ggtggggcaggggag

SEQ ID NO: 577842 - DNA, 15 bp, Homo sapiens
gggtggggcagggga

SEQ ID NO: 577843 - DNA, 15 bp, Homo sapiens
ggggtggggcagggg

SEQ ID NO: 577844 - DNA, 15 bp, Homo sapiens
tggggtggggcaggg

SEQ ID NO: 577845 - DNA, 15 bp, Homo sapiens
gtggggtggggcagg

SEQ ID NO: 577846 - DNA, 15 bp, Homo sapiens
ggtggggtggggcag

SEQ ID NO: 577847 - DNA, 15 bp, Homo sapiens
gggtggggtggggca

SEQ ID NO: 577848 - DNA, 15 bp, Homo sapiens
agggtggggtggggc

SEQ ID NO: 577849 - DNA, 15 bp, Homo sapiens
gagggtggggtgggg

SEQ ID NO: 577850 - DNA, 15 bp, Homo sapiens
tgagggtggggtggg

SEQ ID NO: 577851 - DNA, 15 bp, Homo sapiens
ttgagggtggggtgg

SEQ ID NO: 577852 - DNA, 15 bp, Homo sapiens
attgagggtggggtg

SEQ ID NO: 577853 - DNA, 15 bp, Homo sapiens
gattgagggtggggt

SEQ ID NO: 577854 - DNA, 15 bp, Homo sapiens
agattgagggtgggg

SEQ ID NO: 577855 - DNA, 15 bp, Homo sapiens
aagattgagggtggg

SEQ ID NO: 577856 - DNA, 15 bp, Homo sapiens
gaagattgagggtgg

SEQ ID NO: 577857 - DNA, 15 bp, Homo sapiens
ggaagattgagggtg

SEQ ID NO: 577858 - DNA, 15 bp, Homo sapiens
aggaagattgagggt

SEQ ID NO: 577859 - DNA, 15 bp, Homo sapiens
aaggaagattgaggg

SEQ ID NO: 577860 - DNA, 15 bp, Homo sapiens
aaaggaagattgagg

SEQ ID NO: 577861 - DNA, 15 bp, Homo sapiens
gaaaggaagattgag

SEQ ID NO: 577862 - DNA, 15 bp, Homo sapiens
ggaaaggaagattga

SEQ ID NO: 577863 - DNA, 15 bp, Homo sapiens
ccctgccagaaggga

SEQ ID NO: 577864 - DNA, 15 bp, Homo sapiens
tccctgccagaaggg

SEQ ID NO: 577865 - DNA, 15 bp, Homo sapiens
ctccctgccagaagg

SEQ ID NO: 577866 - DNA, 15 bp, Homo sapiens
actccctgccagaag

SEQ ID NO: 577867 - DNA, 15 bp, Homo sapiens
cactccctgccagaa

SEQ ID NO: 577868 - DNA, 15 bp, Homo sapiens
gcactccctgccaga

SEQ ID NO: 577869 - DNA, 15 bp, Homo sapiens
ggcactccctgccag

SEQ ID NO: 577870 - DNA, 15 bp, Homo sapiens
tggcactccctgcca

SEQ ID NO: 577871 - DNA, 15 bp, Homo sapiens
ctggcactccctgcc

SEQ ID NO: 577872 - DNA, 15 bp, Homo sapiens
gctggcactccctgc

SEQ ID NO: 577873 - DNA, 15 bp, Homo sapiens
agctggcactccctg

SEQ ID NO: 577874 - DNA, 15 bp, Homo sapiens
gagctggcactccct

SEQ ID NO: 577875 - DNA, 15 bp, Homo sapiens
ggagctggcactccc

SEQ ID NO: 577876 - DNA, 15 bp, Homo sapiens
tggagctggcactcc

SEQ ID NO: 577877 - DNA, 15 bp, Homo sapiens
atggagctggcactc

SEQ ID NO: 577878 - DNA, 15 bp, Homo sapiens
tatggagctggcact

SEQ ID NO: 577879 - DNA, 15 bp, Homo sapiens
ttatggagctggcac

SEQ ID NO: 577880 - DNA, 15 bp, Homo sapiens
cttatggagctggca

SEQ ID NO: 577881 - DNA, 15 bp, Homo sapiens
tcttatggagctggc

SEQ ID NO: 577882 - DNA, 15 bp, Homo sapiens
ttcttatggagctgg

SEQ ID NO: 577883 - DNA, 15 bp, Homo sapiens
gttcttatggagctg

SEQ ID NO: 577884 - DNA, 15 bp, Homo sapiens
ggttcttatggagct

SEQ ID NO: 577885 - DNA, 15 bp, Homo sapiens
aggttcttatggagc

SEQ ID NO: 577886 - DNA, 15 bp, Homo sapiens
aaggttcttatggag

SEQ ID NO: 577887 - DNA, 15 bp, Homo sapiens
taaggttcttatgga

SEQ ID NO: 577888 - DNA, 15 bp, Homo sapiens
gtaaggttcttatgg

SEQ ID NO: 577889 - DNA, 15 bp, Homo sapiens
tgtaaggttcttatg

SEQ ID NO: 577890 - DNA, 15 bp, Homo sapiens
atgtaaggttcttat

SEQ ID NO: 577891 - DNA, 15 bp, Homo sapiens
aatgtaaggttctta

SEQ ID NO: 577892 - DNA, 15 bp, Homo sapiens
aaatgtaaggttctt

SEQ ID NO: 577893 - DNA, 15 bp, Homo sapiens
caaatgtaaggttct

SEQ ID NO: 577894 - DNA, 15 bp, Homo sapiens
ccaaatgtaaggttc

SEQ ID NO: 577895 - DNA, 15 bp, Homo sapiens
tccaaatgtaaggtt

SEQ ID NO: 577896 - DNA, 15 bp, Homo sapiens
gtccaaatgtaaggt

SEQ ID NO: 577897 - DNA, 15 bp, Homo sapiens
gaattgtgcaccttg

SEQ ID NO: 577898 - DNA, 15 bp, Homo sapiens
agaattgtgcacctt

SEQ ID NO: 577899 - DNA, 15 bp, Homo sapiens
tagaattgtgcacct

SEQ ID NO: 577900 - DNA, 15 bp, Homo sapiens
ttagaattgtgcacc

SEQ ID NO: 577901 - DNA, 15 bp, Homo sapiens
cttagaattgtgcac

SEQ ID NO: 577902 - DNA, 15 bp, Homo sapiens
acttagaattgtgca

SEQ ID NO: 577903 - DNA, 15 bp, Homo sapiens
cacttagaattgtgc

SEQ ID NO: 577904 - DNA, 15 bp, Homo sapiens
tcacttagaattgtg

SEQ ID NO: 577905 - DNA, 15 bp, Homo sapiens
gtcacttagaattgt

SEQ ID NO: 577906 - DNA, 15 bp, Homo sapiens
ggtcacttagaattg

SEQ ID NO: 577907 - DNA, 15 bp, Homo sapiens
cggtcacttagaatt

SEQ ID NO: 577908 - DNA, 15 bp, Homo sapiens
gcggtcacttagaat

SEQ ID NO: 577909 - DNA, 15 bp, Homo sapiens
tgcggtcacttagaa

SEQ ID NO: 577910 - DNA, 15 bp, Homo sapiens
ctgcggtcacttaga

SEQ ID NO: 577911 - DNA, 15 bp, Homo sapiens
gctgcggtcacttag

SEQ ID NO: 577912 - DNA, 15 bp, Homo sapiens
ggctgcggtcactta

SEQ ID NO: 577913 - DNA, 15 bp, Homo sapiens
tggctgcggtcactt

SEQ ID NO: 577914 - DNA, 15 bp, Homo sapiens
atggctgcggtcact

SEQ ID NO: 577915 - DNA, 15 bp, Homo sapiens
catggctgcggtcac

SEQ ID NO: 577916 - DNA, 15 bp, Homo sapiens
gcatggctgcggtca

SEQ ID NO: 577917 - DNA, 15 bp, Homo sapiens
tgcatggctgcggtc

SEQ ID NO: 577918 - DNA, 15 bp, Homo sapiens
gtgcatggctgcggt

SEQ ID NO: 577919 - DNA, 15 bp, Homo sapiens
ggtgcatggctgcgg

SEQ ID NO: 577920 - DNA, 15 bp, Homo sapiens
aggtgcatggctgcg

SEQ ID NO: 577921 - DNA, 15 bp, Homo sapiens
aaggtgcatggctgc

SEQ ID NO: 577922 - DNA, 15 bp, Homo sapiens
accaaggtgcatggc

SEQ ID NO: 577923 - DNA, 15 bp, Homo sapiens
gaccaaggtgcatgg

SEQ ID NO: 577924 - DNA, 15 bp, Homo sapiens
tgaccaaggtgcatg

SEQ ID NO: 577925 - DNA, 15 bp, Homo sapiens
ttgaccaaggtgcat

SEQ ID NO: 577926 - DNA, 15 bp, Homo sapiens
attgaccaaggtgca

SEQ ID NO: 577927 - DNA, 15 bp, Homo sapiens
tattgaccaaggtgc

SEQ ID NO: 577928 - DNA, 15 bp, Homo sapiens
ttattgaccaaggtg

SEQ ID NO: 577929 - DNA, 15 bp, Homo sapiens
attattgaccaaggt

SEQ ID NO: 577930 - DNA, 15 bp, Homo sapiens
cattattgaccaagg

SEQ ID NO: 577931 - DNA, 15 bp, Homo sapiens
acattattgaccaag

SEQ ID NO: 577932 - DNA, 15 bp, Homo sapiens
cacattattgaccaa

SEQ ID NO: 577933 - DNA, 15 bp, Homo sapiens
acacattattgacca

SEQ ID NO: 577934 - DNA, 15 bp, Homo sapiens
cacacattattgacc

SEQ ID NO: 577935 - DNA, 15 bp, Homo sapiens
acacacattattgac

SEQ ID NO: 577936 - DNA, 15 bp, Homo sapiens
tacacacattattga

SEQ ID NO: 577937 - DNA, 15 bp, Homo sapiens
ttacacacattattg

SEQ ID NO: 577938 - DNA, 15 bp, Homo sapiens
gttacacacattatt

SEQ ID NO: 577939 - DNA, 15 bp, Homo sapiens
agttacacacattat

SEQ ID NO: 577940 - DNA, 15 bp, Homo sapiens
cagttacacacatta

SEQ ID NO: 577941 - DNA, 15 bp, Homo sapiens
gtgtgcagttacaca

SEQ ID NO: 577942 - DNA, 15 bp, Homo sapiens
cgtgtgcagttacac

SEQ ID NO: 577943 - DNA, 15 bp, Homo sapiens
ccgtgtgcagttaca

SEQ ID NO: 577944 - DNA, 15 bp, Homo sapiens
gccgtgtgcagttac

SEQ ID NO: 577945 - DNA, 15 bp, Homo sapiens
ggccgtgtgcagtta

SEQ ID NO: 577946 - DNA, 15 bp, Homo sapiens
aggccgtgtgcagtt

SEQ ID NO: 577947 - DNA, 15 bp, Homo sapiens
taggccgtgtgcagt

SEQ ID NO: 577948 - DNA, 15 bp, Homo sapiens
ataggccgtgtgcag

SEQ ID NO: 577949 - DNA, 15 bp, Homo sapiens
gataggccgtgtgca

SEQ ID NO: 577950 - DNA, 15 bp, Homo sapiens
agataggccgtgtgc

SEQ ID NO: 577951 - DNA, 15 bp, Homo sapiens
gagataggccgtgtg

SEQ ID NO: 577952 - DNA, 15 bp, Homo sapiens
tgagataggccgtgt

SEQ ID NO: 577953 - DNA, 15 bp, Homo sapiens
atgagataggccgtg

SEQ ID NO: 577954 - DNA, 15 bp, Homo sapiens
gatgagataggccgt

SEQ ID NO: 577955 - DNA, 15 bp, Homo sapiens
agatgagataggccg

SEQ ID NO: 577956 - DNA, 15 bp, Homo sapiens
cagatgagataggcc

SEQ ID NO: 577957 - DNA, 15 bp, Homo sapiens
tcagatgagataggc

SEQ ID NO: 577958 - DNA, 15 bp, Homo sapiens
ttcagatgagatagg

SEQ ID NO: 577959 - DNA, 15 bp, Homo sapiens
attcagatgagatag

SEQ ID NO: 577960 - DNA, 15 bp, Homo sapiens
tattcagatgagata

SEQ ID NO: 577961 - DNA, 15 bp, Homo sapiens
ttattcagatgagat

SEQ ID NO: 577962 - DNA, 15 bp, Homo sapiens
cttattcagatgaga

SEQ ID NO: 577963 - DNA, 15 bp, Homo sapiens
ccttattcagatgag

SEQ ID NO: 577964 - DNA, 15 bp, Homo sapiens
gccttattcagatga

SEQ ID NO: 577965 - DNA, 15 bp, Homo sapiens
ggccttattcagatg

SEQ ID NO: 577966 - DNA, 15 bp, Homo sapiens
aggccttattcagat

SEQ ID NO: 577967 - DNA, 15 bp, Homo sapiens
aaggccttattcaga

SEQ ID NO: 577968 - DNA, 15 bp, Homo sapiens
taaggccttattcag

SEQ ID NO: 577969 - DNA, 15 bp, Homo sapiens
gtaaggccttattca

SEQ ID NO: 577970 - DNA, 15 bp, Homo sapiens
agtaaggccttattc

SEQ ID NO: 577971 - DNA, 15 bp, Homo sapiens
gagtaaggccttatt

SEQ ID NO: 577972 - DNA, 15 bp, Homo sapiens
agagtaaggccttat

SEQ ID NO: 577973 - DNA, 15 bp, Homo sapiens
gagagtaaggcctta

SEQ ID NO: 577974 - DNA, 15 bp, Homo sapiens
tgagagtaaggcctt

SEQ ID NO: 577975 - DNA, 15 bp, Homo sapiens
ctgagagtaaggcct

SEQ ID NO: 577976 - DNA, 15 bp, Homo sapiens
tctgagagtaaggcc

SEQ ID NO: 577977 - DNA, 15 bp, Homo sapiens
gtctgagagtaaggc

SEQ ID NO: 577978 - DNA, 15 bp, Homo sapiens
ggtctgagagtaagg

SEQ ID NO: 577979 - DNA, 15 bp, Homo sapiens
gggtctgagagtaag

SEQ ID NO: 577980 - DNA, 15 bp, Homo sapiens
ggggtctgagagtaa

SEQ ID NO: 577981 - DNA, 15 bp, Homo sapiens
tatcagcacccctgc

SEQ ID NO: 577982 - DNA, 15 bp, Homo sapiens
ttatcagcacccctg

SEQ ID NO: 577983 - DNA, 15 bp, Homo sapiens
gttatcagcacccct

SEQ ID NO: 577984 - DNA, 15 bp, Homo sapiens
ggttatcagcacccc

SEQ ID NO: 577985 - DNA, 15 bp, Homo sapiens
tggttatcagcaccc

SEQ ID NO: 577986 - DNA, 15 bp, Homo sapiens
ttggttatcagcacc

SEQ ID NO: 577987 - DNA, 15 bp, Homo sapiens
tgggccttggttatc

SEQ ID NO: 577988 - DNA, 15 bp, Homo sapiens
atgggccttggttat

SEQ ID NO: 577989 - DNA, 15 bp, Homo sapiens
aatgggccttggtta

SEQ ID NO: 577990 - DNA, 15 bp, Homo sapiens
aaatgggccttggtt

SEQ ID NO: 577991 - DNA, 15 bp, Homo sapiens
aaaatgggccttggt

SEQ ID NO: 577992 - DNA, 15 bp, Homo sapiens
gaaaatgggccttgg

SEQ ID NO: 577993 - DNA, 15 bp, Homo sapiens
ggaaaatgggccttg

SEQ ID NO: 577994 - DNA, 15 bp, Homo sapiens
aggaaaatgggcctt

SEQ ID NO: 577995 - DNA, 15 bp, Homo sapiens
caggaaaatgggcct

SEQ ID NO: 577996 - DNA, 15 bp, Homo sapiens
ccaggaaaatgggcc

SEQ ID NO: 577997 - DNA, 15 bp, Homo sapiens
gccaggaaaatgggc

SEQ ID NO: 577998 - DNA, 15 bp, Homo sapiens
ggccaggaaaatggg

SEQ ID NO: 577999 - DNA, 15 bp, Homo sapiens
aggccaggaaaatgg

SEQ ID NO: 578000 - DNA, 15 bp, Homo sapiens
caggccaggaaaatg

SEQ ID NO: 578001 - DNA, 15 bp, Homo sapiens
acaggccaggaaaat

SEQ ID NO: 578002 - DNA, 15 bp, Homo sapiens
ggacaaatataatca

SEQ ID NO: 578003 - DNA, 15 bp, Homo sapiens
tggacaaatataatc

SEQ ID NO: 578004 - DNA, 15 bp, Homo sapiens
ctggacaaatataat

SEQ ID NO: 578005 - DNA, 15 bp, Homo sapiens
cctggacaaatataa

SEQ ID NO: 578006 - DNA, 15 bp, Homo sapiens
acctggacaaatata

SEQ ID NO: 578007 - DNA, 15 bp, Homo sapiens
aacctggacaaatat

SEQ ID NO: 578008 - DNA, 15 bp, Homo sapiens
aaacctggacaaata

SEQ ID NO: 578009 - DNA, 15 bp, Homo sapiens
gaaacctggacaaat

SEQ ID NO: 578010 - DNA, 15 bp, Homo sapiens
agaaacctggacaaa

SEQ ID NO: 578011 - DNA, 15 bp, Homo sapiens
cagaaacctggacaa

SEQ ID NO: 578012 - DNA, 15 bp, Homo sapiens
acagaaacctggaca

SEQ ID NO: 578013 - DNA, 15 bp, Homo sapiens
cacagaaacctggac

SEQ ID NO: 578014 - DNA, 15 bp, Homo sapiens
acacagaaacctgga

SEQ ID NO: 578015 - DNA, 15 bp, Homo sapiens
tacacagaaacctgg

SEQ ID NO: 578016 - DNA, 15 bp, Homo sapiens
gtacacagaaacctg

SEQ ID NO: 578017 - DNA, 15 bp, Homo sapiens
agtacacagaaacct

SEQ ID NO: 578018 - DNA, 15 bp, Homo sapiens
tagtacacagaaacc

SEQ ID NO: 578019 - DNA, 15 bp, Homo sapiens
ctagtacacagaaac

SEQ ID NO: 578020 - DNA, 15 bp, Homo sapiens
tctagtacacagaaa

SEQ ID NO: 578021 - DNA, 15 bp, Homo sapiens
gtctagtacacagaa

SEQ ID NO: 578022 - DNA, 15 bp, Homo sapiens
tgtctagtacacaga

SEQ ID NO: 578023 - DNA, 15 bp, Homo sapiens
ttgtctagtacacag

SEQ ID NO: 578024 - DNA, 15 bp, Homo sapiens
cttgtctagtacaca

SEQ ID NO: 578025 - DNA, 15 bp, Homo sapiens
ccttgtctagtacac

SEQ ID NO: 578026 - DNA, 15 bp, Homo sapiens
tccttgtctagtaca

SEQ ID NO: 578027 - DNA, 15 bp, Homo sapiens
ttccttgtctagtac

SEQ ID NO: 578028 - DNA, 15 bp, Homo sapiens
cttccttgtctagta

SEQ ID NO: 578029 - DNA, 15 bp, Homo sapiens
gcttccttgtctagt

SEQ ID NO: 578030 - DNA, 15 bp, Homo sapiens
ggcttccttgtctag

SEQ ID NO: 578031 - DNA, 15 bp, Homo sapiens
gaggcttccttgtct

SEQ ID NO: 578032 - DNA, 15 bp, Homo sapiens
ggaggcttccttgtc

SEQ ID NO: 578033 - DNA, 15 bp, Homo sapiens
aggaggcttccttgt

SEQ ID NO: 578034 - DNA, 15 bp, Homo sapiens
gaggaggcttccttg

SEQ ID NO: 578035 - DNA, 15 bp, Homo sapiens
agaggaggcttcctt

SEQ ID NO: 578036 - DNA, 15 bp, Homo sapiens
cagaggaggcttcct

SEQ ID NO: 578037 - DNA, 15 bp, Homo sapiens
gcagaggaggcttcc

SEQ ID NO: 578038 - DNA, 15 bp, Homo sapiens
ggcagaggaggcttc

SEQ ID NO: 578039 - DNA, 15 bp, Homo sapiens
gggcagaggaggctt

SEQ ID NO: 578040 - DNA, 15 bp, Homo sapiens
ggggcagaggaggct

SEQ ID NO: 578041 - DNA, 15 bp, Homo sapiens
tggggcagaggaggc

SEQ ID NO: 578042 - DNA, 15 bp, Homo sapiens
atggggcagaggagg

SEQ ID NO: 578043 - DNA, 15 bp, Homo sapiens
gatggggcagaggag

SEQ ID NO: 578044 - DNA, 15 bp, Homo sapiens
ggatggggcagagga

SEQ ID NO: 578045 - DNA, 15 bp, Homo sapiens
gggatggggcagagg

SEQ ID NO: 578046 - DNA, 15 bp, Homo sapiens
tgggatggggcagag

SEQ ID NO: 578047 - DNA, 15 bp, Homo sapiens
atgggatggggcaga

SEQ ID NO: 578048 - DNA, 15 bp, Homo sapiens
gatgggatggggcag

SEQ ID NO: 578049 - DNA, 15 bp, Homo sapiens
agatgggatggggca

SEQ ID NO: 578050 - DNA, 15 bp, Homo sapiens
tagatgggatggggc

SEQ ID NO: 578051 - DNA, 15 bp, Homo sapiens
gtagatgggatgggg

SEQ ID NO: 578052 - DNA, 15 bp, Homo sapiens
cgtagatgggatggg

SEQ ID NO: 578053 - DNA, 15 bp, Homo sapiens
gcgtagatgggatgg

SEQ ID NO: 578054 - DNA, 15 bp, Homo sapiens
tgcgtagatgggatg

SEQ ID NO: 578055 - DNA, 15 bp, Homo sapiens
atgcgtagatgggat

SEQ ID NO: 578056 - DNA, 15 bp, Homo sapiens
tatgcgtagatggga

SEQ ID NO: 578057 - DNA, 15 bp, Homo sapiens
ttatgcgtagatggg

SEQ ID NO: 578058 - DNA, 15 bp, Homo sapiens
attatgcgtagatgg

SEQ ID NO: 578059 - DNA, 15 bp, Homo sapiens
gattatgcgtagatg

SEQ ID NO: 578060 - DNA, 15 bp, Homo sapiens
agattatgcgtagat

SEQ ID NO: 578061 - DNA, 15 bp, Homo sapiens
aagattatgcgtaga

SEQ ID NO: 578062 - DNA, 15 bp, Homo sapiens
aaagattatgcgtag

SEQ ID NO: 578063 - DNA, 15 bp, Homo sapiens
gaaagattatgcgta

SEQ ID NO: 578064 - DNA, 15 bp, Homo sapiens
agaaagattatgcgt

SEQ ID NO: 578065 - DNA, 15 bp, Homo sapiens
aagaaagattatgcg

SEQ ID NO: 578066 - DNA, 15 bp, Homo sapiens
aaagaaagattatgc

SEQ ID NO: 578067 - DNA, 15 bp, Homo sapiens
aaaagaaagattatg

SEQ ID NO: 578068 - DNA, 15 bp, Homo sapiens
gaaaagaaagattat

SEQ ID NO: 578069 - DNA, 15 bp, Homo sapiens
ggaaaagaaagatta

SEQ ID NO: 578070 - DNA, 15 bp, Homo sapiens
aggaaaagaaagatt

SEQ ID NO: 578071 - DNA, 15 bp, Homo sapiens
gaggaaaagaaagat

SEQ ID NO: 578072 - DNA, 15 bp, Homo sapiens
ggaggaaaagaaaga

SEQ ID NO: 578073 - DNA, 15 bp, Homo sapiens
gggaggaaaagaaag

SEQ ID NO: 578074 - DNA, 15 bp, Homo sapiens
tgggaggaaaagaaa

SEQ ID NO: 578075 - DNA, 15 bp, Homo sapiens
ctgggaggaaaagaa

SEQ ID NO: 578076 - DNA, 15 bp, Homo sapiens
gctgggaggaaaaga

SEQ ID NO: 578077 - DNA, 15 bp, Homo sapiens
tgctgggaggaaaag

SEQ ID NO: 578078 - DNA, 15 bp, Homo sapiens
ctgctgggaggaaaa

SEQ ID NO: 578079 - DNA, 15 bp, Homo sapiens
cctgctgggaggaaa

SEQ ID NO: 578080 - DNA, 15 bp, Homo sapiens
ccctgctgggaggaa

SEQ ID NO: 578081 - DNA, 15 bp, Homo sapiens
tccctgctgggagga

SEQ ID NO: 578082 - DNA, 15 bp, Homo sapiens
ctccctgctgggagg

SEQ ID NO: 578083 - DNA, 15 bp, Homo sapiens
actccctgctgggag

SEQ ID NO: 578084 - DNA, 15 bp, Homo sapiens
cactccctgctggga

SEQ ID NO: 578085 - DNA, 15 bp, Homo sapiens
gcactccctgctggg

SEQ ID NO: 578086 - DNA, 15 bp, Homo sapiens
agcactccctgctgg

SEQ ID NO: 578087 - DNA, 15 bp, Homo sapiens
gagcactccctgctg

SEQ ID NO: 578088 - DNA, 15 bp, Homo sapiens
tgagcactccctgct

SEQ ID NO: 578089 - DNA, 15 bp, Homo sapiens
gtgagcactccctgc

SEQ ID NO: 578090 - DNA, 15 bp, Homo sapiens
agtgagcactccctg

SEQ ID NO: 578091 - DNA, 15 bp, Homo sapiens
gagtgagcactccct

SEQ ID NO: 578092 - DNA, 15 bp, Homo sapiens
ggagtgagcactccc

SEQ ID NO: 578093 - DNA, 15 bp, Homo sapiens
tggagtgagcactcc

SEQ ID NO: 578094 - DNA, 15 bp, Homo sapiens
atggagtgagcactc

SEQ ID NO: 578095 - DNA, 15 bp, Homo sapiens
tatggagtgagcact

SEQ ID NO: 578096 - DNA, 15 bp, Homo sapiens
ttatggagtgagcac

SEQ ID NO: 578097 - DNA, 15 bp, Homo sapiens
cttatggagtgagca

SEQ ID NO: 578098 - DNA, 15 bp, Homo sapiens
tcttatggagtgagc

SEQ ID NO: 578099 - DNA, 15 bp, Homo sapiens
gtcttatggagtgag

SEQ ID NO: 578100 - DNA, 15 bp, Homo sapiens
ggtcttatggagtga

SEQ ID NO: 578101 - DNA, 15 bp, Homo sapiens
gggtcttatggagtg

SEQ ID NO: 578102 - DNA, 15 bp, Homo sapiens
agggtcttatggagt

SEQ ID NO: 578103 - DNA, 15 bp, Homo sapiens
gttgtggtcacttac

SEQ ID NO: 578104 - DNA, 15 bp, Homo sapiens
ggttgtggtcactta

SEQ ID NO: 578105 - DNA, 15 bp, Homo sapiens
tggttgtggtcactt

SEQ ID NO: 578106 - DNA, 15 bp, Homo sapiens
atggttgtggtcact

SEQ ID NO: 578107 - DNA, 15 bp, Homo sapiens
atgcatggttgtggt

SEQ ID NO: 578108 - DNA, 15 bp, Homo sapiens
gatgcatggttgtgg

SEQ ID NO: 578109 - DNA, 15 bp, Homo sapiens
agatgcatggttgtg

SEQ ID NO: 578110 - DNA, 15 bp, Homo sapiens
aagatgcatggttgt

SEQ ID NO: 578111 - DNA, 15 bp, Homo sapiens
caagatgcatggttg

SEQ ID NO: 578112 - DNA, 15 bp, Homo sapiens
ccaagatgcatggtt

SEQ ID NO: 578113 - DNA, 15 bp, Homo sapiens
tccaagatgcatggt

SEQ ID NO: 578114 - DNA, 15 bp, Homo sapiens
ttccaagatgcatgg

SEQ ID NO: 578115 - DNA, 15 bp, Homo sapiens
tttccaagatgcatg

SEQ ID NO: 578116 - DNA, 15 bp, Homo sapiens
atttccaagatgcat

SEQ ID NO: 578117 - DNA, 15 bp, Homo sapiens
aatttccaagatgca

SEQ ID NO: 578118 - DNA, 15 bp, Homo sapiens
aaatttccaagatgc

SEQ ID NO: 578119 - DNA, 15 bp, Homo sapiens
taaatttccaagatg

SEQ ID NO: 578120 - DNA, 15 bp, Homo sapiens
ataaatttccaagat

SEQ ID NO: 578121 - DNA, 15 bp, Homo sapiens
cataaatttccaaga

SEQ ID NO: 578122 - DNA, 15 bp, Homo sapiens
acataaatttccaag

SEQ ID NO: 578123 - DNA, 15 bp, Homo sapiens
cacataaatttccaa

SEQ ID NO: 578124 - DNA, 15 bp, Homo sapiens
gcacataaatttcca

SEQ ID NO: 578125 - DNA, 15 bp, Homo sapiens
tgcacataaatttcc

SEQ ID NO: 578126 - DNA, 15 bp, Homo sapiens
atgcacataaatttc

SEQ ID NO: 578127 - DNA, 15 bp, Homo sapiens
tatgcacataaattt

SEQ ID NO: 578128 - DNA, 15 bp, Homo sapiens
ttatgcacataaatt

SEQ ID NO: 578129 - DNA, 15 bp, Homo sapiens
gttatgcacataaat

SEQ ID NO: 578130 - DNA, 15 bp, Homo sapiens
agttatgcacataaa

SEQ ID NO: 578131 - DNA, 15 bp, Homo sapiens
cagttatgcacataa

SEQ ID NO: 578132 - DNA, 15 bp, Homo sapiens
gcagttatgcacata

SEQ ID NO: 578133 - DNA, 15 bp, Homo sapiens
agccatgtgcagtta

SEQ ID NO: 578134 - DNA, 15 bp, Homo sapiens
aagccatgtgcagtt

SEQ ID NO: 578135 - DNA, 15 bp, Homo sapiens
taagccatgtgcagt

SEQ ID NO: 578136 - DNA, 15 bp, Homo sapiens
ataagccatgtgcag

SEQ ID NO: 578137 - DNA, 15 bp, Homo sapiens
gataagccatgtgca

SEQ ID NO: 578138 - DNA, 15 bp, Homo sapiens
ggataagccatgtgc

SEQ ID NO: 578139 - DNA, 15 bp, Homo sapiens
aggataagccatgtg

SEQ ID NO: 578140 - DNA, 15 bp, Homo sapiens
taggataagccatgt

SEQ ID NO: 578141 - DNA, 15 bp, Homo sapiens
ataggataagccatg

SEQ ID NO: 578142 - DNA, 15 bp, Homo sapiens
aataggataagccat

SEQ ID NO: 578143 - DNA, 15 bp, Homo sapiens
aaataggataagcca

SEQ ID NO: 578144 - DNA, 15 bp, Homo sapiens
caaataggataagcc

SEQ ID NO: 578145 - DNA, 15 bp, Homo sapiens
tcaaataggataagc

SEQ ID NO: 578146 - DNA, 15 bp, Homo sapiens
ttcaaataggataag

SEQ ID NO: 578147 - DNA, 15 bp, Homo sapiens
attcaaataggataa

SEQ ID NO: 578148 - DNA, 15 bp, Homo sapiens
tattcaaataggata

SEQ ID NO: 578149 - DNA, 15 bp, Homo sapiens
ttattcaaataggat

SEQ ID NO: 578150 - DNA, 15 bp, Homo sapiens
tttattcaaatagga

SEQ ID NO: 578151 - DNA, 15 bp, Homo sapiens
ctttattcaaatagg

SEQ ID NO: 578152 - DNA, 15 bp, Homo sapiens
actttattcaaatag

SEQ ID NO: 578153 - DNA, 15 bp, Homo sapiens
gactttattcaaata

SEQ ID NO: 578154 - DNA, 15 bp, Homo sapiens
ggactttattcaaat

SEQ ID NO: 578155 - DNA, 15 bp, Homo sapiens
aggactttattcaaa

SEQ ID NO: 578156 - DNA, 15 bp, Homo sapiens
taggactttattcaa

SEQ ID NO: 578157 - DNA, 15 bp, Homo sapiens
gtaggactttattca

SEQ ID NO: 578158 - DNA, 15 bp, Homo sapiens
agtaggactttattc

SEQ ID NO: 578159 - DNA, 15 bp, Homo sapiens
gagtaggactttatt

SEQ ID NO: 578160 - DNA, 15 bp, Homo sapiens
agagtaggactttat

SEQ ID NO: 578161 - DNA, 15 bp, Homo sapiens
gagagtaggacttta

SEQ ID NO: 578162 - DNA, 15 bp, Homo sapiens
tgagagtaggacttt

SEQ ID NO: 578163 - DNA, 15 bp, Homo sapiens
ctgagagtaggactt

SEQ ID NO: 578164 - DNA, 15 bp, Homo sapiens
tctgagagtaggact

SEQ ID NO: 578165 - DNA, 15 bp, Homo sapiens
gggggtctgagagta

SEQ ID NO: 578166 - DNA, 15 bp, Homo sapiens
agggggtctgagagt

SEQ ID NO: 578167 - DNA, 15 bp, Homo sapiens
aagggggtctgagag

SEQ ID NO: 578168 - DNA, 15 bp, Homo sapiens
aaagggggtctgaga

SEQ ID NO: 578169 - DNA, 15 bp, Homo sapiens
caaagggggtctgag

SEQ ID NO: 578170 - DNA, 15 bp, Homo sapiens
gcaaagggggtctga

SEQ ID NO: 578171 - DNA, 15 bp, Homo sapiens
tgcaaagggggtctg

SEQ ID NO: 578172 - DNA, 15 bp, Homo sapiens
ctgcaaagggggtct

SEQ ID NO: 578173 - DNA, 15 bp, Homo sapiens
actgcaaagggggtc

SEQ ID NO: 578174 - DNA, 15 bp, Homo sapiens
tactgcaaagggggt

SEQ ID NO: 578175 - DNA, 15 bp, Homo sapiens
atactgcaaaggggg

SEQ ID NO: 578176 - DNA, 15 bp, Homo sapiens
tatactgcaaagggg

SEQ ID NO: 578177 - DNA, 15 bp, Homo sapiens
ctatactgcaaaggg

SEQ ID NO: 578178 - DNA, 15 bp, Homo sapiens
gctatactgcaaagg

SEQ ID NO: 578179 - DNA, 15 bp, Homo sapiens
agctatactgcaaag

SEQ ID NO: 578180 - DNA, 15 bp, Homo sapiens
cagctatactgcaaa

SEQ ID NO: 578181 - DNA, 15 bp, Homo sapiens
ccagctatactgcaa

SEQ ID NO: 578182 - DNA, 15 bp, Homo sapiens
cccagctatactgca

SEQ ID NO: 578183 - DNA, 15 bp, Homo sapiens
ccccagctatactgc

SEQ ID NO: 578184 - DNA, 15 bp, Homo sapiens
accccagctatactg

SEQ ID NO: 578185 - DNA, 15 bp, Homo sapiens
caccccagctatact

SEQ ID NO: 578186 - DNA, 15 bp, Homo sapiens
gcaccccagctatac

SEQ ID NO: 578187 - DNA, 15 bp, Homo sapiens
agcaccccagctata

SEQ ID NO: 578188 - DNA, 15 bp, Homo sapiens
cagcaccccagctat

SEQ ID NO: 578189 - DNA, 15 bp, Homo sapiens
tcagcaccccagcta

SEQ ID NO: 578190 - DNA, 15 bp, Homo sapiens
atcagcaccccagct

SEQ ID NO: 578191 - DNA, 15 bp, Homo sapiens
gatcagcaccccagc

SEQ ID NO: 578192 - DNA, 15 bp, Homo sapiens
tgatcagcaccccag

SEQ ID NO: 578193 - DNA, 15 bp, Homo sapiens
gtgatcagcacccca

SEQ ID NO: 578194 - DNA, 15 bp, Homo sapiens
agtgatcagcacccc

SEQ ID NO: 578195 - DNA, 15 bp, Homo sapiens
cagtgatcagcaccc

SEQ ID NO: 578196 - DNA, 15 bp, Homo sapiens
tcagtgatcagcacc

SEQ ID NO: 578197 - DNA, 15 bp, Homo sapiens
ctcagtgatcagcac

SEQ ID NO: 578198 - DNA, 15 bp, Homo sapiens
cctcagtgatcagca

SEQ ID NO: 578199 - DNA, 15 bp, Homo sapiens
gcctcagtgatcagc

SEQ ID NO: 578200 - DNA, 15 bp, Homo sapiens
ggcctcagtgatcag

SEQ ID NO: 578201 - DNA, 15 bp, Homo sapiens
aggcctcagtgatca

SEQ ID NO: 578202 - DNA, 15 bp, Homo sapiens
gaggcctcagtgatc

SEQ ID NO: 578203 - DNA, 15 bp, Homo sapiens
agaggcctcagtgat

SEQ ID NO: 578204 - DNA, 15 bp, Homo sapiens
aagaggcctcagtga

SEQ ID NO: 578205 - DNA, 15 bp, Homo sapiens
aaagaggcctcagtg

SEQ ID NO: 578206 - DNA, 15 bp, Homo sapiens
caaagaggcctcagt

SEQ ID NO: 578207 - DNA, 15 bp, Homo sapiens
gcaaagaggcctcag

SEQ ID NO: 578208 - DNA, 15 bp, Homo sapiens
agcaaagaggcctca

SEQ ID NO: 578209 - DNA, 15 bp, Homo sapiens
aagcaaagaggcctc

SEQ ID NO: 578210 - DNA, 15 bp, Homo sapiens
caagcaaagaggcct

SEQ ID NO: 578211 - DNA, 15 bp, Homo sapiens
ccaagcaaagaggcc

SEQ ID NO: 578212 - DNA, 15 bp, Homo sapiens
gccaagcaaagaggc

SEQ ID NO: 578213 - DNA, 15 bp, Homo sapiens
agccaagcaaagagg

SEQ ID NO: 578214 - DNA, 15 bp, Homo sapiens
aagccaagcaaagag

SEQ ID NO: 578215 - DNA, 15 bp, Homo sapiens
caagccaagcaaaga

SEQ ID NO: 578216 - DNA, 15 bp, Homo sapiens
acaagccaagcaaag

SEQ ID NO: 578217 - DNA, 15 bp, Homo sapiens
gacaagccaagcaaa

SEQ ID NO: 578218 - DNA, 15 bp, Homo sapiens
agacaagccaagcaa

SEQ ID NO: 578219 - DNA, 15 bp, Homo sapiens
tagacaagccaagca

SEQ ID NO: 578220 - DNA, 15 bp, Homo sapiens
atagacaagccaagc

SEQ ID NO: 578221 - DNA, 15 bp, Homo sapiens
tatagacaagccaag

SEQ ID NO: 578222 - DNA, 15 bp, Homo sapiens
atatagacaagccaa

SEQ ID NO: 578223 - DNA, 15 bp, Homo sapiens
aatatagacaagcca

SEQ ID NO: 578224 - DNA, 15 bp, Homo sapiens
gaatatagacaagcc

SEQ ID NO: 578225 - DNA, 15 bp, Homo sapiens
agaatatagacaagc

SEQ ID NO: 578226 - DNA, 15 bp, Homo sapiens
aagaatatagacaag

SEQ ID NO: 578227 - DNA, 15 bp, Homo sapiens
caagaatatagacaa

SEQ ID NO: 578228 - DNA, 15 bp, Homo sapiens
acaagaatatagaca

SEQ ID NO: 578229 - DNA, 15 bp, Homo sapiens
cacaagaatatagac

SEQ ID NO: 578230 - DNA, 15 bp, Homo sapiens
acacaagaatataga

SEQ ID NO: 578231 - DNA, 15 bp, Homo sapiens
tacacaagaatatag

SEQ ID NO: 578232 - DNA, 15 bp, Homo sapiens
gtacacaagaatata

SEQ ID NO: 578233 - DNA, 15 bp, Homo sapiens
agtacacaagaatat

SEQ ID NO: 578234 - DNA, 15 bp, Homo sapiens
tagtacacaagaata

SEQ ID NO: 578235 - DNA, 15 bp, Homo sapiens
ctagtacacaagaat

SEQ ID NO: 578236 - DNA, 15 bp, Homo sapiens
tctagtacacaagaa

SEQ ID NO: 578237 - DNA, 15 bp, Homo sapiens
atctagtacacaaga

SEQ ID NO: 578238 - DNA, 15 bp, Homo sapiens
tatctagtacacaag

SEQ ID NO: 578239 - DNA, 15 bp, Homo sapiens
ttatctagtacacaa

SEQ ID NO: 578240 - DNA, 15 bp, Homo sapiens
cttatctagtacaca

SEQ ID NO: 578241 - DNA, 15 bp, Homo sapiens
ccttatctagtacac

SEQ ID NO: 578242 - DNA, 15 bp, Homo sapiens
cccttatctagtaca

SEQ ID NO: 578243 - DNA, 15 bp, Homo sapiens
gcccttatctagtac

SEQ ID NO: 578244 - DNA, 15 bp, Homo sapiens
tgcccttatctagta

SEQ ID NO: 578245 - DNA, 15 bp, Homo sapiens
gtgcccttatctagt

SEQ ID NO: 578246 - DNA, 15 bp, Homo sapiens
ggtgcccttatctag

SEQ ID NO: 578247 - DNA, 15 bp, Homo sapiens
aggtgcccttatcta

SEQ ID NO: 578248 - DNA, 15 bp, Homo sapiens
aaggtgcccttatct

SEQ ID NO: 578249 - DNA, 15 bp, Homo sapiens
gaaggtgcccttatc

SEQ ID NO: 578250 - DNA, 15 bp, Homo sapiens
agaaggtgcccttat

SEQ ID NO: 578251 - DNA, 15 bp, Homo sapiens
gagaaggtgccctta

SEQ ID NO: 578252 - DNA, 15 bp, Homo sapiens
tgagaaggtgccctt

SEQ ID NO: 578253 - DNA, 15 bp, Homo sapiens
atgagaaggtgccct

SEQ ID NO: 578254 - DNA, 15 bp, Homo sapiens
catgagaaggtgccc

SEQ ID NO: 578255 - DNA, 15 bp, Homo sapiens
ccatgagaaggtgcc

SEQ ID NO: 578256 - DNA, 15 bp, Homo sapiens
tccatgagaaggtgc

SEQ ID NO: 578257 - DNA, 15 bp, Homo sapiens
gtccatgagaaggtg

SEQ ID NO: 578258 - DNA, 15 bp, Homo sapiens
agtccatgagaaggt

SEQ ID NO: 578259 - DNA, 15 bp, Homo sapiens
gagtccatgagaagg

SEQ ID NO: 578260 - DNA, 15 bp, Homo sapiens
ggagtccatgagaag

SEQ ID NO: 578261 - DNA, 15 bp, Homo sapiens
gggagtccatgagaa

SEQ ID NO: 578262 - DNA, 15 bp, Homo sapiens
agggagtccatgaga

SEQ ID NO: 578263 - DNA, 15 bp, Homo sapiens
aagggagtccatgag

SEQ ID NO: 578264 - DNA, 15 bp, Homo sapiens
aaagggagtccatga

SEQ ID NO: 578265 - DNA, 15 bp, Homo sapiens
caaagggagtccatg

SEQ ID NO: 578266 - DNA, 15 bp, Homo sapiens
gcaaagggagtccat

SEQ ID NO: 578267 - DNA, 15 bp, Homo sapiens
agcaaagggagtcca

SEQ ID NO: 578268 - DNA, 15 bp, Homo sapiens
aagcaaagggagtcc

SEQ ID NO: 578269 - DNA, 15 bp, Homo sapiens
aaagcaaagggagtc

SEQ ID NO: 578270 - DNA, 15 bp, Homo sapiens
aaaagcaaagggagt

SEQ ID NO: 578271 - DNA, 15 bp, Homo sapiens
gaaaagcaaagggag

SEQ ID NO: 578272 - DNA, 15 bp, Homo sapiens
tgaaaagcaaaggga

SEQ ID NO: 578273 - DNA, 15 bp, Homo sapiens
ttgaaaagcaaaggg

SEQ ID NO: 578274 - DNA, 15 bp, Homo sapiens
gttgaaaagcaaagg

SEQ ID NO: 578275 - DNA, 15 bp, Homo sapiens
tgttgaaaagcaaag

SEQ ID NO: 578276 - DNA, 15 bp, Homo sapiens
ttgttgaaaagcaaa

SEQ ID NO: 578277 - DNA, 15 bp, Homo sapiens
cttgttgaaaagcaa

SEQ ID NO: 578278 - DNA, 15 bp, Homo sapiens
ccttgttgaaaagca

SEQ ID NO: 578279 - DNA, 15 bp, Homo sapiens
tccttgttgaaaagc

SEQ ID NO: 578280 - DNA, 15 bp, Homo sapiens
ctccttgttgaaaag

SEQ ID NO: 578281 - DNA, 15 bp, Homo sapiens
actccttgttgaaaa

SEQ ID NO: 578282 - DNA, 15 bp, Homo sapiens
tactccttgttgaaa

SEQ ID NO: 578283 - DNA, 15 bp, Homo sapiens
gtactccttgttgaa

SEQ ID NO: 578284 - DNA, 15 bp, Homo sapiens
ggtactccttgttga

SEQ ID NO: 578285 - DNA, 15 bp, Homo sapiens
gggtactccttgttg

SEQ ID NO: 578286 - DNA, 15 bp, Homo sapiens
tgggtactccttgtt

SEQ ID NO: 578287 - DNA, 15 bp, Homo sapiens
gtgggtactccttgt

SEQ ID NO: 578288 - DNA, 15 bp, Homo sapiens
agtgggtactccttg

SEQ ID NO: 578289 - DNA, 15 bp, Homo sapiens
tagtgggtactcctt

SEQ ID NO: 578290 - DNA, 15 bp, Homo sapiens
gtagtgggtactcct

SEQ ID NO: 578291 - DNA, 15 bp, Homo sapiens
agtagtgggtactcc

SEQ ID NO: 578292 - DNA, 15 bp, Homo sapiens
aagtagtgggtactc

SEQ ID NO: 578293 - DNA, 15 bp, Homo sapiens
aaagtagtgggtact

SEQ ID NO: 578294 - DNA, 15 bp, Homo sapiens
aaaagtagtgggtac

SEQ ID NO: 578295 - DNA, 15 bp, Homo sapiens
aaaaagtagtgggta

SEQ ID NO: 578296 - DNA, 15 bp, Homo sapiens
taaaaagtagtgggt

SEQ ID NO: 578297 - DNA, 15 bp, Homo sapiens
ttaaaaagtagtggg

SEQ ID NO: 578298 - DNA, 15 bp, Homo sapiens
cttaaaaagtagtgg

SEQ ID NO: 578299 - DNA, 15 bp, Homo sapiens
tcttaaaaagtagtg

SEQ ID NO: 578300 - DNA, 15 bp, Homo sapiens
atcttaaaaagtagt

SEQ ID NO: 578301 - DNA, 15 bp, Homo sapiens
aatcttaaaaagtag

SEQ ID NO: 578302 - DNA, 15 bp, Homo sapiens
gaatcttaaaaagta

SEQ ID NO: 578303 - DNA, 15 bp, Homo sapiens
agaatcttaaaaagt

SEQ ID NO: 578304 - DNA, 15 bp, Homo sapiens
aagaatcttaaaaag

SEQ ID NO: 578305 - DNA, 15 bp, Homo sapiens
taagaatcttaaaaa

SEQ ID NO: 578306 - DNA, 15 bp, Homo sapiens
ataagaatcttaaaa

SEQ ID NO: 578307 - DNA, 15 bp, Homo sapiens
tataagaatcttaaa

SEQ ID NO: 578308 - DNA, 15 bp, Homo sapiens
atataagaatcttaa

SEQ ID NO: 578309 - DNA, 15 bp, Homo sapiens
aatataagaatctta

SEQ ID NO: 578310 - DNA, 15 bp, Homo sapiens
aaatataagaatctt

SEQ ID NO: 578311 - DNA, 15 bp, Homo sapiens
caaatataagaatct

SEQ ID NO: 578312 - DNA, 15 bp, Homo sapiens
acaaatataagaatc

SEQ ID NO: 578313 - DNA, 15 bp, Homo sapiens
gacaaatataagaat

SEQ ID NO: 578314 - DNA, 15 bp, Homo sapiens
ggacaaatataagaa

SEQ ID NO: 578315 - DNA, 15 bp, Homo sapiens
tggacaaatataaga

SEQ ID NO: 578316 - DNA, 15 bp, Homo sapiens
ttggacaaatataag

SEQ ID NO: 578317 - DNA, 15 bp, Homo sapiens
tttggacaaatataa

SEQ ID NO: 578318 - DNA, 15 bp, Homo sapiens
ctttggacaaatata

SEQ ID NO: 578319 - DNA, 15 bp, Homo sapiens
actttggacaaatat

SEQ ID NO: 578320 - DNA, 15 bp, Homo sapiens
tactttggacaaata

SEQ ID NO: 578321 - DNA, 15 bp, Homo sapiens
gtactttggacaaat

SEQ ID NO: 578322 - DNA, 15 bp, Homo sapiens
tgtactttggacaaa

SEQ ID NO: 578323 - DNA, 15 bp, Homo sapiens
atgtactttggacaa

SEQ ID NO: 578324 - DNA, 15 bp, Homo sapiens
catgtactttggaca

SEQ ID NO: 578325 - DNA, 15 bp, Homo sapiens
ccatgtactttggac

SEQ ID NO: 578326 - DNA, 15 bp, Homo sapiens
accatgtactttgga

SEQ ID NO: 578327 - DNA, 15 bp, Homo sapiens
aaccatgtactttgg

SEQ ID NO: 578328 - DNA, 15 bp, Homo sapiens
aaaccatgtactttg

SEQ ID NO: 578329 - DNA, 15 bp, Homo sapiens
aaaaccatgtacttt

SEQ ID NO: 578330 - DNA, 15 bp, Homo sapiens
taaaaccatgtactt

SEQ ID NO: 578331 - DNA, 15 bp, Homo sapiens
ttaaaaccatgtact

SEQ ID NO: 578332 - DNA, 15 bp, Homo sapiens
attaaaaccatgtac

SEQ ID NO: 578333 - DNA, 15 bp, Homo sapiens
aattaaaaccatgta

SEQ ID NO: 578334 - DNA, 15 bp, Homo sapiens
caattaaaaccatgt

SEQ ID NO: 578335 - DNA, 15 bp, Homo sapiens
tcaattaaaaccatg

SEQ ID NO: 578336 - DNA, 15 bp, Homo sapiens
gtcaattaaaaccat

SEQ ID NO: 578337 - DNA, 15 bp, Homo sapiens
ggtcaattaaaacca

SEQ ID NO: 578338 - DNA, 15 bp, Homo sapiens
tggtcaattaaaacc

SEQ ID NO: 578339 - DNA, 15 bp, Homo sapiens
gtggtcaattaaaac

SEQ ID NO: 578340 - DNA, 15 bp, Homo sapiens
tgtggtcaattaaaa

SEQ ID NO: 578341 - DNA, 15 bp, Homo sapiens
ttgtggtcaattaaa

SEQ ID NO: 578342 - DNA, 15 bp, Homo sapiens
gttgtggtcaattaa

SEQ ID NO: 578343 - DNA, 15 bp, Homo sapiens
tgttgtggtcaatta

SEQ ID NO: 578344 - DNA, 15 bp, Homo sapiens
ttgttgtggtcaatt

SEQ ID NO: 578345 - DNA, 15 bp, Homo sapiens
attgttgtggtcaat

SEQ ID NO: 578346 - DNA, 15 bp, Homo sapiens
cattgttgtggtcaa

SEQ ID NO: 578347 - DNA, 15 bp, Homo sapiens
acattgttgtggtca

SEQ ID NO: 578348 - DNA, 15 bp, Homo sapiens
gacattgttgtggtc

SEQ ID NO: 578349 - DNA, 15 bp, Homo sapiens
ggacattgttgtggt

SEQ ID NO: 578350 - DNA, 15 bp, Homo sapiens
gggacattgttgtgg

SEQ ID NO: 578351 - DNA, 15 bp, Homo sapiens
agggacattgttgtg

SEQ ID NO: 578352 - DNA, 15 bp, Homo sapiens
aagggacattgttgt

SEQ ID NO: 578353 - DNA, 15 bp, Homo sapiens
caagggacattgttg

SEQ ID NO: 578354 - DNA, 15 bp, Homo sapiens
ccaagggacattgtt

SEQ ID NO: 578355 - DNA, 15 bp, Homo sapiens
tccaagggacattgt

SEQ ID NO: 578356 - DNA, 15 bp, Homo sapiens
gtccaagggacattg

SEQ ID NO: 578357 - DNA, 15 bp, Homo sapiens
tgtccaagggacatt

SEQ ID NO: 578358 - DNA, 15 bp, Homo sapiens
atgtccaagggacat

SEQ ID NO: 578359 - DNA, 15 bp, Homo sapiens
aatgtccaagggaca

SEQ ID NO: 578360 - DNA, 15 bp, Homo sapiens
taatgtccaagggac

SEQ ID NO: 578361 - DNA, 15 bp, Homo sapiens
ttaatgtccaaggga

SEQ ID NO: 578362 - DNA, 15 bp, Homo sapiens
attaatgtccaaggg

SEQ ID NO: 578363 - DNA, 15 bp, Homo sapiens
tacattaatgtccaa

SEQ ID NO: 578364 - DNA, 15 bp, Homo sapiens
atacattaatgtcca

SEQ ID NO: 578365 - DNA, 15 bp, Homo sapiens
catacattaatgtcc

SEQ ID NO: 578366 - DNA, 15 bp, Homo sapiens
acatacattaatgtc

SEQ ID NO: 578367 - DNA, 15 bp, Homo sapiens
tacatacattaatgt

SEQ ID NO: 578368 - DNA, 15 bp, Homo sapiens
ttacatacattaatg

SEQ ID NO: 578369 - DNA, 15 bp, Homo sapiens
attacatacattaat

SEQ ID NO: 578370 - DNA, 15 bp, Homo sapiens
gattacatacattaa

SEQ ID NO: 578371 - DNA, 15 bp, Homo sapiens
tgattacatacatta

SEQ ID NO: 578372 - DNA, 15 bp, Homo sapiens
gtgattacatacatt

SEQ ID NO: 578373 - DNA, 15 bp, Homo sapiens
ggtgattacatacat

SEQ ID NO: 578374 - DNA, 15 bp, Homo sapiens
tggtgattacataca

SEQ ID NO: 578375 - DNA, 15 bp, Homo sapiens
gtggtgattacatac

SEQ ID NO: 578376 - DNA, 15 bp, Homo sapiens
tgtggtgattacata

SEQ ID NO: 578377 - DNA, 15 bp, Homo sapiens
atgtggtgattacat

SEQ ID NO: 578378 - DNA, 15 bp, Homo sapiens
catgtggtgattaca

SEQ ID NO: 578379 - DNA, 15 bp, Homo sapiens
ccatgtggtgattac

SEQ ID NO: 578380 - DNA, 15 bp, Homo sapiens
accatgtggtgatta

SEQ ID NO: 578381 - DNA, 15 bp, Homo sapiens
aaccatgtggtgatt

SEQ ID NO: 578382 - DNA, 15 bp, Homo sapiens
gaaccatgtggtgat

SEQ ID NO: 578383 - DNA, 15 bp, Homo sapiens
tgaaccatgtggtga

SEQ ID NO: 578384 - DNA, 15 bp, Homo sapiens
atgaaccatgtggtg

SEQ ID NO: 578385 - DNA, 15 bp, Homo sapiens
gatgaaccatgtggt

SEQ ID NO: 578386 - DNA, 15 bp, Homo sapiens
ggatgaaccatgtgg

SEQ ID NO: 578387 - DNA, 15 bp, Homo sapiens
aggatgaaccatgtg

SEQ ID NO: 578388 - DNA, 15 bp, Homo sapiens
taggatgaaccatgt

SEQ ID NO: 578389 - DNA, 15 bp, Homo sapiens
ttaggatgaaccatg

SEQ ID NO: 578390 - DNA, 15 bp, Homo sapiens
attaggatgaaccat

SEQ ID NO: 578391 - DNA, 15 bp, Homo sapiens
aattaggatgaacca

SEQ ID NO: 578392 - DNA, 15 bp, Homo sapiens
taattaggatgaacc

SEQ ID NO: 578393 - DNA, 15 bp, Homo sapiens
ttaattaggatgaac

SEQ ID NO: 578394 - DNA, 15 bp, Homo sapiens
tttaattaggatgaa

SEQ ID NO: 578395 - DNA, 15 bp, Homo sapiens
gtttaattaggatga

SEQ ID NO: 578396 - DNA, 15 bp, Homo sapiens
tgtttaattaggatg

SEQ ID NO: 578397 - DNA, 15 bp, Homo sapiens
ttgtttaattaggat

SEQ ID NO: 578398 - DNA, 15 bp, Homo sapiens
tttgtttaattagga

SEQ ID NO: 578399 - DNA, 15 bp, Homo sapiens
ctttgtttaattagg

SEQ ID NO: 578400 - DNA, 15 bp, Homo sapiens
actttgtttaattag

SEQ ID NO: 578401 - DNA, 15 bp, Homo sapiens
aactttgtttaatta

SEQ ID NO: 578402 - DNA, 15 bp, Homo sapiens
gaactttgtttaatt

SEQ ID NO: 578403 - DNA, 15 bp, Homo sapiens
agaactttgtttaat

SEQ ID NO: 578404 - DNA, 15 bp, Homo sapiens
tagaactttgtttaa

SEQ ID NO: 578405 - DNA, 15 bp, Homo sapiens
gtagaactttgttta

SEQ ID NO: 578406 - DNA, 15 bp, Homo sapiens
ggtagaactttgttt

SEQ ID NO: 578407 - DNA, 15 bp, Homo sapiens
aggtagaactttgtt

SEQ ID NO: 578408 - DNA, 15 bp, Homo sapiens
aaggtagaactttgt

SEQ ID NO: 578409 - DNA, 15 bp, Homo sapiens
gaaggtagaactttg

SEQ ID NO: 578410 - DNA, 15 bp, Homo sapiens
agaaggtagaacttt

SEQ ID NO: 578411 - DNA, 15 bp, Homo sapiens
gagaaggtagaactt

SEQ ID NO: 578412 - DNA, 15 bp, Homo sapiens
tgagaaggtagaact

SEQ ID NO: 578413 - DNA, 15 bp, Homo sapiens
gtgagaaggtagaac

SEQ ID NO: 578414 - DNA, 15 bp, Homo sapiens
ggtgagaaggtagaa

SEQ ID NO: 578415 - DNA, 15 bp, Homo sapiens
gggtgagaaggtaga

SEQ ID NO: 578416 - DNA, 15 bp, Homo sapiens
agggtgagaaggtag

SEQ ID NO: 578417 - DNA, 15 bp, Homo sapiens
gagggtgagaaggta

SEQ ID NO: 578418 - DNA, 15 bp, Homo sapiens
ggagggtgagaaggt

SEQ ID NO: 578419 - DNA, 15 bp, Homo sapiens
tggagggtgagaagg

SEQ ID NO: 578420 - DNA, 15 bp, Homo sapiens
atggagggtgagaag

SEQ ID NO: 578421 - DNA, 15 bp, Homo sapiens
aatggagggtgagaa

SEQ ID NO: 578422 - DNA, 15 bp, Homo sapiens
aaatggagggtgaga

SEQ ID NO: 578423 - DNA, 15 bp, Homo sapiens
caaatggagggtgag

SEQ ID NO: 578424 - DNA, 15 bp, Homo sapiens
gcaaatggagggtga

SEQ ID NO: 578425 - DNA, 15 bp, Homo sapiens
tgcaaatggagggtg

SEQ ID NO: 578426 - DNA, 15 bp, Homo sapiens
ctgcaaatggagggt

SEQ ID NO: 578427 - DNA, 15 bp, Homo sapiens
actgcaaatggaggg

SEQ ID NO: 578428 - DNA, 15 bp, Homo sapiens
tactgcaaatggagg

SEQ ID NO: 578429 - DNA, 15 bp, Homo sapiens
atactgcaaatggag

SEQ ID NO: 578430 - DNA, 15 bp, Homo sapiens
tatactgcaaatgga

SEQ ID NO: 578431 - DNA, 15 bp, Homo sapiens
gtatactgcaaatgg

SEQ ID NO: 578432 - DNA, 15 bp, Homo sapiens
ggtatactgcaaatg

SEQ ID NO: 578433 - DNA, 15 bp, Homo sapiens
tggtatactgcaaat

SEQ ID NO: 578434 - DNA, 15 bp, Homo sapiens
ctggtatactgcaaa

SEQ ID NO: 578435 - DNA, 15 bp, Homo sapiens
cctggtatactgcaa

SEQ ID NO: 578436 - DNA, 15 bp, Homo sapiens
ccctggtatactgca

SEQ ID NO: 578437 - DNA, 15 bp, Homo sapiens
accctggtatactgc

SEQ ID NO: 578438 - DNA, 15 bp, Homo sapiens
aaccctggtatactg

SEQ ID NO: 578439 - DNA, 15 bp, Homo sapiens
caaccctggtatact

SEQ ID NO: 578440 - DNA, 15 bp, Homo sapiens
gcaaccctggtatac

SEQ ID NO: 578441 - DNA, 15 bp, Homo sapiens
agcaaccctggtata

SEQ ID NO: 578442 - DNA, 15 bp, Homo sapiens
cagcaaccctggtat

SEQ ID NO: 578443 - DNA, 15 bp, Homo sapiens
tcagcaaccctggta

SEQ ID NO: 578444 - DNA, 15 bp, Homo sapiens
gtcagcaaccctggt

SEQ ID NO: 578445 - DNA, 15 bp, Homo sapiens
ggtcagcaaccctgg

SEQ ID NO: 578446 - DNA, 15 bp, Homo sapiens
gggtcagcaaccctg

SEQ ID NO: 578447 - DNA, 15 bp, Homo sapiens
ggggtcagcaaccct

SEQ ID NO: 578448 - DNA, 15 bp, Homo sapiens
gggggtcagcaaccc

SEQ ID NO: 578449 - DNA, 15 bp, Homo sapiens
agggggtcagcaacc

SEQ ID NO: 578450 - DNA, 15 bp, Homo sapiens
tagggggtcagcaac

SEQ ID NO: 578451 - DNA, 15 bp, Homo sapiens
ttagggggtcagcaa

SEQ ID NO: 578452 - DNA, 15 bp, Homo sapiens
cttagggggtcagca

SEQ ID NO: 578453 - DNA, 15 bp, Homo sapiens
acttagggggtcagc

SEQ ID NO: 578454 - DNA, 15 bp, Homo sapiens
gacttagggggtcag

SEQ ID NO: 578455 - DNA, 15 bp, Homo sapiens
ggacttagggggtca

SEQ ID NO: 578456 - DNA, 15 bp, Homo sapiens
gggacttagggggtc

SEQ ID NO: 578457 - DNA, 15 bp, Homo sapiens
ggggacttagggggt

SEQ ID NO: 578458 - DNA, 15 bp, Homo sapiens
aggggacttaggggg

SEQ ID NO: 578459 - DNA, 15 bp, Homo sapiens
aaggggacttagggg

SEQ ID NO: 578460 - DNA, 15 bp, Homo sapiens
aaaggggacttaggg

SEQ ID NO: 578461 - DNA, 15 bp, Homo sapiens
aaaaggggacttagg

SEQ ID NO: 578462 - DNA, 15 bp, Homo sapiens
gaaaaggggacttag

SEQ ID NO: 578463 - DNA, 15 bp, Homo sapiens
agaaaaggggactta

SEQ ID NO: 578464 - DNA, 15 bp, Homo sapiens
aagaaaaggggactt

SEQ ID NO: 578465 - DNA, 15 bp, Homo sapiens
agccaagaaaagggg

SEQ ID NO: 578466 - DNA, 15 bp, Homo sapiens
aagccaagaaaaggg

SEQ ID NO: 578467 - DNA, 15 bp, Homo sapiens
caagccaagaaaagg

SEQ ID NO: 578468 - DNA, 15 bp, Homo sapiens
acaagccaagaaaag

SEQ ID NO: 578469 - DNA, 15 bp, Homo sapiens
aacaagccaagaaaa

SEQ ID NO: 578470 - DNA, 15 bp, Homo sapiens
caacaagccaagaaa

SEQ ID NO: 578471 - DNA, 15 bp, Homo sapiens
tcaacaagccaagaa

SEQ ID NO: 578472 - DNA, 15 bp, Homo sapiens
gtcaacaagccaaga

SEQ ID NO: 578473 - DNA, 15 bp, Homo sapiens
tgtcaacaagccaag

SEQ ID NO: 578474 - DNA, 15 bp, Homo sapiens
atgtcaacaagccaa

SEQ ID NO: 578475 - DNA, 15 bp, Homo sapiens
catgtcaacaagcca

SEQ ID NO: 578476 - DNA, 15 bp, Homo sapiens
gcatgtcaacaagcc

SEQ ID NO: 578477 - DNA, 15 bp, Homo sapiens
tgcatgtcaacaagc

SEQ ID NO: 578478 - DNA, 15 bp, Homo sapiens
atgcatgtcaacaag

SEQ ID NO: 578479 - DNA, 15 bp, Homo sapiens
tatgcatgtcaacaa

SEQ ID NO: 578480 - DNA, 15 bp, Homo sapiens
ttatgcatgtcaaca

SEQ ID NO: 578481 - DNA, 15 bp, Homo sapiens
attatgcatgtcaac

SEQ ID NO: 578482 - DNA, 15 bp, Homo sapiens
aattatgcatgtcaa

SEQ ID NO: 578483 - DNA, 15 bp, Homo sapiens
caattatgcatgtca

SEQ ID NO: 578484 - DNA, 15 bp, Homo sapiens
gcaattatgcatgtc

SEQ ID NO: 578485 - DNA, 15 bp, Homo sapiens
tgcaattatgcatgt

SEQ ID NO: 578486 - DNA, 15 bp, Homo sapiens
atgcaattatgcatg

SEQ ID NO: 578487 - DNA, 15 bp, Homo sapiens
aatgcaattatgcat

SEQ ID NO: 578488 - DNA, 15 bp, Homo sapiens
aaatgcaattatgca

SEQ ID NO: 578489 - DNA, 15 bp, Homo sapiens
taaatgcaattatgc

SEQ ID NO: 578490 - DNA, 15 bp, Homo sapiens
ataaatgcaattatg

SEQ ID NO: 578491 - DNA, 15 bp, Homo sapiens
cataaatgcaattat

SEQ ID NO: 578492 - DNA, 15 bp, Homo sapiens
acataaatgcaatta

SEQ ID NO: 578493 - DNA, 15 bp, Homo sapiens
aacataaatgcaatt

SEQ ID NO: 578494 - DNA, 15 bp, Homo sapiens
caacataaatgcaat

SEQ ID NO: 578495 - DNA, 15 bp, Homo sapiens
ccaacataaatgcaa

SEQ ID NO: 578496 - DNA, 15 bp, Homo sapiens
accaacataaatgca

SEQ ID NO: 578497 - DNA, 15 bp, Homo sapiens
aaccaacataaatgc

SEQ ID NO: 578498 - DNA, 15 bp, Homo sapiens
gaaccaacataaatg

SEQ ID NO: 578499 - DNA, 15 bp, Homo sapiens
agaaccaacataaat

SEQ ID NO: 578500 - DNA, 15 bp, Homo sapiens
aagaaccaacataaa

SEQ ID NO: 578501 - DNA, 15 bp, Homo sapiens
caagaaccaacataa

SEQ ID NO: 578502 - DNA, 15 bp, Homo sapiens
acaagaaccaacata

SEQ ID NO: 578503 - DNA, 15 bp, Homo sapiens
cacaagaaccaacat

SEQ ID NO: 578504 - DNA, 15 bp, Homo sapiens
gcacaagaaccaaca

SEQ ID NO: 578505 - DNA, 15 bp, Homo sapiens
ggcacaagaaccaac

SEQ ID NO: 578506 - DNA, 15 bp, Homo sapiens
gggcacaagaaccaa

SEQ ID NO: 578507 - DNA, 15 bp, Homo sapiens
agggcacaagaacca

SEQ ID NO: 578508 - DNA, 15 bp, Homo sapiens
tagggcacaagaacc

SEQ ID NO: 578509 - DNA, 15 bp, Homo sapiens
ctagggcacaagaac

SEQ ID NO: 578510 - DNA, 15 bp, Homo sapiens
tctagggcacaagaa

SEQ ID NO: 578511 - DNA, 15 bp, Homo sapiens
gtctagggcacaaga

SEQ ID NO: 578512 - DNA, 15 bp, Homo sapiens
tgtctagggcacaag

SEQ ID NO: 578513 - DNA, 15 bp, Homo sapiens
ttgtctagggcacaa

SEQ ID NO: 578514 - DNA, 15 bp, Homo sapiens
cttgtctagggcaca

SEQ ID NO: 578515 - DNA, 15 bp, Homo sapiens
ccttgtctagggcac

SEQ ID NO: 578516 - DNA, 15 bp, Homo sapiens
tccttgtctagggca

SEQ ID NO: 578517 - DNA, 15 bp, Homo sapiens
atccttgtctagggc

SEQ ID NO: 578518 - DNA, 15 bp, Homo sapiens
catccttgtctaggg

SEQ ID NO: 578519 - DNA, 15 bp, Homo sapiens
gcatccttgtctagg

SEQ ID NO: 578520 - DNA, 15 bp, Homo sapiens
ggcatccttgtctag

SEQ ID NO: 578521 - DNA, 15 bp, Homo sapiens
gggcatccttgtcta

SEQ ID NO: 578522 - DNA, 15 bp, Homo sapiens
ggggcatccttgtct

SEQ ID NO: 578523 - DNA, 15 bp, Homo sapiens
tggggcatccttgtc

SEQ ID NO: 578524 - DNA, 15 bp, Homo sapiens
gtggggcatccttgt

SEQ ID NO: 578525 - DNA, 15 bp, Homo sapiens
ggtggggcatccttg

SEQ ID NO: 578526 - DNA, 15 bp, Homo sapiens
aggtggggcatcctt

SEQ ID NO: 578527 - DNA, 15 bp, Homo sapiens
gaggtggggcatcct

SEQ ID NO: 578528 - DNA, 15 bp, Homo sapiens
agaggtggggcatcc

SEQ ID NO: 578529 - DNA, 15 bp, Homo sapiens
aagaggtggggcatc

SEQ ID NO: 578530 - DNA, 15 bp, Homo sapiens
aaagaggtggggcat

SEQ ID NO: 578531 - DNA, 15 bp, Homo sapiens
aaaagaggtggggca

SEQ ID NO: 578532 - DNA, 15 bp, Homo sapiens
gaaaagaggtggggc

SEQ ID NO: 578533 - DNA, 15 bp, Homo sapiens
tgaaaagaggtgggg

SEQ ID NO: 578534 - DNA, 15 bp, Homo sapiens
ttgaaaagaggtggg

SEQ ID NO: 578535 - DNA, 15 bp, Homo sapiens
attgaaaagaggtgg

SEQ ID NO: 578536 - DNA, 15 bp, Homo sapiens
tattgaaaagaggtg

SEQ ID NO: 578537 - DNA, 15 bp, Homo sapiens
ctattgaaaagaggt

SEQ ID NO: 578538 - DNA, 15 bp, Homo sapiens
actattgaaaagagg

SEQ ID NO: 578539 - DNA, 15 bp, Homo sapiens
cactattgaaaagag

SEQ ID NO: 578540 - DNA, 15 bp, Homo sapiens
ccactattgaaaaga

SEQ ID NO: 578541 - DNA, 15 bp, Homo sapiens
cccactattgaaaag

SEQ ID NO: 578542 - DNA, 15 bp, Homo sapiens
acccactattgaaaa

SEQ ID NO: 578543 - DNA, 15 bp, Homo sapiens
cacccactattgaaa

SEQ ID NO: 578544 - DNA, 15 bp, Homo sapiens
gcacccactattgaa

SEQ ID NO: 578545 - DNA, 15 bp, Homo sapiens
ggcacccactattga

SEQ ID NO: 578546 - DNA, 15 bp, Homo sapiens
gggcacccactattg

SEQ ID NO: 578547 - DNA, 15 bp, Homo sapiens
tgggcacccactatt

SEQ ID NO: 578548 - DNA, 15 bp, Homo sapiens
gtgggcacccactat

SEQ ID NO: 578549 - DNA, 15 bp, Homo sapiens
agtgggcacccacta

SEQ ID NO: 578550 - DNA, 15 bp, Homo sapiens
gagtgggcacccact

SEQ ID NO: 578551 - DNA, 15 bp, Homo sapiens
ggagtgggcacccac

SEQ ID NO: 578552 - DNA, 15 bp, Homo sapiens
aggagtgggcaccca

SEQ ID NO: 578553 - DNA, 15 bp, Homo sapiens
aaggagtgggcaccc

SEQ ID NO: 578554 - DNA, 15 bp, Homo sapiens
taaggagtgggcacc

SEQ ID NO: 578555 - DNA, 15 bp, Homo sapiens
ataaggagtgggcac

SEQ ID NO: 578556 - DNA, 15 bp, Homo sapiens
cataaggagtgggca

SEQ ID NO: 578557 - DNA, 15 bp, Homo sapiens
tcataaggagtgggc

SEQ ID NO: 578558 - DNA, 15 bp, Homo sapiens
atcataaggagtggg

SEQ ID NO: 578559 - DNA, 15 bp, Homo sapiens
gatcataaggagtgg

SEQ ID NO: 578560 - DNA, 15 bp, Homo sapiens
agatcataaggagtg

SEQ ID NO: 578561 - DNA, 15 bp, Homo sapiens
aagatcataaggagt

SEQ ID NO: 578562 - DNA, 15 bp, Homo sapiens
aaagatcataaggag

SEQ ID NO: 578563 - DNA, 15 bp, Homo sapiens
taaagatcataagga

SEQ ID NO: 578564 - DNA, 15 bp, Homo sapiens
gtaaagatcataagg

SEQ ID NO: 578565 - DNA, 15 bp, Homo sapiens
tgtaaagatcataag

SEQ ID NO: 578566 - DNA, 15 bp, Homo sapiens
atgtaaagatcataa

SEQ ID NO: 578567 - DNA, 15 bp, Homo sapiens
aatgtaaagatcata

SEQ ID NO: 578568 - DNA, 15 bp, Homo sapiens
aaatgtaaagatcat

SEQ ID NO: 578569 - DNA, 15 bp, Homo sapiens
caaatgtaaagatca

SEQ ID NO: 578570 - DNA, 15 bp, Homo sapiens
tcaaatgtaaagatc

SEQ ID NO: 578571 - DNA, 15 bp, Homo sapiens
ttcaaatgtaaagat

SEQ ID NO: 578572 - DNA, 15 bp, Homo sapiens
gttcaaatgtaaaga

SEQ ID NO: 578573 - DNA, 15 bp, Homo sapiens
tgttcaaatgtaaag

SEQ ID NO: 578574 - DNA, 15 bp, Homo sapiens
ctgttcaaatgtaaa

SEQ ID NO: 578575 - DNA, 15 bp, Homo sapiens
actgttcaaatgtaa

SEQ ID NO: 578576 - DNA, 15 bp, Homo sapiens
aactgttcaaatgta

SEQ ID NO: 578577 - DNA, 15 bp, Homo sapiens
taactgttcaaatgt

SEQ ID NO: 578578 - DNA, 15 bp, Homo sapiens
ttaactgttcaaatg

SEQ ID NO: 578579 - DNA, 15 bp, Homo sapiens
attaactgttcaaat

SEQ ID NO: 578580 - DNA, 15 bp, Homo sapiens
cattaactgttcaaa

SEQ ID NO: 578581 - DNA, 15 bp, Homo sapiens
acattaactgttcaa

SEQ ID NO: 578582 - DNA, 15 bp, Homo sapiens
cacattaactgttca

SEQ ID NO: 578583 - DNA, 15 bp, Homo sapiens
tcacattaactgttc

SEQ ID NO: 578584 - DNA, 15 bp, Homo sapiens
ttcacattaactgtt

SEQ ID NO: 578585 - DNA, 15 bp, Homo sapiens
attcacattaactgt

SEQ ID NO: 578586 - DNA, 15 bp, Homo sapiens
tattcacattaactg

SEQ ID NO: 578587 - DNA, 15 bp, Homo sapiens
ttattcacattaact

SEQ ID NO: 578588 - DNA, 15 bp, Homo sapiens
attattcacattaac

SEQ ID NO: 578589 - DNA, 15 bp, Homo sapiens
aattattcacattaa

SEQ ID NO: 578590 - DNA, 15 bp, Homo sapiens
caattattcacatta

SEQ ID NO: 578591 - DNA, 15 bp, Homo sapiens
gcaattattcacatt

SEQ ID NO: 578592 - DNA, 15 bp, Homo sapiens
tgcaattattcacat

SEQ ID NO: 578593 - DNA, 15 bp, Homo sapiens
ctgcaattattcaca

SEQ ID NO: 578594 - DNA, 15 bp, Homo sapiens
actgcaattattcac

SEQ ID NO: 578595 - DNA, 15 bp, Homo sapiens
aactgcaattattca

SEQ ID NO: 578596 - DNA, 15 bp, Homo sapiens
caactgcaattattc

SEQ ID NO: 578597 - DNA, 15 bp, Homo sapiens
acaactgcaattatt

SEQ ID NO: 578598 - DNA, 15 bp, Homo sapiens
gacaactgcaattat

SEQ ID NO: 578599 - DNA, 15 bp, Homo sapiens
ggacaactgcaatta

SEQ ID NO: 578600 - DNA, 15 bp, Homo sapiens
tggacaactgcaatt

SEQ ID NO: 578601 - DNA, 15 bp, Homo sapiens
gtggacaactgcaat

SEQ ID NO: 578602 - DNA, 15 bp, Homo sapiens
tgtggacaactgcaa

SEQ ID NO: 578603 - DNA, 15 bp, Homo sapiens
ttgtggacaactgca

SEQ ID NO: 578604 - DNA, 15 bp, Homo sapiens
gttgtggacaactgc

SEQ ID NO: 578605 - DNA, 15 bp, Homo sapiens
ggttgtggacaactg

SEQ ID NO: 578606 - DNA, 15 bp, Homo sapiens
gggttgtggacaact

SEQ ID NO: 578607 - DNA, 15 bp, Homo sapiens
agggttgtggacaac

SEQ ID NO: 578608 - DNA, 15 bp, Homo sapiens
tagggttgtggacaa

SEQ ID NO: 578609 - DNA, 15 bp, Homo sapiens
atagggttgtggaca

SEQ ID NO: 578610 - DNA, 15 bp, Homo sapiens
gatagggttgtggac

SEQ ID NO: 578611 - DNA, 15 bp, Homo sapiens
tgatagggttgtgga

SEQ ID NO: 578612 - DNA, 15 bp, Homo sapiens
gtgatagggttgtgg

SEQ ID NO: 578613 - DNA, 15 bp, Homo sapiens
agtgatagggttgtg

SEQ ID NO: 578614 - DNA, 15 bp, Homo sapiens
aagtgatagggttgt

SEQ ID NO: 578615 - DNA, 15 bp, Homo sapiens
gaagtgatagggttg

SEQ ID NO: 578616 - DNA, 15 bp, Homo sapiens
agaagtgatagggtt

SEQ ID NO: 578617 - DNA, 15 bp, Homo sapiens
tagaagtgatagggt

SEQ ID NO: 578618 - DNA, 15 bp, Homo sapiens
ctagaagtgataggg

SEQ ID NO: 578619 - DNA, 15 bp, Homo sapiens
cctagaagtgatagg

SEQ ID NO: 578620 - DNA, 15 bp, Homo sapiens
tcctagaagtgatag

SEQ ID NO: 578621 - DNA, 15 bp, Homo sapiens
gtcctagaagtgata

SEQ ID NO: 578622 - DNA, 15 bp, Homo sapiens
ggtcctagaagtgat

SEQ ID NO: 578623 - DNA, 15 bp, Homo sapiens
tggtcctagaagtga

SEQ ID NO: 578624 - DNA, 15 bp, Homo sapiens
atggtcctagaagtg

SEQ ID NO: 578625 - DNA, 15 bp, Homo sapiens
aatggtcctagaagt

SEQ ID NO: 578626 - DNA, 15 bp, Homo sapiens
taatggtcctagaag

SEQ ID NO: 578627 - DNA, 15 bp, Homo sapiens
ataatggtcctagaa

SEQ ID NO: 578628 - DNA, 15 bp, Homo sapiens
tataatggtcctaga

SEQ ID NO: 578629 - DNA, 15 bp, Homo sapiens
gtataatggtcctag

SEQ ID NO: 578630 - DNA, 15 bp, Homo sapiens
ggtataatggtccta

SEQ ID NO: 578631 - DNA, 15 bp, Homo sapiens
aggtataatggtcct

SEQ ID NO: 578632 - DNA, 15 bp, Homo sapiens
gaggtataatggtcc

SEQ ID NO: 578633 - DNA, 15 bp, Homo sapiens
agaggtataatggtc

SEQ ID NO: 578634 - DNA, 15 bp, Homo sapiens
aagaggtataatggt

SEQ ID NO: 578635 - DNA, 15 bp, Homo sapiens
aaagaggtataatgg

SEQ ID NO: 578636 - DNA, 15 bp, Homo sapiens
aaaagaggtataatg

SEQ ID NO: 578637 - DNA, 15 bp, Homo sapiens
caaaagaggtataat

SEQ ID NO: 578638 - DNA, 15 bp, Homo sapiens
gcaaaagaggtataa

SEQ ID NO: 578639 - DNA, 15 bp, Homo sapiens
tgcaaaagaggtata

SEQ ID NO: 578640 - DNA, 15 bp, Homo sapiens
atgcaaaagaggtat

SEQ ID NO: 578641 - DNA, 15 bp, Homo sapiens
aatgcaaaagaggta

SEQ ID NO: 578642 - DNA, 15 bp, Homo sapiens
taatgcaaaagaggt

SEQ ID NO: 578643 - DNA, 15 bp, Homo sapiens
gtaatgcaaaagagg

SEQ ID NO: 578644 - DNA, 15 bp, Homo sapiens
agtaatgcaaaagag

SEQ ID NO: 578645 - DNA, 15 bp, Homo sapiens
cagtaatgcaaaaga

SEQ ID NO: 578646 - DNA, 15 bp, Homo sapiens
acagtaatgcaaaag

SEQ ID NO: 578647 - DNA, 15 bp, Homo sapiens
cacagtaatgcaaaa

SEQ ID NO: 578648 - DNA, 15 bp, Homo sapiens
ccacagtaatgcaaa

SEQ ID NO: 578649 - DNA, 15 bp, Homo sapiens
cccacagtaatgcaa

SEQ ID NO: 578650 - DNA, 15 bp, Homo sapiens
ccccacagtaatgca

SEQ ID NO: 578651 - DNA, 15 bp, Homo sapiens
accccacagtaatgc

SEQ ID NO: 578652 - DNA, 15 bp, Homo sapiens
taccccacagtaatg

SEQ ID NO: 578653 - DNA, 15 bp, Homo sapiens
ataccccacagtaat

SEQ ID NO: 578654 - DNA, 15 bp, Homo sapiens
tataccccacagtaa

SEQ ID NO: 578655 - DNA, 15 bp, Homo sapiens
gtataccccacagta

SEQ ID NO: 578656 - DNA, 15 bp, Homo sapiens
agtataccccacagt

SEQ ID NO: 578657 - DNA, 15 bp, Homo sapiens
cagtataccccacag

SEQ ID NO: 578658 - DNA, 15 bp, Homo sapiens
acagtataccccaca

SEQ ID NO: 578659 - DNA, 15 bp, Homo sapiens
aacagtataccccac

SEQ ID NO: 578660 - DNA, 15 bp, Homo sapiens
aaacagtatacccca

SEQ ID NO: 578661 - DNA, 15 bp, Homo sapiens
gaaacagtatacccc

SEQ ID NO: 578662 - DNA, 15 bp, Homo sapiens
ggaaacagtataccc

SEQ ID NO: 578663 - DNA, 15 bp, Homo sapiens
gggaaacagtatacc

SEQ ID NO: 578664 - DNA, 15 bp, Homo sapiens
agggaaacagtatac

SEQ ID NO: 578665 - DNA, 15 bp, Homo sapiens
gagggaaacagtata

SEQ ID NO: 578666 - DNA, 15 bp, Homo sapiens
ggagggaaacagtat

SEQ ID NO: 578667 - DNA, 15 bp, Homo sapiens
tggagggaaacagta

SEQ ID NO: 578668 - DNA, 15 bp, Homo sapiens
ttggagggaaacagt

SEQ ID NO: 578669 - DNA, 15 bp, Homo sapiens
cttggagggaaacag

SEQ ID NO: 578670 - DNA, 15 bp, Homo sapiens
ccttggagggaaaca

SEQ ID NO: 578671 - DNA, 15 bp, Homo sapiens
gccttggagggaaac

SEQ ID NO: 578672 - DNA, 15 bp, Homo sapiens
ggccttggagggaaa

SEQ ID NO: 578673 - DNA, 15 bp, Homo sapiens
gggccttggagggaa

SEQ ID NO: 578674 - DNA, 15 bp, Homo sapiens
ggggccttggaggga

SEQ ID NO: 578675 - DNA, 15 bp, Homo sapiens
aggggccttggaggg

SEQ ID NO: 578676 - DNA, 15 bp, Homo sapiens
aaggggccttggagg

SEQ ID NO: 578677 - DNA, 15 bp, Homo sapiens
gaaggggccttggag

SEQ ID NO: 578678 - DNA, 15 bp, Homo sapiens
agaaggggccttgga

SEQ ID NO: 578679 - DNA, 15 bp, Homo sapiens
cagaaggggccttgg

SEQ ID NO: 578680 - DNA, 15 bp, Homo sapiens
ccagaaggggccttg

SEQ ID NO: 578681 - DNA, 15 bp, Homo sapiens
accagaaggggcctt

SEQ ID NO: 578682 - DNA, 15 bp, Homo sapiens
caccagaaggggcct

SEQ ID NO: 578683 - DNA, 15 bp, Homo sapiens
ccaccagaaggggcc

SEQ ID NO: 578684 - DNA, 15 bp, Homo sapiens
tccaccagaaggggc

SEQ ID NO: 578685 - DNA, 15 bp, Homo sapiens
gtccaccagaagggg

SEQ ID NO: 578686 - DNA, 15 bp, Homo sapiens
agtccaccagaaggg

SEQ ID NO: 578687 - DNA, 15 bp, Homo sapiens
tagtccaccagaagg

SEQ ID NO: 578688 - DNA, 15 bp, Homo sapiens
atagtccaccagaag

SEQ ID NO: 578689 - DNA, 15 bp, Homo sapiens
gatagtccaccagaa

SEQ ID NO: 578690 - DNA, 15 bp, Homo sapiens
tgatagtccaccaga

SEQ ID NO: 578691 - DNA, 15 bp, Homo sapiens
ttgatagtccaccag

SEQ ID NO: 578692 - DNA, 15 bp, Homo sapiens
gttgatagtccacca

SEQ ID NO: 578693 - DNA, 15 bp, Homo sapiens
tgttgatagtccacc

SEQ ID NO: 578694 - DNA, 15 bp, Homo sapiens
atgttgatagtccac

SEQ ID NO: 578695 - DNA, 15 bp, Homo sapiens
tatgttgatagtcca

SEQ ID NO: 578696 - DNA, 15 bp, Homo sapiens
atatgttgatagtcc

SEQ ID NO: 578697 - DNA, 15 bp, Homo sapiens
tatatgttgatagtc

SEQ ID NO: 578698 - DNA, 15 bp, Homo sapiens
ttatatgttgatagt

SEQ ID NO: 578699 - DNA, 15 bp, Homo sapiens
attatatgttgatag

SEQ ID NO: 578700 - DNA, 15 bp, Homo sapiens
aattatatgttgata

SEQ ID NO: 578701 - DNA, 15 bp, Homo sapiens
caattatatgttgat

SEQ ID NO: 578702 - DNA, 15 bp, Homo sapiens
tcaattatatgttga

SEQ ID NO: 578703 - DNA, 15 bp, Homo sapiens
ttcaattatatgttg

SEQ ID NO: 578704 - DNA, 15 bp, Homo sapiens
tttcaattatatgtt

SEQ ID NO: 578705 - DNA, 15 bp, Homo sapiens
atttcaattatatgt

SEQ ID NO: 578706 - DNA, 15 bp, Homo sapiens
aatttcaattatatg

SEQ ID NO: 578707 - DNA, 15 bp, Homo sapiens
aaatttcaattatat

SEQ ID NO: 578708 - DNA, 15 bp, Homo sapiens
aaaatttcaattata

SEQ ID NO: 578709 - DNA, 15 bp, Homo sapiens
gaaaatttcaattat

SEQ ID NO: 578710 - DNA, 15 bp, Homo sapiens
agaaaatttcaatta

SEQ ID NO: 578711 - DNA, 15 bp, Homo sapiens
aagaaaatttcaatt

SEQ ID NO: 578712 - DNA, 15 bp, Homo sapiens
aaagaaaatttcaat

SEQ ID NO: 578713 - DNA, 15 bp, Homo sapiens
aaaagaaaatttcaa

SEQ ID NO: 578714 - DNA, 15 bp, Homo sapiens
caaaagaaaatttca

SEQ ID NO: 578715 - DNA, 15 bp, Homo sapiens
acaaaagaaaatttc

SEQ ID NO: 578716 - DNA, 15 bp, Homo sapiens
gacaaaagaaaattt

SEQ ID NO: 578717 - DNA, 15 bp, Homo sapiens
agacaaaagaaaatt

SEQ ID NO: 578718 - DNA, 15 bp, Homo sapiens
aagacaaaagaaaat

SEQ ID NO: 578719 - DNA, 15 bp, Homo sapiens
aaagacaaaagaaaa

SEQ ID NO: 578720 - DNA, 15 bp, Homo sapiens
caaagacaaaagaaa

SEQ ID NO: 578721 - DNA, 15 bp, Homo sapiens
acaaagacaaaagaa

SEQ ID NO: 578722 - DNA, 15 bp, Homo sapiens
gacaaagacaaaaga

SEQ ID NO: 578723 - DNA, 15 bp, Homo sapiens
tgacaaagacaaaag

SEQ ID NO: 578724 - DNA, 15 bp, Homo sapiens
ctgacaaagacaaaa

SEQ ID NO: 578725 - DNA, 15 bp, Homo sapiens
actgacaaagacaaa

SEQ ID NO: 578726 - DNA, 15 bp, Homo sapiens
tactgacaaagacaa

SEQ ID NO: 578727 - DNA, 15 bp, Homo sapiens
ctactgacaaagaca

SEQ ID NO: 578728 - DNA, 15 bp, Homo sapiens
tctactgacaaagac

SEQ ID NO: 578729 - DNA, 15 bp, Homo sapiens
atctactgacaaaga

SEQ ID NO: 578730 - DNA, 15 bp, Homo sapiens
aatctactgacaaag

SEQ ID NO: 578731 - DNA, 15 bp, Homo sapiens
taatctactgacaaa

SEQ ID NO: 578732 - DNA, 15 bp, Homo sapiens
ttaatctactgacaa

SEQ ID NO: 578733 - DNA, 15 bp, Homo sapiens
cttaatctactgaca

SEQ ID NO: 578734 - DNA, 15 bp, Homo sapiens
ccttaatctactgac

SEQ ID NO: 578735 - DNA, 15 bp, Homo sapiens
accttaatctactga

SEQ ID NO: 578736 - DNA, 15 bp, Homo sapiens
gaccttaatctactg

SEQ ID NO: 578737 - DNA, 15 bp, Homo sapiens
tgaccttaatctact

SEQ ID NO: 578738 - DNA, 15 bp, Homo sapiens
atgaccttaatctac

SEQ ID NO: 578739 - DNA, 15 bp, Homo sapiens
tatgaccttaatcta

SEQ ID NO: 578740 - DNA, 15 bp, Homo sapiens
gtatgaccttaatct

SEQ ID NO: 578741 - DNA, 15 bp, Homo sapiens
ggtatgaccttaatc

SEQ ID NO: 578742 - DNA, 15 bp, Homo sapiens
gggtatgaccttaat

SEQ ID NO: 578743 - DNA, 15 bp, Homo sapiens
ggggtatgaccttaa

SEQ ID NO: 578744 - DNA, 15 bp, Homo sapiens
tggggtatgacctta

SEQ ID NO: 578745 - DNA, 15 bp, Homo sapiens
atggggtatgacctt

SEQ ID NO: 578746 - DNA, 15 bp, Homo sapiens
gatggggtatgacct

SEQ ID NO: 578747 - DNA, 15 bp, Homo sapiens
tgatggggtatgacc

SEQ ID NO: 578748 - DNA, 15 bp, Homo sapiens
gtgatggggtatgac

SEQ ID NO: 578749 - DNA, 15 bp, Homo sapiens
ggtgatggggtatga

SEQ ID NO: 578750 - DNA, 15 bp, Homo sapiens
aggtgatggggtatg

SEQ ID NO: 578751 - DNA, 15 bp, Homo sapiens
aaggtgatggggtat

SEQ ID NO: 578752 - DNA, 15 bp, Homo sapiens
aaaggtgatggggta

SEQ ID NO: 578753 - DNA, 15 bp, Homo sapiens
gaaaggtgatggggt

SEQ ID NO: 578754 - DNA, 15 bp, Homo sapiens
ggaaaggtgatgggg

SEQ ID NO: 578755 - DNA, 15 bp, Homo sapiens
aggaaaggtgatggg

SEQ ID NO: 578756 - DNA, 15 bp, Homo sapiens
aaggaaaggtgatgg

SEQ ID NO: 578757 - DNA, 15 bp, Homo sapiens
aaaggaaaggtgatg

SEQ ID NO: 578758 - DNA, 15 bp, Homo sapiens
caaaggaaaggtgat

SEQ ID NO: 578759 - DNA, 15 bp, Homo sapiens
acaaaggaaaggtga

SEQ ID NO: 578760 - DNA, 15 bp, Homo sapiens
tacaaaggaaaggtg

SEQ ID NO: 578761 - DNA, 15 bp, Homo sapiens
ctacaaaggaaaggt

SEQ ID NO: 578762 - DNA, 15 bp, Homo sapiens
actacaaaggaaagg

SEQ ID NO: 578763 - DNA, 15 bp, Homo sapiens
tactacaaaggaaag

SEQ ID NO: 578764 - DNA, 15 bp, Homo sapiens
gtactacaaaggaaa

SEQ ID NO: 578765 - DNA, 15 bp, Homo sapiens
tgtactacaaaggaa

SEQ ID NO: 578766 - DNA, 15 bp, Homo sapiens
ttgtactacaaagga

SEQ ID NO: 578767 - DNA, 15 bp, Homo sapiens
gttgtactacaaagg

SEQ ID NO: 578768 - DNA, 15 bp, Homo sapiens
tgttgtactacaaag

SEQ ID NO: 578769 - DNA, 15 bp, Homo sapiens
ctgttgtactacaaa

SEQ ID NO: 578770 - DNA, 15 bp, Homo sapiens
cctgttgtactacaa

SEQ ID NO: 578771 - DNA, 15 bp, Homo sapiens
ccctgttgtactaca

SEQ ID NO: 578772 - DNA, 15 bp, Homo sapiens
accctgttgtactac

SEQ ID NO: 578773 - DNA, 15 bp, Homo sapiens
caccctgttgtacta

SEQ ID NO: 578774 - DNA, 15 bp, Homo sapiens
acaccctgttgtact

SEQ ID NO: 578775 - DNA, 15 bp, Homo sapiens
gacaccctgttgtac

SEQ ID NO: 578776 - DNA, 15 bp, Homo sapiens
ggacaccctgttgta

SEQ ID NO: 578777 - DNA, 15 bp, Homo sapiens
aggacaccctgttgt

SEQ ID NO: 578778 - DNA, 15 bp, Homo sapiens
caggacaccctgttg

SEQ ID NO: 578779 - DNA, 15 bp, Homo sapiens
tcaggacaccctgtt

SEQ ID NO: 578780 - DNA, 15 bp, Homo sapiens
atcaggacaccctgt

SEQ ID NO: 578781 - DNA, 15 bp, Homo sapiens
gatcaggacaccctg

SEQ ID NO: 578782 - DNA, 15 bp, Homo sapiens
tgatcaggacaccct

SEQ ID NO: 578783 - DNA, 15 bp, Homo sapiens
ttgatcaggacaccc

SEQ ID NO: 578784 - DNA, 15 bp, Homo sapiens
gttgatcaggacacc

SEQ ID NO: 578785 - DNA, 15 bp, Homo sapiens
ggttgatcaggacac

SEQ ID NO: 578786 - DNA, 15 bp, Homo sapiens
tggttgatcaggaca

SEQ ID NO: 578787 - DNA, 15 bp, Homo sapiens
ttggttgatcaggac

SEQ ID NO: 578788 - DNA, 15 bp, Homo sapiens
tttggttgatcagga

SEQ ID NO: 578789 - DNA, 15 bp, Homo sapiens
ctttggttgatcagg

SEQ ID NO: 578790 - DNA, 15 bp, Homo sapiens
actttggttgatcag

SEQ ID NO: 578791 - DNA, 15 bp, Homo sapiens
gactttggttgatca

SEQ ID NO: 578792 - DNA, 15 bp, Homo sapiens
ggactttggttgatc

SEQ ID NO: 578793 - DNA, 15 bp, Homo sapiens
aggactttggttgat

SEQ ID NO: 578794 - DNA, 15 bp, Homo sapiens
caggactttggttga

SEQ ID NO: 578795 - DNA, 15 bp, Homo sapiens
acaggactttggttg

SEQ ID NO: 578796 - DNA, 15 bp, Homo sapiens
aacaggactttggtt

SEQ ID NO: 578797 - DNA, 15 bp, Homo sapiens
caacaggactttggt

SEQ ID NO: 578798 - DNA, 15 bp, Homo sapiens
acaacaggactttgg

SEQ ID NO: 578799 - DNA, 15 bp, Homo sapiens
aacaacaggactttg

SEQ ID NO: 578800 - DNA, 15 bp, Homo sapiens
aaacaacaggacttt

SEQ ID NO: 578801 - DNA, 15 bp, Homo sapiens
aaaacaacaggactt

SEQ ID NO: 578802 - DNA, 15 bp, Homo sapiens
caaaacaacaggact

SEQ ID NO: 578803 - DNA, 15 bp, Homo sapiens
ccaaaacaacaggac

SEQ ID NO: 578804 - DNA, 15 bp, Homo sapiens
tccaaaacaacagga

SEQ ID NO: 578805 - DNA, 15 bp, Homo sapiens
gtccaaaacaacagg

SEQ ID NO: 578806 - DNA, 15 bp, Homo sapiens
agtccaaaacaacag

SEQ ID NO: 578807 - DNA, 15 bp, Homo sapiens
cagtccaaaacaaca

SEQ ID NO: 578808 - DNA, 15 bp, Homo sapiens
acagtccaaaacaac

SEQ ID NO: 578809 - DNA, 15 bp, Homo sapiens
aacagtccaaaacaa

SEQ ID NO: 578810 - DNA, 15 bp, Homo sapiens
taacagtccaaaaca

SEQ ID NO: 578811 - DNA, 15 bp, Homo sapiens
ttaacagtccaaaac

SEQ ID NO: 578812 - DNA, 15 bp, Homo sapiens
attaacagtccaaaa

SEQ ID NO: 578813 - DNA, 15 bp, Homo sapiens
tattaacagtccaaa

SEQ ID NO: 578814 - DNA, 15 bp, Homo sapiens
atattaacagtccaa

SEQ ID NO: 578815 - DNA, 15 bp, Homo sapiens
catattaacagtcca

SEQ ID NO: 578816 - DNA, 15 bp, Homo sapiens
acatattaacagtcc

SEQ ID NO: 578817 - DNA, 15 bp, Homo sapiens
cacatattaacagtc

SEQ ID NO: 578818 - DNA, 15 bp, Homo sapiens
gcacatattaacagt

SEQ ID NO: 578819 - DNA, 15 bp, Homo sapiens
tgcacatattaacag

SEQ ID NO: 578820 - DNA, 15 bp, Homo sapiens
ttgcacatattaaca

SEQ ID NO: 578821 - DNA, 15 bp, Homo sapiens
attgcacatattaac

SEQ ID NO: 578822 - DNA, 15 bp, Homo sapiens
aattgcacatattaa

SEQ ID NO: 578823 - DNA, 15 bp, Homo sapiens
taattgcacatatta

SEQ ID NO: 578824 - DNA, 15 bp, Homo sapiens
gtaattgcacatatt

SEQ ID NO: 578825 - DNA, 15 bp, Homo sapiens
tgtaattgcacatat

SEQ ID NO: 578826 - DNA, 15 bp, Homo sapiens
atgtaattgcacata

SEQ ID NO: 578827 - DNA, 15 bp, Homo sapiens
aatgtaattgcacat

SEQ ID NO: 578828 - DNA, 15 bp, Homo sapiens
aaatgtaattgcaca

SEQ ID NO: 578829 - DNA, 15 bp, Homo sapiens
caaatgtaattgcac

SEQ ID NO: 578830 - DNA, 15 bp, Homo sapiens
gcaaatgtaattgca

SEQ ID NO: 578831 - DNA, 15 bp, Homo sapiens
agcaaatgtaattgc

SEQ ID NO: 578832 - DNA, 15 bp, Homo sapiens
gagcaaatgtaattg

SEQ ID NO: 578833 - DNA, 15 bp, Homo sapiens
ggagcaaatgtaatt

SEQ ID NO: 578834 - DNA, 15 bp, Homo sapiens
aggagcaaatgtaat

SEQ ID NO: 578835 - DNA, 15 bp, Homo sapiens
caggagcaaatgtaa

SEQ ID NO: 578836 - DNA, 15 bp, Homo sapiens
tcaggagcaaatgta

SEQ ID NO: 578837 - DNA, 15 bp, Homo sapiens
atcaggagcaaatgt

SEQ ID NO: 578838 - DNA, 15 bp, Homo sapiens
gatcaggagcaaatg

SEQ ID NO: 578839 - DNA, 15 bp, Homo sapiens
agatcaggagcaaat

SEQ ID NO: 578840 - DNA, 15 bp, Homo sapiens
cagatcaggagcaaa

SEQ ID NO: 578841 - DNA, 15 bp, Homo sapiens
acagatcaggagcaa

SEQ ID NO: 578842 - DNA, 15 bp, Homo sapiens
cacagatcaggagca

SEQ ID NO: 578843 - DNA, 15 bp, Homo sapiens
gcacagatcaggagc

SEQ ID NO: 578844 - DNA, 15 bp, Homo sapiens
tgcacagatcaggag

SEQ ID NO: 578845 - DNA, 15 bp, Homo sapiens
gtgcacagatcagga

SEQ ID NO: 578846 - DNA, 15 bp, Homo sapiens
agtgcacagatcagg

SEQ ID NO: 578847 - DNA, 15 bp, Homo sapiens
tagtgcacagatcag

SEQ ID NO: 578848 - DNA, 15 bp, Homo sapiens
ctagtgcacagatca

SEQ ID NO: 578849 - DNA, 15 bp, Homo sapiens
tctagtgcacagatc

SEQ ID NO: 578850 - DNA, 15 bp, Homo sapiens
atctagtgcacagat

SEQ ID NO: 578851 - DNA, 15 bp, Homo sapiens
tatctagtgcacaga

SEQ ID NO: 578852 - DNA, 15 bp, Homo sapiens
ttatctagtgcacag

SEQ ID NO: 578853 - DNA, 15 bp, Homo sapiens
cttatctagtgcaca

SEQ ID NO: 578854 - DNA, 15 bp, Homo sapiens
ccttatctagtgcac

SEQ ID NO: 578855 - DNA, 15 bp, Homo sapiens
tccttatctagtgca

SEQ ID NO: 578856 - DNA, 15 bp, Homo sapiens
atccttatctagtgc

SEQ ID NO: 578857 - DNA, 15 bp, Homo sapiens
gatccttatctagtg

SEQ ID NO: 578858 - DNA, 15 bp, Homo sapiens
ggatccttatctagt

SEQ ID NO: 578859 - DNA, 15 bp, Homo sapiens
aggatccttatctag

SEQ ID NO: 578860 - DNA, 15 bp, Homo sapiens
taggatccttatcta

SEQ ID NO: 578861 - DNA, 15 bp, Homo sapiens
gtaggatccttatct

SEQ ID NO: 578862 - DNA, 15 bp, Homo sapiens
ggtaggatccttatc

SEQ ID NO: 578863 - DNA, 15 bp, Homo sapiens
aggtaggatccttat

SEQ ID NO: 578864 - DNA, 15 bp, Homo sapiens
taggtaggatcctta

SEQ ID NO: 578865 - DNA, 15 bp, Homo sapiens
gtaggtaggatcctt

SEQ ID NO: 578866 - DNA, 15 bp, Homo sapiens
agtaggtaggatcct

SEQ ID NO: 578867 - DNA, 15 bp, Homo sapiens
aagtaggtaggatcc

SEQ ID NO: 578868 - DNA, 15 bp, Homo sapiens
aaagtaggtaggatc

SEQ ID NO: 578869 - DNA, 15 bp, Homo sapiens
gaaagtaggtaggat

SEQ ID NO: 578870 - DNA, 15 bp, Homo sapiens
agaaagtaggtagga

SEQ ID NO: 578871 - DNA, 15 bp, Homo sapiens
aagaaagtaggtagg

SEQ ID NO: 578872 - DNA, 15 bp, Homo sapiens
taagaaagtaggtag

SEQ ID NO: 578873 - DNA, 15 bp, Homo sapiens
ctaagaaagtaggta

SEQ ID NO: 578874 - DNA, 15 bp, Homo sapiens
actaagaaagtaggt

SEQ ID NO: 578875 - DNA, 15 bp, Homo sapiens
cactaagaaagtagg

SEQ ID NO: 578876 - DNA, 15 bp, Homo sapiens
acactaagaaagtag

SEQ ID NO: 578877 - DNA, 15 bp, Homo sapiens
aacactaagaaagta

SEQ ID NO: 578878 - DNA, 15 bp, Homo sapiens
aaacactaagaaagt

SEQ ID NO: 578879 - DNA, 15 bp, Homo sapiens
aaaacactaagaaag

SEQ ID NO: 578880 - DNA, 15 bp, Homo sapiens
aaaaacactaagaaa

SEQ ID NO: 578881 - DNA, 15 bp, Homo sapiens
taaaaacactaagaa

SEQ ID NO: 578882 - DNA, 15 bp, Homo sapiens
ctaaaaacactaaga

SEQ ID NO: 578883 - DNA, 15 bp, Homo sapiens
gctaaaaacactaag

SEQ ID NO: 578884 - DNA, 15 bp, Homo sapiens
tgctaaaaacactaa

SEQ ID NO: 578885 - DNA, 15 bp, Homo sapiens
ctgctaaaaacacta

SEQ ID NO: 578886 - DNA, 15 bp, Homo sapiens
cctgctaaaaacact

SEQ ID NO: 578887 - DNA, 15 bp, Homo sapiens
acctgctaaaaacac

SEQ ID NO: 578888 - DNA, 15 bp, Homo sapiens
tacctgctaaaaaca

SEQ ID NO: 578889 - DNA, 15 bp, Homo sapiens
ctacctgctaaaaac

SEQ ID NO: 578890 - DNA, 15 bp, Homo sapiens
actacctgctaaaaa

SEQ ID NO: 578891 - DNA, 15 bp, Homo sapiens
cactacctgctaaaa

SEQ ID NO: 578892 - DNA, 15 bp, Homo sapiens
gcactacctgctaaa

SEQ ID NO: 578893 - DNA, 15 bp, Homo sapiens
ggcactacctgctaa

SEQ ID NO: 578894 - DNA, 15 bp, Homo sapiens
gggcactacctgcta

SEQ ID NO: 578895 - DNA, 15 bp, Homo sapiens
tgggcactacctgct

SEQ ID NO: 578896 - DNA, 15 bp, Homo sapiens
gtgggcactacctgc

SEQ ID NO: 578897 - DNA, 15 bp, Homo sapiens
agtgggcactacctg

SEQ ID NO: 578898 - DNA, 15 bp, Homo sapiens
tagtgggcactacct

SEQ ID NO: 578899 - DNA, 15 bp, Homo sapiens
gtagtgggcactacc

SEQ ID NO: 578900 - DNA, 15 bp, Homo sapiens
agtagtgggcactac

SEQ ID NO: 578901 - DNA, 15 bp, Homo sapiens
gagtagtgggcacta

SEQ ID NO: 578902 - DNA, 15 bp, Homo sapiens
tgagtagtgggcact

SEQ ID NO: 578903 - DNA, 15 bp, Homo sapiens
ttgagtagtgggcac

SEQ ID NO: 578904 - DNA, 15 bp, Homo sapiens
cttgagtagtgggca

SEQ ID NO: 578905 - DNA, 15 bp, Homo sapiens
tcttgagtagtgggc

SEQ ID NO: 578906 - DNA, 15 bp, Homo sapiens
gtcttgagtagtggg

SEQ ID NO: 578907 - DNA, 15 bp, Homo sapiens
agtcttgagtagtgg

SEQ ID NO: 578908 - DNA, 15 bp, Homo sapiens
cagtcttgagtagtg

SEQ ID NO: 578909 - DNA, 15 bp, Homo sapiens
acagtcttgagtagt

SEQ ID NO: 578910 - DNA, 15 bp, Homo sapiens
gacagtcttgagtag

SEQ ID NO: 578911 - DNA, 15 bp, Homo sapiens
tgacagtcttgagta

SEQ ID NO: 578912 - DNA, 15 bp, Homo sapiens
gtgacagtcttgagt

SEQ ID NO: 578913 - DNA, 15 bp, Homo sapiens
agtgacagtcttgag

SEQ ID NO: 578914 - DNA, 15 bp, Homo sapiens
aagtgacagtcttga

SEQ ID NO: 578915 - DNA, 15 bp, Homo sapiens
caagtgacagtcttg

SEQ ID NO: 578916 - DNA, 15 bp, Homo sapiens
ccaagtgacagtctt

SEQ ID NO: 578917 - DNA, 15 bp, Homo sapiens
tccaagtgacagtct

SEQ ID NO: 578918 - DNA, 15 bp, Homo sapiens
ttccaagtgacagtc

SEQ ID NO: 578919 - DNA, 15 bp, Homo sapiens
attccaagtgacagt

SEQ ID NO: 578920 - DNA, 15 bp, Homo sapiens
cattccaagtgacag

SEQ ID NO: 578921 - DNA, 15 bp, Homo sapiens
acattccaagtgaca

SEQ ID NO: 578922 - DNA, 15 bp, Homo sapiens
aacattccaagtgac

SEQ ID NO: 578923 - DNA, 15 bp, Homo sapiens
gaacattccaagtga

SEQ ID NO: 578924 - DNA, 15 bp, Homo sapiens
tgaacattccaagtg

SEQ ID NO: 578925 - DNA, 15 bp, Homo sapiens
atgaacattccaagt

SEQ ID NO: 578926 - DNA, 15 bp, Homo sapiens
catgaacattccaag

SEQ ID NO: 578927 - DNA, 15 bp, Homo sapiens
acatgaacattccaa

SEQ ID NO: 578928 - DNA, 15 bp, Homo sapiens
cacatgaacattcca

SEQ ID NO: 578929 - DNA, 15 bp, Homo sapiens
gcacatgaacattcc

SEQ ID NO: 578930 - DNA, 15 bp, Homo sapiens
tgcacatgaacattc

SEQ ID NO: 578931 - DNA, 15 bp, Homo sapiens
gtgcacatgaacatt

SEQ ID NO: 578932 - DNA, 15 bp, Homo sapiens
tgtgcacatgaacat

SEQ ID NO: 578933 - DNA, 15 bp, Homo sapiens
ttgtgcacatgaaca

SEQ ID NO: 578934 - DNA, 15 bp, Homo sapiens
tttgtgcacatgaac

SEQ ID NO: 578935 - DNA, 15 bp, Homo sapiens
gtttgtgcacatgaa

SEQ ID NO: 578936 - DNA, 15 bp, Homo sapiens
agtttgtgcacatga

SEQ ID NO: 578937 - DNA, 15 bp, Homo sapiens
gagtttgtgcacatg

SEQ ID NO: 578938 - DNA, 15 bp, Homo sapiens
tgagtttgtgcacat

SEQ ID NO: 578939 - DNA, 15 bp, Homo sapiens
ttgagtttgtgcaca

SEQ ID NO: 578940 - DNA, 15 bp, Homo sapiens
attgagtttgtgcac

SEQ ID NO: 578941 - DNA, 15 bp, Homo sapiens
aattgagtttgtgca

SEQ ID NO: 578942 - DNA, 15 bp, Homo sapiens
gaattgagtttgtgc

SEQ ID NO: 578943 - DNA, 15 bp, Homo sapiens
agaattgagtttgtg

SEQ ID NO: 578944 - DNA, 15 bp, Homo sapiens
gagaattgagtttgt

SEQ ID NO: 578945 - DNA, 15 bp, Homo sapiens
agagaattgagtttg

SEQ ID NO: 578946 - DNA, 15 bp, Homo sapiens
tagagaattgagttt

SEQ ID NO: 578947 - DNA, 15 bp, Homo sapiens
ttagagaattgagtt

SEQ ID NO: 578948 - DNA, 15 bp, Homo sapiens
cttagagaattgagt

SEQ ID NO: 578949 - DNA, 15 bp, Homo sapiens
gcttagagaattgag

SEQ ID NO: 578950 - DNA, 15 bp, Homo sapiens
tgcttagagaattga

SEQ ID NO: 578951 - DNA, 15 bp, Homo sapiens
atgcttagagaattg

SEQ ID NO: 578952 - DNA, 15 bp, Homo sapiens
catgcttagagaatt

SEQ ID NO: 578953 - DNA, 15 bp, Homo sapiens
acatgcttagagaat

SEQ ID NO: 578954 - DNA, 15 bp, Homo sapiens
aacatgcttagagaa

SEQ ID NO: 578955 - DNA, 15 bp, Homo sapiens
gaacatgcttagaga

SEQ ID NO: 578956 - DNA, 15 bp, Homo sapiens
ggaacatgcttagag

SEQ ID NO: 578957 - DNA, 15 bp, Homo sapiens
aggaacatgcttaga

SEQ ID NO: 578958 - DNA, 15 bp, Homo sapiens
caggaacatgcttag

SEQ ID NO: 578959 - DNA, 15 bp, Homo sapiens
acaggaacatgctta

SEQ ID NO: 578960 - DNA, 15 bp, Homo sapiens
tacaggaacatgctt

SEQ ID NO: 578961 - DNA, 15 bp, Homo sapiens
gtacaggaacatgct

SEQ ID NO: 578962 - DNA, 15 bp, Homo sapiens
ggtacaggaacatgc

SEQ ID NO: 578963 - DNA, 15 bp, Homo sapiens
tggtacaggaacatg

SEQ ID NO: 578964 - DNA, 15 bp, Homo sapiens
gtggtacaggaacat

SEQ ID NO: 578965 - DNA, 15 bp, Homo sapiens
ggtggtacaggaaca

SEQ ID NO: 578966 - DNA, 15 bp, Homo sapiens
aggtggtacaggaac

SEQ ID NO: 578967 - DNA, 15 bp, Homo sapiens
aaggtggtacaggaa

SEQ ID NO: 578968 - DNA, 15 bp, Homo sapiens
aaaggtggtacagga

SEQ ID NO: 578969 - DNA, 15 bp, Homo sapiens
caaaggtggtacagg

SEQ ID NO: 578970 - DNA, 15 bp, Homo sapiens
gcaaaggtggtacag

SEQ ID NO: 578971 - DNA, 15 bp, Homo sapiens
agcaaaggtggtaca

SEQ ID NO: 578972 - DNA, 15 bp, Homo sapiens
aagcaaaggtggtac

SEQ ID NO: 578973 - DNA, 15 bp, Homo sapiens
aaagcaaaggtggta

SEQ ID NO: 578974 - DNA, 15 bp, Homo sapiens
taaagcaaaggtggt

SEQ ID NO: 578975 - DNA, 15 bp, Homo sapiens
ctaaagcaaaggtgg

SEQ ID NO: 578976 - DNA, 15 bp, Homo sapiens
tctaaagcaaaggtg

SEQ ID NO: 578977 - DNA, 15 bp, Homo sapiens
ctctaaagcaaaggt

SEQ ID NO: 578978 - DNA, 15 bp, Homo sapiens
gctctaaagcaaagg

SEQ ID NO: 578979 - DNA, 15 bp, Homo sapiens
tgctctaaagcaaag

SEQ ID NO: 578980 - DNA, 15 bp, Homo sapiens
ctgctctaaagcaaa

SEQ ID NO: 578981 - DNA, 15 bp, Homo sapiens
cctgctctaaagcaa

SEQ ID NO: 578982 - DNA, 15 bp, Homo sapiens
ccctgctctaaagca

SEQ ID NO: 578983 - DNA, 15 bp, Homo sapiens
cccctgctctaaagc

SEQ ID NO: 578984 - DNA, 15 bp, Homo sapiens
ccccctgctctaaag

SEQ ID NO: 578985 - DNA, 15 bp, Homo sapiens
tccccctgctctaaa

SEQ ID NO: 578986 - DNA, 15 bp, Homo sapiens
atccccctgctctaa

SEQ ID NO: 578987 - DNA, 15 bp, Homo sapiens
catccccctgctcta

SEQ ID NO: 578988 - DNA, 15 bp, Homo sapiens
tcatccccctgctct

SEQ ID NO: 578989 - DNA, 15 bp, Homo sapiens
atcatccccctgctc

SEQ ID NO: 578990 - DNA, 15 bp, Homo sapiens
tatcatccccctgct

SEQ ID NO: 578991 - DNA, 15 bp, Homo sapiens
atatcatccccctgc

SEQ ID NO: 578992 - DNA, 15 bp, Homo sapiens
aatatcatccccctg

SEQ ID NO: 578993 - DNA, 15 bp, Homo sapiens
gaatatcatccccct

SEQ ID NO: 578994 - DNA, 15 bp, Homo sapiens
tgaatatcatccccc

SEQ ID NO: 578995 - DNA, 15 bp, Homo sapiens
gtgaatatcatcccc

SEQ ID NO: 578996 - DNA, 15 bp, Homo sapiens
agtgaatatcatccc

SEQ ID NO: 578997 - DNA, 15 bp, Homo sapiens
tagtgaatatcatcc

SEQ ID NO: 578998 - DNA, 15 bp, Homo sapiens
ttagtgaatatcatc

SEQ ID NO: 578999 - DNA, 15 bp, Homo sapiens
cttagtgaatatcat

SEQ ID NO: 579000 - DNA, 15 bp, Homo sapiens
acttagtgaatatca

SEQ ID NO: 579001 - DNA, 15 bp, Homo sapiens
cacttagtgaatatc

SEQ ID NO: 579002 - DNA, 15 bp, Homo sapiens
gcacttagtgaatat

SEQ ID NO: 579003 - DNA, 15 bp, Homo sapiens
ggcacttagtgaata

SEQ ID NO: 579004 - DNA, 15 bp, Homo sapiens
gggcacttagtgaat

SEQ ID NO: 579005 - DNA, 15 bp, Homo sapiens
ggggcacttagtgaa

SEQ ID NO: 579006 - DNA, 15 bp, Homo sapiens
aggggcacttagtga

SEQ ID NO: 579007 - DNA, 15 bp, Homo sapiens
aaggggcacttagtg

SEQ ID NO: 579008 - DNA, 15 bp, Homo sapiens
gaaggggcacttagt

SEQ ID NO: 579009 - DNA, 15 bp, Homo sapiens
agaaggggcacttag

SEQ ID NO: 579010 - DNA, 15 bp, Homo sapiens
aagaaggggcactta

SEQ ID NO: 579011 - DNA, 15 bp, Homo sapiens
aaagaaggggcactt

SEQ ID NO: 579012 - DNA, 15 bp, Homo sapiens
aaaagaaggggcact

SEQ ID NO: 579013 - DNA, 15 bp, Homo sapiens
caaaagaaggggcac

SEQ ID NO: 579014 - DNA, 15 bp, Homo sapiens
ccaaaagaaggggca

SEQ ID NO: 579015 - DNA, 15 bp, Homo sapiens
tccaaaagaaggggc

SEQ ID NO: 579016 - DNA, 15 bp, Homo sapiens
gtccaaaagaagggg

SEQ ID NO: 579017 - DNA, 15 bp, Homo sapiens
agtccaaaagaaggg

SEQ ID NO: 579018 - DNA, 15 bp, Homo sapiens
aagtccaaaagaagg

SEQ ID NO: 579019 - DNA, 15 bp, Homo sapiens
taagtccaaaagaag

SEQ ID NO: 579020 - DNA, 15 bp, Homo sapiens
ttaagtccaaaagaa

SEQ ID NO: 579021 - DNA, 15 bp, Homo sapiens
attaagtccaaaaga

SEQ ID NO: 579022 - DNA, 15 bp, Homo sapiens
tattaagtccaaaag

SEQ ID NO: 579023 - DNA, 15 bp, Homo sapiens
atattaagtccaaaa

SEQ ID NO: 579024 - DNA, 15 bp, Homo sapiens
catattaagtccaaa

SEQ ID NO: 579025 - DNA, 15 bp, Homo sapiens
gcatattaagtccaa

SEQ ID NO: 579026 - DNA, 15 bp, Homo sapiens
tgcatattaagtcca

SEQ ID NO: 579027 - DNA, 15 bp, Homo sapiens
atgcatattaagtcc

SEQ ID NO: 579028 - DNA, 15 bp, Homo sapiens
aatgcatattaagtc

SEQ ID NO: 579029 - DNA, 15 bp, Homo sapiens
taatgcatattaagt

SEQ ID NO: 579030 - DNA, 15 bp, Homo sapiens
ttaatgcatattaag

SEQ ID NO: 579031 - DNA, 15 bp, Homo sapiens
attaatgcatattaa

SEQ ID NO: 579032 - DNA, 15 bp, Homo sapiens
cattaatgcatatta

SEQ ID NO: 579033 - DNA, 15 bp, Homo sapiens
gcattaatgcatatt

SEQ ID NO: 579034 - DNA, 15 bp, Homo sapiens
tgcattaatgcatat

SEQ ID NO: 579035 - DNA, 15 bp, Homo sapiens
ttgcattaatgcata

SEQ ID NO: 579036 - DNA, 15 bp, Homo sapiens
attgcattaatgcat

SEQ ID NO: 579037 - DNA, 15 bp, Homo sapiens
aattgcattaatgca

SEQ ID NO: 579038 - DNA, 15 bp, Homo sapiens
caattgcattaatgc

SEQ ID NO: 579039 - DNA, 15 bp, Homo sapiens
acaattgcattaatg

SEQ ID NO: 579040 - DNA, 15 bp, Homo sapiens
gacaattgcattaat

SEQ ID NO: 579041 - DNA, 15 bp, Homo sapiens
ggacaattgcattaa

SEQ ID NO: 579042 - DNA, 15 bp, Homo sapiens
tggacaattgcatta

SEQ ID NO: 579043 - DNA, 15 bp, Homo sapiens
gtggacaattgcatt

SEQ ID NO: 579044 - DNA, 15 bp, Homo sapiens
ggtggacaattgcat

SEQ ID NO: 579045 - DNA, 15 bp, Homo sapiens
aggtggacaattgca

SEQ ID NO: 579046 - DNA, 15 bp, Homo sapiens
gaggtggacaattgc

SEQ ID NO: 579047 - DNA, 15 bp, Homo sapiens
agaggtggacaattg

SEQ ID NO: 579048 - DNA, 15 bp, Homo sapiens
aagaggtggacaatt

SEQ ID NO: 579049 - DNA, 15 bp, Homo sapiens
gaagaggtggacaat

SEQ ID NO: 579050 - DNA, 15 bp, Homo sapiens
agaagaggtggacaa

SEQ ID NO: 579051 - DNA, 15 bp, Homo sapiens
aagaagaggtggaca

SEQ ID NO: 579052 - DNA, 15 bp, Homo sapiens
aaagaagaggtggac

SEQ ID NO: 579053 - DNA, 15 bp, Homo sapiens
aaaagaagaggtgga

SEQ ID NO: 579054 - DNA, 15 bp, Homo sapiens
taaaagaagaggtgg

SEQ ID NO: 579055 - DNA, 15 bp, Homo sapiens
ctaaaagaagaggtg

SEQ ID NO: 579056 - DNA, 15 bp, Homo sapiens
tctaaaagaagaggt

SEQ ID NO: 579057 - DNA, 15 bp, Homo sapiens
gtctaaaagaagagg

SEQ ID NO: 579058 - DNA, 15 bp, Homo sapiens
agtctaaaagaagag

SEQ ID NO: 579059 - DNA, 15 bp, Homo sapiens
tagtctaaaagaaga

SEQ ID NO: 579060 - DNA, 15 bp, Homo sapiens
ttagtctaaaagaag

SEQ ID NO: 579061 - DNA, 15 bp, Homo sapiens
cttagtctaaaagaa

SEQ ID NO: 579062 - DNA, 15 bp, Homo sapiens
tcttagtctaaaaga

SEQ ID NO: 579063 - DNA, 15 bp, Homo sapiens
ctcttagtctaaaag

SEQ ID NO: 579064 - DNA, 15 bp, Homo sapiens
actcttagtctaaaa

SEQ ID NO: 579065 - DNA, 15 bp, Homo sapiens
aactcttagtctaaa

SEQ ID NO: 579066 - DNA, 15 bp, Homo sapiens
caactcttagtctaa

SEQ ID NO: 579067 - DNA, 15 bp, Homo sapiens
tcaactcttagtcta

SEQ ID NO: 579068 - DNA, 15 bp, Homo sapiens
atcaactcttagtct

SEQ ID NO: 579069 - DNA, 15 bp, Homo sapiens
gatcaactcttagtc

SEQ ID NO: 579070 - DNA, 15 bp, Homo sapiens
agatcaactcttagt

SEQ ID NO: 579071 - DNA, 15 bp, Homo sapiens
gagatcaactcttag

SEQ ID NO: 579072 - DNA, 15 bp, Homo sapiens
ggagatcaactctta

SEQ ID NO: 579073 - DNA, 15 bp, Homo sapiens
tggagatcaactctt

SEQ ID NO: 579074 - DNA, 15 bp, Homo sapiens
gtggagatcaactct

SEQ ID NO: 579075 - DNA, 15 bp, Homo sapiens
tgtggagatcaactc

SEQ ID NO: 579076 - DNA, 15 bp, Homo sapiens
atgtggagatcaact

SEQ ID NO: 579077 - DNA, 15 bp, Homo sapiens
tatgtggagatcaac

SEQ ID NO: 579078 - DNA, 15 bp, Homo sapiens
atatgtggagatcaa

SEQ ID NO: 579079 - DNA, 15 bp, Homo sapiens
aatatgtggagatca

SEQ ID NO: 579080 - DNA, 15 bp, Homo sapiens
gaatatgtggagatc

SEQ ID NO: 579081 - DNA, 15 bp, Homo sapiens
ggaatatgtggagat

SEQ ID NO: 579082 - DNA, 15 bp, Homo sapiens
gggaatatgtggaga

SEQ ID NO: 579083 - DNA, 15 bp, Homo sapiens
ggggaatatgtggag

SEQ ID NO: 579084 - DNA, 15 bp, Homo sapiens
aggggaatatgtgga

SEQ ID NO: 579085 - DNA, 15 bp, Homo sapiens
aaggggaatatgtgg

SEQ ID NO: 579086 - DNA, 15 bp, Homo sapiens
caaggggaatatgtg

SEQ ID NO: 579087 - DNA, 15 bp, Homo sapiens
gcaaggggaatatgt

SEQ ID NO: 579088 - DNA, 15 bp, Homo sapiens
tgcaaggggaatatg

SEQ ID NO: 579089 - DNA, 15 bp, Homo sapiens
atgcaaggggaatat

SEQ ID NO: 579090 - DNA, 15 bp, Homo sapiens
gatgcaaggggaata

SEQ ID NO: 579091 - DNA, 15 bp, Homo sapiens
tgatgcaaggggaat

SEQ ID NO: 579092 - DNA, 15 bp, Homo sapiens
ctgatgcaaggggaa

SEQ ID NO: 579093 - DNA, 15 bp, Homo sapiens
cctgatgcaagggga

SEQ ID NO: 579094 - DNA, 15 bp, Homo sapiens
ccctgatgcaagggg

SEQ ID NO: 579095 - DNA, 15 bp, Homo sapiens
cccctgatgcaaggg

SEQ ID NO: 579096 - DNA, 15 bp, Homo sapiens
gcccctgatgcaagg

SEQ ID NO: 579097 - DNA, 15 bp, Homo sapiens
tgcccctgatgcaag

SEQ ID NO: 579098 - DNA, 15 bp, Homo sapiens
atgcccctgatgcaa

SEQ ID NO: 579099 - DNA, 15 bp, Homo sapiens
catgcccctgatgca

SEQ ID NO: 579100 - DNA, 15 bp, Homo sapiens
acatgcccctgatgc

SEQ ID NO: 579101 - DNA, 15 bp, Homo sapiens
aacatgcccctgatg

SEQ ID NO: 579102 - DNA, 15 bp, Homo sapiens
taacatgcccctgat

SEQ ID NO: 579103 - DNA, 15 bp, Homo sapiens
ttaacatgcccctga

SEQ ID NO: 579104 - DNA, 15 bp, Homo sapiens
attaacatgcccctg

SEQ ID NO: 579105 - DNA, 15 bp, Homo sapiens
aattaacatgcccct

SEQ ID NO: 579106 - DNA, 15 bp, Homo sapiens
taattaacatgcccc

SEQ ID NO: 579107 - DNA, 15 bp, Homo sapiens
ataattaacatgccc

SEQ ID NO: 579108 - DNA, 15 bp, Homo sapiens
cataattaacatgcc

SEQ ID NO: 579109 - DNA, 15 bp, Homo sapiens
tcataattaacatgc

SEQ ID NO: 579110 - DNA, 15 bp, Homo sapiens
ttcataattaacatg

SEQ ID NO: 579111 - DNA, 15 bp, Homo sapiens
attcataattaacat

SEQ ID NO: 579112 - DNA, 15 bp, Homo sapiens
cattcataattaaca

SEQ ID NO: 579113 - DNA, 15 bp, Homo sapiens
tcattcataattaac

SEQ ID NO: 579114 - DNA, 15 bp, Homo sapiens
ttcattcataattaa

SEQ ID NO: 579115 - DNA, 15 bp, Homo sapiens
gttcattcataatta

SEQ ID NO: 579116 - DNA, 15 bp, Homo sapiens
ggttcattcataatt

SEQ ID NO: 579117 - DNA, 15 bp, Homo sapiens
gggttcattcataat

SEQ ID NO: 579118 - DNA, 15 bp, Homo sapiens
agggttcattcataa

SEQ ID NO: 579119 - DNA, 15 bp, Homo sapiens
aagggttcattcata

SEQ ID NO: 579120 - DNA, 15 bp, Homo sapiens
aaagggttcattcat

SEQ ID NO: 579121 - DNA, 15 bp, Homo sapiens
aaaagggttcattca

SEQ ID NO: 579122 - DNA, 15 bp, Homo sapiens
gaaaagggttcattc

SEQ ID NO: 579123 - DNA, 15 bp, Homo sapiens
agaaaagggttcatt

SEQ ID NO: 579124 - DNA, 15 bp, Homo sapiens
aagaaaagggttcat

SEQ ID NO: 579125 - DNA, 15 bp, Homo sapiens
aaagaaaagggttca

SEQ ID NO: 579126 - DNA, 15 bp, Homo sapiens
aaaagaaaagggttc

SEQ ID NO: 579127 - DNA, 15 bp, Homo sapiens
taaaagaaaagggtt

SEQ ID NO: 579128 - DNA, 15 bp, Homo sapiens
ttaaaagaaaagggt

SEQ ID NO: 579129 - DNA, 15 bp, Homo sapiens
attaaaagaaaaggg

SEQ ID NO: 579130 - DNA, 15 bp, Homo sapiens
tattaaaagaaaagg

SEQ ID NO: 579131 - DNA, 15 bp, Homo sapiens
atattaaaagaaaag

SEQ ID NO: 579132 - DNA, 15 bp, Homo sapiens
aatattaaaagaaaa

SEQ ID NO: 579133 - DNA, 15 bp, Homo sapiens
taatattaaaagaaa

SEQ ID NO: 579134 - DNA, 15 bp, Homo sapiens
ttaatattaaaagaa

SEQ ID NO: 579135 - DNA, 15 bp, Homo sapiens
attaatattaaaaga

SEQ ID NO: 579136 - DNA, 15 bp, Homo sapiens
cattaatattaaaag

SEQ ID NO: 579137 - DNA, 15 bp, Homo sapiens
acattaatattaaaa

SEQ ID NO: 579138 - DNA, 15 bp, Homo sapiens
gacattaatattaaa

SEQ ID NO: 579139 - DNA, 15 bp, Homo sapiens
tgacattaatattaa

SEQ ID NO: 579140 - DNA, 15 bp, Homo sapiens
atgacattaatatta

SEQ ID NO: 579141 - DNA, 15 bp, Homo sapiens
tatgacattaatatt

SEQ ID NO: 579142 - DNA, 15 bp, Homo sapiens
ttatgacattaatat

SEQ ID NO: 579143 - DNA, 15 bp, Homo sapiens
attatgacattaata

SEQ ID NO: 579144 - DNA, 15 bp, Homo sapiens
aattatgacattaat

SEQ ID NO: 579145 - DNA, 15 bp, Homo sapiens
caattatgacattaa

SEQ ID NO: 579146 - DNA, 15 bp, Homo sapiens
acaattatgacatta

SEQ ID NO: 579147 - DNA, 15 bp, Homo sapiens
tacaattatgacatt

SEQ ID NO: 579148 - DNA, 15 bp, Homo sapiens
atacaattatgacat

SEQ ID NO: 579149 - DNA, 15 bp, Homo sapiens
aatacaattatgaca

SEQ ID NO: 579150 - DNA, 15 bp, Homo sapiens
aaatacaattatgac

SEQ ID NO: 579151 - DNA, 15 bp, Homo sapiens
cacaaatacaattat

SEQ ID NO: 579152 - DNA, 15 bp, Homo sapiens
ccacaaatacaatta

SEQ ID NO: 579153 - DNA, 15 bp, Homo sapiens
tccacaaatacaatt

SEQ ID NO: 579154 - DNA, 15 bp, Homo sapiens
gtccacaaatacaat

SEQ ID NO: 579155 - DNA, 15 bp, Homo sapiens
ggtccacaaatacaa

SEQ ID NO: 579156 - DNA, 15 bp, Homo sapiens
aggtccacaaataca

SEQ ID NO: 579157 - DNA, 15 bp, Homo sapiens
caggtccacaaatac

SEQ ID NO: 579158 - DNA, 15 bp, Homo sapiens
acaggtccacaaata

SEQ ID NO: 579159 - DNA, 15 bp, Homo sapiens
cacaggtccacaaat

SEQ ID NO: 579160 - DNA, 15 bp, Homo sapiens
acacaggtccacaaa

SEQ ID NO: 579161 - DNA, 15 bp, Homo sapiens
tacacaggtccacaa

SEQ ID NO: 579162 - DNA, 15 bp, Homo sapiens
ctacacaggtccaca

SEQ ID NO: 579163 - DNA, 15 bp, Homo sapiens
cctacacaggtccac

SEQ ID NO: 579164 - DNA, 15 bp, Homo sapiens
tcctacacaggtcca

SEQ ID NO: 579165 - DNA, 15 bp, Homo sapiens
ctcctacacaggtcc

SEQ ID NO: 579166 - DNA, 15 bp, Homo sapiens
tctcctacacaggtc

SEQ ID NO: 579167 - DNA, 15 bp, Homo sapiens
ttctcctacacaggt

SEQ ID NO: 579168 - DNA, 15 bp, Homo sapiens
tttctcctacacagg

SEQ ID NO: 579169 - DNA, 15 bp, Homo sapiens
ttttctcctacacag

SEQ ID NO: 579170 - DNA, 15 bp, Homo sapiens
tttttctcctacaca

SEQ ID NO: 579171 - DNA, 15 bp, Homo sapiens
ctttttctcctacac

SEQ ID NO: 579172 - DNA, 15 bp, Homo sapiens
tctttttctcctaca

SEQ ID NO: 579173 - DNA, 15 bp, Homo sapiens
gtctttttctcctac

SEQ ID NO: 579174 - DNA, 15 bp, Homo sapiens
ggtctttttctccta

SEQ ID NO: 579175 - DNA, 15 bp, Homo sapiens
gggtctttttctcct

SEQ ID NO: 579176 - DNA, 15 bp, Homo sapiens
agggtctttttctcc

SEQ ID NO: 579177 - DNA, 15 bp, Homo sapiens
tagggtctttttctc

SEQ ID NO: 579178 - DNA, 15 bp, Homo sapiens
atagggtctttttct

SEQ ID NO: 579179 - DNA, 15 bp, Homo sapiens
catagggtctttttc

SEQ ID NO: 579180 - DNA, 15 bp, Homo sapiens
acatagggtcttttt

SEQ ID NO: 579181 - DNA, 15 bp, Homo sapiens
aacatagggtctttt

SEQ ID NO: 579182 - DNA, 15 bp, Homo sapiens
gaacatagggtcttt

SEQ ID NO: 579183 - DNA, 15 bp, Homo sapiens
ggaacatagggtctt

SEQ ID NO: 579184 - DNA, 15 bp, Homo sapiens
aggaacatagggtct

SEQ ID NO: 579185 - DNA, 15 bp, Homo sapiens
gaggaacatagggtc

SEQ ID NO: 579186 - DNA, 15 bp, Homo sapiens
ggaggaacatagggt

SEQ ID NO: 579187 - DNA, 15 bp, Homo sapiens
gggaggaacataggg

SEQ ID NO: 579188 - DNA, 15 bp, Homo sapiens
tgggaggaacatagg

SEQ ID NO: 579189 - DNA, 15 bp, Homo sapiens
atgggaggaacatag

SEQ ID NO: 579190 - DNA, 15 bp, Homo sapiens
aatgggaggaacata

SEQ ID NO: 579191 - DNA, 15 bp, Homo sapiens
taatgggaggaacat

SEQ ID NO: 579192 - DNA, 15 bp, Homo sapiens
gtaatgggaggaaca

SEQ ID NO: 579193 - DNA, 15 bp, Homo sapiens
ggtaatgggaggaac

SEQ ID NO: 579194 - DNA, 15 bp, Homo sapiens
gggtaatgggaggaa

SEQ ID NO: 579195 - DNA, 15 bp, Homo sapiens
agggtaatgggagga

SEQ ID NO: 579196 - DNA, 15 bp, Homo sapiens
aagggtaatgggagg

SEQ ID NO: 579197 - DNA, 15 bp, Homo sapiens
aaagggtaatgggag

SEQ ID NO: 579198 - DNA, 15 bp, Homo sapiens
caaagggtaatggga

SEQ ID NO: 579199 - DNA, 15 bp, Homo sapiens
ccaaagggtaatggg

SEQ ID NO: 579200 - DNA, 15 bp, Homo sapiens
tccaaagggtaatgg

SEQ ID NO: 579201 - DNA, 15 bp, Homo sapiens
atccaaagggtaatg

SEQ ID NO: 579202 - DNA, 15 bp, Homo sapiens
aatccaaagggtaat

SEQ ID NO: 579203 - DNA, 15 bp, Homo sapiens
caatccaaagggtaa

SEQ ID NO: 579204 - DNA, 15 bp, Homo sapiens
gcaatccaaagggta

SEQ ID NO: 579205 - DNA, 15 bp, Homo sapiens
agcaatccaaagggt

SEQ ID NO: 579206 - DNA, 15 bp, Homo sapiens
cagcaatccaaaggg

SEQ ID NO: 579207 - DNA, 15 bp, Homo sapiens
gcagcaatccaaagg

SEQ ID NO: 579208 - DNA, 15 bp, Homo sapiens
tgtaaaaaggggcca

SEQ ID NO: 579209 - DNA, 15 bp, Homo sapiens
ctgtaaaaaggggcc

SEQ ID NO: 579210 - DNA, 15 bp, Homo sapiens
tctgtaaaaaggggc

SEQ ID NO: 579211 - DNA, 15 bp, Homo sapiens
gtctgtaaaaagggg

SEQ ID NO: 579212 - DNA, 15 bp, Homo sapiens
agtctgtaaaaaggg

SEQ ID NO: 579213 - DNA, 15 bp, Homo sapiens
tagtctgtaaaaagg

SEQ ID NO: 579214 - DNA, 15 bp, Homo sapiens
atagtctgtaaaaag

SEQ ID NO: 579215 - DNA, 15 bp, Homo sapiens
aatagtctgtaaaaa

SEQ ID NO: 579216 - DNA, 15 bp, Homo sapiens
caatagtctgtaaaa

SEQ ID NO: 579217 - DNA, 15 bp, Homo sapiens
gcaatagtctgtaaa

SEQ ID NO: 579218 - DNA, 15 bp, Homo sapiens
agcaatagtctgtaa

SEQ ID NO: 579219 - DNA, 15 bp, Homo sapiens
gagcaatagtctgta

SEQ ID NO: 579220 - DNA, 15 bp, Homo sapiens
tgagcaatagtctgt

SEQ ID NO: 579221 - DNA, 15 bp, Homo sapiens
gtgagcaatagtctg

SEQ ID NO: 579222 - DNA, 15 bp, Homo sapiens
tgtgagcaatagtct

SEQ ID NO: 579223 - DNA, 15 bp, Homo sapiens
ttgtgagcaatagtc

SEQ ID NO: 579224 - DNA, 15 bp, Homo sapiens
attgtgagcaatagt

SEQ ID NO: 579225 - DNA, 15 bp, Homo sapiens
gattgtgagcaatag

SEQ ID NO: 579226 - DNA, 15 bp, Homo sapiens
agattgtgagcaata

SEQ ID NO: 579227 - DNA, 15 bp, Homo sapiens
gagattgtgagcaat

SEQ ID NO: 579228 - DNA, 15 bp, Homo sapiens
tgagattgtgagcaa

SEQ ID NO: 579229 - DNA, 15 bp, Homo sapiens
ctgagattgtgagca

SEQ ID NO: 579230 - DNA, 15 bp, Homo sapiens
cctgagattgtgagc

SEQ ID NO: 579231 - DNA, 15 bp, Homo sapiens
acctgagattgtgag

SEQ ID NO: 579232 - DNA, 15 bp, Homo sapiens
cacctgagattgtga

SEQ ID NO: 579233 - DNA, 15 bp, Homo sapiens
acacctgagattgtg

SEQ ID NO: 579234 - DNA, 15 bp, Homo sapiens
gacacctgagattgt

SEQ ID NO: 579235 - DNA, 15 bp, Homo sapiens
ggacacctgagattg

SEQ ID NO: 579236 - DNA, 15 bp, Homo sapiens
tggacacctgagatt

SEQ ID NO: 579237 - DNA, 15 bp, Homo sapiens
atggacacctgagat

SEQ ID NO: 579238 - DNA, 15 bp, Homo sapiens
tatggacacctgaga

SEQ ID NO: 579239 - DNA, 15 bp, Homo sapiens
atatggacacctgag

SEQ ID NO: 579240 - DNA, 15 bp, Homo sapiens
aatatggacacctga

SEQ ID NO: 579241 - DNA, 15 bp, Homo sapiens
aaatatggacacctg

SEQ ID NO: 579242 - DNA, 15 bp, Homo sapiens
caaatatggacacct

SEQ ID NO: 579243 - DNA, 15 bp, Homo sapiens
gcaaatatggacacc

SEQ ID NO: 579244 - DNA, 15 bp, Homo sapiens
tgcaaatatggacac

SEQ ID NO: 579245 - DNA, 15 bp, Homo sapiens
ctgcaaatatggaca

SEQ ID NO: 579246 - DNA, 15 bp, Homo sapiens
gctgcaaatatggac

SEQ ID NO: 579247 - DNA, 15 bp, Homo sapiens
agctgcaaatatgga

SEQ ID NO: 579248 - DNA, 15 bp, Homo sapiens
tagctgcaaatatgg

SEQ ID NO: 579249 - DNA, 15 bp, Homo sapiens
atagctgcaaatatg

SEQ ID NO: 579250 - DNA, 15 bp, Homo sapiens
aatagctgcaaatat

SEQ ID NO: 579251 - DNA, 15 bp, Homo sapiens
taatagctgcaaata

SEQ ID NO: 579252 - DNA, 15 bp, Homo sapiens
ctaatagctgcaaat

SEQ ID NO: 579253 - DNA, 15 bp, Homo sapiens
cctaatagctgcaaa

SEQ ID NO: 579254 - DNA, 15 bp, Homo sapiens
acctaatagctgcaa

SEQ ID NO: 579255 - DNA, 15 bp, Homo sapiens
tacctaatagctgca

SEQ ID NO: 579256 - DNA, 15 bp, Homo sapiens
ttacctaatagctgc

SEQ ID NO: 579257 - DNA, 15 bp, Homo sapiens
cttacctaatagctg

SEQ ID NO: 579258 - DNA, 15 bp, Homo sapiens
tcttacctaatagct

SEQ ID NO: 579259 - DNA, 15 bp, Homo sapiens
atcttacctaatagc

SEQ ID NO: 579260 - DNA, 15 bp, Homo sapiens
aatcttacctaatag

SEQ ID NO: 579261 - DNA, 15 bp, Homo sapiens
caatcttacctaata

SEQ ID NO: 579262 - DNA, 15 bp, Homo sapiens
acaatcttacctaat

SEQ ID NO: 579263 - DNA, 15 bp, Homo sapiens
cacaatcttacctaa

SEQ ID NO: 579264 - DNA, 15 bp, Homo sapiens
gcacaatcttaccta

SEQ ID NO: 579265 - DNA, 15 bp, Homo sapiens
agcacaatcttacct

SEQ ID NO: 579266 - DNA, 15 bp, Homo sapiens
cagcacaatcttacc

SEQ ID NO: 579267 - DNA, 15 bp, Homo sapiens
acagcacaatcttac

SEQ ID NO: 579268 - DNA, 15 bp, Homo sapiens
gacagcacaatctta

SEQ ID NO: 579269 - DNA, 15 bp, Homo sapiens
agacagcacaatctt

SEQ ID NO: 579270 - DNA, 15 bp, Homo sapiens
gagacagcacaatct

SEQ ID NO: 579271 - DNA, 15 bp, Homo sapiens
ggagacagcacaatc

SEQ ID NO: 579272 - DNA, 15 bp, Homo sapiens
gggagacagcacaat

SEQ ID NO: 579273 - DNA, 15 bp, Homo sapiens
agggagacagcacaa

SEQ ID NO: 579274 - DNA, 15 bp, Homo sapiens
gagggagacagcaca

SEQ ID NO: 579275 - DNA, 15 bp, Homo sapiens
agagggagacagcac

SEQ ID NO: 579276 - DNA, 15 bp, Homo sapiens
aagagggagacagca

SEQ ID NO: 579277 - DNA, 15 bp, Homo sapiens
gaagagggagacagc

SEQ ID NO: 579278 - DNA, 15 bp, Homo sapiens
taacacagaaggggc

SEQ ID NO: 579279 - DNA, 15 bp, Homo sapiens
ataacacagaagggg

SEQ ID NO: 579280 - DNA, 15 bp, Homo sapiens
aataacacagaaggg

SEQ ID NO: 579281 - DNA, 15 bp, Homo sapiens
taataacacagaagg

SEQ ID NO: 579282 - DNA, 15 bp, Homo sapiens
ttaataacacagaag

SEQ ID NO: 579283 - DNA, 15 bp, Homo sapiens
attaataacacagaa

SEQ ID NO: 579284 - DNA, 15 bp, Homo sapiens
tattaataacacaga

SEQ ID NO: 579285 - DNA, 15 bp, Homo sapiens
ttattaataacacag

SEQ ID NO: 579286 - DNA, 15 bp, Homo sapiens
tttattaataacaca

SEQ ID NO: 579287 - DNA, 15 bp, Homo sapiens
gtttattaataacac

SEQ ID NO: 579288 - DNA, 15 bp, Homo sapiens
tgtttattaataaca

SEQ ID NO: 579289 - DNA, 15 bp, Homo sapiens
gtgtttattaataac

SEQ ID NO: 579290 - DNA, 15 bp, Homo sapiens
tgtgtttattaataa

SEQ ID NO: 579291 - DNA, 15 bp, Homo sapiens
ctgtgtttattaata

SEQ ID NO: 579292 - DNA, 15 bp, Homo sapiens
actgtgtttattaat

SEQ ID NO: 579293 - DNA, 15 bp, Homo sapiens
tactgtgtttattaa

SEQ ID NO: 579294 - DNA, 15 bp, Homo sapiens
gtactgtgtttatta

SEQ ID NO: 579295 - DNA, 15 bp, Homo sapiens
agtactgtgtttatt

SEQ ID NO: 579296 - DNA, 15 bp, Homo sapiens
cagtactgtgtttat

SEQ ID NO: 579297 - DNA, 15 bp, Homo sapiens
tcagtactgtgttta

SEQ ID NO: 579298 - DNA, 15 bp, Homo sapiens
atcagtactgtgttt

SEQ ID NO: 579299 - DNA, 15 bp, Homo sapiens
aatcagtactgtgtt

SEQ ID NO: 579300 - DNA, 15 bp, Homo sapiens
caatcagtactgtgt

SEQ ID NO: 579301 - DNA, 15 bp, Homo sapiens
acaatcagtactgtg

SEQ ID NO: 579302 - DNA, 15 bp, Homo sapiens
gacaatcagtactgt

SEQ ID NO: 579303 - DNA, 15 bp, Homo sapiens
ggacaatcagtactg

SEQ ID NO: 579304 - DNA, 15 bp, Homo sapiens
gggacaatcagtact

SEQ ID NO: 579305 - DNA, 15 bp, Homo sapiens
tgggacaatcagtac

SEQ ID NO: 579306 - DNA, 15 bp, Homo sapiens
atgggacaatcagta

SEQ ID NO: 579307 - DNA, 15 bp, Homo sapiens
aatgggacaatcagt

SEQ ID NO: 579308 - DNA, 15 bp, Homo sapiens
aaatgggacaatcag

SEQ ID NO: 579309 - DNA, 15 bp, Homo sapiens
aaaatgggacaatca

SEQ ID NO: 579310 - DNA, 15 bp, Homo sapiens
aaaaatgggacaatc

SEQ ID NO: 579311 - DNA, 15 bp, Homo sapiens
gaaaaatgggacaat

SEQ ID NO: 579312 - DNA, 15 bp, Homo sapiens
tgaaaaatgggacaa

SEQ ID NO: 579313 - DNA, 15 bp, Homo sapiens
ctgaaaaatgggaca

SEQ ID NO: 579314 - DNA, 15 bp, Homo sapiens
gctgaaaaatgggac

SEQ ID NO: 579315 - DNA, 15 bp, Homo sapiens
ggctgaaaaatggga

SEQ ID NO: 579316 - DNA, 15 bp, Homo sapiens
gggctgaaaaatggg

SEQ ID NO: 579317 - DNA, 15 bp, Homo sapiens
tgggctgaaaaatgg

SEQ ID NO: 579318 - DNA, 15 bp, Homo sapiens
atgggctgaaaaatg

SEQ ID NO: 579319 - DNA, 15 bp, Homo sapiens
gatgggctgaaaaat

SEQ ID NO: 579320 - DNA, 15 bp, Homo sapiens
tgatgggctgaaaaa

SEQ ID NO: 579321 - DNA, 15 bp, Homo sapiens
ctgatgggctgaaaa

SEQ ID NO: 579322 - DNA, 15 bp, Homo sapiens
actgatgggctgaaa

SEQ ID NO: 579323 - DNA, 15 bp, Homo sapiens
gactgatgggctgaa

SEQ ID NO: 579324 - DNA, 15 bp, Homo sapiens
ggactgatgggctga

SEQ ID NO: 579325 - DNA, 15 bp, Homo sapiens
tggactgatgggctg

SEQ ID NO: 579326 - DNA, 15 bp, Homo sapiens
ttggactgatgggct

SEQ ID NO: 579327 - DNA, 15 bp, Homo sapiens
cttggactgatgggc

SEQ ID NO: 579328 - DNA, 15 bp, Homo sapiens
tcttggactgatggg

SEQ ID NO: 579329 - DNA, 15 bp, Homo sapiens
atcttggactgatgg

SEQ ID NO: 579330 - DNA, 15 bp, Homo sapiens
gatcttggactgatg

SEQ ID NO: 579331 - DNA, 15 bp, Homo sapiens
agatcttggactgat

SEQ ID NO: 579332 - DNA, 15 bp, Homo sapiens
gagatcttggactga

SEQ ID NO: 579333 - DNA, 15 bp, Homo sapiens
ggagatcttggactg

SEQ ID NO: 579334 - DNA, 15 bp, Homo sapiens
gggagatcttggact

SEQ ID NO: 579335 - DNA, 15 bp, Homo sapiens
agggagatcttggac

SEQ ID NO: 579336 - DNA, 15 bp, Homo sapiens
tagggagatcttgga

SEQ ID NO: 579337 - DNA, 15 bp, Homo sapiens
gtagggagatcttgg

SEQ ID NO: 579338 - DNA, 15 bp, Homo sapiens
ggtagggagatcttg

SEQ ID NO: 579339 - DNA, 15 bp, Homo sapiens
tggtagggagatctt

SEQ ID NO: 579340 - DNA, 15 bp, Homo sapiens
gtggtagggagatct

SEQ ID NO: 579341 - DNA, 15 bp, Homo sapiens
agtggtagggagatc

SEQ ID NO: 579342 - DNA, 15 bp, Homo sapiens
aagtggtagggagat

SEQ ID NO: 579343 - DNA, 15 bp, Homo sapiens
aaagtggtagggaga

SEQ ID NO: 579344 - DNA, 15 bp, Homo sapiens
caaagtggtagggag

SEQ ID NO: 579345 - DNA, 15 bp, Homo sapiens
ccaaagtggtaggga

SEQ ID NO: 579346 - DNA, 15 bp, Homo sapiens
accaaagtggtaggg

SEQ ID NO: 579347 - DNA, 15 bp, Homo sapiens
caccaaagtggtagg

SEQ ID NO: 579348 - DNA, 15 bp, Homo sapiens
acaccaaagtggtag

SEQ ID NO: 579349 - DNA, 15 bp, Homo sapiens
cacaccaaagtggta

SEQ ID NO: 579350 - DNA, 15 bp, Homo sapiens
acacaccaaagtggt

SEQ ID NO: 579351 - DNA, 15 bp, Homo sapiens
aacacaccaaagtgg

SEQ ID NO: 579352 - DNA, 15 bp, Homo sapiens
caacacaccaaagtg

SEQ ID NO: 579353 - DNA, 15 bp, Homo sapiens
ccaacacaccaaagt

SEQ ID NO: 579354 - DNA, 15 bp, Homo sapiens
accaacacaccaaag

SEQ ID NO: 579355 - DNA, 15 bp, Homo sapiens
caccaacacaccaaa

SEQ ID NO: 579356 - DNA, 15 bp, Homo sapiens
gcaccaacacaccaa

SEQ ID NO: 579357 - DNA, 15 bp, Homo sapiens
tgcaccaacacacca

SEQ ID NO: 579358 - DNA, 15 bp, Homo sapiens
ctgcaccaacacacc

SEQ ID NO: 579359 - DNA, 15 bp, Homo sapiens
actgcaccaacacac

SEQ ID NO: 579360 - DNA, 15 bp, Homo sapiens
cactgcaccaacaca

SEQ ID NO: 579361 - DNA, 15 bp, Homo sapiens
acactgcaccaacac

SEQ ID NO: 579362 - DNA, 15 bp, Homo sapiens
aacactgcaccaaca

SEQ ID NO: 579363 - DNA, 15 bp, Homo sapiens
caacactgcaccaac

SEQ ID NO: 579364 - DNA, 15 bp, Homo sapiens
tcaacactgcaccaa

SEQ ID NO: 579365 - DNA, 15 bp, Homo sapiens
gtcaacactgcacca

SEQ ID NO: 579366 - DNA, 15 bp, Homo sapiens
agtcaacactgcacc

SEQ ID NO: 579367 - DNA, 15 bp, Homo sapiens
tagtcaacactgcac

SEQ ID NO: 579368 - DNA, 15 bp, Homo sapiens
atagtcaacactgca

SEQ ID NO: 579369 - DNA, 15 bp, Homo sapiens
catagtcaacactgc

SEQ ID NO: 579370 - DNA, 15 bp, Homo sapiens
tcatagtcaacactg

SEQ ID NO: 579371 - DNA, 15 bp, Homo sapiens
ttcatagtcaacact

SEQ ID NO: 579372 - DNA, 15 bp, Homo sapiens
tttcatagtcaacac

SEQ ID NO: 579373 - DNA, 15 bp, Homo sapiens
ttttcatagtcaaca

SEQ ID NO: 579374 - DNA, 15 bp, Homo sapiens
cttttcatagtcaac

SEQ ID NO: 579375 - DNA, 15 bp, Homo sapiens
gcttttcatagtcaa

SEQ ID NO: 579376 - DNA, 15 bp, Homo sapiens
tgcttttcatagtca

SEQ ID NO: 579377 - DNA, 15 bp, Homo sapiens
ctgcttttcatagtc

SEQ ID NO: 579378 - DNA, 15 bp, Homo sapiens
cctgcttttcatagt

SEQ ID NO: 579379 - DNA, 15 bp, Homo sapiens
gcctgcttttcatag

SEQ ID NO: 579380 - DNA, 15 bp, Homo sapiens
ggcctgcttttcata

SEQ ID NO: 579381 - DNA, 15 bp, Homo sapiens
aggcctgcttttcat

SEQ ID NO: 579382 - DNA, 15 bp, Homo sapiens
caggcctgcttttca

SEQ ID NO: 579383 - DNA, 15 bp, Homo sapiens
tcaggcctgcttttc

SEQ ID NO: 579384 - DNA, 15 bp, Homo sapiens
ttcaggcctgctttt

SEQ ID NO: 579385 - DNA, 15 bp, Homo sapiens
gttcaggcctgcttt

SEQ ID NO: 579386 - DNA, 15 bp, Homo sapiens
agttcaggcctgctt

SEQ ID NO: 579387 - DNA, 15 bp, Homo sapiens
tagttcaggcctgct

SEQ ID NO: 579388 - DNA, 15 bp, Homo sapiens
ctagttcaggcctgc

SEQ ID NO: 579389 - DNA, 15 bp, Homo sapiens
cctagttcaggcctg

SEQ ID NO: 579390 - DNA, 15 bp, Homo sapiens
acctagttcaggcct

SEQ ID NO: 579391 - DNA, 15 bp, Homo sapiens
cacctagttcaggcc

SEQ ID NO: 579392 - DNA, 15 bp, Homo sapiens
ccacctagttcaggc

SEQ ID NO: 579393 - DNA, 15 bp, Homo sapiens
tccacctagttcagg

SEQ ID NO: 579394 - DNA, 15 bp, Homo sapiens
atccacctagttcag

SEQ ID NO: 579395 - DNA, 15 bp, Homo sapiens
tatccacctagttca

SEQ ID NO: 579396 - DNA, 15 bp, Homo sapiens
ttatccacctagttc

SEQ ID NO: 579397 - DNA, 15 bp, Homo sapiens
cttatccacctagtt

SEQ ID NO: 579398 - DNA, 15 bp, Homo sapiens
gcttatccacctagt

SEQ ID NO: 579399 - DNA, 15 bp, Homo sapiens
ggcttatccacctag

SEQ ID NO: 579400 - DNA, 15 bp, Homo sapiens
aggcttatccaccta

SEQ ID NO: 579401 - DNA, 15 bp, Homo sapiens
aaggcttatccacct

SEQ ID NO: 579402 - DNA, 15 bp, Homo sapiens
gaaggcttatccacc

SEQ ID NO: 579403 - DNA, 15 bp, Homo sapiens
tgaaggcttatccac

SEQ ID NO: 579404 - DNA, 15 bp, Homo sapiens
gtgaaggcttatcca

SEQ ID NO: 579405 - DNA, 15 bp, Homo sapiens
agtgaaggcttatcc

SEQ ID NO: 579406 - DNA, 15 bp, Homo sapiens
gagtgaaggcttatc

SEQ ID NO: 579407 - DNA, 15 bp, Homo sapiens
tgagtgaaggcttat

SEQ ID NO: 579408 - DNA, 15 bp, Homo sapiens
atgagtgaaggctta

SEQ ID NO: 579409 - DNA, 15 bp, Homo sapiens
aatgagtgaaggctt

SEQ ID NO: 579410 - DNA, 15 bp, Homo sapiens
aaatgagtgaaggct

SEQ ID NO: 579411 - DNA, 15 bp, Homo sapiens
aaaatgagtgaaggc

SEQ ID NO: 579412 - DNA, 15 bp, Homo sapiens
gaaaatgagtgaagg

SEQ ID NO: 579413 - DNA, 15 bp, Homo sapiens
agaaaatgagtgaag

SEQ ID NO: 579414 - DNA, 15 bp, Homo sapiens
aagaaaatgagtgaa

SEQ ID NO: 579415 - DNA, 15 bp, Homo sapiens
aaagaaaatgagtga

SEQ ID NO: 579416 - DNA, 15 bp, Homo sapiens
gaaagaaaatgagtg

SEQ ID NO: 579417 - DNA, 15 bp, Homo sapiens
tgaaagaaaatgagt

SEQ ID NO: 579418 - DNA, 15 bp, Homo sapiens
atgaaagaaaatgag

SEQ ID NO: 579419 - DNA, 15 bp, Homo sapiens
aatgaaagaaaatga

SEQ ID NO: 579420 - DNA, 15 bp, Homo sapiens
aaatgaaagaaaatg

SEQ ID NO: 579421 - DNA, 15 bp, Homo sapiens
taaatgaaagaaaat

SEQ ID NO: 579422 - DNA, 15 bp, Homo sapiens
ataaatgaaagaaaa

SEQ ID NO: 579423 - DNA, 15 bp, Homo sapiens
aataaatgaaagaaa

SEQ ID NO: 579424 - DNA, 15 bp, Homo sapiens
taataaatgaaagaa

SEQ ID NO: 579425 - DNA, 15 bp, Homo sapiens
atatacaaaggggac

SEQ ID NO: 579426 - DNA, 15 bp, Homo sapiens
aatatacaaagggga

SEQ ID NO: 579427 - DNA, 15 bp, Homo sapiens
caatatacaaagggg

SEQ ID NO: 579428 - DNA, 15 bp, Homo sapiens
acaatatacaaaggg

SEQ ID NO: 579429 - DNA, 15 bp, Homo sapiens
aacaatatacaaagg

SEQ ID NO: 579430 - DNA, 15 bp, Homo sapiens
taacaatatacaaag

SEQ ID NO: 579431 - DNA, 15 bp, Homo sapiens
ataacaatatacaaa

SEQ ID NO: 579432 - DNA, 15 bp, Homo sapiens
aataacaatatacaa

SEQ ID NO: 579433 - DNA, 15 bp, Homo sapiens
caataacaatataca

SEQ ID NO: 579434 - DNA, 15 bp, Homo sapiens
acaataacaatatac

SEQ ID NO: 579435 - DNA, 15 bp, Homo sapiens
tacaataacaatata

SEQ ID NO: 579436 - DNA, 15 bp, Homo sapiens
ttacaataacaatat

SEQ ID NO: 579437 - DNA, 15 bp, Homo sapiens
tttacaataacaata

SEQ ID NO: 579438 - DNA, 15 bp, Homo sapiens
ctttacaataacaat

SEQ ID NO: 579439 - DNA, 15 bp, Homo sapiens
actttacaataacaa

SEQ ID NO: 579440 - DNA, 15 bp, Homo sapiens
cactttacaataaca

SEQ ID NO: 579441 - DNA, 15 bp, Homo sapiens
gcactttacaataac

SEQ ID NO: 579442 - DNA, 15 bp, Homo sapiens
ggcactttacaataa

SEQ ID NO: 579443 - DNA, 15 bp, Homo sapiens
tggcactttacaata

SEQ ID NO: 579444 - DNA, 15 bp, Homo sapiens
ttggcactttacaat

SEQ ID NO: 579445 - DNA, 15 bp, Homo sapiens
tttggcactttacaa

SEQ ID NO: 579446 - DNA, 15 bp, Homo sapiens
atttggcactttaca

SEQ ID NO: 579447 - DNA, 15 bp, Homo sapiens
catttggcactttac

SEQ ID NO: 579448 - DNA, 15 bp, Homo sapiens
gcatttggcacttta

SEQ ID NO: 579449 - DNA, 15 bp, Homo sapiens
ggcatttggcacttt

SEQ ID NO: 579450 - DNA, 15 bp, Homo sapiens
tggcatttggcactt

SEQ ID NO: 579451 - DNA, 15 bp, Homo sapiens
ctggcatttggcact

SEQ ID NO: 579452 - DNA, 15 bp, Homo sapiens
cctggcatttggcac

SEQ ID NO: 579453 - DNA, 15 bp, Homo sapiens
tcctggcatttggca

SEQ ID NO: 579454 - DNA, 15 bp, Homo sapiens
atcctggcatttggc

SEQ ID NO: 579455 - DNA, 15 bp, Homo sapiens
tatcctggcatttgg

SEQ ID NO: 579456 - DNA, 15 bp, Homo sapiens
gtatcctggcatttg

SEQ ID NO: 579457 - DNA, 15 bp, Homo sapiens
tgtatcctggcattt

SEQ ID NO: 579458 - DNA, 15 bp, Homo sapiens
ctgtatcctggcatt

SEQ ID NO: 579459 - DNA, 15 bp, Homo sapiens
gctgtatcctggcat

SEQ ID NO: 579460 - DNA, 15 bp, Homo sapiens
ggctgtatcctggca

SEQ ID NO: 579461 - DNA, 15 bp, Homo sapiens
tggctgtatcctggc

SEQ ID NO: 579462 - DNA, 15 bp, Homo sapiens
ctggctgtatcctgg

SEQ ID NO: 579463 - DNA, 15 bp, Homo sapiens
tctggctgtatcctg

SEQ ID NO: 579464 - DNA, 15 bp, Homo sapiens
ttctggctgtatcct

SEQ ID NO: 579465 - DNA, 15 bp, Homo sapiens
tttctggctgtatcc

SEQ ID NO: 579466 - DNA, 15 bp, Homo sapiens
ttttctggctgtatc

SEQ ID NO: 579467 - DNA, 15 bp, Homo sapiens
tttttctggctgtat

SEQ ID NO: 579468 - DNA, 15 bp, Homo sapiens
atttttctggctgta

SEQ ID NO: 579469 - DNA, 15 bp, Homo sapiens
aatttttctggctgt

SEQ ID NO: 579470 - DNA, 15 bp, Homo sapiens
caatttttctggctg

SEQ ID NO: 579471 - DNA, 15 bp, Homo sapiens
gcaatttttctggct

SEQ ID NO: 579472 - DNA, 15 bp, Homo sapiens
agcaatttttctggc

SEQ ID NO: 579473 - DNA, 15 bp, Homo sapiens
aagcaatttttctgg

SEQ ID NO: 579474 - DNA, 15 bp, Homo sapiens
taagcaatttttctg

SEQ ID NO: 579475 - DNA, 15 bp, Homo sapiens
ataagcaatttttct

SEQ ID NO: 579476 - DNA, 15 bp, Homo sapiens
aataagcaatttttc

SEQ ID NO: 579477 - DNA, 15 bp, Homo sapiens
taataagcaattttt

SEQ ID NO: 579478 - DNA, 15 bp, Homo sapiens
ataataagcaatttt

SEQ ID NO: 579479 - DNA, 15 bp, Homo sapiens
aataataagcaattt

SEQ ID NO: 579480 - DNA, 15 bp, Homo sapiens
taataataagcaatt

SEQ ID NO: 579481 - DNA, 15 bp, Homo sapiens
ataataataagcaat

SEQ ID NO: 579482 - DNA, 15 bp, Homo sapiens
aataataataagcaa

SEQ ID NO: 579483 - DNA, 15 bp, Homo sapiens
taataataataagca

SEQ ID NO: 579484 - DNA, 15 bp, Homo sapiens
ttaataataataagc

SEQ ID NO: 579485 - DNA, 15 bp, Homo sapiens
tttaataataataag

SEQ ID NO: 579486 - DNA, 15 bp, Homo sapiens
ttttaataataataa

SEQ ID NO: 579487 - DNA, 15 bp, Homo sapiens
tttttaataataata

SEQ ID NO: 579488 - DNA, 15 bp, Homo sapiens
ttttttaataataat

SEQ ID NO: 579489 - DNA, 15 bp, Homo sapiens
tttttttaataataa

SEQ ID NO: 579490 - DNA, 15 bp, Homo sapiens
atttttttaataata

SEQ ID NO: 579491 - DNA, 15 bp, Homo sapiens
aatttttttaataat

SEQ ID NO: 579492 - DNA, 15 bp, Homo sapiens
aaatttttttaataa

SEQ ID NO: 579493 - DNA, 15 bp, Homo sapiens
aaaatttttttaata

SEQ ID NO: 579494 - DNA, 15 bp, Homo sapiens
aaaaatttttttaat

SEQ ID NO: 579495 - DNA, 15 bp, Homo sapiens
aaaaaatttttttaa

SEQ ID NO: 579496 - DNA, 15 bp, Homo sapiens
aaaaaaattttttta

SEQ ID NO: 579497 - DNA, 15 bp, Homo sapiens
taaaaaaattttttt

SEQ ID NO: 579498 - DNA, 15 bp, Homo sapiens
ttaaaaaaatttttt

SEQ ID NO: 579499 - DNA, 15 bp, Homo sapiens
cttaaaaaaattttt

SEQ ID NO: 579500 - DNA, 15 bp, Homo sapiens
tcttaaaaaaatttt

SEQ ID NO: 579501 - DNA, 15 bp, Homo sapiens
ttcttaaaaaaattt

SEQ ID NO: 579502 - DNA, 15 bp, Homo sapiens
tttcttaaaaaaatt

SEQ ID NO: 579503 - DNA, 15 bp, Homo sapiens
ctttcttaaaaaaat

SEQ ID NO: 579504 - DNA, 15 bp, Homo sapiens
tctttcttaaaaaaa

SEQ ID NO: 579505 - DNA, 15 bp, Homo sapiens
gtctttcttaaaaaa

SEQ ID NO: 579506 - DNA, 15 bp, Homo sapiens
tgtctttcttaaaaa

SEQ ID NO: 579507 - DNA, 15 bp, Homo sapiens
atgtctttcttaaaa

SEQ ID NO: 579508 - DNA, 15 bp, Homo sapiens
gatgtctttcttaaa

SEQ ID NO: 579509 - DNA, 15 bp, Homo sapiens
agatgtctttcttaa

SEQ ID NO: 579510 - DNA, 15 bp, Homo sapiens
cagatgtctttctta

SEQ ID NO: 579511 - DNA, 15 bp, Homo sapiens
ccagatgtctttctt

SEQ ID NO: 579512 - DNA, 15 bp, Homo sapiens
tccagatgtctttct

SEQ ID NO: 579513 - DNA, 15 bp, Homo sapiens
atccagatgtctttc

SEQ ID NO: 579514 - DNA, 15 bp, Homo sapiens
aatccagatgtcttt

SEQ ID NO: 579515 - DNA, 15 bp, Homo sapiens
caatccagatgtctt

SEQ ID NO: 579516 - DNA, 15 bp, Homo sapiens
acaatccagatgtct

SEQ ID NO: 579517 - DNA, 15 bp, Homo sapiens
tacaatccagatgtc

SEQ ID NO: 579518 - DNA, 15 bp, Homo sapiens
ctacaatccagatgt

SEQ ID NO: 579519 - DNA, 15 bp, Homo sapiens
cctacaatccagatg

SEQ ID NO: 579520 - DNA, 15 bp, Homo sapiens
ccctacaatccagat

SEQ ID NO: 579521 - DNA, 15 bp, Homo sapiens
accctacaatccaga

SEQ ID NO: 579522 - DNA, 15 bp, Homo sapiens
caccctacaatccag

SEQ ID NO: 579523 - DNA, 15 bp, Homo sapiens
ccaccctacaatcca

SEQ ID NO: 579524 - DNA, 15 bp, Homo sapiens
tccaccctacaatcc

SEQ ID NO: 579525 - DNA, 15 bp, Homo sapiens
gtccaccctacaatc

SEQ ID NO: 579526 - DNA, 15 bp, Homo sapiens
agtccaccctacaat

SEQ ID NO: 579527 - DNA, 15 bp, Homo sapiens
gagtccaccctacaa

SEQ ID NO: 579528 - DNA, 15 bp, Homo sapiens
cgagtccaccctaca

SEQ ID NO: 579529 - DNA, 15 bp, Homo sapiens
tcgagtccaccctac

SEQ ID NO: 579530 - DNA, 15 bp, Homo sapiens
atcgagtccacccta

SEQ ID NO: 579531 - DNA, 15 bp, Homo sapiens
tatcgagtccaccct

SEQ ID NO: 579532 - DNA, 15 bp, Homo sapiens
ttatcgagtccaccc

SEQ ID NO: 579533 - DNA, 15 bp, Homo sapiens
gttatcgagtccacc

SEQ ID NO: 579534 - DNA, 15 bp, Homo sapiens
ggttatcgagtccac

SEQ ID NO: 579535 - DNA, 15 bp, Homo sapiens
aggttatcgagtcca

SEQ ID NO: 579536 - DNA, 15 bp, Homo sapiens
caggttatcgagtcc

SEQ ID NO: 579537 - DNA, 15 bp, Homo sapiens
ccaggttatcgagtc

SEQ ID NO: 579538 - DNA, 15 bp, Homo sapiens
accaggttatcgagt

SEQ ID NO: 579539 - DNA, 15 bp, Homo sapiens
gaccaggttatcgag

SEQ ID NO: 579540 - DNA, 15 bp, Homo sapiens
tgaccaggttatcga

SEQ ID NO: 579541 - DNA, 15 bp, Homo sapiens
atgaccaggttatcg

SEQ ID NO: 579542 - DNA, 15 bp, Homo sapiens
aatgaccaggttatc

SEQ ID NO: 579543 - DNA, 15 bp, Homo sapiens
taatgaccaggttat

SEQ ID NO: 579544 - DNA, 15 bp, Homo sapiens
ataatgaccaggtta

SEQ ID NO: 579545 - DNA, 15 bp, Homo sapiens
aataatgaccaggtt

SEQ ID NO: 579546 - DNA, 15 bp, Homo sapiens
aaataatgaccaggt

SEQ ID NO: 579547 - DNA, 15 bp, Homo sapiens
aaaataatgaccagg

SEQ ID NO: 579548 - DNA, 15 bp, Homo sapiens
aaaaataatgaccag

SEQ ID NO: 579549 - DNA, 15 bp, Homo sapiens
aaaaaataatgacca

SEQ ID NO: 579550 - DNA, 15 bp, Homo sapiens
aaaaaaataatgacc

SEQ ID NO: 579551 - DNA, 15 bp, Homo sapiens
caaaaaaataatgac

SEQ ID NO: 579552 - DNA, 15 bp, Homo sapiens
tcaaaaaaataatga

SEQ ID NO: 579553 - DNA, 15 bp, Homo sapiens
ttcaaaaaaataatg

SEQ ID NO: 579554 - DNA, 15 bp, Homo sapiens
cttcaaaaaaataat

SEQ ID NO: 579555 - DNA, 15 bp, Homo sapiens
gcttcaaaaaaataa

SEQ ID NO: 579556 - DNA, 15 bp, Homo sapiens
ggcttcaaaaaaata

SEQ ID NO: 579557 - DNA, 15 bp, Homo sapiens
tggcttcaaaaaaat

SEQ ID NO: 579558 - DNA, 15 bp, Homo sapiens
ttggcttcaaaaaaa

SEQ ID NO: 579559 - DNA, 15 bp, Homo sapiens
tttggcttcaaaaaa

SEQ ID NO: 579560 - DNA, 15 bp, Homo sapiens
ttttggcttcaaaaa

SEQ ID NO: 579561 - DNA, 15 bp, Homo sapiens
attttggcttcaaaa

SEQ ID NO: 579562 - DNA, 15 bp, Homo sapiens
tattttggcttcaaa

SEQ ID NO: 579563 - DNA, 15 bp, Homo sapiens
atattttggcttcaa

SEQ ID NO: 579564 - DNA, 15 bp, Homo sapiens
gatattttggcttca

SEQ ID NO: 579565 - DNA, 15 bp, Homo sapiens
ggatattttggcttc

SEQ ID NO: 579566 - DNA, 15 bp, Homo sapiens
tggatattttggctt

SEQ ID NO: 579567 - DNA, 15 bp, Homo sapiens
atggatattttggct

SEQ ID NO: 579568 - DNA, 15 bp, Homo sapiens
aatggatattttggc

SEQ ID NO: 579569 - DNA, 15 bp, Homo sapiens
aaatggatattttgg

SEQ ID NO: 579570 - DNA, 15 bp, Homo sapiens
taaatggatattttg

SEQ ID NO: 579571 - DNA, 15 bp, Homo sapiens
ataaatggatatttt

SEQ ID NO: 579572 - DNA, 15 bp, Homo sapiens
tataaatggatattt

SEQ ID NO: 579573 - DNA, 15 bp, Homo sapiens
gtataaatggatatt

SEQ ID NO: 579574 - DNA, 15 bp, Homo sapiens
agtataaatggatat

SEQ ID NO: 579575 - DNA, 15 bp, Homo sapiens
tagtataaatggata

SEQ ID NO: 579576 - DNA, 15 bp, Homo sapiens
atagtataaatggat

SEQ ID NO: 579577 - DNA, 15 bp, Homo sapiens
catagtataaatgga

SEQ ID NO: 579578 - DNA, 15 bp, Homo sapiens
acatagtataaatgg

SEQ ID NO: 579579 - DNA, 15 bp, Homo sapiens
tacatagtataaatg

SEQ ID NO: 579580 - DNA, 15 bp, Homo sapiens
gtacatagtataaat

SEQ ID NO: 579581 - DNA, 15 bp, Homo sapiens
ggtacatagtataaa

SEQ ID NO: 579582 - DNA, 15 bp, Homo sapiens
aggtacatagtataa

SEQ ID NO: 579583 - DNA, 15 bp, Homo sapiens
caggtacatagtata

SEQ ID NO: 579584 - DNA, 15 bp, Homo sapiens
ccaggtacatagtat

SEQ ID NO: 579585 - DNA, 15 bp, Homo sapiens
accaggtacatagta

SEQ ID NO: 579586 - DNA, 15 bp, Homo sapiens
caccaggtacatagt

SEQ ID NO: 579587 - DNA, 15 bp, Homo sapiens
tcaccaggtacatag

SEQ ID NO: 579588 - DNA, 15 bp, Homo sapiens
gtcaccaggtacata

SEQ ID NO: 579589 - DNA, 15 bp, Homo sapiens
ggtcaccaggtacat

SEQ ID NO: 579590 - DNA, 15 bp, Homo sapiens
tggtcaccaggtaca

SEQ ID NO: 579591 - DNA, 15 bp, Homo sapiens
ctggtcaccaggtac

SEQ ID NO: 579592 - DNA, 15 bp, Homo sapiens
actggtcaccaggta

SEQ ID NO: 579593 - DNA, 15 bp, Homo sapiens
cactggtcaccaggt

SEQ ID NO: 579594 - DNA, 15 bp, Homo sapiens
acactggtcaccagg

SEQ ID NO: 579595 - DNA, 15 bp, Homo sapiens
gacactggtcaccag

SEQ ID NO: 579596 - DNA, 15 bp, Homo sapiens
agacactggtcacca

SEQ ID NO: 579597 - DNA, 15 bp, Homo sapiens
gagacactggtcacc

SEQ ID NO: 579598 - DNA, 15 bp, Homo sapiens
agagacactggtcac

SEQ ID NO: 579599 - DNA, 15 bp, Homo sapiens
gagagacactggtca

SEQ ID NO: 579600 - DNA, 15 bp, Homo sapiens
tgagagacactggtc

SEQ ID NO: 579601 - DNA, 15 bp, Homo sapiens
atgagagacactggt

SEQ ID NO: 579602 - DNA, 15 bp, Homo sapiens
aatgagagacactgg

SEQ ID NO: 579603 - DNA, 15 bp, Homo sapiens
aaatgagagacactg

SEQ ID NO: 579604 - DNA, 15 bp, Homo sapiens
aaaatgagagacact

SEQ ID NO: 579605 - DNA, 15 bp, Homo sapiens
taaaatgagagacac

SEQ ID NO: 579606 - DNA, 15 bp, Homo sapiens
ttaaaatgagagaca

SEQ ID NO: 579607 - DNA, 15 bp, Homo sapiens
gttaaaatgagagac

SEQ ID NO: 579608 - DNA, 15 bp, Homo sapiens
agttaaaatgagaga

SEQ ID NO: 579609 - DNA, 15 bp, Homo sapiens
cagttaaaatgagag

SEQ ID NO: 579610 - DNA, 15 bp, Homo sapiens
tcagttaaaatgaga

SEQ ID NO: 579611 - DNA, 15 bp, Homo sapiens
ctcagttaaaatgag

SEQ ID NO: 579612 - DNA, 15 bp, Homo sapiens
cctcagttaaaatga

SEQ ID NO: 579613 - DNA, 15 bp, Homo sapiens
ccctcagttaaaatg

SEQ ID NO: 579614 - DNA, 15 bp, Homo sapiens
accctcagttaaaat

SEQ ID NO: 579615 - DNA, 15 bp, Homo sapiens
caccctcagttaaaa

SEQ ID NO: 579616 - DNA, 15 bp, Homo sapiens
ccaccctcagttaaa

SEQ ID NO: 579617 - DNA, 15 bp, Homo sapiens
accaccctcagttaa

SEQ ID NO: 579618 - DNA, 15 bp, Homo sapiens
caccaccctcagtta

SEQ ID NO: 579619 - DNA, 15 bp, Homo sapiens
ccaccaccctcagtt

SEQ ID NO: 579620 - DNA, 15 bp, Homo sapiens
cccaccaccctcagt

SEQ ID NO: 579621 - DNA, 15 bp, Homo sapiens
acccaccaccctcag

SEQ ID NO: 579622 - DNA, 15 bp, Homo sapiens
gacccaccaccctca

SEQ ID NO: 579623 - DNA, 15 bp, Homo sapiens
agacccaccaccctc

SEQ ID NO: 579624 - DNA, 15 bp, Homo sapiens
cagacccaccaccct

SEQ ID NO: 579625 - DNA, 15 bp, Homo sapiens
acagacccaccaccc

SEQ ID NO: 579626 - DNA, 15 bp, Homo sapiens
cacagacccaccacc

SEQ ID NO: 579627 - DNA, 15 bp, Homo sapiens
ccacagacccaccac

SEQ ID NO: 579628 - DNA, 15 bp, Homo sapiens
tccacagacccacca

SEQ ID NO: 579629 - DNA, 15 bp, Homo sapiens
atccacagacccacc

SEQ ID NO: 579630 - DNA, 15 bp, Homo sapiens
tatccacagacccac

SEQ ID NO: 579631 - DNA, 15 bp, Homo sapiens
ctatccacagaccca

SEQ ID NO: 579632 - DNA, 15 bp, Homo sapiens
tctatccacagaccc

SEQ ID NO: 579633 - DNA, 15 bp, Homo sapiens
ttctatccacagacc

SEQ ID NO: 579634 - DNA, 15 bp, Homo sapiens
gttctatccacagac

SEQ ID NO: 579635 - DNA, 15 bp, Homo sapiens
tgttctatccacaga

SEQ ID NO: 579636 - DNA, 15 bp, Homo sapiens
gtgttctatccacag

SEQ ID NO: 579637 - DNA, 15 bp, Homo sapiens
agtgttctatccaca

SEQ ID NO: 579638 - DNA, 15 bp, Homo sapiens
cagtgttctatccac

SEQ ID NO: 579639 - DNA, 15 bp, Homo sapiens
tcagtgttctatcca

SEQ ID NO: 579640 - DNA, 15 bp, Homo sapiens
gtcagtgttctatcc

SEQ ID NO: 579641 - DNA, 15 bp, Homo sapiens
agtcagtgttctatc

SEQ ID NO: 579642 - DNA, 15 bp, Homo sapiens
gagtcagtgttctat

SEQ ID NO: 579643 - DNA, 15 bp, Homo sapiens
agagtcagtgttcta

SEQ ID NO: 579644 - DNA, 15 bp, Homo sapiens
aagagtcagtgttct

SEQ ID NO: 579645 - DNA, 15 bp, Homo sapiens
caagagtcagtgttc

SEQ ID NO: 579646 - DNA, 15 bp, Homo sapiens
gcaagagtcagtgtt

SEQ ID NO: 579647 - DNA, 15 bp, Homo sapiens
agcaagagtcagtgt

SEQ ID NO: 579648 - DNA, 15 bp, Homo sapiens
tagcaagagtcagtg

SEQ ID NO: 579649 - DNA, 15 bp, Homo sapiens
atagcaagagtcagt

SEQ ID NO: 579650 - DNA, 15 bp, Homo sapiens
aatagcaagagtcag

SEQ ID NO: 579651 - DNA, 15 bp, Homo sapiens
aaatagcaagagtca

SEQ ID NO: 579652 - DNA, 15 bp, Homo sapiens
aaaatagcaagagtc

SEQ ID NO: 579653 - DNA, 15 bp, Homo sapiens
taaaatagcaagagt

SEQ ID NO: 579654 - DNA, 15 bp, Homo sapiens
ttaaaatagcaagag

SEQ ID NO: 579655 - DNA, 15 bp, Homo sapiens
attaaaatagcaaga

SEQ ID NO: 579656 - DNA, 15 bp, Homo sapiens
tattaaaatagcaag

SEQ ID NO: 579657 - DNA, 15 bp, Homo sapiens
atattaaaatagcaa

SEQ ID NO: 579658 - DNA, 15 bp, Homo sapiens
gatattaaaatagca

SEQ ID NO: 579659 - DNA, 15 bp, Homo sapiens
tgatattaaaatagc

SEQ ID NO: 579660 - DNA, 15 bp, Homo sapiens
ttgatattaaaatag

SEQ ID NO: 579661 - DNA, 15 bp, Homo sapiens
tttgatattaaaata

SEQ ID NO: 579662 - DNA, 15 bp, Homo sapiens
ctttgatattaaaat

SEQ ID NO: 579663 - DNA, 15 bp, Homo sapiens
tctttgatattaaaa

SEQ ID NO: 579664 - DNA, 15 bp, Homo sapiens
atctttgatattaaa

SEQ ID NO: 579665 - DNA, 15 bp, Homo sapiens
tatctttgatattaa

SEQ ID NO: 579666 - DNA, 15 bp, Homo sapiens
atatctttgatatta

SEQ ID NO: 579667 - DNA, 15 bp, Homo sapiens
aatatctttgatatt

SEQ ID NO: 579668 - DNA, 15 bp, Homo sapiens
gaatatctttgatat

SEQ ID NO: 579669 - DNA, 15 bp, Homo sapiens
agaatatctttgata

SEQ ID NO: 579670 - DNA, 15 bp, Homo sapiens
tagaatatctttgat

SEQ ID NO: 579671 - DNA, 15 bp, Homo sapiens
ctagaatatctttga

SEQ ID NO: 579672 - DNA, 15 bp, Homo sapiens
tctagaatatctttg

SEQ ID NO: 579673 - DNA, 15 bp, Homo sapiens
ctctagaatatcttt

SEQ ID NO: 579674 - DNA, 15 bp, Homo sapiens
actctagaatatctt

SEQ ID NO: 579675 - DNA, 15 bp, Homo sapiens
cactctagaatatct

SEQ ID NO: 579676 - DNA, 15 bp, Homo sapiens
ccactctagaatatc

SEQ ID NO: 579677 - DNA, 15 bp, Homo sapiens
tccactctagaatat

SEQ ID NO: 579678 - DNA, 15 bp, Homo sapiens
ttccactctagaata

SEQ ID NO: 579679 - DNA, 15 bp, Homo sapiens
gttccactctagaat

SEQ ID NO: 579680 - DNA, 15 bp, Homo sapiens
agttccactctagaa

SEQ ID NO: 579681 - DNA, 15 bp, Homo sapiens
gagttccactctaga

SEQ ID NO: 579682 - DNA, 15 bp, Homo sapiens
agagttccactctag

SEQ ID NO: 579683 - DNA, 15 bp, Homo sapiens
aagagttccactcta

SEQ ID NO: 579684 - DNA, 15 bp, Homo sapiens
taagagttccactct

SEQ ID NO: 579685 - DNA, 15 bp, Homo sapiens
ttaagagttccactc

SEQ ID NO: 579686 - DNA, 15 bp, Homo sapiens
cttaagagttccact

SEQ ID NO: 579687 - DNA, 15 bp, Homo sapiens
tcttaagagttccac

SEQ ID NO: 579688 - DNA, 15 bp, Homo sapiens
gtcttaagagttcca

SEQ ID NO: 579689 - DNA, 15 bp, Homo sapiens
ggtcttaagagttcc

SEQ ID NO: 579690 - DNA, 15 bp, Homo sapiens
tggtcttaagagttc

SEQ ID NO: 579691 - DNA, 15 bp, Homo sapiens
ctggtcttaagagtt

SEQ ID NO: 579692 - DNA, 15 bp, Homo sapiens
actggtcttaagagt

SEQ ID NO: 579693 - DNA, 15 bp, Homo sapiens
tactggtcttaagag

SEQ ID NO: 579694 - DNA, 15 bp, Homo sapiens
atactggtcttaaga

SEQ ID NO: 579695 - DNA, 15 bp, Homo sapiens
gatactggtcttaag

SEQ ID NO: 579696 - DNA, 15 bp, Homo sapiens
agatactggtcttaa

SEQ ID NO: 579697 - DNA, 15 bp, Homo sapiens
aagatactggtctta

SEQ ID NO: 579698 - DNA, 15 bp, Homo sapiens
aaagatactggtctt

SEQ ID NO: 579699 - DNA, 15 bp, Homo sapiens
caaagatactggtct

SEQ ID NO: 579700 - DNA, 15 bp, Homo sapiens
acaaagatactggtc

SEQ ID NO: 579701 - DNA, 15 bp, Homo sapiens
cacaaagatactggt

SEQ ID NO: 579702 - DNA, 15 bp, Homo sapiens
acacaaagatactgg

SEQ ID NO: 579703 - DNA, 15 bp, Homo sapiens
cacacaaagatactg

SEQ ID NO: 579704 - DNA, 15 bp, Homo sapiens
ccacacaaagatact

SEQ ID NO: 579705 - DNA, 15 bp, Homo sapiens
cccacacaaagatac

SEQ ID NO: 579706 - DNA, 15 bp, Homo sapiens
gcccacacaaagata

SEQ ID NO: 579707 - DNA, 15 bp, Homo sapiens
agcccacacaaagat

SEQ ID NO: 579708 - DNA, 15 bp, Homo sapiens
aagcccacacaaaga

SEQ ID NO: 579709 - DNA, 15 bp, Homo sapiens
aaagcccacacaaag

SEQ ID NO: 579710 - DNA, 15 bp, Homo sapiens
taaagcccacacaaa

SEQ ID NO: 579711 - DNA, 15 bp, Homo sapiens
gtaaagcccacacaa

SEQ ID NO: 579712 - DNA, 15 bp, Homo sapiens
ggtaaagcccacaca

SEQ ID NO: 579713 - DNA, 15 bp, Homo sapiens
tggtaaagcccacac

SEQ ID NO: 579714 - DNA, 15 bp, Homo sapiens
ctggtaaagcccaca

SEQ ID NO: 579715 - DNA, 15 bp, Homo sapiens
gctggtaaagcccac

SEQ ID NO: 579716 - DNA, 15 bp, Homo sapiens
tgctggtaaagccca

SEQ ID NO: 579717 - DNA, 15 bp, Homo sapiens
atgctggtaaagccc

SEQ ID NO: 579718 - DNA, 15 bp, Homo sapiens
aatgctggtaaagcc

SEQ ID NO: 579719 - DNA, 15 bp, Homo sapiens
gaatgctggtaaagc

SEQ ID NO: 579720 - DNA, 15 bp, Homo sapiens
tgaatgctggtaaag

SEQ ID NO: 579721 - DNA, 15 bp, Homo sapiens
gtgaatgctggtaaa

SEQ ID NO: 579722 - DNA, 15 bp, Homo sapiens
agtgaatgctggtaa

SEQ ID NO: 579723 - DNA, 15 bp, Homo sapiens
aagtgaatgctggta

SEQ ID NO: 579724 - DNA, 15 bp, Homo sapiens
aaagtgaatgctggt

SEQ ID NO: 579725 - DNA, 15 bp, Homo sapiens
aaaagtgaatgctgg

SEQ ID NO: 579726 - DNA, 15 bp, Homo sapiens
taaaagtgaatgctg

SEQ ID NO: 579727 - DNA, 15 bp, Homo sapiens
ctaaaagtgaatgct

SEQ ID NO: 579728 - DNA, 15 bp, Homo sapiens
tctaaaagtgaatgc

SEQ ID NO: 579729 - DNA, 15 bp, Homo sapiens
ttctaaaagtgaatg

SEQ ID NO: 579730 - DNA, 15 bp, Homo sapiens
tttctaaaagtgaat

SEQ ID NO: 579731 - DNA, 15 bp, Homo sapiens
ttttctaaaagtgaa

SEQ ID NO: 579732 - DNA, 15 bp, Homo sapiens
tttttctaaaagtga

SEQ ID NO: 579733 - DNA, 15 bp, Homo sapiens
gtttttctaaaagtg

SEQ ID NO: 579734 - DNA, 15 bp, Homo sapiens
agtttttctaaaagt

SEQ ID NO: 579735 - DNA, 15 bp, Homo sapiens
tagtttttctaaaag

SEQ ID NO: 579736 - DNA, 15 bp, Homo sapiens
gtagtttttctaaaa

SEQ ID NO: 579737 - DNA, 15 bp, Homo sapiens
ggtagtttttctaaa

SEQ ID NO: 579738 - DNA, 15 bp, Homo sapiens
aggtagtttttctaa

SEQ ID NO: 579739 - DNA, 15 bp, Homo sapiens
taggtagtttttcta

SEQ ID NO: 579740 - DNA, 15 bp, Homo sapiens
ttaggtagtttttct

SEQ ID NO: 579741 - DNA, 15 bp, Homo sapiens
tttaggtagtttttc

SEQ ID NO: 579742 - DNA, 15 bp, Homo sapiens
atttaggtagttttt

SEQ ID NO: 579743 - DNA, 15 bp, Homo sapiens
aatttaggtagtttt

SEQ ID NO: 579744 - DNA, 15 bp, Homo sapiens
aaatttaggtagttt

SEQ ID NO: 579745 - DNA, 15 bp, Homo sapiens
aaaatttaggtagtt

SEQ ID NO: 579746 - DNA, 15 bp, Homo sapiens
taaaatttaggtagt

SEQ ID NO: 579747 - DNA, 15 bp, Homo sapiens
ataaaatttaggtag

SEQ ID NO: 579748 - DNA, 15 bp, Homo sapiens
tataaaatttaggta

SEQ ID NO: 579749 - DNA, 15 bp, Homo sapiens
ttataaaatttaggt

SEQ ID NO: 579750 - DNA, 15 bp, Homo sapiens
attataaaatttagg

SEQ ID NO: 579751 - DNA, 15 bp, Homo sapiens
gattataaaatttag

SEQ ID NO: 579752 - DNA, 15 bp, Homo sapiens
ggattataaaattta

SEQ ID NO: 579753 - DNA, 15 bp, Homo sapiens
aggattataaaattt

SEQ ID NO: 579754 - DNA, 15 bp, Homo sapiens
aaggattataaaatt

SEQ ID NO: 579755 - DNA, 15 bp, Homo sapiens
aaaggattataaaat

SEQ ID NO: 579756 - DNA, 15 bp, Homo sapiens
taaaggattataaaa

SEQ ID NO: 579757 - DNA, 15 bp, Homo sapiens
ttaaaggattataaa

SEQ ID NO: 579758 - DNA, 15 bp, Homo sapiens
attaaaggattataa

SEQ ID NO: 579759 - DNA, 15 bp, Homo sapiens
aattaaaggattata

SEQ ID NO: 579760 - DNA, 15 bp, Homo sapiens
aaattaaaggattat

SEQ ID NO: 579761 - DNA, 15 bp, Homo sapiens
gaaattaaaggatta

SEQ ID NO: 579762 - DNA, 15 bp, Homo sapiens
agaaattaaaggatt

SEQ ID NO: 579763 - DNA, 15 bp, Homo sapiens
aagaaattaaaggat

SEQ ID NO: 579764 - DNA, 15 bp, Homo sapiens
gaagaaattaaagga

SEQ ID NO: 579765 - DNA, 15 bp, Homo sapiens
tgaagaaattaaagg

SEQ ID NO: 579766 - DNA, 15 bp, Homo sapiens
atgaagaaattaaag

SEQ ID NO: 579767 - DNA, 15 bp, Homo sapiens
gatgaagaaattaaa

SEQ ID NO: 579768 - DNA, 15 bp, Homo sapiens
agatgaagaaattaa

SEQ ID NO: 579769 - DNA, 15 bp, Homo sapiens
cagatgaagaaatta

SEQ ID NO: 579770 - DNA, 15 bp, Homo sapiens
ccagatgaagaaatt

SEQ ID NO: 579771 - DNA, 15 bp, Homo sapiens
tccagatgaagaaat

SEQ ID NO: 579772 - DNA, 15 bp, Homo sapiens
ctccagatgaagaaa

SEQ ID NO: 579773 - DNA, 15 bp, Homo sapiens
gctccagatgaagaa

SEQ ID NO: 579774 - DNA, 15 bp, Homo sapiens
tgctccagatgaaga

SEQ ID NO: 579775 - DNA, 15 bp, Homo sapiens
gtgctccagatgaag

SEQ ID NO: 579776 - DNA, 15 bp, Homo sapiens
ggtgctccagatgaa

SEQ ID NO: 579777 - DNA, 15 bp, Homo sapiens
aggtgctccagatga

SEQ ID NO: 579778 - DNA, 15 bp, Homo sapiens
caggtgctccagatg

SEQ ID NO: 579779 - DNA, 15 bp, Homo sapiens
gcaggtgctccagat

SEQ ID NO: 579780 - DNA, 15 bp, Homo sapiens
ggcaggtgctccaga

SEQ ID NO: 579781 - DNA, 15 bp, Homo sapiens
gggcaggtgctccag

SEQ ID NO: 579782 - DNA, 15 bp, Homo sapiens
ggggcaggtgctcca

SEQ ID NO: 579783 - DNA, 15 bp, Homo sapiens
aggggcaggtgctcc

SEQ ID NO: 579784 - DNA, 15 bp, Homo sapiens
taggggcaggtgctc

SEQ ID NO: 579785 - DNA, 15 bp, Homo sapiens
gtaggggcaggtgct

SEQ ID NO: 579786 - DNA, 15 bp, Homo sapiens
agtaggggcaggtgc

SEQ ID NO: 579787 - DNA, 15 bp, Homo sapiens
aagtaggggcaggtg

SEQ ID NO: 579788 - DNA, 15 bp, Homo sapiens
taagtaggggcaggt

SEQ ID NO: 579789 - DNA, 15 bp, Homo sapiens
ataagtaggggcagg

SEQ ID NO: 579790 - DNA, 15 bp, Homo sapiens
aataagtaggggcag

SEQ ID NO: 579791 - DNA, 15 bp, Homo sapiens
aaataagtaggggca

SEQ ID NO: 579792 - DNA, 15 bp, Homo sapiens
gaaataagtaggggc

SEQ ID NO: 579793 - DNA, 15 bp, Homo sapiens
tgaaataagtagggg

SEQ ID NO: 579794 - DNA, 15 bp, Homo sapiens
ttgaaataagtaggg

SEQ ID NO: 579795 - DNA, 15 bp, Homo sapiens
cttgaaataagtagg

SEQ ID NO: 579796 - DNA, 15 bp, Homo sapiens
tcttgaaataagtag

SEQ ID NO: 579797 - DNA, 15 bp, Homo sapiens
ttcttgaaataagta

SEQ ID NO: 579798 - DNA, 15 bp, Homo sapiens
cttcttgaaataagt

SEQ ID NO: 579799 - DNA, 15 bp, Homo sapiens
tcttcttgaaataag

SEQ ID NO: 579800 - DNA, 15 bp, Homo sapiens
atcttcttgaaataa

SEQ ID NO: 579801 - DNA, 15 bp, Homo sapiens
aatcttcttgaaata

SEQ ID NO: 579802 - DNA, 15 bp, Homo sapiens
caatcttcttgaaat

SEQ ID NO: 579803 - DNA, 15 bp, Homo sapiens
gcaatcttcttgaaa

SEQ ID NO: 579804 - DNA, 15 bp, Homo sapiens
tgcaatcttcttgaa

SEQ ID NO: 579805 - DNA, 15 bp, Homo sapiens
ctgcaatcttcttga

SEQ ID NO: 579806 - DNA, 15 bp, Homo sapiens
actgcaatcttcttg

SEQ ID NO: 579807 - DNA, 15 bp, Homo sapiens
tactgcaatcttctt

SEQ ID NO: 579808 - DNA, 15 bp, Homo sapiens
ttactgcaatcttct

SEQ ID NO: 579809 - DNA, 15 bp, Homo sapiens
tttactgcaatcttc

SEQ ID NO: 579810 - DNA, 15 bp, Homo sapiens
ttttactgcaatctt

SEQ ID NO: 579811 - DNA, 15 bp, Homo sapiens
gttttactgcaatct

SEQ ID NO: 579812 - DNA, 15 bp, Homo sapiens
cgttttactgcaatc

SEQ ID NO: 579813 - DNA, 15 bp, Homo sapiens
tcgttttactgcaat

SEQ ID NO: 579814 - DNA, 15 bp, Homo sapiens
atcgttttactgcaa

SEQ ID NO: 579815 - DNA, 15 bp, Homo sapiens
aatcgttttactgca

SEQ ID NO: 579816 - DNA, 15 bp, Homo sapiens
taatcgttttactgc

SEQ ID NO: 579817 - DNA, 15 bp, Homo sapiens
ttaatcgttttactg

SEQ ID NO: 579818 - DNA, 15 bp, Homo sapiens
tttaatcgttttact

SEQ ID NO: 579819 - DNA, 15 bp, Homo sapiens
atttaatcgttttac

SEQ ID NO: 579820 - DNA, 15 bp, Homo sapiens
catttaatcgtttta

SEQ ID NO: 579821 - DNA, 15 bp, Homo sapiens
tcatttaatcgtttt

SEQ ID NO: 579822 - DNA, 15 bp, Homo sapiens
ctcatttaatcgttt

SEQ ID NO: 579823 - DNA, 15 bp, Homo sapiens
cctcatttaatcgtt

SEQ ID NO: 579824 - DNA, 15 bp, Homo sapiens
ccctcatttaatcgt

SEQ ID NO: 579825 - DNA, 15 bp, Homo sapiens
tccctcatttaatcg

SEQ ID NO: 579826 - DNA, 15 bp, Homo sapiens
ttccctcatttaatc

SEQ ID NO: 579827 - DNA, 15 bp, Homo sapiens
gttccctcatttaat

SEQ ID NO: 579828 - DNA, 15 bp, Homo sapiens
tgttccctcatttaa

SEQ ID NO: 579829 - DNA, 15 bp, Homo sapiens
atgttccctcattta

SEQ ID NO: 579830 - DNA, 15 bp, Homo sapiens
tatgttccctcattt

SEQ ID NO: 579831 - DNA, 15 bp, Homo sapiens
atatgttccctcatt

SEQ ID NO: 579832 - DNA, 15 bp, Homo sapiens
catatgttccctcat

SEQ ID NO: 579833 - DNA, 15 bp, Homo sapiens
gcatatgttccctca

SEQ ID NO: 579834 - DNA, 15 bp, Homo sapiens
tgcatatgttccctc

SEQ ID NO: 579835 - DNA, 15 bp, Homo sapiens
ctgcatatgttccct

SEQ ID NO: 579836 - DNA, 15 bp, Homo sapiens
tctgcatatgttccc

SEQ ID NO: 579837 - DNA, 15 bp, Homo sapiens
ctctgcatatgttcc

SEQ ID NO: 579838 - DNA, 15 bp, Homo sapiens
cctctgcatatgttc

SEQ ID NO: 579839 - DNA, 15 bp, Homo sapiens
acctctgcatatgtt

SEQ ID NO: 579840 - DNA, 15 bp, Homo sapiens
cacctctgcatatgt

SEQ ID NO: 579841 - DNA, 15 bp, Homo sapiens
gcacctctgcatatg

SEQ ID NO: 579842 - DNA, 15 bp, Homo sapiens
agcacctctgcatat

SEQ ID NO: 579843 - DNA, 15 bp, Homo sapiens
aagcacctctgcata

SEQ ID NO: 579844 - DNA, 15 bp, Homo sapiens
aaagcacctctgcat

SEQ ID NO: 579845 - DNA, 15 bp, Homo sapiens
aaaagcacctctgca

SEQ ID NO: 579846 - DNA, 15 bp, Homo sapiens
taaaagcacctctgc

SEQ ID NO: 579847 - DNA, 15 bp, Homo sapiens
ttaaaagcacctctg

SEQ ID NO: 579848 - DNA, 15 bp, Homo sapiens
tttaaaagcacctct

SEQ ID NO: 579849 - DNA, 15 bp, Homo sapiens
ttttaaaagcacctc

SEQ ID NO: 579850 - DNA, 15 bp, Homo sapiens
tttttaaaagcacct

SEQ ID NO: 579851 - DNA, 15 bp, Homo sapiens
ctttttaaaagcacc

SEQ ID NO: 579852 - DNA, 15 bp, Homo sapiens
gctttttaaaagcac

SEQ ID NO: 579853 - DNA, 15 bp, Homo sapiens
tgctttttaaaagca

SEQ ID NO: 579854 - DNA, 15 bp, Homo sapiens
atgctttttaaaagc

SEQ ID NO: 579855 - DNA, 15 bp, Homo sapiens
tatgctttttaaaag

SEQ ID NO: 579856 - DNA, 15 bp, Homo sapiens
atatgctttttaaaa

SEQ ID NO: 579857 - DNA, 15 bp, Homo sapiens
catatgctttttaaa

SEQ ID NO: 579858 - DNA, 15 bp, Homo sapiens
gcatatgctttttaa

SEQ ID NO: 579859 - DNA, 15 bp, Homo sapiens
ggcatatgcttttta

SEQ ID NO: 579860 - DNA, 15 bp, Homo sapiens
tggcatatgcttttt

SEQ ID NO: 579861 - DNA, 15 bp, Homo sapiens
gtggcatatgctttt

SEQ ID NO: 579862 - DNA, 15 bp, Homo sapiens
ggtggcatatgcttt

SEQ ID NO: 579863 - DNA, 15 bp, Homo sapiens
aggtggcatatgctt

SEQ ID NO: 579864 - DNA, 15 bp, Homo sapiens
aaggtggcatatgct

SEQ ID NO: 579865 - DNA, 15 bp, Homo sapiens
aaaggtggcatatgc

SEQ ID NO: 579866 - DNA, 15 bp, Homo sapiens
aaaaggtggcatatg

SEQ ID NO: 579867 - DNA, 15 bp, Homo sapiens
aaaaaggtggcatat

SEQ ID NO: 579868 - DNA, 15 bp, Homo sapiens
aaaaaaggtggcata

SEQ ID NO: 579869 - DNA, 15 bp, Homo sapiens
taaaaaaggtggcat

SEQ ID NO: 579870 - DNA, 15 bp, Homo sapiens
ataaaaaaggtggca

SEQ ID NO: 579871 - DNA, 15 bp, Homo sapiens
aataaaaaaggtggc

SEQ ID NO: 579872 - DNA, 15 bp, Homo sapiens
taataaaaaaggtgg

SEQ ID NO: 579873 - DNA, 15 bp, Homo sapiens
ttaataaaaaaggtg

SEQ ID NO: 579874 - DNA, 15 bp, Homo sapiens
attaataaaaaaggt

SEQ ID NO: 579875 - DNA, 15 bp, Homo sapiens
aattaataaaaaagg

SEQ ID NO: 579876 - DNA, 15 bp, Homo sapiens
taattaataaaaaag

SEQ ID NO: 579877 - DNA, 15 bp, Homo sapiens
ataattaataaaaaa

SEQ ID NO: 579878 - DNA, 15 bp, Homo sapiens
aataattaataaaaa

SEQ ID NO: 579879 - DNA, 15 bp, Homo sapiens
taataattaataaaa

SEQ ID NO: 579880 - DNA, 15 bp, Homo sapiens
ataataattaataaa

SEQ ID NO: 579881 - DNA, 15 bp, Homo sapiens
tataataattaataa

SEQ ID NO: 579882 - DNA, 15 bp, Homo sapiens
atataataattaata

SEQ ID NO: 579883 - DNA, 15 bp, Homo sapiens
tatataataattaat

SEQ ID NO: 579884 - DNA, 15 bp, Homo sapiens
ttatataataattaa

SEQ ID NO: 579885 - DNA, 15 bp, Homo sapiens
tttatataataatta

SEQ ID NO: 579886 - DNA, 15 bp, Homo sapiens
ttttatataataatt

SEQ ID NO: 579887 - DNA, 15 bp, Homo sapiens
attttatataataat

SEQ ID NO: 579888 - DNA, 15 bp, Homo sapiens
cattttatataataa

SEQ ID NO: 579889 - DNA, 15 bp, Homo sapiens
tcattttatataata

SEQ ID NO: 579890 - DNA, 15 bp, Homo sapiens
ttcattttatataat

SEQ ID NO: 579891 - DNA, 15 bp, Homo sapiens
cttcattttatataa

SEQ ID NO: 579892 - DNA, 15 bp, Homo sapiens
gcttcattttatata

SEQ ID NO: 579893 - DNA, 15 bp, Homo sapiens
tgcttcattttatat

SEQ ID NO: 579894 - DNA, 15 bp, Homo sapiens
atgcttcattttata

SEQ ID NO: 579895 - DNA, 15 bp, Homo sapiens
aatgcttcattttat

SEQ ID NO: 579896 - DNA, 15 bp, Homo sapiens
aaatgcttcatttta

SEQ ID NO: 579897 - DNA, 15 bp, Homo sapiens
taaatgcttcatttt

SEQ ID NO: 579898 - DNA, 15 bp, Homo sapiens
ttaaatgcttcattt

SEQ ID NO: 579899 - DNA, 15 bp, Homo sapiens
attaaatgcttcatt

SEQ ID NO: 579900 - DNA, 15 bp, Homo sapiens
aattaaatgcttcat

SEQ ID NO: 579901 - DNA, 15 bp, Homo sapiens
taattaaatgcttca

SEQ ID NO: 579902 - DNA, 15 bp, Homo sapiens
ataattaaatgcttc

SEQ ID NO: 579903 - DNA, 15 bp, Homo sapiens
tataattaaatgctt

SEQ ID NO: 579904 - DNA, 15 bp, Homo sapiens
ctataattaaatgct

SEQ ID NO: 579905 - DNA, 15 bp, Homo sapiens
actataattaaatgc

SEQ ID NO: 579906 - DNA, 15 bp, Homo sapiens
tactataattaaatg

SEQ ID NO: 579907 - DNA, 15 bp, Homo sapiens
aaatcatctcaggaa

SEQ ID NO: 579908 - DNA, 15 bp, Homo sapiens
aaaatcatctcagga

SEQ ID NO: 579909 - DNA, 15 bp, Homo sapiens
taaaatcatctcagg

SEQ ID NO: 579910 - DNA, 15 bp, Homo sapiens
ataaaatcatctcag

SEQ ID NO: 579911 - DNA, 15 bp, Homo sapiens
gataaaatcatctca

SEQ ID NO: 579912 - DNA, 15 bp, Homo sapiens
cgataaaatcatctc

SEQ ID NO: 579913 - DNA, 15 bp, Homo sapiens
acgataaaatcatct

SEQ ID NO: 579914 - DNA, 15 bp, Homo sapiens
aacgataaaatcatc

SEQ ID NO: 579915 - DNA, 15 bp, Homo sapiens
caacgataaaatcat

SEQ ID NO: 579916 - DNA, 15 bp, Homo sapiens
tcaacgataaaatca

SEQ ID NO: 579917 - DNA, 15 bp, Homo sapiens
ctcaacgataaaatc

SEQ ID NO: 579918 - DNA, 15 bp, Homo sapiens
cctcaacgataaaat

SEQ ID NO: 579919 - DNA, 15 bp, Homo sapiens
tcctcaacgataaaa

SEQ ID NO: 579920 - DNA, 15 bp, Homo sapiens
ctcctcaacgataaa

SEQ ID NO: 579921 - DNA, 15 bp, Homo sapiens
gctcctcaacgataa

SEQ ID NO: 579922 - DNA, 15 bp, Homo sapiens
agctcctcaacgata

SEQ ID NO: 579923 - DNA, 15 bp, Homo sapiens
tagctcctcaacgat

SEQ ID NO: 579924 - DNA, 15 bp, Homo sapiens
ttagctcctcaacga

SEQ ID NO: 579925 - DNA, 15 bp, Homo sapiens
attagctcctcaacg

SEQ ID NO: 579926 - DNA, 15 bp, Homo sapiens
cattagctcctcaac

SEQ ID NO: 579927 - DNA, 15 bp, Homo sapiens
acattagctcctcaa

SEQ ID NO: 579928 - DNA, 15 bp, Homo sapiens
cacattagctcctca

SEQ ID NO: 579929 - DNA, 15 bp, Homo sapiens
tcacattagctcctc

SEQ ID NO: 579930 - DNA, 15 bp, Homo sapiens
ctcacattagctcct

SEQ ID NO: 579931 - DNA, 15 bp, Homo sapiens
gctcacattagctcc

SEQ ID NO: 579932 - DNA, 15 bp, Homo sapiens
tgctcacattagctc

SEQ ID NO: 579933 - DNA, 15 bp, Homo sapiens
gtgctcacattagct

SEQ ID NO: 579934 - DNA, 15 bp, Homo sapiens
tgtgctcacattagc

SEQ ID NO: 579935 - DNA, 15 bp, Homo sapiens
atgtgctcacattag

SEQ ID NO: 579936 - DNA, 15 bp, Homo sapiens
aatgtgctcacatta

SEQ ID NO: 579937 - DNA, 15 bp, Homo sapiens
aaatgtgctcacatt

SEQ ID NO: 579938 - DNA, 15 bp, Homo sapiens
caaatgtgctcacat

SEQ ID NO: 579939 - DNA, 15 bp, Homo sapiens
tcaaatgtgctcaca

SEQ ID NO: 579940 - DNA, 15 bp, Homo sapiens
ttcaaatgtgctcac

SEQ ID NO: 579941 - DNA, 15 bp, Homo sapiens
tttcaaatgtgctca

SEQ ID NO: 579942 - DNA, 15 bp, Homo sapiens
atttcaaatgtgctc

SEQ ID NO: 579943 - DNA, 15 bp, Homo sapiens
tatttcaaatgtgct

SEQ ID NO: 579944 - DNA, 15 bp, Homo sapiens
ttatttcaaatgtgc

SEQ ID NO: 579945 - DNA, 15 bp, Homo sapiens
gttatttcaaatgtg

SEQ ID NO: 579946 - DNA, 15 bp, Homo sapiens
agttatttcaaatgt

SEQ ID NO: 579947 - DNA, 15 bp, Homo sapiens
aagttatttcaaatg

SEQ ID NO: 579948 - DNA, 15 bp, Homo sapiens
aaagttatttcaaat

SEQ ID NO: 579949 - DNA, 15 bp, Homo sapiens
taaagttatttcaaa

SEQ ID NO: 579950 - DNA, 15 bp, Homo sapiens
ctaaagttatttcaa

SEQ ID NO: 579951 - DNA, 15 bp, Homo sapiens
tctaaagttatttca

SEQ ID NO: 579952 - DNA, 15 bp, Homo sapiens
ttctaaagttatttc

SEQ ID NO: 579953 - DNA, 15 bp, Homo sapiens
tttctaaagttattt

SEQ ID NO: 579954 - DNA, 15 bp, Homo sapiens
ttttctaaagttatt

SEQ ID NO: 579955 - DNA, 15 bp, Homo sapiens
attttctaaagttat

SEQ ID NO: 579956 - DNA, 15 bp, Homo sapiens
tattttctaaagtta

SEQ ID NO: 579957 - DNA, 15 bp, Homo sapiens
ttattttctaaagtt

SEQ ID NO: 579958 - DNA, 15 bp, Homo sapiens
attattttctaaagt

SEQ ID NO: 579959 - DNA, 15 bp, Homo sapiens
tattattttctaaag

SEQ ID NO: 579960 - DNA, 15 bp, Homo sapiens
ttattattttctaaa

SEQ ID NO: 579961 - DNA, 15 bp, Homo sapiens
cttattattttctaa

SEQ ID NO: 579962 - DNA, 15 bp, Homo sapiens
acttattattttcta

SEQ ID NO: 579963 - DNA, 15 bp, Homo sapiens
cacttattattttct

SEQ ID NO: 579964 - DNA, 15 bp, Homo sapiens
gcacttattattttc

SEQ ID NO: 579965 - DNA, 15 bp, Homo sapiens
agcacttattatttt

SEQ ID NO: 579966 - DNA, 15 bp, Homo sapiens
cagcacttattattt

SEQ ID NO: 579967 - DNA, 15 bp, Homo sapiens
acagcacttattatt

SEQ ID NO: 579968 - DNA, 15 bp, Homo sapiens
aacagcacttattat

SEQ ID NO: 579969 - DNA, 15 bp, Homo sapiens
aaacagcacttatta

SEQ ID NO: 579970 - DNA, 15 bp, Homo sapiens
aaaacagcacttatt

SEQ ID NO: 579971 - DNA, 15 bp, Homo sapiens
caaaacagcacttat

SEQ ID NO: 579972 - DNA, 15 bp, Homo sapiens
acaaaacagcactta

SEQ ID NO: 579973 - DNA, 15 bp, Homo sapiens
cacaaaacagcactt

SEQ ID NO: 579974 - DNA, 15 bp, Homo sapiens
acacaaaacagcact

SEQ ID NO: 579975 - DNA, 15 bp, Homo sapiens
cacacaaaacagcac

SEQ ID NO: 579976 - DNA, 15 bp, Homo sapiens
tcacacaaaacagca

SEQ ID NO: 579977 - DNA, 15 bp, Homo sapiens
ttcacacaaaacagc

SEQ ID NO: 579978 - DNA, 15 bp, Homo sapiens
attcacacaaaacag

SEQ ID NO: 579979 - DNA, 15 bp, Homo sapiens
gattcacacaaaaca

SEQ ID NO: 579980 - DNA, 15 bp, Homo sapiens
tgattcacacaaaac

SEQ ID NO: 579981 - DNA, 15 bp, Homo sapiens
atgattcacacaaaa

SEQ ID NO: 579982 - DNA, 15 bp, Homo sapiens
tatgattcacacaaa

SEQ ID NO: 579983 - DNA, 15 bp, Homo sapiens
ttatgattcacacaa

SEQ ID NO: 579984 - DNA, 15 bp, Homo sapiens
cttatgattcacaca

SEQ ID NO: 579985 - DNA, 15 bp, Homo sapiens
acttatgattcacac

SEQ ID NO: 579986 - DNA, 15 bp, Homo sapiens
tacttatgattcaca

SEQ ID NO: 579987 - DNA, 15 bp, Homo sapiens
ctacttatgattcac

SEQ ID NO: 579988 - DNA, 15 bp, Homo sapiens
actacttatgattca

SEQ ID NO: 579989 - DNA, 15 bp, Homo sapiens
tactacttatgattc

SEQ ID NO: 579990 - DNA, 15 bp, Homo sapiens
ctactacttatgatt

SEQ ID NO: 579991 - DNA, 15 bp, Homo sapiens
actactacttatgat

SEQ ID NO: 579992 - DNA, 15 bp, Homo sapiens
aactactacttatga

SEQ ID NO: 579993 - DNA, 15 bp, Homo sapiens
aaactactacttatg

SEQ ID NO: 579994 - DNA, 15 bp, Homo sapiens
aaaactactacttat

SEQ ID NO: 579995 - DNA, 15 bp, Homo sapiens
taaaactactactta

SEQ ID NO: 579996 - DNA, 15 bp, Homo sapiens
ctaaaactactactt

SEQ ID NO: 579997 - DNA, 15 bp, Homo sapiens
cctaaaactactact

SEQ ID NO: 579998 - DNA, 15 bp, Homo sapiens
tcctaaaactactac

SEQ ID NO: 579999 - DNA, 15 bp, Homo sapiens
ttcctaaaactacta

SEQ ID NO: 580000 - DNA, 15 bp, Homo sapiens
cttcctaaaactact

SEQ ID NO: 580001 - DNA, 15 bp, Homo sapiens
ccttcctaaaactac

SEQ ID NO: 580002 - DNA, 15 bp, Homo sapiens
cccttcctaaaacta

SEQ ID NO: 580003 - DNA, 15 bp, Homo sapiens
tcccttcctaaaact

SEQ ID NO: 580004 - DNA, 15 bp, Homo sapiens
ttcccttcctaaaac

SEQ ID NO: 580005 - DNA, 15 bp, Homo sapiens
gttcccttcctaaaa

SEQ ID NO: 580006 - DNA, 15 bp, Homo sapiens
ggttcccttcctaaa

SEQ ID NO: 580007 - DNA, 15 bp, Homo sapiens
gggttcccttcctaa

SEQ ID NO: 580008 - DNA, 15 bp, Homo sapiens
tgggttcccttccta

SEQ ID NO: 580009 - DNA, 15 bp, Homo sapiens
gtgggttcccttcct

SEQ ID NO: 580010 - DNA, 15 bp, Homo sapiens
tgtgggttcccttcc

SEQ ID NO: 580011 - DNA, 15 bp, Homo sapiens
ttgtgggttcccttc

SEQ ID NO: 580012 - DNA, 15 bp, Homo sapiens
cttgtgggttccctt

SEQ ID NO: 580013 - DNA, 15 bp, Homo sapiens
ccttgtgggttccct

SEQ ID NO: 580014 - DNA, 15 bp, Homo sapiens
tccttgtgggttccc

SEQ ID NO: 580015 - DNA, 15 bp, Homo sapiens
atccttgtgggttcc

SEQ ID NO: 580016 - DNA, 15 bp, Homo sapiens
aatccttgtgggttc

SEQ ID NO: 580017 - DNA, 15 bp, Homo sapiens
aaatccttgtgggtt

SEQ ID NO: 580018 - DNA, 15 bp, Homo sapiens
caaatccttgtgggt

SEQ ID NO: 580019 - DNA, 15 bp, Homo sapiens
tcaaatccttgtggg

SEQ ID NO: 580020 - DNA, 15 bp, Homo sapiens
ttcaaatccttgtgg

SEQ ID NO: 580021 - DNA, 15 bp, Homo sapiens
cttcaaatccttgtg

SEQ ID NO: 580022 - DNA, 15 bp, Homo sapiens
acttcaaatccttgt

SEQ ID NO: 580023 - DNA, 15 bp, Homo sapiens
aacttcaaatccttg

SEQ ID NO: 580024 - DNA, 15 bp, Homo sapiens
caacttcaaatcctt

SEQ ID NO: 580025 - DNA, 15 bp, Homo sapiens
tcaacttcaaatcct

SEQ ID NO: 580026 - DNA, 15 bp, Homo sapiens
atcaacttcaaatcc

SEQ ID NO: 580027 - DNA, 15 bp, Homo sapiens
tatcaacttcaaatc

SEQ ID NO: 580028 - DNA, 15 bp, Homo sapiens
ctatcaacttcaaat

SEQ ID NO: 580029 - DNA, 15 bp, Homo sapiens
tctatcaacttcaaa

SEQ ID NO: 580030 - DNA, 15 bp, Homo sapiens
ttctatcaacttcaa

SEQ ID NO: 580031 - DNA, 15 bp, Homo sapiens
attctatcaacttca

SEQ ID NO: 580032 - DNA, 15 bp, Homo sapiens
tattctatcaacttc

SEQ ID NO: 580033 - DNA, 15 bp, Homo sapiens
ttattctatcaactt

SEQ ID NO: 580034 - DNA, 15 bp, Homo sapiens
tttattctatcaact

SEQ ID NO: 580035 - DNA, 15 bp, Homo sapiens
gtttattctatcaac

SEQ ID NO: 580036 - DNA, 15 bp, Homo sapiens
agtttattctatcaa

SEQ ID NO: 580037 - DNA, 15 bp, Homo sapiens
aagtttattctatca

SEQ ID NO: 580038 - DNA, 15 bp, Homo sapiens
taagtttattctatc

SEQ ID NO: 580039 - DNA, 15 bp, Homo sapiens
ttaagtttattctat

SEQ ID NO: 580040 - DNA, 15 bp, Homo sapiens
cttaagtttattcta

SEQ ID NO: 580041 - DNA, 15 bp, Homo sapiens
ccttaagtttattct

SEQ ID NO: 580042 - DNA, 15 bp, Homo sapiens
tccttaagtttattc

SEQ ID NO: 580043 - DNA, 15 bp, Homo sapiens
ttccttaagtttatt

SEQ ID NO: 580044 - DNA, 15 bp, Homo sapiens
cttccttaagtttat

SEQ ID NO: 580045 - DNA, 15 bp, Homo sapiens
acttccttaagttta

SEQ ID NO: 580046 - DNA, 15 bp, Homo sapiens
cacttccttaagttt

SEQ ID NO: 580047 - DNA, 15 bp, Homo sapiens
ccacttccttaagtt

SEQ ID NO: 580048 - DNA, 15 bp, Homo sapiens
cccacttccttaagt

SEQ ID NO: 580049 - DNA, 15 bp, Homo sapiens
acccacttccttaag

SEQ ID NO: 580050 - DNA, 15 bp, Homo sapiens
aacccacttccttaa

SEQ ID NO: 580051 - DNA, 15 bp, Homo sapiens
aaacccacttcctta

SEQ ID NO: 580052 - DNA, 15 bp, Homo sapiens
caaacccacttcctt

SEQ ID NO: 580053 - DNA, 15 bp, Homo sapiens
gcaaacccacttcct

SEQ ID NO: 580054 - DNA, 15 bp, Homo sapiens
agcaaacccacttcc

SEQ ID NO: 580055 - DNA, 15 bp, Homo sapiens
aagcaaacccacttc

SEQ ID NO: 580056 - DNA, 15 bp, Homo sapiens
aaagcaaacccactt

SEQ ID NO: 580057 - DNA, 15 bp, Homo sapiens
aaaagcaaacccact

SEQ ID NO: 580058 - DNA, 15 bp, Homo sapiens
aaaaagcaaacccac

SEQ ID NO: 580059 - DNA, 15 bp, Homo sapiens
gaaaaagcaaaccca

SEQ ID NO: 580060 - DNA, 15 bp, Homo sapiens
agaaaaagcaaaccc

SEQ ID NO: 580061 - DNA, 15 bp, Homo sapiens
gagaaaaagcaaacc

SEQ ID NO: 580062 - DNA, 15 bp, Homo sapiens
agagaaaaagcaaac

SEQ ID NO: 580063 - DNA, 15 bp, Homo sapiens
aagagaaaaagcaaa

SEQ ID NO: 580064 - DNA, 15 bp, Homo sapiens
aaagagaaaaagcaa

SEQ ID NO: 580065 - DNA, 15 bp, Homo sapiens
taaagagaaaaagca

SEQ ID NO: 580066 - DNA, 15 bp, Homo sapiens
ttaaagagaaaaagc

SEQ ID NO: 580067 - DNA, 15 bp, Homo sapiens
cttaaagagaaaaag

SEQ ID NO: 580068 - DNA, 15 bp, Homo sapiens
gcttaaagagaaaaa

SEQ ID NO: 580069 - DNA, 15 bp, Homo sapiens
ggcttaaagagaaaa

SEQ ID NO: 580070 - DNA, 15 bp, Homo sapiens
tggcttaaagagaaa

SEQ ID NO: 580071 - DNA, 15 bp, Homo sapiens
ttggcttaaagagaa

SEQ ID NO: 580072 - DNA, 15 bp, Homo sapiens
cttggcttaaagaga

SEQ ID NO: 580073 - DNA, 15 bp, Homo sapiens
tcttggcttaaagag

SEQ ID NO: 580074 - DNA, 15 bp, Homo sapiens
atcttggcttaaaga

SEQ ID NO: 580075 - DNA, 15 bp, Homo sapiens
tatcttggcttaaag

SEQ ID NO: 580076 - DNA, 15 bp, Homo sapiens
ctatcttggcttaaa

SEQ ID NO: 580077 - DNA, 15 bp, Homo sapiens
cctatcttggcttaa

SEQ ID NO: 580078 - DNA, 15 bp, Homo sapiens
tcctatcttggctta

SEQ ID NO: 580079 - DNA, 15 bp, Homo sapiens
atcctatcttggctt

SEQ ID NO: 580080 - DNA, 15 bp, Homo sapiens
aatcctatcttggct

SEQ ID NO: 580081 - DNA, 15 bp, Homo sapiens
taatcctatcttggc

SEQ ID NO: 580082 - DNA, 15 bp, Homo sapiens
ttaatcctatcttgg

SEQ ID NO: 580083 - DNA, 15 bp, Homo sapiens
attaatcctatcttg

SEQ ID NO: 580084 - DNA, 15 bp, Homo sapiens
tattaatcctatctt

SEQ ID NO: 580085 - DNA, 15 bp, Homo sapiens
atattaatcctatct

SEQ ID NO: 580086 - DNA, 15 bp, Homo sapiens
aatattaatcctatc

SEQ ID NO: 580087 - DNA, 15 bp, Homo sapiens
caatattaatcctat

SEQ ID NO: 580088 - DNA, 15 bp, Homo sapiens
gcaatattaatccta

SEQ ID NO: 580089 - DNA, 15 bp, Homo sapiens
tgcaatattaatcct

SEQ ID NO: 580090 - DNA, 15 bp, Homo sapiens
ctgcaatattaatcc

SEQ ID NO: 580091 - DNA, 15 bp, Homo sapiens
gctgcaatattaatc

SEQ ID NO: 580092 - DNA, 15 bp, Homo sapiens
ggctgcaatattaat

SEQ ID NO: 580093 - DNA, 15 bp, Homo sapiens
tggctgcaatattaa

SEQ ID NO: 580094 - DNA, 15 bp, Homo sapiens
atggctgcaatatta

SEQ ID NO: 580095 - DNA, 15 bp, Homo sapiens
gatggctgcaatatt

SEQ ID NO: 580096 - DNA, 15 bp, Homo sapiens
agatggctgcaatat

SEQ ID NO: 580097 - DNA, 15 bp, Homo sapiens
cagatggctgcaata

SEQ ID NO: 580098 - DNA, 15 bp, Homo sapiens
ccagatggctgcaat

SEQ ID NO: 580099 - DNA, 15 bp, Homo sapiens
tccagatggctgcaa

SEQ ID NO: 580100 - DNA, 15 bp, Homo sapiens
atccagatggctgca

SEQ ID NO: 580101 - DNA, 15 bp, Homo sapiens
tatccagatggctgc

SEQ ID NO: 580102 - DNA, 15 bp, Homo sapiens
ctatccagatggctg

SEQ ID NO: 580103 - DNA, 15 bp, Homo sapiens
actatccagatggct

SEQ ID NO: 580104 - DNA, 15 bp, Homo sapiens
gactatccagatggc

SEQ ID NO: 580105 - DNA, 15 bp, Homo sapiens
ggactatccagatgg

SEQ ID NO: 580106 - DNA, 15 bp, Homo sapiens
tggactatccagatg

SEQ ID NO: 580107 - DNA, 15 bp, Homo sapiens
ctggactatccagat

SEQ ID NO: 580108 - DNA, 15 bp, Homo sapiens
actggactatccaga

SEQ ID NO: 580109 - DNA, 15 bp, Homo sapiens
aactggactatccag

SEQ ID NO: 580110 - DNA, 15 bp, Homo sapiens
caactggactatcca

SEQ ID NO: 580111 - DNA, 15 bp, Homo sapiens
ccaactggactatcc

SEQ ID NO: 580112 - DNA, 15 bp, Homo sapiens
accaactggactatc

SEQ ID NO: 580113 - DNA, 15 bp, Homo sapiens
aaccaactggactat

SEQ ID NO: 580114 - DNA, 15 bp, Homo sapiens
aaaccaactggacta

SEQ ID NO: 580115 - DNA, 15 bp, Homo sapiens
taaaccaactggact

SEQ ID NO: 580116 - DNA, 15 bp, Homo sapiens
ataaaccaactggac

SEQ ID NO: 580117 - DNA, 15 bp, Homo sapiens
aataaaccaactgga

SEQ ID NO: 580118 - DNA, 15 bp, Homo sapiens
aaataaaccaactgg

SEQ ID NO: 580119 - DNA, 15 bp, Homo sapiens
aaaataaaccaactg

SEQ ID NO: 580120 - DNA, 15 bp, Homo sapiens
taaaataaaccaact

SEQ ID NO: 580121 - DNA, 15 bp, Homo sapiens
ttaaaataaaccaac

SEQ ID NO: 580122 - DNA, 15 bp, Homo sapiens
attaaaataaaccaa

SEQ ID NO: 580123 - DNA, 15 bp, Homo sapiens
aattaaaataaacca

SEQ ID NO: 580124 - DNA, 15 bp, Homo sapiens
aaattaaaataaacc

SEQ ID NO: 580125 - DNA, 15 bp, Homo sapiens
gaaattaaaataaac

SEQ ID NO: 580126 - DNA, 15 bp, Homo sapiens
tgaaattaaaataaa

SEQ ID NO: 580127 - DNA, 15 bp, Homo sapiens
atgaaattaaaataa

SEQ ID NO: 580128 - DNA, 15 bp, Homo sapiens
aatgaaattaaaata

SEQ ID NO: 580129 - DNA, 15 bp, Homo sapiens
aaatgaaattaaaat

SEQ ID NO: 580130 - DNA, 15 bp, Homo sapiens
caaatgaaattaaaa

SEQ ID NO: 580131 - DNA, 15 bp, Homo sapiens
acaaatgaaattaaa

SEQ ID NO: 580132 - DNA, 15 bp, Homo sapiens
aacaaatgaaattaa

SEQ ID NO: 580133 - DNA, 15 bp, Homo sapiens
aaacaaatgaaatta

SEQ ID NO: 580134 - DNA, 15 bp, Homo sapiens
aaaacaaatgaaatt

SEQ ID NO: 580135 - DNA, 15 bp, Homo sapiens
aaaaacaaatgaaat

SEQ ID NO: 580136 - DNA, 15 bp, Homo sapiens
aaaaaacaaatgaaa

SEQ ID NO: 580137 - DNA, 15 bp, Homo sapiens
taaaaaacaaatgaa

SEQ ID NO: 580138 - DNA, 15 bp, Homo sapiens
gtaaaaaacaaatga

SEQ ID NO: 580139 - DNA, 15 bp, Homo sapiens
ggtaaaaaacaaatg

SEQ ID NO: 580140 - DNA, 15 bp, Homo sapiens
aggtaaaaaacaaat

SEQ ID NO: 580141 - DNA, 15 bp, Homo sapiens
gaggtaaaaaacaaa

SEQ ID NO: 580142 - DNA, 15 bp, Homo sapiens
agaggtaaaaaacaa

SEQ ID NO: 580143 - DNA, 15 bp, Homo sapiens
aagaggtaaaaaaca

SEQ ID NO: 580144 - DNA, 15 bp, Homo sapiens
aaagaggtaaaaaac

SEQ ID NO: 580145 - DNA, 15 bp, Homo sapiens
aaaagaggtaaaaaa

SEQ ID NO: 580146 - DNA, 15 bp, Homo sapiens
caaaagaggtaaaaa

SEQ ID NO: 580147 - DNA, 15 bp, Homo sapiens
ccaaaagaggtaaaa

SEQ ID NO: 580148 - DNA, 15 bp, Homo sapiens
tccaaaagaggtaaa

SEQ ID NO: 580149 - DNA, 15 bp, Homo sapiens
ctccaaaagaggtaa

SEQ ID NO: 580150 - DNA, 15 bp, Homo sapiens
gctccaaaagaggta

SEQ ID NO: 580151 - DNA, 15 bp, Homo sapiens
ggctccaaaagaggt

SEQ ID NO: 580152 - DNA, 15 bp, Homo sapiens
tggctccaaaagagg

SEQ ID NO: 580153 - DNA, 15 bp, Homo sapiens
atggctccaaaagag

SEQ ID NO: 580154 - DNA, 15 bp, Homo sapiens
catggctccaaaaga

SEQ ID NO: 580155 - DNA, 15 bp, Homo sapiens
ccatggctccaaaag

SEQ ID NO: 580156 - DNA, 15 bp, Homo sapiens
tccatggctccaaaa

SEQ ID NO: 580157 - DNA, 15 bp, Homo sapiens
ttccatggctccaaa

SEQ ID NO: 580158 - DNA, 15 bp, Homo sapiens
tttccatggctccaa

SEQ ID NO: 580159 - DNA, 15 bp, Homo sapiens
ctttccatggctcca

SEQ ID NO: 580160 - DNA, 15 bp, Homo sapiens
tctttccatggctcc

SEQ ID NO: 580161 - DNA, 15 bp, Homo sapiens
ctctttccatggctc

SEQ ID NO: 580162 - DNA, 15 bp, Homo sapiens
tctctttccatggct

SEQ ID NO: 580163 - DNA, 15 bp, Homo sapiens
atctctttccatggc

SEQ ID NO: 580164 - DNA, 15 bp, Homo sapiens
catctctttccatgg

SEQ ID NO: 580165 - DNA, 15 bp, Homo sapiens
tcatctctttccatg

SEQ ID NO: 580166 - DNA, 15 bp, Homo sapiens
ttcatctctttccat

SEQ ID NO: 580167 - DNA, 15 bp, Homo sapiens
tttcatctctttcca

SEQ ID NO: 580168 - DNA, 15 bp, Homo sapiens
ctttcatctctttcc

SEQ ID NO: 580169 - DNA, 15 bp, Homo sapiens
cctttcatctctttc

SEQ ID NO: 580170 - DNA, 15 bp, Homo sapiens
ccctttcatctcttt

SEQ ID NO: 580171 - DNA, 15 bp, Homo sapiens
tccctttcatctctt

SEQ ID NO: 580172 - DNA, 15 bp, Homo sapiens
atccctttcatctct

SEQ ID NO: 580173 - DNA, 15 bp, Homo sapiens
tatccctttcatctc

SEQ ID NO: 580174 - DNA, 15 bp, Homo sapiens
ctatccctttcatct

SEQ ID NO: 580175 - DNA, 15 bp, Homo sapiens
tctatccctttcatc

SEQ ID NO: 580176 - DNA, 15 bp, Homo sapiens
ctctatccctttcat

SEQ ID NO: 580177 - DNA, 15 bp, Homo sapiens
gctctatccctttca

SEQ ID NO: 580178 - DNA, 15 bp, Homo sapiens
tgctctatccctttc

SEQ ID NO: 580179 - DNA, 15 bp, Homo sapiens
atgctctatcccttt

SEQ ID NO: 580180 - DNA, 15 bp, Homo sapiens
tatgctctatccctt

SEQ ID NO: 580181 - DNA, 15 bp, Homo sapiens
ctatgctctatccct

SEQ ID NO: 580182 - DNA, 15 bp, Homo sapiens
gctatgctctatccc

SEQ ID NO: 580183 - DNA, 15 bp, Homo sapiens
ggctatgctctatcc

SEQ ID NO: 580184 - DNA, 15 bp, Homo sapiens
tggctatgctctatc

SEQ ID NO: 580185 - DNA, 15 bp, Homo sapiens
atggctatgctctat

SEQ ID NO: 580186 - DNA, 15 bp, Homo sapiens
aatggctatgctcta

SEQ ID NO: 580187 - DNA, 15 bp, Homo sapiens
caatggctatgctct

SEQ ID NO: 580188 - DNA, 15 bp, Homo sapiens
acaatggctatgctc

SEQ ID NO: 580189 - DNA, 15 bp, Homo sapiens
cacaatggctatgct

SEQ ID NO: 580190 - DNA, 15 bp, Homo sapiens
acacaatggctatgc

SEQ ID NO: 580191 - DNA, 15 bp, Homo sapiens
aacacaatggctatg

SEQ ID NO: 580192 - DNA, 15 bp, Homo sapiens
aaacacaatggctat

SEQ ID NO: 580193 - DNA, 15 bp, Homo sapiens
caaacacaatggcta

SEQ ID NO: 580194 - DNA, 15 bp, Homo sapiens
ccaaacacaatggct

SEQ ID NO: 580195 - DNA, 15 bp, Homo sapiens
gccaaacacaatggc

SEQ ID NO: 580196 - DNA, 15 bp, Homo sapiens
agccaaacacaatgg

SEQ ID NO: 580197 - DNA, 15 bp, Homo sapiens
tagccaaacacaatg

SEQ ID NO: 580198 - DNA, 15 bp, Homo sapiens
atagccaaacacaat

SEQ ID NO: 580199 - DNA, 15 bp, Homo sapiens
aatagccaaacacaa

SEQ ID NO: 580200 - DNA, 15 bp, Homo sapiens
aaatagccaaacaca

SEQ ID NO: 580201 - DNA, 15 bp, Homo sapiens
caaatagccaaacac

SEQ ID NO: 580202 - DNA, 15 bp, Homo sapiens
gcaaatagccaaaca

SEQ ID NO: 580203 - DNA, 15 bp, Homo sapiens
cgcaaatagccaaac

SEQ ID NO: 580204 - DNA, 15 bp, Homo sapiens
tcgcaaatagccaaa

SEQ ID NO: 580205 - DNA, 15 bp, Homo sapiens
ttcgcaaatagccaa

SEQ ID NO: 580206 - DNA, 15 bp, Homo sapiens
cttcgcaaatagcca

SEQ ID NO: 580207 - DNA, 15 bp, Homo sapiens
ccttcgcaaatagcc

SEQ ID NO: 580208 - DNA, 15 bp, Homo sapiens
accttcgcaaatagc

SEQ ID NO: 580209 - DNA, 15 bp, Homo sapiens
aaccttcgcaaatag

SEQ ID NO: 580210 - DNA, 15 bp, Homo sapiens
caaccttcgcaaata

SEQ ID NO: 580211 - DNA, 15 bp, Homo sapiens
ccaaccttcgcaaat

SEQ ID NO: 580212 - DNA, 15 bp, Homo sapiens
gccaaccttcgcaaa

SEQ ID NO: 580213 - DNA, 15 bp, Homo sapiens
tgccaaccttcgcaa

SEQ ID NO: 580214 - DNA, 15 bp, Homo sapiens
ttgccaaccttcgca

SEQ ID NO: 580215 - DNA, 15 bp, Homo sapiens
tttgccaaccttcgc

SEQ ID NO: 580216 - DNA, 15 bp, Homo sapiens
atttgccaaccttcg

SEQ ID NO: 580217 - DNA, 15 bp, Homo sapiens
aatttgccaaccttc

SEQ ID NO: 580218 - DNA, 15 bp, Homo sapiens
taatttgccaacctt

SEQ ID NO: 580219 - DNA, 15 bp, Homo sapiens
ctaatttgccaacct

SEQ ID NO: 580220 - DNA, 15 bp, Homo sapiens
actaatttgccaacc

SEQ ID NO: 580221 - DNA, 15 bp, Homo sapiens
cactaatttgccaac

SEQ ID NO: 580222 - DNA, 15 bp, Homo sapiens
tcactaatttgccaa

SEQ ID NO: 580223 - DNA, 15 bp, Homo sapiens
atcactaatttgcca

SEQ ID NO: 580224 - DNA, 15 bp, Homo sapiens
aatcactaatttgcc

SEQ ID NO: 580225 - DNA, 15 bp, Homo sapiens
caatcactaatttgc

SEQ ID NO: 580226 - DNA, 15 bp, Homo sapiens
gcaatcactaatttg

SEQ ID NO: 580227 - DNA, 15 bp, Homo sapiens
agcaatcactaattt

SEQ ID NO: 580228 - DNA, 15 bp, Homo sapiens
tagcaatcactaatt

SEQ ID NO: 580229 - DNA, 15 bp, Homo sapiens
ttagcaatcactaat

SEQ ID NO: 580230 - DNA, 15 bp, Homo sapiens
tttagcaatcactaa

SEQ ID NO: 580231 - DNA, 15 bp, Homo sapiens
atttagcaatcacta

SEQ ID NO: 580232 - DNA, 15 bp, Homo sapiens
gatttagcaatcact

SEQ ID NO: 580233 - DNA, 15 bp, Homo sapiens
agatttagcaatcac

SEQ ID NO: 580234 - DNA, 15 bp, Homo sapiens
gagatttagcaatca

SEQ ID NO: 580235 - DNA, 15 bp, Homo sapiens
tgagatttagcaatc

SEQ ID NO: 580236 - DNA, 15 bp, Homo sapiens
atgagatttagcaat

SEQ ID NO: 580237 - DNA, 15 bp, Homo sapiens
tatgagatttagcaa

SEQ ID NO: 580238 - DNA, 15 bp, Homo sapiens
ttatgagatttagca

SEQ ID NO: 580239 - DNA, 15 bp, Homo sapiens
cttatgagatttagc

SEQ ID NO: 580240 - DNA, 15 bp, Homo sapiens
gcttatgagatttag

SEQ ID NO: 580241 - DNA, 15 bp, Homo sapiens
agcttatgagattta

SEQ ID NO: 580242 - DNA, 15 bp, Homo sapiens
aagcttatgagattt

SEQ ID NO: 580243 - DNA, 15 bp, Homo sapiens
caagcttatgagatt

SEQ ID NO: 580244 - DNA, 15 bp, Homo sapiens
tcaagcttatgagat

SEQ ID NO: 580245 - DNA, 15 bp, Homo sapiens
ctcaagcttatgaga

SEQ ID NO: 580246 - DNA, 15 bp, Homo sapiens
actcaagcttatgag

SEQ ID NO: 580247 - DNA, 15 bp, Homo sapiens
tactcaagcttatga

SEQ ID NO: 580248 - DNA, 15 bp, Homo sapiens
atactcaagcttatg

SEQ ID NO: 580249 - DNA, 15 bp, Homo sapiens
aatactcaagcttat

SEQ ID NO: 580250 - DNA, 15 bp, Homo sapiens
aaatactcaagctta

SEQ ID NO: 580251 - DNA, 15 bp, Homo sapiens
aaaatactcaagctt

SEQ ID NO: 580252 - DNA, 15 bp, Homo sapiens
taaaatactcaagct

SEQ ID NO: 580253 - DNA, 15 bp, Homo sapiens
ttaaaatactcaagc

SEQ ID NO: 580254 - DNA, 15 bp, Homo sapiens
tttaaaatactcaag

SEQ ID NO: 580255 - DNA, 15 bp, Homo sapiens
ctttaaaatactcaa

SEQ ID NO: 580256 - DNA, 15 bp, Homo sapiens
actttaaaatactca

SEQ ID NO: 580257 - DNA, 15 bp, Homo sapiens
aactttaaaatactc

SEQ ID NO: 580258 - DNA, 15 bp, Homo sapiens
gaactttaaaatact

SEQ ID NO: 580259 - DNA, 15 bp, Homo sapiens
tgaactttaaaatac

SEQ ID NO: 580260 - DNA, 15 bp, Homo sapiens
ctgaactttaaaata

SEQ ID NO: 580261 - DNA, 15 bp, Homo sapiens
tctgaactttaaaat

SEQ ID NO: 580262 - DNA, 15 bp, Homo sapiens
ctctgaactttaaaa

SEQ ID NO: 580263 - DNA, 15 bp, Homo sapiens
tctctgaactttaaa

SEQ ID NO: 580264 - DNA, 15 bp, Homo sapiens
atctctgaactttaa

SEQ ID NO: 580265 - DNA, 15 bp, Homo sapiens
aatctctgaacttta

SEQ ID NO: 580266 - DNA, 15 bp, Homo sapiens
caatctctgaacttt

SEQ ID NO: 580267 - DNA, 15 bp, Homo sapiens
tcaatctctgaactt

SEQ ID NO: 580268 - DNA, 15 bp, Homo sapiens
ctcaatctctgaact

SEQ ID NO: 580269 - DNA, 15 bp, Homo sapiens
cctcaatctctgaac

SEQ ID NO: 580270 - DNA, 15 bp, Homo sapiens
ccctcaatctctgaa

SEQ ID NO: 580271 - DNA, 15 bp, Homo sapiens
gccctcaatctctga

SEQ ID NO: 580272 - DNA, 15 bp, Homo sapiens
tgccctcaatctctg

SEQ ID NO: 580273 - DNA, 15 bp, Homo sapiens
atgccctcaatctct

SEQ ID NO: 580274 - DNA, 15 bp, Homo sapiens
tatgccctcaatctc

SEQ ID NO: 580275 - DNA, 15 bp, Homo sapiens
ttatgccctcaatct

SEQ ID NO: 580276 - DNA, 15 bp, Homo sapiens
tttatgccctcaatc

SEQ ID NO: 580277 - DNA, 15 bp, Homo sapiens
atttatgccctcaat

SEQ ID NO: 580278 - DNA, 15 bp, Homo sapiens
gatttatgccctcaa

SEQ ID NO: 580279 - DNA, 15 bp, Homo sapiens
agatttatgccctca

SEQ ID NO: 580280 - DNA, 15 bp, Homo sapiens
tagatttatgccctc

SEQ ID NO: 580281 - DNA, 15 bp, Homo sapiens
ttagatttatgccct

SEQ ID NO: 580282 - DNA, 15 bp, Homo sapiens
attagatttatgccc

SEQ ID NO: 580283 - DNA, 15 bp, Homo sapiens
tattagatttatgcc

SEQ ID NO: 580284 - DNA, 15 bp, Homo sapiens
gtattagatttatgc

SEQ ID NO: 580285 - DNA, 15 bp, Homo sapiens
agtattagatttatg

SEQ ID NO: 580286 - DNA, 15 bp, Homo sapiens
aagtattagatttat

SEQ ID NO: 580287 - DNA, 15 bp, Homo sapiens
gaagtattagattta

SEQ ID NO: 580288 - DNA, 15 bp, Homo sapiens
cgaagtattagattt

SEQ ID NO: 580289 - DNA, 15 bp, Homo sapiens
ccgaagtattagatt

SEQ ID NO: 580290 - DNA, 15 bp, Homo sapiens
gccgaagtattagat

SEQ ID NO: 580291 - DNA, 15 bp, Homo sapiens
agccgaagtattaga

SEQ ID NO: 580292 - DNA, 15 bp, Homo sapiens
gagccgaagtattag

SEQ ID NO: 580293 - DNA, 15 bp, Homo sapiens
ggagccgaagtatta

SEQ ID NO: 580294 - DNA, 15 bp, Homo sapiens
aggagccgaagtatt

SEQ ID NO: 580295 - DNA, 15 bp, Homo sapiens
aaggagccgaagtat

SEQ ID NO: 580296 - DNA, 15 bp, Homo sapiens
gaaggagccgaagta

SEQ ID NO: 580297 - DNA, 15 bp, Homo sapiens
ggaaggagccgaagt

SEQ ID NO: 580298 - DNA, 15 bp, Homo sapiens
tggaaggagccgaag

SEQ ID NO: 580299 - DNA, 15 bp, Homo sapiens
gtggaaggagccgaa

SEQ ID NO: 580300 - DNA, 15 bp, Homo sapiens
tgtggaaggagccga

SEQ ID NO: 580301 - DNA, 15 bp, Homo sapiens
ttgtggaaggagccg

SEQ ID NO: 580302 - DNA, 15 bp, Homo sapiens
attgtggaaggagcc

SEQ ID NO: 580303 - DNA, 15 bp, Homo sapiens
aattgtggaaggagc

SEQ ID NO: 580304 - DNA, 15 bp, Homo sapiens
aaattgtggaaggag

SEQ ID NO: 580305 - DNA, 15 bp, Homo sapiens
aaaattgtggaagga

SEQ ID NO: 580306 - DNA, 15 bp, Homo sapiens
taaaattgtggaagg

SEQ ID NO: 580307 - DNA, 15 bp, Homo sapiens
gtaaaattgtggaag

SEQ ID NO: 580308 - DNA, 15 bp, Homo sapiens
agtaaaattgtggaa

SEQ ID NO: 580309 - DNA, 15 bp, Homo sapiens
tagtaaaattgtgga

SEQ ID NO: 580310 - DNA, 15 bp, Homo sapiens
gtagtaaaattgtgg

SEQ ID NO: 580311 - DNA, 15 bp, Homo sapiens
tgtagtaaaattgtg

SEQ ID NO: 580312 - DNA, 15 bp, Homo sapiens
atgtagtaaaattgt

SEQ ID NO: 580313 - DNA, 15 bp, Homo sapiens
aatgtagtaaaattg

SEQ ID NO: 580314 - DNA, 15 bp, Homo sapiens
aaatgtagtaaaatt

SEQ ID NO: 580315 - DNA, 15 bp, Homo sapiens
gaaatgtagtaaaat

SEQ ID NO: 580316 - DNA, 15 bp, Homo sapiens
agaaatgtagtaaaa

SEQ ID NO: 580317 - DNA, 15 bp, Homo sapiens
cagaaatgtagtaaa

SEQ ID NO: 580318 - DNA, 15 bp, Homo sapiens
gcagaaatgtagtaa

SEQ ID NO: 580319 - DNA, 15 bp, Homo sapiens
ggcagaaatgtagta

SEQ ID NO: 580320 - DNA, 15 bp, Homo sapiens
gggcagaaatgtagt

SEQ ID NO: 580321 - DNA, 15 bp, Homo sapiens
tgggcagaaatgtag

SEQ ID NO: 580322 - DNA, 15 bp, Homo sapiens
ttgggcagaaatgta

SEQ ID NO: 580323 - DNA, 15 bp, Homo sapiens
cttgggcagaaatgt

SEQ ID NO: 580324 - DNA, 15 bp, Homo sapiens
tcttgggcagaaatg

SEQ ID NO: 580325 - DNA, 15 bp, Homo sapiens
ttcttgggcagaaat

SEQ ID NO: 580326 - DNA, 15 bp, Homo sapiens
gttcttgggcagaaa

SEQ ID NO: 580327 - DNA, 15 bp, Homo sapiens
tgttcttgggcagaa

SEQ ID NO: 580328 - DNA, 15 bp, Homo sapiens
ctgttcttgggcaga

SEQ ID NO: 580329 - DNA, 15 bp, Homo sapiens
tctgttcttgggcag

SEQ ID NO: 580330 - DNA, 15 bp, Homo sapiens
atctgttcttgggca

SEQ ID NO: 580331 - DNA, 15 bp, Homo sapiens
catctgttcttgggc

SEQ ID NO: 580332 - DNA, 15 bp, Homo sapiens
tcatctgttcttggg

SEQ ID NO: 580333 - DNA, 15 bp, Homo sapiens
gtcatctgttcttgg

SEQ ID NO: 580334 - DNA, 15 bp, Homo sapiens
ggtcatctgttcttg

SEQ ID NO: 580335 - DNA, 15 bp, Homo sapiens
tggtcatctgttctt

SEQ ID NO: 580336 - DNA, 15 bp, Homo sapiens
atggtcatctgttct

SEQ ID NO: 580337 - DNA, 15 bp, Homo sapiens
catggtcatctgttc

SEQ ID NO: 580338 - DNA, 15 bp, Homo sapiens
ccatggtcatctgtt

SEQ ID NO: 580339 - DNA, 15 bp, Homo sapiens
tccatggtcatctgt

SEQ ID NO: 580340 - DNA, 15 bp, Homo sapiens
atccatggtcatctg

SEQ ID NO: 580341 - DNA, 15 bp, Homo sapiens
tatccatggtcatct

SEQ ID NO: 580342 - DNA, 15 bp, Homo sapiens
ttatccatggtcatc

SEQ ID NO: 580343 - DNA, 15 bp, Homo sapiens
attatccatggtcat

SEQ ID NO: 580344 - DNA, 15 bp, Homo sapiens
cattatccatggtca

SEQ ID NO: 580345 - DNA, 15 bp, Homo sapiens
gcattatccatggtc

SEQ ID NO: 580346 - DNA, 15 bp, Homo sapiens
tgcattatccatggt

SEQ ID NO: 580347 - DNA, 15 bp, Homo sapiens
atgcattatccatgg

SEQ ID NO: 580348 - DNA, 15 bp, Homo sapiens
tatgcattatccatg

SEQ ID NO: 580349 - DNA, 15 bp, Homo sapiens
atatgcattatccat

SEQ ID NO: 580350 - DNA, 15 bp, Homo sapiens
gatatgcattatcca

SEQ ID NO: 580351 - DNA, 15 bp, Homo sapiens
cgatatgcattatcc

SEQ ID NO: 580352 - DNA, 15 bp, Homo sapiens
acgatatgcattatc

SEQ ID NO: 580353 - DNA, 15 bp, Homo sapiens
tacgatatgcattat

SEQ ID NO: 580354 - DNA, 15 bp, Homo sapiens
ctacgatatgcatta

SEQ ID NO: 580355 - DNA, 15 bp, Homo sapiens
tctacgatatgcatt

SEQ ID NO: 580356 - DNA, 15 bp, Homo sapiens
atctacgatatgcat

SEQ ID NO: 580357 - DNA, 15 bp, Homo sapiens
tatctacgatatgca

SEQ ID NO: 580358 - DNA, 15 bp, Homo sapiens
gtatctacgatatgc

SEQ ID NO: 580359 - DNA, 15 bp, Homo sapiens
agtatctacgatatg

SEQ ID NO: 580360 - DNA, 15 bp, Homo sapiens
aagtatctacgatat

SEQ ID NO: 580361 - DNA, 15 bp, Homo sapiens
aaagtatctacgata

SEQ ID NO: 580362 - DNA, 15 bp, Homo sapiens
aaaagtatctacgat

SEQ ID NO: 580363 - DNA, 15 bp, Homo sapiens
aaaaagtatctacga

SEQ ID NO: 580364 - DNA, 15 bp, Homo sapiens
taaaaagtatctacg

SEQ ID NO: 580365 - DNA, 15 bp, Homo sapiens
ttaaaaagtatctac

SEQ ID NO: 580366 - DNA, 15 bp, Homo sapiens
cttaaaaagtatcta

SEQ ID NO: 580367 - DNA, 15 bp, Homo sapiens
acttaaaaagtatct

SEQ ID NO: 580368 - DNA, 15 bp, Homo sapiens
aacttaaaaagtatc

SEQ ID NO: 580369 - DNA, 15 bp, Homo sapiens
aaacttaaaaagtat

SEQ ID NO: 580370 - DNA, 15 bp, Homo sapiens
caaacttaaaaagta

SEQ ID NO: 580371 - DNA, 15 bp, Homo sapiens
ccaaacttaaaaagt

SEQ ID NO: 580372 - DNA, 15 bp, Homo sapiens
tccaaacttaaaaag

SEQ ID NO: 580373 - DNA, 15 bp, Homo sapiens
ttccaaacttaaaaa

SEQ ID NO: 580374 - DNA, 15 bp, Homo sapiens
gttccaaacttaaaa

SEQ ID NO: 580375 - DNA, 15 bp, Homo sapiens
ggttccaaacttaaa

SEQ ID NO: 580376 - DNA, 15 bp, Homo sapiens
aggttccaaacttaa

SEQ ID NO: 580377 - DNA, 15 bp, Homo sapiens
aaggttccaaactta

SEQ ID NO: 580378 - DNA, 15 bp, Homo sapiens
aaaggttccaaactt

SEQ ID NO: 580379 - DNA, 15 bp, Homo sapiens
aaaaggttccaaact

SEQ ID NO: 580380 - DNA, 15 bp, Homo sapiens
aaaaaggttccaaac

SEQ ID NO: 580381 - DNA, 15 bp, Homo sapiens
caaaaaggttccaaa

SEQ ID NO: 580382 - DNA, 15 bp, Homo sapiens
gcaaaaaggttccaa

SEQ ID NO: 580383 - DNA, 15 bp, Homo sapiens
ggcaaaaaggttcca

SEQ ID NO: 580384 - DNA, 15 bp, Homo sapiens
tggcaaaaaggttcc

SEQ ID NO: 580385 - DNA, 15 bp, Homo sapiens
ttggcaaaaaggttc

SEQ ID NO: 580386 - DNA, 15 bp, Homo sapiens
cttggcaaaaaggtt

SEQ ID NO: 580387 - DNA, 15 bp, Homo sapiens
tcttggcaaaaaggt

SEQ ID NO: 580388 - DNA, 15 bp, Homo sapiens
ctcttggcaaaaagg

SEQ ID NO: 580389 - DNA, 15 bp, Homo sapiens
cctcttggcaaaaag

SEQ ID NO: 580390 - DNA, 15 bp, Homo sapiens
ccctcttggcaaaaa

SEQ ID NO: 580391 - DNA, 15 bp, Homo sapiens
accctcttggcaaaa

SEQ ID NO: 580392 - DNA, 15 bp, Homo sapiens
taccctcttggcaaa

SEQ ID NO: 580393 - DNA, 15 bp, Homo sapiens
ctaccctcttggcaa

SEQ ID NO: 580394 - DNA, 15 bp, Homo sapiens
actaccctcttggca

SEQ ID NO: 580395 - DNA, 15 bp, Homo sapiens
cactaccctcttggc

SEQ ID NO: 580396 - DNA, 15 bp, Homo sapiens
ccactaccctcttgg

SEQ ID NO: 580397 - DNA, 15 bp, Homo sapiens
tccactaccctcttg

SEQ ID NO: 580398 - DNA, 15 bp, Homo sapiens
ctccactaccctctt

SEQ ID NO: 580399 - DNA, 15 bp, Homo sapiens
tctccactaccctct

SEQ ID NO: 580400 - DNA, 15 bp, Homo sapiens
ttctccactaccctc

SEQ ID NO: 580401 - DNA, 15 bp, Homo sapiens
cttctccactaccct

SEQ ID NO: 580402 - DNA, 15 bp, Homo sapiens
acttctccactaccc

SEQ ID NO: 580403 - DNA, 15 bp, Homo sapiens
cacttctccactacc

SEQ ID NO: 580404 - DNA, 15 bp, Homo sapiens
tcacttctccactac

SEQ ID NO: 580405 - DNA, 15 bp, Homo sapiens
ttcacttctccacta

SEQ ID NO: 580406 - DNA, 15 bp, Homo sapiens
cttcacttctccact

SEQ ID NO: 580407 - DNA, 15 bp, Homo sapiens
acttcacttctccac

SEQ ID NO: 580408 - DNA, 15 bp, Homo sapiens
gacttcacttctcca

SEQ ID NO: 580409 - DNA, 15 bp, Homo sapiens
tgacttcacttctcc

SEQ ID NO: 580410 - DNA, 15 bp, Homo sapiens
ttgacttcacttctc

SEQ ID NO: 580411 - DNA, 15 bp, Homo sapiens
tttgacttcacttct

SEQ ID NO: 580412 - DNA, 15 bp, Homo sapiens
ttttgacttcacttc

SEQ ID NO: 580413 - DNA, 15 bp, Homo sapiens
gttttgacttcactt

SEQ ID NO: 580414 - DNA, 15 bp, Homo sapiens
ggttttgacttcact

SEQ ID NO: 580415 - DNA, 15 bp, Homo sapiens
aggttttgacttcac

SEQ ID NO: 580416 - DNA, 15 bp, Homo sapiens
aaggttttgacttca

SEQ ID NO: 580417 - DNA, 15 bp, Homo sapiens
caaggttttgacttc

SEQ ID NO: 580418 - DNA, 15 bp, Homo sapiens
tcaaggttttgactt

SEQ ID NO: 580419 - DNA, 15 bp, Homo sapiens
gtcaaggttttgact

SEQ ID NO: 580420 - DNA, 15 bp, Homo sapiens
ggtcaaggttttgac

SEQ ID NO: 580421 - DNA, 15 bp, Homo sapiens
aggtcaaggttttga

SEQ ID NO: 580422 - DNA, 15 bp, Homo sapiens
aaggtcaaggttttg

SEQ ID NO: 580423 - DNA, 15 bp, Homo sapiens
gaaggtcaaggtttt

SEQ ID NO: 580424 - DNA, 15 bp, Homo sapiens
ggaaggtcaaggttt

SEQ ID NO: 580425 - DNA, 15 bp, Homo sapiens
aggaaggtcaaggtt

SEQ ID NO: 580426 - DNA, 15 bp, Homo sapiens
aaggaaggtcaaggt

SEQ ID NO: 580427 - DNA, 15 bp, Homo sapiens
caaggaaggtcaagg

SEQ ID NO: 580428 - DNA, 15 bp, Homo sapiens
gcaaggaaggtcaag

SEQ ID NO: 580429 - DNA, 15 bp, Homo sapiens
ggcaaggaaggtcaa

SEQ ID NO: 580430 - DNA, 15 bp, Homo sapiens
aggcaaggaaggtca

SEQ ID NO: 580431 - DNA, 15 bp, Homo sapiens
taggcaaggaaggtc

SEQ ID NO: 580432 - DNA, 15 bp, Homo sapiens
gtaggcaaggaaggt

SEQ ID NO: 580433 - DNA, 15 bp, Homo sapiens
agtaggcaaggaagg

SEQ ID NO: 580434 - DNA, 15 bp, Homo sapiens
aagtaggcaaggaag

SEQ ID NO: 580435 - DNA, 15 bp, Homo sapiens
aaagtaggcaaggaa

SEQ ID NO: 580436 - DNA, 15 bp, Homo sapiens
taaagtaggcaagga

SEQ ID NO: 580437 - DNA, 15 bp, Homo sapiens
ataaagtaggcaagg

SEQ ID NO: 580438 - DNA, 15 bp, Homo sapiens
cataaagtaggcaag

SEQ ID NO: 580439 - DNA, 15 bp, Homo sapiens
gcataaagtaggcaa

SEQ ID NO: 580440 - DNA, 15 bp, Homo sapiens
agcataaagtaggca

SEQ ID NO: 580441 - DNA, 15 bp, Homo sapiens
cagcataaagtaggc

SEQ ID NO: 580442 - DNA, 15 bp, Homo sapiens
acagcataaagtagg

SEQ ID NO: 580443 - DNA, 15 bp, Homo sapiens
tacagcataaagtag

SEQ ID NO: 580444 - DNA, 15 bp, Homo sapiens
ctacagcataaagta

SEQ ID NO: 580445 - DNA, 15 bp, Homo sapiens
actacagcataaagt

SEQ ID NO: 580446 - DNA, 15 bp, Homo sapiens
aactacagcataaag

SEQ ID NO: 580447 - DNA, 15 bp, Homo sapiens
aaactacagcataaa

SEQ ID NO: 580448 - DNA, 15 bp, Homo sapiens
taaactacagcataa

SEQ ID NO: 580449 - DNA, 15 bp, Homo sapiens
ataaactacagcata

SEQ ID NO: 580450 - DNA, 15 bp, Homo sapiens
tataaactacagcat

SEQ ID NO: 580451 - DNA, 15 bp, Homo sapiens
atataaactacagca

SEQ ID NO: 580452 - DNA, 15 bp, Homo sapiens
tatataaactacagc

SEQ ID NO: 580453 - DNA, 15 bp, Homo sapiens
gtatataaactacag

SEQ ID NO: 580454 - DNA, 15 bp, Homo sapiens
ggtatataaactaca

SEQ ID NO: 580455 - DNA, 15 bp, Homo sapiens
aggtatataaactac

SEQ ID NO: 580456 - DNA, 15 bp, Homo sapiens
aaggtatataaacta

SEQ ID NO: 580457 - DNA, 15 bp, Homo sapiens
gaaggtatataaact

SEQ ID NO: 580458 - DNA, 15 bp, Homo sapiens
agaaggtatataaac

SEQ ID NO: 580459 - DNA, 15 bp, Homo sapiens
aagaaggtatataaa

SEQ ID NO: 580460 - DNA, 15 bp, Homo sapiens
aaagaaggtatataa

SEQ ID NO: 580461 - DNA, 15 bp, Homo sapiens
gaaagaaggtatata

SEQ ID NO: 580462 - DNA, 15 bp, Homo sapiens
ggaaagaaggtatat

SEQ ID NO: 580463 - DNA, 15 bp, Homo sapiens
aggaaagaaggtata

SEQ ID NO: 580464 - DNA, 15 bp, Homo sapiens
gaggaaagaaggtat

SEQ ID NO: 580465 - DNA, 15 bp, Homo sapiens
ggaggaaagaaggta

SEQ ID NO: 580466 - DNA, 15 bp, Homo sapiens
gggaggaaagaaggt

SEQ ID NO: 580467 - DNA, 15 bp, Homo sapiens
tgggaggaaagaagg

SEQ ID NO: 580468 - DNA, 15 bp, Homo sapiens
gtgggaggaaagaag

SEQ ID NO: 580469 - DNA, 15 bp, Homo sapiens
ggtgggaggaaagaa

SEQ ID NO: 580470 - DNA, 15 bp, Homo sapiens
aggtgggaggaaaga

SEQ ID NO: 580471 - DNA, 15 bp, Homo sapiens
aaggtgggaggaaag

SEQ ID NO: 580472 - DNA, 15 bp, Homo sapiens
aaaggtgggaggaaa

SEQ ID NO: 580473 - DNA, 15 bp, Homo sapiens
gaaaggtgggaggaa

SEQ ID NO: 580474 - DNA, 15 bp, Homo sapiens
cgaaaggtgggagga

SEQ ID NO: 580475 - DNA, 15 bp, Homo sapiens
acgaaaggtgggagg

SEQ ID NO: 580476 - DNA, 15 bp, Homo sapiens
tacgaaaggtgggag

SEQ ID NO: 580477 - DNA, 15 bp, Homo sapiens
ttacgaaaggtggga

SEQ ID NO: 580478 - DNA, 15 bp, Homo sapiens
tttacgaaaggtggg

SEQ ID NO: 580479 - DNA, 15 bp, Homo sapiens
ctttacgaaaggtgg

SEQ ID NO: 580480 - DNA, 15 bp, Homo sapiens
gctttacgaaaggtg

SEQ ID NO: 580481 - DNA, 15 bp, Homo sapiens
agctttacgaaaggt

SEQ ID NO: 580482 - DNA, 15 bp, Homo sapiens
tagctttacgaaagg

SEQ ID NO: 580483 - DNA, 15 bp, Homo sapiens
ttagctttacgaaag

SEQ ID NO: 580484 - DNA, 15 bp, Homo sapiens
tttagctttacgaaa

SEQ ID NO: 580485 - DNA, 15 bp, Homo sapiens
ttttagctttacgaa

SEQ ID NO: 580486 - DNA, 15 bp, Homo sapiens
cttttagctttacga

SEQ ID NO: 580487 - DNA, 15 bp, Homo sapiens
tcttttagctttacg

SEQ ID NO: 580488 - DNA, 15 bp, Homo sapiens
ttcttttagctttac

SEQ ID NO: 580489 - DNA, 15 bp, Homo sapiens
cttcttttagcttta

SEQ ID NO: 580490 - DNA, 15 bp, Homo sapiens
gcttcttttagcttt

SEQ ID NO: 580491 - DNA, 15 bp, Homo sapiens
agcttcttttagctt

SEQ ID NO: 580492 - DNA, 15 bp, Homo sapiens
aagcttcttttagct

SEQ ID NO: 580493 - DNA, 15 bp, Homo sapiens
taagcttcttttagc

SEQ ID NO: 580494 - DNA, 15 bp, Homo sapiens
ctaagcttcttttag

SEQ ID NO: 580495 - DNA, 15 bp, Homo sapiens
gctaagcttctttta

SEQ ID NO: 580496 - DNA, 15 bp, Homo sapiens
ggctaagcttctttt

SEQ ID NO: 580497 - DNA, 15 bp, Homo sapiens
aggctaagcttcttt

SEQ ID NO: 580498 - DNA, 15 bp, Homo sapiens
gaggctaagcttctt

SEQ ID NO: 580499 - DNA, 15 bp, Homo sapiens
ggaggctaagcttct

SEQ ID NO: 580500 - DNA, 15 bp, Homo sapiens
aggaggctaagcttc

SEQ ID NO: 580501 - DNA, 15 bp, Homo sapiens
aaggaggctaagctt

SEQ ID NO: 580502 - DNA, 15 bp, Homo sapiens
taaggaggctaagct

SEQ ID NO: 580503 - DNA, 15 bp, Homo sapiens
ttaaggaggctaagc

SEQ ID NO: 580504 - DNA, 15 bp, Homo sapiens
attaaggaggctaag

SEQ ID NO: 580505 - DNA, 15 bp, Homo sapiens
cattaaggaggctaa

SEQ ID NO: 580506 - DNA, 15 bp, Homo sapiens
acattaaggaggcta

SEQ ID NO: 580507 - DNA, 15 bp, Homo sapiens
aacattaaggaggct

SEQ ID NO: 580508 - DNA, 15 bp, Homo sapiens
aaacattaaggaggc

SEQ ID NO: 580509 - DNA, 15 bp, Homo sapiens
aaaacattaaggagg

SEQ ID NO: 580510 - DNA, 15 bp, Homo sapiens
gaaaacattaaggag

SEQ ID NO: 580511 - DNA, 15 bp, Homo sapiens
ggaaaacattaagga

SEQ ID NO: 580512 - DNA, 15 bp, Homo sapiens
tggaaaacattaagg

SEQ ID NO: 580513 - DNA, 15 bp, Homo sapiens
ctggaaaacattaag

SEQ ID NO: 580514 - DNA, 15 bp, Homo sapiens
gctggaaaacattaa

SEQ ID NO: 580515 - DNA, 15 bp, Homo sapiens
agctggaaaacatta

SEQ ID NO: 580516 - DNA, 15 bp, Homo sapiens
cagctggaaaacatt

SEQ ID NO: 580517 - DNA, 15 bp, Homo sapiens
tcagctggaaaacat

SEQ ID NO: 580518 - DNA, 15 bp, Homo sapiens
gtcagctggaaaaca

SEQ ID NO: 580519 - DNA, 15 bp, Homo sapiens
tgtcagctggaaaac

SEQ ID NO: 580520 - DNA, 15 bp, Homo sapiens
ttgtcagctggaaaa

SEQ ID NO: 580521 - DNA, 15 bp, Homo sapiens
tttgtcagctggaaa

SEQ ID NO: 580522 - DNA, 15 bp, Homo sapiens
ttttgtcagctggaa

SEQ ID NO: 580523 - DNA, 15 bp, Homo sapiens
attttgtcagctgga

SEQ ID NO: 580524 - DNA, 15 bp, Homo sapiens
tattttgtcagctgg

SEQ ID NO: 580525 - DNA, 15 bp, Homo sapiens
atattttgtcagctg

SEQ ID NO: 580526 - DNA, 15 bp, Homo sapiens
aatattttgtcagct

SEQ ID NO: 580527 - DNA, 15 bp, Homo sapiens
caatattttgtcagc

SEQ ID NO: 580528 - DNA, 15 bp, Homo sapiens
acaatattttgtcag

SEQ ID NO: 580529 - DNA, 15 bp, Homo sapiens
aacaatattttgtca

SEQ ID NO: 580530 - DNA, 15 bp, Homo sapiens
aaacaatattttgtc

SEQ ID NO: 580531 - DNA, 15 bp, Homo sapiens
taaacaatattttgt

SEQ ID NO: 580532 - DNA, 15 bp, Homo sapiens
ttaaacaatattttg

SEQ ID NO: 580533 - DNA, 15 bp, Homo sapiens
gttaaacaatatttt

SEQ ID NO: 580534 - DNA, 15 bp, Homo sapiens
tgttaaacaatattt

SEQ ID NO: 580535 - DNA, 15 bp, Homo sapiens
atgttaaacaatatt

SEQ ID NO: 580536 - DNA, 15 bp, Homo sapiens
tatgttaaacaatat

SEQ ID NO: 580537 - DNA, 15 bp, Homo sapiens
ttatgttaaacaata

SEQ ID NO: 580538 - DNA, 15 bp, Homo sapiens
gttatgttaaacaat

SEQ ID NO: 580539 - DNA, 15 bp, Homo sapiens
tgttatgttaaacaa

SEQ ID NO: 580540 - DNA, 15 bp, Homo sapiens
atgttatgttaaaca

SEQ ID NO: 580541 - DNA, 15 bp, Homo sapiens
aatgttatgttaaac

SEQ ID NO: 580542 - DNA, 15 bp, Homo sapiens
gaatgttatgttaaa

SEQ ID NO: 580543 - DNA, 15 bp, Homo sapiens
cgaatgttatgttaa

SEQ ID NO: 580544 - DNA, 15 bp, Homo sapiens
tcgaatgttatgtta

SEQ ID NO: 580545 - DNA, 15 bp, Homo sapiens
ttcgaatgttatgtt

SEQ ID NO: 580546 - DNA, 15 bp, Homo sapiens
tttcgaatgttatgt

SEQ ID NO: 580547 - DNA, 15 bp, Homo sapiens
gtttcgaatgttatg

SEQ ID NO: 580548 - DNA, 15 bp, Homo sapiens
agtttcgaatgttat

SEQ ID NO: 580549 - DNA, 15 bp, Homo sapiens
aagtttcgaatgtta

SEQ ID NO: 580550 - DNA, 15 bp, Homo sapiens
aaagtttcgaatgtt

SEQ ID NO: 580551 - DNA, 15 bp, Homo sapiens
aaaagtttcgaatgt

SEQ ID NO: 580552 - DNA, 15 bp, Homo sapiens
aaaaagtttcgaatg

SEQ ID NO: 580553 - DNA, 15 bp, Homo sapiens
aaaaaagtttcgaat

SEQ ID NO: 580554 - DNA, 15 bp, Homo sapiens
aaaaaaagtttcgaa

SEQ ID NO: 580555 - DNA, 15 bp, Homo sapiens
gaaaaaaagtttcga

SEQ ID NO: 580556 - DNA, 15 bp, Homo sapiens
agaaaaaaagtttcg

SEQ ID NO: 580557 - DNA, 15 bp, Homo sapiens
cagaaaaaaagtttc

SEQ ID NO: 580558 - DNA, 15 bp, Homo sapiens
ccagaaaaaaagttt

SEQ ID NO: 580559 - DNA, 15 bp, Homo sapiens
accagaaaaaaagtt

SEQ ID NO: 580560 - DNA, 15 bp, Homo sapiens
caccagaaaaaaagt

SEQ ID NO: 580561 - DNA, 15 bp, Homo sapiens
gcaccagaaaaaaag

SEQ ID NO: 580562 - DNA, 15 bp, Homo sapiens
tgcaccagaaaaaaa

SEQ ID NO: 580563 - DNA, 15 bp, Homo sapiens
gtgcaccagaaaaaa

SEQ ID NO: 580564 - DNA, 15 bp, Homo sapiens
tgtgcaccagaaaaa

SEQ ID NO: 580565 - DNA, 15 bp, Homo sapiens
atgtgcaccagaaaa

SEQ ID NO: 580566 - DNA, 15 bp, Homo sapiens
aatgtgcaccagaaa

SEQ ID NO: 580567 - DNA, 15 bp, Homo sapiens
gaatgtgcaccagaa

SEQ ID NO: 580568 - DNA, 15 bp, Homo sapiens
tgaatgtgcaccaga

SEQ ID NO: 580569 - DNA, 15 bp, Homo sapiens
atgaatgtgcaccag

SEQ ID NO: 580570 - DNA, 15 bp, Homo sapiens
catgaatgtgcacca

SEQ ID NO: 580571 - DNA, 15 bp, Homo sapiens
gcatgaatgtgcacc

SEQ ID NO: 580572 - DNA, 15 bp, Homo sapiens
tgcatgaatgtgcac

SEQ ID NO: 580573 - DNA, 15 bp, Homo sapiens
atgcatgaatgtgca

SEQ ID NO: 580574 - DNA, 15 bp, Homo sapiens
gatgcatgaatgtgc

SEQ ID NO: 580575 - DNA, 15 bp, Homo sapiens
tgatgcatgaatgtg

SEQ ID NO: 580576 - DNA, 15 bp, Homo sapiens
gtgatgcatgaatgt

SEQ ID NO: 580577 - DNA, 15 bp, Homo sapiens
tgtgatgcatgaatg

SEQ ID NO: 580578 - DNA, 15 bp, Homo sapiens
ctgtgatgcatgaat

SEQ ID NO: 580579 - DNA, 15 bp, Homo sapiens
gctgtgatgcatgaa

SEQ ID NO: 580580 - DNA, 15 bp, Homo sapiens
tgctgtgatgcatga

SEQ ID NO: 580581 - DNA, 15 bp, Homo sapiens
ctgctgtgatgcatg

SEQ ID NO: 580582 - DNA, 15 bp, Homo sapiens
cctgctgtgatgcat

SEQ ID NO: 580583 - DNA, 15 bp, Homo sapiens
tcctgctgtgatgca

SEQ ID NO: 580584 - DNA, 15 bp, Homo sapiens
ctcctgctgtgatgc

SEQ ID NO: 580585 - DNA, 15 bp, Homo sapiens
gctcctgctgtgatg

SEQ ID NO: 580586 - DNA, 15 bp, Homo sapiens
tgctcctgctgtgat

SEQ ID NO: 580587 - DNA, 15 bp, Homo sapiens
ttgctcctgctgtga

SEQ ID NO: 580588 - DNA, 15 bp, Homo sapiens
gttgctcctgctgtg

SEQ ID NO: 580589 - DNA, 15 bp, Homo sapiens
tgttgctcctgctgt

SEQ ID NO: 580590 - DNA, 15 bp, Homo sapiens
ttgttgctcctgctg

SEQ ID NO: 580591 - DNA, 15 bp, Homo sapiens
cttgttgctcctgct

SEQ ID NO: 580592 - DNA, 15 bp, Homo sapiens
tcttgttgctcctgc

SEQ ID NO: 580593 - DNA, 15 bp, Homo sapiens
ttcttgttgctcctg

SEQ ID NO: 580594 - DNA, 15 bp, Homo sapiens
gttcttgttgctcct

SEQ ID NO: 580595 - DNA, 15 bp, Homo sapiens
ggttcttgttgctcc

SEQ ID NO: 580596 - DNA, 15 bp, Homo sapiens
tggttcttgttgctc

SEQ ID NO: 580597 - DNA, 15 bp, Homo sapiens
atggttcttgttgct

SEQ ID NO: 580598 - DNA, 15 bp, Homo sapiens
tatggttcttgttgc

SEQ ID NO: 580599 - DNA, 15 bp, Homo sapiens
atatggttcttgttg

SEQ ID NO: 580600 - DNA, 15 bp, Homo sapiens
tatatggttcttgtt

SEQ ID NO: 580601 - DNA, 15 bp, Homo sapiens
ttatatggttcttgt

SEQ ID NO: 580602 - DNA, 15 bp, Homo sapiens
cttatatggttcttg

SEQ ID NO: 580603 - DNA, 15 bp, Homo sapiens
acttatatggttctt

SEQ ID NO: 580604 - DNA, 15 bp, Homo sapiens
cacttatatggttct

SEQ ID NO: 580605 - DNA, 15 bp, Homo sapiens
tcacttatatggttc

SEQ ID NO: 580606 - DNA, 15 bp, Homo sapiens
ttcacttatatggtt

SEQ ID NO: 580607 - DNA, 15 bp, Homo sapiens
gttcacttatatggt

SEQ ID NO: 580608 - DNA, 15 bp, Homo sapiens
agttcacttatatgg

SEQ ID NO: 580609 - DNA, 15 bp, Homo sapiens
cagttcacttatatg

SEQ ID NO: 580610 - DNA, 15 bp, Homo sapiens
ccagttcacttatat

SEQ ID NO: 580611 - DNA, 15 bp, Homo sapiens
gccagttcacttata

SEQ ID NO: 580612 - DNA, 15 bp, Homo sapiens
agccagttcacttat

SEQ ID NO: 580613 - DNA, 15 bp, Homo sapiens
aagccagttcactta

SEQ ID NO: 580614 - DNA, 15 bp, Homo sapiens
gaagccagttcactt

SEQ ID NO: 580615 - DNA, 15 bp, Homo sapiens
tgaagccagttcact

SEQ ID NO: 580616 - DNA, 15 bp, Homo sapiens
gtgaagccagttcac

SEQ ID NO: 580617 - DNA, 15 bp, Homo sapiens
agtgaagccagttca

SEQ ID NO: 580618 - DNA, 15 bp, Homo sapiens
aagtgaagccagttc

SEQ ID NO: 580619 - DNA, 15 bp, Homo sapiens
taagtgaagccagtt

SEQ ID NO: 580620 - DNA, 15 bp, Homo sapiens
ataagtgaagccagt

SEQ ID NO: 580621 - DNA, 15 bp, Homo sapiens
tataagtgaagccag

SEQ ID NO: 580622 - DNA, 15 bp, Homo sapiens
ctataagtgaagcca

SEQ ID NO: 580623 - DNA, 15 bp, Homo sapiens
gctataagtgaagcc

SEQ ID NO: 580624 - DNA, 15 bp, Homo sapiens
ggctataagtgaagc

SEQ ID NO: 580625 - DNA, 15 bp, Homo sapiens
gggctataagtgaag

SEQ ID NO: 580626 - DNA, 15 bp, Homo sapiens
cgggctataagtgaa

SEQ ID NO: 580627 - DNA, 15 bp, Homo sapiens
acgggctataagtga

SEQ ID NO: 580628 - DNA, 15 bp, Homo sapiens
aacgggctataagtg

SEQ ID NO: 580629 - DNA, 15 bp, Homo sapiens
aaacgggctataagt

SEQ ID NO: 580630 - DNA, 15 bp, Homo sapiens
aaaacgggctataag

SEQ ID NO: 580631 - DNA, 15 bp, Homo sapiens
taaaacgggctataa

SEQ ID NO: 580632 - DNA, 15 bp, Homo sapiens
ttaaaacgggctata

SEQ ID NO: 580633 - DNA, 15 bp, Homo sapiens
attaaaacgggctat

SEQ ID NO: 580634 - DNA, 15 bp, Homo sapiens
aattaaaacgggcta

SEQ ID NO: 580635 - DNA, 15 bp, Homo sapiens
gaattaaaacgggct

SEQ ID NO: 580636 - DNA, 15 bp, Homo sapiens
tgaattaaaacgggc

SEQ ID NO: 580637 - DNA, 15 bp, Homo sapiens
atgaattaaaacggg

SEQ ID NO: 580638 - DNA, 15 bp, Homo sapiens
tatgaattaaaacgg

SEQ ID NO: 580639 - DNA, 15 bp, Homo sapiens
atatgaattaaaacg

SEQ ID NO: 580640 - DNA, 15 bp, Homo sapiens
gatatgaattaaaac

SEQ ID NO: 580641 - DNA, 15 bp, Homo sapiens
ggatatgaattaaaa

SEQ ID NO: 580642 - DNA, 15 bp, Homo sapiens
tggatatgaattaaa

SEQ ID NO: 580643 - DNA, 15 bp, Homo sapiens
atggatatgaattaa

SEQ ID NO: 580644 - DNA, 15 bp, Homo sapiens
tatggatatgaatta

SEQ ID NO: 580645 - DNA, 15 bp, Homo sapiens
atatggatatgaatt

SEQ ID NO: 580646 - DNA, 15 bp, Homo sapiens
aatatggatatgaat

SEQ ID NO: 580647 - DNA, 15 bp, Homo sapiens
aaatatggatatgaa

SEQ ID NO: 580648 - DNA, 15 bp, Homo sapiens
gaaatatggatatga

SEQ ID NO: 580649 - DNA, 15 bp, Homo sapiens
ggaaatatggatatg

SEQ ID NO: 580650 - DNA, 15 bp, Homo sapiens
aggaaatatggatat

SEQ ID NO: 580651 - DNA, 15 bp, Homo sapiens
gaggaaatatggata

SEQ ID NO: 580652 - DNA, 15 bp, Homo sapiens
tgaggaaatatggat

SEQ ID NO: 580653 - DNA, 15 bp, Homo sapiens
ctgaggaaatatgga

SEQ ID NO: 580654 - DNA, 15 bp, Homo sapiens
cctgaggaaatatgg

SEQ ID NO: 580655 - DNA, 15 bp, Homo sapiens
ccctgaggaaatatg

SEQ ID NO: 580656 - DNA, 15 bp, Homo sapiens
gccctgaggaaatat

SEQ ID NO: 580657 - DNA, 15 bp, Homo sapiens
agccctgaggaaata

SEQ ID NO: 580658 - DNA, 15 bp, Homo sapiens
aagccctgaggaaat

SEQ ID NO: 580659 - DNA, 15 bp, Homo sapiens
caagccctgaggaaa

SEQ ID NO: 580660 - DNA, 15 bp, Homo sapiens
acaagccctgaggaa

SEQ ID NO: 580661 - DNA, 15 bp, Homo sapiens
aacaagccctgagga

SEQ ID NO: 580662 - DNA, 15 bp, Homo sapiens
aaacaagccctgagg

SEQ ID NO: 580663 - DNA, 15 bp, Homo sapiens
gaaacaagccctgag

SEQ ID NO: 580664 - DNA, 15 bp, Homo sapiens
ggaaacaagccctga

SEQ ID NO: 580665 - DNA, 15 bp, Homo sapiens
tggaaacaagccctg

SEQ ID NO: 580666 - DNA, 15 bp, Homo sapiens
atggaaacaagccct

SEQ ID NO: 580667 - DNA, 15 bp, Homo sapiens
catggaaacaagccc

SEQ ID NO: 580668 - DNA, 15 bp, Homo sapiens
gcatggaaacaagcc

SEQ ID NO: 580669 - DNA, 15 bp, Homo sapiens
ggcatggaaacaagc

SEQ ID NO: 580670 - DNA, 15 bp, Homo sapiens
aggcatggaaacaag

SEQ ID NO: 580671 - DNA, 15 bp, Homo sapiens
gaggcatggaaacaa

SEQ ID NO: 580672 - DNA, 15 bp, Homo sapiens
ggaggcatggaaaca

SEQ ID NO: 580673 - DNA, 15 bp, Homo sapiens
gggaggcatggaaac

SEQ ID NO: 580674 - DNA, 15 bp, Homo sapiens
tgggaggcatggaaa

SEQ ID NO: 580675 - DNA, 15 bp, Homo sapiens
ctgggaggcatggaa

SEQ ID NO: 580676 - DNA, 15 bp, Homo sapiens
gctgggaggcatgga

SEQ ID NO: 580677 - DNA, 15 bp, Homo sapiens
ggctgggaggcatgg

SEQ ID NO: 580678 - DNA, 15 bp, Homo sapiens
gggctgggaggcatg

SEQ ID NO: 580679 - DNA, 15 bp, Homo sapiens
ggggctgggaggcat

SEQ ID NO: 580680 - DNA, 15 bp, Homo sapiens
tggggctgggaggca

SEQ ID NO: 580681 - DNA, 15 bp, Homo sapiens
gtggggctgggaggc

SEQ ID NO: 580682 - DNA, 15 bp, Homo sapiens
agtggggctgggagg

SEQ ID NO: 580683 - DNA, 15 bp, Homo sapiens
gagtggggctgggag

SEQ ID NO: 580684 - DNA, 15 bp, Homo sapiens
ggagtggggctggga

SEQ ID NO: 580685 - DNA, 15 bp, Homo sapiens
tggagtggggctggg

SEQ ID NO: 580686 - DNA, 15 bp, Homo sapiens
atggagtggggctgg

SEQ ID NO: 580687 - DNA, 15 bp, Homo sapiens
tatggagtggggctg

SEQ ID NO: 580688 - DNA, 15 bp, Homo sapiens
atatggagtggggct

SEQ ID NO: 580689 - DNA, 15 bp, Homo sapiens
catatggagtggggc

SEQ ID NO: 580690 - DNA, 15 bp, Homo sapiens
gcatatggagtgggg

SEQ ID NO: 580691 - DNA, 15 bp, Homo sapiens
agcatatggagtggg

SEQ ID NO: 580692 - DNA, 15 bp, Homo sapiens
aagcatatggagtgg

SEQ ID NO: 580693 - DNA, 15 bp, Homo sapiens
taagcatatggagtg

SEQ ID NO: 580694 - DNA, 15 bp, Homo sapiens
ttaagcatatggagt

SEQ ID NO: 580695 - DNA, 15 bp, Homo sapiens
gttaagcatatggag

SEQ ID NO: 580696 - DNA, 15 bp, Homo sapiens
tgttaagcatatgga

SEQ ID NO: 580697 - DNA, 15 bp, Homo sapiens
ttgttaagcatatgg

SEQ ID NO: 580698 - DNA, 15 bp, Homo sapiens
gttgttaagcatatg

SEQ ID NO: 580699 - DNA, 15 bp, Homo sapiens
tgttgttaagcatat

SEQ ID NO: 580700 - DNA, 15 bp, Homo sapiens
atgttgttaagcata

SEQ ID NO: 580701 - DNA, 15 bp, Homo sapiens
aatgttgttaagcat

SEQ ID NO: 580702 - DNA, 15 bp, Homo sapiens
caatgttgttaagca

SEQ ID NO: 580703 - DNA, 15 bp, Homo sapiens
acaatgttgttaagc

SEQ ID NO: 580704 - DNA, 15 bp, Homo sapiens
gacaatgttgttaag

SEQ ID NO: 580705 - DNA, 15 bp, Homo sapiens
agacaatgttgttaa

SEQ ID NO: 580706 - DNA, 15 bp, Homo sapiens
cagacaatgttgtta

SEQ ID NO: 580707 - DNA, 15 bp, Homo sapiens
ccagacaatgttgtt

SEQ ID NO: 580708 - DNA, 15 bp, Homo sapiens
gccagacaatgttgt

SEQ ID NO: 580709 - DNA, 15 bp, Homo sapiens
agccagacaatgttg

SEQ ID NO: 580710 - DNA, 15 bp, Homo sapiens
cagccagacaatgtt

SEQ ID NO: 580711 - DNA, 15 bp, Homo sapiens
tcagccagacaatgt

SEQ ID NO: 580712 - DNA, 15 bp, Homo sapiens
gtcagccagacaatg

SEQ ID NO: 580713 - DNA, 15 bp, Homo sapiens
agtcagccagacaat

SEQ ID NO: 580714 - DNA, 15 bp, Homo sapiens
cagtcagccagacaa

SEQ ID NO: 580715 - DNA, 15 bp, Homo sapiens
tcagtcagccagaca

SEQ ID NO: 580716 - DNA, 15 bp, Homo sapiens
ctcagtcagccagac

SEQ ID NO: 580717 - DNA, 15 bp, Homo sapiens
cctcagtcagccaga

SEQ ID NO: 580718 - DNA, 15 bp, Homo sapiens
ccctcagtcagccag

SEQ ID NO: 580719 - DNA, 15 bp, Homo sapiens
accctcagtcagcca

SEQ ID NO: 580720 - DNA, 15 bp, Homo sapiens
aaccctcagtcagcc

SEQ ID NO: 580721 - DNA, 15 bp, Homo sapiens
taaccctcagtcagc

SEQ ID NO: 580722 - DNA, 15 bp, Homo sapiens
ataaccctcagtcag

SEQ ID NO: 580723 - DNA, 15 bp, Homo sapiens
tataaccctcagtca

SEQ ID NO: 580724 - DNA, 15 bp, Homo sapiens
atataaccctcagtc

SEQ ID NO: 580725 - DNA, 15 bp, Homo sapiens
tatataaccctcagt

SEQ ID NO: 580726 - DNA, 15 bp, Homo sapiens
gtatataaccctcag

SEQ ID NO: 580727 - DNA, 15 bp, Homo sapiens
tgtatataaccctca

SEQ ID NO: 580728 - DNA, 15 bp, Homo sapiens
atgtatataaccctc

SEQ ID NO: 580729 - DNA, 15 bp, Homo sapiens
gatgtatataaccct

SEQ ID NO: 580730 - DNA, 15 bp, Homo sapiens
tgatgtatataaccc

SEQ ID NO: 580731 - DNA, 15 bp, Homo sapiens
atgatgtatataacc

SEQ ID NO: 580732 - DNA, 15 bp, Homo sapiens
catgatgtatataac

SEQ ID NO: 580733 - DNA, 15 bp, Homo sapiens
ccatgatgtatataa

SEQ ID NO: 580734 - DNA, 15 bp, Homo sapiens
accatgatgtatata

SEQ ID NO: 580735 - DNA, 15 bp, Homo sapiens
gaccatgatgtatat

SEQ ID NO: 580736 - DNA, 15 bp, Homo sapiens
agaccatgatgtata

SEQ ID NO: 580737 - DNA, 15 bp, Homo sapiens
aagaccatgatgtat

SEQ ID NO: 580738 - DNA, 15 bp, Homo sapiens
caagaccatgatgta

SEQ ID NO: 580739 - DNA, 15 bp, Homo sapiens
tcaagaccatgatgt

SEQ ID NO: 580740 - DNA, 15 bp, Homo sapiens
ttcaagaccatgatg

SEQ ID NO: 580741 - DNA, 15 bp, Homo sapiens
gttcaagaccatgat

SEQ ID NO: 580742 - DNA, 15 bp, Homo sapiens
ggttcaagaccatga

SEQ ID NO: 580743 - DNA, 15 bp, Homo sapiens
aggttcaagaccatg

SEQ ID NO: 580744 - DNA, 15 bp, Homo sapiens
aaggttcaagaccat

SEQ ID NO: 580745 - DNA, 15 bp, Homo sapiens
gaaggttcaagacca

SEQ ID NO: 580746 - DNA, 15 bp, Homo sapiens
agaaggttcaagacc

SEQ ID NO: 580747 - DNA, 15 bp, Homo sapiens
aagaaggttcaagac

SEQ ID NO: 580748 - DNA, 15 bp, Homo sapiens
caagaaggttcaaga

SEQ ID NO: 580749 - DNA, 15 bp, Homo sapiens
ccaagaaggttcaag

SEQ ID NO: 580750 - DNA, 15 bp, Homo sapiens
tccaagaaggttcaa

SEQ ID NO: 580751 - DNA, 15 bp, Homo sapiens
ttccaagaaggttca

SEQ ID NO: 580752 - DNA, 15 bp, Homo sapiens
tttccaagaaggttc

SEQ ID NO: 580753 - DNA, 15 bp, Homo sapiens
gtttccaagaaggtt

SEQ ID NO: 580754 - DNA, 15 bp, Homo sapiens
tgtttccaagaaggt

SEQ ID NO: 580755 - DNA, 15 bp, Homo sapiens
atgtttccaagaagg

SEQ ID NO: 580756 - DNA, 15 bp, Homo sapiens
catgtttccaagaag

SEQ ID NO: 580757 - DNA, 15 bp, Homo sapiens
ccatgtttccaagaa

SEQ ID NO: 580758 - DNA, 15 bp, Homo sapiens
accatgtttccaaga

SEQ ID NO: 580759 - DNA, 15 bp, Homo sapiens
gaccatgtttccaag

SEQ ID NO: 580760 - DNA, 15 bp, Homo sapiens
agaccatgtttccaa

SEQ ID NO: 580761 - DNA, 15 bp, Homo sapiens
cagaccatgtttcca

SEQ ID NO: 580762 - DNA, 15 bp, Homo sapiens
acagaccatgtttcc

SEQ ID NO: 580763 - DNA, 15 bp, Homo sapiens
cacagaccatgtttc

SEQ ID NO: 580764 - DNA, 15 bp, Homo sapiens
gcacagaccatgttt

SEQ ID NO: 580765 - DNA, 15 bp, Homo sapiens
ggcacagaccatgtt

SEQ ID NO: 580766 - DNA, 15 bp, Homo sapiens
tggcacagaccatgt

SEQ ID NO: 580767 - DNA, 15 bp, Homo sapiens
atggcacagaccatg

SEQ ID NO: 580768 - DNA, 15 bp, Homo sapiens
aatggcacagaccat

SEQ ID NO: 580769 - DNA, 15 bp, Homo sapiens
caatggcacagacca

SEQ ID NO: 580770 - DNA, 15 bp, Homo sapiens
acaatggcacagacc

SEQ ID NO: 580771 - DNA, 15 bp, Homo sapiens
aacaatggcacagac

SEQ ID NO: 580772 - DNA, 15 bp, Homo sapiens
aaacaatggcacaga

SEQ ID NO: 580773 - DNA, 15 bp, Homo sapiens
gaaacaatggcacag

SEQ ID NO: 580774 - DNA, 15 bp, Homo sapiens
agaaacaatggcaca

SEQ ID NO: 580775 - DNA, 15 bp, Homo sapiens
gagaaacaatggcac

SEQ ID NO: 580776 - DNA, 15 bp, Homo sapiens
tgagaaacaatggca

SEQ ID NO: 580777 - DNA, 15 bp, Homo sapiens
ttgagaaacaatggc

SEQ ID NO: 580778 - DNA, 15 bp, Homo sapiens
tttgagaaacaatgg

SEQ ID NO: 580779 - DNA, 15 bp, Homo sapiens
gtttgagaaacaatg

SEQ ID NO: 580780 - DNA, 15 bp, Homo sapiens
ggtttgagaaacaat

SEQ ID NO: 580781 - DNA, 15 bp, Homo sapiens
gggtttgagaaacaa

SEQ ID NO: 580782 - DNA, 15 bp, Homo sapiens
tgggtttgagaaaca

SEQ ID NO: 580783 - DNA, 15 bp, Homo sapiens
ttgggtttgagaaac

SEQ ID NO: 580784 - DNA, 15 bp, Homo sapiens
cttgggtttgagaaa

SEQ ID NO: 580785 - DNA, 15 bp, Homo sapiens
acttgggtttgagaa

SEQ ID NO: 580786 - DNA, 15 bp, Homo sapiens
tacttgggtttgaga

SEQ ID NO: 580787 - DNA, 15 bp, Homo sapiens
ttacttgggtttgag

SEQ ID NO: 580788 - DNA, 15 bp, Homo sapiens
attacttgggtttga

SEQ ID NO: 580789 - DNA, 15 bp, Homo sapiens
cattacttgggtttg

SEQ ID NO: 580790 - DNA, 15 bp, Homo sapiens
gcattacttgggttt

SEQ ID NO: 580791 - DNA, 15 bp, Homo sapiens
agcattacttgggtt

SEQ ID NO: 580792 - DNA, 15 bp, Homo sapiens
aagcattacttgggt

SEQ ID NO: 580793 - DNA, 15 bp, Homo sapiens
gaagcattacttggg

SEQ ID NO: 580794 - DNA, 15 bp, Homo sapiens
tgaagcattacttgg

SEQ ID NO: 580795 - DNA, 15 bp, Homo sapiens
atgaagcattacttg

SEQ ID NO: 580796 - DNA, 15 bp, Homo sapiens
catgaagcattactt

SEQ ID NO: 580797 - DNA, 15 bp, Homo sapiens
tcatgaagcattact

SEQ ID NO: 580798 - DNA, 15 bp, Homo sapiens
atcatgaagcattac

SEQ ID NO: 580799 - DNA, 15 bp, Homo sapiens
catcatgaagcatta

SEQ ID NO: 580800 - DNA, 15 bp, Homo sapiens
tcatcatgaagcatt

SEQ ID NO: 580801 - DNA, 15 bp, Homo sapiens
ttcatcatgaagcat

SEQ ID NO: 580802 - DNA, 15 bp, Homo sapiens
tttcatcatgaagca

SEQ ID NO: 580803 - DNA, 15 bp, Homo sapiens
gtttcatcatgaagc

SEQ ID NO: 580804 - DNA, 15 bp, Homo sapiens
tgtttcatcatgaag

SEQ ID NO: 580805 - DNA, 15 bp, Homo sapiens
gtgtttcatcatgaa

SEQ ID NO: 580806 - DNA, 15 bp, Homo sapiens
ggtgtttcatcatga

SEQ ID NO: 580807 - DNA, 15 bp, Homo sapiens
aggtgtttcatcatg

SEQ ID NO: 580808 - DNA, 15 bp, Homo sapiens
aaggtgtttcatcat

SEQ ID NO: 580809 - DNA, 15 bp, Homo sapiens
gaaggtgtttcatca

SEQ ID NO: 580810 - DNA, 15 bp, Homo sapiens
agaaggtgtttcatc

SEQ ID NO: 580811 - DNA, 15 bp, Homo sapiens
tagaaggtgtttcat

SEQ ID NO: 580812 - DNA, 15 bp, Homo sapiens
ttagaaggtgtttca

SEQ ID NO: 580813 - DNA, 15 bp, Homo sapiens
tttagaaggtgtttc

SEQ ID NO: 580814 - DNA, 15 bp, Homo sapiens
ctttagaaggtgttt

SEQ ID NO: 580815 - DNA, 15 bp, Homo sapiens
cctttagaaggtgtt

SEQ ID NO: 580816 - DNA, 15 bp, Homo sapiens
tcctttagaaggtgt

SEQ ID NO: 580817 - DNA, 15 bp, Homo sapiens
ttcctttagaaggtg

SEQ ID NO: 580818 - DNA, 15 bp, Homo sapiens
gttcctttagaaggt

SEQ ID NO: 580819 - DNA, 15 bp, Homo sapiens
tgttcctttagaagg

SEQ ID NO: 580820 - DNA, 15 bp, Homo sapiens
ttgttcctttagaag

SEQ ID NO: 580821 - DNA, 15 bp, Homo sapiens
tttgttcctttagaa

SEQ ID NO: 580822 - DNA, 15 bp, Homo sapiens
ttttgttcctttaga

SEQ ID NO: 580823 - DNA, 15 bp, Homo sapiens
attttgttcctttag

SEQ ID NO: 580824 - DNA, 15 bp, Homo sapiens
aattttgttccttta

SEQ ID NO: 580825 - DNA, 15 bp, Homo sapiens
aaattttgttccttt

SEQ ID NO: 580826 - DNA, 15 bp, Homo sapiens
aaaattttgttcctt

SEQ ID NO: 580827 - DNA, 15 bp, Homo sapiens
gaaaattttgttcct

SEQ ID NO: 580828 - DNA, 15 bp, Homo sapiens
agaaaattttgttcc

SEQ ID NO: 580829 - DNA, 15 bp, Homo sapiens
cagaaaattttgttc

SEQ ID NO: 580830 - DNA, 15 bp, Homo sapiens
tcagaaaattttgtt

SEQ ID NO: 580831 - DNA, 15 bp, Homo sapiens
ctcagaaaattttgt

SEQ ID NO: 580832 - DNA, 15 bp, Homo sapiens
tctcagaaaattttg

SEQ ID NO: 580833 - DNA, 15 bp, Homo sapiens
atctcagaaaatttt

SEQ ID NO: 580834 - DNA, 15 bp, Homo sapiens
gatctcagaaaattt

SEQ ID NO: 580835 - DNA, 15 bp, Homo sapiens
ggatctcagaaaatt

SEQ ID NO: 580836 - DNA, 15 bp, Homo sapiens
aggatctcagaaaat

SEQ ID NO: 580837 - DNA, 15 bp, Homo sapiens
taggatctcagaaaa

SEQ ID NO: 580838 - DNA, 15 bp, Homo sapiens
ttaggatctcagaaa

SEQ ID NO: 580839 - DNA, 15 bp, Homo sapiens
tttaggatctcagaa

SEQ ID NO: 580840 - DNA, 15 bp, Homo sapiens
ttttaggatctcaga

SEQ ID NO: 580841 - DNA, 15 bp, Homo sapiens
tttttaggatctcag

SEQ ID NO: 580842 - DNA, 15 bp, Homo sapiens
ttttttaggatctca

SEQ ID NO: 580843 - DNA, 15 bp, Homo sapiens
tttttttaggatctc

SEQ ID NO: 580844 - DNA, 15 bp, Homo sapiens
atttttttaggatct

SEQ ID NO: 580845 - DNA, 15 bp, Homo sapiens
catttttttaggatc

SEQ ID NO: 580846 - DNA, 15 bp, Homo sapiens
acatttttttaggat

SEQ ID NO: 580847 - DNA, 15 bp, Homo sapiens
cacatttttttagga

SEQ ID NO: 580848 - DNA, 15 bp, Homo sapiens
acacatttttttagg

SEQ ID NO: 580849 - DNA, 15 bp, Homo sapiens
aacacatttttttag

SEQ ID NO: 580850 - DNA, 15 bp, Homo sapiens
aaacacattttttta

SEQ ID NO: 580851 - DNA, 15 bp, Homo sapiens
aaaacacattttttt

SEQ ID NO: 580852 - DNA, 15 bp, Homo sapiens
caaaacacatttttt

SEQ ID NO: 580853 - DNA, 15 bp, Homo sapiens
tcaaaacacattttt

SEQ ID NO: 580854 - DNA, 15 bp, Homo sapiens
ctcaaaacacatttt

SEQ ID NO: 580855 - DNA, 15 bp, Homo sapiens
cctcaaaacacattt

SEQ ID NO: 580856 - DNA, 15 bp, Homo sapiens
tcctcaaaacacatt

SEQ ID NO: 580857 - DNA, 15 bp, Homo sapiens
ttcctcaaaacacat

SEQ ID NO: 580858 - DNA, 15 bp, Homo sapiens
gttcctcaaaacaca

SEQ ID NO: 580859 - DNA, 15 bp, Homo sapiens
tgttcctcaaaacac

SEQ ID NO: 580860 - DNA, 15 bp, Homo sapiens
gtgttcctcaaaaca

SEQ ID NO: 580861 - DNA, 15 bp, Homo sapiens
agtgttcctcaaaac

SEQ ID NO: 580862 - DNA, 15 bp, Homo sapiens
cagtgttcctcaaaa

SEQ ID NO: 580863 - DNA, 15 bp, Homo sapiens
tcagtgttcctcaaa

SEQ ID NO: 580864 - DNA, 15 bp, Homo sapiens
gtcagtgttcctcaa

SEQ ID NO: 580865 - DNA, 15 bp, Homo sapiens
agtcagtgttcctca

SEQ ID NO: 580866 - DNA, 15 bp, Homo sapiens
aagtcagtgttcctc

SEQ ID NO: 580867 - DNA, 15 bp, Homo sapiens
taagtcagtgttcct

SEQ ID NO: 580868 - DNA, 15 bp, Homo sapiens
ttaagtcagtgttcc

SEQ ID NO: 580869 - DNA, 15 bp, Homo sapiens
gttaagtcagtgttc

SEQ ID NO: 580870 - DNA, 15 bp, Homo sapiens
tgttaagtcagtgtt

SEQ ID NO: 580871 - DNA, 15 bp, Homo sapiens
ttgttaagtcagtgt

SEQ ID NO: 580872 - DNA, 15 bp, Homo sapiens
tttgttaagtcagtg

SEQ ID NO: 580873 - DNA, 15 bp, Homo sapiens
ctttgttaagtcagt

SEQ ID NO: 580874 - DNA, 15 bp, Homo sapiens
tctttgttaagtcag

SEQ ID NO: 580875 - DNA, 15 bp, Homo sapiens
atctttgttaagtca

SEQ ID NO: 580876 - DNA, 15 bp, Homo sapiens
tatctttgttaagtc

SEQ ID NO: 580877 - DNA, 15 bp, Homo sapiens
atatctttgttaagt

SEQ ID NO: 580878 - DNA, 15 bp, Homo sapiens
aatatctttgttaag

SEQ ID NO: 580879 - DNA, 15 bp, Homo sapiens
aaatatctttgttaa

SEQ ID NO: 580880 - DNA, 15 bp, Homo sapiens
caaatatctttgtta

SEQ ID NO: 580881 - DNA, 15 bp, Homo sapiens
tcaaatatctttgtt

SEQ ID NO: 580882 - DNA, 15 bp, Homo sapiens
ttcaaatatctttgt

SEQ ID NO: 580883 - DNA, 15 bp, Homo sapiens
tttcaaatatctttg

SEQ ID NO: 580884 - DNA, 15 bp, Homo sapiens
atttcaaatatcttt

SEQ ID NO: 580885 - DNA, 15 bp, Homo sapiens
catttcaaatatctt

SEQ ID NO: 580886 - DNA, 15 bp, Homo sapiens
acatttcaaatatct

SEQ ID NO: 580887 - DNA, 15 bp, Homo sapiens
tacatttcaaatatc

SEQ ID NO: 580888 - DNA, 15 bp, Homo sapiens
ttacatttcaaatat

SEQ ID NO: 580889 - DNA, 15 bp, Homo sapiens
tttacatttcaaata

SEQ ID NO: 580890 - DNA, 15 bp, Homo sapiens
atttacatttcaaat

SEQ ID NO: 580891 - DNA, 15 bp, Homo sapiens
tatttacatttcaaa

SEQ ID NO: 580892 - DNA, 15 bp, Homo sapiens
atatttacatttcaa

SEQ ID NO: 580893 - DNA, 15 bp, Homo sapiens
catatttacatttca

SEQ ID NO: 580894 - DNA, 15 bp, Homo sapiens
acatatttacatttc

SEQ ID NO: 580895 - DNA, 15 bp, Homo sapiens
aacatatttacattt

SEQ ID NO: 580896 - DNA, 15 bp, Homo sapiens
aaacatatttacatt

SEQ ID NO: 580897 - DNA, 15 bp, Homo sapiens
aaaacatatttacat

SEQ ID NO: 580898 - DNA, 15 bp, Homo sapiens
gaaaacatatttaca

SEQ ID NO: 580899 - DNA, 15 bp, Homo sapiens
ggaaaacatatttac

SEQ ID NO: 580900 - DNA, 15 bp, Homo sapiens
tggaaaacatattta

SEQ ID NO: 580901 - DNA, 15 bp, Homo sapiens
ttggaaaacatattt

SEQ ID NO: 580902 - DNA, 15 bp, Homo sapiens
attggaaaacatatt

SEQ ID NO: 580903 - DNA, 15 bp, Homo sapiens
aattggaaaacatat

SEQ ID NO: 580904 - DNA, 15 bp, Homo sapiens
aaattggaaaacata

SEQ ID NO: 580905 - DNA, 15 bp, Homo sapiens
gaaattggaaaacat

SEQ ID NO: 580906 - DNA, 15 bp, Homo sapiens
tgaaattggaaaaca

SEQ ID NO: 580907 - DNA, 15 bp, Homo sapiens
gtgaaattggaaaac

SEQ ID NO: 580908 - DNA, 15 bp, Homo sapiens
cgtgaaattggaaaa

SEQ ID NO: 580909 - DNA, 15 bp, Homo sapiens
acgtgaaattggaaa

SEQ ID NO: 580910 - DNA, 15 bp, Homo sapiens
aacgtgaaattggaa

SEQ ID NO: 580911 - DNA, 15 bp, Homo sapiens
caacgtgaaattgga

SEQ ID NO: 580912 - DNA, 15 bp, Homo sapiens
acaacgtgaaattgg

SEQ ID NO: 580913 - DNA, 15 bp, Homo sapiens
gacaacgtgaaattg

SEQ ID NO: 580914 - DNA, 15 bp, Homo sapiens
agacaacgtgaaatt

SEQ ID NO: 580915 - DNA, 15 bp, Homo sapiens
aagacaacgtgaaat

SEQ ID NO: 580916 - DNA, 15 bp, Homo sapiens
aaagacaacgtgaaa

SEQ ID NO: 580917 - DNA, 15 bp, Homo sapiens
caaagacaacgtgaa

SEQ ID NO: 580918 - DNA, 15 bp, Homo sapiens
acaaagacaacgtga

SEQ ID NO: 580919 - DNA, 15 bp, Homo sapiens
gacaaagacaacgtg

SEQ ID NO: 580920 - DNA, 15 bp, Homo sapiens
tgacaaagacaacgt

SEQ ID NO: 580921 - DNA, 15 bp, Homo sapiens
ttgacaaagacaacg

SEQ ID NO: 580922 - DNA, 15 bp, Homo sapiens
tttgacaaagacaac

SEQ ID NO: 580923 - DNA, 15 bp, Homo sapiens
ctttgacaaagacaa

SEQ ID NO: 580924 - DNA, 15 bp, Homo sapiens
tctttgacaaagaca

SEQ ID NO: 580925 - DNA, 15 bp, Homo sapiens
atctttgacaaagac

SEQ ID NO: 580926 - DNA, 15 bp, Homo sapiens
catctttgacaaaga

SEQ ID NO: 580927 - DNA, 15 bp, Homo sapiens
acatctttgacaaag

SEQ ID NO: 580928 - DNA, 15 bp, Homo sapiens
cacatctttgacaaa

SEQ ID NO: 580929 - DNA, 15 bp, Homo sapiens
acacatctttgacaa

SEQ ID NO: 580930 - DNA, 15 bp, Homo sapiens
aacacatctttgaca

SEQ ID NO: 580931 - DNA, 15 bp, Homo sapiens
aaacacatctttgac

SEQ ID NO: 580932 - DNA, 15 bp, Homo sapiens
aaaacacatctttga

SEQ ID NO: 580933 - DNA, 15 bp, Homo sapiens
taaaacacatctttg

SEQ ID NO: 580934 - DNA, 15 bp, Homo sapiens
ataaaacacatcttt

SEQ ID NO: 580935 - DNA, 15 bp, Homo sapiens
tataaaacacatctt

SEQ ID NO: 580936 - DNA, 15 bp, Homo sapiens
atataaaacacatct

SEQ ID NO: 580937 - DNA, 15 bp, Homo sapiens
tatataaaacacatc

SEQ ID NO: 580938 - DNA, 15 bp, Homo sapiens
ttatataaaacacat

SEQ ID NO: 580939 - DNA, 15 bp, Homo sapiens
gttatataaaacaca

SEQ ID NO: 580940 - DNA, 15 bp, Homo sapiens
agttatataaaacac

SEQ ID NO: 580941 - DNA, 15 bp, Homo sapiens
aagttatataaaaca

SEQ ID NO: 580942 - DNA, 15 bp, Homo sapiens
taagttatataaaac

SEQ ID NO: 580943 - DNA, 15 bp, Homo sapiens
ataagttatataaaa

SEQ ID NO: 580944 - DNA, 15 bp, Homo sapiens
cataagttatataaa

SEQ ID NO: 580945 - DNA, 15 bp, Homo sapiens
acataagttatataa

SEQ ID NO: 580946 - DNA, 15 bp, Homo sapiens
tacataagttatata

SEQ ID NO: 580947 - DNA, 15 bp, Homo sapiens
ctacataagttatat

SEQ ID NO: 580948 - DNA, 15 bp, Homo sapiens
tctacataagttata

SEQ ID NO: 580949 - DNA, 15 bp, Homo sapiens
ttctacataagttat

SEQ ID NO: 580950 - DNA, 15 bp, Homo sapiens
gttctacataagtta

SEQ ID NO: 580951 - DNA, 15 bp, Homo sapiens
agttctacataagtt

SEQ ID NO: 580952 - DNA, 15 bp, Homo sapiens
aagttctacataagt

SEQ ID NO: 580953 - DNA, 15 bp, Homo sapiens
caagttctacataag

SEQ ID NO: 580954 - DNA, 15 bp, Homo sapiens
ccaagttctacataa

SEQ ID NO: 580955 - DNA, 15 bp, Homo sapiens
cccaagttctacata

SEQ ID NO: 580956 - DNA, 15 bp, Homo sapiens
ccccaagttctacat

SEQ ID NO: 580957 - DNA, 15 bp, Homo sapiens
tccccaagttctaca

SEQ ID NO: 580958 - DNA, 15 bp, Homo sapiens
atccccaagttctac

SEQ ID NO: 580959 - DNA, 15 bp, Homo sapiens
gatccccaagttcta

SEQ ID NO: 580960 - DNA, 15 bp, Homo sapiens
ggatccccaagttct

SEQ ID NO: 580961 - DNA, 15 bp, Homo sapiens
tggatccccaagttc

SEQ ID NO: 580962 - DNA, 15 bp, Homo sapiens
atggatccccaagtt

SEQ ID NO: 580963 - DNA, 15 bp, Homo sapiens
aatggatccccaagt

SEQ ID NO: 580964 - DNA, 15 bp, Homo sapiens
taatggatccccaag

SEQ ID NO: 580965 - DNA, 15 bp, Homo sapiens
ctaatggatccccaa

SEQ ID NO: 580966 - DNA, 15 bp, Homo sapiens
tctaatggatcccca

SEQ ID NO: 580967 - DNA, 15 bp, Homo sapiens
ttctaatggatcccc

SEQ ID NO: 580968 - DNA, 15 bp, Homo sapiens
attctaatggatccc

SEQ ID NO: 580969 - DNA, 15 bp, Homo sapiens
tattctaatggatcc

SEQ ID NO: 580970 - DNA, 15 bp, Homo sapiens
atattctaatggatc

SEQ ID NO: 580971 - DNA, 15 bp, Homo sapiens
tatattctaatggat

SEQ ID NO: 580972 - DNA, 15 bp, Homo sapiens
atatattctaatgga

SEQ ID NO: 580973 - DNA, 15 bp, Homo sapiens
aatatattctaatgg

SEQ ID NO: 580974 - DNA, 15 bp, Homo sapiens
gaatatattctaatg

SEQ ID NO: 580975 - DNA, 15 bp, Homo sapiens
tgaatatattctaat

SEQ ID NO: 580976 - DNA, 15 bp, Homo sapiens
gtgaatatattctaa

SEQ ID NO: 580977 - DNA, 15 bp, Homo sapiens
tgtgaatatattcta

SEQ ID NO: 580978 - DNA, 15 bp, Homo sapiens
ttgtgaatatattct

SEQ ID NO: 580979 - DNA, 15 bp, Homo sapiens
tttgtgaatatattc

SEQ ID NO: 580980 - DNA, 15 bp, Homo sapiens
atttgtgaatatatt

SEQ ID NO: 580981 - DNA, 15 bp, Homo sapiens
gatttgtgaatatat

SEQ ID NO: 580982 - DNA, 15 bp, Homo sapiens
ggatttgtgaatata

SEQ ID NO: 580983 - DNA, 15 bp, Homo sapiens
gggatttgtgaatat

SEQ ID NO: 580984 - DNA, 15 bp, Homo sapiens
ggggatttgtgaata

SEQ ID NO: 580985 - DNA, 15 bp, Homo sapiens
tggggatttgtgaat

SEQ ID NO: 580986 - DNA, 15 bp, Homo sapiens
ctggggatttgtgaa

SEQ ID NO: 580987 - DNA, 15 bp, Homo sapiens
cctggggatttgtga

SEQ ID NO: 580988 - DNA, 15 bp, Homo sapiens
ccctggggatttgtg

SEQ ID NO: 580989 - DNA, 15 bp, Homo sapiens
accctggggatttgt

SEQ ID NO: 580990 - DNA, 15 bp, Homo sapiens
aaccctggggatttg

SEQ ID NO: 580991 - DNA, 15 bp, Homo sapiens
taaccctggggattt

SEQ ID NO: 580992 - DNA, 15 bp, Homo sapiens
ataaccctggggatt

SEQ ID NO: 580993 - DNA, 15 bp, Homo sapiens
gataaccctggggat

SEQ ID NO: 580994 - DNA, 15 bp, Homo sapiens
tgataaccctgggga

SEQ ID NO: 580995 - DNA, 15 bp, Homo sapiens
gtgataaccctgggg

SEQ ID NO: 580996 - DNA, 15 bp, Homo sapiens
ggtgataaccctggg

SEQ ID NO: 580997 - DNA, 15 bp, Homo sapiens
gggtgataaccctgg

SEQ ID NO: 580998 - DNA, 15 bp, Homo sapiens
ggggtgataaccctg

SEQ ID NO: 580999 - DNA, 15 bp, Homo sapiens
tggggtgataaccct

SEQ ID NO: 581000 - DNA, 15 bp, Homo sapiens
ttggggtgataaccc

SEQ ID NO: 581001 - DNA, 15 bp, Homo sapiens
attggggtgataacc

SEQ ID NO: 581002 - DNA, 15 bp, Homo sapiens
aattggggtgataac

SEQ ID NO: 581003 - DNA, 15 bp, Homo sapiens
aaattggggtgataa

SEQ ID NO: 581004 - DNA, 15 bp, Homo sapiens
caaattggggtgata

SEQ ID NO: 581005 - DNA, 15 bp, Homo sapiens
tcaaattggggtgat

SEQ ID NO: 581006 - DNA, 15 bp, Homo sapiens
ctcaaattggggtga

SEQ ID NO: 581007 - DNA, 15 bp, Homo sapiens
tctcaaattggggtg

SEQ ID NO: 581008 - DNA, 15 bp, Homo sapiens
ttctcaaattggggt

SEQ ID NO: 581009 - DNA, 15 bp, Homo sapiens
tttctcaaattgggg

SEQ ID NO: 581010 - DNA, 15 bp, Homo sapiens
gtttctcaaattggg

SEQ ID NO: 581011 - DNA, 15 bp, Homo sapiens
ggtttctcaaattgg

SEQ ID NO: 581012 - DNA, 15 bp, Homo sapiens
gggtttctcaaattg

SEQ ID NO: 581013 - DNA, 15 bp, Homo sapiens
agggtttctcaaatt

SEQ ID NO: 581014 - DNA, 15 bp, Homo sapiens
cagggtttctcaaat

SEQ ID NO: 581015 - DNA, 15 bp, Homo sapiens
ccagggtttctcaaa

SEQ ID NO: 581016 - DNA, 15 bp, Homo sapiens
accagggtttctcaa

SEQ ID NO: 581017 - DNA, 15 bp, Homo sapiens
gaccagggtttctca

SEQ ID NO: 581018 - DNA, 15 bp, Homo sapiens
agaccagggtttctc

SEQ ID NO: 581019 - DNA, 15 bp, Homo sapiens
tagaccagggtttct

SEQ ID NO: 581020 - DNA, 15 bp, Homo sapiens
atagaccagggtttc

SEQ ID NO: 581021 - DNA, 15 bp, Homo sapiens
catagaccagggttt

SEQ ID NO: 581022 - DNA, 15 bp, Homo sapiens
gcatagaccagggtt

SEQ ID NO: 581023 - DNA, 15 bp, Homo sapiens
agcatagaccagggt

SEQ ID NO: 581024 - DNA, 15 bp, Homo sapiens
aagcatagaccaggg

SEQ ID NO: 581025 - DNA, 15 bp, Homo sapiens
taagcatagaccagg

SEQ ID NO: 581026 - DNA, 15 bp, Homo sapiens
ataagcatagaccag

SEQ ID NO: 581027 - DNA, 15 bp, Homo sapiens
cataagcatagacca

SEQ ID NO: 581028 - DNA, 15 bp, Homo sapiens
tcataagcatagacc

SEQ ID NO: 581029 - DNA, 15 bp, Homo sapiens
ttcataagcatagac

SEQ ID NO: 581030 - DNA, 15 bp, Homo sapiens
tttcataagcataga

SEQ ID NO: 581031 - DNA, 15 bp, Homo sapiens
atttcataagcatag

SEQ ID NO: 581032 - DNA, 15 bp, Homo sapiens
gatttcataagcata

SEQ ID NO: 581033 - DNA, 15 bp, Homo sapiens
agatttcataagcat

SEQ ID NO: 581034 - DNA, 15 bp, Homo sapiens
aagatttcataagca

SEQ ID NO: 581035 - DNA, 15 bp, Homo sapiens
gaagatttcataagc

SEQ ID NO: 581036 - DNA, 15 bp, Homo sapiens
agaagatttcataag

SEQ ID NO: 581037 - DNA, 15 bp, Homo sapiens
tagaagatttcataa

SEQ ID NO: 581038 - DNA, 15 bp, Homo sapiens
atagaagatttcata

SEQ ID NO: 581039 - DNA, 15 bp, Homo sapiens
aatagaagatttcat

SEQ ID NO: 581040 - DNA, 15 bp, Homo sapiens
caatagaagatttca

SEQ ID NO: 581041 - DNA, 15 bp, Homo sapiens
ccaatagaagatttc

SEQ ID NO: 581042 - DNA, 15 bp, Homo sapiens
accaatagaagattt

SEQ ID NO: 581043 - DNA, 15 bp, Homo sapiens
taccaatagaagatt

SEQ ID NO: 581044 - DNA, 15 bp, Homo sapiens
ttaccaatagaagat

SEQ ID NO: 581045 - DNA, 15 bp, Homo sapiens
attaccaatagaaga

SEQ ID NO: 581046 - DNA, 15 bp, Homo sapiens
aattaccaatagaag

SEQ ID NO: 581047 - DNA, 15 bp, Homo sapiens
taattaccaatagaa

SEQ ID NO: 581048 - DNA, 15 bp, Homo sapiens
ttaattaccaataga

SEQ ID NO: 581049 - DNA, 15 bp, Homo sapiens
tttaattaccaatag

SEQ ID NO: 581050 - DNA, 15 bp, Homo sapiens
atttaattaccaata

SEQ ID NO: 581051 - DNA, 15 bp, Homo sapiens
aatttaattaccaat

SEQ ID NO: 581052 - DNA, 15 bp, Homo sapiens
caatttaattaccaa

SEQ ID NO: 581053 - DNA, 15 bp, Homo sapiens
acaatttaattacca

SEQ ID NO: 581054 - DNA, 15 bp, Homo sapiens
gacaatttaattacc

SEQ ID NO: 581055 - DNA, 15 bp, Homo sapiens
tgacaatttaattac

SEQ ID NO: 581056 - DNA, 15 bp, Homo sapiens
atgacaatttaatta

SEQ ID NO: 581057 - DNA, 15 bp, Homo sapiens
aatgacaatttaatt

SEQ ID NO: 581058 - DNA, 15 bp, Homo sapiens
gaatgacaatttaat

SEQ ID NO: 581059 - DNA, 15 bp, Homo sapiens
tgaatgacaatttaa

SEQ ID NO: 581060 - DNA, 15 bp, Homo sapiens
atgaatgacaattta

SEQ ID NO: 581061 - DNA, 15 bp, Homo sapiens
aatgaatgacaattt

SEQ ID NO: 581062 - DNA, 15 bp, Homo sapiens
caatgaatgacaatt

SEQ ID NO: 581063 - DNA, 15 bp, Homo sapiens
acaatgaatgacaat

SEQ ID NO: 581064 - DNA, 15 bp, Homo sapiens
gacaatgaatgacaa

SEQ ID NO: 581065 - DNA, 15 bp, Homo sapiens
tgacaatgaatgaca

SEQ ID NO: 581066 - DNA, 15 bp, Homo sapiens
ttgacaatgaatgac

SEQ ID NO: 581067 - DNA, 15 bp, Homo sapiens
gttgacaatgaatga

SEQ ID NO: 581068 - DNA, 15 bp, Homo sapiens
tgttgacaatgaatg

SEQ ID NO: 581069 - DNA, 15 bp, Homo sapiens
atgttgacaatgaat

SEQ ID NO: 581070 - DNA, 15 bp, Homo sapiens
tatgttgacaatgaa

SEQ ID NO: 581071 - DNA, 15 bp, Homo sapiens
gtatgttgacaatga

SEQ ID NO: 581072 - DNA, 15 bp, Homo sapiens
tgtatgttgacaatg

SEQ ID NO: 581073 - DNA, 15 bp, Homo sapiens
ttgtatgttgacaat

SEQ ID NO: 581074 - DNA, 15 bp, Homo sapiens
attgtatgttgacaa

SEQ ID NO: 581075 - DNA, 15 bp, Homo sapiens
aattgtatgttgaca

SEQ ID NO: 581076 - DNA, 15 bp, Homo sapiens
taattgtatgttgac

SEQ ID NO: 581077 - DNA, 15 bp, Homo sapiens
ataattgtatgttga

SEQ ID NO: 581078 - DNA, 15 bp, Homo sapiens
tataattgtatgttg

SEQ ID NO: 581079 - DNA, 15 bp, Homo sapiens
ttataattgtatgtt

SEQ ID NO: 581080 - DNA, 15 bp, Homo sapiens
attataattgtatgt

SEQ ID NO: 581081 - DNA, 15 bp, Homo sapiens
aattataattgtatg

SEQ ID NO: 581082 - DNA, 15 bp, Homo sapiens
taattataattgtat

SEQ ID NO: 581083 - DNA, 15 bp, Homo sapiens
ataattataattgta

SEQ ID NO: 581084 - DNA, 15 bp, Homo sapiens
aataattataattgt

SEQ ID NO: 581085 - DNA, 15 bp, Homo sapiens
taataattataattg

SEQ ID NO: 581086 - DNA, 15 bp, Homo sapiens
ataataattataatt

SEQ ID NO: 581087 - DNA, 15 bp, Homo sapiens
aataataattataat

SEQ ID NO: 581088 - DNA, 15 bp, Homo sapiens
caataataattataa

SEQ ID NO: 581089 - DNA, 15 bp, Homo sapiens
ccaataataattata

SEQ ID NO: 581090 - DNA, 15 bp, Homo sapiens
tccaataataattat

SEQ ID NO: 581091 - DNA, 15 bp, Homo sapiens
ttccaataataatta

SEQ ID NO: 581092 - DNA, 15 bp, Homo sapiens
attccaataataatt

SEQ ID NO: 581093 - DNA, 15 bp, Homo sapiens
aattccaataataat

SEQ ID NO: 581094 - DNA, 15 bp, Homo sapiens
aaattccaataataa

SEQ ID NO: 581095 - DNA, 15 bp, Homo sapiens
caaattccaataata

SEQ ID NO: 581096 - DNA, 15 bp, Homo sapiens
acaaattccaataat

SEQ ID NO: 581097 - DNA, 15 bp, Homo sapiens
aacaaattccaataa

SEQ ID NO: 581098 - DNA, 15 bp, Homo sapiens
aaacaaattccaata

SEQ ID NO: 581099 - DNA, 15 bp, Homo sapiens
aaaacaaattccaat

SEQ ID NO: 581100 - DNA, 15 bp, Homo sapiens
taaaacaaattccaa

SEQ ID NO: 581101 - DNA, 15 bp, Homo sapiens
ttaaaacaaattcca

SEQ ID NO: 581102 - DNA, 15 bp, Homo sapiens
tttaaaacaaattcc

SEQ ID NO: 581103 - DNA, 15 bp, Homo sapiens
atttaaaacaaattc

SEQ ID NO: 581104 - DNA, 15 bp, Homo sapiens
catttaaaacaaatt

SEQ ID NO: 581105 - DNA, 15 bp, Homo sapiens
tcatttaaaacaaat

SEQ ID NO: 581106 - DNA, 15 bp, Homo sapiens
ttcatttaaaacaaa

SEQ ID NO: 581107 - DNA, 15 bp, Homo sapiens
attcatttaaaacaa

SEQ ID NO: 581108 - DNA, 15 bp, Homo sapiens
cattcatttaaaaca

SEQ ID NO: 581109 - DNA, 15 bp, Homo sapiens
tcattcatttaaaac

SEQ ID NO: 581110 - DNA, 15 bp, Homo sapiens
ttcattcatttaaaa

SEQ ID NO: 581111 - DNA, 15 bp, Homo sapiens
attcattcatttaaa

SEQ ID NO: 581112 - DNA, 15 bp, Homo sapiens
aattcattcatttaa

SEQ ID NO: 581113 - DNA, 15 bp, Homo sapiens
aaattcattcattta

SEQ ID NO: 581114 - DNA, 15 bp, Homo sapiens
caaattcattcattt

SEQ ID NO: 581115 - DNA, 15 bp, Homo sapiens
ccaaattcattcatt

SEQ ID NO: 581116 - DNA, 15 bp, Homo sapiens
tccaaattcattcat

SEQ ID NO: 581117 - DNA, 15 bp, Homo sapiens
ctccaaattcattca

SEQ ID NO: 581118 - DNA, 15 bp, Homo sapiens
cctccaaattcattc

SEQ ID NO: 581119 - DNA, 15 bp, Homo sapiens
acctccaaattcatt

SEQ ID NO: 581120 - DNA, 15 bp, Homo sapiens
cacctccaaattcat

SEQ ID NO: 581121 - DNA, 15 bp, Homo sapiens
tcacctccaaattca

SEQ ID NO: 581122 - DNA, 15 bp, Homo sapiens
atcacctccaaattc

SEQ ID NO: 581123 - DNA, 15 bp, Homo sapiens
aatcacctccaaatt

SEQ ID NO: 581124 - DNA, 15 bp, Homo sapiens
gaatcacctccaaat

SEQ ID NO: 581125 - DNA, 15 bp, Homo sapiens
agaatcacctccaaa

SEQ ID NO: 581126 - DNA, 15 bp, Homo sapiens
cagaatcacctccaa

SEQ ID NO: 581127 - DNA, 15 bp, Homo sapiens
acagaatcacctcca

SEQ ID NO: 581128 - DNA, 15 bp, Homo sapiens
tacagaatcacctcc

SEQ ID NO: 581129 - DNA, 15 bp, Homo sapiens
gtacagaatcacctc

SEQ ID NO: 581130 - DNA, 15 bp, Homo sapiens
ggtacagaatcacct

SEQ ID NO: 581131 - DNA, 15 bp, Homo sapiens
aggtacagaatcacc

SEQ ID NO: 581132 - DNA, 15 bp, Homo sapiens
aaggtacagaatcac

SEQ ID NO: 581133 - DNA, 15 bp, Homo sapiens
taaggtacagaatca

SEQ ID NO: 581134 - DNA, 15 bp, Homo sapiens
ttaaggtacagaatc

SEQ ID NO: 581135 - DNA, 15 bp, Homo sapiens
cttaaggtacagaat

SEQ ID NO: 581136 - DNA, 15 bp, Homo sapiens
acttaaggtacagaa

SEQ ID NO: 581137 - DNA, 15 bp, Homo sapiens
gacttaaggtacaga

SEQ ID NO: 581138 - DNA, 15 bp, Homo sapiens
tgacttaaggtacag

SEQ ID NO: 581139 - DNA, 15 bp, Homo sapiens
ttgacttaaggtaca

SEQ ID NO: 581140 - DNA, 15 bp, Homo sapiens
cttgacttaaggtac

SEQ ID NO: 581141 - DNA, 15 bp, Homo sapiens
tcttgacttaaggta

SEQ ID NO: 581142 - DNA, 15 bp, Homo sapiens
ctcttgacttaaggt

SEQ ID NO: 581143 - DNA, 15 bp, Homo sapiens
cctcttgacttaagg

SEQ ID NO: 581144 - DNA, 15 bp, Homo sapiens
tcctcttgacttaag

SEQ ID NO: 581145 - DNA, 15 bp, Homo sapiens
ttcctcttgacttaa

SEQ ID NO: 581146 - DNA, 15 bp, Homo sapiens
cttcctcttgactta

SEQ ID NO: 581147 - DNA, 15 bp, Homo sapiens
ccttcctcttgactt

SEQ ID NO: 581148 - DNA, 15 bp, Homo sapiens
tccttcctcttgact

SEQ ID NO: 581149 - DNA, 15 bp, Homo sapiens
atccttcctcttgac

SEQ ID NO: 581150 - DNA, 15 bp, Homo sapiens
catccttcctcttga

SEQ ID NO: 581151 - DNA, 15 bp, Homo sapiens
ccatccttcctcttg

SEQ ID NO: 581152 - DNA, 15 bp, Homo sapiens
gccatccttcctctt

SEQ ID NO: 581153 - DNA, 15 bp, Homo sapiens
agccatccttcctct

SEQ ID NO: 581154 - DNA, 15 bp, Homo sapiens
aagccatccttcctc

SEQ ID NO: 581155 - DNA, 15 bp, Homo sapiens
caagccatccttcct

SEQ ID NO: 581156 - DNA, 15 bp, Homo sapiens
tcaagccatccttcc

SEQ ID NO: 581157 - DNA, 15 bp, Homo sapiens
atcaagccatccttc

SEQ ID NO: 581158 - DNA, 15 bp, Homo sapiens
aatcaagccatcctt

SEQ ID NO: 581159 - DNA, 15 bp, Homo sapiens
aaatcaagccatcct

SEQ ID NO: 581160 - DNA, 15 bp, Homo sapiens
aaaatcaagccatcc

SEQ ID NO: 581161 - DNA, 15 bp, Homo sapiens
taaaatcaagccatc

SEQ ID NO: 581162 - DNA, 15 bp, Homo sapiens
ctaaaatcaagccat

SEQ ID NO: 581163 - DNA, 15 bp, Homo sapiens
cctaaaatcaagcca

SEQ ID NO: 581164 - DNA, 15 bp, Homo sapiens
acctaaaatcaagcc

SEQ ID NO: 581165 - DNA, 15 bp, Homo sapiens
cacctaaaatcaagc

SEQ ID NO: 581166 - DNA, 15 bp, Homo sapiens
ccacctaaaatcaag

SEQ ID NO: 581167 - DNA, 15 bp, Homo sapiens
tccacctaaaatcaa

SEQ ID NO: 581168 - DNA, 15 bp, Homo sapiens
atccacctaaaatca

SEQ ID NO: 581169 - DNA, 15 bp, Homo sapiens
aatccacctaaaatc

SEQ ID NO: 581170 - DNA, 15 bp, Homo sapiens
caatccacctaaaat

SEQ ID NO: 581171 - DNA, 15 bp, Homo sapiens
tcaatccacctaaaa

SEQ ID NO: 581172 - DNA, 15 bp, Homo sapiens
atcaatccacctaaa

SEQ ID NO: 581173 - DNA, 15 bp, Homo sapiens
aatcaatccacctaa

SEQ ID NO: 581174 - DNA, 15 bp, Homo sapiens
taatcaatccaccta

SEQ ID NO: 581175 - DNA, 15 bp, Homo sapiens
ataatcaatccacct

SEQ ID NO: 581176 - DNA, 15 bp, Homo sapiens
tataatcaatccacc

SEQ ID NO: 581177 - DNA, 15 bp, Homo sapiens
gtataatcaatccac

SEQ ID NO: 581178 - DNA, 15 bp, Homo sapiens
agtataatcaatcca

SEQ ID NO: 581179 - DNA, 15 bp, Homo sapiens
tagtataatcaatcc

SEQ ID NO: 581180 - DNA, 15 bp, Homo sapiens
ctagtataatcaatc

SEQ ID NO: 581181 - DNA, 15 bp, Homo sapiens
tctagtataatcaat

SEQ ID NO: 581182 - DNA, 15 bp, Homo sapiens
atctagtataatcaa

SEQ ID NO: 581183 - DNA, 15 bp, Homo sapiens
tatctagtataatca

SEQ ID NO: 581184 - DNA, 15 bp, Homo sapiens
ctatctagtataatc

SEQ ID NO: 581185 - DNA, 15 bp, Homo sapiens
gctatctagtataat

SEQ ID NO: 581186 - DNA, 15 bp, Homo sapiens
tgctatctagtataa

SEQ ID NO: 581187 - DNA, 15 bp, Homo sapiens
atgctatctagtata

SEQ ID NO: 581188 - DNA, 15 bp, Homo sapiens
gatgctatctagtat

SEQ ID NO: 581189 - DNA, 15 bp, Homo sapiens
ggatgctatctagta

SEQ ID NO: 581190 - DNA, 15 bp, Homo sapiens
tggatgctatctagt

SEQ ID NO: 581191 - DNA, 15 bp, Homo sapiens
ttggatgctatctag

SEQ ID NO: 581192 - DNA, 15 bp, Homo sapiens
tttggatgctatcta

SEQ ID NO: 581193 - DNA, 15 bp, Homo sapiens
ctttggatgctatct

SEQ ID NO: 581194 - DNA, 15 bp, Homo sapiens
cctttggatgctatc

SEQ ID NO: 581195 - DNA, 15 bp, Homo sapiens
acctttggatgctat

SEQ ID NO: 581196 - DNA, 15 bp, Homo sapiens
cacctttggatgcta

SEQ ID NO: 581197 - DNA, 15 bp, Homo sapiens
tcacctttggatgct

SEQ ID NO: 581198 - DNA, 15 bp, Homo sapiens
ttcacctttggatgc

SEQ ID NO: 581199 - DNA, 15 bp, Homo sapiens
attcacctttggatg

SEQ ID NO: 581200 - DNA, 15 bp, Homo sapiens
gattcacctttggat

SEQ ID NO: 581201 - DNA, 15 bp, Homo sapiens
agattcacctttgga

SEQ ID NO: 581202 - DNA, 15 bp, Homo sapiens
aagattcacctttgg

SEQ ID NO: 581203 - DNA, 15 bp, Homo sapiens
caagattcacctttg

SEQ ID NO: 581204 - DNA, 15 bp, Homo sapiens
tcaagattcaccttt

SEQ ID NO: 581205 - DNA, 15 bp, Homo sapiens
ttcaagattcacctt

SEQ ID NO: 581206 - DNA, 15 bp, Homo sapiens
cttcaagattcacct

SEQ ID NO: 581207 - DNA, 15 bp, Homo sapiens
gcttcaagattcacc

SEQ ID NO: 581208 - DNA, 15 bp, Homo sapiens
agcttcaagattcac

SEQ ID NO: 581209 - DNA, 15 bp, Homo sapiens
cagcttcaagattca

SEQ ID NO: 581210 - DNA, 15 bp, Homo sapiens
acagcttcaagattc

SEQ ID NO: 581211 - DNA, 15 bp, Homo sapiens
tacagcttcaagatt

SEQ ID NO: 581212 - DNA, 15 bp, Homo sapiens
atacagcttcaagat

SEQ ID NO: 581213 - DNA, 15 bp, Homo sapiens
aatacagcttcaaga

SEQ ID NO: 581214 - DNA, 15 bp, Homo sapiens
aaatacagcttcaag

SEQ ID NO: 581215 - DNA, 15 bp, Homo sapiens
taaatacagcttcaa

SEQ ID NO: 581216 - DNA, 15 bp, Homo sapiens
ttaaatacagcttca

SEQ ID NO: 581217 - DNA, 15 bp, Homo sapiens
tttaaatacagcttc

SEQ ID NO: 581218 - DNA, 15 bp, Homo sapiens
atttaaatacagctt

SEQ ID NO: 581219 - DNA, 15 bp, Homo sapiens
aatttaaatacagct

SEQ ID NO: 581220 - DNA, 15 bp, Homo sapiens
gaatttaaatacagc

SEQ ID NO: 581221 - DNA, 15 bp, Homo sapiens
tgaatttaaatacag

SEQ ID NO: 581222 - DNA, 15 bp, Homo sapiens
atgaatttaaataca

SEQ ID NO: 581223 - DNA, 15 bp, Homo sapiens
aatgaatttaaatac

SEQ ID NO: 581224 - DNA, 15 bp, Homo sapiens
caatgaatttaaata

SEQ ID NO: 581225 - DNA, 15 bp, Homo sapiens
gcaatgaatttaaat

SEQ ID NO: 581226 - DNA, 15 bp, Homo sapiens
agcaatgaatttaaa

SEQ ID NO: 581227 - DNA, 15 bp, Homo sapiens
aagcaatgaatttaa

SEQ ID NO: 581228 - DNA, 15 bp, Homo sapiens
caagcaatgaattta

SEQ ID NO: 581229 - DNA, 15 bp, Homo sapiens
tcaagcaatgaattt

SEQ ID NO: 581230 - DNA, 15 bp, Homo sapiens
ttcaagcaatgaatt

SEQ ID NO: 581231 - DNA, 15 bp, Homo sapiens
tttcaagcaatgaat

SEQ ID NO: 581232 - DNA, 15 bp, Homo sapiens
atttcaagcaatgaa

SEQ ID NO: 581233 - DNA, 15 bp, Homo sapiens
tatttcaagcaatga

SEQ ID NO: 581234 - DNA, 15 bp, Homo sapiens
ttatttcaagcaatg

SEQ ID NO: 581235 - DNA, 15 bp, Homo sapiens
attatttcaagcaat

SEQ ID NO: 581236 - DNA, 15 bp, Homo sapiens
aattatttcaagcaa

SEQ ID NO: 581237 - DNA, 15 bp, Homo sapiens
aaattatttcaagca

SEQ ID NO: 581238 - DNA, 15 bp, Homo sapiens
gaaattatttcaagc

SEQ ID NO: 581239 - DNA, 15 bp, Homo sapiens
ggaaattatttcaag

SEQ ID NO: 581240 - DNA, 15 bp, Homo sapiens
tggaaattatttcaa

SEQ ID NO: 581241 - DNA, 15 bp, Homo sapiens
gtggaaattatttca

SEQ ID NO: 581242 - DNA, 15 bp, Homo sapiens
ggtggaaattatttc

SEQ ID NO: 581243 - DNA, 15 bp, Homo sapiens
gggtggaaattattt

SEQ ID NO: 581244 - DNA, 15 bp, Homo sapiens
agggtggaaattatt

SEQ ID NO: 581245 - DNA, 15 bp, Homo sapiens
aagggtggaaattat

SEQ ID NO: 581246 - DNA, 15 bp, Homo sapiens
taagggtggaaatta

SEQ ID NO: 581247 - DNA, 15 bp, Homo sapiens
ttaagggtggaaatt

SEQ ID NO: 581248 - DNA, 15 bp, Homo sapiens
cttaagggtggaaat

SEQ ID NO: 581249 - DNA, 15 bp, Homo sapiens
tcttaagggtggaaa

SEQ ID NO: 581250 - DNA, 15 bp, Homo sapiens
ttcttaagggtggaa

SEQ ID NO: 581251 - DNA, 15 bp, Homo sapiens
tttcttaagggtgga

SEQ ID NO: 581252 - DNA, 15 bp, Homo sapiens
ttttcttaagggtgg

SEQ ID NO: 581253 - DNA, 15 bp, Homo sapiens
tttttcttaagggtg

SEQ ID NO: 581254 - DNA, 15 bp, Homo sapiens
atttttcttaagggt

SEQ ID NO: 581255 - DNA, 15 bp, Homo sapiens
gatttttcttaaggg

SEQ ID NO: 581256 - DNA, 15 bp, Homo sapiens
agatttttcttaagg

SEQ ID NO: 581257 - DNA, 15 bp, Homo sapiens
gagatttttcttaag

SEQ ID NO: 581258 - DNA, 15 bp, Homo sapiens
agagatttttcttaa

SEQ ID NO: 581259 - DNA, 15 bp, Homo sapiens
tagagatttttctta

SEQ ID NO: 581260 - DNA, 15 bp, Homo sapiens
ctagagatttttctt

SEQ ID NO: 581261 - DNA, 15 bp, Homo sapiens
gctagagatttttct

SEQ ID NO: 581262 - DNA, 15 bp, Homo sapiens
tgctagagatttttc

SEQ ID NO: 581263 - DNA, 15 bp, Homo sapiens
ttgctagagattttt

SEQ ID NO: 581264 - DNA, 15 bp, Homo sapiens
attgctagagatttt

SEQ ID NO: 581265 - DNA, 15 bp, Homo sapiens
aattgctagagattt

SEQ ID NO: 581266 - DNA, 15 bp, Homo sapiens
caattgctagagatt

SEQ ID NO: 581267 - DNA, 15 bp, Homo sapiens
acaattgctagagat

SEQ ID NO: 581268 - DNA, 15 bp, Homo sapiens
tacaattgctagaga

SEQ ID NO: 581269 - DNA, 15 bp, Homo sapiens
ttacaattgctagag

SEQ ID NO: 581270 - DNA, 15 bp, Homo sapiens
tttacaattgctaga

SEQ ID NO: 581271 - DNA, 15 bp, Homo sapiens
ttttacaattgctag

SEQ ID NO: 581272 - DNA, 15 bp, Homo sapiens
tttttacaattgcta

SEQ ID NO: 581273 - DNA, 15 bp, Homo sapiens
ctttttacaattgct

SEQ ID NO: 581274 - DNA, 15 bp, Homo sapiens
cctttttacaattgc

SEQ ID NO: 581275 - DNA, 15 bp, Homo sapiens
ccctttttacaattg

SEQ ID NO: 581276 - DNA, 15 bp, Homo sapiens
tccctttttacaatt

SEQ ID NO: 581277 - DNA, 15 bp, Homo sapiens
atccctttttacaat

SEQ ID NO: 581278 - DNA, 15 bp, Homo sapiens
catccctttttacaa

SEQ ID NO: 581279 - DNA, 15 bp, Homo sapiens
gcatccctttttaca

SEQ ID NO: 581280 - DNA, 15 bp, Homo sapiens
agcatccctttttac

SEQ ID NO: 581281 - DNA, 15 bp, Homo sapiens
gagcatcccttttta

SEQ ID NO: 581282 - DNA, 15 bp, Homo sapiens
agagcatcccttttt

SEQ ID NO: 581283 - DNA, 15 bp, Homo sapiens
cagagcatccctttt

SEQ ID NO: 581284 - DNA, 15 bp, Homo sapiens
ccagagcatcccttt

SEQ ID NO: 581285 - DNA, 15 bp, Homo sapiens
tccagagcatccctt

SEQ ID NO: 581286 - DNA, 15 bp, Homo sapiens
ttccagagcatccct

SEQ ID NO: 581287 - DNA, 15 bp, Homo sapiens
tttccagagcatccc

SEQ ID NO: 581288 - DNA, 15 bp, Homo sapiens
atttccagagcatcc

SEQ ID NO: 581289 - DNA, 15 bp, Homo sapiens
catttccagagcatc

SEQ ID NO: 581290 - DNA, 15 bp, Homo sapiens
acatttccagagcat

SEQ ID NO: 581291 - DNA, 15 bp, Homo sapiens
cacatttccagagca

SEQ ID NO: 581292 - DNA, 15 bp, Homo sapiens
ccacatttccagagc

SEQ ID NO: 581293 - DNA, 15 bp, Homo sapiens
cccacatttccagag

SEQ ID NO: 581294 - DNA, 15 bp, Homo sapiens
gcccacatttccaga

SEQ ID NO: 581295 - DNA, 15 bp, Homo sapiens
tgcccacatttccag

SEQ ID NO: 581296 - DNA, 15 bp, Homo sapiens
atgcccacatttcca

SEQ ID NO: 581297 - DNA, 15 bp, Homo sapiens
gatgcccacatttcc

SEQ ID NO: 581298 - DNA, 15 bp, Homo sapiens
agatgcccacatttc

SEQ ID NO: 581299 - DNA, 15 bp, Homo sapiens
aagatgcccacattt

SEQ ID NO: 581300 - DNA, 15 bp, Homo sapiens
gaagatgcccacatt

SEQ ID NO: 581301 - DNA, 15 bp, Homo sapiens
tgaagatgcccacat

SEQ ID NO: 581302 - DNA, 15 bp, Homo sapiens
ttgaagatgcccaca

SEQ ID NO: 581303 - DNA, 15 bp, Homo sapiens
tttgaagatgcccac

SEQ ID NO: 581304 - DNA, 15 bp, Homo sapiens
ttttgaagatgccca

SEQ ID NO: 581305 - DNA, 15 bp, Homo sapiens
attttgaagatgccc

SEQ ID NO: 581306 - DNA, 15 bp, Homo sapiens
tattttgaagatgcc

SEQ ID NO: 581307 - DNA, 15 bp, Homo sapiens
ctattttgaagatgc

SEQ ID NO: 581308 - DNA, 15 bp, Homo sapiens
tctattttgaagatg

SEQ ID NO: 581309 - DNA, 15 bp, Homo sapiens
ctctattttgaagat

SEQ ID NO: 581310 - DNA, 15 bp, Homo sapiens
tctctattttgaaga

SEQ ID NO: 581311 - DNA, 15 bp, Homo sapiens
atctctattttgaag

SEQ ID NO: 581312 - DNA, 15 bp, Homo sapiens
tatctctattttgaa

SEQ ID NO: 581313 - DNA, 15 bp, Homo sapiens
ttatctctattttga

SEQ ID NO: 581314 - DNA, 15 bp, Homo sapiens
attatctctattttg

SEQ ID NO: 581315 - DNA, 15 bp, Homo sapiens
aattatctctatttt

SEQ ID NO: 581316 - DNA, 15 bp, Homo sapiens
gaattatctctattt

SEQ ID NO: 581317 - DNA, 15 bp, Homo sapiens
agaattatctctatt

SEQ ID NO: 581318 - DNA, 15 bp, Homo sapiens
aagaattatctctat

SEQ ID NO: 581319 - DNA, 15 bp, Homo sapiens
caagaattatctcta

SEQ ID NO: 581320 - DNA, 15 bp, Homo sapiens
acaagaattatctct

SEQ ID NO: 581321 - DNA, 15 bp, Homo sapiens
cacaagaattatctc

SEQ ID NO: 581322 - DNA, 15 bp, Homo sapiens
acacaagaattatct

SEQ ID NO: 581323 - DNA, 15 bp, Homo sapiens
aacacaagaattatc

SEQ ID NO: 581324 - DNA, 15 bp, Homo sapiens
taacacaagaattat

SEQ ID NO: 581325 - DNA, 15 bp, Homo sapiens
ctaacacaagaatta

SEQ ID NO: 581326 - DNA, 15 bp, Homo sapiens
actaacacaagaatt

SEQ ID NO: 581327 - DNA, 15 bp, Homo sapiens
aactaacacaagaat

SEQ ID NO: 581328 - DNA, 15 bp, Homo sapiens
gaactaacacaagaa

SEQ ID NO: 581329 - DNA, 15 bp, Homo sapiens
tgaactaacacaaga

SEQ ID NO: 581330 - DNA, 15 bp, Homo sapiens
ttgaactaacacaag

SEQ ID NO: 581331 - DNA, 15 bp, Homo sapiens
gttgaactaacacaa

SEQ ID NO: 581332 - DNA, 15 bp, Homo sapiens
tgttgaactaacaca

SEQ ID NO: 581333 - DNA, 15 bp, Homo sapiens
ttgttgaactaacac

SEQ ID NO: 581334 - DNA, 15 bp, Homo sapiens
tttgttgaactaaca

SEQ ID NO: 581335 - DNA, 15 bp, Homo sapiens
atttgttgaactaac

SEQ ID NO: 581336 - DNA, 15 bp, Homo sapiens
tatttgttgaactaa

SEQ ID NO: 581337 - DNA, 15 bp, Homo sapiens
atatttgttgaacta

SEQ ID NO: 581338 - DNA, 15 bp, Homo sapiens
aatatttgttgaact

SEQ ID NO: 581339 - DNA, 15 bp, Homo sapiens
taatatttgttgaac

SEQ ID NO: 581340 - DNA, 15 bp, Homo sapiens
ataatatttgttgaa

SEQ ID NO: 581341 - DNA, 15 bp, Homo sapiens
aataatatttgttga

SEQ ID NO: 581342 - DNA, 15 bp, Homo sapiens
caataatatttgttg

SEQ ID NO: 581343 - DNA, 15 bp, Homo sapiens
acaataatatttgtt

SEQ ID NO: 581344 - DNA, 15 bp, Homo sapiens
tacaataatatttgt

SEQ ID NO: 581345 - DNA, 15 bp, Homo sapiens
gtacaataatatttg

SEQ ID NO: 581346 - DNA, 15 bp, Homo sapiens
ggtacaataatattt

SEQ ID NO: 581347 - DNA, 15 bp, Homo sapiens
tggtacaataatatt

SEQ ID NO: 581348 - DNA, 15 bp, Homo sapiens
ctggtacaataatat

SEQ ID NO: 581349 - DNA, 15 bp, Homo sapiens
cctggtacaataata

SEQ ID NO: 581350 - DNA, 15 bp, Homo sapiens
acctggtacaataat

SEQ ID NO: 581351 - DNA, 15 bp, Homo sapiens
cacctggtacaataa

SEQ ID NO: 581352 - DNA, 15 bp, Homo sapiens
gcacctggtacaata

SEQ ID NO: 581353 - DNA, 15 bp, Homo sapiens
agcacctggtacaat

SEQ ID NO: 581354 - DNA, 15 bp, Homo sapiens
cagcacctggtacaa

SEQ ID NO: 581355 - DNA, 15 bp, Homo sapiens
ccagcacctggtaca

SEQ ID NO: 581356 - DNA, 15 bp, Homo sapiens
tccagcacctggtac

SEQ ID NO: 581357 - DNA, 15 bp, Homo sapiens
ttccagcacctggta

SEQ ID NO: 581358 - DNA, 15 bp, Homo sapiens
attccagcacctggt

SEQ ID NO: 581359 - DNA, 15 bp, Homo sapiens
tattccagcacctgg

SEQ ID NO: 581360 - DNA, 15 bp, Homo sapiens
ttattccagcacctg

SEQ ID NO: 581361 - DNA, 15 bp, Homo sapiens
tttattccagcacct

SEQ ID NO: 581362 - DNA, 15 bp, Homo sapiens
atttattccagcacc

SEQ ID NO: 581363 - DNA, 15 bp, Homo sapiens
tatttattccagcac

SEQ ID NO: 581364 - DNA, 15 bp, Homo sapiens
ctatttattccagca

SEQ ID NO: 581365 - DNA, 15 bp, Homo sapiens
gctatttattccagc

SEQ ID NO: 581366 - DNA, 15 bp, Homo sapiens
tgctatttattccag

SEQ ID NO: 581367 - DNA, 15 bp, Homo sapiens
ttgctatttattcca

SEQ ID NO: 581368 - DNA, 15 bp, Homo sapiens
tttgctatttattcc

SEQ ID NO: 581369 - DNA, 15 bp, Homo sapiens
ttttgctatttattc

SEQ ID NO: 581370 - DNA, 15 bp, Homo sapiens
gttttgctatttatt

SEQ ID NO: 581371 - DNA, 15 bp, Homo sapiens
ggttttgctatttat

SEQ ID NO: 581372 - DNA, 15 bp, Homo sapiens
tggttttgctattta

SEQ ID NO: 581373 - DNA, 15 bp, Homo sapiens
ttggttttgctattt

SEQ ID NO: 581374 - DNA, 15 bp, Homo sapiens
tttggttttgctatt

SEQ ID NO: 581375 - DNA, 15 bp, Homo sapiens
ctttggttttgctat

SEQ ID NO: 581376 - DNA, 15 bp, Homo sapiens
tctttggttttgcta

SEQ ID NO: 581377 - DNA, 15 bp, Homo sapiens
gtctttggttttgct

SEQ ID NO: 581378 - DNA, 15 bp, Homo sapiens
tgtctttggttttgc

SEQ ID NO: 581379 - DNA, 15 bp, Homo sapiens
ctgtctttggttttg

SEQ ID NO: 581380 - DNA, 15 bp, Homo sapiens
cctgtctttggtttt

SEQ ID NO: 581381 - DNA, 15 bp, Homo sapiens
tcctgtctttggttt

SEQ ID NO: 581382 - DNA, 15 bp, Homo sapiens
atcctgtctttggtt

SEQ ID NO: 581383 - DNA, 15 bp, Homo sapiens
aatcctgtctttggt

SEQ ID NO: 581384 - DNA, 15 bp, Homo sapiens
aaatcctgtctttgg

SEQ ID NO: 581385 - DNA, 15 bp, Homo sapiens
taaatcctgtctttg

SEQ ID NO: 581386 - DNA, 15 bp, Homo sapiens
ataaatcctgtcttt

SEQ ID NO: 581387 - DNA, 15 bp, Homo sapiens
tataaatcctgtctt

SEQ ID NO: 581388 - DNA, 15 bp, Homo sapiens
atataaatcctgtct

SEQ ID NO: 581389 - DNA, 15 bp, Homo sapiens
gatataaatcctgtc

SEQ ID NO: 581390 - DNA, 15 bp, Homo sapiens
tgatataaatcctgt

SEQ ID NO: 581391 - DNA, 15 bp, Homo sapiens
ttgatataaatcctg

SEQ ID NO: 581392 - DNA, 15 bp, Homo sapiens
cttgatataaatcct

SEQ ID NO: 581393 - DNA, 15 bp, Homo sapiens
ccttgatataaatcc

SEQ ID NO: 581394 - DNA, 15 bp, Homo sapiens
tccttgatataaatc

SEQ ID NO: 581395 - DNA, 15 bp, Homo sapiens
ttccttgatataaat

SEQ ID NO: 581396 - DNA, 15 bp, Homo sapiens
attccttgatataaa

SEQ ID NO: 581397 - DNA, 15 bp, Homo sapiens
aattccttgatataa

SEQ ID NO: 581398 - DNA, 15 bp, Homo sapiens
aaattccttgatata

SEQ ID NO: 581399 - DNA, 15 bp, Homo sapiens
caaattccttgatat

SEQ ID NO: 581400 - DNA, 15 bp, Homo sapiens
gcaaattccttgata

SEQ ID NO: 581401 - DNA, 15 bp, Homo sapiens
agcaaattccttgat

SEQ ID NO: 581402 - DNA, 15 bp, Homo sapiens
aagcaaattccttga

SEQ ID NO: 581403 - DNA, 15 bp, Homo sapiens
aaagcaaattccttg

SEQ ID NO: 581404 - DNA, 15 bp, Homo sapiens
gaaagcaaattcctt

SEQ ID NO: 581405 - DNA, 15 bp, Homo sapiens
agaaagcaaattcct

SEQ ID NO: 581406 - DNA, 15 bp, Homo sapiens
aagaaagcaaattcc

SEQ ID NO: 581407 - DNA, 15 bp, Homo sapiens
taagaaagcaaattc

SEQ ID NO: 581408 - DNA, 15 bp, Homo sapiens
ataagaaagcaaatt

SEQ ID NO: 581409 - DNA, 15 bp, Homo sapiens
cataagaaagcaaat

SEQ ID NO: 581410 - DNA, 15 bp, Homo sapiens
ccataagaaagcaaa

SEQ ID NO: 581411 - DNA, 15 bp, Homo sapiens
tccataagaaagcaa

SEQ ID NO: 581412 - DNA, 15 bp, Homo sapiens
ctccataagaaagca

SEQ ID NO: 581413 - DNA, 15 bp, Homo sapiens
cctccataagaaagc

SEQ ID NO: 581414 - DNA, 15 bp, Homo sapiens
tcctccataagaaag

SEQ ID NO: 581415 - DNA, 15 bp, Homo sapiens
atcctccataagaaa

SEQ ID NO: 581416 - DNA, 15 bp, Homo sapiens
catcctccataagaa

SEQ ID NO: 581417 - DNA, 15 bp, Homo sapiens
gcatcctccataaga

SEQ ID NO: 581418 - DNA, 15 bp, Homo sapiens
tgcatcctccataag

SEQ ID NO: 581419 - DNA, 15 bp, Homo sapiens
ctgcatcctccataa

SEQ ID NO: 581420 - DNA, 15 bp, Homo sapiens
tctgcatcctccata

SEQ ID NO: 581421 - DNA, 15 bp, Homo sapiens
ttctgcatcctccat

SEQ ID NO: 581422 - DNA, 15 bp, Homo sapiens
cttctgcatcctcca

SEQ ID NO: 581423 - DNA, 15 bp, Homo sapiens
ccttctgcatcctcc

SEQ ID NO: 581424 - DNA, 15 bp, Homo sapiens
tccttctgcatcctc

SEQ ID NO: 581425 - DNA, 15 bp, Homo sapiens
ttccttctgcatcct

SEQ ID NO: 581426 - DNA, 15 bp, Homo sapiens
tttccttctgcatcc

SEQ ID NO: 581427 - DNA, 15 bp, Homo sapiens
atttccttctgcatc

SEQ ID NO: 581428 - DNA, 15 bp, Homo sapiens
gatttccttctgcat

SEQ ID NO: 581429 - DNA, 15 bp, Homo sapiens
tgatttccttctgca

SEQ ID NO: 581430 - DNA, 15 bp, Homo sapiens
atgatttccttctgc

SEQ ID NO: 581431 - DNA, 15 bp, Homo sapiens
aatgatttccttctg

SEQ ID NO: 581432 - DNA, 15 bp, Homo sapiens
taatgatttccttct

SEQ ID NO: 581433 - DNA, 15 bp, Homo sapiens
ataatgatttccttc

SEQ ID NO: 581434 - DNA, 15 bp, Homo sapiens
cataatgatttcctt

SEQ ID NO: 581435 - DNA, 15 bp, Homo sapiens
ccataatgatttcct

SEQ ID NO: 581436 - DNA, 15 bp, Homo sapiens
accataatgatttcc

SEQ ID NO: 581437 - DNA, 15 bp, Homo sapiens
aaccataatgatttc

SEQ ID NO: 581438 - DNA, 15 bp, Homo sapiens
aaaccataatgattt

SEQ ID NO: 581439 - DNA, 15 bp, Homo sapiens
aaaaccataatgatt

SEQ ID NO: 581440 - DNA, 15 bp, Homo sapiens
caaaaccataatgat

SEQ ID NO: 581441 - DNA, 15 bp, Homo sapiens
ccaaaaccataatga

SEQ ID NO: 581442 - DNA, 15 bp, Homo sapiens
cccaaaaccataatg

SEQ ID NO: 581443 - DNA, 15 bp, Homo sapiens
gcccaaaaccataat

SEQ ID NO: 581444 - DNA, 15 bp, Homo sapiens
tgcccaaaaccataa

SEQ ID NO: 581445 - DNA, 15 bp, Homo sapiens
ctgcccaaaaccata

SEQ ID NO: 581446 - DNA, 15 bp, Homo sapiens
tctgcccaaaaccat

SEQ ID NO: 581447 - DNA, 15 bp, Homo sapiens
ttctgcccaaaacca

SEQ ID NO: 581448 - DNA, 15 bp, Homo sapiens
tttctgcccaaaacc

SEQ ID NO: 581449 - DNA, 15 bp, Homo sapiens
atttctgcccaaaac

SEQ ID NO: 581450 - DNA, 15 bp, Homo sapiens
catttctgcccaaaa

SEQ ID NO: 581451 - DNA, 15 bp, Homo sapiens
gcatttctgcccaaa

SEQ ID NO: 581452 - DNA, 15 bp, Homo sapiens
agcatttctgcccaa

SEQ ID NO: 581453 - DNA, 15 bp, Homo sapiens
aagcatttctgccca

SEQ ID NO: 581454 - DNA, 15 bp, Homo sapiens
taagcatttctgccc

SEQ ID NO: 581455 - DNA, 15 bp, Homo sapiens
ctaagcatttctgcc

SEQ ID NO: 581456 - DNA, 15 bp, Homo sapiens
tctaagcatttctgc

SEQ ID NO: 581457 - DNA, 15 bp, Homo sapiens
gtctaagcatttctg

SEQ ID NO: 581458 - DNA, 15 bp, Homo sapiens
agtctaagcatttct

SEQ ID NO: 581459 - DNA, 15 bp, Homo sapiens
aagtctaagcatttc

SEQ ID NO: 581460 - DNA, 15 bp, Homo sapiens
aaagtctaagcattt

SEQ ID NO: 581461 - DNA, 15 bp, Homo sapiens
taaagtctaagcatt

SEQ ID NO: 581462 - DNA, 15 bp, Homo sapiens
ctaaagtctaagcat

SEQ ID NO: 581463 - DNA, 15 bp, Homo sapiens
actaaagtctaagca

SEQ ID NO: 581464 - DNA, 15 bp, Homo sapiens
gactaaagtctaagc

SEQ ID NO: 581465 - DNA, 15 bp, Homo sapiens
ggactaaagtctaag

SEQ ID NO: 581466 - DNA, 15 bp, Homo sapiens
aggactaaagtctaa

SEQ ID NO: 581467 - DNA, 15 bp, Homo sapiens
caggactaaagtcta

SEQ ID NO: 581468 - DNA, 15 bp, Homo sapiens
ccaggactaaagtct

SEQ ID NO: 581469 - DNA, 15 bp, Homo sapiens
gccaggactaaagtc

SEQ ID NO: 581470 - DNA, 15 bp, Homo sapiens
agccaggactaaagt

SEQ ID NO: 581471 - DNA, 15 bp, Homo sapiens
gagccaggactaaag

SEQ ID NO: 581472 - DNA, 15 bp, Homo sapiens
agagccaggactaaa

SEQ ID NO: 581473 - DNA, 15 bp, Homo sapiens
cagagccaggactaa

SEQ ID NO: 581474 - DNA, 15 bp, Homo sapiens
tcagagccaggacta

SEQ ID NO: 581475 - DNA, 15 bp, Homo sapiens
ctcagagccaggact

SEQ ID NO: 581476 - DNA, 15 bp, Homo sapiens
actcagagccaggac

SEQ ID NO: 581477 - DNA, 15 bp, Homo sapiens
aactcagagccagga

SEQ ID NO: 581478 - DNA, 15 bp, Homo sapiens
aaactcagagccagg

SEQ ID NO: 581479 - DNA, 15 bp, Homo sapiens
caaactcagagccag

SEQ ID NO: 581480 - DNA, 15 bp, Homo sapiens
ccaaactcagagcca

SEQ ID NO: 581481 - DNA, 15 bp, Homo sapiens
accaaactcagagcc

SEQ ID NO: 581482 - DNA, 15 bp, Homo sapiens
aaccaaactcagagc

SEQ ID NO: 581483 - DNA, 15 bp, Homo sapiens
gaaccaaactcagag

SEQ ID NO: 581484 - DNA, 15 bp, Homo sapiens
tgaaccaaactcaga

SEQ ID NO: 581485 - DNA, 15 bp, Homo sapiens
ctgaaccaaactcag

SEQ ID NO: 581486 - DNA, 15 bp, Homo sapiens
tctgaaccaaactca

SEQ ID NO: 581487 - DNA, 15 bp, Homo sapiens
atctgaaccaaactc

SEQ ID NO: 581488 - DNA, 15 bp, Homo sapiens
gatctgaaccaaact

SEQ ID NO: 581489 - DNA, 15 bp, Homo sapiens
tgatctgaaccaaac

SEQ ID NO: 581490 - DNA, 15 bp, Homo sapiens
gtgatctgaaccaaa

SEQ ID NO: 581491 - DNA, 15 bp, Homo sapiens
ggtgatctgaaccaa

SEQ ID NO: 581492 - DNA, 15 bp, Homo sapiens
tggtgatctgaacca

SEQ ID NO: 581493 - DNA, 15 bp, Homo sapiens
atggtgatctgaacc

SEQ ID NO: 581494 - DNA, 15 bp, Homo sapiens
gatggtgatctgaac

SEQ ID NO: 581495 - DNA, 15 bp, Homo sapiens
tgatggtgatctgaa

SEQ ID NO: 581496 - DNA, 15 bp, Homo sapiens
ttgatggtgatctga

SEQ ID NO: 581497 - DNA, 15 bp, Homo sapiens
attgatggtgatctg

SEQ ID NO: 581498 - DNA, 15 bp, Homo sapiens
gattgatggtgatct

SEQ ID NO: 581499 - DNA, 15 bp, Homo sapiens
agattgatggtgatc

SEQ ID NO: 581500 - DNA, 15 bp, Homo sapiens
cagattgatggtgat

SEQ ID NO: 581501 - DNA, 15 bp, Homo sapiens
tcagattgatggtga

SEQ ID NO: 581502 - DNA, 15 bp, Homo sapiens
gtcagattgatggtg

SEQ ID NO: 581503 - DNA, 15 bp, Homo sapiens
ggtcagattgatggt

SEQ ID NO: 581504 - DNA, 15 bp, Homo sapiens
tggtcagattgatgg

SEQ ID NO: 581505 - DNA, 15 bp, Homo sapiens
atggtcagattgatg

SEQ ID NO: 581506 - DNA, 15 bp, Homo sapiens
gatggtcagattgat

SEQ ID NO: 581507 - DNA, 15 bp, Homo sapiens
agatggtcagattga

SEQ ID NO: 581508 - DNA, 15 bp, Homo sapiens
gagatggtcagattg

SEQ ID NO: 581509 - DNA, 15 bp, Homo sapiens
cgagatggtcagatt

SEQ ID NO: 581510 - DNA, 15 bp, Homo sapiens
tcgagatggtcagat

SEQ ID NO: 581511 - DNA, 15 bp, Homo sapiens
ctcgagatggtcaga

SEQ ID NO: 581512 - DNA, 15 bp, Homo sapiens
tctcgagatggtcag

SEQ ID NO: 581513 - DNA, 15 bp, Homo sapiens
gtctcgagatggtca

SEQ ID NO: 581514 - DNA, 15 bp, Homo sapiens
agtctcgagatggtc

SEQ ID NO: 581515 - DNA, 15 bp, Homo sapiens
cagtctcgagatggt

SEQ ID NO: 581516 - DNA, 15 bp, Homo sapiens
gcagtctcgagatgg

SEQ ID NO: 581517 - DNA, 15 bp, Homo sapiens
agcagtctcgagatg

SEQ ID NO: 581518 - DNA, 15 bp, Homo sapiens
tagcagtctcgagat

SEQ ID NO: 581519 - DNA, 15 bp, Homo sapiens
ctagcagtctcgaga

SEQ ID NO: 581520 - DNA, 15 bp, Homo sapiens
actagcagtctcgag

SEQ ID NO: 581521 - DNA, 15 bp, Homo sapiens
cactagcagtctcga

SEQ ID NO: 581522 - DNA, 15 bp, Homo sapiens
tcactagcagtctcg

SEQ ID NO: 581523 - DNA, 15 bp, Homo sapiens
ttcactagcagtctc

SEQ ID NO: 581524 - DNA, 15 bp, Homo sapiens
tttcactagcagtct

SEQ ID NO: 581525 - DNA, 15 bp, Homo sapiens
atttcactagcagtc

SEQ ID NO: 581526 - DNA, 15 bp, Homo sapiens
tatttcactagcagt

SEQ ID NO: 581527 - DNA, 15 bp, Homo sapiens
ttatttcactagcag

SEQ ID NO: 581528 - DNA, 15 bp, Homo sapiens
cttatttcactagca

SEQ ID NO: 581529 - DNA, 15 bp, Homo sapiens
tcttatttcactagc

SEQ ID NO: 581530 - DNA, 15 bp, Homo sapiens
atcttatttcactag

SEQ ID NO: 581531 - DNA, 15 bp, Homo sapiens
tatcttatttcacta

SEQ ID NO: 581532 - DNA, 15 bp, Homo sapiens
ctatcttatttcact

SEQ ID NO: 581533 - DNA, 15 bp, Homo sapiens
cctatcttatttcac

SEQ ID NO: 581534 - DNA, 15 bp, Homo sapiens
ccctatcttatttca

SEQ ID NO: 581535 - DNA, 15 bp, Homo sapiens
cccctatcttatttc

SEQ ID NO: 581536 - DNA, 15 bp, Homo sapiens
gcccctatcttattt

SEQ ID NO: 581537 - DNA, 15 bp, Homo sapiens
agcccctatcttatt

SEQ ID NO: 581538 - DNA, 15 bp, Homo sapiens
aagcccctatcttat

SEQ ID NO: 581539 - DNA, 15 bp, Homo sapiens
taagcccctatctta

SEQ ID NO: 581540 - DNA, 15 bp, Homo sapiens
ataagcccctatctt

SEQ ID NO: 581541 - DNA, 15 bp, Homo sapiens
tataagcccctatct

SEQ ID NO: 581542 - DNA, 15 bp, Homo sapiens
atataagcccctatc

SEQ ID NO: 581543 - DNA, 15 bp, Homo sapiens
gatataagcccctat

SEQ ID NO: 581544 - DNA, 15 bp, Homo sapiens
tgatataagccccta

SEQ ID NO: 581545 - DNA, 15 bp, Homo sapiens
ttgatataagcccct

SEQ ID NO: 581546 - DNA, 15 bp, Homo sapiens
tttgatataagcccc

SEQ ID NO: 581547 - DNA, 15 bp, Homo sapiens
atttgatataagccc

SEQ ID NO: 581548 - DNA, 15 bp, Homo sapiens
tatttgatataagcc

SEQ ID NO: 581549 - DNA, 15 bp, Homo sapiens
gtatttgatataagc

SEQ ID NO: 581550 - DNA, 15 bp, Homo sapiens
ggtatttgatataag

SEQ ID NO: 581551 - DNA, 15 bp, Homo sapiens
aggtatttgatataa

SEQ ID NO: 581552 - DNA, 15 bp, Homo sapiens
taggtatttgatata

SEQ ID NO: 581553 - DNA, 15 bp, Homo sapiens
ttaggtatttgatat

SEQ ID NO: 581554 - DNA, 15 bp, Homo sapiens
tttaggtatttgata

SEQ ID NO: 581555 - DNA, 15 bp, Homo sapiens
atttaggtatttgat

SEQ ID NO: 581556 - DNA, 15 bp, Homo sapiens
gatttaggtatttga

SEQ ID NO: 581557 - DNA, 15 bp, Homo sapiens
ggatttaggtatttg

SEQ ID NO: 581558 - DNA, 15 bp, Homo sapiens
gggatttaggtattt

SEQ ID NO: 581559 - DNA, 15 bp, Homo sapiens
agggatttaggtatt

SEQ ID NO: 581560 - DNA, 15 bp, Homo sapiens
cagggatttaggtat

SEQ ID NO: 581561 - DNA, 15 bp, Homo sapiens
tcagggatttaggta

SEQ ID NO: 581562 - DNA, 15 bp, Homo sapiens
ttcagggatttaggt

SEQ ID NO: 581563 - DNA, 15 bp, Homo sapiens
tttcagggatttagg

SEQ ID NO: 581564 - DNA, 15 bp, Homo sapiens
ttttcagggatttag

SEQ ID NO: 581565 - DNA, 15 bp, Homo sapiens
attttcagggattta

SEQ ID NO: 581566 - DNA, 15 bp, Homo sapiens
cattttcagggattt

SEQ ID NO: 581567 - DNA, 15 bp, Homo sapiens
tcattttcagggatt

SEQ ID NO: 581568 - DNA, 15 bp, Homo sapiens
gtcattttcagggat

SEQ ID NO: 581569 - DNA, 15 bp, Homo sapiens
tgtcattttcaggga

SEQ ID NO: 581570 - DNA, 15 bp, Homo sapiens
atgtcattttcaggg

SEQ ID NO: 581571 - DNA, 15 bp, Homo sapiens
aatgtcattttcagg

SEQ ID NO: 581572 - DNA, 15 bp, Homo sapiens
aaatgtcattttcag

SEQ ID NO: 581573 - DNA, 15 bp, Homo sapiens
aaaatgtcattttca

SEQ ID NO: 581574 - DNA, 15 bp, Homo sapiens
caaaatgtcattttc

SEQ ID NO: 581575 - DNA, 15 bp, Homo sapiens
acaaaatgtcatttt

SEQ ID NO: 581576 - DNA, 15 bp, Homo sapiens
cacaaaatgtcattt

SEQ ID NO: 581577 - DNA, 15 bp, Homo sapiens
tcacaaaatgtcatt

SEQ ID NO: 581578 - DNA, 15 bp, Homo sapiens
atcacaaaatgtcat

SEQ ID NO: 581579 - DNA, 15 bp, Homo sapiens
aatcacaaaatgtca

SEQ ID NO: 581580 - DNA, 15 bp, Homo sapiens
aaatcacaaaatgtc

SEQ ID NO: 581581 - DNA, 15 bp, Homo sapiens
caaatcacaaaatgt

SEQ ID NO: 581582 - DNA, 15 bp, Homo sapiens
ccaaatcacaaaatg

SEQ ID NO: 581583 - DNA, 15 bp, Homo sapiens
tccaaatcacaaaat

SEQ ID NO: 581584 - DNA, 15 bp, Homo sapiens
ttccaaatcacaaaa

SEQ ID NO: 581585 - DNA, 15 bp, Homo sapiens
tttccaaatcacaaa

SEQ ID NO: 581586 - DNA, 15 bp, Homo sapiens
ttttccaaatcacaa

SEQ ID NO: 581587 - DNA, 15 bp, Homo sapiens
attttccaaatcaca

SEQ ID NO: 581588 - DNA, 15 bp, Homo sapiens
aattttccaaatcac

SEQ ID NO: 581589 - DNA, 15 bp, Homo sapiens
aaattttccaaatca

SEQ ID NO: 581590 - DNA, 15 bp, Homo sapiens
aaaattttccaaatc

SEQ ID NO: 581591 - DNA, 15 bp, Homo sapiens
gaaaattttccaaat

SEQ ID NO: 581592 - DNA, 15 bp, Homo sapiens
tgaaaattttccaaa

SEQ ID NO: 581593 - DNA, 15 bp, Homo sapiens
ttgaaaattttccaa

SEQ ID NO: 581594 - DNA, 15 bp, Homo sapiens
tttgaaaattttcca

SEQ ID NO: 581595 - DNA, 15 bp, Homo sapiens
ttttgaaaattttcc

SEQ ID NO: 581596 - DNA, 15 bp, Homo sapiens
cttttgaaaattttc

SEQ ID NO: 581597 - DNA, 15 bp, Homo sapiens
acttttgaaaatttt

SEQ ID NO: 581598 - DNA, 15 bp, Homo sapiens
gacttttgaaaattt

SEQ ID NO: 581599 - DNA, 15 bp, Homo sapiens
agacttttgaaaatt

SEQ ID NO: 581600 - DNA, 15 bp, Homo sapiens
tagacttttgaaaat

SEQ ID NO: 581601 - DNA, 15 bp, Homo sapiens
ttagacttttgaaaa

SEQ ID NO: 581602 - DNA, 15 bp, Homo sapiens
attagacttttgaaa

SEQ ID NO: 581603 - DNA, 15 bp, Homo sapiens
cattagacttttgaa

SEQ ID NO: 581604 - DNA, 15 bp, Homo sapiens
tcattagacttttga

SEQ ID NO: 581605 - DNA, 15 bp, Homo sapiens
ttcattagacttttg

SEQ ID NO: 581606 - DNA, 15 bp, Homo sapiens
cttcattagactttt

SEQ ID NO: 581607 - DNA, 15 bp, Homo sapiens
ccttcattagacttt

SEQ ID NO: 581608 - DNA, 15 bp, Homo sapiens
tccttcattagactt

SEQ ID NO: 581609 - DNA, 15 bp, Homo sapiens
ttccttcattagact

SEQ ID NO: 581610 - DNA, 15 bp, Homo sapiens
tttccttcattagac

SEQ ID NO: 581611 - DNA, 15 bp, Homo sapiens
gtttccttcattaga

SEQ ID NO: 581612 - DNA, 15 bp, Homo sapiens
agtttccttcattag

SEQ ID NO: 581613 - DNA, 15 bp, Homo sapiens
aagtttccttcatta

SEQ ID NO: 581614 - DNA, 15 bp, Homo sapiens
aaagtttccttcatt

SEQ ID NO: 581615 - DNA, 15 bp, Homo sapiens
aaaagtttccttcat

SEQ ID NO: 581616 - DNA, 15 bp, Homo sapiens
aaaaagtttccttca

SEQ ID NO: 581617 - DNA, 15 bp, Homo sapiens
aaaaaagtttccttc

SEQ ID NO: 581618 - DNA, 15 bp, Homo sapiens
caaaaaagtttcctt

SEQ ID NO: 581619 - DNA, 15 bp, Homo sapiens
ccaaaaaagtttcct

SEQ ID NO: 581620 - DNA, 15 bp, Homo sapiens
gccaaaaaagtttcc

SEQ ID NO: 581621 - DNA, 15 bp, Homo sapiens
tgccaaaaaagtttc

SEQ ID NO: 581622 - DNA, 15 bp, Homo sapiens
atgccaaaaaagttt

SEQ ID NO: 581623 - DNA, 15 bp, Homo sapiens
aatgccaaaaaagtt

SEQ ID NO: 581624 - DNA, 15 bp, Homo sapiens
aaatgccaaaaaagt

SEQ ID NO: 581625 - DNA, 15 bp, Homo sapiens
gaaatgccaaaaaag

SEQ ID NO: 581626 - DNA, 15 bp, Homo sapiens
agaaatgccaaaaaa

SEQ ID NO: 581627 - DNA, 15 bp, Homo sapiens
aagaaatgccaaaaa

SEQ ID NO: 581628 - DNA, 15 bp, Homo sapiens
aaagaaatgccaaaa

SEQ ID NO: 581629 - DNA, 15 bp, Homo sapiens
taaagaaatgccaaa

SEQ ID NO: 581630 - DNA, 15 bp, Homo sapiens
ttaaagaaatgccaa

SEQ ID NO: 581631 - DNA, 15 bp, Homo sapiens
tttaaagaaatgcca

SEQ ID NO: 581632 - DNA, 15 bp, Homo sapiens
atttaaagaaatgcc

SEQ ID NO: 581633 - DNA, 15 bp, Homo sapiens
catttaaagaaatgc

SEQ ID NO: 581634 - DNA, 15 bp, Homo sapiens
tcatttaaagaaatg

SEQ ID NO: 581635 - DNA, 15 bp, Homo sapiens
atcatttaaagaaat

SEQ ID NO: 581636 - DNA, 15 bp, Homo sapiens
aatcatttaaagaaa

SEQ ID NO: 581637 - DNA, 15 bp, Homo sapiens
taatcatttaaagaa

SEQ ID NO: 581638 - DNA, 15 bp, Homo sapiens
ataatcatttaaaga

SEQ ID NO: 581639 - DNA, 15 bp, Homo sapiens
aataatcatttaaag

SEQ ID NO: 581640 - DNA, 15 bp, Homo sapiens
caataatcatttaaa

SEQ ID NO: 581641 - DNA, 15 bp, Homo sapiens
acaataatcatttaa

SEQ ID NO: 581642 - DNA, 15 bp, Homo sapiens
gacaataatcattta

SEQ ID NO: 581643 - DNA, 15 bp, Homo sapiens
tgacaataatcattt

SEQ ID NO: 581644 - DNA, 15 bp, Homo sapiens
atgacaataatcatt

SEQ ID NO: 581645 - DNA, 15 bp, Homo sapiens
aatgacaataatcat

SEQ ID NO: 581646 - DNA, 15 bp, Homo sapiens
aaatgacaataatca

SEQ ID NO: 581647 - DNA, 15 bp, Homo sapiens
gaaatgacaataatc

SEQ ID NO: 581648 - DNA, 15 bp, Homo sapiens
agaaatgacaataat

SEQ ID NO: 581649 - DNA, 15 bp, Homo sapiens
aagaaatgacaataa

SEQ ID NO: 581650 - DNA, 15 bp, Homo sapiens
aaagaaatgacaata

SEQ ID NO: 581651 - DNA, 15 bp, Homo sapiens
aaaagaaatgacaat

SEQ ID NO: 581652 - DNA, 15 bp, Homo sapiens
gaaaagaaatgacaa

SEQ ID NO: 581653 - DNA, 15 bp, Homo sapiens
agaaaagaaatgaca

SEQ ID NO: 581654 - DNA, 15 bp, Homo sapiens
cagaaaagaaatgac

SEQ ID NO: 581655 - DNA, 15 bp, Homo sapiens
tcagaaaagaaatga

SEQ ID NO: 581656 - DNA, 15 bp, Homo sapiens
gtcagaaaagaaatg

SEQ ID NO: 581657 - DNA, 15 bp, Homo sapiens
agtcagaaaagaaat

SEQ ID NO: 581658 - DNA, 15 bp, Homo sapiens
aagtcagaaaagaaa

SEQ ID NO: 581659 - DNA, 15 bp, Homo sapiens
aaagtcagaaaagaa

SEQ ID NO: 581660 - DNA, 15 bp, Homo sapiens
aaaagtcagaaaaga

SEQ ID NO: 581661 - DNA, 15 bp, Homo sapiens
gaaaagtcagaaaag

SEQ ID NO: 581662 - DNA, 15 bp, Homo sapiens
ggaaaagtcagaaaa

SEQ ID NO: 581663 - DNA, 15 bp, Homo sapiens
gggaaaagtcagaaa

SEQ ID NO: 581664 - DNA, 15 bp, Homo sapiens
agggaaaagtcagaa

SEQ ID NO: 581665 - DNA, 15 bp, Homo sapiens
aagggaaaagtcaga

SEQ ID NO: 581666 - DNA, 15 bp, Homo sapiens
aaagggaaaagtcag

SEQ ID NO: 581667 - DNA, 15 bp, Homo sapiens
taaagggaaaagtca

SEQ ID NO: 581668 - DNA, 15 bp, Homo sapiens
ataaagggaaaagtc

SEQ ID NO: 581669 - DNA, 15 bp, Homo sapiens
tataaagggaaaagt

SEQ ID NO: 581670 - DNA, 15 bp, Homo sapiens
ttataaagggaaaag

SEQ ID NO: 581671 - DNA, 15 bp, Homo sapiens
tttataaagggaaaa

SEQ ID NO: 581672 - DNA, 15 bp, Homo sapiens
ttttataaagggaaa

SEQ ID NO: 581673 - DNA, 15 bp, Homo sapiens
gttttataaagggaa

SEQ ID NO: 581674 - DNA, 15 bp, Homo sapiens
ggttttataaaggga

SEQ ID NO: 581675 - DNA, 15 bp, Homo sapiens
aggttttataaaggg

SEQ ID NO: 581676 - DNA, 15 bp, Homo sapiens
aaggttttataaagg

SEQ ID NO: 581677 - DNA, 15 bp, Homo sapiens
taaggttttataaag

SEQ ID NO: 581678 - DNA, 15 bp, Homo sapiens
ttaaggttttataaa

SEQ ID NO: 581679 - DNA, 15 bp, Homo sapiens
gttaaggttttataa

SEQ ID NO: 581680 - DNA, 15 bp, Homo sapiens
tgttaaggttttata

SEQ ID NO: 581681 - DNA, 15 bp, Homo sapiens
atgttaaggttttat

SEQ ID NO: 581682 - DNA, 15 bp, Homo sapiens
catgttaaggtttta

SEQ ID NO: 581683 - DNA, 15 bp, Homo sapiens
acatgttaaggtttt

SEQ ID NO: 581684 - DNA, 15 bp, Homo sapiens
tacatgttaaggttt

SEQ ID NO: 581685 - DNA, 15 bp, Homo sapiens
ctacatgttaaggtt

SEQ ID NO: 581686 - DNA, 15 bp, Homo sapiens
cctacatgttaaggt

SEQ ID NO: 581687 - DNA, 15 bp, Homo sapiens
tcctacatgttaagg

SEQ ID NO: 581688 - DNA, 15 bp, Homo sapiens
atcctacatgttaag

SEQ ID NO: 581689 - DNA, 15 bp, Homo sapiens
aatcctacatgttaa

SEQ ID NO: 581690 - DNA, 15 bp, Homo sapiens
caatcctacatgtta

SEQ ID NO: 581691 - DNA, 15 bp, Homo sapiens
ccaatcctacatgtt

SEQ ID NO: 581692 - DNA, 15 bp, Homo sapiens
tccaatcctacatgt

SEQ ID NO: 581693 - DNA, 15 bp, Homo sapiens
ctccaatcctacatg

SEQ ID NO: 581694 - DNA, 15 bp, Homo sapiens
cctccaatcctacat

SEQ ID NO: 581695 - DNA, 15 bp, Homo sapiens
tcctccaatcctaca

SEQ ID NO: 581696 - DNA, 15 bp, Homo sapiens
ttcctccaatcctac

SEQ ID NO: 581697 - DNA, 15 bp, Homo sapiens
cttcctccaatccta

SEQ ID NO: 581698 - DNA, 15 bp, Homo sapiens
acttcctccaatcct

SEQ ID NO: 581699 - DNA, 15 bp, Homo sapiens
aacttcctccaatcc

SEQ ID NO: 581700 - DNA, 15 bp, Homo sapiens
aaacttcctccaatc

SEQ ID NO: 581701 - DNA, 15 bp, Homo sapiens
aaaacttcctccaat

SEQ ID NO: 581702 - DNA, 15 bp, Homo sapiens
gaaaacttcctccaa

SEQ ID NO: 581703 - DNA, 15 bp, Homo sapiens
agaaaacttcctcca

SEQ ID NO: 581704 - DNA, 15 bp, Homo sapiens
cagaaaacttcctcc

SEQ ID NO: 581705 - DNA, 15 bp, Homo sapiens
tcagaaaacttcctc

SEQ ID NO: 581706 - DNA, 15 bp, Homo sapiens
gtcagaaaacttcct

SEQ ID NO: 581707 - DNA, 15 bp, Homo sapiens
ggtcagaaaacttcc

SEQ ID NO: 581708 - DNA, 15 bp, Homo sapiens
tggtcagaaaacttc

SEQ ID NO: 581709 - DNA, 15 bp, Homo sapiens
atggtcagaaaactt

SEQ ID NO: 581710 - DNA, 15 bp, Homo sapiens
aatggtcagaaaact

SEQ ID NO: 581711 - DNA, 15 bp, Homo sapiens
aaatggtcagaaaac

SEQ ID NO: 581712 - DNA, 15 bp, Homo sapiens
aaaatggtcagaaaa

SEQ ID NO: 581713 - DNA, 15 bp, Homo sapiens
gaaaatggtcagaaa

SEQ ID NO: 581714 - DNA, 15 bp, Homo sapiens
agaaaatggtcagaa

SEQ ID NO: 581715 - DNA, 15 bp, Homo sapiens
gagaaaatggtcaga

SEQ ID NO: 581716 - DNA, 15 bp, Homo sapiens
tgagaaaatggtcag

SEQ ID NO: 581717 - DNA, 15 bp, Homo sapiens
atgagaaaatggtca

SEQ ID NO: 581718 - DNA, 15 bp, Homo sapiens
tatgagaaaatggtc

SEQ ID NO: 581719 - DNA, 15 bp, Homo sapiens
atatgagaaaatggt

SEQ ID NO: 581720 - DNA, 15 bp, Homo sapiens
gatatgagaaaatgg

SEQ ID NO: 581721 - DNA, 15 bp, Homo sapiens
ggatatgagaaaatg

SEQ ID NO: 581722 - DNA, 15 bp, Homo sapiens
aggatatgagaaaat

SEQ ID NO: 581723 - DNA, 15 bp, Homo sapiens
gaggatatgagaaaa

SEQ ID NO: 581724 - DNA, 15 bp, Homo sapiens
agaggatatgagaaa

SEQ ID NO: 581725 - DNA, 15 bp, Homo sapiens
aagaggatatgagaa

SEQ ID NO: 581726 - DNA, 15 bp, Homo sapiens
aaagaggatatgaga

SEQ ID NO: 581727 - DNA, 15 bp, Homo sapiens
gaaagaggatatgag

SEQ ID NO: 581728 - DNA, 15 bp, Homo sapiens
tgaaagaggatatga

SEQ ID NO: 581729 - DNA, 15 bp, Homo sapiens
ctgaaagaggatatg

SEQ ID NO: 581730 - DNA, 15 bp, Homo sapiens
gctgaaagaggatat

SEQ ID NO: 581731 - DNA, 15 bp, Homo sapiens
agctgaaagaggata

SEQ ID NO: 581732 - DNA, 15 bp, Homo sapiens
aagctgaaagaggat

SEQ ID NO: 581733 - DNA, 15 bp, Homo sapiens
aaagctgaaagagga

SEQ ID NO: 581734 - DNA, 15 bp, Homo sapiens
taaagctgaaagagg

SEQ ID NO: 581735 - DNA, 15 bp, Homo sapiens
ataaagctgaaagag

SEQ ID NO: 581736 - DNA, 15 bp, Homo sapiens
gataaagctgaaaga

SEQ ID NO: 581737 - DNA, 15 bp, Homo sapiens
agataaagctgaaag

SEQ ID NO: 581738 - DNA, 15 bp, Homo sapiens
aagataaagctgaaa

SEQ ID NO: 581739 - DNA, 15 bp, Homo sapiens
aaagataaagctgaa

SEQ ID NO: 581740 - DNA, 15 bp, Homo sapiens
gaaagataaagctga

SEQ ID NO: 581741 - DNA, 15 bp, Homo sapiens
agaaagataaagctg

SEQ ID NO: 581742 - DNA, 15 bp, Homo sapiens
cagaaagataaagct

SEQ ID NO: 581743 - DNA, 15 bp, Homo sapiens
acagaaagataaagc

SEQ ID NO: 581744 - DNA, 15 bp, Homo sapiens
tacagaaagataaag

SEQ ID NO: 581745 - DNA, 15 bp, Homo sapiens
ttacagaaagataaa

SEQ ID NO: 581746 - DNA, 15 bp, Homo sapiens
gttacagaaagataa

SEQ ID NO: 581747 - DNA, 15 bp, Homo sapiens
agttacagaaagata

SEQ ID NO: 581748 - DNA, 15 bp, Homo sapiens
aagttacagaaagat

SEQ ID NO: 581749 - DNA, 15 bp, Homo sapiens
gaagttacagaaaga

SEQ ID NO: 581750 - DNA, 15 bp, Homo sapiens
ggaagttacagaaag

SEQ ID NO: 581751 - DNA, 15 bp, Homo sapiens
tggaagttacagaaa

SEQ ID NO: 581752 - DNA, 15 bp, Homo sapiens
atggaagttacagaa

SEQ ID NO: 581753 - DNA, 15 bp, Homo sapiens
aatggaagttacaga

SEQ ID NO: 581754 - DNA, 15 bp, Homo sapiens
aaatggaagttacag

SEQ ID NO: 581755 - DNA, 15 bp, Homo sapiens
gaaatggaagttaca

SEQ ID NO: 581756 - DNA, 15 bp, Homo sapiens
agaaatggaagttac

SEQ ID NO: 581757 - DNA, 15 bp, Homo sapiens
gagaaatggaagtta

SEQ ID NO: 581758 - DNA, 15 bp, Homo sapiens
agagaaatggaagtt

SEQ ID NO: 581759 - DNA, 15 bp, Homo sapiens
tagagaaatggaagt

SEQ ID NO: 581760 - DNA, 15 bp, Homo sapiens
ctagagaaatggaag

SEQ ID NO: 581761 - DNA, 15 bp, Homo sapiens
gctagagaaatggaa

SEQ ID NO: 581762 - DNA, 15 bp, Homo sapiens
ggctagagaaatgga

SEQ ID NO: 581763 - DNA, 15 bp, Homo sapiens
tggctagagaaatgg

SEQ ID NO: 581764 - DNA, 15 bp, Homo sapiens
gtggctagagaaatg

SEQ ID NO: 581765 - DNA, 15 bp, Homo sapiens
ggtggctagagaaat

SEQ ID NO: 581766 - DNA, 15 bp, Homo sapiens
aggtggctagagaaa

SEQ ID NO: 581767 - DNA, 15 bp, Homo sapiens
gaggtggctagagaa

SEQ ID NO: 581768 - DNA, 15 bp, Homo sapiens
ggaggtggctagaga

SEQ ID NO: 581769 - DNA, 15 bp, Homo sapiens
gggaggtggctagag

SEQ ID NO: 581770 - DNA, 15 bp, Homo sapiens
agggaggtggctaga

SEQ ID NO: 581771 - DNA, 15 bp, Homo sapiens
tagggaggtggctag

SEQ ID NO: 581772 - DNA, 15 bp, Homo sapiens
ttagggaggtggcta

SEQ ID NO: 581773 - DNA, 15 bp, Homo sapiens
tttagggaggtggct

SEQ ID NO: 581774 - DNA, 15 bp, Homo sapiens
atttagggaggtggc

SEQ ID NO: 581775 - DNA, 15 bp, Homo sapiens
aatttagggaggtgg

SEQ ID NO: 581776 - DNA, 15 bp, Homo sapiens
taatttagggaggtg

SEQ ID NO: 581777 - DNA, 15 bp, Homo sapiens
gtaatttagggaggt

SEQ ID NO: 581778 - DNA, 15 bp, Homo sapiens
tgtaatttagggagg

SEQ ID NO: 581779 - DNA, 15 bp, Homo sapiens
ctgtaatttagggag

SEQ ID NO: 581780 - DNA, 15 bp, Homo sapiens
tctgtaatttaggga

SEQ ID NO: 581781 - DNA, 15 bp, Homo sapiens
ttctgtaatttaggg

SEQ ID NO: 581782 - DNA, 15 bp, Homo sapiens
cttctgtaatttagg

SEQ ID NO: 581783 - DNA, 15 bp, Homo sapiens
tcttctgtaatttag

SEQ ID NO: 581784 - DNA, 15 bp, Homo sapiens
gtcttctgtaattta

SEQ ID NO: 581785 - DNA, 15 bp, Homo sapiens
agtcttctgtaattt

SEQ ID NO: 581786 - DNA, 15 bp, Homo sapiens
cagtcttctgtaatt

SEQ ID NO: 581787 - DNA, 15 bp, Homo sapiens
acagtcttctgtaat

SEQ ID NO: 581788 - DNA, 15 bp, Homo sapiens
cacagtcttctgtaa

SEQ ID NO: 581789 - DNA, 15 bp, Homo sapiens
tcacagtcttctgta

SEQ ID NO: 581790 - DNA, 15 bp, Homo sapiens
ctcacagtcttctgt

SEQ ID NO: 581791 - DNA, 15 bp, Homo sapiens
tctcacagtcttctg

SEQ ID NO: 581792 - DNA, 15 bp, Homo sapiens
gtctcacagtcttct

SEQ ID NO: 581793 - DNA, 15 bp, Homo sapiens
ggtctcacagtcttc

SEQ ID NO: 581794 - DNA, 15 bp, Homo sapiens
gggtctcacagtctt

SEQ ID NO: 581795 - DNA, 15 bp, Homo sapiens
tgggtctcacagtct

SEQ ID NO: 581796 - DNA, 15 bp, Homo sapiens
ctgggtctcacagtc

SEQ ID NO: 581797 - DNA, 15 bp, Homo sapiens
cctgggtctcacagt

SEQ ID NO: 581798 - DNA, 15 bp, Homo sapiens
ccctgggtctcacag

SEQ ID NO: 581799 - DNA, 15 bp, Homo sapiens
gccctgggtctcaca

SEQ ID NO: 581800 - DNA, 15 bp, Homo sapiens
agccctgggtctcac

SEQ ID NO: 581801 - DNA, 15 bp, Homo sapiens
cagccctgggtctca

SEQ ID NO: 581802 - DNA, 15 bp, Homo sapiens
gcagccctgggtctc

SEQ ID NO: 581803 - DNA, 15 bp, Homo sapiens
agcagccctgggtct

SEQ ID NO: 581804 - DNA, 15 bp, Homo sapiens
cagcagccctgggtc

SEQ ID NO: 581805 - DNA, 15 bp, Homo sapiens
acagcagccctgggt

SEQ ID NO: 581806 - DNA, 15 bp, Homo sapiens
cacagcagccctggg

SEQ ID NO: 581807 - DNA, 15 bp, Homo sapiens
tcacagcagccctgg

SEQ ID NO: 581808 - DNA, 15 bp, Homo sapiens
atcacagcagccctg

SEQ ID NO: 581809 - DNA, 15 bp, Homo sapiens
aatcacagcagccct

SEQ ID NO: 581810 - DNA, 15 bp, Homo sapiens
taatcacagcagccc

SEQ ID NO: 581811 - DNA, 15 bp, Homo sapiens
ctaatcacagcagcc

SEQ ID NO: 581812 - DNA, 15 bp, Homo sapiens
cctaatcacagcagc

SEQ ID NO: 581813 - DNA, 15 bp, Homo sapiens
gcctaatcacagcag

SEQ ID NO: 581814 - DNA, 15 bp, Homo sapiens
tgcctaatcacagca

SEQ ID NO: 581815 - DNA, 15 bp, Homo sapiens
atgcctaatcacagc

SEQ ID NO: 581816 - DNA, 15 bp, Homo sapiens
aatgcctaatcacag

SEQ ID NO: 581817 - DNA, 15 bp, Homo sapiens
gaatgcctaatcaca

SEQ ID NO: 581818 - DNA, 15 bp, Homo sapiens
tgaatgcctaatcac

SEQ ID NO: 581819 - DNA, 15 bp, Homo sapiens
atgaatgcctaatca

SEQ ID NO: 581820 - DNA, 15 bp, Homo sapiens
tatgaatgcctaatc

SEQ ID NO: 581821 - DNA, 15 bp, Homo sapiens
ttatgaatgcctaat

SEQ ID NO: 581822 - DNA, 15 bp, Homo sapiens
attatgaatgcctaa

SEQ ID NO: 581823 - DNA, 15 bp, Homo sapiens
aattatgaatgccta

SEQ ID NO: 581824 - DNA, 15 bp, Homo sapiens
aaattatgaatgcct

SEQ ID NO: 581825 - DNA, 15 bp, Homo sapiens
gaaattatgaatgcc

SEQ ID NO: 581826 - DNA, 15 bp, Homo sapiens
agaaattatgaatgc

SEQ ID NO: 581827 - DNA, 15 bp, Homo sapiens
aagaaattatgaatg

SEQ ID NO: 581828 - DNA, 15 bp, Homo sapiens
aaagaaattatgaat

SEQ ID NO: 581829 - DNA, 15 bp, Homo sapiens
aaaagaaattatgaa

SEQ ID NO: 581830 - DNA, 15 bp, Homo sapiens
gaaaagaaattatga

SEQ ID NO: 581831 - DNA, 15 bp, Homo sapiens
tgaaaagaaattatg

SEQ ID NO: 581832 - DNA, 15 bp, Homo sapiens
ctgaaaagaaattat

SEQ ID NO: 581833 - DNA, 15 bp, Homo sapiens
cctgaaaagaaatta

SEQ ID NO: 581834 - DNA, 15 bp, Homo sapiens
ccctgaaaagaaatt

SEQ ID NO: 581835 - DNA, 15 bp, Homo sapiens
accctgaaaagaaat

SEQ ID NO: 581836 - DNA, 15 bp, Homo sapiens
caccctgaaaagaaa

SEQ ID NO: 581837 - DNA, 15 bp, Homo sapiens
acaccctgaaaagaa

SEQ ID NO: 581838 - DNA, 15 bp, Homo sapiens
aacaccctgaaaaga

SEQ ID NO: 581839 - DNA, 15 bp, Homo sapiens
aaacaccctgaaaag

SEQ ID NO: 581840 - DNA, 15 bp, Homo sapiens
caaacaccctgaaaa

SEQ ID NO: 581841 - DNA, 15 bp, Homo sapiens
acaaacaccctgaaa

SEQ ID NO: 581842 - DNA, 15 bp, Homo sapiens
cacaaacaccctgaa

SEQ ID NO: 581843 - DNA, 15 bp, Homo sapiens
gcacaaacaccctga

SEQ ID NO: 581844 - DNA, 15 bp, Homo sapiens
ggcacaaacaccctg

SEQ ID NO: 581845 - DNA, 15 bp, Homo sapiens
gggcacaaacaccct

SEQ ID NO: 581846 - DNA, 15 bp, Homo sapiens
agggcacaaacaccc

SEQ ID NO: 581847 - DNA, 15 bp, Homo sapiens
cagggcacaaacacc

SEQ ID NO: 581848 - DNA, 15 bp, Homo sapiens
tcagggcacaaacac

SEQ ID NO: 581849 - DNA, 15 bp, Homo sapiens
atcagggcacaaaca

SEQ ID NO: 581850 - DNA, 15 bp, Homo sapiens
aatcagggcacaaac

SEQ ID NO: 581851 - DNA, 15 bp, Homo sapiens
taatcagggcacaaa

SEQ ID NO: 581852 - DNA, 15 bp, Homo sapiens
ataatcagggcacaa

SEQ ID NO: 581853 - DNA, 15 bp, Homo sapiens
gataatcagggcaca

SEQ ID NO: 581854 - DNA, 15 bp, Homo sapiens
tgataatcagggcac

SEQ ID NO: 581855 - DNA, 15 bp, Homo sapiens
ttgataatcagggca

SEQ ID NO: 581856 - DNA, 15 bp, Homo sapiens
tttgataatcagggc

SEQ ID NO: 581857 - DNA, 15 bp, Homo sapiens
atttgataatcaggg

SEQ ID NO: 581858 - DNA, 15 bp, Homo sapiens
catttgataatcagg

SEQ ID NO: 581859 - DNA, 15 bp, Homo sapiens
acatttgataatcag

SEQ ID NO: 581860 - DNA, 15 bp, Homo sapiens
tacatttgataatca

SEQ ID NO: 581861 - DNA, 15 bp, Homo sapiens
gtacatttgataatc

SEQ ID NO: 581862 - DNA, 15 bp, Homo sapiens
tgtacatttgataat

SEQ ID NO: 581863 - DNA, 15 bp, Homo sapiens
ctgtacatttgataa

SEQ ID NO: 581864 - DNA, 15 bp, Homo sapiens
gctgtacatttgata

SEQ ID NO: 581865 - DNA, 15 bp, Homo sapiens
agctgtacatttgat

SEQ ID NO: 581866 - DNA, 15 bp, Homo sapiens
aagctgtacatttga

SEQ ID NO: 581867 - DNA, 15 bp, Homo sapiens
caagctgtacatttg

SEQ ID NO: 581868 - DNA, 15 bp, Homo sapiens
tcaagctgtacattt

SEQ ID NO: 581869 - DNA, 15 bp, Homo sapiens
ttcaagctgtacatt

SEQ ID NO: 581870 - DNA, 15 bp, Homo sapiens
cttcaagctgtacat

SEQ ID NO: 581871 - DNA, 15 bp, Homo sapiens
ccttcaagctgtaca

SEQ ID NO: 581872 - DNA, 15 bp, Homo sapiens
cccttcaagctgtac

SEQ ID NO: 581873 - DNA, 15 bp, Homo sapiens
tcccttcaagctgta

SEQ ID NO: 581874 - DNA, 15 bp, Homo sapiens
ctcccttcaagctgt

SEQ ID NO: 581875 - DNA, 15 bp, Homo sapiens
actcccttcaagctg

SEQ ID NO: 581876 - DNA, 15 bp, Homo sapiens
aactcccttcaagct

SEQ ID NO: 581877 - DNA, 15 bp, Homo sapiens
gaactcccttcaagc

SEQ ID NO: 581878 - DNA, 15 bp, Homo sapiens
tgaactcccttcaag

SEQ ID NO: 581879 - DNA, 15 bp, Homo sapiens
atgaactcccttcaa

SEQ ID NO: 581880 - DNA, 15 bp, Homo sapiens
catgaactcccttca

SEQ ID NO: 581881 - DNA, 15 bp, Homo sapiens
acatgaactcccttc

SEQ ID NO: 581882 - DNA, 15 bp, Homo sapiens
gacatgaactccctt

SEQ ID NO: 581883 - DNA, 15 bp, Homo sapiens
agacatgaactccct

SEQ ID NO: 581884 - DNA, 15 bp, Homo sapiens
aagacatgaactccc

SEQ ID NO: 581885 - DNA, 15 bp, Homo sapiens
taagacatgaactcc

SEQ ID NO: 581886 - DNA, 15 bp, Homo sapiens
ttaagacatgaactc

SEQ ID NO: 581887 - DNA, 15 bp, Homo sapiens
tttaagacatgaact

SEQ ID NO: 581888 - DNA, 15 bp, Homo sapiens
ctttaagacatgaac

SEQ ID NO: 581889 - DNA, 15 bp, Homo sapiens
actttaagacatgaa

SEQ ID NO: 581890 - DNA, 15 bp, Homo sapiens
tactttaagacatga

SEQ ID NO: 581891 - DNA, 15 bp, Homo sapiens
ttactttaagacatg

SEQ ID NO: 581892 - DNA, 15 bp, Homo sapiens
attactttaagacat

SEQ ID NO: 581893 - DNA, 15 bp, Homo sapiens
cattactttaagaca

SEQ ID NO: 581894 - DNA, 15 bp, Homo sapiens
tcattactttaagac

SEQ ID NO: 581895 - DNA, 15 bp, Homo sapiens
ttcattactttaaga

SEQ ID NO: 581896 - DNA, 15 bp, Homo sapiens
attcattactttaag

SEQ ID NO: 581897 - DNA, 15 bp, Homo sapiens
aattcattactttaa

SEQ ID NO: 581898 - DNA, 15 bp, Homo sapiens
taattcattacttta

SEQ ID NO: 581899 - DNA, 15 bp, Homo sapiens
ttaattcattacttt

SEQ ID NO: 581900 - DNA, 15 bp, Homo sapiens
cttaattcattactt

SEQ ID NO: 581901 - DNA, 15 bp, Homo sapiens
tcttaattcattact

SEQ ID NO: 581902 - DNA, 15 bp, Homo sapiens
ctcttaattcattac

SEQ ID NO: 581903 - DNA, 15 bp, Homo sapiens
actcttaattcatta

SEQ ID NO: 581904 - DNA, 15 bp, Homo sapiens
aactcttaattcatt

SEQ ID NO: 581905 - DNA, 15 bp, Homo sapiens
caactcttaattcat

SEQ ID NO: 581906 - DNA, 15 bp, Homo sapiens
tcaactcttaattca

SEQ ID NO: 581907 - DNA, 15 bp, Homo sapiens
gtcaactcttaattc

SEQ ID NO: 581908 - DNA, 15 bp, Homo sapiens
ggtcaactcttaatt

SEQ ID NO: 581909 - DNA, 15 bp, Homo sapiens
aggtcaactcttaat

SEQ ID NO: 581910 - DNA, 15 bp, Homo sapiens
aaggtcaactcttaa

SEQ ID NO: 581911 - DNA, 15 bp, Homo sapiens
aaaggtcaactctta

SEQ ID NO: 581912 - DNA, 15 bp, Homo sapiens
caaaggtcaactctt

SEQ ID NO: 581913 - DNA, 15 bp, Homo sapiens
acaaaggtcaactct

SEQ ID NO: 581914 - DNA, 15 bp, Homo sapiens
aacaaaggtcaactc

SEQ ID NO: 581915 - DNA, 15 bp, Homo sapiens
caacaaaggtcaact

SEQ ID NO: 581916 - DNA, 15 bp, Homo sapiens
tcaacaaaggtcaac

SEQ ID NO: 581917 - DNA, 15 bp, Homo sapiens
gtcaacaaaggtcaa

SEQ ID NO: 581918 - DNA, 15 bp, Homo sapiens
agtcaacaaaggtca

SEQ ID NO: 581919 - DNA, 15 bp, Homo sapiens
cagtcaacaaaggtc

SEQ ID NO: 581920 - DNA, 15 bp, Homo sapiens
gcagtcaacaaaggt

SEQ ID NO: 581921 - DNA, 15 bp, Homo sapiens
agcagtcaacaaagg

SEQ ID NO: 581922 - DNA, 15 bp, Homo sapiens
tagcagtcaacaaag

SEQ ID NO: 581923 - DNA, 15 bp, Homo sapiens
ttagcagtcaacaaa

SEQ ID NO: 581924 - DNA, 15 bp, Homo sapiens
tttagcagtcaacaa

SEQ ID NO: 581925 - DNA, 15 bp, Homo sapiens
ttttagcagtcaaca

SEQ ID NO: 581926 - DNA, 15 bp, Homo sapiens
attttagcagtcaac

SEQ ID NO: 581927 - DNA, 15 bp, Homo sapiens
tattttagcagtcaa

SEQ ID NO: 581928 - DNA, 15 bp, Homo sapiens
atattttagcagtca

SEQ ID NO: 581929 - DNA, 15 bp, Homo sapiens
aatattttagcagtc

SEQ ID NO: 581930 - DNA, 15 bp, Homo sapiens
gaatattttagcagt

SEQ ID NO: 581931 - DNA, 15 bp, Homo sapiens
agaatattttagcag

SEQ ID NO: 581932 - DNA, 15 bp, Homo sapiens
aagaatattttagca

SEQ ID NO: 581933 - DNA, 15 bp, Homo sapiens
taagaatattttagc

SEQ ID NO: 581934 - DNA, 15 bp, Homo sapiens
ataagaatattttag

SEQ ID NO: 581935 - DNA, 15 bp, Homo sapiens
tataagaatatttta

SEQ ID NO: 581936 - DNA, 15 bp, Homo sapiens
atataagaatatttt

SEQ ID NO: 581937 - DNA, 15 bp, Homo sapiens
catataagaatattt

SEQ ID NO: 581938 - DNA, 15 bp, Homo sapiens
acatataagaatatt

SEQ ID NO: 581939 - DNA, 15 bp, Homo sapiens
cacatataagaatat

SEQ ID NO: 581940 - DNA, 15 bp, Homo sapiens
tcacatataagaata

SEQ ID NO: 581941 - DNA, 15 bp, Homo sapiens
ttcacatataagaat

SEQ ID NO: 581942 - DNA, 15 bp, Homo sapiens
tttcacatataagaa

SEQ ID NO: 581943 - DNA, 15 bp, Homo sapiens
ctttcacatataaga

SEQ ID NO: 581944 - DNA, 15 bp, Homo sapiens
gctttcacatataag

SEQ ID NO: 581945 - DNA, 15 bp, Homo sapiens
tgctttcacatataa

SEQ ID NO: 581946 - DNA, 15 bp, Homo sapiens
atgctttcacatata

SEQ ID NO: 581947 - DNA, 15 bp, Homo sapiens
gatgctttcacatat

SEQ ID NO: 581948 - DNA, 15 bp, Homo sapiens
ggatgctttcacata

SEQ ID NO: 581949 - DNA, 15 bp, Homo sapiens
aggatgctttcacat

SEQ ID NO: 581950 - DNA, 15 bp, Homo sapiens
caggatgctttcaca

SEQ ID NO: 581951 - DNA, 15 bp, Homo sapiens
ccaggatgctttcac

SEQ ID NO: 581952 - DNA, 15 bp, Homo sapiens
tccaggatgctttca

SEQ ID NO: 581953 - DNA, 15 bp, Homo sapiens
ttccaggatgctttc

SEQ ID NO: 581954 - DNA, 15 bp, Homo sapiens
tttccaggatgcttt

SEQ ID NO: 581955 - DNA, 15 bp, Homo sapiens
ttttccaggatgctt

SEQ ID NO: 581956 - DNA, 15 bp, Homo sapiens
tttttccaggatgct

SEQ ID NO: 581957 - DNA, 15 bp, Homo sapiens
atttttccaggatgc

SEQ ID NO: 581958 - DNA, 15 bp, Homo sapiens
tatttttccaggatg

SEQ ID NO: 581959 - DNA, 15 bp, Homo sapiens
gtatttttccaggat

SEQ ID NO: 581960 - DNA, 15 bp, Homo sapiens
cgtatttttccagga

SEQ ID NO: 581961 - DNA, 15 bp, Homo sapiens
acgtatttttccagg

SEQ ID NO: 581962 - DNA, 15 bp, Homo sapiens
aacgtatttttccag

SEQ ID NO: 581963 - DNA, 15 bp, Homo sapiens
taacgtatttttcca

SEQ ID NO: 581964 - DNA, 15 bp, Homo sapiens
gtaacgtatttttcc

SEQ ID NO: 581965 - DNA, 15 bp, Homo sapiens
ggtaacgtatttttc

SEQ ID NO: 581966 - DNA, 15 bp, Homo sapiens
tggtaacgtattttt

SEQ ID NO: 581967 - DNA, 15 bp, Homo sapiens
ctggtaacgtatttt

SEQ ID NO: 581968 - DNA, 15 bp, Homo sapiens
gctggtaacgtattt

SEQ ID NO: 581969 - DNA, 15 bp, Homo sapiens
agctggtaacgtatt

SEQ ID NO: 581970 - DNA, 15 bp, Homo sapiens
aagctggtaacgtat

SEQ ID NO: 581971 - DNA, 15 bp, Homo sapiens
taagctggtaacgta

SEQ ID NO: 581972 - DNA, 15 bp, Homo sapiens
ttaagctggtaacgt

SEQ ID NO: 581973 - DNA, 15 bp, Homo sapiens
tttaagctggtaacg

SEQ ID NO: 581974 - DNA, 15 bp, Homo sapiens
ctttaagctggtaac

SEQ ID NO: 581975 - DNA, 15 bp, Homo sapiens
tctttaagctggtaa

SEQ ID NO: 581976 - DNA, 15 bp, Homo sapiens
ctctttaagctggta

SEQ ID NO: 581977 - DNA, 15 bp, Homo sapiens
tctctttaagctggt

SEQ ID NO: 581978 - DNA, 15 bp, Homo sapiens
ttctctttaagctgg

SEQ ID NO: 581979 - DNA, 15 bp, Homo sapiens
tttctctttaagctg

SEQ ID NO: 581980 - DNA, 15 bp, Homo sapiens
ctttctctttaagct

SEQ ID NO: 581981 - DNA, 15 bp, Homo sapiens
tctttctctttaagc

SEQ ID NO: 581982 - DNA, 15 bp, Homo sapiens
ttctttctctttaag

SEQ ID NO: 581983 - DNA, 15 bp, Homo sapiens
tttctttctctttaa

SEQ ID NO: 581984 - DNA, 15 bp, Homo sapiens
gtttctttctcttta

SEQ ID NO: 581985 - DNA, 15 bp, Homo sapiens
agtttctttctcttt

SEQ ID NO: 581986 - DNA, 15 bp, Homo sapiens
tagtttctttctctt

SEQ ID NO: 581987 - DNA, 15 bp, Homo sapiens
ttagtttctttctct

SEQ ID NO: 581988 - DNA, 15 bp, Homo sapiens
attagtttctttctc

SEQ ID NO: 581989 - DNA, 15 bp, Homo sapiens
cattagtttctttct

SEQ ID NO: 581990 - DNA, 15 bp, Homo sapiens
tcattagtttctttc

SEQ ID NO: 581991 - DNA, 15 bp, Homo sapiens
atcattagtttcttt

SEQ ID NO: 581992 - DNA, 15 bp, Homo sapiens
aatcattagtttctt

SEQ ID NO: 581993 - DNA, 15 bp, Homo sapiens
taatcattagtttct

SEQ ID NO: 581994 - DNA, 15 bp, Homo sapiens
ataatcattagtttc

SEQ ID NO: 581995 - DNA, 15 bp, Homo sapiens
tataatcattagttt

SEQ ID NO: 581996 - DNA, 15 bp, Homo sapiens
atataatcattagtt

SEQ ID NO: 581997 - DNA, 15 bp, Homo sapiens
gatataatcattagt

SEQ ID NO: 581998 - DNA, 15 bp, Homo sapiens
agatataatcattag

SEQ ID NO: 581999 - DNA, 15 bp, Homo sapiens
cagatataatcatta

SEQ ID NO: 582000 - DNA, 15 bp, Homo sapiens
tcagatataatcatt

SEQ ID NO: 582001 - DNA, 15 bp, Homo sapiens
ttcagatataatcat

SEQ ID NO: 582002 - DNA, 15 bp, Homo sapiens
gttcagatataatca

SEQ ID NO: 582003 - DNA, 15 bp, Homo sapiens
agttcagatataatc

SEQ ID NO: 582004 - DNA, 15 bp, Homo sapiens
cagttcagatataat

SEQ ID NO: 582005 - DNA, 15 bp, Homo sapiens
tcagttcagatataa

SEQ ID NO: 582006 - DNA, 15 bp, Homo sapiens
ctcagttcagatata

SEQ ID NO: 582007 - DNA, 15 bp, Homo sapiens
gctcagttcagatat

SEQ ID NO: 582008 - DNA, 15 bp, Homo sapiens
agctcagttcagata

SEQ ID NO: 582009 - DNA, 15 bp, Homo sapiens
tagctcagttcagat

SEQ ID NO: 582010 - DNA, 15 bp, Homo sapiens
ttagctcagttcaga

SEQ ID NO: 582011 - DNA, 15 bp, Homo sapiens
attagctcagttcag

SEQ ID NO: 582012 - DNA, 15 bp, Homo sapiens
cattagctcagttca

SEQ ID NO: 582013 - DNA, 15 bp, Homo sapiens
gcattagctcagttc

SEQ ID NO: 582014 - DNA, 15 bp, Homo sapiens
ggcattagctcagtt

SEQ ID NO: 582015 - DNA, 15 bp, Homo sapiens
aggcattagctcagt

SEQ ID NO: 582016 - DNA, 15 bp, Homo sapiens
gaggcattagctcag

SEQ ID NO: 582017 - DNA, 15 bp, Homo sapiens
agaggcattagctca

SEQ ID NO: 582018 - DNA, 15 bp, Homo sapiens
aagaggcattagctc

SEQ ID NO: 582019 - DNA, 15 bp, Homo sapiens
gaagaggcattagct

SEQ ID NO: 582020 - DNA, 15 bp, Homo sapiens
agaagaggcattagc

SEQ ID NO: 582021 - DNA, 15 bp, Homo sapiens
gagaagaggcattag

SEQ ID NO: 582022 - DNA, 15 bp, Homo sapiens
agagaagaggcatta

SEQ ID NO: 582023 - DNA, 15 bp, Homo sapiens
aagagaagaggcatt

SEQ ID NO: 582024 - DNA, 15 bp, Homo sapiens
gaagagaagaggcat

SEQ ID NO: 582025 - DNA, 15 bp, Homo sapiens
ggaagagaagaggca

SEQ ID NO: 582026 - DNA, 15 bp, Homo sapiens
gggaagagaagaggc

SEQ ID NO: 582027 - DNA, 15 bp, Homo sapiens
ggggaagagaagagg

SEQ ID NO: 582028 - DNA, 15 bp, Homo sapiens
gggggaagagaagag

SEQ ID NO: 582029 - DNA, 15 bp, Homo sapiens
tgggggaagagaaga

SEQ ID NO: 582030 - DNA, 15 bp, Homo sapiens
ttgggggaagagaag

SEQ ID NO: 582031 - DNA, 15 bp, Homo sapiens
tttgggggaagagaa

SEQ ID NO: 582032 - DNA, 15 bp, Homo sapiens
gtttgggggaagaga

SEQ ID NO: 582033 - DNA, 15 bp, Homo sapiens
ggtttgggggaagag

SEQ ID NO: 582034 - DNA, 15 bp, Homo sapiens
aggtttgggggaaga

SEQ ID NO: 582035 - DNA, 15 bp, Homo sapiens
aaggtttgggggaag

SEQ ID NO: 582036 - DNA, 15 bp, Homo sapiens
taaggtttgggggaa

SEQ ID NO: 582037 - DNA, 15 bp, Homo sapiens
ataaggtttggggga

SEQ ID NO: 582038 - DNA, 15 bp, Homo sapiens
gataaggtttggggg

SEQ ID NO: 582039 - DNA, 15 bp, Homo sapiens
tgataaggtttgggg

SEQ ID NO: 582040 - DNA, 15 bp, Homo sapiens
ctgataaggtttggg

SEQ ID NO: 582041 - DNA, 15 bp, Homo sapiens
actgataaggtttgg

SEQ ID NO: 582042 - DNA, 15 bp, Homo sapiens
aactgataaggtttg

SEQ ID NO: 582043 - DNA, 15 bp, Homo sapiens
aaactgataaggttt

SEQ ID NO: 582044 - DNA, 15 bp, Homo sapiens
caaactgataaggtt

SEQ ID NO: 582045 - DNA, 15 bp, Homo sapiens
ccaaactgataaggt

SEQ ID NO: 582046 - DNA, 15 bp, Homo sapiens
tccaaactgataagg

SEQ ID NO: 582047 - DNA, 15 bp, Homo sapiens
atccaaactgataag

SEQ ID NO: 582048 - DNA, 15 bp, Homo sapiens
catccaaactgataa

SEQ ID NO: 582049 - DNA, 15 bp, Homo sapiens
ccatccaaactgata

SEQ ID NO: 582050 - DNA, 15 bp, Homo sapiens
gccatccaaactgat

SEQ ID NO: 582051 - DNA, 15 bp, Homo sapiens
tgccatccaaactga

SEQ ID NO: 582052 - DNA, 15 bp, Homo sapiens
ttgccatccaaactg

SEQ ID NO: 582053 - DNA, 15 bp, Homo sapiens
tttgccatccaaact

SEQ ID NO: 582054 - DNA, 15 bp, Homo sapiens
ctttgccatccaaac

SEQ ID NO: 582055 - DNA, 15 bp, Homo sapiens
tctttgccatccaaa

SEQ ID NO: 582056 - DNA, 15 bp, Homo sapiens
ctctttgccatccaa

SEQ ID NO: 582057 - DNA, 15 bp, Homo sapiens
actctttgccatcca

SEQ ID NO: 582058 - DNA, 15 bp, Homo sapiens
tactctttgccatcc

SEQ ID NO: 582059 - DNA, 15 bp, Homo sapiens
ttactctttgccatc

SEQ ID NO: 582060 - DNA, 15 bp, Homo sapiens
attactctttgccat

SEQ ID NO: 582061 - DNA, 15 bp, Homo sapiens
cattactctttgcca

SEQ ID NO: 582062 - DNA, 15 bp, Homo sapiens
tcattactctttgcc

SEQ ID NO: 582063 - DNA, 15 bp, Homo sapiens
atcattactctttgc

SEQ ID NO: 582064 - DNA, 15 bp, Homo sapiens
catcattactctttg

SEQ ID NO: 582065 - DNA, 15 bp, Homo sapiens
acatcattactcttt

SEQ ID NO: 582066 - DNA, 15 bp, Homo sapiens
cacatcattactctt

SEQ ID NO: 582067 - DNA, 15 bp, Homo sapiens
acacatcattactct

SEQ ID NO: 582068 - DNA, 15 bp, Homo sapiens
gacacatcattactc

SEQ ID NO: 582069 - DNA, 15 bp, Homo sapiens
tgacacatcattact

SEQ ID NO: 582070 - DNA, 15 bp, Homo sapiens
ctgacacatcattac

SEQ ID NO: 582071 - DNA, 15 bp, Homo sapiens
actgacacatcatta

SEQ ID NO: 582072 - DNA, 15 bp, Homo sapiens
aactgacacatcatt

SEQ ID NO: 582073 - DNA, 15 bp, Homo sapiens
taactgacacatcat

SEQ ID NO: 582074 - DNA, 15 bp, Homo sapiens
ttaactgacacatca

SEQ ID NO: 582075 - DNA, 15 bp, Homo sapiens
tttaactgacacatc

SEQ ID NO: 582076 - DNA, 15 bp, Homo sapiens
gtttaactgacacat

SEQ ID NO: 582077 - DNA, 15 bp, Homo sapiens
tgtttaactgacaca

SEQ ID NO: 582078 - DNA, 15 bp, Homo sapiens
ctgtttaactgacac

SEQ ID NO: 582079 - DNA, 15 bp, Homo sapiens
tctgtttaactgaca

SEQ ID NO: 582080 - DNA, 15 bp, Homo sapiens
ctctgtttaactgac

SEQ ID NO: 582081 - DNA, 15 bp, Homo sapiens
gctctgtttaactga

SEQ ID NO: 582082 - DNA, 15 bp, Homo sapiens
agctctgtttaactg

SEQ ID NO: 582083 - DNA, 15 bp, Homo sapiens
tagctctgtttaact

SEQ ID NO: 582084 - DNA, 15 bp, Homo sapiens
ttagctctgtttaac

SEQ ID NO: 582085 - DNA, 15 bp, Homo sapiens
attagctctgtttaa

SEQ ID NO: 582086 - DNA, 15 bp, Homo sapiens
cattagctctgttta

SEQ ID NO: 582087 - DNA, 15 bp, Homo sapiens
gcattagctctgttt

SEQ ID NO: 582088 - DNA, 15 bp, Homo sapiens
ggcattagctctgtt

SEQ ID NO: 582089 - DNA, 15 bp, Homo sapiens
aggcattagctctgt

SEQ ID NO: 582090 - DNA, 15 bp, Homo sapiens
aaggcattagctctg

SEQ ID NO: 582091 - DNA, 15 bp, Homo sapiens
gaaggcattagctct

SEQ ID NO: 582092 - DNA, 15 bp, Homo sapiens
ggaaggcattagctc

SEQ ID NO: 582093 - DNA, 15 bp, Homo sapiens
aggaaggcattagct

SEQ ID NO: 582094 - DNA, 15 bp, Homo sapiens
gaggaaggcattagc

SEQ ID NO: 582095 - DNA, 15 bp, Homo sapiens
agaggaaggcattag

SEQ ID NO: 582096 - DNA, 15 bp, Homo sapiens
cagaggaaggcatta

SEQ ID NO: 582097 - DNA, 15 bp, Homo sapiens
gcagaggaaggcatt

SEQ ID NO: 582098 - DNA, 15 bp, Homo sapiens
ggcagaggaaggcat

SEQ ID NO: 582099 - DNA, 15 bp, Homo sapiens
aggcagaggaaggca

SEQ ID NO: 582100 - DNA, 15 bp, Homo sapiens
aaggcagaggaaggc

SEQ ID NO: 582101 - DNA, 15 bp, Homo sapiens
caaggcagaggaagg

SEQ ID NO: 582102 - DNA, 15 bp, Homo sapiens
acaaggcagaggaag

SEQ ID NO: 582103 - DNA, 15 bp, Homo sapiens
gacaaggcagaggaa

SEQ ID NO: 582104 - DNA, 15 bp, Homo sapiens
agacaaggcagagga

SEQ ID NO: 582105 - DNA, 15 bp, Homo sapiens
aagacaaggcagagg

SEQ ID NO: 582106 - DNA, 15 bp, Homo sapiens
taagacaaggcagag

SEQ ID NO: 582107 - DNA, 15 bp, Homo sapiens
ttaagacaaggcaga

SEQ ID NO: 582108 - DNA, 15 bp, Homo sapiens
tttaagacaaggcag

SEQ ID NO: 582109 - DNA, 15 bp, Homo sapiens
ctttaagacaaggca

SEQ ID NO: 582110 - DNA, 15 bp, Homo sapiens
tctttaagacaaggc

SEQ ID NO: 582111 - DNA, 15 bp, Homo sapiens
gtctttaagacaagg

SEQ ID NO: 582112 - DNA, 15 bp, Homo sapiens
agtctttaagacaag

SEQ ID NO: 582113 - DNA, 15 bp, Homo sapiens
cagtctttaagacaa

SEQ ID NO: 582114 - DNA, 15 bp, Homo sapiens
ccagtctttaagaca

SEQ ID NO: 582115 - DNA, 15 bp, Homo sapiens
tccagtctttaagac

SEQ ID NO: 582116 - DNA, 15 bp, Homo sapiens
atccagtctttaaga

SEQ ID NO: 582117 - DNA, 15 bp, Homo sapiens
aatccagtctttaag

SEQ ID NO: 582118 - DNA, 15 bp, Homo sapiens
caatccagtctttaa

SEQ ID NO: 582119 - DNA, 15 bp, Homo sapiens
ccaatccagtcttta

SEQ ID NO: 582120 - DNA, 15 bp, Homo sapiens
cccaatccagtcttt

SEQ ID NO: 582121 - DNA, 15 bp, Homo sapiens
tcccaatccagtctt

SEQ ID NO: 582122 - DNA, 15 bp, Homo sapiens
ctcccaatccagtct

SEQ ID NO: 582123 - DNA, 15 bp, Homo sapiens
tctcccaatccagtc

SEQ ID NO: 582124 - DNA, 15 bp, Homo sapiens
ttctcccaatccagt

SEQ ID NO: 582125 - DNA, 15 bp, Homo sapiens
tttctcccaatccag

SEQ ID NO: 582126 - DNA, 15 bp, Homo sapiens
ttttctcccaatcca

SEQ ID NO: 582127 - DNA, 15 bp, Homo sapiens
attttctcccaatcc

SEQ ID NO: 582128 - DNA, 15 bp, Homo sapiens
aattttctcccaatc

SEQ ID NO: 582129 - DNA, 15 bp, Homo sapiens
caattttctcccaat

SEQ ID NO: 582130 - DNA, 15 bp, Homo sapiens
tcaattttctcccaa

SEQ ID NO: 582131 - DNA, 15 bp, Homo sapiens
atcaattttctccca

SEQ ID NO: 582132 - DNA, 15 bp, Homo sapiens
tatcaattttctccc

SEQ ID NO: 582133 - DNA, 15 bp, Homo sapiens
atatcaattttctcc

SEQ ID NO: 582134 - DNA, 15 bp, Homo sapiens
aatatcaattttctc

SEQ ID NO: 582135 - DNA, 15 bp, Homo sapiens
gaatatcaattttct

SEQ ID NO: 582136 - DNA, 15 bp, Homo sapiens
agaatatcaattttc

SEQ ID NO: 582137 - DNA, 15 bp, Homo sapiens
gagaatatcaatttt

SEQ ID NO: 582138 - DNA, 15 bp, Homo sapiens
tgagaatatcaattt

SEQ ID NO: 582139 - DNA, 15 bp, Homo sapiens
gtgagaatatcaatt

SEQ ID NO: 582140 - DNA, 15 bp, Homo sapiens
agtgagaatatcaat

SEQ ID NO: 582141 - DNA, 15 bp, Homo sapiens
tagtgagaatatcaa

SEQ ID NO: 582142 - DNA, 15 bp, Homo sapiens
gtagtgagaatatca

SEQ ID NO: 582143 - DNA, 15 bp, Homo sapiens
ggtagtgagaatatc

SEQ ID NO: 582144 - DNA, 15 bp, Homo sapiens
tggtagtgagaatat

SEQ ID NO: 582145 - DNA, 15 bp, Homo sapiens
atggtagtgagaata

SEQ ID NO: 582146 - DNA, 15 bp, Homo sapiens
tatggtagtgagaat

SEQ ID NO: 582147 - DNA, 15 bp, Homo sapiens
atatggtagtgagaa

SEQ ID NO: 582148 - DNA, 15 bp, Homo sapiens
aatatggtagtgaga

SEQ ID NO: 582149 - DNA, 15 bp, Homo sapiens
aaatatggtagtgag

SEQ ID NO: 582150 - DNA, 15 bp, Homo sapiens
aaaatatggtagtga

SEQ ID NO: 582151 - DNA, 15 bp, Homo sapiens
caaaatatggtagtg

SEQ ID NO: 582152 - DNA, 15 bp, Homo sapiens
ccaaaatatggtagt

SEQ ID NO: 582153 - DNA, 15 bp, Homo sapiens
cccaaaatatggtag

SEQ ID NO: 582154 - DNA, 15 bp, Homo sapiens
gcccaaaatatggta

SEQ ID NO: 582155 - DNA, 15 bp, Homo sapiens
agcccaaaatatggt

SEQ ID NO: 582156 - DNA, 15 bp, Homo sapiens
cagcccaaaatatgg

SEQ ID NO: 582157 - DNA, 15 bp, Homo sapiens
acagcccaaaatatg

SEQ ID NO: 582158 - DNA, 15 bp, Homo sapiens
tacagcccaaaatat

SEQ ID NO: 582159 - DNA, 15 bp, Homo sapiens
ctacagcccaaaata

SEQ ID NO: 582160 - DNA, 15 bp, Homo sapiens
cctacagcccaaaat

SEQ ID NO: 582161 - DNA, 15 bp, Homo sapiens
gcctacagcccaaaa

SEQ ID NO: 582162 - DNA, 15 bp, Homo sapiens
tgcctacagcccaaa

SEQ ID NO: 582163 - DNA, 15 bp, Homo sapiens
ttgcctacagcccaa

SEQ ID NO: 582164 - DNA, 15 bp, Homo sapiens
cttgcctacagccca

SEQ ID NO: 582165 - DNA, 15 bp, Homo sapiens
acttgcctacagccc

SEQ ID NO: 582166 - DNA, 15 bp, Homo sapiens
tacttgcctacagcc

SEQ ID NO: 582167 - DNA, 15 bp, Homo sapiens
ctacttgcctacagc

SEQ ID NO: 582168 - DNA, 15 bp, Homo sapiens
gctacttgcctacag

SEQ ID NO: 582169 - DNA, 15 bp, Homo sapiens
tgctacttgcctaca

SEQ ID NO: 582170 - DNA, 15 bp, Homo sapiens
atgctacttgcctac

SEQ ID NO: 582171 - DNA, 15 bp, Homo sapiens
aatgctacttgccta

SEQ ID NO: 582172 - DNA, 15 bp, Homo sapiens
aaatgctacttgcct

SEQ ID NO: 582173 - DNA, 15 bp, Homo sapiens
aaaatgctacttgcc

SEQ ID NO: 582174 - DNA, 15 bp, Homo sapiens
taaaatgctacttgc

SEQ ID NO: 582175 - DNA, 15 bp, Homo sapiens
gtaaaatgctacttg

SEQ ID NO: 582176 - DNA, 15 bp, Homo sapiens
tgtaaaatgctactt

SEQ ID NO: 582177 - DNA, 15 bp, Homo sapiens
gtgtaaaatgctact

SEQ ID NO: 582178 - DNA, 15 bp, Homo sapiens
tgtgtaaaatgctac

SEQ ID NO: 582179 - DNA, 15 bp, Homo sapiens
ctgtgtaaaatgcta

SEQ ID NO: 582180 - DNA, 15 bp, Homo sapiens
cctgtgtaaaatgct

SEQ ID NO: 582181 - DNA, 15 bp, Homo sapiens
acctgtgtaaaatgc

SEQ ID NO: 582182 - DNA, 15 bp, Homo sapiens
aacctgtgtaaaatg

SEQ ID NO: 582183 - DNA, 15 bp, Homo sapiens
aaacctgtgtaaaat

SEQ ID NO: 582184 - DNA, 15 bp, Homo sapiens
gaaacctgtgtaaaa

SEQ ID NO: 582185 - DNA, 15 bp, Homo sapiens
ggaaacctgtgtaaa

SEQ ID NO: 582186 - DNA, 15 bp, Homo sapiens
aggaaacctgtgtaa

SEQ ID NO: 582187 - DNA, 15 bp, Homo sapiens
aaggaaacctgtgta

SEQ ID NO: 582188 - DNA, 15 bp, Homo sapiens
gaaggaaacctgtgt

SEQ ID NO: 582189 - DNA, 15 bp, Homo sapiens
tgaaggaaacctgtg

SEQ ID NO: 582190 - DNA, 15 bp, Homo sapiens
ttgaaggaaacctgt

SEQ ID NO: 582191 - DNA, 15 bp, Homo sapiens
tttgaaggaaacctg

SEQ ID NO: 582192 - DNA, 15 bp, Homo sapiens
ttttgaaggaaacct

SEQ ID NO: 582193 - DNA, 15 bp, Homo sapiens
tttttgaaggaaacc

SEQ ID NO: 582194 - DNA, 15 bp, Homo sapiens
atttttgaaggaaac

SEQ ID NO: 582195 - DNA, 15 bp, Homo sapiens
gatttttgaaggaaa

SEQ ID NO: 582196 - DNA, 15 bp, Homo sapiens
ggatttttgaaggaa

SEQ ID NO: 582197 - DNA, 15 bp, Homo sapiens
tggatttttgaagga

SEQ ID NO: 582198 - DNA, 15 bp, Homo sapiens
ttggatttttgaagg

SEQ ID NO: 582199 - DNA, 15 bp, Homo sapiens
gttggatttttgaag

SEQ ID NO: 582200 - DNA, 15 bp, Homo sapiens
agttggatttttgaa

SEQ ID NO: 582201 - DNA, 15 bp, Homo sapiens
gagttggatttttga

SEQ ID NO: 582202 - DNA, 15 bp, Homo sapiens
tgagttggatttttg

SEQ ID NO: 582203 - DNA, 15 bp, Homo sapiens
ttgagttggattttt

SEQ ID NO: 582204 - DNA, 15 bp, Homo sapiens
cttgagttggatttt

SEQ ID NO: 582205 - DNA, 15 bp, Homo sapiens
acttgagttggattt

SEQ ID NO: 582206 - DNA, 15 bp, Homo sapiens
aacttgagttggatt

SEQ ID NO: 582207 - DNA, 15 bp, Homo sapiens
caacttgagttggat

SEQ ID NO: 582208 - DNA, 15 bp, Homo sapiens
ccaacttgagttgga

SEQ ID NO: 582209 - DNA, 15 bp, Homo sapiens
tccaacttgagttgg

SEQ ID NO: 582210 - DNA, 15 bp, Homo sapiens
ctccaacttgagttg

SEQ ID NO: 582211 - DNA, 15 bp, Homo sapiens
gctccaacttgagtt

SEQ ID NO: 582212 - DNA, 15 bp, Homo sapiens
agctccaacttgagt

SEQ ID NO: 582213 - DNA, 15 bp, Homo sapiens
gagctccaacttgag

SEQ ID NO: 582214 - DNA, 15 bp, Homo sapiens
tgagctccaacttga

SEQ ID NO: 582215 - DNA, 15 bp, Homo sapiens
atgagctccaacttg

SEQ ID NO: 582216 - DNA, 15 bp, Homo sapiens
catgagctccaactt

SEQ ID NO: 582217 - DNA, 15 bp, Homo sapiens
acatgagctccaact

SEQ ID NO: 582218 - DNA, 15 bp, Homo sapiens
tacatgagctccaac

SEQ ID NO: 582219 - DNA, 15 bp, Homo sapiens
atacatgagctccaa

SEQ ID NO: 582220 - DNA, 15 bp, Homo sapiens
aatacatgagctcca

SEQ ID NO: 582221 - DNA, 15 bp, Homo sapiens
aaatacatgagctcc

SEQ ID NO: 582222 - DNA, 15 bp, Homo sapiens
taaatacatgagctc

SEQ ID NO: 582223 - DNA, 15 bp, Homo sapiens
ttaaatacatgagct

SEQ ID NO: 582224 - DNA, 15 bp, Homo sapiens
cttaaatacatgagc

SEQ ID NO: 582225 - DNA, 15 bp, Homo sapiens
tcttaaatacatgag

SEQ ID NO: 582226 - DNA, 15 bp, Homo sapiens
gtcttaaatacatga

SEQ ID NO: 582227 - DNA, 15 bp, Homo sapiens
tgtcttaaatacatg

SEQ ID NO: 582228 - DNA, 15 bp, Homo sapiens
atgtcttaaatacat

SEQ ID NO: 582229 - DNA, 15 bp, Homo sapiens
tatgtcttaaataca

SEQ ID NO: 582230 - DNA, 15 bp, Homo sapiens
ctatgtcttaaatac

SEQ ID NO: 582231 - DNA, 15 bp, Homo sapiens
gctatgtcttaaata

SEQ ID NO: 582232 - DNA, 15 bp, Homo sapiens
agctatgtcttaaat

SEQ ID NO: 582233 - DNA, 15 bp, Homo sapiens
cagctatgtcttaaa

SEQ ID NO: 582234 - DNA, 15 bp, Homo sapiens
ccagctatgtcttaa

SEQ ID NO: 582235 - DNA, 15 bp, Homo sapiens
gccagctatgtctta

SEQ ID NO: 582236 - DNA, 15 bp, Homo sapiens
ggccagctatgtctt

SEQ ID NO: 582237 - DNA, 15 bp, Homo sapiens
aggccagctatgtct

SEQ ID NO: 582238 - DNA, 15 bp, Homo sapiens
caggccagctatgtc

SEQ ID NO: 582239 - DNA, 15 bp, Homo sapiens
gcaggccagctatgt

SEQ ID NO: 582240 - DNA, 15 bp, Homo sapiens
agcaggccagctatg

SEQ ID NO: 582241 - DNA, 15 bp, Homo sapiens
cagcaggccagctat

SEQ ID NO: 582242 - DNA, 15 bp, Homo sapiens
tcagcaggccagcta

SEQ ID NO: 582243 - DNA, 15 bp, Homo sapiens
ttcagcaggccagct

SEQ ID NO: 582244 - DNA, 15 bp, Homo sapiens
attcagcaggccagc

SEQ ID NO: 582245 - DNA, 15 bp, Homo sapiens
aattcagcaggccag

SEQ ID NO: 582246 - DNA, 15 bp, Homo sapiens
aaattcagcaggcca

SEQ ID NO: 582247 - DNA, 15 bp, Homo sapiens
taaattcagcaggcc

SEQ ID NO: 582248 - DNA, 15 bp, Homo sapiens
ttaaattcagcaggc

SEQ ID NO: 582249 - DNA, 15 bp, Homo sapiens
gttaaattcagcagg

SEQ ID NO: 582250 - DNA, 15 bp, Homo sapiens
tgttaaattcagcag

SEQ ID NO: 582251 - DNA, 15 bp, Homo sapiens
ttgttaaattcagca

SEQ ID NO: 582252 - DNA, 15 bp, Homo sapiens
cttgttaaattcagc

SEQ ID NO: 582253 - DNA, 15 bp, Homo sapiens
acttgttaaattcag

SEQ ID NO: 582254 - DNA, 15 bp, Homo sapiens
aacttgttaaattca

SEQ ID NO: 582255 - DNA, 15 bp, Homo sapiens
taacttgttaaattc

SEQ ID NO: 582256 - DNA, 15 bp, Homo sapiens
ttaacttgttaaatt

SEQ ID NO: 582257 - DNA, 15 bp, Homo sapiens
tttaacttgttaaat

SEQ ID NO: 582258 - DNA, 15 bp, Homo sapiens
gtttaacttgttaaa

SEQ ID NO: 582259 - DNA, 15 bp, Homo sapiens
agtttaacttgttaa

SEQ ID NO: 582260 - DNA, 15 bp, Homo sapiens
aagtttaacttgtta

SEQ ID NO: 582261 - DNA, 15 bp, Homo sapiens
gaagtttaacttgtt

SEQ ID NO: 582262 - DNA, 15 bp, Homo sapiens
tgaagtttaacttgt

SEQ ID NO: 582263 - DNA, 15 bp, Homo sapiens
ctgaagtttaacttg

SEQ ID NO: 582264 - DNA, 15 bp, Homo sapiens
actgaagtttaactt

SEQ ID NO: 582265 - DNA, 15 bp, Homo sapiens
cactgaagtttaact

SEQ ID NO: 582266 - DNA, 15 bp, Homo sapiens
ccactgaagtttaac

SEQ ID NO: 582267 - DNA, 15 bp, Homo sapiens
gccactgaagtttaa

SEQ ID NO: 582268 - DNA, 15 bp, Homo sapiens
ggccactgaagttta

SEQ ID NO: 582269 - DNA, 15 bp, Homo sapiens
tggccactgaagttt

SEQ ID NO: 582270 - DNA, 15 bp, Homo sapiens
atggccactgaagtt

SEQ ID NO: 582271 - DNA, 15 bp, Homo sapiens
catggccactgaagt

SEQ ID NO: 582272 - DNA, 15 bp, Homo sapiens
acatggccactgaag

SEQ ID NO: 582273 - DNA, 15 bp, Homo sapiens
tacatggccactgaa

SEQ ID NO: 582274 - DNA, 15 bp, Homo sapiens
gtacatggccactga

SEQ ID NO: 582275 - DNA, 15 bp, Homo sapiens
tgtacatggccactg

SEQ ID NO: 582276 - DNA, 15 bp, Homo sapiens
ctgtacatggccact

SEQ ID NO: 582277 - DNA, 15 bp, Homo sapiens
actgtacatggccac

SEQ ID NO: 582278 - DNA, 15 bp, Homo sapiens
aactgtacatggcca

SEQ ID NO: 582279 - DNA, 15 bp, Homo sapiens
taactgtacatggcc

SEQ ID NO: 582280 - DNA, 15 bp, Homo sapiens
ataactgtacatggc

SEQ ID NO: 582281 - DNA, 15 bp, Homo sapiens
tataactgtacatgg

SEQ ID NO: 582282 - DNA, 15 bp, Homo sapiens
atataactgtacatg

SEQ ID NO: 582283 - DNA, 15 bp, Homo sapiens
tatataactgtacat

SEQ ID NO: 582284 - DNA, 15 bp, Homo sapiens
atatataactgtaca

SEQ ID NO: 582285 - DNA, 15 bp, Homo sapiens
gatatataactgtac

SEQ ID NO: 582286 - DNA, 15 bp, Homo sapiens
tgatatataactgta

SEQ ID NO: 582287 - DNA, 15 bp, Homo sapiens
gtgatatataactgt

SEQ ID NO: 582288 - DNA, 15 bp, Homo sapiens
agtgatatataactg

SEQ ID NO: 582289 - DNA, 15 bp, Homo sapiens
tagtgatatataact

SEQ ID NO: 582290 - DNA, 15 bp, Homo sapiens
atagtgatatataac

SEQ ID NO: 582291 - DNA, 15 bp, Homo sapiens
tatagtgatatataa

SEQ ID NO: 582292 - DNA, 15 bp, Homo sapiens
atatagtgatatata

SEQ ID NO: 582293 - DNA, 15 bp, Homo sapiens
tatatagtgatatat

SEQ ID NO: 582294 - DNA, 15 bp, Homo sapiens
atatatagtgatata

SEQ ID NO: 582295 - DNA, 15 bp, Homo sapiens
tatatatagtgatat

SEQ ID NO: 582296 - DNA, 15 bp, Homo sapiens
atatatatagtgata

SEQ ID NO: 582297 - DNA, 15 bp, Homo sapiens
catatatatagtgat

SEQ ID NO: 582298 - DNA, 15 bp, Homo sapiens
acatatatatagtga

SEQ ID NO: 582299 - DNA, 15 bp, Homo sapiens
cacatatatatagtg

SEQ ID NO: 582300 - DNA, 15 bp, Homo sapiens
acacatatatatagt

SEQ ID NO: 582301 - DNA, 15 bp, Homo sapiens
tacacatatatatag

SEQ ID NO: 582302 - DNA, 15 bp, Homo sapiens
atacacatatatata

SEQ ID NO: 582303 - DNA, 15 bp, Homo sapiens
aatacacatatatat

SEQ ID NO: 582304 - DNA, 15 bp, Homo sapiens
taatacacatatata

SEQ ID NO: 582305 - DNA, 15 bp, Homo sapiens
ctaatacacatatat

SEQ ID NO: 582306 - DNA, 15 bp, Homo sapiens
cctaatacacatata

SEQ ID NO: 582307 - DNA, 15 bp, Homo sapiens
gcctaatacacatat

SEQ ID NO: 582308 - DNA, 15 bp, Homo sapiens
agcctaatacacata

SEQ ID NO: 582309 - DNA, 15 bp, Homo sapiens
cagcctaatacacat

SEQ ID NO: 582310 - DNA, 15 bp, Homo sapiens
acagcctaatacaca

SEQ ID NO: 582311 - DNA, 15 bp, Homo sapiens
gacagcctaatacac

SEQ ID NO: 582312 - DNA, 15 bp, Homo sapiens
cgacagcctaataca

SEQ ID NO: 582313 - DNA, 15 bp, Homo sapiens
tcgacagcctaatac

SEQ ID NO: 582314 - DNA, 15 bp, Homo sapiens
ctcgacagcctaata

SEQ ID NO: 582315 - DNA, 15 bp, Homo sapiens
actcgacagcctaat

SEQ ID NO: 582316 - DNA, 15 bp, Homo sapiens
aactcgacagcctaa

SEQ ID NO: 582317 - DNA, 15 bp, Homo sapiens
caactcgacagccta

SEQ ID NO: 582318 - DNA, 15 bp, Homo sapiens
ccaactcgacagcct

SEQ ID NO: 582319 - DNA, 15 bp, Homo sapiens
accaactcgacagcc

SEQ ID NO: 582320 - DNA, 15 bp, Homo sapiens
gaccaactcgacagc

SEQ ID NO: 582321 - DNA, 15 bp, Homo sapiens
tgaccaactcgacag

SEQ ID NO: 582322 - DNA, 15 bp, Homo sapiens
atgaccaactcgaca

SEQ ID NO: 582323 - DNA, 15 bp, Homo sapiens
catgaccaactcgac

SEQ ID NO: 582324 - DNA, 15 bp, Homo sapiens
acatgaccaactcga

SEQ ID NO: 582325 - DNA, 15 bp, Homo sapiens
aacatgaccaactcg

SEQ ID NO: 582326 - DNA, 15 bp, Homo sapiens
aaacatgaccaactc

SEQ ID NO: 582327 - DNA, 15 bp, Homo sapiens
aaaacatgaccaact

SEQ ID NO: 582328 - DNA, 15 bp, Homo sapiens
aaaaacatgaccaac

SEQ ID NO: 582329 - DNA, 15 bp, Homo sapiens
caaaaacatgaccaa

SEQ ID NO: 582330 - DNA, 15 bp, Homo sapiens
acaaaaacatgacca

SEQ ID NO: 582331 - DNA, 15 bp, Homo sapiens
aacaaaaacatgacc

SEQ ID NO: 582332 - DNA, 15 bp, Homo sapiens
caacaaaaacatgac

SEQ ID NO: 582333 - DNA, 15 bp, Homo sapiens
ccaacaaaaacatga

SEQ ID NO: 582334 - DNA, 15 bp, Homo sapiens
accaacaaaaacatg

SEQ ID NO: 582335 - DNA, 15 bp, Homo sapiens
caccaacaaaaacat

SEQ ID NO: 582336 - DNA, 15 bp, Homo sapiens
tcaccaacaaaaaca

SEQ ID NO: 582337 - DNA, 15 bp, Homo sapiens
gtcaccaacaaaaac

SEQ ID NO: 582338 - DNA, 15 bp, Homo sapiens
agtcaccaacaaaaa

SEQ ID NO: 582339 - DNA, 15 bp, Homo sapiens
aagtcaccaacaaaa

SEQ ID NO: 582340 - DNA, 15 bp, Homo sapiens
taagtcaccaacaaa

SEQ ID NO: 582341 - DNA, 15 bp, Homo sapiens
ctaagtcaccaacaa

SEQ ID NO: 582342 - DNA, 15 bp, Homo sapiens
cctaagtcaccaaca

SEQ ID NO: 582343 - DNA, 15 bp, Homo sapiens
gcctaagtcaccaac

SEQ ID NO: 582344 - DNA, 15 bp, Homo sapiens
agcctaagtcaccaa

SEQ ID NO: 582345 - DNA, 15 bp, Homo sapiens
aagcctaagtcacca

SEQ ID NO: 582346 - DNA, 15 bp, Homo sapiens
aaagcctaagtcacc

SEQ ID NO: 582347 - DNA, 15 bp, Homo sapiens
taaagcctaagtcac

SEQ ID NO: 582348 - DNA, 15 bp, Homo sapiens
gtaaagcctaagtca

SEQ ID NO: 582349 - DNA, 15 bp, Homo sapiens
agtaaagcctaagtc

SEQ ID NO: 582350 - DNA, 15 bp, Homo sapiens
aagtaaagcctaagt

SEQ ID NO: 582351 - DNA, 15 bp, Homo sapiens
caagtaaagcctaag

SEQ ID NO: 582352 - DNA, 15 bp, Homo sapiens
tcaagtaaagcctaa

SEQ ID NO: 582353 - DNA, 15 bp, Homo sapiens
atcaagtaaagccta

SEQ ID NO: 582354 - DNA, 15 bp, Homo sapiens
tatcaagtaaagcct

SEQ ID NO: 582355 - DNA, 15 bp, Homo sapiens
ctatcaagtaaagcc

SEQ ID NO: 582356 - DNA, 15 bp, Homo sapiens
gctatcaagtaaagc

SEQ ID NO: 582357 - DNA, 15 bp, Homo sapiens
agctatcaagtaaag

SEQ ID NO: 582358 - DNA, 15 bp, Homo sapiens
gagctatcaagtaaa

SEQ ID NO: 582359 - DNA, 15 bp, Homo sapiens
agagctatcaagtaa

SEQ ID NO: 582360 - DNA, 15 bp, Homo sapiens
aagagctatcaagta

SEQ ID NO: 582361 - DNA, 15 bp, Homo sapiens
gaagagctatcaagt

SEQ ID NO: 582362 - DNA, 15 bp, Homo sapiens
ggaagagctatcaag

SEQ ID NO: 582363 - DNA, 15 bp, Homo sapiens
aggaagagctatcaa

SEQ ID NO: 582364 - DNA, 15 bp, Homo sapiens
aaggaagagctatca

SEQ ID NO: 582365 - DNA, 15 bp, Homo sapiens
caaggaagagctatc

SEQ ID NO: 582366 - DNA, 15 bp, Homo sapiens
tcaaggaagagctat

SEQ ID NO: 582367 - DNA, 15 bp, Homo sapiens
gtcaaggaagagcta

SEQ ID NO: 582368 - DNA, 15 bp, Homo sapiens
ggtcaaggaagagct

SEQ ID NO: 582369 - DNA, 15 bp, Homo sapiens
aggtcaaggaagagc

SEQ ID NO: 582370 - DNA, 15 bp, Homo sapiens
aaggtcaaggaagag

SEQ ID NO: 582371 - DNA, 15 bp, Homo sapiens
aaaggtcaaggaaga

SEQ ID NO: 582372 - DNA, 15 bp, Homo sapiens
gaaaggtcaaggaag

SEQ ID NO: 582373 - DNA, 15 bp, Homo sapiens
ggaaaggtcaaggaa

SEQ ID NO: 582374 - DNA, 15 bp, Homo sapiens
tggaaaggtcaagga

SEQ ID NO: 582375 - DNA, 15 bp, Homo sapiens
ttggaaaggtcaagg

SEQ ID NO: 582376 - DNA, 15 bp, Homo sapiens
tttggaaaggtcaag

SEQ ID NO: 582377 - DNA, 15 bp, Homo sapiens
atttggaaaggtcaa

SEQ ID NO: 582378 - DNA, 15 bp, Homo sapiens
aatttggaaaggtca

SEQ ID NO: 582379 - DNA, 15 bp, Homo sapiens
caatttggaaaggtc

SEQ ID NO: 582380 - DNA, 15 bp, Homo sapiens
tcaatttggaaaggt

SEQ ID NO: 582381 - DNA, 15 bp, Homo sapiens
ctcaatttggaaagg

SEQ ID NO: 582382 - DNA, 15 bp, Homo sapiens
actcaatttggaaag

SEQ ID NO: 582383 - DNA, 15 bp, Homo sapiens
tactcaatttggaaa

SEQ ID NO: 582384 - DNA, 15 bp, Homo sapiens
gtactcaatttggaa

SEQ ID NO: 582385 - DNA, 15 bp, Homo sapiens
agtactcaatttgga

SEQ ID NO: 582386 - DNA, 15 bp, Homo sapiens
cagtactcaatttgg

SEQ ID NO: 582387 - DNA, 15 bp, Homo sapiens
tcagtactcaatttg

SEQ ID NO: 582388 - DNA, 15 bp, Homo sapiens
atcagtactcaattt

SEQ ID NO: 582389 - DNA, 15 bp, Homo sapiens
tatcagtactcaatt

SEQ ID NO: 582390 - DNA, 15 bp, Homo sapiens
gtatcagtactcaat

SEQ ID NO: 582391 - DNA, 15 bp, Homo sapiens
tgtatcagtactcaa

SEQ ID NO: 582392 - DNA, 15 bp, Homo sapiens
atgtatcagtactca

SEQ ID NO: 582393 - DNA, 15 bp, Homo sapiens
catgtatcagtactc

SEQ ID NO: 582394 - DNA, 15 bp, Homo sapiens
ccatgtatcagtact

SEQ ID NO: 582395 - DNA, 15 bp, Homo sapiens
tccatgtatcagtac

SEQ ID NO: 582396 - DNA, 15 bp, Homo sapiens
ctccatgtatcagta

SEQ ID NO: 582397 - DNA, 15 bp, Homo sapiens
gctccatgtatcagt

SEQ ID NO: 582398 - DNA, 15 bp, Homo sapiens
agctccatgtatcag

SEQ ID NO: 582399 - DNA, 15 bp, Homo sapiens
aagctccatgtatca

SEQ ID NO: 582400 - DNA, 15 bp, Homo sapiens
caagctccatgtatc

SEQ ID NO: 582401 - DNA, 15 bp, Homo sapiens
ccaagctccatgtat

SEQ ID NO: 582402 - DNA, 15 bp, Homo sapiens
cccaagctccatgta

SEQ ID NO: 582403 - DNA, 15 bp, Homo sapiens
gcccaagctccatgt

SEQ ID NO: 582404 - DNA, 15 bp, Homo sapiens
agcccaagctccatg

SEQ ID NO: 582405 - DNA, 15 bp, Homo sapiens
aagcccaagctccat

SEQ ID NO: 582406 - DNA, 15 bp, Homo sapiens
gaagcccaagctcca

SEQ ID NO: 582407 - DNA, 15 bp, Homo sapiens
agaagcccaagctcc

SEQ ID NO: 582408 - DNA, 15 bp, Homo sapiens
aagaagcccaagctc

SEQ ID NO: 582409 - DNA, 15 bp, Homo sapiens
gaagaagcccaagct

SEQ ID NO: 582410 - DNA, 15 bp, Homo sapiens
agaagaagcccaagc

SEQ ID NO: 582411 - DNA, 15 bp, Homo sapiens
cagaagaagcccaag

SEQ ID NO: 582412 - DNA, 15 bp, Homo sapiens
gcagaagaagcccaa

SEQ ID NO: 582413 - DNA, 15 bp, Homo sapiens
tgcagaagaagccca

SEQ ID NO: 582414 - DNA, 15 bp, Homo sapiens
atgcagaagaagccc

SEQ ID NO: 582415 - DNA, 15 bp, Homo sapiens
gatgcagaagaagcc

SEQ ID NO: 582416 - DNA, 15 bp, Homo sapiens
agatgcagaagaagc

SEQ ID NO: 582417 - DNA, 15 bp, Homo sapiens
aagatgcagaagaag

SEQ ID NO: 582418 - DNA, 15 bp, Homo sapiens
taagatgcagaagaa

SEQ ID NO: 582419 - DNA, 15 bp, Homo sapiens
ataagatgcagaaga

SEQ ID NO: 582420 - DNA, 15 bp, Homo sapiens
tataagatgcagaag

SEQ ID NO: 582421 - DNA, 15 bp, Homo sapiens
gtataagatgcagaa

SEQ ID NO: 582422 - DNA, 15 bp, Homo sapiens
tgtataagatgcaga

SEQ ID NO: 582423 - DNA, 15 bp, Homo sapiens
ttgtataagatgcag

SEQ ID NO: 582424 - DNA, 15 bp, Homo sapiens
tttgtataagatgca

SEQ ID NO: 582425 - DNA, 15 bp, Homo sapiens
atttgtataagatgc

SEQ ID NO: 582426 - DNA, 15 bp, Homo sapiens
catttgtataagatg

SEQ ID NO: 582427 - DNA, 15 bp, Homo sapiens
tcatttgtataagat

SEQ ID NO: 582428 - DNA, 15 bp, Homo sapiens
ctcatttgtataaga

SEQ ID NO: 582429 - DNA, 15 bp, Homo sapiens
actcatttgtataag

SEQ ID NO: 582430 - DNA, 15 bp, Homo sapiens
aactcatttgtataa

SEQ ID NO: 582431 - DNA, 15 bp, Homo sapiens
aaactcatttgtata

SEQ ID NO: 582432 - DNA, 15 bp, Homo sapiens
caaactcatttgtat

SEQ ID NO: 582433 - DNA, 15 bp, Homo sapiens
ccaaactcatttgta

SEQ ID NO: 582434 - DNA, 15 bp, Homo sapiens
accaaactcatttgt

SEQ ID NO: 582435 - DNA, 15 bp, Homo sapiens
taccaaactcatttg

SEQ ID NO: 582436 - DNA, 15 bp, Homo sapiens
ttaccaaactcattt

SEQ ID NO: 582437 - DNA, 15 bp, Homo sapiens
tttaccaaactcatt

SEQ ID NO: 582438 - DNA, 15 bp, Homo sapiens
ctttaccaaactcat

SEQ ID NO: 582439 - DNA, 15 bp, Homo sapiens
tctttaccaaactca

SEQ ID NO: 582440 - DNA, 15 bp, Homo sapiens
ttctttaccaaactc

SEQ ID NO: 582441 - DNA, 15 bp, Homo sapiens
cttctttaccaaact

SEQ ID NO: 582442 - DNA, 15 bp, Homo sapiens
gcttctttaccaaac

SEQ ID NO: 582443 - DNA, 15 bp, Homo sapiens
ggcttctttaccaaa

SEQ ID NO: 582444 - DNA, 15 bp, Homo sapiens
aggcttctttaccaa

SEQ ID NO: 582445 - DNA, 15 bp, Homo sapiens
gaggcttctttacca

SEQ ID NO: 582446 - DNA, 15 bp, Homo sapiens
agaggcttctttacc

SEQ ID NO: 582447 - DNA, 15 bp, Homo sapiens
gagaggcttctttac

SEQ ID NO: 582448 - DNA, 15 bp, Homo sapiens
ggagaggcttcttta

SEQ ID NO: 582449 - DNA, 15 bp, Homo sapiens
aggagaggcttcttt

SEQ ID NO: 582450 - DNA, 15 bp, Homo sapiens
aaggagaggcttctt

SEQ ID NO: 582451 - DNA, 15 bp, Homo sapiens
aaaggagaggcttct

SEQ ID NO: 582452 - DNA, 15 bp, Homo sapiens
taaaggagaggcttc

SEQ ID NO: 582453 - DNA, 15 bp, Homo sapiens
gtaaaggagaggctt

SEQ ID NO: 582454 - DNA, 15 bp, Homo sapiens
agtaaaggagaggct

SEQ ID NO: 582455 - DNA, 15 bp, Homo sapiens
cagtaaaggagaggc

SEQ ID NO: 582456 - DNA, 15 bp, Homo sapiens
acagtaaaggagagg

SEQ ID NO: 582457 - DNA, 15 bp, Homo sapiens
aacagtaaaggagag

SEQ ID NO: 582458 - DNA, 15 bp, Homo sapiens
aaacagtaaaggaga

SEQ ID NO: 582459 - DNA, 15 bp, Homo sapiens
aaaacagtaaaggag

SEQ ID NO: 582460 - DNA, 15 bp, Homo sapiens
caaaacagtaaagga

SEQ ID NO: 582461 - DNA, 15 bp, Homo sapiens
tcaaaacagtaaagg

SEQ ID NO: 582462 - DNA, 15 bp, Homo sapiens
atcaaaacagtaaag

SEQ ID NO: 582463 - DNA, 15 bp, Homo sapiens
catcaaaacagtaaa

SEQ ID NO: 582464 - DNA, 15 bp, Homo sapiens
acatcaaaacagtaa

SEQ ID NO: 582465 - DNA, 15 bp, Homo sapiens
aacatcaaaacagta

SEQ ID NO: 582466 - DNA, 15 bp, Homo sapiens
aaacatcaaaacagt

SEQ ID NO: 582467 - DNA, 15 bp, Homo sapiens
taaacatcaaaacag

SEQ ID NO: 582468 - DNA, 15 bp, Homo sapiens
ataaacatcaaaaca

SEQ ID NO: 582469 - DNA, 15 bp, Homo sapiens
tataaacatcaaaac

SEQ ID NO: 582470 - DNA, 15 bp, Homo sapiens
atataaacatcaaaa

SEQ ID NO: 582471 - DNA, 15 bp, Homo sapiens
aatataaacatcaaa

SEQ ID NO: 582472 - DNA, 15 bp, Homo sapiens
taatataaacatcaa

SEQ ID NO: 582473 - DNA, 15 bp, Homo sapiens
ctaatataaacatca

SEQ ID NO: 582474 - DNA, 15 bp, Homo sapiens
tctaatataaacatc

SEQ ID NO: 582475 - DNA, 15 bp, Homo sapiens
ttctaatataaacat

SEQ ID NO: 582476 - DNA, 15 bp, Homo sapiens
tttctaatataaaca

SEQ ID NO: 582477 - DNA, 15 bp, Homo sapiens
atttctaatataaac

SEQ ID NO: 582478 - DNA, 15 bp, Homo sapiens
tatttctaatataaa

SEQ ID NO: 582479 - DNA, 15 bp, Homo sapiens
ttatttctaatataa

SEQ ID NO: 582480 - DNA, 15 bp, Homo sapiens
gttatttctaatata

SEQ ID NO: 582481 - DNA, 15 bp, Homo sapiens
agttatttctaatat

SEQ ID NO: 582482 - DNA, 15 bp, Homo sapiens
aagttatttctaata

SEQ ID NO: 582483 - DNA, 15 bp, Homo sapiens
aaagttatttctaat

SEQ ID NO: 582484 - DNA, 15 bp, Homo sapiens
aaaagttatttctaa

SEQ ID NO: 582485 - DNA, 15 bp, Homo sapiens
caaaagttatttcta

SEQ ID NO: 582486 - DNA, 15 bp, Homo sapiens
tcaaaagttatttct

SEQ ID NO: 582487 - DNA, 15 bp, Homo sapiens
atcaaaagttatttc

SEQ ID NO: 582488 - DNA, 15 bp, Homo sapiens
aatcaaaagttattt

SEQ ID NO: 582489 - DNA, 15 bp, Homo sapiens
taatcaaaagttatt

SEQ ID NO: 582490 - DNA, 15 bp, Homo sapiens
ataatcaaaagttat

SEQ ID NO: 582491 - DNA, 15 bp, Homo sapiens
aataatcaaaagtta

SEQ ID NO: 582492 - DNA, 15 bp, Homo sapiens
aaataatcaaaagtt

SEQ ID NO: 582493 - DNA, 15 bp, Homo sapiens
aaaataatcaaaagt

SEQ ID NO: 582494 - DNA, 15 bp, Homo sapiens
aaaaataatcaaaag

SEQ ID NO: 582495 - DNA, 15 bp, Homo sapiens
aaaaaataatcaaaa

SEQ ID NO: 582496 - DNA, 15 bp, Homo sapiens
aaaaaaataatcaaa

SEQ ID NO: 582497 - DNA, 15 bp, Homo sapiens
aaaaaaaataatcaa

SEQ ID NO: 582498 - DNA, 15 bp, Homo sapiens
gaaaaaaaataatca

SEQ ID NO: 582499 - DNA, 15 bp, Homo sapiens
tgaaaaaaaataatc

SEQ ID NO: 582500 - DNA, 15 bp, Homo sapiens
atgaaaaaaaataat

SEQ ID NO: 582501 - DNA, 15 bp, Homo sapiens
catgaaaaaaaataa

SEQ ID NO: 582502 - DNA, 15 bp, Homo sapiens
acatgaaaaaaaata

SEQ ID NO: 582503 - DNA, 15 bp, Homo sapiens
aacatgaaaaaaaat

SEQ ID NO: 582504 - DNA, 15 bp, Homo sapiens
taacatgaaaaaaaa

SEQ ID NO: 582505 - DNA, 15 bp, Homo sapiens
ctaacatgaaaaaaa

SEQ ID NO: 582506 - DNA, 15 bp, Homo sapiens
cctaacatgaaaaaa

SEQ ID NO: 582507 - DNA, 15 bp, Homo sapiens
tcctaacatgaaaaa

SEQ ID NO: 582508 - DNA, 15 bp, Homo sapiens
atcctaacatgaaaa

SEQ ID NO: 582509 - DNA, 15 bp, Homo sapiens
catcctaacatgaaa

SEQ ID NO: 582510 - DNA, 15 bp, Homo sapiens
tcatcctaacatgaa

SEQ ID NO: 582511 - DNA, 15 bp, Homo sapiens
ctcatcctaacatga

SEQ ID NO: 582512 - DNA, 15 bp, Homo sapiens
tctcatcctaacatg

SEQ ID NO: 582513 - DNA, 15 bp, Homo sapiens
ttctcatcctaacat

SEQ ID NO: 582514 - DNA, 15 bp, Homo sapiens
tttctcatcctaaca

SEQ ID NO: 582515 - DNA, 15 bp, Homo sapiens
gtttctcatcctaac

SEQ ID NO: 582516 - DNA, 15 bp, Homo sapiens
agtttctcatcctaa

SEQ ID NO: 582517 - DNA, 15 bp, Homo sapiens
cagtttctcatccta

SEQ ID NO: 582518 - DNA, 15 bp, Homo sapiens
tcagtttctcatcct

SEQ ID NO: 582519 - DNA, 15 bp, Homo sapiens
ttcagtttctcatcc

SEQ ID NO: 582520 - DNA, 15 bp, Homo sapiens
tttcagtttctcatc

SEQ ID NO: 582521 - DNA, 15 bp, Homo sapiens
gtttcagtttctcat

SEQ ID NO: 582522 - DNA, 15 bp, Homo sapiens
tgtttcagtttctca

SEQ ID NO: 582523 - DNA, 15 bp, Homo sapiens
ttgtttcagtttctc

SEQ ID NO: 582524 - DNA, 15 bp, Homo sapiens
tttgtttcagtttct

SEQ ID NO: 582525 - DNA, 15 bp, Homo sapiens
ttttgtttcagtttc

SEQ ID NO: 582526 - DNA, 15 bp, Homo sapiens
attttgtttcagttt

SEQ ID NO: 582527 - DNA, 15 bp, Homo sapiens
cattttgtttcagtt

SEQ ID NO: 582528 - DNA, 15 bp, Homo sapiens
acattttgtttcagt

SEQ ID NO: 582529 - DNA, 15 bp, Homo sapiens
tacattttgtttcag

SEQ ID NO: 582530 - DNA, 15 bp, Homo sapiens
ttacattttgtttca

SEQ ID NO: 582531 - DNA, 15 bp, Homo sapiens
tttacattttgtttc

SEQ ID NO: 582532 - DNA, 15 bp, Homo sapiens
atttacattttgttt

SEQ ID NO: 582533 - DNA, 15 bp, Homo sapiens
aatttacattttgtt

SEQ ID NO: 582534 - DNA, 15 bp, Homo sapiens
aaatttacattttgt

SEQ ID NO: 582535 - DNA, 15 bp, Homo sapiens
caaatttacattttg

SEQ ID NO: 582536 - DNA, 15 bp, Homo sapiens
tcaaatttacatttt

SEQ ID NO: 582537 - DNA, 15 bp, Homo sapiens
gtcaaatttacattt

SEQ ID NO: 582538 - DNA, 15 bp, Homo sapiens
ggtcaaatttacatt

SEQ ID NO: 582539 - DNA, 15 bp, Homo sapiens
cggtcaaatttacat

SEQ ID NO: 582540 - DNA, 15 bp, Homo sapiens
ccggtcaaatttaca

SEQ ID NO: 582541 - DNA, 15 bp, Homo sapiens
accggtcaaatttac

SEQ ID NO: 582542 - DNA, 15 bp, Homo sapiens
caccggtcaaattta

SEQ ID NO: 582543 - DNA, 15 bp, Homo sapiens
gcaccggtcaaattt

SEQ ID NO: 582544 - DNA, 15 bp, Homo sapiens
agcaccggtcaaatt

SEQ ID NO: 582545 - DNA, 15 bp, Homo sapiens
tagcaccggtcaaat

SEQ ID NO: 582546 - DNA, 15 bp, Homo sapiens
ctagcaccggtcaaa

SEQ ID NO: 582547 - DNA, 15 bp, Homo sapiens
tctagcaccggtcaa

SEQ ID NO: 582548 - DNA, 15 bp, Homo sapiens
gtctagcaccggtca

SEQ ID NO: 582549 - DNA, 15 bp, Homo sapiens
agtctagcaccggtc

SEQ ID NO: 582550 - DNA, 15 bp, Homo sapiens
aagtctagcaccggt

SEQ ID NO: 582551 - DNA, 15 bp, Homo sapiens
gaagtctagcaccgg

SEQ ID NO: 582552 - DNA, 15 bp, Homo sapiens
agaagtctagcaccg

SEQ ID NO: 582553 - DNA, 15 bp, Homo sapiens
aagaagtctagcacc

SEQ ID NO: 582554 - DNA, 15 bp, Homo sapiens
taagaagtctagcac

SEQ ID NO: 582555 - DNA, 15 bp, Homo sapiens
ttaagaagtctagca

SEQ ID NO: 582556 - DNA, 15 bp, Homo sapiens
tttaagaagtctagc

SEQ ID NO: 582557 - DNA, 15 bp, Homo sapiens
atttaagaagtctag

SEQ ID NO: 582558 - DNA, 15 bp, Homo sapiens
aatttaagaagtcta

SEQ ID NO: 582559 - DNA, 15 bp, Homo sapiens
taatttaagaagtct

SEQ ID NO: 582560 - DNA, 15 bp, Homo sapiens
ataatttaagaagtc

SEQ ID NO: 582561 - DNA, 15 bp, Homo sapiens
cataatttaagaagt

SEQ ID NO: 582562 - DNA, 15 bp, Homo sapiens
ccataatttaagaag

SEQ ID NO: 582563 - DNA, 15 bp, Homo sapiens
cccataatttaagaa

SEQ ID NO: 582564 - DNA, 15 bp, Homo sapiens
acccataatttaaga

SEQ ID NO: 582565 - DNA, 15 bp, Homo sapiens
tacccataatttaag

SEQ ID NO: 582566 - DNA, 15 bp, Homo sapiens
ctacccataatttaa

SEQ ID NO: 582567 - DNA, 15 bp, Homo sapiens
tctacccataattta

SEQ ID NO: 582568 - DNA, 15 bp, Homo sapiens
gtctacccataattt

SEQ ID NO: 582569 - DNA, 15 bp, Homo sapiens
agtctacccataatt

SEQ ID NO: 582570 - DNA, 15 bp, Homo sapiens
aagtctacccataat

SEQ ID NO: 582571 - DNA, 15 bp, Homo sapiens
taagtctacccataa

SEQ ID NO: 582572 - DNA, 15 bp, Homo sapiens
ttaagtctacccata

SEQ ID NO: 582573 - DNA, 15 bp, Homo sapiens
tttaagtctacccat

SEQ ID NO: 582574 - DNA, 15 bp, Homo sapiens
ctttaagtctaccca

SEQ ID NO: 582575 - DNA, 15 bp, Homo sapiens
actttaagtctaccc

SEQ ID NO: 582576 - DNA, 15 bp, Homo sapiens
tactttaagtctacc

SEQ ID NO: 582577 - DNA, 15 bp, Homo sapiens
atactttaagtctac

SEQ ID NO: 582578 - DNA, 15 bp, Homo sapiens
aatactttaagtcta

SEQ ID NO: 582579 - DNA, 15 bp, Homo sapiens
taatactttaagtct

SEQ ID NO: 582580 - DNA, 15 bp, Homo sapiens
ataatactttaagtc

SEQ ID NO: 582581 - DNA, 15 bp, Homo sapiens
aataatactttaagt

SEQ ID NO: 582582 - DNA, 15 bp, Homo sapiens
aaataatactttaag

SEQ ID NO: 582583 - DNA, 15 bp, Homo sapiens
aaaataatactttaa

SEQ ID NO: 582584 - DNA, 15 bp, Homo sapiens
gaaaataatacttta

SEQ ID NO: 582585 - DNA, 15 bp, Homo sapiens
ggaaaataatacttt

SEQ ID NO: 582586 - DNA, 15 bp, Homo sapiens
aggaaaataatactt

SEQ ID NO: 582587 - DNA, 15 bp, Homo sapiens
aaggaaaataatact

SEQ ID NO: 582588 - DNA, 15 bp, Homo sapiens
taaggaaaataatac

SEQ ID NO: 582589 - DNA, 15 bp, Homo sapiens
ttaaggaaaataata

SEQ ID NO: 582590 - DNA, 15 bp, Homo sapiens
gttaaggaaaataat

SEQ ID NO: 582591 - DNA, 15 bp, Homo sapiens
ggttaaggaaaataa

SEQ ID NO: 582592 - DNA, 15 bp, Homo sapiens
tggttaaggaaaata

SEQ ID NO: 582593 - DNA, 15 bp, Homo sapiens
ttggttaaggaaaat

SEQ ID NO: 582594 - DNA, 15 bp, Homo sapiens
attggttaaggaaaa

SEQ ID NO: 582595 - DNA, 15 bp, Homo sapiens
aattggttaaggaaa

SEQ ID NO: 582596 - DNA, 15 bp, Homo sapiens
taattggttaaggaa

SEQ ID NO: 582597 - DNA, 15 bp, Homo sapiens
ctaattggttaagga

SEQ ID NO: 582598 - DNA, 15 bp, Homo sapiens
tctaattggttaagg

SEQ ID NO: 582599 - DNA, 15 bp, Homo sapiens
ttctaattggttaag

SEQ ID NO: 582600 - DNA, 15 bp, Homo sapiens
attctaattggttaa

SEQ ID NO: 582601 - DNA, 15 bp, Homo sapiens
cattctaattggtta

SEQ ID NO: 582602 - DNA, 15 bp, Homo sapiens
gcattctaattggtt

SEQ ID NO: 582603 - DNA, 15 bp, Homo sapiens
agcattctaattggt

SEQ ID NO: 582604 - DNA, 15 bp, Homo sapiens
tagcattctaattgg

SEQ ID NO: 582605 - DNA, 15 bp, Homo sapiens
ctagcattctaattg

SEQ ID NO: 582606 - DNA, 15 bp, Homo sapiens
actagcattctaatt

SEQ ID NO: 582607 - DNA, 15 bp, Homo sapiens
gactagcattctaat

SEQ ID NO: 582608 - DNA, 15 bp, Homo sapiens
agactagcattctaa

SEQ ID NO: 582609 - DNA, 15 bp, Homo sapiens
aagactagcattcta

SEQ ID NO: 582610 - DNA, 15 bp, Homo sapiens
gaagactagcattct

SEQ ID NO: 582611 - DNA, 15 bp, Homo sapiens
agaagactagcattc

SEQ ID NO: 582612 - DNA, 15 bp, Homo sapiens
tagaagactagcatt

SEQ ID NO: 582613 - DNA, 15 bp, Homo sapiens
ctagaagactagcat

SEQ ID NO: 582614 - DNA, 15 bp, Homo sapiens
actagaagactagca

SEQ ID NO: 582615 - DNA, 15 bp, Homo sapiens
cactagaagactagc

SEQ ID NO: 582616 - DNA, 15 bp, Homo sapiens
acactagaagactag

SEQ ID NO: 582617 - DNA, 15 bp, Homo sapiens
aacactagaagacta

SEQ ID NO: 582618 - DNA, 15 bp, Homo sapiens
gaacactagaagact

SEQ ID NO: 582619 - DNA, 15 bp, Homo sapiens
ggaacactagaagac

SEQ ID NO: 582620 - DNA, 15 bp, Homo sapiens
gggaacactagaaga

SEQ ID NO: 582621 - DNA, 15 bp, Homo sapiens
cgggaacactagaag

SEQ ID NO: 582622 - DNA, 15 bp, Homo sapiens
ccgggaacactagaa

SEQ ID NO: 582623 - DNA, 15 bp, Homo sapiens
tccgggaacactaga

SEQ ID NO: 582624 - DNA, 15 bp, Homo sapiens
ttccgggaacactag

SEQ ID NO: 582625 - DNA, 15 bp, Homo sapiens
tttccgggaacacta

SEQ ID NO: 582626 - DNA, 15 bp, Homo sapiens
gtttccgggaacact

SEQ ID NO: 582627 - DNA, 15 bp, Homo sapiens
tgtttccgggaacac

SEQ ID NO: 582628 - DNA, 15 bp, Homo sapiens
atgtttccgggaaca

SEQ ID NO: 582629 - DNA, 15 bp, Homo sapiens
catgtttccgggaac

SEQ ID NO: 582630 - DNA, 15 bp, Homo sapiens
tcatgtttccgggaa

SEQ ID NO: 582631 - DNA, 15 bp, Homo sapiens
ctcatgtttccggga

SEQ ID NO: 582632 - DNA, 15 bp, Homo sapiens
tctcatgtttccggg

SEQ ID NO: 582633 - DNA, 15 bp, Homo sapiens
ctctcatgtttccgg

SEQ ID NO: 582634 - DNA, 15 bp, Homo sapiens
cctctcatgtttccg

SEQ ID NO: 582635 - DNA, 15 bp, Homo sapiens
acctctcatgtttcc

SEQ ID NO: 582636 - DNA, 15 bp, Homo sapiens
aacctctcatgtttc

SEQ ID NO: 582637 - DNA, 15 bp, Homo sapiens
taacctctcatgttt

SEQ ID NO: 582638 - DNA, 15 bp, Homo sapiens
ataacctctcatgtt

SEQ ID NO: 582639 - DNA, 15 bp, Homo sapiens
cataacctctcatgt

SEQ ID NO: 582640 - DNA, 15 bp, Homo sapiens
gcataacctctcatg

SEQ ID NO: 582641 - DNA, 15 bp, Homo sapiens
tgcataacctctcat

SEQ ID NO: 582642 - DNA, 15 bp, Homo sapiens
ctgcataacctctca

SEQ ID NO: 582643 - DNA, 15 bp, Homo sapiens
actgcataacctctc

SEQ ID NO: 582644 - DNA, 15 bp, Homo sapiens
tactgcataacctct

SEQ ID NO: 582645 - DNA, 15 bp, Homo sapiens
ctactgcataacctc

SEQ ID NO: 582646 - DNA, 15 bp, Homo sapiens
tctactgcataacct

SEQ ID NO: 582647 - DNA, 15 bp, Homo sapiens
gtctactgcataacc

SEQ ID NO: 582648 - DNA, 15 bp, Homo sapiens
ggtctactgcataac

SEQ ID NO: 582649 - DNA, 15 bp, Homo sapiens
gggtctactgcataa

SEQ ID NO: 582650 - DNA, 15 bp, Homo sapiens
tgggtctactgcata

SEQ ID NO: 582651 - DNA, 15 bp, Homo sapiens
ttgggtctactgcat

SEQ ID NO: 582652 - DNA, 15 bp, Homo sapiens
cttgggtctactgca

SEQ ID NO: 582653 - DNA, 15 bp, Homo sapiens
gcttgggtctactgc

SEQ ID NO: 582654 - DNA, 15 bp, Homo sapiens
tgcttgggtctactg

SEQ ID NO: 582655 - DNA, 15 bp, Homo sapiens
ttgcttgggtctact

SEQ ID NO: 582656 - DNA, 15 bp, Homo sapiens
attgcttgggtctac

SEQ ID NO: 582657 - DNA, 15 bp, Homo sapiens
tattgcttgggtcta

SEQ ID NO: 582658 - DNA, 15 bp, Homo sapiens
gtattgcttgggtct

SEQ ID NO: 582659 - DNA, 15 bp, Homo sapiens
ggtattgcttgggtc

SEQ ID NO: 582660 - DNA, 15 bp, Homo sapiens
gggtattgcttgggt

SEQ ID NO: 582661 - DNA, 15 bp, Homo sapiens
agggtattgcttggg

SEQ ID NO: 582662 - DNA, 15 bp, Homo sapiens
gagggtattgcttgg

SEQ ID NO: 582663 - DNA, 15 bp, Homo sapiens
agagggtattgcttg

SEQ ID NO: 582664 - DNA, 15 bp, Homo sapiens
aagagggtattgctt

SEQ ID NO: 582665 - DNA, 15 bp, Homo sapiens
taagagggtattgct

SEQ ID NO: 582666 - DNA, 15 bp, Homo sapiens
ataagagggtattgc

SEQ ID NO: 582667 - DNA, 15 bp, Homo sapiens
aataagagggtattg

SEQ ID NO: 582668 - DNA, 15 bp, Homo sapiens
taataagagggtatt

SEQ ID NO: 582669 - DNA, 15 bp, Homo sapiens
gtaataagagggtat

SEQ ID NO: 582670 - DNA, 15 bp, Homo sapiens
tgtaataagagggta

SEQ ID NO: 582671 - DNA, 15 bp, Homo sapiens
atgtaataagagggt

SEQ ID NO: 582672 - DNA, 15 bp, Homo sapiens
tatgtaataagaggg

SEQ ID NO: 582673 - DNA, 15 bp, Homo sapiens
ttatgtaataagagg

SEQ ID NO: 582674 - DNA, 15 bp, Homo sapiens
attatgtaataagag

SEQ ID NO: 582675 - DNA, 15 bp, Homo sapiens
gattatgtaataaga

SEQ ID NO: 582676 - DNA, 15 bp, Homo sapiens
tgattatgtaataag

SEQ ID NO: 582677 - DNA, 15 bp, Homo sapiens
ttgattatgtaataa

SEQ ID NO: 582678 - DNA, 15 bp, Homo sapiens
cttgattatgtaata

SEQ ID NO: 582679 - DNA, 15 bp, Homo sapiens
acttgattatgtaat

SEQ ID NO: 582680 - DNA, 15 bp, Homo sapiens
cacttgattatgtaa

SEQ ID NO: 582681 - DNA, 15 bp, Homo sapiens
gcacttgattatgta

SEQ ID NO: 582682 - DNA, 15 bp, Homo sapiens
cgcacttgattatgt

SEQ ID NO: 582683 - DNA, 15 bp, Homo sapiens
acgcacttgattatg

SEQ ID NO: 582684 - DNA, 15 bp, Homo sapiens
tacgcacttgattat

SEQ ID NO: 582685 - DNA, 15 bp, Homo sapiens
atacgcacttgatta

SEQ ID NO: 582686 - DNA, 15 bp, Homo sapiens
tatacgcacttgatt

SEQ ID NO: 582687 - DNA, 15 bp, Homo sapiens
ttatacgcacttgat

SEQ ID NO: 582688 - DNA, 15 bp, Homo sapiens
cttatacgcacttga

SEQ ID NO: 582689 - DNA, 15 bp, Homo sapiens
tcttatacgcacttg

SEQ ID NO: 582690 - DNA, 15 bp, Homo sapiens
ttcttatacgcactt

SEQ ID NO: 582691 - DNA, 15 bp, Homo sapiens
attcttatacgcact

SEQ ID NO: 582692 - DNA, 15 bp, Homo sapiens
aattcttatacgcac

SEQ ID NO: 582693 - DNA, 15 bp, Homo sapiens
aaattcttatacgca

SEQ ID NO: 582694 - DNA, 15 bp, Homo sapiens
taaattcttatacgc

SEQ ID NO: 582695 - DNA, 15 bp, Homo sapiens
ttaaattcttatacg

SEQ ID NO: 582696 - DNA, 15 bp, Homo sapiens
tttaaattcttatac

SEQ ID NO: 582697 - DNA, 15 bp, Homo sapiens
ttttaaattcttata

SEQ ID NO: 582698 - DNA, 15 bp, Homo sapiens
tttttaaattcttat

SEQ ID NO: 582699 - DNA, 15 bp, Homo sapiens
atttttaaattctta

SEQ ID NO: 582700 - DNA, 15 bp, Homo sapiens
tatttttaaattctt

SEQ ID NO: 582701 - DNA, 15 bp, Homo sapiens
ctatttttaaattct

SEQ ID NO: 582702 - DNA, 15 bp, Homo sapiens
cctatttttaaattc

SEQ ID NO: 582703 - DNA, 15 bp, Homo sapiens
ccctatttttaaatt

SEQ ID NO: 582704 - DNA, 15 bp, Homo sapiens
tccctatttttaaat

SEQ ID NO: 582705 - DNA, 15 bp, Homo sapiens
atccctatttttaaa

SEQ ID NO: 582706 - DNA, 15 bp, Homo sapiens
tatccctatttttaa

SEQ ID NO: 582707 - DNA, 15 bp, Homo sapiens
atatccctattttta

SEQ ID NO: 582708 - DNA, 15 bp, Homo sapiens
catatccctattttt

SEQ ID NO: 582709 - DNA, 15 bp, Homo sapiens
tcatatccctatttt

SEQ ID NO: 582710 - DNA, 15 bp, Homo sapiens
gtcatatccctattt

SEQ ID NO: 582711 - DNA, 15 bp, Homo sapiens
agtcatatccctatt

SEQ ID NO: 582712 - DNA, 15 bp, Homo sapiens
cagtcatatccctat

SEQ ID NO: 582713 - DNA, 15 bp, Homo sapiens
ccagtcatatcccta

SEQ ID NO: 582714 - DNA, 15 bp, Homo sapiens
tccagtcatatccct

SEQ ID NO: 582715 - DNA, 15 bp, Homo sapiens
ttccagtcatatccc

SEQ ID NO: 582716 - DNA, 15 bp, Homo sapiens
gttccagtcatatcc

SEQ ID NO: 582717 - DNA, 15 bp, Homo sapiens
tgttccagtcatatc

SEQ ID NO: 582718 - DNA, 15 bp, Homo sapiens
atgttccagtcatat

SEQ ID NO: 582719 - DNA, 15 bp, Homo sapiens
gatgttccagtcata

SEQ ID NO: 582720 - DNA, 15 bp, Homo sapiens
tgatgttccagtcat

SEQ ID NO: 582721 - DNA, 15 bp, Homo sapiens
gtgatgttccagtca

SEQ ID NO: 582722 - DNA, 15 bp, Homo sapiens
agtgatgttccagtc

SEQ ID NO: 582723 - DNA, 15 bp, Homo sapiens
cagtgatgttccagt

SEQ ID NO: 582724 - DNA, 15 bp, Homo sapiens
acagtgatgttccag

SEQ ID NO: 582725 - DNA, 15 bp, Homo sapiens
tacagtgatgttcca

SEQ ID NO: 582726 - DNA, 15 bp, Homo sapiens
gtacagtgatgttcc

SEQ ID NO: 582727 - DNA, 15 bp, Homo sapiens
agtacagtgatgttc

SEQ ID NO: 582728 - DNA, 15 bp, Homo sapiens
aagtacagtgatgtt

SEQ ID NO: 582729 - DNA, 15 bp, Homo sapiens
aaagtacagtgatgt

SEQ ID NO: 582730 - DNA, 15 bp, Homo sapiens
taaagtacagtgatg

SEQ ID NO: 582731 - DNA, 15 bp, Homo sapiens
gtaaagtacagtgat

SEQ ID NO: 582732 - DNA, 15 bp, Homo sapiens
ggtaaagtacagtga

SEQ ID NO: 582733 - DNA, 15 bp, Homo sapiens
tggtaaagtacagtg

SEQ ID NO: 582734 - DNA, 15 bp, Homo sapiens
ctggtaaagtacagt

SEQ ID NO: 582735 - DNA, 15 bp, Homo sapiens
cctggtaaagtacag

SEQ ID NO: 582736 - DNA, 15 bp, Homo sapiens
acctggtaaagtaca

SEQ ID NO: 582737 - DNA, 15 bp, Homo sapiens
gacctggtaaagtac

SEQ ID NO: 582738 - DNA, 15 bp, Homo sapiens
ggacctggtaaagta

SEQ ID NO: 582739 - DNA, 15 bp, Homo sapiens
gggacctggtaaagt

SEQ ID NO: 582740 - DNA, 15 bp, Homo sapiens
tgggacctggtaaag

SEQ ID NO: 582741 - DNA, 15 bp, Homo sapiens
atgggacctggtaaa

SEQ ID NO: 582742 - DNA, 15 bp, Homo sapiens
aatgggacctggtaa

SEQ ID NO: 582743 - DNA, 15 bp, Homo sapiens
taatgggacctggta

SEQ ID NO: 582744 - DNA, 15 bp, Homo sapiens
ataatgggacctggt

SEQ ID NO: 582745 - DNA, 15 bp, Homo sapiens
tataatgggacctgg

SEQ ID NO: 582746 - DNA, 15 bp, Homo sapiens
ttataatgggacctg

SEQ ID NO: 582747 - DNA, 15 bp, Homo sapiens
tttataatgggacct

SEQ ID NO: 582748 - DNA, 15 bp, Homo sapiens
ttttataatgggacc

SEQ ID NO: 582749 - DNA, 15 bp, Homo sapiens
attttataatgggac

SEQ ID NO: 582750 - DNA, 15 bp, Homo sapiens
aattttataatggga

SEQ ID NO: 582751 - DNA, 15 bp, Homo sapiens
taattttataatggg

SEQ ID NO: 582752 - DNA, 15 bp, Homo sapiens
ataattttataatgg

SEQ ID NO: 582753 - DNA, 15 bp, Homo sapiens
gataattttataatg

SEQ ID NO: 582754 - DNA, 15 bp, Homo sapiens
agataattttataat

SEQ ID NO: 582755 - DNA, 15 bp, Homo sapiens
tagataattttataa

SEQ ID NO: 582756 - DNA, 15 bp, Homo sapiens
atagataattttata

SEQ ID NO: 582757 - DNA, 15 bp, Homo sapiens
catagataattttat

SEQ ID NO: 582758 - DNA, 15 bp, Homo sapiens
acatagataatttta

SEQ ID NO: 582759 - DNA, 15 bp, Homo sapiens
aacatagataatttt

SEQ ID NO: 582760 - DNA, 15 bp, Homo sapiens
taacatagataattt

SEQ ID NO: 582761 - DNA, 15 bp, Homo sapiens
gtaacatagataatt

SEQ ID NO: 582762 - DNA, 15 bp, Homo sapiens
agtaacatagataat

SEQ ID NO: 582763 - DNA, 15 bp, Homo sapiens
aagtaacatagataa

SEQ ID NO: 582764 - DNA, 15 bp, Homo sapiens
aaagtaacatagata

SEQ ID NO: 582765 - DNA, 15 bp, Homo sapiens
taaagtaacatagat

SEQ ID NO: 582766 - DNA, 15 bp, Homo sapiens
gtaaagtaacataga

SEQ ID NO: 582767 - DNA, 15 bp, Homo sapiens
ggtaaagtaacatag

SEQ ID NO: 582768 - DNA, 15 bp, Homo sapiens
gggtaaagtaacata

SEQ ID NO: 582769 - DNA, 15 bp, Homo sapiens
tgggtaaagtaacat

SEQ ID NO: 582770 - DNA, 15 bp, Homo sapiens
atgggtaaagtaaca

SEQ ID NO: 582771 - DNA, 15 bp, Homo sapiens
tatgggtaaagtaac

SEQ ID NO: 582772 - DNA, 15 bp, Homo sapiens
ctatgggtaaagtaa

SEQ ID NO: 582773 - DNA, 15 bp, Homo sapiens
gctatgggtaaagta

SEQ ID NO: 582774 - DNA, 15 bp, Homo sapiens
agctatgggtaaagt

SEQ ID NO: 582775 - DNA, 15 bp, Homo sapiens
aagctatgggtaaag

SEQ ID NO: 582776 - DNA, 15 bp, Homo sapiens
aaagctatgggtaaa

SEQ ID NO: 582777 - DNA, 15 bp, Homo sapiens
caaagctatgggtaa

SEQ ID NO: 582778 - DNA, 15 bp, Homo sapiens
tcaaagctatgggta

SEQ ID NO: 582779 - DNA, 15 bp, Homo sapiens
ttcaaagctatgggt

SEQ ID NO: 582780 - DNA, 15 bp, Homo sapiens
tttcaaagctatggg

SEQ ID NO: 582781 - DNA, 15 bp, Homo sapiens
ttttcaaagctatgg

SEQ ID NO: 582782 - DNA, 15 bp, Homo sapiens
gttttcaaagctatg

SEQ ID NO: 582783 - DNA, 15 bp, Homo sapiens
agttttcaaagctat

SEQ ID NO: 582784 - DNA, 15 bp, Homo sapiens
tagttttcaaagcta

SEQ ID NO: 582785 - DNA, 15 bp, Homo sapiens
ctagttttcaaagct

SEQ ID NO: 582786 - DNA, 15 bp, Homo sapiens
actagttttcaaagc

SEQ ID NO: 582787 - DNA, 15 bp, Homo sapiens
cactagttttcaaag

SEQ ID NO: 582788 - DNA, 15 bp, Homo sapiens
ccactagttttcaaa

SEQ ID NO: 582789 - DNA, 15 bp, Homo sapiens
gccactagttttcaa

SEQ ID NO: 582790 - DNA, 15 bp, Homo sapiens
tgccactagttttca

SEQ ID NO: 582791 - DNA, 15 bp, Homo sapiens
atgccactagttttc

SEQ ID NO: 582792 - DNA, 15 bp, Homo sapiens
tatgccactagtttt

SEQ ID NO: 582793 - DNA, 15 bp, Homo sapiens
ctatgccactagttt

SEQ ID NO: 582794 - DNA, 15 bp, Homo sapiens
actatgccactagtt

SEQ ID NO: 582795 - DNA, 15 bp, Homo sapiens
tactatgccactagt

SEQ ID NO: 582796 - DNA, 15 bp, Homo sapiens
atactatgccactag

SEQ ID NO: 582797 - DNA, 15 bp, Homo sapiens
tatactatgccacta

SEQ ID NO: 582798 - DNA, 15 bp, Homo sapiens
atatactatgccact

SEQ ID NO: 582799 - DNA, 15 bp, Homo sapiens
aatatactatgccac

SEQ ID NO: 582800 - DNA, 15 bp, Homo sapiens
aaatatactatgcca

SEQ ID NO: 582801 - DNA, 15 bp, Homo sapiens
aaaatatactatgcc

SEQ ID NO: 582802 - DNA, 15 bp, Homo sapiens
taaaatatactatgc

SEQ ID NO: 582803 - DNA, 15 bp, Homo sapiens
ataaaatatactatg

SEQ ID NO: 582804 - DNA, 15 bp, Homo sapiens
tataaaatatactat

SEQ ID NO: 582805 - DNA, 15 bp, Homo sapiens
ctataaaatatacta

SEQ ID NO: 582806 - DNA, 15 bp, Homo sapiens
actataaaatatact

SEQ ID NO: 582807 - DNA, 15 bp, Homo sapiens
tactataaaatatac

SEQ ID NO: 582808 - DNA, 15 bp, Homo sapiens
atactataaaatata

SEQ ID NO: 582809 - DNA, 15 bp, Homo sapiens
catactataaaatat

SEQ ID NO: 582810 - DNA, 15 bp, Homo sapiens
gcatactataaaata

SEQ ID NO: 582811 - DNA, 15 bp, Homo sapiens
agcatactataaaat

SEQ ID NO: 582812 - DNA, 15 bp, Homo sapiens
cagcatactataaaa

SEQ ID NO: 582813 - DNA, 15 bp, Homo sapiens
acagcatactataaa

SEQ ID NO: 582814 - DNA, 15 bp, Homo sapiens
aacagcatactataa

SEQ ID NO: 582815 - DNA, 15 bp, Homo sapiens
taacagcatactata

SEQ ID NO: 582816 - DNA, 15 bp, Homo sapiens
ctaacagcatactat

SEQ ID NO: 582817 - DNA, 15 bp, Homo sapiens
actaacagcatacta

SEQ ID NO: 582818 - DNA, 15 bp, Homo sapiens
cactaacagcatact

SEQ ID NO: 582819 - DNA, 15 bp, Homo sapiens
acactaacagcatac

SEQ ID NO: 582820 - DNA, 15 bp, Homo sapiens
cacactaacagcata

SEQ ID NO: 582821 - DNA, 15 bp, Homo sapiens
tcacactaacagcat

SEQ ID NO: 582822 - DNA, 15 bp, Homo sapiens
atcacactaacagca

SEQ ID NO: 582823 - DNA, 15 bp, Homo sapiens
aatcacactaacagc

SEQ ID NO: 582824 - DNA, 15 bp, Homo sapiens
caatcacactaacag

SEQ ID NO: 582825 - DNA, 15 bp, Homo sapiens
ccaatcacactaaca

SEQ ID NO: 582826 - DNA, 15 bp, Homo sapiens
gccaatcacactaac

SEQ ID NO: 582827 - DNA, 15 bp, Homo sapiens
tgccaatcacactaa

SEQ ID NO: 582828 - DNA, 15 bp, Homo sapiens
atgccaatcacacta

SEQ ID NO: 582829 - DNA, 15 bp, Homo sapiens
aatgccaatcacact

SEQ ID NO: 582830 - DNA, 15 bp, Homo sapiens
caatgccaatcacac

SEQ ID NO: 582831 - DNA, 15 bp, Homo sapiens
tcaatgccaatcaca

SEQ ID NO: 582832 - DNA, 15 bp, Homo sapiens
ttcaatgccaatcac

SEQ ID NO: 582833 - DNA, 15 bp, Homo sapiens
gttcaatgccaatca

SEQ ID NO: 582834 - DNA, 15 bp, Homo sapiens
tgttcaatgccaatc

SEQ ID NO: 582835 - DNA, 15 bp, Homo sapiens
ctgttcaatgccaat

SEQ ID NO: 582836 - DNA, 15 bp, Homo sapiens
actgttcaatgccaa

SEQ ID NO: 582837 - DNA, 15 bp, Homo sapiens
cactgttcaatgcca

SEQ ID NO: 582838 - DNA, 15 bp, Homo sapiens
tcactgttcaatgcc

SEQ ID NO: 582839 - DNA, 15 bp, Homo sapiens
atcactgttcaatgc

SEQ ID NO: 582840 - DNA, 15 bp, Homo sapiens
catcactgttcaatg

SEQ ID NO: 582841 - DNA, 15 bp, Homo sapiens
ccatcactgttcaat

SEQ ID NO: 582842 - DNA, 15 bp, Homo sapiens
cccatcactgttcaa

SEQ ID NO: 582843 - DNA, 15 bp, Homo sapiens
tcccatcactgttca

SEQ ID NO: 582844 - DNA, 15 bp, Homo sapiens
atcccatcactgttc

SEQ ID NO: 582845 - DNA, 15 bp, Homo sapiens
tatcccatcactgtt

SEQ ID NO: 582846 - DNA, 15 bp, Homo sapiens
atatcccatcactgt

SEQ ID NO: 582847 - DNA, 15 bp, Homo sapiens
tatatcccatcactg

SEQ ID NO: 582848 - DNA, 15 bp, Homo sapiens
ttatatcccatcact

SEQ ID NO: 582849 - DNA, 15 bp, Homo sapiens
attatatcccatcac

SEQ ID NO: 582850 - DNA, 15 bp, Homo sapiens
gattatatcccatca

SEQ ID NO: 582851 - DNA, 15 bp, Homo sapiens
tgattatatcccatc

SEQ ID NO: 582852 - DNA, 15 bp, Homo sapiens
gtgattatatcccat

SEQ ID NO: 582853 - DNA, 15 bp, Homo sapiens
agtgattatatccca

SEQ ID NO: 582854 - DNA, 15 bp, Homo sapiens
gagtgattatatccc

SEQ ID NO: 582855 - DNA, 15 bp, Homo sapiens
agagtgattatatcc

SEQ ID NO: 582856 - DNA, 15 bp, Homo sapiens
tagagtgattatatc

SEQ ID NO: 582857 - DNA, 15 bp, Homo sapiens
gtagagtgattatat

SEQ ID NO: 582858 - DNA, 15 bp, Homo sapiens
tgtagagtgattata

SEQ ID NO: 582859 - DNA, 15 bp, Homo sapiens
ttgtagagtgattat

SEQ ID NO: 582860 - DNA, 15 bp, Homo sapiens
attgtagagtgatta

SEQ ID NO: 582861 - DNA, 15 bp, Homo sapiens
gattgtagagtgatt

SEQ ID NO: 582862 - DNA, 15 bp, Homo sapiens
agattgtagagtgat

SEQ ID NO: 582863 - DNA, 15 bp, Homo sapiens
tagattgtagagtga

SEQ ID NO: 582864 - DNA, 15 bp, Homo sapiens
atagattgtagagtg

SEQ ID NO: 582865 - DNA, 15 bp, Homo sapiens
tatagattgtagagt

SEQ ID NO: 582866 - DNA, 15 bp, Homo sapiens
atatagattgtagag

SEQ ID NO: 582867 - DNA, 15 bp, Homo sapiens
catatagattgtaga

SEQ ID NO: 582868 - DNA, 15 bp, Homo sapiens
acatatagattgtag

SEQ ID NO: 582869 - DNA, 15 bp, Homo sapiens
aacatatagattgta

SEQ ID NO: 582870 - DNA, 15 bp, Homo sapiens
taacatatagattgt

SEQ ID NO: 582871 - DNA, 15 bp, Homo sapiens
ataacatatagattg

SEQ ID NO: 582872 - DNA, 15 bp, Homo sapiens
aataacatatagatt

SEQ ID NO: 582873 - DNA, 15 bp, Homo sapiens
taataacatatagat

SEQ ID NO: 582874 - DNA, 15 bp, Homo sapiens
ttaataacatataga

SEQ ID NO: 582875 - DNA, 15 bp, Homo sapiens
tttaataacatatag

SEQ ID NO: 582876 - DNA, 15 bp, Homo sapiens
ctttaataacatata

SEQ ID NO: 582877 - DNA, 15 bp, Homo sapiens
actttaataacatat

SEQ ID NO: 582878 - DNA, 15 bp, Homo sapiens
aactttaataacata

SEQ ID NO: 582879 - DNA, 15 bp, Homo sapiens
aaactttaataacat

SEQ ID NO: 582880 - DNA, 15 bp, Homo sapiens
aaaactttaataaca

SEQ ID NO: 582881 - DNA, 15 bp, Homo sapiens
gaaaactttaataac

SEQ ID NO: 582882 - DNA, 15 bp, Homo sapiens
ggaaaactttaataa

SEQ ID NO: 582883 - DNA, 15 bp, Homo sapiens
tggaaaactttaata

SEQ ID NO: 582884 - DNA, 15 bp, Homo sapiens
ctggaaaactttaat

SEQ ID NO: 582885 - DNA, 15 bp, Homo sapiens
gctggaaaactttaa

SEQ ID NO: 582886 - DNA, 15 bp, Homo sapiens
ggctggaaaacttta

SEQ ID NO: 582887 - DNA, 15 bp, Homo sapiens
aggctggaaaacttt

SEQ ID NO: 582888 - DNA, 15 bp, Homo sapiens
aaggctggaaaactt

SEQ ID NO: 582889 - DNA, 15 bp, Homo sapiens
taaggctggaaaact

SEQ ID NO: 582890 - DNA, 15 bp, Homo sapiens
ataaggctggaaaac

SEQ ID NO: 582891 - DNA, 15 bp, Homo sapiens
tataaggctggaaaa

SEQ ID NO: 582892 - DNA, 15 bp, Homo sapiens
ctataaggctggaaa

SEQ ID NO: 582893 - DNA, 15 bp, Homo sapiens
tctataaggctggaa

SEQ ID NO: 582894 - DNA, 15 bp, Homo sapiens
atctataaggctgga

SEQ ID NO: 582895 - DNA, 15 bp, Homo sapiens
gatctataaggctgg

SEQ ID NO: 582896 - DNA, 15 bp, Homo sapiens
agatctataaggctg

SEQ ID NO: 582897 - DNA, 15 bp, Homo sapiens
gagatctataaggct

SEQ ID NO: 582898 - DNA, 15 bp, Homo sapiens
ggagatctataaggc

SEQ ID NO: 582899 - DNA, 15 bp, Homo sapiens
gggagatctataagg

SEQ ID NO: 582900 - DNA, 15 bp, Homo sapiens
agggagatctataag

SEQ ID NO: 582901 - DNA, 15 bp, Homo sapiens
aagggagatctataa

SEQ ID NO: 582902 - DNA, 15 bp, Homo sapiens
caagggagatctata

SEQ ID NO: 582903 - DNA, 15 bp, Homo sapiens
tcaagggagatctat

SEQ ID NO: 582904 - DNA, 15 bp, Homo sapiens
gtcaagggagatcta

SEQ ID NO: 582905 - DNA, 15 bp, Homo sapiens
agtcaagggagatct

SEQ ID NO: 582906 - DNA, 15 bp, Homo sapiens
cagtcaagggagatc

SEQ ID NO: 582907 - DNA, 15 bp, Homo sapiens
tcagtcaagggagat

SEQ ID NO: 582908 - DNA, 15 bp, Homo sapiens
ttcagtcaagggaga

SEQ ID NO: 582909 - DNA, 15 bp, Homo sapiens
tttcagtcaagggag

SEQ ID NO: 582910 - DNA, 15 bp, Homo sapiens
ttttcagtcaaggga

SEQ ID NO: 582911 - DNA, 15 bp, Homo sapiens
attttcagtcaaggg

SEQ ID NO: 582912 - DNA, 15 bp, Homo sapiens
aattttcagtcaagg

SEQ ID NO: 582913 - DNA, 15 bp, Homo sapiens
taattttcagtcaag

SEQ ID NO: 582914 - DNA, 15 bp, Homo sapiens
ctaattttcagtcaa

SEQ ID NO: 582915 - DNA, 15 bp, Homo sapiens
gctaattttcagtca

SEQ ID NO: 582916 - DNA, 15 bp, Homo sapiens
agctaattttcagtc

SEQ ID NO: 582917 - DNA, 15 bp, Homo sapiens
tagctaattttcagt

SEQ ID NO: 582918 - DNA, 15 bp, Homo sapiens
gtagctaattttcag

SEQ ID NO: 582919 - DNA, 15 bp, Homo sapiens
agtagctaattttca

SEQ ID NO: 582920 - DNA, 15 bp, Homo sapiens
tagtagctaattttc

SEQ ID NO: 582921 - DNA, 15 bp, Homo sapiens
ttagtagctaatttt

SEQ ID NO: 582922 - DNA, 15 bp, Homo sapiens
gttagtagctaattt

SEQ ID NO: 582923 - DNA, 15 bp, Homo sapiens
agttagtagctaatt

SEQ ID NO: 582924 - DNA, 15 bp, Homo sapiens
aagttagtagctaat

SEQ ID NO: 582925 - DNA, 15 bp, Homo sapiens
taagttagtagctaa

SEQ ID NO: 582926 - DNA, 15 bp, Homo sapiens
gtaagttagtagcta

SEQ ID NO: 582927 - DNA, 15 bp, Homo sapiens
cgtaagttagtagct

SEQ ID NO: 582928 - DNA, 15 bp, Homo sapiens
tcgtaagttagtagc

SEQ ID NO: 582929 - DNA, 15 bp, Homo sapiens
gtcgtaagttagtag

SEQ ID NO: 582930 - DNA, 15 bp, Homo sapiens
agtcgtaagttagta

SEQ ID NO: 582931 - DNA, 15 bp, Homo sapiens
aagtcgtaagttagt

SEQ ID NO: 582932 - DNA, 15 bp, Homo sapiens
taagtcgtaagttag

SEQ ID NO: 582933 - DNA, 15 bp, Homo sapiens
ataagtcgtaagtta

SEQ ID NO: 582934 - DNA, 15 bp, Homo sapiens
aataagtcgtaagtt

SEQ ID NO: 582935 - DNA, 15 bp, Homo sapiens
aaataagtcgtaagt

SEQ ID NO: 582936 - DNA, 15 bp, Homo sapiens
aaaataagtcgtaag

SEQ ID NO: 582937 - DNA, 15 bp, Homo sapiens
aaaaataagtcgtaa

SEQ ID NO: 582938 - DNA, 15 bp, Homo sapiens
aaaaaataagtcgta

SEQ ID NO: 582939 - DNA, 15 bp, Homo sapiens
taaaaaataagtcgt

SEQ ID NO: 582940 - DNA, 15 bp, Homo sapiens
gtaaaaaataagtcg

SEQ ID NO: 582941 - DNA, 15 bp, Homo sapiens
tgtaaaaaataagtc

SEQ ID NO: 582942 - DNA, 15 bp, Homo sapiens
ctgtaaaaaataagt

SEQ ID NO: 582943 - DNA, 15 bp, Homo sapiens
gctgtaaaaaataag

SEQ ID NO: 582944 - DNA, 15 bp, Homo sapiens
tgctgtaaaaaataa

SEQ ID NO: 582945 - DNA, 15 bp, Homo sapiens
ctgctgtaaaaaata

SEQ ID NO: 582946 - DNA, 15 bp, Homo sapiens
tctgctgtaaaaaat

SEQ ID NO: 582947 - DNA, 15 bp, Homo sapiens
atctgctgtaaaaaa

SEQ ID NO: 582948 - DNA, 15 bp, Homo sapiens
aatctgctgtaaaaa

SEQ ID NO: 582949 - DNA, 15 bp, Homo sapiens
caatctgctgtaaaa

SEQ ID NO: 582950 - DNA, 15 bp, Homo sapiens
tcaatctgctgtaaa

SEQ ID NO: 582951 - DNA, 15 bp, Homo sapiens
gtcaatctgctgtaa

SEQ ID NO: 582952 - DNA, 15 bp, Homo sapiens
agtcaatctgctgta

SEQ ID NO: 582953 - DNA, 15 bp, Homo sapiens
tagtcaatctgctgt

SEQ ID NO: 582954 - DNA, 15 bp, Homo sapiens
ctagtcaatctgctg

SEQ ID NO: 582955 - DNA, 15 bp, Homo sapiens
cctagtcaatctgct

SEQ ID NO: 582956 - DNA, 15 bp, Homo sapiens
acctagtcaatctgc

SEQ ID NO: 582957 - DNA, 15 bp, Homo sapiens
gacctagtcaatctg

SEQ ID NO: 582958 - DNA, 15 bp, Homo sapiens
agacctagtcaatct

SEQ ID NO: 582959 - DNA, 15 bp, Homo sapiens
aagacctagtcaatc

SEQ ID NO: 582960 - DNA, 15 bp, Homo sapiens
aaagacctagtcaat

SEQ ID NO: 582961 - DNA, 15 bp, Homo sapiens
gaaagacctagtcaa

SEQ ID NO: 582962 - DNA, 15 bp, Homo sapiens
ggaaagacctagtca

SEQ ID NO: 582963 - DNA, 15 bp, Homo sapiens
tggaaagacctagtc

SEQ ID NO: 582964 - DNA, 15 bp, Homo sapiens
ctggaaagacctagt

SEQ ID NO: 582965 - DNA, 15 bp, Homo sapiens
cctggaaagacctag

SEQ ID NO: 582966 - DNA, 15 bp, Homo sapiens
tcctggaaagaccta

SEQ ID NO: 582967 - DNA, 15 bp, Homo sapiens
ttcctggaaagacct

SEQ ID NO: 582968 - DNA, 15 bp, Homo sapiens
tttcctggaaagacc

SEQ ID NO: 582969 - DNA, 15 bp, Homo sapiens
atttcctggaaagac

SEQ ID NO: 582970 - DNA, 15 bp, Homo sapiens
gatttcctggaaaga

SEQ ID NO: 582971 - DNA, 15 bp, Homo sapiens
agatttcctggaaag

SEQ ID NO: 582972 - DNA, 15 bp, Homo sapiens
cagatttcctggaaa

SEQ ID NO: 582973 - DNA, 15 bp, Homo sapiens
acagatttcctggaa

SEQ ID NO: 582974 - DNA, 15 bp, Homo sapiens
aacagatttcctgga

SEQ ID NO: 582975 - DNA, 15 bp, Homo sapiens
caacagatttcctgg

SEQ ID NO: 582976 - DNA, 15 bp, Homo sapiens
tcaacagatttcctg

SEQ ID NO: 582977 - DNA, 15 bp, Homo sapiens
atcaacagatttcct

SEQ ID NO: 582978 - DNA, 15 bp, Homo sapiens
catcaacagatttcc

SEQ ID NO: 582979 - DNA, 15 bp, Homo sapiens
acatcaacagatttc

SEQ ID NO: 582980 - DNA, 15 bp, Homo sapiens
tacatcaacagattt

SEQ ID NO: 582981 - DNA, 15 bp, Homo sapiens
gtacatcaacagatt

SEQ ID NO: 582982 - DNA, 15 bp, Homo sapiens
tgtacatcaacagat

SEQ ID NO: 582983 - DNA, 15 bp, Homo sapiens
ttgtacatcaacaga

SEQ ID NO: 582984 - DNA, 15 bp, Homo sapiens
tttgtacatcaacag

SEQ ID NO: 582985 - DNA, 15 bp, Homo sapiens
ttttgtacatcaaca

SEQ ID NO: 582986 - DNA, 15 bp, Homo sapiens
tttttgtacatcaac

SEQ ID NO: 582987 - DNA, 15 bp, Homo sapiens
gtttttgtacatcaa

SEQ ID NO: 582988 - DNA, 15 bp, Homo sapiens
tgtttttgtacatca

SEQ ID NO: 582989 - DNA, 15 bp, Homo sapiens
ttgtttttgtacatc

SEQ ID NO: 582990 - DNA, 15 bp, Homo sapiens
tttgtttttgtacat

SEQ ID NO: 582991 - DNA, 15 bp, Homo sapiens
ctttgtttttgtaca

SEQ ID NO: 582992 - DNA, 15 bp, Homo sapiens
actttgtttttgtac

SEQ ID NO: 582993 - DNA, 15 bp, Homo sapiens
aactttgtttttgta

SEQ ID NO: 582994 - DNA, 15 bp, Homo sapiens
aaactttgtttttgt

SEQ ID NO: 582995 - DNA, 15 bp, Homo sapiens
taaactttgtttttg

SEQ ID NO: 582996 - DNA, 15 bp, Homo sapiens
ttaaactttgttttt

SEQ ID NO: 582997 - DNA, 15 bp, Homo sapiens
attaaactttgtttt

SEQ ID NO: 582998 - DNA, 15 bp, Homo sapiens
aattaaactttgttt

SEQ ID NO: 582999 - DNA, 15 bp, Homo sapiens
caattaaactttgtt

SEQ ID NO: 583000 - DNA, 15 bp, Homo sapiens
gcaattaaactttgt

SEQ ID NO: 583001 - DNA, 15 bp, Homo sapiens
agcaattaaactttg

SEQ ID NO: 583002 - DNA, 15 bp, Homo sapiens
tagcaattaaacttt

SEQ ID NO: 583003 - DNA, 15 bp, Homo sapiens
ttagcaattaaactt

SEQ ID NO: 583004 - DNA, 15 bp, Homo sapiens
attagcaattaaact

SEQ ID NO: 583005 - DNA, 15 bp, Homo sapiens
cattagcaattaaac

SEQ ID NO: 583006 - DNA, 15 bp, Homo sapiens
acattagcaattaaa

SEQ ID NO: 583007 - DNA, 15 bp, Homo sapiens
aacattagcaattaa

SEQ ID NO: 583008 - DNA, 15 bp, Homo sapiens
aaacattagcaatta

SEQ ID NO: 583009 - DNA, 15 bp, Homo sapiens
aaaacattagcaatt

SEQ ID NO: 583010 - DNA, 15 bp, Homo sapiens
aaaaacattagcaat

SEQ ID NO: 583011 - DNA, 15 bp, Homo sapiens
aaaaaacattagcaa

SEQ ID NO: 583012 - DNA, 15 bp, Homo sapiens
aaaaaaacattagca

SEQ ID NO: 583013 - DNA, 15 bp, Homo sapiens
taaaaaaacattagc

SEQ ID NO: 583014 - DNA, 15 bp, Homo sapiens
ttaaaaaaacattag

SEQ ID NO: 583015 - DNA, 15 bp, Homo sapiens
tttaaaaaaacatta

SEQ ID NO: 583016 - DNA, 15 bp, Homo sapiens
ttttaaaaaaacatt

SEQ ID NO: 583017 - DNA, 15 bp, Homo sapiens
tttttaaaaaaacat

SEQ ID NO: 583018 - DNA, 15 bp, Homo sapiens
ttttttaaaaaaaca

SEQ ID NO: 583019 - DNA, 15 bp, Homo sapiens
attttttaaaaaaac

SEQ ID NO: 583020 - DNA, 15 bp, Homo sapiens
tattttttaaaaaaa

SEQ ID NO: 583021 - DNA, 15 bp, Homo sapiens
ttattttttaaaaaa

SEQ ID NO: 583022 - DNA, 15 bp, Homo sapiens
gttattttttaaaaa

SEQ ID NO: 583023 - DNA, 15 bp, Homo sapiens
agttattttttaaaa

SEQ ID NO: 583024 - DNA, 15 bp, Homo sapiens
aagttattttttaaa

SEQ ID NO: 583025 - DNA, 15 bp, Homo sapiens
aaagttattttttaa

SEQ ID NO: 583026 - DNA, 15 bp, Homo sapiens
aaaagttatttttta

SEQ ID NO: 583027 - DNA, 15 bp, Homo sapiens
aaaaagttatttttt

SEQ ID NO: 583028 - DNA, 15 bp, Homo sapiens
caaaaagttattttt

SEQ ID NO: 583029 - DNA, 15 bp, Homo sapiens
tcaaaaagttatttt

SEQ ID NO: 583030 - DNA, 15 bp, Homo sapiens
atcaaaaagttattt

SEQ ID NO: 583031 - DNA, 15 bp, Homo sapiens
tatcaaaaagttatt

SEQ ID NO: 583032 - DNA, 15 bp, Homo sapiens
atatcaaaaagttat

SEQ ID NO: 583033 - DNA, 15 bp, Homo sapiens
aatatcaaaaagtta

SEQ ID NO: 583034 - DNA, 15 bp, Homo sapiens
taatatcaaaaagtt

SEQ ID NO: 583035 - DNA, 15 bp, Homo sapiens
gtaatatcaaaaagt

SEQ ID NO: 583036 - DNA, 15 bp, Homo sapiens
cgtaatatcaaaaag

SEQ ID NO: 583037 - DNA, 15 bp, Homo sapiens
ccgtaatatcaaaaa

SEQ ID NO: 583038 - DNA, 15 bp, Homo sapiens
tccgtaatatcaaaa

SEQ ID NO: 583039 - DNA, 15 bp, Homo sapiens
atccgtaatatcaaa

SEQ ID NO: 583040 - DNA, 15 bp, Homo sapiens
tatccgtaatatcaa

SEQ ID NO: 583041 - DNA, 15 bp, Homo sapiens
gtatccgtaatatca

SEQ ID NO: 583042 - DNA, 15 bp, Homo sapiens
ggtatccgtaatatc

SEQ ID NO: 583043 - DNA, 15 bp, Homo sapiens
aggtatccgtaatat

SEQ ID NO: 583044 - DNA, 15 bp, Homo sapiens
caggtatccgtaata

SEQ ID NO: 583045 - DNA, 15 bp, Homo sapiens
ccaggtatccgtaat

SEQ ID NO: 583046 - DNA, 15 bp, Homo sapiens
accaggtatccgtaa

SEQ ID NO: 583047 - DNA, 15 bp, Homo sapiens
aaccaggtatccgta

SEQ ID NO: 583048 - DNA, 15 bp, Homo sapiens
taaccaggtatccgt

SEQ ID NO: 583049 - DNA, 15 bp, Homo sapiens
ataaccaggtatccg

SEQ ID NO: 583050 - DNA, 15 bp, Homo sapiens
aataaccaggtatcc

SEQ ID NO: 583051 - DNA, 15 bp, Homo sapiens
aaataaccaggtatc

SEQ ID NO: 583052 - DNA, 15 bp, Homo sapiens
caaataaccaggtat

SEQ ID NO: 583053 - DNA, 15 bp, Homo sapiens
ccaaataaccaggta

SEQ ID NO: 583054 - DNA, 15 bp, Homo sapiens
cccaaataaccaggt

SEQ ID NO: 583055 - DNA, 15 bp, Homo sapiens
gcccaaataaccagg

SEQ ID NO: 583056 - DNA, 15 bp, Homo sapiens
ggcccaaataaccag

SEQ ID NO: 583057 - DNA, 15 bp, Homo sapiens
aggcccaaataacca

SEQ ID NO: 583058 - DNA, 15 bp, Homo sapiens
aaggcccaaataacc

SEQ ID NO: 583059 - DNA, 15 bp, Homo sapiens
caaggcccaaataac

SEQ ID NO: 583060 - DNA, 15 bp, Homo sapiens
acaaggcccaaataa

SEQ ID NO: 583061 - DNA, 15 bp, Homo sapiens
tacaaggcccaaata

SEQ ID NO: 583062 - DNA, 15 bp, Homo sapiens
atacaaggcccaaat

SEQ ID NO: 583063 - DNA, 15 bp, Homo sapiens
tatacaaggcccaaa

SEQ ID NO: 583064 - DNA, 15 bp, Homo sapiens
atatacaaggcccaa

SEQ ID NO: 583065 - DNA, 15 bp, Homo sapiens
aatatacaaggccca

SEQ ID NO: 583066 - DNA, 15 bp, Homo sapiens
aaatatacaaggccc

SEQ ID NO: 583067 - DNA, 15 bp, Homo sapiens
aaaatatacaaggcc

SEQ ID NO: 583068 - DNA, 15 bp, Homo sapiens
taaaatatacaaggc

SEQ ID NO: 583069 - DNA, 15 bp, Homo sapiens
ttaaaatatacaagg

SEQ ID NO: 583070 - DNA, 15 bp, Homo sapiens
gttaaaatatacaag

SEQ ID NO: 583071 - DNA, 15 bp, Homo sapiens
tgttaaaatatacaa

SEQ ID NO: 583072 - DNA, 15 bp, Homo sapiens
atgttaaaatataca

SEQ ID NO: 583073 - DNA, 15 bp, Homo sapiens
gatgttaaaatatac

SEQ ID NO: 583074 - DNA, 15 bp, Homo sapiens
tgatgttaaaatata

SEQ ID NO: 583075 - DNA, 15 bp, Homo sapiens
ttgatgttaaaatat

SEQ ID NO: 583076 - DNA, 15 bp, Homo sapiens
tttgatgttaaaata

SEQ ID NO: 583077 - DNA, 15 bp, Homo sapiens
ttttgatgttaaaat

SEQ ID NO: 583078 - DNA, 15 bp, Homo sapiens
attttgatgttaaaa

SEQ ID NO: 583079 - DNA, 15 bp, Homo sapiens
aattttgatgttaaa

SEQ ID NO: 583080 - DNA, 15 bp, Homo sapiens
taattttgatgttaa

SEQ ID NO: 583081 - DNA, 15 bp, Homo sapiens
gtaattttgatgtta

SEQ ID NO: 583082 - DNA, 15 bp, Homo sapiens
ggtaattttgatgtt

SEQ ID NO: 583083 - DNA, 15 bp, Homo sapiens
aggtaattttgatgt

SEQ ID NO: 583084 - DNA, 15 bp, Homo sapiens
taggtaattttgatg

SEQ ID NO: 583085 - DNA, 15 bp, Homo sapiens
ataggtaattttgat

SEQ ID NO: 583086 - DNA, 15 bp, Homo sapiens
aataggtaattttga

SEQ ID NO: 583087 - DNA, 15 bp, Homo sapiens
taataggtaattttg

SEQ ID NO: 583088 - DNA, 15 bp, Homo sapiens
ataataggtaatttt

SEQ ID NO: 583089 - DNA, 15 bp, Homo sapiens
tataataggtaattt

SEQ ID NO: 583090 - DNA, 15 bp, Homo sapiens
ttataataggtaatt

SEQ ID NO: 583091 - DNA, 15 bp, Homo sapiens
tttataataggtaat

SEQ ID NO: 583092 - DNA, 15 bp, Homo sapiens
atttataataggtaa

SEQ ID NO: 583093 - DNA, 15 bp, Homo sapiens
gatttataataggta

SEQ ID NO: 583094 - DNA, 15 bp, Homo sapiens
ggatttataataggt

SEQ ID NO: 583095 - DNA, 15 bp, Homo sapiens
tggatttataatagg

SEQ ID NO: 583096 - DNA, 15 bp, Homo sapiens
atggatttataatag

SEQ ID NO: 583097 - DNA, 15 bp, Homo sapiens
tatggatttataata

SEQ ID NO: 583098 - DNA, 15 bp, Homo sapiens
atatggatttataat

SEQ ID NO: 583099 - DNA, 15 bp, Homo sapiens
tatatggatttataa

SEQ ID NO: 583100 - DNA, 15 bp, Homo sapiens
ttatatggatttata

SEQ ID NO: 583101 - DNA, 15 bp, Homo sapiens
tttatatggatttat

SEQ ID NO: 583102 - DNA, 15 bp, Homo sapiens
gtttatatggattta

SEQ ID NO: 583103 - DNA, 15 bp, Homo sapiens
tgtttatatggattt

SEQ ID NO: 583104 - DNA, 15 bp, Homo sapiens
ctgtttatatggatt

SEQ ID NO: 583105 - DNA, 15 bp, Homo sapiens
tctgtttatatggat

SEQ ID NO: 583106 - DNA, 15 bp, Homo sapiens
ttctgtttatatgga

SEQ ID NO: 583107 - DNA, 15 bp, Homo sapiens
tttctgtttatatgg

SEQ ID NO: 583108 - DNA, 15 bp, Homo sapiens
ttttctgtttatatg

SEQ ID NO: 583109 - DNA, 15 bp, Homo sapiens
cttttctgtttatat

SEQ ID NO: 583110 - DNA, 15 bp, Homo sapiens
tcttttctgtttata

SEQ ID NO: 583111 - DNA, 15 bp, Homo sapiens
ttcttttctgtttat

SEQ ID NO: 583112 - DNA, 15 bp, Homo sapiens
tttcttttctgttta

SEQ ID NO: 583113 - DNA, 15 bp, Homo sapiens
ctttcttttctgttt

SEQ ID NO: 583114 - DNA, 15 bp, Homo sapiens
tctttcttttctgtt

SEQ ID NO: 583115 - DNA, 15 bp, Homo sapiens
ctctttcttttctgt

SEQ ID NO: 583116 - DNA, 15 bp, Homo sapiens
tctctttcttttctg

SEQ ID NO: 583117 - DNA, 15 bp, Homo sapiens
ctctctttcttttct

SEQ ID NO: 583118 - DNA, 15 bp, Homo sapiens
actctctttcttttc

SEQ ID NO: 583119 - DNA, 15 bp, Homo sapiens
tactctctttctttt

SEQ ID NO: 583120 - DNA, 15 bp, Homo sapiens
ttactctctttcttt

SEQ ID NO: 583121 - DNA, 15 bp, Homo sapiens
cttactctctttctt

SEQ ID NO: 583122 - DNA, 15 bp, Homo sapiens
acttactctctttct

SEQ ID NO: 583123 - DNA, 15 bp, Homo sapiens
gacttactctctttc

SEQ ID NO: 583124 - DNA, 15 bp, Homo sapiens
agacttactctcttt

SEQ ID NO: 583125 - DNA, 15 bp, Homo sapiens
aagacttactctctt

SEQ ID NO: 583126 - DNA, 15 bp, Homo sapiens
aaagacttactctct

SEQ ID NO: 583127 - DNA, 15 bp, Homo sapiens
taaagacttactctc

SEQ ID NO: 583128 - DNA, 15 bp, Homo sapiens
ctaaagacttactct

SEQ ID NO: 583129 - DNA, 15 bp, Homo sapiens
tctaaagacttactc

SEQ ID NO: 583130 - DNA, 15 bp, Homo sapiens
atctaaagacttact

SEQ ID NO: 583131 - DNA, 15 bp, Homo sapiens
gatctaaagacttac

SEQ ID NO: 583132 - DNA, 15 bp, Homo sapiens
tgatctaaagactta

SEQ ID NO: 583133 - DNA, 15 bp, Homo sapiens
ctgatctaaagactt

SEQ ID NO: 583134 - DNA, 15 bp, Homo sapiens
tctgatctaaagact

SEQ ID NO: 583135 - DNA, 15 bp, Homo sapiens
atctgatctaaagac

SEQ ID NO: 583136 - DNA, 15 bp, Homo sapiens
gatctgatctaaaga

SEQ ID NO: 583137 - DNA, 15 bp, Homo sapiens
agatctgatctaaag

SEQ ID NO: 583138 - DNA, 15 bp, Homo sapiens
cagatctgatctaaa

SEQ ID NO: 583139 - DNA, 15 bp, Homo sapiens
gcagatctgatctaa

SEQ ID NO: 583140 - DNA, 15 bp, Homo sapiens
tgcagatctgatcta

SEQ ID NO: 583141 - DNA, 15 bp, Homo sapiens
ttgcagatctgatct

SEQ ID NO: 583142 - DNA, 15 bp, Homo sapiens
tttgcagatctgatc

SEQ ID NO: 583143 - DNA, 15 bp, Homo sapiens
gtttgcagatctgat

SEQ ID NO: 583144 - DNA, 15 bp, Homo sapiens
tgtttgcagatctga

SEQ ID NO: 583145 - DNA, 15 bp, Homo sapiens
ttgtttgcagatctg

SEQ ID NO: 583146 - DNA, 15 bp, Homo sapiens
attgtttgcagatct

SEQ ID NO: 583147 - DNA, 15 bp, Homo sapiens
cattgtttgcagatc

SEQ ID NO: 583148 - DNA, 15 bp, Homo sapiens
tcattgtttgcagat

SEQ ID NO: 583149 - DNA, 15 bp, Homo sapiens
atcattgtttgcaga

SEQ ID NO: 583150 - DNA, 15 bp, Homo sapiens
catcattgtttgcag

SEQ ID NO: 583151 - DNA, 15 bp, Homo sapiens
ccatcattgtttgca

SEQ ID NO: 583152 - DNA, 15 bp, Homo sapiens
accatcattgtttgc

SEQ ID NO: 583153 - DNA, 15 bp, Homo sapiens
taccatcattgtttg

SEQ ID NO: 583154 - DNA, 15 bp, Homo sapiens
gtaccatcattgttt

SEQ ID NO: 583155 - DNA, 15 bp, Homo sapiens
cgtaccatcattgtt

SEQ ID NO: 583156 - DNA, 15 bp, Homo sapiens
acgtaccatcattgt

SEQ ID NO: 583157 - DNA, 15 bp, Homo sapiens
tacgtaccatcattg

SEQ ID NO: 583158 - DNA, 15 bp, Homo sapiens
gtacgtaccatcatt

SEQ ID NO: 583159 - DNA, 15 bp, Homo sapiens
agtacgtaccatcat

SEQ ID NO: 583160 - DNA, 15 bp, Homo sapiens
cagtacgtaccatca

SEQ ID NO: 583161 - DNA, 15 bp, Homo sapiens
acagtacgtaccatc

SEQ ID NO: 583162 - DNA, 15 bp, Homo sapiens
tacagtacgtaccat

SEQ ID NO: 583163 - DNA, 15 bp, Homo sapiens
ctacagtacgtacca

SEQ ID NO: 583164 - DNA, 15 bp, Homo sapiens
tctacagtacgtacc

SEQ ID NO: 583165 - DNA, 15 bp, Homo sapiens
ttctacagtacgtac

SEQ ID NO: 583166 - DNA, 15 bp, Homo sapiens
tttctacagtacgta

SEQ ID NO: 583167 - DNA, 15 bp, Homo sapiens
ttttctacagtacgt

SEQ ID NO: 583168 - DNA, 15 bp, Homo sapiens
tttttctacagtacg

SEQ ID NO: 583169 - DNA, 15 bp, Homo sapiens
atttttctacagtac

SEQ ID NO: 583170 - DNA, 15 bp, Homo sapiens
gatttttctacagta

SEQ ID NO: 583171 - DNA, 15 bp, Homo sapiens
agatttttctacagt

SEQ ID NO: 583172 - DNA, 15 bp, Homo sapiens
cagatttttctacag

SEQ ID NO: 583173 - DNA, 15 bp, Homo sapiens
ccagatttttctaca

SEQ ID NO: 583174 - DNA, 15 bp, Homo sapiens
tccagatttttctac

SEQ ID NO: 583175 - DNA, 15 bp, Homo sapiens
ttccagatttttcta

SEQ ID NO: 583176 - DNA, 15 bp, Homo sapiens
gttccagatttttct

SEQ ID NO: 583177 - DNA, 15 bp, Homo sapiens
tgttccagatttttc

SEQ ID NO: 583178 - DNA, 15 bp, Homo sapiens
atgttccagattttt

SEQ ID NO: 583179 - DNA, 15 bp, Homo sapiens
tgtaaaacaacaagc

SEQ ID NO: 583180 - DNA, 15 bp, Homo sapiens
ctgtaaaacaacaag

SEQ ID NO: 583181 - DNA, 15 bp, Homo sapiens
actgtaaaacaacaa

SEQ ID NO: 583182 - DNA, 15 bp, Homo sapiens
cactgtaaaacaaca

SEQ ID NO: 583183 - DNA, 15 bp, Homo sapiens
acactgtaaaacaac

SEQ ID NO: 583184 - DNA, 15 bp, Homo sapiens
aacactgtaaaacaa

SEQ ID NO: 583185 - DNA, 15 bp, Homo sapiens
taacactgtaaaaca

SEQ ID NO: 583186 - DNA, 15 bp, Homo sapiens
ctaacactgtaaaac

SEQ ID NO: 583187 - DNA, 15 bp, Homo sapiens
actaacactgtaaaa

SEQ ID NO: 583188 - DNA, 15 bp, Homo sapiens
cactaacactgtaaa

SEQ ID NO: 583189 - DNA, 15 bp, Homo sapiens
tcactaacactgtaa

SEQ ID NO: 583190 - DNA, 15 bp, Homo sapiens
atcactaacactgta

SEQ ID NO: 583191 - DNA, 15 bp, Homo sapiens
gatcactaacactgt

SEQ ID NO: 583192 - DNA, 15 bp, Homo sapiens
ggatcactaacactg

SEQ ID NO: 583193 - DNA, 15 bp, Homo sapiens
tggatcactaacact

SEQ ID NO: 583194 - DNA, 15 bp, Homo sapiens
atggatcactaacac

SEQ ID NO: 583195 - DNA, 15 bp, Homo sapiens
aatggatcactaaca

SEQ ID NO: 583196 - DNA, 15 bp, Homo sapiens
gaatggatcactaac

SEQ ID NO: 583197 - DNA, 15 bp, Homo sapiens
ggaatggatcactaa

SEQ ID NO: 583198 - DNA, 15 bp, Homo sapiens
gggaatggatcacta

SEQ ID NO: 583199 - DNA, 15 bp, Homo sapiens
agggaatggatcact

SEQ ID NO: 583200 - DNA, 15 bp, Homo sapiens
aagggaatggatcac

SEQ ID NO: 583201 - DNA, 15 bp, Homo sapiens
aaagggaatggatca

SEQ ID NO: 583202 - DNA, 15 bp, Homo sapiens
caaagggaatggatc

SEQ ID NO: 583203 - DNA, 15 bp, Homo sapiens
tcaaagggaatggat

SEQ ID NO: 583204 - DNA, 15 bp, Homo sapiens
gtcaaagggaatgga

SEQ ID NO: 583205 - DNA, 15 bp, Homo sapiens
cgtcaaagggaatgg

SEQ ID NO: 583206 - DNA, 15 bp, Homo sapiens
tcgtcaaagggaatg

SEQ ID NO: 583207 - DNA, 15 bp, Homo sapiens
atcgtcaaagggaat

SEQ ID NO: 583208 - DNA, 15 bp, Homo sapiens
gatcgtcaaagggaa

SEQ ID NO: 583209 - DNA, 15 bp, Homo sapiens
ggatcgtcaaaggga

SEQ ID NO: 583210 - DNA, 15 bp, Homo sapiens
gggatcgtcaaaggg

SEQ ID NO: 583211 - DNA, 15 bp, Homo sapiens
agggatcgtcaaagg

SEQ ID NO: 583212 - DNA, 15 bp, Homo sapiens
tagggatcgtcaaag

SEQ ID NO: 583213 - DNA, 15 bp, Homo sapiens
ctagggatcgtcaaa

SEQ ID NO: 583214 - DNA, 15 bp, Homo sapiens
cctagggatcgtcaa

SEQ ID NO: 583215 - DNA, 15 bp, Homo sapiens
acctagggatcgtca

SEQ ID NO: 583216 - DNA, 15 bp, Homo sapiens
cacctagggatcgtc

SEQ ID NO: 583217 - DNA, 15 bp, Homo sapiens
ccacctagggatcgt

SEQ ID NO: 583218 - DNA, 15 bp, Homo sapiens
tccacctagggatcg

SEQ ID NO: 583219 - DNA, 15 bp, Homo sapiens
ctccacctagggatc

SEQ ID NO: 583220 - DNA, 15 bp, Homo sapiens
tctccacctagggat

SEQ ID NO: 583221 - DNA, 15 bp, Homo sapiens
atctccacctaggga

SEQ ID NO: 583222 - DNA, 15 bp, Homo sapiens
catctccacctaggg

SEQ ID NO: 583223 - DNA, 15 bp, Homo sapiens
ccatctccacctagg

SEQ ID NO: 583224 - DNA, 15 bp, Homo sapiens
cccatctccacctag

SEQ ID NO: 583225 - DNA, 15 bp, Homo sapiens
ccccatctccaccta

SEQ ID NO: 583226 - DNA, 15 bp, Homo sapiens
gccccatctccacct

SEQ ID NO: 583227 - DNA, 15 bp, Homo sapiens
tgccccatctccacc

SEQ ID NO: 583228 - DNA, 15 bp, Homo sapiens
atgccccatctccac

SEQ ID NO: 583229 - DNA, 15 bp, Homo sapiens
catgccccatctcca

SEQ ID NO: 583230 - DNA, 15 bp, Homo sapiens
tcatgccccatctcc

SEQ ID NO: 583231 - DNA, 15 bp, Homo sapiens
ctcatgccccatctc

SEQ ID NO: 583232 - DNA, 15 bp, Homo sapiens
cctcatgccccatct

SEQ ID NO: 583233 - DNA, 15 bp, Homo sapiens
tcctcatgccccatc

SEQ ID NO: 583234 - DNA, 15 bp, Homo sapiens
atcctcatgccccat

SEQ ID NO: 583235 - DNA, 15 bp, Homo sapiens
gatcctcatgcccca

SEQ ID NO: 583236 - DNA, 15 bp, Homo sapiens
ggatcctcatgcccc

SEQ ID NO: 583237 - DNA, 15 bp, Homo sapiens
aggatcctcatgccc

SEQ ID NO: 583238 - DNA, 15 bp, Homo sapiens
gaggatcctcatgcc

SEQ ID NO: 583239 - DNA, 15 bp, Homo sapiens
ggaggatcctcatgc

SEQ ID NO: 583240 - DNA, 15 bp, Homo sapiens
tggaggatcctcatg

SEQ ID NO: 583241 - DNA, 15 bp, Homo sapiens
ctggaggatcctcat

SEQ ID NO: 583242 - DNA, 15 bp, Homo sapiens
cctggaggatcctca

SEQ ID NO: 583243 - DNA, 15 bp, Homo sapiens
ccctggaggatcctc

SEQ ID NO: 583244 - DNA, 15 bp, Homo sapiens
cccctggaggatcct

SEQ ID NO: 583245 - DNA, 15 bp, Homo sapiens
tcccctggaggatcc

SEQ ID NO: 583246 - DNA, 15 bp, Homo sapiens
ttcccctggaggatc

SEQ ID NO: 583247 - DNA, 15 bp, Homo sapiens
tttcccctggaggat

SEQ ID NO: 583248 - DNA, 15 bp, Homo sapiens
ttttcccctggagga

SEQ ID NO: 583249 - DNA, 15 bp, Homo sapiens
cttttcccctggagg

SEQ ID NO: 583250 - DNA, 15 bp, Homo sapiens
gcttttcccctggag

SEQ ID NO: 583251 - DNA, 15 bp, Homo sapiens
agcttttcccctgga

SEQ ID NO: 583252 - DNA, 15 bp, Homo sapiens
gagcttttcccctgg

SEQ ID NO: 583253 - DNA, 15 bp, Homo sapiens
tgagcttttcccctg

SEQ ID NO: 583254 - DNA, 15 bp, Homo sapiens
gtgagcttttcccct

SEQ ID NO: 583255 - DNA, 15 bp, Homo sapiens
agtgagcttttcccc

SEQ ID NO: 583256 - DNA, 15 bp, Homo sapiens
tagtgagcttttccc

SEQ ID NO: 583257 - DNA, 15 bp, Homo sapiens
gtagtgagcttttcc

SEQ ID NO: 583258 - DNA, 15 bp, Homo sapiens
ggtagtgagcttttc

SEQ ID NO: 583259 - DNA, 15 bp, Homo sapiens
tggtagtgagctttt

SEQ ID NO: 583260 - DNA, 15 bp, Homo sapiens
gtggtagtgagcttt

SEQ ID NO: 583261 - DNA, 15 bp, Homo sapiens
agtggtagtgagctt

SEQ ID NO: 583262 - DNA, 15 bp, Homo sapiens
cagtggtagtgagct

SEQ ID NO: 583263 - DNA, 15 bp, Homo sapiens
ccagtggtagtgagc

SEQ ID NO: 583264 - DNA, 15 bp, Homo sapiens
cccagtggtagtgag

SEQ ID NO: 583265 - DNA, 15 bp, Homo sapiens
gcccagtggtagtga

SEQ ID NO: 583266 - DNA, 15 bp, Homo sapiens
tgcccagtggtagtg

SEQ ID NO: 583267 - DNA, 15 bp, Homo sapiens
ttgcccagtggtagt

SEQ ID NO: 583268 - DNA, 15 bp, Homo sapiens
gttgcccagtggtag

SEQ ID NO: 583269 - DNA, 15 bp, Homo sapiens
tgttgcccagtggta

SEQ ID NO: 583270 - DNA, 15 bp, Homo sapiens
ttgttgcccagtggt

SEQ ID NO: 583271 - DNA, 15 bp, Homo sapiens
gttgttgcccagtgg

SEQ ID NO: 583272 - DNA, 15 bp, Homo sapiens
ggttgttgcccagtg

SEQ ID NO: 583273 - DNA, 15 bp, Homo sapiens
gggttgttgcccagt

SEQ ID NO: 583274 - DNA, 15 bp, Homo sapiens
agggttgttgcccag

SEQ ID NO: 583275 - DNA, 15 bp, Homo sapiens
tagggttgttgccca

SEQ ID NO: 583276 - DNA, 15 bp, Homo sapiens
ctagggttgttgccc

SEQ ID NO: 583277 - DNA, 15 bp, Homo sapiens
cctagggttgttgcc

SEQ ID NO: 583278 - DNA, 15 bp, Homo sapiens
acctagggttgttgc

SEQ ID NO: 583279 - DNA, 15 bp, Homo sapiens
gacctagggttgttg

SEQ ID NO: 583280 - DNA, 15 bp, Homo sapiens
tgacctagggttgtt

SEQ ID NO: 583281 - DNA, 15 bp, Homo sapiens
ctgacctagggttgt

SEQ ID NO: 583282 - DNA, 15 bp, Homo sapiens
cctgacctagggttg

SEQ ID NO: 583283 - DNA, 15 bp, Homo sapiens
tcctgacctagggtt

SEQ ID NO: 583284 - DNA, 15 bp, Homo sapiens
ctcctgacctagggt

SEQ ID NO: 583285 - DNA, 15 bp, Homo sapiens
cctcctgacctaggg

SEQ ID NO: 583286 - DNA, 15 bp, Homo sapiens
acctcctgacctagg

SEQ ID NO: 583287 - DNA, 15 bp, Homo sapiens
aacctcctgacctag

SEQ ID NO: 583288 - DNA, 15 bp, Homo sapiens
gaacctcctgaccta

SEQ ID NO: 583289 - DNA, 15 bp, Homo sapiens
agaacctcctgacct

SEQ ID NO: 583290 - DNA, 15 bp, Homo sapiens
cagaacctcctgacc

SEQ ID NO: 583291 - DNA, 15 bp, Homo sapiens
acagaacctcctgac

SEQ ID NO: 583292 - DNA, 15 bp, Homo sapiens
gacagaacctcctga

SEQ ID NO: 583293 - DNA, 15 bp, Homo sapiens
tgacagaacctcctg

SEQ ID NO: 583294 - DNA, 15 bp, Homo sapiens
ttgacagaacctcct

SEQ ID NO: 583295 - DNA, 15 bp, Homo sapiens
cttgacagaacctcc

SEQ ID NO: 583296 - DNA, 15 bp, Homo sapiens
tcttgacagaacctc

SEQ ID NO: 583297 - DNA, 15 bp, Homo sapiens
atcttgacagaacct

SEQ ID NO: 583298 - DNA, 15 bp, Homo sapiens
tatcttgacagaacc

SEQ ID NO: 583299 - DNA, 15 bp, Homo sapiens
gtatcttgacagaac

SEQ ID NO: 583300 - DNA, 15 bp, Homo sapiens
agtatcttgacagaa

SEQ ID NO: 583301 - DNA, 15 bp, Homo sapiens
aagtatcttgacaga

SEQ ID NO: 583302 - DNA, 15 bp, Homo sapiens
aaagtatcttgacag

SEQ ID NO: 583303 - DNA, 15 bp, Homo sapiens
gaaagtatcttgaca

SEQ ID NO: 583304 - DNA, 15 bp, Homo sapiens
ggaaagtatcttgac

SEQ ID NO: 583305 - DNA, 15 bp, Homo sapiens
aggaaagtatcttga

SEQ ID NO: 583306 - DNA, 15 bp, Homo sapiens
caggaaagtatcttg

SEQ ID NO: 583307 - DNA, 15 bp, Homo sapiens
ccaggaaagtatctt

SEQ ID NO: 583308 - DNA, 15 bp, Homo sapiens
accaggaaagtatct

SEQ ID NO: 583309 - DNA, 15 bp, Homo sapiens
gaccaggaaagtatc

SEQ ID NO: 583310 - DNA, 15 bp, Homo sapiens
ggaccaggaaagtat

SEQ ID NO: 583311 - DNA, 15 bp, Homo sapiens
gggaccaggaaagta

SEQ ID NO: 583312 - DNA, 15 bp, Homo sapiens
tgggaccaggaaagt

SEQ ID NO: 583313 - DNA, 15 bp, Homo sapiens
ctgggaccaggaaag

SEQ ID NO: 583314 - DNA, 15 bp, Homo sapiens
tctgggaccaggaaa

SEQ ID NO: 583315 - DNA, 15 bp, Homo sapiens
atctgggaccaggaa

SEQ ID NO: 583316 - DNA, 15 bp, Homo sapiens
tatctgggaccagga

SEQ ID NO: 583317 - DNA, 15 bp, Homo sapiens
ctatctgggaccagg

SEQ ID NO: 583318 - DNA, 15 bp, Homo sapiens
cctatctgggaccag

SEQ ID NO: 583319 - DNA, 15 bp, Homo sapiens
gtgctatagtcccac

SEQ ID NO: 583320 - DNA, 15 bp, Homo sapiens
cgtgctatagtccca

SEQ ID NO: 583321 - DNA, 15 bp, Homo sapiens
acgtgctatagtccc

SEQ ID NO: 583322 - DNA, 15 bp, Homo sapiens
cacgtgctatagtcc

SEQ ID NO: 583323 - DNA, 15 bp, Homo sapiens
ccacgtgctatagtc

SEQ ID NO: 583324 - DNA, 15 bp, Homo sapiens
gccacgtgctatagt

SEQ ID NO: 583325 - DNA, 15 bp, Homo sapiens
tgccacgtgctatag

SEQ ID NO: 583326 - DNA, 15 bp, Homo sapiens
ctgccacgtgctata

SEQ ID NO: 583327 - DNA, 15 bp, Homo sapiens
tctgccacgtgctat

SEQ ID NO: 583328 - DNA, 15 bp, Homo sapiens
ctctgccacgtgcta

SEQ ID NO: 583329 - DNA, 15 bp, Homo sapiens
cctctgccacgtgct

SEQ ID NO: 583330 - DNA, 15 bp, Homo sapiens
gcctctgccacgtgc

SEQ ID NO: 583331 - DNA, 15 bp, Homo sapiens
agcctctgccacgtg

SEQ ID NO: 583332 - DNA, 15 bp, Homo sapiens
aagcctctgccacgt

SEQ ID NO: 583333 - DNA, 15 bp, Homo sapiens
taagcctctgccacg

SEQ ID NO: 583334 - DNA, 15 bp, Homo sapiens
gtaagcctctgccac

SEQ ID NO: 583335 - DNA, 15 bp, Homo sapiens
tgtaagcctctgcca

SEQ ID NO: 583336 - DNA, 15 bp, Homo sapiens
ctgtaagcctctgcc

SEQ ID NO: 583337 - DNA, 15 bp, Homo sapiens
gctgtaagcctctgc

SEQ ID NO: 583338 - DNA, 15 bp, Homo sapiens
agctgtaagcctctg

SEQ ID NO: 583339 - DNA, 15 bp, Homo sapiens
tagctgtaagcctct

SEQ ID NO: 583340 - DNA, 15 bp, Homo sapiens
ttagctgtaagcctc

SEQ ID NO: 583341 - DNA, 15 bp, Homo sapiens
cttagctgtaagcct

SEQ ID NO: 583342 - DNA, 15 bp, Homo sapiens
acttagctgtaagcc

SEQ ID NO: 583343 - DNA, 15 bp, Homo sapiens
aacttagctgtaagc

SEQ ID NO: 583344 - DNA, 15 bp, Homo sapiens
caacttagctgtaag

SEQ ID NO: 583345 - DNA, 15 bp, Homo sapiens
acaacttagctgtaa

SEQ ID NO: 583346 - DNA, 15 bp, Homo sapiens
aacaacttagctgta

SEQ ID NO: 583347 - DNA, 15 bp, Homo sapiens
gaacaacttagctgt

SEQ ID NO: 583348 - DNA, 15 bp, Homo sapiens
agaacaacttagctg

SEQ ID NO: 583349 - DNA, 15 bp, Homo sapiens
aagaacaacttagct

SEQ ID NO: 583350 - DNA, 15 bp, Homo sapiens
aaagaacaacttagc

SEQ ID NO: 583351 - DNA, 15 bp, Homo sapiens
aaaagaacaacttag

SEQ ID NO: 583352 - DNA, 15 bp, Homo sapiens
taaaagaacaactta

SEQ ID NO: 583353 - DNA, 15 bp, Homo sapiens
ctaaaagaacaactt

SEQ ID NO: 583354 - DNA, 15 bp, Homo sapiens
cctaaaagaacaact

SEQ ID NO: 583355 - DNA, 15 bp, Homo sapiens
tcctaaaagaacaac

SEQ ID NO: 583356 - DNA, 15 bp, Homo sapiens
ctcctaaaagaacaa

SEQ ID NO: 583357 - DNA, 15 bp, Homo sapiens
tctcctaaaagaaca

SEQ ID NO: 583358 - DNA, 15 bp, Homo sapiens
ttctcctaaaagaac

SEQ ID NO: 583359 - DNA, 15 bp, Homo sapiens
gttctcctaaaagaa

SEQ ID NO: 583360 - DNA, 15 bp, Homo sapiens
tgttctcctaaaaga

SEQ ID NO: 583361 - DNA, 15 bp, Homo sapiens
atgttctcctaaaag

SEQ ID NO: 583362 - DNA, 15 bp, Homo sapiens
catgttctcctaaaa

SEQ ID NO: 583363 - DNA, 15 bp, Homo sapiens
ccatgttctcctaaa

SEQ ID NO: 583364 - DNA, 15 bp, Homo sapiens
tccatgttctcctaa

SEQ ID NO: 583365 - DNA, 15 bp, Homo sapiens
gtccatgttctccta

SEQ ID NO: 583366 - DNA, 15 bp, Homo sapiens
tgtccatgttctcct

SEQ ID NO: 583367 - DNA, 15 bp, Homo sapiens
ttgtccatgttctcc

SEQ ID NO: 583368 - DNA, 15 bp, Homo sapiens
gttgtccatgttctc

SEQ ID NO: 583369 - DNA, 15 bp, Homo sapiens
agttgtccatgttct

SEQ ID NO: 583370 - DNA, 15 bp, Homo sapiens
cagttgtccatgttc

SEQ ID NO: 583371 - DNA, 15 bp, Homo sapiens
acagttgtccatgtt

SEQ ID NO: 583372 - DNA, 15 bp, Homo sapiens
gacagttgtccatgt

SEQ ID NO: 583373 - DNA, 15 bp, Homo sapiens
tgacagttgtccatg

SEQ ID NO: 583374 - DNA, 15 bp, Homo sapiens
gtgacagttgtccat

SEQ ID NO: 583375 - DNA, 15 bp, Homo sapiens
tgtgacagttgtcca

SEQ ID NO: 583376 - DNA, 15 bp, Homo sapiens
atgtgacagttgtcc

SEQ ID NO: 583377 - DNA, 15 bp, Homo sapiens
gatgtgacagttgtc

SEQ ID NO: 583378 - DNA, 15 bp, Homo sapiens
tgatgtgacagttgt

SEQ ID NO: 583379 - DNA, 15 bp, Homo sapiens
ctgatgtgacagttg

SEQ ID NO: 583380 - DNA, 15 bp, Homo sapiens
actgatgtgacagtt

SEQ ID NO: 583381 - DNA, 15 bp, Homo sapiens
cactgatgtgacagt

SEQ ID NO: 583382 - DNA, 15 bp, Homo sapiens
tcactgatgtgacag

SEQ ID NO: 583383 - DNA, 15 bp, Homo sapiens
gtcactgatgtgaca

SEQ ID NO: 583384 - DNA, 15 bp, Homo sapiens
tgtcactgatgtgac

SEQ ID NO: 583385 - DNA, 15 bp, Homo sapiens
atgtcactgatgtga

SEQ ID NO: 583386 - DNA, 15 bp, Homo sapiens
aatgtcactgatgtg

SEQ ID NO: 583387 - DNA, 15 bp, Homo sapiens
caatgtcactgatgt

SEQ ID NO: 583388 - DNA, 15 bp, Homo sapiens
tcaatgtcactgatg

SEQ ID NO: 583389 - DNA, 15 bp, Homo sapiens
atcaatgtcactgat

SEQ ID NO: 583390 - DNA, 15 bp, Homo sapiens
gatcaatgtcactga

SEQ ID NO: 583391 - DNA, 15 bp, Homo sapiens
tgatcaatgtcactg

SEQ ID NO: 583392 - DNA, 15 bp, Homo sapiens
gtgatcaatgtcact

SEQ ID NO: 583393 - DNA, 15 bp, Homo sapiens
tgtgatcaatgtcac

SEQ ID NO: 583394 - DNA, 15 bp, Homo sapiens
atgtgatcaatgtca

SEQ ID NO: 583395 - DNA, 15 bp, Homo sapiens
catgtgatcaatgtc

SEQ ID NO: 583396 - DNA, 15 bp, Homo sapiens
ccatgtgatcaatgt

SEQ ID NO: 583397 - DNA, 15 bp, Homo sapiens
cccatgtgatcaatg

SEQ ID NO: 583398 - DNA, 15 bp, Homo sapiens
gcccatgtgatcaat

SEQ ID NO: 583399 - DNA, 15 bp, Homo sapiens
tgcccatgtgatcaa

SEQ ID NO: 583400 - DNA, 15 bp, Homo sapiens
ttgcccatgtgatca

SEQ ID NO: 583401 - DNA, 15 bp, Homo sapiens
tttgcccatgtgatc

SEQ ID NO: 583402 - DNA, 15 bp, Homo sapiens
atttgcccatgtgat

SEQ ID NO: 583403 - DNA, 15 bp, Homo sapiens
gatttgcccatgtga

SEQ ID NO: 583404 - DNA, 15 bp, Homo sapiens
tgatttgcccatgtg

SEQ ID NO: 583405 - DNA, 15 bp, Homo sapiens
atgatttgcccatgt

SEQ ID NO: 583406 - DNA, 15 bp, Homo sapiens
aatgatttgcccatg

SEQ ID NO: 583407 - DNA, 15 bp, Homo sapiens
gaatgatttgcccat

SEQ ID NO: 583408 - DNA, 15 bp, Homo sapiens
agaatgatttgccca

SEQ ID NO: 583409 - DNA, 15 bp, Homo sapiens
cagaatgatttgccc

SEQ ID NO: 583410 - DNA, 15 bp, Homo sapiens
acagaatgatttgcc

SEQ ID NO: 583411 - DNA, 15 bp, Homo sapiens
aacagaatgatttgc

SEQ ID NO: 583412 - DNA, 15 bp, Homo sapiens
gaacagaatgatttg

SEQ ID NO: 583413 - DNA, 15 bp, Homo sapiens
ggaacagaatgattt

SEQ ID NO: 583414 - DNA, 15 bp, Homo sapiens
tggaacagaatgatt

SEQ ID NO: 583415 - DNA, 15 bp, Homo sapiens
atggaacagaatgat

SEQ ID NO: 583416 - DNA, 15 bp, Homo sapiens
catggaacagaatga

SEQ ID NO: 583417 - DNA, 15 bp, Homo sapiens
acatggaacagaatg

SEQ ID NO: 583418 - DNA, 15 bp, Homo sapiens
cacatggaacagaat

SEQ ID NO: 583419 - DNA, 15 bp, Homo sapiens
ccacatggaacagaa

SEQ ID NO: 583420 - DNA, 15 bp, Homo sapiens
accacatggaacaga

SEQ ID NO: 583421 - DNA, 15 bp, Homo sapiens
gaccacatggaacag

SEQ ID NO: 583422 - DNA, 15 bp, Homo sapiens
ggaccacatggaaca

SEQ ID NO: 583423 - DNA, 15 bp, Homo sapiens
gggaccacatggaac

SEQ ID NO: 583424 - DNA, 15 bp, Homo sapiens
ggggaccacatggaa

SEQ ID NO: 583425 - DNA, 15 bp, Homo sapiens
tggggaccacatgga

SEQ ID NO: 583426 - DNA, 15 bp, Homo sapiens
ttggggaccacatgg

SEQ ID NO: 583427 - DNA, 15 bp, Homo sapiens
tttggggaccacatg

SEQ ID NO: 583428 - DNA, 15 bp, Homo sapiens
ctttggggaccacat

SEQ ID NO: 583429 - DNA, 15 bp, Homo sapiens
actttggggaccaca

SEQ ID NO: 583430 - DNA, 15 bp, Homo sapiens
gactttggggaccac

SEQ ID NO: 583431 - DNA, 15 bp, Homo sapiens
agactttggggacca

SEQ ID NO: 583432 - DNA, 15 bp, Homo sapiens
gagactttggggacc

SEQ ID NO: 583433 - DNA, 15 bp, Homo sapiens
agagactttggggac

SEQ ID NO: 583434 - DNA, 15 bp, Homo sapiens
gagagactttgggga

SEQ ID NO: 583435 - DNA, 15 bp, Homo sapiens
agagagactttgggg

SEQ ID NO: 583436 - DNA, 15 bp, Homo sapiens
aagagagactttggg

SEQ ID NO: 583437 - DNA, 15 bp, Homo sapiens
taagagagactttgg

SEQ ID NO: 583438 - DNA, 15 bp, Homo sapiens
ttaagagagactttg

SEQ ID NO: 583439 - DNA, 15 bp, Homo sapiens
tttaagagagacttt

SEQ ID NO: 583440 - DNA, 15 bp, Homo sapiens
ctttaagagagactt

SEQ ID NO: 583441 - DNA, 15 bp, Homo sapiens
gctttaagagagact

SEQ ID NO: 583442 - DNA, 15 bp, Homo sapiens
ggctttaagagagac

SEQ ID NO: 583443 - DNA, 15 bp, Homo sapiens
aggctttaagagaga

SEQ ID NO: 583444 - DNA, 15 bp, Homo sapiens
aaggctttaagagag

SEQ ID NO: 583445 - DNA, 15 bp, Homo sapiens
taaggctttaagaga

SEQ ID NO: 583446 - DNA, 15 bp, Homo sapiens
gtaaggctttaagag

SEQ ID NO: 583447 - DNA, 15 bp, Homo sapiens
tgtaaggctttaaga

SEQ ID NO: 583448 - DNA, 15 bp, Homo sapiens
ctgtaaggctttaag

SEQ ID NO: 583449 - DNA, 15 bp, Homo sapiens
tctgtaaggctttaa

SEQ ID NO: 583450 - DNA, 15 bp, Homo sapiens
ttctgtaaggcttta

SEQ ID NO: 583451 - DNA, 15 bp, Homo sapiens
cttctgtaaggcttt

SEQ ID NO: 583452 - DNA, 15 bp, Homo sapiens
tcttctgtaaggctt

SEQ ID NO: 583453 - DNA, 15 bp, Homo sapiens
ttcttctgtaaggct

SEQ ID NO: 583454 - DNA, 15 bp, Homo sapiens
gttcttctgtaaggc

SEQ ID NO: 583455 - DNA, 15 bp, Homo sapiens
agttcttctgtaagg

SEQ ID NO: 583456 - DNA, 15 bp, Homo sapiens
aagttcttctgtaag

SEQ ID NO: 583457 - DNA, 15 bp, Homo sapiens
aaagttcttctgtaa

SEQ ID NO: 583458 - DNA, 15 bp, Homo sapiens
caaagttcttctgta

SEQ ID NO: 583459 - DNA, 15 bp, Homo sapiens
gcaaagttcttctgt

SEQ ID NO: 583460 - DNA, 15 bp, Homo sapiens
ggcaaagttcttctg

SEQ ID NO: 583461 - DNA, 15 bp, Homo sapiens
tggcaaagttcttct

SEQ ID NO: 583462 - DNA, 15 bp, Homo sapiens
ttggcaaagttcttc

SEQ ID NO: 583463 - DNA, 15 bp, Homo sapiens
attggcaaagttctt

SEQ ID NO: 583464 - DNA, 15 bp, Homo sapiens
gattggcaaagttct

SEQ ID NO: 583465 - DNA, 15 bp, Homo sapiens
tgattggcaaagttc

SEQ ID NO: 583466 - DNA, 15 bp, Homo sapiens
atgattggcaaagtt

SEQ ID NO: 583467 - DNA, 15 bp, Homo sapiens
aatgattggcaaagt

SEQ ID NO: 583468 - DNA, 15 bp, Homo sapiens
aaatgattggcaaag

SEQ ID NO: 583469 - DNA, 15 bp, Homo sapiens
taaatgattggcaaa

SEQ ID NO: 583470 - DNA, 15 bp, Homo sapiens
gtaaatgattggcaa

SEQ ID NO: 583471 - DNA, 15 bp, Homo sapiens
tgtaaatgattggca

SEQ ID NO: 583472 - DNA, 15 bp, Homo sapiens
atgtaaatgattggc

SEQ ID NO: 583473 - DNA, 15 bp, Homo sapiens
tatgtaaatgattgg

SEQ ID NO: 583474 - DNA, 15 bp, Homo sapiens
gtatgtaaatgattg

SEQ ID NO: 583475 - DNA, 15 bp, Homo sapiens
agtatgtaaatgatt

SEQ ID NO: 583476 - DNA, 15 bp, Homo sapiens
aagtatgtaaatgat

SEQ ID NO: 583477 - DNA, 15 bp, Homo sapiens
gaagtatgtaaatga

SEQ ID NO: 583478 - DNA, 15 bp, Homo sapiens
tgaagtatgtaaatg

SEQ ID NO: 583479 - DNA, 15 bp, Homo sapiens
ctgaagtatgtaaat

SEQ ID NO: 583480 - DNA, 15 bp, Homo sapiens
cctgaagtatgtaaa

SEQ ID NO: 583481 - DNA, 15 bp, Homo sapiens
tcctgaagtatgtaa

SEQ ID NO: 583482 - DNA, 15 bp, Homo sapiens
atcctgaagtatgta

SEQ ID NO: 583483 - DNA, 15 bp, Homo sapiens
catcctgaagtatgt

SEQ ID NO: 583484 - DNA, 15 bp, Homo sapiens
ccatcctgaagtatg

SEQ ID NO: 583485 - DNA, 15 bp, Homo sapiens
gccatcctgaagtat

SEQ ID NO: 583486 - DNA, 15 bp, Homo sapiens
agccatcctgaagta

SEQ ID NO: 583487 - DNA, 15 bp, Homo sapiens
aagccatcctgaagt

SEQ ID NO: 583488 - DNA, 15 bp, Homo sapiens
caagccatcctgaag

SEQ ID NO: 583489 - DNA, 15 bp, Homo sapiens
ccaagccatcctgaa

SEQ ID NO: 583490 - DNA, 15 bp, Homo sapiens
cccaagccatcctga

SEQ ID NO: 583491 - DNA, 15 bp, Homo sapiens
tcccaagccatcctg

SEQ ID NO: 583492 - DNA, 15 bp, Homo sapiens
atcccaagccatcct

SEQ ID NO: 583493 - DNA, 15 bp, Homo sapiens
catcccaagccatcc

SEQ ID NO: 583494 - DNA, 15 bp, Homo sapiens
gcatcccaagccatc

SEQ ID NO: 583495 - DNA, 15 bp, Homo sapiens
ggcatcccaagccat

SEQ ID NO: 583496 - DNA, 15 bp, Homo sapiens
tggcatcccaagcca

SEQ ID NO: 583497 - DNA, 15 bp, Homo sapiens
atggcatcccaagcc

SEQ ID NO: 583498 - DNA, 15 bp, Homo sapiens
catggcatcccaagc

SEQ ID NO: 583499 - DNA, 15 bp, Homo sapiens
ccatggcatcccaag

SEQ ID NO: 583500 - DNA, 15 bp, Homo sapiens
accatggcatcccaa

SEQ ID NO: 583501 - DNA, 15 bp, Homo sapiens
caccatggcatccca

SEQ ID NO: 583502 - DNA, 15 bp, Homo sapiens
acaccatggcatccc

SEQ ID NO: 583503 - DNA, 15 bp, Homo sapiens
tacaccatggcatcc

SEQ ID NO: 583504 - DNA, 15 bp, Homo sapiens
atacaccatggcatc

SEQ ID NO: 583505 - DNA, 15 bp, Homo sapiens
tatacaccatggcat

SEQ ID NO: 583506 - DNA, 15 bp, Homo sapiens
ttatacaccatggca

SEQ ID NO: 583507 - DNA, 15 bp, Homo sapiens
attatacaccatggc

SEQ ID NO: 583508 - DNA, 15 bp, Homo sapiens
tattatacaccatgg

SEQ ID NO: 583509 - DNA, 15 bp, Homo sapiens
gtattatacaccatg

SEQ ID NO: 583510 - DNA, 15 bp, Homo sapiens
tgtattatacaccat

SEQ ID NO: 583511 - DNA, 15 bp, Homo sapiens
ttgtattatacacca

SEQ ID NO: 583512 - DNA, 15 bp, Homo sapiens
gttgtattatacacc

SEQ ID NO: 583513 - DNA, 15 bp, Homo sapiens
tgttgtattatacac

SEQ ID NO: 583514 - DNA, 15 bp, Homo sapiens
ttgttgtattataca

SEQ ID NO: 583515 - DNA, 15 bp, Homo sapiens
cttgttgtattatac

SEQ ID NO: 583516 - DNA, 15 bp, Homo sapiens
acttgttgtattata

SEQ ID NO: 583517 - DNA, 15 bp, Homo sapiens
cacttgttgtattat

SEQ ID NO: 583518 - DNA, 15 bp, Homo sapiens
tcacttgttgtatta

SEQ ID NO: 583519 - DNA, 15 bp, Homo sapiens
ctcacttgttgtatt

SEQ ID NO: 583520 - DNA, 15 bp, Homo sapiens
tctcacttgttgtat

SEQ ID NO: 583521 - DNA, 15 bp, Homo sapiens
ctctcacttgttgta

SEQ ID NO: 583522 - DNA, 15 bp, Homo sapiens
cctctcacttgttgt

SEQ ID NO: 583523 - DNA, 15 bp, Homo sapiens
acctctcacttgttg

SEQ ID NO: 583524 - DNA, 15 bp, Homo sapiens
cacctctcacttgtt

SEQ ID NO: 583525 - DNA, 15 bp, Homo sapiens
acacctctcacttgt

SEQ ID NO: 583526 - DNA, 15 bp, Homo sapiens
cacacctctcacttg

SEQ ID NO: 583527 - DNA, 15 bp, Homo sapiens
acacacctctcactt

SEQ ID NO: 583528 - DNA, 15 bp, Homo sapiens
gacacacctctcact

SEQ ID NO: 583529 - DNA, 15 bp, Homo sapiens
agacacacctctcac

SEQ ID NO: 583530 - DNA, 15 bp, Homo sapiens
aagacacacctctca

SEQ ID NO: 583531 - DNA, 15 bp, Homo sapiens
aaagacacacctctc

SEQ ID NO: 583532 - DNA, 15 bp, Homo sapiens
aaaagacacacctct

SEQ ID NO: 583533 - DNA, 15 bp, Homo sapiens
aaaaagacacacctc

SEQ ID NO: 583534 - DNA, 15 bp, Homo sapiens
taaaaagacacacct

SEQ ID NO: 583535 - DNA, 15 bp, Homo sapiens
ataaaaagacacacc

SEQ ID NO: 583536 - DNA, 15 bp, Homo sapiens
cataaaaagacacac

SEQ ID NO: 583537 - DNA, 15 bp, Homo sapiens
gcataaaaagacaca

SEQ ID NO: 583538 - DNA, 15 bp, Homo sapiens
agcataaaaagacac

SEQ ID NO: 583539 - DNA, 15 bp, Homo sapiens
tagcataaaaagaca

SEQ ID NO: 583540 - DNA, 15 bp, Homo sapiens
atagcataaaaagac

SEQ ID NO: 583541 - DNA, 15 bp, Homo sapiens
catagcataaaaaga

SEQ ID NO: 583542 - DNA, 15 bp, Homo sapiens
ccatagcataaaaag

SEQ ID NO: 583543 - DNA, 15 bp, Homo sapiens
accatagcataaaaa

SEQ ID NO: 583544 - DNA, 15 bp, Homo sapiens
aaccatagcataaaa

SEQ ID NO: 583545 - DNA, 15 bp, Homo sapiens
caaccatagcataaa

SEQ ID NO: 583546 - DNA, 15 bp, Homo sapiens
gcaaccatagcataa

SEQ ID NO: 583547 - DNA, 15 bp, Homo sapiens
agcaaccatagcata

SEQ ID NO: 583548 - DNA, 15 bp, Homo sapiens
cagcaaccatagcat

SEQ ID NO: 583549 - DNA, 15 bp, Homo sapiens
tcagcaaccatagca

SEQ ID NO: 583550 - DNA, 15 bp, Homo sapiens
atcagcaaccatagc

SEQ ID NO: 583551 - DNA, 15 bp, Homo sapiens
aatcagcaaccatag

SEQ ID NO: 583552 - DNA, 15 bp, Homo sapiens
caatcagcaaccata

SEQ ID NO: 583553 - DNA, 15 bp, Homo sapiens
tcaatcagcaaccat

SEQ ID NO: 583554 - DNA, 15 bp, Homo sapiens
atcaatcagcaacca

SEQ ID NO: 583555 - DNA, 15 bp, Homo sapiens
catcaatcagcaacc

SEQ ID NO: 583556 - DNA, 15 bp, Homo sapiens
ccatcaatcagcaac

SEQ ID NO: 583557 - DNA, 15 bp, Homo sapiens
tccatcaatcagcaa

SEQ ID NO: 583558 - DNA, 15 bp, Homo sapiens
ttccatcaatcagca

SEQ ID NO: 583559 - DNA, 15 bp, Homo sapiens
cttccatcaatcagc

SEQ ID NO: 583560 - DNA, 15 bp, Homo sapiens
gcttccatcaatcag

SEQ ID NO: 583561 - DNA, 15 bp, Homo sapiens
ggcttccatcaatca

SEQ ID NO: 583562 - DNA, 15 bp, Homo sapiens
cggcttccatcaatc

SEQ ID NO: 583563 - DNA, 15 bp, Homo sapiens
gcggcttccatcaat

SEQ ID NO: 583564 - DNA, 15 bp, Homo sapiens
tgcggcttccatcaa

SEQ ID NO: 583565 - DNA, 15 bp, Homo sapiens
atgcggcttccatca

SEQ ID NO: 583566 - DNA, 15 bp, Homo sapiens
tatgcggcttccatc

SEQ ID NO: 583567 - DNA, 15 bp, Homo sapiens
ttatgcggcttccat

SEQ ID NO: 583568 - DNA, 15 bp, Homo sapiens
tttatgcggcttcca

SEQ ID NO: 583569 - DNA, 15 bp, Homo sapiens
atttatgcggcttcc

SEQ ID NO: 583570 - DNA, 15 bp, Homo sapiens
tatttatgcggcttc

SEQ ID NO: 583571 - DNA, 15 bp, Homo sapiens
gtatttatgcggctt

SEQ ID NO: 583572 - DNA, 15 bp, Homo sapiens
tgtatttatgcggct

SEQ ID NO: 583573 - DNA, 15 bp, Homo sapiens
ttgtatttatgcggc

SEQ ID NO: 583574 - DNA, 15 bp, Homo sapiens
tttgtatttatgcgg

SEQ ID NO: 583575 - DNA, 15 bp, Homo sapiens
atttgtatttatgcg

SEQ ID NO: 583576 - DNA, 15 bp, Homo sapiens
catttgtatttatgc

SEQ ID NO: 583577 - DNA, 15 bp, Homo sapiens
ccatttgtatttatg

SEQ ID NO: 583578 - DNA, 15 bp, Homo sapiens
tccatttgtatttat

SEQ ID NO: 583579 - DNA, 15 bp, Homo sapiens
ttccatttgtattta

SEQ ID NO: 583580 - DNA, 15 bp, Homo sapiens
tttccatttgtattt

SEQ ID NO: 583581 - DNA, 15 bp, Homo sapiens
gtttccatttgtatt

SEQ ID NO: 583582 - DNA, 15 bp, Homo sapiens
ggtttccatttgtat

SEQ ID NO: 583583 - DNA, 15 bp, Homo sapiens
aggtttccatttgta

SEQ ID NO: 583584 - DNA, 15 bp, Homo sapiens
caggtttccatttgt

SEQ ID NO: 583585 - DNA, 15 bp, Homo sapiens
tcaggtttccatttg

SEQ ID NO: 583586 - DNA, 15 bp, Homo sapiens
gtcaggtttccattt

SEQ ID NO: 583587 - DNA, 15 bp, Homo sapiens
agtcaggtttccatt

SEQ ID NO: 583588 - DNA, 15 bp, Homo sapiens
tagtcaggtttccat

SEQ ID NO: 583589 - DNA, 15 bp, Homo sapiens
ttagtcaggtttcca

SEQ ID NO: 583590 - DNA, 15 bp, Homo sapiens
tttagtcaggtttcc

SEQ ID NO: 583591 - DNA, 15 bp, Homo sapiens
ttttagtcaggtttc

SEQ ID NO: 583592 - DNA, 15 bp, Homo sapiens
tttttagtcaggttt

SEQ ID NO: 583593 - DNA, 15 bp, Homo sapiens
atttttagtcaggtt

SEQ ID NO: 583594 - DNA, 15 bp, Homo sapiens
ggaagactggtcatc

SEQ ID NO: 583595 - DNA, 15 bp, Homo sapiens
tggaagactggtcat

SEQ ID NO: 583596 - DNA, 15 bp, Homo sapiens
atggaagactggtca

SEQ ID NO: 583597 - DNA, 15 bp, Homo sapiens
tatggaagactggtc

SEQ ID NO: 583598 - DNA, 15 bp, Homo sapiens
atatggaagactggt

SEQ ID NO: 583599 - DNA, 15 bp, Homo sapiens
aatatggaagactgg

SEQ ID NO: 583600 - DNA, 15 bp, Homo sapiens
taatatggaagactg

SEQ ID NO: 583601 - DNA, 15 bp, Homo sapiens
gtaatatggaagact

SEQ ID NO: 583602 - DNA, 15 bp, Homo sapiens
agtaatatggaagac

SEQ ID NO: 583603 - DNA, 15 bp, Homo sapiens
cagtaatatggaaga

SEQ ID NO: 583604 - DNA, 15 bp, Homo sapiens
tcagtaatatggaag

SEQ ID NO: 583605 - DNA, 15 bp, Homo sapiens
gtcagtaatatggaa

SEQ ID NO: 583606 - DNA, 15 bp, Homo sapiens
agtcagtaatatgga

SEQ ID NO: 583607 - DNA, 15 bp, Homo sapiens
cagtcagtaatatgg

SEQ ID NO: 583608 - DNA, 15 bp, Homo sapiens
ccagtcagtaatatg

SEQ ID NO: 583609 - DNA, 15 bp, Homo sapiens
cccagtcagtaatat

SEQ ID NO: 583610 - DNA, 15 bp, Homo sapiens
acccagtcagtaata

SEQ ID NO: 583611 - DNA, 15 bp, Homo sapiens
aacccagtcagtaat

SEQ ID NO: 583612 - DNA, 15 bp, Homo sapiens
gaacccagtcagtaa

SEQ ID NO: 583613 - DNA, 15 bp, Homo sapiens
tgaacccagtcagta

SEQ ID NO: 583614 - DNA, 15 bp, Homo sapiens
gtgaacccagtcagt

SEQ ID NO: 583615 - DNA, 15 bp, Homo sapiens
agtgaacccagtcag

SEQ ID NO: 583616 - DNA, 15 bp, Homo sapiens
cagtgaacccagtca

SEQ ID NO: 583617 - DNA, 15 bp, Homo sapiens
tcagtgaacccagtc

SEQ ID NO: 583618 - DNA, 15 bp, Homo sapiens
ttcagtgaacccagt

SEQ ID NO: 583619 - DNA, 15 bp, Homo sapiens
cttcagtgaacccag

SEQ ID NO: 583620 - DNA, 15 bp, Homo sapiens
gcttcagtgaaccca

SEQ ID NO: 583621 - DNA, 15 bp, Homo sapiens
tgcttcagtgaaccc

SEQ ID NO: 583622 - DNA, 15 bp, Homo sapiens
ttgcttcagtgaacc

SEQ ID NO: 583623 - DNA, 15 bp, Homo sapiens
gttgcttcagtgaac

SEQ ID NO: 583624 - DNA, 15 bp, Homo sapiens
agttgcttcagtgaa

SEQ ID NO: 583625 - DNA, 15 bp, Homo sapiens
gagttgcttcagtga

SEQ ID NO: 583626 - DNA, 15 bp, Homo sapiens
tgagttgcttcagtg

SEQ ID NO: 583627 - DNA, 15 bp, Homo sapiens
ttgagttgcttcagt

SEQ ID NO: 583628 - DNA, 15 bp, Homo sapiens
tttgagttgcttcag

SEQ ID NO: 583629 - DNA, 15 bp, Homo sapiens
ctttgagttgcttca

SEQ ID NO: 583630 - DNA, 15 bp, Homo sapiens
tctttgagttgcttc

SEQ ID NO: 583631 - DNA, 15 bp, Homo sapiens
gtctttgagttgctt

SEQ ID NO: 583632 - DNA, 15 bp, Homo sapiens
tgtctttgagttgct

SEQ ID NO: 583633 - DNA, 15 bp, Homo sapiens
atgtctttgagttgc

SEQ ID NO: 583634 - DNA, 15 bp, Homo sapiens
aatgtctttgagttg

SEQ ID NO: 583635 - DNA, 15 bp, Homo sapiens
taatgtctttgagtt

SEQ ID NO: 583636 - DNA, 15 bp, Homo sapiens
ataatgtctttgagt

SEQ ID NO: 583637 - DNA, 15 bp, Homo sapiens
cataatgtctttgag

SEQ ID NO: 583638 - DNA, 15 bp, Homo sapiens
ccataatgtctttga

SEQ ID NO: 583639 - DNA, 15 bp, Homo sapiens
accataatgtctttg

SEQ ID NO: 583640 - DNA, 15 bp, Homo sapiens
gaccataatgtcttt

SEQ ID NO: 583641 - DNA, 15 bp, Homo sapiens
agaccataatgtctt

SEQ ID NO: 583642 - DNA, 15 bp, Homo sapiens
aagaccataatgtct

SEQ ID NO: 583643 - DNA, 15 bp, Homo sapiens
gaagaccataatgtc

SEQ ID NO: 583644 - DNA, 15 bp, Homo sapiens
agaagaccataatgt

SEQ ID NO: 583645 - DNA, 15 bp, Homo sapiens
aagaagaccataatg

SEQ ID NO: 583646 - DNA, 15 bp, Homo sapiens
taagaagaccataat

SEQ ID NO: 583647 - DNA, 15 bp, Homo sapiens
gtaagaagaccataa

SEQ ID NO: 583648 - DNA, 15 bp, Homo sapiens
ggtaagaagaccata

SEQ ID NO: 583649 - DNA, 15 bp, Homo sapiens
tggtaagaagaccat

SEQ ID NO: 583650 - DNA, 15 bp, Homo sapiens
ctggtaagaagacca

SEQ ID NO: 583651 - DNA, 15 bp, Homo sapiens
actggtaagaagacc

SEQ ID NO: 583652 - DNA, 15 bp, Homo sapiens
aactggtaagaagac

SEQ ID NO: 583653 - DNA, 15 bp, Homo sapiens
caactggtaagaaga

SEQ ID NO: 583654 - DNA, 15 bp, Homo sapiens
acaactggtaagaag

SEQ ID NO: 583655 - DNA, 15 bp, Homo sapiens
tacaactggtaagaa

SEQ ID NO: 583656 - DNA, 15 bp, Homo sapiens
atacaactggtaaga

SEQ ID NO: 583657 - DNA, 15 bp, Homo sapiens
gatacaactggtaag

SEQ ID NO: 583658 - DNA, 15 bp, Homo sapiens
tgatacaactggtaa

SEQ ID NO: 583659 - DNA, 15 bp, Homo sapiens
gtgatacaactggta

SEQ ID NO: 583660 - DNA, 15 bp, Homo sapiens
tgtgatacaactggt

SEQ ID NO: 583661 - DNA, 15 bp, Homo sapiens
ctgtgatacaactgg

SEQ ID NO: 583662 - DNA, 15 bp, Homo sapiens
tctgtgatacaactg

SEQ ID NO: 583663 - DNA, 15 bp, Homo sapiens
ttctgtgatacaact

SEQ ID NO: 583664 - DNA, 15 bp, Homo sapiens
cttctgtgatacaac

SEQ ID NO: 583665 - DNA, 15 bp, Homo sapiens
tcttctgtgatacaa

SEQ ID NO: 583666 - DNA, 15 bp, Homo sapiens
ttcttctgtgataca

SEQ ID NO: 583667 - DNA, 15 bp, Homo sapiens
attcttctgtgatac

SEQ ID NO: 583668 - DNA, 15 bp, Homo sapiens
aattcttctgtgata

SEQ ID NO: 583669 - DNA, 15 bp, Homo sapiens
aaattcttctgtgat

SEQ ID NO: 583670 - DNA, 15 bp, Homo sapiens
taaattcttctgtga

SEQ ID NO: 583671 - DNA, 15 bp, Homo sapiens
ctaaattcttctgtg

SEQ ID NO: 583672 - DNA, 15 bp, Homo sapiens
gctaaattcttctgt

SEQ ID NO: 583673 - DNA, 15 bp, Homo sapiens
ggctaaattcttctg

SEQ ID NO: 583674 - DNA, 15 bp, Homo sapiens
aggctaaattcttct

SEQ ID NO: 583675 - DNA, 15 bp, Homo sapiens
aaggctaaattcttc

SEQ ID NO: 583676 - DNA, 15 bp, Homo sapiens
aaaggctaaattctt

SEQ ID NO: 583677 - DNA, 15 bp, Homo sapiens
caaaggctaaattct

SEQ ID NO: 583678 - DNA, 15 bp, Homo sapiens
gcaaaggctaaattc

SEQ ID NO: 583679 - DNA, 15 bp, Homo sapiens
agcaaaggctaaatt

SEQ ID NO: 583680 - DNA, 15 bp, Homo sapiens
aagcaaaggctaaat

SEQ ID NO: 583681 - DNA, 15 bp, Homo sapiens
caagcaaaggctaaa

SEQ ID NO: 583682 - DNA, 15 bp, Homo sapiens
acaagcaaaggctaa

SEQ ID NO: 583683 - DNA, 15 bp, Homo sapiens
cacaagcaaaggcta

SEQ ID NO: 583684 - DNA, 15 bp, Homo sapiens
acacaagcaaaggct

SEQ ID NO: 583685 - DNA, 15 bp, Homo sapiens
cacacaagcaaaggc

SEQ ID NO: 583686 - DNA, 15 bp, Homo sapiens
acacacaagcaaagg

SEQ ID NO: 583687 - DNA, 15 bp, Homo sapiens
aacacacaagcaaag

SEQ ID NO: 583688 - DNA, 15 bp, Homo sapiens
gaacacacaagcaaa

SEQ ID NO: 583689 - DNA, 15 bp, Homo sapiens
agaacacacaagcaa

SEQ ID NO: 583690 - DNA, 15 bp, Homo sapiens
tagaacacacaagca

SEQ ID NO: 583691 - DNA, 15 bp, Homo sapiens
atagaacacacaagc

SEQ ID NO: 583692 - DNA, 15 bp, Homo sapiens
catagaacacacaag

SEQ ID NO: 583693 - DNA, 15 bp, Homo sapiens
acatagaacacacaa

SEQ ID NO: 583694 - DNA, 15 bp, Homo sapiens
gacatagaacacaca

SEQ ID NO: 583695 - DNA, 15 bp, Homo sapiens
agacatagaacacac

SEQ ID NO: 583696 - DNA, 15 bp, Homo sapiens
aagacatagaacaca

SEQ ID NO: 583697 - DNA, 15 bp, Homo sapiens
gaagacatagaacac

SEQ ID NO: 583698 - DNA, 15 bp, Homo sapiens
tgaagacatagaaca

SEQ ID NO: 583699 - DNA, 15 bp, Homo sapiens
gtgaagacatagaac

SEQ ID NO: 583700 - DNA, 15 bp, Homo sapiens
agtgaagacatagaa

SEQ ID NO: 583701 - DNA, 15 bp, Homo sapiens
cagtgaagacataga

SEQ ID NO: 583702 - DNA, 15 bp, Homo sapiens
acagtgaagacatag

SEQ ID NO: 583703 - DNA, 15 bp, Homo sapiens
tacagtgaagacata

SEQ ID NO: 583704 - DNA, 15 bp, Homo sapiens
atacagtgaagacat

SEQ ID NO: 583705 - DNA, 15 bp, Homo sapiens
tatacagtgaagaca

SEQ ID NO: 583706 - DNA, 15 bp, Homo sapiens
ctatacagtgaagac

SEQ ID NO: 583707 - DNA, 15 bp, Homo sapiens
cctatacagtgaaga

SEQ ID NO: 583708 - DNA, 15 bp, Homo sapiens
gcctatacagtgaag

SEQ ID NO: 583709 - DNA, 15 bp, Homo sapiens
ggcctatacagtgaa

SEQ ID NO: 583710 - DNA, 15 bp, Homo sapiens
gggcctatacagtga

SEQ ID NO: 583711 - DNA, 15 bp, Homo sapiens
agggcctatacagtg

SEQ ID NO: 583712 - DNA, 15 bp, Homo sapiens
gagggcctatacagt

SEQ ID NO: 583713 - DNA, 15 bp, Homo sapiens
agagggcctatacag

SEQ ID NO: 583714 - DNA, 15 bp, Homo sapiens
cagagggcctataca

SEQ ID NO: 583715 - DNA, 15 bp, Homo sapiens
acagagggcctatac

SEQ ID NO: 583716 - DNA, 15 bp, Homo sapiens
gacagagggcctata

SEQ ID NO: 583717 - DNA, 15 bp, Homo sapiens
tgacagagggcctat

SEQ ID NO: 583718 - DNA, 15 bp, Homo sapiens
atgacagagggccta

SEQ ID NO: 583719 - DNA, 15 bp, Homo sapiens
aatgacagagggcct

SEQ ID NO: 583720 - DNA, 15 bp, Homo sapiens
gaatgacagagggcc

SEQ ID NO: 583721 - DNA, 15 bp, Homo sapiens
agaatgacagagggc

SEQ ID NO: 583722 - DNA, 15 bp, Homo sapiens
aagaatgacagaggg

SEQ ID NO: 583723 - DNA, 15 bp, Homo sapiens
taagaatgacagagg

SEQ ID NO: 583724 - DNA, 15 bp, Homo sapiens
ctaagaatgacagag

SEQ ID NO: 583725 - DNA, 15 bp, Homo sapiens
tctaagaatgacaga

SEQ ID NO: 583726 - DNA, 15 bp, Homo sapiens
ctctaagaatgacag

SEQ ID NO: 583727 - DNA, 15 bp, Homo sapiens
gctctaagaatgaca

SEQ ID NO: 583728 - DNA, 15 bp, Homo sapiens
ggctctaagaatgac

SEQ ID NO: 583729 - DNA, 15 bp, Homo sapiens
aggctctaagaatga

SEQ ID NO: 583730 - DNA, 15 bp, Homo sapiens
aaggctctaagaatg

SEQ ID NO: 583731 - DNA, 15 bp, Homo sapiens
taaggctctaagaat

SEQ ID NO: 583732 - DNA, 15 bp, Homo sapiens
ttaaggctctaagaa

SEQ ID NO: 583733 - DNA, 15 bp, Homo sapiens
tttaaggctctaaga

SEQ ID NO: 583734 - DNA, 15 bp, Homo sapiens
gtttaaggctctaag

SEQ ID NO: 583735 - DNA, 15 bp, Homo sapiens
cgtttaaggctctaa

SEQ ID NO: 583736 - DNA, 15 bp, Homo sapiens
acgtttaaggctcta

SEQ ID NO: 583737 - DNA, 15 bp, Homo sapiens
aacgtttaaggctct

SEQ ID NO: 583738 - DNA, 15 bp, Homo sapiens
caacgtttaaggctc

SEQ ID NO: 583739 - DNA, 15 bp, Homo sapiens
tcaacgtttaaggct

SEQ ID NO: 583740 - DNA, 15 bp, Homo sapiens
ctcaacgtttaaggc

SEQ ID NO: 583741 - DNA, 15 bp, Homo sapiens
tctcaacgtttaagg

SEQ ID NO: 583742 - DNA, 15 bp, Homo sapiens
ttctcaacgtttaag

SEQ ID NO: 583743 - DNA, 15 bp, Homo sapiens
cttctcaacgtttaa

SEQ ID NO: 583744 - DNA, 15 bp, Homo sapiens
gcttctcaacgttta

SEQ ID NO: 583745 - DNA, 15 bp, Homo sapiens
agcttctcaacgttt

SEQ ID NO: 583746 - DNA, 15 bp, Homo sapiens
aagcttctcaacgtt

SEQ ID NO: 583747 - DNA, 15 bp, Homo sapiens
taagcttctcaacgt

SEQ ID NO: 583748 - DNA, 15 bp, Homo sapiens
ttaagcttctcaacg

SEQ ID NO: 583749 - DNA, 15 bp, Homo sapiens
tttaagcttctcaac

SEQ ID NO: 583750 - DNA, 15 bp, Homo sapiens
ttttaagcttctcaa

SEQ ID NO: 583751 - DNA, 15 bp, Homo sapiens
gttttaagcttctca

SEQ ID NO: 583752 - DNA, 15 bp, Homo sapiens
tgttttaagcttctc

SEQ ID NO: 583753 - DNA, 15 bp, Homo sapiens
gtgttttaagcttct

SEQ ID NO: 583754 - DNA, 15 bp, Homo sapiens
ggtgttttaagcttc

SEQ ID NO: 583755 - DNA, 15 bp, Homo sapiens
tggtgttttaagctt

SEQ ID NO: 583756 - DNA, 15 bp, Homo sapiens
atggtgttttaagct

SEQ ID NO: 583757 - DNA, 15 bp, Homo sapiens
aatggtgttttaagc

SEQ ID NO: 583758 - DNA, 15 bp, Homo sapiens
aaatggtgttttaag

SEQ ID NO: 583759 - DNA, 15 bp, Homo sapiens
gaaatggtgttttaa

SEQ ID NO: 583760 - DNA, 15 bp, Homo sapiens
agaaatggtgtttta

SEQ ID NO: 583761 - DNA, 15 bp, Homo sapiens
cagaaatggtgtttt

SEQ ID NO: 583762 - DNA, 15 bp, Homo sapiens
gcagaaatggtgttt

SEQ ID NO: 583763 - DNA, 15 bp, Homo sapiens
agcagaaatggtgtt

SEQ ID NO: 583764 - DNA, 15 bp, Homo sapiens
aagcagaaatggtgt

SEQ ID NO: 583765 - DNA, 15 bp, Homo sapiens
aaagcagaaatggtg

SEQ ID NO: 583766 - DNA, 15 bp, Homo sapiens
gaaagcagaaatggt

SEQ ID NO: 583767 - DNA, 15 bp, Homo sapiens
agaaagcagaaatgg

SEQ ID NO: 583768 - DNA, 15 bp, Homo sapiens
cagaaagcagaaatg

SEQ ID NO: 583769 - DNA, 15 bp, Homo sapiens
gcagaaagcagaaat

SEQ ID NO: 583770 - DNA, 15 bp, Homo sapiens
agcagaaagcagaaa

SEQ ID NO: 583771 - DNA, 15 bp, Homo sapiens
cagcagaaagcagaa

SEQ ID NO: 583772 - DNA, 15 bp, Homo sapiens
tcagcagaaagcaga

SEQ ID NO: 583773 - DNA, 15 bp, Homo sapiens
ttcagcagaaagcag

SEQ ID NO: 583774 - DNA, 15 bp, Homo sapiens
tttcagcagaaagca

SEQ ID NO: 583775 - DNA, 15 bp, Homo sapiens
ctttcagcagaaagc

SEQ ID NO: 583776 - DNA, 15 bp, Homo sapiens
cctttcagcagaaag

SEQ ID NO: 583777 - DNA, 15 bp, Homo sapiens
ccctttcagcagaaa

SEQ ID NO: 583778 - DNA, 15 bp, Homo sapiens
accctttcagcagaa

SEQ ID NO: 583779 - DNA, 15 bp, Homo sapiens
taccctttcagcaga

SEQ ID NO: 583780 - DNA, 15 bp, Homo sapiens
ttaccctttcagcag

SEQ ID NO: 583781 - DNA, 15 bp, Homo sapiens
gttaccctttcagca

SEQ ID NO: 583782 - DNA, 15 bp, Homo sapiens
ggttaccctttcagc

SEQ ID NO: 583783 - DNA, 15 bp, Homo sapiens
gggttaccctttcag

SEQ ID NO: 583784 - DNA, 15 bp, Homo sapiens
agggttaccctttca

SEQ ID NO: 583785 - DNA, 15 bp, Homo sapiens
aagggttaccctttc

SEQ ID NO: 583786 - DNA, 15 bp, Homo sapiens
aaagggttacccttt

SEQ ID NO: 583787 - DNA, 15 bp, Homo sapiens
gaaagggttaccctt

SEQ ID NO: 583788 - DNA, 15 bp, Homo sapiens
agaaagggttaccct

SEQ ID NO: 583789 - DNA, 15 bp, Homo sapiens
gagaaagggttaccc

SEQ ID NO: 583790 - DNA, 15 bp, Homo sapiens
tgagaaagggttacc

SEQ ID NO: 583791 - DNA, 15 bp, Homo sapiens
atgagaaagggttac

SEQ ID NO: 583792 - DNA, 15 bp, Homo sapiens
gatgagaaagggtta

SEQ ID NO: 583793 - DNA, 15 bp, Homo sapiens
agatgagaaagggtt

SEQ ID NO: 583794 - DNA, 15 bp, Homo sapiens
gagatgagaaagggt

SEQ ID NO: 583795 - DNA, 15 bp, Homo sapiens
ggagatgagaaaggg

SEQ ID NO: 583796 - DNA, 15 bp, Homo sapiens
cggagatgagaaagg

SEQ ID NO: 583797 - DNA, 15 bp, Homo sapiens
acggagatgagaaag

SEQ ID NO: 583798 - DNA, 15 bp, Homo sapiens
aacggagatgagaaa

SEQ ID NO: 583799 - DNA, 15 bp, Homo sapiens
aaacggagatgagaa

SEQ ID NO: 583800 - DNA, 15 bp, Homo sapiens
caaacggagatgaga

SEQ ID NO: 583801 - DNA, 15 bp, Homo sapiens
acaaacggagatgag

SEQ ID NO: 583802 - DNA, 15 bp, Homo sapiens
cacaaacggagatga

SEQ ID NO: 583803 - DNA, 15 bp, Homo sapiens
tcacaaacggagatg

SEQ ID NO: 583804 - DNA, 15 bp, Homo sapiens
ctcacaaacggagat

SEQ ID NO: 583805 - DNA, 15 bp, Homo sapiens
tctcacaaacggaga

SEQ ID NO: 583806 - DNA, 15 bp, Homo sapiens
ctctcacaaacggag

SEQ ID NO: 583807 - DNA, 15 bp, Homo sapiens
tctctcacaaacgga

SEQ ID NO: 583808 - DNA, 15 bp, Homo sapiens
gtctctcacaaacgg

SEQ ID NO: 583809 - DNA, 15 bp, Homo sapiens
agtctctcacaaacg

SEQ ID NO: 583810 - DNA, 15 bp, Homo sapiens
gagtctctcacaaac

SEQ ID NO: 583811 - DNA, 15 bp, Homo sapiens
agagtctctcacaaa

SEQ ID NO: 583812 - DNA, 15 bp, Homo sapiens
cagagtctctcacaa

SEQ ID NO: 583813 - DNA, 15 bp, Homo sapiens
acagagtctctcaca

SEQ ID NO: 583814 - DNA, 15 bp, Homo sapiens
gacagagtctctcac

SEQ ID NO: 583815 - DNA, 15 bp, Homo sapiens
cgacagagtctctca

SEQ ID NO: 583816 - DNA, 15 bp, Homo sapiens
acgacagagtctctc

SEQ ID NO: 583817 - DNA, 15 bp, Homo sapiens
gacgacagagtctct

SEQ ID NO: 583818 - DNA, 15 bp, Homo sapiens
tgacgacagagtctc

SEQ ID NO: 583819 - DNA, 15 bp, Homo sapiens
ctgacgacagagtct

SEQ ID NO: 583820 - DNA, 15 bp, Homo sapiens
actgacgacagagtc

SEQ ID NO: 583821 - DNA, 15 bp, Homo sapiens
aactgacgacagagt

SEQ ID NO: 583822 - DNA, 15 bp, Homo sapiens
taactgacgacagag

SEQ ID NO: 583823 - DNA, 15 bp, Homo sapiens
ttaactgacgacaga

SEQ ID NO: 583824 - DNA, 15 bp, Homo sapiens
cttaactgacgacag

SEQ ID NO: 583825 - DNA, 15 bp, Homo sapiens
tcttaactgacgaca

SEQ ID NO: 583826 - DNA, 15 bp, Homo sapiens
atcttaactgacgac

SEQ ID NO: 583827 - DNA, 15 bp, Homo sapiens
aatcttaactgacga

SEQ ID NO: 583828 - DNA, 15 bp, Homo sapiens
taatcttaactgacg

SEQ ID NO: 583829 - DNA, 15 bp, Homo sapiens
ctaatcttaactgac

SEQ ID NO: 583830 - DNA, 15 bp, Homo sapiens
actaatcttaactga

SEQ ID NO: 583831 - DNA, 15 bp, Homo sapiens
cactaatcttaactg

SEQ ID NO: 583832 - DNA, 15 bp, Homo sapiens
acactaatcttaact

SEQ ID NO: 583833 - DNA, 15 bp, Homo sapiens
tacactaatcttaac

SEQ ID NO: 583834 - DNA, 15 bp, Homo sapiens
ttacactaatcttaa

SEQ ID NO: 583835 - DNA, 15 bp, Homo sapiens
tttacactaatctta

SEQ ID NO: 583836 - DNA, 15 bp, Homo sapiens
ttttacactaatctt

SEQ ID NO: 583837 - DNA, 15 bp, Homo sapiens
tttttacactaatct

SEQ ID NO: 583838 - DNA, 15 bp, Homo sapiens
ctttttacactaatc

SEQ ID NO: 583839 - DNA, 15 bp, Homo sapiens
tctttttacactaat

SEQ ID NO: 583840 - DNA, 15 bp, Homo sapiens
ttctttttacactaa

SEQ ID NO: 583841 - DNA, 15 bp, Homo sapiens
tttctttttacacta

SEQ ID NO: 583842 - DNA, 15 bp, Homo sapiens
ttttctttttacact

SEQ ID NO: 583843 - DNA, 15 bp, Homo sapiens
gttttctttttacac

SEQ ID NO: 583844 - DNA, 15 bp, Homo sapiens
agttttctttttaca

SEQ ID NO: 583845 - DNA, 15 bp, Homo sapiens
tagttttctttttac

SEQ ID NO: 583846 - DNA, 15 bp, Homo sapiens
ttagttttcttttta

SEQ ID NO: 583847 - DNA, 15 bp, Homo sapiens
tttagttttcttttt

SEQ ID NO: 583848 - DNA, 15 bp, Homo sapiens
gtttagttttctttt

SEQ ID NO: 583849 - DNA, 15 bp, Homo sapiens
agtttagttttcttt

SEQ ID NO: 583850 - DNA, 15 bp, Homo sapiens
gagtttagttttctt

SEQ ID NO: 583851 - DNA, 15 bp, Homo sapiens
agagtttagttttct

SEQ ID NO: 583852 - DNA, 15 bp, Homo sapiens
cagagtttagttttc

SEQ ID NO: 583853 - DNA, 15 bp, Homo sapiens
tcagagtttagtttt

SEQ ID NO: 583854 - DNA, 15 bp, Homo sapiens
ttcagagtttagttt

SEQ ID NO: 583855 - DNA, 15 bp, Homo sapiens
cttcagagtttagtt

SEQ ID NO: 583856 - DNA, 15 bp, Homo sapiens
acttcagagtttagt

SEQ ID NO: 583857 - DNA, 15 bp, Homo sapiens
tacttcagagtttag

SEQ ID NO: 583858 - DNA, 15 bp, Homo sapiens
ctacttcagagttta

SEQ ID NO: 583859 - DNA, 15 bp, Homo sapiens
gctacttcagagttt

SEQ ID NO: 583860 - DNA, 15 bp, Homo sapiens
ggctacttcagagtt

SEQ ID NO: 583861 - DNA, 15 bp, Homo sapiens
tggctacttcagagt

SEQ ID NO: 583862 - DNA, 15 bp, Homo sapiens
atggctacttcagag

SEQ ID NO: 583863 - DNA, 15 bp, Homo sapiens
aatggctacttcaga

SEQ ID NO: 583864 - DNA, 15 bp, Homo sapiens
taatggctacttcag

SEQ ID NO: 583865 - DNA, 15 bp, Homo sapiens
ataatggctacttca

SEQ ID NO: 583866 - DNA, 15 bp, Homo sapiens
tataatggctacttc

SEQ ID NO: 583867 - DNA, 15 bp, Homo sapiens
ttataatggctactt

SEQ ID NO: 583868 - DNA, 15 bp, Homo sapiens
tttataatggctact

SEQ ID NO: 583869 - DNA, 15 bp, Homo sapiens
ttttataatggctac

SEQ ID NO: 583870 - DNA, 15 bp, Homo sapiens
cttttataatggcta

SEQ ID NO: 583871 - DNA, 15 bp, Homo sapiens
acttttataatggct

SEQ ID NO: 583872 - DNA, 15 bp, Homo sapiens
cacttttataatggc

SEQ ID NO: 583873 - DNA, 15 bp, Homo sapiens
acacttttataatgg

SEQ ID NO: 583874 - DNA, 15 bp, Homo sapiens
cacacttttataatg

SEQ ID NO: 583875 - DNA, 15 bp, Homo sapiens
tcacacttttataat

SEQ ID NO: 583876 - DNA, 15 bp, Homo sapiens
ctcacacttttataa

SEQ ID NO: 583877 - DNA, 15 bp, Homo sapiens
tctcacacttttata

SEQ ID NO: 583878 - DNA, 15 bp, Homo sapiens
ttctcacacttttat

SEQ ID NO: 583879 - DNA, 15 bp, Homo sapiens
attctcacactttta

SEQ ID NO: 583880 - DNA, 15 bp, Homo sapiens
cattctcacactttt

SEQ ID NO: 583881 - DNA, 15 bp, Homo sapiens
tcattctcacacttt

SEQ ID NO: 583882 - DNA, 15 bp, Homo sapiens
ttcattctcacactt

SEQ ID NO: 583883 - DNA, 15 bp, Homo sapiens
cttcattctcacact

SEQ ID NO: 583884 - DNA, 15 bp, Homo sapiens
acttcattctcacac

SEQ ID NO: 583885 - DNA, 15 bp, Homo sapiens
gacttcattctcaca

SEQ ID NO: 583886 - DNA, 15 bp, Homo sapiens
tgacttcattctcac

SEQ ID NO: 583887 - DNA, 15 bp, Homo sapiens
ctgacttcattctca

SEQ ID NO: 583888 - DNA, 15 bp, Homo sapiens
actgacttcattctc

SEQ ID NO: 583889 - DNA, 15 bp, Homo sapiens
aactgacttcattct

SEQ ID NO: 583890 - DNA, 15 bp, Homo sapiens
aaactgacttcattc

SEQ ID NO: 583891 - DNA, 15 bp, Homo sapiens
aaaactgacttcatt

SEQ ID NO: 583892 - DNA, 15 bp, Homo sapiens
gaaaactgacttcat

SEQ ID NO: 583893 - DNA, 15 bp, Homo sapiens
agaaaactgacttca

SEQ ID NO: 583894 - DNA, 15 bp, Homo sapiens
tagaaaactgacttc

SEQ ID NO: 583895 - DNA, 15 bp, Homo sapiens
ttagaaaactgactt

SEQ ID NO: 583896 - DNA, 15 bp, Homo sapiens
tttagaaaactgact

SEQ ID NO: 583897 - DNA, 15 bp, Homo sapiens
ctttagaaaactgac

SEQ ID NO: 583898 - DNA, 15 bp, Homo sapiens
tctttagaaaactga

SEQ ID NO: 583899 - DNA, 15 bp, Homo sapiens
ctctttagaaaactg

SEQ ID NO: 583900 - DNA, 15 bp, Homo sapiens
actctttagaaaact

SEQ ID NO: 583901 - DNA, 15 bp, Homo sapiens
aactctttagaaaac

SEQ ID NO: 583902 - DNA, 15 bp, Homo sapiens
caactctttagaaaa

SEQ ID NO: 583903 - DNA, 15 bp, Homo sapiens
ccaactctttagaaa

SEQ ID NO: 583904 - DNA, 15 bp, Homo sapiens
cccaactctttagaa

SEQ ID NO: 583905 - DNA, 15 bp, Homo sapiens
ccccaactctttaga

SEQ ID NO: 583906 - DNA, 15 bp, Homo sapiens
tccccaactctttag

SEQ ID NO: 583907 - DNA, 15 bp, Homo sapiens
ttccccaactcttta

SEQ ID NO: 583908 - DNA, 15 bp, Homo sapiens
tttccccaactcttt

SEQ ID NO: 583909 - DNA, 15 bp, Homo sapiens
ctttccccaactctt

SEQ ID NO: 583910 - DNA, 15 bp, Homo sapiens
cctttccccaactct

SEQ ID NO: 583911 - DNA, 15 bp, Homo sapiens
acctttccccaactc

SEQ ID NO: 583912 - DNA, 15 bp, Homo sapiens
cacctttccccaact

SEQ ID NO: 583913 - DNA, 15 bp, Homo sapiens
tcacctttccccaac

SEQ ID NO: 583914 - DNA, 15 bp, Homo sapiens
atcacctttccccaa

SEQ ID NO: 583915 - DNA, 15 bp, Homo sapiens
catcacctttcccca

SEQ ID NO: 583916 - DNA, 15 bp, Homo sapiens
gcatcacctttcccc

SEQ ID NO: 583917 - DNA, 15 bp, Homo sapiens
agcatcacctttccc

SEQ ID NO: 583918 - DNA, 15 bp, Homo sapiens
tagcatcacctttcc

SEQ ID NO: 583919 - DNA, 15 bp, Homo sapiens
ttagcatcacctttc

SEQ ID NO: 583920 - DNA, 15 bp, Homo sapiens
tttagcatcaccttt

SEQ ID NO: 583921 - DNA, 15 bp, Homo sapiens
ctttagcatcacctt

SEQ ID NO: 583922 - DNA, 15 bp, Homo sapiens
cctttagcatcacct

SEQ ID NO: 583923 - DNA, 15 bp, Homo sapiens
tcctttagcatcacc

SEQ ID NO: 583924 - DNA, 15 bp, Homo sapiens
ctcctttagcatcac

SEQ ID NO: 583925 - DNA, 15 bp, Homo sapiens
cctcctttagcatca

SEQ ID NO: 583926 - DNA, 15 bp, Homo sapiens
ccctcctttagcatc

SEQ ID NO: 583927 - DNA, 15 bp, Homo sapiens
cccctcctttagcat

SEQ ID NO: 583928 - DNA, 15 bp, Homo sapiens
tcccctcctttagca

SEQ ID NO: 583929 - DNA, 15 bp, Homo sapiens
atcccctcctttagc

SEQ ID NO: 583930 - DNA, 15 bp, Homo sapiens
aatcccctcctttag

SEQ ID NO: 583931 - DNA, 15 bp, Homo sapiens
caatcccctccttta

SEQ ID NO: 583932 - DNA, 15 bp, Homo sapiens
tcaatcccctccttt

SEQ ID NO: 583933 - DNA, 15 bp, Homo sapiens
ctcaatcccctcctt

SEQ ID NO: 583934 - DNA, 15 bp, Homo sapiens
gctcaatcccctcct

SEQ ID NO: 583935 - DNA, 15 bp, Homo sapiens
tgctcaatcccctcc

SEQ ID NO: 583936 - DNA, 15 bp, Homo sapiens
ttgctcaatcccctc

SEQ ID NO: 583937 - DNA, 15 bp, Homo sapiens
cttgctcaatcccct

SEQ ID NO: 583938 - DNA, 15 bp, Homo sapiens
acttgctcaatcccc

SEQ ID NO: 583939 - DNA, 15 bp, Homo sapiens
gacttgctcaatccc

SEQ ID NO: 583940 - DNA, 15 bp, Homo sapiens
ggacttgctcaatcc

SEQ ID NO: 583941 - DNA, 15 bp, Homo sapiens
aggacttgctcaatc

SEQ ID NO: 583942 - DNA, 15 bp, Homo sapiens
taggacttgctcaat

SEQ ID NO: 583943 - DNA, 15 bp, Homo sapiens
ataggacttgctcaa

SEQ ID NO: 583944 - DNA, 15 bp, Homo sapiens
gataggacttgctca

SEQ ID NO: 583945 - DNA, 15 bp, Homo sapiens
tgataggacttgctc

SEQ ID NO: 583946 - DNA, 15 bp, Homo sapiens
ttgataggacttgct

SEQ ID NO: 583947 - DNA, 15 bp, Homo sapiens
tttgataggacttgc

SEQ ID NO: 583948 - DNA, 15 bp, Homo sapiens
ctttgataggacttg

SEQ ID NO: 583949 - DNA, 15 bp, Homo sapiens
tctttgataggactt

SEQ ID NO: 583950 - DNA, 15 bp, Homo sapiens
ctctttgataggact

SEQ ID NO: 583951 - DNA, 15 bp, Homo sapiens
gctctttgataggac

SEQ ID NO: 583952 - DNA, 15 bp, Homo sapiens
ggctctttgatagga

SEQ ID NO: 583953 - DNA, 15 bp, Homo sapiens
aggctctttgatagg

SEQ ID NO: 583954 - DNA, 15 bp, Homo sapiens
aaggctctttgatag

SEQ ID NO: 583955 - DNA, 15 bp, Homo sapiens
aaaggctctttgata

SEQ ID NO: 583956 - DNA, 15 bp, Homo sapiens
aaaaggctctttgat

SEQ ID NO: 583957 - DNA, 15 bp, Homo sapiens
taaaaggctctttga

SEQ ID NO: 583958 - DNA, 15 bp, Homo sapiens
ataaaaggctctttg

SEQ ID NO: 583959 - DNA, 15 bp, Homo sapiens
cataaaaggctcttt

SEQ ID NO: 583960 - DNA, 15 bp, Homo sapiens
tcataaaaggctctt

SEQ ID NO: 583961 - DNA, 15 bp, Homo sapiens
ttcataaaaggctct

SEQ ID NO: 583962 - DNA, 15 bp, Homo sapiens
tttcataaaaggctc

SEQ ID NO: 583963 - DNA, 15 bp, Homo sapiens
ttttcataaaaggct

SEQ ID NO: 583964 - DNA, 15 bp, Homo sapiens
attttcataaaaggc

SEQ ID NO: 583965 - DNA, 15 bp, Homo sapiens
tattttcataaaagg

SEQ ID NO: 583966 - DNA, 15 bp, Homo sapiens
gtattttcataaaag

SEQ ID NO: 583967 - DNA, 15 bp, Homo sapiens
agtattttcataaaa

SEQ ID NO: 583968 - DNA, 15 bp, Homo sapiens
aagtattttcataaa

SEQ ID NO: 583969 - DNA, 15 bp, Homo sapiens
taagtattttcataa

SEQ ID NO: 583970 - DNA, 15 bp, Homo sapiens
ctaagtattttcata

SEQ ID NO: 583971 - DNA, 15 bp, Homo sapiens
actaagtattttcat

SEQ ID NO: 583972 - DNA, 15 bp, Homo sapiens
gactaagtattttca

SEQ ID NO: 583973 - DNA, 15 bp, Homo sapiens
tgactaagtattttc

SEQ ID NO: 583974 - DNA, 15 bp, Homo sapiens
atgactaagtatttt

SEQ ID NO: 583975 - DNA, 15 bp, Homo sapiens
gatgactaagtattt

SEQ ID NO: 583976 - DNA, 15 bp, Homo sapiens
agatgactaagtatt

SEQ ID NO: 583977 - DNA, 15 bp, Homo sapiens
cagatgactaagtat

SEQ ID NO: 583978 - DNA, 15 bp, Homo sapiens
acagatgactaagta

SEQ ID NO: 583979 - DNA, 15 bp, Homo sapiens
cacagatgactaagt

SEQ ID NO: 583980 - DNA, 15 bp, Homo sapiens
tcacagatgactaag

SEQ ID NO: 583981 - DNA, 15 bp, Homo sapiens
gtcacagatgactaa

SEQ ID NO: 583982 - DNA, 15 bp, Homo sapiens
tgtcacagatgacta

SEQ ID NO: 583983 - DNA, 15 bp, Homo sapiens
atgtcacagatgact

SEQ ID NO: 583984 - DNA, 15 bp, Homo sapiens
gatgtcacagatgac

SEQ ID NO: 583985 - DNA, 15 bp, Homo sapiens
ggatgtcacagatga

SEQ ID NO: 583986 - DNA, 15 bp, Homo sapiens
gggatgtcacagatg

SEQ ID NO: 583987 - DNA, 15 bp, Homo sapiens
tgggatgtcacagat

SEQ ID NO: 583988 - DNA, 15 bp, Homo sapiens
atgggatgtcacaga

SEQ ID NO: 583989 - DNA, 15 bp, Homo sapiens
aatgggatgtcacag

SEQ ID NO: 583990 - DNA, 15 bp, Homo sapiens
aaatgggatgtcaca

SEQ ID NO: 583991 - DNA, 15 bp, Homo sapiens
caaatgggatgtcac

SEQ ID NO: 583992 - DNA, 15 bp, Homo sapiens
ccaaatgggatgtca

SEQ ID NO: 583993 - DNA, 15 bp, Homo sapiens
gccaaatgggatgtc

SEQ ID NO: 583994 - DNA, 15 bp, Homo sapiens
agccaaatgggatgt

SEQ ID NO: 583995 - DNA, 15 bp, Homo sapiens
gagccaaatgggatg

SEQ ID NO: 583996 - DNA, 15 bp, Homo sapiens
agagccaaatgggat

SEQ ID NO: 583997 - DNA, 15 bp, Homo sapiens
aagagccaaatggga

SEQ ID NO: 583998 - DNA, 15 bp, Homo sapiens
gaagagccaaatggg

SEQ ID NO: 583999 - DNA, 15 bp, Homo sapiens
ggaagagccaaatgg

SEQ ID NO: 584000 - DNA, 15 bp, Homo sapiens
tggaagagccaaatg

SEQ ID NO: 584001 - DNA, 15 bp, Homo sapiens
ctggaagagccaaat

SEQ ID NO: 584002 - DNA, 15 bp, Homo sapiens
tctggaagagccaaa

SEQ ID NO: 584003 - DNA, 15 bp, Homo sapiens
ttctggaagagccaa

SEQ ID NO: 584004 - DNA, 15 bp, Homo sapiens
tttctggaagagcca

SEQ ID NO: 584005 - DNA, 15 bp, Homo sapiens
atttctggaagagcc

SEQ ID NO: 584006 - DNA, 15 bp, Homo sapiens
gatttctggaagagc

SEQ ID NO: 584007 - DNA, 15 bp, Homo sapiens
ggatttctggaagag

SEQ ID NO: 584008 - DNA, 15 bp, Homo sapiens
aggatttctggaaga

SEQ ID NO: 584009 - DNA, 15 bp, Homo sapiens
taggatttctggaag

SEQ ID NO: 584010 - DNA, 15 bp, Homo sapiens
ctaggatttctggaa

SEQ ID NO: 584011 - DNA, 15 bp, Homo sapiens
actaggatttctgga

SEQ ID NO: 584012 - DNA, 15 bp, Homo sapiens
tactaggatttctgg

SEQ ID NO: 584013 - DNA, 15 bp, Homo sapiens
ttactaggatttctg

SEQ ID NO: 584014 - DNA, 15 bp, Homo sapiens
tttactaggatttct

SEQ ID NO: 584015 - DNA, 15 bp, Homo sapiens
atttactaggatttc

SEQ ID NO: 584016 - DNA, 15 bp, Homo sapiens
tatttactaggattt

SEQ ID NO: 584017 - DNA, 15 bp, Homo sapiens
ctatttactaggatt

SEQ ID NO: 584018 - DNA, 15 bp, Homo sapiens
actatttactaggat

SEQ ID NO: 584019 - DNA, 15 bp, Homo sapiens
aactatttactagga

SEQ ID NO: 584020 - DNA, 15 bp, Homo sapiens
caactatttactagg

SEQ ID NO: 584021 - DNA, 15 bp, Homo sapiens
acaactatttactag

SEQ ID NO: 584022 - DNA, 15 bp, Homo sapiens
tacaactatttacta

SEQ ID NO: 584023 - DNA, 15 bp, Homo sapiens
ttacaactatttact

SEQ ID NO: 584024 - DNA, 15 bp, Homo sapiens
gttacaactatttac

SEQ ID NO: 584025 - DNA, 15 bp, Homo sapiens
tgttacaactattta

SEQ ID NO: 584026 - DNA, 15 bp, Homo sapiens
ctgttacaactattt

SEQ ID NO: 584027 - DNA, 15 bp, Homo sapiens
cctgttacaactatt

SEQ ID NO: 584028 - DNA, 15 bp, Homo sapiens
tcctgttacaactat

SEQ ID NO: 584029 - DNA, 15 bp, Homo sapiens
atcctgttacaacta

SEQ ID NO: 584030 - DNA, 15 bp, Homo sapiens
catcctgttacaact

SEQ ID NO: 584031 - DNA, 15 bp, Homo sapiens
acatcctgttacaac

SEQ ID NO: 584032 - DNA, 15 bp, Homo sapiens
aacatcctgttacaa

SEQ ID NO: 584033 - DNA, 15 bp, Homo sapiens
taacatcctgttaca

SEQ ID NO: 584034 - DNA, 15 bp, Homo sapiens
ttaacatcctgttac

SEQ ID NO: 584035 - DNA, 15 bp, Homo sapiens
cttaacatcctgtta

SEQ ID NO: 584036 - DNA, 15 bp, Homo sapiens
tcttaacatcctgtt

SEQ ID NO: 584037 - DNA, 15 bp, Homo sapiens
ctcttaacatcctgt

SEQ ID NO: 584038 - DNA, 15 bp, Homo sapiens
cctcttaacatcctg

SEQ ID NO: 584039 - DNA, 15 bp, Homo sapiens
gcctcttaacatcct

SEQ ID NO: 584040 - DNA, 15 bp, Homo sapiens
tgcctcttaacatcc

SEQ ID NO: 584041 - DNA, 15 bp, Homo sapiens
atgcctcttaacatc

SEQ ID NO: 584042 - DNA, 15 bp, Homo sapiens
tatgcctcttaacat

SEQ ID NO: 584043 - DNA, 15 bp, Homo sapiens
gtatgcctcttaaca

SEQ ID NO: 584044 - DNA, 15 bp, Homo sapiens
tgtatgcctcttaac

SEQ ID NO: 584045 - DNA, 15 bp, Homo sapiens
atgtatgcctcttaa

SEQ ID NO: 584046 - DNA, 15 bp, Homo sapiens
aatgtatgcctctta

SEQ ID NO: 584047 - DNA, 15 bp, Homo sapiens
caatgtatgcctctt

SEQ ID NO: 584048 - DNA, 15 bp, Homo sapiens
acaatgtatgcctct

SEQ ID NO: 584049 - DNA, 15 bp, Homo sapiens
cacaatgtatgcctc

SEQ ID NO: 584050 - DNA, 15 bp, Homo sapiens
acacaatgtatgcct

SEQ ID NO: 584051 - DNA, 15 bp, Homo sapiens
cacacaatgtatgcc

SEQ ID NO: 584052 - DNA, 15 bp, Homo sapiens
acacacaatgtatgc

SEQ ID NO: 584053 - DNA, 15 bp, Homo sapiens
aacacacaatgtatg

SEQ ID NO: 584054 - DNA, 15 bp, Homo sapiens
aaacacacaatgtat

SEQ ID NO: 584055 - DNA, 15 bp, Homo sapiens
aaaacacacaatgta

SEQ ID NO: 584056 - DNA, 15 bp, Homo sapiens
taaaacacacaatgt

SEQ ID NO: 584057 - DNA, 15 bp, Homo sapiens
ttaaaacacacaatg

SEQ ID NO: 584058 - DNA, 15 bp, Homo sapiens
tttaaaacacacaat

SEQ ID NO: 584059 - DNA, 15 bp, Homo sapiens
atttaaaacacacaa

SEQ ID NO: 584060 - DNA, 15 bp, Homo sapiens
gatttaaaacacaca

SEQ ID NO: 584061 - DNA, 15 bp, Homo sapiens
ggatttaaaacacac

SEQ ID NO: 584062 - DNA, 15 bp, Homo sapiens
aggatttaaaacaca

SEQ ID NO: 584063 - DNA, 15 bp, Homo sapiens
gaggatttaaaacac

SEQ ID NO: 584064 - DNA, 15 bp, Homo sapiens
agaggatttaaaaca

SEQ ID NO: 584065 - DNA, 15 bp, Homo sapiens
cagaggatttaaaac

SEQ ID NO: 584066 - DNA, 15 bp, Homo sapiens
gcagaggatttaaaa

SEQ ID NO: 584067 - DNA, 15 bp, Homo sapiens
agcagaggatttaaa

SEQ ID NO: 584068 - DNA, 15 bp, Homo sapiens
tagcagaggatttaa

SEQ ID NO: 584069 - DNA, 15 bp, Homo sapiens
gtagcagaggattta

SEQ ID NO: 584070 - DNA, 15 bp, Homo sapiens
agtagcagaggattt

SEQ ID NO: 584071 - DNA, 15 bp, Homo sapiens
gagtagcagaggatt

SEQ ID NO: 584072 - DNA, 15 bp, Homo sapiens
tgagtagcagaggat

SEQ ID NO: 584073 - DNA, 15 bp, Homo sapiens
atgagtagcagagga

SEQ ID NO: 584074 - DNA, 15 bp, Homo sapiens
aatgagtagcagagg

SEQ ID NO: 584075 - DNA, 15 bp, Homo sapiens
taatgagtagcagag

SEQ ID NO: 584076 - DNA, 15 bp, Homo sapiens
ctaatgagtagcaga

SEQ ID NO: 584077 - DNA, 15 bp, Homo sapiens
cctaatgagtagcag

SEQ ID NO: 584078 - DNA, 15 bp, Homo sapiens
acctaatgagtagca

SEQ ID NO: 584079 - DNA, 15 bp, Homo sapiens
tacctaatgagtagc

SEQ ID NO: 584080 - DNA, 15 bp, Homo sapiens
atacctaatgagtag

SEQ ID NO: 584081 - DNA, 15 bp, Homo sapiens
tatacctaatgagta

SEQ ID NO: 584082 - DNA, 15 bp, Homo sapiens
atatacctaatgagt

SEQ ID NO: 584083 - DNA, 15 bp, Homo sapiens
catatacctaatgag

SEQ ID NO: 584084 - DNA, 15 bp, Homo sapiens
tcatatacctaatga

SEQ ID NO: 584085 - DNA, 15 bp, Homo sapiens
gtcatatacctaatg

SEQ ID NO: 584086 - DNA, 15 bp, Homo sapiens
ggtcatatacctaat

SEQ ID NO: 584087 - DNA, 15 bp, Homo sapiens
aggtcatatacctaa

SEQ ID NO: 584088 - DNA, 15 bp, Homo sapiens
aaggtcatataccta

SEQ ID NO: 584089 - DNA, 15 bp, Homo sapiens
aaaggtcatatacct

SEQ ID NO: 584090 - DNA, 15 bp, Homo sapiens
caaaggtcatatacc

SEQ ID NO: 584091 - DNA, 15 bp, Homo sapiens
tcaaaggtcatatac

SEQ ID NO: 584092 - DNA, 15 bp, Homo sapiens
gtcaaaggtcatata

SEQ ID NO: 584093 - DNA, 15 bp, Homo sapiens
tgtcaaaggtcatat

SEQ ID NO: 584094 - DNA, 15 bp, Homo sapiens
ttgtcaaaggtcata

SEQ ID NO: 584095 - DNA, 15 bp, Homo sapiens
gttgtcaaaggtcat

SEQ ID NO: 584096 - DNA, 15 bp, Homo sapiens
agttgtcaaaggtca

SEQ ID NO: 584097 - DNA, 15 bp, Homo sapiens
aagttgtcaaaggtc

SEQ ID NO: 584098 - DNA, 15 bp, Homo sapiens
taagttgtcaaaggt

SEQ ID NO: 584099 - DNA, 15 bp, Homo sapiens
ttaagttgtcaaagg

SEQ ID NO: 584100 - DNA, 15 bp, Homo sapiens
tttaagttgtcaaag

SEQ ID NO: 584101 - DNA, 15 bp, Homo sapiens
ctttaagttgtcaaa

SEQ ID NO: 584102 - DNA, 15 bp, Homo sapiens
actttaagttgtcaa

SEQ ID NO: 584103 - DNA, 15 bp, Homo sapiens
gactttaagttgtca

SEQ ID NO: 584104 - DNA, 15 bp, Homo sapiens
agactttaagttgtc

SEQ ID NO: 584105 - DNA, 15 bp, Homo sapiens
gagactttaagttgt

SEQ ID NO: 584106 - DNA, 15 bp, Homo sapiens
agagactttaagttg

SEQ ID NO: 584107 - DNA, 15 bp, Homo sapiens
tagagactttaagtt

SEQ ID NO: 584108 - DNA, 15 bp, Homo sapiens
ctagagactttaagt

SEQ ID NO: 584109 - DNA, 15 bp, Homo sapiens
tctagagactttaag

SEQ ID NO: 584110 - DNA, 15 bp, Homo sapiens
gtctagagactttaa

SEQ ID NO: 584111 - DNA, 15 bp, Homo sapiens
agtctagagacttta

SEQ ID NO: 584112 - DNA, 15 bp, Homo sapiens
aagtctagagacttt

SEQ ID NO: 584113 - DNA, 15 bp, Homo sapiens
gaagtctagagactt

SEQ ID NO: 584114 - DNA, 15 bp, Homo sapiens
agaagtctagagact

SEQ ID NO: 584115 - DNA, 15 bp, Homo sapiens
gagaagtctagagac

SEQ ID NO: 584116 - DNA, 15 bp, Homo sapiens
agagaagtctagaga

SEQ ID NO: 584117 - DNA, 15 bp, Homo sapiens
cagagaagtctagag

SEQ ID NO: 584118 - DNA, 15 bp, Homo sapiens
acagagaagtctaga

SEQ ID NO: 584119 - DNA, 15 bp, Homo sapiens
aacagagaagtctag

SEQ ID NO: 584120 - DNA, 15 bp, Homo sapiens
aaacagagaagtcta

SEQ ID NO: 584121 - DNA, 15 bp, Homo sapiens
caaacagagaagtct

SEQ ID NO: 584122 - DNA, 15 bp, Homo sapiens
acaaacagagaagtc

SEQ ID NO: 584123 - DNA, 15 bp, Homo sapiens
cacaaacagagaagt

SEQ ID NO: 584124 - DNA, 15 bp, Homo sapiens
tcacaaacagagaag

SEQ ID NO: 584125 - DNA, 15 bp, Homo sapiens
ctcacaaacagagaa

SEQ ID NO: 584126 - DNA, 15 bp, Homo sapiens
cctcacaaacagaga

SEQ ID NO: 584127 - DNA, 15 bp, Homo sapiens
ccctcacaaacagag

SEQ ID NO: 584128 - DNA, 15 bp, Homo sapiens
accctcacaaacaga

SEQ ID NO: 584129 - DNA, 15 bp, Homo sapiens
aaccctcacaaacag

SEQ ID NO: 584130 - DNA, 15 bp, Homo sapiens
taaccctcacaaaca

SEQ ID NO: 584131 - DNA, 15 bp, Homo sapiens
ttaaccctcacaaac

SEQ ID NO: 584132 - DNA, 15 bp, Homo sapiens
tttaaccctcacaaa

SEQ ID NO: 584133 - DNA, 15 bp, Homo sapiens
atttaaccctcacaa

SEQ ID NO: 584134 - DNA, 15 bp, Homo sapiens
catttaaccctcaca

SEQ ID NO: 584135 - DNA, 15 bp, Homo sapiens
tcatttaaccctcac

SEQ ID NO: 584136 - DNA, 15 bp, Homo sapiens
ttcatttaaccctca

SEQ ID NO: 584137 - DNA, 15 bp, Homo sapiens
tttcatttaaccctc

SEQ ID NO: 584138 - DNA, 15 bp, Homo sapiens
atttcatttaaccct

SEQ ID NO: 584139 - DNA, 15 bp, Homo sapiens
gatttcatttaaccc

SEQ ID NO: 584140 - DNA, 15 bp, Homo sapiens
tgatttcatttaacc

SEQ ID NO: 584141 - DNA, 15 bp, Homo sapiens
atgatttcatttaac

SEQ ID NO: 584142 - DNA, 15 bp, Homo sapiens
catgatttcatttaa

SEQ ID NO: 584143 - DNA, 15 bp, Homo sapiens
acatgatttcattta

SEQ ID NO: 584144 - DNA, 15 bp, Homo sapiens
tacatgatttcattt

SEQ ID NO: 584145 - DNA, 15 bp, Homo sapiens
atacatgatttcatt

SEQ ID NO: 584146 - DNA, 15 bp, Homo sapiens
catacatgatttcat

SEQ ID NO: 584147 - DNA, 15 bp, Homo sapiens
acatacatgatttca

SEQ ID NO: 584148 - DNA, 15 bp, Homo sapiens
tacatacatgatttc

SEQ ID NO: 584149 - DNA, 15 bp, Homo sapiens
ttacatacatgattt

SEQ ID NO: 584150 - DNA, 15 bp, Homo sapiens
tttacatacatgatt

SEQ ID NO: 584151 - DNA, 15 bp, Homo sapiens
ctttacatacatgat

SEQ ID NO: 584152 - DNA, 15 bp, Homo sapiens
actttacatacatga

SEQ ID NO: 584153 - DNA, 15 bp, Homo sapiens
cactttacatacatg

SEQ ID NO: 584154 - DNA, 15 bp, Homo sapiens
gcactttacatacat

SEQ ID NO: 584155 - DNA, 15 bp, Homo sapiens
agcactttacataca

SEQ ID NO: 584156 - DNA, 15 bp, Homo sapiens
gagcactttacatac

SEQ ID NO: 584157 - DNA, 15 bp, Homo sapiens
tgagcactttacata

SEQ ID NO: 584158 - DNA, 15 bp, Homo sapiens
gtgagcactttacat

SEQ ID NO: 584159 - DNA, 15 bp, Homo sapiens
ggtgagcactttaca

SEQ ID NO: 584160 - DNA, 15 bp, Homo sapiens
aggtgagcactttac

SEQ ID NO: 584161 - DNA, 15 bp, Homo sapiens
taggtgagcacttta

SEQ ID NO: 584162 - DNA, 15 bp, Homo sapiens
ataggtgagcacttt

SEQ ID NO: 584163 - DNA, 15 bp, Homo sapiens
aataggtgagcactt

SEQ ID NO: 584164 - DNA, 15 bp, Homo sapiens
caataggtgagcact

SEQ ID NO: 584165 - DNA, 15 bp, Homo sapiens
gcaataggtgagcac

SEQ ID NO: 584166 - DNA, 15 bp, Homo sapiens
tgcaataggtgagca

SEQ ID NO: 584167 - DNA, 15 bp, Homo sapiens
ctgcaataggtgagc

SEQ ID NO: 584168 - DNA, 15 bp, Homo sapiens
actgcaataggtgag

SEQ ID NO: 584169 - DNA, 15 bp, Homo sapiens
cactgcaataggtga

SEQ ID NO: 584170 - DNA, 15 bp, Homo sapiens
gcactgcaataggtg

SEQ ID NO: 584171 - DNA, 15 bp, Homo sapiens
ggcactgcaataggt

SEQ ID NO: 584172 - DNA, 15 bp, Homo sapiens
aggcactgcaatagg

SEQ ID NO: 584173 - DNA, 15 bp, Homo sapiens
caggcactgcaatag

SEQ ID NO: 584174 - DNA, 15 bp, Homo sapiens
ccaggcactgcaata

SEQ ID NO: 584175 - DNA, 15 bp, Homo sapiens
gccaggcactgcaat

SEQ ID NO: 584176 - DNA, 15 bp, Homo sapiens
tgccaggcactgcaa

SEQ ID NO: 584177 - DNA, 15 bp, Homo sapiens
gtgccaggcactgca

SEQ ID NO: 584178 - DNA, 15 bp, Homo sapiens
tgtgccaggcactgc

SEQ ID NO: 584179 - DNA, 15 bp, Homo sapiens
atgtgccaggcactg

SEQ ID NO: 584180 - DNA, 15 bp, Homo sapiens
catgtgccaggcact

SEQ ID NO: 584181 - DNA, 15 bp, Homo sapiens
acatgtgccaggcac

SEQ ID NO: 584182 - DNA, 15 bp, Homo sapiens
gacatgtgccaggca

SEQ ID NO: 584183 - DNA, 15 bp, Homo sapiens
tgacatgtgccaggc

SEQ ID NO: 584184 - DNA, 15 bp, Homo sapiens
ttgacatgtgccagg

SEQ ID NO: 584185 - DNA, 15 bp, Homo sapiens
cttgacatgtgccag

SEQ ID NO: 584186 - DNA, 15 bp, Homo sapiens
acttgacatgtgcca

SEQ ID NO: 584187 - DNA, 15 bp, Homo sapiens
tacttgacatgtgcc

SEQ ID NO: 584188 - DNA, 15 bp, Homo sapiens
ttacttgacatgtgc

SEQ ID NO: 584189 - DNA, 15 bp, Homo sapiens
tttacttgacatgtg

SEQ ID NO: 584190 - DNA, 15 bp, Homo sapiens
ttttacttgacatgt

SEQ ID NO: 584191 - DNA, 15 bp, Homo sapiens
cttttacttgacatg

SEQ ID NO: 584192 - DNA, 15 bp, Homo sapiens
ccttttacttgacat

SEQ ID NO: 584193 - DNA, 15 bp, Homo sapiens
accttttacttgaca

SEQ ID NO: 584194 - DNA, 15 bp, Homo sapiens
taccttttacttgac

SEQ ID NO: 584195 - DNA, 15 bp, Homo sapiens
ttaccttttacttga

SEQ ID NO: 584196 - DNA, 15 bp, Homo sapiens
gttaccttttacttg

SEQ ID NO: 584197 - DNA, 15 bp, Homo sapiens
ggttaccttttactt

SEQ ID NO: 584198 - DNA, 15 bp, Homo sapiens
gggttaccttttact

SEQ ID NO: 584199 - DNA, 15 bp, Homo sapiens
tgggttaccttttac

SEQ ID NO: 584200 - DNA, 15 bp, Homo sapiens
ttgggttacctttta

SEQ ID NO: 584201 - DNA, 15 bp, Homo sapiens
cttgggttacctttt

SEQ ID NO: 584202 - DNA, 15 bp, Homo sapiens
tcttgggttaccttt

SEQ ID NO: 584203 - DNA, 15 bp, Homo sapiens
ttcttgggttacctt

SEQ ID NO: 584204 - DNA, 15 bp, Homo sapiens
cttcttgggttacct

SEQ ID NO: 584205 - DNA, 15 bp, Homo sapiens
tcttcttgggttacc

SEQ ID NO: 584206 - DNA, 15 bp, Homo sapiens
gtcttcttgggttac

SEQ ID NO: 584207 - DNA, 15 bp, Homo sapiens
agtcttcttgggtta

SEQ ID NO: 584208 - DNA, 15 bp, Homo sapiens
gagtcttcttgggtt

SEQ ID NO: 584209 - DNA, 15 bp, Homo sapiens
tgagtcttcttgggt

SEQ ID NO: 584210 - DNA, 15 bp, Homo sapiens
atgagtcttcttggg

SEQ ID NO: 584211 - DNA, 15 bp, Homo sapiens
tatgagtcttcttgg

SEQ ID NO: 584212 - DNA, 15 bp, Homo sapiens
ttatgagtcttcttg

SEQ ID NO: 584213 - DNA, 15 bp, Homo sapiens
cttatgagtcttctt

SEQ ID NO: 584214 - DNA, 15 bp, Homo sapiens
acttatgagtcttct

SEQ ID NO: 584215 - DNA, 15 bp, Homo sapiens
aacttatgagtcttc

SEQ ID NO: 584216 - DNA, 15 bp, Homo sapiens
gaacttatgagtctt

SEQ ID NO: 584217 - DNA, 15 bp, Homo sapiens
tgaacttatgagtct

SEQ ID NO: 584218 - DNA, 15 bp, Homo sapiens
atgaacttatgagtc

SEQ ID NO: 584219 - DNA, 15 bp, Homo sapiens
aatgaacttatgagt

SEQ ID NO: 584220 - DNA, 15 bp, Homo sapiens
aaatgaacttatgag

SEQ ID NO: 584221 - DNA, 15 bp, Homo sapiens
gaaatgaacttatga

SEQ ID NO: 584222 - DNA, 15 bp, Homo sapiens
ggaaatgaacttatg

SEQ ID NO: 584223 - DNA, 15 bp, Homo sapiens
gggaaatgaacttat

SEQ ID NO: 584224 - DNA, 15 bp, Homo sapiens
tgggaaatgaactta

SEQ ID NO: 584225 - DNA, 15 bp, Homo sapiens
gtgggaaatgaactt

SEQ ID NO: 584226 - DNA, 15 bp, Homo sapiens
tgtgggaaatgaact

SEQ ID NO: 584227 - DNA, 15 bp, Homo sapiens
ttgtgggaaatgaac

SEQ ID NO: 584228 - DNA, 15 bp, Homo sapiens
attgtgggaaatgaa

SEQ ID NO: 584229 - DNA, 15 bp, Homo sapiens
tattgtgggaaatga

SEQ ID NO: 584230 - DNA, 15 bp, Homo sapiens
atattgtgggaaatg

SEQ ID NO: 584231 - DNA, 15 bp, Homo sapiens
tatattgtgggaaat

SEQ ID NO: 584232 - DNA, 15 bp, Homo sapiens
ttatattgtgggaaa

SEQ ID NO: 584233 - DNA, 15 bp, Homo sapiens
cttatattgtgggaa

SEQ ID NO: 584234 - DNA, 15 bp, Homo sapiens
acttatattgtggga

SEQ ID NO: 584235 - DNA, 15 bp, Homo sapiens
cacttatattgtggg

SEQ ID NO: 584236 - DNA, 15 bp, Homo sapiens
tcacttatattgtgg

SEQ ID NO: 584237 - DNA, 15 bp, Homo sapiens
gtcacttatattgtg

SEQ ID NO: 584238 - DNA, 15 bp, Homo sapiens
ggtcacttatattgt

SEQ ID NO: 584239 - DNA, 15 bp, Homo sapiens
tggtcacttatattg

SEQ ID NO: 584240 - DNA, 15 bp, Homo sapiens
gtggtcacttatatt

SEQ ID NO: 584241 - DNA, 15 bp, Homo sapiens
agtggtcacttatat

SEQ ID NO: 584242 - DNA, 15 bp, Homo sapiens
tagtggtcacttata

SEQ ID NO: 584243 - DNA, 15 bp, Homo sapiens
ctagtggtcacttat

SEQ ID NO: 584244 - DNA, 15 bp, Homo sapiens
gctagtggtcactta

SEQ ID NO: 584245 - DNA, 15 bp, Homo sapiens
tgctagtggtcactt

SEQ ID NO: 584246 - DNA, 15 bp, Homo sapiens
gtgctagtggtcact

SEQ ID NO: 584247 - DNA, 15 bp, Homo sapiens
agtgctagtggtcac

SEQ ID NO: 584248 - DNA, 15 bp, Homo sapiens
tagtgctagtggtca

SEQ ID NO: 584249 - DNA, 15 bp, Homo sapiens
atagtgctagtggtc

SEQ ID NO: 584250 - DNA, 15 bp, Homo sapiens
gatagtgctagtggt

SEQ ID NO: 584251 - DNA, 15 bp, Homo sapiens
tgatagtgctagtgg

SEQ ID NO: 584252 - DNA, 15 bp, Homo sapiens
ctgatagtgctagtg

SEQ ID NO: 584253 - DNA, 15 bp, Homo sapiens
cctgatagtgctagt

SEQ ID NO: 584254 - DNA, 15 bp, Homo sapiens
acctgatagtgctag

SEQ ID NO: 584255 - DNA, 15 bp, Homo sapiens
tacctgatagtgcta

SEQ ID NO: 584256 - DNA, 15 bp, Homo sapiens
ctacctgatagtgct

SEQ ID NO: 584257 - DNA, 15 bp, Homo sapiens
gctacctgatagtgc

SEQ ID NO: 584258 - DNA, 15 bp, Homo sapiens
tgctacctgatagtg

SEQ ID NO: 584259 - DNA, 15 bp, Homo sapiens
ctgctacctgatagt

SEQ ID NO: 584260 - DNA, 15 bp, Homo sapiens
cctgctacctgatag

SEQ ID NO: 584261 - DNA, 15 bp, Homo sapiens
gcctgctacctgata

SEQ ID NO: 584262 - DNA, 15 bp, Homo sapiens
tgcctgctacctgat

SEQ ID NO: 584263 - DNA, 15 bp, Homo sapiens
ctgcctgctacctga

SEQ ID NO: 584264 - DNA, 15 bp, Homo sapiens
tctgcctgctacctg

SEQ ID NO: 584265 - DNA, 15 bp, Homo sapiens
ctctgcctgctacct

SEQ ID NO: 584266 - DNA, 15 bp, Homo sapiens
actctgcctgctacc

SEQ ID NO: 584267 - DNA, 15 bp, Homo sapiens
aactctgcctgctac

SEQ ID NO: 584268 - DNA, 15 bp, Homo sapiens
caactctgcctgcta

SEQ ID NO: 584269 - DNA, 15 bp, Homo sapiens
ccaactctgcctgct

SEQ ID NO: 584270 - DNA, 15 bp, Homo sapiens
gccaactctgcctgc

SEQ ID NO: 584271 - DNA, 15 bp, Homo sapiens
tgccaactctgcctg

SEQ ID NO: 584272 - DNA, 15 bp, Homo sapiens
atgccaactctgcct

SEQ ID NO: 584273 - DNA, 15 bp, Homo sapiens
catgccaactctgcc

SEQ ID NO: 584274 - DNA, 15 bp, Homo sapiens
gcatgccaactctgc

SEQ ID NO: 584275 - DNA, 15 bp, Homo sapiens
agcatgccaactctg

SEQ ID NO: 584276 - DNA, 15 bp, Homo sapiens
aagcatgccaactct

SEQ ID NO: 584277 - DNA, 15 bp, Homo sapiens
aaagcatgccaactc

SEQ ID NO: 584278 - DNA, 15 bp, Homo sapiens
caaagcatgccaact

SEQ ID NO: 584279 - DNA, 15 bp, Homo sapiens
ccaaagcatgccaac

SEQ ID NO: 584280 - DNA, 15 bp, Homo sapiens
accaaagcatgccaa

SEQ ID NO: 584281 - DNA, 15 bp, Homo sapiens
aaccaaagcatgcca

SEQ ID NO: 584282 - DNA, 15 bp, Homo sapiens
gaaccaaagcatgcc

SEQ ID NO: 584283 - DNA, 15 bp, Homo sapiens
agaaccaaagcatgc

SEQ ID NO: 584284 - DNA, 15 bp, Homo sapiens
tagaaccaaagcatg

SEQ ID NO: 584285 - DNA, 15 bp, Homo sapiens
atagaaccaaagcat

SEQ ID NO: 584286 - DNA, 15 bp, Homo sapiens
catagaaccaaagca

SEQ ID NO: 584287 - DNA, 15 bp, Homo sapiens
acatagaaccaaagc

SEQ ID NO: 584288 - DNA, 15 bp, Homo sapiens
tacatagaaccaaag

SEQ ID NO: 584289 - DNA, 15 bp, Homo sapiens
ttacatagaaccaaa

SEQ ID NO: 584290 - DNA, 15 bp, Homo sapiens
cttacatagaaccaa

SEQ ID NO: 584291 - DNA, 15 bp, Homo sapiens
tcttacatagaacca

SEQ ID NO: 584292 - DNA, 15 bp, Homo sapiens
ttcttacatagaacc

SEQ ID NO: 584293 - DNA, 15 bp, Homo sapiens
tttcttacatagaac

SEQ ID NO: 584294 - DNA, 15 bp, Homo sapiens
atttcttacatagaa

SEQ ID NO: 584295 - DNA, 15 bp, Homo sapiens
gatttcttacataga

SEQ ID NO: 584296 - DNA, 15 bp, Homo sapiens
ggatttcttacatag

SEQ ID NO: 584297 - DNA, 15 bp, Homo sapiens
gggatttcttacata

SEQ ID NO: 584298 - DNA, 15 bp, Homo sapiens
agggatttcttacat

SEQ ID NO: 584299 - DNA, 15 bp, Homo sapiens
tagggatttcttaca

SEQ ID NO: 584300 - DNA, 15 bp, Homo sapiens
ttagggatttcttac

SEQ ID NO: 584301 - DNA, 15 bp, Homo sapiens
cttagggatttctta

SEQ ID NO: 584302 - DNA, 15 bp, Homo sapiens
ccttagggatttctt

SEQ ID NO: 584303 - DNA, 15 bp, Homo sapiens
accttagggatttct

SEQ ID NO: 584304 - DNA, 15 bp, Homo sapiens
taccttagggatttc

SEQ ID NO: 584305 - DNA, 15 bp, Homo sapiens
ttaccttagggattt

SEQ ID NO: 584306 - DNA, 15 bp, Homo sapiens
tttaccttagggatt

SEQ ID NO: 584307 - DNA, 15 bp, Homo sapiens
ttttaccttagggat

SEQ ID NO: 584308 - DNA, 15 bp, Homo sapiens
cttttaccttaggga

SEQ ID NO: 584309 - DNA, 15 bp, Homo sapiens
acttttaccttaggg

SEQ ID NO: 584310 - DNA, 15 bp, Homo sapiens
aacttttaccttagg

SEQ ID NO: 584311 - DNA, 15 bp, Homo sapiens
aaacttttaccttag

SEQ ID NO: 584312 - DNA, 15 bp, Homo sapiens
taaacttttacctta

SEQ ID NO: 584313 - DNA, 15 bp, Homo sapiens
ataaacttttacctt

SEQ ID NO: 584314 - DNA, 15 bp, Homo sapiens
tataaacttttacct

SEQ ID NO: 584315 - DNA, 15 bp, Homo sapiens
ttataaacttttacc

SEQ ID NO: 584316 - DNA, 15 bp, Homo sapiens
tttataaacttttac

SEQ ID NO: 584317 - DNA, 15 bp, Homo sapiens
atttataaactttta

SEQ ID NO: 584318 - DNA, 15 bp, Homo sapiens
tatttataaactttt

SEQ ID NO: 584319 - DNA, 15 bp, Homo sapiens
ctatttataaacttt

SEQ ID NO: 584320 - DNA, 15 bp, Homo sapiens
tctatttataaactt

SEQ ID NO: 584321 - DNA, 15 bp, Homo sapiens
ttctatttataaact

SEQ ID NO: 584322 - DNA, 15 bp, Homo sapiens
cttctatttataaac

SEQ ID NO: 584323 - DNA, 15 bp, Homo sapiens
tcttctatttataaa

SEQ ID NO: 584324 - DNA, 15 bp, Homo sapiens
ctcttctatttataa

SEQ ID NO: 584325 - DNA, 15 bp, Homo sapiens
gctcttctatttata

SEQ ID NO: 584326 - DNA, 15 bp, Homo sapiens
tgctcttctatttat

SEQ ID NO: 584327 - DNA, 15 bp, Homo sapiens
atgctcttctattta

SEQ ID NO: 584328 - DNA, 15 bp, Homo sapiens
gatgctcttctattt

SEQ ID NO: 584329 - DNA, 15 bp, Homo sapiens
agatgctcttctatt

SEQ ID NO: 584330 - DNA, 15 bp, Homo sapiens
cagatgctcttctat

SEQ ID NO: 584331 - DNA, 15 bp, Homo sapiens
acagatgctcttcta

SEQ ID NO: 584332 - DNA, 15 bp, Homo sapiens
cacagatgctcttct

SEQ ID NO: 584333 - DNA, 15 bp, Homo sapiens
acacagatgctcttc

SEQ ID NO: 584334 - DNA, 15 bp, Homo sapiens
aacacagatgctctt

SEQ ID NO: 584335 - DNA, 15 bp, Homo sapiens
caacacagatgctct

SEQ ID NO: 584336 - DNA, 15 bp, Homo sapiens
ccaacacagatgctc

SEQ ID NO: 584337 - DNA, 15 bp, Homo sapiens
accaacacagatgct

SEQ ID NO: 584338 - DNA, 15 bp, Homo sapiens
taccaacacagatgc

SEQ ID NO: 584339 - DNA, 15 bp, Homo sapiens
ataccaacacagatg

SEQ ID NO: 584340 - DNA, 15 bp, Homo sapiens
aataccaacacagat

SEQ ID NO: 584341 - DNA, 15 bp, Homo sapiens
caataccaacacaga

SEQ ID NO: 584342 - DNA, 15 bp, Homo sapiens
ccaataccaacacag

SEQ ID NO: 584343 - DNA, 15 bp, Homo sapiens
accaataccaacaca

SEQ ID NO: 584344 - DNA, 15 bp, Homo sapiens
caccaataccaacac

SEQ ID NO: 584345 - DNA, 15 bp, Homo sapiens
ccaccaataccaaca

SEQ ID NO: 584346 - DNA, 15 bp, Homo sapiens
accaccaataccaac

SEQ ID NO: 584347 - DNA, 15 bp, Homo sapiens
gcccacatatgcaaa

SEQ ID NO: 584348 - DNA, 15 bp, Homo sapiens
tgcccacatatgcaa

SEQ ID NO: 584349 - DNA, 15 bp, Homo sapiens
ttgcccacatatgca

SEQ ID NO: 584350 - DNA, 15 bp, Homo sapiens
cttgcccacatatgc

SEQ ID NO: 584351 - DNA, 15 bp, Homo sapiens
acttgcccacatatg

SEQ ID NO: 584352 - DNA, 15 bp, Homo sapiens
cacttgcccacatat

SEQ ID NO: 584353 - DNA, 15 bp, Homo sapiens
acacttgcccacata

SEQ ID NO: 584354 - DNA, 15 bp, Homo sapiens
tacacttgcccacat

SEQ ID NO: 584355 - DNA, 15 bp, Homo sapiens
gtacacttgcccaca

SEQ ID NO: 584356 - DNA, 15 bp, Homo sapiens
cgtacacttgcccac

SEQ ID NO: 584357 - DNA, 15 bp, Homo sapiens
acgtacacttgccca

SEQ ID NO: 584358 - DNA, 15 bp, Homo sapiens
cacgtacacttgccc

SEQ ID NO: 584359 - DNA, 15 bp, Homo sapiens
acacgtacacttgcc

SEQ ID NO: 584360 - DNA, 15 bp, Homo sapiens
cacacgtacacttgc

SEQ ID NO: 584361 - DNA, 15 bp, Homo sapiens
acacacgtacacttg

SEQ ID NO: 584362 - DNA, 15 bp, Homo sapiens
cacacacgtacactt

SEQ ID NO: 584363 - DNA, 15 bp, Homo sapiens
acacacacgtacact

SEQ ID NO: 584364 - DNA, 15 bp, Homo sapiens
cacacacacgtacac

SEQ ID NO: 584365 - DNA, 15 bp, Homo sapiens
acacacacacgtaca

SEQ ID NO: 584366 - DNA, 15 bp, Homo sapiens
cacacacacacgtac

SEQ ID NO: 584367 - DNA, 15 bp, Homo sapiens
acacacacacacgta

SEQ ID NO: 584368 - DNA, 15 bp, Homo sapiens
gacacacacacacgt

SEQ ID NO: 584369 - DNA, 15 bp, Homo sapiens
tgacacacacacacg

SEQ ID NO: 584370 - DNA, 15 bp, Homo sapiens
atgacacacacacac

SEQ ID NO: 584371 - DNA, 15 bp, Homo sapiens
catgacacacacaca

SEQ ID NO: 584372 - DNA, 15 bp, Homo sapiens
acatgacacacacac

SEQ ID NO: 584373 - DNA, 15 bp, Homo sapiens
cacatgacacacaca

SEQ ID NO: 584374 - DNA, 15 bp, Homo sapiens
acacatgacacacac

SEQ ID NO: 584375 - DNA, 15 bp, Homo sapiens
cacacatgacacaca

SEQ ID NO: 584376 - DNA, 15 bp, Homo sapiens
ccacacatgacacac

SEQ ID NO: 584377 - DNA, 15 bp, Homo sapiens
gccacacatgacaca

SEQ ID NO: 584378 - DNA, 15 bp, Homo sapiens
tgccacacatgacac

SEQ ID NO: 584379 - DNA, 15 bp, Homo sapiens
ctgccacacatgaca

SEQ ID NO: 584380 - DNA, 15 bp, Homo sapiens
tctgccacacatgac

SEQ ID NO: 584381 - DNA, 15 bp, Homo sapiens
ctctgccacacatga

SEQ ID NO: 584382 - DNA, 15 bp, Homo sapiens
cctctgccacacatg

SEQ ID NO: 584383 - DNA, 15 bp, Homo sapiens
ccctctgccacacat

SEQ ID NO: 584384 - DNA, 15 bp, Homo sapiens
cccctctgccacaca

SEQ ID NO: 584385 - DNA, 15 bp, Homo sapiens
gcccctctgccacac

SEQ ID NO: 584386 - DNA, 15 bp, Homo sapiens
agcccctctgccaca

SEQ ID NO: 584387 - DNA, 15 bp, Homo sapiens
aagcccctctgccac

SEQ ID NO: 584388 - DNA, 15 bp, Homo sapiens
gaagcccctctgcca

SEQ ID NO: 584389 - DNA, 15 bp, Homo sapiens
ggaagcccctctgcc

SEQ ID NO: 584390 - DNA, 15 bp, Homo sapiens
aggaagcccctctgc

SEQ ID NO: 584391 - DNA, 15 bp, Homo sapiens
taggaagcccctctg

SEQ ID NO: 584392 - DNA, 15 bp, Homo sapiens
ttaggaagcccctct

SEQ ID NO: 584393 - DNA, 15 bp, Homo sapiens
gttaggaagcccctc

SEQ ID NO: 584394 - DNA, 15 bp, Homo sapiens
ggttaggaagcccct

SEQ ID NO: 584395 - DNA, 15 bp, Homo sapiens
gggttaggaagcccc

SEQ ID NO: 584396 - DNA, 15 bp, Homo sapiens
ggggttaggaagccc

SEQ ID NO: 584397 - DNA, 15 bp, Homo sapiens
aggggttaggaagcc

SEQ ID NO: 584398 - DNA, 15 bp, Homo sapiens
caggggttaggaagc

SEQ ID NO: 584399 - DNA, 15 bp, Homo sapiens
gcaggggttaggaag

SEQ ID NO: 584400 - DNA, 15 bp, Homo sapiens
ggcaggggttaggaa

SEQ ID NO: 584401 - DNA, 15 bp, Homo sapiens
aggcaggggttagga

SEQ ID NO: 584402 - DNA, 15 bp, Homo sapiens
caggcaggggttagg

SEQ ID NO: 584403 - DNA, 15 bp, Homo sapiens
tcaggcaggggttag

SEQ ID NO: 584404 - DNA, 15 bp, Homo sapiens
atcaggcaggggtta

SEQ ID NO: 584405 - DNA, 15 bp, Homo sapiens
tatcaggcaggggtt

SEQ ID NO: 584406 - DNA, 15 bp, Homo sapiens
ctatcaggcaggggt

SEQ ID NO: 584407 - DNA, 15 bp, Homo sapiens
cctatcaggcagggg

SEQ ID NO: 584408 - DNA, 15 bp, Homo sapiens
acctatcaggcaggg

SEQ ID NO: 584409 - DNA, 15 bp, Homo sapiens
cacctatcaggcagg

SEQ ID NO: 584410 - DNA, 15 bp, Homo sapiens
gcacctatcaggcag

SEQ ID NO: 584411 - DNA, 15 bp, Homo sapiens
tgcacctatcaggca

SEQ ID NO: 584412 - DNA, 15 bp, Homo sapiens
ctgcacctatcaggc

SEQ ID NO: 584413 - DNA, 15 bp, Homo sapiens
tctgcacctatcagg

SEQ ID NO: 584414 - DNA, 15 bp, Homo sapiens
ttctgcacctatcag

SEQ ID NO: 584415 - DNA, 15 bp, Homo sapiens
gttctgcacctatca

SEQ ID NO: 584416 - DNA, 15 bp, Homo sapiens
cgttctgcacctatc

SEQ ID NO: 584417 - DNA, 15 bp, Homo sapiens
acgttctgcacctat

SEQ ID NO: 584418 - DNA, 15 bp, Homo sapiens
gacgttctgcaccta

SEQ ID NO: 584419 - DNA, 15 bp, Homo sapiens
cgacgttctgcacct

SEQ ID NO: 584420 - DNA, 15 bp, Homo sapiens
ccgacgttctgcacc

SEQ ID NO: 584421 - DNA, 15 bp, Homo sapiens
gccgacgttctgcac

SEQ ID NO: 584422 - DNA, 15 bp, Homo sapiens
agccgacgttctgca

SEQ ID NO: 584423 - DNA, 15 bp, Homo sapiens
tagccgacgttctgc

SEQ ID NO: 584424 - DNA, 15 bp, Homo sapiens
atagccgacgttctg

SEQ ID NO: 584425 - DNA, 15 bp, Homo sapiens
gatagccgacgttct

SEQ ID NO: 584426 - DNA, 15 bp, Homo sapiens
tgatagccgacgttc

SEQ ID NO: 584427 - DNA, 15 bp, Homo sapiens
ctgatagccgacgtt

SEQ ID NO: 584428 - DNA, 15 bp, Homo sapiens
tctgatagccgacgt

SEQ ID NO: 584429 - DNA, 15 bp, Homo sapiens
ctctgatagccgacg

SEQ ID NO: 584430 - DNA, 15 bp, Homo sapiens
gctctgatagccgac

SEQ ID NO: 584431 - DNA, 15 bp, Homo sapiens
tgctctgatagccga

SEQ ID NO: 584432 - DNA, 15 bp, Homo sapiens
ttgctctgatagccg

SEQ ID NO: 584433 - DNA, 15 bp, Homo sapiens
cttgctctgatagcc

SEQ ID NO: 584434 - DNA, 15 bp, Homo sapiens
gcttgctctgatagc

SEQ ID NO: 584435 - DNA, 15 bp, Homo sapiens
tgcttgctctgatag

SEQ ID NO: 584436 - DNA, 15 bp, Homo sapiens
atgcttgctctgata

SEQ ID NO: 584437 - DNA, 15 bp, Homo sapiens
aatgcttgctctgat

SEQ ID NO: 584438 - DNA, 15 bp, Homo sapiens
caatgcttgctctga

SEQ ID NO: 584439 - DNA, 15 bp, Homo sapiens
acaatgcttgctctg

SEQ ID NO: 584440 - DNA, 15 bp, Homo sapiens
cacaatgcttgctct

SEQ ID NO: 584441 - DNA, 15 bp, Homo sapiens
ccacaatgcttgctc

SEQ ID NO: 584442 - DNA, 15 bp, Homo sapiens
tccacaatgcttgct

SEQ ID NO: 584443 - DNA, 15 bp, Homo sapiens
ctccacaatgcttgc

SEQ ID NO: 584444 - DNA, 15 bp, Homo sapiens
gctccacaatgcttg

SEQ ID NO: 584445 - DNA, 15 bp, Homo sapiens
cgctccacaatgctt

SEQ ID NO: 584446 - DNA, 15 bp, Homo sapiens
ccgctccacaatgct

SEQ ID NO: 584447 - DNA, 15 bp, Homo sapiens
accgctccacaatgc

SEQ ID NO: 584448 - DNA, 15 bp, Homo sapiens
aaccgctccacaatg

SEQ ID NO: 584449 - DNA, 15 bp, Homo sapiens
gaaccgctccacaat

SEQ ID NO: 584450 - DNA, 15 bp, Homo sapiens
ggaaccgctccacaa

SEQ ID NO: 584451 - DNA, 15 bp, Homo sapiens
aggaaccgctccaca

SEQ ID NO: 584452 - DNA, 15 bp, Homo sapiens
aaggaaccgctccac

SEQ ID NO: 584453 - DNA, 15 bp, Homo sapiens
taaggaaccgctcca

SEQ ID NO: 584454 - DNA, 15 bp, Homo sapiens
ataaggaaccgctcc

SEQ ID NO: 584455 - DNA, 15 bp, Homo sapiens
cataaggaaccgctc

SEQ ID NO: 584456 - DNA, 15 bp, Homo sapiens
gcataaggaaccgct

SEQ ID NO: 584457 - DNA, 15 bp, Homo sapiens
ggcataaggaaccgc

SEQ ID NO: 584458 - DNA, 15 bp, Homo sapiens
tggcataaggaaccg

SEQ ID NO: 584459 - DNA, 15 bp, Homo sapiens
ctggcataaggaacc

SEQ ID NO: 584460 - DNA, 15 bp, Homo sapiens
cctggcataaggaac

SEQ ID NO: 584461 - DNA, 15 bp, Homo sapiens
gcctggcataaggaa

SEQ ID NO: 584462 - DNA, 15 bp, Homo sapiens
agcctggcataagga

SEQ ID NO: 584463 - DNA, 15 bp, Homo sapiens
cagcctggcataagg

SEQ ID NO: 584464 - DNA, 15 bp, Homo sapiens
gcagcctggcataag

SEQ ID NO: 584465 - DNA, 15 bp, Homo sapiens
ggcagcctggcataa

SEQ ID NO: 584466 - DNA, 15 bp, Homo sapiens
tggcagcctggcata

SEQ ID NO: 584467 - DNA, 15 bp, Homo sapiens
atggcagcctggcat

SEQ ID NO: 584468 - DNA, 15 bp, Homo sapiens
catggcagcctggca

SEQ ID NO: 584469 - DNA, 15 bp, Homo sapiens
acatggcagcctggc

SEQ ID NO: 584470 - DNA, 15 bp, Homo sapiens
cacatggcagcctgg

SEQ ID NO: 584471 - DNA, 15 bp, Homo sapiens
tcacatggcagcctg

SEQ ID NO: 584472 - DNA, 15 bp, Homo sapiens
ctcacatggcagcct

SEQ ID NO: 584473 - DNA, 15 bp, Homo sapiens
tctcacatggcagcc

SEQ ID NO: 584474 - DNA, 15 bp, Homo sapiens
atctcacatggcagc

SEQ ID NO: 584475 - DNA, 15 bp, Homo sapiens
catctcacatggcag

SEQ ID NO: 584476 - DNA, 15 bp, Homo sapiens
tcatctcacatggca

SEQ ID NO: 584477 - DNA, 15 bp, Homo sapiens
atcatctcacatggc

SEQ ID NO: 584478 - DNA, 15 bp, Homo sapiens
gatcatctcacatgg

SEQ ID NO: 584479 - DNA, 15 bp, Homo sapiens
ggatcatctcacatg

SEQ ID NO: 584480 - DNA, 15 bp, Homo sapiens
tggatcatctcacat

SEQ ID NO: 584481 - DNA, 15 bp, Homo sapiens
ttggatcatctcaca

SEQ ID NO: 584482 - DNA, 15 bp, Homo sapiens
cttggatcatctcac

SEQ ID NO: 584483 - DNA, 15 bp, Homo sapiens
tcttggatcatctca

SEQ ID NO: 584484 - DNA, 15 bp, Homo sapiens
gtcttggatcatctc

SEQ ID NO: 584485 - DNA, 15 bp, Homo sapiens
ggtcttggatcatct

SEQ ID NO: 584486 - DNA, 15 bp, Homo sapiens
tggtcttggatcatc

SEQ ID NO: 584487 - DNA, 15 bp, Homo sapiens
ttggtcttggatcat

SEQ ID NO: 584488 - DNA, 15 bp, Homo sapiens
tttggtcttggatca

SEQ ID NO: 584489 - DNA, 15 bp, Homo sapiens
ttttggtcttggatc

SEQ ID NO: 584490 - DNA, 15 bp, Homo sapiens
gttttggtcttggat

SEQ ID NO: 584491 - DNA, 15 bp, Homo sapiens
tgttttggtcttgga

SEQ ID NO: 584492 - DNA, 15 bp, Homo sapiens
ttgttttggtcttgg

SEQ ID NO: 584493 - DNA, 15 bp, Homo sapiens
cttgttttggtcttg

SEQ ID NO: 584494 - DNA, 15 bp, Homo sapiens
ccttgttttggtctt

SEQ ID NO: 584495 - DNA, 15 bp, Homo sapiens
gccttgttttggtct

SEQ ID NO: 584496 - DNA, 15 bp, Homo sapiens
ggccttgttttggtc

SEQ ID NO: 584497 - DNA, 15 bp, Homo sapiens
gggccttgttttggt

SEQ ID NO: 584498 - DNA, 15 bp, Homo sapiens
agggccttgttttgg

SEQ ID NO: 584499 - DNA, 15 bp, Homo sapiens
tagggccttgttttg

SEQ ID NO: 584500 - DNA, 15 bp, Homo sapiens
ctagggccttgtttt

SEQ ID NO: 584501 - DNA, 15 bp, Homo sapiens
tctagggccttgttt

SEQ ID NO: 584502 - DNA, 15 bp, Homo sapiens
gtctagggccttgtt

SEQ ID NO: 584503 - DNA, 15 bp, Homo sapiens
agtctagggccttgt

SEQ ID NO: 584504 - DNA, 15 bp, Homo sapiens
cagtctagggccttg

SEQ ID NO: 584505 - DNA, 15 bp, Homo sapiens
gcagtctagggcctt

SEQ ID NO: 584506 - DNA, 15 bp, Homo sapiens
tgcagtctagggcct

SEQ ID NO: 584507 - DNA, 15 bp, Homo sapiens
ctgcagtctagggcc

SEQ ID NO: 584508 - DNA, 15 bp, Homo sapiens
actgcagtctagggc

SEQ ID NO: 584509 - DNA, 15 bp, Homo sapiens
tactgcagtctaggg

SEQ ID NO: 584510 - DNA, 15 bp, Homo sapiens
ttactgcagtctagg

SEQ ID NO: 584511 - DNA, 15 bp, Homo sapiens
tttactgcagtctag

SEQ ID NO: 584512 - DNA, 15 bp, Homo sapiens
ttttactgcagtcta

SEQ ID NO: 584513 - DNA, 15 bp, Homo sapiens
gttttactgcagtct

SEQ ID NO: 584514 - DNA, 15 bp, Homo sapiens
ggttttactgcagtc

SEQ ID NO: 584515 - DNA, 15 bp, Homo sapiens
gggttttactgcagt

SEQ ID NO: 584516 - DNA, 15 bp, Homo sapiens
tgggttttactgcag

SEQ ID NO: 584517 - DNA, 15 bp, Homo sapiens
ctgggttttactgca

SEQ ID NO: 584518 - DNA, 15 bp, Homo sapiens
tctgggttttactgc

SEQ ID NO: 584519 - DNA, 15 bp, Homo sapiens
ttctgggttttactg

SEQ ID NO: 584520 - DNA, 15 bp, Homo sapiens
gttctgggttttact

SEQ ID NO: 584521 - DNA, 15 bp, Homo sapiens
agttctgggttttac

SEQ ID NO: 584522 - DNA, 15 bp, Homo sapiens
gagttctgggtttta

SEQ ID NO: 584523 - DNA, 15 bp, Homo sapiens
tgagttctgggtttt

SEQ ID NO: 584524 - DNA, 15 bp, Homo sapiens
ttgagttctgggttt

SEQ ID NO: 584525 - DNA, 15 bp, Homo sapiens
cttgagttctgggtt

SEQ ID NO: 584526 - DNA, 15 bp, Homo sapiens
acttgagttctgggt

SEQ ID NO: 584527 - DNA, 15 bp, Homo sapiens
tacttgagttctggg

SEQ ID NO: 584528 - DNA, 15 bp, Homo sapiens
ctacttgagttctgg

SEQ ID NO: 584529 - DNA, 15 bp, Homo sapiens
cctacttgagttctg

SEQ ID NO: 584530 - DNA, 15 bp, Homo sapiens
ccctacttgagttct

SEQ ID NO: 584531 - DNA, 15 bp, Homo sapiens
gccctacttgagttc

SEQ ID NO: 584532 - DNA, 15 bp, Homo sapiens
tgccctacttgagtt

SEQ ID NO: 584533 - DNA, 15 bp, Homo sapiens
ctgccctacttgagt

SEQ ID NO: 584534 - DNA, 15 bp, Homo sapiens
tctgccctacttgag

SEQ ID NO: 584535 - DNA, 15 bp, Homo sapiens
ttctgccctacttga

SEQ ID NO: 584536 - DNA, 15 bp, Homo sapiens
cttctgccctacttg

SEQ ID NO: 584537 - DNA, 15 bp, Homo sapiens
ccttctgccctactt

SEQ ID NO: 584538 - DNA, 15 bp, Homo sapiens
accttctgccctact

SEQ ID NO: 584539 - DNA, 15 bp, Homo sapiens
caccttctgccctac

SEQ ID NO: 584540 - DNA, 15 bp, Homo sapiens
ccaccttctgcccta

SEQ ID NO: 584541 - DNA, 15 bp, Homo sapiens
tccaccttctgccct

SEQ ID NO: 584542 - DNA, 15 bp, Homo sapiens
ttccaccttctgccc

SEQ ID NO: 584543 - DNA, 15 bp, Homo sapiens
cttccaccttctgcc

SEQ ID NO: 584544 - DNA, 15 bp, Homo sapiens
ccttccaccttctgc

SEQ ID NO: 584545 - DNA, 15 bp, Homo sapiens
gccttccaccttctg

SEQ ID NO: 584546 - DNA, 15 bp, Homo sapiens
agccttccaccttct

SEQ ID NO: 584547 - DNA, 15 bp, Homo sapiens
gagccttccaccttc

SEQ ID NO: 584548 - DNA, 15 bp, Homo sapiens
tgagccttccacctt

SEQ ID NO: 584549 - DNA, 15 bp, Homo sapiens
atgagccttccacct

SEQ ID NO: 584550 - DNA, 15 bp, Homo sapiens
tatgagccttccacc

SEQ ID NO: 584551 - DNA, 15 bp, Homo sapiens
atatgagccttccac

SEQ ID NO: 584552 - DNA, 15 bp, Homo sapiens
catatgagccttcca

SEQ ID NO: 584553 - DNA, 15 bp, Homo sapiens
ccatatgagccttcc

SEQ ID NO: 584554 - DNA, 15 bp, Homo sapiens
tccatatgagccttc

SEQ ID NO: 584555 - DNA, 15 bp, Homo sapiens
atccatatgagcctt

SEQ ID NO: 584556 - DNA, 15 bp, Homo sapiens
tatccatatgagcct

SEQ ID NO: 584557 - DNA, 15 bp, Homo sapiens
ctatccatatgagcc

SEQ ID NO: 584558 - DNA, 15 bp, Homo sapiens
tctatccatatgagc

SEQ ID NO: 584559 - DNA, 15 bp, Homo sapiens
ttctatccatatgag

SEQ ID NO: 584560 - DNA, 15 bp, Homo sapiens
cttctatccatatga

SEQ ID NO: 584561 - DNA, 15 bp, Homo sapiens
ccttctatccatatg

SEQ ID NO: 584562 - DNA, 15 bp, Homo sapiens
gccttctatccatat

SEQ ID NO: 584563 - DNA, 15 bp, Homo sapiens
ggccttctatccata

SEQ ID NO: 584564 - DNA, 15 bp, Homo sapiens
gggccttctatccat

SEQ ID NO: 584565 - DNA, 15 bp, Homo sapiens
tgggccttctatcca

SEQ ID NO: 584566 - DNA, 15 bp, Homo sapiens
ttgggccttctatcc

SEQ ID NO: 584567 - DNA, 15 bp, Homo sapiens
tttgggccttctatc

SEQ ID NO: 584568 - DNA, 15 bp, Homo sapiens
ctttgggccttctat

SEQ ID NO: 584569 - DNA, 15 bp, Homo sapiens
actttgggccttcta

SEQ ID NO: 584570 - DNA, 15 bp, Homo sapiens
tactttgggccttct

SEQ ID NO: 584571 - DNA, 15 bp, Homo sapiens
atactttgggccttc

SEQ ID NO: 584572 - DNA, 15 bp, Homo sapiens
tatactttgggcctt

SEQ ID NO: 584573 - DNA, 15 bp, Homo sapiens
ttatactttgggcct

SEQ ID NO: 584574 - DNA, 15 bp, Homo sapiens
cttatactttgggcc

SEQ ID NO: 584575 - DNA, 15 bp, Homo sapiens
tcttatactttgggc

SEQ ID NO: 584576 - DNA, 15 bp, Homo sapiens
gtcttatactttggg

SEQ ID NO: 584577 - DNA, 15 bp, Homo sapiens
tgtcttatactttgg

SEQ ID NO: 584578 - DNA, 15 bp, Homo sapiens
ctgtcttatactttg

SEQ ID NO: 584579 - DNA, 15 bp, Homo sapiens
tctgtcttatacttt

SEQ ID NO: 584580 - DNA, 15 bp, Homo sapiens
atctgtcttatactt

SEQ ID NO: 584581 - DNA, 15 bp, Homo sapiens
catctgtcttatact

SEQ ID NO: 584582 - DNA, 15 bp, Homo sapiens
ccatctgtcttatac

SEQ ID NO: 584583 - DNA, 15 bp, Homo sapiens
accatctgtcttata

SEQ ID NO: 584584 - DNA, 15 bp, Homo sapiens
aaccatctgtcttat

SEQ ID NO: 584585 - DNA, 15 bp, Homo sapiens
aaaccatctgtctta

SEQ ID NO: 584586 - DNA, 15 bp, Homo sapiens
caaaccatctgtctt

SEQ ID NO: 584587 - DNA, 15 bp, Homo sapiens
tcaaaccatctgtct

SEQ ID NO: 584588 - DNA, 15 bp, Homo sapiens
ctcaaaccatctgtc

SEQ ID NO: 584589 - DNA, 15 bp, Homo sapiens
tctcaaaccatctgt

SEQ ID NO: 584590 - DNA, 15 bp, Homo sapiens
gtctcaaaccatctg

SEQ ID NO: 584591 - DNA, 15 bp, Homo sapiens
agtctcaaaccatct

SEQ ID NO: 584592 - DNA, 15 bp, Homo sapiens
aagtctcaaaccatc

SEQ ID NO: 584593 - DNA, 15 bp, Homo sapiens
caagtctcaaaccat

SEQ ID NO: 584594 - DNA, 15 bp, Homo sapiens
tcaagtctcaaacca

SEQ ID NO: 584595 - DNA, 15 bp, Homo sapiens
ctcaagtctcaaacc

SEQ ID NO: 584596 - DNA, 15 bp, Homo sapiens
tctcaagtctcaaac

SEQ ID NO: 584597 - DNA, 15 bp, Homo sapiens
gtctcaagtctcaaa

SEQ ID NO: 584598 - DNA, 15 bp, Homo sapiens
ggtctcaagtctcaa

SEQ ID NO: 584599 - DNA, 15 bp, Homo sapiens
gggtctcaagtctca

SEQ ID NO: 584600 - DNA, 15 bp, Homo sapiens
cgggtctcaagtctc

SEQ ID NO: 584601 - DNA, 15 bp, Homo sapiens
tcgggtctcaagtct

SEQ ID NO: 584602 - DNA, 15 bp, Homo sapiens
ctcgggtctcaagtc

SEQ ID NO: 584603 - DNA, 15 bp, Homo sapiens
cctcgggtctcaagt

SEQ ID NO: 584604 - DNA, 15 bp, Homo sapiens
tcctcgggtctcaag

SEQ ID NO: 584605 - DNA, 15 bp, Homo sapiens
gtcctcgggtctcaa

SEQ ID NO: 584606 - DNA, 15 bp, Homo sapiens
agtcctcgggtctca

SEQ ID NO: 584607 - DNA, 15 bp, Homo sapiens
tagtcctcgggtctc

SEQ ID NO: 584608 - DNA, 15 bp, Homo sapiens
ttagtcctcgggtct

SEQ ID NO: 584609 - DNA, 15 bp, Homo sapiens
cttagtcctcgggtc

SEQ ID NO: 584610 - DNA, 15 bp, Homo sapiens
tcttagtcctcgggt

SEQ ID NO: 584611 - DNA, 15 bp, Homo sapiens
atcttagtcctcggg

SEQ ID NO: 584612 - DNA, 15 bp, Homo sapiens
catcttagtcctcgg

SEQ ID NO: 584613 - DNA, 15 bp, Homo sapiens
ccatcttagtcctcg

SEQ ID NO: 584614 - DNA, 15 bp, Homo sapiens
tccatcttagtcctc

SEQ ID NO: 584615 - DNA, 15 bp, Homo sapiens
ttccatcttagtcct

SEQ ID NO: 584616 - DNA, 15 bp, Homo sapiens
tttccatcttagtcc

SEQ ID NO: 584617 - DNA, 15 bp, Homo sapiens
ctttccatcttagtc

SEQ ID NO: 584618 - DNA, 15 bp, Homo sapiens
gctttccatcttagt

SEQ ID NO: 584619 - DNA, 15 bp, Homo sapiens
ggctttccatcttag

SEQ ID NO: 584620 - DNA, 15 bp, Homo sapiens
gggctttccatctta

SEQ ID NO: 584621 - DNA, 15 bp, Homo sapiens
tgggctttccatctt

SEQ ID NO: 584622 - DNA, 15 bp, Homo sapiens
atgggctttccatct

SEQ ID NO: 584623 - DNA, 15 bp, Homo sapiens
catgggctttccatc

SEQ ID NO: 584624 - DNA, 15 bp, Homo sapiens
acatgggctttccat

SEQ ID NO: 584625 - DNA, 15 bp, Homo sapiens
aacatgggctttcca

SEQ ID NO: 584626 - DNA, 15 bp, Homo sapiens
gaacatgggctttcc

SEQ ID NO: 584627 - DNA, 15 bp, Homo sapiens
ggaacatgggctttc

SEQ ID NO: 584628 - DNA, 15 bp, Homo sapiens
tggaacatgggcttt

SEQ ID NO: 584629 - DNA, 15 bp, Homo sapiens
ttggaacatgggctt

SEQ ID NO: 584630 - DNA, 15 bp, Homo sapiens
cttggaacatgggct

SEQ ID NO: 584631 - DNA, 15 bp, Homo sapiens
tcttggaacatgggc

SEQ ID NO: 584632 - DNA, 15 bp, Homo sapiens
atcttggaacatggg

SEQ ID NO: 584633 - DNA, 15 bp, Homo sapiens
tatcttggaacatgg

SEQ ID NO: 584634 - DNA, 15 bp, Homo sapiens
ctatcttggaacatg

SEQ ID NO: 584635 - DNA, 15 bp, Homo sapiens
tctatcttggaacat

SEQ ID NO: 584636 - DNA, 15 bp, Homo sapiens
atctatcttggaaca

SEQ ID NO: 584637 - DNA, 15 bp, Homo sapiens
tatctatcttggaac

SEQ ID NO: 584638 - DNA, 15 bp, Homo sapiens
ctatctatcttggaa

SEQ ID NO: 584639 - DNA, 15 bp, Homo sapiens
tctatctatcttgga

SEQ ID NO: 584640 - DNA, 15 bp, Homo sapiens
ttctatctatcttgg

SEQ ID NO: 584641 - DNA, 15 bp, Homo sapiens
cttctatctatcttg

SEQ ID NO: 584642 - DNA, 15 bp, Homo sapiens
gcttctatctatctt

SEQ ID NO: 584643 - DNA, 15 bp, Homo sapiens
ggcttctatctatct

SEQ ID NO: 584644 - DNA, 15 bp, Homo sapiens
aggcttctatctatc

SEQ ID NO: 584645 - DNA, 15 bp, Homo sapiens
gaggcttctatctat

SEQ ID NO: 584646 - DNA, 15 bp, Homo sapiens
tgaggcttctatcta

SEQ ID NO: 584647 - DNA, 15 bp, Homo sapiens
ctgaggcttctatct

SEQ ID NO: 584648 - DNA, 15 bp, Homo sapiens
cctgaggcttctatc

SEQ ID NO: 584649 - DNA, 15 bp, Homo sapiens
gcctgaggcttctat

SEQ ID NO: 584650 - DNA, 15 bp, Homo sapiens
ggcctgaggcttcta

SEQ ID NO: 584651 - DNA, 15 bp, Homo sapiens
aggcctgaggcttct

SEQ ID NO: 584652 - DNA, 15 bp, Homo sapiens
caggcctgaggcttc

SEQ ID NO: 584653 - DNA, 15 bp, Homo sapiens
tcaggcctgaggctt

SEQ ID NO: 584654 - DNA, 15 bp, Homo sapiens
ttcaggcctgaggct

SEQ ID NO: 584655 - DNA, 15 bp, Homo sapiens
tttcaggcctgaggc

SEQ ID NO: 584656 - DNA, 15 bp, Homo sapiens
gtttcaggcctgagg

SEQ ID NO: 584657 - DNA, 15 bp, Homo sapiens
ggtttcaggcctgag

SEQ ID NO: 584658 - DNA, 15 bp, Homo sapiens
tggtttcaggcctga

SEQ ID NO: 584659 - DNA, 15 bp, Homo sapiens
ttggtttcaggcctg

SEQ ID NO: 584660 - DNA, 15 bp, Homo sapiens
gttggtttcaggcct

SEQ ID NO: 584661 - DNA, 15 bp, Homo sapiens
tgttggtttcaggcc

SEQ ID NO: 584662 - DNA, 15 bp, Homo sapiens
ttgttggtttcaggc

SEQ ID NO: 584663 - DNA, 15 bp, Homo sapiens
tttgttggtttcagg

SEQ ID NO: 584664 - DNA, 15 bp, Homo sapiens
ttttgttggtttcag

SEQ ID NO: 584665 - DNA, 15 bp, Homo sapiens
cttttgttggtttca

SEQ ID NO: 584666 - DNA, 15 bp, Homo sapiens
gcttttgttggtttc

SEQ ID NO: 584667 - DNA, 15 bp, Homo sapiens
ggcttttgttggttt

SEQ ID NO: 584668 - DNA, 15 bp, Homo sapiens
aggcttttgttggtt

SEQ ID NO: 584669 - DNA, 15 bp, Homo sapiens
gaggcttttgttggt

SEQ ID NO: 584670 - DNA, 15 bp, Homo sapiens
tgaggcttttgttgg

SEQ ID NO: 584671 - DNA, 15 bp, Homo sapiens
ttgaggcttttgttg

SEQ ID NO: 584672 - DNA, 15 bp, Homo sapiens
cttgaggcttttgtt

SEQ ID NO: 584673 - DNA, 15 bp, Homo sapiens
tcttgaggcttttgt

SEQ ID NO: 584674 - DNA, 15 bp, Homo sapiens
ctcttgaggcttttg

SEQ ID NO: 584675 - DNA, 15 bp, Homo sapiens
gctcttgaggctttt

SEQ ID NO: 584676 - DNA, 15 bp, Homo sapiens
ggctcttgaggcttt

SEQ ID NO: 584677 - DNA, 15 bp, Homo sapiens
tggctcttgaggctt

SEQ ID NO: 584678 - DNA, 15 bp, Homo sapiens
ttggctcttgaggct

SEQ ID NO: 584679 - DNA, 15 bp, Homo sapiens
cttggctcttgaggc

SEQ ID NO: 584680 - DNA, 15 bp, Homo sapiens
tcttggctcttgagg

SEQ ID NO: 584681 - DNA, 15 bp, Homo sapiens
ttcttggctcttgag

SEQ ID NO: 584682 - DNA, 15 bp, Homo sapiens
tttcttggctcttga

SEQ ID NO: 584683 - DNA, 15 bp, Homo sapiens
ttttcttggctcttg

SEQ ID NO: 584684 - DNA, 15 bp, Homo sapiens
gttttcttggctctt

SEQ ID NO: 584685 - DNA, 15 bp, Homo sapiens
tgttttcttggctct

SEQ ID NO: 584686 - DNA, 15 bp, Homo sapiens
ctgttttcttggctc

SEQ ID NO: 584687 - DNA, 15 bp, Homo sapiens
tctgttttcttggct

SEQ ID NO: 584688 - DNA, 15 bp, Homo sapiens
ctctgttttcttggc

SEQ ID NO: 584689 - DNA, 15 bp, Homo sapiens
cctctgttttcttgg

SEQ ID NO: 584690 - DNA, 15 bp, Homo sapiens
ccctctgttttcttg

SEQ ID NO: 584691 - DNA, 15 bp, Homo sapiens
accctctgttttctt

SEQ ID NO: 584692 - DNA, 15 bp, Homo sapiens
caccctctgttttct

SEQ ID NO: 584693 - DNA, 15 bp, Homo sapiens
ccaccctctgttttc

SEQ ID NO: 584694 - DNA, 15 bp, Homo sapiens
gccaccctctgtttt

SEQ ID NO: 584695 - DNA, 15 bp, Homo sapiens
ggccaccctctgttt

SEQ ID NO: 584696 - DNA, 15 bp, Homo sapiens
aggccaccctctgtt

SEQ ID NO: 584697 - DNA, 15 bp, Homo sapiens
caggccaccctctgt

SEQ ID NO: 584698 - DNA, 15 bp, Homo sapiens
tcaggccaccctctg

SEQ ID NO: 584699 - DNA, 15 bp, Homo sapiens
ttcaggccaccctct

SEQ ID NO: 584700 - DNA, 15 bp, Homo sapiens
attcaggccaccctc

SEQ ID NO: 584701 - DNA, 15 bp, Homo sapiens
aattcaggccaccct

SEQ ID NO: 584702 - DNA, 15 bp, Homo sapiens
caattcaggccaccc

SEQ ID NO: 584703 - DNA, 15 bp, Homo sapiens
ccaattcaggccacc

SEQ ID NO: 584704 - DNA, 15 bp, Homo sapiens
tccaattcaggccac

SEQ ID NO: 584705 - DNA, 15 bp, Homo sapiens
gtccaattcaggcca

SEQ ID NO: 584706 - DNA, 15 bp, Homo sapiens
ggtccaattcaggcc

SEQ ID NO: 584707 - DNA, 15 bp, Homo sapiens
cggtccaattcaggc

SEQ ID NO: 584708 - DNA, 15 bp, Homo sapiens
tcggtccaattcagg

SEQ ID NO: 584709 - DNA, 15 bp, Homo sapiens
ttcggtccaattcag

SEQ ID NO: 584710 - DNA, 15 bp, Homo sapiens
cttcggtccaattca

SEQ ID NO: 584711 - DNA, 15 bp, Homo sapiens
ccttcggtccaattc

SEQ ID NO: 584712 - DNA, 15 bp, Homo sapiens
gccttcggtccaatt

SEQ ID NO: 584713 - DNA, 15 bp, Homo sapiens
ggccttcggtccaat

SEQ ID NO: 584714 - DNA, 15 bp, Homo sapiens
aggccttcggtccaa

SEQ ID NO: 584715 - DNA, 15 bp, Homo sapiens
caggccttcggtcca

SEQ ID NO: 584716 - DNA, 15 bp, Homo sapiens
tcaggccttcggtcc

SEQ ID NO: 584717 - DNA, 15 bp, Homo sapiens
ctcaggccttcggtc

SEQ ID NO: 584718 - DNA, 15 bp, Homo sapiens
actcaggccttcggt

SEQ ID NO: 584719 - DNA, 15 bp, Homo sapiens
aactcaggccttcgg

SEQ ID NO: 584720 - DNA, 15 bp, Homo sapiens
caactcaggccttcg

SEQ ID NO: 584721 - DNA, 15 bp, Homo sapiens
ccaactcaggccttc

SEQ ID NO: 584722 - DNA, 15 bp, Homo sapiens
tccaactcaggcctt

SEQ ID NO: 584723 - DNA, 15 bp, Homo sapiens
atccaactcaggcct

SEQ ID NO: 584724 - DNA, 15 bp, Homo sapiens
catccaactcaggcc

SEQ ID NO: 584725 - DNA, 15 bp, Homo sapiens
ccatccaactcaggc

SEQ ID NO: 584726 - DNA, 15 bp, Homo sapiens
tccatccaactcagg

SEQ ID NO: 584727 - DNA, 15 bp, Homo sapiens
ttccatccaactcag

SEQ ID NO: 584728 - DNA, 15 bp, Homo sapiens
cttccatccaactca

SEQ ID NO: 584729 - DNA, 15 bp, Homo sapiens
acttccatccaactc

SEQ ID NO: 584730 - DNA, 15 bp, Homo sapiens
gacttccatccaact

SEQ ID NO: 584731 - DNA, 15 bp, Homo sapiens
agacttccatccaac

SEQ ID NO: 584732 - DNA, 15 bp, Homo sapiens
gagacttccatccaa

SEQ ID NO: 584733 - DNA, 15 bp, Homo sapiens
tgagacttccatcca

SEQ ID NO: 584734 - DNA, 15 bp, Homo sapiens
ttgagacttccatcc

SEQ ID NO: 584735 - DNA, 15 bp, Homo sapiens
cttgagacttccatc

SEQ ID NO: 584736 - DNA, 15 bp, Homo sapiens
ccttgagacttccat

SEQ ID NO: 584737 - DNA, 15 bp, Homo sapiens
gccttgagacttcca

SEQ ID NO: 584738 - DNA, 15 bp, Homo sapiens
agccttgagacttcc

SEQ ID NO: 584739 - DNA, 15 bp, Homo sapiens
aagccttgagacttc

SEQ ID NO: 584740 - DNA, 15 bp, Homo sapiens
caagccttgagactt

SEQ ID NO: 584741 - DNA, 15 bp, Homo sapiens
tcaagccttgagact

SEQ ID NO: 584742 - DNA, 15 bp, Homo sapiens
ctcaagccttgagac

SEQ ID NO: 584743 - DNA, 15 bp, Homo sapiens
actcaagccttgaga

SEQ ID NO: 584744 - DNA, 15 bp, Homo sapiens
aactcaagccttgag

SEQ ID NO: 584745 - DNA, 15 bp, Homo sapiens
taactcaagccttga

SEQ ID NO: 584746 - DNA, 15 bp, Homo sapiens
ctaactcaagccttg

SEQ ID NO: 584747 - DNA, 15 bp, Homo sapiens
tctaactcaagcctt

SEQ ID NO: 584748 - DNA, 15 bp, Homo sapiens
ttctaactcaagcct

SEQ ID NO: 584749 - DNA, 15 bp, Homo sapiens
cttctaactcaagcc

SEQ ID NO: 584750 - DNA, 15 bp, Homo sapiens
acttctaactcaagc

SEQ ID NO: 584751 - DNA, 15 bp, Homo sapiens
gacttctaactcaag

SEQ ID NO: 584752 - DNA, 15 bp, Homo sapiens
agacttctaactcaa

SEQ ID NO: 584753 - DNA, 15 bp, Homo sapiens
aagacttctaactca

SEQ ID NO: 584754 - DNA, 15 bp, Homo sapiens
taagacttctaactc

SEQ ID NO: 584755 - DNA, 15 bp, Homo sapiens
ttaagacttctaact

SEQ ID NO: 584756 - DNA, 15 bp, Homo sapiens
cttaagacttctaac

SEQ ID NO: 584757 - DNA, 15 bp, Homo sapiens
tcttaagacttctaa

SEQ ID NO: 584758 - DNA, 15 bp, Homo sapiens
gtcttaagacttcta

SEQ ID NO: 584759 - DNA, 15 bp, Homo sapiens
ggtcttaagacttct

SEQ ID NO: 584760 - DNA, 15 bp, Homo sapiens
aggtcttaagacttc

SEQ ID NO: 584761 - DNA, 15 bp, Homo sapiens
caggtcttaagactt

SEQ ID NO: 584762 - DNA, 15 bp, Homo sapiens
ccaggtcttaagact

SEQ ID NO: 584763 - DNA, 15 bp, Homo sapiens
cccaggtcttaagac

SEQ ID NO: 584764 - DNA, 15 bp, Homo sapiens
tcccaggtcttaaga

SEQ ID NO: 584765 - DNA, 15 bp, Homo sapiens
gtcccaggtcttaag

SEQ ID NO: 584766 - DNA, 15 bp, Homo sapiens
tgtcccaggtcttaa

SEQ ID NO: 584767 - DNA, 15 bp, Homo sapiens
ctgtcccaggtctta

SEQ ID NO: 584768 - DNA, 15 bp, Homo sapiens
cctgtcccaggtctt

SEQ ID NO: 584769 - DNA, 15 bp, Homo sapiens
tcctgtcccaggtct

SEQ ID NO: 584770 - DNA, 15 bp, Homo sapiens
gtcctgtcccaggtc

SEQ ID NO: 584771 - DNA, 15 bp, Homo sapiens
tgtcctgtcccaggt

SEQ ID NO: 584772 - DNA, 15 bp, Homo sapiens
gtgtcctgtcccagg

SEQ ID NO: 584773 - DNA, 15 bp, Homo sapiens
tgtgtcctgtcccag

SEQ ID NO: 584774 - DNA, 15 bp, Homo sapiens
atgtgtcctgtccca

SEQ ID NO: 584775 - DNA, 15 bp, Homo sapiens
catgtgtcctgtccc

SEQ ID NO: 584776 - DNA, 15 bp, Homo sapiens
ccatgtgtcctgtcc

SEQ ID NO: 584777 - DNA, 15 bp, Homo sapiens
tccatgtgtcctgtc

SEQ ID NO: 584778 - DNA, 15 bp, Homo sapiens
ttccatgtgtcctgt

SEQ ID NO: 584779 - DNA, 15 bp, Homo sapiens
cttccatgtgtcctg

SEQ ID NO: 584780 - DNA, 15 bp, Homo sapiens
ccttccatgtgtcct

SEQ ID NO: 584781 - DNA, 15 bp, Homo sapiens
gccttccatgtgtcc

SEQ ID NO: 584782 - DNA, 15 bp, Homo sapiens
ggccttccatgtgtc

SEQ ID NO: 584783 - DNA, 15 bp, Homo sapiens
aggccttccatgtgt

SEQ ID NO: 584784 - DNA, 15 bp, Homo sapiens
taggccttccatgtg

SEQ ID NO: 584785 - DNA, 15 bp, Homo sapiens
ttaggccttccatgt

SEQ ID NO: 584786 - DNA, 15 bp, Homo sapiens
cttaggccttccatg

SEQ ID NO: 584787 - DNA, 15 bp, Homo sapiens
tcttaggccttccat

SEQ ID NO: 584788 - DNA, 15 bp, Homo sapiens
ttcttaggccttcca

SEQ ID NO: 584789 - DNA, 15 bp, Homo sapiens
gttcttaggccttcc

SEQ ID NO: 584790 - DNA, 15 bp, Homo sapiens
agttcttaggccttc

SEQ ID NO: 584791 - DNA, 15 bp, Homo sapiens
cagttcttaggcctt

SEQ ID NO: 584792 - DNA, 15 bp, Homo sapiens
tcagttcttaggcct

SEQ ID NO: 584793 - DNA, 15 bp, Homo sapiens
ctcagttcttaggcc

SEQ ID NO: 584794 - DNA, 15 bp, Homo sapiens
tctcagttcttaggc

SEQ ID NO: 584795 - DNA, 15 bp, Homo sapiens
gtctcagttcttagg

SEQ ID NO: 584796 - DNA, 15 bp, Homo sapiens
agtctcagttcttag

SEQ ID NO: 584797 - DNA, 15 bp, Homo sapiens
aagtctcagttctta

SEQ ID NO: 584798 - DNA, 15 bp, Homo sapiens
caagtctcagttctt

SEQ ID NO: 584799 - DNA, 15 bp, Homo sapiens
acaagtctcagttct

SEQ ID NO: 584800 - DNA, 15 bp, Homo sapiens
cacaagtctcagttc

SEQ ID NO: 584801 - DNA, 15 bp, Homo sapiens
tcacaagtctcagtt

SEQ ID NO: 584802 - DNA, 15 bp, Homo sapiens
gtcacaagtctcagt

SEQ ID NO: 584803 - DNA, 15 bp, Homo sapiens
tgtcacaagtctcag

SEQ ID NO: 584804 - DNA, 15 bp, Homo sapiens
gtgtcacaagtctca

SEQ ID NO: 584805 - DNA, 15 bp, Homo sapiens
tgtgtcacaagtctc

SEQ ID NO: 584806 - DNA, 15 bp, Homo sapiens
ttgtgtcacaagtct

SEQ ID NO: 584807 - DNA, 15 bp, Homo sapiens
cttgtgtcacaagtc

SEQ ID NO: 584808 - DNA, 15 bp, Homo sapiens
ccttgtgtcacaagt

SEQ ID NO: 584809 - DNA, 15 bp, Homo sapiens
gccttgtgtcacaag

SEQ ID NO: 584810 - DNA, 15 bp, Homo sapiens
ggccttgtgtcacaa

SEQ ID NO: 584811 - DNA, 15 bp, Homo sapiens
tggccttgtgtcaca

SEQ ID NO: 584812 - DNA, 15 bp, Homo sapiens
ttggccttgtgtcac

SEQ ID NO: 584813 - DNA, 15 bp, Homo sapiens
gttggccttgtgtca

SEQ ID NO: 584814 - DNA, 15 bp, Homo sapiens
cgttggccttgtgtc

SEQ ID NO: 584815 - DNA, 15 bp, Homo sapiens
tcgttggccttgtgt

SEQ ID NO: 584816 - DNA, 15 bp, Homo sapiens
gtcgttggccttgtg

SEQ ID NO: 584817 - DNA, 15 bp, Homo sapiens
ggtcgttggccttgt

SEQ ID NO: 584818 - DNA, 15 bp, Homo sapiens
aggtcgttggccttg

SEQ ID NO: 584819 - DNA, 15 bp, Homo sapiens
taggtcgttggcctt

SEQ ID NO: 584820 - DNA, 15 bp, Homo sapiens
ttaggtcgttggcct

SEQ ID NO: 584821 - DNA, 15 bp, Homo sapiens
cttaggtcgttggcc

SEQ ID NO: 584822 - DNA, 15 bp, Homo sapiens
tcttaggtcgttggc

SEQ ID NO: 584823 - DNA, 15 bp, Homo sapiens
atcttaggtcgttgg

SEQ ID NO: 584824 - DNA, 15 bp, Homo sapiens
aatcttaggtcgttg

SEQ ID NO: 584825 - DNA, 15 bp, Homo sapiens
taatcttaggtcgtt

SEQ ID NO: 584826 - DNA, 15 bp, Homo sapiens
ctaatcttaggtcgt

SEQ ID NO: 584827 - DNA, 15 bp, Homo sapiens
gctaatcttaggtcg

SEQ ID NO: 584828 - DNA, 15 bp, Homo sapiens
ggctaatcttaggtc

SEQ ID NO: 584829 - DNA, 15 bp, Homo sapiens
gggctaatcttaggt

SEQ ID NO: 584830 - DNA, 15 bp, Homo sapiens
tgggctaatcttagg

SEQ ID NO: 584831 - DNA, 15 bp, Homo sapiens
ctgggctaatcttag

SEQ ID NO: 584832 - DNA, 15 bp, Homo sapiens
cctgggctaatctta

SEQ ID NO: 584833 - DNA, 15 bp, Homo sapiens
ccctgggctaatctt

SEQ ID NO: 584834 - DNA, 15 bp, Homo sapiens
accctgggctaatct

SEQ ID NO: 584835 - DNA, 15 bp, Homo sapiens
aaccctgggctaatc

SEQ ID NO: 584836 - DNA, 15 bp, Homo sapiens
caaccctgggctaat

SEQ ID NO: 584837 - DNA, 15 bp, Homo sapiens
acaaccctgggctaa

SEQ ID NO: 584838 - DNA, 15 bp, Homo sapiens
tacaaccctgggcta

SEQ ID NO: 584839 - DNA, 15 bp, Homo sapiens
ctacaaccctgggct

SEQ ID NO: 584840 - DNA, 15 bp, Homo sapiens
gctacaaccctgggc

SEQ ID NO: 584841 - DNA, 15 bp, Homo sapiens
agctacaaccctggg

SEQ ID NO: 584842 - DNA, 15 bp, Homo sapiens
cagctacaaccctgg

SEQ ID NO: 584843 - DNA, 15 bp, Homo sapiens
ccagctacaaccctg

SEQ ID NO: 584844 - DNA, 15 bp, Homo sapiens
tccagctacaaccct

SEQ ID NO: 584845 - DNA, 15 bp, Homo sapiens
ttccagctacaaccc

SEQ ID NO: 584846 - DNA, 15 bp, Homo sapiens
cttccagctacaacc

SEQ ID NO: 584847 - DNA, 15 bp, Homo sapiens
tcttccagctacaac

SEQ ID NO: 584848 - DNA, 15 bp, Homo sapiens
gtcttccagctacaa

SEQ ID NO: 584849 - DNA, 15 bp, Homo sapiens
ggtcttccagctaca

SEQ ID NO: 584850 - DNA, 15 bp, Homo sapiens
aggtcttccagctac

SEQ ID NO: 584851 - DNA, 15 bp, Homo sapiens
taggtcttccagcta

SEQ ID NO: 584852 - DNA, 15 bp, Homo sapiens
gtaggtcttccagct

SEQ ID NO: 584853 - DNA, 15 bp, Homo sapiens
tgtaggtcttccagc

SEQ ID NO: 584854 - DNA, 15 bp, Homo sapiens
ttgtaggtcttccag

SEQ ID NO: 584855 - DNA, 15 bp, Homo sapiens
gttgtaggtcttcca

SEQ ID NO: 584856 - DNA, 15 bp, Homo sapiens
ggttgtaggtcttcc

SEQ ID NO: 584857 - DNA, 15 bp, Homo sapiens
gggttgtaggtcttc

SEQ ID NO: 584858 - DNA, 15 bp, Homo sapiens
tgggttgtaggtctt

SEQ ID NO: 584859 - DNA, 15 bp, Homo sapiens
ttgggttgtaggtct

SEQ ID NO: 584860 - DNA, 15 bp, Homo sapiens
cttgggttgtaggtc

SEQ ID NO: 584861 - DNA, 15 bp, Homo sapiens
ccttgggttgtaggt

SEQ ID NO: 584862 - DNA, 15 bp, Homo sapiens
tccttgggttgtagg

SEQ ID NO: 584863 - DNA, 15 bp, Homo sapiens
atccttgggttgtag

SEQ ID NO: 584864 - DNA, 15 bp, Homo sapiens
catccttgggttgta

SEQ ID NO: 584865 - DNA, 15 bp, Homo sapiens
ccatccttgggttgt

SEQ ID NO: 584866 - DNA, 15 bp, Homo sapiens
tccatccttgggttg

SEQ ID NO: 584867 - DNA, 15 bp, Homo sapiens
ttccatccttgggtt

SEQ ID NO: 584868 - DNA, 15 bp, Homo sapiens
cttccatccttgggt

SEQ ID NO: 584869 - DNA, 15 bp, Homo sapiens
ccttccatccttggg

SEQ ID NO: 584870 - DNA, 15 bp, Homo sapiens
gccttccatccttgg

SEQ ID NO: 584871 - DNA, 15 bp, Homo sapiens
ggccttccatccttg

SEQ ID NO: 584872 - DNA, 15 bp, Homo sapiens
gggccttccatcctt

SEQ ID NO: 584873 - DNA, 15 bp, Homo sapiens
ggggccttccatcct

SEQ ID NO: 584874 - DNA, 15 bp, Homo sapiens
aggggccttccatcc

SEQ ID NO: 584875 - DNA, 15 bp, Homo sapiens
caggggccttccatc

SEQ ID NO: 584876 - DNA, 15 bp, Homo sapiens
acaggggccttccat

SEQ ID NO: 584877 - DNA, 15 bp, Homo sapiens
gacaggggccttcca

SEQ ID NO: 584878 - DNA, 15 bp, Homo sapiens
tgacaggggccttcc

SEQ ID NO: 584879 - DNA, 15 bp, Homo sapiens
gtgacaggggccttc

SEQ ID NO: 584880 - DNA, 15 bp, Homo sapiens
tgtgacaggggcctt

SEQ ID NO: 584881 - DNA, 15 bp, Homo sapiens
ttgtgacaggggcct

SEQ ID NO: 584882 - DNA, 15 bp, Homo sapiens
tttgtgacaggggcc

SEQ ID NO: 584883 - DNA, 15 bp, Homo sapiens
ctttgtgacaggggc

SEQ ID NO: 584884 - DNA, 15 bp, Homo sapiens
gctttgtgacagggg

SEQ ID NO: 584885 - DNA, 15 bp, Homo sapiens
ggctttgtgacaggg

SEQ ID NO: 584886 - DNA, 15 bp, Homo sapiens
aggctttgtgacagg

SEQ ID NO: 584887 - DNA, 15 bp, Homo sapiens
taggctttgtgacag

SEQ ID NO: 584888 - DNA, 15 bp, Homo sapiens
gtaggctttgtgaca

SEQ ID NO: 584889 - DNA, 15 bp, Homo sapiens
ggtaggctttgtgac

SEQ ID NO: 584890 - DNA, 15 bp, Homo sapiens
aggtaggctttgtga

SEQ ID NO: 584891 - DNA, 15 bp, Homo sapiens
taggtaggctttgtg

SEQ ID NO: 584892 - DNA, 15 bp, Homo sapiens
ctaggtaggctttgt

SEQ ID NO: 584893 - DNA, 15 bp, Homo sapiens
tctaggtaggctttg

SEQ ID NO: 584894 - DNA, 15 bp, Homo sapiens
atctaggtaggcttt

SEQ ID NO: 584895 - DNA, 15 bp, Homo sapiens
catctaggtaggctt

SEQ ID NO: 584896 - DNA, 15 bp, Homo sapiens
ccatctaggtaggct

SEQ ID NO: 584897 - DNA, 15 bp, Homo sapiens
tccatctaggtaggc

SEQ ID NO: 584898 - DNA, 15 bp, Homo sapiens
atccatctaggtagg

SEQ ID NO: 584899 - DNA, 15 bp, Homo sapiens
tatccatctaggtag

SEQ ID NO: 584900 - DNA, 15 bp, Homo sapiens
ctatccatctaggta

SEQ ID NO: 584901 - DNA, 15 bp, Homo sapiens
tctatccatctaggt

SEQ ID NO: 584902 - DNA, 15 bp, Homo sapiens
ctctatccatctagg

SEQ ID NO: 584903 - DNA, 15 bp, Homo sapiens
cctctatccatctag

SEQ ID NO: 584904 - DNA, 15 bp, Homo sapiens
tcctctatccatcta

SEQ ID NO: 584905 - DNA, 15 bp, Homo sapiens
gtcctctatccatct

SEQ ID NO: 584906 - DNA, 15 bp, Homo sapiens
ggtcctctatccatc

SEQ ID NO: 584907 - DNA, 15 bp, Homo sapiens
gggtcctctatccat

SEQ ID NO: 584908 - DNA, 15 bp, Homo sapiens
tgggtcctctatcca

SEQ ID NO: 584909 - DNA, 15 bp, Homo sapiens
ttgggtcctctatcc

SEQ ID NO: 584910 - DNA, 15 bp, Homo sapiens
cttgggtcctctatc

SEQ ID NO: 584911 - DNA, 15 bp, Homo sapiens
gcttgggtcctctat

SEQ ID NO: 584912 - DNA, 15 bp, Homo sapiens
cgcttgggtcctcta

SEQ ID NO: 584913 - DNA, 15 bp, Homo sapiens
tcgcttgggtcctct

SEQ ID NO: 584914 - DNA, 15 bp, Homo sapiens
ttcgcttgggtcctc

SEQ ID NO: 584915 - DNA, 15 bp, Homo sapiens
tttcgcttgggtcct

SEQ ID NO: 584916 - DNA, 15 bp, Homo sapiens
ttttcgcttgggtcc

SEQ ID NO: 584917 - DNA, 15 bp, Homo sapiens
tttttcgcttgggtc

SEQ ID NO: 584918 - DNA, 15 bp, Homo sapiens
ctttttcgcttgggt

SEQ ID NO: 584919 - DNA, 15 bp, Homo sapiens
cctttttcgcttggg

SEQ ID NO: 584920 - DNA, 15 bp, Homo sapiens
acctttttcgcttgg

SEQ ID NO: 584921 - DNA, 15 bp, Homo sapiens
tacctttttcgcttg

SEQ ID NO: 584922 - DNA, 15 bp, Homo sapiens
atacctttttcgctt

SEQ ID NO: 584923 - DNA, 15 bp, Homo sapiens
gatacctttttcgct

SEQ ID NO: 584924 - DNA, 15 bp, Homo sapiens
agatacctttttcgc

SEQ ID NO: 584925 - DNA, 15 bp, Homo sapiens
gagatacctttttcg

SEQ ID NO: 584926 - DNA, 15 bp, Homo sapiens
tgagatacctttttc

SEQ ID NO: 584927 - DNA, 15 bp, Homo sapiens
ttgagataccttttt

SEQ ID NO: 584928 - DNA, 15 bp, Homo sapiens
cttgagatacctttt

SEQ ID NO: 584929 - DNA, 15 bp, Homo sapiens
tcttgagataccttt

SEQ ID NO: 584930 - DNA, 15 bp, Homo sapiens
gtcttgagatacctt

SEQ ID NO: 584931 - DNA, 15 bp, Homo sapiens
agtcttgagatacct

SEQ ID NO: 584932 - DNA, 15 bp, Homo sapiens
tagtcttgagatacc

SEQ ID NO: 584933 - DNA, 15 bp, Homo sapiens
ttagtcttgagatac

SEQ ID NO: 584934 - DNA, 15 bp, Homo sapiens
gttagtcttgagata

SEQ ID NO: 584935 - DNA, 15 bp, Homo sapiens
cgttagtcttgagat

SEQ ID NO: 584936 - DNA, 15 bp, Homo sapiens
ccgttagtcttgaga

SEQ ID NO: 584937 - DNA, 15 bp, Homo sapiens
gccgttagtcttgag

SEQ ID NO: 584938 - DNA, 15 bp, Homo sapiens
ggccgttagtcttga

SEQ ID NO: 584939 - DNA, 15 bp, Homo sapiens
cggccgttagtcttg

SEQ ID NO: 584940 - DNA, 15 bp, Homo sapiens
ccggccgttagtctt

SEQ ID NO: 584941 - DNA, 15 bp, Homo sapiens
tccggccgttagtct

SEQ ID NO: 584942 - DNA, 15 bp, Homo sapiens
ttccggccgttagtc

SEQ ID NO: 584943 - DNA, 15 bp, Homo sapiens
attccggccgttagt

SEQ ID NO: 584944 - DNA, 15 bp, Homo sapiens
gattccggccgttag

SEQ ID NO: 584945 - DNA, 15 bp, Homo sapiens
agattccggccgtta

SEQ ID NO: 584946 - DNA, 15 bp, Homo sapiens
cagattccggccgtt

SEQ ID NO: 584947 - DNA, 15 bp, Homo sapiens
ccagattccggccgt

SEQ ID NO: 584948 - DNA, 15 bp, Homo sapiens
tccagattccggccg

SEQ ID NO: 584949 - DNA, 15 bp, Homo sapiens
ctccagattccggcc

SEQ ID NO: 584950 - DNA, 15 bp, Homo sapiens
cctccagattccggc

SEQ ID NO: 584951 - DNA, 15 bp, Homo sapiens
gcctccagattccgg

SEQ ID NO: 584952 - DNA, 15 bp, Homo sapiens
ggcctccagattccg

SEQ ID NO: 584953 - DNA, 15 bp, Homo sapiens
gggcctccagattcc

SEQ ID NO: 584954 - DNA, 15 bp, Homo sapiens
tgggcctccagattc

SEQ ID NO: 584955 - DNA, 15 bp, Homo sapiens
atgggcctccagatt

SEQ ID NO: 584956 - DNA, 15 bp, Homo sapiens
catgggcctccagat

SEQ ID NO: 584957 - DNA, 15 bp, Homo sapiens
tcatgggcctccaga

SEQ ID NO: 584958 - DNA, 15 bp, Homo sapiens
gtcatgggcctccag

SEQ ID NO: 584959 - DNA, 15 bp, Homo sapiens
ggtcatgggcctcca

SEQ ID NO: 584960 - DNA, 15 bp, Homo sapiens
gggtcatgggcctcc

SEQ ID NO: 584961 - DNA, 15 bp, Homo sapiens
tgggtcatgggcctc

SEQ ID NO: 584962 - DNA, 15 bp, Homo sapiens
ctgggtcatgggcct

SEQ ID NO: 584963 - DNA, 15 bp, Homo sapiens
tctgggtcatgggcc

SEQ ID NO: 584964 - DNA, 15 bp, Homo sapiens
ttctgggtcatgggc

SEQ ID NO: 584965 - DNA, 15 bp, Homo sapiens
gttctgggtcatggg

SEQ ID NO: 584966 - DNA, 15 bp, Homo sapiens
ggttctgggtcatgg

SEQ ID NO: 584967 - DNA, 15 bp, Homo sapiens
gggttctgggtcatg

SEQ ID NO: 584968 - DNA, 15 bp, Homo sapiens
tgggttctgggtcat

SEQ ID NO: 584969 - DNA, 15 bp, Homo sapiens
ctgggttctgggtca

SEQ ID NO: 584970 - DNA, 15 bp, Homo sapiens
cctgggttctgggtc

SEQ ID NO: 584971 - DNA, 15 bp, Homo sapiens
tcctgggttctgggt

SEQ ID NO: 584972 - DNA, 15 bp, Homo sapiens
ttcctgggttctggg

SEQ ID NO: 584973 - DNA, 15 bp, Homo sapiens
cttcctgggttctgg

SEQ ID NO: 584974 - DNA, 15 bp, Homo sapiens
ccttcctgggttctg

SEQ ID NO: 584975 - DNA, 15 bp, Homo sapiens
tccttcctgggttct

SEQ ID NO: 584976 - DNA, 15 bp, Homo sapiens
atccttcctgggttc

SEQ ID NO: 584977 - DNA, 15 bp, Homo sapiens
tatccttcctgggtt

SEQ ID NO: 584978 - DNA, 15 bp, Homo sapiens
ctatccttcctgggt

SEQ ID NO: 584979 - DNA, 15 bp, Homo sapiens
tctatccttcctggg

SEQ ID NO: 584980 - DNA, 15 bp, Homo sapiens
ttctatccttcctgg

SEQ ID NO: 584981 - DNA, 15 bp, Homo sapiens
cttctatccttcctg

SEQ ID NO: 584982 - DNA, 15 bp, Homo sapiens
gcttctatccttcct

SEQ ID NO: 584983 - DNA, 15 bp, Homo sapiens
agcttctatccttcc

SEQ ID NO: 584984 - DNA, 15 bp, Homo sapiens
aagcttctatccttc

SEQ ID NO: 584985 - DNA, 15 bp, Homo sapiens
caagcttctatcctt

SEQ ID NO: 584986 - DNA, 15 bp, Homo sapiens
tcaagcttctatcct

SEQ ID NO: 584987 - DNA, 15 bp, Homo sapiens
ttcaagcttctatcc

SEQ ID NO: 584988 - DNA, 15 bp, Homo sapiens
cttcaagcttctatc

SEQ ID NO: 584989 - DNA, 15 bp, Homo sapiens
tcttcaagcttctat

SEQ ID NO: 584990 - DNA, 15 bp, Homo sapiens
gtcttcaagcttcta

SEQ ID NO: 584991 - DNA, 15 bp, Homo sapiens
ggtcttcaagcttct

SEQ ID NO: 584992 - DNA, 15 bp, Homo sapiens
aggtcttcaagcttc

SEQ ID NO: 584993 - DNA, 15 bp, Homo sapiens
caggtcttcaagctt

SEQ ID NO: 584994 - DNA, 15 bp, Homo sapiens
ccaggtcttcaagct

SEQ ID NO: 584995 - DNA, 15 bp, Homo sapiens
cccaggtcttcaagc

SEQ ID NO: 584996 - DNA, 15 bp, Homo sapiens
ccccaggtcttcaag

SEQ ID NO: 584997 - DNA, 15 bp, Homo sapiens
tccccaggtcttcaa

SEQ ID NO: 584998 - DNA, 15 bp, Homo sapiens
ttccccaggtcttca

SEQ ID NO: 584999 - DNA, 15 bp, Homo sapiens
tttccccaggtcttc

SEQ ID NO: 585000 - DNA, 15 bp, Homo sapiens
atttccccaggtctt

SEQ ID NO: 585001 - DNA, 15 bp, Homo sapiens
gatttccccaggtct

SEQ ID NO: 585002 - DNA, 15 bp, Homo sapiens
ggatttccccaggtc

SEQ ID NO: 585003 - DNA, 15 bp, Homo sapiens
gggatttccccaggt

SEQ ID NO: 585004 - DNA, 15 bp, Homo sapiens
tgggatttccccagg

SEQ ID NO: 585005 - DNA, 15 bp, Homo sapiens
ttgggatttccccag

SEQ ID NO: 585006 - DNA, 15 bp, Homo sapiens
cttgggatttcccca

SEQ ID NO: 585007 - DNA, 15 bp, Homo sapiens
tcttgggatttcccc

SEQ ID NO: 585008 - DNA, 15 bp, Homo sapiens
atcttgggatttccc

SEQ ID NO: 585009 - DNA, 15 bp, Homo sapiens
catcttgggatttcc

SEQ ID NO: 585010 - DNA, 15 bp, Homo sapiens
tcatcttgggatttc

SEQ ID NO: 585011 - DNA, 15 bp, Homo sapiens
ctcatcttgggattt

SEQ ID NO: 585012 - DNA, 15 bp, Homo sapiens
tctcatcttgggatt

SEQ ID NO: 585013 - DNA, 15 bp, Homo sapiens
ttctcatcttgggat

SEQ ID NO: 585014 - DNA, 15 bp, Homo sapiens
gttctcatcttggga

SEQ ID NO: 585015 - DNA, 15 bp, Homo sapiens
ggttctcatcttggg

SEQ ID NO: 585016 - DNA, 15 bp, Homo sapiens
gggttctcatcttgg

SEQ ID NO: 585017 - DNA, 15 bp, Homo sapiens
agggttctcatcttg

SEQ ID NO: 585018 - DNA, 15 bp, Homo sapiens
tagggttctcatctt

SEQ ID NO: 585019 - DNA, 15 bp, Homo sapiens
ttagggttctcatct

SEQ ID NO: 585020 - DNA, 15 bp, Homo sapiens
tttagggttctcatc

SEQ ID NO: 585021 - DNA, 15 bp, Homo sapiens
gtttagggttctcat

SEQ ID NO: 585022 - DNA, 15 bp, Homo sapiens
ggtttagggttctca

SEQ ID NO: 585023 - DNA, 15 bp, Homo sapiens
gggtttagggttctc

SEQ ID NO: 585024 - DNA, 15 bp, Homo sapiens
agggtttagggttct

SEQ ID NO: 585025 - DNA, 15 bp, Homo sapiens
tagggtttagggttc

SEQ ID NO: 585026 - DNA, 15 bp, Homo sapiens
gtagggtttagggtt

SEQ ID NO: 585027 - DNA, 15 bp, Homo sapiens
ggtagggtttagggt

SEQ ID NO: 585028 - DNA, 15 bp, Homo sapiens
aggtagggtttaggg

SEQ ID NO: 585029 - DNA, 15 bp, Homo sapiens
gaggtagggtttagg

SEQ ID NO: 585030 - DNA, 15 bp, Homo sapiens
agaggtagggtttag

SEQ ID NO: 585031 - DNA, 15 bp, Homo sapiens
aagaggtagggttta

SEQ ID NO: 585032 - DNA, 15 bp, Homo sapiens
aaagaggtagggttt

SEQ ID NO: 585033 - DNA, 15 bp, Homo sapiens
aaaagaggtagggtt

SEQ ID NO: 585034 - DNA, 15 bp, Homo sapiens
gaaaagaggtagggt

SEQ ID NO: 585035 - DNA, 15 bp, Homo sapiens
agaaaagaggtaggg

SEQ ID NO: 585036 - DNA, 15 bp, Homo sapiens
tagaaaagaggtagg

SEQ ID NO: 585037 - DNA, 15 bp, Homo sapiens
atagaaaagaggtag

SEQ ID NO: 585038 - DNA, 15 bp, Homo sapiens
aatagaaaagaggta

SEQ ID NO: 585039 - DNA, 15 bp, Homo sapiens
caatagaaaagaggt

SEQ ID NO: 585040 - DNA, 15 bp, Homo sapiens
acaatagaaaagagg

SEQ ID NO: 585041 - DNA, 15 bp, Homo sapiens
aacaatagaaaagag

SEQ ID NO: 585042 - DNA, 15 bp, Homo sapiens
aaacaatagaaaaga

SEQ ID NO: 585043 - DNA, 15 bp, Homo sapiens
taaacaatagaaaag

SEQ ID NO: 585044 - DNA, 15 bp, Homo sapiens
gtaaacaatagaaaa

SEQ ID NO: 585045 - DNA, 15 bp, Homo sapiens
tgtaaacaatagaaa

SEQ ID NO: 585046 - DNA, 15 bp, Homo sapiens
gtgtaaacaatagaa

SEQ ID NO: 585047 - DNA, 15 bp, Homo sapiens
agtgtaaacaataga

SEQ ID NO: 585048 - DNA, 15 bp, Homo sapiens
aagtgtaaacaatag

SEQ ID NO: 585049 - DNA, 15 bp, Homo sapiens
gaagtgtaaacaata

SEQ ID NO: 585050 - DNA, 15 bp, Homo sapiens
agaagtgtaaacaat

SEQ ID NO: 585051 - DNA, 15 bp, Homo sapiens
aagaagtgtaaacaa

SEQ ID NO: 585052 - DNA, 15 bp, Homo sapiens
taagaagtgtaaaca

SEQ ID NO: 585053 - DNA, 15 bp, Homo sapiens
gtaagaagtgtaaac

SEQ ID NO: 585054 - DNA, 15 bp, Homo sapiens
agtaagaagtgtaaa

SEQ ID NO: 585055 - DNA, 15 bp, Homo sapiens
gagtaagaagtgtaa

SEQ ID NO: 585056 - DNA, 15 bp, Homo sapiens
agagtaagaagtgta

SEQ ID NO: 585057 - DNA, 15 bp, Homo sapiens
aagagtaagaagtgt

SEQ ID NO: 585058 - DNA, 15 bp, Homo sapiens
taagagtaagaagtg

SEQ ID NO: 585059 - DNA, 15 bp, Homo sapiens
ctaagagtaagaagt

SEQ ID NO: 585060 - DNA, 15 bp, Homo sapiens
tctaagagtaagaag

SEQ ID NO: 585061 - DNA, 15 bp, Homo sapiens
atctaagagtaagaa

SEQ ID NO: 585062 - DNA, 15 bp, Homo sapiens
tatctaagagtaaga

SEQ ID NO: 585063 - DNA, 15 bp, Homo sapiens
atatctaagagtaag

SEQ ID NO: 585064 - DNA, 15 bp, Homo sapiens
aatatctaagagtaa

SEQ ID NO: 585065 - DNA, 15 bp, Homo sapiens
aaatatctaagagta

SEQ ID NO: 585066 - DNA, 15 bp, Homo sapiens
gaaatatctaagagt

SEQ ID NO: 585067 - DNA, 15 bp, Homo sapiens
ggaaatatctaagag

SEQ ID NO: 585068 - DNA, 15 bp, Homo sapiens
tggaaatatctaaga

SEQ ID NO: 585069 - DNA, 15 bp, Homo sapiens
ctggaaatatctaag

SEQ ID NO: 585070 - DNA, 15 bp, Homo sapiens
actggaaatatctaa

SEQ ID NO: 585071 - DNA, 15 bp, Homo sapiens
aactggaaatatcta

SEQ ID NO: 585072 - DNA, 15 bp, Homo sapiens
gaactggaaatatct

SEQ ID NO: 585073 - DNA, 15 bp, Homo sapiens
agaactggaaatatc

SEQ ID NO: 585074 - DNA, 15 bp, Homo sapiens
gagaactggaaatat

SEQ ID NO: 585075 - DNA, 15 bp, Homo sapiens
ggagaactggaaata

SEQ ID NO: 585076 - DNA, 15 bp, Homo sapiens
aggagaactggaaat

SEQ ID NO: 585077 - DNA, 15 bp, Homo sapiens
caggagaactggaaa

SEQ ID NO: 585078 - DNA, 15 bp, Homo sapiens
acaggagaactggaa

SEQ ID NO: 585079 - DNA, 15 bp, Homo sapiens
aacaggagaactgga

SEQ ID NO: 585080 - DNA, 15 bp, Homo sapiens
aaacaggagaactgg

SEQ ID NO: 585081 - DNA, 15 bp, Homo sapiens
taaacaggagaactg

SEQ ID NO: 585082 - DNA, 15 bp, Homo sapiens
ataaacaggagaact

SEQ ID NO: 585083 - DNA, 15 bp, Homo sapiens
gataaacaggagaac

SEQ ID NO: 585084 - DNA, 15 bp, Homo sapiens
agataaacaggagaa

SEQ ID NO: 585085 - DNA, 15 bp, Homo sapiens
aagataaacaggaga

SEQ ID NO: 585086 - DNA, 15 bp, Homo sapiens
aaagataaacaggag

SEQ ID NO: 585087 - DNA, 15 bp, Homo sapiens
taaagataaacagga

SEQ ID NO: 585088 - DNA, 15 bp, Homo sapiens
ttaaagataaacagg

SEQ ID NO: 585089 - DNA, 15 bp, Homo sapiens
cttaaagataaacag

SEQ ID NO: 585090 - DNA, 15 bp, Homo sapiens
gcttaaagataaaca

SEQ ID NO: 585091 - DNA, 15 bp, Homo sapiens
ggcttaaagataaac

SEQ ID NO: 585092 - DNA, 15 bp, Homo sapiens
aggcttaaagataaa

SEQ ID NO: 585093 - DNA, 15 bp, Homo sapiens
caggcttaaagataa

SEQ ID NO: 585094 - DNA, 15 bp, Homo sapiens
tcaggcttaaagata

SEQ ID NO: 585095 - DNA, 15 bp, Homo sapiens
atcaggcttaaagat

SEQ ID NO: 585096 - DNA, 15 bp, Homo sapiens
aatcaggcttaaaga

SEQ ID NO: 585097 - DNA, 15 bp, Homo sapiens
gaatcaggcttaaag

SEQ ID NO: 585098 - DNA, 15 bp, Homo sapiens
agaatcaggcttaaa

SEQ ID NO: 585099 - DNA, 15 bp, Homo sapiens
aagaatcaggcttaa

SEQ ID NO: 585100 - DNA, 15 bp, Homo sapiens
aaagaatcaggctta

SEQ ID NO: 585101 - DNA, 15 bp, Homo sapiens
aaaagaatcaggctt

SEQ ID NO: 585102 - DNA, 15 bp, Homo sapiens
caaaagaatcaggct

SEQ ID NO: 585103 - DNA, 15 bp, Homo sapiens
tcaaaagaatcaggc

SEQ ID NO: 585104 - DNA, 15 bp, Homo sapiens
ctcaaaagaatcagg

SEQ ID NO: 585105 - DNA, 15 bp, Homo sapiens
tctcaaaagaatcag

SEQ ID NO: 585106 - DNA, 15 bp, Homo sapiens
atctcaaaagaatca

SEQ ID NO: 585107 - DNA, 15 bp, Homo sapiens
catctcaaaagaatc

SEQ ID NO: 585108 - DNA, 15 bp, Homo sapiens
acatctcaaaagaat

SEQ ID NO: 585109 - DNA, 15 bp, Homo sapiens
tacatctcaaaagaa

SEQ ID NO: 585110 - DNA, 15 bp, Homo sapiens
gtacatctcaaaaga

SEQ ID NO: 585111 - DNA, 15 bp, Homo sapiens
agtacatctcaaaag

SEQ ID NO: 585112 - DNA, 15 bp, Homo sapiens
aagtacatctcaaaa

SEQ ID NO: 585113 - DNA, 15 bp, Homo sapiens
aaagtacatctcaaa

SEQ ID NO: 585114 - DNA, 15 bp, Homo sapiens
aaaagtacatctcaa

SEQ ID NO: 585115 - DNA, 15 bp, Homo sapiens
aaaaagtacatctca

SEQ ID NO: 585116 - DNA, 15 bp, Homo sapiens
caaaaagtacatctc

SEQ ID NO: 585117 - DNA, 15 bp, Homo sapiens
tcaaaaagtacatct

SEQ ID NO: 585118 - DNA, 15 bp, Homo sapiens
atcaaaaagtacatc

SEQ ID NO: 585119 - DNA, 15 bp, Homo sapiens
catcaaaaagtacat

SEQ ID NO: 585120 - DNA, 15 bp, Homo sapiens
acatcaaaaagtaca

SEQ ID NO: 585121 - DNA, 15 bp, Homo sapiens
aacatcaaaaagtac

SEQ ID NO: 585122 - DNA, 15 bp, Homo sapiens
caacatcaaaaagta

SEQ ID NO: 585123 - DNA, 15 bp, Homo sapiens
gcaacatcaaaaagt

SEQ ID NO: 585124 - DNA, 15 bp, Homo sapiens
ggcaacatcaaaaag

SEQ ID NO: 585125 - DNA, 15 bp, Homo sapiens
cggcaacatcaaaaa

SEQ ID NO: 585126 - DNA, 15 bp, Homo sapiens
ccggcaacatcaaaa

SEQ ID NO: 585127 - DNA, 15 bp, Homo sapiens
accggcaacatcaaa

SEQ ID NO: 585128 - DNA, 15 bp, Homo sapiens
aaccggcaacatcaa

SEQ ID NO: 585129 - DNA, 15 bp, Homo sapiens
taaccggcaacatca

SEQ ID NO: 585130 - DNA, 15 bp, Homo sapiens
gtaaccggcaacatc

SEQ ID NO: 585131 - DNA, 15 bp, Homo sapiens
ggtaaccggcaacat

SEQ ID NO: 585132 - DNA, 15 bp, Homo sapiens
aggtaaccggcaaca

SEQ ID NO: 585133 - DNA, 15 bp, Homo sapiens
aaggtaaccggcaac

SEQ ID NO: 585134 - DNA, 15 bp, Homo sapiens
aaaggtaaccggcaa

SEQ ID NO: 585135 - DNA, 15 bp, Homo sapiens
taaaggtaaccggca

SEQ ID NO: 585136 - DNA, 15 bp, Homo sapiens
ctaaaggtaaccggc

SEQ ID NO: 585137 - DNA, 15 bp, Homo sapiens
tctaaaggtaaccgg

SEQ ID NO: 585138 - DNA, 15 bp, Homo sapiens
atctaaaggtaaccg

SEQ ID NO: 585139 - DNA, 15 bp, Homo sapiens
aatctaaaggtaacc

SEQ ID NO: 585140 - DNA, 15 bp, Homo sapiens
caatctaaaggtaac

SEQ ID NO: 585141 - DNA, 15 bp, Homo sapiens
tcaatctaaaggtaa

SEQ ID NO: 585142 - DNA, 15 bp, Homo sapiens
gtcaatctaaaggta

SEQ ID NO: 585143 - DNA, 15 bp, Homo sapiens
tgtcaatctaaaggt

SEQ ID NO: 585144 - DNA, 15 bp, Homo sapiens
ctgtcaatctaaagg

SEQ ID NO: 585145 - DNA, 15 bp, Homo sapiens
actgtcaatctaaag

SEQ ID NO: 585146 - DNA, 15 bp, Homo sapiens
tactgtcaatctaaa

SEQ ID NO: 585147 - DNA, 15 bp, Homo sapiens
atactgtcaatctaa

SEQ ID NO: 585148 - DNA, 15 bp, Homo sapiens
aatactgtcaatcta

SEQ ID NO: 585149 - DNA, 15 bp, Homo sapiens
taatactgtcaatct

SEQ ID NO: 585150 - DNA, 15 bp, Homo sapiens
ataatactgtcaatc

SEQ ID NO: 585151 - DNA, 15 bp, Homo sapiens
cataatactgtcaat

SEQ ID NO: 585152 - DNA, 15 bp, Homo sapiens
gcataatactgtcaa

SEQ ID NO: 585153 - DNA, 15 bp, Homo sapiens
ggcataatactgtca

SEQ ID NO: 585154 - DNA, 15 bp, Homo sapiens
aggcataatactgtc

SEQ ID NO: 585155 - DNA, 15 bp, Homo sapiens
caggcataatactgt

SEQ ID NO: 585156 - DNA, 15 bp, Homo sapiens
ccaggcataatactg

SEQ ID NO: 585157 - DNA, 15 bp, Homo sapiens
cccaggcataatact

SEQ ID NO: 585158 - DNA, 15 bp, Homo sapiens
gcccaggcataatac

SEQ ID NO: 585159 - DNA, 15 bp, Homo sapiens
ggcccaggcataata

SEQ ID NO: 585160 - DNA, 15 bp, Homo sapiens
tggcccaggcataat

SEQ ID NO: 585161 - DNA, 15 bp, Homo sapiens
ctggcccaggcataa

SEQ ID NO: 585162 - DNA, 15 bp, Homo sapiens
actggcccaggcata

SEQ ID NO: 585163 - DNA, 15 bp, Homo sapiens
gactggcccaggcat

SEQ ID NO: 585164 - DNA, 15 bp, Homo sapiens
agactggcccaggca

SEQ ID NO: 585165 - DNA, 15 bp, Homo sapiens
aagactggcccaggc

SEQ ID NO: 585166 - DNA, 15 bp, Homo sapiens
caagactggcccagg

SEQ ID NO: 585167 - DNA, 15 bp, Homo sapiens
tcaagactggcccag

SEQ ID NO: 585168 - DNA, 15 bp, Homo sapiens
ctcaagactggccca

SEQ ID NO: 585169 - DNA, 15 bp, Homo sapiens
gctcaagactggccc

SEQ ID NO: 585170 - DNA, 15 bp, Homo sapiens
ggctcaagactggcc

SEQ ID NO: 585171 - DNA, 15 bp, Homo sapiens
tggctcaagactggc

SEQ ID NO: 585172 - DNA, 15 bp, Homo sapiens
ctggctcaagactgg

SEQ ID NO: 585173 - DNA, 15 bp, Homo sapiens
gctggctcaagactg

SEQ ID NO: 585174 - DNA, 15 bp, Homo sapiens
agctggctcaagact

SEQ ID NO: 585175 - DNA, 15 bp, Homo sapiens
aagctggctcaagac

SEQ ID NO: 585176 - DNA, 15 bp, Homo sapiens
aaagctggctcaaga

SEQ ID NO: 585177 - DNA, 15 bp, Homo sapiens
taaagctggctcaag

SEQ ID NO: 585178 - DNA, 15 bp, Homo sapiens
ttaaagctggctcaa

SEQ ID NO: 585179 - DNA, 15 bp, Homo sapiens
tttaaagctggctca

SEQ ID NO: 585180 - DNA, 15 bp, Homo sapiens
atttaaagctggctc

SEQ ID NO: 585181 - DNA, 15 bp, Homo sapiens
gatttaaagctggct

SEQ ID NO: 585182 - DNA, 15 bp, Homo sapiens
tgatttaaagctggc

SEQ ID NO: 585183 - DNA, 15 bp, Homo sapiens
gtgatttaaagctgg

SEQ ID NO: 585184 - DNA, 15 bp, Homo sapiens
tgtgatttaaagctg

SEQ ID NO: 585185 - DNA, 15 bp, Homo sapiens
ctgtgatttaaagct

SEQ ID NO: 585186 - DNA, 15 bp, Homo sapiens
gctgtgatttaaagc

SEQ ID NO: 585187 - DNA, 15 bp, Homo sapiens
agctgtgatttaaag

SEQ ID NO: 585188 - DNA, 15 bp, Homo sapiens
aagctgtgatttaaa

SEQ ID NO: 585189 - DNA, 15 bp, Homo sapiens
aaagctgtgatttaa

SEQ ID NO: 585190 - DNA, 15 bp, Homo sapiens
aaaagctgtgattta

SEQ ID NO: 585191 - DNA, 15 bp, Homo sapiens
taaaagctgtgattt

SEQ ID NO: 585192 - DNA, 15 bp, Homo sapiens
gtaaaagctgtgatt

SEQ ID NO: 585193 - DNA, 15 bp, Homo sapiens
ggtaaaagctgtgat

SEQ ID NO: 585194 - DNA, 15 bp, Homo sapiens
tacataatgcttcac

SEQ ID NO: 585195 - DNA, 15 bp, Homo sapiens
ttacataatgcttca

SEQ ID NO: 585196 - DNA, 15 bp, Homo sapiens
tttacataatgcttc

SEQ ID NO: 585197 - DNA, 15 bp, Homo sapiens
atttacataatgctt

SEQ ID NO: 585198 - DNA, 15 bp, Homo sapiens
gatttacataatgct

SEQ ID NO: 585199 - DNA, 15 bp, Homo sapiens
tgatttacataatgc

SEQ ID NO: 585200 - DNA, 15 bp, Homo sapiens
ctgatttacataatg

SEQ ID NO: 585201 - DNA, 15 bp, Homo sapiens
cctgatttacataat

SEQ ID NO: 585202 - DNA, 15 bp, Homo sapiens
ccctgatttacataa

SEQ ID NO: 585203 - DNA, 15 bp, Homo sapiens
cccctgatttacata

SEQ ID NO: 585204 - DNA, 15 bp, Homo sapiens
acccctgatttacat

SEQ ID NO: 585205 - DNA, 15 bp, Homo sapiens
gacccctgatttaca

SEQ ID NO: 585206 - DNA, 15 bp, Homo sapiens
ggacccctgatttac

SEQ ID NO: 585207 - DNA, 15 bp, Homo sapiens
tggacccctgattta

SEQ ID NO: 585208 - DNA, 15 bp, Homo sapiens
gtggacccctgattt

SEQ ID NO: 585209 - DNA, 15 bp, Homo sapiens
tgtggacccctgatt

SEQ ID NO: 585210 - DNA, 15 bp, Homo sapiens
ctgtggacccctgat

SEQ ID NO: 585211 - DNA, 15 bp, Homo sapiens
actgtggacccctga

SEQ ID NO: 585212 - DNA, 15 bp, Homo sapiens
aactgtggacccctg

SEQ ID NO: 585213 - DNA, 15 bp, Homo sapiens
aaactgtggacccct

SEQ ID NO: 585214 - DNA, 15 bp, Homo sapiens
aaaactgtggacccc

SEQ ID NO: 585215 - DNA, 15 bp, Homo sapiens
aaaaactgtggaccc

SEQ ID NO: 585216 - DNA, 15 bp, Homo sapiens
gaaaaactgtggacc

SEQ ID NO: 585217 - DNA, 15 bp, Homo sapiens
agaaaaactgtggac

SEQ ID NO: 585218 - DNA, 15 bp, Homo sapiens
cagaaaaactgtgga

SEQ ID NO: 585219 - DNA, 15 bp, Homo sapiens
acagaaaaactgtgg

SEQ ID NO: 585220 - DNA, 15 bp, Homo sapiens
tacagaaaaactgtg

SEQ ID NO: 585221 - DNA, 15 bp, Homo sapiens
ttacagaaaaactgt

SEQ ID NO: 585222 - DNA, 15 bp, Homo sapiens
cttacagaaaaactg

SEQ ID NO: 585223 - DNA, 15 bp, Homo sapiens
ccttacagaaaaact

SEQ ID NO: 585224 - DNA, 15 bp, Homo sapiens
cccttacagaaaaac

SEQ ID NO: 585225 - DNA, 15 bp, Homo sapiens
ccccttacagaaaaa

SEQ ID NO: 585226 - DNA, 15 bp, Homo sapiens
accccttacagaaaa

SEQ ID NO: 585227 - DNA, 15 bp, Homo sapiens
gaccccttacagaaa

SEQ ID NO: 585228 - DNA, 15 bp, Homo sapiens
tgaccccttacagaa

SEQ ID NO: 585229 - DNA, 15 bp, Homo sapiens
ttgaccccttacaga

SEQ ID NO: 585230 - DNA, 15 bp, Homo sapiens
tttgaccccttacag

SEQ ID NO: 585231 - DNA, 15 bp, Homo sapiens
atttgaccccttaca

SEQ ID NO: 585232 - DNA, 15 bp, Homo sapiens
gatttgaccccttac

SEQ ID NO: 585233 - DNA, 15 bp, Homo sapiens
tgatttgacccctta

SEQ ID NO: 585234 - DNA, 15 bp, Homo sapiens
atgatttgacccctt

SEQ ID NO: 585235 - DNA, 15 bp, Homo sapiens
tatgatttgacccct

SEQ ID NO: 585236 - DNA, 15 bp, Homo sapiens
ttatgatttgacccc

SEQ ID NO: 585237 - DNA, 15 bp, Homo sapiens
tttatgatttgaccc

SEQ ID NO: 585238 - DNA, 15 bp, Homo sapiens
atttatgatttgacc

SEQ ID NO: 585239 - DNA, 15 bp, Homo sapiens
tatttatgatttgac

SEQ ID NO: 585240 - DNA, 15 bp, Homo sapiens
gtatttatgatttga

SEQ ID NO: 585241 - DNA, 15 bp, Homo sapiens
agtatttatgatttg

SEQ ID NO: 585242 - DNA, 15 bp, Homo sapiens
aagtatttatgattt

SEQ ID NO: 585243 - DNA, 15 bp, Homo sapiens
aaagtatttatgatt

SEQ ID NO: 585244 - DNA, 15 bp, Homo sapiens
taaagtatttatgat

SEQ ID NO: 585245 - DNA, 15 bp, Homo sapiens
ctaaagtatttatga

SEQ ID NO: 585246 - DNA, 15 bp, Homo sapiens
tctaaagtatttatg

SEQ ID NO: 585247 - DNA, 15 bp, Homo sapiens
gtctaaagtatttat

SEQ ID NO: 585248 - DNA, 15 bp, Homo sapiens
agtctaaagtattta

SEQ ID NO: 585249 - DNA, 15 bp, Homo sapiens
cagtctaaagtattt

SEQ ID NO: 585250 - DNA, 15 bp, Homo sapiens
acagtctaaagtatt

SEQ ID NO: 585251 - DNA, 15 bp, Homo sapiens
cacagtctaaagtat

SEQ ID NO: 585252 - DNA, 15 bp, Homo sapiens
ccacagtctaaagta

SEQ ID NO: 585253 - DNA, 15 bp, Homo sapiens
cccacagtctaaagt

SEQ ID NO: 585254 - DNA, 15 bp, Homo sapiens
gcccacagtctaaag

SEQ ID NO: 585255 - DNA, 15 bp, Homo sapiens
ggcccacagtctaaa

SEQ ID NO: 585256 - DNA, 15 bp, Homo sapiens
tggcccacagtctaa

SEQ ID NO: 585257 - DNA, 15 bp, Homo sapiens
atggcccacagtcta

SEQ ID NO: 585258 - DNA, 15 bp, Homo sapiens
tatggcccacagtct

SEQ ID NO: 585259 - DNA, 15 bp, Homo sapiens
atatggcccacagtc

SEQ ID NO: 585260 - DNA, 15 bp, Homo sapiens
catatggcccacagt

SEQ ID NO: 585261 - DNA, 15 bp, Homo sapiens
ccatatggcccacag

SEQ ID NO: 585262 - DNA, 15 bp, Homo sapiens
accatatggcccaca

SEQ ID NO: 585263 - DNA, 15 bp, Homo sapiens
aaccatatggcccac

SEQ ID NO: 585264 - DNA, 15 bp, Homo sapiens
aaaccatatggccca

SEQ ID NO: 585265 - DNA, 15 bp, Homo sapiens
gaaaccatatggccc

SEQ ID NO: 585266 - DNA, 15 bp, Homo sapiens
agaaaccatatggcc

SEQ ID NO: 585267 - DNA, 15 bp, Homo sapiens
cagaaaccatatggc

SEQ ID NO: 585268 - DNA, 15 bp, Homo sapiens
acagaaaccatatgg

SEQ ID NO: 585269 - DNA, 15 bp, Homo sapiens
aacagaaaccatatg

SEQ ID NO: 585270 - DNA, 15 bp, Homo sapiens
taacagaaaccatat

SEQ ID NO: 585271 - DNA, 15 bp, Homo sapiens
gtaacagaaaccata

SEQ ID NO: 585272 - DNA, 15 bp, Homo sapiens
tgtaacagaaaccat

SEQ ID NO: 585273 - DNA, 15 bp, Homo sapiens
atgtaacagaaacca

SEQ ID NO: 585274 - DNA, 15 bp, Homo sapiens
tatgtaacagaaacc

SEQ ID NO: 585275 - DNA, 15 bp, Homo sapiens
atatgtaacagaaac

SEQ ID NO: 585276 - DNA, 15 bp, Homo sapiens
aatatgtaacagaaa

SEQ ID NO: 585277 - DNA, 15 bp, Homo sapiens
aaatatgtaacagaa

SEQ ID NO: 585278 - DNA, 15 bp, Homo sapiens
caaatatgtaacaga

SEQ ID NO: 585279 - DNA, 15 bp, Homo sapiens
acaaatatgtaacag

SEQ ID NO: 585280 - DNA, 15 bp, Homo sapiens
aacaaatatgtaaca

SEQ ID NO: 585281 - DNA, 15 bp, Homo sapiens
aaacaaatatgtaac

SEQ ID NO: 585282 - DNA, 15 bp, Homo sapiens
aaaacaaatatgtaa

SEQ ID NO: 585283 - DNA, 15 bp, Homo sapiens
aaaaacaaatatgta

SEQ ID NO: 585284 - DNA, 15 bp, Homo sapiens
aaaaaacaaatatgt

SEQ ID NO: 585285 - DNA, 15 bp, Homo sapiens
taaaaaacaaatatg

SEQ ID NO: 585286 - DNA, 15 bp, Homo sapiens
ttaaaaaacaaatat

SEQ ID NO: 585287 - DNA, 15 bp, Homo sapiens
tttaaaaaacaaata

SEQ ID NO: 585288 - DNA, 15 bp, Homo sapiens
gtttaaaaaacaaat

SEQ ID NO: 585289 - DNA, 15 bp, Homo sapiens
tgtttaaaaaacaaa

SEQ ID NO: 585290 - DNA, 15 bp, Homo sapiens
ttgtttaaaaaacaa

SEQ ID NO: 585291 - DNA, 15 bp, Homo sapiens
gttgtttaaaaaaca

SEQ ID NO: 585292 - DNA, 15 bp, Homo sapiens
cgttgtttaaaaaac

SEQ ID NO: 585293 - DNA, 15 bp, Homo sapiens
acgttgtttaaaaaa

SEQ ID NO: 585294 - DNA, 15 bp, Homo sapiens
aacgttgtttaaaaa

SEQ ID NO: 585295 - DNA, 15 bp, Homo sapiens
aaacgttgtttaaaa

SEQ ID NO: 585296 - DNA, 15 bp, Homo sapiens
aaaacgttgtttaaa

SEQ ID NO: 585297 - DNA, 15 bp, Homo sapiens
aaaaacgttgtttaa

SEQ ID NO: 585298 - DNA, 15 bp, Homo sapiens
taaaaacgttgttta

SEQ ID NO: 585299 - DNA, 15 bp, Homo sapiens
ataaaaacgttgttt

SEQ ID NO: 585300 - DNA, 15 bp, Homo sapiens
tataaaaacgttgtt

SEQ ID NO: 585301 - DNA, 15 bp, Homo sapiens
ttataaaaacgttgt

SEQ ID NO: 585302 - DNA, 15 bp, Homo sapiens
cttataaaaacgttg

SEQ ID NO: 585303 - DNA, 15 bp, Homo sapiens
ccttataaaaacgtt

SEQ ID NO: 585304 - DNA, 15 bp, Homo sapiens
accttataaaaacgt

SEQ ID NO: 585305 - DNA, 15 bp, Homo sapiens
gaccttataaaaacg

SEQ ID NO: 585306 - DNA, 15 bp, Homo sapiens
tgaccttataaaaac

SEQ ID NO: 585307 - DNA, 15 bp, Homo sapiens
ttgaccttataaaaa

SEQ ID NO: 585308 - DNA, 15 bp, Homo sapiens
tttgaccttataaaa

SEQ ID NO: 585309 - DNA, 15 bp, Homo sapiens
ttttgaccttataaa

SEQ ID NO: 585310 - DNA, 15 bp, Homo sapiens
attttgaccttataa

SEQ ID NO: 585311 - DNA, 15 bp, Homo sapiens
gattttgaccttata

SEQ ID NO: 585312 - DNA, 15 bp, Homo sapiens
tgattttgaccttat

SEQ ID NO: 585313 - DNA, 15 bp, Homo sapiens
atgattttgacctta

SEQ ID NO: 585314 - DNA, 15 bp, Homo sapiens
aatgattttgacctt

SEQ ID NO: 585315 - DNA, 15 bp, Homo sapiens
gaatgattttgacct

SEQ ID NO: 585316 - DNA, 15 bp, Homo sapiens
agaatgattttgacc

SEQ ID NO: 585317 - DNA, 15 bp, Homo sapiens
aagaatgattttgac

SEQ ID NO: 585318 - DNA, 15 bp, Homo sapiens
taagaatgattttga

SEQ ID NO: 585319 - DNA, 15 bp, Homo sapiens
ctaagaatgattttg

SEQ ID NO: 585320 - DNA, 15 bp, Homo sapiens
actaagaatgatttt

SEQ ID NO: 585321 - DNA, 15 bp, Homo sapiens
aactaagaatgattt

SEQ ID NO: 585322 - DNA, 15 bp, Homo sapiens
aaactaagaatgatt

SEQ ID NO: 585323 - DNA, 15 bp, Homo sapiens
aaaactaagaatgat

SEQ ID NO: 585324 - DNA, 15 bp, Homo sapiens
aaaaactaagaatga

SEQ ID NO: 585325 - DNA, 15 bp, Homo sapiens
caaaaactaagaatg

SEQ ID NO: 585326 - DNA, 15 bp, Homo sapiens
tcaaaaactaagaat

SEQ ID NO: 585327 - DNA, 15 bp, Homo sapiens
ctcaaaaactaagaa

SEQ ID NO: 585328 - DNA, 15 bp, Homo sapiens
gctcaaaaactaaga

SEQ ID NO: 585329 - DNA, 15 bp, Homo sapiens
ggctcaaaaactaag

SEQ ID NO: 585330 - DNA, 15 bp, Homo sapiens
tggctcaaaaactaa

SEQ ID NO: 585331 - DNA, 15 bp, Homo sapiens
ttggctcaaaaacta

SEQ ID NO: 585332 - DNA, 15 bp, Homo sapiens
attggctcaaaaact

SEQ ID NO: 585333 - DNA, 15 bp, Homo sapiens
aattggctcaaaaac

SEQ ID NO: 585334 - DNA, 15 bp, Homo sapiens
caattggctcaaaaa

SEQ ID NO: 585335 - DNA, 15 bp, Homo sapiens
ccaattggctcaaaa

SEQ ID NO: 585336 - DNA, 15 bp, Homo sapiens
tccaattggctcaaa

SEQ ID NO: 585337 - DNA, 15 bp, Homo sapiens
atccaattggctcaa

SEQ ID NO: 585338 - DNA, 15 bp, Homo sapiens
aatccaattggctca

SEQ ID NO: 585339 - DNA, 15 bp, Homo sapiens
aaatccaattggctc

SEQ ID NO: 585340 - DNA, 15 bp, Homo sapiens
caaatccaattggct

SEQ ID NO: 585341 - DNA, 15 bp, Homo sapiens
ccaaatccaattggc

SEQ ID NO: 585342 - DNA, 15 bp, Homo sapiens
gccaaatccaattgg

SEQ ID NO: 585343 - DNA, 15 bp, Homo sapiens
ggccaaatccaattg

SEQ ID NO: 585344 - DNA, 15 bp, Homo sapiens
aggccaaatccaatt

SEQ ID NO: 585345 - DNA, 15 bp, Homo sapiens
caggccaaatccaat

SEQ ID NO: 585346 - DNA, 15 bp, Homo sapiens
gcaggccaaatccaa

SEQ ID NO: 585347 - DNA, 15 bp, Homo sapiens
agcaggccaaatcca

SEQ ID NO: 585348 - DNA, 15 bp, Homo sapiens
cagcaggccaaatcc

SEQ ID NO: 585349 - DNA, 15 bp, Homo sapiens
acagcaggccaaatc

SEQ ID NO: 585350 - DNA, 15 bp, Homo sapiens
aacagcaggccaaat

SEQ ID NO: 585351 - DNA, 15 bp, Homo sapiens
gaacagcaggccaaa

SEQ ID NO: 585352 - DNA, 15 bp, Homo sapiens
tgaacagcaggccaa

SEQ ID NO: 585353 - DNA, 15 bp, Homo sapiens
atgaacagcaggcca

SEQ ID NO: 585354 - DNA, 15 bp, Homo sapiens
tatgaacagcaggcc

SEQ ID NO: 585355 - DNA, 15 bp, Homo sapiens
ctatgaacagcaggc

SEQ ID NO: 585356 - DNA, 15 bp, Homo sapiens
gctatgaacagcagg

SEQ ID NO: 585357 - DNA, 15 bp, Homo sapiens
agctatgaacagcag

SEQ ID NO: 585358 - DNA, 15 bp, Homo sapiens
aagctatgaacagca

SEQ ID NO: 585359 - DNA, 15 bp, Homo sapiens
taagctatgaacagc

SEQ ID NO: 585360 - DNA, 15 bp, Homo sapiens
gtaagctatgaacag

SEQ ID NO: 585361 - DNA, 15 bp, Homo sapiens
ggtaagctatgaaca

SEQ ID NO: 585362 - DNA, 15 bp, Homo sapiens
tggtaagctatgaac

SEQ ID NO: 585363 - DNA, 15 bp, Homo sapiens
gtggtaagctatgaa

SEQ ID NO: 585364 - DNA, 15 bp, Homo sapiens
ggtggtaagctatga

SEQ ID NO: 585365 - DNA, 15 bp, Homo sapiens
gggtggtaagctatg

SEQ ID NO: 585366 - DNA, 15 bp, Homo sapiens
ggggtggtaagctat

SEQ ID NO: 585367 - DNA, 15 bp, Homo sapiens
gggggtggtaagcta

SEQ ID NO: 585368 - DNA, 15 bp, Homo sapiens
agggggtggtaagct

SEQ ID NO: 585369 - DNA, 15 bp, Homo sapiens
cagggggtggtaagc

SEQ ID NO: 585370 - DNA, 15 bp, Homo sapiens
tcagggggtggtaag

SEQ ID NO: 585371 - DNA, 15 bp, Homo sapiens
atcagggggtggtaa

SEQ ID NO: 585372 - DNA, 15 bp, Homo sapiens
catcagggggtggta

SEQ ID NO: 585373 - DNA, 15 bp, Homo sapiens
acatcagggggtggt

SEQ ID NO: 585374 - DNA, 15 bp, Homo sapiens
tacatcagggggtgg

SEQ ID NO: 585375 - DNA, 15 bp, Homo sapiens
atacatcagggggtg

SEQ ID NO: 585376 - DNA, 15 bp, Homo sapiens
aatacatcagggggt

SEQ ID NO: 585377 - DNA, 15 bp, Homo sapiens
taatacatcaggggg

SEQ ID NO: 585378 - DNA, 15 bp, Homo sapiens
ataatacatcagggg

SEQ ID NO: 585379 - DNA, 15 bp, Homo sapiens
aataatacatcaggg

SEQ ID NO: 585380 - DNA, 15 bp, Homo sapiens
aaataatacatcagg

SEQ ID NO: 585381 - DNA, 15 bp, Homo sapiens
caaataatacatcag

SEQ ID NO: 585382 - DNA, 15 bp, Homo sapiens
acaaataatacatca

SEQ ID NO: 585383 - DNA, 15 bp, Homo sapiens
aacaaataatacatc

SEQ ID NO: 585384 - DNA, 15 bp, Homo sapiens
taacaaataatacat

SEQ ID NO: 585385 - DNA, 15 bp, Homo sapiens
ataacaaataataca

SEQ ID NO: 585386 - DNA, 15 bp, Homo sapiens
aataacaaataatac

SEQ ID NO: 585387 - DNA, 15 bp, Homo sapiens
gaataacaaataata

SEQ ID NO: 585388 - DNA, 15 bp, Homo sapiens
tgaataacaaataat

SEQ ID NO: 585389 - DNA, 15 bp, Homo sapiens
ctgaataacaaataa

SEQ ID NO: 585390 - DNA, 15 bp, Homo sapiens
tctgaataacaaata

SEQ ID NO: 585391 - DNA, 15 bp, Homo sapiens
ctctgaataacaaat

SEQ ID NO: 585392 - DNA, 15 bp, Homo sapiens
tctctgaataacaaa

SEQ ID NO: 585393 - DNA, 15 bp, Homo sapiens
ttctctgaataacaa

SEQ ID NO: 585394 - DNA, 15 bp, Homo sapiens
tttctctgaataaca

SEQ ID NO: 585395 - DNA, 15 bp, Homo sapiens
ttttctctgaataac

SEQ ID NO: 585396 - DNA, 15 bp, Homo sapiens
attttctctgaataa

SEQ ID NO: 585397 - DNA, 15 bp, Homo sapiens
aattttctctgaata

SEQ ID NO: 585398 - DNA, 15 bp, Homo sapiens
aaattttctctgaat

SEQ ID NO: 585399 - DNA, 15 bp, Homo sapiens
gaaattttctctgaa

SEQ ID NO: 585400 - DNA, 15 bp, Homo sapiens
agaaattttctctga

SEQ ID NO: 585401 - DNA, 15 bp, Homo sapiens
cagaaattttctctg

SEQ ID NO: 585402 - DNA, 15 bp, Homo sapiens
tcagaaattttctct

SEQ ID NO: 585403 - DNA, 15 bp, Homo sapiens
ttcagaaattttctc

SEQ ID NO: 585404 - DNA, 15 bp, Homo sapiens
attcagaaattttct

SEQ ID NO: 585405 - DNA, 15 bp, Homo sapiens
tattcagaaattttc

SEQ ID NO: 585406 - DNA, 15 bp, Homo sapiens
gtattcagaaatttt

SEQ ID NO: 585407 - DNA, 15 bp, Homo sapiens
agtattcagaaattt

SEQ ID NO: 585408 - DNA, 15 bp, Homo sapiens
tagtattcagaaatt

SEQ ID NO: 585409 - DNA, 15 bp, Homo sapiens
gtagtattcagaaat

SEQ ID NO: 585410 - DNA, 15 bp, Homo sapiens
agtagtattcagaaa

SEQ ID NO: 585411 - DNA, 15 bp, Homo sapiens
tagtagtattcagaa

SEQ ID NO: 585412 - DNA, 15 bp, Homo sapiens
ctagtagtattcaga

SEQ ID NO: 585413 - DNA, 15 bp, Homo sapiens
actagtagtattcag

SEQ ID NO: 585414 - DNA, 15 bp, Homo sapiens
aactagtagtattca

SEQ ID NO: 585415 - DNA, 15 bp, Homo sapiens
aaactagtagtattc

SEQ ID NO: 585416 - DNA, 15 bp, Homo sapiens
gaaactagtagtatt

SEQ ID NO: 585417 - DNA, 15 bp, Homo sapiens
ggaaactagtagtat

SEQ ID NO: 585418 - DNA, 15 bp, Homo sapiens
aggaaactagtagta

SEQ ID NO: 585419 - DNA, 15 bp, Homo sapiens
aaggaaactagtagt

SEQ ID NO: 585420 - DNA, 15 bp, Homo sapiens
aaaggaaactagtag

SEQ ID NO: 585421 - DNA, 15 bp, Homo sapiens
aaaaggaaactagta

SEQ ID NO: 585422 - DNA, 15 bp, Homo sapiens
gaaaaggaaactagt

SEQ ID NO: 585423 - DNA, 15 bp, Homo sapiens
agaaaaggaaactag

SEQ ID NO: 585424 - DNA, 15 bp, Homo sapiens
cagaaaaggaaacta

SEQ ID NO: 585425 - DNA, 15 bp, Homo sapiens
acagaaaaggaaact

SEQ ID NO: 585426 - DNA, 15 bp, Homo sapiens
cacagaaaaggaaac

SEQ ID NO: 585427 - DNA, 15 bp, Homo sapiens
gcacagaaaaggaaa

SEQ ID NO: 585428 - DNA, 15 bp, Homo sapiens
ggcacagaaaaggaa

SEQ ID NO: 585429 - DNA, 15 bp, Homo sapiens
aggcacagaaaagga

SEQ ID NO: 585430 - DNA, 15 bp, Homo sapiens
caggcacagaaaagg

SEQ ID NO: 585431 - DNA, 15 bp, Homo sapiens
acaggcacagaaaag

SEQ ID NO: 585432 - DNA, 15 bp, Homo sapiens
gacaggcacagaaaa

SEQ ID NO: 585433 - DNA, 15 bp, Homo sapiens
ggacaggcacagaaa

SEQ ID NO: 585434 - DNA, 15 bp, Homo sapiens
gggacaggcacagaa

SEQ ID NO: 585435 - DNA, 15 bp, Homo sapiens
agggacaggcacaga

SEQ ID NO: 585436 - DNA, 15 bp, Homo sapiens
cagggacaggcacag

SEQ ID NO: 585437 - DNA, 15 bp, Homo sapiens
acagggacaggcaca

SEQ ID NO: 585438 - DNA, 15 bp, Homo sapiens
cacagggacaggcac

SEQ ID NO: 585439 - DNA, 15 bp, Homo sapiens
gcacagggacaggca

SEQ ID NO: 585440 - DNA, 15 bp, Homo sapiens
agcacagggacaggc

SEQ ID NO: 585441 - DNA, 15 bp, Homo sapiens
tagcacagggacagg

SEQ ID NO: 585442 - DNA, 15 bp, Homo sapiens
ctagcacagggacag

SEQ ID NO: 585443 - DNA, 15 bp, Homo sapiens
cctagcacagggaca

SEQ ID NO: 585444 - DNA, 15 bp, Homo sapiens
gcctagcacagggac

SEQ ID NO: 585445 - DNA, 15 bp, Homo sapiens
tgcctagcacaggga

SEQ ID NO: 585446 - DNA, 15 bp, Homo sapiens
gtgcctagcacaggg

SEQ ID NO: 585447 - DNA, 15 bp, Homo sapiens
agtgcctagcacagg

SEQ ID NO: 585448 - DNA, 15 bp, Homo sapiens
tagtgcctagcacag

SEQ ID NO: 585449 - DNA, 15 bp, Homo sapiens
ttagtgcctagcaca

SEQ ID NO: 585450 - DNA, 15 bp, Homo sapiens
tttagtgcctagcac

SEQ ID NO: 585451 - DNA, 15 bp, Homo sapiens
ttttagtgcctagca

SEQ ID NO: 585452 - DNA, 15 bp, Homo sapiens
tttttagtgcctagc

SEQ ID NO: 585453 - DNA, 15 bp, Homo sapiens
atttttagtgcctag

SEQ ID NO: 585454 - DNA, 15 bp, Homo sapiens
catttttagtgccta

SEQ ID NO: 585455 - DNA, 15 bp, Homo sapiens
gcatttttagtgcct

SEQ ID NO: 585456 - DNA, 15 bp, Homo sapiens
tgcatttttagtgcc

SEQ ID NO: 585457 - DNA, 15 bp, Homo sapiens
ttgcatttttagtgc

SEQ ID NO: 585458 - DNA, 15 bp, Homo sapiens
attgcatttttagtg

SEQ ID NO: 585459 - DNA, 15 bp, Homo sapiens
cattgcatttttagt

SEQ ID NO: 585460 - DNA, 15 bp, Homo sapiens
tcattgcatttttag

SEQ ID NO: 585461 - DNA, 15 bp, Homo sapiens
atcattgcattttta

SEQ ID NO: 585462 - DNA, 15 bp, Homo sapiens
aatcattgcattttt

SEQ ID NO: 585463 - DNA, 15 bp, Homo sapiens
taatcattgcatttt

SEQ ID NO: 585464 - DNA, 15 bp, Homo sapiens
ataatcattgcattt

SEQ ID NO: 585465 - DNA, 15 bp, Homo sapiens
aataatcattgcatt

SEQ ID NO: 585466 - DNA, 15 bp, Homo sapiens
caataatcattgcat

SEQ ID NO: 585467 - DNA, 15 bp, Homo sapiens
tcaataatcattgca

SEQ ID NO: 585468 - DNA, 15 bp, Homo sapiens
atcaataatcattgc

SEQ ID NO: 585469 - DNA, 15 bp, Homo sapiens
tatcaataatcattg

SEQ ID NO: 585470 - DNA, 15 bp, Homo sapiens
atatcaataatcatt

SEQ ID NO: 585471 - DNA, 15 bp, Homo sapiens
gatatcaataatcat

SEQ ID NO: 585472 - DNA, 15 bp, Homo sapiens
agatatcaataatca

SEQ ID NO: 585473 - DNA, 15 bp, Homo sapiens
tagatatcaataatc

SEQ ID NO: 585474 - DNA, 15 bp, Homo sapiens
ctagatatcaataat

SEQ ID NO: 585475 - DNA, 15 bp, Homo sapiens
cctagatatcaataa

SEQ ID NO: 585476 - DNA, 15 bp, Homo sapiens
acctagatatcaata

SEQ ID NO: 585477 - DNA, 15 bp, Homo sapiens
cacctagatatcaat

SEQ ID NO: 585478 - DNA, 15 bp, Homo sapiens
tcacctagatatcaa

SEQ ID NO: 585479 - DNA, 15 bp, Homo sapiens
gtcacctagatatca

SEQ ID NO: 585480 - DNA, 15 bp, Homo sapiens
ggtcacctagatatc

SEQ ID NO: 585481 - DNA, 15 bp, Homo sapiens
aggtcacctagatat

SEQ ID NO: 585482 - DNA, 15 bp, Homo sapiens
caggtcacctagata

SEQ ID NO: 585483 - DNA, 15 bp, Homo sapiens
tcaggtcacctagat

SEQ ID NO: 585484 - DNA, 15 bp, Homo sapiens
ttcaggtcacctaga

SEQ ID NO: 585485 - DNA, 15 bp, Homo sapiens
tttcaggtcacctag

SEQ ID NO: 585486 - DNA, 15 bp, Homo sapiens
ttttcaggtcaccta

SEQ ID NO: 585487 - DNA, 15 bp, Homo sapiens
tttttcaggtcacct

SEQ ID NO: 585488 - DNA, 15 bp, Homo sapiens
ttttttcaggtcacc

SEQ ID NO: 585489 - DNA, 15 bp, Homo sapiens
tttttttcaggtcac

SEQ ID NO: 585490 - DNA, 15 bp, Homo sapiens
ttttttttcaggtca

SEQ ID NO: 585491 - DNA, 15 bp, Homo sapiens
attttttttcaggtc

SEQ ID NO: 585492 - DNA, 15 bp, Homo sapiens
tattttttttcaggt

SEQ ID NO: 585493 - DNA, 15 bp, Homo sapiens
ctattttttttcagg

SEQ ID NO: 585494 - DNA, 15 bp, Homo sapiens
actattttttttcag

SEQ ID NO: 585495 - DNA, 15 bp, Homo sapiens
cactattttttttca

SEQ ID NO: 585496 - DNA, 15 bp, Homo sapiens
tcactattttttttc

SEQ ID NO: 585497 - DNA, 15 bp, Homo sapiens
ttcactatttttttt

SEQ ID NO: 585498 - DNA, 15 bp, Homo sapiens
attcactattttttt

SEQ ID NO: 585499 - DNA, 15 bp, Homo sapiens
cattcactatttttt

SEQ ID NO: 585500 - DNA, 15 bp, Homo sapiens
acattcactattttt

SEQ ID NO: 585501 - DNA, 15 bp, Homo sapiens
cacattcactatttt

SEQ ID NO: 585502 - DNA, 15 bp, Homo sapiens
gcacattcactattt

SEQ ID NO: 585503 - DNA, 15 bp, Homo sapiens
agcacattcactatt

SEQ ID NO: 585504 - DNA, 15 bp, Homo sapiens
aagcacattcactat

SEQ ID NO: 585505 - DNA, 15 bp, Homo sapiens
aaagcacattcacta

SEQ ID NO: 585506 - DNA, 15 bp, Homo sapiens
caaagcacattcact

SEQ ID NO: 585507 - DNA, 15 bp, Homo sapiens
acaaagcacattcac

SEQ ID NO: 585508 - DNA, 15 bp, Homo sapiens
tacaaagcacattca

SEQ ID NO: 585509 - DNA, 15 bp, Homo sapiens
ttacaaagcacattc

SEQ ID NO: 585510 - DNA, 15 bp, Homo sapiens
tttacaaagcacatt

SEQ ID NO: 585511 - DNA, 15 bp, Homo sapiens
gtttacaaagcacat

SEQ ID NO: 585512 - DNA, 15 bp, Homo sapiens
agtttacaaagcaca

SEQ ID NO: 585513 - DNA, 15 bp, Homo sapiens
cagtttacaaagcac

SEQ ID NO: 585514 - DNA, 15 bp, Homo sapiens
acagtttacaaagca

SEQ ID NO: 585515 - DNA, 15 bp, Homo sapiens
tacagtttacaaagc

SEQ ID NO: 585516 - DNA, 15 bp, Homo sapiens
ttacagtttacaaag

SEQ ID NO: 585517 - DNA, 15 bp, Homo sapiens
tttacagtttacaaa

SEQ ID NO: 585518 - DNA, 15 bp, Homo sapiens
ctttacagtttacaa

SEQ ID NO: 585519 - DNA, 15 bp, Homo sapiens
gctttacagtttaca

SEQ ID NO: 585520 - DNA, 15 bp, Homo sapiens
tgctttacagtttac

SEQ ID NO: 585521 - DNA, 15 bp, Homo sapiens
gtgctttacagttta

SEQ ID NO: 585522 - DNA, 15 bp, Homo sapiens
agtgctttacagttt

SEQ ID NO: 585523 - DNA, 15 bp, Homo sapiens
aagtgctttacagtt

SEQ ID NO: 585524 - DNA, 15 bp, Homo sapiens
caagtgctttacagt

SEQ ID NO: 585525 - DNA, 15 bp, Homo sapiens
acaagtgctttacag

SEQ ID NO: 585526 - DNA, 15 bp, Homo sapiens
tacaagtgctttaca

SEQ ID NO: 585527 - DNA, 15 bp, Homo sapiens
atacaagtgctttac

SEQ ID NO: 585528 - DNA, 15 bp, Homo sapiens
aatacaagtgcttta

SEQ ID NO: 585529 - DNA, 15 bp, Homo sapiens
gaatacaagtgcttt

SEQ ID NO: 585530 - DNA, 15 bp, Homo sapiens
agaatacaagtgctt

SEQ ID NO: 585531 - DNA, 15 bp, Homo sapiens
tagaatacaagtgct

SEQ ID NO: 585532 - DNA, 15 bp, Homo sapiens
gtagaatacaagtgc

SEQ ID NO: 585533 - DNA, 15 bp, Homo sapiens
agtagaatacaagtg

SEQ ID NO: 585534 - DNA, 15 bp, Homo sapiens
cagtagaatacaagt

SEQ ID NO: 585535 - DNA, 15 bp, Homo sapiens
acagtagaatacaag

SEQ ID NO: 585536 - DNA, 15 bp, Homo sapiens
cacagtagaatacaa

SEQ ID NO: 585537 - DNA, 15 bp, Homo sapiens
tcacagtagaataca

SEQ ID NO: 585538 - DNA, 15 bp, Homo sapiens
atcacagtagaatac

SEQ ID NO: 585539 - DNA, 15 bp, Homo sapiens
tatcacagtagaata

SEQ ID NO: 585540 - DNA, 15 bp, Homo sapiens
ttatcacagtagaat

SEQ ID NO: 585541 - DNA, 15 bp, Homo sapiens
cttatcacagtagaa

SEQ ID NO: 585542 - DNA, 15 bp, Homo sapiens
gcttatcacagtaga

SEQ ID NO: 585543 - DNA, 15 bp, Homo sapiens
cgcttatcacagtag

SEQ ID NO: 585544 - DNA, 15 bp, Homo sapiens
acgcttatcacagta

SEQ ID NO: 585545 - DNA, 15 bp, Homo sapiens
aacgcttatcacagt

SEQ ID NO: 585546 - DNA, 15 bp, Homo sapiens
caacgcttatcacag

SEQ ID NO: 585547 - DNA, 15 bp, Homo sapiens
acaacgcttatcaca

SEQ ID NO: 585548 - DNA, 15 bp, Homo sapiens
cacaacgcttatcac

SEQ ID NO: 585549 - DNA, 15 bp, Homo sapiens
ccacaacgcttatca

SEQ ID NO: 585550 - DNA, 15 bp, Homo sapiens
tccacaacgcttatc

SEQ ID NO: 585551 - DNA, 15 bp, Homo sapiens
atccacaacgcttat

SEQ ID NO: 585552 - DNA, 15 bp, Homo sapiens
tatccacaacgctta

SEQ ID NO: 585553 - DNA, 15 bp, Homo sapiens
gtatccacaacgctt

SEQ ID NO: 585554 - DNA, 15 bp, Homo sapiens
tgtatccacaacgct

SEQ ID NO: 585555 - DNA, 15 bp, Homo sapiens
ttgtatccacaacgc

SEQ ID NO: 585556 - DNA, 15 bp, Homo sapiens
tttgtatccacaacg

SEQ ID NO: 585557 - DNA, 15 bp, Homo sapiens
ctttgtatccacaac

SEQ ID NO: 585558 - DNA, 15 bp, Homo sapiens
tctttgtatccacaa

SEQ ID NO: 585559 - DNA, 15 bp, Homo sapiens
ttctttgtatccaca

SEQ ID NO: 585560 - DNA, 15 bp, Homo sapiens
cccaaaatagctggt

SEQ ID NO: 585561 - DNA, 15 bp, Homo sapiens
acccaaaatagctgg

SEQ ID NO: 585562 - DNA, 15 bp, Homo sapiens
tacccaaaatagctg

SEQ ID NO: 585563 - DNA, 15 bp, Homo sapiens
gtacccaaaatagct

SEQ ID NO: 585564 - DNA, 15 bp, Homo sapiens
agtacccaaaatagc

SEQ ID NO: 585565 - DNA, 15 bp, Homo sapiens
cagtacccaaaatag

SEQ ID NO: 585566 - DNA, 15 bp, Homo sapiens
acagtacccaaaata

SEQ ID NO: 585567 - DNA, 15 bp, Homo sapiens
tacagtacccaaaat

SEQ ID NO: 585568 - DNA, 15 bp, Homo sapiens
ttacagtacccaaaa

SEQ ID NO: 585569 - DNA, 15 bp, Homo sapiens
tttacagtacccaaa

SEQ ID NO: 585570 - DNA, 15 bp, Homo sapiens
ttttacagtacccaa

SEQ ID NO: 585571 - DNA, 15 bp, Homo sapiens
attttacagtaccca

SEQ ID NO: 585572 - DNA, 15 bp, Homo sapiens
tattttacagtaccc

SEQ ID NO: 585573 - DNA, 15 bp, Homo sapiens
gtattttacagtacc

SEQ ID NO: 585574 - DNA, 15 bp, Homo sapiens
tgtattttacagtac

SEQ ID NO: 585575 - DNA, 15 bp, Homo sapiens
ttgtattttacagta

SEQ ID NO: 585576 - DNA, 15 bp, Homo sapiens
cttgtattttacagt

SEQ ID NO: 585577 - DNA, 15 bp, Homo sapiens
tcttgtattttacag

SEQ ID NO: 585578 - DNA, 15 bp, Homo sapiens
atcttgtattttaca

SEQ ID NO: 585579 - DNA, 15 bp, Homo sapiens
aatcttgtattttac

SEQ ID NO: 585580 - DNA, 15 bp, Homo sapiens
taatcttgtatttta

SEQ ID NO: 585581 - DNA, 15 bp, Homo sapiens
ttaatcttgtatttt

SEQ ID NO: 585582 - DNA, 15 bp, Homo sapiens
attaatcttgtattt

SEQ ID NO: 585583 - DNA, 15 bp, Homo sapiens
aattaatcttgtatt

SEQ ID NO: 585584 - DNA, 15 bp, Homo sapiens
gaattaatcttgtat

SEQ ID NO: 585585 - DNA, 15 bp, Homo sapiens
agaattaatcttgta

SEQ ID NO: 585586 - DNA, 15 bp, Homo sapiens
gagaattaatcttgt

SEQ ID NO: 585587 - DNA, 15 bp, Homo sapiens
ggagaattaatcttg

SEQ ID NO: 585588 - DNA, 15 bp, Homo sapiens
aggagaattaatctt

SEQ ID NO: 585589 - DNA, 15 bp, Homo sapiens
taggagaattaatct

SEQ ID NO: 585590 - DNA, 15 bp, Homo sapiens
ataggagaattaatc

SEQ ID NO: 585591 - DNA, 15 bp, Homo sapiens
cataggagaattaat

SEQ ID NO: 585592 - DNA, 15 bp, Homo sapiens
acataggagaattaa

SEQ ID NO: 585593 - DNA, 15 bp, Homo sapiens
tacataggagaatta

SEQ ID NO: 585594 - DNA, 15 bp, Homo sapiens
ttacataggagaatt

SEQ ID NO: 585595 - DNA, 15 bp, Homo sapiens
attacataggagaat

SEQ ID NO: 585596 - DNA, 15 bp, Homo sapiens
tattacataggagaa

SEQ ID NO: 585597 - DNA, 15 bp, Homo sapiens
ttattacataggaga

SEQ ID NO: 585598 - DNA, 15 bp, Homo sapiens
cttattacataggag

SEQ ID NO: 585599 - DNA, 15 bp, Homo sapiens
tcttattacatagga

SEQ ID NO: 585600 - DNA, 15 bp, Homo sapiens
ctcttattacatagg

SEQ ID NO: 585601 - DNA, 15 bp, Homo sapiens
cctcttattacatag

SEQ ID NO: 585602 - DNA, 15 bp, Homo sapiens
tcctcttattacata

SEQ ID NO: 585603 - DNA, 15 bp, Homo sapiens
ttcctcttattacat

SEQ ID NO: 585604 - DNA, 15 bp, Homo sapiens
tttcctcttattaca

SEQ ID NO: 585605 - DNA, 15 bp, Homo sapiens
ctttcctcttattac

SEQ ID NO: 585606 - DNA, 15 bp, Homo sapiens
actttcctcttatta

SEQ ID NO: 585607 - DNA, 15 bp, Homo sapiens
aactttcctcttatt

SEQ ID NO: 585608 - DNA, 15 bp, Homo sapiens
aaactttcctcttat

SEQ ID NO: 585609 - DNA, 15 bp, Homo sapiens
taaactttcctctta

SEQ ID NO: 585610 - DNA, 15 bp, Homo sapiens
ataaactttcctctt

SEQ ID NO: 585611 - DNA, 15 bp, Homo sapiens
gataaactttcctct

SEQ ID NO: 585612 - DNA, 15 bp, Homo sapiens
ggataaactttcctc

SEQ ID NO: 585613 - DNA, 15 bp, Homo sapiens
aggataaactttcct

SEQ ID NO: 585614 - DNA, 15 bp, Homo sapiens
gaggataaactttcc

SEQ ID NO: 585615 - DNA, 15 bp, Homo sapiens
agaggataaactttc

SEQ ID NO: 585616 - DNA, 15 bp, Homo sapiens
tagaggataaacttt

SEQ ID NO: 585617 - DNA, 15 bp, Homo sapiens
atagaggataaactt

SEQ ID NO: 585618 - DNA, 15 bp, Homo sapiens
tatagaggataaact

SEQ ID NO: 585619 - DNA, 15 bp, Homo sapiens
gtatagaggataaac

SEQ ID NO: 585620 - DNA, 15 bp, Homo sapiens
agtatagaggataaa

SEQ ID NO: 585621 - DNA, 15 bp, Homo sapiens
tagtatagaggataa

SEQ ID NO: 585622 - DNA, 15 bp, Homo sapiens
atagtatagaggata

SEQ ID NO: 585623 - DNA, 15 bp, Homo sapiens
aatagtatagaggat

SEQ ID NO: 585624 - DNA, 15 bp, Homo sapiens
gaatagtatagagga

SEQ ID NO: 585625 - DNA, 15 bp, Homo sapiens
tgaatagtatagagg

SEQ ID NO: 585626 - DNA, 15 bp, Homo sapiens
ctgaatagtatagag

SEQ ID NO: 585627 - DNA, 15 bp, Homo sapiens
tctgaatagtataga

SEQ ID NO: 585628 - DNA, 15 bp, Homo sapiens
atctgaatagtatag

SEQ ID NO: 585629 - DNA, 15 bp, Homo sapiens
catctgaatagtata

SEQ ID NO: 585630 - DNA, 15 bp, Homo sapiens
acatctgaatagtat

SEQ ID NO: 585631 - DNA, 15 bp, Homo sapiens
tacatctgaatagta

SEQ ID NO: 585632 - DNA, 15 bp, Homo sapiens
ttacatctgaatagt

SEQ ID NO: 585633 - DNA, 15 bp, Homo sapiens
cttacatctgaatag

SEQ ID NO: 585634 - DNA, 15 bp, Homo sapiens
ccttacatctgaata

SEQ ID NO: 585635 - DNA, 15 bp, Homo sapiens
tccttacatctgaat

SEQ ID NO: 585636 - DNA, 15 bp, Homo sapiens
ttccttacatctgaa

SEQ ID NO: 585637 - DNA, 15 bp, Homo sapiens
attccttacatctga

SEQ ID NO: 585638 - DNA, 15 bp, Homo sapiens
cattccttacatctg

SEQ ID NO: 585639 - DNA, 15 bp, Homo sapiens
tcattccttacatct

SEQ ID NO: 585640 - DNA, 15 bp, Homo sapiens
atcattccttacatc

SEQ ID NO: 585641 - DNA, 15 bp, Homo sapiens
tatcattccttacat

SEQ ID NO: 585642 - DNA, 15 bp, Homo sapiens
atatcattccttaca

SEQ ID NO: 585643 - DNA, 15 bp, Homo sapiens
tatatcattccttac

SEQ ID NO: 585644 - DNA, 15 bp, Homo sapiens
atatatcattcctta

SEQ ID NO: 585645 - DNA, 15 bp, Homo sapiens
aatatatcattcctt

SEQ ID NO: 585646 - DNA, 15 bp, Homo sapiens
caatatatcattcct

SEQ ID NO: 585647 - DNA, 15 bp, Homo sapiens
gcaatatatcattcc

SEQ ID NO: 585648 - DNA, 15 bp, Homo sapiens
agcaatatatcattc

SEQ ID NO: 585649 - DNA, 15 bp, Homo sapiens
aagcaatatatcatt

SEQ ID NO: 585650 - DNA, 15 bp, Homo sapiens
taagcaatatatcat

SEQ ID NO: 585651 - DNA, 15 bp, Homo sapiens
ttaagcaatatatca

SEQ ID NO: 585652 - DNA, 15 bp, Homo sapiens
attaagcaatatatc

SEQ ID NO: 585653 - DNA, 15 bp, Homo sapiens
aattaagcaatatat

SEQ ID NO: 585654 - DNA, 15 bp, Homo sapiens
aaattaagcaatata

SEQ ID NO: 585655 - DNA, 15 bp, Homo sapiens
aaaattaagcaatat

SEQ ID NO: 585656 - DNA, 15 bp, Homo sapiens
taaaattaagcaata

SEQ ID NO: 585657 - DNA, 15 bp, Homo sapiens
ttaaaattaagcaat

SEQ ID NO: 585658 - DNA, 15 bp, Homo sapiens
tttaaaattaagcaa

SEQ ID NO: 585659 - DNA, 15 bp, Homo sapiens
gtttaaaattaagca

SEQ ID NO: 585660 - DNA, 15 bp, Homo sapiens
tgtttaaaattaagc

SEQ ID NO: 585661 - DNA, 15 bp, Homo sapiens
ttgtttaaaattaag

SEQ ID NO: 585662 - DNA, 15 bp, Homo sapiens
attgtttaaaattaa

SEQ ID NO: 585663 - DNA, 15 bp, Homo sapiens
gattgtttaaaatta

SEQ ID NO: 585664 - DNA, 15 bp, Homo sapiens
tgattgtttaaaatt

SEQ ID NO: 585665 - DNA, 15 bp, Homo sapiens
ttgattgtttaaaat

SEQ ID NO: 585666 - DNA, 15 bp, Homo sapiens
cttgattgtttaaaa

SEQ ID NO: 585667 - DNA, 15 bp, Homo sapiens
tcttgattgtttaaa

SEQ ID NO: 585668 - DNA, 15 bp, Homo sapiens
gtcttgattgtttaa

SEQ ID NO: 585669 - DNA, 15 bp, Homo sapiens
agtcttgattgttta

SEQ ID NO: 585670 - DNA, 15 bp, Homo sapiens
aagtcttgattgttt

SEQ ID NO: 585671 - DNA, 15 bp, Homo sapiens
aaagtcttgattgtt

SEQ ID NO: 585672 - DNA, 15 bp, Homo sapiens
taaagtcttgattgt

SEQ ID NO: 585673 - DNA, 15 bp, Homo sapiens
gtaaagtcttgattg

SEQ ID NO: 585674 - DNA, 15 bp, Homo sapiens
agtaaagtcttgatt

SEQ ID NO: 585675 - DNA, 15 bp, Homo sapiens
cagtaaagtcttgat

SEQ ID NO: 585676 - DNA, 15 bp, Homo sapiens
ccagtaaagtcttga

SEQ ID NO: 585677 - DNA, 15 bp, Homo sapiens
accagtaaagtcttg

SEQ ID NO: 585678 - DNA, 15 bp, Homo sapiens
caccagtaaagtctt

SEQ ID NO: 585679 - DNA, 15 bp, Homo sapiens
tcaccagtaaagtct

SEQ ID NO: 585680 - DNA, 15 bp, Homo sapiens
ctcaccagtaaagtc

SEQ ID NO: 585681 - DNA, 15 bp, Homo sapiens
cctcaccagtaaagt

SEQ ID NO: 585682 - DNA, 15 bp, Homo sapiens
acctcaccagtaaag

SEQ ID NO: 585683 - DNA, 15 bp, Homo sapiens
aacctcaccagtaaa

SEQ ID NO: 585684 - DNA, 15 bp, Homo sapiens
taacctcaccagtaa

SEQ ID NO: 585685 - DNA, 15 bp, Homo sapiens
ttaacctcaccagta

SEQ ID NO: 585686 - DNA, 15 bp, Homo sapiens
cttaacctcaccagt

SEQ ID NO: 585687 - DNA, 15 bp, Homo sapiens
acttaacctcaccag

SEQ ID NO: 585688 - DNA, 15 bp, Homo sapiens
aacttaacctcacca

SEQ ID NO: 585689 - DNA, 15 bp, Homo sapiens
taacttaacctcacc

SEQ ID NO: 585690 - DNA, 15 bp, Homo sapiens
ttaacttaacctcac

SEQ ID NO: 585691 - DNA, 15 bp, Homo sapiens
tttaacttaacctca

SEQ ID NO: 585692 - DNA, 15 bp, Homo sapiens
atttaacttaacctc

SEQ ID NO: 585693 - DNA, 15 bp, Homo sapiens
aatttaacttaacct

SEQ ID NO: 585694 - DNA, 15 bp, Homo sapiens
taatttaacttaacc

SEQ ID NO: 585695 - DNA, 15 bp, Homo sapiens
ataatttaacttaac

SEQ ID NO: 585696 - DNA, 15 bp, Homo sapiens
aataatttaacttaa

SEQ ID NO: 585697 - DNA, 15 bp, Homo sapiens
taataatttaactta

SEQ ID NO: 585698 - DNA, 15 bp, Homo sapiens
gtaataatttaactt

SEQ ID NO: 585699 - DNA, 15 bp, Homo sapiens
agtaataatttaact

SEQ ID NO: 585700 - DNA, 15 bp, Homo sapiens
cagtaataatttaac

SEQ ID NO: 585701 - DNA, 15 bp, Homo sapiens
tcagtaataatttaa

SEQ ID NO: 585702 - DNA, 15 bp, Homo sapiens
atcagtaataattta

SEQ ID NO: 585703 - DNA, 15 bp, Homo sapiens
tatcagtaataattt

SEQ ID NO: 585704 - DNA, 15 bp, Homo sapiens
gtatcagtaataatt

SEQ ID NO: 585705 - DNA, 15 bp, Homo sapiens
tgtatcagtaataat

SEQ ID NO: 585706 - DNA, 15 bp, Homo sapiens
atgtatcagtaataa

SEQ ID NO: 585707 - DNA, 15 bp, Homo sapiens
aatgtatcagtaata

SEQ ID NO: 585708 - DNA, 15 bp, Homo sapiens
aaatgtatcagtaat

SEQ ID NO: 585709 - DNA, 15 bp, Homo sapiens
aaaatgtatcagtaa

SEQ ID NO: 585710 - DNA, 15 bp, Homo sapiens
aaaaatgtatcagta

SEQ ID NO: 585711 - DNA, 15 bp, Homo sapiens
gaaaaatgtatcagt

SEQ ID NO: 585712 - DNA, 15 bp, Homo sapiens
ggaaaaatgtatcag

SEQ ID NO: 585713 - DNA, 15 bp, Homo sapiens
tggaaaaatgtatca

SEQ ID NO: 585714 - DNA, 15 bp, Homo sapiens
ctggaaaaatgtatc

SEQ ID NO: 585715 - DNA, 15 bp, Homo sapiens
cctggaaaaatgtat

SEQ ID NO: 585716 - DNA, 15 bp, Homo sapiens
acctggaaaaatgta

SEQ ID NO: 585717 - DNA, 15 bp, Homo sapiens
tacctggaaaaatgt

SEQ ID NO: 585718 - DNA, 15 bp, Homo sapiens
ttacctggaaaaatg

SEQ ID NO: 585719 - DNA, 15 bp, Homo sapiens
gttacctggaaaaat

SEQ ID NO: 585720 - DNA, 15 bp, Homo sapiens
ggttacctggaaaaa

SEQ ID NO: 585721 - DNA, 15 bp, Homo sapiens
tggttacctggaaaa

SEQ ID NO: 585722 - DNA, 15 bp, Homo sapiens
ctggttacctggaaa

SEQ ID NO: 585723 - DNA, 15 bp, Homo sapiens
cctggttacctggaa

SEQ ID NO: 585724 - DNA, 15 bp, Homo sapiens
tcctggttacctgga

SEQ ID NO: 585725 - DNA, 15 bp, Homo sapiens
ttcctggttacctgg

SEQ ID NO: 585726 - DNA, 15 bp, Homo sapiens
tttcctggttacctg

SEQ ID NO: 585727 - DNA, 15 bp, Homo sapiens
ctttcctggttacct

SEQ ID NO: 585728 - DNA, 15 bp, Homo sapiens
tctttcctggttacc

SEQ ID NO: 585729 - DNA, 15 bp, Homo sapiens
ctctttcctggttac

SEQ ID NO: 585730 - DNA, 15 bp, Homo sapiens
gctctttcctggtta

SEQ ID NO: 585731 - DNA, 15 bp, Homo sapiens
agctctttcctggtt

SEQ ID NO: 585732 - DNA, 15 bp, Homo sapiens
tagctctttcctggt

SEQ ID NO: 585733 - DNA, 15 bp, Homo sapiens
ctagctctttcctgg

SEQ ID NO: 585734 - DNA, 15 bp, Homo sapiens
actagctctttcctg

SEQ ID NO: 585735 - DNA, 15 bp, Homo sapiens
tactagctctttcct

SEQ ID NO: 585736 - DNA, 15 bp, Homo sapiens
atactagctctttcc

SEQ ID NO: 585737 - DNA, 15 bp, Homo sapiens
catactagctctttc

SEQ ID NO: 585738 - DNA, 15 bp, Homo sapiens
tcatactagctcttt

SEQ ID NO: 585739 - DNA, 15 bp, Homo sapiens
ctcatactagctctt

SEQ ID NO: 585740 - DNA, 15 bp, Homo sapiens
cctcatactagctct

SEQ ID NO: 585741 - DNA, 15 bp, Homo sapiens
tcctcatactagctc

SEQ ID NO: 585742 - DNA, 15 bp, Homo sapiens
ttcctcatactagct

SEQ ID NO: 585743 - DNA, 15 bp, Homo sapiens
tttcctcatactagc

SEQ ID NO: 585744 - DNA, 15 bp, Homo sapiens
atttcctcatactag

SEQ ID NO: 585745 - DNA, 15 bp, Homo sapiens
catttcctcatacta

SEQ ID NO: 585746 - DNA, 15 bp, Homo sapiens
tcatttcctcatact

SEQ ID NO: 585747 - DNA, 15 bp, Homo sapiens
ttcatttcctcatac

SEQ ID NO: 585748 - DNA, 15 bp, Homo sapiens
cttcatttcctcata

SEQ ID NO: 585749 - DNA, 15 bp, Homo sapiens
acttcatttcctcat

SEQ ID NO: 585750 - DNA, 15 bp, Homo sapiens
tacttcatttcctca

SEQ ID NO: 585751 - DNA, 15 bp, Homo sapiens
ttacttcatttcctc

SEQ ID NO: 585752 - DNA, 15 bp, Homo sapiens
attacttcatttcct

SEQ ID NO: 585753 - DNA, 15 bp, Homo sapiens
tattacttcatttcc

SEQ ID NO: 585754 - DNA, 15 bp, Homo sapiens
ctattacttcatttc

SEQ ID NO: 585755 - DNA, 15 bp, Homo sapiens
tctattacttcattt

SEQ ID NO: 585756 - DNA, 15 bp, Homo sapiens
atctattacttcatt

SEQ ID NO: 585757 - DNA, 15 bp, Homo sapiens
catctattacttcat

SEQ ID NO: 585758 - DNA, 15 bp, Homo sapiens
acatctattacttca

SEQ ID NO: 585759 - DNA, 15 bp, Homo sapiens
cacatctattacttc

SEQ ID NO: 585760 - DNA, 15 bp, Homo sapiens
tcacatctattactt

SEQ ID NO: 585761 - DNA, 15 bp, Homo sapiens
ctcacatctattact

SEQ ID NO: 585762 - DNA, 15 bp, Homo sapiens
tctcacatctattac

SEQ ID NO: 585763 - DNA, 15 bp, Homo sapiens
atctcacatctatta

SEQ ID NO: 585764 - DNA, 15 bp, Homo sapiens
gatctcacatctatt

SEQ ID NO: 585765 - DNA, 15 bp, Homo sapiens
ggatctcacatctat

SEQ ID NO: 585766 - DNA, 15 bp, Homo sapiens
tggatctcacatcta

SEQ ID NO: 585767 - DNA, 15 bp, Homo sapiens
ctggatctcacatct

SEQ ID NO: 585768 - DNA, 15 bp, Homo sapiens
tctggatctcacatc

SEQ ID NO: 585769 - DNA, 15 bp, Homo sapiens
gtctggatctcacat

SEQ ID NO: 585770 - DNA, 15 bp, Homo sapiens
ggtctggatctcaca

SEQ ID NO: 585771 - DNA, 15 bp, Homo sapiens
cggtctggatctcac

SEQ ID NO: 585772 - DNA, 15 bp, Homo sapiens
tcggtctggatctca

SEQ ID NO: 585773 - DNA, 15 bp, Homo sapiens
ttcggtctggatctc

SEQ ID NO: 585774 - DNA, 15 bp, Homo sapiens
tttcggtctggatct

SEQ ID NO: 585775 - DNA, 15 bp, Homo sapiens
ctttcggtctggatc

SEQ ID NO: 585776 - DNA, 15 bp, Homo sapiens
actttcggtctggat

SEQ ID NO: 585777 - DNA, 15 bp, Homo sapiens
gactttcggtctgga

SEQ ID NO: 585778 - DNA, 15 bp, Homo sapiens
tgactttcggtctgg

SEQ ID NO: 585779 - DNA, 15 bp, Homo sapiens
gtgactttcggtctg

SEQ ID NO: 585780 - DNA, 15 bp, Homo sapiens
agtgactttcggtct

SEQ ID NO: 585781 - DNA, 15 bp, Homo sapiens
aagtgactttcggtc

SEQ ID NO: 585782 - DNA, 15 bp, Homo sapiens
taagtgactttcggt

SEQ ID NO: 585783 - DNA, 15 bp, Homo sapiens
ttaagtgactttcgg

SEQ ID NO: 585784 - DNA, 15 bp, Homo sapiens
attaagtgactttcg

SEQ ID NO: 585785 - DNA, 15 bp, Homo sapiens
aattaagtgactttc

SEQ ID NO: 585786 - DNA, 15 bp, Homo sapiens
gaattaagtgacttt

SEQ ID NO: 585787 - DNA, 15 bp, Homo sapiens
tgaattaagtgactt

SEQ ID NO: 585788 - DNA, 15 bp, Homo sapiens
ctgaattaagtgact

SEQ ID NO: 585789 - DNA, 15 bp, Homo sapiens
gctgaattaagtgac

SEQ ID NO: 585790 - DNA, 15 bp, Homo sapiens
agctgaattaagtga

SEQ ID NO: 585791 - DNA, 15 bp, Homo sapiens
aagctgaattaagtg

SEQ ID NO: 585792 - DNA, 15 bp, Homo sapiens
caagctgaattaagt

SEQ ID NO: 585793 - DNA, 15 bp, Homo sapiens
gcaagctgaattaag

SEQ ID NO: 585794 - DNA, 15 bp, Homo sapiens
cgcaagctgaattaa

SEQ ID NO: 585795 - DNA, 15 bp, Homo sapiens
tcgcaagctgaatta

SEQ ID NO: 585796 - DNA, 15 bp, Homo sapiens
ttcgcaagctgaatt

SEQ ID NO: 585797 - DNA, 15 bp, Homo sapiens
attcgcaagctgaat

SEQ ID NO: 585798 - DNA, 15 bp, Homo sapiens
cattcgcaagctgaa

SEQ ID NO: 585799 - DNA, 15 bp, Homo sapiens
acattcgcaagctga

SEQ ID NO: 585800 - DNA, 15 bp, Homo sapiens
cacattcgcaagctg

SEQ ID NO: 585801 - DNA, 15 bp, Homo sapiens
gcacattcgcaagct

SEQ ID NO: 585802 - DNA, 15 bp, Homo sapiens
agcacattcgcaagc

SEQ ID NO: 585803 - DNA, 15 bp, Homo sapiens
aagcacattcgcaag

SEQ ID NO: 585804 - DNA, 15 bp, Homo sapiens
aaagcacattcgcaa

SEQ ID NO: 585805 - DNA, 15 bp, Homo sapiens
gaaagcacattcgca

SEQ ID NO: 585806 - DNA, 15 bp, Homo sapiens
agaaagcacattcgc

SEQ ID NO: 585807 - DNA, 15 bp, Homo sapiens
tagaaagcacattcg

SEQ ID NO: 585808 - DNA, 15 bp, Homo sapiens
ttagaaagcacattc

SEQ ID NO: 585809 - DNA, 15 bp, Homo sapiens
tttagaaagcacatt

SEQ ID NO: 585810 - DNA, 15 bp, Homo sapiens
atttagaaagcacat

SEQ ID NO: 585811 - DNA, 15 bp, Homo sapiens
aatttagaaagcaca

SEQ ID NO: 585812 - DNA, 15 bp, Homo sapiens
taatttagaaagcac

SEQ ID NO: 585813 - DNA, 15 bp, Homo sapiens
ataatttagaaagca

SEQ ID NO: 585814 - DNA, 15 bp, Homo sapiens
tataatttagaaagc

SEQ ID NO: 585815 - DNA, 15 bp, Homo sapiens
ttataatttagaaag

SEQ ID NO: 585816 - DNA, 15 bp, Homo sapiens
tttataatttagaaa

SEQ ID NO: 585817 - DNA, 15 bp, Homo sapiens
ctttataatttagaa

SEQ ID NO: 585818 - DNA, 15 bp, Homo sapiens
gctttataatttaga

SEQ ID NO: 585819 - DNA, 15 bp, Homo sapiens
tgctttataatttag

SEQ ID NO: 585820 - DNA, 15 bp, Homo sapiens
gtgctttataattta

SEQ ID NO: 585821 - DNA, 15 bp, Homo sapiens
agtgctttataattt

SEQ ID NO: 585822 - DNA, 15 bp, Homo sapiens
aagtgctttataatt

SEQ ID NO: 585823 - DNA, 15 bp, Homo sapiens
caagtgctttataat

SEQ ID NO: 585824 - DNA, 15 bp, Homo sapiens
acaagtgctttataa

SEQ ID NO: 585825 - DNA, 15 bp, Homo sapiens
tacaagtgctttata

SEQ ID NO: 585826 - DNA, 15 bp, Homo sapiens
ttacaagtgctttat

SEQ ID NO: 585827 - DNA, 15 bp, Homo sapiens
tttacaagtgcttta

SEQ ID NO: 585828 - DNA, 15 bp, Homo sapiens
atttacaagtgcttt

SEQ ID NO: 585829 - DNA, 15 bp, Homo sapiens
catttacaagtgctt

SEQ ID NO: 585830 - DNA, 15 bp, Homo sapiens
tcatttacaagtgct

SEQ ID NO: 585831 - DNA, 15 bp, Homo sapiens
ttcatttacaagtgc

SEQ ID NO: 585832 - DNA, 15 bp, Homo sapiens
tttcatttacaagtg

SEQ ID NO: 585833 - DNA, 15 bp, Homo sapiens
ttttcatttacaagt

SEQ ID NO: 585834 - DNA, 15 bp, Homo sapiens
tttttcatttacaag

SEQ ID NO: 585835 - DNA, 15 bp, Homo sapiens
atttttcatttacaa

SEQ ID NO: 585836 - DNA, 15 bp, Homo sapiens
aatttttcatttaca

SEQ ID NO: 585837 - DNA, 15 bp, Homo sapiens
aaatttttcatttac

SEQ ID NO: 585838 - DNA, 15 bp, Homo sapiens
caaatttttcattta

SEQ ID NO: 585839 - DNA, 15 bp, Homo sapiens
tcaaatttttcattt

SEQ ID NO: 585840 - DNA, 15 bp, Homo sapiens
atcaaatttttcatt

SEQ ID NO: 585841 - DNA, 15 bp, Homo sapiens
catcaaatttttcat

SEQ ID NO: 585842 - DNA, 15 bp, Homo sapiens
gcatcaaatttttca

SEQ ID NO: 585843 - DNA, 15 bp, Homo sapiens
agcatcaaatttttc

SEQ ID NO: 585844 - DNA, 15 bp, Homo sapiens
aagcatcaaattttt

SEQ ID NO: 585845 - DNA, 15 bp, Homo sapiens
aaagcatcaaatttt

SEQ ID NO: 585846 - DNA, 15 bp, Homo sapiens
gaaagcatcaaattt

SEQ ID NO: 585847 - DNA, 15 bp, Homo sapiens
agaaagcatcaaatt

SEQ ID NO: 585848 - DNA, 15 bp, Homo sapiens
cagaaagcatcaaat

SEQ ID NO: 585849 - DNA, 15 bp, Homo sapiens
acagaaagcatcaaa

SEQ ID NO: 585850 - DNA, 15 bp, Homo sapiens
tacagaaagcatcaa

SEQ ID NO: 585851 - DNA, 15 bp, Homo sapiens
atacagaaagcatca

SEQ ID NO: 585852 - DNA, 15 bp, Homo sapiens
catacagaaagcatc

SEQ ID NO: 585853 - DNA, 15 bp, Homo sapiens
tcatacagaaagcat

SEQ ID NO: 585854 - DNA, 15 bp, Homo sapiens
ttcatacagaaagca

SEQ ID NO: 585855 - DNA, 15 bp, Homo sapiens
attcatacagaaagc

SEQ ID NO: 585856 - DNA, 15 bp, Homo sapiens
tattcatacagaaag

SEQ ID NO: 585857 - DNA, 15 bp, Homo sapiens
ttattcatacagaaa

SEQ ID NO: 585858 - DNA, 15 bp, Homo sapiens
tttattcatacagaa

SEQ ID NO: 585859 - DNA, 15 bp, Homo sapiens
ttttattcatacaga

SEQ ID NO: 585860 - DNA, 15 bp, Homo sapiens
gttttattcatacag

SEQ ID NO: 585861 - DNA, 15 bp, Homo sapiens
agttttattcataca

SEQ ID NO: 585862 - DNA, 15 bp, Homo sapiens
aagttttattcatac

SEQ ID NO: 585863 - DNA, 15 bp, Homo sapiens
aaagttttattcata

SEQ ID NO: 585864 - DNA, 15 bp, Homo sapiens
gaaagttttattcat

SEQ ID NO: 585865 - DNA, 15 bp, Homo sapiens
agaaagttttattca

SEQ ID NO: 585866 - DNA, 15 bp, Homo sapiens
cagaaagttttattc

SEQ ID NO: 585867 - DNA, 15 bp, Homo sapiens
acagaaagttttatt

SEQ ID NO: 585868 - DNA, 15 bp, Homo sapiens
tacagaaagttttat

SEQ ID NO: 585869 - DNA, 15 bp, Homo sapiens
ttacagaaagtttta

SEQ ID NO: 585870 - DNA, 15 bp, Homo sapiens
cttacagaaagtttt

SEQ ID NO: 585871 - DNA, 15 bp, Homo sapiens
gcttacagaaagttt

SEQ ID NO: 585872 - DNA, 15 bp, Homo sapiens
agcttacagaaagtt

SEQ ID NO: 585873 - DNA, 15 bp, Homo sapiens
tagcttacagaaagt

SEQ ID NO: 585874 - DNA, 15 bp, Homo sapiens
ctagcttacagaaag

SEQ ID NO: 585875 - DNA, 15 bp, Homo sapiens
cctagcttacagaaa

SEQ ID NO: 585876 - DNA, 15 bp, Homo sapiens
acctagcttacagaa

SEQ ID NO: 585877 - DNA, 15 bp, Homo sapiens
tacctagcttacaga

SEQ ID NO: 585878 - DNA, 15 bp, Homo sapiens
atacctagcttacag

SEQ ID NO: 585879 - DNA, 15 bp, Homo sapiens
aatacctagcttaca

SEQ ID NO: 585880 - DNA, 15 bp, Homo sapiens
caatacctagcttac

SEQ ID NO: 585881 - DNA, 15 bp, Homo sapiens
acaatacctagctta

SEQ ID NO: 585882 - DNA, 15 bp, Homo sapiens
gacaatacctagctt

SEQ ID NO: 585883 - DNA, 15 bp, Homo sapiens
agacaatacctagct

SEQ ID NO: 585884 - DNA, 15 bp, Homo sapiens
gagacaatacctagc

SEQ ID NO: 585885 - DNA, 15 bp, Homo sapiens
agagacaatacctag

SEQ ID NO: 585886 - DNA, 15 bp, Homo sapiens
tagagacaataccta

SEQ ID NO: 585887 - DNA, 15 bp, Homo sapiens
gtagagacaatacct

SEQ ID NO: 585888 - DNA, 15 bp, Homo sapiens
tgtagagacaatacc

SEQ ID NO: 585889 - DNA, 15 bp, Homo sapiens
ttgtagagacaatac

SEQ ID NO: 585890 - DNA, 15 bp, Homo sapiens
tttgtagagacaata

SEQ ID NO: 585891 - DNA, 15 bp, Homo sapiens
ttttgtagagacaat

SEQ ID NO: 585892 - DNA, 15 bp, Homo sapiens
attttgtagagacaa

SEQ ID NO: 585893 - DNA, 15 bp, Homo sapiens
aattttgtagagaca

SEQ ID NO: 585894 - DNA, 15 bp, Homo sapiens
gaattttgtagagac

SEQ ID NO: 585895 - DNA, 15 bp, Homo sapiens
agaattttgtagaga

SEQ ID NO: 585896 - DNA, 15 bp, Homo sapiens
gagaattttgtagag

SEQ ID NO: 585897 - DNA, 15 bp, Homo sapiens
tgagaattttgtaga

SEQ ID NO: 585898 - DNA, 15 bp, Homo sapiens
atgagaattttgtag

SEQ ID NO: 585899 - DNA, 15 bp, Homo sapiens
aatgagaattttgta

SEQ ID NO: 585900 - DNA, 15 bp, Homo sapiens
caatgagaattttgt

SEQ ID NO: 585901 - DNA, 15 bp, Homo sapiens
acaatgagaattttg

SEQ ID NO: 585902 - DNA, 15 bp, Homo sapiens
tacaatgagaatttt

SEQ ID NO: 585903 - DNA, 15 bp, Homo sapiens
atacaatgagaattt

SEQ ID NO: 585904 - DNA, 15 bp, Homo sapiens
tatacaatgagaatt

SEQ ID NO: 585905 - DNA, 15 bp, Homo sapiens
ctatacaatgagaat

SEQ ID NO: 585906 - DNA, 15 bp, Homo sapiens
actatacaatgagaa

SEQ ID NO: 585907 - DNA, 15 bp, Homo sapiens
aactatacaatgaga

SEQ ID NO: 585908 - DNA, 15 bp, Homo sapiens
taactatacaatgag

SEQ ID NO: 585909 - DNA, 15 bp, Homo sapiens
ttaactatacaatga

SEQ ID NO: 585910 - DNA, 15 bp, Homo sapiens
tttaactatacaatg

SEQ ID NO: 585911 - DNA, 15 bp, Homo sapiens
gtttaactatacaat

SEQ ID NO: 585912 - DNA, 15 bp, Homo sapiens
ggtttaactatacaa

SEQ ID NO: 585913 - DNA, 15 bp, Homo sapiens
tggtttaactataca

SEQ ID NO: 585914 - DNA, 15 bp, Homo sapiens
gtggtttaactatac

SEQ ID NO: 585915 - DNA, 15 bp, Homo sapiens
tgtggtttaactata

SEQ ID NO: 585916 - DNA, 15 bp, Homo sapiens
ctgtggtttaactat

SEQ ID NO: 585917 - DNA, 15 bp, Homo sapiens
actgtggtttaacta

SEQ ID NO: 585918 - DNA, 15 bp, Homo sapiens
cactgtggtttaact

SEQ ID NO: 585919 - DNA, 15 bp, Homo sapiens
tcactgtggtttaac

SEQ ID NO: 585920 - DNA, 15 bp, Homo sapiens
ctcactgtggtttaa

SEQ ID NO: 585921 - DNA, 15 bp, Homo sapiens
tctcactgtggttta

SEQ ID NO: 585922 - DNA, 15 bp, Homo sapiens
ttctcactgtggttt

SEQ ID NO: 585923 - DNA, 15 bp, Homo sapiens
cttctcactgtggtt

SEQ ID NO: 585924 - DNA, 15 bp, Homo sapiens
ccttctcactgtggt

SEQ ID NO: 585925 - DNA, 15 bp, Homo sapiens
cccttctcactgtgg

SEQ ID NO: 585926 - DNA, 15 bp, Homo sapiens
acccttctcactgtg

SEQ ID NO: 585927 - DNA, 15 bp, Homo sapiens
aacccttctcactgt

SEQ ID NO: 585928 - DNA, 15 bp, Homo sapiens
gaacccttctcactg

SEQ ID NO: 585929 - DNA, 15 bp, Homo sapiens
agaacccttctcact

SEQ ID NO: 585930 - DNA, 15 bp, Homo sapiens
tagaacccttctcac

SEQ ID NO: 585931 - DNA, 15 bp, Homo sapiens
atagaacccttctca

SEQ ID NO: 585932 - DNA, 15 bp, Homo sapiens
tatagaacccttctc

SEQ ID NO: 585933 - DNA, 15 bp, Homo sapiens
ttatagaacccttct

SEQ ID NO: 585934 - DNA, 15 bp, Homo sapiens
cttatagaacccttc

SEQ ID NO: 585935 - DNA, 15 bp, Homo sapiens
acttatagaaccctt

SEQ ID NO: 585936 - DNA, 15 bp, Homo sapiens
tacttatagaaccct

SEQ ID NO: 585937 - DNA, 15 bp, Homo sapiens
ctacttatagaaccc

SEQ ID NO: 585938 - DNA, 15 bp, Homo sapiens
actacttatagaacc

SEQ ID NO: 585939 - DNA, 15 bp, Homo sapiens
aactacttatagaac

SEQ ID NO: 585940 - DNA, 15 bp, Homo sapiens
taactacttatagaa

SEQ ID NO: 585941 - DNA, 15 bp, Homo sapiens
ataactacttataga

SEQ ID NO: 585942 - DNA, 15 bp, Homo sapiens
tataactacttatag

SEQ ID NO: 585943 - DNA, 15 bp, Homo sapiens
gtataactacttata

SEQ ID NO: 585944 - DNA, 15 bp, Homo sapiens
tgtataactacttat

SEQ ID NO: 585945 - DNA, 15 bp, Homo sapiens
ttgtataactactta

SEQ ID NO: 585946 - DNA, 15 bp, Homo sapiens
tttgtataactactt

SEQ ID NO: 585947 - DNA, 15 bp, Homo sapiens
gtttgtataactact

SEQ ID NO: 585948 - DNA, 15 bp, Homo sapiens
ggtttgtataactac

SEQ ID NO: 585949 - DNA, 15 bp, Homo sapiens
tggtttgtataacta

SEQ ID NO: 585950 - DNA, 15 bp, Homo sapiens
ttggtttgtataact

SEQ ID NO: 585951 - DNA, 15 bp, Homo sapiens
cttggtttgtataac

SEQ ID NO: 585952 - DNA, 15 bp, Homo sapiens
ccttggtttgtataa

SEQ ID NO: 585953 - DNA, 15 bp, Homo sapiens
cccttggtttgtata

SEQ ID NO: 585954 - DNA, 15 bp, Homo sapiens
acccttggtttgtat

SEQ ID NO: 585955 - DNA, 15 bp, Homo sapiens
aacccttggtttgta

SEQ ID NO: 585956 - DNA, 15 bp, Homo sapiens
aaacccttggtttgt

SEQ ID NO: 585957 - DNA, 15 bp, Homo sapiens
taaacccttggtttg

SEQ ID NO: 585958 - DNA, 15 bp, Homo sapiens
ttaaacccttggttt

SEQ ID NO: 585959 - DNA, 15 bp, Homo sapiens
tttaaacccttggtt

SEQ ID NO: 585960 - DNA, 15 bp, Homo sapiens
atttaaacccttggt

SEQ ID NO: 585961 - DNA, 15 bp, Homo sapiens
tatttaaacccttgg

SEQ ID NO: 585962 - DNA, 15 bp, Homo sapiens
gtatttaaacccttg

SEQ ID NO: 585963 - DNA, 15 bp, Homo sapiens
ggtatttaaaccctt

SEQ ID NO: 585964 - DNA, 15 bp, Homo sapiens
aggtatttaaaccct

SEQ ID NO: 585965 - DNA, 15 bp, Homo sapiens
caggtatttaaaccc

SEQ ID NO: 585966 - DNA, 15 bp, Homo sapiens
acaggtatttaaacc

SEQ ID NO: 585967 - DNA, 15 bp, Homo sapiens
aacaggtatttaaac

SEQ ID NO: 585968 - DNA, 15 bp, Homo sapiens
taacaggtatttaaa

SEQ ID NO: 585969 - DNA, 15 bp, Homo sapiens
ttaacaggtatttaa

SEQ ID NO: 585970 - DNA, 15 bp, Homo sapiens
tttaacaggtattta

SEQ ID NO: 585971 - DNA, 15 bp, Homo sapiens
atttaacaggtattt

SEQ ID NO: 585972 - DNA, 15 bp, Homo sapiens
tatttaacaggtatt

SEQ ID NO: 585973 - DNA, 15 bp, Homo sapiens
ctatttaacaggtat

SEQ ID NO: 585974 - DNA, 15 bp, Homo sapiens
tctatttaacaggta

SEQ ID NO: 585975 - DNA, 15 bp, Homo sapiens
atctatttaacaggt

SEQ ID NO: 585976 - DNA, 15 bp, Homo sapiens
gatctatttaacagg

SEQ ID NO: 585977 - DNA, 15 bp, Homo sapiens
tgatctatttaacag

SEQ ID NO: 585978 - DNA, 15 bp, Homo sapiens
ttgatctatttaaca

SEQ ID NO: 585979 - DNA, 15 bp, Homo sapiens
attgatctatttaac

SEQ ID NO: 585980 - DNA, 15 bp, Homo sapiens
aattgatctatttaa

SEQ ID NO: 585981 - DNA, 15 bp, Homo sapiens
aaattgatctattta

SEQ ID NO: 585982 - DNA, 15 bp, Homo sapiens
aaaattgatctattt

SEQ ID NO: 585983 - DNA, 15 bp, Homo sapiens
caaaattgatctatt

SEQ ID NO: 585984 - DNA, 15 bp, Homo sapiens
tcaaaattgatctat

SEQ ID NO: 585985 - DNA, 15 bp, Homo sapiens
atcaaaattgatcta

SEQ ID NO: 585986 - DNA, 15 bp, Homo sapiens
aatcaaaattgatct

SEQ ID NO: 585987 - DNA, 15 bp, Homo sapiens
caatcaaaattgatc

SEQ ID NO: 585988 - DNA, 15 bp, Homo sapiens
gcaatcaaaattgat

SEQ ID NO: 585989 - DNA, 15 bp, Homo sapiens
ggcaatcaaaattga

SEQ ID NO: 585990 - DNA, 15 bp, Homo sapiens
aggcaatcaaaattg

SEQ ID NO: 585991 - DNA, 15 bp, Homo sapiens
taggcaatcaaaatt

SEQ ID NO: 585992 - DNA, 15 bp, Homo sapiens
gtaggcaatcaaaat

SEQ ID NO: 585993 - DNA, 15 bp, Homo sapiens
agtaggcaatcaaaa

SEQ ID NO: 585994 - DNA, 15 bp, Homo sapiens
tagtaggcaatcaaa

SEQ ID NO: 585995 - DNA, 15 bp, Homo sapiens
atagtaggcaatcaa

SEQ ID NO: 585996 - DNA, 15 bp, Homo sapiens
catagtaggcaatca

SEQ ID NO: 585997 - DNA, 15 bp, Homo sapiens
acatagtaggcaatc

SEQ ID NO: 585998 - DNA, 15 bp, Homo sapiens
cacatagtaggcaat

SEQ ID NO: 585999 - DNA, 15 bp, Homo sapiens
tcacatagtaggcaa

SEQ ID NO: 586000 - DNA, 15 bp, Homo sapiens
ttcacatagtaggca

SEQ ID NO: 586001 - DNA, 15 bp, Homo sapiens
gttcacatagtaggc

SEQ ID NO: 586002 - DNA, 15 bp, Homo sapiens
agttcacatagtagg

SEQ ID NO: 586003 - DNA, 15 bp, Homo sapiens
gagttcacatagtag

SEQ ID NO: 586004 - DNA, 15 bp, Homo sapiens
tgagttcacatagta

SEQ ID NO: 586005 - DNA, 15 bp, Homo sapiens
gtgagttcacatagt

SEQ ID NO: 586006 - DNA, 15 bp, Homo sapiens
agtgagttcacatag

SEQ ID NO: 586007 - DNA, 15 bp, Homo sapiens
cagtgagttcacata

SEQ ID NO: 586008 - DNA, 15 bp, Homo sapiens
acagtgagttcacat

SEQ ID NO: 586009 - DNA, 15 bp, Homo sapiens
aacagtgagttcaca

SEQ ID NO: 586010 - DNA, 15 bp, Homo sapiens
taacagtgagttcac

SEQ ID NO: 586011 - DNA, 15 bp, Homo sapiens
ttaacagtgagttca

SEQ ID NO: 586012 - DNA, 15 bp, Homo sapiens
tttaacagtgagttc

SEQ ID NO: 586013 - DNA, 15 bp, Homo sapiens
ctttaacagtgagtt

SEQ ID NO: 586014 - DNA, 15 bp, Homo sapiens
cctttaacagtgagt

SEQ ID NO: 586015 - DNA, 15 bp, Homo sapiens
gcctttaacagtgag

SEQ ID NO: 586016 - DNA, 15 bp, Homo sapiens
tgcctttaacagtga

SEQ ID NO: 586017 - DNA, 15 bp, Homo sapiens
gtgcctttaacagtg

SEQ ID NO: 586018 - DNA, 15 bp, Homo sapiens
agtgcctttaacagt

SEQ ID NO: 586019 - DNA, 15 bp, Homo sapiens
cagtgcctttaacag

SEQ ID NO: 586020 - DNA, 15 bp, Homo sapiens
tcagtgcctttaaca

SEQ ID NO: 586021 - DNA, 15 bp, Homo sapiens
ttcagtgcctttaac

SEQ ID NO: 586022 - DNA, 15 bp, Homo sapiens
tttcagtgcctttaa

SEQ ID NO: 586023 - DNA, 15 bp, Homo sapiens
ttttcagtgccttta

SEQ ID NO: 586024 - DNA, 15 bp, Homo sapiens
attttcagtgccttt

SEQ ID NO: 586025 - DNA, 15 bp, Homo sapiens
aattttcagtgcctt

SEQ ID NO: 586026 - DNA, 15 bp, Homo sapiens
aaattttcagtgcct

SEQ ID NO: 586027 - DNA, 15 bp, Homo sapiens
taaattttcagtgcc

SEQ ID NO: 586028 - DNA, 15 bp, Homo sapiens
ataaattttcagtgc

SEQ ID NO: 586029 - DNA, 15 bp, Homo sapiens
gataaattttcagtg

SEQ ID NO: 586030 - DNA, 15 bp, Homo sapiens
tgataaattttcagt

SEQ ID NO: 586031 - DNA, 15 bp, Homo sapiens
atgataaattttcag

SEQ ID NO: 586032 - DNA, 15 bp, Homo sapiens
tatgataaattttca

SEQ ID NO: 586033 - DNA, 15 bp, Homo sapiens
atatgataaattttc

SEQ ID NO: 586034 - DNA, 15 bp, Homo sapiens
aatatgataaatttt

SEQ ID NO: 586035 - DNA, 15 bp, Homo sapiens
aaatatgataaattt

SEQ ID NO: 586036 - DNA, 15 bp, Homo sapiens
gaaatatgataaatt

SEQ ID NO: 586037 - DNA, 15 bp, Homo sapiens
tgaaatatgataaat

SEQ ID NO: 586038 - DNA, 15 bp, Homo sapiens
atgaaatatgataaa

SEQ ID NO: 586039 - DNA, 15 bp, Homo sapiens
aatgaaatatgataa

SEQ ID NO: 586040 - DNA, 15 bp, Homo sapiens
aaatgaaatatgata

SEQ ID NO: 586041 - DNA, 15 bp, Homo sapiens
taaatgaaatatgat

SEQ ID NO: 586042 - DNA, 15 bp, Homo sapiens
ctaaatgaaatatga

SEQ ID NO: 586043 - DNA, 15 bp, Homo sapiens
gctaaatgaaatatg

SEQ ID NO: 586044 - DNA, 15 bp, Homo sapiens
ggctaaatgaaatat

SEQ ID NO: 586045 - DNA, 15 bp, Homo sapiens
tggctaaatgaaata

SEQ ID NO: 586046 - DNA, 15 bp, Homo sapiens
gtggctaaatgaaat

SEQ ID NO: 586047 - DNA, 15 bp, Homo sapiens
tgtggctaaatgaaa

SEQ ID NO: 586048 - DNA, 15 bp, Homo sapiens
ctgtggctaaatgaa

SEQ ID NO: 586049 - DNA, 15 bp, Homo sapiens
gctgtggctaaatga

SEQ ID NO: 586050 - DNA, 15 bp, Homo sapiens
ggctgtggctaaatg

SEQ ID NO: 586051 - DNA, 15 bp, Homo sapiens
tggctgtggctaaat

SEQ ID NO: 586052 - DNA, 15 bp, Homo sapiens
ttggctgtggctaaa

SEQ ID NO: 586053 - DNA, 15 bp, Homo sapiens
tttggctgtggctaa

SEQ ID NO: 586054 - DNA, 15 bp, Homo sapiens
ttttggctgtggcta

SEQ ID NO: 586055 - DNA, 15 bp, Homo sapiens
tttttggctgtggct

SEQ ID NO: 586056 - DNA, 15 bp, Homo sapiens
atttttggctgtggc

SEQ ID NO: 586057 - DNA, 15 bp, Homo sapiens
tatttttggctgtgg

SEQ ID NO: 586058 - DNA, 15 bp, Homo sapiens
ttatttttggctgtg

SEQ ID NO: 586059 - DNA, 15 bp, Homo sapiens
cttatttttggctgt

SEQ ID NO: 586060 - DNA, 15 bp, Homo sapiens
ccttatttttggctg

SEQ ID NO: 586061 - DNA, 15 bp, Homo sapiens
gccttatttttggct

SEQ ID NO: 586062 - DNA, 15 bp, Homo sapiens
tgccttatttttggc

SEQ ID NO: 586063 - DNA, 15 bp, Homo sapiens
ttgccttatttttgg

SEQ ID NO: 586064 - DNA, 15 bp, Homo sapiens
attgccttatttttg

SEQ ID NO: 586065 - DNA, 15 bp, Homo sapiens
tattgccttattttt

SEQ ID NO: 586066 - DNA, 15 bp, Homo sapiens
gtattgccttatttt

SEQ ID NO: 586067 - DNA, 15 bp, Homo sapiens
ggtattgccttattt

SEQ ID NO: 586068 - DNA, 15 bp, Homo sapiens
aggtattgccttatt

SEQ ID NO: 586069 - DNA, 15 bp, Homo sapiens
taggtattgccttat

SEQ ID NO: 586070 - DNA, 15 bp, Homo sapiens
ataggtattgcctta

SEQ ID NO: 586071 - DNA, 15 bp, Homo sapiens
cataggtattgcctt

SEQ ID NO: 586072 - DNA, 15 bp, Homo sapiens
acataggtattgcct

SEQ ID NO: 586073 - DNA, 15 bp, Homo sapiens
aacataggtattgcc

SEQ ID NO: 586074 - DNA, 15 bp, Homo sapiens
taacataggtattgc

SEQ ID NO: 586075 - DNA, 15 bp, Homo sapiens
ctaacataggtattg

SEQ ID NO: 586076 - DNA, 15 bp, Homo sapiens
gctaacataggtatt

SEQ ID NO: 586077 - DNA, 15 bp, Homo sapiens
tgctaacataggtat

SEQ ID NO: 586078 - DNA, 15 bp, Homo sapiens
atgctaacataggta

SEQ ID NO: 586079 - DNA, 15 bp, Homo sapiens
aatgctaacataggt

SEQ ID NO: 586080 - DNA, 15 bp, Homo sapiens
aaatgctaacatagg

SEQ ID NO: 586081 - DNA, 15 bp, Homo sapiens
aaaatgctaacatag

SEQ ID NO: 586082 - DNA, 15 bp, Homo sapiens
caaaatgctaacata

SEQ ID NO: 586083 - DNA, 15 bp, Homo sapiens
acaaaatgctaacat

SEQ ID NO: 586084 - DNA, 15 bp, Homo sapiens
cacaaaatgctaaca

SEQ ID NO: 586085 - DNA, 15 bp, Homo sapiens
tcacaaaatgctaac

SEQ ID NO: 586086 - DNA, 15 bp, Homo sapiens
ttcacaaaatgctaa

SEQ ID NO: 586087 - DNA, 15 bp, Homo sapiens
gttcacaaaatgcta

SEQ ID NO: 586088 - DNA, 15 bp, Homo sapiens
agttcacaaaatgct

SEQ ID NO: 586089 - DNA, 15 bp, Homo sapiens
gagttcacaaaatgc

SEQ ID NO: 586090 - DNA, 15 bp, Homo sapiens
agagttcacaaaatg

SEQ ID NO: 586091 - DNA, 15 bp, Homo sapiens
tagagttcacaaaat

SEQ ID NO: 586092 - DNA, 15 bp, Homo sapiens
ttagagttcacaaaa

SEQ ID NO: 586093 - DNA, 15 bp, Homo sapiens
cttagagttcacaaa

SEQ ID NO: 586094 - DNA, 15 bp, Homo sapiens
ccttagagttcacaa

SEQ ID NO: 586095 - DNA, 15 bp, Homo sapiens
gccttagagttcaca

SEQ ID NO: 586096 - DNA, 15 bp, Homo sapiens
tgccttagagttcac

SEQ ID NO: 586097 - DNA, 15 bp, Homo sapiens
gtgccttagagttca

SEQ ID NO: 586098 - DNA, 15 bp, Homo sapiens
ggtgccttagagttc

SEQ ID NO: 586099 - DNA, 15 bp, Homo sapiens
tggtgccttagagtt

SEQ ID NO: 586100 - DNA, 15 bp, Homo sapiens
atggtgccttagagt

SEQ ID NO: 586101 - DNA, 15 bp, Homo sapiens
tatggtgccttagag

SEQ ID NO: 586102 - DNA, 15 bp, Homo sapiens
atatggtgccttaga

SEQ ID NO: 586103 - DNA, 15 bp, Homo sapiens
tatatggtgccttag

SEQ ID NO: 586104 - DNA, 15 bp, Homo sapiens
ttatatggtgcctta

SEQ ID NO: 586105 - DNA, 15 bp, Homo sapiens
tttatatggtgcctt

SEQ ID NO: 586106 - DNA, 15 bp, Homo sapiens
atttatatggtgcct

SEQ ID NO: 586107 - DNA, 15 bp, Homo sapiens
catttatatggtgcc

SEQ ID NO: 586108 - DNA, 15 bp, Homo sapiens
acatttatatggtgc

SEQ ID NO: 586109 - DNA, 15 bp, Homo sapiens
tacatttatatggtg

SEQ ID NO: 586110 - DNA, 15 bp, Homo sapiens
ttacatttatatggt

SEQ ID NO: 586111 - DNA, 15 bp, Homo sapiens
gttacatttatatgg

SEQ ID NO: 586112 - DNA, 15 bp, Homo sapiens
agttacatttatatg

SEQ ID NO: 586113 - DNA, 15 bp, Homo sapiens
cagttacatttatat

SEQ ID NO: 586114 - DNA, 15 bp, Homo sapiens
acagttacatttata

SEQ ID NO: 586115 - DNA, 15 bp, Homo sapiens
aacagttacatttat

SEQ ID NO: 586116 - DNA, 15 bp, Homo sapiens
caacagttacattta

SEQ ID NO: 586117 - DNA, 15 bp, Homo sapiens
tcaacagttacattt

SEQ ID NO: 586118 - DNA, 15 bp, Homo sapiens
atcaacagttacatt

SEQ ID NO: 586119 - DNA, 15 bp, Homo sapiens
aatcaacagttacat

SEQ ID NO: 586120 - DNA, 15 bp, Homo sapiens
aaatcaacagttaca

SEQ ID NO: 586121 - DNA, 15 bp, Homo sapiens
aaaatcaacagttac

SEQ ID NO: 586122 - DNA, 15 bp, Homo sapiens
gaaaatcaacagtta

SEQ ID NO: 586123 - DNA, 15 bp, Homo sapiens
agaaaatcaacagtt

SEQ ID NO: 586124 - DNA, 15 bp, Homo sapiens
gagaaaatcaacagt

SEQ ID NO: 586125 - DNA, 15 bp, Homo sapiens
tgagaaaatcaacag

SEQ ID NO: 586126 - DNA, 15 bp, Homo sapiens
gtgagaaaatcaaca

SEQ ID NO: 586127 - DNA, 15 bp, Homo sapiens
agtgagaaaatcaac

SEQ ID NO: 586128 - DNA, 15 bp, Homo sapiens
aagtgagaaaatcaa

SEQ ID NO: 586129 - DNA, 15 bp, Homo sapiens
caagtgagaaaatca

SEQ ID NO: 586130 - DNA, 15 bp, Homo sapiens
ccaagtgagaaaatc

SEQ ID NO: 586131 - DNA, 15 bp, Homo sapiens
accaagtgagaaaat

SEQ ID NO: 586132 - DNA, 15 bp, Homo sapiens
caccaagtgagaaaa

SEQ ID NO: 586133 - DNA, 15 bp, Homo sapiens
gcaccaagtgagaaa

SEQ ID NO: 586134 - DNA, 15 bp, Homo sapiens
agcaccaagtgagaa

SEQ ID NO: 586135 - DNA, 15 bp, Homo sapiens
cagcaccaagtgaga

SEQ ID NO: 586136 - DNA, 15 bp, Homo sapiens
ccagcaccaagtgag

SEQ ID NO: 586137 - DNA, 15 bp, Homo sapiens
cccagcaccaagtga

SEQ ID NO: 586138 - DNA, 15 bp, Homo sapiens
acccagcaccaagtg

SEQ ID NO: 586139 - DNA, 15 bp, Homo sapiens
tacccagcaccaagt

SEQ ID NO: 586140 - DNA, 15 bp, Homo sapiens
gtacccagcaccaag

SEQ ID NO: 586141 - DNA, 15 bp, Homo sapiens
agtacccagcaccaa

SEQ ID NO: 586142 - DNA, 15 bp, Homo sapiens
tagtacccagcacca

SEQ ID NO: 586143 - DNA, 15 bp, Homo sapiens
ctagtacccagcacc

SEQ ID NO: 586144 - DNA, 15 bp, Homo sapiens
cctagtacccagcac

SEQ ID NO: 586145 - DNA, 15 bp, Homo sapiens
acctagtacccagca

SEQ ID NO: 586146 - DNA, 15 bp, Homo sapiens
aacctagtacccagc

SEQ ID NO: 586147 - DNA, 15 bp, Homo sapiens
aaacctagtacccag

SEQ ID NO: 586148 - DNA, 15 bp, Homo sapiens
taaacctagtaccca

SEQ ID NO: 586149 - DNA, 15 bp, Homo sapiens
ataaacctagtaccc

SEQ ID NO: 586150 - DNA, 15 bp, Homo sapiens
tataaacctagtacc

SEQ ID NO: 586151 - DNA, 15 bp, Homo sapiens
ttataaacctagtac

SEQ ID NO: 586152 - DNA, 15 bp, Homo sapiens
tttataaacctagta

SEQ ID NO: 586153 - DNA, 15 bp, Homo sapiens
ttttataaacctagt

SEQ ID NO: 586154 - DNA, 15 bp, Homo sapiens
attttataaacctag

SEQ ID NO: 586155 - DNA, 15 bp, Homo sapiens
aattttataaaccta

SEQ ID NO: 586156 - DNA, 15 bp, Homo sapiens
caattttataaacct

SEQ ID NO: 586157 - DNA, 15 bp, Homo sapiens
acaattttataaacc

SEQ ID NO: 586158 - DNA, 15 bp, Homo sapiens
tacaattttataaac

SEQ ID NO: 586159 - DNA, 15 bp, Homo sapiens
atacaattttataaa

SEQ ID NO: 586160 - DNA, 15 bp, Homo sapiens
catacaattttataa

SEQ ID NO: 586161 - DNA, 15 bp, Homo sapiens
tcatacaattttata

SEQ ID NO: 586162 - DNA, 15 bp, Homo sapiens
atcatacaattttat

SEQ ID NO: 586163 - DNA, 15 bp, Homo sapiens
tatcatacaatttta

SEQ ID NO: 586164 - DNA, 15 bp, Homo sapiens
ctatcatacaatttt

SEQ ID NO: 586165 - DNA, 15 bp, Homo sapiens
actatcatacaattt

SEQ ID NO: 586166 - DNA, 15 bp, Homo sapiens
aactatcatacaatt

SEQ ID NO: 586167 - DNA, 15 bp, Homo sapiens
taactatcatacaat

SEQ ID NO: 586168 - DNA, 15 bp, Homo sapiens
ataactatcatacaa

SEQ ID NO: 586169 - DNA, 15 bp, Homo sapiens
aataactatcataca

SEQ ID NO: 586170 - DNA, 15 bp, Homo sapiens
taataactatcatac

SEQ ID NO: 586171 - DNA, 15 bp, Homo sapiens
ataataactatcata

SEQ ID NO: 586172 - DNA, 15 bp, Homo sapiens
tataataactatcat

SEQ ID NO: 586173 - DNA, 15 bp, Homo sapiens
atataataactatca

SEQ ID NO: 586174 - DNA, 15 bp, Homo sapiens
aatataataactatc

SEQ ID NO: 586175 - DNA, 15 bp, Homo sapiens
caatataataactat

SEQ ID NO: 586176 - DNA, 15 bp, Homo sapiens
acaatataataacta

SEQ ID NO: 586177 - DNA, 15 bp, Homo sapiens
cacaatataataact

SEQ ID NO: 586178 - DNA, 15 bp, Homo sapiens
gcacaatataataac

SEQ ID NO: 586179 - DNA, 15 bp, Homo sapiens
tgcacaatataataa

SEQ ID NO: 586180 - DNA, 15 bp, Homo sapiens
ttgcacaatataata

SEQ ID NO: 586181 - DNA, 15 bp, Homo sapiens
tttgcacaatataat

SEQ ID NO: 586182 - DNA, 15 bp, Homo sapiens
atttgcacaatataa

SEQ ID NO: 586183 - DNA, 15 bp, Homo sapiens
tatttgcacaatata

SEQ ID NO: 586184 - DNA, 15 bp, Homo sapiens
ttatttgcacaatat

SEQ ID NO: 586185 - DNA, 15 bp, Homo sapiens
tttatttgcacaata

SEQ ID NO: 586186 - DNA, 15 bp, Homo sapiens
ctttatttgcacaat

SEQ ID NO: 586187 - DNA, 15 bp, Homo sapiens
actttatttgcacaa

SEQ ID NO: 586188 - DNA, 15 bp, Homo sapiens
tactttatttgcaca

SEQ ID NO: 586189 - DNA, 15 bp, Homo sapiens
ctactttatttgcac

SEQ ID NO: 586190 - DNA, 15 bp, Homo sapiens
cctactttatttgca

SEQ ID NO: 586191 - DNA, 15 bp, Homo sapiens
tcctactttatttgc

SEQ ID NO: 586192 - DNA, 15 bp, Homo sapiens
ttcctactttatttg

SEQ ID NO: 586193 - DNA, 15 bp, Homo sapiens
tttcctactttattt

SEQ ID NO: 586194 - DNA, 15 bp, Homo sapiens
ttttcctactttatt

SEQ ID NO: 586195 - DNA, 15 bp, Homo sapiens
attttcctactttat

SEQ ID NO: 586196 - DNA, 15 bp, Homo sapiens
aattttcctacttta

SEQ ID NO: 586197 - DNA, 15 bp, Homo sapiens
aaattttcctacttt

SEQ ID NO: 586198 - DNA, 15 bp, Homo sapiens
caaattttcctactt

SEQ ID NO: 586199 - DNA, 15 bp, Homo sapiens
tcaaattttcctact

SEQ ID NO: 586200 - DNA, 15 bp, Homo sapiens
ttcaaattttcctac

SEQ ID NO: 586201 - DNA, 15 bp, Homo sapiens
attcaaattttccta

SEQ ID NO: 586202 - DNA, 15 bp, Homo sapiens
tattcaaattttcct

SEQ ID NO: 586203 - DNA, 15 bp, Homo sapiens
ttattcaaattttcc

SEQ ID NO: 586204 - DNA, 15 bp, Homo sapiens
gttattcaaattttc

SEQ ID NO: 586205 - DNA, 15 bp, Homo sapiens
tgttattcaaatttt

SEQ ID NO: 586206 - DNA, 15 bp, Homo sapiens
ttgttattcaaattt

SEQ ID NO: 586207 - DNA, 15 bp, Homo sapiens
attgttattcaaatt

SEQ ID NO: 586208 - DNA, 15 bp, Homo sapiens
cattgttattcaaat

SEQ ID NO: 586209 - DNA, 15 bp, Homo sapiens
tcattgttattcaaa

SEQ ID NO: 586210 - DNA, 15 bp, Homo sapiens
atcattgttattcaa

SEQ ID NO: 586211 - DNA, 15 bp, Homo sapiens
aatcattgttattca

SEQ ID NO: 586212 - DNA, 15 bp, Homo sapiens
taatcattgttattc

SEQ ID NO: 586213 - DNA, 15 bp, Homo sapiens
ataatcattgttatt

SEQ ID NO: 586214 - DNA, 15 bp, Homo sapiens
gataatcattgttat

SEQ ID NO: 586215 - DNA, 15 bp, Homo sapiens
agataatcattgtta

SEQ ID NO: 586216 - DNA, 15 bp, Homo sapiens
aagataatcattgtt

SEQ ID NO: 586217 - DNA, 15 bp, Homo sapiens
aaagataatcattgt

SEQ ID NO: 586218 - DNA, 15 bp, Homo sapiens
aaaagataatcattg

SEQ ID NO: 586219 - DNA, 15 bp, Homo sapiens
caaaagataatcatt

SEQ ID NO: 586220 - DNA, 15 bp, Homo sapiens
tcaaaagataatcat

SEQ ID NO: 586221 - DNA, 15 bp, Homo sapiens
ttcaaaagataatca

SEQ ID NO: 586222 - DNA, 15 bp, Homo sapiens
attcaaaagataatc

SEQ ID NO: 586223 - DNA, 15 bp, Homo sapiens
tattcaaaagataat

SEQ ID NO: 586224 - DNA, 15 bp, Homo sapiens
gtattcaaaagataa

SEQ ID NO: 586225 - DNA, 15 bp, Homo sapiens
cgtattcaaaagata

SEQ ID NO: 586226 - DNA, 15 bp, Homo sapiens
gcgtattcaaaagat

SEQ ID NO: 586227 - DNA, 15 bp, Homo sapiens
tgcgtattcaaaaga

SEQ ID NO: 586228 - DNA, 15 bp, Homo sapiens
atgcgtattcaaaag

SEQ ID NO: 586229 - DNA, 15 bp, Homo sapiens
tatgcgtattcaaaa

SEQ ID NO: 586230 - DNA, 15 bp, Homo sapiens
gtatgcgtattcaaa

SEQ ID NO: 586231 - DNA, 15 bp, Homo sapiens
cgtatgcgtattcaa

SEQ ID NO: 586232 - DNA, 15 bp, Homo sapiens
gcgtatgcgtattca

SEQ ID NO: 586233 - DNA, 15 bp, Homo sapiens
tgcgtatgcgtattc

SEQ ID NO: 586234 - DNA, 15 bp, Homo sapiens
ttgcgtatgcgtatt

SEQ ID NO: 586235 - DNA, 15 bp, Homo sapiens
cttgcgtatgcgtat

SEQ ID NO: 586236 - DNA, 15 bp, Homo sapiens
ccttgcgtatgcgta

SEQ ID NO: 586237 - DNA, 15 bp, Homo sapiens
cccttgcgtatgcgt

SEQ ID NO: 586238 - DNA, 15 bp, Homo sapiens
tcccttgcgtatgcg

SEQ ID NO: 586239 - DNA, 15 bp, Homo sapiens
atcccttgcgtatgc

SEQ ID NO: 586240 - DNA, 15 bp, Homo sapiens
aatcccttgcgtatg

SEQ ID NO: 586241 - DNA, 15 bp, Homo sapiens
caatcccttgcgtat

SEQ ID NO: 586242 - DNA, 15 bp, Homo sapiens
ccaatcccttgcgta

SEQ ID NO: 586243 - DNA, 15 bp, Homo sapiens
accaatcccttgcgt

SEQ ID NO: 586244 - DNA, 15 bp, Homo sapiens
aaccaatcccttgcg

SEQ ID NO: 586245 - DNA, 15 bp, Homo sapiens
caaccaatcccttgc

SEQ ID NO: 586246 - DNA, 15 bp, Homo sapiens
acaaccaatcccttg

SEQ ID NO: 586247 - DNA, 15 bp, Homo sapiens
gacaaccaatccctt

SEQ ID NO: 586248 - DNA, 15 bp, Homo sapiens
agacaaccaatccct

SEQ ID NO: 586249 - DNA, 15 bp, Homo sapiens
cagacaaccaatccc

SEQ ID NO: 586250 - DNA, 15 bp, Homo sapiens
tcagacaaccaatcc

SEQ ID NO: 586251 - DNA, 15 bp, Homo sapiens
ttcagacaaccaatc

SEQ ID NO: 586252 - DNA, 15 bp, Homo sapiens
cttcagacaaccaat

SEQ ID NO: 586253 - DNA, 15 bp, Homo sapiens
tcttcagacaaccaa

SEQ ID NO: 586254 - DNA, 15 bp, Homo sapiens
ttcttcagacaacca

SEQ ID NO: 586255 - DNA, 15 bp, Homo sapiens
attcttcagacaacc

SEQ ID NO: 586256 - DNA, 15 bp, Homo sapiens
cattcttcagacaac

SEQ ID NO: 586257 - DNA, 15 bp, Homo sapiens
gcattcttcagacaa

SEQ ID NO: 586258 - DNA, 15 bp, Homo sapiens
ggcattcttcagaca

SEQ ID NO: 586259 - DNA, 15 bp, Homo sapiens
tggcattcttcagac

SEQ ID NO: 586260 - DNA, 15 bp, Homo sapiens
gtggcattcttcaga

SEQ ID NO: 586261 - DNA, 15 bp, Homo sapiens
agtggcattcttcag

SEQ ID NO: 586262 - DNA, 15 bp, Homo sapiens
tagtggcattcttca

SEQ ID NO: 586263 - DNA, 15 bp, Homo sapiens
atagtggcattcttc

SEQ ID NO: 586264 - DNA, 15 bp, Homo sapiens
tatagtggcattctt

SEQ ID NO: 586265 - DNA, 15 bp, Homo sapiens
ctatagtggcattct

SEQ ID NO: 586266 - DNA, 15 bp, Homo sapiens
actatagtggcattc

SEQ ID NO: 586267 - DNA, 15 bp, Homo sapiens
tactatagtggcatt

SEQ ID NO: 586268 - DNA, 15 bp, Homo sapiens
ctactatagtggcat

SEQ ID NO: 586269 - DNA, 15 bp, Homo sapiens
actactatagtggca

SEQ ID NO: 586270 - DNA, 15 bp, Homo sapiens
aactactatagtggc

SEQ ID NO: 586271 - DNA, 15 bp, Homo sapiens
taactactatagtgg

SEQ ID NO: 586272 - DNA, 15 bp, Homo sapiens
ataactactatagtg

SEQ ID NO: 586273 - DNA, 15 bp, Homo sapiens
gataactactatagt

SEQ ID NO: 586274 - DNA, 15 bp, Homo sapiens
agataactactatag

SEQ ID NO: 586275 - DNA, 15 bp, Homo sapiens
tagataactactata

SEQ ID NO: 586276 - DNA, 15 bp, Homo sapiens
atagataactactat

SEQ ID NO: 586277 - DNA, 15 bp, Homo sapiens
aatagataactacta

SEQ ID NO: 586278 - DNA, 15 bp, Homo sapiens
caatagataactact

SEQ ID NO: 586279 - DNA, 15 bp, Homo sapiens
acaatagataactac

SEQ ID NO: 586280 - DNA, 15 bp, Homo sapiens
cacaatagataacta

SEQ ID NO: 586281 - DNA, 15 bp, Homo sapiens
acacaatagataact

SEQ ID NO: 586282 - DNA, 15 bp, Homo sapiens
cacacaatagataac

SEQ ID NO: 586283 - DNA, 15 bp, Homo sapiens
gcacacaatagataa

SEQ ID NO: 586284 - DNA, 15 bp, Homo sapiens
ggcacacaatagata

SEQ ID NO: 586285 - DNA, 15 bp, Homo sapiens
tggcacacaatagat

SEQ ID NO: 586286 - DNA, 15 bp, Homo sapiens
ttggcacacaataga

SEQ ID NO: 586287 - DNA, 15 bp, Homo sapiens
attggcacacaatag

SEQ ID NO: 586288 - DNA, 15 bp, Homo sapiens
gattggcacacaata

SEQ ID NO: 586289 - DNA, 15 bp, Homo sapiens
agattggcacacaat

SEQ ID NO: 586290 - DNA, 15 bp, Homo sapiens
gagattggcacacaa

SEQ ID NO: 586291 - DNA, 15 bp, Homo sapiens
tgagattggcacaca

SEQ ID NO: 586292 - DNA, 15 bp, Homo sapiens
atgagattggcacac

SEQ ID NO: 586293 - DNA, 15 bp, Homo sapiens
aatgagattggcaca

SEQ ID NO: 586294 - DNA, 15 bp, Homo sapiens
caatgagattggcac

SEQ ID NO: 586295 - DNA, 15 bp, Homo sapiens
gcaatgagattggca

SEQ ID NO: 586296 - DNA, 15 bp, Homo sapiens
agcaatgagattggc

SEQ ID NO: 586297 - DNA, 15 bp, Homo sapiens
tagcaatgagattgg

SEQ ID NO: 586298 - DNA, 15 bp, Homo sapiens
ctagcaatgagattg

SEQ ID NO: 586299 - DNA, 15 bp, Homo sapiens
cctagcaatgagatt

SEQ ID NO: 586300 - DNA, 15 bp, Homo sapiens
gcctagcaatgagat

SEQ ID NO: 586301 - DNA, 15 bp, Homo sapiens
tgcctagcaatgaga

SEQ ID NO: 586302 - DNA, 15 bp, Homo sapiens
atgcctagcaatgag

SEQ ID NO: 586303 - DNA, 15 bp, Homo sapiens
aatgcctagcaatga

SEQ ID NO: 586304 - DNA, 15 bp, Homo sapiens
caatgcctagcaatg

SEQ ID NO: 586305 - DNA, 15 bp, Homo sapiens
ccaatgcctagcaat

SEQ ID NO: 586306 - DNA, 15 bp, Homo sapiens
cccaatgcctagcaa

SEQ ID NO: 586307 - DNA, 15 bp, Homo sapiens
ccccaatgcctagca

SEQ ID NO: 586308 - DNA, 15 bp, Homo sapiens
tccccaatgcctagc

SEQ ID NO: 586309 - DNA, 15 bp, Homo sapiens
atccccaatgcctag

SEQ ID NO: 586310 - DNA, 15 bp, Homo sapiens
catccccaatgccta

SEQ ID NO: 586311 - DNA, 15 bp, Homo sapiens
gcatccccaatgcct

SEQ ID NO: 586312 - DNA, 15 bp, Homo sapiens
tgcatccccaatgcc

SEQ ID NO: 586313 - DNA, 15 bp, Homo sapiens
ttgcatccccaatgc

SEQ ID NO: 586314 - DNA, 15 bp, Homo sapiens
tttgcatccccaatg

SEQ ID NO: 586315 - DNA, 15 bp, Homo sapiens
ctttgcatccccaat

SEQ ID NO: 586316 - DNA, 15 bp, Homo sapiens
tctttgcatccccaa

SEQ ID NO: 586317 - DNA, 15 bp, Homo sapiens
atctttgcatcccca

SEQ ID NO: 586318 - DNA, 15 bp, Homo sapiens
tatctttgcatcccc

SEQ ID NO: 586319 - DNA, 15 bp, Homo sapiens
ttatctttgcatccc

SEQ ID NO: 586320 - DNA, 15 bp, Homo sapiens
tttatctttgcatcc

SEQ ID NO: 586321 - DNA, 15 bp, Homo sapiens
gtttatctttgcatc

SEQ ID NO: 586322 - DNA, 15 bp, Homo sapiens
ggtttatctttgcat

SEQ ID NO: 586323 - DNA, 15 bp, Homo sapiens
tggtttatctttgca

SEQ ID NO: 586324 - DNA, 15 bp, Homo sapiens
atggtttatctttgc

SEQ ID NO: 586325 - DNA, 15 bp, Homo sapiens
gatggtttatctttg

SEQ ID NO: 586326 - DNA, 15 bp, Homo sapiens
agatggtttatcttt

SEQ ID NO: 586327 - DNA, 15 bp, Homo sapiens
aagatggtttatctt

SEQ ID NO: 586328 - DNA, 15 bp, Homo sapiens
aaagatggtttatct

SEQ ID NO: 586329 - DNA, 15 bp, Homo sapiens
taaagatggtttatc

SEQ ID NO: 586330 - DNA, 15 bp, Homo sapiens
ataaagatggtttat

SEQ ID NO: 586331 - DNA, 15 bp, Homo sapiens
aataaagatggttta

SEQ ID NO: 586332 - DNA, 15 bp, Homo sapiens
caataaagatggttt

SEQ ID NO: 586333 - DNA, 15 bp, Homo sapiens
acaataaagatggtt

SEQ ID NO: 586334 - DNA, 15 bp, Homo sapiens
cacaataaagatggt

SEQ ID NO: 586335 - DNA, 15 bp, Homo sapiens
acacaataaagatgg

SEQ ID NO: 586336 - DNA, 15 bp, Homo sapiens
gacacaataaagatg

SEQ ID NO: 586337 - DNA, 15 bp, Homo sapiens
agacacaataaagat

SEQ ID NO: 586338 - DNA, 15 bp, Homo sapiens
aagacacaataaaga

SEQ ID NO: 586339 - DNA, 15 bp, Homo sapiens
caagacacaataaag

SEQ ID NO: 586340 - DNA, 15 bp, Homo sapiens
ccaagacacaataaa

SEQ ID NO: 586341 - DNA, 15 bp, Homo sapiens
cccaagacacaataa

SEQ ID NO: 586342 - DNA, 15 bp, Homo sapiens
acccaagacacaata

SEQ ID NO: 586343 - DNA, 15 bp, Homo sapiens
tacccaagacacaat

SEQ ID NO: 586344 - DNA, 15 bp, Homo sapiens
ctacccaagacacaa

SEQ ID NO: 586345 - DNA, 15 bp, Homo sapiens
gctacccaagacaca

SEQ ID NO: 586346 - DNA, 15 bp, Homo sapiens
tgctacccaagacac

SEQ ID NO: 586347 - DNA, 15 bp, Homo sapiens
ctgctacccaagaca

SEQ ID NO: 586348 - DNA, 15 bp, Homo sapiens
tctgctacccaagac

SEQ ID NO: 586349 - DNA, 15 bp, Homo sapiens
ttctgctacccaaga

SEQ ID NO: 586350 - DNA, 15 bp, Homo sapiens
cttctgctacccaag

SEQ ID NO: 586351 - DNA, 15 bp, Homo sapiens
tcttctgctacccaa

SEQ ID NO: 586352 - DNA, 15 bp, Homo sapiens
ttcttctgctaccca

SEQ ID NO: 586353 - DNA, 15 bp, Homo sapiens
tttcttctgctaccc

SEQ ID NO: 586354 - DNA, 15 bp, Homo sapiens
ttttcttctgctacc

SEQ ID NO: 586355 - DNA, 15 bp, Homo sapiens
attttcttctgctac

SEQ ID NO: 586356 - DNA, 15 bp, Homo sapiens
tattttcttctgcta

SEQ ID NO: 586357 - DNA, 15 bp, Homo sapiens
atattttcttctgct

SEQ ID NO: 586358 - DNA, 15 bp, Homo sapiens
catattttcttctgc

SEQ ID NO: 586359 - DNA, 15 bp, Homo sapiens
acatattttcttctg

SEQ ID NO: 586360 - DNA, 15 bp, Homo sapiens
cacatattttcttct

SEQ ID NO: 586361 - DNA, 15 bp, Homo sapiens
acacatattttcttc

SEQ ID NO: 586362 - DNA, 15 bp, Homo sapiens
tacacatattttctt

SEQ ID NO: 586363 - DNA, 15 bp, Homo sapiens
agtatcgaacatatc

SEQ ID NO: 586364 - DNA, 15 bp, Homo sapiens
tagtatcgaacatat

SEQ ID NO: 586365 - DNA, 15 bp, Homo sapiens
ttagtatcgaacata

SEQ ID NO: 586366 - DNA, 15 bp, Homo sapiens
cttagtatcgaacat

SEQ ID NO: 586367 - DNA, 15 bp, Homo sapiens
ccttagtatcgaaca

SEQ ID NO: 586368 - DNA, 15 bp, Homo sapiens
tccttagtatcgaac

SEQ ID NO: 586369 - DNA, 15 bp, Homo sapiens
ttccttagtatcgaa

SEQ ID NO: 586370 - DNA, 15 bp, Homo sapiens
tttccttagtatcga

SEQ ID NO: 586371 - DNA, 15 bp, Homo sapiens
ttttccttagtatcg

SEQ ID NO: 586372 - DNA, 15 bp, Homo sapiens
tttttccttagtatc

SEQ ID NO: 586373 - DNA, 15 bp, Homo sapiens
gtttttccttagtat

SEQ ID NO: 586374 - DNA, 15 bp, Homo sapiens
agtttttccttagta

SEQ ID NO: 586375 - DNA, 15 bp, Homo sapiens
tagtttttccttagt

SEQ ID NO: 586376 - DNA, 15 bp, Homo sapiens
ttagtttttccttag

SEQ ID NO: 586377 - DNA, 15 bp, Homo sapiens
tttagtttttcctta

SEQ ID NO: 586378 - DNA, 15 bp, Homo sapiens
gtttagtttttcctt

SEQ ID NO: 586379 - DNA, 15 bp, Homo sapiens
tgtttagtttttcct

SEQ ID NO: 586380 - DNA, 15 bp, Homo sapiens
ctgtttagtttttcc

SEQ ID NO: 586381 - DNA, 15 bp, Homo sapiens
tctgtttagtttttc

SEQ ID NO: 586382 - DNA, 15 bp, Homo sapiens
atctgtttagttttt

SEQ ID NO: 586383 - DNA, 15 bp, Homo sapiens
gatctgtttagtttt

SEQ ID NO: 586384 - DNA, 15 bp, Homo sapiens
tgatctgtttagttt

SEQ ID NO: 586385 - DNA, 15 bp, Homo sapiens
gtgatctgtttagtt

SEQ ID NO: 586386 - DNA, 15 bp, Homo sapiens
ggtgatctgtttagt

SEQ ID NO: 586387 - DNA, 15 bp, Homo sapiens
aggtgatctgtttag

SEQ ID NO: 586388 - DNA, 15 bp, Homo sapiens
aaggtgatctgttta

SEQ ID NO: 586389 - DNA, 15 bp, Homo sapiens
aaaggtgatctgttt

SEQ ID NO: 586390 - DNA, 15 bp, Homo sapiens
caaaggtgatctgtt

SEQ ID NO: 586391 - DNA, 15 bp, Homo sapiens
tcaaaggtgatctgt

SEQ ID NO: 586392 - DNA, 15 bp, Homo sapiens
gtcaaaggtgatctg

SEQ ID NO: 586393 - DNA, 15 bp, Homo sapiens
tgtcaaaggtgatct

SEQ ID NO: 586394 - DNA, 15 bp, Homo sapiens
atgtcaaaggtgatc

SEQ ID NO: 586395 - DNA, 15 bp, Homo sapiens
catgtcaaaggtgat

SEQ ID NO: 586396 - DNA, 15 bp, Homo sapiens
gcatgtcaaaggtga

SEQ ID NO: 586397 - DNA, 15 bp, Homo sapiens
cgcatgtcaaaggtg

SEQ ID NO: 586398 - DNA, 15 bp, Homo sapiens
acgcatgtcaaaggt

SEQ ID NO: 586399 - DNA, 15 bp, Homo sapiens
caaaatggttgagat

SEQ ID NO: 586400 - DNA, 15 bp, Homo sapiens
acaaaatggttgaga

SEQ ID NO: 586401 - DNA, 15 bp, Homo sapiens
aacaaaatggttgag

SEQ ID NO: 586402 - DNA, 15 bp, Homo sapiens
taacaaaatggttga

SEQ ID NO: 586403 - DNA, 15 bp, Homo sapiens
ttaacaaaatggttg

SEQ ID NO: 586404 - DNA, 15 bp, Homo sapiens
tttaacaaaatggtt

SEQ ID NO: 586405 - DNA, 15 bp, Homo sapiens
atttaacaaaatggt

SEQ ID NO: 586406 - DNA, 15 bp, Homo sapiens
gatttaacaaaatgg

SEQ ID NO: 586407 - DNA, 15 bp, Homo sapiens
ggatttaacaaaatg

SEQ ID NO: 586408 - DNA, 15 bp, Homo sapiens
aggatttaacaaaat

SEQ ID NO: 586409 - DNA, 15 bp, Homo sapiens
taggatttaacaaaa

SEQ ID NO: 586410 - DNA, 15 bp, Homo sapiens
ttaggatttaacaaa

SEQ ID NO: 586411 - DNA, 15 bp, Homo sapiens
tttaggatttaacaa

SEQ ID NO: 586412 - DNA, 15 bp, Homo sapiens
gtttaggatttaaca

SEQ ID NO: 586413 - DNA, 15 bp, Homo sapiens
tgtttaggatttaac

SEQ ID NO: 586414 - DNA, 15 bp, Homo sapiens
ctgtttaggatttaa

SEQ ID NO: 586415 - DNA, 15 bp, Homo sapiens
tctgtttaggattta

SEQ ID NO: 586416 - DNA, 15 bp, Homo sapiens
ttctgtttaggattt

SEQ ID NO: 586417 - DNA, 15 bp, Homo sapiens
tttctgtttaggatt

SEQ ID NO: 586418 - DNA, 15 bp, Homo sapiens
ttttctgtttaggat

SEQ ID NO: 586419 - DNA, 15 bp, Homo sapiens
gttttctgtttagga

SEQ ID NO: 586420 - DNA, 15 bp, Homo sapiens
tgttttctgtttagg

SEQ ID NO: 586421 - DNA, 15 bp, Homo sapiens
ttgttttctgtttag

SEQ ID NO: 586422 - DNA, 15 bp, Homo sapiens
tttgttttctgttta

SEQ ID NO: 586423 - DNA, 15 bp, Homo sapiens
ttttgttttctgttt

SEQ ID NO: 586424 - DNA, 15 bp, Homo sapiens
tttttgttttctgtt

SEQ ID NO: 586425 - DNA, 15 bp, Homo sapiens
ttttttgttttctgt

SEQ ID NO: 586426 - DNA, 15 bp, Homo sapiens
tttttttgttttctg

SEQ ID NO: 586427 - DNA, 15 bp, Homo sapiens
ttttttttgttttct

SEQ ID NO: 586428 - DNA, 15 bp, Homo sapiens
attttttttgttttc

SEQ ID NO: 586429 - DNA, 15 bp, Homo sapiens
gattttttttgtttt

SEQ ID NO: 586430 - DNA, 15 bp, Homo sapiens
tgattttttttgttt

SEQ ID NO: 586431 - DNA, 15 bp, Homo sapiens
atgattttttttgtt

SEQ ID NO: 586432 - DNA, 15 bp, Homo sapiens
catgattttttttgt

SEQ ID NO: 586433 - DNA, 15 bp, Homo sapiens
tcatgattttttttg

SEQ ID NO: 586434 - DNA, 15 bp, Homo sapiens
gtcatgatttttttt

SEQ ID NO: 586435 - DNA, 15 bp, Homo sapiens
cgtcatgattttttt

SEQ ID NO: 586436 - DNA, 15 bp, Homo sapiens
tcgtcatgatttttt

SEQ ID NO: 586437 - DNA, 15 bp, Homo sapiens
ttcgtcatgattttt

SEQ ID NO: 586438 - DNA, 15 bp, Homo sapiens
tttcgtcatgatttt

SEQ ID NO: 586439 - DNA, 15 bp, Homo sapiens
ttttcgtcatgattt

SEQ ID NO: 586440 - DNA, 15 bp, Homo sapiens
cttttcgtcatgatt

SEQ ID NO: 586441 - DNA, 15 bp, Homo sapiens
tcttttcgtcatgat

SEQ ID NO: 586442 - DNA, 15 bp, Homo sapiens
gtcttttcgtcatga

SEQ ID NO: 586443 - DNA, 15 bp, Homo sapiens
tgtcttttcgtcatg

SEQ ID NO: 586444 - DNA, 15 bp, Homo sapiens
gtgtcttttcgtcat

SEQ ID NO: 586445 - DNA, 15 bp, Homo sapiens
agtgtcttttcgtca

SEQ ID NO: 586446 - DNA, 15 bp, Homo sapiens
aagtgtcttttcgtc

SEQ ID NO: 586447 - DNA, 15 bp, Homo sapiens
caagtgtcttttcgt

SEQ ID NO: 586448 - DNA, 15 bp, Homo sapiens
gcaagtgtcttttcg

SEQ ID NO: 586449 - DNA, 15 bp, Homo sapiens
agcaagtgtcttttc

SEQ ID NO: 586450 - DNA, 15 bp, Homo sapiens
aagcaagtgtctttt

SEQ ID NO: 586451 - DNA, 15 bp, Homo sapiens
taagcaagtgtcttt

SEQ ID NO: 586452 - DNA, 15 bp, Homo sapiens
ataagcaagtgtctt

SEQ ID NO: 586453 - DNA, 15 bp, Homo sapiens
aataagcaagtgtct

SEQ ID NO: 586454 - DNA, 15 bp, Homo sapiens
taataagcaagtgtc

SEQ ID NO: 586455 - DNA, 15 bp, Homo sapiens
ttaataagcaagtgt

SEQ ID NO: 586456 - DNA, 15 bp, Homo sapiens
attaataagcaagtg

SEQ ID NO: 586457 - DNA, 15 bp, Homo sapiens
aattaataagcaagt

SEQ ID NO: 586458 - DNA, 15 bp, Homo sapiens
caattaataagcaag

SEQ ID NO: 586459 - DNA, 15 bp, Homo sapiens
ccaattaataagcaa

SEQ ID NO: 586460 - DNA, 15 bp, Homo sapiens
gccaattaataagca

SEQ ID NO: 586461 - DNA, 15 bp, Homo sapiens
agccaattaataagc

SEQ ID NO: 586462 - DNA, 15 bp, Homo sapiens
aagccaattaataag

SEQ ID NO: 586463 - DNA, 15 bp, Homo sapiens
caagccaattaataa

SEQ ID NO: 586464 - DNA, 15 bp, Homo sapiens
ccaagccaattaata

SEQ ID NO: 586465 - DNA, 15 bp, Homo sapiens
tccaagccaattaat

SEQ ID NO: 586466 - DNA, 15 bp, Homo sapiens
ttccaagccaattaa

SEQ ID NO: 586467 - DNA, 15 bp, Homo sapiens
tttccaagccaatta

SEQ ID NO: 586468 - DNA, 15 bp, Homo sapiens
ctttccaagccaatt

SEQ ID NO: 586469 - DNA, 15 bp, Homo sapiens
actttccaagccaat

SEQ ID NO: 586470 - DNA, 15 bp, Homo sapiens
tactttccaagccaa

SEQ ID NO: 586471 - DNA, 15 bp, Homo sapiens
ctactttccaagcca

SEQ ID NO: 586472 - DNA, 15 bp, Homo sapiens
tctactttccaagcc

SEQ ID NO: 586473 - DNA, 15 bp, Homo sapiens
ttctactttccaagc

SEQ ID NO: 586474 - DNA, 15 bp, Homo sapiens
attctactttccaag

SEQ ID NO: 586475 - DNA, 15 bp, Homo sapiens
tattctactttccaa

SEQ ID NO: 586476 - DNA, 15 bp, Homo sapiens
atattctactttcca

SEQ ID NO: 586477 - DNA, 15 bp, Homo sapiens
tatattctactttcc

SEQ ID NO: 586478 - DNA, 15 bp, Homo sapiens
ctatattctactttc

SEQ ID NO: 586479 - DNA, 15 bp, Homo sapiens
cctatattctacttt

SEQ ID NO: 586480 - DNA, 15 bp, Homo sapiens
tcctatattctactt

SEQ ID NO: 586481 - DNA, 15 bp, Homo sapiens
ctcctatattctact

SEQ ID NO: 586482 - DNA, 15 bp, Homo sapiens
tctcctatattctac

SEQ ID NO: 586483 - DNA, 15 bp, Homo sapiens
ttctcctatattcta

SEQ ID NO: 586484 - DNA, 15 bp, Homo sapiens
tttctcctatattct

SEQ ID NO: 586485 - DNA, 15 bp, Homo sapiens
ctttctcctatattc

SEQ ID NO: 586486 - DNA, 15 bp, Homo sapiens
cctttctcctatatt

SEQ ID NO: 586487 - DNA, 15 bp, Homo sapiens
acctttctcctatat

SEQ ID NO: 586488 - DNA, 15 bp, Homo sapiens
aacctttctcctata

SEQ ID NO: 586489 - DNA, 15 bp, Homo sapiens
taacctttctcctat

SEQ ID NO: 586490 - DNA, 15 bp, Homo sapiens
gtaacctttctccta

SEQ ID NO: 586491 - DNA, 15 bp, Homo sapiens
agtaacctttctcct

SEQ ID NO: 586492 - DNA, 15 bp, Homo sapiens
cagtaacctttctcc

SEQ ID NO: 586493 - DNA, 15 bp, Homo sapiens
acagtaacctttctc

SEQ ID NO: 586494 - DNA, 15 bp, Homo sapiens
aacagtaacctttct

SEQ ID NO: 586495 - DNA, 15 bp, Homo sapiens
aaacagtaacctttc

SEQ ID NO: 586496 - DNA, 15 bp, Homo sapiens
taaacagtaaccttt

SEQ ID NO: 586497 - DNA, 15 bp, Homo sapiens
ataaacagtaacctt

SEQ ID NO: 586498 - DNA, 15 bp, Homo sapiens
aataaacagtaacct

SEQ ID NO: 586499 - DNA, 15 bp, Homo sapiens
aaataaacagtaacc

SEQ ID NO: 586500 - DNA, 15 bp, Homo sapiens
aaaataaacagtaac

SEQ ID NO: 586501 - DNA, 15 bp, Homo sapiens
aaaaataaacagtaa

SEQ ID NO: 586502 - DNA, 15 bp, Homo sapiens
aaaaaataaacagta

SEQ ID NO: 586503 - DNA, 15 bp, Homo sapiens
aaaaaaataaacagt

SEQ ID NO: 586504 - DNA, 15 bp, Homo sapiens
aaaaaaaataaacag

SEQ ID NO: 586505 - DNA, 15 bp, Homo sapiens
gaaaaaaaataaaca

SEQ ID NO: 586506 - DNA, 15 bp, Homo sapiens
tgaaaaaaaataaac

SEQ ID NO: 586507 - DNA, 15 bp, Homo sapiens
atgaaaaaaaataaa

SEQ ID NO: 586508 - DNA, 15 bp, Homo sapiens
tacatgaaaaaaaat

SEQ ID NO: 586509 - DNA, 15 bp, Homo sapiens
atacatgaaaaaaaa

SEQ ID NO: 586510 - DNA, 15 bp, Homo sapiens
aatacatgaaaaaaa

SEQ ID NO: 586511 - DNA, 15 bp, Homo sapiens
gaatacatgaaaaaa

SEQ ID NO: 586512 - DNA, 15 bp, Homo sapiens
tgaatacatgaaaaa

SEQ ID NO: 586513 - DNA, 15 bp, Homo sapiens
atgaatacatgaaaa

SEQ ID NO: 586514 - DNA, 15 bp, Homo sapiens
aatgaatacatgaaa

SEQ ID NO: 586515 - DNA, 15 bp, Homo sapiens
gaatgaatacatgaa

SEQ ID NO: 586516 - DNA, 15 bp, Homo sapiens
tgaatgaatacatga

SEQ ID NO: 586517 - DNA, 15 bp, Homo sapiens
atgaatgaatacatg

SEQ ID NO: 586518 - DNA, 15 bp, Homo sapiens
aatgaatgaatacat

SEQ ID NO: 586519 - DNA, 15 bp, Homo sapiens
gaatgaatgaataca

SEQ ID NO: 586520 - DNA, 15 bp, Homo sapiens
agaatgaatgaatac

SEQ ID NO: 586521 - DNA, 15 bp, Homo sapiens
tagaatgaatgaata

SEQ ID NO: 586522 - DNA, 15 bp, Homo sapiens
gtagaatgaatgaat

SEQ ID NO: 586523 - DNA, 15 bp, Homo sapiens
tgtagaatgaatgaa

SEQ ID NO: 586524 - DNA, 15 bp, Homo sapiens
ttgtagaatgaatga

SEQ ID NO: 586525 - DNA, 15 bp, Homo sapiens
tttgtagaatgaatg

SEQ ID NO: 586526 - DNA, 15 bp, Homo sapiens
atttgtagaatgaat

SEQ ID NO: 586527 - DNA, 15 bp, Homo sapiens
tatttgtagaatgaa

SEQ ID NO: 586528 - DNA, 15 bp, Homo sapiens
atatttgtagaatga

SEQ ID NO: 586529 - DNA, 15 bp, Homo sapiens
tatatttgtagaatg

SEQ ID NO: 586530 - DNA, 15 bp, Homo sapiens
atatatttgtagaat

SEQ ID NO: 586531 - DNA, 15 bp, Homo sapiens
aatatatttgtagaa

SEQ ID NO: 586532 - DNA, 15 bp, Homo sapiens
gaatatatttgtaga

SEQ ID NO: 586533 - DNA, 15 bp, Homo sapiens
cgaatatatttgtag

SEQ ID NO: 586534 - DNA, 15 bp, Homo sapiens
ccgaatatatttgta

SEQ ID NO: 586535 - DNA, 15 bp, Homo sapiens
cccgaatatatttgt

SEQ ID NO: 586536 - DNA, 15 bp, Homo sapiens
acccgaatatatttg

SEQ ID NO: 586537 - DNA, 15 bp, Homo sapiens
cacccgaatatattt

SEQ ID NO: 586538 - DNA, 15 bp, Homo sapiens
gcacccgaatatatt

SEQ ID NO: 586539 - DNA, 15 bp, Homo sapiens
ggcacccgaatatat

SEQ ID NO: 586540 - DNA, 15 bp, Homo sapiens
tggcacccgaatata

SEQ ID NO: 586541 - DNA, 15 bp, Homo sapiens
ttggcacccgaatat

SEQ ID NO: 586542 - DNA, 15 bp, Homo sapiens
attggcacccgaata

SEQ ID NO: 586543 - DNA, 15 bp, Homo sapiens
tattggcacccgaat

SEQ ID NO: 586544 - DNA, 15 bp, Homo sapiens
ctattggcacccgaa

SEQ ID NO: 586545 - DNA, 15 bp, Homo sapiens
cctattggcacccga

SEQ ID NO: 586546 - DNA, 15 bp, Homo sapiens
acctattggcacccg

SEQ ID NO: 586547 - DNA, 15 bp, Homo sapiens
tacctattggcaccc

SEQ ID NO: 586548 - DNA, 15 bp, Homo sapiens
gtacctattggcacc

SEQ ID NO: 586549 - DNA, 15 bp, Homo sapiens
agtacctattggcac

SEQ ID NO: 586550 - DNA, 15 bp, Homo sapiens
aagtacctattggca

SEQ ID NO: 586551 - DNA, 15 bp, Homo sapiens
caagtacctattggc

SEQ ID NO: 586552 - DNA, 15 bp, Homo sapiens
ccaagtacctattgg

SEQ ID NO: 586553 - DNA, 15 bp, Homo sapiens
accaagtacctattg

SEQ ID NO: 586554 - DNA, 15 bp, Homo sapiens
taccaagtacctatt

SEQ ID NO: 586555 - DNA, 15 bp, Homo sapiens
ataccaagtacctat

SEQ ID NO: 586556 - DNA, 15 bp, Homo sapiens
tataccaagtaccta

SEQ ID NO: 586557 - DNA, 15 bp, Homo sapiens
ttataccaagtacct

SEQ ID NO: 586558 - DNA, 15 bp, Homo sapiens
cttataccaagtacc

SEQ ID NO: 586559 - DNA, 15 bp, Homo sapiens
ccttataccaagtac

SEQ ID NO: 586560 - DNA, 15 bp, Homo sapiens
accttataccaagta

SEQ ID NO: 586561 - DNA, 15 bp, Homo sapiens
aaccttataccaagt

SEQ ID NO: 586562 - DNA, 15 bp, Homo sapiens
aaaccttataccaag

SEQ ID NO: 586563 - DNA, 15 bp, Homo sapiens
aaaaccttataccaa

SEQ ID NO: 586564 - DNA, 15 bp, Homo sapiens
aaaaaccttatacca

SEQ ID NO: 586565 - DNA, 15 bp, Homo sapiens
caaaaaccttatacc

SEQ ID NO: 586566 - DNA, 15 bp, Homo sapiens
ccaaaaaccttatac

SEQ ID NO: 586567 - DNA, 15 bp, Homo sapiens
gccaaaaaccttata

SEQ ID NO: 586568 - DNA, 15 bp, Homo sapiens
ggccaaaaaccttat

SEQ ID NO: 586569 - DNA, 15 bp, Homo sapiens
gggccaaaaacctta

SEQ ID NO: 586570 - DNA, 15 bp, Homo sapiens
ggggccaaaaacctt

SEQ ID NO: 586571 - DNA, 15 bp, Homo sapiens
tggggccaaaaacct

SEQ ID NO: 586572 - DNA, 15 bp, Homo sapiens
ctggggccaaaaacc

SEQ ID NO: 586573 - DNA, 15 bp, Homo sapiens
tctggggccaaaaac

SEQ ID NO: 586574 - DNA, 15 bp, Homo sapiens
ctctggggccaaaaa

SEQ ID NO: 586575 - DNA, 15 bp, Homo sapiens
tctctggggccaaaa

SEQ ID NO: 586576 - DNA, 15 bp, Homo sapiens
gtctctggggccaaa

SEQ ID NO: 586577 - DNA, 15 bp, Homo sapiens
tgtctctggggccaa

SEQ ID NO: 586578 - DNA, 15 bp, Homo sapiens
atgtctctggggcca

SEQ ID NO: 586579 - DNA, 15 bp, Homo sapiens
catgtctctggggcc

SEQ ID NO: 586580 - DNA, 15 bp, Homo sapiens
ccatgtctctggggc

SEQ ID NO: 586581 - DNA, 15 bp, Homo sapiens
cccatgtctctgggg

SEQ ID NO: 586582 - DNA, 15 bp, Homo sapiens
tcccatgtctctggg

SEQ ID NO: 586583 - DNA, 15 bp, Homo sapiens
ttcccatgtctctgg

SEQ ID NO: 586584 - DNA, 15 bp, Homo sapiens
tttcccatgtctctg

SEQ ID NO: 586585 - DNA, 15 bp, Homo sapiens
ttttcccatgtctct

SEQ ID NO: 586586 - DNA, 15 bp, Homo sapiens
tttttcccatgtctc

SEQ ID NO: 586587 - DNA, 15 bp, Homo sapiens
ttttttcccatgtct

SEQ ID NO: 586588 - DNA, 15 bp, Homo sapiens
tttttttcccatgtc

SEQ ID NO: 586589 - DNA, 15 bp, Homo sapiens
atttttttcccatgt

SEQ ID NO: 586590 - DNA, 15 bp, Homo sapiens
catttttttcccatg

SEQ ID NO: 586591 - DNA, 15 bp, Homo sapiens
gcatttttttcccat

SEQ ID NO: 586592 - DNA, 15 bp, Homo sapiens
tgcatttttttccca

SEQ ID NO: 586593 - DNA, 15 bp, Homo sapiens
atgcatttttttccc

SEQ ID NO: 586594 - DNA, 15 bp, Homo sapiens
catgcatttttttcc

SEQ ID NO: 586595 - DNA, 15 bp, Homo sapiens
gcatgcatttttttc

SEQ ID NO: 586596 - DNA, 15 bp, Homo sapiens
ggcatgcattttttt

SEQ ID NO: 586597 - DNA, 15 bp, Homo sapiens
aggcatgcatttttt

SEQ ID NO: 586598 - DNA, 15 bp, Homo sapiens
aaggcatgcattttt

SEQ ID NO: 586599 - DNA, 15 bp, Homo sapiens
gaaggcatgcatttt

SEQ ID NO: 586600 - DNA, 15 bp, Homo sapiens
ggaaggcatgcattt

SEQ ID NO: 586601 - DNA, 15 bp, Homo sapiens
gggaaggcatgcatt

SEQ ID NO: 586602 - DNA, 15 bp, Homo sapiens
tgggaaggcatgcat

SEQ ID NO: 586603 - DNA, 15 bp, Homo sapiens
ctgggaaggcatgca

SEQ ID NO: 586604 - DNA, 15 bp, Homo sapiens
tctgggaaggcatgc

SEQ ID NO: 586605 - DNA, 15 bp, Homo sapiens
ctctgggaaggcatg

SEQ ID NO: 586606 - DNA, 15 bp, Homo sapiens
tctctgggaaggcat

SEQ ID NO: 586607 - DNA, 15 bp, Homo sapiens
ttctctgggaaggca

SEQ ID NO: 586608 - DNA, 15 bp, Homo sapiens
attctctgggaaggc

SEQ ID NO: 586609 - DNA, 15 bp, Homo sapiens
cattctctgggaagg

SEQ ID NO: 586610 - DNA, 15 bp, Homo sapiens
gcattctctgggaag

SEQ ID NO: 586611 - DNA, 15 bp, Homo sapiens
ggcattctctgggaa

SEQ ID NO: 586612 - DNA, 15 bp, Homo sapiens
aggcattctctggga

SEQ ID NO: 586613 - DNA, 15 bp, Homo sapiens
taggcattctctggg

SEQ ID NO: 586614 - DNA, 15 bp, Homo sapiens
ttaggcattctctgg

SEQ ID NO: 586615 - DNA, 15 bp, Homo sapiens
attaggcattctctg

SEQ ID NO: 586616 - DNA, 15 bp, Homo sapiens
tattaggcattctct

SEQ ID NO: 586617 - DNA, 15 bp, Homo sapiens
gtattaggcattctc

SEQ ID NO: 586618 - DNA, 15 bp, Homo sapiens
cccagctacctgctt

SEQ ID NO: 586619 - DNA, 15 bp, Homo sapiens
acccagctacctgct

SEQ ID NO: 586620 - DNA, 15 bp, Homo sapiens
aacccagctacctgc

SEQ ID NO: 586621 - DNA, 15 bp, Homo sapiens
aaacccagctacctg

SEQ ID NO: 586622 - DNA, 15 bp, Homo sapiens
aaaacccagctacct

SEQ ID NO: 586623 - DNA, 15 bp, Homo sapiens
caaaacccagctacc

SEQ ID NO: 586624 - DNA, 15 bp, Homo sapiens
acaaaacccagctac

SEQ ID NO: 586625 - DNA, 15 bp, Homo sapiens
tacaaaacccagcta

SEQ ID NO: 586626 - DNA, 15 bp, Homo sapiens
ctacaaaacccagct

SEQ ID NO: 586627 - DNA, 15 bp, Homo sapiens
actacaaaacccagc

SEQ ID NO: 586628 - DNA, 15 bp, Homo sapiens
cactacaaaacccag

SEQ ID NO: 586629 - DNA, 15 bp, Homo sapiens
tcactacaaaaccca

SEQ ID NO: 586630 - DNA, 15 bp, Homo sapiens
ctcactacaaaaccc

SEQ ID NO: 586631 - DNA, 15 bp, Homo sapiens
gctcactacaaaacc

SEQ ID NO: 586632 - DNA, 15 bp, Homo sapiens
agctcactacaaaac

SEQ ID NO: 586633 - DNA, 15 bp, Homo sapiens
aagctcactacaaaa

SEQ ID NO: 586634 - DNA, 15 bp, Homo sapiens
caagctcactacaaa

SEQ ID NO: 586635 - DNA, 15 bp, Homo sapiens
gcaagctcactacaa

SEQ ID NO: 586636 - DNA, 15 bp, Homo sapiens
agcaagctcactaca

SEQ ID NO: 586637 - DNA, 15 bp, Homo sapiens
gagcaagctcactac

SEQ ID NO: 586638 - DNA, 15 bp, Homo sapiens
ggagcaagctcacta

SEQ ID NO: 586639 - DNA, 15 bp, Homo sapiens
aggagcaagctcact

SEQ ID NO: 586640 - DNA, 15 bp, Homo sapiens
aaggagcaagctcac

SEQ ID NO: 586641 - DNA, 15 bp, Homo sapiens
taaggagcaagctca

SEQ ID NO: 586642 - DNA, 15 bp, Homo sapiens
ttaaggagcaagctc

SEQ ID NO: 586643 - DNA, 15 bp, Homo sapiens
cttaaggagcaagct

SEQ ID NO: 586644 - DNA, 15 bp, Homo sapiens
acttaaggagcaagc

SEQ ID NO: 586645 - DNA, 15 bp, Homo sapiens
aacttaaggagcaag

SEQ ID NO: 586646 - DNA, 15 bp, Homo sapiens
taacttaaggagcaa

SEQ ID NO: 586647 - DNA, 15 bp, Homo sapiens
gtaacttaaggagca

SEQ ID NO: 586648 - DNA, 15 bp, Homo sapiens
tgtaacttaaggagc

SEQ ID NO: 586649 - DNA, 15 bp, Homo sapiens
ctgtaacttaaggag

SEQ ID NO: 586650 - DNA, 15 bp, Homo sapiens
cctgtaacttaagga

SEQ ID NO: 586651 - DNA, 15 bp, Homo sapiens
tcctgtaacttaagg

SEQ ID NO: 586652 - DNA, 15 bp, Homo sapiens
ttcctgtaacttaag

SEQ ID NO: 586653 - DNA, 15 bp, Homo sapiens
gttcctgtaacttaa

SEQ ID NO: 586654 - DNA, 15 bp, Homo sapiens
agttcctgtaactta

SEQ ID NO: 586655 - DNA, 15 bp, Homo sapiens
gagttcctgtaactt

SEQ ID NO: 586656 - DNA, 15 bp, Homo sapiens
agagttcctgtaact

SEQ ID NO: 586657 - DNA, 15 bp, Homo sapiens
gagagttcctgtaac

SEQ ID NO: 586658 - DNA, 15 bp, Homo sapiens
ggagagttcctgtaa

SEQ ID NO: 586659 - DNA, 15 bp, Homo sapiens
aggagagttcctgta

SEQ ID NO: 586660 - DNA, 15 bp, Homo sapiens
aaggagagttcctgt

SEQ ID NO: 586661 - DNA, 15 bp, Homo sapiens
taaggagagttcctg

SEQ ID NO: 586662 - DNA, 15 bp, Homo sapiens
ataaggagagttcct

SEQ ID NO: 586663 - DNA, 15 bp, Homo sapiens
tataaggagagttcc

SEQ ID NO: 586664 - DNA, 15 bp, Homo sapiens
ttataaggagagttc

SEQ ID NO: 586665 - DNA, 15 bp, Homo sapiens
attataaggagagtt

SEQ ID NO: 586666 - DNA, 15 bp, Homo sapiens
tattataaggagagt

SEQ ID NO: 586667 - DNA, 15 bp, Homo sapiens
ctattataaggagag

SEQ ID NO: 586668 - DNA, 15 bp, Homo sapiens
tctattataaggaga

SEQ ID NO: 586669 - DNA, 15 bp, Homo sapiens
gtctattataaggag

SEQ ID NO: 586670 - DNA, 15 bp, Homo sapiens
tgtctattataagga

SEQ ID NO: 586671 - DNA, 15 bp, Homo sapiens
gtgtctattataagg

SEQ ID NO: 586672 - DNA, 15 bp, Homo sapiens
agtgtctattataag

SEQ ID NO: 586673 - DNA, 15 bp, Homo sapiens
aagtgtctattataa

SEQ ID NO: 586674 - DNA, 15 bp, Homo sapiens
gaagtgtctattata

SEQ ID NO: 586675 - DNA, 15 bp, Homo sapiens
tgaagtgtctattat

SEQ ID NO: 586676 - DNA, 15 bp, Homo sapiens
atgaagtgtctatta

SEQ ID NO: 586677 - DNA, 15 bp, Homo sapiens
aatgaagtgtctatt

SEQ ID NO: 586678 - DNA, 15 bp, Homo sapiens
aaatgaagtgtctat

SEQ ID NO: 586679 - DNA, 15 bp, Homo sapiens
aaaatgaagtgtcta

SEQ ID NO: 586680 - DNA, 15 bp, Homo sapiens
gaaaatgaagtgtct

SEQ ID NO: 586681 - DNA, 15 bp, Homo sapiens
ggaaaatgaagtgtc

SEQ ID NO: 586682 - DNA, 15 bp, Homo sapiens
aggaaaatgaagtgt

SEQ ID NO: 586683 - DNA, 15 bp, Homo sapiens
taggaaaatgaagtg

SEQ ID NO: 586684 - DNA, 15 bp, Homo sapiens
ctaggaaaatgaagt

SEQ ID NO: 586685 - DNA, 15 bp, Homo sapiens
actaggaaaatgaag

SEQ ID NO: 586686 - DNA, 15 bp, Homo sapiens
gactaggaaaatgaa

SEQ ID NO: 586687 - DNA, 15 bp, Homo sapiens
ggactaggaaaatga

SEQ ID NO: 586688 - DNA, 15 bp, Homo sapiens
tggactaggaaaatg

SEQ ID NO: 586689 - DNA, 15 bp, Homo sapiens
atggactaggaaaat

SEQ ID NO: 586690 - DNA, 15 bp, Homo sapiens
gatggactaggaaaa

SEQ ID NO: 586691 - DNA, 15 bp, Homo sapiens
ggatggactaggaaa

SEQ ID NO: 586692 - DNA, 15 bp, Homo sapiens
gggatggactaggaa

SEQ ID NO: 586693 - DNA, 15 bp, Homo sapiens
agggatggactagga

SEQ ID NO: 586694 - DNA, 15 bp, Homo sapiens
gagggatggactagg

SEQ ID NO: 586695 - DNA, 15 bp, Homo sapiens
tgagggatggactag

SEQ ID NO: 586696 - DNA, 15 bp, Homo sapiens
atgagggatggacta

SEQ ID NO: 586697 - DNA, 15 bp, Homo sapiens
catgagggatggact

SEQ ID NO: 586698 - DNA, 15 bp, Homo sapiens
tcatgagggatggac

SEQ ID NO: 586699 - DNA, 15 bp, Homo sapiens
ttcatgagggatgga

SEQ ID NO: 586700 - DNA, 15 bp, Homo sapiens
tttcatgagggatgg

SEQ ID NO: 586701 - DNA, 15 bp, Homo sapiens
ttttcatgagggatg

SEQ ID NO: 586702 - DNA, 15 bp, Homo sapiens
tttttcatgagggat

SEQ ID NO: 586703 - DNA, 15 bp, Homo sapiens
atttttcatgaggga

SEQ ID NO: 586704 - DNA, 15 bp, Homo sapiens
catttttcatgaggg

SEQ ID NO: 586705 - DNA, 15 bp, Homo sapiens
tcatttttcatgagg

SEQ ID NO: 586706 - DNA, 15 bp, Homo sapiens
gtcatttttcatgag

SEQ ID NO: 586707 - DNA, 15 bp, Homo sapiens
agtcatttttcatga

SEQ ID NO: 586708 - DNA, 15 bp, Homo sapiens
cagtcatttttcatg

SEQ ID NO: 586709 - DNA, 15 bp, Homo sapiens
tcagtcatttttcat

SEQ ID NO: 586710 - DNA, 15 bp, Homo sapiens
gtcagtcatttttca

SEQ ID NO: 586711 - DNA, 15 bp, Homo sapiens
ggtcagtcatttttc

SEQ ID NO: 586712 - DNA, 15 bp, Homo sapiens
tggtcagtcattttt

SEQ ID NO: 586713 - DNA, 15 bp, Homo sapiens
gtggtcagtcatttt

SEQ ID NO: 586714 - DNA, 15 bp, Homo sapiens
agtggtcagtcattt

SEQ ID NO: 586715 - DNA, 15 bp, Homo sapiens
cagtggtcagtcatt

SEQ ID NO: 586716 - DNA, 15 bp, Homo sapiens
gcagtggtcagtcat

SEQ ID NO: 586717 - DNA, 15 bp, Homo sapiens
agcagtggtcagtca

SEQ ID NO: 586718 - DNA, 15 bp, Homo sapiens
cagcagtggtcagtc

SEQ ID NO: 586719 - DNA, 15 bp, Homo sapiens
ccagcagtggtcagt

SEQ ID NO: 586720 - DNA, 15 bp, Homo sapiens
cccagcagtggtcag

SEQ ID NO: 586721 - DNA, 15 bp, Homo sapiens
gcccagcagtggtca

SEQ ID NO: 586722 - DNA, 15 bp, Homo sapiens
tgcccagcagtggtc

SEQ ID NO: 586723 - DNA, 15 bp, Homo sapiens
ctgcccagcagtggt

SEQ ID NO: 586724 - DNA, 15 bp, Homo sapiens
gctgcccagcagtgg

SEQ ID NO: 586725 - DNA, 15 bp, Homo sapiens
tgctgcccagcagtg

SEQ ID NO: 586726 - DNA, 15 bp, Homo sapiens
ctgctgcccagcagt

SEQ ID NO: 586727 - DNA, 15 bp, Homo sapiens
cctgctgcccagcag

SEQ ID NO: 586728 - DNA, 15 bp, Homo sapiens
tcctgctgcccagca

SEQ ID NO: 586729 - DNA, 15 bp, Homo sapiens
ctcctgctgcccagc

SEQ ID NO: 586730 - DNA, 15 bp, Homo sapiens
cctcctgctgcccag

SEQ ID NO: 586731 - DNA, 15 bp, Homo sapiens
ccctcctgctgccca

SEQ ID NO: 586732 - DNA, 15 bp, Homo sapiens
tccctcctgctgccc

SEQ ID NO: 586733 - DNA, 15 bp, Homo sapiens
atccctcctgctgcc

SEQ ID NO: 586734 - DNA, 15 bp, Homo sapiens
catccctcctgctgc

SEQ ID NO: 586735 - DNA, 15 bp, Homo sapiens
tcatccctcctgctg

SEQ ID NO: 586736 - DNA, 15 bp, Homo sapiens
atcatccctcctgct

SEQ ID NO: 586737 - DNA, 15 bp, Homo sapiens
catcatccctcctgc

SEQ ID NO: 586738 - DNA, 15 bp, Homo sapiens
tcatcatccctcctg

SEQ ID NO: 586739 - DNA, 15 bp, Homo sapiens
gtcatcatccctcct

SEQ ID NO: 586740 - DNA, 15 bp, Homo sapiens
ggtcatcatccctcc

SEQ ID NO: 586741 - DNA, 15 bp, Homo sapiens
tggtcatcatccctc

SEQ ID NO: 586742 - DNA, 15 bp, Homo sapiens
ttggtcatcatccct

SEQ ID NO: 586743 - DNA, 15 bp, Homo sapiens
gttggtcatcatccc

SEQ ID NO: 586744 - DNA, 15 bp, Homo sapiens
agttggtcatcatcc

SEQ ID NO: 586745 - DNA, 15 bp, Homo sapiens
tagttggtcatcatc

SEQ ID NO: 586746 - DNA, 15 bp, Homo sapiens
ttagttggtcatcat

SEQ ID NO: 586747 - DNA, 15 bp, Homo sapiens
attagttggtcatca

SEQ ID NO: 586748 - DNA, 15 bp, Homo sapiens
aattagttggtcatc

SEQ ID NO: 586749 - DNA, 15 bp, Homo sapiens
taaggtataattaga

SEQ ID NO: 586750 - DNA, 15 bp, Homo sapiens
ctaaggtataattag

SEQ ID NO: 586751 - DNA, 15 bp, Homo sapiens
tctaaggtataatta

SEQ ID NO: 586752 - DNA, 15 bp, Homo sapiens
ttctaaggtataatt

SEQ ID NO: 586753 - DNA, 15 bp, Homo sapiens
tttctaaggtataat

SEQ ID NO: 586754 - DNA, 15 bp, Homo sapiens
atttctaaggtataa

SEQ ID NO: 586755 - DNA, 15 bp, Homo sapiens
catttctaaggtata

SEQ ID NO: 586756 - DNA, 15 bp, Homo sapiens
acatttctaaggtat

SEQ ID NO: 586757 - DNA, 15 bp, Homo sapiens
aacatttctaaggta

SEQ ID NO: 586758 - DNA, 15 bp, Homo sapiens
gaacatttctaaggt

SEQ ID NO: 586759 - DNA, 15 bp, Homo sapiens
agaacatttctaagg

SEQ ID NO: 586760 - DNA, 15 bp, Homo sapiens
gagaacatttctaag

SEQ ID NO: 586761 - DNA, 15 bp, Homo sapiens
ggagaacatttctaa

SEQ ID NO: 586762 - DNA, 15 bp, Homo sapiens
aggagaacatttcta

SEQ ID NO: 586763 - DNA, 15 bp, Homo sapiens
aaggagaacatttct

SEQ ID NO: 586764 - DNA, 15 bp, Homo sapiens
aaaggagaacatttc

SEQ ID NO: 586765 - DNA, 15 bp, Homo sapiens
aaaaggagaacattt

SEQ ID NO: 586766 - DNA, 15 bp, Homo sapiens
aaaaaggagaacatt

SEQ ID NO: 586767 - DNA, 15 bp, Homo sapiens
taaaaaggagaacat

SEQ ID NO: 586768 - DNA, 15 bp, Homo sapiens
ataaaaaggagaaca

SEQ ID NO: 586769 - DNA, 15 bp, Homo sapiens
gataaaaaggagaac

SEQ ID NO: 586770 - DNA, 15 bp, Homo sapiens
tgataaaaaggagaa

SEQ ID NO: 586771 - DNA, 15 bp, Homo sapiens
atgataaaaaggaga

SEQ ID NO: 586772 - DNA, 15 bp, Homo sapiens
gatgataaaaaggag

SEQ ID NO: 586773 - DNA, 15 bp, Homo sapiens
tgatgataaaaagga

SEQ ID NO: 586774 - DNA, 15 bp, Homo sapiens
ttgatgataaaaagg

SEQ ID NO: 586775 - DNA, 15 bp, Homo sapiens
tttgatgataaaaag

SEQ ID NO: 586776 - DNA, 15 bp, Homo sapiens
atttgatgataaaaa

SEQ ID NO: 586777 - DNA, 15 bp, Homo sapiens
gatttgatgataaaa

SEQ ID NO: 586778 - DNA, 15 bp, Homo sapiens
agatttgatgataaa

SEQ ID NO: 586779 - DNA, 15 bp, Homo sapiens
cagatttgatgataa

SEQ ID NO: 586780 - DNA, 15 bp, Homo sapiens
gcagatttgatgata

SEQ ID NO: 586781 - DNA, 15 bp, Homo sapiens
agcagatttgatgat

SEQ ID NO: 586782 - DNA, 15 bp, Homo sapiens
gagcagatttgatga

SEQ ID NO: 586783 - DNA, 15 bp, Homo sapiens
tgagcagatttgatg

SEQ ID NO: 586784 - DNA, 15 bp, Homo sapiens
ttgagcagatttgat

SEQ ID NO: 586785 - DNA, 15 bp, Homo sapiens
cttgagcagatttga

SEQ ID NO: 586786 - DNA, 15 bp, Homo sapiens
tcttgagcagatttg

SEQ ID NO: 586787 - DNA, 15 bp, Homo sapiens
ttcttgagcagattt

SEQ ID NO: 586788 - DNA, 15 bp, Homo sapiens
cttcttgagcagatt

SEQ ID NO: 586789 - DNA, 15 bp, Homo sapiens
ccttcttgagcagat

SEQ ID NO: 586790 - DNA, 15 bp, Homo sapiens
cccttcttgagcaga

SEQ ID NO: 586791 - DNA, 15 bp, Homo sapiens
gcccttcttgagcag

SEQ ID NO: 586792 - DNA, 15 bp, Homo sapiens
agcccttcttgagca

SEQ ID NO: 586793 - DNA, 15 bp, Homo sapiens
aagcccttcttgagc

SEQ ID NO: 586794 - DNA, 15 bp, Homo sapiens
aaagcccttcttgag

SEQ ID NO: 586795 - DNA, 15 bp, Homo sapiens
aaaagcccttcttga

SEQ ID NO: 586796 - DNA, 15 bp, Homo sapiens
aaaaagcccttcttg

SEQ ID NO: 586797 - DNA, 15 bp, Homo sapiens
taaaaagcccttctt

SEQ ID NO: 586798 - DNA, 15 bp, Homo sapiens
ataaaaagcccttct

SEQ ID NO: 586799 - DNA, 15 bp, Homo sapiens
tataaaaagcccttc

SEQ ID NO: 586800 - DNA, 15 bp, Homo sapiens
ctataaaaagccctt

SEQ ID NO: 586801 - DNA, 15 bp, Homo sapiens
actataaaaagccct

SEQ ID NO: 586802 - DNA, 15 bp, Homo sapiens
tactataaaaagccc

SEQ ID NO: 586803 - DNA, 15 bp, Homo sapiens
ctactataaaaagcc

SEQ ID NO: 586804 - DNA, 15 bp, Homo sapiens
tctactataaaaagc

SEQ ID NO: 586805 - DNA, 15 bp, Homo sapiens
ttctactataaaaag

SEQ ID NO: 586806 - DNA, 15 bp, Homo sapiens
attctactataaaaa

SEQ ID NO: 586807 - DNA, 15 bp, Homo sapiens
tattctactataaaa

SEQ ID NO: 586808 - DNA, 15 bp, Homo sapiens
ttattctactataaa

SEQ ID NO: 586809 - DNA, 15 bp, Homo sapiens
attattctactataa

SEQ ID NO: 586810 - DNA, 15 bp, Homo sapiens
tattattctactata

SEQ ID NO: 586811 - DNA, 15 bp, Homo sapiens
atattattctactat

SEQ ID NO: 586812 - DNA, 15 bp, Homo sapiens
gatattattctacta

SEQ ID NO: 586813 - DNA, 15 bp, Homo sapiens
tgatattattctact

SEQ ID NO: 586814 - DNA, 15 bp, Homo sapiens
ctgatattattctac

SEQ ID NO: 586815 - DNA, 15 bp, Homo sapiens
actgatattattcta

SEQ ID NO: 586816 - DNA, 15 bp, Homo sapiens
cactgatattattct

SEQ ID NO: 586817 - DNA, 15 bp, Homo sapiens
ccactgatattattc

SEQ ID NO: 586818 - DNA, 15 bp, Homo sapiens
tccactgatattatt

SEQ ID NO: 586819 - DNA, 15 bp, Homo sapiens
atccactgatattat

SEQ ID NO: 586820 - DNA, 15 bp, Homo sapiens
catccactgatatta

SEQ ID NO: 586821 - DNA, 15 bp, Homo sapiens
tcatccactgatatt

SEQ ID NO: 586822 - DNA, 15 bp, Homo sapiens
ttcatccactgatat

SEQ ID NO: 586823 - DNA, 15 bp, Homo sapiens
tttcatccactgata

SEQ ID NO: 586824 - DNA, 15 bp, Homo sapiens
ttttcatccactgat

SEQ ID NO: 586825 - DNA, 15 bp, Homo sapiens
gttttcatccactga

SEQ ID NO: 586826 - DNA, 15 bp, Homo sapiens
tgttttcatccactg

SEQ ID NO: 586827 - DNA, 15 bp, Homo sapiens
ctgttttcatccact

SEQ ID NO: 586828 - DNA, 15 bp, Homo sapiens
gctgttttcatccac

SEQ ID NO: 586829 - DNA, 15 bp, Homo sapiens
agctgttttcatcca

SEQ ID NO: 586830 - DNA, 15 bp, Homo sapiens
aagctgttttcatcc

SEQ ID NO: 586831 - DNA, 15 bp, Homo sapiens
taagctgttttcatc

SEQ ID NO: 586832 - DNA, 15 bp, Homo sapiens
ttaagctgttttcat

SEQ ID NO: 586833 - DNA, 15 bp, Homo sapiens
gttaagctgttttca

SEQ ID NO: 586834 - DNA, 15 bp, Homo sapiens
tgttaagctgttttc

SEQ ID NO: 586835 - DNA, 15 bp, Homo sapiens
atgttaagctgtttt

SEQ ID NO: 586836 - DNA, 15 bp, Homo sapiens
aatgttaagctgttt

SEQ ID NO: 586837 - DNA, 15 bp, Homo sapiens
aaatgttaagctgtt

SEQ ID NO: 586838 - DNA, 15 bp, Homo sapiens
aaaatgttaagctgt

SEQ ID NO: 586839 - DNA, 15 bp, Homo sapiens
taaaatgttaagctg

SEQ ID NO: 586840 - DNA, 15 bp, Homo sapiens
gtaaaatgttaagct

SEQ ID NO: 586841 - DNA, 15 bp, Homo sapiens
ggtaaaatgttaagc

SEQ ID NO: 586842 - DNA, 15 bp, Homo sapiens
tggtaaaatgttaag

SEQ ID NO: 586843 - DNA, 15 bp, Homo sapiens
atggtaaaatgttaa

SEQ ID NO: 586844 - DNA, 15 bp, Homo sapiens
catggtaaaatgtta

SEQ ID NO: 586845 - DNA, 15 bp, Homo sapiens
gcatggtaaaatgtt

SEQ ID NO: 586846 - DNA, 15 bp, Homo sapiens
agcatggtaaaatgt

SEQ ID NO: 586847 - DNA, 15 bp, Homo sapiens
aagcatggtaaaatg

SEQ ID NO: 586848 - DNA, 15 bp, Homo sapiens
taagcatggtaaaat

SEQ ID NO: 586849 - DNA, 15 bp, Homo sapiens
ttaagcatggtaaaa

SEQ ID NO: 586850 - DNA, 15 bp, Homo sapiens
cttaagcatggtaaa

SEQ ID NO: 586851 - DNA, 15 bp, Homo sapiens
acttaagcatggtaa

SEQ ID NO: 586852 - DNA, 15 bp, Homo sapiens
aacttaagcatggta

SEQ ID NO: 586853 - DNA, 15 bp, Homo sapiens
aaacttaagcatggt

SEQ ID NO: 586854 - DNA, 15 bp, Homo sapiens
aaaacttaagcatgg

SEQ ID NO: 586855 - DNA, 15 bp, Homo sapiens
taaaacttaagcatg

SEQ ID NO: 586856 - DNA, 15 bp, Homo sapiens
ttaaaacttaagcat

SEQ ID NO: 586857 - DNA, 15 bp, Homo sapiens
cttaaaacttaagca

SEQ ID NO: 586858 - DNA, 15 bp, Homo sapiens
tcttaaaacttaagc

SEQ ID NO: 586859 - DNA, 15 bp, Homo sapiens
ttcttaaaacttaag

SEQ ID NO: 586860 - DNA, 15 bp, Homo sapiens
attcttaaaacttaa

SEQ ID NO: 586861 - DNA, 15 bp, Homo sapiens
tattcttaaaactta

SEQ ID NO: 586862 - DNA, 15 bp, Homo sapiens
ttattcttaaaactt

SEQ ID NO: 586863 - DNA, 15 bp, Homo sapiens
tttattcttaaaact

SEQ ID NO: 586864 - DNA, 15 bp, Homo sapiens
ttttattcttaaaac

SEQ ID NO: 586865 - DNA, 15 bp, Homo sapiens
attttattcttaaaa

SEQ ID NO: 586866 - DNA, 15 bp, Homo sapiens
tattttattcttaaa

SEQ ID NO: 586867 - DNA, 15 bp, Homo sapiens
ttattttattcttaa

SEQ ID NO: 586868 - DNA, 15 bp, Homo sapiens
tttattttattctta

SEQ ID NO: 586869 - DNA, 15 bp, Homo sapiens
ttttattttattctt

SEQ ID NO: 586870 - DNA, 15 bp, Homo sapiens
tttttattttattct

SEQ ID NO: 586871 - DNA, 15 bp, Homo sapiens
atttttattttattc

SEQ ID NO: 586872 - DNA, 15 bp, Homo sapiens
aatttttattttatt

SEQ ID NO: 586873 - DNA, 15 bp, Homo sapiens
caatttttattttat

SEQ ID NO: 586874 - DNA, 15 bp, Homo sapiens
ccaatttttatttta

SEQ ID NO: 586875 - DNA, 15 bp, Homo sapiens
tccaatttttatttt

SEQ ID NO: 586876 - DNA, 15 bp, Homo sapiens
ttccaatttttattt

SEQ ID NO: 586877 - DNA, 15 bp, Homo sapiens
tttccaatttttatt

SEQ ID NO: 586878 - DNA, 15 bp, Homo sapiens
atttccaatttttat

SEQ ID NO: 586879 - DNA, 15 bp, Homo sapiens
tatttccaattttta

SEQ ID NO: 586880 - DNA, 15 bp, Homo sapiens
ttatttccaattttt

SEQ ID NO: 586881 - DNA, 15 bp, Homo sapiens
attatttccaatttt

SEQ ID NO: 586882 - DNA, 15 bp, Homo sapiens
aattatttccaattt

SEQ ID NO: 586883 - DNA, 15 bp, Homo sapiens
caattatttccaatt

SEQ ID NO: 586884 - DNA, 15 bp, Homo sapiens
ccaattatttccaat

SEQ ID NO: 586885 - DNA, 15 bp, Homo sapiens
gccaattatttccaa

SEQ ID NO: 586886 - DNA, 15 bp, Homo sapiens
ggccaattatttcca

SEQ ID NO: 586887 - DNA, 15 bp, Homo sapiens
tggccaattatttcc

SEQ ID NO: 586888 - DNA, 15 bp, Homo sapiens
ttggccaattatttc

SEQ ID NO: 586889 - DNA, 15 bp, Homo sapiens
tttggccaattattt

SEQ ID NO: 586890 - DNA, 15 bp, Homo sapiens
ttttggccaattatt

SEQ ID NO: 586891 - DNA, 15 bp, Homo sapiens
attttggccaattat

SEQ ID NO: 586892 - DNA, 15 bp, Homo sapiens
aattttggccaatta

SEQ ID NO: 586893 - DNA, 15 bp, Homo sapiens
caattttggccaatt

SEQ ID NO: 586894 - DNA, 15 bp, Homo sapiens
tcaattttggccaat

SEQ ID NO: 586895 - DNA, 15 bp, Homo sapiens
ttcaattttggccaa

SEQ ID NO: 586896 - DNA, 15 bp, Homo sapiens
tttcaattttggcca

SEQ ID NO: 586897 - DNA, 15 bp, Homo sapiens
ctttcaattttggcc

SEQ ID NO: 586898 - DNA, 15 bp, Homo sapiens
cctttcaattttggc

SEQ ID NO: 586899 - DNA, 15 bp, Homo sapiens
tcctttcaattttgg

SEQ ID NO: 586900 - DNA, 15 bp, Homo sapiens
ttcctttcaattttg

SEQ ID NO: 586901 - DNA, 15 bp, Homo sapiens
tttcctttcaatttt

SEQ ID NO: 586902 - DNA, 15 bp, Homo sapiens
ttttcctttcaattt

SEQ ID NO: 586903 - DNA, 15 bp, Homo sapiens
tttttcctttcaatt

SEQ ID NO: 586904 - DNA, 15 bp, Homo sapiens
atttttcctttcaat

SEQ ID NO: 586905 - DNA, 15 bp, Homo sapiens
aatttttcctttcaa

SEQ ID NO: 586906 - DNA, 15 bp, Homo sapiens
aaatttttcctttca

SEQ ID NO: 586907 - DNA, 15 bp, Homo sapiens
aaaatttttcctttc

SEQ ID NO: 586908 - DNA, 15 bp, Homo sapiens
aaaaatttttccttt

SEQ ID NO: 586909 - DNA, 15 bp, Homo sapiens
aaaaaatttttcctt

SEQ ID NO: 586910 - DNA, 15 bp, Homo sapiens
aaaaaaatttttcct

SEQ ID NO: 586911 - DNA, 15 bp, Homo sapiens
taaaaaaatttttcc

SEQ ID NO: 586912 - DNA, 15 bp, Homo sapiens
ttaaaaaaatttttc

SEQ ID NO: 586913 - DNA, 15 bp, Homo sapiens
tttaaaaaaattttt

SEQ ID NO: 586914 - DNA, 15 bp, Homo sapiens
ttttaaaaaaatttt

SEQ ID NO: 586915 - DNA, 15 bp, Homo sapiens
attttaaaaaaattt

SEQ ID NO: 586916 - DNA, 15 bp, Homo sapiens
aattttaaaaaaatt

SEQ ID NO: 586917 - DNA, 15 bp, Homo sapiens
aaattttaaaaaaat

SEQ ID NO: 586918 - DNA, 15 bp, Homo sapiens
gaaattttaaaaaaa

SEQ ID NO: 586919 - DNA, 15 bp, Homo sapiens
agaaattttaaaaaa

SEQ ID NO: 586920 - DNA, 15 bp, Homo sapiens
gagaaattttaaaaa

SEQ ID NO: 586921 - DNA, 15 bp, Homo sapiens
agagaaattttaaaa

SEQ ID NO: 586922 - DNA, 15 bp, Homo sapiens
tagagaaattttaaa

SEQ ID NO: 586923 - DNA, 15 bp, Homo sapiens
ttagagaaattttaa

SEQ ID NO: 586924 - DNA, 15 bp, Homo sapiens
tttagagaaatttta

SEQ ID NO: 586925 - DNA, 15 bp, Homo sapiens
atttagagaaatttt

SEQ ID NO: 586926 - DNA, 15 bp, Homo sapiens
catttagagaaattt

SEQ ID NO: 586927 - DNA, 15 bp, Homo sapiens
acatttagagaaatt

SEQ ID NO: 586928 - DNA, 15 bp, Homo sapiens
tacatttagagaaat

SEQ ID NO: 586929 - DNA, 15 bp, Homo sapiens
ctacatttagagaaa

SEQ ID NO: 586930 - DNA, 15 bp, Homo sapiens
cctacatttagagaa

SEQ ID NO: 586931 - DNA, 15 bp, Homo sapiens
gcctacatttagaga

SEQ ID NO: 586932 - DNA, 15 bp, Homo sapiens
ggcctacatttagag

SEQ ID NO: 586933 - DNA, 15 bp, Homo sapiens
aggcctacatttaga

SEQ ID NO: 586934 - DNA, 15 bp, Homo sapiens
caggcctacatttag

SEQ ID NO: 586935 - DNA, 15 bp, Homo sapiens
ccaggcctacattta

SEQ ID NO: 586936 - DNA, 15 bp, Homo sapiens
gccaggcctacattt

SEQ ID NO: 586937 - DNA, 15 bp, Homo sapiens
agccaggcctacatt

SEQ ID NO: 586938 - DNA, 15 bp, Homo sapiens
cagccaggcctacat

SEQ ID NO: 586939 - DNA, 15 bp, Homo sapiens
ccagccaggcctaca

SEQ ID NO: 586940 - DNA, 15 bp, Homo sapiens
cccagccaggcctac

SEQ ID NO: 586941 - DNA, 15 bp, Homo sapiens
gcccagccaggccta

SEQ ID NO: 586942 - DNA, 15 bp, Homo sapiens
agcccagccaggcct

SEQ ID NO: 586943 - DNA, 15 bp, Homo sapiens
aagcccagccaggcc

SEQ ID NO: 586944 - DNA, 15 bp, Homo sapiens
aaagcccagccaggc

SEQ ID NO: 586945 - DNA, 15 bp, Homo sapiens
caaagcccagccagg

SEQ ID NO: 586946 - DNA, 15 bp, Homo sapiens
tcaaagcccagccag

SEQ ID NO: 586947 - DNA, 15 bp, Homo sapiens
gtcaaagcccagcca

SEQ ID NO: 586948 - DNA, 15 bp, Homo sapiens
ggtcaaagcccagcc

SEQ ID NO: 586949 - DNA, 15 bp, Homo sapiens
aggtcaaagcccagc

SEQ ID NO: 586950 - DNA, 15 bp, Homo sapiens
aaggtcaaagcccag

SEQ ID NO: 586951 - DNA, 15 bp, Homo sapiens
aaaggtcaaagccca

SEQ ID NO: 586952 - DNA, 15 bp, Homo sapiens
aaaaggtcaaagccc

SEQ ID NO: 586953 - DNA, 15 bp, Homo sapiens
gaaaaggtcaaagcc

SEQ ID NO: 586954 - DNA, 15 bp, Homo sapiens
ggaaaaggtcaaagc

SEQ ID NO: 586955 - DNA, 15 bp, Homo sapiens
cggaaaaggtcaaag

SEQ ID NO: 586956 - DNA, 15 bp, Homo sapiens
acggaaaaggtcaaa

SEQ ID NO: 586957 - DNA, 15 bp, Homo sapiens
aacggaaaaggtcaa

SEQ ID NO: 586958 - DNA, 15 bp, Homo sapiens
aaacggaaaaggtca

SEQ ID NO: 586959 - DNA, 15 bp, Homo sapiens
aaaacggaaaaggtc

SEQ ID NO: 586960 - DNA, 15 bp, Homo sapiens
aaaaacggaaaaggt

SEQ ID NO: 586961 - DNA, 15 bp, Homo sapiens
taaaaacggaaaagg

SEQ ID NO: 586962 - DNA, 15 bp, Homo sapiens
ttaaaaacggaaaag

SEQ ID NO: 586963 - DNA, 15 bp, Homo sapiens
tttaaaaacggaaaa

SEQ ID NO: 586964 - DNA, 15 bp, Homo sapiens
atttaaaaacggaaa

SEQ ID NO: 586965 - DNA, 15 bp, Homo sapiens
gatttaaaaacggaa

SEQ ID NO: 586966 - DNA, 15 bp, Homo sapiens
tgatttaaaaacgga

SEQ ID NO: 586967 - DNA, 15 bp, Homo sapiens
gtgatttaaaaacgg

SEQ ID NO: 586968 - DNA, 15 bp, Homo sapiens
agtgatttaaaaacg

SEQ ID NO: 586969 - DNA, 15 bp, Homo sapiens
gagtgatttaaaaac

SEQ ID NO: 586970 - DNA, 15 bp, Homo sapiens
tgagtgatttaaaaa

SEQ ID NO: 586971 - DNA, 15 bp, Homo sapiens
gtgagtgatttaaaa

SEQ ID NO: 586972 - DNA, 15 bp, Homo sapiens
tgtgagtgatttaaa

SEQ ID NO: 586973 - DNA, 15 bp, Homo sapiens
ctgtgagtgatttaa

SEQ ID NO: 586974 - DNA, 15 bp, Homo sapiens
tctgtgagtgattta

SEQ ID NO: 586975 - DNA, 15 bp, Homo sapiens
ctctgtgagtgattt

SEQ ID NO: 586976 - DNA, 15 bp, Homo sapiens
cctctgtgagtgatt

SEQ ID NO: 586977 - DNA, 15 bp, Homo sapiens
ccctctgtgagtgat

SEQ ID NO: 586978 - DNA, 15 bp, Homo sapiens
accctctgtgagtga

SEQ ID NO: 586979 - DNA, 15 bp, Homo sapiens
caccctctgtgagtg

SEQ ID NO: 586980 - DNA, 15 bp, Homo sapiens
ccaccctctgtgagt

SEQ ID NO: 586981 - DNA, 15 bp, Homo sapiens
cccaccctctgtgag

SEQ ID NO: 586982 - DNA, 15 bp, Homo sapiens
tcccaccctctgtga

SEQ ID NO: 586983 - DNA, 15 bp, Homo sapiens
gtcccaccctctgtg

SEQ ID NO: 586984 - DNA, 15 bp, Homo sapiens
tgtcccaccctctgt

SEQ ID NO: 586985 - DNA, 15 bp, Homo sapiens
ctgtcccaccctctg

SEQ ID NO: 586986 - DNA, 15 bp, Homo sapiens
cctgtcccaccctct

SEQ ID NO: 586987 - DNA, 15 bp, Homo sapiens
tcctgtcccaccctc

SEQ ID NO: 586988 - DNA, 15 bp, Homo sapiens
ctcctgtcccaccct

SEQ ID NO: 586989 - DNA, 15 bp, Homo sapiens
cctcctgtcccaccc

SEQ ID NO: 586990 - DNA, 15 bp, Homo sapiens
tcctcctgtcccacc

SEQ ID NO: 586991 - DNA, 15 bp, Homo sapiens
ttcctcctgtcccac

SEQ ID NO: 586992 - DNA, 15 bp, Homo sapiens
cttcctcctgtccca

SEQ ID NO: 586993 - DNA, 15 bp, Homo sapiens
tcttcctcctgtccc

SEQ ID NO: 586994 - DNA, 15 bp, Homo sapiens
ctcttcctcctgtcc

SEQ ID NO: 586995 - DNA, 15 bp, Homo sapiens
actcttcctcctgtc

SEQ ID NO: 586996 - DNA, 15 bp, Homo sapiens
cactcttcctcctgt

SEQ ID NO: 586997 - DNA, 15 bp, Homo sapiens
tcactcttcctcctg

SEQ ID NO: 586998 - DNA, 15 bp, Homo sapiens
ttcactcttcctcct

SEQ ID NO: 586999 - DNA, 15 bp, Homo sapiens
cttcactcttcctcc

SEQ ID NO: 587000 - DNA, 15 bp, Homo sapiens
ccttcactcttcctc

SEQ ID NO: 587001 - DNA, 15 bp, Homo sapiens
tccttcactcttcct

SEQ ID NO: 587002 - DNA, 15 bp, Homo sapiens
ttccttcactcttcc

SEQ ID NO: 587003 - DNA, 15 bp, Homo sapiens
tttccttcactcttc

SEQ ID NO: 587004 - DNA, 15 bp, Homo sapiens
ttttccttcactctt

SEQ ID NO: 587005 - DNA, 15 bp, Homo sapiens
cttttccttcactct

SEQ ID NO: 587006 - DNA, 15 bp, Homo sapiens
ccttttccttcactc

SEQ ID NO: 587007 - DNA, 15 bp, Homo sapiens
accttttccttcact

SEQ ID NO: 587008 - DNA, 15 bp, Homo sapiens
gaccttttccttcac

SEQ ID NO: 587009 - DNA, 15 bp, Homo sapiens
tgaccttttccttca

SEQ ID NO: 587010 - DNA, 15 bp, Homo sapiens
ttgaccttttccttc

SEQ ID NO: 587011 - DNA, 15 bp, Homo sapiens
tttgaccttttcctt

SEQ ID NO: 587012 - DNA, 15 bp, Homo sapiens
gtttgaccttttcct

SEQ ID NO: 587013 - DNA, 15 bp, Homo sapiens
ggtttgaccttttcc

SEQ ID NO: 587014 - DNA, 15 bp, Homo sapiens
aggtttgaccttttc

SEQ ID NO: 587015 - DNA, 15 bp, Homo sapiens
caggtttgacctttt

SEQ ID NO: 587016 - DNA, 15 bp, Homo sapiens
acaggtttgaccttt

SEQ ID NO: 587017 - DNA, 15 bp, Homo sapiens
aacaggtttgacctt

SEQ ID NO: 587018 - DNA, 15 bp, Homo sapiens
aaacaggtttgacct

SEQ ID NO: 587019 - DNA, 15 bp, Homo sapiens
aaaacaggtttgacc

SEQ ID NO: 587020 - DNA, 15 bp, Homo sapiens
taaaacaggtttgac

SEQ ID NO: 587021 - DNA, 15 bp, Homo sapiens
ttaaaacaggtttga

SEQ ID NO: 587022 - DNA, 15 bp, Homo sapiens
cttaaaacaggtttg

SEQ ID NO: 587023 - DNA, 15 bp, Homo sapiens
ccttaaaacaggttt

SEQ ID NO: 587024 - DNA, 15 bp, Homo sapiens
cccttaaaacaggtt

SEQ ID NO: 587025 - DNA, 15 bp, Homo sapiens
gcccttaaaacaggt

SEQ ID NO: 587026 - DNA, 15 bp, Homo sapiens
tgcccttaaaacagg

SEQ ID NO: 587027 - DNA, 15 bp, Homo sapiens
ttaagataatcttat

SEQ ID NO: 587028 - DNA, 15 bp, Homo sapiens
tttaagataatctta

SEQ ID NO: 587029 - DNA, 15 bp, Homo sapiens
ctttaagataatctt

SEQ ID NO: 587030 - DNA, 15 bp, Homo sapiens
gctttaagataatct

SEQ ID NO: 587031 - DNA, 15 bp, Homo sapiens
agctttaagataatc

SEQ ID NO: 587032 - DNA, 15 bp, Homo sapiens
cagctttaagataat

SEQ ID NO: 587033 - DNA, 15 bp, Homo sapiens
tcagctttaagataa

SEQ ID NO: 587034 - DNA, 15 bp, Homo sapiens
ttcagctttaagata

SEQ ID NO: 587035 - DNA, 15 bp, Homo sapiens
cttcagctttaagat

SEQ ID NO: 587036 - DNA, 15 bp, Homo sapiens
gcttcagctttaaga

SEQ ID NO: 587037 - DNA, 15 bp, Homo sapiens
ggcttcagctttaag

SEQ ID NO: 587038 - DNA, 15 bp, Homo sapiens
tggcttcagctttaa

SEQ ID NO: 587039 - DNA, 15 bp, Homo sapiens
ttggcttcagcttta

SEQ ID NO: 587040 - DNA, 15 bp, Homo sapiens
tttggcttcagcttt

SEQ ID NO: 587041 - DNA, 15 bp, Homo sapiens
ttttggcttcagctt

SEQ ID NO: 587042 - DNA, 15 bp, Homo sapiens
attttggcttcagct

SEQ ID NO: 587043 - DNA, 15 bp, Homo sapiens
tattttggcttcagc

SEQ ID NO: 587044 - DNA, 15 bp, Homo sapiens
atattttggcttcag

SEQ ID NO: 587045 - DNA, 15 bp, Homo sapiens
catattttggcttca

SEQ ID NO: 587046 - DNA, 15 bp, Homo sapiens
gcatattttggcttc

SEQ ID NO: 587047 - DNA, 15 bp, Homo sapiens
agcatattttggctt

SEQ ID NO: 587048 - DNA, 15 bp, Homo sapiens
aagcatattttggct

SEQ ID NO: 587049 - DNA, 15 bp, Homo sapiens
gaagcatattttggc

SEQ ID NO: 587050 - DNA, 15 bp, Homo sapiens
tgaagcatattttgg

SEQ ID NO: 587051 - DNA, 15 bp, Homo sapiens
ttgaagcatattttg

SEQ ID NO: 587052 - DNA, 15 bp, Homo sapiens
tttgaagcatatttt

SEQ ID NO: 587053 - DNA, 15 bp, Homo sapiens
ttttgaagcatattt

SEQ ID NO: 587054 - DNA, 15 bp, Homo sapiens
cttttgaagcatatt

SEQ ID NO: 587055 - DNA, 15 bp, Homo sapiens
tcttttgaagcatat

SEQ ID NO: 587056 - DNA, 15 bp, Homo sapiens
ttcttttgaagcata

SEQ ID NO: 587057 - DNA, 15 bp, Homo sapiens
cttcttttgaagcat

SEQ ID NO: 587058 - DNA, 15 bp, Homo sapiens
tcttcttttgaagca

SEQ ID NO: 587059 - DNA, 15 bp, Homo sapiens
ctcttcttttgaagc

SEQ ID NO: 587060 - DNA, 15 bp, Homo sapiens
cctcttcttttgaag

SEQ ID NO: 587061 - DNA, 15 bp, Homo sapiens
tcctcttcttttgaa

SEQ ID NO: 587062 - DNA, 15 bp, Homo sapiens
gtcctcttcttttga

SEQ ID NO: 587063 - DNA, 15 bp, Homo sapiens
agtcctcttcttttg

SEQ ID NO: 587064 - DNA, 15 bp, Homo sapiens
aagtcctcttctttt

SEQ ID NO: 587065 - DNA, 15 bp, Homo sapiens
aaagtcctcttcttt

SEQ ID NO: 587066 - DNA, 15 bp, Homo sapiens
taaagtcctcttctt

SEQ ID NO: 587067 - DNA, 15 bp, Homo sapiens
ataaagtcctcttct

SEQ ID NO: 587068 - DNA, 15 bp, Homo sapiens
aataaagtcctcttc

SEQ ID NO: 587069 - DNA, 15 bp, Homo sapiens
caataaagtcctctt

SEQ ID NO: 587070 - DNA, 15 bp, Homo sapiens
acaataaagtcctct

SEQ ID NO: 587071 - DNA, 15 bp, Homo sapiens
aacaataaagtcctc

SEQ ID NO: 587072 - DNA, 15 bp, Homo sapiens
gaacaataaagtcct

SEQ ID NO: 587073 - DNA, 15 bp, Homo sapiens
tgaacaataaagtcc

SEQ ID NO: 587074 - DNA, 15 bp, Homo sapiens
atgaacaataaagtc

SEQ ID NO: 587075 - DNA, 15 bp, Homo sapiens
aatgaacaataaagt

SEQ ID NO: 587076 - DNA, 15 bp, Homo sapiens
caatgaacaataaag

SEQ ID NO: 587077 - DNA, 15 bp, Homo sapiens
acaatgaacaataaa

SEQ ID NO: 587078 - DNA, 15 bp, Homo sapiens
tacaatgaacaataa

SEQ ID NO: 587079 - DNA, 15 bp, Homo sapiens
ctacaatgaacaata

SEQ ID NO: 587080 - DNA, 15 bp, Homo sapiens
actacaatgaacaat

SEQ ID NO: 587081 - DNA, 15 bp, Homo sapiens
aactacaatgaacaa

SEQ ID NO: 587082 - DNA, 15 bp, Homo sapiens
gaactacaatgaaca

SEQ ID NO: 587083 - DNA, 15 bp, Homo sapiens
tgaactacaatgaac

SEQ ID NO: 587084 - DNA, 15 bp, Homo sapiens
atgaactacaatgaa

SEQ ID NO: 587085 - DNA, 15 bp, Homo sapiens
tatgaactacaatga

SEQ ID NO: 587086 - DNA, 15 bp, Homo sapiens
gtatgaactacaatg

SEQ ID NO: 587087 - DNA, 15 bp, Homo sapiens
tgtatgaactacaat

SEQ ID NO: 587088 - DNA, 15 bp, Homo sapiens
atgtatgaactacaa

SEQ ID NO: 587089 - DNA, 15 bp, Homo sapiens
aatgtatgaactaca

SEQ ID NO: 587090 - DNA, 15 bp, Homo sapiens
gaatgtatgaactac

SEQ ID NO: 587091 - DNA, 15 bp, Homo sapiens
tgaatgtatgaacta

SEQ ID NO: 587092 - DNA, 15 bp, Homo sapiens
ttgaatgtatgaact

SEQ ID NO: 587093 - DNA, 15 bp, Homo sapiens
tttgaatgtatgaac

SEQ ID NO: 587094 - DNA, 15 bp, Homo sapiens
ctttgaatgtatgaa

SEQ ID NO: 587095 - DNA, 15 bp, Homo sapiens
gctttgaatgtatga

SEQ ID NO: 587096 - DNA, 15 bp, Homo sapiens
tgctttgaatgtatg

SEQ ID NO: 587097 - DNA, 15 bp, Homo sapiens
atgctttgaatgtat

SEQ ID NO: 587098 - DNA, 15 bp, Homo sapiens
gatgctttgaatgta

SEQ ID NO: 587099 - DNA, 15 bp, Homo sapiens
agatgctttgaatgt

SEQ ID NO: 587100 - DNA, 15 bp, Homo sapiens
cagatgctttgaatg

SEQ ID NO: 587101 - DNA, 15 bp, Homo sapiens
tcagatgctttgaat

SEQ ID NO: 587102 - DNA, 15 bp, Homo sapiens
ttcagatgctttgaa

SEQ ID NO: 587103 - DNA, 15 bp, Homo sapiens
gttcagatgctttga

SEQ ID NO: 587104 - DNA, 15 bp, Homo sapiens
agttcagatgctttg

SEQ ID NO: 587105 - DNA, 15 bp, Homo sapiens
cagttcagatgcttt

SEQ ID NO: 587106 - DNA, 15 bp, Homo sapiens
acagttcagatgctt

SEQ ID NO: 587107 - DNA, 15 bp, Homo sapiens
tacagttcagatgct

SEQ ID NO: 587108 - DNA, 15 bp, Homo sapiens
ctacagttcagatgc

SEQ ID NO: 587109 - DNA, 15 bp, Homo sapiens
actacagttcagatg

SEQ ID NO: 587110 - DNA, 15 bp, Homo sapiens
aactacagttcagat

SEQ ID NO: 587111 - DNA, 15 bp, Homo sapiens
aaactacagttcaga

SEQ ID NO: 587112 - DNA, 15 bp, Homo sapiens
gaaactacagttcag

SEQ ID NO: 587113 - DNA, 15 bp, Homo sapiens
agaaactacagttca

SEQ ID NO: 587114 - DNA, 15 bp, Homo sapiens
tagaaactacagttc

SEQ ID NO: 587115 - DNA, 15 bp, Homo sapiens
atagaaactacagtt

SEQ ID NO: 587116 - DNA, 15 bp, Homo sapiens
tatagaaactacagt

SEQ ID NO: 587117 - DNA, 15 bp, Homo sapiens
ctatagaaactacag

SEQ ID NO: 587118 - DNA, 15 bp, Homo sapiens
gctatagaaactaca

SEQ ID NO: 587119 - DNA, 15 bp, Homo sapiens
tgctatagaaactac

SEQ ID NO: 587120 - DNA, 15 bp, Homo sapiens
ttgctatagaaacta

SEQ ID NO: 587121 - DNA, 15 bp, Homo sapiens
cttgctatagaaact

SEQ ID NO: 587122 - DNA, 15 bp, Homo sapiens
gcttgctatagaaac

SEQ ID NO: 587123 - DNA, 15 bp, Homo sapiens
ggcttgctatagaaa

SEQ ID NO: 587124 - DNA, 15 bp, Homo sapiens
tggcttgctatagaa

SEQ ID NO: 587125 - DNA, 15 bp, Homo sapiens
ttggcttgctataga

SEQ ID NO: 587126 - DNA, 15 bp, Homo sapiens
attggcttgctatag

SEQ ID NO: 587127 - DNA, 15 bp, Homo sapiens
aattggcttgctata

SEQ ID NO: 587128 - DNA, 15 bp, Homo sapiens
taattggcttgctat

SEQ ID NO: 587129 - DNA, 15 bp, Homo sapiens
gtaattggcttgcta

SEQ ID NO: 587130 - DNA, 15 bp, Homo sapiens
tgtaattggcttgct

SEQ ID NO: 587131 - DNA, 15 bp, Homo sapiens
atgtaattggcttgc

SEQ ID NO: 587132 - DNA, 15 bp, Homo sapiens
gatgtaattggcttg

SEQ ID NO: 587133 - DNA, 15 bp, Homo sapiens
ggatgtaattggctt

SEQ ID NO: 587134 - DNA, 15 bp, Homo sapiens
tggatgtaattggct

SEQ ID NO: 587135 - DNA, 15 bp, Homo sapiens
atggatgtaattggc

SEQ ID NO: 587136 - DNA, 15 bp, Homo sapiens
tatggatgtaattgg

SEQ ID NO: 587137 - DNA, 15 bp, Homo sapiens
ttatggatgtaattg

SEQ ID NO: 587138 - DNA, 15 bp, Homo sapiens
cttatggatgtaatt

SEQ ID NO: 587139 - DNA, 15 bp, Homo sapiens
acttatggatgtaat

SEQ ID NO: 587140 - DNA, 15 bp, Homo sapiens
cacttatggatgtaa

SEQ ID NO: 587141 - DNA, 15 bp, Homo sapiens
ccacttatggatgta

SEQ ID NO: 587142 - DNA, 15 bp, Homo sapiens
tccacttatggatgt

SEQ ID NO: 587143 - DNA, 15 bp, Homo sapiens
ctccacttatggatg

SEQ ID NO: 587144 - DNA, 15 bp, Homo sapiens
tctccacttatggat

SEQ ID NO: 587145 - DNA, 15 bp, Homo sapiens
ttctccacttatgga

SEQ ID NO: 587146 - DNA, 15 bp, Homo sapiens
cttctccacttatgg

SEQ ID NO: 587147 - DNA, 15 bp, Homo sapiens
ccttctccacttatg

SEQ ID NO: 587148 - DNA, 15 bp, Homo sapiens
tccttctccacttat

SEQ ID NO: 587149 - DNA, 15 bp, Homo sapiens
ttccttctccactta

SEQ ID NO: 587150 - DNA, 15 bp, Homo sapiens
tttccttctccactt

SEQ ID NO: 587151 - DNA, 15 bp, Homo sapiens
atttccttctccact

SEQ ID NO: 587152 - DNA, 15 bp, Homo sapiens
tatttccttctccac

SEQ ID NO: 587153 - DNA, 15 bp, Homo sapiens
ctatttccttctcca

SEQ ID NO: 587154 - DNA, 15 bp, Homo sapiens
tctatttccttctcc

SEQ ID NO: 587155 - DNA, 15 bp, Homo sapiens
atctatttccttctc

SEQ ID NO: 587156 - DNA, 15 bp, Homo sapiens
tatctatttccttct

SEQ ID NO: 587157 - DNA, 15 bp, Homo sapiens
ttatctatttccttc

SEQ ID NO: 587158 - DNA, 15 bp, Homo sapiens
tttatctatttcctt

SEQ ID NO: 587159 - DNA, 15 bp, Homo sapiens
atttatctatttcct

SEQ ID NO: 587160 - DNA, 15 bp, Homo sapiens
catttatctatttcc

SEQ ID NO: 587161 - DNA, 15 bp, Homo sapiens
acatttatctatttc

SEQ ID NO: 587162 - DNA, 15 bp, Homo sapiens
gacatttatctattt

SEQ ID NO: 587163 - DNA, 15 bp, Homo sapiens
tgacatttatctatt

SEQ ID NO: 587164 - DNA, 15 bp, Homo sapiens
ttgacatttatctat

SEQ ID NO: 587165 - DNA, 15 bp, Homo sapiens
tttgacatttatcta

SEQ ID NO: 587166 - DNA, 15 bp, Homo sapiens
ctttgacatttatct

SEQ ID NO: 587167 - DNA, 15 bp, Homo sapiens
actttgacatttatc

SEQ ID NO: 587168 - DNA, 15 bp, Homo sapiens
tactttgacatttat

SEQ ID NO: 587169 - DNA, 15 bp, Homo sapiens
atactttgacattta

SEQ ID NO: 587170 - DNA, 15 bp, Homo sapiens
catactttgacattt

SEQ ID NO: 587171 - DNA, 15 bp, Homo sapiens
tcatactttgacatt

SEQ ID NO: 587172 - DNA, 15 bp, Homo sapiens
atcatactttgacat

SEQ ID NO: 587173 - DNA, 15 bp, Homo sapiens
aatcatactttgaca

SEQ ID NO: 587174 - DNA, 15 bp, Homo sapiens
caatcatactttgac

SEQ ID NO: 587175 - DNA, 15 bp, Homo sapiens
ccaatcatactttga

SEQ ID NO: 587176 - DNA, 15 bp, Homo sapiens
accaatcatactttg

SEQ ID NO: 587177 - DNA, 15 bp, Homo sapiens
caccaatcatacttt

SEQ ID NO: 587178 - DNA, 15 bp, Homo sapiens
ccaccaatcatactt

SEQ ID NO: 587179 - DNA, 15 bp, Homo sapiens
tccaccaatcatact

SEQ ID NO: 587180 - DNA, 15 bp, Homo sapiens
ctccaccaatcatac

SEQ ID NO: 587181 - DNA, 15 bp, Homo sapiens
cctccaccaatcata

SEQ ID NO: 587182 - DNA, 15 bp, Homo sapiens
ccctccaccaatcat

SEQ ID NO: 587183 - DNA, 15 bp, Homo sapiens
tccctccaccaatca

SEQ ID NO: 587184 - DNA, 15 bp, Homo sapiens
ctccctccaccaatc

SEQ ID NO: 587185 - DNA, 15 bp, Homo sapiens
gctccctccaccaat

SEQ ID NO: 587186 - DNA, 15 bp, Homo sapiens
tgctccctccaccaa

SEQ ID NO: 587187 - DNA, 15 bp, Homo sapiens
ttgctccctccacca

SEQ ID NO: 587188 - DNA, 15 bp, Homo sapiens
cttgctccctccacc

SEQ ID NO: 587189 - DNA, 15 bp, Homo sapiens
ccttgctccctccac

SEQ ID NO: 587190 - DNA, 15 bp, Homo sapiens
accttgctccctcca

SEQ ID NO: 587191 - DNA, 15 bp, Homo sapiens
aaccttgctccctcc

SEQ ID NO: 587192 - DNA, 15 bp, Homo sapiens
caaccttgctccctc

SEQ ID NO: 587193 - DNA, 15 bp, Homo sapiens
tcaaccttgctccct

SEQ ID NO: 587194 - DNA, 15 bp, Homo sapiens
ttcaaccttgctccc

SEQ ID NO: 587195 - DNA, 15 bp, Homo sapiens
cttcaaccttgctcc

SEQ ID NO: 587196 - DNA, 15 bp, Homo sapiens
tcttcaaccttgctc

SEQ ID NO: 587197 - DNA, 15 bp, Homo sapiens
atcttcaaccttgct

SEQ ID NO: 587198 - DNA, 15 bp, Homo sapiens
tatcttcaaccttgc

SEQ ID NO: 587199 - DNA, 15 bp, Homo sapiens
ttatcttcaaccttg

SEQ ID NO: 587200 - DNA, 15 bp, Homo sapiens
attatcttcaacctt

SEQ ID NO: 587201 - DNA, 15 bp, Homo sapiens
gattatcttcaacct

SEQ ID NO: 587202 - DNA, 15 bp, Homo sapiens
agattatcttcaacc

SEQ ID NO: 587203 - DNA, 15 bp, Homo sapiens
cagattatcttcaac

SEQ ID NO: 587204 - DNA, 15 bp, Homo sapiens
ccagattatcttcaa

SEQ ID NO: 587205 - DNA, 15 bp, Homo sapiens
cccagattatcttca

SEQ ID NO: 587206 - DNA, 15 bp, Homo sapiens
ccccagattatcttc

SEQ ID NO: 587207 - DNA, 15 bp, Homo sapiens
accccagattatctt

SEQ ID NO: 587208 - DNA, 15 bp, Homo sapiens
aaccccagattatct

SEQ ID NO: 587209 - DNA, 15 bp, Homo sapiens
caaccccagattatc

SEQ ID NO: 587210 - DNA, 15 bp, Homo sapiens
tcaaccccagattat

SEQ ID NO: 587211 - DNA, 15 bp, Homo sapiens
ttcaaccccagatta

SEQ ID NO: 587212 - DNA, 15 bp, Homo sapiens
tttcaaccccagatt

SEQ ID NO: 587213 - DNA, 15 bp, Homo sapiens
atttcaaccccagat

SEQ ID NO: 587214 - DNA, 15 bp, Homo sapiens
aatttcaaccccaga

SEQ ID NO: 587215 - DNA, 15 bp, Homo sapiens
aaatttcaaccccag

SEQ ID NO: 587216 - DNA, 15 bp, Homo sapiens
aaaatttcaacccca

SEQ ID NO: 587217 - DNA, 15 bp, Homo sapiens
gaaaatttcaacccc

SEQ ID NO: 587218 - DNA, 15 bp, Homo sapiens
agaaaatttcaaccc

SEQ ID NO: 587219 - DNA, 15 bp, Homo sapiens
tagaaaatttcaacc

SEQ ID NO: 587220 - DNA, 15 bp, Homo sapiens
ctagaaaatttcaac

SEQ ID NO: 587221 - DNA, 15 bp, Homo sapiens
actagaaaatttcaa

SEQ ID NO: 587222 - DNA, 15 bp, Homo sapiens
aactagaaaatttca

SEQ ID NO: 587223 - DNA, 15 bp, Homo sapiens
aaactagaaaatttc

SEQ ID NO: 587224 - DNA, 15 bp, Homo sapiens
aaaactagaaaattt

SEQ ID NO: 587225 - DNA, 15 bp, Homo sapiens
gaaaactagaaaatt

SEQ ID NO: 587226 - DNA, 15 bp, Homo sapiens
tgaaaactagaaaat

SEQ ID NO: 587227 - DNA, 15 bp, Homo sapiens
atgaaaactagaaaa

SEQ ID NO: 587228 - DNA, 15 bp, Homo sapiens
aatgaaaactagaaa

SEQ ID NO: 587229 - DNA, 15 bp, Homo sapiens
gaatgaaaactagaa

SEQ ID NO: 587230 - DNA, 15 bp, Homo sapiens
agaatgaaaactaga

SEQ ID NO: 587231 - DNA, 15 bp, Homo sapiens
cagaatgaaaactag

SEQ ID NO: 587232 - DNA, 15 bp, Homo sapiens
acagaatgaaaacta

SEQ ID NO: 587233 - DNA, 15 bp, Homo sapiens
tacagaatgaaaact

SEQ ID NO: 587234 - DNA, 15 bp, Homo sapiens
gtacagaatgaaaac

SEQ ID NO: 587235 - DNA, 15 bp, Homo sapiens
tgtacagaatgaaaa

SEQ ID NO: 587236 - DNA, 15 bp, Homo sapiens
atgtacagaatgaaa

SEQ ID NO: 587237 - DNA, 15 bp, Homo sapiens
aatgtacagaatgaa

SEQ ID NO: 587238 - DNA, 15 bp, Homo sapiens
aaatgtacagaatga

SEQ ID NO: 587239 - DNA, 15 bp, Homo sapiens
aaaatgtacagaatg

SEQ ID NO: 587240 - DNA, 15 bp, Homo sapiens
aaaaatgtacagaat

SEQ ID NO: 587241 - DNA, 15 bp, Homo sapiens
taaaaatgtacagaa

SEQ ID NO: 587242 - DNA, 15 bp, Homo sapiens
ctaaaaatgtacaga

SEQ ID NO: 587243 - DNA, 15 bp, Homo sapiens
actaaaaatgtacag

SEQ ID NO: 587244 - DNA, 15 bp, Homo sapiens
aactaaaaatgtaca

SEQ ID NO: 587245 - DNA, 15 bp, Homo sapiens
taactaaaaatgtac

SEQ ID NO: 587246 - DNA, 15 bp, Homo sapiens
ctaactaaaaatgta

SEQ ID NO: 587247 - DNA, 15 bp, Homo sapiens
tctaactaaaaatgt

SEQ ID NO: 587248 - DNA, 15 bp, Homo sapiens
aagcactgccttgca

SEQ ID NO: 587249 - DNA, 15 bp, Homo sapiens
agcactgccttgcag

SEQ ID NO: 587250 - DNA, 15 bp, Homo sapiens
gcactgccttgcagt

SEQ ID NO: 587251 - DNA, 15 bp, Homo sapiens
cactgccttgcagtt

SEQ ID NO: 587252 - DNA, 15 bp, Homo sapiens
actgccttgcagttt

SEQ ID NO: 587253 - DNA, 15 bp, Homo sapiens
ctgccttgcagtttt

SEQ ID NO: 587254 - DNA, 15 bp, Homo sapiens
tgccttgcagtttta

SEQ ID NO: 587255 - DNA, 15 bp, Homo sapiens
gccttgcagttttag

SEQ ID NO: 587256 - DNA, 15 bp, Homo sapiens
ccttgcagttttagt

SEQ ID NO: 587257 - DNA, 15 bp, Homo sapiens
cttgcagttttagtt

SEQ ID NO: 587258 - DNA, 15 bp, Homo sapiens
ttgcagttttagttt

SEQ ID NO: 587259 - DNA, 15 bp, Homo sapiens
tgcagttttagttta

SEQ ID NO: 587260 - DNA, 15 bp, Homo sapiens
gcagttttagtttac

SEQ ID NO: 587261 - DNA, 15 bp, Homo sapiens
cagttttagtttaca

SEQ ID NO: 587262 - DNA, 15 bp, Homo sapiens
agttttagtttacaa

SEQ ID NO: 587263 - DNA, 15 bp, Homo sapiens
gttttagtttacaac

SEQ ID NO: 587264 - DNA, 15 bp, Homo sapiens
ttttagtttacaact

SEQ ID NO: 587265 - DNA, 15 bp, Homo sapiens
tttagtttacaactg

SEQ ID NO: 587266 - DNA, 15 bp, Homo sapiens
ttagtttacaactgc

SEQ ID NO: 587267 - DNA, 15 bp, Homo sapiens
tagtttacaactgca

SEQ ID NO: 587268 - DNA, 15 bp, Homo sapiens
agtttacaactgcac

SEQ ID NO: 587269 - DNA, 15 bp, Homo sapiens
gtttacaactgcact

SEQ ID NO: 587270 - DNA, 15 bp, Homo sapiens
tttacaactgcactt

SEQ ID NO: 587271 - DNA, 15 bp, Homo sapiens
ttacaactgcacttt

SEQ ID NO: 587272 - DNA, 15 bp, Homo sapiens
tacaactgcactttc

SEQ ID NO: 587273 - DNA, 15 bp, Homo sapiens
acaactgcactttca

SEQ ID NO: 587274 - DNA, 15 bp, Homo sapiens
caactgcactttcag

SEQ ID NO: 587275 - DNA, 15 bp, Homo sapiens
aactgcactttcagc

SEQ ID NO: 587276 - DNA, 15 bp, Homo sapiens
actgcactttcagct

SEQ ID NO: 587277 - DNA, 15 bp, Homo sapiens
ctgcactttcagctt

SEQ ID NO: 587278 - DNA, 15 bp, Homo sapiens
tgcactttcagctta

SEQ ID NO: 587279 - DNA, 15 bp, Homo sapiens
gcactttcagcttaa

SEQ ID NO: 587280 - DNA, 15 bp, Homo sapiens
cactttcagcttaag

SEQ ID NO: 587281 - DNA, 15 bp, Homo sapiens
actttcagcttaaga

SEQ ID NO: 587282 - DNA, 15 bp, Homo sapiens
ctttcagcttaagaa

SEQ ID NO: 587283 - DNA, 15 bp, Homo sapiens
tttcagcttaagaaa

SEQ ID NO: 587284 - DNA, 15 bp, Homo sapiens
ttcagcttaagaaac

SEQ ID NO: 587285 - DNA, 15 bp, Homo sapiens
tcagcttaagaaaca

SEQ ID NO: 587286 - DNA, 15 bp, Homo sapiens
cagcttaagaaacac

SEQ ID NO: 587287 - DNA, 15 bp, Homo sapiens
agcttaagaaacacc

SEQ ID NO: 587288 - DNA, 15 bp, Homo sapiens
gcttaagaaacacct

SEQ ID NO: 587289 - DNA, 15 bp, Homo sapiens
cttaagaaacacctg

SEQ ID NO: 587290 - DNA, 15 bp, Homo sapiens
ttaagaaacacctgc

SEQ ID NO: 587291 - DNA, 15 bp, Homo sapiens
taagaaacacctgcc

SEQ ID NO: 587292 - DNA, 15 bp, Homo sapiens
aagaaacacctgccc

SEQ ID NO: 587293 - DNA, 15 bp, Homo sapiens
agaaacacctgccca

SEQ ID NO: 587294 - DNA, 15 bp, Homo sapiens
gaaacacctgcccat

SEQ ID NO: 587295 - DNA, 15 bp, Homo sapiens
aaacacctgcccatc

SEQ ID NO: 587296 - DNA, 15 bp, Homo sapiens
aacacctgcccatcc

SEQ ID NO: 587297 - DNA, 15 bp, Homo sapiens
acacctgcccatcca

SEQ ID NO: 587298 - DNA, 15 bp, Homo sapiens
cacctgcccatccag

SEQ ID NO: 587299 - DNA, 15 bp, Homo sapiens
acctgcccatccaga

SEQ ID NO: 587300 - DNA, 15 bp, Homo sapiens
cctgcccatccagag

SEQ ID NO: 587301 - DNA, 15 bp, Homo sapiens
ctgcccatccagaga

SEQ ID NO: 587302 - DNA, 15 bp, Homo sapiens
tgcccatccagagag

SEQ ID NO: 587303 - DNA, 15 bp, Homo sapiens
gcccatccagagaga

SEQ ID NO: 587304 - DNA, 15 bp, Homo sapiens
cccatccagagagat

SEQ ID NO: 587305 - DNA, 15 bp, Homo sapiens
ccatccagagagatc

SEQ ID NO: 587306 - DNA, 15 bp, Homo sapiens
catccagagagatcg

SEQ ID NO: 587307 - DNA, 15 bp, Homo sapiens
atccagagagatcgt

SEQ ID NO: 587308 - DNA, 15 bp, Homo sapiens
tccagagagatcgtg

SEQ ID NO: 587309 - DNA, 15 bp, Homo sapiens
ccagagagatcgtgt

SEQ ID NO: 587310 - DNA, 15 bp, Homo sapiens
cagagagatcgtgtg

SEQ ID NO: 587311 - DNA, 15 bp, Homo sapiens
agagagatcgtgtgg

SEQ ID NO: 587312 - DNA, 15 bp, Homo sapiens
gagagatcgtgtggg

SEQ ID NO: 587313 - DNA, 15 bp, Homo sapiens
agagatcgtgtgggg

SEQ ID NO: 587314 - DNA, 15 bp, Homo sapiens
gagatcgtgtggggt

SEQ ID NO: 587315 - DNA, 15 bp, Homo sapiens
agatcgtgtggggtc

SEQ ID NO: 587316 - DNA, 15 bp, Homo sapiens
gatcgtgtggggtca

SEQ ID NO: 587317 - DNA, 15 bp, Homo sapiens
atcgtgtggggtcac

SEQ ID NO: 587318 - DNA, 15 bp, Homo sapiens
tcgtgtggggtcaca

SEQ ID NO: 587319 - DNA, 15 bp, Homo sapiens
cgtgtggggtcacat

SEQ ID NO: 587320 - DNA, 15 bp, Homo sapiens
gtgtggggtcacatg

SEQ ID NO: 587321 - DNA, 15 bp, Homo sapiens
tgtggggtcacatgg

SEQ ID NO: 587322 - DNA, 15 bp, Homo sapiens
gtggggtcacatggt

SEQ ID NO: 587323 - DNA, 15 bp, Homo sapiens
tggggtcacatggtg

SEQ ID NO: 587324 - DNA, 15 bp, Homo sapiens
ggggtcacatggtgg

SEQ ID NO: 587325 - DNA, 15 bp, Homo sapiens
gggtcacatggtggg

SEQ ID NO: 587326 - DNA, 15 bp, Homo sapiens
ggtcacatggtggga

SEQ ID NO: 587327 - DNA, 15 bp, Homo sapiens
gtcacatggtgggat

SEQ ID NO: 587328 - DNA, 15 bp, Homo sapiens
tcacatggtgggatc

SEQ ID NO: 587329 - DNA, 15 bp, Homo sapiens
cacatggtgggatca

SEQ ID NO: 587330 - DNA, 15 bp, Homo sapiens
acatggtgggatcag

SEQ ID NO: 587331 - DNA, 15 bp, Homo sapiens
catggtgggatcagg

SEQ ID NO: 587332 - DNA, 15 bp, Homo sapiens
atggtgggatcaggg

SEQ ID NO: 587333 - DNA, 15 bp, Homo sapiens
tggtgggatcaggga

SEQ ID NO: 587334 - DNA, 15 bp, Homo sapiens
ggtgggatcagggag

SEQ ID NO: 587335 - DNA, 15 bp, Homo sapiens
gtgggatcagggagg

SEQ ID NO: 587336 - DNA, 15 bp, Homo sapiens
tgggatcagggaggc

SEQ ID NO: 587337 - DNA, 15 bp, Homo sapiens
gggatcagggaggcc

SEQ ID NO: 587338 - DNA, 15 bp, Homo sapiens
ggatcagggaggcct

SEQ ID NO: 587339 - DNA, 15 bp, Homo sapiens
gatcagggaggcctg

SEQ ID NO: 587340 - DNA, 15 bp, Homo sapiens
atcagggaggcctga

SEQ ID NO: 587341 - DNA, 15 bp, Homo sapiens
tcagggaggcctgaa

SEQ ID NO: 587342 - DNA, 15 bp, Homo sapiens
cagggaggcctgaag

SEQ ID NO: 587343 - DNA, 15 bp, Homo sapiens
agggaggcctgaaga

SEQ ID NO: 587344 - DNA, 15 bp, Homo sapiens
gggaggcctgaagac

SEQ ID NO: 587345 - DNA, 15 bp, Homo sapiens
ggaggcctgaagaca

SEQ ID NO: 587346 - DNA, 15 bp, Homo sapiens
gaggcctgaagacag

SEQ ID NO: 587347 - DNA, 15 bp, Homo sapiens
aggcctgaagacagc

SEQ ID NO: 587348 - DNA, 15 bp, Homo sapiens
ggcctgaagacagct

SEQ ID NO: 587349 - DNA, 15 bp, Homo sapiens
gcctgaagacagctc

SEQ ID NO: 587350 - DNA, 15 bp, Homo sapiens
cctgaagacagctca

SEQ ID NO: 587351 - DNA, 15 bp, Homo sapiens
ctgaagacagctcag

SEQ ID NO: 587352 - DNA, 15 bp, Homo sapiens
tgaagacagctcagt

SEQ ID NO: 587353 - DNA, 15 bp, Homo sapiens
gaagacagctcagtg

SEQ ID NO: 587354 - DNA, 15 bp, Homo sapiens
aagacagctcagtgg

SEQ ID NO: 587355 - DNA, 15 bp, Homo sapiens
agacagctcagtgga

SEQ ID NO: 587356 - DNA, 15 bp, Homo sapiens
gacagctcagtggag

SEQ ID NO: 587357 - DNA, 15 bp, Homo sapiens
acagctcagtggagg

SEQ ID NO: 587358 - DNA, 15 bp, Homo sapiens
cagctcagtggaggc

SEQ ID NO: 587359 - DNA, 15 bp, Homo sapiens
agctcagtggaggct

SEQ ID NO: 587360 - DNA, 15 bp, Homo sapiens
gctcagtggaggctg

SEQ ID NO: 587361 - DNA, 15 bp, Homo sapiens
ctcagtggaggctgc

SEQ ID NO: 587362 - DNA, 15 bp, Homo sapiens
tcagtggaggctgca

SEQ ID NO: 587363 - DNA, 15 bp, Homo sapiens
cagtggaggctgcat

SEQ ID NO: 587364 - DNA, 15 bp, Homo sapiens
agtggaggctgcatg

SEQ ID NO: 587365 - DNA, 15 bp, Homo sapiens
gtggaggctgcatgg

SEQ ID NO: 587366 - DNA, 15 bp, Homo sapiens
tggaggctgcatgga

SEQ ID NO: 587367 - DNA, 15 bp, Homo sapiens
ggaggctgcatggag

SEQ ID NO: 587368 - DNA, 15 bp, Homo sapiens
gaggctgcatggagc

SEQ ID NO: 587369 - DNA, 15 bp, Homo sapiens
aggctgcatggagct

SEQ ID NO: 587370 - DNA, 15 bp, Homo sapiens
ggctgcatggagctt

SEQ ID NO: 587371 - DNA, 15 bp, Homo sapiens
gctgcatggagcttt

SEQ ID NO: 587372 - DNA, 15 bp, Homo sapiens
ctgcatggagctttg

SEQ ID NO: 587373 - DNA, 15 bp, Homo sapiens
tgcatggagctttgg

SEQ ID NO: 587374 - DNA, 15 bp, Homo sapiens
gcatggagctttggt

SEQ ID NO: 587375 - DNA, 15 bp, Homo sapiens
catggagctttggtg

SEQ ID NO: 587376 - DNA, 15 bp, Homo sapiens
atggagctttggtgg

SEQ ID NO: 587377 - DNA, 15 bp, Homo sapiens
tggagctttggtggg

SEQ ID NO: 587378 - DNA, 15 bp, Homo sapiens
ggagctttggtggga

SEQ ID NO: 587379 - DNA, 15 bp, Homo sapiens
gagctttggtgggaa

SEQ ID NO: 587380 - DNA, 15 bp, Homo sapiens
agctttggtgggaac

SEQ ID NO: 587381 - DNA, 15 bp, Homo sapiens
gctttggtgggaacg

SEQ ID NO: 587382 - DNA, 15 bp, Homo sapiens
ctttggtgggaacgg

SEQ ID NO: 587383 - DNA, 15 bp, Homo sapiens
tttggtgggaacggc

SEQ ID NO: 587384 - DNA, 15 bp, Homo sapiens
ttggtgggaacggcc

SEQ ID NO: 587385 - DNA, 15 bp, Homo sapiens
tggtgggaacggccc

SEQ ID NO: 587386 - DNA, 15 bp, Homo sapiens
ggtgggaacggccct

SEQ ID NO: 587387 - DNA, 15 bp, Homo sapiens
gtgggaacggccctg

SEQ ID NO: 587388 - DNA, 15 bp, Homo sapiens
tgggaacggccctgg

SEQ ID NO: 587389 - DNA, 15 bp, Homo sapiens
gggaacggccctggc

SEQ ID NO: 587390 - DNA, 15 bp, Homo sapiens
ggaacggccctggca

SEQ ID NO: 587391 - DNA, 15 bp, Homo sapiens
gaacggccctggcag

SEQ ID NO: 587392 - DNA, 15 bp, Homo sapiens
aacggccctggcagt

SEQ ID NO: 587393 - DNA, 15 bp, Homo sapiens
acggccctggcagtg

SEQ ID NO: 587394 - DNA, 15 bp, Homo sapiens
cggccctggcagtgt

SEQ ID NO: 587395 - DNA, 15 bp, Homo sapiens
ggccctggcagtgtc

SEQ ID NO: 587396 - DNA, 15 bp, Homo sapiens
gccctggcagtgtct

SEQ ID NO: 587397 - DNA, 15 bp, Homo sapiens
ccctggcagtgtcta

SEQ ID NO: 587398 - DNA, 15 bp, Homo sapiens
cctggcagtgtctat

SEQ ID NO: 587399 - DNA, 15 bp, Homo sapiens
ctggcagtgtctata

SEQ ID NO: 587400 - DNA, 15 bp, Homo sapiens
tggcagtgtctatag

SEQ ID NO: 587401 - DNA, 15 bp, Homo sapiens
ggcagtgtctataga

SEQ ID NO: 587402 - DNA, 15 bp, Homo sapiens
gcagtgtctatagat

SEQ ID NO: 587403 - DNA, 15 bp, Homo sapiens
cagtgtctatagatg

SEQ ID NO: 587404 - DNA, 15 bp, Homo sapiens
agtgtctatagatgt

SEQ ID NO: 587405 - DNA, 15 bp, Homo sapiens
gtgtctatagatgtt

SEQ ID NO: 587406 - DNA, 15 bp, Homo sapiens
tgtctatagatgtta

SEQ ID NO: 587407 - DNA, 15 bp, Homo sapiens
gtctatagatgttat

SEQ ID NO: 587408 - DNA, 15 bp, Homo sapiens
tctatagatgttatt

SEQ ID NO: 587409 - DNA, 15 bp, Homo sapiens
ctatagatgttattg

SEQ ID NO: 587410 - DNA, 15 bp, Homo sapiens
tatagatgttattgc

SEQ ID NO: 587411 - DNA, 15 bp, Homo sapiens
atagatgttattgcg

SEQ ID NO: 587412 - DNA, 15 bp, Homo sapiens
tagatgttattgcgg

SEQ ID NO: 587413 - DNA, 15 bp, Homo sapiens
agatgttattgcgga

SEQ ID NO: 587414 - DNA, 15 bp, Homo sapiens
gatgttattgcggaa

SEQ ID NO: 587415 - DNA, 15 bp, Homo sapiens
atgttattgcggaaa

SEQ ID NO: 587416 - DNA, 15 bp, Homo sapiens
tgttattgcggaaaa

SEQ ID NO: 587417 - DNA, 15 bp, Homo sapiens
gttattgcggaaaac

SEQ ID NO: 587418 - DNA, 15 bp, Homo sapiens
ttattgcggaaaact

SEQ ID NO: 587419 - DNA, 15 bp, Homo sapiens
tattgcggaaaactg

SEQ ID NO: 587420 - DNA, 15 bp, Homo sapiens
attgcggaaaactga

SEQ ID NO: 587421 - DNA, 15 bp, Homo sapiens
ttgcggaaaactgag

SEQ ID NO: 587422 - DNA, 15 bp, Homo sapiens
tgcggaaaactgagg

SEQ ID NO: 587423 - DNA, 15 bp, Homo sapiens
gcggaaaactgaggg

SEQ ID NO: 587424 - DNA, 15 bp, Homo sapiens
cggaaaactgagggg

SEQ ID NO: 587425 - DNA, 15 bp, Homo sapiens
ggaaaactgaggggt

SEQ ID NO: 587426 - DNA, 15 bp, Homo sapiens
gaaaactgaggggtg

SEQ ID NO: 587427 - DNA, 15 bp, Homo sapiens
aaaactgaggggtgg

SEQ ID NO: 587428 - DNA, 15 bp, Homo sapiens
aaactgaggggtggg

SEQ ID NO: 587429 - DNA, 15 bp, Homo sapiens
aactgaggggtggga

SEQ ID NO: 587430 - DNA, 15 bp, Homo sapiens
actgaggggtgggag

SEQ ID NO: 587431 - DNA, 15 bp, Homo sapiens
ctgaggggtgggagt

SEQ ID NO: 587432 - DNA, 15 bp, Homo sapiens
tgaggggtgggagtt

SEQ ID NO: 587433 - DNA, 15 bp, Homo sapiens
gaggggtgggagttg

SEQ ID NO: 587434 - DNA, 15 bp, Homo sapiens
aggggtgggagttgg

SEQ ID NO: 587435 - DNA, 15 bp, Homo sapiens
ggggtgggagttgga

SEQ ID NO: 587436 - DNA, 15 bp, Homo sapiens
gggtgggagttggag

SEQ ID NO: 587437 - DNA, 15 bp, Homo sapiens
ggtgggagttggaga

SEQ ID NO: 587438 - DNA, 15 bp, Homo sapiens
gtgggagttggagaa

SEQ ID NO: 587439 - DNA, 15 bp, Homo sapiens
tgggagttggagaag

SEQ ID NO: 587440 - DNA, 15 bp, Homo sapiens
gggagttggagaagg

SEQ ID NO: 587441 - DNA, 15 bp, Homo sapiens
ggagttggagaaggg

SEQ ID NO: 587442 - DNA, 15 bp, Homo sapiens
gagttggagaagggg

SEQ ID NO: 587443 - DNA, 15 bp, Homo sapiens
agttggagaaggggg

SEQ ID NO: 587444 - DNA, 15 bp, Homo sapiens
gttggagaagggggc

SEQ ID NO: 587445 - DNA, 15 bp, Homo sapiens
ttggagaagggggct

SEQ ID NO: 587446 - DNA, 15 bp, Homo sapiens
tggagaagggggctc

SEQ ID NO: 587447 - DNA, 15 bp, Homo sapiens
ggagaagggggctcc

SEQ ID NO: 587448 - DNA, 15 bp, Homo sapiens
gagaagggggctcca

SEQ ID NO: 587449 - DNA, 15 bp, Homo sapiens
agaagggggctccag

SEQ ID NO: 587450 - DNA, 15 bp, Homo sapiens
gaagggggctccaga

SEQ ID NO: 587451 - DNA, 15 bp, Homo sapiens
aagggggctccagac

SEQ ID NO: 587452 - DNA, 15 bp, Homo sapiens
agggggctccagact

SEQ ID NO: 587453 - DNA, 15 bp, Homo sapiens
gggggctccagactc

SEQ ID NO: 587454 - DNA, 15 bp, Homo sapiens
ggggctccagactct

SEQ ID NO: 587455 - DNA, 15 bp, Homo sapiens
gggctccagactcta

SEQ ID NO: 587456 - DNA, 15 bp, Homo sapiens
ggctccagactctag

SEQ ID NO: 587457 - DNA, 15 bp, Homo sapiens
gctccagactctagc

SEQ ID NO: 587458 - DNA, 15 bp, Homo sapiens
ctccagactctagct

SEQ ID NO: 587459 - DNA, 15 bp, Homo sapiens
tccagactctagctg

SEQ ID NO: 587460 - DNA, 15 bp, Homo sapiens
ccagactctagctgt

SEQ ID NO: 587461 - DNA, 15 bp, Homo sapiens
cagactctagctgta

SEQ ID NO: 587462 - DNA, 15 bp, Homo sapiens
agactctagctgtac

SEQ ID NO: 587463 - DNA, 15 bp, Homo sapiens
gactctagctgtact

SEQ ID NO: 587464 - DNA, 15 bp, Homo sapiens
actctagctgtactt

SEQ ID NO: 587465 - DNA, 15 bp, Homo sapiens
ctctagctgtacttg

SEQ ID NO: 587466 - DNA, 15 bp, Homo sapiens
tctagctgtacttgg

SEQ ID NO: 587467 - DNA, 15 bp, Homo sapiens
ctagctgtacttggc

SEQ ID NO: 587468 - DNA, 15 bp, Homo sapiens
tagctgtacttggca

SEQ ID NO: 587469 - DNA, 15 bp, Homo sapiens
agctgtacttggcat

SEQ ID NO: 587470 - DNA, 15 bp, Homo sapiens
gctgtacttggcatt

SEQ ID NO: 587471 - DNA, 15 bp, Homo sapiens
ctgtacttggcattt

SEQ ID NO: 587472 - DNA, 15 bp, Homo sapiens
tgtacttggcatttg

SEQ ID NO: 587473 - DNA, 15 bp, Homo sapiens
gtacttggcatttga

SEQ ID NO: 587474 - DNA, 15 bp, Homo sapiens
tacttggcatttgaa

SEQ ID NO: 587475 - DNA, 15 bp, Homo sapiens
acttggcatttgaac

SEQ ID NO: 587476 - DNA, 15 bp, Homo sapiens
cttggcatttgaacc

SEQ ID NO: 587477 - DNA, 15 bp, Homo sapiens
ttggcatttgaaccc

SEQ ID NO: 587478 - DNA, 15 bp, Homo sapiens
tggcatttgaacccg

SEQ ID NO: 587479 - DNA, 15 bp, Homo sapiens
ggcatttgaacccgg

SEQ ID NO: 587480 - DNA, 15 bp, Homo sapiens
gcatttgaacccgga

SEQ ID NO: 587481 - DNA, 15 bp, Homo sapiens
catttgaacccggaa

SEQ ID NO: 587482 - DNA, 15 bp, Homo sapiens
atttgaacccggaaa

SEQ ID NO: 587483 - DNA, 15 bp, Homo sapiens
tttgaacccggaaag

SEQ ID NO: 587484 - DNA, 15 bp, Homo sapiens
ttgaacccggaaagt

SEQ ID NO: 587485 - DNA, 15 bp, Homo sapiens
tgaacccggaaagtt

SEQ ID NO: 587486 - DNA, 15 bp, Homo sapiens
gaacccggaaagttg

SEQ ID NO: 587487 - DNA, 15 bp, Homo sapiens
aacccggaaagttgg

SEQ ID NO: 587488 - DNA, 15 bp, Homo sapiens
acccggaaagttggg

SEQ ID NO: 587489 - DNA, 15 bp, Homo sapiens
cccggaaagttgggt

SEQ ID NO: 587490 - DNA, 15 bp, Homo sapiens
ccggaaagttgggtt

SEQ ID NO: 587491 - DNA, 15 bp, Homo sapiens
cggaaagttgggttt

SEQ ID NO: 587492 - DNA, 15 bp, Homo sapiens
ggaaagttgggtttc

SEQ ID NO: 587493 - DNA, 15 bp, Homo sapiens
gaaagttgggtttca

SEQ ID NO: 587494 - DNA, 15 bp, Homo sapiens
aaagttgggtttcat

SEQ ID NO: 587495 - DNA, 15 bp, Homo sapiens
aagttgggtttcatg

SEQ ID NO: 587496 - DNA, 15 bp, Homo sapiens
agttgggtttcatgt

SEQ ID NO: 587497 - DNA, 15 bp, Homo sapiens
gttgggtttcatgtt

SEQ ID NO: 587498 - DNA, 15 bp, Homo sapiens
ttgggtttcatgttt

SEQ ID NO: 587499 - DNA, 15 bp, Homo sapiens
tgggtttcatgtttt

SEQ ID NO: 587500 - DNA, 15 bp, Homo sapiens
gggtttcatgttttg

SEQ ID NO: 587501 - DNA, 15 bp, Homo sapiens
ggtttcatgttttgc

SEQ ID NO: 587502 - DNA, 15 bp, Homo sapiens
gtttcatgttttgca

SEQ ID NO: 587503 - DNA, 15 bp, Homo sapiens
tttcatgttttgcac

SEQ ID NO: 587504 - DNA, 15 bp, Homo sapiens
ttcatgttttgcact

SEQ ID NO: 587505 - DNA, 15 bp, Homo sapiens
tcatgttttgcactc

SEQ ID NO: 587506 - DNA, 15 bp, Homo sapiens
catgttttgcactca

SEQ ID NO: 587507 - DNA, 15 bp, Homo sapiens
atgttttgcactcac

SEQ ID NO: 587508 - DNA, 15 bp, Homo sapiens
tgttttgcactcaca

SEQ ID NO: 587509 - DNA, 15 bp, Homo sapiens
gttttgcactcacat

SEQ ID NO: 587510 - DNA, 15 bp, Homo sapiens
ttttgcactcacatt

SEQ ID NO: 587511 - DNA, 15 bp, Homo sapiens
tttgcactcacatta

SEQ ID NO: 587512 - DNA, 15 bp, Homo sapiens
ttgcactcacattat

SEQ ID NO: 587513 - DNA, 15 bp, Homo sapiens
tgcactcacattatg

SEQ ID NO: 587514 - DNA, 15 bp, Homo sapiens
gcactcacattatga

SEQ ID NO: 587515 - DNA, 15 bp, Homo sapiens
cactcacattatgag

SEQ ID NO: 587516 - DNA, 15 bp, Homo sapiens
actcacattatgagt

SEQ ID NO: 587517 - DNA, 15 bp, Homo sapiens
ctcacattatgagtg

SEQ ID NO: 587518 - DNA, 15 bp, Homo sapiens
tcacattatgagtga

SEQ ID NO: 587519 - DNA, 15 bp, Homo sapiens
cacattatgagtgaa

SEQ ID NO: 587520 - DNA, 15 bp, Homo sapiens
acattatgagtgaaa

SEQ ID NO: 587521 - DNA, 15 bp, Homo sapiens
cattatgagtgaaat

SEQ ID NO: 587522 - DNA, 15 bp, Homo sapiens
attatgagtgaaata

SEQ ID NO: 587523 - DNA, 15 bp, Homo sapiens
ttatgagtgaaatat

SEQ ID NO: 587524 - DNA, 15 bp, Homo sapiens
tatgagtgaaatatt

SEQ ID NO: 587525 - DNA, 15 bp, Homo sapiens
atgagtgaaatattg

SEQ ID NO: 587526 - DNA, 15 bp, Homo sapiens
tgagtgaaatattgg

SEQ ID NO: 587527 - DNA, 15 bp, Homo sapiens
gagtgaaatattggc

SEQ ID NO: 587528 - DNA, 15 bp, Homo sapiens
agtgaaatattggct

SEQ ID NO: 587529 - DNA, 15 bp, Homo sapiens
gtgaaatattggctt

SEQ ID NO: 587530 - DNA, 15 bp, Homo sapiens
tgaaatattggctta

SEQ ID NO: 587531 - DNA, 15 bp, Homo sapiens
gaaatattggcttat

SEQ ID NO: 587532 - DNA, 15 bp, Homo sapiens
aaatattggcttatt

SEQ ID NO: 587533 - DNA, 15 bp, Homo sapiens
aatattggcttattc

SEQ ID NO: 587534 - DNA, 15 bp, Homo sapiens
atattggcttattca

SEQ ID NO: 587535 - DNA, 15 bp, Homo sapiens
tattggcttattcaa

SEQ ID NO: 587536 - DNA, 15 bp, Homo sapiens
attggcttattcaag

SEQ ID NO: 587537 - DNA, 15 bp, Homo sapiens
ttggcttattcaagg

SEQ ID NO: 587538 - DNA, 15 bp, Homo sapiens
tggcttattcaaggt

SEQ ID NO: 587539 - DNA, 15 bp, Homo sapiens
ggcttattcaaggtt

SEQ ID NO: 587540 - DNA, 15 bp, Homo sapiens
gcttattcaaggttc

SEQ ID NO: 587541 - DNA, 15 bp, Homo sapiens
cttattcaaggttct

SEQ ID NO: 587542 - DNA, 15 bp, Homo sapiens
ttattcaaggttctt

SEQ ID NO: 587543 - DNA, 15 bp, Homo sapiens
tattcaaggttcttt

SEQ ID NO: 587544 - DNA, 15 bp, Homo sapiens
attcaaggttctttt

SEQ ID NO: 587545 - DNA, 15 bp, Homo sapiens
ttcaaggttcttttg

SEQ ID NO: 587546 - DNA, 15 bp, Homo sapiens
tcaaggttcttttgc

SEQ ID NO: 587547 - DNA, 15 bp, Homo sapiens
caaggttcttttgct

SEQ ID NO: 587548 - DNA, 15 bp, Homo sapiens
aaggttcttttgctt

SEQ ID NO: 587549 - DNA, 15 bp, Homo sapiens
aggttcttttgcttg

SEQ ID NO: 587550 - DNA, 15 bp, Homo sapiens
ggttcttttgcttgc

SEQ ID NO: 587551 - DNA, 15 bp, Homo sapiens
gttcttttgcttgca

SEQ ID NO: 587552 - DNA, 15 bp, Homo sapiens
ttcttttgcttgcaa

SEQ ID NO: 587553 - DNA, 15 bp, Homo sapiens
tcttttgcttgcaag

SEQ ID NO: 587554 - DNA, 15 bp, Homo sapiens
cttttgcttgcaagg

SEQ ID NO: 587555 - DNA, 15 bp, Homo sapiens
ttttgcttgcaaggc

SEQ ID NO: 587556 - DNA, 15 bp, Homo sapiens
tttgcttgcaaggca

SEQ ID NO: 587557 - DNA, 15 bp, Homo sapiens
ttgcttgcaaggcac

SEQ ID NO: 587558 - DNA, 15 bp, Homo sapiens
tgcttgcaaggcacg

SEQ ID NO: 587559 - DNA, 15 bp, Homo sapiens
gcttgcaaggcacgg

SEQ ID NO: 587560 - DNA, 15 bp, Homo sapiens
cttgcaaggcacgga

SEQ ID NO: 587561 - DNA, 15 bp, Homo sapiens
ttgcaaggcacggaa

SEQ ID NO: 587562 - DNA, 15 bp, Homo sapiens
tgcaaggcacggaaa

SEQ ID NO: 587563 - DNA, 15 bp, Homo sapiens
gcaaggcacggaaac

SEQ ID NO: 587564 - DNA, 15 bp, Homo sapiens
caaggcacggaaacc

SEQ ID NO: 587565 - DNA, 15 bp, Homo sapiens
aaggcacggaaaccc

SEQ ID NO: 587566 - DNA, 15 bp, Homo sapiens
aggcacggaaaccca

SEQ ID NO: 587567 - DNA, 15 bp, Homo sapiens
ggcacggaaacccat

SEQ ID NO: 587568 - DNA, 15 bp, Homo sapiens
gcacggaaacccatt

SEQ ID NO: 587569 - DNA, 15 bp, Homo sapiens
cacggaaacccattc

SEQ ID NO: 587570 - DNA, 15 bp, Homo sapiens
acggaaacccattca

SEQ ID NO: 587571 - DNA, 15 bp, Homo sapiens
cggaaacccattcaa

SEQ ID NO: 587572 - DNA, 15 bp, Homo sapiens
ggaaacccattcaag

SEQ ID NO: 587573 - DNA, 15 bp, Homo sapiens
gaaacccattcaagc

SEQ ID NO: 587574 - DNA, 15 bp, Homo sapiens
aaacccattcaagca

SEQ ID NO: 587575 - DNA, 15 bp, Homo sapiens
aacccattcaagcaa

SEQ ID NO: 587576 - DNA, 15 bp, Homo sapiens
acccattcaagcaat

SEQ ID NO: 587577 - DNA, 15 bp, Homo sapiens
cccattcaagcaatc

SEQ ID NO: 587578 - DNA, 15 bp, Homo sapiens
ccattcaagcaatct

SEQ ID NO: 587579 - DNA, 15 bp, Homo sapiens
cattcaagcaatctt

SEQ ID NO: 587580 - DNA, 15 bp, Homo sapiens
attcaagcaatctta

SEQ ID NO: 587581 - DNA, 15 bp, Homo sapiens
ttcaagcaatcttaa

SEQ ID NO: 587582 - DNA, 15 bp, Homo sapiens
tcaagcaatcttaaa

SEQ ID NO: 587583 - DNA, 15 bp, Homo sapiens
caagcaatcttaaac

SEQ ID NO: 587584 - DNA, 15 bp, Homo sapiens
aagcaatcttaaacc

SEQ ID NO: 587585 - DNA, 15 bp, Homo sapiens
agcaatcttaaaccc

SEQ ID NO: 587586 - DNA, 15 bp, Homo sapiens
gcaatcttaaacccc

SEQ ID NO: 587587 - DNA, 15 bp, Homo sapiens
caatcttaaacccca

SEQ ID NO: 587588 - DNA, 15 bp, Homo sapiens
aatcttaaaccccag

SEQ ID NO: 587589 - DNA, 15 bp, Homo sapiens
atcttaaaccccaga

SEQ ID NO: 587590 - DNA, 15 bp, Homo sapiens
tcttaaaccccagaa

SEQ ID NO: 587591 - DNA, 15 bp, Homo sapiens
cttaaaccccagaag

SEQ ID NO: 587592 - DNA, 15 bp, Homo sapiens
ttaaaccccagaagg

SEQ ID NO: 587593 - DNA, 15 bp, Homo sapiens
taaaccccagaagga

SEQ ID NO: 587594 - DNA, 15 bp, Homo sapiens
aaaccccagaaggaa

SEQ ID NO: 587595 - DNA, 15 bp, Homo sapiens
aaccccagaaggaaa

SEQ ID NO: 587596 - DNA, 15 bp, Homo sapiens
accccagaaggaaat

SEQ ID NO: 587597 - DNA, 15 bp, Homo sapiens
ccccagaaggaaatc

SEQ ID NO: 587598 - DNA, 15 bp, Homo sapiens
cccagaaggaaatct

SEQ ID NO: 587599 - DNA, 15 bp, Homo sapiens
ccagaaggaaatcta

SEQ ID NO: 587600 - DNA, 15 bp, Homo sapiens
cagaaggaaatctat

SEQ ID NO: 587601 - DNA, 15 bp, Homo sapiens
agaaggaaatctatg

SEQ ID NO: 587602 - DNA, 15 bp, Homo sapiens
gaaggaaatctatga

SEQ ID NO: 587603 - DNA, 15 bp, Homo sapiens
aaggaaatctatgat

SEQ ID NO: 587604 - DNA, 15 bp, Homo sapiens
aggaaatctatgatt

SEQ ID NO: 587605 - DNA, 15 bp, Homo sapiens
ggaaatctatgattt

SEQ ID NO: 587606 - DNA, 15 bp, Homo sapiens
gaaatctatgatttg

SEQ ID NO: 587607 - DNA, 15 bp, Homo sapiens
aaatctatgatttgg

SEQ ID NO: 587608 - DNA, 15 bp, Homo sapiens
aatctatgatttgga

SEQ ID NO: 587609 - DNA, 15 bp, Homo sapiens
atctatgatttggat

SEQ ID NO: 587610 - DNA, 15 bp, Homo sapiens
tctatgatttggata

SEQ ID NO: 587611 - DNA, 15 bp, Homo sapiens
ctatgatttggatac

SEQ ID NO: 587612 - DNA, 15 bp, Homo sapiens
tatgatttggatact

SEQ ID NO: 587613 - DNA, 15 bp, Homo sapiens
atgatttggatacta

SEQ ID NO: 587614 - DNA, 15 bp, Homo sapiens
tgatttggatactag

SEQ ID NO: 587615 - DNA, 15 bp, Homo sapiens
gatttggatactaga

SEQ ID NO: 587616 - DNA, 15 bp, Homo sapiens
atttggatactagac

SEQ ID NO: 587617 - DNA, 15 bp, Homo sapiens
tttggatactagaca

SEQ ID NO: 587618 - DNA, 15 bp, Homo sapiens
ttggatactagacat

SEQ ID NO: 587619 - DNA, 15 bp, Homo sapiens
tggatactagacatt

SEQ ID NO: 587620 - DNA, 15 bp, Homo sapiens
ggatactagacattc

SEQ ID NO: 587621 - DNA, 15 bp, Homo sapiens
gatactagacattct

SEQ ID NO: 587622 - DNA, 15 bp, Homo sapiens
atactagacattctc

SEQ ID NO: 587623 - DNA, 15 bp, Homo sapiens
tactagacattctca

SEQ ID NO: 587624 - DNA, 15 bp, Homo sapiens
actagacattctcac

SEQ ID NO: 587625 - DNA, 15 bp, Homo sapiens
ctagacattctcaca

SEQ ID NO: 587626 - DNA, 15 bp, Homo sapiens
tagacattctcacag

SEQ ID NO: 587627 - DNA, 15 bp, Homo sapiens
agacattctcacaga

SEQ ID NO: 587628 - DNA, 15 bp, Homo sapiens
gacattctcacagag

SEQ ID NO: 587629 - DNA, 15 bp, Homo sapiens
acattctcacagagc

SEQ ID NO: 587630 - DNA, 15 bp, Homo sapiens
cattctcacagagcc

SEQ ID NO: 587631 - DNA, 15 bp, Homo sapiens
attctcacagagcca

SEQ ID NO: 587632 - DNA, 15 bp, Homo sapiens
ttctcacagagccaa

SEQ ID NO: 587633 - DNA, 15 bp, Homo sapiens
tctcacagagccaag

SEQ ID NO: 587634 - DNA, 15 bp, Homo sapiens
ctcacagagccaagg

SEQ ID NO: 587635 - DNA, 15 bp, Homo sapiens
tcacagagccaaggg

SEQ ID NO: 587636 - DNA, 15 bp, Homo sapiens
cacagagccaagggc

SEQ ID NO: 587637 - DNA, 15 bp, Homo sapiens
acagagccaagggca

SEQ ID NO: 587638 - DNA, 15 bp, Homo sapiens
cagagccaagggcag

SEQ ID NO: 587639 - DNA, 15 bp, Homo sapiens
agagccaagggcagc

SEQ ID NO: 587640 - DNA, 15 bp, Homo sapiens
gagccaagggcagca

SEQ ID NO: 587641 - DNA, 15 bp, Homo sapiens
agccaagggcagcaa

SEQ ID NO: 587642 - DNA, 15 bp, Homo sapiens
gccaagggcagcaag

SEQ ID NO: 587643 - DNA, 15 bp, Homo sapiens
ccaagggcagcaagg

SEQ ID NO: 587644 - DNA, 15 bp, Homo sapiens
caagggcagcaaggc

SEQ ID NO: 587645 - DNA, 15 bp, Homo sapiens
aagggcagcaaggcg

SEQ ID NO: 587646 - DNA, 15 bp, Homo sapiens
agggcagcaaggcgg

SEQ ID NO: 587647 - DNA, 15 bp, Homo sapiens
gggcagcaaggcggg

SEQ ID NO: 587648 - DNA, 15 bp, Homo sapiens
ggcagcaaggcgggg

SEQ ID NO: 587649 - DNA, 15 bp, Homo sapiens
gcagcaaggcggggc

SEQ ID NO: 587650 - DNA, 15 bp, Homo sapiens
cagcaaggcggggct

SEQ ID NO: 587651 - DNA, 15 bp, Homo sapiens
agcaaggcggggctc

SEQ ID NO: 587652 - DNA, 15 bp, Homo sapiens
gcaaggcggggctca

SEQ ID NO: 587653 - DNA, 15 bp, Homo sapiens
caaggcggggctcag

SEQ ID NO: 587654 - DNA, 15 bp, Homo sapiens
aaggcggggctcagg

SEQ ID NO: 587655 - DNA, 15 bp, Homo sapiens
aggcggggctcagga

SEQ ID NO: 587656 - DNA, 15 bp, Homo sapiens
ggcggggctcaggag

SEQ ID NO: 587657 - DNA, 15 bp, Homo sapiens
gcggggctcaggaga

SEQ ID NO: 587658 - DNA, 15 bp, Homo sapiens
cggggctcaggagag

SEQ ID NO: 587659 - DNA, 15 bp, Homo sapiens
ggggctcaggagagg

SEQ ID NO: 587660 - DNA, 15 bp, Homo sapiens
gggctcaggagaggc

SEQ ID NO: 587661 - DNA, 15 bp, Homo sapiens
ggctcaggagaggca

SEQ ID NO: 587662 - DNA, 15 bp, Homo sapiens
gctcaggagaggcag

SEQ ID NO: 587663 - DNA, 15 bp, Homo sapiens
ctcaggagaggcagg

SEQ ID NO: 587664 - DNA, 15 bp, Homo sapiens
tcaggagaggcaggc

SEQ ID NO: 587665 - DNA, 15 bp, Homo sapiens
caggagaggcaggcc

SEQ ID NO: 587666 - DNA, 15 bp, Homo sapiens
aggagaggcaggcca

SEQ ID NO: 587667 - DNA, 15 bp, Homo sapiens
ggagaggcaggccaa

SEQ ID NO: 587668 - DNA, 15 bp, Homo sapiens
gagaggcaggccaag

SEQ ID NO: 587669 - DNA, 15 bp, Homo sapiens
agaggcaggccaaga

SEQ ID NO: 587670 - DNA, 15 bp, Homo sapiens
gaggcaggccaagac

SEQ ID NO: 587671 - DNA, 15 bp, Homo sapiens
aggcaggccaagacc

SEQ ID NO: 587672 - DNA, 15 bp, Homo sapiens
ggcaggccaagacct

SEQ ID NO: 587673 - DNA, 15 bp, Homo sapiens
gcaggccaagacctg

SEQ ID NO: 587674 - DNA, 15 bp, Homo sapiens
caggccaagacctgg

SEQ ID NO: 587675 - DNA, 15 bp, Homo sapiens
aggccaagacctgga

SEQ ID NO: 587676 - DNA, 15 bp, Homo sapiens
ggccaagacctggag

SEQ ID NO: 587677 - DNA, 15 bp, Homo sapiens
gccaagacctggaga

SEQ ID NO: 587678 - DNA, 15 bp, Homo sapiens
ccaagacctggagag

SEQ ID NO: 587679 - DNA, 15 bp, Homo sapiens
caagacctggagagc

SEQ ID NO: 587680 - DNA, 15 bp, Homo sapiens
aagacctggagagct

SEQ ID NO: 587681 - DNA, 15 bp, Homo sapiens
agacctggagagctg

SEQ ID NO: 587682 - DNA, 15 bp, Homo sapiens
gacctggagagctgt

SEQ ID NO: 587683 - DNA, 15 bp, Homo sapiens
acctggagagctgtc

SEQ ID NO: 587684 - DNA, 15 bp, Homo sapiens
cctggagagctgtca

SEQ ID NO: 587685 - DNA, 15 bp, Homo sapiens
ctggagagctgtcag

SEQ ID NO: 587686 - DNA, 15 bp, Homo sapiens
tggagagctgtcagg

SEQ ID NO: 587687 - DNA, 15 bp, Homo sapiens
ggagagctgtcagga

SEQ ID NO: 587688 - DNA, 15 bp, Homo sapiens
gagagctgtcaggag

SEQ ID NO: 587689 - DNA, 15 bp, Homo sapiens
agagctgtcaggagc

SEQ ID NO: 587690 - DNA, 15 bp, Homo sapiens
gagctgtcaggagct

SEQ ID NO: 587691 - DNA, 15 bp, Homo sapiens
agctgtcaggagctg

SEQ ID NO: 587692 - DNA, 15 bp, Homo sapiens
gctgtcaggagctgc

SEQ ID NO: 587693 - DNA, 15 bp, Homo sapiens
ctgtcaggagctgct

SEQ ID NO: 587694 - DNA, 15 bp, Homo sapiens
tgtcaggagctgctt

SEQ ID NO: 587695 - DNA, 15 bp, Homo sapiens
gtcaggagctgcttc

SEQ ID NO: 587696 - DNA, 15 bp, Homo sapiens
tcaggagctgcttcc

SEQ ID NO: 587697 - DNA, 15 bp, Homo sapiens
caggagctgcttcct

SEQ ID NO: 587698 - DNA, 15 bp, Homo sapiens
aggagctgcttcctc

SEQ ID NO: 587699 - DNA, 15 bp, Homo sapiens
ggagctgcttcctca

SEQ ID NO: 587700 - DNA, 15 bp, Homo sapiens
gagctgcttcctcaa

SEQ ID NO: 587701 - DNA, 15 bp, Homo sapiens
agctgcttcctcaac

SEQ ID NO: 587702 - DNA, 15 bp, Homo sapiens
gctgcttcctcaact

SEQ ID NO: 587703 - DNA, 15 bp, Homo sapiens
ctgcttcctcaactc

SEQ ID NO: 587704 - DNA, 15 bp, Homo sapiens
tgcttcctcaactct

SEQ ID NO: 587705 - DNA, 15 bp, Homo sapiens
gcttcctcaactctc

SEQ ID NO: 587706 - DNA, 15 bp, Homo sapiens
cttcctcaactctct

SEQ ID NO: 587707 - DNA, 15 bp, Homo sapiens
ttcctcaactctctt

SEQ ID NO: 587708 - DNA, 15 bp, Homo sapiens
tcctcaactctcttc

SEQ ID NO: 587709 - DNA, 15 bp, Homo sapiens
cctcaactctcttcc

SEQ ID NO: 587710 - DNA, 15 bp, Homo sapiens
ctcaactctcttcca

SEQ ID NO: 587711 - DNA, 15 bp, Homo sapiens
tcaactctcttccat

SEQ ID NO: 587712 - DNA, 15 bp, Homo sapiens
caactctcttccatc

SEQ ID NO: 587713 - DNA, 15 bp, Homo sapiens
aactctcttccatct

SEQ ID NO: 587714 - DNA, 15 bp, Homo sapiens
actctcttccatctg

SEQ ID NO: 587715 - DNA, 15 bp, Homo sapiens
ctctcttccatctgg

SEQ ID NO: 587716 - DNA, 15 bp, Homo sapiens
tctcttccatctggg

SEQ ID NO: 587717 - DNA, 15 bp, Homo sapiens
ctcttccatctgggc

SEQ ID NO: 587718 - DNA, 15 bp, Homo sapiens
tcttccatctgggcc

SEQ ID NO: 587719 - DNA, 15 bp, Homo sapiens
cttccatctgggcct

SEQ ID NO: 587720 - DNA, 15 bp, Homo sapiens
ttccatctgggcctg

SEQ ID NO: 587721 - DNA, 15 bp, Homo sapiens
tccatctgggcctgc

SEQ ID NO: 587722 - DNA, 15 bp, Homo sapiens
ccatctgggcctgcc

SEQ ID NO: 587723 - DNA, 15 bp, Homo sapiens
catctgggcctgcca

SEQ ID NO: 587724 - DNA, 15 bp, Homo sapiens
atctgggcctgccag

SEQ ID NO: 587725 - DNA, 15 bp, Homo sapiens
tctgggcctgccagc

SEQ ID NO: 587726 - DNA, 15 bp, Homo sapiens
ctgggcctgccagcc

SEQ ID NO: 587727 - DNA, 15 bp, Homo sapiens
tgggcctgccagccc

SEQ ID NO: 587728 - DNA, 15 bp, Homo sapiens
gggcctgccagccct

SEQ ID NO: 587729 - DNA, 15 bp, Homo sapiens
ggcctgccagccctg

SEQ ID NO: 587730 - DNA, 15 bp, Homo sapiens
gcctgccagccctgg

SEQ ID NO: 587731 - DNA, 15 bp, Homo sapiens
cctgccagccctggc

SEQ ID NO: 587732 - DNA, 15 bp, Homo sapiens
ctgccagccctggcc

SEQ ID NO: 587733 - DNA, 15 bp, Homo sapiens
tgccagccctggcct

SEQ ID NO: 587734 - DNA, 15 bp, Homo sapiens
gccagccctggcctc

SEQ ID NO: 587735 - DNA, 15 bp, Homo sapiens
ccagccctggcctct

SEQ ID NO: 587736 - DNA, 15 bp, Homo sapiens
cagccctggcctctg

SEQ ID NO: 587737 - DNA, 15 bp, Homo sapiens
agccctggcctctgt

SEQ ID NO: 587738 - DNA, 15 bp, Homo sapiens
gccctggcctctgta

SEQ ID NO: 587739 - DNA, 15 bp, Homo sapiens
ccctggcctctgtat

SEQ ID NO: 587740 - DNA, 15 bp, Homo sapiens
cctggcctctgtatc

SEQ ID NO: 587741 - DNA, 15 bp, Homo sapiens
ctggcctctgtatct

SEQ ID NO: 587742 - DNA, 15 bp, Homo sapiens
tggcctctgtatcta

SEQ ID NO: 587743 - DNA, 15 bp, Homo sapiens
ggcctctgtatctac

SEQ ID NO: 587744 - DNA, 15 bp, Homo sapiens
gcctctgtatctact

SEQ ID NO: 587745 - DNA, 15 bp, Homo sapiens
cctctgtatctactc

SEQ ID NO: 587746 - DNA, 15 bp, Homo sapiens
ctctgtatctactcc

SEQ ID NO: 587747 - DNA, 15 bp, Homo sapiens
tctgtatctactcca

SEQ ID NO: 587748 - DNA, 15 bp, Homo sapiens
ctgtatctactccat

SEQ ID NO: 587749 - DNA, 15 bp, Homo sapiens
tgtatctactccatt

SEQ ID NO: 587750 - DNA, 15 bp, Homo sapiens
gtatctactccattc

SEQ ID NO: 587751 - DNA, 15 bp, Homo sapiens
tatctactccattca

SEQ ID NO: 587752 - DNA, 15 bp, Homo sapiens
atctactccattcac

SEQ ID NO: 587753 - DNA, 15 bp, Homo sapiens
tctactccattcacc

SEQ ID NO: 587754 - DNA, 15 bp, Homo sapiens
ctactccattcacct

SEQ ID NO: 587755 - DNA, 15 bp, Homo sapiens
tactccattcacctc

SEQ ID NO: 587756 - DNA, 15 bp, Homo sapiens
actccattcacctct

SEQ ID NO: 587757 - DNA, 15 bp, Homo sapiens
ctccattcacctctc

SEQ ID NO: 587758 - DNA, 15 bp, Homo sapiens
tccattcacctctct

SEQ ID NO: 587759 - DNA, 15 bp, Homo sapiens
ccattcacctctctc

SEQ ID NO: 587760 - DNA, 15 bp, Homo sapiens
cattcacctctctcc

SEQ ID NO: 587761 - DNA, 15 bp, Homo sapiens
attcacctctctcca

SEQ ID NO: 587762 - DNA, 15 bp, Homo sapiens
ttcacctctctccat

SEQ ID NO: 587763 - DNA, 15 bp, Homo sapiens
tcacctctctccatg

SEQ ID NO: 587764 - DNA, 15 bp, Homo sapiens
cacctctctccatgg

SEQ ID NO: 587765 - DNA, 15 bp, Homo sapiens
acctctctccatgga

SEQ ID NO: 587766 - DNA, 15 bp, Homo sapiens
cctctctccatggac

SEQ ID NO: 587767 - DNA, 15 bp, Homo sapiens
ctctctccatggacc

SEQ ID NO: 587768 - DNA, 15 bp, Homo sapiens
tctctccatggacca

SEQ ID NO: 587769 - DNA, 15 bp, Homo sapiens
ctctccatggaccag

SEQ ID NO: 587770 - DNA, 15 bp, Homo sapiens
tctccatggaccagt

SEQ ID NO: 587771 - DNA, 15 bp, Homo sapiens
ctccatggaccagtc

SEQ ID NO: 587772 - DNA, 15 bp, Homo sapiens
tccatggaccagtct

SEQ ID NO: 587773 - DNA, 15 bp, Homo sapiens
ccatggaccagtctc

SEQ ID NO: 587774 - DNA, 15 bp, Homo sapiens
catggaccagtctcc

SEQ ID NO: 587775 - DNA, 15 bp, Homo sapiens
atggaccagtctccc

SEQ ID NO: 587776 - DNA, 15 bp, Homo sapiens
tggaccagtctcccc

SEQ ID NO: 587777 - DNA, 15 bp, Homo sapiens
ggaccagtctcccct

SEQ ID NO: 587778 - DNA, 15 bp, Homo sapiens
gaccagtctcccctg

SEQ ID NO: 587779 - DNA, 15 bp, Homo sapiens
accagtctcccctgc

SEQ ID NO: 587780 - DNA, 15 bp, Homo sapiens
ccagtctcccctgct

SEQ ID NO: 587781 - DNA, 15 bp, Homo sapiens
cagtctcccctgctc

SEQ ID NO: 587782 - DNA, 15 bp, Homo sapiens
agtctcccctgctcc

SEQ ID NO: 587783 - DNA, 15 bp, Homo sapiens
gtctcccctgctcct

SEQ ID NO: 587784 - DNA, 15 bp, Homo sapiens
tctcccctgctcctc

SEQ ID NO: 587785 - DNA, 15 bp, Homo sapiens
ctcccctgctcctca

SEQ ID NO: 587786 - DNA, 15 bp, Homo sapiens
tcccctgctcctcaa

SEQ ID NO: 587787 - DNA, 15 bp, Homo sapiens
cccctgctcctcaat

SEQ ID NO: 587788 - DNA, 15 bp, Homo sapiens
ccctgctcctcaatg

SEQ ID NO: 587789 - DNA, 15 bp, Homo sapiens
cctgctcctcaatgc

SEQ ID NO: 587790 - DNA, 15 bp, Homo sapiens
ctgctcctcaatgcc

SEQ ID NO: 587791 - DNA, 15 bp, Homo sapiens
tgctcctcaatgcct

SEQ ID NO: 587792 - DNA, 15 bp, Homo sapiens
gctcctcaatgcctg

SEQ ID NO: 587793 - DNA, 15 bp, Homo sapiens
ctcctcaatgcctgg

SEQ ID NO: 587794 - DNA, 15 bp, Homo sapiens
tcctcaatgcctggg

SEQ ID NO: 587795 - DNA, 15 bp, Homo sapiens
cctcaatgcctgggc

SEQ ID NO: 587796 - DNA, 15 bp, Homo sapiens
ctcaatgcctgggct

SEQ ID NO: 587797 - DNA, 15 bp, Homo sapiens
tcaatgcctgggctg

SEQ ID NO: 587798 - DNA, 15 bp, Homo sapiens
caatgcctgggctgc

SEQ ID NO: 587799 - DNA, 15 bp, Homo sapiens
aatgcctgggctgcc

SEQ ID NO: 587800 - DNA, 15 bp, Homo sapiens
atgcctgggctgcca

SEQ ID NO: 587801 - DNA, 15 bp, Homo sapiens
tgcctgggctgccat

SEQ ID NO: 587802 - DNA, 15 bp, Homo sapiens
gcctgggctgccatt

SEQ ID NO: 587803 - DNA, 15 bp, Homo sapiens
cctgggctgccattg

SEQ ID NO: 587804 - DNA, 15 bp, Homo sapiens
ctgggctgccattgt

SEQ ID NO: 587805 - DNA, 15 bp, Homo sapiens
tgggctgccattgtt

SEQ ID NO: 587806 - DNA, 15 bp, Homo sapiens
gggctgccattgttc

SEQ ID NO: 587807 - DNA, 15 bp, Homo sapiens
ggctgccattgttca

SEQ ID NO: 587808 - DNA, 15 bp, Homo sapiens
gctgccattgttcat

SEQ ID NO: 587809 - DNA, 15 bp, Homo sapiens
ctgccattgttcatg

SEQ ID NO: 587810 - DNA, 15 bp, Homo sapiens
tgccattgttcatgc

SEQ ID NO: 587811 - DNA, 15 bp, Homo sapiens
gccattgttcatgca

SEQ ID NO: 587812 - DNA, 15 bp, Homo sapiens
ccattgttcatgcaa

SEQ ID NO: 587813 - DNA, 15 bp, Homo sapiens
cattgttcatgcaat

SEQ ID NO: 587814 - DNA, 15 bp, Homo sapiens
attgttcatgcaatt

SEQ ID NO: 587815 - DNA, 15 bp, Homo sapiens
ttgttcatgcaattc

SEQ ID NO: 587816 - DNA, 15 bp, Homo sapiens
tgttcatgcaattca

SEQ ID NO: 587817 - DNA, 15 bp, Homo sapiens
gttcatgcaattcac

SEQ ID NO: 587818 - DNA, 15 bp, Homo sapiens
ttcatgcaattcaca

SEQ ID NO: 587819 - DNA, 15 bp, Homo sapiens
tcatgcaattcacaa

SEQ ID NO: 587820 - DNA, 15 bp, Homo sapiens
catgcaattcacaat

SEQ ID NO: 587821 - DNA, 15 bp, Homo sapiens
atgcaattcacaata

SEQ ID NO: 587822 - DNA, 15 bp, Homo sapiens
tgcaattcacaatac

SEQ ID NO: 587823 - DNA, 15 bp, Homo sapiens
gcaattcacaatacc

SEQ ID NO: 587824 - DNA, 15 bp, Homo sapiens
caattcacaatacct

SEQ ID NO: 587825 - DNA, 15 bp, Homo sapiens
aattcacaatacctc

SEQ ID NO: 587826 - DNA, 15 bp, Homo sapiens
attcacaatacctcg

SEQ ID NO: 587827 - DNA, 15 bp, Homo sapiens
ttcacaatacctcgg

SEQ ID NO: 587828 - DNA, 15 bp, Homo sapiens
tcacaatacctcggc

SEQ ID NO: 587829 - DNA, 15 bp, Homo sapiens
cacaatacctcggcc

SEQ ID NO: 587830 - DNA, 15 bp, Homo sapiens
acaatacctcggcct

SEQ ID NO: 587831 - DNA, 15 bp, Homo sapiens
caatacctcggcctg

SEQ ID NO: 587832 - DNA, 15 bp, Homo sapiens
aatacctcggcctgg

SEQ ID NO: 587833 - DNA, 15 bp, Homo sapiens
atacctcggcctggg

SEQ ID NO: 587834 - DNA, 15 bp, Homo sapiens
tacctcggcctgggc

SEQ ID NO: 587835 - DNA, 15 bp, Homo sapiens
acctcggcctgggca

SEQ ID NO: 587836 - DNA, 15 bp, Homo sapiens
cctcggcctgggcaa

SEQ ID NO: 587837 - DNA, 15 bp, Homo sapiens
ctcggcctgggcaat

SEQ ID NO: 587838 - DNA, 15 bp, Homo sapiens
tcggcctgggcaatc

SEQ ID NO: 587839 - DNA, 15 bp, Homo sapiens
cggcctgggcaatca

SEQ ID NO: 587840 - DNA, 15 bp, Homo sapiens
ggcctgggcaatcag

SEQ ID NO: 587841 - DNA, 15 bp, Homo sapiens
gcctgggcaatcaga

SEQ ID NO: 587842 - DNA, 15 bp, Homo sapiens
cctgggcaatcagaa

SEQ ID NO: 587843 - DNA, 15 bp, Homo sapiens
ctgggcaatcagaag

SEQ ID NO: 587844 - DNA, 15 bp, Homo sapiens
tgggcaatcagaagc

SEQ ID NO: 587845 - DNA, 15 bp, Homo sapiens
gggcaatcagaagct

SEQ ID NO: 587846 - DNA, 15 bp, Homo sapiens
ggcaatcagaagctc

SEQ ID NO: 587847 - DNA, 15 bp, Homo sapiens
gcaatcagaagctca

SEQ ID NO: 587848 - DNA, 15 bp, Homo sapiens
caatcagaagctcat

SEQ ID NO: 587849 - DNA, 15 bp, Homo sapiens
aatcagaagctcatc

SEQ ID NO: 587850 - DNA, 15 bp, Homo sapiens
atcagaagctcatct

SEQ ID NO: 587851 - DNA, 15 bp, Homo sapiens
tcagaagctcatctc

SEQ ID NO: 587852 - DNA, 15 bp, Homo sapiens
cagaagctcatctct

SEQ ID NO: 587853 - DNA, 15 bp, Homo sapiens
agaagctcatctctg

SEQ ID NO: 587854 - DNA, 15 bp, Homo sapiens
gaagctcatctctga

SEQ ID NO: 587855 - DNA, 15 bp, Homo sapiens
aagctcatctctgaa

SEQ ID NO: 587856 - DNA, 15 bp, Homo sapiens
agctcatctctgaac

SEQ ID NO: 587857 - DNA, 15 bp, Homo sapiens
gctcatctctgaaca

SEQ ID NO: 587858 - DNA, 15 bp, Homo sapiens
ctcatctctgaacac

SEQ ID NO: 587859 - DNA, 15 bp, Homo sapiens
tcatctctgaacacc

SEQ ID NO: 587860 - DNA, 15 bp, Homo sapiens
catctctgaacacca

SEQ ID NO: 587861 - DNA, 15 bp, Homo sapiens
atctctgaacaccat

SEQ ID NO: 587862 - DNA, 15 bp, Homo sapiens
tctctgaacaccatc

SEQ ID NO: 587863 - DNA, 15 bp, Homo sapiens
ctctgaacaccatcc

SEQ ID NO: 587864 - DNA, 15 bp, Homo sapiens
tctgaacaccatcca

SEQ ID NO: 587865 - DNA, 15 bp, Homo sapiens
ctgaacaccatccaa

SEQ ID NO: 587866 - DNA, 15 bp, Homo sapiens
tgaacaccatccaaa

SEQ ID NO: 587867 - DNA, 15 bp, Homo sapiens
gaacaccatccaaat

SEQ ID NO: 587868 - DNA, 15 bp, Homo sapiens
aacaccatccaaatt

SEQ ID NO: 587869 - DNA, 15 bp, Homo sapiens
acaccatccaaattc

SEQ ID NO: 587870 - DNA, 15 bp, Homo sapiens
caccatccaaattcc

SEQ ID NO: 587871 - DNA, 15 bp, Homo sapiens
accatccaaattcct

SEQ ID NO: 587872 - DNA, 15 bp, Homo sapiens
ccatccaaattcctg

SEQ ID NO: 587873 - DNA, 15 bp, Homo sapiens
catccaaattcctgg

SEQ ID NO: 587874 - DNA, 15 bp, Homo sapiens
atccaaattcctggg

SEQ ID NO: 587875 - DNA, 15 bp, Homo sapiens
tccaaattcctggga

SEQ ID NO: 587876 - DNA, 15 bp, Homo sapiens
ccaaattcctgggaa

SEQ ID NO: 587877 - DNA, 15 bp, Homo sapiens
caaattcctgggaac

SEQ ID NO: 587878 - DNA, 15 bp, Homo sapiens
aaattcctgggaaca

SEQ ID NO: 587879 - DNA, 15 bp, Homo sapiens
aattcctgggaacaa

SEQ ID NO: 587880 - DNA, 15 bp, Homo sapiens
attcctgggaacaaa

SEQ ID NO: 587881 - DNA, 15 bp, Homo sapiens
ttcctgggaacaaat

SEQ ID NO: 587882 - DNA, 15 bp, Homo sapiens
tcctgggaacaaatc

SEQ ID NO: 587883 - DNA, 15 bp, Homo sapiens
cctgggaacaaatcg

SEQ ID NO: 587884 - DNA, 15 bp, Homo sapiens
ctgggaacaaatcgg

SEQ ID NO: 587885 - DNA, 15 bp, Homo sapiens
tgggaacaaatcggg

SEQ ID NO: 587886 - DNA, 15 bp, Homo sapiens
gggaacaaatcgggt

SEQ ID NO: 587887 - DNA, 15 bp, Homo sapiens
ggaacaaatcgggtt

SEQ ID NO: 587888 - DNA, 15 bp, Homo sapiens
gaacaaatcgggttg

SEQ ID NO: 587889 - DNA, 15 bp, Homo sapiens
aacaaatcgggttga

SEQ ID NO: 587890 - DNA, 15 bp, Homo sapiens
acaaatcgggttgac

SEQ ID NO: 587891 - DNA, 15 bp, Homo sapiens
caaatcgggttgacc

SEQ ID NO: 587892 - DNA, 15 bp, Homo sapiens
aaatcgggttgaccc

SEQ ID NO: 587893 - DNA, 15 bp, Homo sapiens
aatcgggttgaccca

SEQ ID NO: 587894 - DNA, 15 bp, Homo sapiens
atcgggttgacccag

SEQ ID NO: 587895 - DNA, 15 bp, Homo sapiens
tcgggttgacccagc

SEQ ID NO: 587896 - DNA, 15 bp, Homo sapiens
cgggttgacccagct

SEQ ID NO: 587897 - DNA, 15 bp, Homo sapiens
gggttgacccagctt

SEQ ID NO: 587898 - DNA, 15 bp, Homo sapiens
ggttgacccagcttt

SEQ ID NO: 587899 - DNA, 15 bp, Homo sapiens
gttgacccagcttta

SEQ ID NO: 587900 - DNA, 15 bp, Homo sapiens
ttgacccagctttat

SEQ ID NO: 587901 - DNA, 15 bp, Homo sapiens
tgacccagctttatt

SEQ ID NO: 587902 - DNA, 15 bp, Homo sapiens
gacccagctttattc

SEQ ID NO: 587903 - DNA, 15 bp, Homo sapiens
acccagctttattct

SEQ ID NO: 587904 - DNA, 15 bp, Homo sapiens
cccagctttattctc

SEQ ID NO: 587905 - DNA, 15 bp, Homo sapiens
ccagctttattctcc

SEQ ID NO: 587906 - DNA, 15 bp, Homo sapiens
cagctttattctccc

SEQ ID NO: 587907 - DNA, 15 bp, Homo sapiens
agctttattctccct

SEQ ID NO: 587908 - DNA, 15 bp, Homo sapiens
gctttattctccctg

SEQ ID NO: 587909 - DNA, 15 bp, Homo sapiens
ctttattctccctgt

SEQ ID NO: 587910 - DNA, 15 bp, Homo sapiens
tttattctccctgtc

SEQ ID NO: 587911 - DNA, 15 bp, Homo sapiens
ttattctccctgtcc

SEQ ID NO: 587912 - DNA, 15 bp, Homo sapiens
tattctccctgtccc

SEQ ID NO: 587913 - DNA, 15 bp, Homo sapiens
attctccctgtccca

SEQ ID NO: 587914 - DNA, 15 bp, Homo sapiens
ttctccctgtcccat

SEQ ID NO: 587915 - DNA, 15 bp, Homo sapiens
tctccctgtcccatc

SEQ ID NO: 587916 - DNA, 15 bp, Homo sapiens
ctccctgtcccatca

SEQ ID NO: 587917 - DNA, 15 bp, Homo sapiens
tccctgtcccatcag

SEQ ID NO: 587918 - DNA, 15 bp, Homo sapiens
ccctgtcccatcagc

SEQ ID NO: 587919 - DNA, 15 bp, Homo sapiens
cctgtcccatcagcc

SEQ ID NO: 587920 - DNA, 15 bp, Homo sapiens
ctgtcccatcagcct

SEQ ID NO: 587921 - DNA, 15 bp, Homo sapiens
tgtcccatcagcctt

SEQ ID NO: 587922 - DNA, 15 bp, Homo sapiens
gtcccatcagccttg

SEQ ID NO: 587923 - DNA, 15 bp, Homo sapiens
tcccatcagccttgg

SEQ ID NO: 587924 - DNA, 15 bp, Homo sapiens
cccatcagccttggc

SEQ ID NO: 587925 - DNA, 15 bp, Homo sapiens
ccatcagccttggca

SEQ ID NO: 587926 - DNA, 15 bp, Homo sapiens
catcagccttggcag

SEQ ID NO: 587927 - DNA, 15 bp, Homo sapiens
atcagccttggcaga

SEQ ID NO: 587928 - DNA, 15 bp, Homo sapiens
tcagccttggcagag

SEQ ID NO: 587929 - DNA, 15 bp, Homo sapiens
cagccttggcagagg

SEQ ID NO: 587930 - DNA, 15 bp, Homo sapiens
agccttggcagaggc

SEQ ID NO: 587931 - DNA, 15 bp, Homo sapiens
gccttggcagaggcg

SEQ ID NO: 587932 - DNA, 15 bp, Homo sapiens
ccttggcagaggcgt

SEQ ID NO: 587933 - DNA, 15 bp, Homo sapiens
cttggcagaggcgtg

SEQ ID NO: 587934 - DNA, 15 bp, Homo sapiens
ttggcagaggcgtgc

SEQ ID NO: 587935 - DNA, 15 bp, Homo sapiens
tggcagaggcgtgca

SEQ ID NO: 587936 - DNA, 15 bp, Homo sapiens
ggcagaggcgtgcat

SEQ ID NO: 587937 - DNA, 15 bp, Homo sapiens
gcagaggcgtgcatg

SEQ ID NO: 587938 - DNA, 15 bp, Homo sapiens
cagaggcgtgcatgt

SEQ ID NO: 587939 - DNA, 15 bp, Homo sapiens
agaggcgtgcatgtg

SEQ ID NO: 587940 - DNA, 15 bp, Homo sapiens
gaggcgtgcatgtgc

SEQ ID NO: 587941 - DNA, 15 bp, Homo sapiens
aggcgtgcatgtgca

SEQ ID NO: 587942 - DNA, 15 bp, Homo sapiens
ggcgtgcatgtgcat

SEQ ID NO: 587943 - DNA, 15 bp, Homo sapiens
gcgtgcatgtgcatg

SEQ ID NO: 587944 - DNA, 15 bp, Homo sapiens
cgtgcatgtgcatgc

SEQ ID NO: 587945 - DNA, 15 bp, Homo sapiens
gtgcatgtgcatgcg

SEQ ID NO: 587946 - DNA, 15 bp, Homo sapiens
tgcatgtgcatgcgt

SEQ ID NO: 587947 - DNA, 15 bp, Homo sapiens
gcatgtgcatgcgtg

SEQ ID NO: 587948 - DNA, 15 bp, Homo sapiens
catgtgcatgcgtgc

SEQ ID NO: 587949 - DNA, 15 bp, Homo sapiens
atgtgcatgcgtgcc

SEQ ID NO: 587950 - DNA, 15 bp, Homo sapiens
tgtgcatgcgtgcca

SEQ ID NO: 587951 - DNA, 15 bp, Homo sapiens
gtgcatgcgtgccaa

SEQ ID NO: 587952 - DNA, 15 bp, Homo sapiens
tgcatgcgtgccaat

SEQ ID NO: 587953 - DNA, 15 bp, Homo sapiens
gcatgcgtgccaatg

SEQ ID NO: 587954 - DNA, 15 bp, Homo sapiens
catgcgtgccaatgt

SEQ ID NO: 587955 - DNA, 15 bp, Homo sapiens
atgcgtgccaatgtg

SEQ ID NO: 587956 - DNA, 15 bp, Homo sapiens
tgcgtgccaatgtgt

SEQ ID NO: 587957 - DNA, 15 bp, Homo sapiens
gcgtgccaatgtgtg

SEQ ID NO: 587958 - DNA, 15 bp, Homo sapiens
cgtgccaatgtgtgt

SEQ ID NO: 587959 - DNA, 15 bp, Homo sapiens
gtgccaatgtgtgtg

SEQ ID NO: 587960 - DNA, 15 bp, Homo sapiens
tgccaatgtgtgtgt

SEQ ID NO: 587961 - DNA, 15 bp, Homo sapiens
gccaatgtgtgtgtg

SEQ ID NO: 587962 - DNA, 15 bp, Homo sapiens
ccaatgtgtgtgtgc

SEQ ID NO: 587963 - DNA, 15 bp, Homo sapiens
caatgtgtgtgtgca

SEQ ID NO: 587964 - DNA, 15 bp, Homo sapiens
aatgtgtgtgtgcag

SEQ ID NO: 587965 - DNA, 15 bp, Homo sapiens
atgtgtgtgtgcagg

SEQ ID NO: 587966 - DNA, 15 bp, Homo sapiens
tgtgtgtgtgcaggg

SEQ ID NO: 587967 - DNA, 15 bp, Homo sapiens
gtgtgtgtgcaggga

SEQ ID NO: 587968 - DNA, 15 bp, Homo sapiens
tgtgtgtgcagggag

SEQ ID NO: 587969 - DNA, 15 bp, Homo sapiens
gtgtgtgcagggagg

SEQ ID NO: 587970 - DNA, 15 bp, Homo sapiens
tgtgtgcagggaggt

SEQ ID NO: 587971 - DNA, 15 bp, Homo sapiens
gtgtgcagggaggtc

SEQ ID NO: 587972 - DNA, 15 bp, Homo sapiens
tgtgcagggaggtcc

SEQ ID NO: 587973 - DNA, 15 bp, Homo sapiens
gtgcagggaggtcct

SEQ ID NO: 587974 - DNA, 15 bp, Homo sapiens
tgcagggaggtcctt

SEQ ID NO: 587975 - DNA, 15 bp, Homo sapiens
gcagggaggtccttg

SEQ ID NO: 587976 - DNA, 15 bp, Homo sapiens
cagggaggtccttgt

SEQ ID NO: 587977 - DNA, 15 bp, Homo sapiens
agggaggtccttgtg

SEQ ID NO: 587978 - DNA, 15 bp, Homo sapiens
gggaggtccttgtgg

SEQ ID NO: 587979 - DNA, 15 bp, Homo sapiens
ggaggtccttgtgga

SEQ ID NO: 587980 - DNA, 15 bp, Homo sapiens
gaggtccttgtggat

SEQ ID NO: 587981 - DNA, 15 bp, Homo sapiens
aggtccttgtggatg

SEQ ID NO: 587982 - DNA, 15 bp, Homo sapiens
ggtccttgtggatga

SEQ ID NO: 587983 - DNA, 15 bp, Homo sapiens
gtccttgtggatgaa

SEQ ID NO: 587984 - DNA, 15 bp, Homo sapiens
tccttgtggatgaag

SEQ ID NO: 587985 - DNA, 15 bp, Homo sapiens
ccttgtggatgaagc

SEQ ID NO: 587986 - DNA, 15 bp, Homo sapiens
cttgtggatgaagca

SEQ ID NO: 587987 - DNA, 15 bp, Homo sapiens
ttgtggatgaagcat

SEQ ID NO: 587988 - DNA, 15 bp, Homo sapiens
tgtggatgaagcatg

SEQ ID NO: 587989 - DNA, 15 bp, Homo sapiens
gtggatgaagcatgg

SEQ ID NO: 587990 - DNA, 15 bp, Homo sapiens
tggatgaagcatggc

SEQ ID NO: 587991 - DNA, 15 bp, Homo sapiens
ggatgaagcatggct

SEQ ID NO: 587992 - DNA, 15 bp, Homo sapiens
gatgaagcatggctg

SEQ ID NO: 587993 - DNA, 15 bp, Homo sapiens
atgaagcatggctgt

SEQ ID NO: 587994 - DNA, 15 bp, Homo sapiens
tgaagcatggctgtc

SEQ ID NO: 587995 - DNA, 15 bp, Homo sapiens
gaagcatggctgtca

SEQ ID NO: 587996 - DNA, 15 bp, Homo sapiens
aagcatggctgtcag

SEQ ID NO: 587997 - DNA, 15 bp, Homo sapiens
agcatggctgtcaga

SEQ ID NO: 587998 - DNA, 15 bp, Homo sapiens
gcatggctgtcagag

SEQ ID NO: 587999 - DNA, 15 bp, Homo sapiens
catggctgtcagagc

SEQ ID NO: 588000 - DNA, 15 bp, Homo sapiens
atggctgtcagagcc

SEQ ID NO: 588001 - DNA, 15 bp, Homo sapiens
tggctgtcagagcct

SEQ ID NO: 588002 - DNA, 15 bp, Homo sapiens
ggctgtcagagccta

SEQ ID NO: 588003 - DNA, 15 bp, Homo sapiens
gctgtcagagcctac

SEQ ID NO: 588004 - DNA, 15 bp, Homo sapiens
ctgtcagagcctacc

SEQ ID NO: 588005 - DNA, 15 bp, Homo sapiens
tgtcagagcctacct

SEQ ID NO: 588006 - DNA, 15 bp, Homo sapiens
gtcagagcctacctg

SEQ ID NO: 588007 - DNA, 15 bp, Homo sapiens
tcagagcctacctgc

SEQ ID NO: 588008 - DNA, 15 bp, Homo sapiens
cagagcctacctgcg

SEQ ID NO: 588009 - DNA, 15 bp, Homo sapiens
agagcctacctgcgt

SEQ ID NO: 588010 - DNA, 15 bp, Homo sapiens
gagcctacctgcgtg

SEQ ID NO: 588011 - DNA, 15 bp, Homo sapiens
agcctacctgcgtga

SEQ ID NO: 588012 - DNA, 15 bp, Homo sapiens
gcctacctgcgtgaa

SEQ ID NO: 588013 - DNA, 15 bp, Homo sapiens
cctacctgcgtgaat

SEQ ID NO: 588014 - DNA, 15 bp, Homo sapiens
ctacctgcgtgaatg

SEQ ID NO: 588015 - DNA, 15 bp, Homo sapiens
tacctgcgtgaatgg

SEQ ID NO: 588016 - DNA, 15 bp, Homo sapiens
acctgcgtgaatggg

SEQ ID NO: 588017 - DNA, 15 bp, Homo sapiens
cctgcgtgaatgggt

SEQ ID NO: 588018 - DNA, 15 bp, Homo sapiens
ctgcgtgaatgggtg

SEQ ID NO: 588019 - DNA, 15 bp, Homo sapiens
tgcgtgaatgggtgg

SEQ ID NO: 588020 - DNA, 15 bp, Homo sapiens
gcgtgaatgggtgga

SEQ ID NO: 588021 - DNA, 15 bp, Homo sapiens
cgtgaatgggtggaa

SEQ ID NO: 588022 - DNA, 15 bp, Homo sapiens
gtgaatgggtggaag

SEQ ID NO: 588023 - DNA, 15 bp, Homo sapiens
tgaatgggtggaagg

SEQ ID NO: 588024 - DNA, 15 bp, Homo sapiens
gaatgggtggaaggg

SEQ ID NO: 588025 - DNA, 15 bp, Homo sapiens
aatgggtggaagggc

SEQ ID NO: 588026 - DNA, 15 bp, Homo sapiens
atgggtggaagggca

SEQ ID NO: 588027 - DNA, 15 bp, Homo sapiens
tgggtggaagggcag

SEQ ID NO: 588028 - DNA, 15 bp, Homo sapiens
gggtggaagggcagg

SEQ ID NO: 588029 - DNA, 15 bp, Homo sapiens
ggtggaagggcaggt

SEQ ID NO: 588030 - DNA, 15 bp, Homo sapiens
gtggaagggcaggtc

SEQ ID NO: 588031 - DNA, 15 bp, Homo sapiens
tggaagggcaggtct

SEQ ID NO: 588032 - DNA, 15 bp, Homo sapiens
ggaagggcaggtctc

SEQ ID NO: 588033 - DNA, 15 bp, Homo sapiens
gaagggcaggtctca

SEQ ID NO: 588034 - DNA, 15 bp, Homo sapiens
aagggcaggtctcag

SEQ ID NO: 588035 - DNA, 15 bp, Homo sapiens
agggcaggtctcaga

SEQ ID NO: 588036 - DNA, 15 bp, Homo sapiens
gggcaggtctcagag

SEQ ID NO: 588037 - DNA, 15 bp, Homo sapiens
ggcaggtctcagaga

SEQ ID NO: 588038 - DNA, 15 bp, Homo sapiens
gcaggtctcagagaa

SEQ ID NO: 588039 - DNA, 15 bp, Homo sapiens
caggtctcagagaat

SEQ ID NO: 588040 - DNA, 15 bp, Homo sapiens
aggtctcagagaatt

SEQ ID NO: 588041 - DNA, 15 bp, Homo sapiens
ggtctcagagaattg

SEQ ID NO: 588042 - DNA, 15 bp, Homo sapiens
gtctcagagaattgg

SEQ ID NO: 588043 - DNA, 15 bp, Homo sapiens
tctcagagaattggg

SEQ ID NO: 588044 - DNA, 15 bp, Homo sapiens
ctcagagaattgggt

SEQ ID NO: 588045 - DNA, 15 bp, Homo sapiens
tcagagaattgggta

SEQ ID NO: 588046 - DNA, 15 bp, Homo sapiens
cagagaattgggtaa

SEQ ID NO: 588047 - DNA, 15 bp, Homo sapiens
agagaattgggtaaa

SEQ ID NO: 588048 - DNA, 15 bp, Homo sapiens
gagaattgggtaaaa

SEQ ID NO: 588049 - DNA, 15 bp, Homo sapiens
agaattgggtaaaaa

SEQ ID NO: 588050 - DNA, 15 bp, Homo sapiens
gaattgggtaaaaac

SEQ ID NO: 588051 - DNA, 15 bp, Homo sapiens
aattgggtaaaaact

SEQ ID NO: 588052 - DNA, 15 bp, Homo sapiens
attgggtaaaaactg

SEQ ID NO: 588053 - DNA, 15 bp, Homo sapiens
ttgggtaaaaactgg

SEQ ID NO: 588054 - DNA, 15 bp, Homo sapiens
tgggtaaaaactgga

SEQ ID NO: 588055 - DNA, 15 bp, Homo sapiens
gggtaaaaactggat

SEQ ID NO: 588056 - DNA, 15 bp, Homo sapiens
ggtaaaaactggata

SEQ ID NO: 588057 - DNA, 15 bp, Homo sapiens
gtaaaaactggataa

SEQ ID NO: 588058 - DNA, 15 bp, Homo sapiens
taaaaactggataaa

SEQ ID NO: 588059 - DNA, 15 bp, Homo sapiens
aaaaactggataaac

SEQ ID NO: 588060 - DNA, 15 bp, Homo sapiens
aaaactggataaacc

SEQ ID NO: 588061 - DNA, 15 bp, Homo sapiens
aaactggataaaccc

SEQ ID NO: 588062 - DNA, 15 bp, Homo sapiens
aactggataaaccct

SEQ ID NO: 588063 - DNA, 15 bp, Homo sapiens
actggataaaccctc

SEQ ID NO: 588064 - DNA, 15 bp, Homo sapiens
ctggataaaccctcc

SEQ ID NO: 588065 - DNA, 15 bp, Homo sapiens
tggataaaccctcca

SEQ ID NO: 588066 - DNA, 15 bp, Homo sapiens
ggataaaccctccag

SEQ ID NO: 588067 - DNA, 15 bp, Homo sapiens
gataaaccctccagt

SEQ ID NO: 588068 - DNA, 15 bp, Homo sapiens
ataaaccctccagtg

SEQ ID NO: 588069 - DNA, 15 bp, Homo sapiens
taaaccctccagtga

SEQ ID NO: 588070 - DNA, 15 bp, Homo sapiens
aaaccctccagtgat

SEQ ID NO: 588071 - DNA, 15 bp, Homo sapiens
aaccctccagtgata

SEQ ID NO: 588072 - DNA, 15 bp, Homo sapiens
accctccagtgatat

SEQ ID NO: 588073 - DNA, 15 bp, Homo sapiens
ccctccagtgatatc

SEQ ID NO: 588074 - DNA, 15 bp, Homo sapiens
cctccagtgatatcc

SEQ ID NO: 588075 - DNA, 15 bp, Homo sapiens
ctccagtgatatcca

SEQ ID NO: 588076 - DNA, 15 bp, Homo sapiens
tccagtgatatccac

SEQ ID NO: 588077 - DNA, 15 bp, Homo sapiens
ccagtgatatccacc

SEQ ID NO: 588078 - DNA, 15 bp, Homo sapiens
cagtgatatccacca

SEQ ID NO: 588079 - DNA, 15 bp, Homo sapiens
agtgatatccaccaa

SEQ ID NO: 588080 - DNA, 15 bp, Homo sapiens
gtgatatccaccaat

SEQ ID NO: 588081 - DNA, 15 bp, Homo sapiens
tgatatccaccaatg

SEQ ID NO: 588082 - DNA, 15 bp, Homo sapiens
gatatccaccaatgt

SEQ ID NO: 588083 - DNA, 15 bp, Homo sapiens
atatccaccaatgtc

SEQ ID NO: 588084 - DNA, 15 bp, Homo sapiens
tatccaccaatgtca

SEQ ID NO: 588085 - DNA, 15 bp, Homo sapiens
atccaccaatgtcac

SEQ ID NO: 588086 - DNA, 15 bp, Homo sapiens
tccaccaatgtcacc

SEQ ID NO: 588087 - DNA, 15 bp, Homo sapiens
ccaccaatgtcaccc

SEQ ID NO: 588088 - DNA, 15 bp, Homo sapiens
caccaatgtcaccct

SEQ ID NO: 588089 - DNA, 15 bp, Homo sapiens
accaatgtcaccctg

SEQ ID NO: 588090 - DNA, 15 bp, Homo sapiens
ccaatgtcaccctgt

SEQ ID NO: 588091 - DNA, 15 bp, Homo sapiens
caatgtcaccctgtt

SEQ ID NO: 588092 - DNA, 15 bp, Homo sapiens
aatgtcaccctgttt

SEQ ID NO: 588093 - DNA, 15 bp, Homo sapiens
atgtcaccctgttta

SEQ ID NO: 588094 - DNA, 15 bp, Homo sapiens
tgtcaccctgtttaa

SEQ ID NO: 588095 - DNA, 15 bp, Homo sapiens
gtcaccctgtttaag

SEQ ID NO: 588096 - DNA, 15 bp, Homo sapiens
tcaccctgtttaagg

SEQ ID NO: 588097 - DNA, 15 bp, Homo sapiens
caccctgtttaaggc

SEQ ID NO: 588098 - DNA, 15 bp, Homo sapiens
accctgtttaaggct

SEQ ID NO: 588099 - DNA, 15 bp, Homo sapiens
ccctgtttaaggctt

SEQ ID NO: 588100 - DNA, 15 bp, Homo sapiens
cctgtttaaggcttc

SEQ ID NO: 588101 - DNA, 15 bp, Homo sapiens
ctgtttaaggcttct

SEQ ID NO: 588102 - DNA, 15 bp, Homo sapiens
tgtttaaggcttctc

SEQ ID NO: 588103 - DNA, 15 bp, Homo sapiens
gtttaaggcttctct

SEQ ID NO: 588104 - DNA, 15 bp, Homo sapiens
tttaaggcttctctg

SEQ ID NO: 588105 - DNA, 15 bp, Homo sapiens
ttaaggcttctctgg

SEQ ID NO: 588106 - DNA, 15 bp, Homo sapiens
taaggcttctctggg

SEQ ID NO: 588107 - DNA, 15 bp, Homo sapiens
aaggcttctctgggc

SEQ ID NO: 588108 - DNA, 15 bp, Homo sapiens
aggcttctctgggca

SEQ ID NO: 588109 - DNA, 15 bp, Homo sapiens
ggcttctctgggcaa

SEQ ID NO: 588110 - DNA, 15 bp, Homo sapiens
gcttctctgggcaag

SEQ ID NO: 588111 - DNA, 15 bp, Homo sapiens
cttctctgggcaaga

SEQ ID NO: 588112 - DNA, 15 bp, Homo sapiens
ttctctgggcaagag

SEQ ID NO: 588113 - DNA, 15 bp, Homo sapiens
tctctgggcaagaga

SEQ ID NO: 588114 - DNA, 15 bp, Homo sapiens
ctctgggcaagagac

SEQ ID NO: 588115 - DNA, 15 bp, Homo sapiens
tctgggcaagagaca

SEQ ID NO: 588116 - DNA, 15 bp, Homo sapiens
ctgggcaagagacac

SEQ ID NO: 588117 - DNA, 15 bp, Homo sapiens
tgggcaagagacaca

SEQ ID NO: 588118 - DNA, 15 bp, Homo sapiens
gggcaagagacacac

SEQ ID NO: 588119 - DNA, 15 bp, Homo sapiens
ggcaagagacacaca

SEQ ID NO: 588120 - DNA, 15 bp, Homo sapiens
gcaagagacacacag

SEQ ID NO: 588121 - DNA, 15 bp, Homo sapiens
caagagacacacaga

SEQ ID NO: 588122 - DNA, 15 bp, Homo sapiens
aagagacacacagag

SEQ ID NO: 588123 - DNA, 15 bp, Homo sapiens
agagacacacagagc

SEQ ID NO: 588124 - DNA, 15 bp, Homo sapiens
gagacacacagagca

SEQ ID NO: 588125 - DNA, 15 bp, Homo sapiens
agacacacagagcat

SEQ ID NO: 588126 - DNA, 15 bp, Homo sapiens
gacacacagagcatg

SEQ ID NO: 588127 - DNA, 15 bp, Homo sapiens
acacacagagcatgg

SEQ ID NO: 588128 - DNA, 15 bp, Homo sapiens
cacacagagcatggg

SEQ ID NO: 588129 - DNA, 15 bp, Homo sapiens
acacagagcatggga

SEQ ID NO: 588130 - DNA, 15 bp, Homo sapiens
cacagagcatgggac

SEQ ID NO: 588131 - DNA, 15 bp, Homo sapiens
acagagcatgggacc

SEQ ID NO: 588132 - DNA, 15 bp, Homo sapiens
cagagcatgggaccg

SEQ ID NO: 588133 - DNA, 15 bp, Homo sapiens
agagcatgggaccga

SEQ ID NO: 588134 - DNA, 15 bp, Homo sapiens
gagcatgggaccgag

SEQ ID NO: 588135 - DNA, 15 bp, Homo sapiens
agcatgggaccgaga

SEQ ID NO: 588136 - DNA, 15 bp, Homo sapiens
gcatgggaccgagag

SEQ ID NO: 588137 - DNA, 15 bp, Homo sapiens
catgggaccgagagg

SEQ ID NO: 588138 - DNA, 15 bp, Homo sapiens
atgggaccgagaggc

SEQ ID NO: 588139 - DNA, 15 bp, Homo sapiens
tgggaccgagaggcg

SEQ ID NO: 588140 - DNA, 15 bp, Homo sapiens
gggaccgagaggcga

SEQ ID NO: 588141 - DNA, 15 bp, Homo sapiens
ggaccgagaggcgag

SEQ ID NO: 588142 - DNA, 15 bp, Homo sapiens
gaccgagaggcgagc

SEQ ID NO: 588143 - DNA, 15 bp, Homo sapiens
accgagaggcgagca

SEQ ID NO: 588144 - DNA, 15 bp, Homo sapiens
ccgagaggcgagcag

SEQ ID NO: 588145 - DNA, 15 bp, Homo sapiens
cgagaggcgagcaga

SEQ ID NO: 588146 - DNA, 15 bp, Homo sapiens
gagaggcgagcagac

SEQ ID NO: 588147 - DNA, 15 bp, Homo sapiens
agaggcgagcagacc

SEQ ID NO: 588148 - DNA, 15 bp, Homo sapiens
gaggcgagcagaccc

SEQ ID NO: 588149 - DNA, 15 bp, Homo sapiens
aggcgagcagaccct

SEQ ID NO: 588150 - DNA, 15 bp, Homo sapiens
ggcgagcagaccctg

SEQ ID NO: 588151 - DNA, 15 bp, Homo sapiens
gcgagcagaccctgc

SEQ ID NO: 588152 - DNA, 15 bp, Homo sapiens
cgagcagaccctgcc

SEQ ID NO: 588153 - DNA, 15 bp, Homo sapiens
gagcagaccctgcca

SEQ ID NO: 588154 - DNA, 15 bp, Homo sapiens
agcagaccctgccaa

SEQ ID NO: 588155 - DNA, 15 bp, Homo sapiens
gcagaccctgccaaa

SEQ ID NO: 588156 - DNA, 15 bp, Homo sapiens
cagaccctgccaaaa

SEQ ID NO: 588157 - DNA, 15 bp, Homo sapiens
agaccctgccaaaac

SEQ ID NO: 588158 - DNA, 15 bp, Homo sapiens
gaccctgccaaaact

SEQ ID NO: 588159 - DNA, 15 bp, Homo sapiens
accctgccaaaactg

SEQ ID NO: 588160 - DNA, 15 bp, Homo sapiens
ccctgccaaaactgg

SEQ ID NO: 588161 - DNA, 15 bp, Homo sapiens
cctgccaaaactggg

SEQ ID NO: 588162 - DNA, 15 bp, Homo sapiens
ctgccaaaactggga

SEQ ID NO: 588163 - DNA, 15 bp, Homo sapiens
tgccaaaactgggag

SEQ ID NO: 588164 - DNA, 15 bp, Homo sapiens
gccaaaactgggaga

SEQ ID NO: 588165 - DNA, 15 bp, Homo sapiens
ccaaaactgggagac

SEQ ID NO: 588166 - DNA, 15 bp, Homo sapiens
caaaactgggagact

SEQ ID NO: 588167 - DNA, 15 bp, Homo sapiens
aaaactgggagactg

SEQ ID NO: 588168 - DNA, 15 bp, Homo sapiens
aaactgggagactga

SEQ ID NO: 588169 - DNA, 15 bp, Homo sapiens
aactgggagactgaa

SEQ ID NO: 588170 - DNA, 15 bp, Homo sapiens
actgggagactgaat

SEQ ID NO: 588171 - DNA, 15 bp, Homo sapiens
ctgggagactgaata

SEQ ID NO: 588172 - DNA, 15 bp, Homo sapiens
tgggagactgaatag

SEQ ID NO: 588173 - DNA, 15 bp, Homo sapiens
gggagactgaataga

SEQ ID NO: 588174 - DNA, 15 bp, Homo sapiens
ggagactgaatagat

SEQ ID NO: 588175 - DNA, 15 bp, Homo sapiens
gagactgaatagatc

SEQ ID NO: 588176 - DNA, 15 bp, Homo sapiens
agactgaatagatcg

SEQ ID NO: 588177 - DNA, 15 bp, Homo sapiens
gactgaatagatcgc

SEQ ID NO: 588178 - DNA, 15 bp, Homo sapiens
actgaatagatcgct

SEQ ID NO: 588179 - DNA, 15 bp, Homo sapiens
ctgaatagatcgctc

SEQ ID NO: 588180 - DNA, 15 bp, Homo sapiens
tgaatagatcgctca

SEQ ID NO: 588181 - DNA, 15 bp, Homo sapiens
gaatagatcgctcac

SEQ ID NO: 588182 - DNA, 15 bp, Homo sapiens
aatagatcgctcacc

SEQ ID NO: 588183 - DNA, 15 bp, Homo sapiens
atagatcgctcacca

SEQ ID NO: 588184 - DNA, 15 bp, Homo sapiens
tagatcgctcaccat

SEQ ID NO: 588185 - DNA, 15 bp, Homo sapiens
agatcgctcaccatc

SEQ ID NO: 588186 - DNA, 15 bp, Homo sapiens
gatcgctcaccatcc

SEQ ID NO: 588187 - DNA, 15 bp, Homo sapiens
atcgctcaccatcct

SEQ ID NO: 588188 - DNA, 15 bp, Homo sapiens
tcgctcaccatcctt

SEQ ID NO: 588189 - DNA, 15 bp, Homo sapiens
cgctcaccatccttg

SEQ ID NO: 588190 - DNA, 15 bp, Homo sapiens
gctcaccatccttgt

SEQ ID NO: 588191 - DNA, 15 bp, Homo sapiens
ctcaccatccttgtc

SEQ ID NO: 588192 - DNA, 15 bp, Homo sapiens
tcaccatccttgtca

SEQ ID NO: 588193 - DNA, 15 bp, Homo sapiens
caccatccttgtcag

SEQ ID NO: 588194 - DNA, 15 bp, Homo sapiens
accatccttgtcagt

SEQ ID NO: 588195 - DNA, 15 bp, Homo sapiens
ccatccttgtcagtt

SEQ ID NO: 588196 - DNA, 15 bp, Homo sapiens
catccttgtcagtta

SEQ ID NO: 588197 - DNA, 15 bp, Homo sapiens
atccttgtcagttag

SEQ ID NO: 588198 - DNA, 15 bp, Homo sapiens
tccttgtcagttagc

SEQ ID NO: 588199 - DNA, 15 bp, Homo sapiens
ccttgtcagttagcc

SEQ ID NO: 588200 - DNA, 15 bp, Homo sapiens
cttgtcagttagcct

SEQ ID NO: 588201 - DNA, 15 bp, Homo sapiens
ttgtcagttagccta

SEQ ID NO: 588202 - DNA, 15 bp, Homo sapiens
tgtcagttagcctat

SEQ ID NO: 588203 - DNA, 15 bp, Homo sapiens
gtcagttagcctata

SEQ ID NO: 588204 - DNA, 15 bp, Homo sapiens
tcagttagcctatat

SEQ ID NO: 588205 - DNA, 15 bp, Homo sapiens
cagttagcctatatg

SEQ ID NO: 588206 - DNA, 15 bp, Homo sapiens
agttagcctatatgt

SEQ ID NO: 588207 - DNA, 15 bp, Homo sapiens
gttagcctatatgta

SEQ ID NO: 588208 - DNA, 15 bp, Homo sapiens
ttagcctatatgtac

SEQ ID NO: 588209 - DNA, 15 bp, Homo sapiens
tagcctatatgtaca

SEQ ID NO: 588210 - DNA, 15 bp, Homo sapiens
agcctatatgtacaa

SEQ ID NO: 588211 - DNA, 15 bp, Homo sapiens
gcctatatgtacaag

SEQ ID NO: 588212 - DNA, 15 bp, Homo sapiens
cctatatgtacaagg

SEQ ID NO: 588213 - DNA, 15 bp, Homo sapiens
ctatatgtacaagga

SEQ ID NO: 588214 - DNA, 15 bp, Homo sapiens
tatatgtacaaggaa

SEQ ID NO: 588215 - DNA, 15 bp, Homo sapiens
atatgtacaaggaag

SEQ ID NO: 588216 - DNA, 15 bp, Homo sapiens
tatgtacaaggaagt

SEQ ID NO: 588217 - DNA, 15 bp, Homo sapiens
atgtacaaggaagta

SEQ ID NO: 588218 - DNA, 15 bp, Homo sapiens
tgtacaaggaagtaa

SEQ ID NO: 588219 - DNA, 15 bp, Homo sapiens
gtacaaggaagtaaa

SEQ ID NO: 588220 - DNA, 15 bp, Homo sapiens
tacaaggaagtaaaa

SEQ ID NO: 588221 - DNA, 15 bp, Homo sapiens
acaaggaagtaaaat

SEQ ID NO: 588222 - DNA, 15 bp, Homo sapiens
caaggaagtaaaatt

SEQ ID NO: 588223 - DNA, 15 bp, Homo sapiens
aaggaagtaaaatta

SEQ ID NO: 588224 - DNA, 15 bp, Homo sapiens
aggaagtaaaattat

SEQ ID NO: 588225 - DNA, 15 bp, Homo sapiens
ggaagtaaaattatc

SEQ ID NO: 588226 - DNA, 15 bp, Homo sapiens
gaagtaaaattatct

SEQ ID NO: 588227 - DNA, 15 bp, Homo sapiens
aagtaaaattatctc

SEQ ID NO: 588228 - DNA, 15 bp, Homo sapiens
agtaaaattatctct

SEQ ID NO: 588229 - DNA, 15 bp, Homo sapiens
gtaaaattatctctt

SEQ ID NO: 588230 - DNA, 15 bp, Homo sapiens
taaaattatctcttt

SEQ ID NO: 588231 - DNA, 15 bp, Homo sapiens
aaaattatctctttc

SEQ ID NO: 588232 - DNA, 15 bp, Homo sapiens
aaattatctctttct

SEQ ID NO: 588233 - DNA, 15 bp, Homo sapiens
aattatctctttctc

SEQ ID NO: 588234 - DNA, 15 bp, Homo sapiens
attatctctttctcc

SEQ ID NO: 588235 - DNA, 15 bp, Homo sapiens
ttatctctttctcct

SEQ ID NO: 588236 - DNA, 15 bp, Homo sapiens
tatctctttctcctg

SEQ ID NO: 588237 - DNA, 15 bp, Homo sapiens
atctctttctcctgc

SEQ ID NO: 588238 - DNA, 15 bp, Homo sapiens
tctctttctcctgcc

SEQ ID NO: 588239 - DNA, 15 bp, Homo sapiens
ctctttctcctgcct

SEQ ID NO: 588240 - DNA, 15 bp, Homo sapiens
tctttctcctgcctt

SEQ ID NO: 588241 - DNA, 15 bp, Homo sapiens
ctttctcctgccttg

SEQ ID NO: 588242 - DNA, 15 bp, Homo sapiens
tttctcctgccttgg

SEQ ID NO: 588243 - DNA, 15 bp, Homo sapiens
ttctcctgccttggc

SEQ ID NO: 588244 - DNA, 15 bp, Homo sapiens
tctcctgccttggca

SEQ ID NO: 588245 - DNA, 15 bp, Homo sapiens
ctcctgccttggcag

SEQ ID NO: 588246 - DNA, 15 bp, Homo sapiens
tcctgccttggcagt

SEQ ID NO: 588247 - DNA, 15 bp, Homo sapiens
cctgccttggcagta

SEQ ID NO: 588248 - DNA, 15 bp, Homo sapiens
ctgccttggcagtat

SEQ ID NO: 588249 - DNA, 15 bp, Homo sapiens
tgccttggcagtatt

SEQ ID NO: 588250 - DNA, 15 bp, Homo sapiens
gccttggcagtattg

SEQ ID NO: 588251 - DNA, 15 bp, Homo sapiens
ccttggcagtattgt

SEQ ID NO: 588252 - DNA, 15 bp, Homo sapiens
cttggcagtattgta

SEQ ID NO: 588253 - DNA, 15 bp, Homo sapiens
ttggcagtattgtaa

SEQ ID NO: 588254 - DNA, 15 bp, Homo sapiens
tggcagtattgtaag

SEQ ID NO: 588255 - DNA, 15 bp, Homo sapiens
ggcagtattgtaagg

SEQ ID NO: 588256 - DNA, 15 bp, Homo sapiens
gcagtattgtaagga

SEQ ID NO: 588257 - DNA, 15 bp, Homo sapiens
cagtattgtaaggat

SEQ ID NO: 588258 - DNA, 15 bp, Homo sapiens
agtattgtaaggata

SEQ ID NO: 588259 - DNA, 15 bp, Homo sapiens
gtattgtaaggatac

SEQ ID NO: 588260 - DNA, 15 bp, Homo sapiens
tattgtaaggatact

SEQ ID NO: 588261 - DNA, 15 bp, Homo sapiens
attgtaaggatactc

SEQ ID NO: 588262 - DNA, 15 bp, Homo sapiens
ttgtaaggatactca

SEQ ID NO: 588263 - DNA, 15 bp, Homo sapiens
tgtaaggatactcaa

SEQ ID NO: 588264 - DNA, 15 bp, Homo sapiens
gtaaggatactcaat

SEQ ID NO: 588265 - DNA, 15 bp, Homo sapiens
taaggatactcaatg

SEQ ID NO: 588266 - DNA, 15 bp, Homo sapiens
aaggatactcaatgt

SEQ ID NO: 588267 - DNA, 15 bp, Homo sapiens
aggatactcaatgta

SEQ ID NO: 588268 - DNA, 15 bp, Homo sapiens
ggatactcaatgtag

SEQ ID NO: 588269 - DNA, 15 bp, Homo sapiens
gatactcaatgtagt

SEQ ID NO: 588270 - DNA, 15 bp, Homo sapiens
atactcaatgtagta

SEQ ID NO: 588271 - DNA, 15 bp, Homo sapiens
tactcaatgtagtag

SEQ ID NO: 588272 - DNA, 15 bp, Homo sapiens
actcaatgtagtagc

SEQ ID NO: 588273 - DNA, 15 bp, Homo sapiens
ctcaatgtagtagct

SEQ ID NO: 588274 - DNA, 15 bp, Homo sapiens
tcaatgtagtagcta

SEQ ID NO: 588275 - DNA, 15 bp, Homo sapiens
caatgtagtagctag

SEQ ID NO: 588276 - DNA, 15 bp, Homo sapiens
aatgtagtagctagg

SEQ ID NO: 588277 - DNA, 15 bp, Homo sapiens
atgtagtagctaggc

SEQ ID NO: 588278 - DNA, 15 bp, Homo sapiens
tgtagtagctaggcc

SEQ ID NO: 588279 - DNA, 15 bp, Homo sapiens
gtagtagctaggcca

SEQ ID NO: 588280 - DNA, 15 bp, Homo sapiens
tagtagctaggccag

SEQ ID NO: 588281 - DNA, 15 bp, Homo sapiens
agtagctaggccaga

SEQ ID NO: 588282 - DNA, 15 bp, Homo sapiens
gtagctaggccagac

SEQ ID NO: 588283 - DNA, 15 bp, Homo sapiens
tagctaggccagaca

SEQ ID NO: 588284 - DNA, 15 bp, Homo sapiens
agctaggccagacac

SEQ ID NO: 588285 - DNA, 15 bp, Homo sapiens
gctaggccagacaca

SEQ ID NO: 588286 - DNA, 15 bp, Homo sapiens
ctaggccagacacat

SEQ ID NO: 588287 - DNA, 15 bp, Homo sapiens
taggccagacacata

SEQ ID NO: 588288 - DNA, 15 bp, Homo sapiens
aggccagacacatag

SEQ ID NO: 588289 - DNA, 15 bp, Homo sapiens
ggccagacacatagt

SEQ ID NO: 588290 - DNA, 15 bp, Homo sapiens
gccagacacatagta

SEQ ID NO: 588291 - DNA, 15 bp, Homo sapiens
ccagacacatagtat

SEQ ID NO: 588292 - DNA, 15 bp, Homo sapiens
cagacacatagtatc

SEQ ID NO: 588293 - DNA, 15 bp, Homo sapiens
agacacatagtatct

SEQ ID NO: 588294 - DNA, 15 bp, Homo sapiens
gacacatagtatctt

SEQ ID NO: 588295 - DNA, 15 bp, Homo sapiens
acacatagtatcttt

SEQ ID NO: 588296 - DNA, 15 bp, Homo sapiens
cacatagtatcttta

SEQ ID NO: 588297 - DNA, 15 bp, Homo sapiens
acatagtatctttaa

SEQ ID NO: 588298 - DNA, 15 bp, Homo sapiens
catagtatctttaaa

SEQ ID NO: 588299 - DNA, 15 bp, Homo sapiens
atagtatctttaaat

SEQ ID NO: 588300 - DNA, 15 bp, Homo sapiens
tagtatctttaaata

SEQ ID NO: 588301 - DNA, 15 bp, Homo sapiens
agtatctttaaatat

SEQ ID NO: 588302 - DNA, 15 bp, Homo sapiens
gtatctttaaatata

SEQ ID NO: 588303 - DNA, 15 bp, Homo sapiens
tatctttaaatatag

SEQ ID NO: 588304 - DNA, 15 bp, Homo sapiens
atctttaaatatagc

SEQ ID NO: 588305 - DNA, 15 bp, Homo sapiens
tctttaaatatagca

SEQ ID NO: 588306 - DNA, 15 bp, Homo sapiens
ctttaaatatagcat

SEQ ID NO: 588307 - DNA, 15 bp, Homo sapiens
tttaaatatagcatg

SEQ ID NO: 588308 - DNA, 15 bp, Homo sapiens
ttaaatatagcatga

SEQ ID NO: 588309 - DNA, 15 bp, Homo sapiens
taaatatagcatgag

SEQ ID NO: 588310 - DNA, 15 bp, Homo sapiens
aaatatagcatgaga

SEQ ID NO: 588311 - DNA, 15 bp, Homo sapiens
aatatagcatgagat

SEQ ID NO: 588312 - DNA, 15 bp, Homo sapiens
atatagcatgagatg

SEQ ID NO: 588313 - DNA, 15 bp, Homo sapiens
tatagcatgagatgg

SEQ ID NO: 588314 - DNA, 15 bp, Homo sapiens
atagcatgagatggc

SEQ ID NO: 588315 - DNA, 15 bp, Homo sapiens
tagcatgagatggcc

SEQ ID NO: 588316 - DNA, 15 bp, Homo sapiens
agcatgagatggcca

SEQ ID NO: 588317 - DNA, 15 bp, Homo sapiens
gcatgagatggccaa

SEQ ID NO: 588318 - DNA, 15 bp, Homo sapiens
catgagatggccaag

SEQ ID NO: 588319 - DNA, 15 bp, Homo sapiens
atgagatggccaagc

SEQ ID NO: 588320 - DNA, 15 bp, Homo sapiens
tgagatggccaagca

SEQ ID NO: 588321 - DNA, 15 bp, Homo sapiens
gagatggccaagcac

SEQ ID NO: 588322 - DNA, 15 bp, Homo sapiens
agatggccaagcacg

SEQ ID NO: 588323 - DNA, 15 bp, Homo sapiens
gatggccaagcacgg

SEQ ID NO: 588324 - DNA, 15 bp, Homo sapiens
atggccaagcacggt

SEQ ID NO: 588325 - DNA, 15 bp, Homo sapiens
tggccaagcacggtg

SEQ ID NO: 588326 - DNA, 15 bp, Homo sapiens
ggccaagcacggtgg

SEQ ID NO: 588327 - DNA, 15 bp, Homo sapiens
gccaagcacggtggc

SEQ ID NO: 588328 - DNA, 15 bp, Homo sapiens
ccaagcacggtggct

SEQ ID NO: 588329 - DNA, 15 bp, Homo sapiens
caagcacggtggctc

SEQ ID NO: 588330 - DNA, 15 bp, Homo sapiens
aagcacggtggctca

SEQ ID NO: 588331 - DNA, 15 bp, Homo sapiens
agcacggtggctcat

SEQ ID NO: 588332 - DNA, 15 bp, Homo sapiens
gcacggtggctcatg

SEQ ID NO: 588333 - DNA, 15 bp, Homo sapiens
cacggtggctcatgc

SEQ ID NO: 588334 - DNA, 15 bp, Homo sapiens
acggtggctcatgcc

SEQ ID NO: 588335 - DNA, 15 bp, Homo sapiens
cggtggctcatgcct

SEQ ID NO: 588336 - DNA, 15 bp, Homo sapiens
ggtggctcatgcctg

SEQ ID NO: 588337 - DNA, 15 bp, Homo sapiens
gtggctcatgcctgt

SEQ ID NO: 588338 - DNA, 15 bp, Homo sapiens
tggctcatgcctgta

SEQ ID NO: 588339 - DNA, 15 bp, Homo sapiens
ggctcatgcctgtaa

SEQ ID NO: 588340 - DNA, 15 bp, Homo sapiens
gctcatgcctgtaat

SEQ ID NO: 588341 - DNA, 15 bp, Homo sapiens
ctcatgcctgtaatc

SEQ ID NO: 588342 - DNA, 15 bp, Homo sapiens
tcatgcctgtaatcc

SEQ ID NO: 588343 - DNA, 15 bp, Homo sapiens
catgcctgtaatccc

SEQ ID NO: 588344 - DNA, 15 bp, Homo sapiens
atgcctgtaatccca

SEQ ID NO: 588345 - DNA, 15 bp, Homo sapiens
tgggaggctgaggcg

SEQ ID NO: 588346 - DNA, 15 bp, Homo sapiens
gggaggctgaggcgg

SEQ ID NO: 588347 - DNA, 15 bp, Homo sapiens
ggaggctgaggcggg

SEQ ID NO: 588348 - DNA, 15 bp, Homo sapiens
gaggctgaggcgggt

SEQ ID NO: 588349 - DNA, 15 bp, Homo sapiens
aggctgaggcgggtg

SEQ ID NO: 588350 - DNA, 15 bp, Homo sapiens
ggctgaggcgggtgg

SEQ ID NO: 588351 - DNA, 15 bp, Homo sapiens
gctgaggcgggtgga

SEQ ID NO: 588352 - DNA, 15 bp, Homo sapiens
ctgaggcgggtggat

SEQ ID NO: 588353 - DNA, 15 bp, Homo sapiens
tgaggcgggtggatc

SEQ ID NO: 588354 - DNA, 15 bp, Homo sapiens
gaggcgggtggatca

SEQ ID NO: 588355 - DNA, 15 bp, Homo sapiens
aggcgggtggatcac

SEQ ID NO: 588356 - DNA, 15 bp, Homo sapiens
ggcgggtggatcacg

SEQ ID NO: 588357 - DNA, 15 bp, Homo sapiens
gcgggtggatcacga

SEQ ID NO: 588358 - DNA, 15 bp, Homo sapiens
cgggtggatcacgag

SEQ ID NO: 588359 - DNA, 15 bp, Homo sapiens
gggtggatcacgagg

SEQ ID NO: 588360 - DNA, 15 bp, Homo sapiens
ggtggatcacgaggt

SEQ ID NO: 588361 - DNA, 15 bp, Homo sapiens
gtggatcacgaggtc

SEQ ID NO: 588362 - DNA, 15 bp, Homo sapiens
tggatcacgaggtca

SEQ ID NO: 588363 - DNA, 15 bp, Homo sapiens
ggatcacgaggtcag

SEQ ID NO: 588364 - DNA, 15 bp, Homo sapiens
gatcacgaggtcagg

SEQ ID NO: 588365 - DNA, 15 bp, Homo sapiens
atcacgaggtcagga

SEQ ID NO: 588366 - DNA, 15 bp, Homo sapiens
tcacgaggtcaggag

SEQ ID NO: 588367 - DNA, 15 bp, Homo sapiens
cacgaggtcaggaga

SEQ ID NO: 588368 - DNA, 15 bp, Homo sapiens
acgaggtcaggagat

SEQ ID NO: 588369 - DNA, 15 bp, Homo sapiens
cgaggtcaggagatc

SEQ ID NO: 588370 - DNA, 15 bp, Homo sapiens
gaggtcaggagatcg

SEQ ID NO: 588371 - DNA, 15 bp, Homo sapiens
catcctggctaacac

SEQ ID NO: 588372 - DNA, 15 bp, Homo sapiens
atcctggctaacacg

SEQ ID NO: 588373 - DNA, 15 bp, Homo sapiens
tcctggctaacacga

SEQ ID NO: 588374 - DNA, 15 bp, Homo sapiens
cctggctaacacgat

SEQ ID NO: 588375 - DNA, 15 bp, Homo sapiens
ctggctaacacgatg

SEQ ID NO: 588376 - DNA, 15 bp, Homo sapiens
tggctaacacgatga

SEQ ID NO: 588377 - DNA, 15 bp, Homo sapiens
ggctaacacgatgaa

SEQ ID NO: 588378 - DNA, 15 bp, Homo sapiens
gctaacacgatgaag

SEQ ID NO: 588379 - DNA, 15 bp, Homo sapiens
ctaacacgatgaagc

SEQ ID NO: 588380 - DNA, 15 bp, Homo sapiens
taacacgatgaagcc

SEQ ID NO: 588381 - DNA, 15 bp, Homo sapiens
aacacgatgaagccc

SEQ ID NO: 588382 - DNA, 15 bp, Homo sapiens
acacgatgaagcccc

SEQ ID NO: 588383 - DNA, 15 bp, Homo sapiens
cacgatgaagccccg

SEQ ID NO: 588384 - DNA, 15 bp, Homo sapiens
acgatgaagccccgt

SEQ ID NO: 588385 - DNA, 15 bp, Homo sapiens
cgatgaagccccgtc

SEQ ID NO: 588386 - DNA, 15 bp, Homo sapiens
gatgaagccccgtct

SEQ ID NO: 588387 - DNA, 15 bp, Homo sapiens
atgaagccccgtctc

SEQ ID NO: 588388 - DNA, 15 bp, Homo sapiens
tgaagccccgtctct

SEQ ID NO: 588389 - DNA, 15 bp, Homo sapiens
gaagccccgtctcta

SEQ ID NO: 588390 - DNA, 15 bp, Homo sapiens
aagccccgtctctac

SEQ ID NO: 588391 - DNA, 15 bp, Homo sapiens
agccccgtctctact

SEQ ID NO: 588392 - DNA, 15 bp, Homo sapiens
gccccgtctctacta

SEQ ID NO: 588393 - DNA, 15 bp, Homo sapiens
ctctactaaaaatat

SEQ ID NO: 588394 - DNA, 15 bp, Homo sapiens
tctactaaaaatata

SEQ ID NO: 588395 - DNA, 15 bp, Homo sapiens
ctactaaaaatataa

SEQ ID NO: 588396 - DNA, 15 bp, Homo sapiens
tactaaaaatataaa

SEQ ID NO: 588397 - DNA, 15 bp, Homo sapiens
actaaaaatataaaa

SEQ ID NO: 588398 - DNA, 15 bp, Homo sapiens
ctaaaaatataaaaa

SEQ ID NO: 588399 - DNA, 15 bp, Homo sapiens
taaaaatataaaaaa

SEQ ID NO: 588400 - DNA, 15 bp, Homo sapiens
aaaaatataaaaaat

SEQ ID NO: 588401 - DNA, 15 bp, Homo sapiens
aaaatataaaaaatt

SEQ ID NO: 588402 - DNA, 15 bp, Homo sapiens
aaatataaaaaatta

SEQ ID NO: 588403 - DNA, 15 bp, Homo sapiens
aatataaaaaattag

SEQ ID NO: 588404 - DNA, 15 bp, Homo sapiens
atataaaaaattagc

SEQ ID NO: 588405 - DNA, 15 bp, Homo sapiens
tataaaaaattagct

SEQ ID NO: 588406 - DNA, 15 bp, Homo sapiens
ataaaaaattagctg

SEQ ID NO: 588407 - DNA, 15 bp, Homo sapiens
taaaaaattagctgg

SEQ ID NO: 588408 - DNA, 15 bp, Homo sapiens
aaaaaattagctggg

SEQ ID NO: 588409 - DNA, 15 bp, Homo sapiens
aaaaattagctgggt

SEQ ID NO: 588410 - DNA, 15 bp, Homo sapiens
aaaattagctgggtg

SEQ ID NO: 588411 - DNA, 15 bp, Homo sapiens
aaattagctgggtgt

SEQ ID NO: 588412 - DNA, 15 bp, Homo sapiens
aattagctgggtgtg

SEQ ID NO: 588413 - DNA, 15 bp, Homo sapiens
attagctgggtgtgg

SEQ ID NO: 588414 - DNA, 15 bp, Homo sapiens
ttagctgggtgtggt

SEQ ID NO: 588415 - DNA, 15 bp, Homo sapiens
tagctgggtgtggtg

SEQ ID NO: 588416 - DNA, 15 bp, Homo sapiens
agctgggtgtggtgg

SEQ ID NO: 588417 - DNA, 15 bp, Homo sapiens
gctgggtgtggtggc

SEQ ID NO: 588418 - DNA, 15 bp, Homo sapiens
ctgggtgtggtggcg

SEQ ID NO: 588419 - DNA, 15 bp, Homo sapiens
tgggtgtggtggcgg

SEQ ID NO: 588420 - DNA, 15 bp, Homo sapiens
gggtgtggtggcggg

SEQ ID NO: 588421 - DNA, 15 bp, Homo sapiens
ggtgtggtggcgggc

SEQ ID NO: 588422 - DNA, 15 bp, Homo sapiens
gtgtggtggcgggcg

SEQ ID NO: 588423 - DNA, 15 bp, Homo sapiens
tgtggtggcgggcgc

SEQ ID NO: 588424 - DNA, 15 bp, Homo sapiens
gtggtggcgggcgcc

SEQ ID NO: 588425 - DNA, 15 bp, Homo sapiens
tggtggcgggcgcct

SEQ ID NO: 588426 - DNA, 15 bp, Homo sapiens
ggtggcgggcgcctg

SEQ ID NO: 588427 - DNA, 15 bp, Homo sapiens
gtggcgggcgcctgt

SEQ ID NO: 588428 - DNA, 15 bp, Homo sapiens
tggcgggcgcctgta

SEQ ID NO: 588429 - DNA, 15 bp, Homo sapiens
ggcgggcgcctgtag

SEQ ID NO: 588430 - DNA, 15 bp, Homo sapiens
gcgggcgcctgtagt

SEQ ID NO: 588431 - DNA, 15 bp, Homo sapiens
cgggcgcctgtagtc

SEQ ID NO: 588432 - DNA, 15 bp, Homo sapiens
gggcgcctgtagtcc

SEQ ID NO: 588433 - DNA, 15 bp, Homo sapiens
ggcgcctgtagtccc

SEQ ID NO: 588434 - DNA, 15 bp, Homo sapiens
gcgcctgtagtccca

SEQ ID NO: 588435 - DNA, 15 bp, Homo sapiens
cgcctgtagtcccag

SEQ ID NO: 588436 - DNA, 15 bp, Homo sapiens
gcctgtagtcccagc

SEQ ID NO: 588437 - DNA, 15 bp, Homo sapiens
cctgtagtcccagct

SEQ ID NO: 588438 - DNA, 15 bp, Homo sapiens
ctgtagtcccagcta

SEQ ID NO: 588439 - DNA, 15 bp, Homo sapiens
tgtagtcccagctac

SEQ ID NO: 588440 - DNA, 15 bp, Homo sapiens
gtagtcccagctact

SEQ ID NO: 588441 - DNA, 15 bp, Homo sapiens
tagtcccagctactc

SEQ ID NO: 588442 - DNA, 15 bp, Homo sapiens
agtcccagctactcg

SEQ ID NO: 588443 - DNA, 15 bp, Homo sapiens
gtcccagctactcgg

SEQ ID NO: 588444 - DNA, 15 bp, Homo sapiens
tcccagctactcggg

SEQ ID NO: 588445 - DNA, 15 bp, Homo sapiens
cccagctactcggga

SEQ ID NO: 588446 - DNA, 15 bp, Homo sapiens
ccagctactcgggag

SEQ ID NO: 588447 - DNA, 15 bp, Homo sapiens
cagctactcgggagg

SEQ ID NO: 588448 - DNA, 15 bp, Homo sapiens
agctactcgggaggc

SEQ ID NO: 588449 - DNA, 15 bp, Homo sapiens
gctactcgggaggct

SEQ ID NO: 588450 - DNA, 15 bp, Homo sapiens
ctactcgggaggctg

SEQ ID NO: 588451 - DNA, 15 bp, Homo sapiens
tactcgggaggctga

SEQ ID NO: 588452 - DNA, 15 bp, Homo sapiens
actcgggaggctgag

SEQ ID NO: 588453 - DNA, 15 bp, Homo sapiens
ctcgggaggctgagg

SEQ ID NO: 588454 - DNA, 15 bp, Homo sapiens
tcgggaggctgaggc

SEQ ID NO: 588455 - DNA, 15 bp, Homo sapiens
cgggaggctgaggca

SEQ ID NO: 588456 - DNA, 15 bp, Homo sapiens
tgaggcaggagaata

SEQ ID NO: 588457 - DNA, 15 bp, Homo sapiens
gaggcaggagaatag

SEQ ID NO: 588458 - DNA, 15 bp, Homo sapiens
aggcaggagaatagc

SEQ ID NO: 588459 - DNA, 15 bp, Homo sapiens
ggcaggagaatagcg

SEQ ID NO: 588460 - DNA, 15 bp, Homo sapiens
gcaggagaatagcgt

SEQ ID NO: 588461 - DNA, 15 bp, Homo sapiens
caggagaatagcgtg

SEQ ID NO: 588462 - DNA, 15 bp, Homo sapiens
aggagaatagcgtga

SEQ ID NO: 588463 - DNA, 15 bp, Homo sapiens
ggagaatagcgtgaa

SEQ ID NO: 588464 - DNA, 15 bp, Homo sapiens
gagaatagcgtgaac

SEQ ID NO: 588465 - DNA, 15 bp, Homo sapiens
agaatagcgtgaacc

SEQ ID NO: 588466 - DNA, 15 bp, Homo sapiens
gaatagcgtgaaccc

SEQ ID NO: 588467 - DNA, 15 bp, Homo sapiens
aatagcgtgaacccg

SEQ ID NO: 588468 - DNA, 15 bp, Homo sapiens
atagcgtgaacccgg

SEQ ID NO: 588469 - DNA, 15 bp, Homo sapiens
tagcgtgaacccggg

SEQ ID NO: 588470 - DNA, 15 bp, Homo sapiens
agcgtgaacccgggg

SEQ ID NO: 588471 - DNA, 15 bp, Homo sapiens
gcgtgaacccggggg

SEQ ID NO: 588472 - DNA, 15 bp, Homo sapiens
cgtgaacccgggggg

SEQ ID NO: 588473 - DNA, 15 bp, Homo sapiens
gtgaacccggggggc

SEQ ID NO: 588474 - DNA, 15 bp, Homo sapiens
tgaacccggggggca

SEQ ID NO: 588475 - DNA, 15 bp, Homo sapiens
gaacccggggggcag

SEQ ID NO: 588476 - DNA, 15 bp, Homo sapiens
aacccggggggcaga

SEQ ID NO: 588477 - DNA, 15 bp, Homo sapiens
acccggggggcagag

SEQ ID NO: 588478 - DNA, 15 bp, Homo sapiens
cccggggggcagagc

SEQ ID NO: 588479 - DNA, 15 bp, Homo sapiens
ccggggggcagagct

SEQ ID NO: 588480 - DNA, 15 bp, Homo sapiens
cggggggcagagctt

SEQ ID NO: 588481 - DNA, 15 bp, Homo sapiens
ggggggcagagcttg

SEQ ID NO: 588482 - DNA, 15 bp, Homo sapiens
gggggcagagcttgc

SEQ ID NO: 588483 - DNA, 15 bp, Homo sapiens
ggggcagagcttgca

SEQ ID NO: 588484 - DNA, 15 bp, Homo sapiens
gggcagagcttgcag

SEQ ID NO: 588485 - DNA, 15 bp, Homo sapiens
gcttgcagtgagccg

SEQ ID NO: 588486 - DNA, 15 bp, Homo sapiens
cttgcagtgagccga

SEQ ID NO: 588487 - DNA, 15 bp, Homo sapiens
ttgcagtgagccgag

SEQ ID NO: 588488 - DNA, 15 bp, Homo sapiens
tgcagtgagccgaga

SEQ ID NO: 588489 - DNA, 15 bp, Homo sapiens
gcagtgagccgagat

SEQ ID NO: 588490 - DNA, 15 bp, Homo sapiens
cagtgagccgagatc

SEQ ID NO: 588491 - DNA, 15 bp, Homo sapiens
agtgagccgagatca

SEQ ID NO: 588492 - DNA, 15 bp, Homo sapiens
gtgagccgagatcac

SEQ ID NO: 588493 - DNA, 15 bp, Homo sapiens
tgagccgagatcacg

SEQ ID NO: 588494 - DNA, 15 bp, Homo sapiens
gagccgagatcacgc

SEQ ID NO: 588495 - DNA, 15 bp, Homo sapiens
agccgagatcacgcc

SEQ ID NO: 588496 - DNA, 15 bp, Homo sapiens
gccgagatcacgcca

SEQ ID NO: 588497 - DNA, 15 bp, Homo sapiens
ccgagatcacgccac

SEQ ID NO: 588498 - DNA, 15 bp, Homo sapiens
cgagatcacgccact

SEQ ID NO: 588499 - DNA, 15 bp, Homo sapiens
gagatcacgccactg

SEQ ID NO: 588500 - DNA, 15 bp, Homo sapiens
agatcacgccactgc

SEQ ID NO: 588501 - DNA, 15 bp, Homo sapiens
gatcacgccactgca

SEQ ID NO: 588502 - DNA, 15 bp, Homo sapiens
atcacgccactgcac

SEQ ID NO: 588503 - DNA, 15 bp, Homo sapiens
tcacgccactgcact

SEQ ID NO: 588504 - DNA, 15 bp, Homo sapiens
cacgccactgcactc

SEQ ID NO: 588505 - DNA, 15 bp, Homo sapiens
acgccactgcactcc

SEQ ID NO: 588506 - DNA, 15 bp, Homo sapiens
cgccactgcactcca

SEQ ID NO: 588507 - DNA, 15 bp, Homo sapiens
cactccagcctgggt

SEQ ID NO: 588508 - DNA, 15 bp, Homo sapiens
actccagcctgggtg

SEQ ID NO: 588509 - DNA, 15 bp, Homo sapiens
ctccagcctgggtga

SEQ ID NO: 588510 - DNA, 15 bp, Homo sapiens
tccagcctgggtgac

SEQ ID NO: 588511 - DNA, 15 bp, Homo sapiens
ccagcctgggtgaca

SEQ ID NO: 588512 - DNA, 15 bp, Homo sapiens
cagcctgggtgacag

SEQ ID NO: 588513 - DNA, 15 bp, Homo sapiens
agcctgggtgacaga

SEQ ID NO: 588514 - DNA, 15 bp, Homo sapiens
gcctgggtgacagag

SEQ ID NO: 588515 - DNA, 15 bp, Homo sapiens
cctgggtgacagagc

SEQ ID NO: 588516 - DNA, 15 bp, Homo sapiens
ctgggtgacagagcg

SEQ ID NO: 588517 - DNA, 15 bp, Homo sapiens
tgggtgacagagcga

SEQ ID NO: 588518 - DNA, 15 bp, Homo sapiens
gggtgacagagcgag

SEQ ID NO: 588519 - DNA, 15 bp, Homo sapiens
ggtgacagagcgaga

SEQ ID NO: 588520 - DNA, 15 bp, Homo sapiens
gtgacagagcgagat

SEQ ID NO: 588521 - DNA, 15 bp, Homo sapiens
tgacagagcgagata

SEQ ID NO: 588522 - DNA, 15 bp, Homo sapiens
gacagagcgagataa

SEQ ID NO: 588523 - DNA, 15 bp, Homo sapiens
acagagcgagataaa

SEQ ID NO: 588524 - DNA, 15 bp, Homo sapiens
cagagcgagataaaa

SEQ ID NO: 588525 - DNA, 15 bp, Homo sapiens
agagcgagataaaaa

SEQ ID NO: 588526 - DNA, 15 bp, Homo sapiens
gagcgagataaaaaa

SEQ ID NO: 588527 - DNA, 15 bp, Homo sapiens
agcgagataaaaaaa

SEQ ID NO: 588528 - DNA, 15 bp, Homo sapiens
gcgagataaaaaaaa

SEQ ID NO: 588529 - DNA, 15 bp, Homo sapiens
cgagataaaaaaaaa

SEQ ID NO: 588530 - DNA, 15 bp, Homo sapiens
gagataaaaaaaaaa

SEQ ID NO: 588531 - DNA, 15 bp, Homo sapiens
agataaaaaaaaaaa

SEQ ID NO: 588532 - DNA, 15 bp, Homo sapiens
gataaaaaaaaaaaa

SEQ ID NO: 588533 - DNA, 15 bp, Homo sapiens
ataaaaaaaaaaaat

SEQ ID NO: 588534 - DNA, 15 bp, Homo sapiens
taaaaaaaaaaaata

SEQ ID NO: 588535 - DNA, 15 bp, Homo sapiens
aaaaaaaaaaaatag

SEQ ID NO: 588536 - DNA, 15 bp, Homo sapiens
aaaaaaaaaaatagc

SEQ ID NO: 588537 - DNA, 15 bp, Homo sapiens
aaaaaaaaaatagca

SEQ ID NO: 588538 - DNA, 15 bp, Homo sapiens
aaaaaaaaatagcat

SEQ ID NO: 588539 - DNA, 15 bp, Homo sapiens
aaaaaaaatagcatg

SEQ ID NO: 588540 - DNA, 15 bp, Homo sapiens
aaaaaaatagcatga

SEQ ID NO: 588541 - DNA, 15 bp, Homo sapiens
aaaaaatagcatgag

SEQ ID NO: 588542 - DNA, 15 bp, Homo sapiens
aaaaatagcatgaga

SEQ ID NO: 588543 - DNA, 15 bp, Homo sapiens
aaaatagcatgagat

SEQ ID NO: 588544 - DNA, 15 bp, Homo sapiens
aaatagcatgagata

SEQ ID NO: 588545 - DNA, 15 bp, Homo sapiens
aatagcatgagatat

SEQ ID NO: 588546 - DNA, 15 bp, Homo sapiens
atagcatgagatatt

SEQ ID NO: 588547 - DNA, 15 bp, Homo sapiens
tagcatgagatatta

SEQ ID NO: 588548 - DNA, 15 bp, Homo sapiens
agcatgagatattat

SEQ ID NO: 588549 - DNA, 15 bp, Homo sapiens
gcatgagatattatt

SEQ ID NO: 588550 - DNA, 15 bp, Homo sapiens
catgagatattatta

SEQ ID NO: 588551 - DNA, 15 bp, Homo sapiens
atgagatattattac

SEQ ID NO: 588552 - DNA, 15 bp, Homo sapiens
tgagatattattact

SEQ ID NO: 588553 - DNA, 15 bp, Homo sapiens
gagatattattactg

SEQ ID NO: 588554 - DNA, 15 bp, Homo sapiens
agatattattactgt

SEQ ID NO: 588555 - DNA, 15 bp, Homo sapiens
gatattattactgtt

SEQ ID NO: 588556 - DNA, 15 bp, Homo sapiens
atattattactgtta

SEQ ID NO: 588557 - DNA, 15 bp, Homo sapiens
tattattactgttat

SEQ ID NO: 588558 - DNA, 15 bp, Homo sapiens
attattactgttata

SEQ ID NO: 588559 - DNA, 15 bp, Homo sapiens
ttattactgttataa

SEQ ID NO: 588560 - DNA, 15 bp, Homo sapiens
tattactgttataaa

SEQ ID NO: 588561 - DNA, 15 bp, Homo sapiens
attactgttataaaa

SEQ ID NO: 588562 - DNA, 15 bp, Homo sapiens
ttactgttataaaaa

SEQ ID NO: 588563 - DNA, 15 bp, Homo sapiens
tactgttataaaaat

SEQ ID NO: 588564 - DNA, 15 bp, Homo sapiens
actgttataaaaata

SEQ ID NO: 588565 - DNA, 15 bp, Homo sapiens
ctgttataaaaataa

SEQ ID NO: 588566 - DNA, 15 bp, Homo sapiens
tgttataaaaataac

SEQ ID NO: 588567 - DNA, 15 bp, Homo sapiens
gttataaaaataaca

SEQ ID NO: 588568 - DNA, 15 bp, Homo sapiens
ttataaaaataacag

SEQ ID NO: 588569 - DNA, 15 bp, Homo sapiens
tataaaaataacagc

SEQ ID NO: 588570 - DNA, 15 bp, Homo sapiens
ataaaaataacagct

SEQ ID NO: 588571 - DNA, 15 bp, Homo sapiens
taaaaataacagcta

SEQ ID NO: 588572 - DNA, 15 bp, Homo sapiens
aaaaataacagctat

SEQ ID NO: 588573 - DNA, 15 bp, Homo sapiens
aaaataacagctatt

SEQ ID NO: 588574 - DNA, 15 bp, Homo sapiens
aaataacagctattt

SEQ ID NO: 588575 - DNA, 15 bp, Homo sapiens
aataacagctatttc

SEQ ID NO: 588576 - DNA, 15 bp, Homo sapiens
ataacagctatttcc

SEQ ID NO: 588577 - DNA, 15 bp, Homo sapiens
taacagctatttcct

SEQ ID NO: 588578 - DNA, 15 bp, Homo sapiens
aacagctatttcctt

SEQ ID NO: 588579 - DNA, 15 bp, Homo sapiens
acagctatttcctta

SEQ ID NO: 588580 - DNA, 15 bp, Homo sapiens
cagctatttccttat

SEQ ID NO: 588581 - DNA, 15 bp, Homo sapiens
agctatttccttatt

SEQ ID NO: 588582 - DNA, 15 bp, Homo sapiens
gctatttccttatta

SEQ ID NO: 588583 - DNA, 15 bp, Homo sapiens
ctatttccttattaa

SEQ ID NO: 588584 - DNA, 15 bp, Homo sapiens
tatttccttattaat

SEQ ID NO: 588585 - DNA, 15 bp, Homo sapiens
atttccttattaatg

SEQ ID NO: 588586 - DNA, 15 bp, Homo sapiens
tttccttattaatga

SEQ ID NO: 588587 - DNA, 15 bp, Homo sapiens
ttccttattaatgag

SEQ ID NO: 588588 - DNA, 15 bp, Homo sapiens
tccttattaatgagg

SEQ ID NO: 588589 - DNA, 15 bp, Homo sapiens
ccttattaatgaggc

SEQ ID NO: 588590 - DNA, 15 bp, Homo sapiens
cttattaatgaggct

SEQ ID NO: 588591 - DNA, 15 bp, Homo sapiens
ttattaatgaggctt

SEQ ID NO: 588592 - DNA, 15 bp, Homo sapiens
tattaatgaggcttt

SEQ ID NO: 588593 - DNA, 15 bp, Homo sapiens
attaatgaggctttg

SEQ ID NO: 588594 - DNA, 15 bp, Homo sapiens
ttaatgaggctttgt

SEQ ID NO: 588595 - DNA, 15 bp, Homo sapiens
taatgaggctttgtc

SEQ ID NO: 588596 - DNA, 15 bp, Homo sapiens
aatgaggctttgtcc

SEQ ID NO: 588597 - DNA, 15 bp, Homo sapiens
atgaggctttgtcct

SEQ ID NO: 588598 - DNA, 15 bp, Homo sapiens
tgaggctttgtcctt

SEQ ID NO: 588599 - DNA, 15 bp, Homo sapiens
gaggctttgtcctta

SEQ ID NO: 588600 - DNA, 15 bp, Homo sapiens
aggctttgtccttac

SEQ ID NO: 588601 - DNA, 15 bp, Homo sapiens
ggctttgtccttaca

SEQ ID NO: 588602 - DNA, 15 bp, Homo sapiens
gctttgtccttacag

SEQ ID NO: 588603 - DNA, 15 bp, Homo sapiens
ctttgtccttacagc

SEQ ID NO: 588604 - DNA, 15 bp, Homo sapiens
tttgtccttacagct

SEQ ID NO: 588605 - DNA, 15 bp, Homo sapiens
ttgtccttacagctt

SEQ ID NO: 588606 - DNA, 15 bp, Homo sapiens
tgtccttacagcttg

SEQ ID NO: 588607 - DNA, 15 bp, Homo sapiens
gtccttacagcttgg

SEQ ID NO: 588608 - DNA, 15 bp, Homo sapiens
tccttacagcttggc

SEQ ID NO: 588609 - DNA, 15 bp, Homo sapiens
ccttacagcttggca

SEQ ID NO: 588610 - DNA, 15 bp, Homo sapiens
cttacagcttggcaa

SEQ ID NO: 588611 - DNA, 15 bp, Homo sapiens
ttacagcttggcaag

SEQ ID NO: 588612 - DNA, 15 bp, Homo sapiens
tacagcttggcaagg

SEQ ID NO: 588613 - DNA, 15 bp, Homo sapiens
acagcttggcaaggg

SEQ ID NO: 588614 - DNA, 15 bp, Homo sapiens
cagcttggcaagggt

SEQ ID NO: 588615 - DNA, 15 bp, Homo sapiens
agcttggcaagggta

SEQ ID NO: 588616 - DNA, 15 bp, Homo sapiens
gcttggcaagggtat

SEQ ID NO: 588617 - DNA, 15 bp, Homo sapiens
cttggcaagggtata

SEQ ID NO: 588618 - DNA, 15 bp, Homo sapiens
ttggcaagggtatat

SEQ ID NO: 588619 - DNA, 15 bp, Homo sapiens
tggcaagggtatatc

SEQ ID NO: 588620 - DNA, 15 bp, Homo sapiens
ggcaagggtatatcg

SEQ ID NO: 588621 - DNA, 15 bp, Homo sapiens
gcaagggtatatcga

SEQ ID NO: 588622 - DNA, 15 bp, Homo sapiens
caagggtatatcgag

SEQ ID NO: 588623 - DNA, 15 bp, Homo sapiens
aagggtatatcgaga

SEQ ID NO: 588624 - DNA, 15 bp, Homo sapiens
agggtatatcgagat

SEQ ID NO: 588625 - DNA, 15 bp, Homo sapiens
gggtatatcgagatt

SEQ ID NO: 588626 - DNA, 15 bp, Homo sapiens
ggtatatcgagattt

SEQ ID NO: 588627 - DNA, 15 bp, Homo sapiens
gtatatcgagatttt

SEQ ID NO: 588628 - DNA, 15 bp, Homo sapiens
tatatcgagattttc

SEQ ID NO: 588629 - DNA, 15 bp, Homo sapiens
atatcgagattttca

SEQ ID NO: 588630 - DNA, 15 bp, Homo sapiens
tatcgagattttcaa

SEQ ID NO: 588631 - DNA, 15 bp, Homo sapiens
atcgagattttcaag

SEQ ID NO: 588632 - DNA, 15 bp, Homo sapiens
tcgagattttcaaga

SEQ ID NO: 588633 - DNA, 15 bp, Homo sapiens
cgagattttcaagaa

SEQ ID NO: 588634 - DNA, 15 bp, Homo sapiens
gagattttcaagaac

SEQ ID NO: 588635 - DNA, 15 bp, Homo sapiens
agattttcaagaact

SEQ ID NO: 588636 - DNA, 15 bp, Homo sapiens
gattttcaagaactc

SEQ ID NO: 588637 - DNA, 15 bp, Homo sapiens
attttcaagaactcc

SEQ ID NO: 588638 - DNA, 15 bp, Homo sapiens
ttttcaagaactcct

SEQ ID NO: 588639 - DNA, 15 bp, Homo sapiens
tttcaagaactcctc

SEQ ID NO: 588640 - DNA, 15 bp, Homo sapiens
ttcaagaactcctca

SEQ ID NO: 588641 - DNA, 15 bp, Homo sapiens
tcaagaactcctcat

SEQ ID NO: 588642 - DNA, 15 bp, Homo sapiens
caagaactcctcatg

SEQ ID NO: 588643 - DNA, 15 bp, Homo sapiens
aagaactcctcatga

SEQ ID NO: 588644 - DNA, 15 bp, Homo sapiens
agaactcctcatgaa

SEQ ID NO: 588645 - DNA, 15 bp, Homo sapiens
gaactcctcatgaat

SEQ ID NO: 588646 - DNA, 15 bp, Homo sapiens
aactcctcatgaatg

SEQ ID NO: 588647 - DNA, 15 bp, Homo sapiens
actcctcatgaatgc

SEQ ID NO: 588648 - DNA, 15 bp, Homo sapiens
ctcctcatgaatgca

SEQ ID NO: 588649 - DNA, 15 bp, Homo sapiens
tcctcatgaatgcac

SEQ ID NO: 588650 - DNA, 15 bp, Homo sapiens
cctcatgaatgcacc

SEQ ID NO: 588651 - DNA, 15 bp, Homo sapiens
ctcatgaatgcacca

SEQ ID NO: 588652 - DNA, 15 bp, Homo sapiens
tcatgaatgcaccag

SEQ ID NO: 588653 - DNA, 15 bp, Homo sapiens
catgaatgcaccaga

SEQ ID NO: 588654 - DNA, 15 bp, Homo sapiens
atgaatgcaccagag

SEQ ID NO: 588655 - DNA, 15 bp, Homo sapiens
tgaatgcaccagaga

SEQ ID NO: 588656 - DNA, 15 bp, Homo sapiens
gaatgcaccagagag

SEQ ID NO: 588657 - DNA, 15 bp, Homo sapiens
aatgcaccagagagc

SEQ ID NO: 588658 - DNA, 15 bp, Homo sapiens
atgcaccagagagcc

SEQ ID NO: 588659 - DNA, 15 bp, Homo sapiens
tgcaccagagagcca

SEQ ID NO: 588660 - DNA, 15 bp, Homo sapiens
gcaccagagagccag

SEQ ID NO: 588661 - DNA, 15 bp, Homo sapiens
caccagagagccagc

SEQ ID NO: 588662 - DNA, 15 bp, Homo sapiens
accagagagccagca

SEQ ID NO: 588663 - DNA, 15 bp, Homo sapiens
ccagagagccagcac

SEQ ID NO: 588664 - DNA, 15 bp, Homo sapiens
cagagagccagcacc

SEQ ID NO: 588665 - DNA, 15 bp, Homo sapiens
agagagccagcacct

SEQ ID NO: 588666 - DNA, 15 bp, Homo sapiens
gagagccagcacctt

SEQ ID NO: 588667 - DNA, 15 bp, Homo sapiens
agagccagcaccttg

SEQ ID NO: 588668 - DNA, 15 bp, Homo sapiens
gagccagcaccttgg

SEQ ID NO: 588669 - DNA, 15 bp, Homo sapiens
agccagcaccttggc

SEQ ID NO: 588670 - DNA, 15 bp, Homo sapiens
gccagcaccttggcc

SEQ ID NO: 588671 - DNA, 15 bp, Homo sapiens
ccagcaccttggccg

SEQ ID NO: 588672 - DNA, 15 bp, Homo sapiens
cagcaccttggccgt

SEQ ID NO: 588673 - DNA, 15 bp, Homo sapiens
agcaccttggccgta

SEQ ID NO: 588674 - DNA, 15 bp, Homo sapiens
gcaccttggccgtat

SEQ ID NO: 588675 - DNA, 15 bp, Homo sapiens
caccttggccgtatt

SEQ ID NO: 588676 - DNA, 15 bp, Homo sapiens
accttggccgtattt

SEQ ID NO: 588677 - DNA, 15 bp, Homo sapiens
ccttggccgtatttg

SEQ ID NO: 588678 - DNA, 15 bp, Homo sapiens
cttggccgtatttgg

SEQ ID NO: 588679 - DNA, 15 bp, Homo sapiens
ttggccgtatttgga

SEQ ID NO: 588680 - DNA, 15 bp, Homo sapiens
tggccgtatttggac

SEQ ID NO: 588681 - DNA, 15 bp, Homo sapiens
ggccgtatttggaca

SEQ ID NO: 588682 - DNA, 15 bp, Homo sapiens
gccgtatttggacag

SEQ ID NO: 588683 - DNA, 15 bp, Homo sapiens
ccgtatttggacaga

SEQ ID NO: 588684 - DNA, 15 bp, Homo sapiens
cgtatttggacagag

SEQ ID NO: 588685 - DNA, 15 bp, Homo sapiens
gtatttggacagagc

SEQ ID NO: 588686 - DNA, 15 bp, Homo sapiens
tatttggacagagct

SEQ ID NO: 588687 - DNA, 15 bp, Homo sapiens
atttggacagagcta

SEQ ID NO: 588688 - DNA, 15 bp, Homo sapiens
tttggacagagctac

SEQ ID NO: 588689 - DNA, 15 bp, Homo sapiens
ttggacagagctaca

SEQ ID NO: 588690 - DNA, 15 bp, Homo sapiens
tggacagagctacac

SEQ ID NO: 588691 - DNA, 15 bp, Homo sapiens
ggacagagctacaca

SEQ ID NO: 588692 - DNA, 15 bp, Homo sapiens
gacagagctacacat

SEQ ID NO: 588693 - DNA, 15 bp, Homo sapiens
acagagctacacatc

SEQ ID NO: 588694 - DNA, 15 bp, Homo sapiens
cagagctacacatct

SEQ ID NO: 588695 - DNA, 15 bp, Homo sapiens
agagctacacatctt

SEQ ID NO: 588696 - DNA, 15 bp, Homo sapiens
gagctacacatcttg

SEQ ID NO: 588697 - DNA, 15 bp, Homo sapiens
agctacacatcttgt

SEQ ID NO: 588698 - DNA, 15 bp, Homo sapiens
gctacacatcttgtc

SEQ ID NO: 588699 - DNA, 15 bp, Homo sapiens
ctacacatcttgtcc

SEQ ID NO: 588700 - DNA, 15 bp, Homo sapiens
tacacatcttgtccc

SEQ ID NO: 588701 - DNA, 15 bp, Homo sapiens
acacatcttgtccca

SEQ ID NO: 588702 - DNA, 15 bp, Homo sapiens
cacatcttgtcccaa

SEQ ID NO: 588703 - DNA, 15 bp, Homo sapiens
acatcttgtcccaat

SEQ ID NO: 588704 - DNA, 15 bp, Homo sapiens
catcttgtcccaatt

SEQ ID NO: 588705 - DNA, 15 bp, Homo sapiens
atcttgtcccaattc

SEQ ID NO: 588706 - DNA, 15 bp, Homo sapiens
tcttgtcccaattca

SEQ ID NO: 588707 - DNA, 15 bp, Homo sapiens
cttgtcccaattcat

SEQ ID NO: 588708 - DNA, 15 bp, Homo sapiens
ttgtcccaattcatg

SEQ ID NO: 588709 - DNA, 15 bp, Homo sapiens
tgtcccaattcatgg

SEQ ID NO: 588710 - DNA, 15 bp, Homo sapiens
gtcccaattcatgga

SEQ ID NO: 588711 - DNA, 15 bp, Homo sapiens
tcccaattcatggac

SEQ ID NO: 588712 - DNA, 15 bp, Homo sapiens
cccaattcatggaca

SEQ ID NO: 588713 - DNA, 15 bp, Homo sapiens
ccaattcatggacac

SEQ ID NO: 588714 - DNA, 15 bp, Homo sapiens
caattcatggacacc

SEQ ID NO: 588715 - DNA, 15 bp, Homo sapiens
aattcatggacaccc

SEQ ID NO: 588716 - DNA, 15 bp, Homo sapiens
attcatggacaccct

SEQ ID NO: 588717 - DNA, 15 bp, Homo sapiens
ttcatggacaccctc

SEQ ID NO: 588718 - DNA, 15 bp, Homo sapiens
tcatggacaccctcc

SEQ ID NO: 588719 - DNA, 15 bp, Homo sapiens
catggacaccctccg

SEQ ID NO: 588720 - DNA, 15 bp, Homo sapiens
atggacaccctccgg

SEQ ID NO: 588721 - DNA, 15 bp, Homo sapiens
tggacaccctccgga

SEQ ID NO: 588722 - DNA, 15 bp, Homo sapiens
ggacaccctccggac

SEQ ID NO: 588723 - DNA, 15 bp, Homo sapiens
gacaccctccggact

SEQ ID NO: 588724 - DNA, 15 bp, Homo sapiens
acaccctccggactc

SEQ ID NO: 588725 - DNA, 15 bp, Homo sapiens
caccctccggactca

SEQ ID NO: 588726 - DNA, 15 bp, Homo sapiens
accctccggactcac

SEQ ID NO: 588727 - DNA, 15 bp, Homo sapiens
ccctccggactcacc

SEQ ID NO: 588728 - DNA, 15 bp, Homo sapiens
cctccggactcaccc

SEQ ID NO: 588729 - DNA, 15 bp, Homo sapiens
ctccggactcacccg

SEQ ID NO: 588730 - DNA, 15 bp, Homo sapiens
tccggactcacccgg

SEQ ID NO: 588731 - DNA, 15 bp, Homo sapiens
ccggactcacccgga

SEQ ID NO: 588732 - DNA, 15 bp, Homo sapiens
cggactcacccggag

SEQ ID NO: 588733 - DNA, 15 bp, Homo sapiens
ggactcacccggaga

SEQ ID NO: 588734 - DNA, 15 bp, Homo sapiens
gactcacccggagag

SEQ ID NO: 588735 - DNA, 15 bp, Homo sapiens
actcacccggagaga

SEQ ID NO: 588736 - DNA, 15 bp, Homo sapiens
ctcacccggagagaa

SEQ ID NO: 588737 - DNA, 15 bp, Homo sapiens
tcacccggagagaat

SEQ ID NO: 588738 - DNA, 15 bp, Homo sapiens
cacccggagagaatt

SEQ ID NO: 588739 - DNA, 15 bp, Homo sapiens
acccggagagaattg

SEQ ID NO: 588740 - DNA, 15 bp, Homo sapiens
cccggagagaattgc

SEQ ID NO: 588741 - DNA, 15 bp, Homo sapiens
ccggagagaattgca

SEQ ID NO: 588742 - DNA, 15 bp, Homo sapiens
cggagagaattgcag

SEQ ID NO: 588743 - DNA, 15 bp, Homo sapiens
ggagagaattgcagg

SEQ ID NO: 588744 - DNA, 15 bp, Homo sapiens
gagagaattgcaggt

SEQ ID NO: 588745 - DNA, 15 bp, Homo sapiens
agagaattgcaggta

SEQ ID NO: 588746 - DNA, 15 bp, Homo sapiens
gagaattgcaggtaa

SEQ ID NO: 588747 - DNA, 15 bp, Homo sapiens
agaattgcaggtaag

SEQ ID NO: 588748 - DNA, 15 bp, Homo sapiens
gaattgcaggtaagc

SEQ ID NO: 588749 - DNA, 15 bp, Homo sapiens
aattgcaggtaagca

SEQ ID NO: 588750 - DNA, 15 bp, Homo sapiens
attgcaggtaagcat

SEQ ID NO: 588751 - DNA, 15 bp, Homo sapiens
ttgcaggtaagcatg

SEQ ID NO: 588752 - DNA, 15 bp, Homo sapiens
tgcaggtaagcatga

SEQ ID NO: 588753 - DNA, 15 bp, Homo sapiens
gcaggtaagcatgac

SEQ ID NO: 588754 - DNA, 15 bp, Homo sapiens
caggtaagcatgact

SEQ ID NO: 588755 - DNA, 15 bp, Homo sapiens
aggtaagcatgactg

SEQ ID NO: 588756 - DNA, 15 bp, Homo sapiens
ggtaagcatgactgc

SEQ ID NO: 588757 - DNA, 15 bp, Homo sapiens
gtaagcatgactgca

SEQ ID NO: 588758 - DNA, 15 bp, Homo sapiens
taagcatgactgcag

SEQ ID NO: 588759 - DNA, 15 bp, Homo sapiens
aagcatgactgcagt

SEQ ID NO: 588760 - DNA, 15 bp, Homo sapiens
agcatgactgcagtg

SEQ ID NO: 588761 - DNA, 15 bp, Homo sapiens
gcatgactgcagtgc

SEQ ID NO: 588762 - DNA, 15 bp, Homo sapiens
catgactgcagtgct

SEQ ID NO: 588763 - DNA, 15 bp, Homo sapiens
atgactgcagtgctc

SEQ ID NO: 588764 - DNA, 15 bp, Homo sapiens
tgactgcagtgctct

SEQ ID NO: 588765 - DNA, 15 bp, Homo sapiens
gactgcagtgctctc

SEQ ID NO: 588766 - DNA, 15 bp, Homo sapiens
actgcagtgctctca

SEQ ID NO: 588767 - DNA, 15 bp, Homo sapiens
ctgcagtgctctcaa

SEQ ID NO: 588768 - DNA, 15 bp, Homo sapiens
tgcagtgctctcaag

SEQ ID NO: 588769 - DNA, 15 bp, Homo sapiens
gcagtgctctcaagc

SEQ ID NO: 588770 - DNA, 15 bp, Homo sapiens
cagtgctctcaagca

SEQ ID NO: 588771 - DNA, 15 bp, Homo sapiens
agtgctctcaagcat

SEQ ID NO: 588772 - DNA, 15 bp, Homo sapiens
gtgctctcaagcatc

SEQ ID NO: 588773 - DNA, 15 bp, Homo sapiens
tgctctcaagcatca

SEQ ID NO: 588774 - DNA, 15 bp, Homo sapiens
gctctcaagcatcat

SEQ ID NO: 588775 - DNA, 15 bp, Homo sapiens
ctctcaagcatcatt

SEQ ID NO: 588776 - DNA, 15 bp, Homo sapiens
tctcaagcatcattt

SEQ ID NO: 588777 - DNA, 15 bp, Homo sapiens
ctcaagcatcatttc

SEQ ID NO: 588778 - DNA, 15 bp, Homo sapiens
tcaagcatcatttcc

SEQ ID NO: 588779 - DNA, 15 bp, Homo sapiens
caagcatcatttccc

SEQ ID NO: 588780 - DNA, 15 bp, Homo sapiens
aagcatcatttccct

SEQ ID NO: 588781 - DNA, 15 bp, Homo sapiens
agcatcatttccctc

SEQ ID NO: 588782 - DNA, 15 bp, Homo sapiens
gcatcatttccctca

SEQ ID NO: 588783 - DNA, 15 bp, Homo sapiens
catcatttccctcac

SEQ ID NO: 588784 - DNA, 15 bp, Homo sapiens
atcatttccctcacc

SEQ ID NO: 588785 - DNA, 15 bp, Homo sapiens
tcatttccctcacct

SEQ ID NO: 588786 - DNA, 15 bp, Homo sapiens
catttccctcaccta

SEQ ID NO: 588787 - DNA, 15 bp, Homo sapiens
atttccctcacctat

SEQ ID NO: 588788 - DNA, 15 bp, Homo sapiens
tttccctcacctatg

SEQ ID NO: 588789 - DNA, 15 bp, Homo sapiens
ttccctcacctatgg

SEQ ID NO: 588790 - DNA, 15 bp, Homo sapiens
tccctcacctatgga

SEQ ID NO: 588791 - DNA, 15 bp, Homo sapiens
ccctcacctatggag

SEQ ID NO: 588792 - DNA, 15 bp, Homo sapiens
cctcacctatggaga

SEQ ID NO: 588793 - DNA, 15 bp, Homo sapiens
ctcacctatggagag

SEQ ID NO: 588794 - DNA, 15 bp, Homo sapiens
tcacctatggagaga

SEQ ID NO: 588795 - DNA, 15 bp, Homo sapiens
cacctatggagagac

SEQ ID NO: 588796 - DNA, 15 bp, Homo sapiens
acctatggagagact

SEQ ID NO: 588797 - DNA, 15 bp, Homo sapiens
cctatggagagactg

SEQ ID NO: 588798 - DNA, 15 bp, Homo sapiens
ctatggagagactga

SEQ ID NO: 588799 - DNA, 15 bp, Homo sapiens
tatggagagactgaa

SEQ ID NO: 588800 - DNA, 15 bp, Homo sapiens
atggagagactgaag

SEQ ID NO: 588801 - DNA, 15 bp, Homo sapiens
tggagagactgaaga

SEQ ID NO: 588802 - DNA, 15 bp, Homo sapiens
ggagagactgaagat

SEQ ID NO: 588803 - DNA, 15 bp, Homo sapiens
gagagactgaagata

SEQ ID NO: 588804 - DNA, 15 bp, Homo sapiens
agagactgaagatat

SEQ ID NO: 588805 - DNA, 15 bp, Homo sapiens
gagactgaagatata

SEQ ID NO: 588806 - DNA, 15 bp, Homo sapiens
agactgaagatatag

SEQ ID NO: 588807 - DNA, 15 bp, Homo sapiens
gactgaagatatagg

SEQ ID NO: 588808 - DNA, 15 bp, Homo sapiens
actgaagatatagga

SEQ ID NO: 588809 - DNA, 15 bp, Homo sapiens
ctgaagatataggaa

SEQ ID NO: 588810 - DNA, 15 bp, Homo sapiens
tgaagatataggaaa

SEQ ID NO: 588811 - DNA, 15 bp, Homo sapiens
gaagatataggaaag

SEQ ID NO: 588812 - DNA, 15 bp, Homo sapiens
aagatataggaaaga

SEQ ID NO: 588813 - DNA, 15 bp, Homo sapiens
agatataggaaagaa

SEQ ID NO: 588814 - DNA, 15 bp, Homo sapiens
gatataggaaagaac

SEQ ID NO: 588815 - DNA, 15 bp, Homo sapiens
atataggaaagaaca

SEQ ID NO: 588816 - DNA, 15 bp, Homo sapiens
tataggaaagaacag

SEQ ID NO: 588817 - DNA, 15 bp, Homo sapiens
ataggaaagaacagg

SEQ ID NO: 588818 - DNA, 15 bp, Homo sapiens
taggaaagaacaggg

SEQ ID NO: 588819 - DNA, 15 bp, Homo sapiens
aggaaagaacaggga

SEQ ID NO: 588820 - DNA, 15 bp, Homo sapiens
ggaaagaacagggag

SEQ ID NO: 588821 - DNA, 15 bp, Homo sapiens
gaaagaacagggaga

SEQ ID NO: 588822 - DNA, 15 bp, Homo sapiens
aaagaacagggagag

SEQ ID NO: 588823 - DNA, 15 bp, Homo sapiens
aagaacagggagagt

SEQ ID NO: 588824 - DNA, 15 bp, Homo sapiens
agaacagggagagtt

SEQ ID NO: 588825 - DNA, 15 bp, Homo sapiens
gaacagggagagttg

SEQ ID NO: 588826 - DNA, 15 bp, Homo sapiens
aacagggagagttgg

SEQ ID NO: 588827 - DNA, 15 bp, Homo sapiens
acagggagagttggt

SEQ ID NO: 588828 - DNA, 15 bp, Homo sapiens
cagggagagttggtg

SEQ ID NO: 588829 - DNA, 15 bp, Homo sapiens
agggagagttggtga

SEQ ID NO: 588830 - DNA, 15 bp, Homo sapiens
gggagagttggtgaa

SEQ ID NO: 588831 - DNA, 15 bp, Homo sapiens
ggagagttggtgaaa

SEQ ID NO: 588832 - DNA, 15 bp, Homo sapiens
gagagttggtgaaaa

SEQ ID NO: 588833 - DNA, 15 bp, Homo sapiens
agagttggtgaaaaa

SEQ ID NO: 588834 - DNA, 15 bp, Homo sapiens
gagttggtgaaaaat

SEQ ID NO: 588835 - DNA, 15 bp, Homo sapiens
agttggtgaaaaata

SEQ ID NO: 588836 - DNA, 15 bp, Homo sapiens
gttggtgaaaaatat

SEQ ID NO: 588837 - DNA, 15 bp, Homo sapiens
ttggtgaaaaatata

SEQ ID NO: 588838 - DNA, 15 bp, Homo sapiens
tggtgaaaaatatac

SEQ ID NO: 588839 - DNA, 15 bp, Homo sapiens
ggtgaaaaatatact

SEQ ID NO: 588840 - DNA, 15 bp, Homo sapiens
gtgaaaaatatacta

SEQ ID NO: 588841 - DNA, 15 bp, Homo sapiens
tgaaaaatatactag

SEQ ID NO: 588842 - DNA, 15 bp, Homo sapiens
gaaaaatatactagc

SEQ ID NO: 588843 - DNA, 15 bp, Homo sapiens
aaaaatatactagcg

SEQ ID NO: 588844 - DNA, 15 bp, Homo sapiens
aaaatatactagcgg

SEQ ID NO: 588845 - DNA, 15 bp, Homo sapiens
aaatatactagcgga

SEQ ID NO: 588846 - DNA, 15 bp, Homo sapiens
aatatactagcggag

SEQ ID NO: 588847 - DNA, 15 bp, Homo sapiens
atatactagcggagg

SEQ ID NO: 588848 - DNA, 15 bp, Homo sapiens
tatactagcggaggc

SEQ ID NO: 588849 - DNA, 15 bp, Homo sapiens
atactagcggaggca

SEQ ID NO: 588850 - DNA, 15 bp, Homo sapiens
tactagcggaggcag

SEQ ID NO: 588851 - DNA, 15 bp, Homo sapiens
actagcggaggcagg

SEQ ID NO: 588852 - DNA, 15 bp, Homo sapiens
ctagcggaggcagga

SEQ ID NO: 588853 - DNA, 15 bp, Homo sapiens
tagcggaggcaggaa

SEQ ID NO: 588854 - DNA, 15 bp, Homo sapiens
agcggaggcaggaag

SEQ ID NO: 588855 - DNA, 15 bp, Homo sapiens
gcggaggcaggaagg

SEQ ID NO: 588856 - DNA, 15 bp, Homo sapiens
cggaggcaggaaggg

SEQ ID NO: 588857 - DNA, 15 bp, Homo sapiens
ggaggcaggaaggga

SEQ ID NO: 588858 - DNA, 15 bp, Homo sapiens
gaggcaggaagggat

SEQ ID NO: 588859 - DNA, 15 bp, Homo sapiens
aggcaggaagggatg

SEQ ID NO: 588860 - DNA, 15 bp, Homo sapiens
ggcaggaagggatgg

SEQ ID NO: 588861 - DNA, 15 bp, Homo sapiens
gcaggaagggatggg

SEQ ID NO: 588862 - DNA, 15 bp, Homo sapiens
caggaagggatgggg

SEQ ID NO: 588863 - DNA, 15 bp, Homo sapiens
aggaagggatggggt

SEQ ID NO: 588864 - DNA, 15 bp, Homo sapiens
ggaagggatggggtc

SEQ ID NO: 588865 - DNA, 15 bp, Homo sapiens
gaagggatggggtct

SEQ ID NO: 588866 - DNA, 15 bp, Homo sapiens
aagggatggggtctg

SEQ ID NO: 588867 - DNA, 15 bp, Homo sapiens
agggatggggtctgg

SEQ ID NO: 588868 - DNA, 15 bp, Homo sapiens
gggatggggtctgga

SEQ ID NO: 588869 - DNA, 15 bp, Homo sapiens
ggatggggtctggag

SEQ ID NO: 588870 - DNA, 15 bp, Homo sapiens
gatggggtctggagg

SEQ ID NO: 588871 - DNA, 15 bp, Homo sapiens
atggggtctggaggc

SEQ ID NO: 588872 - DNA, 15 bp, Homo sapiens
tggggtctggaggcg

SEQ ID NO: 588873 - DNA, 15 bp, Homo sapiens
ggggtctggaggcgg

SEQ ID NO: 588874 - DNA, 15 bp, Homo sapiens
gggtctggaggcggc

SEQ ID NO: 588875 - DNA, 15 bp, Homo sapiens
ggtctggaggcggct

SEQ ID NO: 588876 - DNA, 15 bp, Homo sapiens
gtctggaggcggctt

SEQ ID NO: 588877 - DNA, 15 bp, Homo sapiens
tctggaggcggcttg

SEQ ID NO: 588878 - DNA, 15 bp, Homo sapiens
ctggaggcggcttga

SEQ ID NO: 588879 - DNA, 15 bp, Homo sapiens
tggaggcggcttgaa

SEQ ID NO: 588880 - DNA, 15 bp, Homo sapiens
ggaggcggcttgaac

SEQ ID NO: 588881 - DNA, 15 bp, Homo sapiens
gaggcggcttgaaca

SEQ ID NO: 588882 - DNA, 15 bp, Homo sapiens
aggcggcttgaacat

SEQ ID NO: 588883 - DNA, 15 bp, Homo sapiens
ggcggcttgaacatc

SEQ ID NO: 588884 - DNA, 15 bp, Homo sapiens
gcggcttgaacatca

SEQ ID NO: 588885 - DNA, 15 bp, Homo sapiens
cggcttgaacatcac

SEQ ID NO: 588886 - DNA, 15 bp, Homo sapiens
ggcttgaacatcacc

SEQ ID NO: 588887 - DNA, 15 bp, Homo sapiens
gcttgaacatcacct

SEQ ID NO: 588888 - DNA, 15 bp, Homo sapiens
cttgaacatcacctt

SEQ ID NO: 588889 - DNA, 15 bp, Homo sapiens
ttgaacatcaccttg

SEQ ID NO: 588890 - DNA, 15 bp, Homo sapiens
tgaacatcaccttgg

SEQ ID NO: 588891 - DNA, 15 bp, Homo sapiens
gaacatcaccttggt

SEQ ID NO: 588892 - DNA, 15 bp, Homo sapiens
aacatcaccttggtg

SEQ ID NO: 588893 - DNA, 15 bp, Homo sapiens
acatcaccttggtga

SEQ ID NO: 588894 - DNA, 15 bp, Homo sapiens
catcaccttggtgaa

SEQ ID NO: 588895 - DNA, 15 bp, Homo sapiens
atcaccttggtgaag

SEQ ID NO: 588896 - DNA, 15 bp, Homo sapiens
tcaccttggtgaaga

SEQ ID NO: 588897 - DNA, 15 bp, Homo sapiens
caccttggtgaagat

SEQ ID NO: 588898 - DNA, 15 bp, Homo sapiens
accttggtgaagatg

SEQ ID NO: 588899 - DNA, 15 bp, Homo sapiens
ccttggtgaagatgc

SEQ ID NO: 588900 - DNA, 15 bp, Homo sapiens
cttggtgaagatgcc

SEQ ID NO: 588901 - DNA, 15 bp, Homo sapiens
ttggtgaagatgcct

SEQ ID NO: 588902 - DNA, 15 bp, Homo sapiens
tggtgaagatgcctc

SEQ ID NO: 588903 - DNA, 15 bp, Homo sapiens
ggtgaagatgcctct

SEQ ID NO: 588904 - DNA, 15 bp, Homo sapiens
gtgaagatgcctctt

SEQ ID NO: 588905 - DNA, 15 bp, Homo sapiens
tgaagatgcctcttc

SEQ ID NO: 588906 - DNA, 15 bp, Homo sapiens
gaagatgcctcttcc

SEQ ID NO: 588907 - DNA, 15 bp, Homo sapiens
aagatgcctcttcct

SEQ ID NO: 588908 - DNA, 15 bp, Homo sapiens
agatgcctcttcctc

SEQ ID NO: 588909 - DNA, 15 bp, Homo sapiens
gatgcctcttcctcc

SEQ ID NO: 588910 - DNA, 15 bp, Homo sapiens
atgcctcttcctcca

SEQ ID NO: 588911 - DNA, 15 bp, Homo sapiens
tgcctcttcctccac

SEQ ID NO: 588912 - DNA, 15 bp, Homo sapiens
gcctcttcctccaca

SEQ ID NO: 588913 - DNA, 15 bp, Homo sapiens
cctcttcctccacag

SEQ ID NO: 588914 - DNA, 15 bp, Homo sapiens
ctcttcctccacaga

SEQ ID NO: 588915 - DNA, 15 bp, Homo sapiens
tcttcctccacagaa

SEQ ID NO: 588916 - DNA, 15 bp, Homo sapiens
cttcctccacagaag

SEQ ID NO: 588917 - DNA, 15 bp, Homo sapiens
ttcctccacagaagc

SEQ ID NO: 588918 - DNA, 15 bp, Homo sapiens
tcctccacagaagcc

SEQ ID NO: 588919 - DNA, 15 bp, Homo sapiens
cctccacagaagcct

SEQ ID NO: 588920 - DNA, 15 bp, Homo sapiens
ctccacagaagcctg

SEQ ID NO: 588921 - DNA, 15 bp, Homo sapiens
tccacagaagcctgg

SEQ ID NO: 588922 - DNA, 15 bp, Homo sapiens
ccacagaagcctgga

SEQ ID NO: 588923 - DNA, 15 bp, Homo sapiens
cacagaagcctggaa

SEQ ID NO: 588924 - DNA, 15 bp, Homo sapiens
acagaagcctggaag

SEQ ID NO: 588925 - DNA, 15 bp, Homo sapiens
cagaagcctggaagg

SEQ ID NO: 588926 - DNA, 15 bp, Homo sapiens
agaagcctggaaggt

SEQ ID NO: 588927 - DNA, 15 bp, Homo sapiens
gaagcctggaaggta

SEQ ID NO: 588928 - DNA, 15 bp, Homo sapiens
aagcctggaaggtag

SEQ ID NO: 588929 - DNA, 15 bp, Homo sapiens
agcctggaaggtagg

SEQ ID NO: 588930 - DNA, 15 bp, Homo sapiens
gcctggaaggtagga

SEQ ID NO: 588931 - DNA, 15 bp, Homo sapiens
cctggaaggtaggaa

SEQ ID NO: 588932 - DNA, 15 bp, Homo sapiens
ctggaaggtaggaag

SEQ ID NO: 588933 - DNA, 15 bp, Homo sapiens
tggaaggtaggaagt

SEQ ID NO: 588934 - DNA, 15 bp, Homo sapiens
ggaaggtaggaagtt

SEQ ID NO: 588935 - DNA, 15 bp, Homo sapiens
gaaggtaggaagttg

SEQ ID NO: 588936 - DNA, 15 bp, Homo sapiens
aaggtaggaagttgg

SEQ ID NO: 588937 - DNA, 15 bp, Homo sapiens
aggtaggaagttggg

SEQ ID NO: 588938 - DNA, 15 bp, Homo sapiens
ggtaggaagttggga

SEQ ID NO: 588939 - DNA, 15 bp, Homo sapiens
gtaggaagttgggaa

SEQ ID NO: 588940 - DNA, 15 bp, Homo sapiens
taggaagttgggaag

SEQ ID NO: 588941 - DNA, 15 bp, Homo sapiens
aggaagttgggaagg

SEQ ID NO: 588942 - DNA, 15 bp, Homo sapiens
ggaagttgggaagga

SEQ ID NO: 588943 - DNA, 15 bp, Homo sapiens
gaagttgggaaggaa

SEQ ID NO: 588944 - DNA, 15 bp, Homo sapiens
aagttgggaaggaag

SEQ ID NO: 588945 - DNA, 15 bp, Homo sapiens
agttgggaaggaagg

SEQ ID NO: 588946 - DNA, 15 bp, Homo sapiens
gttgggaaggaaggc

SEQ ID NO: 588947 - DNA, 15 bp, Homo sapiens
ttgggaaggaaggca

SEQ ID NO: 588948 - DNA, 15 bp, Homo sapiens
tgggaaggaaggcag

SEQ ID NO: 588949 - DNA, 15 bp, Homo sapiens
gggaaggaaggcagg

SEQ ID NO: 588950 - DNA, 15 bp, Homo sapiens
ggaaggaaggcagga

SEQ ID NO: 588951 - DNA, 15 bp, Homo sapiens
gaaggaaggcaggaa

SEQ ID NO: 588952 - DNA, 15 bp, Homo sapiens
aaggaaggcaggaaa

SEQ ID NO: 588953 - DNA, 15 bp, Homo sapiens
aggaaggcaggaaag

SEQ ID NO: 588954 - DNA, 15 bp, Homo sapiens
ggaaggcaggaaagg

SEQ ID NO: 588955 - DNA, 15 bp, Homo sapiens
gaaggcaggaaaggt

SEQ ID NO: 588956 - DNA, 15 bp, Homo sapiens
aaggcaggaaaggtc

SEQ ID NO: 588957 - DNA, 15 bp, Homo sapiens
aggcaggaaaggtct

SEQ ID NO: 588958 - DNA, 15 bp, Homo sapiens
ggcaggaaaggtctc

SEQ ID NO: 588959 - DNA, 15 bp, Homo sapiens
gcaggaaaggtctca

SEQ ID NO: 588960 - DNA, 15 bp, Homo sapiens
caggaaaggtctcat

SEQ ID NO: 588961 - DNA, 15 bp, Homo sapiens
aggaaaggtctcatc

SEQ ID NO: 588962 - DNA, 15 bp, Homo sapiens
ggaaaggtctcatcc

SEQ ID NO: 588963 - DNA, 15 bp, Homo sapiens
gaaaggtctcatcca

SEQ ID NO: 588964 - DNA, 15 bp, Homo sapiens
aaaggtctcatccac

SEQ ID NO: 588965 - DNA, 15 bp, Homo sapiens
aaggtctcatccacg

SEQ ID NO: 588966 - DNA, 15 bp, Homo sapiens
aggtctcatccacgt

SEQ ID NO: 588967 - DNA, 15 bp, Homo sapiens
ggtctcatccacgtt

SEQ ID NO: 588968 - DNA, 15 bp, Homo sapiens
gtctcatccacgtta

SEQ ID NO: 588969 - DNA, 15 bp, Homo sapiens
tctcatccacgttaa

SEQ ID NO: 588970 - DNA, 15 bp, Homo sapiens
ctcatccacgttaag

SEQ ID NO: 588971 - DNA, 15 bp, Homo sapiens
tcatccacgttaagt

SEQ ID NO: 588972 - DNA, 15 bp, Homo sapiens
catccacgttaagtc

SEQ ID NO: 588973 - DNA, 15 bp, Homo sapiens
atccacgttaagtct

SEQ ID NO: 588974 - DNA, 15 bp, Homo sapiens
tccacgttaagtcta

SEQ ID NO: 588975 - DNA, 15 bp, Homo sapiens
ccacgttaagtctag

SEQ ID NO: 588976 - DNA, 15 bp, Homo sapiens
cacgttaagtctaga

SEQ ID NO: 588977 - DNA, 15 bp, Homo sapiens
acgttaagtctagag

SEQ ID NO: 588978 - DNA, 15 bp, Homo sapiens
cgttaagtctagaga

SEQ ID NO: 588979 - DNA, 15 bp, Homo sapiens
gttaagtctagagac

SEQ ID NO: 588980 - DNA, 15 bp, Homo sapiens
ttaagtctagagaca

SEQ ID NO: 588981 - DNA, 15 bp, Homo sapiens
taagtctagagacag

SEQ ID NO: 588982 - DNA, 15 bp, Homo sapiens
aagtctagagacaga

SEQ ID NO: 588983 - DNA, 15 bp, Homo sapiens
agtctagagacagaa

SEQ ID NO: 588984 - DNA, 15 bp, Homo sapiens
gtctagagacagaaa

SEQ ID NO: 588985 - DNA, 15 bp, Homo sapiens
tctagagacagaaag

SEQ ID NO: 588986 - DNA, 15 bp, Homo sapiens
ctagagacagaaaga

SEQ ID NO: 588987 - DNA, 15 bp, Homo sapiens
tagagacagaaagaa

SEQ ID NO: 588988 - DNA, 15 bp, Homo sapiens
agagacagaaagaat

SEQ ID NO: 588989 - DNA, 15 bp, Homo sapiens
gagacagaaagaatg

SEQ ID NO: 588990 - DNA, 15 bp, Homo sapiens
agacagaaagaatgc

SEQ ID NO: 588991 - DNA, 15 bp, Homo sapiens
gacagaaagaatgct

SEQ ID NO: 588992 - DNA, 15 bp, Homo sapiens
acagaaagaatgcta

SEQ ID NO: 588993 - DNA, 15 bp, Homo sapiens
cagaaagaatgctaa

SEQ ID NO: 588994 - DNA, 15 bp, Homo sapiens
agaaagaatgctaag

SEQ ID NO: 588995 - DNA, 15 bp, Homo sapiens
gaaagaatgctaaga

SEQ ID NO: 588996 - DNA, 15 bp, Homo sapiens
aaagaatgctaagag

SEQ ID NO: 588997 - DNA, 15 bp, Homo sapiens
aagaatgctaagaga

SEQ ID NO: 588998 - DNA, 15 bp, Homo sapiens
agaatgctaagagag

SEQ ID NO: 588999 - DNA, 15 bp, Homo sapiens
gaatgctaagagaga

SEQ ID NO: 589000 - DNA, 15 bp, Homo sapiens
aatgctaagagagat

SEQ ID NO: 589001 - DNA, 15 bp, Homo sapiens
atgctaagagagatg

SEQ ID NO: 589002 - DNA, 15 bp, Homo sapiens
tgctaagagagatgg

SEQ ID NO: 589003 - DNA, 15 bp, Homo sapiens
gctaagagagatggc

SEQ ID NO: 589004 - DNA, 15 bp, Homo sapiens
ctaagagagatggca

SEQ ID NO: 589005 - DNA, 15 bp, Homo sapiens
taagagagatggcac

SEQ ID NO: 589006 - DNA, 15 bp, Homo sapiens
aagagagatggcact

SEQ ID NO: 589007 - DNA, 15 bp, Homo sapiens
agagagatggcacta

SEQ ID NO: 589008 - DNA, 15 bp, Homo sapiens
gagagatggcactat

SEQ ID NO: 589009 - DNA, 15 bp, Homo sapiens
agagatggcactatg

SEQ ID NO: 589010 - DNA, 15 bp, Homo sapiens
gagatggcactatgg

SEQ ID NO: 589011 - DNA, 15 bp, Homo sapiens
agatggcactatggg

SEQ ID NO: 589012 - DNA, 15 bp, Homo sapiens
gatggcactatggga

SEQ ID NO: 589013 - DNA, 15 bp, Homo sapiens
atggcactatgggaa

SEQ ID NO: 589014 - DNA, 15 bp, Homo sapiens
tggcactatgggaag

SEQ ID NO: 589015 - DNA, 15 bp, Homo sapiens
ggcactatgggaagt

SEQ ID NO: 589016 - DNA, 15 bp, Homo sapiens
gcactatgggaagta

SEQ ID NO: 589017 - DNA, 15 bp, Homo sapiens
cactatgggaagtat

SEQ ID NO: 589018 - DNA, 15 bp, Homo sapiens
actatgggaagtatg

SEQ ID NO: 589019 - DNA, 15 bp, Homo sapiens
ctatgggaagtatga

SEQ ID NO: 589020 - DNA, 15 bp, Homo sapiens
tatgggaagtatgag

SEQ ID NO: 589021 - DNA, 15 bp, Homo sapiens
atgggaagtatgagg

SEQ ID NO: 589022 - DNA, 15 bp, Homo sapiens
tgggaagtatgaggc

SEQ ID NO: 589023 - DNA, 15 bp, Homo sapiens
gggaagtatgaggct

SEQ ID NO: 589024 - DNA, 15 bp, Homo sapiens
ggaagtatgaggcta

SEQ ID NO: 589025 - DNA, 15 bp, Homo sapiens
gaagtatgaggctag

SEQ ID NO: 589026 - DNA, 15 bp, Homo sapiens
aagtatgaggctagg

SEQ ID NO: 589027 - DNA, 15 bp, Homo sapiens
agtatgaggctaggt

SEQ ID NO: 589028 - DNA, 15 bp, Homo sapiens
gtatgaggctaggtc

SEQ ID NO: 589029 - DNA, 15 bp, Homo sapiens
tatgaggctaggtca

SEQ ID NO: 589030 - DNA, 15 bp, Homo sapiens
atgaggctaggtcaa

SEQ ID NO: 589031 - DNA, 15 bp, Homo sapiens
tgaggctaggtcaag

SEQ ID NO: 589032 - DNA, 15 bp, Homo sapiens
gaggctaggtcaagg

SEQ ID NO: 589033 - DNA, 15 bp, Homo sapiens
aggctaggtcaaggg

SEQ ID NO: 589034 - DNA, 15 bp, Homo sapiens
ggctaggtcaagggc

SEQ ID NO: 589035 - DNA, 15 bp, Homo sapiens
gctaggtcaagggct

SEQ ID NO: 589036 - DNA, 15 bp, Homo sapiens
ctaggtcaagggcta

SEQ ID NO: 589037 - DNA, 15 bp, Homo sapiens
taggtcaagggctag

SEQ ID NO: 589038 - DNA, 15 bp, Homo sapiens
aggtcaagggctaga

SEQ ID NO: 589039 - DNA, 15 bp, Homo sapiens
ggtcaagggctagaa

SEQ ID NO: 589040 - DNA, 15 bp, Homo sapiens
gtcaagggctagaag

SEQ ID NO: 589041 - DNA, 15 bp, Homo sapiens
tcaagggctagaagc

SEQ ID NO: 589042 - DNA, 15 bp, Homo sapiens
caagggctagaagca

SEQ ID NO: 589043 - DNA, 15 bp, Homo sapiens
aagggctagaagcag

SEQ ID NO: 589044 - DNA, 15 bp, Homo sapiens
agggctagaagcagg

SEQ ID NO: 589045 - DNA, 15 bp, Homo sapiens
gggctagaagcaggg

SEQ ID NO: 589046 - DNA, 15 bp, Homo sapiens
ggctagaagcagggg

SEQ ID NO: 589047 - DNA, 15 bp, Homo sapiens
gctagaagcagggga

SEQ ID NO: 589048 - DNA, 15 bp, Homo sapiens
ctagaagcaggggag

SEQ ID NO: 589049 - DNA, 15 bp, Homo sapiens
tagaagcaggggaga

SEQ ID NO: 589050 - DNA, 15 bp, Homo sapiens
agaagcaggggagac

SEQ ID NO: 589051 - DNA, 15 bp, Homo sapiens
gaagcaggggagacg

SEQ ID NO: 589052 - DNA, 15 bp, Homo sapiens
aagcaggggagacga

SEQ ID NO: 589053 - DNA, 15 bp, Homo sapiens
agcaggggagacgag

SEQ ID NO: 589054 - DNA, 15 bp, Homo sapiens
gcaggggagacgagt

SEQ ID NO: 589055 - DNA, 15 bp, Homo sapiens
caggggagacgagtt

SEQ ID NO: 589056 - DNA, 15 bp, Homo sapiens
aggggagacgagttt

SEQ ID NO: 589057 - DNA, 15 bp, Homo sapiens
ggggagacgagttta

SEQ ID NO: 589058 - DNA, 15 bp, Homo sapiens
gggagacgagtttac

SEQ ID NO: 589059 - DNA, 15 bp, Homo sapiens
ggagacgagtttaca

SEQ ID NO: 589060 - DNA, 15 bp, Homo sapiens
gagacgagtttacag

SEQ ID NO: 589061 - DNA, 15 bp, Homo sapiens
agacgagtttacaga

SEQ ID NO: 589062 - DNA, 15 bp, Homo sapiens
gacgagtttacagag

SEQ ID NO: 589063 - DNA, 15 bp, Homo sapiens
acgagtttacagagt

SEQ ID NO: 589064 - DNA, 15 bp, Homo sapiens
cgagtttacagagtt

SEQ ID NO: 589065 - DNA, 15 bp, Homo sapiens
gagtttacagagttt

SEQ ID NO: 589066 - DNA, 15 bp, Homo sapiens
agtttacagagtttc

SEQ ID NO: 589067 - DNA, 15 bp, Homo sapiens
gtttacagagtttcg

SEQ ID NO: 589068 - DNA, 15 bp, Homo sapiens
tttacagagtttcgt

SEQ ID NO: 589069 - DNA, 15 bp, Homo sapiens
ttacagagtttcgta

SEQ ID NO: 589070 - DNA, 15 bp, Homo sapiens
tacagagtttcgtaa

SEQ ID NO: 589071 - DNA, 15 bp, Homo sapiens
acagagtttcgtaaa

SEQ ID NO: 589072 - DNA, 15 bp, Homo sapiens
cagagtttcgtaaag

SEQ ID NO: 589073 - DNA, 15 bp, Homo sapiens
agagtttcgtaaaga

SEQ ID NO: 589074 - DNA, 15 bp, Homo sapiens
gagtttcgtaaagat

SEQ ID NO: 589075 - DNA, 15 bp, Homo sapiens
agtttcgtaaagata

SEQ ID NO: 589076 - DNA, 15 bp, Homo sapiens
gtttcgtaaagatat

SEQ ID NO: 589077 - DNA, 15 bp, Homo sapiens
tttcgtaaagatata

SEQ ID NO: 589078 - DNA, 15 bp, Homo sapiens
ttcgtaaagatatag

SEQ ID NO: 589079 - DNA, 15 bp, Homo sapiens
tcgtaaagatataga

SEQ ID NO: 589080 - DNA, 15 bp, Homo sapiens
cgtaaagatatagag

SEQ ID NO: 589081 - DNA, 15 bp, Homo sapiens
gtaaagatatagagc

SEQ ID NO: 589082 - DNA, 15 bp, Homo sapiens
taaagatatagagca

SEQ ID NO: 589083 - DNA, 15 bp, Homo sapiens
aaagatatagagcaa

SEQ ID NO: 589084 - DNA, 15 bp, Homo sapiens
aagatatagagcaac

SEQ ID NO: 589085 - DNA, 15 bp, Homo sapiens
agatatagagcaact

SEQ ID NO: 589086 - DNA, 15 bp, Homo sapiens
gatatagagcaactc

SEQ ID NO: 589087 - DNA, 15 bp, Homo sapiens
atatagagcaactct

SEQ ID NO: 589088 - DNA, 15 bp, Homo sapiens
tatagagcaactctc

SEQ ID NO: 589089 - DNA, 15 bp, Homo sapiens
atagagcaactctca

SEQ ID NO: 589090 - DNA, 15 bp, Homo sapiens
tagagcaactctcac

SEQ ID NO: 589091 - DNA, 15 bp, Homo sapiens
agagcaactctcaca

SEQ ID NO: 589092 - DNA, 15 bp, Homo sapiens
gagcaactctcacag

SEQ ID NO: 589093 - DNA, 15 bp, Homo sapiens
agcaactctcacaga

SEQ ID NO: 589094 - DNA, 15 bp, Homo sapiens
gcaactctcacagag

SEQ ID NO: 589095 - DNA, 15 bp, Homo sapiens
caactctcacagagt

SEQ ID NO: 589096 - DNA, 15 bp, Homo sapiens
aactctcacagagtt

SEQ ID NO: 589097 - DNA, 15 bp, Homo sapiens
actctcacagagttc

SEQ ID NO: 589098 - DNA, 15 bp, Homo sapiens
ctctcacagagttct

SEQ ID NO: 589099 - DNA, 15 bp, Homo sapiens
tctcacagagttcta

SEQ ID NO: 589100 - DNA, 15 bp, Homo sapiens
ctcacagagttctag

SEQ ID NO: 589101 - DNA, 15 bp, Homo sapiens
tcacagagttctaga

SEQ ID NO: 589102 - DNA, 15 bp, Homo sapiens
cacagagttctagag

SEQ ID NO: 589103 - DNA, 15 bp, Homo sapiens
acagagttctagagc

SEQ ID NO: 589104 - DNA, 15 bp, Homo sapiens
cagagttctagagcg

SEQ ID NO: 589105 - DNA, 15 bp, Homo sapiens
agagttctagagcga

SEQ ID NO: 589106 - DNA, 15 bp, Homo sapiens
gagttctagagcgag

SEQ ID NO: 589107 - DNA, 15 bp, Homo sapiens
agttctagagcgaga

SEQ ID NO: 589108 - DNA, 15 bp, Homo sapiens
gttctagagcgagag

SEQ ID NO: 589109 - DNA, 15 bp, Homo sapiens
ttctagagcgagagc

SEQ ID NO: 589110 - DNA, 15 bp, Homo sapiens
tctagagcgagagct

SEQ ID NO: 589111 - DNA, 15 bp, Homo sapiens
ctagagcgagagcta

SEQ ID NO: 589112 - DNA, 15 bp, Homo sapiens
tagagcgagagctaa

SEQ ID NO: 589113 - DNA, 15 bp, Homo sapiens
agagcgagagctaac

SEQ ID NO: 589114 - DNA, 15 bp, Homo sapiens
gagcgagagctaacc

SEQ ID NO: 589115 - DNA, 15 bp, Homo sapiens
agcgagagctaacca

SEQ ID NO: 589116 - DNA, 15 bp, Homo sapiens
gcgagagctaaccag

SEQ ID NO: 589117 - DNA, 15 bp, Homo sapiens
cgagagctaaccagg

SEQ ID NO: 589118 - DNA, 15 bp, Homo sapiens
gagagctaaccagga

SEQ ID NO: 589119 - DNA, 15 bp, Homo sapiens
agagctaaccaggaa

SEQ ID NO: 589120 - DNA, 15 bp, Homo sapiens
gagctaaccaggaac

SEQ ID NO: 589121 - DNA, 15 bp, Homo sapiens
agctaaccaggaaca

SEQ ID NO: 589122 - DNA, 15 bp, Homo sapiens
gctaaccaggaacat

SEQ ID NO: 589123 - DNA, 15 bp, Homo sapiens
ctaaccaggaacatg

SEQ ID NO: 589124 - DNA, 15 bp, Homo sapiens
taaccaggaacatga

SEQ ID NO: 589125 - DNA, 15 bp, Homo sapiens
aaccaggaacatgaa

SEQ ID NO: 589126 - DNA, 15 bp, Homo sapiens
accaggaacatgaag

SEQ ID NO: 589127 - DNA, 15 bp, Homo sapiens
ccaggaacatgaagc

SEQ ID NO: 589128 - DNA, 15 bp, Homo sapiens
caggaacatgaagca

SEQ ID NO: 589129 - DNA, 15 bp, Homo sapiens
aggaacatgaagcag

SEQ ID NO: 589130 - DNA, 15 bp, Homo sapiens
ggaacatgaagcagc

SEQ ID NO: 589131 - DNA, 15 bp, Homo sapiens
gaacatgaagcagca

SEQ ID NO: 589132 - DNA, 15 bp, Homo sapiens
aacatgaagcagcaa

SEQ ID NO: 589133 - DNA, 15 bp, Homo sapiens
acatgaagcagcaag

SEQ ID NO: 589134 - DNA, 15 bp, Homo sapiens
catgaagcagcaagg

SEQ ID NO: 589135 - DNA, 15 bp, Homo sapiens
atgaagcagcaaggc

SEQ ID NO: 589136 - DNA, 15 bp, Homo sapiens
tgaagcagcaaggcc

SEQ ID NO: 589137 - DNA, 15 bp, Homo sapiens
gaagcagcaaggcca

SEQ ID NO: 589138 - DNA, 15 bp, Homo sapiens
aagcagcaaggccaa

SEQ ID NO: 589139 - DNA, 15 bp, Homo sapiens
agcagcaaggccaac

SEQ ID NO: 589140 - DNA, 15 bp, Homo sapiens
gcagcaaggccaact

SEQ ID NO: 589141 - DNA, 15 bp, Homo sapiens
cagcaaggccaacta

SEQ ID NO: 589142 - DNA, 15 bp, Homo sapiens
agcaaggccaactat

SEQ ID NO: 589143 - DNA, 15 bp, Homo sapiens
gcaaggccaactatc

SEQ ID NO: 589144 - DNA, 15 bp, Homo sapiens
caaggccaactatca

SEQ ID NO: 589145 - DNA, 15 bp, Homo sapiens
aaggccaactatcat

SEQ ID NO: 589146 - DNA, 15 bp, Homo sapiens
aggccaactatcatt

SEQ ID NO: 589147 - DNA, 15 bp, Homo sapiens
ggccaactatcatta

SEQ ID NO: 589148 - DNA, 15 bp, Homo sapiens
gccaactatcattaa

SEQ ID NO: 589149 - DNA, 15 bp, Homo sapiens
ccaactatcattaag

SEQ ID NO: 589150 - DNA, 15 bp, Homo sapiens
caactatcattaagg

SEQ ID NO: 589151 - DNA, 15 bp, Homo sapiens
aactatcattaagga

SEQ ID NO: 589152 - DNA, 15 bp, Homo sapiens
actatcattaaggag

SEQ ID NO: 589153 - DNA, 15 bp, Homo sapiens
ctatcattaaggagc

SEQ ID NO: 589154 - DNA, 15 bp, Homo sapiens
tatcattaaggagcc

SEQ ID NO: 589155 - DNA, 15 bp, Homo sapiens
atcattaaggagcca

SEQ ID NO: 589156 - DNA, 15 bp, Homo sapiens
tcattaaggagccag

SEQ ID NO: 589157 - DNA, 15 bp, Homo sapiens
cattaaggagccagg

SEQ ID NO: 589158 - DNA, 15 bp, Homo sapiens
attaaggagccaggg

SEQ ID NO: 589159 - DNA, 15 bp, Homo sapiens
ttaaggagccaggga

SEQ ID NO: 589160 - DNA, 15 bp, Homo sapiens
taaggagccagggag

SEQ ID NO: 589161 - DNA, 15 bp, Homo sapiens
aaggagccagggagg

SEQ ID NO: 589162 - DNA, 15 bp, Homo sapiens
aggagccagggaggt

SEQ ID NO: 589163 - DNA, 15 bp, Homo sapiens
ggagccagggaggtc

SEQ ID NO: 589164 - DNA, 15 bp, Homo sapiens
gagccagggaggtca

SEQ ID NO: 589165 - DNA, 15 bp, Homo sapiens
agccagggaggtcag

SEQ ID NO: 589166 - DNA, 15 bp, Homo sapiens
gccagggaggtcaga

SEQ ID NO: 589167 - DNA, 15 bp, Homo sapiens
ccagggaggtcagag

SEQ ID NO: 589168 - DNA, 15 bp, Homo sapiens
cagggaggtcagaga

SEQ ID NO: 589169 - DNA, 15 bp, Homo sapiens
agggaggtcagagat

SEQ ID NO: 589170 - DNA, 15 bp, Homo sapiens
gggaggtcagagatc

SEQ ID NO: 589171 - DNA, 15 bp, Homo sapiens
ggaggtcagagatca

SEQ ID NO: 589172 - DNA, 15 bp, Homo sapiens
gaggtcagagatcat

SEQ ID NO: 589173 - DNA, 15 bp, Homo sapiens
aggtcagagatcatg

SEQ ID NO: 589174 - DNA, 15 bp, Homo sapiens
ggtcagagatcatgt

SEQ ID NO: 589175 - DNA, 15 bp, Homo sapiens
gtcagagatcatgta

SEQ ID NO: 589176 - DNA, 15 bp, Homo sapiens
tcagagatcatgtat

SEQ ID NO: 589177 - DNA, 15 bp, Homo sapiens
cagagatcatgtatt

SEQ ID NO: 589178 - DNA, 15 bp, Homo sapiens
agagatcatgtatta

SEQ ID NO: 589179 - DNA, 15 bp, Homo sapiens
gagatcatgtattat

SEQ ID NO: 589180 - DNA, 15 bp, Homo sapiens
agatcatgtattatc

SEQ ID NO: 589181 - DNA, 15 bp, Homo sapiens
gatcatgtattatca

SEQ ID NO: 589182 - DNA, 15 bp, Homo sapiens
atcatgtattatcat

SEQ ID NO: 589183 - DNA, 15 bp, Homo sapiens
tcatgtattatcatg

SEQ ID NO: 589184 - DNA, 15 bp, Homo sapiens
catgtattatcatga

SEQ ID NO: 589185 - DNA, 15 bp, Homo sapiens
atgtattatcatgac

SEQ ID NO: 589186 - DNA, 15 bp, Homo sapiens
tgtattatcatgaca

SEQ ID NO: 589187 - DNA, 15 bp, Homo sapiens
gtattatcatgacat

SEQ ID NO: 589188 - DNA, 15 bp, Homo sapiens
tattatcatgacata

SEQ ID NO: 589189 - DNA, 15 bp, Homo sapiens
attatcatgacataa

SEQ ID NO: 589190 - DNA, 15 bp, Homo sapiens
ttatcatgacataaa

SEQ ID NO: 589191 - DNA, 15 bp, Homo sapiens
tatcatgacataaat

SEQ ID NO: 589192 - DNA, 15 bp, Homo sapiens
atcatgacataaata

SEQ ID NO: 589193 - DNA, 15 bp, Homo sapiens
tcatgacataaatat

SEQ ID NO: 589194 - DNA, 15 bp, Homo sapiens
catgacataaatatg

SEQ ID NO: 589195 - DNA, 15 bp, Homo sapiens
atgacataaatatgc

SEQ ID NO: 589196 - DNA, 15 bp, Homo sapiens
tgacataaatatgca

SEQ ID NO: 589197 - DNA, 15 bp, Homo sapiens
gacataaatatgcat

SEQ ID NO: 589198 - DNA, 15 bp, Homo sapiens
acataaatatgcata

SEQ ID NO: 589199 - DNA, 15 bp, Homo sapiens
cataaatatgcataa

SEQ ID NO: 589200 - DNA, 15 bp, Homo sapiens
ataaatatgcataat

SEQ ID NO: 589201 - DNA, 15 bp, Homo sapiens
taaatatgcataatt

SEQ ID NO: 589202 - DNA, 15 bp, Homo sapiens
aaatatgcataattg

SEQ ID NO: 589203 - DNA, 15 bp, Homo sapiens
aatatgcataattgt

SEQ ID NO: 589204 - DNA, 15 bp, Homo sapiens
atatgcataattgta

SEQ ID NO: 589205 - DNA, 15 bp, Homo sapiens
tatgcataattgtac

SEQ ID NO: 589206 - DNA, 15 bp, Homo sapiens
atgcataattgtact

SEQ ID NO: 589207 - DNA, 15 bp, Homo sapiens
tgcataattgtacta

SEQ ID NO: 589208 - DNA, 15 bp, Homo sapiens
gcataattgtactat

SEQ ID NO: 589209 - DNA, 15 bp, Homo sapiens
cataattgtactatt

SEQ ID NO: 589210 - DNA, 15 bp, Homo sapiens
ataattgtactattt

SEQ ID NO: 589211 - DNA, 15 bp, Homo sapiens
taattgtactatttc

SEQ ID NO: 589212 - DNA, 15 bp, Homo sapiens
aattgtactatttct

SEQ ID NO: 589213 - DNA, 15 bp, Homo sapiens
attgtactatttctc

SEQ ID NO: 589214 - DNA, 15 bp, Homo sapiens
ttgtactatttctcc

SEQ ID NO: 589215 - DNA, 15 bp, Homo sapiens
tgtactatttctccc

SEQ ID NO: 589216 - DNA, 15 bp, Homo sapiens
gtactatttctccca

SEQ ID NO: 589217 - DNA, 15 bp, Homo sapiens
tactatttctcccag

SEQ ID NO: 589218 - DNA, 15 bp, Homo sapiens
actatttctcccagt

SEQ ID NO: 589219 - DNA, 15 bp, Homo sapiens
ctatttctcccagta

SEQ ID NO: 589220 - DNA, 15 bp, Homo sapiens
tatttctcccagtaa

SEQ ID NO: 589221 - DNA, 15 bp, Homo sapiens
atttctcccagtaat

SEQ ID NO: 589222 - DNA, 15 bp, Homo sapiens
tttctcccagtaata

SEQ ID NO: 589223 - DNA, 15 bp, Homo sapiens
ttctcccagtaatat

SEQ ID NO: 589224 - DNA, 15 bp, Homo sapiens
tctcccagtaatatt

SEQ ID NO: 589225 - DNA, 15 bp, Homo sapiens
ctcccagtaatattt

SEQ ID NO: 589226 - DNA, 15 bp, Homo sapiens
tcccagtaatattta

SEQ ID NO: 589227 - DNA, 15 bp, Homo sapiens
cccagtaatatttag

SEQ ID NO: 589228 - DNA, 15 bp, Homo sapiens
ccagtaatatttagc

SEQ ID NO: 589229 - DNA, 15 bp, Homo sapiens
cagtaatatttagca

SEQ ID NO: 589230 - DNA, 15 bp, Homo sapiens
agtaatatttagcac

SEQ ID NO: 589231 - DNA, 15 bp, Homo sapiens
gtaatatttagcacc

SEQ ID NO: 589232 - DNA, 15 bp, Homo sapiens
taatatttagcaccc

SEQ ID NO: 589233 - DNA, 15 bp, Homo sapiens
aatatttagcaccca

SEQ ID NO: 589234 - DNA, 15 bp, Homo sapiens
atatttagcacccag

SEQ ID NO: 589235 - DNA, 15 bp, Homo sapiens
tatttagcacccagg

SEQ ID NO: 589236 - DNA, 15 bp, Homo sapiens
atttagcacccaggc

SEQ ID NO: 589237 - DNA, 15 bp, Homo sapiens
tttagcacccaggcc

SEQ ID NO: 589238 - DNA, 15 bp, Homo sapiens
ttagcacccaggccc

SEQ ID NO: 589239 - DNA, 15 bp, Homo sapiens
tagcacccaggcccc

SEQ ID NO: 589240 - DNA, 15 bp, Homo sapiens
agcacccaggccccg

SEQ ID NO: 589241 - DNA, 15 bp, Homo sapiens
gcacccaggccccga

SEQ ID NO: 589242 - DNA, 15 bp, Homo sapiens
cacccaggccccgag

SEQ ID NO: 589243 - DNA, 15 bp, Homo sapiens
acccaggccccgagg

SEQ ID NO: 589244 - DNA, 15 bp, Homo sapiens
cccaggccccgaggc

SEQ ID NO: 589245 - DNA, 15 bp, Homo sapiens
ccaggccccgaggca

SEQ ID NO: 589246 - DNA, 15 bp, Homo sapiens
caggccccgaggcag

SEQ ID NO: 589247 - DNA, 15 bp, Homo sapiens
aggccccgaggcaga

SEQ ID NO: 589248 - DNA, 15 bp, Homo sapiens
ggccccgaggcagag

SEQ ID NO: 589249 - DNA, 15 bp, Homo sapiens
gccccgaggcagagc

SEQ ID NO: 589250 - DNA, 15 bp, Homo sapiens
ccccgaggcagagca

SEQ ID NO: 589251 - DNA, 15 bp, Homo sapiens
cccgaggcagagcaa

SEQ ID NO: 589252 - DNA, 15 bp, Homo sapiens
ccgaggcagagcaag

SEQ ID NO: 589253 - DNA, 15 bp, Homo sapiens
cgaggcagagcaagt

SEQ ID NO: 589254 - DNA, 15 bp, Homo sapiens
gaggcagagcaagtg

SEQ ID NO: 589255 - DNA, 15 bp, Homo sapiens
aggcagagcaagtgg

SEQ ID NO: 589256 - DNA, 15 bp, Homo sapiens
ggcagagcaagtgga

SEQ ID NO: 589257 - DNA, 15 bp, Homo sapiens
gcagagcaagtggag

SEQ ID NO: 589258 - DNA, 15 bp, Homo sapiens
cagagcaagtggaga

SEQ ID NO: 589259 - DNA, 15 bp, Homo sapiens
agagcaagtggagag

SEQ ID NO: 589260 - DNA, 15 bp, Homo sapiens
gagcaagtggagagt

SEQ ID NO: 589261 - DNA, 15 bp, Homo sapiens
agcaagtggagagtg

SEQ ID NO: 589262 - DNA, 15 bp, Homo sapiens
gcaagtggagagtgg

SEQ ID NO: 589263 - DNA, 15 bp, Homo sapiens
caagtggagagtggg

SEQ ID NO: 589264 - DNA, 15 bp, Homo sapiens
aagtggagagtgggt

SEQ ID NO: 589265 - DNA, 15 bp, Homo sapiens
agtggagagtgggtg

SEQ ID NO: 589266 - DNA, 15 bp, Homo sapiens
gtggagagtgggtga

SEQ ID NO: 589267 - DNA, 15 bp, Homo sapiens
tggagagtgggtgat

SEQ ID NO: 589268 - DNA, 15 bp, Homo sapiens
ggagagtgggtgatg

SEQ ID NO: 589269 - DNA, 15 bp, Homo sapiens
gagagtgggtgatgc

SEQ ID NO: 589270 - DNA, 15 bp, Homo sapiens
agagtgggtgatgca

SEQ ID NO: 589271 - DNA, 15 bp, Homo sapiens
gagtgggtgatgcag

SEQ ID NO: 589272 - DNA, 15 bp, Homo sapiens
agtgggtgatgcagg

SEQ ID NO: 589273 - DNA, 15 bp, Homo sapiens
gtgggtgatgcaggg

SEQ ID NO: 589274 - DNA, 15 bp, Homo sapiens
tgggtgatgcagggc

SEQ ID NO: 589275 - DNA, 15 bp, Homo sapiens
gggtgatgcagggct

SEQ ID NO: 589276 - DNA, 15 bp, Homo sapiens
ggtgatgcagggctg

SEQ ID NO: 589277 - DNA, 15 bp, Homo sapiens
gtgatgcagggctgg

SEQ ID NO: 589278 - DNA, 15 bp, Homo sapiens
tgatgcagggctggg

SEQ ID NO: 589279 - DNA, 15 bp, Homo sapiens
gatgcagggctgggg

SEQ ID NO: 589280 - DNA, 15 bp, Homo sapiens
atgcagggctggggg

SEQ ID NO: 589281 - DNA, 15 bp, Homo sapiens
tgcagggctgggggt

SEQ ID NO: 589282 - DNA, 15 bp, Homo sapiens
gcagggctgggggtg

SEQ ID NO: 589283 - DNA, 15 bp, Homo sapiens
cagggctgggggtgt

SEQ ID NO: 589284 - DNA, 15 bp, Homo sapiens
agggctgggggtgtg

SEQ ID NO: 589285 - DNA, 15 bp, Homo sapiens
gggctgggggtgtgt

SEQ ID NO: 589286 - DNA, 15 bp, Homo sapiens
ggctgggggtgtgta

SEQ ID NO: 589287 - DNA, 15 bp, Homo sapiens
gctgggggtgtgtat

SEQ ID NO: 589288 - DNA, 15 bp, Homo sapiens
ctgggggtgtgtatg

SEQ ID NO: 589289 - DNA, 15 bp, Homo sapiens
tgggggtgtgtatgg

SEQ ID NO: 589290 - DNA, 15 bp, Homo sapiens
gggggtgtgtatgga

SEQ ID NO: 589291 - DNA, 15 bp, Homo sapiens
ggggtgtgtatggag

SEQ ID NO: 589292 - DNA, 15 bp, Homo sapiens
gggtgtgtatggagg

SEQ ID NO: 589293 - DNA, 15 bp, Homo sapiens
ggtgtgtatggaggc

SEQ ID NO: 589294 - DNA, 15 bp, Homo sapiens
gtgtgtatggaggca

SEQ ID NO: 589295 - DNA, 15 bp, Homo sapiens
tgtgtatggaggcac

SEQ ID NO: 589296 - DNA, 15 bp, Homo sapiens
gtgtatggaggcacc

SEQ ID NO: 589297 - DNA, 15 bp, Homo sapiens
tgtatggaggcacca

SEQ ID NO: 589298 - DNA, 15 bp, Homo sapiens
gtatggaggcaccac

SEQ ID NO: 589299 - DNA, 15 bp, Homo sapiens
tatggaggcaccaca

SEQ ID NO: 589300 - DNA, 15 bp, Homo sapiens
atggaggcaccacag

SEQ ID NO: 589301 - DNA, 15 bp, Homo sapiens
tggaggcaccacaga

SEQ ID NO: 589302 - DNA, 15 bp, Homo sapiens
ggaggcaccacagaa

SEQ ID NO: 589303 - DNA, 15 bp, Homo sapiens
gaggcaccacagaag

SEQ ID NO: 589304 - DNA, 15 bp, Homo sapiens
aggcaccacagaagg

SEQ ID NO: 589305 - DNA, 15 bp, Homo sapiens
ggcaccacagaaggt

SEQ ID NO: 589306 - DNA, 15 bp, Homo sapiens
gcaccacagaaggtc

SEQ ID NO: 589307 - DNA, 15 bp, Homo sapiens
caccacagaaggtca

SEQ ID NO: 589308 - DNA, 15 bp, Homo sapiens
accacagaaggtcaa

SEQ ID NO: 589309 - DNA, 15 bp, Homo sapiens
ccacagaaggtcaac

SEQ ID NO: 589310 - DNA, 15 bp, Homo sapiens
cacagaaggtcaaca

SEQ ID NO: 589311 - DNA, 15 bp, Homo sapiens
acagaaggtcaacag

SEQ ID NO: 589312 - DNA, 15 bp, Homo sapiens
cagaaggtcaacagg

SEQ ID NO: 589313 - DNA, 15 bp, Homo sapiens
agaaggtcaacaggc

SEQ ID NO: 589314 - DNA, 15 bp, Homo sapiens
gaaggtcaacaggca

SEQ ID NO: 589315 - DNA, 15 bp, Homo sapiens
aaggtcaacaggcag

SEQ ID NO: 589316 - DNA, 15 bp, Homo sapiens
aggtcaacaggcagc

SEQ ID NO: 589317 - DNA, 15 bp, Homo sapiens
ggtcaacaggcagcg

SEQ ID NO: 589318 - DNA, 15 bp, Homo sapiens
gtcaacaggcagcgg

SEQ ID NO: 589319 - DNA, 15 bp, Homo sapiens
tcaacaggcagcggg

SEQ ID NO: 589320 - DNA, 15 bp, Homo sapiens
caacaggcagcgggc

SEQ ID NO: 589321 - DNA, 15 bp, Homo sapiens
aacaggcagcgggct

SEQ ID NO: 589322 - DNA, 15 bp, Homo sapiens
acaggcagcgggctg

SEQ ID NO: 589323 - DNA, 15 bp, Homo sapiens
caggcagcgggctga

SEQ ID NO: 589324 - DNA, 15 bp, Homo sapiens
aggcagcgggctgaa

SEQ ID NO: 589325 - DNA, 15 bp, Homo sapiens
ggcagcgggctgaag

SEQ ID NO: 589326 - DNA, 15 bp, Homo sapiens
gcagcgggctgaagg

SEQ ID NO: 589327 - DNA, 15 bp, Homo sapiens
cagcgggctgaaggc

SEQ ID NO: 589328 - DNA, 15 bp, Homo sapiens
agcgggctgaaggca

SEQ ID NO: 589329 - DNA, 15 bp, Homo sapiens
gcgggctgaaggcag

SEQ ID NO: 589330 - DNA, 15 bp, Homo sapiens
cgggctgaaggcagg

SEQ ID NO: 589331 - DNA, 15 bp, Homo sapiens
gggctgaaggcaggg

SEQ ID NO: 589332 - DNA, 15 bp, Homo sapiens
ggctgaaggcaggga

SEQ ID NO: 589333 - DNA, 15 bp, Homo sapiens
gctgaaggcagggac

SEQ ID NO: 589334 - DNA, 15 bp, Homo sapiens
ctgaaggcagggact

SEQ ID NO: 589335 - DNA, 15 bp, Homo sapiens
tgaaggcagggactg

SEQ ID NO: 589336 - DNA, 15 bp, Homo sapiens
gaaggcagggactgg

SEQ ID NO: 589337 - DNA, 15 bp, Homo sapiens
aaggcagggactgga

SEQ ID NO: 589338 - DNA, 15 bp, Homo sapiens
aggcagggactggac

SEQ ID NO: 589339 - DNA, 15 bp, Homo sapiens
ggcagggactggact

SEQ ID NO: 589340 - DNA, 15 bp, Homo sapiens
gcagggactggacta

SEQ ID NO: 589341 - DNA, 15 bp, Homo sapiens
cagggactggactac

SEQ ID NO: 589342 - DNA, 15 bp, Homo sapiens
agggactggactaca

SEQ ID NO: 589343 - DNA, 15 bp, Homo sapiens
gggactggactacat

SEQ ID NO: 589344 - DNA, 15 bp, Homo sapiens
ggactggactacatg

SEQ ID NO: 589345 - DNA, 15 bp, Homo sapiens
gactggactacatgc

SEQ ID NO: 589346 - DNA, 15 bp, Homo sapiens
actggactacatgca

SEQ ID NO: 589347 - DNA, 15 bp, Homo sapiens
ctggactacatgcat

SEQ ID NO: 589348 - DNA, 15 bp, Homo sapiens
tggactacatgcatc

SEQ ID NO: 589349 - DNA, 15 bp, Homo sapiens
ggactacatgcatca

SEQ ID NO: 589350 - DNA, 15 bp, Homo sapiens
gactacatgcatcaa

SEQ ID NO: 589351 - DNA, 15 bp, Homo sapiens
actacatgcatcaag

SEQ ID NO: 589352 - DNA, 15 bp, Homo sapiens
ctacatgcatcaagt

SEQ ID NO: 589353 - DNA, 15 bp, Homo sapiens
tacatgcatcaagtc

SEQ ID NO: 589354 - DNA, 15 bp, Homo sapiens
acatgcatcaagtcc

SEQ ID NO: 589355 - DNA, 15 bp, Homo sapiens
catgcatcaagtcca

SEQ ID NO: 589356 - DNA, 15 bp, Homo sapiens
atgcatcaagtccag

SEQ ID NO: 589357 - DNA, 15 bp, Homo sapiens
tgcatcaagtccagg

SEQ ID NO: 589358 - DNA, 15 bp, Homo sapiens
gcatcaagtccaggc

SEQ ID NO: 589359 - DNA, 15 bp, Homo sapiens
catcaagtccaggct

SEQ ID NO: 589360 - DNA, 15 bp, Homo sapiens
atcaagtccaggctg

SEQ ID NO: 589361 - DNA, 15 bp, Homo sapiens
tcaagtccaggctgc

SEQ ID NO: 589362 - DNA, 15 bp, Homo sapiens
caagtccaggctgca

SEQ ID NO: 589363 - DNA, 15 bp, Homo sapiens
aagtccaggctgcac

SEQ ID NO: 589364 - DNA, 15 bp, Homo sapiens
agtccaggctgcacg

SEQ ID NO: 589365 - DNA, 15 bp, Homo sapiens
gtccaggctgcacga

SEQ ID NO: 589366 - DNA, 15 bp, Homo sapiens
tccaggctgcacgag

SEQ ID NO: 589367 - DNA, 15 bp, Homo sapiens
ccaggctgcacgagg

SEQ ID NO: 589368 - DNA, 15 bp, Homo sapiens
caggctgcacgagga

SEQ ID NO: 589369 - DNA, 15 bp, Homo sapiens
aggctgcacgaggaa

SEQ ID NO: 589370 - DNA, 15 bp, Homo sapiens
ggctgcacgaggaag

SEQ ID NO: 589371 - DNA, 15 bp, Homo sapiens
gctgcacgaggaagg

SEQ ID NO: 589372 - DNA, 15 bp, Homo sapiens
ctgcacgaggaagga

SEQ ID NO: 589373 - DNA, 15 bp, Homo sapiens
tgcacgaggaaggat

SEQ ID NO: 589374 - DNA, 15 bp, Homo sapiens
gcacgaggaaggatg

SEQ ID NO: 589375 - DNA, 15 bp, Homo sapiens
cacgaggaaggatga

SEQ ID NO: 589376 - DNA, 15 bp, Homo sapiens
acgaggaaggatgag

SEQ ID NO: 589377 - DNA, 15 bp, Homo sapiens
cgaggaaggatgaga

SEQ ID NO: 589378 - DNA, 15 bp, Homo sapiens
gaggaaggatgagaa

SEQ ID NO: 589379 - DNA, 15 bp, Homo sapiens
aggaaggatgagaag

SEQ ID NO: 589380 - DNA, 15 bp, Homo sapiens
ggaaggatgagaagg

SEQ ID NO: 589381 - DNA, 15 bp, Homo sapiens
gaaggatgagaaggc

SEQ ID NO: 589382 - DNA, 15 bp, Homo sapiens
aaggatgagaaggca

SEQ ID NO: 589383 - DNA, 15 bp, Homo sapiens
aggatgagaaggcag

SEQ ID NO: 589384 - DNA, 15 bp, Homo sapiens
ggatgagaaggcaga

SEQ ID NO: 589385 - DNA, 15 bp, Homo sapiens
gatgagaaggcagat

SEQ ID NO: 589386 - DNA, 15 bp, Homo sapiens
atgagaaggcagatg

SEQ ID NO: 589387 - DNA, 15 bp, Homo sapiens
tgagaaggcagatga

SEQ ID NO: 589388 - DNA, 15 bp, Homo sapiens
gagaaggcagatgag

SEQ ID NO: 589389 - DNA, 15 bp, Homo sapiens
agaaggcagatgagc

SEQ ID NO: 589390 - DNA, 15 bp, Homo sapiens
gaaggcagatgagca

SEQ ID NO: 589391 - DNA, 15 bp, Homo sapiens
aaggcagatgagcac

SEQ ID NO: 589392 - DNA, 15 bp, Homo sapiens
aggcagatgagcacg

SEQ ID NO: 589393 - DNA, 15 bp, Homo sapiens
ggcagatgagcacgg

SEQ ID NO: 589394 - DNA, 15 bp, Homo sapiens
gcagatgagcacgga

SEQ ID NO: 589395 - DNA, 15 bp, Homo sapiens
cagatgagcacggaa

SEQ ID NO: 589396 - DNA, 15 bp, Homo sapiens
agatgagcacggaaa

SEQ ID NO: 589397 - DNA, 15 bp, Homo sapiens
gatgagcacggaaat

SEQ ID NO: 589398 - DNA, 15 bp, Homo sapiens
atgagcacggaaatg

SEQ ID NO: 589399 - DNA, 15 bp, Homo sapiens
tgagcacggaaatgg

SEQ ID NO: 589400 - DNA, 15 bp, Homo sapiens
gagcacggaaatgga

SEQ ID NO: 589401 - DNA, 15 bp, Homo sapiens
agcacggaaatggac

SEQ ID NO: 589402 - DNA, 15 bp, Homo sapiens
gcacggaaatggact

SEQ ID NO: 589403 - DNA, 15 bp, Homo sapiens
cacggaaatggactg

SEQ ID NO: 589404 - DNA, 15 bp, Homo sapiens
acggaaatggactgg

SEQ ID NO: 589405 - DNA, 15 bp, Homo sapiens
cggaaatggactggg

SEQ ID NO: 589406 - DNA, 15 bp, Homo sapiens
ggaaatggactgggg

SEQ ID NO: 589407 - DNA, 15 bp, Homo sapiens
gaaatggactggggg

SEQ ID NO: 589408 - DNA, 15 bp, Homo sapiens
aaatggactggggga

SEQ ID NO: 589409 - DNA, 15 bp, Homo sapiens
aatggactgggggaa

SEQ ID NO: 589410 - DNA, 15 bp, Homo sapiens
atggactgggggaaa

SEQ ID NO: 589411 - DNA, 15 bp, Homo sapiens
tggactgggggaaat

SEQ ID NO: 589412 - DNA, 15 bp, Homo sapiens
ggactgggggaaatg

SEQ ID NO: 589413 - DNA, 15 bp, Homo sapiens
gactgggggaaatga

SEQ ID NO: 589414 - DNA, 15 bp, Homo sapiens
actgggggaaatgaa

SEQ ID NO: 589415 - DNA, 15 bp, Homo sapiens
ctgggggaaatgaag

SEQ ID NO: 589416 - DNA, 15 bp, Homo sapiens
tgggggaaatgaaga

SEQ ID NO: 589417 - DNA, 15 bp, Homo sapiens
gggggaaatgaagag

SEQ ID NO: 589418 - DNA, 15 bp, Homo sapiens
ggggaaatgaagagg

SEQ ID NO: 589419 - DNA, 15 bp, Homo sapiens
gggaaatgaagaggc

SEQ ID NO: 589420 - DNA, 15 bp, Homo sapiens
ggaaatgaagaggca

SEQ ID NO: 589421 - DNA, 15 bp, Homo sapiens
gaaatgaagaggcaa

SEQ ID NO: 589422 - DNA, 15 bp, Homo sapiens
aaatgaagaggcaag

SEQ ID NO: 589423 - DNA, 15 bp, Homo sapiens
aatgaagaggcaagg

SEQ ID NO: 589424 - DNA, 15 bp, Homo sapiens
atgaagaggcaaggg

SEQ ID NO: 589425 - DNA, 15 bp, Homo sapiens
tgaagaggcaaggga

SEQ ID NO: 589426 - DNA, 15 bp, Homo sapiens
gaagaggcaagggaa

SEQ ID NO: 589427 - DNA, 15 bp, Homo sapiens
aagaggcaagggaat

SEQ ID NO: 589428 - DNA, 15 bp, Homo sapiens
agaggcaagggaata

SEQ ID NO: 589429 - DNA, 15 bp, Homo sapiens
gaggcaagggaatag

SEQ ID NO: 589430 - DNA, 15 bp, Homo sapiens
aggcaagggaataga

SEQ ID NO: 589431 - DNA, 15 bp, Homo sapiens
ggcaagggaatagaa

SEQ ID NO: 589432 - DNA, 15 bp, Homo sapiens
gcaagggaatagaag

SEQ ID NO: 589433 - DNA, 15 bp, Homo sapiens
caagggaatagaagt

SEQ ID NO: 589434 - DNA, 15 bp, Homo sapiens
aagggaatagaagtc

SEQ ID NO: 589435 - DNA, 15 bp, Homo sapiens
agggaatagaagtct

SEQ ID NO: 589436 - DNA, 15 bp, Homo sapiens
gggaatagaagtctc

SEQ ID NO: 589437 - DNA, 15 bp, Homo sapiens
ggaatagaagtctca

SEQ ID NO: 589438 - DNA, 15 bp, Homo sapiens
gaatagaagtctcag

SEQ ID NO: 589439 - DNA, 15 bp, Homo sapiens
aatagaagtctcagt

SEQ ID NO: 589440 - DNA, 15 bp, Homo sapiens
atagaagtctcagtg

SEQ ID NO: 589441 - DNA, 15 bp, Homo sapiens
tagaagtctcagtgg

SEQ ID NO: 589442 - DNA, 15 bp, Homo sapiens
agaagtctcagtggg

SEQ ID NO: 589443 - DNA, 15 bp, Homo sapiens
gaagtctcagtgggt

SEQ ID NO: 589444 - DNA, 15 bp, Homo sapiens
aagtctcagtgggtg

SEQ ID NO: 589445 - DNA, 15 bp, Homo sapiens
agtctcagtgggtgc

SEQ ID NO: 589446 - DNA, 15 bp, Homo sapiens
gtctcagtgggtgcc

SEQ ID NO: 589447 - DNA, 15 bp, Homo sapiens
tctcagtgggtgcca

SEQ ID NO: 589448 - DNA, 15 bp, Homo sapiens
ctcagtgggtgccat

SEQ ID NO: 589449 - DNA, 15 bp, Homo sapiens
tcagtgggtgccatg

SEQ ID NO: 589450 - DNA, 15 bp, Homo sapiens
cagtgggtgccatga

SEQ ID NO: 589451 - DNA, 15 bp, Homo sapiens
agtgggtgccatgac

SEQ ID NO: 589452 - DNA, 15 bp, Homo sapiens
gtgggtgccatgacc

SEQ ID NO: 589453 - DNA, 15 bp, Homo sapiens
tgggtgccatgaccc

SEQ ID NO: 589454 - DNA, 15 bp, Homo sapiens
gggtgccatgaccct

SEQ ID NO: 589455 - DNA, 15 bp, Homo sapiens
ggtgccatgaccctg

SEQ ID NO: 589456 - DNA, 15 bp, Homo sapiens
gtgccatgaccctgt

SEQ ID NO: 589457 - DNA, 15 bp, Homo sapiens
tgccatgaccctgtt

SEQ ID NO: 589458 - DNA, 15 bp, Homo sapiens
gccatgaccctgttt

SEQ ID NO: 589459 - DNA, 15 bp, Homo sapiens
ccatgaccctgttta

SEQ ID NO: 589460 - DNA, 15 bp, Homo sapiens
catgaccctgtttaa

SEQ ID NO: 589461 - DNA, 15 bp, Homo sapiens
atgaccctgtttaag

SEQ ID NO: 589462 - DNA, 15 bp, Homo sapiens
tgaccctgtttaagt

SEQ ID NO: 589463 - DNA, 15 bp, Homo sapiens
gaccctgtttaagtg

SEQ ID NO: 589464 - DNA, 15 bp, Homo sapiens
accctgtttaagtga

SEQ ID NO: 589465 - DNA, 15 bp, Homo sapiens
ccctgtttaagtgat

SEQ ID NO: 589466 - DNA, 15 bp, Homo sapiens
cctgtttaagtgatt

SEQ ID NO: 589467 - DNA, 15 bp, Homo sapiens
ctgtttaagtgattg

SEQ ID NO: 589468 - DNA, 15 bp, Homo sapiens
tgtttaagtgattga

SEQ ID NO: 589469 - DNA, 15 bp, Homo sapiens
gtttaagtgattgag

SEQ ID NO: 589470 - DNA, 15 bp, Homo sapiens
tttaagtgattgaga

SEQ ID NO: 589471 - DNA, 15 bp, Homo sapiens
ttaagtgattgagaa

SEQ ID NO: 589472 - DNA, 15 bp, Homo sapiens
taagtgattgagaaa

SEQ ID NO: 589473 - DNA, 15 bp, Homo sapiens
aagtgattgagaaaa

SEQ ID NO: 589474 - DNA, 15 bp, Homo sapiens
agtgattgagaaaat

SEQ ID NO: 589475 - DNA, 15 bp, Homo sapiens
gtgattgagaaaatg

SEQ ID NO: 589476 - DNA, 15 bp, Homo sapiens
tgattgagaaaatga

SEQ ID NO: 589477 - DNA, 15 bp, Homo sapiens
gattgagaaaatgaa

SEQ ID NO: 589478 - DNA, 15 bp, Homo sapiens
attgagaaaatgaac

SEQ ID NO: 589479 - DNA, 15 bp, Homo sapiens
ttgagaaaatgaaca

SEQ ID NO: 589480 - DNA, 15 bp, Homo sapiens
tgagaaaatgaacaa

SEQ ID NO: 589481 - DNA, 15 bp, Homo sapiens
gagaaaatgaacaag

SEQ ID NO: 589482 - DNA, 15 bp, Homo sapiens
agaaaatgaacaaga

SEQ ID NO: 589483 - DNA, 15 bp, Homo sapiens
gaaaatgaacaagat

SEQ ID NO: 589484 - DNA, 15 bp, Homo sapiens
aaaatgaacaagatg

SEQ ID NO: 589485 - DNA, 15 bp, Homo sapiens
aaatgaacaagatga

SEQ ID NO: 589486 - DNA, 15 bp, Homo sapiens
aatgaacaagatgaa

SEQ ID NO: 589487 - DNA, 15 bp, Homo sapiens
atgaacaagatgaaa

SEQ ID NO: 589488 - DNA, 15 bp, Homo sapiens
tgaacaagatgaaaa

SEQ ID NO: 589489 - DNA, 15 bp, Homo sapiens
gaacaagatgaaaag

SEQ ID NO: 589490 - DNA, 15 bp, Homo sapiens
aacaagatgaaaagg

SEQ ID NO: 589491 - DNA, 15 bp, Homo sapiens
acaagatgaaaaggt

SEQ ID NO: 589492 - DNA, 15 bp, Homo sapiens
caagatgaaaaggtt

SEQ ID NO: 589493 - DNA, 15 bp, Homo sapiens
aagatgaaaaggtta

SEQ ID NO: 589494 - DNA, 15 bp, Homo sapiens
agatgaaaaggttaa

SEQ ID NO: 589495 - DNA, 15 bp, Homo sapiens
gatgaaaaggttaat

SEQ ID NO: 589496 - DNA, 15 bp, Homo sapiens
atgaaaaggttaatg

SEQ ID NO: 589497 - DNA, 15 bp, Homo sapiens
tgaaaaggttaatgg

SEQ ID NO: 589498 - DNA, 15 bp, Homo sapiens
gaaaaggttaatggc

SEQ ID NO: 589499 - DNA, 15 bp, Homo sapiens
aaaaggttaatggct

SEQ ID NO: 589500 - DNA, 15 bp, Homo sapiens
aaaggttaatggctg

SEQ ID NO: 589501 - DNA, 15 bp, Homo sapiens
aaggttaatggctgt

SEQ ID NO: 589502 - DNA, 15 bp, Homo sapiens
aggttaatggctgtg

SEQ ID NO: 589503 - DNA, 15 bp, Homo sapiens
ggttaatggctgtgg

SEQ ID NO: 589504 - DNA, 15 bp, Homo sapiens
gttaatggctgtggt

SEQ ID NO: 589505 - DNA, 15 bp, Homo sapiens
ttaatggctgtggtc

SEQ ID NO: 589506 - DNA, 15 bp, Homo sapiens
taatggctgtggtca

SEQ ID NO: 589507 - DNA, 15 bp, Homo sapiens
aatggctgtggtcag

SEQ ID NO: 589508 - DNA, 15 bp, Homo sapiens
atggctgtggtcaga

SEQ ID NO: 589509 - DNA, 15 bp, Homo sapiens
tggctgtggtcagaa

SEQ ID NO: 589510 - DNA, 15 bp, Homo sapiens
ggctgtggtcagaaa

SEQ ID NO: 589511 - DNA, 15 bp, Homo sapiens
gctgtggtcagaaag

SEQ ID NO: 589512 - DNA, 15 bp, Homo sapiens
ctgtggtcagaaagt

SEQ ID NO: 589513 - DNA, 15 bp, Homo sapiens
tgtggtcagaaagtg

SEQ ID NO: 589514 - DNA, 15 bp, Homo sapiens
gtggtcagaaagtga

SEQ ID NO: 589515 - DNA, 15 bp, Homo sapiens
tggtcagaaagtgaa

SEQ ID NO: 589516 - DNA, 15 bp, Homo sapiens
ggtcagaaagtgaaa

SEQ ID NO: 589517 - DNA, 15 bp, Homo sapiens
gtcagaaagtgaaat

SEQ ID NO: 589518 - DNA, 15 bp, Homo sapiens
tcagaaagtgaaata

SEQ ID NO: 589519 - DNA, 15 bp, Homo sapiens
cagaaagtgaaatat

SEQ ID NO: 589520 - DNA, 15 bp, Homo sapiens
agaaagtgaaatatg

SEQ ID NO: 589521 - DNA, 15 bp, Homo sapiens
gaaagtgaaatatgt

SEQ ID NO: 589522 - DNA, 15 bp, Homo sapiens
aaagtgaaatatgtg

SEQ ID NO: 589523 - DNA, 15 bp, Homo sapiens
aagtgaaatatgtga

SEQ ID NO: 589524 - DNA, 15 bp, Homo sapiens
agtgaaatatgtgaa

SEQ ID NO: 589525 - DNA, 15 bp, Homo sapiens
gtgaaatatgtgaat

SEQ ID NO: 589526 - DNA, 15 bp, Homo sapiens
tgaaatatgtgaatt

SEQ ID NO: 589527 - DNA, 15 bp, Homo sapiens
gaaatatgtgaattc

SEQ ID NO: 589528 - DNA, 15 bp, Homo sapiens
aaatatgtgaattca

SEQ ID NO: 589529 - DNA, 15 bp, Homo sapiens
aatatgtgaattcag

SEQ ID NO: 589530 - DNA, 15 bp, Homo sapiens
atatgtgaattcagg

SEQ ID NO: 589531 - DNA, 15 bp, Homo sapiens
tatgtgaattcagga

SEQ ID NO: 589532 - DNA, 15 bp, Homo sapiens
atgtgaattcaggat

SEQ ID NO: 589533 - DNA, 15 bp, Homo sapiens
tgtgaattcaggatt

SEQ ID NO: 589534 - DNA, 15 bp, Homo sapiens
gtgaattcaggattt

SEQ ID NO: 589535 - DNA, 15 bp, Homo sapiens
tgaattcaggatttc

SEQ ID NO: 589536 - DNA, 15 bp, Homo sapiens
gaattcaggatttcg

SEQ ID NO: 589537 - DNA, 15 bp, Homo sapiens
aattcaggatttcga

SEQ ID NO: 589538 - DNA, 15 bp, Homo sapiens
attcaggatttcgaa

SEQ ID NO: 589539 - DNA, 15 bp, Homo sapiens
ttcaggatttcgaag

SEQ ID NO: 589540 - DNA, 15 bp, Homo sapiens
tcaggatttcgaagg

SEQ ID NO: 589541 - DNA, 15 bp, Homo sapiens
caggatttcgaaggt

SEQ ID NO: 589542 - DNA, 15 bp, Homo sapiens
aggatttcgaaggta

SEQ ID NO: 589543 - DNA, 15 bp, Homo sapiens
ggatttcgaaggtag

SEQ ID NO: 589544 - DNA, 15 bp, Homo sapiens
gatttcgaaggtagg

SEQ ID NO: 589545 - DNA, 15 bp, Homo sapiens
atttcgaaggtaggg

SEQ ID NO: 589546 - DNA, 15 bp, Homo sapiens
tttcgaaggtagggt

SEQ ID NO: 589547 - DNA, 15 bp, Homo sapiens
ttcgaaggtagggtg

SEQ ID NO: 589548 - DNA, 15 bp, Homo sapiens
tcgaaggtagggtgg

SEQ ID NO: 589549 - DNA, 15 bp, Homo sapiens
cgaaggtagggtggg

SEQ ID NO: 589550 - DNA, 15 bp, Homo sapiens
gaaggtagggtgggt

SEQ ID NO: 589551 - DNA, 15 bp, Homo sapiens
aaggtagggtgggtg

SEQ ID NO: 589552 - DNA, 15 bp, Homo sapiens
aggtagggtgggtga

SEQ ID NO: 589553 - DNA, 15 bp, Homo sapiens
ggtagggtgggtgat

SEQ ID NO: 589554 - DNA, 15 bp, Homo sapiens
gtagggtgggtgatg

SEQ ID NO: 589555 - DNA, 15 bp, Homo sapiens
tagggtgggtgatga

SEQ ID NO: 589556 - DNA, 15 bp, Homo sapiens
agggtgggtgatgac

SEQ ID NO: 589557 - DNA, 15 bp, Homo sapiens
gggtgggtgatgact

SEQ ID NO: 589558 - DNA, 15 bp, Homo sapiens
ggtgggtgatgactg

SEQ ID NO: 589559 - DNA, 15 bp, Homo sapiens
gtgggtgatgactgg

SEQ ID NO: 589560 - DNA, 15 bp, Homo sapiens
tgggtgatgactggc

SEQ ID NO: 589561 - DNA, 15 bp, Homo sapiens
gggtgatgactggcc

SEQ ID NO: 589562 - DNA, 15 bp, Homo sapiens
ggtgatgactggccc

SEQ ID NO: 589563 - DNA, 15 bp, Homo sapiens
gtgatgactggcccc

SEQ ID NO: 589564 - DNA, 15 bp, Homo sapiens
tgatgactggccccc

SEQ ID NO: 589565 - DNA, 15 bp, Homo sapiens
gatgactggccccca

SEQ ID NO: 589566 - DNA, 15 bp, Homo sapiens
atgactggcccccag

SEQ ID NO: 589567 - DNA, 15 bp, Homo sapiens
tgactggcccccaga

SEQ ID NO: 589568 - DNA, 15 bp, Homo sapiens
gactggcccccagat

SEQ ID NO: 589569 - DNA, 15 bp, Homo sapiens
actggcccccagatg

SEQ ID NO: 589570 - DNA, 15 bp, Homo sapiens
ctggcccccagatgc

SEQ ID NO: 589571 - DNA, 15 bp, Homo sapiens
tggcccccagatgcg

SEQ ID NO: 589572 - DNA, 15 bp, Homo sapiens
ggcccccagatgcgg

SEQ ID NO: 589573 - DNA, 15 bp, Homo sapiens
gcccccagatgcggc

SEQ ID NO: 589574 - DNA, 15 bp, Homo sapiens
cccccagatgcggcc

SEQ ID NO: 589575 - DNA, 15 bp, Homo sapiens
ccccagatgcggcca

SEQ ID NO: 589576 - DNA, 15 bp, Homo sapiens
cccagatgcggccat

SEQ ID NO: 589577 - DNA, 15 bp, Homo sapiens
ccagatgcggccatg

SEQ ID NO: 589578 - DNA, 15 bp, Homo sapiens
cagatgcggccatgg

SEQ ID NO: 589579 - DNA, 15 bp, Homo sapiens
agatgcggccatggt

SEQ ID NO: 589580 - DNA, 15 bp, Homo sapiens
gatgcggccatggtg

SEQ ID NO: 589581 - DNA, 15 bp, Homo sapiens
atgcggccatggtga

SEQ ID NO: 589582 - DNA, 15 bp, Homo sapiens
tgcggccatggtgaa

SEQ ID NO: 589583 - DNA, 15 bp, Homo sapiens
gcggccatggtgaag

SEQ ID NO: 589584 - DNA, 15 bp, Homo sapiens
cggccatggtgaagt

SEQ ID NO: 589585 - DNA, 15 bp, Homo sapiens
ggccatggtgaagtg

SEQ ID NO: 589586 - DNA, 15 bp, Homo sapiens
gccatggtgaagtgg

SEQ ID NO: 589587 - DNA, 15 bp, Homo sapiens
ccatggtgaagtggg

SEQ ID NO: 589588 - DNA, 15 bp, Homo sapiens
catggtgaagtgggg

SEQ ID NO: 589589 - DNA, 15 bp, Homo sapiens
atggtgaagtggggc

SEQ ID NO: 589590 - DNA, 15 bp, Homo sapiens
tggtgaagtggggca

SEQ ID NO: 589591 - DNA, 15 bp, Homo sapiens
ggtgaagtggggcaa

SEQ ID NO: 589592 - DNA, 15 bp, Homo sapiens
gtgaagtggggcaaa

SEQ ID NO: 589593 - DNA, 15 bp, Homo sapiens
tgaagtggggcaaag

SEQ ID NO: 589594 - DNA, 15 bp, Homo sapiens
gaagtggggcaaagg

SEQ ID NO: 589595 - DNA, 15 bp, Homo sapiens
aagtggggcaaaggt

SEQ ID NO: 589596 - DNA, 15 bp, Homo sapiens
agtggggcaaaggtg

SEQ ID NO: 589597 - DNA, 15 bp, Homo sapiens
gtggggcaaaggtgc

SEQ ID NO: 589598 - DNA, 15 bp, Homo sapiens
tggggcaaaggtgca

SEQ ID NO: 589599 - DNA, 15 bp, Homo sapiens
ggggcaaaggtgcag

SEQ ID NO: 589600 - DNA, 15 bp, Homo sapiens
gggcaaaggtgcagg

SEQ ID NO: 589601 - DNA, 15 bp, Homo sapiens
ggcaaaggtgcaggt

SEQ ID NO: 589602 - DNA, 15 bp, Homo sapiens
gcaaaggtgcaggtg

SEQ ID NO: 589603 - DNA, 15 bp, Homo sapiens
caaaggtgcaggtgc

SEQ ID NO: 589604 - DNA, 15 bp, Homo sapiens
aaaggtgcaggtgca

SEQ ID NO: 589605 - DNA, 15 bp, Homo sapiens
aaggtgcaggtgcat

SEQ ID NO: 589606 - DNA, 15 bp, Homo sapiens
aggtgcaggtgcatg

SEQ ID NO: 589607 - DNA, 15 bp, Homo sapiens
ggtgcaggtgcatgg

SEQ ID NO: 589608 - DNA, 15 bp, Homo sapiens
gtgcaggtgcatggt

SEQ ID NO: 589609 - DNA, 15 bp, Homo sapiens
tgcaggtgcatggtg

SEQ ID NO: 589610 - DNA, 15 bp, Homo sapiens
gcaggtgcatggtga

SEQ ID NO: 589611 - DNA, 15 bp, Homo sapiens
caggtgcatggtgag

SEQ ID NO: 589612 - DNA, 15 bp, Homo sapiens
aggtgcatggtgagg

SEQ ID NO: 589613 - DNA, 15 bp, Homo sapiens
ggtgcatggtgaggg

SEQ ID NO: 589614 - DNA, 15 bp, Homo sapiens
gtgcatggtgagggg

SEQ ID NO: 589615 - DNA, 15 bp, Homo sapiens
tgcatggtgagggga

SEQ ID NO: 589616 - DNA, 15 bp, Homo sapiens
gcatggtgaggggaa

SEQ ID NO: 589617 - DNA, 15 bp, Homo sapiens
catggtgaggggaag

SEQ ID NO: 589618 - DNA, 15 bp, Homo sapiens
atggtgaggggaagg

SEQ ID NO: 589619 - DNA, 15 bp, Homo sapiens
tggtgaggggaagga

SEQ ID NO: 589620 - DNA, 15 bp, Homo sapiens
ggtgaggggaaggag

SEQ ID NO: 589621 - DNA, 15 bp, Homo sapiens
gtgaggggaaggagg

SEQ ID NO: 589622 - DNA, 15 bp, Homo sapiens
tgaggggaaggagga

SEQ ID NO: 589623 - DNA, 15 bp, Homo sapiens
gaggggaaggaggaa

SEQ ID NO: 589624 - DNA, 15 bp, Homo sapiens
aggggaaggaggaaa

SEQ ID NO: 589625 - DNA, 15 bp, Homo sapiens
ggggaaggaggaaat

SEQ ID NO: 589626 - DNA, 15 bp, Homo sapiens
gggaaggaggaaatg

SEQ ID NO: 589627 - DNA, 15 bp, Homo sapiens
ggaaggaggaaatgg

SEQ ID NO: 589628 - DNA, 15 bp, Homo sapiens
gaaggaggaaatggg

SEQ ID NO: 589629 - DNA, 15 bp, Homo sapiens
aaggaggaaatggga

SEQ ID NO: 589630 - DNA, 15 bp, Homo sapiens
aggaggaaatgggag

SEQ ID NO: 589631 - DNA, 15 bp, Homo sapiens
ggaggaaatgggagg

SEQ ID NO: 589632 - DNA, 15 bp, Homo sapiens
gaggaaatgggaggt

SEQ ID NO: 589633 - DNA, 15 bp, Homo sapiens
aggaaatgggaggtg

SEQ ID NO: 589634 - DNA, 15 bp, Homo sapiens
ggaaatgggaggtga

SEQ ID NO: 589635 - DNA, 15 bp, Homo sapiens
gaaatgggaggtgat

SEQ ID NO: 589636 - DNA, 15 bp, Homo sapiens
aaatgggaggtgatg

SEQ ID NO: 589637 - DNA, 15 bp, Homo sapiens
aatgggaggtgatga

SEQ ID NO: 589638 - DNA, 15 bp, Homo sapiens
atgggaggtgatgat

SEQ ID NO: 589639 - DNA, 15 bp, Homo sapiens
tgggaggtgatgatg

SEQ ID NO: 589640 - DNA, 15 bp, Homo sapiens
gggaggtgatgatgt

SEQ ID NO: 589641 - DNA, 15 bp, Homo sapiens
ggaggtgatgatgtt

SEQ ID NO: 589642 - DNA, 15 bp, Homo sapiens
gaggtgatgatgttg

SEQ ID NO: 589643 - DNA, 15 bp, Homo sapiens
aggtgatgatgttgg

SEQ ID NO: 589644 - DNA, 15 bp, Homo sapiens
ggtgatgatgttggc

SEQ ID NO: 589645 - DNA, 15 bp, Homo sapiens
gtgatgatgttggcc

SEQ ID NO: 589646 - DNA, 15 bp, Homo sapiens
tgatgatgttggccc

SEQ ID NO: 589647 - DNA, 15 bp, Homo sapiens
gatgatgttggcccc

SEQ ID NO: 589648 - DNA, 15 bp, Homo sapiens
atgatgttggcccca

SEQ ID NO: 589649 - DNA, 15 bp, Homo sapiens
tgatgttggccccac

SEQ ID NO: 589650 - DNA, 15 bp, Homo sapiens
gatgttggccccaca

SEQ ID NO: 589651 - DNA, 15 bp, Homo sapiens
atgttggccccacac

SEQ ID NO: 589652 - DNA, 15 bp, Homo sapiens
tgttggccccacacg

SEQ ID NO: 589653 - DNA, 15 bp, Homo sapiens
gttggccccacacgg

SEQ ID NO: 589654 - DNA, 15 bp, Homo sapiens
ttggccccacacgga

SEQ ID NO: 589655 - DNA, 15 bp, Homo sapiens
tggccccacacggac

SEQ ID NO: 589656 - DNA, 15 bp, Homo sapiens
ggccccacacggaca

SEQ ID NO: 589657 - DNA, 15 bp, Homo sapiens
gccccacacggacac

SEQ ID NO: 589658 - DNA, 15 bp, Homo sapiens
ccccacacggacacc

SEQ ID NO: 589659 - DNA, 15 bp, Homo sapiens
cccacacggacacca

SEQ ID NO: 589660 - DNA, 15 bp, Homo sapiens
ccacacggacaccac

SEQ ID NO: 589661 - DNA, 15 bp, Homo sapiens
cacacggacaccacg

SEQ ID NO: 589662 - DNA, 15 bp, Homo sapiens
acacggacaccacgg

SEQ ID NO: 589663 - DNA, 15 bp, Homo sapiens
cacggacaccacggt

SEQ ID NO: 589664 - DNA, 15 bp, Homo sapiens
acggacaccacggtt

SEQ ID NO: 589665 - DNA, 15 bp, Homo sapiens
cggacaccacggttg

SEQ ID NO: 589666 - DNA, 15 bp, Homo sapiens
ggacaccacggttgt

SEQ ID NO: 589667 - DNA, 15 bp, Homo sapiens
gacaccacggttgtg

SEQ ID NO: 589668 - DNA, 15 bp, Homo sapiens
acaccacggttgtgc

SEQ ID NO: 589669 - DNA, 15 bp, Homo sapiens
caccacggttgtgca

SEQ ID NO: 589670 - DNA, 15 bp, Homo sapiens
accacggttgtgcag

SEQ ID NO: 589671 - DNA, 15 bp, Homo sapiens
ccacggttgtgcagg

SEQ ID NO: 589672 - DNA, 15 bp, Homo sapiens
cacggttgtgcagga

SEQ ID NO: 589673 - DNA, 15 bp, Homo sapiens
acggttgtgcaggaa

SEQ ID NO: 589674 - DNA, 15 bp, Homo sapiens
cggttgtgcaggaag

SEQ ID NO: 589675 - DNA, 15 bp, Homo sapiens
ggttgtgcaggaaga

SEQ ID NO: 589676 - DNA, 15 bp, Homo sapiens
gttgtgcaggaagat

SEQ ID NO: 589677 - DNA, 15 bp, Homo sapiens
ttgtgcaggaagatg

SEQ ID NO: 589678 - DNA, 15 bp, Homo sapiens
tgtgcaggaagatgg

SEQ ID NO: 589679 - DNA, 15 bp, Homo sapiens
gtgcaggaagatggc

SEQ ID NO: 589680 - DNA, 15 bp, Homo sapiens
tgcaggaagatggca

SEQ ID NO: 589681 - DNA, 15 bp, Homo sapiens
gcaggaagatggcag

SEQ ID NO: 589682 - DNA, 15 bp, Homo sapiens
caggaagatggcagg

SEQ ID NO: 589683 - DNA, 15 bp, Homo sapiens
aggaagatggcagga

SEQ ID NO: 589684 - DNA, 15 bp, Homo sapiens
ggaagatggcaggag

SEQ ID NO: 589685 - DNA, 15 bp, Homo sapiens
gaagatggcaggagc

SEQ ID NO: 589686 - DNA, 15 bp, Homo sapiens
aagatggcaggagct

SEQ ID NO: 589687 - DNA, 15 bp, Homo sapiens
agatggcaggagctg

SEQ ID NO: 589688 - DNA, 15 bp, Homo sapiens
gatggcaggagctgg

SEQ ID NO: 589689 - DNA, 15 bp, Homo sapiens
atggcaggagctggg

SEQ ID NO: 589690 - DNA, 15 bp, Homo sapiens
tggcaggagctgggc

SEQ ID NO: 589691 - DNA, 15 bp, Homo sapiens
ggcaggagctgggca

SEQ ID NO: 589692 - DNA, 15 bp, Homo sapiens
gcaggagctgggcac

SEQ ID NO: 589693 - DNA, 15 bp, Homo sapiens
caggagctgggcacc

SEQ ID NO: 589694 - DNA, 15 bp, Homo sapiens
aggagctgggcacca

SEQ ID NO: 589695 - DNA, 15 bp, Homo sapiens
ggagctgggcaccag

SEQ ID NO: 589696 - DNA, 15 bp, Homo sapiens
gagctgggcaccagg

SEQ ID NO: 589697 - DNA, 15 bp, Homo sapiens
agctgggcaccaggg

SEQ ID NO: 589698 - DNA, 15 bp, Homo sapiens
gctgggcaccagggt

SEQ ID NO: 589699 - DNA, 15 bp, Homo sapiens
ctgggcaccagggtg

SEQ ID NO: 589700 - DNA, 15 bp, Homo sapiens
tgggcaccagggtgg

SEQ ID NO: 589701 - DNA, 15 bp, Homo sapiens
gggcaccagggtggg

SEQ ID NO: 589702 - DNA, 15 bp, Homo sapiens
ggcaccagggtggga

SEQ ID NO: 589703 - DNA, 15 bp, Homo sapiens
gcaccagggtgggag

SEQ ID NO: 589704 - DNA, 15 bp, Homo sapiens
caccagggtgggagc

SEQ ID NO: 589705 - DNA, 15 bp, Homo sapiens
accagggtgggagcc

SEQ ID NO: 589706 - DNA, 15 bp, Homo sapiens
ccagggtgggagcca

SEQ ID NO: 589707 - DNA, 15 bp, Homo sapiens
cagggtgggagccac

SEQ ID NO: 589708 - DNA, 15 bp, Homo sapiens
agggtgggagccacc

SEQ ID NO: 589709 - DNA, 15 bp, Homo sapiens
gggtgggagccacct

SEQ ID NO: 589710 - DNA, 15 bp, Homo sapiens
ggtgggagccacctg

SEQ ID NO: 589711 - DNA, 15 bp, Homo sapiens
gtgggagccacctgg

SEQ ID NO: 589712 - DNA, 15 bp, Homo sapiens
tgggagccacctgga

SEQ ID NO: 589713 - DNA, 15 bp, Homo sapiens
gggagccacctggag

SEQ ID NO: 589714 - DNA, 15 bp, Homo sapiens
ggagccacctggagt

SEQ ID NO: 589715 - DNA, 15 bp, Homo sapiens
gagccacctggagtc

SEQ ID NO: 589716 - DNA, 15 bp, Homo sapiens
agccacctggagtca

SEQ ID NO: 589717 - DNA, 15 bp, Homo sapiens
gccacctggagtcag

SEQ ID NO: 589718 - DNA, 15 bp, Homo sapiens
ccacctggagtcagg

SEQ ID NO: 589719 - DNA, 15 bp, Homo sapiens
cacctggagtcagga

SEQ ID NO: 589720 - DNA, 15 bp, Homo sapiens
acctggagtcaggaa

SEQ ID NO: 589721 - DNA, 15 bp, Homo sapiens
cctggagtcaggaag

SEQ ID NO: 589722 - DNA, 15 bp, Homo sapiens
ctggagtcaggaaga

SEQ ID NO: 589723 - DNA, 15 bp, Homo sapiens
tggagtcaggaagag

SEQ ID NO: 589724 - DNA, 15 bp, Homo sapiens
ggagtcaggaagagt

SEQ ID NO: 589725 - DNA, 15 bp, Homo sapiens
gagtcaggaagagtg

SEQ ID NO: 589726 - DNA, 15 bp, Homo sapiens
agtcaggaagagtga

SEQ ID NO: 589727 - DNA, 15 bp, Homo sapiens
gtcaggaagagtgaa

SEQ ID NO: 589728 - DNA, 15 bp, Homo sapiens
tcaggaagagtgaag

SEQ ID NO: 589729 - DNA, 15 bp, Homo sapiens
caggaagagtgaaga

SEQ ID NO: 589730 - DNA, 15 bp, Homo sapiens
aggaagagtgaagag

SEQ ID NO: 589731 - DNA, 15 bp, Homo sapiens
ggaagagtgaagaga

SEQ ID NO: 589732 - DNA, 15 bp, Homo sapiens
gaagagtgaagagaa

SEQ ID NO: 589733 - DNA, 15 bp, Homo sapiens
aagagtgaagagaaa

SEQ ID NO: 589734 - DNA, 15 bp, Homo sapiens
agagtgaagagaaag

SEQ ID NO: 589735 - DNA, 15 bp, Homo sapiens
gagtgaagagaaagg

SEQ ID NO: 589736 - DNA, 15 bp, Homo sapiens
agtgaagagaaagga

SEQ ID NO: 589737 - DNA, 15 bp, Homo sapiens
gtgaagagaaaggat

SEQ ID NO: 589738 - DNA, 15 bp, Homo sapiens
tgaagagaaaggatg

SEQ ID NO: 589739 - DNA, 15 bp, Homo sapiens
gaagagaaaggatga

SEQ ID NO: 589740 - DNA, 15 bp, Homo sapiens
aagagaaaggatgaa

SEQ ID NO: 589741 - DNA, 15 bp, Homo sapiens
agagaaaggatgaag

SEQ ID NO: 589742 - DNA, 15 bp, Homo sapiens
gagaaaggatgaaga

SEQ ID NO: 589743 - DNA, 15 bp, Homo sapiens
agaaaggatgaagag

SEQ ID NO: 589744 - DNA, 15 bp, Homo sapiens
gaaaggatgaagagg

SEQ ID NO: 589745 - DNA, 15 bp, Homo sapiens
aaaggatgaagaggc

SEQ ID NO: 589746 - DNA, 15 bp, Homo sapiens
aaggatgaagaggct

SEQ ID NO: 589747 - DNA, 15 bp, Homo sapiens
aggatgaagaggctc

SEQ ID NO: 589748 - DNA, 15 bp, Homo sapiens
ggatgaagaggctcc

SEQ ID NO: 589749 - DNA, 15 bp, Homo sapiens
gatgaagaggctccc

SEQ ID NO: 589750 - DNA, 15 bp, Homo sapiens
atgaagaggctccct

SEQ ID NO: 589751 - DNA, 15 bp, Homo sapiens
tgaagaggctccctc

SEQ ID NO: 589752 - DNA, 15 bp, Homo sapiens
gaagaggctccctct

SEQ ID NO: 589753 - DNA, 15 bp, Homo sapiens
aagaggctccctctc

SEQ ID NO: 589754 - DNA, 15 bp, Homo sapiens
agaggctccctctcc

SEQ ID NO: 589755 - DNA, 15 bp, Homo sapiens
gaggctccctctcct

SEQ ID NO: 589756 - DNA, 15 bp, Homo sapiens
aggctccctctcctg

SEQ ID NO: 589757 - DNA, 15 bp, Homo sapiens
ggctccctctcctgt

SEQ ID NO: 589758 - DNA, 15 bp, Homo sapiens
gctccctctcctgtg

SEQ ID NO: 589759 - DNA, 15 bp, Homo sapiens
ctccctctcctgtgt

SEQ ID NO: 589760 - DNA, 15 bp, Homo sapiens
tccctctcctgtgtc

SEQ ID NO: 589761 - DNA, 15 bp, Homo sapiens
ccctctcctgtgtct

SEQ ID NO: 589762 - DNA, 15 bp, Homo sapiens
cctctcctgtgtctc

SEQ ID NO: 589763 - DNA, 15 bp, Homo sapiens
ctctcctgtgtctct

SEQ ID NO: 589764 - DNA, 15 bp, Homo sapiens
tctcctgtgtctctc

SEQ ID NO: 589765 - DNA, 15 bp, Homo sapiens
ctcctgtgtctctcc

SEQ ID NO: 589766 - DNA, 15 bp, Homo sapiens
tcctgtgtctctcct

SEQ ID NO: 589767 - DNA, 15 bp, Homo sapiens
cctgtgtctctcctc

SEQ ID NO: 589768 - DNA, 15 bp, Homo sapiens
ctgtgtctctcctcc

SEQ ID NO: 589769 - DNA, 15 bp, Homo sapiens
tgtgtctctcctccc

SEQ ID NO: 589770 - DNA, 15 bp, Homo sapiens
gtgtctctcctcccc

SEQ ID NO: 589771 - DNA, 15 bp, Homo sapiens
tgtctctcctcccca

SEQ ID NO: 589772 - DNA, 15 bp, Homo sapiens
gtctctcctccccag

SEQ ID NO: 589773 - DNA, 15 bp, Homo sapiens
tctctcctccccagg

SEQ ID NO: 589774 - DNA, 15 bp, Homo sapiens
ctctcctccccagga

SEQ ID NO: 589775 - DNA, 15 bp, Homo sapiens
tctcctccccaggag

SEQ ID NO: 589776 - DNA, 15 bp, Homo sapiens
ctcctccccaggaga

SEQ ID NO: 589777 - DNA, 15 bp, Homo sapiens
tcctccccaggagaa

SEQ ID NO: 589778 - DNA, 15 bp, Homo sapiens
cctccccaggagaag

SEQ ID NO: 589779 - DNA, 15 bp, Homo sapiens
ctccccaggagaaga

SEQ ID NO: 589780 - DNA, 15 bp, Homo sapiens
tccccaggagaagaa

SEQ ID NO: 589781 - DNA, 15 bp, Homo sapiens
ccccaggagaagaac

SEQ ID NO: 589782 - DNA, 15 bp, Homo sapiens
cccaggagaagaaca

SEQ ID NO: 589783 - DNA, 15 bp, Homo sapiens
ccaggagaagaacaa

SEQ ID NO: 589784 - DNA, 15 bp, Homo sapiens
caggagaagaacaag

SEQ ID NO: 589785 - DNA, 15 bp, Homo sapiens
aggagaagaacaaga

SEQ ID NO: 589786 - DNA, 15 bp, Homo sapiens
ggagaagaacaagaa

SEQ ID NO: 589787 - DNA, 15 bp, Homo sapiens
gagaagaacaagaaa

SEQ ID NO: 589788 - DNA, 15 bp, Homo sapiens
agaagaacaagaaac

SEQ ID NO: 589789 - DNA, 15 bp, Homo sapiens
gaagaacaagaaaca

SEQ ID NO: 589790 - DNA, 15 bp, Homo sapiens
aagaacaagaaacaa

SEQ ID NO: 589791 - DNA, 15 bp, Homo sapiens
agaacaagaaacaat

SEQ ID NO: 589792 - DNA, 15 bp, Homo sapiens
gaacaagaaacaatc

SEQ ID NO: 589793 - DNA, 15 bp, Homo sapiens
aacaagaaacaatcc

SEQ ID NO: 589794 - DNA, 15 bp, Homo sapiens
acaagaaacaatccg

SEQ ID NO: 589795 - DNA, 15 bp, Homo sapiens
caagaaacaatccga

SEQ ID NO: 589796 - DNA, 15 bp, Homo sapiens
aagaaacaatccgaa

SEQ ID NO: 589797 - DNA, 15 bp, Homo sapiens
agaaacaatccgaaa

SEQ ID NO: 589798 - DNA, 15 bp, Homo sapiens
gaaacaatccgaaag

SEQ ID NO: 589799 - DNA, 15 bp, Homo sapiens
aaacaatccgaaagt

SEQ ID NO: 589800 - DNA, 15 bp, Homo sapiens
aacaatccgaaagta

SEQ ID NO: 589801 - DNA, 15 bp, Homo sapiens
acaatccgaaagtaa

SEQ ID NO: 589802 - DNA, 15 bp, Homo sapiens
caatccgaaagtaat

SEQ ID NO: 589803 - DNA, 15 bp, Homo sapiens
aatccgaaagtaata

SEQ ID NO: 589804 - DNA, 15 bp, Homo sapiens
atccgaaagtaataa

SEQ ID NO: 589805 - DNA, 15 bp, Homo sapiens
tccgaaagtaataac

SEQ ID NO: 589806 - DNA, 15 bp, Homo sapiens
ccgaaagtaataaca

SEQ ID NO: 589807 - DNA, 15 bp, Homo sapiens
cgaaagtaataacac

SEQ ID NO: 589808 - DNA, 15 bp, Homo sapiens
gaaagtaataacacc

SEQ ID NO: 589809 - DNA, 15 bp, Homo sapiens
aaagtaataacacca

SEQ ID NO: 589810 - DNA, 15 bp, Homo sapiens
aagtaataacaccaa

SEQ ID NO: 589811 - DNA, 15 bp, Homo sapiens
agtaataacaccaat

SEQ ID NO: 589812 - DNA, 15 bp, Homo sapiens
gtaataacaccaatg

SEQ ID NO: 589813 - DNA, 15 bp, Homo sapiens
taataacaccaatgt

SEQ ID NO: 589814 - DNA, 15 bp, Homo sapiens
aataacaccaatgtg

SEQ ID NO: 589815 - DNA, 15 bp, Homo sapiens
ataacaccaatgtgc

SEQ ID NO: 589816 - DNA, 15 bp, Homo sapiens
taacaccaatgtgcc

SEQ ID NO: 589817 - DNA, 15 bp, Homo sapiens
aacaccaatgtgcct

SEQ ID NO: 589818 - DNA, 15 bp, Homo sapiens
acaccaatgtgcctt

SEQ ID NO: 589819 - DNA, 15 bp, Homo sapiens
caccaatgtgccttt

SEQ ID NO: 589820 - DNA, 15 bp, Homo sapiens
accaatgtgccttta

SEQ ID NO: 589821 - DNA, 15 bp, Homo sapiens
ccaatgtgcctttac

SEQ ID NO: 589822 - DNA, 15 bp, Homo sapiens
caatgtgcctttaca

SEQ ID NO: 589823 - DNA, 15 bp, Homo sapiens
aatgtgcctttacaa

SEQ ID NO: 589824 - DNA, 15 bp, Homo sapiens
atgtgcctttacaaa

SEQ ID NO: 589825 - DNA, 15 bp, Homo sapiens
tgtgcctttacaaag

SEQ ID NO: 589826 - DNA, 15 bp, Homo sapiens
gtgcctttacaaagt

SEQ ID NO: 589827 - DNA, 15 bp, Homo sapiens
tgcctttacaaagtg

SEQ ID NO: 589828 - DNA, 15 bp, Homo sapiens
gcctttacaaagtgt

SEQ ID NO: 589829 - DNA, 15 bp, Homo sapiens
cctttacaaagtgtg

SEQ ID NO: 589830 - DNA, 15 bp, Homo sapiens
ctttacaaagtgtga

SEQ ID NO: 589831 - DNA, 15 bp, Homo sapiens
tttacaaagtgtgag

SEQ ID NO: 589832 - DNA, 15 bp, Homo sapiens
ttacaaagtgtgagt

SEQ ID NO: 589833 - DNA, 15 bp, Homo sapiens
tacaaagtgtgagtg

SEQ ID NO: 589834 - DNA, 15 bp, Homo sapiens
acaaagtgtgagtgg

SEQ ID NO: 589835 - DNA, 15 bp, Homo sapiens
caaagtgtgagtggg

SEQ ID NO: 589836 - DNA, 15 bp, Homo sapiens
aaagtgtgagtgggt

SEQ ID NO: 589837 - DNA, 15 bp, Homo sapiens
aagtgtgagtgggtg

SEQ ID NO: 589838 - DNA, 15 bp, Homo sapiens
agtgtgagtgggtgt

SEQ ID NO: 589839 - DNA, 15 bp, Homo sapiens
gtgtgagtgggtgtt

SEQ ID NO: 589840 - DNA, 15 bp, Homo sapiens
tgtgagtgggtgttg

SEQ ID NO: 589841 - DNA, 15 bp, Homo sapiens
gtgagtgggtgttgt

SEQ ID NO: 589842 - DNA, 15 bp, Homo sapiens
tgagtgggtgttgtg

SEQ ID NO: 589843 - DNA, 15 bp, Homo sapiens
gagtgggtgttgtgt

SEQ ID NO: 589844 - DNA, 15 bp, Homo sapiens
agtgggtgttgtgtg

SEQ ID NO: 589845 - DNA, 15 bp, Homo sapiens
gtgggtgttgtgtgc

SEQ ID NO: 589846 - DNA, 15 bp, Homo sapiens
tgggtgttgtgtgct

SEQ ID NO: 589847 - DNA, 15 bp, Homo sapiens
gggtgttgtgtgctg

SEQ ID NO: 589848 - DNA, 15 bp, Homo sapiens
ggtgttgtgtgctgt

SEQ ID NO: 589849 - DNA, 15 bp, Homo sapiens
gtgttgtgtgctgtc

SEQ ID NO: 589850 - DNA, 15 bp, Homo sapiens
tgttgtgtgctgtca

SEQ ID NO: 589851 - DNA, 15 bp, Homo sapiens
gttgtgtgctgtcac

SEQ ID NO: 589852 - DNA, 15 bp, Homo sapiens
ttgtgtgctgtcacg

SEQ ID NO: 589853 - DNA, 15 bp, Homo sapiens
tgtgtgctgtcacgt

SEQ ID NO: 589854 - DNA, 15 bp, Homo sapiens
gtgtgctgtcacgtg

SEQ ID NO: 589855 - DNA, 15 bp, Homo sapiens
tgtgctgtcacgtgt

SEQ ID NO: 589856 - DNA, 15 bp, Homo sapiens
gtgctgtcacgtgtg

SEQ ID NO: 589857 - DNA, 15 bp, Homo sapiens
tgctgtcacgtgtgt

SEQ ID NO: 589858 - DNA, 15 bp, Homo sapiens
gctgtcacgtgtgta

SEQ ID NO: 589859 - DNA, 15 bp, Homo sapiens
ctgtcacgtgtgtag

SEQ ID NO: 589860 - DNA, 15 bp, Homo sapiens
tgtcacgtgtgtagt

SEQ ID NO: 589861 - DNA, 15 bp, Homo sapiens
gtcacgtgtgtagta

SEQ ID NO: 589862 - DNA, 15 bp, Homo sapiens
tcacgtgtgtagtag

SEQ ID NO: 589863 - DNA, 15 bp, Homo sapiens
cacgtgtgtagtagg

SEQ ID NO: 589864 - DNA, 15 bp, Homo sapiens
acgtgtgtagtaggc

SEQ ID NO: 589865 - DNA, 15 bp, Homo sapiens
cgtgtgtagtaggct

SEQ ID NO: 589866 - DNA, 15 bp, Homo sapiens
gtgtgtagtaggctc

SEQ ID NO: 589867 - DNA, 15 bp, Homo sapiens
tgtgtagtaggctcc

SEQ ID NO: 589868 - DNA, 15 bp, Homo sapiens
gtgtagtaggctcct

SEQ ID NO: 589869 - DNA, 15 bp, Homo sapiens
tgtagtaggctcctc

SEQ ID NO: 589870 - DNA, 15 bp, Homo sapiens
gtagtaggctcctct

SEQ ID NO: 589871 - DNA, 15 bp, Homo sapiens
tagtaggctcctctg

SEQ ID NO: 589872 - DNA, 15 bp, Homo sapiens
agtaggctcctctgt

SEQ ID NO: 589873 - DNA, 15 bp, Homo sapiens
gtaggctcctctgtg

SEQ ID NO: 589874 - DNA, 15 bp, Homo sapiens
taggctcctctgtgg

SEQ ID NO: 589875 - DNA, 15 bp, Homo sapiens
aggctcctctgtgga

SEQ ID NO: 589876 - DNA, 15 bp, Homo sapiens
ggctcctctgtggat

SEQ ID NO: 589877 - DNA, 15 bp, Homo sapiens
gctcctctgtggatg

SEQ ID NO: 589878 - DNA, 15 bp, Homo sapiens
ctcctctgtggatgg

SEQ ID NO: 589879 - DNA, 15 bp, Homo sapiens
tcctctgtggatggc

SEQ ID NO: 589880 - DNA, 15 bp, Homo sapiens
cctctgtggatggct

SEQ ID NO: 589881 - DNA, 15 bp, Homo sapiens
ctctgtggatggcta

SEQ ID NO: 589882 - DNA, 15 bp, Homo sapiens
tctgtggatggctag

SEQ ID NO: 589883 - DNA, 15 bp, Homo sapiens
ctgtggatggctaga

SEQ ID NO: 589884 - DNA, 15 bp, Homo sapiens
tgtggatggctagag

SEQ ID NO: 589885 - DNA, 15 bp, Homo sapiens
gtggatggctagagg

SEQ ID NO: 589886 - DNA, 15 bp, Homo sapiens
tggatggctagaggg

SEQ ID NO: 589887 - DNA, 15 bp, Homo sapiens
ggatggctagaggga

SEQ ID NO: 589888 - DNA, 15 bp, Homo sapiens
gatggctagagggac

SEQ ID NO: 589889 - DNA, 15 bp, Homo sapiens
atggctagagggact

SEQ ID NO: 589890 - DNA, 15 bp, Homo sapiens
tggctagagggactg

SEQ ID NO: 589891 - DNA, 15 bp, Homo sapiens
ggctagagggactgg

SEQ ID NO: 589892 - DNA, 15 bp, Homo sapiens
gctagagggactgga

SEQ ID NO: 589893 - DNA, 15 bp, Homo sapiens
ctagagggactggac

SEQ ID NO: 589894 - DNA, 15 bp, Homo sapiens
tagagggactggaca

SEQ ID NO: 589895 - DNA, 15 bp, Homo sapiens
agagggactggacat

SEQ ID NO: 589896 - DNA, 15 bp, Homo sapiens
gagggactggacatg

SEQ ID NO: 589897 - DNA, 15 bp, Homo sapiens
agggactggacatgg

SEQ ID NO: 589898 - DNA, 15 bp, Homo sapiens
gggactggacatggc

SEQ ID NO: 589899 - DNA, 15 bp, Homo sapiens
ggactggacatggcc

SEQ ID NO: 589900 - DNA, 15 bp, Homo sapiens
gactggacatggcca

SEQ ID NO: 589901 - DNA, 15 bp, Homo sapiens
actggacatggccac

SEQ ID NO: 589902 - DNA, 15 bp, Homo sapiens
ctggacatggccact

SEQ ID NO: 589903 - DNA, 15 bp, Homo sapiens
tggacatggccactg

SEQ ID NO: 589904 - DNA, 15 bp, Homo sapiens
ggacatggccactgg

SEQ ID NO: 589905 - DNA, 15 bp, Homo sapiens
gacatggccactgga

SEQ ID NO: 589906 - DNA, 15 bp, Homo sapiens
acatggccactggat

SEQ ID NO: 589907 - DNA, 15 bp, Homo sapiens
catggccactggatc

SEQ ID NO: 589908 - DNA, 15 bp, Homo sapiens
atggccactggatcc

SEQ ID NO: 589909 - DNA, 15 bp, Homo sapiens
tggccactggatccc

SEQ ID NO: 589910 - DNA, 15 bp, Homo sapiens
ggccactggatccca

SEQ ID NO: 589911 - DNA, 15 bp, Homo sapiens
gccactggatcccac

SEQ ID NO: 589912 - DNA, 15 bp, Homo sapiens
ccactggatcccact

SEQ ID NO: 589913 - DNA, 15 bp, Homo sapiens
cactggatcccactt

SEQ ID NO: 589914 - DNA, 15 bp, Homo sapiens
actggatcccacttg

SEQ ID NO: 589915 - DNA, 15 bp, Homo sapiens
ctggatcccacttgc

SEQ ID NO: 589916 - DNA, 15 bp, Homo sapiens
tggatcccacttgca

SEQ ID NO: 589917 - DNA, 15 bp, Homo sapiens
ggatcccacttgcaa

SEQ ID NO: 589918 - DNA, 15 bp, Homo sapiens
gatcccacttgcaag

SEQ ID NO: 589919 - DNA, 15 bp, Homo sapiens
atcccacttgcaaga

SEQ ID NO: 589920 - DNA, 15 bp, Homo sapiens
tcccacttgcaagag

SEQ ID NO: 589921 - DNA, 15 bp, Homo sapiens
cccacttgcaagagc

SEQ ID NO: 589922 - DNA, 15 bp, Homo sapiens
ccacttgcaagagca

SEQ ID NO: 589923 - DNA, 15 bp, Homo sapiens
cacttgcaagagcag

SEQ ID NO: 589924 - DNA, 15 bp, Homo sapiens
acttgcaagagcaga

SEQ ID NO: 589925 - DNA, 15 bp, Homo sapiens
cttgcaagagcagag

SEQ ID NO: 589926 - DNA, 15 bp, Homo sapiens
ttgcaagagcagagg

SEQ ID NO: 589927 - DNA, 15 bp, Homo sapiens
tgcaagagcagagga

SEQ ID NO: 589928 - DNA, 15 bp, Homo sapiens
gcaagagcagaggaa

SEQ ID NO: 589929 - DNA, 15 bp, Homo sapiens
caagagcagaggaaa

SEQ ID NO: 589930 - DNA, 15 bp, Homo sapiens
aagagcagaggaaaa

SEQ ID NO: 589931 - DNA, 15 bp, Homo sapiens
agagcagaggaaaag

SEQ ID NO: 589932 - DNA, 15 bp, Homo sapiens
gagcagaggaaaaga

SEQ ID NO: 589933 - DNA, 15 bp, Homo sapiens
agcagaggaaaagag

SEQ ID NO: 589934 - DNA, 15 bp, Homo sapiens
gcagaggaaaagagt

SEQ ID NO: 589935 - DNA, 15 bp, Homo sapiens
cagaggaaaagagtg

SEQ ID NO: 589936 - DNA, 15 bp, Homo sapiens
agaggaaaagagtgg

SEQ ID NO: 589937 - DNA, 15 bp, Homo sapiens
gaggaaaagagtggt

SEQ ID NO: 589938 - DNA, 15 bp, Homo sapiens
aggaaaagagtggtc

SEQ ID NO: 589939 - DNA, 15 bp, Homo sapiens
ggaaaagagtggtcg

SEQ ID NO: 589940 - DNA, 15 bp, Homo sapiens
gaaaagagtggtcgt

SEQ ID NO: 589941 - DNA, 15 bp, Homo sapiens
aaaagagtggtcgtg

SEQ ID NO: 589942 - DNA, 15 bp, Homo sapiens
aaagagtggtcgtga

SEQ ID NO: 589943 - DNA, 15 bp, Homo sapiens
aagagtggtcgtgag

SEQ ID NO: 589944 - DNA, 15 bp, Homo sapiens
agagtggtcgtgagg

SEQ ID NO: 589945 - DNA, 15 bp, Homo sapiens
gagtggtcgtgagga

SEQ ID NO: 589946 - DNA, 15 bp, Homo sapiens
agtggtcgtgaggaa

SEQ ID NO: 589947 - DNA, 15 bp, Homo sapiens
gtggtcgtgaggaag

SEQ ID NO: 589948 - DNA, 15 bp, Homo sapiens
tggtcgtgaggaagt

SEQ ID NO: 589949 - DNA, 15 bp, Homo sapiens
ggtcgtgaggaagta

SEQ ID NO: 589950 - DNA, 15 bp, Homo sapiens
gtcgtgaggaagtaa

SEQ ID NO: 589951 - DNA, 15 bp, Homo sapiens
tcgtgaggaagtaaa

SEQ ID NO: 589952 - DNA, 15 bp, Homo sapiens
cgtgaggaagtaaag

SEQ ID NO: 589953 - DNA, 15 bp, Homo sapiens
gtgaggaagtaaagc

SEQ ID NO: 589954 - DNA, 15 bp, Homo sapiens
tgaggaagtaaagcc

SEQ ID NO: 589955 - DNA, 15 bp, Homo sapiens
gaggaagtaaagccc

SEQ ID NO: 589956 - DNA, 15 bp, Homo sapiens
aggaagtaaagcccc

SEQ ID NO: 589957 - DNA, 15 bp, Homo sapiens
ggaagtaaagccccc

SEQ ID NO: 589958 - DNA, 15 bp, Homo sapiens
gaagtaaagcccccc

SEQ ID NO: 589959 - DNA, 15 bp, Homo sapiens
aagtaaagcccccca

SEQ ID NO: 589960 - DNA, 15 bp, Homo sapiens
agtaaagccccccaa

SEQ ID NO: 589961 - DNA, 15 bp, Homo sapiens
gtaaagccccccaaa

SEQ ID NO: 589962 - DNA, 15 bp, Homo sapiens
taaagccccccaaaa

SEQ ID NO: 589963 - DNA, 15 bp, Homo sapiens
aaagccccccaaaat

SEQ ID NO: 589964 - DNA, 15 bp, Homo sapiens
aagccccccaaaatc

SEQ ID NO: 589965 - DNA, 15 bp, Homo sapiens
agccccccaaaatcc

SEQ ID NO: 589966 - DNA, 15 bp, Homo sapiens
gccccccaaaatcca

SEQ ID NO: 589967 - DNA, 15 bp, Homo sapiens
ccccccaaaatccag

SEQ ID NO: 589968 - DNA, 15 bp, Homo sapiens
cccccaaaatccagg

SEQ ID NO: 589969 - DNA, 15 bp, Homo sapiens
ccccaaaatccaggg

SEQ ID NO: 589970 - DNA, 15 bp, Homo sapiens
cccaaaatccagggg

SEQ ID NO: 589971 - DNA, 15 bp, Homo sapiens
ccaaaatccaggggt

SEQ ID NO: 589972 - DNA, 15 bp, Homo sapiens
caaaatccaggggtt

SEQ ID NO: 589973 - DNA, 15 bp, Homo sapiens
aaaatccaggggttg

SEQ ID NO: 589974 - DNA, 15 bp, Homo sapiens
aaatccaggggttgc

SEQ ID NO: 589975 - DNA, 15 bp, Homo sapiens
aatccaggggttgct

SEQ ID NO: 589976 - DNA, 15 bp, Homo sapiens
atccaggggttgctg

SEQ ID NO: 589977 - DNA, 15 bp, Homo sapiens
tccaggggttgctgc

SEQ ID NO: 589978 - DNA, 15 bp, Homo sapiens
ccaggggttgctgca

SEQ ID NO: 589979 - DNA, 15 bp, Homo sapiens
caggggttgctgcag

SEQ ID NO: 589980 - DNA, 15 bp, Homo sapiens
aggggttgctgcagc

SEQ ID NO: 589981 - DNA, 15 bp, Homo sapiens
ggggttgctgcagct

SEQ ID NO: 589982 - DNA, 15 bp, Homo sapiens
gggttgctgcagctt

SEQ ID NO: 589983 - DNA, 15 bp, Homo sapiens
ggttgctgcagcttt

SEQ ID NO: 589984 - DNA, 15 bp, Homo sapiens
gttgctgcagctttg

SEQ ID NO: 589985 - DNA, 15 bp, Homo sapiens
ttgctgcagctttgg

SEQ ID NO: 589986 - DNA, 15 bp, Homo sapiens
tgctgcagctttggg

SEQ ID NO: 589987 - DNA, 15 bp, Homo sapiens
gctgcagctttgggt

SEQ ID NO: 589988 - DNA, 15 bp, Homo sapiens
ctgcagctttgggtg

SEQ ID NO: 589989 - DNA, 15 bp, Homo sapiens
tgcagctttgggtgt

SEQ ID NO: 589990 - DNA, 15 bp, Homo sapiens
gcagctttgggtgtg

SEQ ID NO: 589991 - DNA, 15 bp, Homo sapiens
cagctttgggtgtgg

SEQ ID NO: 589992 - DNA, 15 bp, Homo sapiens
agctttgggtgtgga

SEQ ID NO: 589993 - DNA, 15 bp, Homo sapiens
gctttgggtgtggag

SEQ ID NO: 589994 - DNA, 15 bp, Homo sapiens
ctttgggtgtggagc

SEQ ID NO: 589995 - DNA, 15 bp, Homo sapiens
tttgggtgtggagcg

SEQ ID NO: 589996 - DNA, 15 bp, Homo sapiens
ttgggtgtggagcgt

SEQ ID NO: 589997 - DNA, 15 bp, Homo sapiens
tgggtgtggagcgtg

SEQ ID NO: 589998 - DNA, 15 bp, Homo sapiens
gggtgtggagcgtgc

SEQ ID NO: 589999 - DNA, 15 bp, Homo sapiens
ggtgtggagcgtgcc

SEQ ID NO: 590000 - DNA, 15 bp, Homo sapiens
gtgtggagcgtgccc

SEQ ID NO: 590001 - DNA, 15 bp, Homo sapiens
tgtggagcgtgccct

SEQ ID NO: 590002 - DNA, 15 bp, Homo sapiens
gtggagcgtgccctc

SEQ ID NO: 590003 - DNA, 15 bp, Homo sapiens
tggagcgtgccctct

SEQ ID NO: 590004 - DNA, 15 bp, Homo sapiens
ggagcgtgccctctg

SEQ ID NO: 590005 - DNA, 15 bp, Homo sapiens
gagcgtgccctctga

SEQ ID NO: 590006 - DNA, 15 bp, Homo sapiens
agcgtgccctctgag

SEQ ID NO: 590007 - DNA, 15 bp, Homo sapiens
gcgtgccctctgagg

SEQ ID NO: 590008 - DNA, 15 bp, Homo sapiens
cgtgccctctgagga

SEQ ID NO: 590009 - DNA, 15 bp, Homo sapiens
gtgccctctgaggaa

SEQ ID NO: 590010 - DNA, 15 bp, Homo sapiens
tgccctctgaggaaa

SEQ ID NO: 590011 - DNA, 15 bp, Homo sapiens
gccctctgaggaaag

SEQ ID NO: 590012 - DNA, 15 bp, Homo sapiens
ccctctgaggaaagg

SEQ ID NO: 590013 - DNA, 15 bp, Homo sapiens
cctctgaggaaaggc

SEQ ID NO: 590014 - DNA, 15 bp, Homo sapiens
ctctgaggaaaggct

SEQ ID NO: 590015 - DNA, 15 bp, Homo sapiens
tctgaggaaaggctg

SEQ ID NO: 590016 - DNA, 15 bp, Homo sapiens
ctgaggaaaggctgc

SEQ ID NO: 590017 - DNA, 15 bp, Homo sapiens
tgaggaaaggctgct

SEQ ID NO: 590018 - DNA, 15 bp, Homo sapiens
gaggaaaggctgctc

SEQ ID NO: 590019 - DNA, 15 bp, Homo sapiens
aggaaaggctgctct

SEQ ID NO: 590020 - DNA, 15 bp, Homo sapiens
ggaaaggctgctctg

SEQ ID NO: 590021 - DNA, 15 bp, Homo sapiens
gaaaggctgctctgg

SEQ ID NO: 590022 - DNA, 15 bp, Homo sapiens
aaaggctgctctggg

SEQ ID NO: 590023 - DNA, 15 bp, Homo sapiens
aaggctgctctgggg

SEQ ID NO: 590024 - DNA, 15 bp, Homo sapiens
aggctgctctggggg

SEQ ID NO: 590025 - DNA, 15 bp, Homo sapiens
ggctgctctggggga

SEQ ID NO: 590026 - DNA, 15 bp, Homo sapiens
gctgctctgggggag

SEQ ID NO: 590027 - DNA, 15 bp, Homo sapiens
ctgctctgggggaga

SEQ ID NO: 590028 - DNA, 15 bp, Homo sapiens
tgctctgggggagat

SEQ ID NO: 590029 - DNA, 15 bp, Homo sapiens
gctctgggggagatt

SEQ ID NO: 590030 - DNA, 15 bp, Homo sapiens
ctctgggggagattg

SEQ ID NO: 590031 - DNA, 15 bp, Homo sapiens
tctgggggagattgc

SEQ ID NO: 590032 - DNA, 15 bp, Homo sapiens
ctgggggagattgcc

SEQ ID NO: 590033 - DNA, 15 bp, Homo sapiens
tgggggagattgccc

SEQ ID NO: 590034 - DNA, 15 bp, Homo sapiens
gggggagattgccca

SEQ ID NO: 590035 - DNA, 15 bp, Homo sapiens
ggggagattgcccag

SEQ ID NO: 590036 - DNA, 15 bp, Homo sapiens
gggagattgcccagg

SEQ ID NO: 590037 - DNA, 15 bp, Homo sapiens
ggagattgcccagga

SEQ ID NO: 590038 - DNA, 15 bp, Homo sapiens
gagattgcccaggaa

SEQ ID NO: 590039 - DNA, 15 bp, Homo sapiens
agattgcccaggaaa

SEQ ID NO: 590040 - DNA, 15 bp, Homo sapiens
gattgcccaggaaac

SEQ ID NO: 590041 - DNA, 15 bp, Homo sapiens
attgcccaggaaacg

SEQ ID NO: 590042 - DNA, 15 bp, Homo sapiens
ttgcccaggaaacgg

SEQ ID NO: 590043 - DNA, 15 bp, Homo sapiens
tgcccaggaaacggg

SEQ ID NO: 590044 - DNA, 15 bp, Homo sapiens
gcccaggaaacgggg

SEQ ID NO: 590045 - DNA, 15 bp, Homo sapiens
cccaggaaacggggc

SEQ ID NO: 590046 - DNA, 15 bp, Homo sapiens
ccaggaaacggggct

SEQ ID NO: 590047 - DNA, 15 bp, Homo sapiens
caggaaacggggctc

SEQ ID NO: 590048 - DNA, 15 bp, Homo sapiens
aggaaacggggctca

SEQ ID NO: 590049 - DNA, 15 bp, Homo sapiens
ggaaacggggctcag

SEQ ID NO: 590050 - DNA, 15 bp, Homo sapiens
gaaacggggctcaga

SEQ ID NO: 590051 - DNA, 15 bp, Homo sapiens
aaacggggctcagag

SEQ ID NO: 590052 - DNA, 15 bp, Homo sapiens
aacggggctcagagg

SEQ ID NO: 590053 - DNA, 15 bp, Homo sapiens
acggggctcagaggc

SEQ ID NO: 590054 - DNA, 15 bp, Homo sapiens
cggggctcagaggcc

SEQ ID NO: 590055 - DNA, 15 bp, Homo sapiens
ggggctcagaggcca

SEQ ID NO: 590056 - DNA, 15 bp, Homo sapiens
gggctcagaggccac

SEQ ID NO: 590057 - DNA, 15 bp, Homo sapiens
ggctcagaggccacg

SEQ ID NO: 590058 - DNA, 15 bp, Homo sapiens
gctcagaggccacga

SEQ ID NO: 590059 - DNA, 15 bp, Homo sapiens
ctcagaggccacgaa

SEQ ID NO: 590060 - DNA, 15 bp, Homo sapiens
tcagaggccacgaaa

SEQ ID NO: 590061 - DNA, 15 bp, Homo sapiens
cagaggccacgaaag

SEQ ID NO: 590062 - DNA, 15 bp, Homo sapiens
agaggccacgaaagc

SEQ ID NO: 590063 - DNA, 15 bp, Homo sapiens
gaggccacgaaagca

SEQ ID NO: 590064 - DNA, 15 bp, Homo sapiens
aggccacgaaagcag

SEQ ID NO: 590065 - DNA, 15 bp, Homo sapiens
ggccacgaaagcagc

SEQ ID NO: 590066 - DNA, 15 bp, Homo sapiens
gccacgaaagcagct

SEQ ID NO: 590067 - DNA, 15 bp, Homo sapiens
ccacgaaagcagctg

SEQ ID NO: 590068 - DNA, 15 bp, Homo sapiens
cacgaaagcagctgt

SEQ ID NO: 590069 - DNA, 15 bp, Homo sapiens
acgaaagcagctgtt

SEQ ID NO: 590070 - DNA, 15 bp, Homo sapiens
cgaaagcagctgtta

SEQ ID NO: 590071 - DNA, 15 bp, Homo sapiens
gaaagcagctgttag

SEQ ID NO: 590072 - DNA, 15 bp, Homo sapiens
aaagcagctgttagg

SEQ ID NO: 590073 - DNA, 15 bp, Homo sapiens
aagcagctgttaggg

SEQ ID NO: 590074 - DNA, 15 bp, Homo sapiens
agcagctgttagggg

SEQ ID NO: 590075 - DNA, 15 bp, Homo sapiens
gcagctgttaggggc

SEQ ID NO: 590076 - DNA, 15 bp, Homo sapiens
cagctgttaggggct

SEQ ID NO: 590077 - DNA, 15 bp, Homo sapiens
agctgttaggggctt

SEQ ID NO: 590078 - DNA, 15 bp, Homo sapiens
gctgttaggggcttc

SEQ ID NO: 590079 - DNA, 15 bp, Homo sapiens
ctgttaggggcttct

SEQ ID NO: 590080 - DNA, 15 bp, Homo sapiens
tgttaggggcttctg

SEQ ID NO: 590081 - DNA, 15 bp, Homo sapiens
gttaggggcttctgg

SEQ ID NO: 590082 - DNA, 15 bp, Homo sapiens
ttaggggcttctggg

SEQ ID NO: 590083 - DNA, 15 bp, Homo sapiens
taggggcttctggga

SEQ ID NO: 590084 - DNA, 15 bp, Homo sapiens
aggggcttctgggag

SEQ ID NO: 590085 - DNA, 15 bp, Homo sapiens
ggggcttctgggaga

SEQ ID NO: 590086 - DNA, 15 bp, Homo sapiens
gggcttctgggagat

SEQ ID NO: 590087 - DNA, 15 bp, Homo sapiens
ggcttctgggagatg

SEQ ID NO: 590088 - DNA, 15 bp, Homo sapiens
gcttctgggagatgt

SEQ ID NO: 590089 - DNA, 15 bp, Homo sapiens
cttctgggagatgtg

SEQ ID NO: 590090 - DNA, 15 bp, Homo sapiens
ttctgggagatgtgt

SEQ ID NO: 590091 - DNA, 15 bp, Homo sapiens
tctgggagatgtgtg

SEQ ID NO: 590092 - DNA, 15 bp, Homo sapiens
ctgggagatgtgtgc

SEQ ID NO: 590093 - DNA, 15 bp, Homo sapiens
tgggagatgtgtgct

SEQ ID NO: 590094 - DNA, 15 bp, Homo sapiens
gggagatgtgtgctc

SEQ ID NO: 590095 - DNA, 15 bp, Homo sapiens
ggagatgtgtgctcc

SEQ ID NO: 590096 - DNA, 15 bp, Homo sapiens
gagatgtgtgctcct

SEQ ID NO: 590097 - DNA, 15 bp, Homo sapiens
agatgtgtgctccta

SEQ ID NO: 590098 - DNA, 15 bp, Homo sapiens
gatgtgtgctcctag

SEQ ID NO: 590099 - DNA, 15 bp, Homo sapiens
atgtgtgctcctagg

SEQ ID NO: 590100 - DNA, 15 bp, Homo sapiens
tgtgtgctcctagga

SEQ ID NO: 590101 - DNA, 15 bp, Homo sapiens
gtgtgctcctaggat

SEQ ID NO: 590102 - DNA, 15 bp, Homo sapiens
tgtgctcctaggatt

SEQ ID NO: 590103 - DNA, 15 bp, Homo sapiens
gtgctcctaggatta

SEQ ID NO: 590104 - DNA, 15 bp, Homo sapiens
tgctcctaggattag

SEQ ID NO: 590105 - DNA, 15 bp, Homo sapiens
gctcctaggattagg

SEQ ID NO: 590106 - DNA, 15 bp, Homo sapiens
ctcctaggattaggg

SEQ ID NO: 590107 - DNA, 15 bp, Homo sapiens
tcctaggattaggga

SEQ ID NO: 590108 - DNA, 15 bp, Homo sapiens
cctaggattagggag

SEQ ID NO: 590109 - DNA, 15 bp, Homo sapiens
ctaggattagggagt

SEQ ID NO: 590110 - DNA, 15 bp, Homo sapiens
taggattagggagtt

SEQ ID NO: 590111 - DNA, 15 bp, Homo sapiens
aggattagggagttg

SEQ ID NO: 590112 - DNA, 15 bp, Homo sapiens
ggattagggagttga

SEQ ID NO: 590113 - DNA, 15 bp, Homo sapiens
gattagggagttgac

SEQ ID NO: 590114 - DNA, 15 bp, Homo sapiens
attagggagttgact

SEQ ID NO: 590115 - DNA, 15 bp, Homo sapiens
ttagggagttgactc

SEQ ID NO: 590116 - DNA, 15 bp, Homo sapiens
tagggagttgactct

SEQ ID NO: 590117 - DNA, 15 bp, Homo sapiens
agggagttgactcta

SEQ ID NO: 590118 - DNA, 15 bp, Homo sapiens
gggagttgactctaa

SEQ ID NO: 590119 - DNA, 15 bp, Homo sapiens
ggagttgactctaag

SEQ ID NO: 590120 - DNA, 15 bp, Homo sapiens
gagttgactctaagg

SEQ ID NO: 590121 - DNA, 15 bp, Homo sapiens
agttgactctaagga

SEQ ID NO: 590122 - DNA, 15 bp, Homo sapiens
gttgactctaaggat

SEQ ID NO: 590123 - DNA, 15 bp, Homo sapiens
ttgactctaaggatg

SEQ ID NO: 590124 - DNA, 15 bp, Homo sapiens
tgactctaaggatga

SEQ ID NO: 590125 - DNA, 15 bp, Homo sapiens
gactctaaggatgac

SEQ ID NO: 590126 - DNA, 15 bp, Homo sapiens
actctaaggatgacc

SEQ ID NO: 590127 - DNA, 15 bp, Homo sapiens
ctctaaggatgacct

SEQ ID NO: 590128 - DNA, 15 bp, Homo sapiens
tctaaggatgacctt

SEQ ID NO: 590129 - DNA, 15 bp, Homo sapiens
ctaaggatgacctta

SEQ ID NO: 590130 - DNA, 15 bp, Homo sapiens
taaggatgaccttag

SEQ ID NO: 590131 - DNA, 15 bp, Homo sapiens
aaggatgaccttaga

SEQ ID NO: 590132 - DNA, 15 bp, Homo sapiens
aggatgaccttagag

SEQ ID NO: 590133 - DNA, 15 bp, Homo sapiens
ggatgaccttagagg

SEQ ID NO: 590134 - DNA, 15 bp, Homo sapiens
gatgaccttagaggt

SEQ ID NO: 590135 - DNA, 15 bp, Homo sapiens
atgaccttagaggtt

SEQ ID NO: 590136 - DNA, 15 bp, Homo sapiens
tgaccttagaggtta

SEQ ID NO: 590137 - DNA, 15 bp, Homo sapiens
gaccttagaggttaa

SEQ ID NO: 590138 - DNA, 15 bp, Homo sapiens
accttagaggttaac

SEQ ID NO: 590139 - DNA, 15 bp, Homo sapiens
ccttagaggttaaca

SEQ ID NO: 590140 - DNA, 15 bp, Homo sapiens
cttagaggttaacag

SEQ ID NO: 590141 - DNA, 15 bp, Homo sapiens
ttagaggttaacagg

SEQ ID NO: 590142 - DNA, 15 bp, Homo sapiens
tagaggttaacaggg

SEQ ID NO: 590143 - DNA, 15 bp, Homo sapiens
agaggttaacaggga

SEQ ID NO: 590144 - DNA, 15 bp, Homo sapiens
gaggttaacagggat

SEQ ID NO: 590145 - DNA, 15 bp, Homo sapiens
aggttaacagggatg

SEQ ID NO: 590146 - DNA, 15 bp, Homo sapiens
ggttaacagggatga

SEQ ID NO: 590147 - DNA, 15 bp, Homo sapiens
gttaacagggatgag

SEQ ID NO: 590148 - DNA, 15 bp, Homo sapiens
ttaacagggatgaga

SEQ ID NO: 590149 - DNA, 15 bp, Homo sapiens
taacagggatgagaa

SEQ ID NO: 590150 - DNA, 15 bp, Homo sapiens
aacagggatgagaaa

SEQ ID NO: 590151 - DNA, 15 bp, Homo sapiens
acagggatgagaaag

SEQ ID NO: 590152 - DNA, 15 bp, Homo sapiens
cagggatgagaaagg

SEQ ID NO: 590153 - DNA, 15 bp, Homo sapiens
agggatgagaaaggg

SEQ ID NO: 590154 - DNA, 15 bp, Homo sapiens
gggatgagaaagggg

SEQ ID NO: 590155 - DNA, 15 bp, Homo sapiens
ggatgagaaaggggt

SEQ ID NO: 590156 - DNA, 15 bp, Homo sapiens
gatgagaaaggggtc

SEQ ID NO: 590157 - DNA, 15 bp, Homo sapiens
atgagaaaggggtca

SEQ ID NO: 590158 - DNA, 15 bp, Homo sapiens
tgagaaaggggtcac

SEQ ID NO: 590159 - DNA, 15 bp, Homo sapiens
gagaaaggggtcacc

SEQ ID NO: 590160 - DNA, 15 bp, Homo sapiens
agaaaggggtcacca

SEQ ID NO: 590161 - DNA, 15 bp, Homo sapiens
gaaaggggtcaccaa

SEQ ID NO: 590162 - DNA, 15 bp, Homo sapiens
aaaggggtcaccaag

SEQ ID NO: 590163 - DNA, 15 bp, Homo sapiens
aaggggtcaccaagg

SEQ ID NO: 590164 - DNA, 15 bp, Homo sapiens
aggggtcaccaaggg

SEQ ID NO: 590165 - DNA, 15 bp, Homo sapiens
ggggtcaccaagggg

SEQ ID NO: 590166 - DNA, 15 bp, Homo sapiens
gggtcaccaaggggt

SEQ ID NO: 590167 - DNA, 15 bp, Homo sapiens
ggtcaccaaggggtc

SEQ ID NO: 590168 - DNA, 15 bp, Homo sapiens
gtcaccaaggggtct

SEQ ID NO: 590169 - DNA, 15 bp, Homo sapiens
tcaccaaggggtcta

SEQ ID NO: 590170 - DNA, 15 bp, Homo sapiens
caccaaggggtctac

SEQ ID NO: 590171 - DNA, 15 bp, Homo sapiens
accaaggggtctacc

SEQ ID NO: 590172 - DNA, 15 bp, Homo sapiens
ccaaggggtctacca

SEQ ID NO: 590173 - DNA, 15 bp, Homo sapiens
caaggggtctaccag

SEQ ID NO: 590174 - DNA, 15 bp, Homo sapiens
aaggggtctaccagg

SEQ ID NO: 590175 - DNA, 15 bp, Homo sapiens
aggggtctaccaggg

SEQ ID NO: 590176 - DNA, 15 bp, Homo sapiens
ggggtctaccagggg

SEQ ID NO: 590177 - DNA, 15 bp, Homo sapiens
gggtctaccagggga

SEQ ID NO: 590178 - DNA, 15 bp, Homo sapiens
ggtctaccaggggaa

SEQ ID NO: 590179 - DNA, 15 bp, Homo sapiens
gtctaccaggggaat

SEQ ID NO: 590180 - DNA, 15 bp, Homo sapiens
tctaccaggggaatg

SEQ ID NO: 590181 - DNA, 15 bp, Homo sapiens
ctaccaggggaatgg

SEQ ID NO: 590182 - DNA, 15 bp, Homo sapiens
taccaggggaatggg

SEQ ID NO: 590183 - DNA, 15 bp, Homo sapiens
accaggggaatggga

SEQ ID NO: 590184 - DNA, 15 bp, Homo sapiens
ccaggggaatgggag

SEQ ID NO: 590185 - DNA, 15 bp, Homo sapiens
caggggaatgggaga

SEQ ID NO: 590186 - DNA, 15 bp, Homo sapiens
aggggaatgggagag

SEQ ID NO: 590187 - DNA, 15 bp, Homo sapiens
ggggaatgggagagg

SEQ ID NO: 590188 - DNA, 15 bp, Homo sapiens
gggaatgggagaggc

SEQ ID NO: 590189 - DNA, 15 bp, Homo sapiens
ggaatgggagaggct

SEQ ID NO: 590190 - DNA, 15 bp, Homo sapiens
gaatgggagaggctg

SEQ ID NO: 590191 - DNA, 15 bp, Homo sapiens
aatgggagaggctgt

SEQ ID NO: 590192 - DNA, 15 bp, Homo sapiens
atgggagaggctgta

SEQ ID NO: 590193 - DNA, 15 bp, Homo sapiens
tgggagaggctgtat

SEQ ID NO: 590194 - DNA, 15 bp, Homo sapiens
gggagaggctgtatt

SEQ ID NO: 590195 - DNA, 15 bp, Homo sapiens
ggagaggctgtattg

SEQ ID NO: 590196 - DNA, 15 bp, Homo sapiens
gagaggctgtattga

SEQ ID NO: 590197 - DNA, 15 bp, Homo sapiens
agaggctgtattgat

SEQ ID NO: 590198 - DNA, 15 bp, Homo sapiens
gaggctgtattgata

SEQ ID NO: 590199 - DNA, 15 bp, Homo sapiens
aggctgtattgatag

SEQ ID NO: 590200 - DNA, 15 bp, Homo sapiens
ggctgtattgataga

SEQ ID NO: 590201 - DNA, 15 bp, Homo sapiens
gctgtattgatagaa

SEQ ID NO: 590202 - DNA, 15 bp, Homo sapiens
ctgtattgatagaac

SEQ ID NO: 590203 - DNA, 15 bp, Homo sapiens
tgtattgatagaaca

SEQ ID NO: 590204 - DNA, 15 bp, Homo sapiens
gtattgatagaacag

SEQ ID NO: 590205 - DNA, 15 bp, Homo sapiens
tattgatagaacagc

SEQ ID NO: 590206 - DNA, 15 bp, Homo sapiens
attgatagaacagct

SEQ ID NO: 590207 - DNA, 15 bp, Homo sapiens
ttgatagaacagctt

SEQ ID NO: 590208 - DNA, 15 bp, Homo sapiens
tgatagaacagcttc

SEQ ID NO: 590209 - DNA, 15 bp, Homo sapiens
gatagaacagcttct

SEQ ID NO: 590210 - DNA, 15 bp, Homo sapiens
atagaacagcttctg

SEQ ID NO: 590211 - DNA, 15 bp, Homo sapiens
tagaacagcttctgc

SEQ ID NO: 590212 - DNA, 15 bp, Homo sapiens
agaacagcttctgct

SEQ ID NO: 590213 - DNA, 15 bp, Homo sapiens
gaacagcttctgctg

SEQ ID NO: 590214 - DNA, 15 bp, Homo sapiens
aacagcttctgctgc

SEQ ID NO: 590215 - DNA, 15 bp, Homo sapiens
acagcttctgctgca

SEQ ID NO: 590216 - DNA, 15 bp, Homo sapiens
cagcttctgctgcag

SEQ ID NO: 590217 - DNA, 15 bp, Homo sapiens
agcttctgctgcagg

SEQ ID NO: 590218 - DNA, 15 bp, Homo sapiens
gcttctgctgcaggt

SEQ ID NO: 590219 - DNA, 15 bp, Homo sapiens
cttctgctgcaggtt

SEQ ID NO: 590220 - DNA, 15 bp, Homo sapiens
ttctgctgcaggttc

SEQ ID NO: 590221 - DNA, 15 bp, Homo sapiens
tctgctgcaggttcc

SEQ ID NO: 590222 - DNA, 15 bp, Homo sapiens
ctgctgcaggttcca

SEQ ID NO: 590223 - DNA, 15 bp, Homo sapiens
tgctgcaggttccaa

SEQ ID NO: 590224 - DNA, 15 bp, Homo sapiens
gctgcaggttccaaa

SEQ ID NO: 590225 - DNA, 15 bp, Homo sapiens
ctgcaggttccaaac

SEQ ID NO: 590226 - DNA, 15 bp, Homo sapiens
tgcaggttccaaaca

SEQ ID NO: 590227 - DNA, 15 bp, Homo sapiens
gcaggttccaaacaa

SEQ ID NO: 590228 - DNA, 15 bp, Homo sapiens
caggttccaaacaag

SEQ ID NO: 590229 - DNA, 15 bp, Homo sapiens
aggttccaaacaaga

SEQ ID NO: 590230 - DNA, 15 bp, Homo sapiens
ggttccaaacaagaa

SEQ ID NO: 590231 - DNA, 15 bp, Homo sapiens
gttccaaacaagaaa

SEQ ID NO: 590232 - DNA, 15 bp, Homo sapiens
ttccaaacaagaaat

SEQ ID NO: 590233 - DNA, 15 bp, Homo sapiens
tccaaacaagaaatg

SEQ ID NO: 590234 - DNA, 15 bp, Homo sapiens
ccaaacaagaaatgt

SEQ ID NO: 590235 - DNA, 15 bp, Homo sapiens
caaacaagaaatgtg

SEQ ID NO: 590236 - DNA, 15 bp, Homo sapiens
aaacaagaaatgtgg

SEQ ID NO: 590237 - DNA, 15 bp, Homo sapiens
aacaagaaatgtggg

SEQ ID NO: 590238 - DNA, 15 bp, Homo sapiens
acaagaaatgtggga

SEQ ID NO: 590239 - DNA, 15 bp, Homo sapiens
caagaaatgtgggag

SEQ ID NO: 590240 - DNA, 15 bp, Homo sapiens
aagaaatgtgggaga

SEQ ID NO: 590241 - DNA, 15 bp, Homo sapiens
agaaatgtgggagaa

SEQ ID NO: 590242 - DNA, 15 bp, Homo sapiens
gaaatgtgggagaat

SEQ ID NO: 590243 - DNA, 15 bp, Homo sapiens
aaatgtgggagaatg

SEQ ID NO: 590244 - DNA, 15 bp, Homo sapiens
aatgtgggagaatgg

SEQ ID NO: 590245 - DNA, 15 bp, Homo sapiens
atgtgggagaatggt

SEQ ID NO: 590246 - DNA, 15 bp, Homo sapiens
tgtgggagaatggtt

SEQ ID NO: 590247 - DNA, 15 bp, Homo sapiens
gtgggagaatggttg

SEQ ID NO: 590248 - DNA, 15 bp, Homo sapiens
tgggagaatggttga

SEQ ID NO: 590249 - DNA, 15 bp, Homo sapiens
gggagaatggttgaa

SEQ ID NO: 590250 - DNA, 15 bp, Homo sapiens
ggagaatggttgaaa

SEQ ID NO: 590251 - DNA, 15 bp, Homo sapiens
gagaatggttgaaat

SEQ ID NO: 590252 - DNA, 15 bp, Homo sapiens
agaatggttgaaatc

SEQ ID NO: 590253 - DNA, 15 bp, Homo sapiens
gaatggttgaaatca

SEQ ID NO: 590254 - DNA, 15 bp, Homo sapiens
aatggttgaaatcag

SEQ ID NO: 590255 - DNA, 15 bp, Homo sapiens
atggttgaaatcagc

SEQ ID NO: 590256 - DNA, 15 bp, Homo sapiens
tggttgaaatcagcc

SEQ ID NO: 590257 - DNA, 15 bp, Homo sapiens
ggttgaaatcagccc

SEQ ID NO: 590258 - DNA, 15 bp, Homo sapiens
gttgaaatcagcccc

SEQ ID NO: 590259 - DNA, 15 bp, Homo sapiens
ttgaaatcagccccg

SEQ ID NO: 590260 - DNA, 15 bp, Homo sapiens
tgaaatcagccccgg

SEQ ID NO: 590261 - DNA, 15 bp, Homo sapiens
gaaatcagccccggg

SEQ ID NO: 590262 - DNA, 15 bp, Homo sapiens
aaatcagccccgggg

SEQ ID NO: 590263 - DNA, 15 bp, Homo sapiens
aatcagccccggggg

SEQ ID NO: 590264 - DNA, 15 bp, Homo sapiens
atcagccccgggggc

SEQ ID NO: 590265 - DNA, 15 bp, Homo sapiens
tcagccccgggggca

SEQ ID NO: 590266 - DNA, 15 bp, Homo sapiens
cagccccgggggcac

SEQ ID NO: 590267 - DNA, 15 bp, Homo sapiens
agccccgggggcacc

SEQ ID NO: 590268 - DNA, 15 bp, Homo sapiens
gccccgggggcacct

SEQ ID NO: 590269 - DNA, 15 bp, Homo sapiens
ccccgggggcacctt

SEQ ID NO: 590270 - DNA, 15 bp, Homo sapiens
cccgggggcaccttc

SEQ ID NO: 590271 - DNA, 15 bp, Homo sapiens
ccgggggcaccttcc

SEQ ID NO: 590272 - DNA, 15 bp, Homo sapiens
cgggggcaccttccc

SEQ ID NO: 590273 - DNA, 15 bp, Homo sapiens
gggggcaccttcccg

SEQ ID NO: 590274 - DNA, 15 bp, Homo sapiens
ggggcaccttcccgt

SEQ ID NO: 590275 - DNA, 15 bp, Homo sapiens
gggcaccttcccgtg

SEQ ID NO: 590276 - DNA, 15 bp, Homo sapiens
ggcaccttcccgtgc

SEQ ID NO: 590277 - DNA, 15 bp, Homo sapiens
gcaccttcccgtgca

SEQ ID NO: 590278 - DNA, 15 bp, Homo sapiens
caccttcccgtgcat

SEQ ID NO: 590279 - DNA, 15 bp, Homo sapiens
accttcccgtgcatg

SEQ ID NO: 590280 - DNA, 15 bp, Homo sapiens
ccttcccgtgcatgc

SEQ ID NO: 590281 - DNA, 15 bp, Homo sapiens
cttcccgtgcatgcg

SEQ ID NO: 590282 - DNA, 15 bp, Homo sapiens
ttcccgtgcatgcgt

SEQ ID NO: 590283 - DNA, 15 bp, Homo sapiens
tcccgtgcatgcgtg

SEQ ID NO: 590284 - DNA, 15 bp, Homo sapiens
cccgtgcatgcgtgc

SEQ ID NO: 590285 - DNA, 15 bp, Homo sapiens
ccgtgcatgcgtgca

SEQ ID NO: 590286 - DNA, 15 bp, Homo sapiens
cgtgcatgcgtgcag

SEQ ID NO: 590287 - DNA, 15 bp, Homo sapiens
gtgcatgcgtgcagc

SEQ ID NO: 590288 - DNA, 15 bp, Homo sapiens
tgcatgcgtgcagct

SEQ ID NO: 590289 - DNA, 15 bp, Homo sapiens
gcatgcgtgcagctc

SEQ ID NO: 590290 - DNA, 15 bp, Homo sapiens
catgcgtgcagctcc

SEQ ID NO: 590291 - DNA, 15 bp, Homo sapiens
atgcgtgcagctcct

SEQ ID NO: 590292 - DNA, 15 bp, Homo sapiens
tgcgtgcagctcctt

SEQ ID NO: 590293 - DNA, 15 bp, Homo sapiens
gcgtgcagctccttc

SEQ ID NO: 590294 - DNA, 15 bp, Homo sapiens
cgtgcagctccttca

SEQ ID NO: 590295 - DNA, 15 bp, Homo sapiens
gtgcagctccttcaa

SEQ ID NO: 590296 - DNA, 15 bp, Homo sapiens
tgcagctccttcaac

SEQ ID NO: 590297 - DNA, 15 bp, Homo sapiens
gcagctccttcaaca

SEQ ID NO: 590298 - DNA, 15 bp, Homo sapiens
cagctccttcaacat

SEQ ID NO: 590299 - DNA, 15 bp, Homo sapiens
agctccttcaacatt

SEQ ID NO: 590300 - DNA, 15 bp, Homo sapiens
gctccttcaacattc

SEQ ID NO: 590301 - DNA, 15 bp, Homo sapiens
ctccttcaacattca

SEQ ID NO: 590302 - DNA, 15 bp, Homo sapiens
tccttcaacattcag

SEQ ID NO: 590303 - DNA, 15 bp, Homo sapiens
ccttcaacattcagt

SEQ ID NO: 590304 - DNA, 15 bp, Homo sapiens
cttcaacattcagtc

SEQ ID NO: 590305 - DNA, 15 bp, Homo sapiens
ttcaacattcagtcg

SEQ ID NO: 590306 - DNA, 15 bp, Homo sapiens
tcaacattcagtcga

SEQ ID NO: 590307 - DNA, 15 bp, Homo sapiens
caacattcagtcgac

SEQ ID NO: 590308 - DNA, 15 bp, Homo sapiens
aacattcagtcgacc

SEQ ID NO: 590309 - DNA, 15 bp, Homo sapiens
acattcagtcgacct

SEQ ID NO: 590310 - DNA, 15 bp, Homo sapiens
cattcagtcgacctt

SEQ ID NO: 590311 - DNA, 15 bp, Homo sapiens
attcagtcgaccttc

SEQ ID NO: 590312 - DNA, 15 bp, Homo sapiens
ttcagtcgaccttca

SEQ ID NO: 590313 - DNA, 15 bp, Homo sapiens
tcagtcgaccttcag

SEQ ID NO: 590314 - DNA, 15 bp, Homo sapiens
cagtcgaccttcagt

SEQ ID NO: 590315 - DNA, 15 bp, Homo sapiens
agtcgaccttcagtg

SEQ ID NO: 590316 - DNA, 15 bp, Homo sapiens
gtcgaccttcagtgc

SEQ ID NO: 590317 - DNA, 15 bp, Homo sapiens
tcgaccttcagtgcc

SEQ ID NO: 590318 - DNA, 15 bp, Homo sapiens
cgaccttcagtgcct

SEQ ID NO: 590319 - DNA, 15 bp, Homo sapiens
gaccttcagtgcctc

SEQ ID NO: 590320 - DNA, 15 bp, Homo sapiens
accttcagtgcctcc

SEQ ID NO: 590321 - DNA, 15 bp, Homo sapiens
ccttcagtgcctcct

SEQ ID NO: 590322 - DNA, 15 bp, Homo sapiens
cttcagtgcctcctg

SEQ ID NO: 590323 - DNA, 15 bp, Homo sapiens
ttcagtgcctcctgt

SEQ ID NO: 590324 - DNA, 15 bp, Homo sapiens
tcagtgcctcctgtg

SEQ ID NO: 590325 - DNA, 15 bp, Homo sapiens
cagtgcctcctgtga

SEQ ID NO: 590326 - DNA, 15 bp, Homo sapiens
agtgcctcctgtgag

SEQ ID NO: 590327 - DNA, 15 bp, Homo sapiens
gtgcctcctgtgagc

SEQ ID NO: 590328 - DNA, 15 bp, Homo sapiens
tgcctcctgtgagcc

SEQ ID NO: 590329 - DNA, 15 bp, Homo sapiens
gcctcctgtgagcca

SEQ ID NO: 590330 - DNA, 15 bp, Homo sapiens
cctcctgtgagccag

SEQ ID NO: 590331 - DNA, 15 bp, Homo sapiens
ctcctgtgagccagg

SEQ ID NO: 590332 - DNA, 15 bp, Homo sapiens
tcctgtgagccaggc

SEQ ID NO: 590333 - DNA, 15 bp, Homo sapiens
cctgtgagccaggca

SEQ ID NO: 590334 - DNA, 15 bp, Homo sapiens
ctgtgagccaggcac

SEQ ID NO: 590335 - DNA, 15 bp, Homo sapiens
tgtgagccaggcact

SEQ ID NO: 590336 - DNA, 15 bp, Homo sapiens
gtgagccaggcactg

SEQ ID NO: 590337 - DNA, 15 bp, Homo sapiens
tgagccaggcactgg

SEQ ID NO: 590338 - DNA, 15 bp, Homo sapiens
gagccaggcactggg

SEQ ID NO: 590339 - DNA, 15 bp, Homo sapiens
agccaggcactgggc

SEQ ID NO: 590340 - DNA, 15 bp, Homo sapiens
gccaggcactgggct

SEQ ID NO: 590341 - DNA, 15 bp, Homo sapiens
ccaggcactgggcta

SEQ ID NO: 590342 - DNA, 15 bp, Homo sapiens
caggcactgggctag

SEQ ID NO: 590343 - DNA, 15 bp, Homo sapiens
aggcactgggctagt

SEQ ID NO: 590344 - DNA, 15 bp, Homo sapiens
ggcactgggctagtc

SEQ ID NO: 590345 - DNA, 15 bp, Homo sapiens
gcactgggctagtct

SEQ ID NO: 590346 - DNA, 15 bp, Homo sapiens
cactgggctagtctc

SEQ ID NO: 590347 - DNA, 15 bp, Homo sapiens
actgggctagtctct

SEQ ID NO: 590348 - DNA, 15 bp, Homo sapiens
ctgggctagtctctg

SEQ ID NO: 590349 - DNA, 15 bp, Homo sapiens
tgggctagtctctgg

SEQ ID NO: 590350 - DNA, 15 bp, Homo sapiens
gggctagtctctggg

SEQ ID NO: 590351 - DNA, 15 bp, Homo sapiens
ggctagtctctgggg

SEQ ID NO: 590352 - DNA, 15 bp, Homo sapiens
gctagtctctggggg

SEQ ID NO: 590353 - DNA, 15 bp, Homo sapiens
ctagtctctgggggt

SEQ ID NO: 590354 - DNA, 15 bp, Homo sapiens
tagtctctgggggtg

SEQ ID NO: 590355 - DNA, 15 bp, Homo sapiens
agtctctgggggtgg

SEQ ID NO: 590356 - DNA, 15 bp, Homo sapiens
gtctctgggggtgga

SEQ ID NO: 590357 - DNA, 15 bp, Homo sapiens
tctctgggggtggag

SEQ ID NO: 590358 - DNA, 15 bp, Homo sapiens
ctctgggggtggaga

SEQ ID NO: 590359 - DNA, 15 bp, Homo sapiens
tctgggggtggagag

SEQ ID NO: 590360 - DNA, 15 bp, Homo sapiens
ctgggggtggagaga

SEQ ID NO: 590361 - DNA, 15 bp, Homo sapiens
tgggggtggagagat

SEQ ID NO: 590362 - DNA, 15 bp, Homo sapiens
gggggtggagagatg

SEQ ID NO: 590363 - DNA, 15 bp, Homo sapiens
ggggtggagagatga

SEQ ID NO: 590364 - DNA, 15 bp, Homo sapiens
gggtggagagatgag

SEQ ID NO: 590365 - DNA, 15 bp, Homo sapiens
ggtggagagatgagt

SEQ ID NO: 590366 - DNA, 15 bp, Homo sapiens
gtggagagatgagtc

SEQ ID NO: 590367 - DNA, 15 bp, Homo sapiens
tggagagatgagtca

SEQ ID NO: 590368 - DNA, 15 bp, Homo sapiens
ggagagatgagtcag

SEQ ID NO: 590369 - DNA, 15 bp, Homo sapiens
gagagatgagtcagg

SEQ ID NO: 590370 - DNA, 15 bp, Homo sapiens
agagatgagtcaggc

SEQ ID NO: 590371 - DNA, 15 bp, Homo sapiens
gagatgagtcaggca

SEQ ID NO: 590372 - DNA, 15 bp, Homo sapiens
agatgagtcaggcaa

SEQ ID NO: 590373 - DNA, 15 bp, Homo sapiens
gatgagtcaggcaaa

SEQ ID NO: 590374 - DNA, 15 bp, Homo sapiens
atgagtcaggcaaat

SEQ ID NO: 590375 - DNA, 15 bp, Homo sapiens
tgagtcaggcaaatg

SEQ ID NO: 590376 - DNA, 15 bp, Homo sapiens
gagtcaggcaaatgc

SEQ ID NO: 590377 - DNA, 15 bp, Homo sapiens
agtcaggcaaatgcc

SEQ ID NO: 590378 - DNA, 15 bp, Homo sapiens
gtcaggcaaatgcca

SEQ ID NO: 590379 - DNA, 15 bp, Homo sapiens
tcaggcaaatgccag

SEQ ID NO: 590380 - DNA, 15 bp, Homo sapiens
caggcaaatgccagc

SEQ ID NO: 590381 - DNA, 15 bp, Homo sapiens
aggcaaatgccagcc

SEQ ID NO: 590382 - DNA, 15 bp, Homo sapiens
ggcaaatgccagccc

SEQ ID NO: 590383 - DNA, 15 bp, Homo sapiens
gcaaatgccagccct

SEQ ID NO: 590384 - DNA, 15 bp, Homo sapiens
caaatgccagccctc

SEQ ID NO: 590385 - DNA, 15 bp, Homo sapiens
aaatgccagccctca

SEQ ID NO: 590386 - DNA, 15 bp, Homo sapiens
aatgccagccctcag

SEQ ID NO: 590387 - DNA, 15 bp, Homo sapiens
atgccagccctcaga

SEQ ID NO: 590388 - DNA, 15 bp, Homo sapiens
tgccagccctcagag

SEQ ID NO: 590389 - DNA, 15 bp, Homo sapiens
gccagccctcagagg

SEQ ID NO: 590390 - DNA, 15 bp, Homo sapiens
ccagccctcagaggg

SEQ ID NO: 590391 - DNA, 15 bp, Homo sapiens
cagccctcagagggc

SEQ ID NO: 590392 - DNA, 15 bp, Homo sapiens
agccctcagagggct

SEQ ID NO: 590393 - DNA, 15 bp, Homo sapiens
gccctcagagggctc

SEQ ID NO: 590394 - DNA, 15 bp, Homo sapiens
ccctcagagggctca

SEQ ID NO: 590395 - DNA, 15 bp, Homo sapiens
cctcagagggctcac

SEQ ID NO: 590396 - DNA, 15 bp, Homo sapiens
ctcagagggctcaca

SEQ ID NO: 590397 - DNA, 15 bp, Homo sapiens
tcagagggctcacag

SEQ ID NO: 590398 - DNA, 15 bp, Homo sapiens
cagagggctcacagg

SEQ ID NO: 590399 - DNA, 15 bp, Homo sapiens
agagggctcacaggg

SEQ ID NO: 590400 - DNA, 15 bp, Homo sapiens
gagggctcacagggc

SEQ ID NO: 590401 - DNA, 15 bp, Homo sapiens
agggctcacagggca

SEQ ID NO: 590402 - DNA, 15 bp, Homo sapiens
gggctcacagggcag

SEQ ID NO: 590403 - DNA, 15 bp, Homo sapiens
ggctcacagggcaga

SEQ ID NO: 590404 - DNA, 15 bp, Homo sapiens
gctcacagggcagaa

SEQ ID NO: 590405 - DNA, 15 bp, Homo sapiens
ctcacagggcagaag

SEQ ID NO: 590406 - DNA, 15 bp, Homo sapiens
tcacagggcagaagg

SEQ ID NO: 590407 - DNA, 15 bp, Homo sapiens
cacagggcagaaggt

SEQ ID NO: 590408 - DNA, 15 bp, Homo sapiens
acagggcagaaggtg

SEQ ID NO: 590409 - DNA, 15 bp, Homo sapiens
cagggcagaaggtga

SEQ ID NO: 590410 - DNA, 15 bp, Homo sapiens
agggcagaaggtgag

SEQ ID NO: 590411 - DNA, 15 bp, Homo sapiens
gggcagaaggtgaga

SEQ ID NO: 590412 - DNA, 15 bp, Homo sapiens
ggcagaaggtgagag

SEQ ID NO: 590413 - DNA, 15 bp, Homo sapiens
gcagaaggtgagaga

SEQ ID NO: 590414 - DNA, 15 bp, Homo sapiens
cagaaggtgagagat

SEQ ID NO: 590415 - DNA, 15 bp, Homo sapiens
agaaggtgagagatg

SEQ ID NO: 590416 - DNA, 15 bp, Homo sapiens
gaaggtgagagatga

SEQ ID NO: 590417 - DNA, 15 bp, Homo sapiens
aaggtgagagatgag

SEQ ID NO: 590418 - DNA, 15 bp, Homo sapiens
aggtgagagatgagt

SEQ ID NO: 590419 - DNA, 15 bp, Homo sapiens
ggtgagagatgagtg

SEQ ID NO: 590420 - DNA, 15 bp, Homo sapiens
gtgagagatgagtga

SEQ ID NO: 590421 - DNA, 15 bp, Homo sapiens
tgagagatgagtgag

SEQ ID NO: 590422 - DNA, 15 bp, Homo sapiens
gagagatgagtgagc

SEQ ID NO: 590423 - DNA, 15 bp, Homo sapiens
agagatgagtgagca

SEQ ID NO: 590424 - DNA, 15 bp, Homo sapiens
gagatgagtgagcag

SEQ ID NO: 590425 - DNA, 15 bp, Homo sapiens
agatgagtgagcaga

SEQ ID NO: 590426 - DNA, 15 bp, Homo sapiens
gatgagtgagcagaa

SEQ ID NO: 590427 - DNA, 15 bp, Homo sapiens
atgagtgagcagaaa

SEQ ID NO: 590428 - DNA, 15 bp, Homo sapiens
tgagtgagcagaaaa

SEQ ID NO: 590429 - DNA, 15 bp, Homo sapiens
gagtgagcagaaaat

SEQ ID NO: 590430 - DNA, 15 bp, Homo sapiens
agtgagcagaaaatg

SEQ ID NO: 590431 - DNA, 15 bp, Homo sapiens
gtgagcagaaaatga

SEQ ID NO: 590432 - DNA, 15 bp, Homo sapiens
tgagcagaaaatgac

SEQ ID NO: 590433 - DNA, 15 bp, Homo sapiens
gagcagaaaatgacc

SEQ ID NO: 590434 - DNA, 15 bp, Homo sapiens
agcagaaaatgacca

SEQ ID NO: 590435 - DNA, 15 bp, Homo sapiens
gcagaaaatgaccac

SEQ ID NO: 590436 - DNA, 15 bp, Homo sapiens
cagaaaatgaccaca

SEQ ID NO: 590437 - DNA, 15 bp, Homo sapiens
agaaaatgaccacag

SEQ ID NO: 590438 - DNA, 15 bp, Homo sapiens
gaaaatgaccacagc

SEQ ID NO: 590439 - DNA, 15 bp, Homo sapiens
aaaatgaccacagcg

SEQ ID NO: 590440 - DNA, 15 bp, Homo sapiens
aaatgaccacagcgc

SEQ ID NO: 590441 - DNA, 15 bp, Homo sapiens
aatgaccacagcgcg

SEQ ID NO: 590442 - DNA, 15 bp, Homo sapiens
atgaccacagcgcgt

SEQ ID NO: 590443 - DNA, 15 bp, Homo sapiens
tgaccacagcgcgtg

SEQ ID NO: 590444 - DNA, 15 bp, Homo sapiens
gaccacagcgcgtgt

SEQ ID NO: 590445 - DNA, 15 bp, Homo sapiens
accacagcgcgtgtg

SEQ ID NO: 590446 - DNA, 15 bp, Homo sapiens
ccacagcgcgtgtgg

SEQ ID NO: 590447 - DNA, 15 bp, Homo sapiens
cacagcgcgtgtggg

SEQ ID NO: 590448 - DNA, 15 bp, Homo sapiens
acagcgcgtgtgggg

SEQ ID NO: 590449 - DNA, 15 bp, Homo sapiens
cagcgcgtgtggggc

SEQ ID NO: 590450 - DNA, 15 bp, Homo sapiens
agcgcgtgtggggcc

SEQ ID NO: 590451 - DNA, 15 bp, Homo sapiens
gcgcgtgtggggccc

SEQ ID NO: 590452 - DNA, 15 bp, Homo sapiens
cgcgtgtggggccca

SEQ ID NO: 590453 - DNA, 15 bp, Homo sapiens
gcgtgtggggcccag

SEQ ID NO: 590454 - DNA, 15 bp, Homo sapiens
cgtgtggggcccagt

SEQ ID NO: 590455 - DNA, 15 bp, Homo sapiens
gtgtggggcccagtg

SEQ ID NO: 590456 - DNA, 15 bp, Homo sapiens
tgtggggcccagtgg

SEQ ID NO: 590457 - DNA, 15 bp, Homo sapiens
gtggggcccagtgga

SEQ ID NO: 590458 - DNA, 15 bp, Homo sapiens
tggggcccagtggag

SEQ ID NO: 590459 - DNA, 15 bp, Homo sapiens
ggggcccagtggagg

SEQ ID NO: 590460 - DNA, 15 bp, Homo sapiens
gggcccagtggaggg

SEQ ID NO: 590461 - DNA, 15 bp, Homo sapiens
ggcccagtggaggga

SEQ ID NO: 590462 - DNA, 15 bp, Homo sapiens
gcccagtggagggaa

SEQ ID NO: 590463 - DNA, 15 bp, Homo sapiens
cccagtggagggaag

SEQ ID NO: 590464 - DNA, 15 bp, Homo sapiens
ccagtggagggaagg

SEQ ID NO: 590465 - DNA, 15 bp, Homo sapiens
cagtggagggaagga

SEQ ID NO: 590466 - DNA, 15 bp, Homo sapiens
agtggagggaaggag

SEQ ID NO: 590467 - DNA, 15 bp, Homo sapiens
gtggagggaaggagg

SEQ ID NO: 590468 - DNA, 15 bp, Homo sapiens
tggagggaaggaggg

SEQ ID NO: 590469 - DNA, 15 bp, Homo sapiens
ggagggaaggagggg

SEQ ID NO: 590470 - DNA, 15 bp, Homo sapiens
gagggaaggagggga

SEQ ID NO: 590471 - DNA, 15 bp, Homo sapiens
agggaaggaggggat

SEQ ID NO: 590472 - DNA, 15 bp, Homo sapiens
gggaaggaggggatt

SEQ ID NO: 590473 - DNA, 15 bp, Homo sapiens
ggaaggaggggattc

SEQ ID NO: 590474 - DNA, 15 bp, Homo sapiens
gaaggaggggattca

SEQ ID NO: 590475 - DNA, 15 bp, Homo sapiens
aaggaggggattcag

SEQ ID NO: 590476 - DNA, 15 bp, Homo sapiens
aggaggggattcagg

SEQ ID NO: 590477 - DNA, 15 bp, Homo sapiens
ggaggggattcagga

SEQ ID NO: 590478 - DNA, 15 bp, Homo sapiens
gaggggattcaggag

SEQ ID NO: 590479 - DNA, 15 bp, Homo sapiens
aggggattcaggagc

SEQ ID NO: 590480 - DNA, 15 bp, Homo sapiens
ggggattcaggagca

SEQ ID NO: 590481 - DNA, 15 bp, Homo sapiens
gggattcaggagcac

SEQ ID NO: 590482 - DNA, 15 bp, Homo sapiens
ggattcaggagcaca

SEQ ID NO: 590483 - DNA, 15 bp, Homo sapiens
gattcaggagcacag

SEQ ID NO: 590484 - DNA, 15 bp, Homo sapiens
attcaggagcacagg

SEQ ID NO: 590485 - DNA, 15 bp, Homo sapiens
ttcaggagcacagga

SEQ ID NO: 590486 - DNA, 15 bp, Homo sapiens
tcaggagcacaggag

SEQ ID NO: 590487 - DNA, 15 bp, Homo sapiens
caggagcacaggaga

SEQ ID NO: 590488 - DNA, 15 bp, Homo sapiens
aggagcacaggagag

SEQ ID NO: 590489 - DNA, 15 bp, Homo sapiens
ggagcacaggagagt

SEQ ID NO: 590490 - DNA, 15 bp, Homo sapiens
gagcacaggagagtc

SEQ ID NO: 590491 - DNA, 15 bp, Homo sapiens
agcacaggagagtca

SEQ ID NO: 590492 - DNA, 15 bp, Homo sapiens
gcacaggagagtcaa

SEQ ID NO: 590493 - DNA, 15 bp, Homo sapiens
cacaggagagtcaac

SEQ ID NO: 590494 - DNA, 15 bp, Homo sapiens
acaggagagtcaaca

SEQ ID NO: 590495 - DNA, 15 bp, Homo sapiens
caggagagtcaacag

SEQ ID NO: 590496 - DNA, 15 bp, Homo sapiens
aggagagtcaacagg

SEQ ID NO: 590497 - DNA, 15 bp, Homo sapiens
ggagagtcaacaggg

SEQ ID NO: 590498 - DNA, 15 bp, Homo sapiens
gagagtcaacagggg

SEQ ID NO: 590499 - DNA, 15 bp, Homo sapiens
agagtcaacagggga

SEQ ID NO: 590500 - DNA, 15 bp, Homo sapiens
gagtcaacaggggaa

SEQ ID NO: 590501 - DNA, 15 bp, Homo sapiens
agtcaacaggggaaa

SEQ ID NO: 590502 - DNA, 15 bp, Homo sapiens
gtcaacaggggaaac

SEQ ID NO: 590503 - DNA, 15 bp, Homo sapiens
tcaacaggggaaact

SEQ ID NO: 590504 - DNA, 15 bp, Homo sapiens
caacaggggaaactt

SEQ ID NO: 590505 - DNA, 15 bp, Homo sapiens
aacaggggaaacttc

SEQ ID NO: 590506 - DNA, 15 bp, Homo sapiens
acaggggaaacttct

SEQ ID NO: 590507 - DNA, 15 bp, Homo sapiens
caggggaaacttctc

SEQ ID NO: 590508 - DNA, 15 bp, Homo sapiens
aggggaaacttctcc

SEQ ID NO: 590509 - DNA, 15 bp, Homo sapiens
ggggaaacttctccg

SEQ ID NO: 590510 - DNA, 15 bp, Homo sapiens
gggaaacttctccga

SEQ ID NO: 590511 - DNA, 15 bp, Homo sapiens
ggaaacttctccgag

SEQ ID NO: 590512 - DNA, 15 bp, Homo sapiens
gaaacttctccgagg

SEQ ID NO: 590513 - DNA, 15 bp, Homo sapiens
aaacttctccgagga

SEQ ID NO: 590514 - DNA, 15 bp, Homo sapiens
aacttctccgaggag

SEQ ID NO: 590515 - DNA, 15 bp, Homo sapiens
acttctccgaggaga

SEQ ID NO: 590516 - DNA, 15 bp, Homo sapiens
cttctccgaggagaa

SEQ ID NO: 590517 - DNA, 15 bp, Homo sapiens
ttctccgaggagaat

SEQ ID NO: 590518 - DNA, 15 bp, Homo sapiens
tctccgaggagaatc

SEQ ID NO: 590519 - DNA, 15 bp, Homo sapiens
ctccgaggagaatct

SEQ ID NO: 590520 - DNA, 15 bp, Homo sapiens
tccgaggagaatctg

SEQ ID NO: 590521 - DNA, 15 bp, Homo sapiens
ccgaggagaatctga

SEQ ID NO: 590522 - DNA, 15 bp, Homo sapiens
cgaggagaatctgat

SEQ ID NO: 590523 - DNA, 15 bp, Homo sapiens
gaggagaatctgatc

SEQ ID NO: 590524 - DNA, 15 bp, Homo sapiens
aggagaatctgatcc

SEQ ID NO: 590525 - DNA, 15 bp, Homo sapiens
ggagaatctgatcct

SEQ ID NO: 590526 - DNA, 15 bp, Homo sapiens
gagaatctgatcctc

SEQ ID NO: 590527 - DNA, 15 bp, Homo sapiens
agaatctgatcctcc

SEQ ID NO: 590528 - DNA, 15 bp, Homo sapiens
gaatctgatcctcct

SEQ ID NO: 590529 - DNA, 15 bp, Homo sapiens
aatctgatcctcctc

SEQ ID NO: 590530 - DNA, 15 bp, Homo sapiens
atctgatcctcctcc

SEQ ID NO: 590531 - DNA, 15 bp, Homo sapiens
tctgatcctcctccc

SEQ ID NO: 590532 - DNA, 15 bp, Homo sapiens
ctgatcctcctccca

SEQ ID NO: 590533 - DNA, 15 bp, Homo sapiens
tgatcctcctcccat

SEQ ID NO: 590534 - DNA, 15 bp, Homo sapiens
gatcctcctcccatc

SEQ ID NO: 590535 - DNA, 15 bp, Homo sapiens
atcctcctcccatct

SEQ ID NO: 590536 - DNA, 15 bp, Homo sapiens
tcctcctcccatctg

SEQ ID NO: 590537 - DNA, 15 bp, Homo sapiens
cctcctcccatctgg

SEQ ID NO: 590538 - DNA, 15 bp, Homo sapiens
ctcctcccatctggc

SEQ ID NO: 590539 - DNA, 15 bp, Homo sapiens
tcctcccatctggcc

SEQ ID NO: 590540 - DNA, 15 bp, Homo sapiens
cctcccatctggcca

SEQ ID NO: 590541 - DNA, 15 bp, Homo sapiens
ctcccatctggccac

SEQ ID NO: 590542 - DNA, 15 bp, Homo sapiens
tcccatctggccacc

SEQ ID NO: 590543 - DNA, 15 bp, Homo sapiens
cccatctggccacct

SEQ ID NO: 590544 - DNA, 15 bp, Homo sapiens
ccatctggccacctt

SEQ ID NO: 590545 - DNA, 15 bp, Homo sapiens
catctggccaccttc

SEQ ID NO: 590546 - DNA, 15 bp, Homo sapiens
atctggccaccttct

SEQ ID NO: 590547 - DNA, 15 bp, Homo sapiens
tctggccaccttctg

SEQ ID NO: 590548 - DNA, 15 bp, Homo sapiens
ctggccaccttctga

SEQ ID NO: 590549 - DNA, 15 bp, Homo sapiens
tggccaccttctgaa

SEQ ID NO: 590550 - DNA, 15 bp, Homo sapiens
ggccaccttctgaag

SEQ ID NO: 590551 - DNA, 15 bp, Homo sapiens
gccaccttctgaagc

SEQ ID NO: 590552 - DNA, 15 bp, Homo sapiens
ccaccttctgaagcc

SEQ ID NO: 590553 - DNA, 15 bp, Homo sapiens
caccttctgaagccc

SEQ ID NO: 590554 - DNA, 15 bp, Homo sapiens
accttctgaagccct

SEQ ID NO: 590555 - DNA, 15 bp, Homo sapiens
ccttctgaagccctc

SEQ ID NO: 590556 - DNA, 15 bp, Homo sapiens
cttctgaagccctct

SEQ ID NO: 590557 - DNA, 15 bp, Homo sapiens
ttctgaagccctctc

SEQ ID NO: 590558 - DNA, 15 bp, Homo sapiens
tctgaagccctctct

SEQ ID NO: 590559 - DNA, 15 bp, Homo sapiens
ctgaagccctctctc

SEQ ID NO: 590560 - DNA, 15 bp, Homo sapiens
tgaagccctctctcc

SEQ ID NO: 590561 - DNA, 15 bp, Homo sapiens
gaagccctctctccc

SEQ ID NO: 590562 - DNA, 15 bp, Homo sapiens
aagccctctctcccc

SEQ ID NO: 590563 - DNA, 15 bp, Homo sapiens
agccctctctcccca

SEQ ID NO: 590564 - DNA, 15 bp, Homo sapiens
gccctctctccccat

SEQ ID NO: 590565 - DNA, 15 bp, Homo sapiens
ccctctctccccatc

SEQ ID NO: 590566 - DNA, 15 bp, Homo sapiens
cctctctccccatcc

SEQ ID NO: 590567 - DNA, 15 bp, Homo sapiens
ctctctccccatcca

SEQ ID NO: 590568 - DNA, 15 bp, Homo sapiens
tctctccccatccaa

SEQ ID NO: 590569 - DNA, 15 bp, Homo sapiens
ctctccccatccaag

SEQ ID NO: 590570 - DNA, 15 bp, Homo sapiens
tctccccatccaagt

SEQ ID NO: 590571 - DNA, 15 bp, Homo sapiens
ctccccatccaagtg

SEQ ID NO: 590572 - DNA, 15 bp, Homo sapiens
tccccatccaagtga

SEQ ID NO: 590573 - DNA, 15 bp, Homo sapiens
ccccatccaagtgag

SEQ ID NO: 590574 - DNA, 15 bp, Homo sapiens
cccatccaagtgaga

SEQ ID NO: 590575 - DNA, 15 bp, Homo sapiens
ccatccaagtgagaa

SEQ ID NO: 590576 - DNA, 15 bp, Homo sapiens
catccaagtgagaaa

SEQ ID NO: 590577 - DNA, 15 bp, Homo sapiens
atccaagtgagaaag

SEQ ID NO: 590578 - DNA, 15 bp, Homo sapiens
tccaagtgagaaagg

SEQ ID NO: 590579 - DNA, 15 bp, Homo sapiens
ccaagtgagaaagga

SEQ ID NO: 590580 - DNA, 15 bp, Homo sapiens
caagtgagaaaggac

SEQ ID NO: 590581 - DNA, 15 bp, Homo sapiens
aagtgagaaaggaca

SEQ ID NO: 590582 - DNA, 15 bp, Homo sapiens
agtgagaaaggacag

SEQ ID NO: 590583 - DNA, 15 bp, Homo sapiens
gtgagaaaggacagg

SEQ ID NO: 590584 - DNA, 15 bp, Homo sapiens
tgagaaaggacaggc

SEQ ID NO: 590585 - DNA, 15 bp, Homo sapiens
gagaaaggacaggcg

SEQ ID NO: 590586 - DNA, 15 bp, Homo sapiens
agaaaggacaggcgt

SEQ ID NO: 590587 - DNA, 15 bp, Homo sapiens
gaaaggacaggcgta

SEQ ID NO: 590588 - DNA, 15 bp, Homo sapiens
aaaggacaggcgtat

SEQ ID NO: 590589 - DNA, 15 bp, Homo sapiens
aaggacaggcgtatg

SEQ ID NO: 590590 - DNA, 15 bp, Homo sapiens
aggacaggcgtatga

SEQ ID NO: 590591 - DNA, 15 bp, Homo sapiens
ggacaggcgtatgac

SEQ ID NO: 590592 - DNA, 15 bp, Homo sapiens
gacaggcgtatgacc

SEQ ID NO: 590593 - DNA, 15 bp, Homo sapiens
acaggcgtatgacca

SEQ ID NO: 590594 - DNA, 15 bp, Homo sapiens
caggcgtatgaccag

SEQ ID NO: 590595 - DNA, 15 bp, Homo sapiens
aggcgtatgaccaga

SEQ ID NO: 590596 - DNA, 15 bp, Homo sapiens
ggcgtatgaccagat

SEQ ID NO: 590597 - DNA, 15 bp, Homo sapiens
gcgtatgaccagatt

SEQ ID NO: 590598 - DNA, 15 bp, Homo sapiens
cgtatgaccagattg

SEQ ID NO: 590599 - DNA, 15 bp, Homo sapiens
gtatgaccagattgg

SEQ ID NO: 590600 - DNA, 15 bp, Homo sapiens
tatgaccagattggt

SEQ ID NO: 590601 - DNA, 15 bp, Homo sapiens
atgaccagattggtg

SEQ ID NO: 590602 - DNA, 15 bp, Homo sapiens
tgaccagattggtgt

SEQ ID NO: 590603 - DNA, 15 bp, Homo sapiens
gaccagattggtgta

SEQ ID NO: 590604 - DNA, 15 bp, Homo sapiens
accagattggtgtat

SEQ ID NO: 590605 - DNA, 15 bp, Homo sapiens
ccagattggtgtatg

SEQ ID NO: 590606 - DNA, 15 bp, Homo sapiens
cagattggtgtatga

SEQ ID NO: 590607 - DNA, 15 bp, Homo sapiens
agattggtgtatgaa

SEQ ID NO: 590608 - DNA, 15 bp, Homo sapiens
gattggtgtatgaag

SEQ ID NO: 590609 - DNA, 15 bp, Homo sapiens
attggtgtatgaaga

SEQ ID NO: 590610 - DNA, 15 bp, Homo sapiens
ttggtgtatgaagat

SEQ ID NO: 590611 - DNA, 15 bp, Homo sapiens
tggtgtatgaagatg

SEQ ID NO: 590612 - DNA, 15 bp, Homo sapiens
ggtgtatgaagatgc

SEQ ID NO: 590613 - DNA, 15 bp, Homo sapiens
gtgtatgaagatgct

SEQ ID NO: 590614 - DNA, 15 bp, Homo sapiens
tgtatgaagatgctg

SEQ ID NO: 590615 - DNA, 15 bp, Homo sapiens
gtatgaagatgctga

SEQ ID NO: 590616 - DNA, 15 bp, Homo sapiens
tatgaagatgctgaa

SEQ ID NO: 590617 - DNA, 15 bp, Homo sapiens
atgaagatgctgaat

SEQ ID NO: 590618 - DNA, 15 bp, Homo sapiens
tgaagatgctgaatt

SEQ ID NO: 590619 - DNA, 15 bp, Homo sapiens
gaagatgctgaatta

SEQ ID NO: 590620 - DNA, 15 bp, Homo sapiens
aagatgctgaattac

SEQ ID NO: 590621 - DNA, 15 bp, Homo sapiens
agatgctgaattacg

SEQ ID NO: 590622 - DNA, 15 bp, Homo sapiens
gatgctgaattacgt

SEQ ID NO: 590623 - DNA, 15 bp, Homo sapiens
atgctgaattacgtt

SEQ ID NO: 590624 - DNA, 15 bp, Homo sapiens
tgctgaattacgttc

SEQ ID NO: 590625 - DNA, 15 bp, Homo sapiens
gctgaattacgttct

SEQ ID NO: 590626 - DNA, 15 bp, Homo sapiens
ctgaattacgttctc

SEQ ID NO: 590627 - DNA, 15 bp, Homo sapiens
tgaattacgttctca

SEQ ID NO: 590628 - DNA, 15 bp, Homo sapiens
gaattacgttctcat

SEQ ID NO: 590629 - DNA, 15 bp, Homo sapiens
aattacgttctcatt

SEQ ID NO: 590630 - DNA, 15 bp, Homo sapiens
attacgttctcattg

SEQ ID NO: 590631 - DNA, 15 bp, Homo sapiens
ttacgttctcattgt

SEQ ID NO: 590632 - DNA, 15 bp, Homo sapiens
tacgttctcattgtt

SEQ ID NO: 590633 - DNA, 15 bp, Homo sapiens
acgttctcattgttt

SEQ ID NO: 590634 - DNA, 15 bp, Homo sapiens
cgttctcattgtttc

SEQ ID NO: 590635 - DNA, 15 bp, Homo sapiens
gttctcattgtttca

SEQ ID NO: 590636 - DNA, 15 bp, Homo sapiens
ttctcattgtttcaa

SEQ ID NO: 590637 - DNA, 15 bp, Homo sapiens
tctcattgtttcaaa

SEQ ID NO: 590638 - DNA, 15 bp, Homo sapiens
ctcattgtttcaaac

SEQ ID NO: 590639 - DNA, 15 bp, Homo sapiens
tcattgtttcaaact

SEQ ID NO: 590640 - DNA, 15 bp, Homo sapiens
cattgtttcaaacta

SEQ ID NO: 590641 - DNA, 15 bp, Homo sapiens
attgtttcaaactag

SEQ ID NO: 590642 - DNA, 15 bp, Homo sapiens
ttgtttcaaactagt

SEQ ID NO: 590643 - DNA, 15 bp, Homo sapiens
tgtttcaaactagta

SEQ ID NO: 590644 - DNA, 15 bp, Homo sapiens
gtttcaaactagtaa

SEQ ID NO: 590645 - DNA, 15 bp, Homo sapiens
tttcaaactagtaaa

SEQ ID NO: 590646 - DNA, 15 bp, Homo sapiens
ttcaaactagtaaac

SEQ ID NO: 590647 - DNA, 15 bp, Homo sapiens
tcaaactagtaaacc

SEQ ID NO: 590648 - DNA, 15 bp, Homo sapiens
caaactagtaaacca

SEQ ID NO: 590649 - DNA, 15 bp, Homo sapiens
aaactagtaaaccat

SEQ ID NO: 590650 - DNA, 15 bp, Homo sapiens
aactagtaaaccata

SEQ ID NO: 590651 - DNA, 15 bp, Homo sapiens
actagtaaaccatag

SEQ ID NO: 590652 - DNA, 15 bp, Homo sapiens
ctagtaaaccataga

SEQ ID NO: 590653 - DNA, 15 bp, Homo sapiens
tagtaaaccatagat

SEQ ID NO: 590654 - DNA, 15 bp, Homo sapiens
agtaaaccatagatt

SEQ ID NO: 590655 - DNA, 15 bp, Homo sapiens
gtaaaccatagattt

SEQ ID NO: 590656 - DNA, 15 bp, Homo sapiens
taaaccatagatttt

SEQ ID NO: 590657 - DNA, 15 bp, Homo sapiens
aaaccatagatttta

SEQ ID NO: 590658 - DNA, 15 bp, Homo sapiens
aaccatagattttat

SEQ ID NO: 590659 - DNA, 15 bp, Homo sapiens
accatagattttatg

SEQ ID NO: 590660 - DNA, 15 bp, Homo sapiens
ccatagattttatgt

SEQ ID NO: 590661 - DNA, 15 bp, Homo sapiens
catagattttatgta

SEQ ID NO: 590662 - DNA, 15 bp, Homo sapiens
atagattttatgtag

SEQ ID NO: 590663 - DNA, 15 bp, Homo sapiens
tagattttatgtagt

SEQ ID NO: 590664 - DNA, 15 bp, Homo sapiens
agattttatgtagta

SEQ ID NO: 590665 - DNA, 15 bp, Homo sapiens
gattttatgtagtaa

SEQ ID NO: 590666 - DNA, 15 bp, Homo sapiens
attttatgtagtaac

SEQ ID NO: 590667 - DNA, 15 bp, Homo sapiens
ttttatgtagtaact

SEQ ID NO: 590668 - DNA, 15 bp, Homo sapiens
tttatgtagtaactt

SEQ ID NO: 590669 - DNA, 15 bp, Homo sapiens
ttatgtagtaacttc

SEQ ID NO: 590670 - DNA, 15 bp, Homo sapiens
tatgtagtaacttct

SEQ ID NO: 590671 - DNA, 15 bp, Homo sapiens
atgtagtaacttcta

SEQ ID NO: 590672 - DNA, 15 bp, Homo sapiens
tgtagtaacttctac

SEQ ID NO: 590673 - DNA, 15 bp, Homo sapiens
gtagtaacttctaca

SEQ ID NO: 590674 - DNA, 15 bp, Homo sapiens
tagtaacttctacaa

SEQ ID NO: 590675 - DNA, 15 bp, Homo sapiens
agtaacttctacaaa

SEQ ID NO: 590676 - DNA, 15 bp, Homo sapiens
gtaacttctacaaac

SEQ ID NO: 590677 - DNA, 15 bp, Homo sapiens
taacttctacaaact

SEQ ID NO: 590678 - DNA, 15 bp, Homo sapiens
aacttctacaaactg

SEQ ID NO: 590679 - DNA, 15 bp, Homo sapiens
acttctacaaactgc

SEQ ID NO: 590680 - DNA, 15 bp, Homo sapiens
cttctacaaactgca

SEQ ID NO: 590681 - DNA, 15 bp, Homo sapiens
ttctacaaactgcat

SEQ ID NO: 590682 - DNA, 15 bp, Homo sapiens
tctacaaactgcatt

SEQ ID NO: 590683 - DNA, 15 bp, Homo sapiens
ctacaaactgcatta

SEQ ID NO: 590684 - DNA, 15 bp, Homo sapiens
tacaaactgcattac

SEQ ID NO: 590685 - DNA, 15 bp, Homo sapiens
acaaactgcattaca

SEQ ID NO: 590686 - DNA, 15 bp, Homo sapiens
caaactgcattacaa

SEQ ID NO: 590687 - DNA, 15 bp, Homo sapiens
aaactgcattacaaa

SEQ ID NO: 590688 - DNA, 15 bp, Homo sapiens
aactgcattacaaac

SEQ ID NO: 590689 - DNA, 15 bp, Homo sapiens
actgcattacaaaca

SEQ ID NO: 590690 - DNA, 15 bp, Homo sapiens
ctgcattacaaacac

SEQ ID NO: 590691 - DNA, 15 bp, Homo sapiens
tgcattacaaacact

SEQ ID NO: 590692 - DNA, 15 bp, Homo sapiens
gcattacaaacactc

SEQ ID NO: 590693 - DNA, 15 bp, Homo sapiens
cattacaaacactcc

SEQ ID NO: 590694 - DNA, 15 bp, Homo sapiens
attacaaacactcca

SEQ ID NO: 590695 - DNA, 15 bp, Homo sapiens
ttacaaacactccat

SEQ ID NO: 590696 - DNA, 15 bp, Homo sapiens
tacaaacactccatt

SEQ ID NO: 590697 - DNA, 15 bp, Homo sapiens
acaaacactccattc

SEQ ID NO: 590698 - DNA, 15 bp, Homo sapiens
caaacactccattct

SEQ ID NO: 590699 - DNA, 15 bp, Homo sapiens
aaacactccattctt

SEQ ID NO: 590700 - DNA, 15 bp, Homo sapiens
aacactccattcttt

SEQ ID NO: 590701 - DNA, 15 bp, Homo sapiens
acactccattctttg

SEQ ID NO: 590702 - DNA, 15 bp, Homo sapiens
cactccattctttgt

SEQ ID NO: 590703 - DNA, 15 bp, Homo sapiens
actccattctttgtt

SEQ ID NO: 590704 - DNA, 15 bp, Homo sapiens
ctccattctttgttg

SEQ ID NO: 590705 - DNA, 15 bp, Homo sapiens
tccattctttgttgc

SEQ ID NO: 590706 - DNA, 15 bp, Homo sapiens
ccattctttgttgcc

SEQ ID NO: 590707 - DNA, 15 bp, Homo sapiens
cattctttgttgccc

SEQ ID NO: 590708 - DNA, 15 bp, Homo sapiens
attctttgttgccct

SEQ ID NO: 590709 - DNA, 15 bp, Homo sapiens
ttctttgttgccctg

SEQ ID NO: 590710 - DNA, 15 bp, Homo sapiens
tctttgttgccctgg

SEQ ID NO: 590711 - DNA, 15 bp, Homo sapiens
ctttgttgccctggg

SEQ ID NO: 590712 - DNA, 15 bp, Homo sapiens
tttgttgccctgggt

SEQ ID NO: 590713 - DNA, 15 bp, Homo sapiens
ttgttgccctgggta

SEQ ID NO: 590714 - DNA, 15 bp, Homo sapiens
tgttgccctgggtag

SEQ ID NO: 590715 - DNA, 15 bp, Homo sapiens
gttgccctgggtaga

SEQ ID NO: 590716 - DNA, 15 bp, Homo sapiens
ttgccctgggtagaa

SEQ ID NO: 590717 - DNA, 15 bp, Homo sapiens
tgccctgggtagaag

SEQ ID NO: 590718 - DNA, 15 bp, Homo sapiens
gccctgggtagaagt

SEQ ID NO: 590719 - DNA, 15 bp, Homo sapiens
ccctgggtagaagtt

SEQ ID NO: 590720 - DNA, 15 bp, Homo sapiens
cctgggtagaagttt

SEQ ID NO: 590721 - DNA, 15 bp, Homo sapiens
ctgggtagaagttta

SEQ ID NO: 590722 - DNA, 15 bp, Homo sapiens
tgggtagaagtttat

SEQ ID NO: 590723 - DNA, 15 bp, Homo sapiens
gggtagaagtttatt

SEQ ID NO: 590724 - DNA, 15 bp, Homo sapiens
ggtagaagtttattt

SEQ ID NO: 590725 - DNA, 15 bp, Homo sapiens
gtagaagtttatttt

SEQ ID NO: 590726 - DNA, 15 bp, Homo sapiens
tagaagtttatttta

SEQ ID NO: 590727 - DNA, 15 bp, Homo sapiens
agaagtttattttag

SEQ ID NO: 590728 - DNA, 15 bp, Homo sapiens
gaagtttattttagt

SEQ ID NO: 590729 - DNA, 15 bp, Homo sapiens
aagtttattttagtg

SEQ ID NO: 590730 - DNA, 15 bp, Homo sapiens
agtttattttagtga

SEQ ID NO: 590731 - DNA, 15 bp, Homo sapiens
gtttattttagtgag

SEQ ID NO: 590732 - DNA, 15 bp, Homo sapiens
tttattttagtgagc

SEQ ID NO: 590733 - DNA, 15 bp, Homo sapiens
ttattttagtgagcc

SEQ ID NO: 590734 - DNA, 15 bp, Homo sapiens
tattttagtgagccc

SEQ ID NO: 590735 - DNA, 15 bp, Homo sapiens
attttagtgagccca

SEQ ID NO: 590736 - DNA, 15 bp, Homo sapiens
ttttagtgagcccaa

SEQ ID NO: 590737 - DNA, 15 bp, Homo sapiens
tttagtgagcccaag

SEQ ID NO: 590738 - DNA, 15 bp, Homo sapiens
ttagtgagcccaagt

SEQ ID NO: 590739 - DNA, 15 bp, Homo sapiens
tagtgagcccaagtt

SEQ ID NO: 590740 - DNA, 15 bp, Homo sapiens
agtgagcccaagttt

SEQ ID NO: 590741 - DNA, 15 bp, Homo sapiens
gtgagcccaagtttg

SEQ ID NO: 590742 - DNA, 15 bp, Homo sapiens
tgagcccaagtttga

SEQ ID NO: 590743 - DNA, 15 bp, Homo sapiens
gagcccaagtttgag

SEQ ID NO: 590744 - DNA, 15 bp, Homo sapiens
agcccaagtttgagg

SEQ ID NO: 590745 - DNA, 15 bp, Homo sapiens
gcccaagtttgagga

SEQ ID NO: 590746 - DNA, 15 bp, Homo sapiens
cccaagtttgaggaa

SEQ ID NO: 590747 - DNA, 15 bp, Homo sapiens
ccaagtttgaggaac

SEQ ID NO: 590748 - DNA, 15 bp, Homo sapiens
caagtttgaggaacc

SEQ ID NO: 590749 - DNA, 15 bp, Homo sapiens
aagtttgaggaacct

SEQ ID NO: 590750 - DNA, 15 bp, Homo sapiens
agtttgaggaacctt

SEQ ID NO: 590751 - DNA, 15 bp, Homo sapiens
gtttgaggaacctta

SEQ ID NO: 590752 - DNA, 15 bp, Homo sapiens
tttgaggaaccttat

SEQ ID NO: 590753 - DNA, 15 bp, Homo sapiens
ttgaggaaccttata

SEQ ID NO: 590754 - DNA, 15 bp, Homo sapiens
tgaggaaccttatat

SEQ ID NO: 590755 - DNA, 15 bp, Homo sapiens
gaggaaccttatatg

SEQ ID NO: 590756 - DNA, 15 bp, Homo sapiens
aggaaccttatatgg

SEQ ID NO: 590757 - DNA, 15 bp, Homo sapiens
ggaaccttatatggt

SEQ ID NO: 590758 - DNA, 15 bp, Homo sapiens
gaaccttatatggta

SEQ ID NO: 590759 - DNA, 15 bp, Homo sapiens
aaccttatatggtat

SEQ ID NO: 590760 - DNA, 15 bp, Homo sapiens
accttatatggtatg

SEQ ID NO: 590761 - DNA, 15 bp, Homo sapiens
ccttatatggtatga

SEQ ID NO: 590762 - DNA, 15 bp, Homo sapiens
cttatatggtatgag

SEQ ID NO: 590763 - DNA, 15 bp, Homo sapiens
ttatatggtatgagt

SEQ ID NO: 590764 - DNA, 15 bp, Homo sapiens
tatatggtatgagta

SEQ ID NO: 590765 - DNA, 15 bp, Homo sapiens
atatggtatgagtac

SEQ ID NO: 590766 - DNA, 15 bp, Homo sapiens
tatggtatgagtaca

SEQ ID NO: 590767 - DNA, 15 bp, Homo sapiens
atggtatgagtacaa

SEQ ID NO: 590768 - DNA, 15 bp, Homo sapiens
tggtatgagtacaat

SEQ ID NO: 590769 - DNA, 15 bp, Homo sapiens
ggtatgagtacaatt

SEQ ID NO: 590770 - DNA, 15 bp, Homo sapiens
gtatgagtacaatta

SEQ ID NO: 590771 - DNA, 15 bp, Homo sapiens
tatgagtacaattac

SEQ ID NO: 590772 - DNA, 15 bp, Homo sapiens
atgagtacaattacc

SEQ ID NO: 590773 - DNA, 15 bp, Homo sapiens
tgagtacaattacca

SEQ ID NO: 590774 - DNA, 15 bp, Homo sapiens
gagtacaattaccat

SEQ ID NO: 590775 - DNA, 15 bp, Homo sapiens
agtacaattaccatt

SEQ ID NO: 590776 - DNA, 15 bp, Homo sapiens
gtacaattaccattt

SEQ ID NO: 590777 - DNA, 15 bp, Homo sapiens
tacaattaccatttt

SEQ ID NO: 590778 - DNA, 15 bp, Homo sapiens
acaattaccatttta

SEQ ID NO: 590779 - DNA, 15 bp, Homo sapiens
caattaccattttaa

SEQ ID NO: 590780 - DNA, 15 bp, Homo sapiens
aattaccattttaat

SEQ ID NO: 590781 - DNA, 15 bp, Homo sapiens
attaccattttaata

SEQ ID NO: 590782 - DNA, 15 bp, Homo sapiens
ttaccattttaatag

SEQ ID NO: 590783 - DNA, 15 bp, Homo sapiens
taccattttaatagt

SEQ ID NO: 590784 - DNA, 15 bp, Homo sapiens
accattttaatagta

SEQ ID NO: 590785 - DNA, 15 bp, Homo sapiens
ccattttaatagtaa

SEQ ID NO: 590786 - DNA, 15 bp, Homo sapiens
cattttaatagtaag

SEQ ID NO: 590787 - DNA, 15 bp, Homo sapiens
attttaatagtaaga

SEQ ID NO: 590788 - DNA, 15 bp, Homo sapiens
ttttaatagtaagaa

SEQ ID NO: 590789 - DNA, 15 bp, Homo sapiens
tttaatagtaagaaa

SEQ ID NO: 590790 - DNA, 15 bp, Homo sapiens
ttaatagtaagaaat

SEQ ID NO: 590791 - DNA, 15 bp, Homo sapiens
taatagtaagaaatc

SEQ ID NO: 590792 - DNA, 15 bp, Homo sapiens
aatagtaagaaatcc

SEQ ID NO: 590793 - DNA, 15 bp, Homo sapiens
atagtaagaaatccc

SEQ ID NO: 590794 - DNA, 15 bp, Homo sapiens
tagtaagaaatcccc

SEQ ID NO: 590795 - DNA, 15 bp, Homo sapiens
agtaagaaatccccc

SEQ ID NO: 590796 - DNA, 15 bp, Homo sapiens
gtaagaaatccccct

SEQ ID NO: 590797 - DNA, 15 bp, Homo sapiens
taagaaatccccctt

SEQ ID NO: 590798 - DNA, 15 bp, Homo sapiens
aagaaatcccccttc

SEQ ID NO: 590799 - DNA, 15 bp, Homo sapiens
agaaatcccccttcc

SEQ ID NO: 590800 - DNA, 15 bp, Homo sapiens
gaaatcccccttccc

SEQ ID NO: 590801 - DNA, 15 bp, Homo sapiens
aaatcccccttcccc

SEQ ID NO: 590802 - DNA, 15 bp, Homo sapiens
aatcccccttcccct

SEQ ID NO: 590803 - DNA, 15 bp, Homo sapiens
atcccccttcccctg

SEQ ID NO: 590804 - DNA, 15 bp, Homo sapiens
tcccccttcccctgt

SEQ ID NO: 590805 - DNA, 15 bp, Homo sapiens
cccccttcccctgtg

SEQ ID NO: 590806 - DNA, 15 bp, Homo sapiens
ccccttcccctgtgt

SEQ ID NO: 590807 - DNA, 15 bp, Homo sapiens
cccttcccctgtgta

SEQ ID NO: 590808 - DNA, 15 bp, Homo sapiens
ccttcccctgtgtac

SEQ ID NO: 590809 - DNA, 15 bp, Homo sapiens
cttcccctgtgtacc

SEQ ID NO: 590810 - DNA, 15 bp, Homo sapiens
ttcccctgtgtacca

SEQ ID NO: 590811 - DNA, 15 bp, Homo sapiens
tcccctgtgtaccaa

SEQ ID NO: 590812 - DNA, 15 bp, Homo sapiens
cccctgtgtaccaac

SEQ ID NO: 590813 - DNA, 15 bp, Homo sapiens
ccctgtgtaccaacc

SEQ ID NO: 590814 - DNA, 15 bp, Homo sapiens
cctgtgtaccaacca

SEQ ID NO: 590815 - DNA, 15 bp, Homo sapiens
ctgtgtaccaaccag

SEQ ID NO: 590816 - DNA, 15 bp, Homo sapiens
tgtgtaccaaccaga

SEQ ID NO: 590817 - DNA, 15 bp, Homo sapiens
gtgtaccaaccagaa

SEQ ID NO: 590818 - DNA, 15 bp, Homo sapiens
tgtaccaaccagaag

SEQ ID NO: 590819 - DNA, 15 bp, Homo sapiens
gtaccaaccagaagg

SEQ ID NO: 590820 - DNA, 15 bp, Homo sapiens
taccaaccagaaggt

SEQ ID NO: 590821 - DNA, 15 bp, Homo sapiens
accaaccagaaggtg

SEQ ID NO: 590822 - DNA, 15 bp, Homo sapiens
ccaaccagaaggtgt

SEQ ID NO: 590823 - DNA, 15 bp, Homo sapiens
caaccagaaggtgtt

SEQ ID NO: 590824 - DNA, 15 bp, Homo sapiens
aaccagaaggtgttt

SEQ ID NO: 590825 - DNA, 15 bp, Homo sapiens
accagaaggtgtttt

SEQ ID NO: 590826 - DNA, 15 bp, Homo sapiens
ccagaaggtgttttt

SEQ ID NO: 590827 - DNA, 15 bp, Homo sapiens
cagaaggtgtttttt

SEQ ID NO: 590828 - DNA, 15 bp, Homo sapiens
agaaggtgttttttt

SEQ ID NO: 590829 - DNA, 15 bp, Homo sapiens
gaaggtgtttttttc

SEQ ID NO: 590830 - DNA, 15 bp, Homo sapiens
aaggtgtttttttcc

SEQ ID NO: 590831 - DNA, 15 bp, Homo sapiens
aggtgtttttttcct

SEQ ID NO: 590832 - DNA, 15 bp, Homo sapiens
ggtgtttttttccta

SEQ ID NO: 590833 - DNA, 15 bp, Homo sapiens
gtgtttttttcctaa

SEQ ID NO: 590834 - DNA, 15 bp, Homo sapiens
tgtttttttcctaat

SEQ ID NO: 590835 - DNA, 15 bp, Homo sapiens
gtttttttcctaatt

SEQ ID NO: 590836 - DNA, 15 bp, Homo sapiens
tttttttcctaattt

SEQ ID NO: 590837 - DNA, 15 bp, Homo sapiens
ttttttcctaattta

SEQ ID NO: 590838 - DNA, 15 bp, Homo sapiens
tttttcctaatttaa

SEQ ID NO: 590839 - DNA, 15 bp, Homo sapiens
ttttcctaatttaaa

SEQ ID NO: 590840 - DNA, 15 bp, Homo sapiens
tttcctaatttaaac

SEQ ID NO: 590841 - DNA, 15 bp, Homo sapiens
ttcctaatttaaaca

SEQ ID NO: 590842 - DNA, 15 bp, Homo sapiens
tcctaatttaaacaa

SEQ ID NO: 590843 - DNA, 15 bp, Homo sapiens
cctaatttaaacaaa

SEQ ID NO: 590844 - DNA, 15 bp, Homo sapiens
ctaatttaaacaaac

SEQ ID NO: 590845 - DNA, 15 bp, Homo sapiens
taatttaaacaaaca

SEQ ID NO: 590846 - DNA, 15 bp, Homo sapiens
aatttaaacaaacag

SEQ ID NO: 590847 - DNA, 15 bp, Homo sapiens
atttaaacaaacaga

SEQ ID NO: 590848 - DNA, 15 bp, Homo sapiens
tttaaacaaacagat

SEQ ID NO: 590849 - DNA, 15 bp, Homo sapiens
ttaaacaaacagatg

SEQ ID NO: 590850 - DNA, 15 bp, Homo sapiens
taaacaaacagatgc

SEQ ID NO: 590851 - DNA, 15 bp, Homo sapiens
aaacaaacagatgca

SEQ ID NO: 590852 - DNA, 15 bp, Homo sapiens
aacaaacagatgcag

SEQ ID NO: 590853 - DNA, 15 bp, Homo sapiens
acaaacagatgcaga

SEQ ID NO: 590854 - DNA, 15 bp, Homo sapiens
caaacagatgcagac

SEQ ID NO: 590855 - DNA, 15 bp, Homo sapiens
aaacagatgcagacg

SEQ ID NO: 590856 - DNA, 15 bp, Homo sapiens
aacagatgcagacgt

SEQ ID NO: 590857 - DNA, 15 bp, Homo sapiens
acagatgcagacgtg

SEQ ID NO: 590858 - DNA, 15 bp, Homo sapiens
cagatgcagacgtgg

SEQ ID NO: 590859 - DNA, 15 bp, Homo sapiens
agatgcagacgtggg

SEQ ID NO: 590860 - DNA, 15 bp, Homo sapiens
gatgcagacgtgggc

SEQ ID NO: 590861 - DNA, 15 bp, Homo sapiens
atgcagacgtgggct

SEQ ID NO: 590862 - DNA, 15 bp, Homo sapiens
tgcagacgtgggctg

SEQ ID NO: 590863 - DNA, 15 bp, Homo sapiens
gcagacgtgggctgt

SEQ ID NO: 590864 - DNA, 15 bp, Homo sapiens
cagacgtgggctgtc

SEQ ID NO: 590865 - DNA, 15 bp, Homo sapiens
agacgtgggctgtcc

SEQ ID NO: 590866 - DNA, 15 bp, Homo sapiens
gacgtgggctgtcca

SEQ ID NO: 590867 - DNA, 15 bp, Homo sapiens
acgtgggctgtccag

SEQ ID NO: 590868 - DNA, 15 bp, Homo sapiens
cgtgggctgtccagc

SEQ ID NO: 590869 - DNA, 15 bp, Homo sapiens
gtgggctgtccagct

SEQ ID NO: 590870 - DNA, 15 bp, Homo sapiens
tgggctgtccagctc

SEQ ID NO: 590871 - DNA, 15 bp, Homo sapiens
gggctgtccagctcc

SEQ ID NO: 590872 - DNA, 15 bp, Homo sapiens
ggctgtccagctcct

SEQ ID NO: 590873 - DNA, 15 bp, Homo sapiens
gctgtccagctcctg

SEQ ID NO: 590874 - DNA, 15 bp, Homo sapiens
ctgtccagctcctgg

SEQ ID NO: 590875 - DNA, 15 bp, Homo sapiens
tgtccagctcctggc

SEQ ID NO: 590876 - DNA, 15 bp, Homo sapiens
gtccagctcctggcg

SEQ ID NO: 590877 - DNA, 15 bp, Homo sapiens
tccagctcctggcgg

SEQ ID NO: 590878 - DNA, 15 bp, Homo sapiens
ccagctcctggcggg

SEQ ID NO: 590879 - DNA, 15 bp, Homo sapiens
cagctcctggcggga

SEQ ID NO: 590880 - DNA, 15 bp, Homo sapiens
agctcctggcgggat

SEQ ID NO: 590881 - DNA, 15 bp, Homo sapiens
gctcctggcgggatg

SEQ ID NO: 590882 - DNA, 15 bp, Homo sapiens
ctcctggcgggatga

SEQ ID NO: 590883 - DNA, 15 bp, Homo sapiens
tcctggcgggatgac

SEQ ID NO: 590884 - DNA, 15 bp, Homo sapiens
cctggcgggatgaca

SEQ ID NO: 590885 - DNA, 15 bp, Homo sapiens
ctggcgggatgacat

SEQ ID NO: 590886 - DNA, 15 bp, Homo sapiens
tggcgggatgacata

SEQ ID NO: 590887 - DNA, 15 bp, Homo sapiens
ggcgggatgacatac

SEQ ID NO: 590888 - DNA, 15 bp, Homo sapiens
gcgggatgacatacc

SEQ ID NO: 590889 - DNA, 15 bp, Homo sapiens
cgggatgacatacct

SEQ ID NO: 590890 - DNA, 15 bp, Homo sapiens
gggatgacatacctc

SEQ ID NO: 590891 - DNA, 15 bp, Homo sapiens
ggatgacatacctca

SEQ ID NO: 590892 - DNA, 15 bp, Homo sapiens
gatgacatacctcat

SEQ ID NO: 590893 - DNA, 15 bp, Homo sapiens
atgacatacctcatg

SEQ ID NO: 590894 - DNA, 15 bp, Homo sapiens
tgacatacctcatgc

SEQ ID NO: 590895 - DNA, 15 bp, Homo sapiens
gacatacctcatgca

SEQ ID NO: 590896 - DNA, 15 bp, Homo sapiens
acatacctcatgcat

SEQ ID NO: 590897 - DNA, 15 bp, Homo sapiens
catacctcatgcatc

SEQ ID NO: 590898 - DNA, 15 bp, Homo sapiens
atacctcatgcatcc

SEQ ID NO: 590899 - DNA, 15 bp, Homo sapiens
tacctcatgcatcca

SEQ ID NO: 590900 - DNA, 15 bp, Homo sapiens
acctcatgcatccag

SEQ ID NO: 590901 - DNA, 15 bp, Homo sapiens
cctcatgcatccagt

SEQ ID NO: 590902 - DNA, 15 bp, Homo sapiens
ctcatgcatccagtg

SEQ ID NO: 590903 - DNA, 15 bp, Homo sapiens
tcatgcatccagtgg

SEQ ID NO: 590904 - DNA, 15 bp, Homo sapiens
catgcatccagtggg

SEQ ID NO: 590905 - DNA, 15 bp, Homo sapiens
atgcatccagtgggt

SEQ ID NO: 590906 - DNA, 15 bp, Homo sapiens
tgcatccagtgggtt

SEQ ID NO: 590907 - DNA, 15 bp, Homo sapiens
gcatccagtgggttt

SEQ ID NO: 590908 - DNA, 15 bp, Homo sapiens
catccagtgggtttg

SEQ ID NO: 590909 - DNA, 15 bp, Homo sapiens
atccagtgggtttga

SEQ ID NO: 590910 - DNA, 15 bp, Homo sapiens
tccagtgggtttgat

SEQ ID NO: 590911 - DNA, 15 bp, Homo sapiens
ccagtgggtttgatg

SEQ ID NO: 590912 - DNA, 15 bp, Homo sapiens
cagtgggtttgatga

SEQ ID NO: 590913 - DNA, 15 bp, Homo sapiens
agtgggtttgatgat

SEQ ID NO: 590914 - DNA, 15 bp, Homo sapiens
gtgggtttgatgatg

SEQ ID NO: 590915 - DNA, 15 bp, Homo sapiens
tgggtttgatgatga

SEQ ID NO: 590916 - DNA, 15 bp, Homo sapiens
gggtttgatgatgag

SEQ ID NO: 590917 - DNA, 15 bp, Homo sapiens
ggtttgatgatgagg

SEQ ID NO: 590918 - DNA, 15 bp, Homo sapiens
gtttgatgatgaggc

SEQ ID NO: 590919 - DNA, 15 bp, Homo sapiens
tttgatgatgaggca

SEQ ID NO: 590920 - DNA, 15 bp, Homo sapiens
ttgatgatgaggcag

SEQ ID NO: 590921 - DNA, 15 bp, Homo sapiens
tgatgatgaggcaga

SEQ ID NO: 590922 - DNA, 15 bp, Homo sapiens
gatgatgaggcagac

SEQ ID NO: 590923 - DNA, 15 bp, Homo sapiens
atgatgaggcagaca

SEQ ID NO: 590924 - DNA, 15 bp, Homo sapiens
tgatgaggcagacat

SEQ ID NO: 590925 - DNA, 15 bp, Homo sapiens
gatgaggcagacatt

SEQ ID NO: 590926 - DNA, 15 bp, Homo sapiens
atgaggcagacattt

SEQ ID NO: 590927 - DNA, 15 bp, Homo sapiens
tgaggcagacatttc

SEQ ID NO: 590928 - DNA, 15 bp, Homo sapiens
gaggcagacatttca

SEQ ID NO: 590929 - DNA, 15 bp, Homo sapiens
aggcagacatttcac

SEQ ID NO: 590930 - DNA, 15 bp, Homo sapiens
ggcagacatttcact

SEQ ID NO: 590931 - DNA, 15 bp, Homo sapiens
gcagacatttcactt

SEQ ID NO: 590932 - DNA, 15 bp, Homo sapiens
cagacatttcactta

SEQ ID NO: 590933 - DNA, 15 bp, Homo sapiens
agacatttcacttaa

SEQ ID NO: 590934 - DNA, 15 bp, Homo sapiens
gacatttcacttaag

SEQ ID NO: 590935 - DNA, 15 bp, Homo sapiens
acatttcacttaagt

SEQ ID NO: 590936 - DNA, 15 bp, Homo sapiens
catttcacttaagtg

SEQ ID NO: 590937 - DNA, 15 bp, Homo sapiens
atttcacttaagtgc

SEQ ID NO: 590938 - DNA, 15 bp, Homo sapiens
tttcacttaagtgcc

SEQ ID NO: 590939 - DNA, 15 bp, Homo sapiens
ttcacttaagtgcct

SEQ ID NO: 590940 - DNA, 15 bp, Homo sapiens
tcacttaagtgcctg

SEQ ID NO: 590941 - DNA, 15 bp, Homo sapiens
cacttaagtgcctga

SEQ ID NO: 590942 - DNA, 15 bp, Homo sapiens
acttaagtgcctgat

SEQ ID NO: 590943 - DNA, 15 bp, Homo sapiens
cttaagtgcctgatc

SEQ ID NO: 590944 - DNA, 15 bp, Homo sapiens
ttaagtgcctgatca

SEQ ID NO: 590945 - DNA, 15 bp, Homo sapiens
taagtgcctgatcat

SEQ ID NO: 590946 - DNA, 15 bp, Homo sapiens
aagtgcctgatcatc

SEQ ID NO: 590947 - DNA, 15 bp, Homo sapiens
agtgcctgatcatca

SEQ ID NO: 590948 - DNA, 15 bp, Homo sapiens
gtgcctgatcatcag

SEQ ID NO: 590949 - DNA, 15 bp, Homo sapiens
tgcctgatcatcaga

SEQ ID NO: 590950 - DNA, 15 bp, Homo sapiens
gcctgatcatcagat

SEQ ID NO: 590951 - DNA, 15 bp, Homo sapiens
cctgatcatcagatt

SEQ ID NO: 590952 - DNA, 15 bp, Homo sapiens
ctgatcatcagattg

SEQ ID NO: 590953 - DNA, 15 bp, Homo sapiens
tgatcatcagattga

SEQ ID NO: 590954 - DNA, 15 bp, Homo sapiens
gatcatcagattgag

SEQ ID NO: 590955 - DNA, 15 bp, Homo sapiens
atcatcagattgagt

SEQ ID NO: 590956 - DNA, 15 bp, Homo sapiens
tcatcagattgagtc

SEQ ID NO: 590957 - DNA, 15 bp, Homo sapiens
catcagattgagtcc

SEQ ID NO: 590958 - DNA, 15 bp, Homo sapiens
atcagattgagtcct

SEQ ID NO: 590959 - DNA, 15 bp, Homo sapiens
tcagattgagtcctg

SEQ ID NO: 590960 - DNA, 15 bp, Homo sapiens
cagattgagtcctgc

SEQ ID NO: 590961 - DNA, 15 bp, Homo sapiens
agattgagtcctgct

SEQ ID NO: 590962 - DNA, 15 bp, Homo sapiens
gattgagtcctgctg

SEQ ID NO: 590963 - DNA, 15 bp, Homo sapiens
attgagtcctgctgg

SEQ ID NO: 590964 - DNA, 15 bp, Homo sapiens
ttgagtcctgctggg

SEQ ID NO: 590965 - DNA, 15 bp, Homo sapiens
tgagtcctgctggga

SEQ ID NO: 590966 - DNA, 15 bp, Homo sapiens
gagtcctgctgggag

SEQ ID NO: 590967 - DNA, 15 bp, Homo sapiens
agtcctgctgggagg

SEQ ID NO: 590968 - DNA, 15 bp, Homo sapiens
gtcctgctgggagga

SEQ ID NO: 590969 - DNA, 15 bp, Homo sapiens
tcctgctgggaggaa

SEQ ID NO: 590970 - DNA, 15 bp, Homo sapiens
cctgctgggaggaag

SEQ ID NO: 590971 - DNA, 15 bp, Homo sapiens
ctgctgggaggaagt

SEQ ID NO: 590972 - DNA, 15 bp, Homo sapiens
tgctgggaggaagtg

SEQ ID NO: 590973 - DNA, 15 bp, Homo sapiens
gctgggaggaagtgt

SEQ ID NO: 590974 - DNA, 15 bp, Homo sapiens
ctgggaggaagtgtg

SEQ ID NO: 590975 - DNA, 15 bp, Homo sapiens
tgggaggaagtgtga

SEQ ID NO: 590976 - DNA, 15 bp, Homo sapiens
gggaggaagtgtgaa

SEQ ID NO: 590977 - DNA, 15 bp, Homo sapiens
ggaggaagtgtgaag

SEQ ID NO: 590978 - DNA, 15 bp, Homo sapiens
gaggaagtgtgaagg

SEQ ID NO: 590979 - DNA, 15 bp, Homo sapiens
aggaagtgtgaagga

SEQ ID NO: 590980 - DNA, 15 bp, Homo sapiens
ggaagtgtgaaggaa

SEQ ID NO: 590981 - DNA, 15 bp, Homo sapiens
gaagtgtgaaggaag

SEQ ID NO: 590982 - DNA, 15 bp, Homo sapiens
aagtgtgaaggaagt

SEQ ID NO: 590983 - DNA, 15 bp, Homo sapiens
agtgtgaaggaagta

SEQ ID NO: 590984 - DNA, 15 bp, Homo sapiens
gtgtgaaggaagtaa

SEQ ID NO: 590985 - DNA, 15 bp, Homo sapiens
tgtgaaggaagtaat

SEQ ID NO: 590986 - DNA, 15 bp, Homo sapiens
gtgaaggaagtaatt

SEQ ID NO: 590987 - DNA, 15 bp, Homo sapiens
tgaaggaagtaattt

SEQ ID NO: 590988 - DNA, 15 bp, Homo sapiens
gaaggaagtaatttc

SEQ ID NO: 590989 - DNA, 15 bp, Homo sapiens
aaggaagtaatttca

SEQ ID NO: 590990 - DNA, 15 bp, Homo sapiens
aggaagtaatttcaa

SEQ ID NO: 590991 - DNA, 15 bp, Homo sapiens
ggaagtaatttcaaa

SEQ ID NO: 590992 - DNA, 15 bp, Homo sapiens
gaagtaatttcaaac

SEQ ID NO: 590993 - DNA, 15 bp, Homo sapiens
aagtaatttcaaacc

SEQ ID NO: 590994 - DNA, 15 bp, Homo sapiens
agtaatttcaaacca

SEQ ID NO: 590995 - DNA, 15 bp, Homo sapiens
gtaatttcaaaccac

SEQ ID NO: 590996 - DNA, 15 bp, Homo sapiens
taatttcaaaccaca

SEQ ID NO: 590997 - DNA, 15 bp, Homo sapiens
aatttcaaaccacag

SEQ ID NO: 590998 - DNA, 15 bp, Homo sapiens
atttcaaaccacagt

SEQ ID NO: 590999 - DNA, 15 bp, Homo sapiens
tttcaaaccacagtt

SEQ ID NO: 591000 - DNA, 15 bp, Homo sapiens
ttcaaaccacagttt

SEQ ID NO: 591001 - DNA, 15 bp, Homo sapiens
tcaaaccacagtttc

SEQ ID NO: 591002 - DNA, 15 bp, Homo sapiens
caaaccacagtttct

SEQ ID NO: 591003 - DNA, 15 bp, Homo sapiens
aaaccacagtttctc

SEQ ID NO: 591004 - DNA, 15 bp, Homo sapiens
aaccacagtttctct

SEQ ID NO: 591005 - DNA, 15 bp, Homo sapiens
accacagtttctctg

SEQ ID NO: 591006 - DNA, 15 bp, Homo sapiens
ccacagtttctctgt

SEQ ID NO: 591007 - DNA, 15 bp, Homo sapiens
cacagtttctctgtg

SEQ ID NO: 591008 - DNA, 15 bp, Homo sapiens
acagtttctctgtgg

SEQ ID NO: 591009 - DNA, 15 bp, Homo sapiens
cagtttctctgtggc

SEQ ID NO: 591010 - DNA, 15 bp, Homo sapiens
agtttctctgtggct

SEQ ID NO: 591011 - DNA, 15 bp, Homo sapiens
gtttctctgtggctt

SEQ ID NO: 591012 - DNA, 15 bp, Homo sapiens
tttctctgtggcttt

SEQ ID NO: 591013 - DNA, 15 bp, Homo sapiens
ttctctgtggctttt

SEQ ID NO: 591014 - DNA, 15 bp, Homo sapiens
tctctgtggctttta

SEQ ID NO: 591015 - DNA, 15 bp, Homo sapiens
ctctgtggcttttac

SEQ ID NO: 591016 - DNA, 15 bp, Homo sapiens
tctgtggcttttaca

SEQ ID NO: 591017 - DNA, 15 bp, Homo sapiens
ctgtggcttttacaa

SEQ ID NO: 591018 - DNA, 15 bp, Homo sapiens
tgtggcttttacaat

SEQ ID NO: 591019 - DNA, 15 bp, Homo sapiens
gtggcttttacaatg

SEQ ID NO: 591020 - DNA, 15 bp, Homo sapiens
tggcttttacaatgt

SEQ ID NO: 591021 - DNA, 15 bp, Homo sapiens
ggcttttacaatgtg

SEQ ID NO: 591022 - DNA, 15 bp, Homo sapiens
gcttttacaatgtgg

SEQ ID NO: 591023 - DNA, 15 bp, Homo sapiens
cttttacaatgtgga

SEQ ID NO: 591024 - DNA, 15 bp, Homo sapiens
ttttacaatgtggat

SEQ ID NO: 591025 - DNA, 15 bp, Homo sapiens
tttacaatgtggata

SEQ ID NO: 591026 - DNA, 15 bp, Homo sapiens
ttacaatgtggatat

SEQ ID NO: 591027 - DNA, 15 bp, Homo sapiens
tacaatgtggatatg

SEQ ID NO: 591028 - DNA, 15 bp, Homo sapiens
acaatgtggatatga

SEQ ID NO: 591029 - DNA, 15 bp, Homo sapiens
caatgtggatatgag

SEQ ID NO: 591030 - DNA, 15 bp, Homo sapiens
aatgtggatatgaga

SEQ ID NO: 591031 - DNA, 15 bp, Homo sapiens
atgtggatatgagaa

SEQ ID NO: 591032 - DNA, 15 bp, Homo sapiens
tgtggatatgagaac

SEQ ID NO: 591033 - DNA, 15 bp, Homo sapiens
gtggatatgagaacc

SEQ ID NO: 591034 - DNA, 15 bp, Homo sapiens
tggatatgagaacca

SEQ ID NO: 591035 - DNA, 15 bp, Homo sapiens
ggatatgagaaccaa

SEQ ID NO: 591036 - DNA, 15 bp, Homo sapiens
gatatgagaaccaaa

SEQ ID NO: 591037 - DNA, 15 bp, Homo sapiens
atatgagaaccaaaa

SEQ ID NO: 591038 - DNA, 15 bp, Homo sapiens
tatgagaaccaaaat

SEQ ID NO: 591039 - DNA, 15 bp, Homo sapiens
atgagaaccaaaatc

SEQ ID NO: 591040 - DNA, 15 bp, Homo sapiens
tgagaaccaaaatca

SEQ ID NO: 591041 - DNA, 15 bp, Homo sapiens
gagaaccaaaatcac

SEQ ID NO: 591042 - DNA, 15 bp, Homo sapiens
agaaccaaaatcact

SEQ ID NO: 591043 - DNA, 15 bp, Homo sapiens
gaaccaaaatcacta

SEQ ID NO: 591044 - DNA, 15 bp, Homo sapiens
aaccaaaatcactac

SEQ ID NO: 591045 - DNA, 15 bp, Homo sapiens
accaaaatcactact

SEQ ID NO: 591046 - DNA, 15 bp, Homo sapiens
ccaaaatcactactt

SEQ ID NO: 591047 - DNA, 15 bp, Homo sapiens
caaaatcactacttc

SEQ ID NO: 591048 - DNA, 15 bp, Homo sapiens
aaaatcactacttct

SEQ ID NO: 591049 - DNA, 15 bp, Homo sapiens
aaatcactacttctt

SEQ ID NO: 591050 - DNA, 15 bp, Homo sapiens
aatcactacttctta

SEQ ID NO: 591051 - DNA, 15 bp, Homo sapiens
atcactacttcttaa

SEQ ID NO: 591052 - DNA, 15 bp, Homo sapiens
tcactacttcttaac

SEQ ID NO: 591053 - DNA, 15 bp, Homo sapiens
cactacttcttaacc

SEQ ID NO: 591054 - DNA, 15 bp, Homo sapiens
actacttcttaaccc

SEQ ID NO: 591055 - DNA, 15 bp, Homo sapiens
ctacttcttaacccc

SEQ ID NO: 591056 - DNA, 15 bp, Homo sapiens
tacttcttaacccca

SEQ ID NO: 591057 - DNA, 15 bp, Homo sapiens
acttcttaaccccag

SEQ ID NO: 591058 - DNA, 15 bp, Homo sapiens
cttcttaaccccaga

SEQ ID NO: 591059 - DNA, 15 bp, Homo sapiens
ttcttaaccccagag

SEQ ID NO: 591060 - DNA, 15 bp, Homo sapiens
tcttaaccccagagc

SEQ ID NO: 591061 - DNA, 15 bp, Homo sapiens
cttaaccccagagca

SEQ ID NO: 591062 - DNA, 15 bp, Homo sapiens
ttaaccccagagcag

SEQ ID NO: 591063 - DNA, 15 bp, Homo sapiens
taaccccagagcagg

SEQ ID NO: 591064 - DNA, 15 bp, Homo sapiens
aaccccagagcagga

SEQ ID NO: 591065 - DNA, 15 bp, Homo sapiens
accccagagcaggac

SEQ ID NO: 591066 - DNA, 15 bp, Homo sapiens
ccccagagcaggact

SEQ ID NO: 591067 - DNA, 15 bp, Homo sapiens
cccagagcaggactg

SEQ ID NO: 591068 - DNA, 15 bp, Homo sapiens
ccagagcaggactga

SEQ ID NO: 591069 - DNA, 15 bp, Homo sapiens
cagagcaggactgat

SEQ ID NO: 591070 - DNA, 15 bp, Homo sapiens
agagcaggactgatt

SEQ ID NO: 591071 - DNA, 15 bp, Homo sapiens
gagcaggactgattt

SEQ ID NO: 591072 - DNA, 15 bp, Homo sapiens
agcaggactgatttt

SEQ ID NO: 591073 - DNA, 15 bp, Homo sapiens
gcaggactgattttg

SEQ ID NO: 591074 - DNA, 15 bp, Homo sapiens
caggactgattttga

SEQ ID NO: 591075 - DNA, 15 bp, Homo sapiens
aggactgattttgaa

SEQ ID NO: 591076 - DNA, 15 bp, Homo sapiens
ggactgattttgaat

SEQ ID NO: 591077 - DNA, 15 bp, Homo sapiens
gactgattttgaatt

SEQ ID NO: 591078 - DNA, 15 bp, Homo sapiens
actgattttgaattg

SEQ ID NO: 591079 - DNA, 15 bp, Homo sapiens
ctgattttgaattgg

SEQ ID NO: 591080 - DNA, 15 bp, Homo sapiens
tgattttgaattggt

SEQ ID NO: 591081 - DNA, 15 bp, Homo sapiens
gattttgaattggta

SEQ ID NO: 591082 - DNA, 15 bp, Homo sapiens
attttgaattggtat

SEQ ID NO: 591083 - DNA, 15 bp, Homo sapiens
ttttgaattggtatg

SEQ ID NO: 591084 - DNA, 15 bp, Homo sapiens
tttgaattggtatgc

SEQ ID NO: 591085 - DNA, 15 bp, Homo sapiens
ttgaattggtatgca

SEQ ID NO: 591086 - DNA, 15 bp, Homo sapiens
tgaattggtatgcag

SEQ ID NO: 591087 - DNA, 15 bp, Homo sapiens
gaattggtatgcagg

SEQ ID NO: 591088 - DNA, 15 bp, Homo sapiens
aattggtatgcaggc

SEQ ID NO: 591089 - DNA, 15 bp, Homo sapiens
attggtatgcaggcg

SEQ ID NO: 591090 - DNA, 15 bp, Homo sapiens
ttggtatgcaggcgg

SEQ ID NO: 591091 - DNA, 15 bp, Homo sapiens
tggtatgcaggcggt

SEQ ID NO: 591092 - DNA, 15 bp, Homo sapiens
ggtatgcaggcggtt

SEQ ID NO: 591093 - DNA, 15 bp, Homo sapiens
gtatgcaggcggttc

SEQ ID NO: 591094 - DNA, 15 bp, Homo sapiens
tatgcaggcggttcc

SEQ ID NO: 591095 - DNA, 15 bp, Homo sapiens
atgcaggcggttcct

SEQ ID NO: 591096 - DNA, 15 bp, Homo sapiens
tgcaggcggttcctt

SEQ ID NO: 591097 - DNA, 15 bp, Homo sapiens
gcaggcggttccttc

SEQ ID NO: 591098 - DNA, 15 bp, Homo sapiens
caggcggttccttct

SEQ ID NO: 591099 - DNA, 15 bp, Homo sapiens
aggcggttccttctg

SEQ ID NO: 591100 - DNA, 15 bp, Homo sapiens
ggcggttccttctgc

SEQ ID NO: 591101 - DNA, 15 bp, Homo sapiens
gcggttccttctgca

SEQ ID NO: 591102 - DNA, 15 bp, Homo sapiens
cggttccttctgcag

SEQ ID NO: 591103 - DNA, 15 bp, Homo sapiens
ggttccttctgcagg

SEQ ID NO: 591104 - DNA, 15 bp, Homo sapiens
gttccttctgcaggc

SEQ ID NO: 591105 - DNA, 15 bp, Homo sapiens
ttccttctgcaggct

SEQ ID NO: 591106 - DNA, 15 bp, Homo sapiens
tccttctgcaggctt

SEQ ID NO: 591107 - DNA, 15 bp, Homo sapiens
ccttctgcaggcttc

SEQ ID NO: 591108 - DNA, 15 bp, Homo sapiens
cttctgcaggcttcg

SEQ ID NO: 591109 - DNA, 15 bp, Homo sapiens
ttctgcaggcttcgg

SEQ ID NO: 591110 - DNA, 15 bp, Homo sapiens
tctgcaggcttcggg

SEQ ID NO: 591111 - DNA, 15 bp, Homo sapiens
ctgcaggcttcgggc

SEQ ID NO: 591112 - DNA, 15 bp, Homo sapiens
tgcaggcttcgggct

SEQ ID NO: 591113 - DNA, 15 bp, Homo sapiens
gcaggcttcgggctg

SEQ ID NO: 591114 - DNA, 15 bp, Homo sapiens
caggcttcgggctgt

SEQ ID NO: 591115 - DNA, 15 bp, Homo sapiens
aggcttcgggctgtg

SEQ ID NO: 591116 - DNA, 15 bp, Homo sapiens
ggcttcgggctgtga

SEQ ID NO: 591117 - DNA, 15 bp, Homo sapiens
gcttcgggctgtgag

SEQ ID NO: 591118 - DNA, 15 bp, Homo sapiens
cttcgggctgtgaga

SEQ ID NO: 591119 - DNA, 15 bp, Homo sapiens
ttcgggctgtgagaa

SEQ ID NO: 591120 - DNA, 15 bp, Homo sapiens
tcgggctgtgagaag

SEQ ID NO: 591121 - DNA, 15 bp, Homo sapiens
cgggctgtgagaagt

SEQ ID NO: 591122 - DNA, 15 bp, Homo sapiens
gggctgtgagaagtc

SEQ ID NO: 591123 - DNA, 15 bp, Homo sapiens
ggctgtgagaagtcc

SEQ ID NO: 591124 - DNA, 15 bp, Homo sapiens
gctgtgagaagtccc

SEQ ID NO: 591125 - DNA, 15 bp, Homo sapiens
ctgtgagaagtccct

SEQ ID NO: 591126 - DNA, 15 bp, Homo sapiens
tgtgagaagtcccta

SEQ ID NO: 591127 - DNA, 15 bp, Homo sapiens
gtgagaagtccctaa

SEQ ID NO: 591128 - DNA, 15 bp, Homo sapiens
tgagaagtccctaac

SEQ ID NO: 591129 - DNA, 15 bp, Homo sapiens
gagaagtccctaaca

SEQ ID NO: 591130 - DNA, 15 bp, Homo sapiens
agaagtccctaacag

SEQ ID NO: 591131 - DNA, 15 bp, Homo sapiens
gaagtccctaacaga

SEQ ID NO: 591132 - DNA, 15 bp, Homo sapiens
aagtccctaacagag

SEQ ID NO: 591133 - DNA, 15 bp, Homo sapiens
agtccctaacagagc

SEQ ID NO: 591134 - DNA, 15 bp, Homo sapiens
gtccctaacagagca

SEQ ID NO: 591135 - DNA, 15 bp, Homo sapiens
tccctaacagagcaa

SEQ ID NO: 591136 - DNA, 15 bp, Homo sapiens
ccctaacagagcaaa

SEQ ID NO: 591137 - DNA, 15 bp, Homo sapiens
cctaacagagcaaat

SEQ ID NO: 591138 - DNA, 15 bp, Homo sapiens
ctaacagagcaaatc

SEQ ID NO: 591139 - DNA, 15 bp, Homo sapiens
taacagagcaaatct

SEQ ID NO: 591140 - DNA, 15 bp, Homo sapiens
aacagagcaaatctg

SEQ ID NO: 591141 - DNA, 15 bp, Homo sapiens
acagagcaaatctgg

SEQ ID NO: 591142 - DNA, 15 bp, Homo sapiens
cagagcaaatctggg

SEQ ID NO: 591143 - DNA, 15 bp, Homo sapiens
agagcaaatctgggg

SEQ ID NO: 591144 - DNA, 15 bp, Homo sapiens
gagcaaatctgggga

SEQ ID NO: 591145 - DNA, 15 bp, Homo sapiens
agcaaatctggggac

SEQ ID NO: 591146 - DNA, 15 bp, Homo sapiens
gcaaatctggggaca

SEQ ID NO: 591147 - DNA, 15 bp, Homo sapiens
caaatctggggacaa

SEQ ID NO: 591148 - DNA, 15 bp, Homo sapiens
aaatctggggacaag

SEQ ID NO: 591149 - DNA, 15 bp, Homo sapiens
aatctggggacaagg

SEQ ID NO: 591150 - DNA, 15 bp, Homo sapiens
atctggggacaaggg

SEQ ID NO: 591151 - DNA, 15 bp, Homo sapiens
tctggggacaagggc

SEQ ID NO: 591152 - DNA, 15 bp, Homo sapiens
ctggggacaagggct

SEQ ID NO: 591153 - DNA, 15 bp, Homo sapiens
tggggacaagggctc

SEQ ID NO: 591154 - DNA, 15 bp, Homo sapiens
ggggacaagggctca

SEQ ID NO: 591155 - DNA, 15 bp, Homo sapiens
gggacaagggctcag

SEQ ID NO: 591156 - DNA, 15 bp, Homo sapiens
ggacaagggctcagg

SEQ ID NO: 591157 - DNA, 15 bp, Homo sapiens
gacaagggctcagga

SEQ ID NO: 591158 - DNA, 15 bp, Homo sapiens
acaagggctcaggaa

SEQ ID NO: 591159 - DNA, 15 bp, Homo sapiens
caagggctcaggaaa

SEQ ID NO: 591160 - DNA, 15 bp, Homo sapiens
aagggctcaggaaag

SEQ ID NO: 591161 - DNA, 15 bp, Homo sapiens
agggctcaggaaagg

SEQ ID NO: 591162 - DNA, 15 bp, Homo sapiens
gggctcaggaaaggt

SEQ ID NO: 591163 - DNA, 15 bp, Homo sapiens
ggctcaggaaaggtt

SEQ ID NO: 591164 - DNA, 15 bp, Homo sapiens
gctcaggaaaggttg

SEQ ID NO: 591165 - DNA, 15 bp, Homo sapiens
ctcaggaaaggttgg

SEQ ID NO: 591166 - DNA, 15 bp, Homo sapiens
tcaggaaaggttggc

SEQ ID NO: 591167 - DNA, 15 bp, Homo sapiens
caggaaaggttggcc

SEQ ID NO: 591168 - DNA, 15 bp, Homo sapiens
aggaaaggttggcca

SEQ ID NO: 591169 - DNA, 15 bp, Homo sapiens
ggaaaggttggccac

SEQ ID NO: 591170 - DNA, 15 bp, Homo sapiens
gaaaggttggccacg

SEQ ID NO: 591171 - DNA, 15 bp, Homo sapiens
aaaggttggccacgg

SEQ ID NO: 591172 - DNA, 15 bp, Homo sapiens
aaggttggccacggc

SEQ ID NO: 591173 - DNA, 15 bp, Homo sapiens
aggttggccacggcc

SEQ ID NO: 591174 - DNA, 15 bp, Homo sapiens
ggttggccacggccc

SEQ ID NO: 591175 - DNA, 15 bp, Homo sapiens
gttggccacggcccc

SEQ ID NO: 591176 - DNA, 15 bp, Homo sapiens
ttggccacggccccc

SEQ ID NO: 591177 - DNA, 15 bp, Homo sapiens
tggccacggccccct

SEQ ID NO: 591178 - DNA, 15 bp, Homo sapiens
ggccacggcccccta

SEQ ID NO: 591179 - DNA, 15 bp, Homo sapiens
gccacggccccctag

SEQ ID NO: 591180 - DNA, 15 bp, Homo sapiens
ccacggccccctagg

SEQ ID NO: 591181 - DNA, 15 bp, Homo sapiens
cacggccccctagga

SEQ ID NO: 591182 - DNA, 15 bp, Homo sapiens
acggccccctaggaa

SEQ ID NO: 591183 - DNA, 15 bp, Homo sapiens
cggccccctaggaat

SEQ ID NO: 591184 - DNA, 15 bp, Homo sapiens
ggccccctaggaatg

SEQ ID NO: 591185 - DNA, 15 bp, Homo sapiens
gccccctaggaatgg

SEQ ID NO: 591186 - DNA, 15 bp, Homo sapiens
ccccctaggaatggg

SEQ ID NO: 591187 - DNA, 15 bp, Homo sapiens
cccctaggaatgggg

SEQ ID NO: 591188 - DNA, 15 bp, Homo sapiens
ccctaggaatggggg

SEQ ID NO: 591189 - DNA, 15 bp, Homo sapiens
cctaggaatgggggc

SEQ ID NO: 591190 - DNA, 15 bp, Homo sapiens
ctaggaatgggggct

SEQ ID NO: 591191 - DNA, 15 bp, Homo sapiens
taggaatgggggctc

SEQ ID NO: 591192 - DNA, 15 bp, Homo sapiens
aggaatgggggctct

SEQ ID NO: 591193 - DNA, 15 bp, Homo sapiens
ggaatgggggctctg

SEQ ID NO: 591194 - DNA, 15 bp, Homo sapiens
gaatgggggctctgc

SEQ ID NO: 591195 - DNA, 15 bp, Homo sapiens
aatgggggctctgca

SEQ ID NO: 591196 - DNA, 15 bp, Homo sapiens
atgggggctctgcaa

SEQ ID NO: 591197 - DNA, 15 bp, Homo sapiens
tgggggctctgcaag

SEQ ID NO: 591198 - DNA, 15 bp, Homo sapiens
gggggctctgcaaga

SEQ ID NO: 591199 - DNA, 15 bp, Homo sapiens
ggggctctgcaagat

SEQ ID NO: 591200 - DNA, 15 bp, Homo sapiens
gggctctgcaagatc

SEQ ID NO: 591201 - DNA, 15 bp, Homo sapiens
ggctctgcaagatcc

SEQ ID NO: 591202 - DNA, 15 bp, Homo sapiens
gctctgcaagatccc

SEQ ID NO: 591203 - DNA, 15 bp, Homo sapiens
ctctgcaagatccct

SEQ ID NO: 591204 - DNA, 15 bp, Homo sapiens
tctgcaagatccctg

SEQ ID NO: 591205 - DNA, 15 bp, Homo sapiens
ctgcaagatccctgg

SEQ ID NO: 591206 - DNA, 15 bp, Homo sapiens
tgcaagatccctggc

SEQ ID NO: 591207 - DNA, 15 bp, Homo sapiens
gcaagatccctggcc

SEQ ID NO: 591208 - DNA, 15 bp, Homo sapiens
caagatccctggcct

SEQ ID NO: 591209 - DNA, 15 bp, Homo sapiens
aagatccctggcctt

SEQ ID NO: 591210 - DNA, 15 bp, Homo sapiens
agatccctggcctta

SEQ ID NO: 591211 - DNA, 15 bp, Homo sapiens
gatccctggccttag

SEQ ID NO: 591212 - DNA, 15 bp, Homo sapiens
atccctggccttaga

SEQ ID NO: 591213 - DNA, 15 bp, Homo sapiens
tccctggccttagag

SEQ ID NO: 591214 - DNA, 15 bp, Homo sapiens
ccctggccttagagg

SEQ ID NO: 591215 - DNA, 15 bp, Homo sapiens
cctggccttagaggc

SEQ ID NO: 591216 - DNA, 15 bp, Homo sapiens
ctggccttagaggct

SEQ ID NO: 591217 - DNA, 15 bp, Homo sapiens
tggccttagaggctg

SEQ ID NO: 591218 - DNA, 15 bp, Homo sapiens
ggccttagaggctgt

SEQ ID NO: 591219 - DNA, 15 bp, Homo sapiens
gccttagaggctgtg

SEQ ID NO: 591220 - DNA, 15 bp, Homo sapiens
ccttagaggctgtga

SEQ ID NO: 591221 - DNA, 15 bp, Homo sapiens
cttagaggctgtgag

SEQ ID NO: 591222 - DNA, 15 bp, Homo sapiens
ttagaggctgtgaga

SEQ ID NO: 591223 - DNA, 15 bp, Homo sapiens
tagaggctgtgagag

SEQ ID NO: 591224 - DNA, 15 bp, Homo sapiens
agaggctgtgagagg

SEQ ID NO: 591225 - DNA, 15 bp, Homo sapiens
gaggctgtgagaggg

SEQ ID NO: 591226 - DNA, 15 bp, Homo sapiens
aggctgtgagaggga

SEQ ID NO: 591227 - DNA, 15 bp, Homo sapiens
ggctgtgagagggaa

SEQ ID NO: 591228 - DNA, 15 bp, Homo sapiens
gctgtgagagggaac

SEQ ID NO: 591229 - DNA, 15 bp, Homo sapiens
ctgtgagagggaaca

SEQ ID NO: 591230 - DNA, 15 bp, Homo sapiens
tgtgagagggaacag

SEQ ID NO: 591231 - DNA, 15 bp, Homo sapiens
gtgagagggaacagg

SEQ ID NO: 591232 - DNA, 15 bp, Homo sapiens
tgagagggaacaggg

SEQ ID NO: 591233 - DNA, 15 bp, Homo sapiens
gagagggaacagggg

SEQ ID NO: 591234 - DNA, 15 bp, Homo sapiens
agagggaacaggggt

SEQ ID NO: 591235 - DNA, 15 bp, Homo sapiens
gagggaacaggggtc

SEQ ID NO: 591236 - DNA, 15 bp, Homo sapiens
agggaacaggggtcc

SEQ ID NO: 591237 - DNA, 15 bp, Homo sapiens
gggaacaggggtcca

SEQ ID NO: 591238 - DNA, 15 bp, Homo sapiens
ggaacaggggtccat

SEQ ID NO: 591239 - DNA, 15 bp, Homo sapiens
gaacaggggtccatc

SEQ ID NO: 591240 - DNA, 15 bp, Homo sapiens
aacaggggtccatcc

SEQ ID NO: 591241 - DNA, 15 bp, Homo sapiens
acaggggtccatccc

SEQ ID NO: 591242 - DNA, 15 bp, Homo sapiens
caggggtccatcccc

SEQ ID NO: 591243 - DNA, 15 bp, Homo sapiens
aggggtccatcccca

SEQ ID NO: 591244 - DNA, 15 bp, Homo sapiens
ggggtccatccccaa

SEQ ID NO: 591245 - DNA, 15 bp, Homo sapiens
gggtccatccccaag

SEQ ID NO: 591246 - DNA, 15 bp, Homo sapiens
ggtccatccccaagt

SEQ ID NO: 591247 - DNA, 15 bp, Homo sapiens
gtccatccccaagta

SEQ ID NO: 591248 - DNA, 15 bp, Homo sapiens
tccatccccaagtaa

SEQ ID NO: 591249 - DNA, 15 bp, Homo sapiens
ccatccccaagtaag

SEQ ID NO: 591250 - DNA, 15 bp, Homo sapiens
catccccaagtaagg

SEQ ID NO: 591251 - DNA, 15 bp, Homo sapiens
atccccaagtaaggg

SEQ ID NO: 591252 - DNA, 15 bp, Homo sapiens
tccccaagtaaggga

SEQ ID NO: 591253 - DNA, 15 bp, Homo sapiens
ccccaagtaagggac

SEQ ID NO: 591254 - DNA, 15 bp, Homo sapiens
cccaagtaagggaca

SEQ ID NO: 591255 - DNA, 15 bp, Homo sapiens
ccaagtaagggacac

SEQ ID NO: 591256 - DNA, 15 bp, Homo sapiens
caagtaagggacacg

SEQ ID NO: 591257 - DNA, 15 bp, Homo sapiens
aagtaagggacacgg

SEQ ID NO: 591258 - DNA, 15 bp, Homo sapiens
agtaagggacacggt

SEQ ID NO: 591259 - DNA, 15 bp, Homo sapiens
gtaagggacacggtc

SEQ ID NO: 591260 - DNA, 15 bp, Homo sapiens
taagggacacggtct

SEQ ID NO: 591261 - DNA, 15 bp, Homo sapiens
aagggacacggtctt

SEQ ID NO: 591262 - DNA, 15 bp, Homo sapiens
agggacacggtcttt

SEQ ID NO: 591263 - DNA, 15 bp, Homo sapiens
gggacacggtctttg

SEQ ID NO: 591264 - DNA, 15 bp, Homo sapiens
ggacacggtctttga

SEQ ID NO: 591265 - DNA, 15 bp, Homo sapiens
gacacggtctttgag

SEQ ID NO: 591266 - DNA, 15 bp, Homo sapiens
acacggtctttgagg

SEQ ID NO: 591267 - DNA, 15 bp, Homo sapiens
cacggtctttgagga

SEQ ID NO: 591268 - DNA, 15 bp, Homo sapiens
acggtctttgaggaa

SEQ ID NO: 591269 - DNA, 15 bp, Homo sapiens
cggtctttgaggaaa

SEQ ID NO: 591270 - DNA, 15 bp, Homo sapiens
ggtctttgaggaaat

SEQ ID NO: 591271 - DNA, 15 bp, Homo sapiens
gtctttgaggaaatc

SEQ ID NO: 591272 - DNA, 15 bp, Homo sapiens
tctttgaggaaatcc

SEQ ID NO: 591273 - DNA, 15 bp, Homo sapiens
ctttgaggaaatccc

SEQ ID NO: 591274 - DNA, 15 bp, Homo sapiens
tttgaggaaatccca

SEQ ID NO: 591275 - DNA, 15 bp, Homo sapiens
ttgaggaaatcccag

SEQ ID NO: 591276 - DNA, 15 bp, Homo sapiens
tgaggaaatcccagg

SEQ ID NO: 591277 - DNA, 15 bp, Homo sapiens
gaggaaatcccaggc

SEQ ID NO: 591278 - DNA, 15 bp, Homo sapiens
aggaaatcccaggcc

SEQ ID NO: 591279 - DNA, 15 bp, Homo sapiens
ggaaatcccaggcca

SEQ ID NO: 591280 - DNA, 15 bp, Homo sapiens
gaaatcccaggccag

SEQ ID NO: 591281 - DNA, 15 bp, Homo sapiens
aaatcccaggccagg

SEQ ID NO: 591282 - DNA, 15 bp, Homo sapiens
aatcccaggccaggg

SEQ ID NO: 591283 - DNA, 15 bp, Homo sapiens
atcccaggccagggc

SEQ ID NO: 591284 - DNA, 15 bp, Homo sapiens
tcccaggccagggcc

SEQ ID NO: 591285 - DNA, 15 bp, Homo sapiens
cccaggccagggcct

SEQ ID NO: 591286 - DNA, 15 bp, Homo sapiens
ccaggccagggcctg

SEQ ID NO: 591287 - DNA, 15 bp, Homo sapiens
caggccagggcctga

SEQ ID NO: 591288 - DNA, 15 bp, Homo sapiens
aggccagggcctgaa

SEQ ID NO: 591289 - DNA, 15 bp, Homo sapiens
ggccagggcctgaag

SEQ ID NO: 591290 - DNA, 15 bp, Homo sapiens
gccagggcctgaagg

SEQ ID NO: 591291 - DNA, 15 bp, Homo sapiens
ccagggcctgaaggg

SEQ ID NO: 591292 - DNA, 15 bp, Homo sapiens
cagggcctgaagggc

SEQ ID NO: 591293 - DNA, 15 bp, Homo sapiens
agggcctgaagggca

SEQ ID NO: 591294 - DNA, 15 bp, Homo sapiens
gggcctgaagggcac

SEQ ID NO: 591295 - DNA, 15 bp, Homo sapiens
ggcctgaagggcact

SEQ ID NO: 591296 - DNA, 15 bp, Homo sapiens
gcctgaagggcactg

SEQ ID NO: 591297 - DNA, 15 bp, Homo sapiens
cctgaagggcactgt

SEQ ID NO: 591298 - DNA, 15 bp, Homo sapiens
ctgaagggcactgtc

SEQ ID NO: 591299 - DNA, 15 bp, Homo sapiens
tgaagggcactgtca

SEQ ID NO: 591300 - DNA, 15 bp, Homo sapiens
gaagggcactgtcag

SEQ ID NO: 591301 - DNA, 15 bp, Homo sapiens
aagggcactgtcagg

SEQ ID NO: 591302 - DNA, 15 bp, Homo sapiens
agggcactgtcagga

SEQ ID NO: 591303 - DNA, 15 bp, Homo sapiens
gggcactgtcaggaa

SEQ ID NO: 591304 - DNA, 15 bp, Homo sapiens
ggcactgtcaggaac

SEQ ID NO: 591305 - DNA, 15 bp, Homo sapiens
gcactgtcaggaaca

SEQ ID NO: 591306 - DNA, 15 bp, Homo sapiens
cactgtcaggaacac

SEQ ID NO: 591307 - DNA, 15 bp, Homo sapiens
actgtcaggaacaca

SEQ ID NO: 591308 - DNA, 15 bp, Homo sapiens
ctgtcaggaacacag

SEQ ID NO: 591309 - DNA, 15 bp, Homo sapiens
tgtcaggaacacagg

SEQ ID NO: 591310 - DNA, 15 bp, Homo sapiens
gtcaggaacacaggc

SEQ ID NO: 591311 - DNA, 15 bp, Homo sapiens
tcaggaacacaggct

SEQ ID NO: 591312 - DNA, 15 bp, Homo sapiens
caggaacacaggctg

SEQ ID NO: 591313 - DNA, 15 bp, Homo sapiens
aggaacacaggctgt

SEQ ID NO: 591314 - DNA, 15 bp, Homo sapiens
ggaacacaggctgtt

SEQ ID NO: 591315 - DNA, 15 bp, Homo sapiens
gaacacaggctgttt

SEQ ID NO: 591316 - DNA, 15 bp, Homo sapiens
aacacaggctgtttc

SEQ ID NO: 591317 - DNA, 15 bp, Homo sapiens
acacaggctgtttca

SEQ ID NO: 591318 - DNA, 15 bp, Homo sapiens
cacaggctgtttcag

SEQ ID NO: 591319 - DNA, 15 bp, Homo sapiens
acaggctgtttcagt

SEQ ID NO: 591320 - DNA, 15 bp, Homo sapiens
caggctgtttcagtc

SEQ ID NO: 591321 - DNA, 15 bp, Homo sapiens
aggctgtttcagtct

SEQ ID NO: 591322 - DNA, 15 bp, Homo sapiens
ggctgtttcagtctg

SEQ ID NO: 591323 - DNA, 15 bp, Homo sapiens
gctgtttcagtctgt

SEQ ID NO: 591324 - DNA, 15 bp, Homo sapiens
ctgtttcagtctgtt

SEQ ID NO: 591325 - DNA, 15 bp, Homo sapiens
tgtttcagtctgttg

SEQ ID NO: 591326 - DNA, 15 bp, Homo sapiens
gtttcagtctgttga

SEQ ID NO: 591327 - DNA, 15 bp, Homo sapiens
tttcagtctgttgag

SEQ ID NO: 591328 - DNA, 15 bp, Homo sapiens
ttcagtctgttgaga

SEQ ID NO: 591329 - DNA, 15 bp, Homo sapiens
tcagtctgttgagat

SEQ ID NO: 591330 - DNA, 15 bp, Homo sapiens
cagtctgttgagatt

SEQ ID NO: 591331 - DNA, 15 bp, Homo sapiens
agtctgttgagattc

SEQ ID NO: 591332 - DNA, 15 bp, Homo sapiens
gtctgttgagattca

SEQ ID NO: 591333 - DNA, 15 bp, Homo sapiens
tctgttgagattcac

SEQ ID NO: 591334 - DNA, 15 bp, Homo sapiens
ctgttgagattcacc

SEQ ID NO: 591335 - DNA, 15 bp, Homo sapiens
tgttgagattcaccg

SEQ ID NO: 591336 - DNA, 15 bp, Homo sapiens
gttgagattcaccgg

SEQ ID NO: 591337 - DNA, 15 bp, Homo sapiens
ttgagattcaccggg

SEQ ID NO: 591338 - DNA, 15 bp, Homo sapiens
tgagattcaccgggg

SEQ ID NO: 591339 - DNA, 15 bp, Homo sapiens
gagattcaccggggc

SEQ ID NO: 591340 - DNA, 15 bp, Homo sapiens
agattcaccggggcg

SEQ ID NO: 591341 - DNA, 15 bp, Homo sapiens
gattcaccggggcgc

SEQ ID NO: 591342 - DNA, 15 bp, Homo sapiens
attcaccggggcgct

SEQ ID NO: 591343 - DNA, 15 bp, Homo sapiens
ttcaccggggcgctg

SEQ ID NO: 591344 - DNA, 15 bp, Homo sapiens
tcaccggggcgctgc

SEQ ID NO: 591345 - DNA, 15 bp, Homo sapiens
caccggggcgctgct

SEQ ID NO: 591346 - DNA, 15 bp, Homo sapiens
accggggcgctgctc

SEQ ID NO: 591347 - DNA, 15 bp, Homo sapiens
ccggggcgctgctca

SEQ ID NO: 591348 - DNA, 15 bp, Homo sapiens
cggggcgctgctcac

SEQ ID NO: 591349 - DNA, 15 bp, Homo sapiens
ggggcgctgctcact

SEQ ID NO: 591350 - DNA, 15 bp, Homo sapiens
gggcgctgctcactg

SEQ ID NO: 591351 - DNA, 15 bp, Homo sapiens
ggcgctgctcactgt

SEQ ID NO: 591352 - DNA, 15 bp, Homo sapiens
gcgctgctcactgtg

SEQ ID NO: 591353 - DNA, 15 bp, Homo sapiens
cgctgctcactgtga

SEQ ID NO: 591354 - DNA, 15 bp, Homo sapiens
gctgctcactgtgag

SEQ ID NO: 591355 - DNA, 15 bp, Homo sapiens
ctgctcactgtgagc

SEQ ID NO: 591356 - DNA, 15 bp, Homo sapiens
tgctcactgtgagca

SEQ ID NO: 591357 - DNA, 15 bp, Homo sapiens
gctcactgtgagcac

SEQ ID NO: 591358 - DNA, 15 bp, Homo sapiens
ctcactgtgagcacg

SEQ ID NO: 591359 - DNA, 15 bp, Homo sapiens
tcactgtgagcacgg

SEQ ID NO: 591360 - DNA, 15 bp, Homo sapiens
cactgtgagcacgga

SEQ ID NO: 591361 - DNA, 15 bp, Homo sapiens
actgtgagcacggac

SEQ ID NO: 591362 - DNA, 15 bp, Homo sapiens
ctgtgagcacggact

SEQ ID NO: 591363 - DNA, 15 bp, Homo sapiens
tgtgagcacggactc

SEQ ID NO: 591364 - DNA, 15 bp, Homo sapiens
gtgagcacggactcc

SEQ ID NO: 591365 - DNA, 15 bp, Homo sapiens
tgagcacggactcct

SEQ ID NO: 591366 - DNA, 15 bp, Homo sapiens
gagcacggactcctc

SEQ ID NO: 591367 - DNA, 15 bp, Homo sapiens
agcacggactcctca

SEQ ID NO: 591368 - DNA, 15 bp, Homo sapiens
gcacggactcctcag

SEQ ID NO: 591369 - DNA, 15 bp, Homo sapiens
cacggactcctcagg

SEQ ID NO: 591370 - DNA, 15 bp, Homo sapiens
acggactcctcaggc

SEQ ID NO: 591371 - DNA, 15 bp, Homo sapiens
cggactcctcaggcc

SEQ ID NO: 591372 - DNA, 15 bp, Homo sapiens
ggactcctcaggcca

SEQ ID NO: 591373 - DNA, 15 bp, Homo sapiens
gactcctcaggccaa

SEQ ID NO: 591374 - DNA, 15 bp, Homo sapiens
actcctcaggccaat

SEQ ID NO: 591375 - DNA, 15 bp, Homo sapiens
ctcctcaggccaatg

SEQ ID NO: 591376 - DNA, 15 bp, Homo sapiens
tcctcaggccaatgt

SEQ ID NO: 591377 - DNA, 15 bp, Homo sapiens
cctcaggccaatgtg

SEQ ID NO: 591378 - DNA, 15 bp, Homo sapiens
ctcaggccaatgtgg

SEQ ID NO: 591379 - DNA, 15 bp, Homo sapiens
tcaggccaatgtggc

SEQ ID NO: 591380 - DNA, 15 bp, Homo sapiens
caggccaatgtggca

SEQ ID NO: 591381 - DNA, 15 bp, Homo sapiens
aggccaatgtggcag

SEQ ID NO: 591382 - DNA, 15 bp, Homo sapiens
ggccaatgtggcaga

SEQ ID NO: 591383 - DNA, 15 bp, Homo sapiens
gccaatgtggcagaa

SEQ ID NO: 591384 - DNA, 15 bp, Homo sapiens
ccaatgtggcagaag

SEQ ID NO: 591385 - DNA, 15 bp, Homo sapiens
caatgtggcagaaga

SEQ ID NO: 591386 - DNA, 15 bp, Homo sapiens
aatgtggcagaagag

SEQ ID NO: 591387 - DNA, 15 bp, Homo sapiens
atgtggcagaagagc

SEQ ID NO: 591388 - DNA, 15 bp, Homo sapiens
tgtggcagaagagcc

SEQ ID NO: 591389 - DNA, 15 bp, Homo sapiens
gtggcagaagagccc

SEQ ID NO: 591390 - DNA, 15 bp, Homo sapiens
tggcagaagagccca

SEQ ID NO: 591391 - DNA, 15 bp, Homo sapiens
ggcagaagagcccac

SEQ ID NO: 591392 - DNA, 15 bp, Homo sapiens
gcagaagagcccacc

SEQ ID NO: 591393 - DNA, 15 bp, Homo sapiens
cagaagagcccacct

SEQ ID NO: 591394 - DNA, 15 bp, Homo sapiens
agaagagcccacctt

SEQ ID NO: 591395 - DNA, 15 bp, Homo sapiens
gaagagcccaccttt

SEQ ID NO: 591396 - DNA, 15 bp, Homo sapiens
aagagcccacctttg

SEQ ID NO: 591397 - DNA, 15 bp, Homo sapiens
agagcccacctttga

SEQ ID NO: 591398 - DNA, 15 bp, Homo sapiens
gagcccacctttgaa

SEQ ID NO: 591399 - DNA, 15 bp, Homo sapiens
agcccacctttgaaa

SEQ ID NO: 591400 - DNA, 15 bp, Homo sapiens
gcccacctttgaaag

SEQ ID NO: 591401 - DNA, 15 bp, Homo sapiens
cccacctttgaaagc

SEQ ID NO: 591402 - DNA, 15 bp, Homo sapiens
ccacctttgaaagcg

SEQ ID NO: 591403 - DNA, 15 bp, Homo sapiens
cacctttgaaagcga

SEQ ID NO: 591404 - DNA, 15 bp, Homo sapiens
acctttgaaagcgag

SEQ ID NO: 591405 - DNA, 15 bp, Homo sapiens
cctttgaaagcgagc

SEQ ID NO: 591406 - DNA, 15 bp, Homo sapiens
ctttgaaagcgagcg

SEQ ID NO: 591407 - DNA, 15 bp, Homo sapiens
tttgaaagcgagcgg

SEQ ID NO: 591408 - DNA, 15 bp, Homo sapiens
ttgaaagcgagcggg

SEQ ID NO: 591409 - DNA, 15 bp, Homo sapiens
tgaaagcgagcgggt

SEQ ID NO: 591410 - DNA, 15 bp, Homo sapiens
gaaagcgagcgggtg

SEQ ID NO: 591411 - DNA, 15 bp, Homo sapiens
aaagcgagcgggtgg

SEQ ID NO: 591412 - DNA, 15 bp, Homo sapiens
aagcgagcgggtggg

SEQ ID NO: 591413 - DNA, 15 bp, Homo sapiens
agcgagcgggtgggg

SEQ ID NO: 591414 - DNA, 15 bp, Homo sapiens
gcgagcgggtggggg

SEQ ID NO: 591415 - DNA, 15 bp, Homo sapiens
cgagcgggtgggggt

SEQ ID NO: 591416 - DNA, 15 bp, Homo sapiens
gagcgggtgggggtg

SEQ ID NO: 591417 - DNA, 15 bp, Homo sapiens
agcgggtgggggtgg

SEQ ID NO: 591418 - DNA, 15 bp, Homo sapiens
gcgggtgggggtggc

SEQ ID NO: 591419 - DNA, 15 bp, Homo sapiens
cgggtgggggtggcg

SEQ ID NO: 591420 - DNA, 15 bp, Homo sapiens
gggtgggggtggcgg

SEQ ID NO: 591421 - DNA, 15 bp, Homo sapiens
ggtgggggtggcggg

SEQ ID NO: 591422 - DNA, 15 bp, Homo sapiens
gtgggggtggcgggg

SEQ ID NO: 591423 - DNA, 15 bp, Homo sapiens
tgggggtggcggggc

SEQ ID NO: 591424 - DNA, 15 bp, Homo sapiens
gggggtggcggggct

SEQ ID NO: 591425 - DNA, 15 bp, Homo sapiens
ggggtggcggggctg

SEQ ID NO: 591426 - DNA, 15 bp, Homo sapiens
gggtggcggggctgg

SEQ ID NO: 591427 - DNA, 15 bp, Homo sapiens
ggtggcggggctggt

SEQ ID NO: 591428 - DNA, 15 bp, Homo sapiens
gtggcggggctggtg

SEQ ID NO: 591429 - DNA, 15 bp, Homo sapiens
tggcggggctggtgc

SEQ ID NO: 591430 - DNA, 15 bp, Homo sapiens
ggcggggctggtgct

SEQ ID NO: 591431 - DNA, 15 bp, Homo sapiens
gcggggctggtgctg

SEQ ID NO: 591432 - DNA, 15 bp, Homo sapiens
cggggctggtgctgg

SEQ ID NO: 591433 - DNA, 15 bp, Homo sapiens
ggggctggtgctggt

SEQ ID NO: 591434 - DNA, 15 bp, Homo sapiens
gggctggtgctggtg

SEQ ID NO: 591435 - DNA, 15 bp, Homo sapiens
ggctggtgctggtgc

SEQ ID NO: 591436 - DNA, 15 bp, Homo sapiens
gctggtgctggtgcg

SEQ ID NO: 591437 - DNA, 15 bp, Homo sapiens
ctggtgctggtgcgt

SEQ ID NO: 591438 - DNA, 15 bp, Homo sapiens
tggtgctggtgcgtg

SEQ ID NO: 591439 - DNA, 15 bp, Homo sapiens
ggtgctggtgcgtgc

SEQ ID NO: 591440 - DNA, 15 bp, Homo sapiens
gtgctggtgcgtgct

SEQ ID NO: 591441 - DNA, 15 bp, Homo sapiens
tgctggtgcgtgctt

SEQ ID NO: 591442 - DNA, 15 bp, Homo sapiens
gctggtgcgtgcttc

SEQ ID NO: 591443 - DNA, 15 bp, Homo sapiens
ctggtgcgtgcttct

SEQ ID NO: 591444 - DNA, 15 bp, Homo sapiens
tggtgcgtgcttctg

SEQ ID NO: 591445 - DNA, 15 bp, Homo sapiens
ggtgcgtgcttctgc

SEQ ID NO: 591446 - DNA, 15 bp, Homo sapiens
gtgcgtgcttctgca

SEQ ID NO: 591447 - DNA, 15 bp, Homo sapiens
tgcgtgcttctgcac

SEQ ID NO: 591448 - DNA, 15 bp, Homo sapiens
gcgtgcttctgcaca

SEQ ID NO: 591449 - DNA, 15 bp, Homo sapiens
cgtgcttctgcacag

SEQ ID NO: 591450 - DNA, 15 bp, Homo sapiens
gtgcttctgcacagc

SEQ ID NO: 591451 - DNA, 15 bp, Homo sapiens
tgcttctgcacagcc

SEQ ID NO: 591452 - DNA, 15 bp, Homo sapiens
gcttctgcacagcca

SEQ ID NO: 591453 - DNA, 15 bp, Homo sapiens
cttctgcacagccac

SEQ ID NO: 591454 - DNA, 15 bp, Homo sapiens
ttctgcacagccacc

SEQ ID NO: 591455 - DNA, 15 bp, Homo sapiens
tctgcacagccacct

SEQ ID NO: 591456 - DNA, 15 bp, Homo sapiens
ctgcacagccacctg

SEQ ID NO: 591457 - DNA, 15 bp, Homo sapiens
tgcacagccacctgg

SEQ ID NO: 591458 - DNA, 15 bp, Homo sapiens
gcacagccacctggg

SEQ ID NO: 591459 - DNA, 15 bp, Homo sapiens
cacagccacctggga

SEQ ID NO: 591460 - DNA, 15 bp, Homo sapiens
acagccacctgggaa

SEQ ID NO: 591461 - DNA, 15 bp, Homo sapiens
cagccacctgggaag

SEQ ID NO: 591462 - DNA, 15 bp, Homo sapiens
agccacctgggaagg

SEQ ID NO: 591463 - DNA, 15 bp, Homo sapiens
gccacctgggaaggt

SEQ ID NO: 591464 - DNA, 15 bp, Homo sapiens
ccacctgggaaggta

SEQ ID NO: 591465 - DNA, 15 bp, Homo sapiens
cacctgggaaggtat

SEQ ID NO: 591466 - DNA, 15 bp, Homo sapiens
acctgggaaggtatg

SEQ ID NO: 591467 - DNA, 15 bp, Homo sapiens
cctgggaaggtatgc

SEQ ID NO: 591468 - DNA, 15 bp, Homo sapiens
ctgggaaggtatgcc

SEQ ID NO: 591469 - DNA, 15 bp, Homo sapiens
tgggaaggtatgccg

SEQ ID NO: 591470 - DNA, 15 bp, Homo sapiens
gggaaggtatgccgc

SEQ ID NO: 591471 - DNA, 15 bp, Homo sapiens
ggaaggtatgccgct

SEQ ID NO: 591472 - DNA, 15 bp, Homo sapiens
gaaggtatgccgctg

SEQ ID NO: 591473 - DNA, 15 bp, Homo sapiens
aaggtatgccgctgg

SEQ ID NO: 591474 - DNA, 15 bp, Homo sapiens
aggtatgccgctggt

SEQ ID NO: 591475 - DNA, 15 bp, Homo sapiens
ggtatgccgctggtt

SEQ ID NO: 591476 - DNA, 15 bp, Homo sapiens
gtatgccgctggttg

SEQ ID NO: 591477 - DNA, 15 bp, Homo sapiens
tatgccgctggttga

SEQ ID NO: 591478 - DNA, 15 bp, Homo sapiens
atgccgctggttgac

SEQ ID NO: 591479 - DNA, 15 bp, Homo sapiens
tgccgctggttgacc

SEQ ID NO: 591480 - DNA, 15 bp, Homo sapiens
gccgctggttgaccc

SEQ ID NO: 591481 - DNA, 15 bp, Homo sapiens
ccgctggttgaccca

SEQ ID NO: 591482 - DNA, 15 bp, Homo sapiens
cgctggttgacccag

SEQ ID NO: 591483 - DNA, 15 bp, Homo sapiens
gctggttgacccagg

SEQ ID NO: 591484 - DNA, 15 bp, Homo sapiens
ctggttgacccaggc

SEQ ID NO: 591485 - DNA, 15 bp, Homo sapiens
tggttgacccaggca

SEQ ID NO: 591486 - DNA, 15 bp, Homo sapiens
ggttgacccaggcag

SEQ ID NO: 591487 - DNA, 15 bp, Homo sapiens
gttgacccaggcaga

SEQ ID NO: 591488 - DNA, 15 bp, Homo sapiens
ttgacccaggcagag

SEQ ID NO: 591489 - DNA, 15 bp, Homo sapiens
tgacccaggcagagg

SEQ ID NO: 591490 - DNA, 15 bp, Homo sapiens
gacccaggcagaggt

SEQ ID NO: 591491 - DNA, 15 bp, Homo sapiens
acccaggcagaggtt

SEQ ID NO: 591492 - DNA, 15 bp, Homo sapiens
cccaggcagaggttt

SEQ ID NO: 591493 - DNA, 15 bp, Homo sapiens
ccaggcagaggtttt

SEQ ID NO: 591494 - DNA, 15 bp, Homo sapiens
caggcagaggttttc

SEQ ID NO: 591495 - DNA, 15 bp, Homo sapiens
aggcagaggttttct

SEQ ID NO: 591496 - DNA, 15 bp, Homo sapiens
ggcagaggttttctt

SEQ ID NO: 591497 - DNA, 15 bp, Homo sapiens
gcagaggttttcttt

SEQ ID NO: 591498 - DNA, 15 bp, Homo sapiens
cagaggttttctttc

SEQ ID NO: 591499 - DNA, 15 bp, Homo sapiens
agaggttttctttca

SEQ ID NO: 591500 - DNA, 15 bp, Homo sapiens
gaggttttctttcat

SEQ ID NO: 591501 - DNA, 15 bp, Homo sapiens
aggttttctttcatg

SEQ ID NO: 591502 - DNA, 15 bp, Homo sapiens
ggttttctttcatgg

SEQ ID NO: 591503 - DNA, 15 bp, Homo sapiens
gttttctttcatggc

SEQ ID NO: 591504 - DNA, 15 bp, Homo sapiens
ttttctttcatggca

SEQ ID NO: 591505 - DNA, 15 bp, Homo sapiens
tttctttcatggcaa

SEQ ID NO: 591506 - DNA, 15 bp, Homo sapiens
ttctttcatggcaaa

SEQ ID NO: 591507 - DNA, 15 bp, Homo sapiens
tctttcatggcaaac

SEQ ID NO: 591508 - DNA, 15 bp, Homo sapiens
ctttcatggcaaacc

SEQ ID NO: 591509 - DNA, 15 bp, Homo sapiens
tttcatggcaaacct

SEQ ID NO: 591510 - DNA, 15 bp, Homo sapiens
ttcatggcaaacctg

SEQ ID NO: 591511 - DNA, 15 bp, Homo sapiens
tcatggcaaacctgc

SEQ ID NO: 591512 - DNA, 15 bp, Homo sapiens
catggcaaacctgca

SEQ ID NO: 591513 - DNA, 15 bp, Homo sapiens
atggcaaacctgcag

SEQ ID NO: 591514 - DNA, 15 bp, Homo sapiens
tggcaaacctgcagt

SEQ ID NO: 591515 - DNA, 15 bp, Homo sapiens
ggcaaacctgcagta

SEQ ID NO: 591516 - DNA, 15 bp, Homo sapiens
gcaaacctgcagtac

SEQ ID NO: 591517 - DNA, 15 bp, Homo sapiens
caaacctgcagtact

SEQ ID NO: 591518 - DNA, 15 bp, Homo sapiens
aaacctgcagtactg

SEQ ID NO: 591519 - DNA, 15 bp, Homo sapiens
aacctgcagtactgc

SEQ ID NO: 591520 - DNA, 15 bp, Homo sapiens
acctgcagtactgca

SEQ ID NO: 591521 - DNA, 15 bp, Homo sapiens
cctgcagtactgcat

SEQ ID NO: 591522 - DNA, 15 bp, Homo sapiens
ctgcagtactgcatt

SEQ ID NO: 591523 - DNA, 15 bp, Homo sapiens
tgcagtactgcattc

SEQ ID NO: 591524 - DNA, 15 bp, Homo sapiens
gcagtactgcattct

SEQ ID NO: 591525 - DNA, 15 bp, Homo sapiens
cagtactgcattctc

SEQ ID NO: 591526 - DNA, 15 bp, Homo sapiens
agtactgcattctca

SEQ ID NO: 591527 - DNA, 15 bp, Homo sapiens
gtactgcattctcag

SEQ ID NO: 591528 - DNA, 15 bp, Homo sapiens
tactgcattctcagc

SEQ ID NO: 591529 - DNA, 15 bp, Homo sapiens
actgcattctcagca

SEQ ID NO: 591530 - DNA, 15 bp, Homo sapiens
ctgcattctcagcag

SEQ ID NO: 591531 - DNA, 15 bp, Homo sapiens
tgcattctcagcagg

SEQ ID NO: 591532 - DNA, 15 bp, Homo sapiens
gcattctcagcaggg

SEQ ID NO: 591533 - DNA, 15 bp, Homo sapiens
cattctcagcaggga

SEQ ID NO: 591534 - DNA, 15 bp, Homo sapiens
attctcagcagggag

SEQ ID NO: 591535 - DNA, 15 bp, Homo sapiens
ttctcagcagggagg

SEQ ID NO: 591536 - DNA, 15 bp, Homo sapiens
tctcagcagggagga

SEQ ID NO: 591537 - DNA, 15 bp, Homo sapiens
ctcagcagggaggat

SEQ ID NO: 591538 - DNA, 15 bp, Homo sapiens
tcagcagggaggatt

SEQ ID NO: 591539 - DNA, 15 bp, Homo sapiens
cagcagggaggatta

SEQ ID NO: 591540 - DNA, 15 bp, Homo sapiens
agcagggaggattaa

SEQ ID NO: 591541 - DNA, 15 bp, Homo sapiens
gcagggaggattaat

SEQ ID NO: 591542 - DNA, 15 bp, Homo sapiens
cagggaggattaatg

SEQ ID NO: 591543 - DNA, 15 bp, Homo sapiens
agggaggattaatgg

SEQ ID NO: 591544 - DNA, 15 bp, Homo sapiens
gggaggattaatggt

SEQ ID NO: 591545 - DNA, 15 bp, Homo sapiens
ggaggattaatggta

SEQ ID NO: 591546 - DNA, 15 bp, Homo sapiens
gaggattaatggtaa

SEQ ID NO: 591547 - DNA, 15 bp, Homo sapiens
aggattaatggtaaa

SEQ ID NO: 591548 - DNA, 15 bp, Homo sapiens
ggattaatggtaaaa

SEQ ID NO: 591549 - DNA, 15 bp, Homo sapiens
gattaatggtaaaag

SEQ ID NO: 591550 - DNA, 15 bp, Homo sapiens
attaatggtaaaaga

SEQ ID NO: 591551 - DNA, 15 bp, Homo sapiens
ttaatggtaaaagac

SEQ ID NO: 591552 - DNA, 15 bp, Homo sapiens
taatggtaaaagacc

SEQ ID NO: 591553 - DNA, 15 bp, Homo sapiens
aatggtaaaagacca

SEQ ID NO: 591554 - DNA, 15 bp, Homo sapiens
atggtaaaagaccag

SEQ ID NO: 591555 - DNA, 15 bp, Homo sapiens
tggtaaaagaccagg

SEQ ID NO: 591556 - DNA, 15 bp, Homo sapiens
ggtaaaagaccaggc

SEQ ID NO: 591557 - DNA, 15 bp, Homo sapiens
gtaaaagaccaggca

SEQ ID NO: 591558 - DNA, 15 bp, Homo sapiens
taaaagaccaggcat

SEQ ID NO: 591559 - DNA, 15 bp, Homo sapiens
aaaagaccaggcatg

SEQ ID NO: 591560 - DNA, 15 bp, Homo sapiens
aaagaccaggcatgg

SEQ ID NO: 591561 - DNA, 15 bp, Homo sapiens
aagaccaggcatgga

SEQ ID NO: 591562 - DNA, 15 bp, Homo sapiens
agaccaggcatggag

SEQ ID NO: 591563 - DNA, 15 bp, Homo sapiens
gaccaggcatggagc

SEQ ID NO: 591564 - DNA, 15 bp, Homo sapiens
accaggcatggagcc

SEQ ID NO: 591565 - DNA, 15 bp, Homo sapiens
ccaggcatggagccc

SEQ ID NO: 591566 - DNA, 15 bp, Homo sapiens
caggcatggagcccc

SEQ ID NO: 591567 - DNA, 15 bp, Homo sapiens
aggcatggagccccc

SEQ ID NO: 591568 - DNA, 15 bp, Homo sapiens
ggcatggagccccct

SEQ ID NO: 591569 - DNA, 15 bp, Homo sapiens
gcatggagccccctt

SEQ ID NO: 591570 - DNA, 15 bp, Homo sapiens
catggagcccccttc

SEQ ID NO: 591571 - DNA, 15 bp, Homo sapiens
atggagcccccttcc

SEQ ID NO: 591572 - DNA, 15 bp, Homo sapiens
tggagcccccttccc

SEQ ID NO: 591573 - DNA, 15 bp, Homo sapiens
ggagcccccttccct

SEQ ID NO: 591574 - DNA, 15 bp, Homo sapiens
gagcccccttccctc

SEQ ID NO: 591575 - DNA, 15 bp, Homo sapiens
agcccccttccctct

SEQ ID NO: 591576 - DNA, 15 bp, Homo sapiens
gcccccttccctctc

SEQ ID NO: 591577 - DNA, 15 bp, Homo sapiens
cccccttccctctcc

SEQ ID NO: 591578 - DNA, 15 bp, Homo sapiens
ccccttccctctccc

SEQ ID NO: 591579 - DNA, 15 bp, Homo sapiens
cccttccctctccct

SEQ ID NO: 591580 - DNA, 15 bp, Homo sapiens
ccttccctctccctc

SEQ ID NO: 591581 - DNA, 15 bp, Homo sapiens
cttccctctccctcg

SEQ ID NO: 591582 - DNA, 15 bp, Homo sapiens
ttccctctccctcga

SEQ ID NO: 591583 - DNA, 15 bp, Homo sapiens
tccctctccctcgaa

SEQ ID NO: 591584 - DNA, 15 bp, Homo sapiens
ccctctccctcgaag

SEQ ID NO: 591585 - DNA, 15 bp, Homo sapiens
cctctccctcgaagc

SEQ ID NO: 591586 - DNA, 15 bp, Homo sapiens
ctctccctcgaagca

SEQ ID NO: 591587 - DNA, 15 bp, Homo sapiens
tctccctcgaagcaa

SEQ ID NO: 591588 - DNA, 15 bp, Homo sapiens
ctccctcgaagcaag

SEQ ID NO: 591589 - DNA, 15 bp, Homo sapiens
tccctcgaagcaagc

SEQ ID NO: 591590 - DNA, 15 bp, Homo sapiens
ccctcgaagcaagct

SEQ ID NO: 591591 - DNA, 15 bp, Homo sapiens
cctcgaagcaagctc

SEQ ID NO: 591592 - DNA, 15 bp, Homo sapiens
ctcgaagcaagctct

SEQ ID NO: 591593 - DNA, 15 bp, Homo sapiens
tcgaagcaagctctg

SEQ ID NO: 591594 - DNA, 15 bp, Homo sapiens
cgaagcaagctctgt

SEQ ID NO: 591595 - DNA, 15 bp, Homo sapiens
gaagcaagctctgtg

SEQ ID NO: 591596 - DNA, 15 bp, Homo sapiens
aagcaagctctgtgg

SEQ ID NO: 591597 - DNA, 15 bp, Homo sapiens
agcaagctctgtggt

SEQ ID NO: 591598 - DNA, 15 bp, Homo sapiens
gcaagctctgtggtc

SEQ ID NO: 591599 - DNA, 15 bp, Homo sapiens
caagctctgtggtct

SEQ ID NO: 591600 - DNA, 15 bp, Homo sapiens
aagctctgtggtctc

SEQ ID NO: 591601 - DNA, 15 bp, Homo sapiens
agctctgtggtctct

SEQ ID NO: 591602 - DNA, 15 bp, Homo sapiens
gctctgtggtctctc

SEQ ID NO: 591603 - DNA, 15 bp, Homo sapiens
ctctgtggtctctca

SEQ ID NO: 591604 - DNA, 15 bp, Homo sapiens
tctgtggtctctcaa

SEQ ID NO: 591605 - DNA, 15 bp, Homo sapiens
ctgtggtctctcaat

SEQ ID NO: 591606 - DNA, 15 bp, Homo sapiens
tgtggtctctcaatc

SEQ ID NO: 591607 - DNA, 15 bp, Homo sapiens
gtggtctctcaatca

SEQ ID NO: 591608 - DNA, 15 bp, Homo sapiens
tggtctctcaatcat

SEQ ID NO: 591609 - DNA, 15 bp, Homo sapiens
ggtctctcaatcatc

SEQ ID NO: 591610 - DNA, 15 bp, Homo sapiens
gtctctcaatcatct

SEQ ID NO: 591611 - DNA, 15 bp, Homo sapiens
tctctcaatcatctt

SEQ ID NO: 591612 - DNA, 15 bp, Homo sapiens
ctctcaatcatcttt

SEQ ID NO: 591613 - DNA, 15 bp, Homo sapiens
tctcaatcatcttta

SEQ ID NO: 591614 - DNA, 15 bp, Homo sapiens
ctcaatcatctttaa

SEQ ID NO: 591615 - DNA, 15 bp, Homo sapiens
tcaatcatctttaaa

SEQ ID NO: 591616 - DNA, 15 bp, Homo sapiens
caatcatctttaaaa

SEQ ID NO: 591617 - DNA, 15 bp, Homo sapiens
aatcatctttaaaac

SEQ ID NO: 591618 - DNA, 15 bp, Homo sapiens
atcatctttaaaaca

SEQ ID NO: 591619 - DNA, 15 bp, Homo sapiens
tcatctttaaaacac

SEQ ID NO: 591620 - DNA, 15 bp, Homo sapiens
catctttaaaacacc

SEQ ID NO: 591621 - DNA, 15 bp, Homo sapiens
atctttaaaacacct

SEQ ID NO: 591622 - DNA, 15 bp, Homo sapiens
tctttaaaacacctt

SEQ ID NO: 591623 - DNA, 15 bp, Homo sapiens
ctttaaaacaccttc

SEQ ID NO: 591624 - DNA, 15 bp, Homo sapiens
tttaaaacaccttct

SEQ ID NO: 591625 - DNA, 15 bp, Homo sapiens
ttaaaacaccttctt

SEQ ID NO: 591626 - DNA, 15 bp, Homo sapiens
taaaacaccttcttc

SEQ ID NO: 591627 - DNA, 15 bp, Homo sapiens
aaaacaccttcttcc

SEQ ID NO: 591628 - DNA, 15 bp, Homo sapiens
aaacaccttcttccc

SEQ ID NO: 591629 - DNA, 15 bp, Homo sapiens
aacaccttcttcccg

SEQ ID NO: 591630 - DNA, 15 bp, Homo sapiens
acaccttcttcccgg

SEQ ID NO: 591631 - DNA, 15 bp, Homo sapiens
caccttcttcccggg

SEQ ID NO: 591632 - DNA, 15 bp, Homo sapiens
accttcttcccggga

SEQ ID NO: 591633 - DNA, 15 bp, Homo sapiens
ccttcttcccgggag

SEQ ID NO: 591634 - DNA, 15 bp, Homo sapiens
cttcttcccgggagc

SEQ ID NO: 591635 - DNA, 15 bp, Homo sapiens
ttcttcccgggagcc

SEQ ID NO: 591636 - DNA, 15 bp, Homo sapiens
tcttcccgggagcct

SEQ ID NO: 591637 - DNA, 15 bp, Homo sapiens
cttcccgggagcctc

SEQ ID NO: 591638 - DNA, 15 bp, Homo sapiens
ttcccgggagcctcc

SEQ ID NO: 591639 - DNA, 15 bp, Homo sapiens
tcccgggagcctcct

SEQ ID NO: 591640 - DNA, 15 bp, Homo sapiens
cccgggagcctccta

SEQ ID NO: 591641 - DNA, 15 bp, Homo sapiens
ccgggagcctcctac

SEQ ID NO: 591642 - DNA, 15 bp, Homo sapiens
cgggagcctcctaca

SEQ ID NO: 591643 - DNA, 15 bp, Homo sapiens
gggagcctcctacat

SEQ ID NO: 591644 - DNA, 15 bp, Homo sapiens
ggagcctcctacatt

SEQ ID NO: 591645 - DNA, 15 bp, Homo sapiens
gagcctcctacattc

SEQ ID NO: 591646 - DNA, 15 bp, Homo sapiens
agcctcctacattct

SEQ ID NO: 591647 - DNA, 15 bp, Homo sapiens
gcctcctacattctc

SEQ ID NO: 591648 - DNA, 15 bp, Homo sapiens
cctcctacattctcc

SEQ ID NO: 591649 - DNA, 15 bp, Homo sapiens
ctcctacattctcct

SEQ ID NO: 591650 - DNA, 15 bp, Homo sapiens
tcctacattctcctg

SEQ ID NO: 591651 - DNA, 15 bp, Homo sapiens
cctacattctcctgg

SEQ ID NO: 591652 - DNA, 15 bp, Homo sapiens
ctacattctcctggc

SEQ ID NO: 591653 - DNA, 15 bp, Homo sapiens
tacattctcctggct

SEQ ID NO: 591654 - DNA, 15 bp, Homo sapiens
acattctcctggctt

SEQ ID NO: 591655 - DNA, 15 bp, Homo sapiens
cattctcctggcttc

SEQ ID NO: 591656 - DNA, 15 bp, Homo sapiens
attctcctggcttcc

SEQ ID NO: 591657 - DNA, 15 bp, Homo sapiens
ttctcctggcttccc

SEQ ID NO: 591658 - DNA, 15 bp, Homo sapiens
tctcctggcttccct

SEQ ID NO: 591659 - DNA, 15 bp, Homo sapiens
ctcctggcttccctc

SEQ ID NO: 591660 - DNA, 15 bp, Homo sapiens
tcctggcttccctcc

SEQ ID NO: 591661 - DNA, 15 bp, Homo sapiens
cctggcttccctccc

SEQ ID NO: 591662 - DNA, 15 bp, Homo sapiens
ctggcttccctccca

SEQ ID NO: 591663 - DNA, 15 bp, Homo sapiens
tggcttccctcccac

SEQ ID NO: 591664 - DNA, 15 bp, Homo sapiens
ggcttccctcccacc

SEQ ID NO: 591665 - DNA, 15 bp, Homo sapiens
gcttccctcccaccc

SEQ ID NO: 591666 - DNA, 15 bp, Homo sapiens
cttccctcccacccc

SEQ ID NO: 591667 - DNA, 15 bp, Homo sapiens
ttccctcccaccccc

SEQ ID NO: 591668 - DNA, 15 bp, Homo sapiens
tccctcccaccccca

SEQ ID NO: 591669 - DNA, 15 bp, Homo sapiens
ccctcccacccccac

SEQ ID NO: 591670 - DNA, 15 bp, Homo sapiens
cctcccacccccacc

SEQ ID NO: 591671 - DNA, 15 bp, Homo sapiens
ctcccacccccaccc

SEQ ID NO: 591672 - DNA, 15 bp, Homo sapiens
tcccacccccaccct

SEQ ID NO: 591673 - DNA, 15 bp, Homo sapiens
cccacccccaccctc

SEQ ID NO: 591674 - DNA, 15 bp, Homo sapiens
ccacccccaccctca

SEQ ID NO: 591675 - DNA, 15 bp, Homo sapiens
cacccccaccctcag

SEQ ID NO: 591676 - DNA, 15 bp, Homo sapiens
acccccaccctcagc

SEQ ID NO: 591677 - DNA, 15 bp, Homo sapiens
cccccaccctcagct

SEQ ID NO: 591678 - DNA, 15 bp, Homo sapiens
ccccaccctcagctc

SEQ ID NO: 591679 - DNA, 15 bp, Homo sapiens
cccaccctcagctcc

SEQ ID NO: 591680 - DNA, 15 bp, Homo sapiens
ccaccctcagctcct

SEQ ID NO: 591681 - DNA, 15 bp, Homo sapiens
caccctcagctcctg

SEQ ID NO: 591682 - DNA, 15 bp, Homo sapiens
accctcagctcctgg

SEQ ID NO: 591683 - DNA, 15 bp, Homo sapiens
ccctcagctcctggg

SEQ ID NO: 591684 - DNA, 15 bp, Homo sapiens
cctcagctcctgggg

SEQ ID NO: 591685 - DNA, 15 bp, Homo sapiens
ctcagctcctggggc

SEQ ID NO: 591686 - DNA, 15 bp, Homo sapiens
tcagctcctggggcc

SEQ ID NO: 591687 - DNA, 15 bp, Homo sapiens
cagctcctggggcct

SEQ ID NO: 591688 - DNA, 15 bp, Homo sapiens
agctcctggggcctc

SEQ ID NO: 591689 - DNA, 15 bp, Homo sapiens
gctcctggggcctca

SEQ ID NO: 591690 - DNA, 15 bp, Homo sapiens
ctcctggggcctcag

SEQ ID NO: 591691 - DNA, 15 bp, Homo sapiens
tcctggggcctcagc

SEQ ID NO: 591692 - DNA, 15 bp, Homo sapiens
cctggggcctcagca

SEQ ID NO: 591693 - DNA, 15 bp, Homo sapiens
ctggggcctcagcag

SEQ ID NO: 591694 - DNA, 15 bp, Homo sapiens
tggggcctcagcagc

SEQ ID NO: 591695 - DNA, 15 bp, Homo sapiens
ggggcctcagcagcc

SEQ ID NO: 591696 - DNA, 15 bp, Homo sapiens
gggcctcagcagccc

SEQ ID NO: 591697 - DNA, 15 bp, Homo sapiens
ggcctcagcagcccc

SEQ ID NO: 591698 - DNA, 15 bp, Homo sapiens
gcctcagcagcccca

SEQ ID NO: 591699 - DNA, 15 bp, Homo sapiens
cctcagcagccccac

SEQ ID NO: 591700 - DNA, 15 bp, Homo sapiens
ctcagcagccccacc

SEQ ID NO: 591701 - DNA, 15 bp, Homo sapiens
tcagcagccccaccc

SEQ ID NO: 591702 - DNA, 15 bp, Homo sapiens
cagcagccccacccc

SEQ ID NO: 591703 - DNA, 15 bp, Homo sapiens
agcagccccaccccc

SEQ ID NO: 591704 - DNA, 15 bp, Homo sapiens
gcagccccaccccca

SEQ ID NO: 591705 - DNA, 15 bp, Homo sapiens
cagccccacccccaa

SEQ ID NO: 591706 - DNA, 15 bp, Homo sapiens
agccccacccccaag

SEQ ID NO: 591707 - DNA, 15 bp, Homo sapiens
gccccacccccaagc

SEQ ID NO: 591708 - DNA, 15 bp, Homo sapiens
ccccacccccaagcc

SEQ ID NO: 591709 - DNA, 15 bp, Homo sapiens
cccacccccaagcct

SEQ ID NO: 591710 - DNA, 15 bp, Homo sapiens
ccacccccaagcctc

SEQ ID NO: 591711 - DNA, 15 bp, Homo sapiens
cacccccaagcctct

SEQ ID NO: 591712 - DNA, 15 bp, Homo sapiens
acccccaagcctcta

SEQ ID NO: 591713 - DNA, 15 bp, Homo sapiens
cccccaagcctctaa

SEQ ID NO: 591714 - DNA, 15 bp, Homo sapiens
ccccaagcctctaat

SEQ ID NO: 591715 - DNA, 15 bp, Homo sapiens
cccaagcctctaatc

SEQ ID NO: 591716 - DNA, 15 bp, Homo sapiens
ccaagcctctaatct

SEQ ID NO: 591717 - DNA, 15 bp, Homo sapiens
caagcctctaatctt

SEQ ID NO: 591718 - DNA, 15 bp, Homo sapiens
aagcctctaatcttc

SEQ ID NO: 591719 - DNA, 15 bp, Homo sapiens
agcctctaatcttcc

SEQ ID NO: 591720 - DNA, 15 bp, Homo sapiens
gcctctaatcttccc

SEQ ID NO: 591721 - DNA, 15 bp, Homo sapiens
cctctaatcttccca

SEQ ID NO: 591722 - DNA, 15 bp, Homo sapiens
ctctaatcttcccag

SEQ ID NO: 591723 - DNA, 15 bp, Homo sapiens
tctaatcttcccagg

SEQ ID NO: 591724 - DNA, 15 bp, Homo sapiens
ctaatcttcccaggg

SEQ ID NO: 591725 - DNA, 15 bp, Homo sapiens
taatcttcccaggga

SEQ ID NO: 591726 - DNA, 15 bp, Homo sapiens
aatcttcccagggaa

SEQ ID NO: 591727 - DNA, 15 bp, Homo sapiens
atcttcccagggaag

SEQ ID NO: 591728 - DNA, 15 bp, Homo sapiens
tcttcccagggaagg

SEQ ID NO: 591729 - DNA, 15 bp, Homo sapiens
cttcccagggaaggg

SEQ ID NO: 591730 - DNA, 15 bp, Homo sapiens
ttcccagggaaggga

SEQ ID NO: 591731 - DNA, 15 bp, Homo sapiens
tcccagggaagggaa

SEQ ID NO: 591732 - DNA, 15 bp, Homo sapiens
cccagggaagggaac

SEQ ID NO: 591733 - DNA, 15 bp, Homo sapiens
ccagggaagggaaca

SEQ ID NO: 591734 - DNA, 15 bp, Homo sapiens
cagggaagggaacaa

SEQ ID NO: 591735 - DNA, 15 bp, Homo sapiens
agggaagggaacaag

SEQ ID NO: 591736 - DNA, 15 bp, Homo sapiens
gggaagggaacaaga

SEQ ID NO: 591737 - DNA, 15 bp, Homo sapiens
ggaagggaacaagaa

SEQ ID NO: 591738 - DNA, 15 bp, Homo sapiens
gaagggaacaagaag

SEQ ID NO: 591739 - DNA, 15 bp, Homo sapiens
aagggaacaagaaga

SEQ ID NO: 591740 - DNA, 15 bp, Homo sapiens
agggaacaagaagaa

SEQ ID NO: 591741 - DNA, 15 bp, Homo sapiens
gggaacaagaagaac

SEQ ID NO: 591742 - DNA, 15 bp, Homo sapiens
ggaacaagaagaacc

SEQ ID NO: 591743 - DNA, 15 bp, Homo sapiens
gaacaagaagaacca

SEQ ID NO: 591744 - DNA, 15 bp, Homo sapiens
aacaagaagaaccac

SEQ ID NO: 591745 - DNA, 15 bp, Homo sapiens
acaagaagaaccaca

SEQ ID NO: 591746 - DNA, 15 bp, Homo sapiens
caagaagaaccacat

SEQ ID NO: 591747 - DNA, 15 bp, Homo sapiens
aagaagaaccacatt

SEQ ID NO: 591748 - DNA, 15 bp, Homo sapiens
agaagaaccacattt

SEQ ID NO: 591749 - DNA, 15 bp, Homo sapiens
gaagaaccacatttt

SEQ ID NO: 591750 - DNA, 15 bp, Homo sapiens
aagaaccacatttta

SEQ ID NO: 591751 - DNA, 15 bp, Homo sapiens
agaaccacattttaa

SEQ ID NO: 591752 - DNA, 15 bp, Homo sapiens
gaaccacattttaaa

SEQ ID NO: 591753 - DNA, 15 bp, Homo sapiens
aaccacattttaaac

SEQ ID NO: 591754 - DNA, 15 bp, Homo sapiens
accacattttaaacg

SEQ ID NO: 591755 - DNA, 15 bp, Homo sapiens
ccacattttaaacga

SEQ ID NO: 591756 - DNA, 15 bp, Homo sapiens
cacattttaaacgaa

SEQ ID NO: 591757 - DNA, 15 bp, Homo sapiens
acattttaaacgaaa

SEQ ID NO: 591758 - DNA, 15 bp, Homo sapiens
cattttaaacgaaat

SEQ ID NO: 591759 - DNA, 15 bp, Homo sapiens
attttaaacgaaatt

SEQ ID NO: 591760 - DNA, 15 bp, Homo sapiens
ttttaaacgaaattt

SEQ ID NO: 591761 - DNA, 15 bp, Homo sapiens
tttaaacgaaattta

SEQ ID NO: 591762 - DNA, 15 bp, Homo sapiens
ttaaacgaaatttat

SEQ ID NO: 591763 - DNA, 15 bp, Homo sapiens
taaacgaaatttatt

SEQ ID NO: 591764 - DNA, 15 bp, Homo sapiens
aaacgaaatttattt

SEQ ID NO: 591765 - DNA, 15 bp, Homo sapiens
aacgaaatttatttt

SEQ ID NO: 591766 - DNA, 15 bp, Homo sapiens
acgaaatttattttt

SEQ ID NO: 591767 - DNA, 15 bp, Homo sapiens
cgaaatttatttttc

SEQ ID NO: 591768 - DNA, 15 bp, Homo sapiens
gaaatttatttttct

SEQ ID NO: 591769 - DNA, 15 bp, Homo sapiens
aaatttatttttctt

SEQ ID NO: 591770 - DNA, 15 bp, Homo sapiens
aatttatttttcttt

SEQ ID NO: 591771 - DNA, 15 bp, Homo sapiens
atttatttttctttc

SEQ ID NO: 591772 - DNA, 15 bp, Homo sapiens
tttatttttctttcc

SEQ ID NO: 591773 - DNA, 15 bp, Homo sapiens
ttatttttctttcct

SEQ ID NO: 591774 - DNA, 15 bp, Homo sapiens
tatttttctttcctc

SEQ ID NO: 591775 - DNA, 15 bp, Homo sapiens
atttttctttcctca

SEQ ID NO: 591776 - DNA, 15 bp, Homo sapiens
tttttctttcctcag

SEQ ID NO: 591777 - DNA, 15 bp, Homo sapiens
ttttctttcctcagg

SEQ ID NO: 591778 - DNA, 15 bp, Homo sapiens
tttctttcctcaggc

SEQ ID NO: 591779 - DNA, 15 bp, Homo sapiens
ttctttcctcaggct

SEQ ID NO: 591780 - DNA, 15 bp, Homo sapiens
tctttcctcaggctc

SEQ ID NO: 591781 - DNA, 15 bp, Homo sapiens
ctttcctcaggctcc

SEQ ID NO: 591782 - DNA, 15 bp, Homo sapiens
tttcctcaggctccc

SEQ ID NO: 591783 - DNA, 15 bp, Homo sapiens
ttcctcaggctccca

SEQ ID NO: 591784 - DNA, 15 bp, Homo sapiens
tcctcaggctcccag

SEQ ID NO: 591785 - DNA, 15 bp, Homo sapiens
cctcaggctcccagt

SEQ ID NO: 591786 - DNA, 15 bp, Homo sapiens
ctcaggctcccagtt

SEQ ID NO: 591787 - DNA, 15 bp, Homo sapiens
tcaggctcccagttc

SEQ ID NO: 591788 - DNA, 15 bp, Homo sapiens
caggctcccagttca

SEQ ID NO: 591789 - DNA, 15 bp, Homo sapiens
aggctcccagttcac

SEQ ID NO: 591790 - DNA, 15 bp, Homo sapiens
ggctcccagttcaca

SEQ ID NO: 591791 - DNA, 15 bp, Homo sapiens
gctcccagttcacat

SEQ ID NO: 591792 - DNA, 15 bp, Homo sapiens
ctcccagttcacatt

SEQ ID NO: 591793 - DNA, 15 bp, Homo sapiens
tcccagttcacattt

SEQ ID NO: 591794 - DNA, 15 bp, Homo sapiens
cccagttcacatttc

SEQ ID NO: 591795 - DNA, 15 bp, Homo sapiens
ccagttcacatttct

SEQ ID NO: 591796 - DNA, 15 bp, Homo sapiens
cagttcacatttctc

SEQ ID NO: 591797 - DNA, 15 bp, Homo sapiens
agttcacatttctcc

SEQ ID NO: 591798 - DNA, 15 bp, Homo sapiens
gttcacatttctccc

SEQ ID NO: 591799 - DNA, 15 bp, Homo sapiens
ttcacatttctccct

SEQ ID NO: 591800 - DNA, 15 bp, Homo sapiens
tcacatttctccctc

SEQ ID NO: 591801 - DNA, 15 bp, Homo sapiens
cacatttctccctca

SEQ ID NO: 591802 - DNA, 15 bp, Homo sapiens
acatttctccctcag

SEQ ID NO: 591803 - DNA, 15 bp, Homo sapiens
catttctccctcagg

SEQ ID NO: 591804 - DNA, 15 bp, Homo sapiens
atttctccctcagga

SEQ ID NO: 591805 - DNA, 15 bp, Homo sapiens
tttctccctcaggag

SEQ ID NO: 591806 - DNA, 15 bp, Homo sapiens
ttctccctcaggagt

SEQ ID NO: 591807 - DNA, 15 bp, Homo sapiens
tctccctcaggagtc

SEQ ID NO: 591808 - DNA, 15 bp, Homo sapiens
ctccctcaggagtct

SEQ ID NO: 591809 - DNA, 15 bp, Homo sapiens
tccctcaggagtcta

SEQ ID NO: 591810 - DNA, 15 bp, Homo sapiens
ccctcaggagtctag

SEQ ID NO: 591811 - DNA, 15 bp, Homo sapiens
cctcaggagtctagg

SEQ ID NO: 591812 - DNA, 15 bp, Homo sapiens
ctcaggagtctaggg

SEQ ID NO: 591813 - DNA, 15 bp, Homo sapiens
tcaggagtctaggga

SEQ ID NO: 591814 - DNA, 15 bp, Homo sapiens
caggagtctagggaa

SEQ ID NO: 591815 - DNA, 15 bp, Homo sapiens
aggagtctagggaag

SEQ ID NO: 591816 - DNA, 15 bp, Homo sapiens
ggagtctagggaagc

SEQ ID NO: 591817 - DNA, 15 bp, Homo sapiens
gagtctagggaagct

SEQ ID NO: 591818 - DNA, 15 bp, Homo sapiens
agtctagggaagctt

SEQ ID NO: 591819 - DNA, 15 bp, Homo sapiens
gtctagggaagcttc

SEQ ID NO: 591820 - DNA, 15 bp, Homo sapiens
tctagggaagcttct

SEQ ID NO: 591821 - DNA, 15 bp, Homo sapiens
ctagggaagcttctg

SEQ ID NO: 591822 - DNA, 15 bp, Homo sapiens
tagggaagcttctgt

SEQ ID NO: 591823 - DNA, 15 bp, Homo sapiens
agggaagcttctgtc

SEQ ID NO: 591824 - DNA, 15 bp, Homo sapiens
gggaagcttctgtct

SEQ ID NO: 591825 - DNA, 15 bp, Homo sapiens
ggaagcttctgtctg

SEQ ID NO: 591826 - DNA, 15 bp, Homo sapiens
gaagcttctgtctgg

SEQ ID NO: 591827 - DNA, 15 bp, Homo sapiens
aagcttctgtctggt

SEQ ID NO: 591828 - DNA, 15 bp, Homo sapiens
agcttctgtctggta

SEQ ID NO: 591829 - DNA, 15 bp, Homo sapiens
gcttctgtctggtat

SEQ ID NO: 591830 - DNA, 15 bp, Homo sapiens
cttctgtctggtatc

SEQ ID NO: 591831 - DNA, 15 bp, Homo sapiens
ttctgtctggtatcg

SEQ ID NO: 591832 - DNA, 15 bp, Homo sapiens
tctgtctggtatcgg

SEQ ID NO: 591833 - DNA, 15 bp, Homo sapiens
ctgtctggtatcggc

SEQ ID NO: 591834 - DNA, 15 bp, Homo sapiens
tgtctggtatcggcc

SEQ ID NO: 591835 - DNA, 15 bp, Homo sapiens
gtctggtatcggcct

SEQ ID NO: 591836 - DNA, 15 bp, Homo sapiens
tctggtatcggcctc

SEQ ID NO: 591837 - DNA, 15 bp, Homo sapiens
ctggtatcggcctcc

SEQ ID NO: 591838 - DNA, 15 bp, Homo sapiens
tggtatcggcctcct

SEQ ID NO: 591839 - DNA, 15 bp, Homo sapiens
ggtatcggcctcctc

SEQ ID NO: 591840 - DNA, 15 bp, Homo sapiens
gtatcggcctcctct

SEQ ID NO: 591841 - DNA, 15 bp, Homo sapiens
tatcggcctcctctt

SEQ ID NO: 591842 - DNA, 15 bp, Homo sapiens
atcggcctcctcttc

SEQ ID NO: 591843 - DNA, 15 bp, Homo sapiens
tcggcctcctcttca

SEQ ID NO: 591844 - DNA, 15 bp, Homo sapiens
cggcctcctcttcac

SEQ ID NO: 591845 - DNA, 15 bp, Homo sapiens
ggcctcctcttcacc

SEQ ID NO: 591846 - DNA, 15 bp, Homo sapiens
gcctcctcttcacct

SEQ ID NO: 591847 - DNA, 15 bp, Homo sapiens
cctcctcttcacctg

SEQ ID NO: 591848 - DNA, 15 bp, Homo sapiens
ctcctcttcacctgg

SEQ ID NO: 591849 - DNA, 15 bp, Homo sapiens
tcctcttcacctggg

SEQ ID NO: 591850 - DNA, 15 bp, Homo sapiens
cctcttcacctgggc

SEQ ID NO: 591851 - DNA, 15 bp, Homo sapiens
ctcttcacctgggcc

SEQ ID NO: 591852 - DNA, 15 bp, Homo sapiens
tcttcacctgggccc

SEQ ID NO: 591853 - DNA, 15 bp, Homo sapiens
cttcacctgggcccc

SEQ ID NO: 591854 - DNA, 15 bp, Homo sapiens
ttcacctgggccccc

SEQ ID NO: 591855 - DNA, 15 bp, Homo sapiens
tcacctgggcccccg

SEQ ID NO: 591856 - DNA, 15 bp, Homo sapiens
cacctgggcccccgc

SEQ ID NO: 591857 - DNA, 15 bp, Homo sapiens
acctgggcccccgcc

SEQ ID NO: 591858 - DNA, 15 bp, Homo sapiens
cctgggcccccgccc

SEQ ID NO: 591859 - DNA, 15 bp, Homo sapiens
ctgggcccccgccct

SEQ ID NO: 591860 - DNA, 15 bp, Homo sapiens
tgggcccccgccctc

SEQ ID NO: 591861 - DNA, 15 bp, Homo sapiens
gggcccccgccctcc

SEQ ID NO: 591862 - DNA, 15 bp, Homo sapiens
ggcccccgccctcct

SEQ ID NO: 591863 - DNA, 15 bp, Homo sapiens
gcccccgccctcctc

SEQ ID NO: 591864 - DNA, 15 bp, Homo sapiens
cccccgccctcctca

SEQ ID NO: 591865 - DNA, 15 bp, Homo sapiens
ccccgccctcctcag

SEQ ID NO: 591866 - DNA, 15 bp, Homo sapiens
cccgccctcctcagg

SEQ ID NO: 591867 - DNA, 15 bp, Homo sapiens
ccgccctcctcaggt

SEQ ID NO: 591868 - DNA, 15 bp, Homo sapiens
cgccctcctcaggtg

SEQ ID NO: 591869 - DNA, 15 bp, Homo sapiens
gccctcctcaggtgt

SEQ ID NO: 591870 - DNA, 15 bp, Homo sapiens
ccctcctcaggtgta

SEQ ID NO: 591871 - DNA, 15 bp, Homo sapiens
cctcctcaggtgtac

SEQ ID NO: 591872 - DNA, 15 bp, Homo sapiens
ctcctcaggtgtacc

SEQ ID NO: 591873 - DNA, 15 bp, Homo sapiens
tcctcaggtgtacca

SEQ ID NO: 591874 - DNA, 15 bp, Homo sapiens
cctcaggtgtaccag

SEQ ID NO: 591875 - DNA, 15 bp, Homo sapiens
ctcaggtgtaccaga

SEQ ID NO: 591876 - DNA, 15 bp, Homo sapiens
tcaggtgtaccagaa

SEQ ID NO: 591877 - DNA, 15 bp, Homo sapiens
caggtgtaccagaag

SEQ ID NO: 591878 - DNA, 15 bp, Homo sapiens
aggtgtaccagaagc

SEQ ID NO: 591879 - DNA, 15 bp, Homo sapiens
ggtgtaccagaagcc

SEQ ID NO: 591880 - DNA, 15 bp, Homo sapiens
gtgtaccagaagcca

SEQ ID NO: 591881 - DNA, 15 bp, Homo sapiens
tgtaccagaagccag

SEQ ID NO: 591882 - DNA, 15 bp, Homo sapiens
gtaccagaagccagc

SEQ ID NO: 591883 - DNA, 15 bp, Homo sapiens
taccagaagccagca

SEQ ID NO: 591884 - DNA, 15 bp, Homo sapiens
accagaagccagcac

SEQ ID NO: 591885 - DNA, 15 bp, Homo sapiens
ccagaagccagcaca

SEQ ID NO: 591886 - DNA, 15 bp, Homo sapiens
cagaagccagcacac

SEQ ID NO: 591887 - DNA, 15 bp, Homo sapiens
agaagccagcacact

SEQ ID NO: 591888 - DNA, 15 bp, Homo sapiens
gaagccagcacactc

SEQ ID NO: 591889 - DNA, 15 bp, Homo sapiens
aagccagcacactcc

SEQ ID NO: 591890 - DNA, 15 bp, Homo sapiens
agccagcacactccc

SEQ ID NO: 591891 - DNA, 15 bp, Homo sapiens
gccagcacactcccc

SEQ ID NO: 591892 - DNA, 15 bp, Homo sapiens
ccagcacactccccc

SEQ ID NO: 591893 - DNA, 15 bp, Homo sapiens
cagcacactccccct

SEQ ID NO: 591894 - DNA, 15 bp, Homo sapiens
agcacactccccctt

SEQ ID NO: 591895 - DNA, 15 bp, Homo sapiens
gcacactcccccttc

SEQ ID NO: 591896 - DNA, 15 bp, Homo sapiens
cacactcccccttcc

SEQ ID NO: 591897 - DNA, 15 bp, Homo sapiens
acactcccccttccc

SEQ ID NO: 591898 - DNA, 15 bp, Homo sapiens
cactcccccttcccc

SEQ ID NO: 591899 - DNA, 15 bp, Homo sapiens
actcccccttccccc

SEQ ID NO: 591900 - DNA, 15 bp, Homo sapiens
ctcccccttcccccc

SEQ ID NO: 591901 - DNA, 15 bp, Homo sapiens
tcccccttccccccc

SEQ ID NO: 591902 - DNA, 15 bp, Homo sapiens
cccccttccccccca

SEQ ID NO: 591903 - DNA, 15 bp, Homo sapiens
ccccttcccccccag

SEQ ID NO: 591904 - DNA, 15 bp, Homo sapiens
cccttcccccccaga

SEQ ID NO: 591905 - DNA, 15 bp, Homo sapiens
ccttcccccccagag

SEQ ID NO: 591906 - DNA, 15 bp, Homo sapiens
cttcccccccagagc

SEQ ID NO: 591907 - DNA, 15 bp, Homo sapiens
ttcccccccagagcc

SEQ ID NO: 591908 - DNA, 15 bp, Homo sapiens
tcccccccagagcca

SEQ ID NO: 591909 - DNA, 15 bp, Homo sapiens
cccccccagagccac

SEQ ID NO: 591910 - DNA, 15 bp, Homo sapiens
ccccccagagccaca

SEQ ID NO: 591911 - DNA, 15 bp, Homo sapiens
cccccagagccacag

SEQ ID NO: 591912 - DNA, 15 bp, Homo sapiens
ccccagagccacagc

SEQ ID NO: 591913 - DNA, 15 bp, Homo sapiens
cccagagccacagca

SEQ ID NO: 591914 - DNA, 15 bp, Homo sapiens
ccagagccacagcag

SEQ ID NO: 591915 - DNA, 15 bp, Homo sapiens
cagagccacagcagc

SEQ ID NO: 591916 - DNA, 15 bp, Homo sapiens
agagccacagcagcc

SEQ ID NO: 591917 - DNA, 15 bp, Homo sapiens
gagccacagcagccc

SEQ ID NO: 591918 - DNA, 15 bp, Homo sapiens
agccacagcagccct

SEQ ID NO: 591919 - DNA, 15 bp, Homo sapiens
gccacagcagccctg

SEQ ID NO: 591920 - DNA, 15 bp, Homo sapiens
ccacagcagccctgt

SEQ ID NO: 591921 - DNA, 15 bp, Homo sapiens
cacagcagccctgtc

SEQ ID NO: 591922 - DNA, 15 bp, Homo sapiens
acagcagccctgtct

SEQ ID NO: 591923 - DNA, 15 bp, Homo sapiens
cagcagccctgtctc

SEQ ID NO: 591924 - DNA, 15 bp, Homo sapiens
agcagccctgtctcc

SEQ ID NO: 591925 - DNA, 15 bp, Homo sapiens
gcagccctgtctcct

SEQ ID NO: 591926 - DNA, 15 bp, Homo sapiens
cagccctgtctcctg

SEQ ID NO: 591927 - DNA, 15 bp, Homo sapiens
agccctgtctcctgg

SEQ ID NO: 591928 - DNA, 15 bp, Homo sapiens
gccctgtctcctggg

SEQ ID NO: 591929 - DNA, 15 bp, Homo sapiens
ccctgtctcctgggt

SEQ ID NO: 591930 - DNA, 15 bp, Homo sapiens
cctgtctcctgggtg

SEQ ID NO: 591931 - DNA, 15 bp, Homo sapiens
ctgtctcctgggtgg

SEQ ID NO: 591932 - DNA, 15 bp, Homo sapiens
tgtctcctgggtggt

SEQ ID NO: 591933 - DNA, 15 bp, Homo sapiens
gtctcctgggtggtc

SEQ ID NO: 591934 - DNA, 15 bp, Homo sapiens
tctcctgggtggtct

SEQ ID NO: 591935 - DNA, 15 bp, Homo sapiens
ctcctgggtggtctt

SEQ ID NO: 591936 - DNA, 15 bp, Homo sapiens
tcctgggtggtcttg

SEQ ID NO: 591937 - DNA, 15 bp, Homo sapiens
cctgggtggtcttgt

SEQ ID NO: 591938 - DNA, 15 bp, Homo sapiens
ctgggtggtcttgtg

SEQ ID NO: 591939 - DNA, 15 bp, Homo sapiens
tgggtggtcttgtgt

SEQ ID NO: 591940 - DNA, 15 bp, Homo sapiens
gggtggtcttgtgtg

SEQ ID NO: 591941 - DNA, 15 bp, Homo sapiens
ggtggtcttgtgtgc

SEQ ID NO: 591942 - DNA, 15 bp, Homo sapiens
gtggtcttgtgtgcc

SEQ ID NO: 591943 - DNA, 15 bp, Homo sapiens
tggtcttgtgtgcca

SEQ ID NO: 591944 - DNA, 15 bp, Homo sapiens
ggtcttgtgtgccaa

SEQ ID NO: 591945 - DNA, 15 bp, Homo sapiens
gtcttgtgtgccaag

SEQ ID NO: 591946 - DNA, 15 bp, Homo sapiens
tcttgtgtgccaagc

SEQ ID NO: 591947 - DNA, 15 bp, Homo sapiens
cttgtgtgccaagcc

SEQ ID NO: 591948 - DNA, 15 bp, Homo sapiens
ttgtgtgccaagcct

SEQ ID NO: 591949 - DNA, 15 bp, Homo sapiens
tgtgtgccaagcctg

SEQ ID NO: 591950 - DNA, 15 bp, Homo sapiens
gtgtgccaagcctgg

SEQ ID NO: 591951 - DNA, 15 bp, Homo sapiens
tgtgccaagcctggg

SEQ ID NO: 591952 - DNA, 15 bp, Homo sapiens
gtgccaagcctgggc

SEQ ID NO: 591953 - DNA, 15 bp, Homo sapiens
tgccaagcctgggca

SEQ ID NO: 591954 - DNA, 15 bp, Homo sapiens
gccaagcctgggcaa

SEQ ID NO: 591955 - DNA, 15 bp, Homo sapiens
ccaagcctgggcaac

SEQ ID NO: 591956 - DNA, 15 bp, Homo sapiens
caagcctgggcaaca

SEQ ID NO: 591957 - DNA, 15 bp, Homo sapiens
aagcctgggcaacat

SEQ ID NO: 591958 - DNA, 15 bp, Homo sapiens
agcctgggcaacatc

SEQ ID NO: 591959 - DNA, 15 bp, Homo sapiens
gcctgggcaacatca

SEQ ID NO: 591960 - DNA, 15 bp, Homo sapiens
cctgggcaacatcac

SEQ ID NO: 591961 - DNA, 15 bp, Homo sapiens
ctgggcaacatcact

SEQ ID NO: 591962 - DNA, 15 bp, Homo sapiens
tgggcaacatcactc

SEQ ID NO: 591963 - DNA, 15 bp, Homo sapiens
gggcaacatcactcc

SEQ ID NO: 591964 - DNA, 15 bp, Homo sapiens
ggcaacatcactccc

SEQ ID NO: 591965 - DNA, 15 bp, Homo sapiens
gcaacatcactccca

SEQ ID NO: 591966 - DNA, 15 bp, Homo sapiens
caacatcactcccag

SEQ ID NO: 591967 - DNA, 15 bp, Homo sapiens
aacatcactcccagc

SEQ ID NO: 591968 - DNA, 15 bp, Homo sapiens
acatcactcccagct

SEQ ID NO: 591969 - DNA, 15 bp, Homo sapiens
catcactcccagctt

SEQ ID NO: 591970 - DNA, 15 bp, Homo sapiens
atcactcccagcttt

SEQ ID NO: 591971 - DNA, 15 bp, Homo sapiens
tcactcccagctttt

SEQ ID NO: 591972 - DNA, 15 bp, Homo sapiens
cactcccagcttttc

SEQ ID NO: 591973 - DNA, 15 bp, Homo sapiens
actcccagcttttct

SEQ ID NO: 591974 - DNA, 15 bp, Homo sapiens
ctcccagcttttctt

SEQ ID NO: 591975 - DNA, 15 bp, Homo sapiens
tcccagcttttcttg

SEQ ID NO: 591976 - DNA, 15 bp, Homo sapiens
cccagcttttcttgt

SEQ ID NO: 591977 - DNA, 15 bp, Homo sapiens
ccagcttttcttgtt

SEQ ID NO: 591978 - DNA, 15 bp, Homo sapiens
cagcttttcttgttt

SEQ ID NO: 591979 - DNA, 15 bp, Homo sapiens
agcttttcttgtttt

SEQ ID NO: 591980 - DNA, 15 bp, Homo sapiens
gcttttcttgttttg

SEQ ID NO: 591981 - DNA, 15 bp, Homo sapiens
cttttcttgttttgc

SEQ ID NO: 591982 - DNA, 15 bp, Homo sapiens
ttttcttgttttgcc

SEQ ID NO: 591983 - DNA, 15 bp, Homo sapiens
tttcttgttttgccc

SEQ ID NO: 591984 - DNA, 15 bp, Homo sapiens
ttcttgttttgcccc

SEQ ID NO: 591985 - DNA, 15 bp, Homo sapiens
tcttgttttgcccct

SEQ ID NO: 591986 - DNA, 15 bp, Homo sapiens
cttgttttgcccctt

SEQ ID NO: 591987 - DNA, 15 bp, Homo sapiens
ttgttttgccccttc

SEQ ID NO: 591988 - DNA, 15 bp, Homo sapiens
tgttttgccccttct

SEQ ID NO: 591989 - DNA, 15 bp, Homo sapiens
gttttgccccttctc

SEQ ID NO: 591990 - DNA, 15 bp, Homo sapiens
ttttgccccttctcc

SEQ ID NO: 591991 - DNA, 15 bp, Homo sapiens
tttgccccttctccc

SEQ ID NO: 591992 - DNA, 15 bp, Homo sapiens
ttgccccttctcccc

SEQ ID NO: 591993 - DNA, 15 bp, Homo sapiens
tgccccttctcccca

SEQ ID NO: 591994 - DNA, 15 bp, Homo sapiens
gccccttctccccag

SEQ ID NO: 591995 - DNA, 15 bp, Homo sapiens
ccccttctccccagc

SEQ ID NO: 591996 - DNA, 15 bp, Homo sapiens
cccttctccccagca

SEQ ID NO: 591997 - DNA, 15 bp, Homo sapiens
ccttctccccagcaa

SEQ ID NO: 591998 - DNA, 15 bp, Homo sapiens
cttctccccagcaag

SEQ ID NO: 591999 - DNA, 15 bp, Homo sapiens
ttctccccagcaaga

SEQ ID NO: 592000 - DNA, 15 bp, Homo sapiens
tctccccagcaagat

SEQ ID NO: 592001 - DNA, 15 bp, Homo sapiens
ctccccagcaagata

SEQ ID NO: 592002 - DNA, 15 bp, Homo sapiens
tccccagcaagatat

SEQ ID NO: 592003 - DNA, 15 bp, Homo sapiens
ccccagcaagatatt

SEQ ID NO: 592004 - DNA, 15 bp, Homo sapiens
cccagcaagatattt

SEQ ID NO: 592005 - DNA, 15 bp, Homo sapiens
ccagcaagatatttg

SEQ ID NO: 592006 - DNA, 15 bp, Homo sapiens
cagcaagatatttgt

SEQ ID NO: 592007 - DNA, 15 bp, Homo sapiens
agcaagatatttgta

SEQ ID NO: 592008 - DNA, 15 bp, Homo sapiens
gcaagatatttgtat

SEQ ID NO: 592009 - DNA, 15 bp, Homo sapiens
caagatatttgtatg

SEQ ID NO: 592010 - DNA, 15 bp, Homo sapiens
aagatatttgtatgt

SEQ ID NO: 592011 - DNA, 15 bp, Homo sapiens
agatatttgtatgta

SEQ ID NO: 592012 - DNA, 15 bp, Homo sapiens
gatatttgtatgtaa

SEQ ID NO: 592013 - DNA, 15 bp, Homo sapiens
atatttgtatgtaag

SEQ ID NO: 592014 - DNA, 15 bp, Homo sapiens
tatttgtatgtaagg

SEQ ID NO: 592015 - DNA, 15 bp, Homo sapiens
atttgtatgtaaggt

SEQ ID NO: 592016 - DNA, 15 bp, Homo sapiens
tttgtatgtaaggtc

SEQ ID NO: 592017 - DNA, 15 bp, Homo sapiens
ttgtatgtaaggtca

SEQ ID NO: 592018 - DNA, 15 bp, Homo sapiens
tgtatgtaaggtcag

SEQ ID NO: 592019 - DNA, 15 bp, Homo sapiens
gtatgtaaggtcagg

SEQ ID NO: 592020 - DNA, 15 bp, Homo sapiens
tatgtaaggtcaggt

SEQ ID NO: 592021 - DNA, 15 bp, Homo sapiens
atgtaaggtcaggtg

SEQ ID NO: 592022 - DNA, 15 bp, Homo sapiens
tgtaaggtcaggtga

SEQ ID NO: 592023 - DNA, 15 bp, Homo sapiens
gtaaggtcaggtgag

SEQ ID NO: 592024 - DNA, 15 bp, Homo sapiens
taaggtcaggtgagt

SEQ ID NO: 592025 - DNA, 15 bp, Homo sapiens
aaggtcaggtgagtg

SEQ ID NO: 592026 - DNA, 15 bp, Homo sapiens
aggtcaggtgagtga

SEQ ID NO: 592027 - DNA, 15 bp, Homo sapiens
ggtcaggtgagtgag

SEQ ID NO: 592028 - DNA, 15 bp, Homo sapiens
gtcaggtgagtgagt

SEQ ID NO: 592029 - DNA, 15 bp, Homo sapiens
tcaggtgagtgagtt

SEQ ID NO: 592030 - DNA, 15 bp, Homo sapiens
caggtgagtgagtta

SEQ ID NO: 592031 - DNA, 15 bp, Homo sapiens
aggtgagtgagttaa

SEQ ID NO: 592032 - DNA, 15 bp, Homo sapiens
ggtgagtgagttaaa

SEQ ID NO: 592033 - DNA, 15 bp, Homo sapiens
gtgagtgagttaaag

SEQ ID NO: 592034 - DNA, 15 bp, Homo sapiens
tgagtgagttaaaga

SEQ ID NO: 592035 - DNA, 15 bp, Homo sapiens
gagtgagttaaagaa

SEQ ID NO: 592036 - DNA, 15 bp, Homo sapiens
agtgagttaaagaat

SEQ ID NO: 592037 - DNA, 15 bp, Homo sapiens
gtgagttaaagaata

SEQ ID NO: 592038 - DNA, 15 bp, Homo sapiens
tgagttaaagaataa

SEQ ID NO: 592039 - DNA, 15 bp, Homo sapiens
gagttaaagaataac

SEQ ID NO: 592040 - DNA, 15 bp, Homo sapiens
agttaaagaataacg

SEQ ID NO: 592041 - DNA, 15 bp, Homo sapiens
gttaaagaataacga

SEQ ID NO: 592042 - DNA, 15 bp, Homo sapiens
ttaaagaataacgaa

SEQ ID NO: 592043 - DNA, 15 bp, Homo sapiens
taaagaataacgaag

SEQ ID NO: 592044 - DNA, 15 bp, Homo sapiens
aaagaataacgaaga

SEQ ID NO: 592045 - DNA, 15 bp, Homo sapiens
aagaataacgaagag

SEQ ID NO: 592046 - DNA, 15 bp, Homo sapiens
agaataacgaagaga

SEQ ID NO: 592047 - DNA, 15 bp, Homo sapiens
gaataacgaagagat

SEQ ID NO: 592048 - DNA, 15 bp, Homo sapiens
aataacgaagagata

SEQ ID NO: 592049 - DNA, 15 bp, Homo sapiens
ataacgaagagataa

SEQ ID NO: 592050 - DNA, 15 bp, Homo sapiens
taacgaagagataaa

SEQ ID NO: 592051 - DNA, 15 bp, Homo sapiens
aacgaagagataaac

SEQ ID NO: 592052 - DNA, 15 bp, Homo sapiens
acgaagagataaaca

SEQ ID NO: 592053 - DNA, 15 bp, Homo sapiens
cgaagagataaacag

SEQ ID NO: 592054 - DNA, 15 bp, Homo sapiens
gaagagataaacagt

SEQ ID NO: 592055 - DNA, 15 bp, Homo sapiens
aagagataaacagtc

SEQ ID NO: 592056 - DNA, 15 bp, Homo sapiens
agagataaacagtca

SEQ ID NO: 592057 - DNA, 15 bp, Homo sapiens
gagataaacagtcaa

SEQ ID NO: 592058 - DNA, 15 bp, Homo sapiens
agataaacagtcaaa

SEQ ID NO: 592059 - DNA, 15 bp, Homo sapiens
gataaacagtcaaat

SEQ ID NO: 592060 - DNA, 15 bp, Homo sapiens
ataaacagtcaaatg

SEQ ID NO: 592061 - DNA, 15 bp, Homo sapiens
taaacagtcaaatgg

SEQ ID NO: 592062 - DNA, 15 bp, Homo sapiens
aaacagtcaaatgga

SEQ ID NO: 592063 - DNA, 15 bp, Homo sapiens
aacagtcaaatggag

SEQ ID NO: 592064 - DNA, 15 bp, Homo sapiens
acagtcaaatggagt

SEQ ID NO: 592065 - DNA, 15 bp, Homo sapiens
cagtcaaatggagtc

SEQ ID NO: 592066 - DNA, 15 bp, Homo sapiens
agtcaaatggagtcc

SEQ ID NO: 592067 - DNA, 15 bp, Homo sapiens
gtcaaatggagtcct

SEQ ID NO: 592068 - DNA, 15 bp, Homo sapiens
tcaaatggagtcctg

SEQ ID NO: 592069 - DNA, 15 bp, Homo sapiens
caaatggagtcctga

SEQ ID NO: 592070 - DNA, 15 bp, Homo sapiens
aaatggagtcctgac

SEQ ID NO: 592071 - DNA, 15 bp, Homo sapiens
aatggagtcctgact

SEQ ID NO: 592072 - DNA, 15 bp, Homo sapiens
atggagtcctgactg

SEQ ID NO: 592073 - DNA, 15 bp, Homo sapiens
tggagtcctgactgt

SEQ ID NO: 592074 - DNA, 15 bp, Homo sapiens
ggagtcctgactgtc

SEQ ID NO: 592075 - DNA, 15 bp, Homo sapiens
gagtcctgactgtca

SEQ ID NO: 592076 - DNA, 15 bp, Homo sapiens
agtcctgactgtcag

SEQ ID NO: 592077 - DNA, 15 bp, Homo sapiens
gtcctgactgtcagg

SEQ ID NO: 592078 - DNA, 15 bp, Homo sapiens
tcctgactgtcaggt

SEQ ID NO: 592079 - DNA, 15 bp, Homo sapiens
cctgactgtcaggtc

SEQ ID NO: 592080 - DNA, 15 bp, Homo sapiens
ctgactgtcaggtca

SEQ ID NO: 592081 - DNA, 15 bp, Homo sapiens
tgactgtcaggtcaa

SEQ ID NO: 592082 - DNA, 15 bp, Homo sapiens
gactgtcaggtcaag

SEQ ID NO: 592083 - DNA, 15 bp, Homo sapiens
actgtcaggtcaaga

SEQ ID NO: 592084 - DNA, 15 bp, Homo sapiens
ctgtcaggtcaagac

SEQ ID NO: 592085 - DNA, 15 bp, Homo sapiens
tgtcaggtcaagaca

SEQ ID NO: 592086 - DNA, 15 bp, Homo sapiens
gtcaggtcaagacaa

SEQ ID NO: 592087 - DNA, 15 bp, Homo sapiens
tcaggtcaagacaac

SEQ ID NO: 592088 - DNA, 15 bp, Homo sapiens
caggtcaagacaaca

SEQ ID NO: 592089 - DNA, 15 bp, Homo sapiens
aggtcaagacaacag

SEQ ID NO: 592090 - DNA, 15 bp, Homo sapiens
ggtcaagacaacagt

SEQ ID NO: 592091 - DNA, 15 bp, Homo sapiens
gtcaagacaacagtt

SEQ ID NO: 592092 - DNA, 15 bp, Homo sapiens
tcaagacaacagtta

SEQ ID NO: 592093 - DNA, 15 bp, Homo sapiens
caagacaacagttat

SEQ ID NO: 592094 - DNA, 15 bp, Homo sapiens
aagacaacagttatt

SEQ ID NO: 592095 - DNA, 15 bp, Homo sapiens
agacaacagttattt

SEQ ID NO: 592096 - DNA, 15 bp, Homo sapiens
gacaacagttattta

SEQ ID NO: 592097 - DNA, 15 bp, Homo sapiens
acaacagttatttac

SEQ ID NO: 592098 - DNA, 15 bp, Homo sapiens
caacagttatttact

SEQ ID NO: 592099 - DNA, 15 bp, Homo sapiens
aacagttatttactg

SEQ ID NO: 592100 - DNA, 15 bp, Homo sapiens
acagttatttactga

SEQ ID NO: 592101 - DNA, 15 bp, Homo sapiens
cagttatttactgaa

SEQ ID NO: 592102 - DNA, 15 bp, Homo sapiens
agttatttactgaat

SEQ ID NO: 592103 - DNA, 15 bp, Homo sapiens
gttatttactgaatg

SEQ ID NO: 592104 - DNA, 15 bp, Homo sapiens
ttatttactgaatgc

SEQ ID NO: 592105 - DNA, 15 bp, Homo sapiens
tatttactgaatgcc

SEQ ID NO: 592106 - DNA, 15 bp, Homo sapiens
atttactgaatgcct

SEQ ID NO: 592107 - DNA, 15 bp, Homo sapiens
tttactgaatgcctc

SEQ ID NO: 592108 - DNA, 15 bp, Homo sapiens
ttactgaatgcctca

SEQ ID NO: 592109 - DNA, 15 bp, Homo sapiens
tactgaatgcctcat

SEQ ID NO: 592110 - DNA, 15 bp, Homo sapiens
actgaatgcctcatg

SEQ ID NO: 592111 - DNA, 15 bp, Homo sapiens
ctgaatgcctcatgt

SEQ ID NO: 592112 - DNA, 15 bp, Homo sapiens
tgaatgcctcatgtc

SEQ ID NO: 592113 - DNA, 15 bp, Homo sapiens
gaatgcctcatgtca

SEQ ID NO: 592114 - DNA, 15 bp, Homo sapiens
aatgcctcatgtcat

SEQ ID NO: 592115 - DNA, 15 bp, Homo sapiens
atgcctcatgtcatt

SEQ ID NO: 592116 - DNA, 15 bp, Homo sapiens
tgcctcatgtcattc

SEQ ID NO: 592117 - DNA, 15 bp, Homo sapiens
gcctcatgtcattca

SEQ ID NO: 592118 - DNA, 15 bp, Homo sapiens
cctcatgtcattcaa

SEQ ID NO: 592119 - DNA, 15 bp, Homo sapiens
ctcatgtcattcaac

SEQ ID NO: 592120 - DNA, 15 bp, Homo sapiens
tcatgtcattcaaca

SEQ ID NO: 592121 - DNA, 15 bp, Homo sapiens
catgtcattcaacag

SEQ ID NO: 592122 - DNA, 15 bp, Homo sapiens
atgtcattcaacaga

SEQ ID NO: 592123 - DNA, 15 bp, Homo sapiens
tgtcattcaacagac

SEQ ID NO: 592124 - DNA, 15 bp, Homo sapiens
gtcattcaacagaca

SEQ ID NO: 592125 - DNA, 15 bp, Homo sapiens
tcattcaacagacat

SEQ ID NO: 592126 - DNA, 15 bp, Homo sapiens
cattcaacagacatt

SEQ ID NO: 592127 - DNA, 15 bp, Homo sapiens
attcaacagacattt

SEQ ID NO: 592128 - DNA, 15 bp, Homo sapiens
ttcaacagacattta

SEQ ID NO: 592129 - DNA, 15 bp, Homo sapiens
tcaacagacatttat

SEQ ID NO: 592130 - DNA, 15 bp, Homo sapiens
caacagacatttatt

SEQ ID NO: 592131 - DNA, 15 bp, Homo sapiens
aacagacatttattg

SEQ ID NO: 592132 - DNA, 15 bp, Homo sapiens
acagacatttattga

SEQ ID NO: 592133 - DNA, 15 bp, Homo sapiens
cagacatttattgag

SEQ ID NO: 592134 - DNA, 15 bp, Homo sapiens
agacatttattgaga

SEQ ID NO: 592135 - DNA, 15 bp, Homo sapiens
gacatttattgagac

SEQ ID NO: 592136 - DNA, 15 bp, Homo sapiens
acatttattgagact

SEQ ID NO: 592137 - DNA, 15 bp, Homo sapiens
catttattgagactc

SEQ ID NO: 592138 - DNA, 15 bp, Homo sapiens
atttattgagactct

SEQ ID NO: 592139 - DNA, 15 bp, Homo sapiens
tttattgagactctg

SEQ ID NO: 592140 - DNA, 15 bp, Homo sapiens
ttattgagactctga

SEQ ID NO: 592141 - DNA, 15 bp, Homo sapiens
tattgagactctgat

SEQ ID NO: 592142 - DNA, 15 bp, Homo sapiens
attgagactctgatt

SEQ ID NO: 592143 - DNA, 15 bp, Homo sapiens
ttgagactctgattg

SEQ ID NO: 592144 - DNA, 15 bp, Homo sapiens
tgagactctgattgg

SEQ ID NO: 592145 - DNA, 15 bp, Homo sapiens
gagactctgattgga

SEQ ID NO: 592146 - DNA, 15 bp, Homo sapiens
agactctgattggat

SEQ ID NO: 592147 - DNA, 15 bp, Homo sapiens
gactctgattggatg

SEQ ID NO: 592148 - DNA, 15 bp, Homo sapiens
actctgattggatgt

SEQ ID NO: 592149 - DNA, 15 bp, Homo sapiens
ctctgattggatgtc

SEQ ID NO: 592150 - DNA, 15 bp, Homo sapiens
tctgattggatgtca

SEQ ID NO: 592151 - DNA, 15 bp, Homo sapiens
ctgattggatgtcag

SEQ ID NO: 592152 - DNA, 15 bp, Homo sapiens
tgattggatgtcagt

SEQ ID NO: 592153 - DNA, 15 bp, Homo sapiens
gattggatgtcagtc

SEQ ID NO: 592154 - DNA, 15 bp, Homo sapiens
attggatgtcagtct

SEQ ID NO: 592155 - DNA, 15 bp, Homo sapiens
ttggatgtcagtctt

SEQ ID NO: 592156 - DNA, 15 bp, Homo sapiens
tggatgtcagtcttt

SEQ ID NO: 592157 - DNA, 15 bp, Homo sapiens
ggatgtcagtcttta

SEQ ID NO: 592158 - DNA, 15 bp, Homo sapiens
gatgtcagtctttaa

SEQ ID NO: 592159 - DNA, 15 bp, Homo sapiens
atgtcagtctttaat

SEQ ID NO: 592160 - DNA, 15 bp, Homo sapiens
tgtcagtctttaatg

SEQ ID NO: 592161 - DNA, 15 bp, Homo sapiens
gtcagtctttaatgc

SEQ ID NO: 592162 - DNA, 15 bp, Homo sapiens
tcagtctttaatgct

SEQ ID NO: 592163 - DNA, 15 bp, Homo sapiens
cagtctttaatgctg

SEQ ID NO: 592164 - DNA, 15 bp, Homo sapiens
agtctttaatgctgg

SEQ ID NO: 592165 - DNA, 15 bp, Homo sapiens
gtctttaatgctggg

SEQ ID NO: 592166 - DNA, 15 bp, Homo sapiens
tctttaatgctgggt

SEQ ID NO: 592167 - DNA, 15 bp, Homo sapiens
ctttaatgctgggtg

SEQ ID NO: 592168 - DNA, 15 bp, Homo sapiens
tttaatgctgggtgt

SEQ ID NO: 592169 - DNA, 15 bp, Homo sapiens
ttaatgctgggtgtc

SEQ ID NO: 592170 - DNA, 15 bp, Homo sapiens
taatgctgggtgtca

SEQ ID NO: 592171 - DNA, 15 bp, Homo sapiens
aatgctgggtgtcag

SEQ ID NO: 592172 - DNA, 15 bp, Homo sapiens
atgctgggtgtcaga

SEQ ID NO: 592173 - DNA, 15 bp, Homo sapiens
tgctgggtgtcagag

SEQ ID NO: 592174 - DNA, 15 bp, Homo sapiens
gctgggtgtcagaga

SEQ ID NO: 592175 - DNA, 15 bp, Homo sapiens
ctgggtgtcagagag

SEQ ID NO: 592176 - DNA, 15 bp, Homo sapiens
tgggtgtcagagaga

SEQ ID NO: 592177 - DNA, 15 bp, Homo sapiens
gggtgtcagagagag

SEQ ID NO: 592178 - DNA, 15 bp, Homo sapiens
ggtgtcagagagagg

SEQ ID NO: 592179 - DNA, 15 bp, Homo sapiens
gtgtcagagagaggt

SEQ ID NO: 592180 - DNA, 15 bp, Homo sapiens
tgtcagagagaggtg

SEQ ID NO: 592181 - DNA, 15 bp, Homo sapiens
gtcagagagaggtga

SEQ ID NO: 592182 - DNA, 15 bp, Homo sapiens
tcagagagaggtgac

SEQ ID NO: 592183 - DNA, 15 bp, Homo sapiens
cagagagaggtgact

SEQ ID NO: 592184 - DNA, 15 bp, Homo sapiens
agagagaggtgactt

SEQ ID NO: 592185 - DNA, 15 bp, Homo sapiens
gagagaggtgacttc

SEQ ID NO: 592186 - DNA, 15 bp, Homo sapiens
agagaggtgacttca

SEQ ID NO: 592187 - DNA, 15 bp, Homo sapiens
gagaggtgacttcaa

SEQ ID NO: 592188 - DNA, 15 bp, Homo sapiens
agaggtgacttcaag

SEQ ID NO: 592189 - DNA, 15 bp, Homo sapiens
gaggtgacttcaagg

SEQ ID NO: 592190 - DNA, 15 bp, Homo sapiens
aggtgacttcaaggg

SEQ ID NO: 592191 - DNA, 15 bp, Homo sapiens
ggtgacttcaagggc

SEQ ID NO: 592192 - DNA, 15 bp, Homo sapiens
gtgacttcaagggct

SEQ ID NO: 592193 - DNA, 15 bp, Homo sapiens
tgacttcaagggctt

SEQ ID NO: 592194 - DNA, 15 bp, Homo sapiens
gacttcaagggcttg

SEQ ID NO: 592195 - DNA, 15 bp, Homo sapiens
acttcaagggcttgc

SEQ ID NO: 592196 - DNA, 15 bp, Homo sapiens
cttcaagggcttgca

SEQ ID NO: 592197 - DNA, 15 bp, Homo sapiens
ttcaagggcttgcat

SEQ ID NO: 592198 - DNA, 15 bp, Homo sapiens
tcaagggcttgcatc

SEQ ID NO: 592199 - DNA, 15 bp, Homo sapiens
caagggcttgcatct

SEQ ID NO: 592200 - DNA, 15 bp, Homo sapiens
aagggcttgcatctg

SEQ ID NO: 592201 - DNA, 15 bp, Homo sapiens
agggcttgcatctgt

SEQ ID NO: 592202 - DNA, 15 bp, Homo sapiens
gggcttgcatctgtg

SEQ ID NO: 592203 - DNA, 15 bp, Homo sapiens
ggcttgcatctgtgc

SEQ ID NO: 592204 - DNA, 15 bp, Homo sapiens
gcttgcatctgtgca

SEQ ID NO: 592205 - DNA, 15 bp, Homo sapiens
cttgcatctgtgcac

SEQ ID NO: 592206 - DNA, 15 bp, Homo sapiens
ttgcatctgtgcacc

SEQ ID NO: 592207 - DNA, 15 bp, Homo sapiens
tgcatctgtgcaccc

SEQ ID NO: 592208 - DNA, 15 bp, Homo sapiens
gcatctgtgcaccca

SEQ ID NO: 592209 - DNA, 15 bp, Homo sapiens
catctgtgcacccag

SEQ ID NO: 592210 - DNA, 15 bp, Homo sapiens
atctgtgcacccagc

SEQ ID NO: 592211 - DNA, 15 bp, Homo sapiens
tctgtgcacccagca

SEQ ID NO: 592212 - DNA, 15 bp, Homo sapiens
ctgtgcacccagcat

SEQ ID NO: 592213 - DNA, 15 bp, Homo sapiens
tgtgcacccagcatt

SEQ ID NO: 592214 - DNA, 15 bp, Homo sapiens
gtgcacccagcattg

SEQ ID NO: 592215 - DNA, 15 bp, Homo sapiens
tgcacccagcattgc

SEQ ID NO: 592216 - DNA, 15 bp, Homo sapiens
gcacccagcattgct

SEQ ID NO: 592217 - DNA, 15 bp, Homo sapiens
cacccagcattgcta

SEQ ID NO: 592218 - DNA, 15 bp, Homo sapiens
acccagcattgctag

SEQ ID NO: 592219 - DNA, 15 bp, Homo sapiens
cccagcattgctagg

SEQ ID NO: 592220 - DNA, 15 bp, Homo sapiens
ccagcattgctaggt

SEQ ID NO: 592221 - DNA, 15 bp, Homo sapiens
cagcattgctaggta

SEQ ID NO: 592222 - DNA, 15 bp, Homo sapiens
agcattgctaggtac

SEQ ID NO: 592223 - DNA, 15 bp, Homo sapiens
gcattgctaggtaca

SEQ ID NO: 592224 - DNA, 15 bp, Homo sapiens
cattgctaggtacaa

SEQ ID NO: 592225 - DNA, 15 bp, Homo sapiens
attgctaggtacaat

SEQ ID NO: 592226 - DNA, 15 bp, Homo sapiens
ttgctaggtacaatg

SEQ ID NO: 592227 - DNA, 15 bp, Homo sapiens
tgctaggtacaatga

SEQ ID NO: 592228 - DNA, 15 bp, Homo sapiens
gctaggtacaatgag

SEQ ID NO: 592229 - DNA, 15 bp, Homo sapiens
ctaggtacaatgagg

SEQ ID NO: 592230 - DNA, 15 bp, Homo sapiens
taggtacaatgagga

SEQ ID NO: 592231 - DNA, 15 bp, Homo sapiens
aggtacaatgaggag

SEQ ID NO: 592232 - DNA, 15 bp, Homo sapiens
ggtacaatgaggagt

SEQ ID NO: 592233 - DNA, 15 bp, Homo sapiens
gtacaatgaggagta

SEQ ID NO: 592234 - DNA, 15 bp, Homo sapiens
tacaatgaggagtat

SEQ ID NO: 592235 - DNA, 15 bp, Homo sapiens
acaatgaggagtata

SEQ ID NO: 592236 - DNA, 15 bp, Homo sapiens
caatgaggagtataa

SEQ ID NO: 592237 - DNA, 15 bp, Homo sapiens
aatgaggagtataat

SEQ ID NO: 592238 - DNA, 15 bp, Homo sapiens
atgaggagtataata

SEQ ID NO: 592239 - DNA, 15 bp, Homo sapiens
tgaggagtataataa

SEQ ID NO: 592240 - DNA, 15 bp, Homo sapiens
gaggagtataataaa

SEQ ID NO: 592241 - DNA, 15 bp, Homo sapiens
aggagtataataaaa

SEQ ID NO: 592242 - DNA, 15 bp, Homo sapiens
ggagtataataaaag

SEQ ID NO: 592243 - DNA, 15 bp, Homo sapiens
gagtataataaaagc

SEQ ID NO: 592244 - DNA, 15 bp, Homo sapiens
agtataataaaagca

SEQ ID NO: 592245 - DNA, 15 bp, Homo sapiens
gtataataaaagcag

SEQ ID NO: 592246 - DNA, 15 bp, Homo sapiens
tataataaaagcagg

SEQ ID NO: 592247 - DNA, 15 bp, Homo sapiens
ataataaaagcagga

SEQ ID NO: 592248 - DNA, 15 bp, Homo sapiens
taataaaagcaggag

SEQ ID NO: 592249 - DNA, 15 bp, Homo sapiens
aataaaagcaggagc

SEQ ID NO: 592250 - DNA, 15 bp, Homo sapiens
ataaaagcaggagcc

SEQ ID NO: 592251 - DNA, 15 bp, Homo sapiens
taaaagcaggagcca

SEQ ID NO: 592252 - DNA, 15 bp, Homo sapiens
aaaagcaggagccat

SEQ ID NO: 592253 - DNA, 15 bp, Homo sapiens
aaagcaggagccata

SEQ ID NO: 592254 - DNA, 15 bp, Homo sapiens
aagcaggagccatag

SEQ ID NO: 592255 - DNA, 15 bp, Homo sapiens
agcaggagccatagc

SEQ ID NO: 592256 - DNA, 15 bp, Homo sapiens
gcaggagccatagcc

SEQ ID NO: 592257 - DNA, 15 bp, Homo sapiens
caggagccatagccc

SEQ ID NO: 592258 - DNA, 15 bp, Homo sapiens
aggagccatagcccc

SEQ ID NO: 592259 - DNA, 15 bp, Homo sapiens
ggagccatagccccc

SEQ ID NO: 592260 - DNA, 15 bp, Homo sapiens
gagccatagccccca

SEQ ID NO: 592261 - DNA, 15 bp, Homo sapiens
agccatagcccccaa

SEQ ID NO: 592262 - DNA, 15 bp, Homo sapiens
gccatagcccccaac

SEQ ID NO: 592263 - DNA, 15 bp, Homo sapiens
ccatagcccccaact

SEQ ID NO: 592264 - DNA, 15 bp, Homo sapiens
catagcccccaactc

SEQ ID NO: 592265 - DNA, 15 bp, Homo sapiens
atagcccccaactct

SEQ ID NO: 592266 - DNA, 15 bp, Homo sapiens
tagcccccaactctc

SEQ ID NO: 592267 - DNA, 15 bp, Homo sapiens
agcccccaactctca

SEQ ID NO: 592268 - DNA, 15 bp, Homo sapiens
gcccccaactctcaa

SEQ ID NO: 592269 - DNA, 15 bp, Homo sapiens
cccccaactctcaag

SEQ ID NO: 592270 - DNA, 15 bp, Homo sapiens
ccccaactctcaaga

SEQ ID NO: 592271 - DNA, 15 bp, Homo sapiens
cccaactctcaagag

SEQ ID NO: 592272 - DNA, 15 bp, Homo sapiens
ccaactctcaagaga

SEQ ID NO: 592273 - DNA, 15 bp, Homo sapiens
caactctcaagagat

SEQ ID NO: 592274 - DNA, 15 bp, Homo sapiens
aactctcaagagatc

SEQ ID NO: 592275 - DNA, 15 bp, Homo sapiens
actctcaagagatct

SEQ ID NO: 592276 - DNA, 15 bp, Homo sapiens
ctctcaagagatctc

SEQ ID NO: 592277 - DNA, 15 bp, Homo sapiens
tctcaagagatctcc

SEQ ID NO: 592278 - DNA, 15 bp, Homo sapiens
ctcaagagatctccc

SEQ ID NO: 592279 - DNA, 15 bp, Homo sapiens
tcaagagatctccca

SEQ ID NO: 592280 - DNA, 15 bp, Homo sapiens
caagagatctcccat

SEQ ID NO: 592281 - DNA, 15 bp, Homo sapiens
aagagatctcccatg

SEQ ID NO: 592282 - DNA, 15 bp, Homo sapiens
agagatctcccatgt

SEQ ID NO: 592283 - DNA, 15 bp, Homo sapiens
gagatctcccatgtg

SEQ ID NO: 592284 - DNA, 15 bp, Homo sapiens
agatctcccatgtgt

SEQ ID NO: 592285 - DNA, 15 bp, Homo sapiens
gatctcccatgtgtg

SEQ ID NO: 592286 - DNA, 15 bp, Homo sapiens
atctcccatgtgtgt

SEQ ID NO: 592287 - DNA, 15 bp, Homo sapiens
tctcccatgtgtgta

SEQ ID NO: 592288 - DNA, 15 bp, Homo sapiens
ctcccatgtgtgtat

SEQ ID NO: 592289 - DNA, 15 bp, Homo sapiens
tcccatgtgtgtatg

SEQ ID NO: 592290 - DNA, 15 bp, Homo sapiens
cccatgtgtgtatgt

SEQ ID NO: 592291 - DNA, 15 bp, Homo sapiens
ccatgtgtgtatgtc

SEQ ID NO: 592292 - DNA, 15 bp, Homo sapiens
catgtgtgtatgtct

SEQ ID NO: 592293 - DNA, 15 bp, Homo sapiens
atgtgtgtatgtctg

SEQ ID NO: 592294 - DNA, 15 bp, Homo sapiens
tgtgtgtatgtctgc

SEQ ID NO: 592295 - DNA, 15 bp, Homo sapiens
gtgtgtatgtctgca

SEQ ID NO: 592296 - DNA, 15 bp, Homo sapiens
tgtgtatgtctgcat

SEQ ID NO: 592297 - DNA, 15 bp, Homo sapiens
gtgtatgtctgcata

SEQ ID NO: 592298 - DNA, 15 bp, Homo sapiens
tgtatgtctgcatat

SEQ ID NO: 592299 - DNA, 15 bp, Homo sapiens
gtatgtctgcatatg

SEQ ID NO: 592300 - DNA, 15 bp, Homo sapiens
tatgtctgcatatgc

SEQ ID NO: 592301 - DNA, 15 bp, Homo sapiens
atgtctgcatatgcg

SEQ ID NO: 592302 - DNA, 15 bp, Homo sapiens
tgtctgcatatgcgt

SEQ ID NO: 592303 - DNA, 15 bp, Homo sapiens
gtctgcatatgcgtg

SEQ ID NO: 592304 - DNA, 15 bp, Homo sapiens
tctgcatatgcgtgc

SEQ ID NO: 592305 - DNA, 15 bp, Homo sapiens
ctgcatatgcgtgcg

SEQ ID NO: 592306 - DNA, 15 bp, Homo sapiens
tgcatatgcgtgcgt

SEQ ID NO: 592307 - DNA, 15 bp, Homo sapiens
gcatatgcgtgcgtg

SEQ ID NO: 592308 - DNA, 15 bp, Homo sapiens
catatgcgtgcgtgt

SEQ ID NO: 592309 - DNA, 15 bp, Homo sapiens
atatgcgtgcgtgtg

SEQ ID NO: 592310 - DNA, 15 bp, Homo sapiens
tatgcgtgcgtgtgc

SEQ ID NO: 592311 - DNA, 15 bp, Homo sapiens
atgcgtgcgtgtgca

SEQ ID NO: 592312 - DNA, 15 bp, Homo sapiens
tgcgtgcgtgtgcat

SEQ ID NO: 592313 - DNA, 15 bp, Homo sapiens
gcgtgcgtgtgcatg

SEQ ID NO: 592314 - DNA, 15 bp, Homo sapiens
cgtgcgtgtgcatgt

SEQ ID NO: 592315 - DNA, 15 bp, Homo sapiens
gtgcgtgtgcatgtg

SEQ ID NO: 592316 - DNA, 15 bp, Homo sapiens
tgcgtgtgcatgtgt

SEQ ID NO: 592317 - DNA, 15 bp, Homo sapiens
gcgtgtgcatgtgtg

SEQ ID NO: 592318 - DNA, 15 bp, Homo sapiens
cgtgtgcatgtgtgc

SEQ ID NO: 592319 - DNA, 15 bp, Homo sapiens
gtgtgcatgtgtgcg

SEQ ID NO: 592320 - DNA, 15 bp, Homo sapiens
tgtgcatgtgtgcgc

SEQ ID NO: 592321 - DNA, 15 bp, Homo sapiens
gtgcatgtgtgcgca

SEQ ID NO: 592322 - DNA, 15 bp, Homo sapiens
tgcatgtgtgcgcat

SEQ ID NO: 592323 - DNA, 15 bp, Homo sapiens
gcatgtgtgcgcatg

SEQ ID NO: 592324 - DNA, 15 bp, Homo sapiens
catgtgtgcgcatgt

SEQ ID NO: 592325 - DNA, 15 bp, Homo sapiens
atgtgtgcgcatgtg

SEQ ID NO: 592326 - DNA, 15 bp, Homo sapiens
tgtgtgcgcatgtgt

SEQ ID NO: 592327 - DNA, 15 bp, Homo sapiens
gtgtgcgcatgtgtg

SEQ ID NO: 592328 - DNA, 15 bp, Homo sapiens
tgtgcgcatgtgtgc

SEQ ID NO: 592329 - DNA, 15 bp, Homo sapiens
gtgcgcatgtgtgca

SEQ ID NO: 592330 - DNA, 15 bp, Homo sapiens
tgcgcatgtgtgcat

SEQ ID NO: 592331 - DNA, 15 bp, Homo sapiens
gcgcatgtgtgcatg

SEQ ID NO: 592332 - DNA, 15 bp, Homo sapiens
cgcatgtgtgcatgt

SEQ ID NO: 592333 - DNA, 15 bp, Homo sapiens
gcatgtgtgcatgtg

SEQ ID NO: 592334 - DNA, 15 bp, Homo sapiens
catgtgtgcatgtgt

SEQ ID NO: 592335 - DNA, 15 bp, Homo sapiens
atgtgtgcatgtgtg

SEQ ID NO: 592336 - DNA, 15 bp, Homo sapiens
tgtgtgcatgtgtgt

SEQ ID NO: 592337 - DNA, 15 bp, Homo sapiens
gtgtgcatgtgtgtg

SEQ ID NO: 592338 - DNA, 15 bp, Homo sapiens
tgtgcatgtgtgtgt

SEQ ID NO: 592339 - DNA, 15 bp, Homo sapiens
gtgcatgtgtgtgtg

SEQ ID NO: 592340 - DNA, 15 bp, Homo sapiens
tgcatgtgtgtgtgc

SEQ ID NO: 592341 - DNA, 15 bp, Homo sapiens
gcatgtgtgtgtgca

SEQ ID NO: 592342 - DNA, 15 bp, Homo sapiens
catgtgtgtgtgcat

SEQ ID NO: 592343 - DNA, 15 bp, Homo sapiens
atgtgtgtgtgcatg

SEQ ID NO: 592344 - DNA, 15 bp, Homo sapiens
tgtgtgtgtgcatgt

SEQ ID NO: 592345 - DNA, 15 bp, Homo sapiens
gtgtgtgtgcatgtg

SEQ ID NO: 592346 - DNA, 15 bp, Homo sapiens
tgtgtgtgcatgtgt

SEQ ID NO: 592347 - DNA, 15 bp, Homo sapiens
gtgtgtgcatgtgtg

SEQ ID NO: 592348 - DNA, 15 bp, Homo sapiens
tgtgcatgtgtgtgc

SEQ ID NO: 592349 - DNA, 15 bp, Homo sapiens
gtgcatgtgtgtgca

SEQ ID NO: 592350 - DNA, 15 bp, Homo sapiens
tgcatgtgtgtgcat

SEQ ID NO: 592351 - DNA, 15 bp, Homo sapiens
gcatgtgtgtgcatg

SEQ ID NO: 592352 - DNA, 15 bp, Homo sapiens
catgtgtgtgcatgc

SEQ ID NO: 592353 - DNA, 15 bp, Homo sapiens
atgtgtgtgcatgcg

SEQ ID NO: 592354 - DNA, 15 bp, Homo sapiens
tgtgtgtgcatgcgt

SEQ ID NO: 592355 - DNA, 15 bp, Homo sapiens
gtgtgtgcatgcgtg

SEQ ID NO: 592356 - DNA, 15 bp, Homo sapiens
tgtgtgcatgcgtgt

SEQ ID NO: 592357 - DNA, 15 bp, Homo sapiens
gtgtgcatgcgtgtg

SEQ ID NO: 592358 - DNA, 15 bp, Homo sapiens
tgtgcatgcgtgtgt

SEQ ID NO: 592359 - DNA, 15 bp, Homo sapiens
gtgcatgcgtgtgtg

SEQ ID NO: 592360 - DNA, 15 bp, Homo sapiens
tgcatgcgtgtgtgt

SEQ ID NO: 592361 - DNA, 15 bp, Homo sapiens
gcatgcgtgtgtgtg

SEQ ID NO: 592362 - DNA, 15 bp, Homo sapiens
catgcgtgtgtgtgt

SEQ ID NO: 592363 - DNA, 15 bp, Homo sapiens
atgcgtgtgtgtgtg

SEQ ID NO: 592364 - DNA, 15 bp, Homo sapiens
tgcgtgtgtgtgtgc

SEQ ID NO: 592365 - DNA, 15 bp, Homo sapiens
gcgtgtgtgtgtgcg

SEQ ID NO: 592366 - DNA, 15 bp, Homo sapiens
cgtgtgtgtgtgcgt

SEQ ID NO: 592367 - DNA, 15 bp, Homo sapiens
gtgtgtgtgtgcgtg

SEQ ID NO: 592368 - DNA, 15 bp, Homo sapiens
tgtgtgtgtgcgtgt

SEQ ID NO: 592369 - DNA, 15 bp, Homo sapiens
gtgtgtgtgcgtgtg

SEQ ID NO: 592370 - DNA, 15 bp, Homo sapiens
tgtgtgtgcgtgtgt

SEQ ID NO: 592371 - DNA, 15 bp, Homo sapiens
gtgtgtgcgtgtgtt

SEQ ID NO: 592372 - DNA, 15 bp, Homo sapiens
tgtgtgcgtgtgttg

SEQ ID NO: 592373 - DNA, 15 bp, Homo sapiens
gtgtgcgtgtgttgg

SEQ ID NO: 592374 - DNA, 15 bp, Homo sapiens
tgtgcgtgtgttggg

SEQ ID NO: 592375 - DNA, 15 bp, Homo sapiens
gtgcgtgtgttgggg

SEQ ID NO: 592376 - DNA, 15 bp, Homo sapiens
tgcgtgtgttgggga

SEQ ID NO: 592377 - DNA, 15 bp, Homo sapiens
gcgtgtgttggggat

SEQ ID NO: 592378 - DNA, 15 bp, Homo sapiens
cgtgtgttggggatg

SEQ ID NO: 592379 - DNA, 15 bp, Homo sapiens
gtgtgttggggatgg

SEQ ID NO: 592380 - DNA, 15 bp, Homo sapiens
tgtgttggggatggt

SEQ ID NO: 592381 - DNA, 15 bp, Homo sapiens
gtgttggggatggtg

SEQ ID NO: 592382 - DNA, 15 bp, Homo sapiens
tgttggggatggtgt

SEQ ID NO: 592383 - DNA, 15 bp, Homo sapiens
gttggggatggtgtt

SEQ ID NO: 592384 - DNA, 15 bp, Homo sapiens
ttggggatggtgttg

SEQ ID NO: 592385 - DNA, 15 bp, Homo sapiens
tggggatggtgttgg

SEQ ID NO: 592386 - DNA, 15 bp, Homo sapiens
ggggatggtgttggt

SEQ ID NO: 592387 - DNA, 15 bp, Homo sapiens
gggatggtgttggtg

SEQ ID NO: 592388 - DNA, 15 bp, Homo sapiens
ggatggtgttggtgg

SEQ ID NO: 592389 - DNA, 15 bp, Homo sapiens
gatggtgttggtgga

SEQ ID NO: 592390 - DNA, 15 bp, Homo sapiens
atggtgttggtggag

SEQ ID NO: 592391 - DNA, 15 bp, Homo sapiens
tggtgttggtggagt

SEQ ID NO: 592392 - DNA, 15 bp, Homo sapiens
ggtgttggtggagtg

SEQ ID NO: 592393 - DNA, 15 bp, Homo sapiens
gtgttggtggagtga

SEQ ID NO: 592394 - DNA, 15 bp, Homo sapiens
tgttggtggagtgag

SEQ ID NO: 592395 - DNA, 15 bp, Homo sapiens
gttggtggagtgaga

SEQ ID NO: 592396 - DNA, 15 bp, Homo sapiens
ttggtggagtgagag

SEQ ID NO: 592397 - DNA, 15 bp, Homo sapiens
tggtggagtgagagt

SEQ ID NO: 592398 - DNA, 15 bp, Homo sapiens
ggtggagtgagagtg

SEQ ID NO: 592399 - DNA, 15 bp, Homo sapiens
gtggagtgagagtgt

SEQ ID NO: 592400 - DNA, 15 bp, Homo sapiens
tggagtgagagtgta

SEQ ID NO: 592401 - DNA, 15 bp, Homo sapiens
ggagtgagagtgtac

SEQ ID NO: 592402 - DNA, 15 bp, Homo sapiens
gagtgagagtgtaca

SEQ ID NO: 592403 - DNA, 15 bp, Homo sapiens
agtgagagtgtacaa

SEQ ID NO: 592404 - DNA, 15 bp, Homo sapiens
gtgagagtgtacaag

SEQ ID NO: 592405 - DNA, 15 bp, Homo sapiens
tgagagtgtacaagg

SEQ ID NO: 592406 - DNA, 15 bp, Homo sapiens
gagagtgtacaaggc

SEQ ID NO: 592407 - DNA, 15 bp, Homo sapiens
agagtgtacaaggct

SEQ ID NO: 592408 - DNA, 15 bp, Homo sapiens
gagtgtacaaggctg

SEQ ID NO: 592409 - DNA, 15 bp, Homo sapiens
agtgtacaaggctgt

SEQ ID NO: 592410 - DNA, 15 bp, Homo sapiens
gtgtacaaggctgtg

SEQ ID NO: 592411 - DNA, 15 bp, Homo sapiens
tgtacaaggctgtgt

SEQ ID NO: 592412 - DNA, 15 bp, Homo sapiens
gtacaaggctgtgta

SEQ ID NO: 592413 - DNA, 15 bp, Homo sapiens
tacaaggctgtgtat

SEQ ID NO: 592414 - DNA, 15 bp, Homo sapiens
acaaggctgtgtatg

SEQ ID NO: 592415 - DNA, 15 bp, Homo sapiens
caaggctgtgtatga

SEQ ID NO: 592416 - DNA, 15 bp, Homo sapiens
aaggctgtgtatgaa

SEQ ID NO: 592417 - DNA, 15 bp, Homo sapiens
aggctgtgtatgaag

SEQ ID NO: 592418 - DNA, 15 bp, Homo sapiens
ggctgtgtatgaagg

SEQ ID NO: 592419 - DNA, 15 bp, Homo sapiens
gctgtgtatgaaggg

SEQ ID NO: 592420 - DNA, 15 bp, Homo sapiens
ctgtgtatgaagggg

SEQ ID NO: 592421 - DNA, 15 bp, Homo sapiens
tgtgtatgaaggggt

SEQ ID NO: 592422 - DNA, 15 bp, Homo sapiens
gtgtatgaaggggta

SEQ ID NO: 592423 - DNA, 15 bp, Homo sapiens
tgtatgaaggggtaa

SEQ ID NO: 592424 - DNA, 15 bp, Homo sapiens
gtatgaaggggtaat

SEQ ID NO: 592425 - DNA, 15 bp, Homo sapiens
tatgaaggggtaatt

SEQ ID NO: 592426 - DNA, 15 bp, Homo sapiens
atgaaggggtaattg

SEQ ID NO: 592427 - DNA, 15 bp, Homo sapiens
tgaaggggtaattgg

SEQ ID NO: 592428 - DNA, 15 bp, Homo sapiens
gaaggggtaattggg

SEQ ID NO: 592429 - DNA, 15 bp, Homo sapiens
aaggggtaattggga

SEQ ID NO: 592430 - DNA, 15 bp, Homo sapiens
aggggtaattgggaa

SEQ ID NO: 592431 - DNA, 15 bp, Homo sapiens
ggggtaattgggaaa

SEQ ID NO: 592432 - DNA, 15 bp, Homo sapiens
gggtaattgggaaaa

SEQ ID NO: 592433 - DNA, 15 bp, Homo sapiens
ggtaattgggaaaag

SEQ ID NO: 592434 - DNA, 15 bp, Homo sapiens
gtaattgggaaaaga

SEQ ID NO: 592435 - DNA, 15 bp, Homo sapiens
taattgggaaaagaa

SEQ ID NO: 592436 - DNA, 15 bp, Homo sapiens
aattgggaaaagaac

SEQ ID NO: 592437 - DNA, 15 bp, Homo sapiens
attgggaaaagaaca

SEQ ID NO: 592438 - DNA, 15 bp, Homo sapiens
ttgggaaaagaacaa

SEQ ID NO: 592439 - DNA, 15 bp, Homo sapiens
tgggaaaagaacaat

SEQ ID NO: 592440 - DNA, 15 bp, Homo sapiens
gggaaaagaacaatg

SEQ ID NO: 592441 - DNA, 15 bp, Homo sapiens
ggaaaagaacaatgg

SEQ ID NO: 592442 - DNA, 15 bp, Homo sapiens
gaaaagaacaatgga

SEQ ID NO: 592443 - DNA, 15 bp, Homo sapiens
aaaagaacaatggag

SEQ ID NO: 592444 - DNA, 15 bp, Homo sapiens
aaagaacaatggagc

SEQ ID NO: 592445 - DNA, 15 bp, Homo sapiens
aagaacaatggagct

SEQ ID NO: 592446 - DNA, 15 bp, Homo sapiens
agaacaatggagctg

SEQ ID NO: 592447 - DNA, 15 bp, Homo sapiens
gaacaatggagctgg

SEQ ID NO: 592448 - DNA, 15 bp, Homo sapiens
aacaatggagctggc

SEQ ID NO: 592449 - DNA, 15 bp, Homo sapiens
acaatggagctggca

SEQ ID NO: 592450 - DNA, 15 bp, Homo sapiens
caatggagctggcac

SEQ ID NO: 592451 - DNA, 15 bp, Homo sapiens
aatggagctggcacc

SEQ ID NO: 592452 - DNA, 15 bp, Homo sapiens
atggagctggcaccc

SEQ ID NO: 592453 - DNA, 15 bp, Homo sapiens
tggagctggcaccca

SEQ ID NO: 592454 - DNA, 15 bp, Homo sapiens
ggagctggcacccag

SEQ ID NO: 592455 - DNA, 15 bp, Homo sapiens
gagctggcacccagg

SEQ ID NO: 592456 - DNA, 15 bp, Homo sapiens
agctggcacccaggg

SEQ ID NO: 592457 - DNA, 15 bp, Homo sapiens
gctggcacccaggga

SEQ ID NO: 592458 - DNA, 15 bp, Homo sapiens
ctggcacccagggac

SEQ ID NO: 592459 - DNA, 15 bp, Homo sapiens
tggcacccagggaca

SEQ ID NO: 592460 - DNA, 15 bp, Homo sapiens
ggcacccagggacag

SEQ ID NO: 592461 - DNA, 15 bp, Homo sapiens
gcacccagggacagg

SEQ ID NO: 592462 - DNA, 15 bp, Homo sapiens
cacccagggacagga

SEQ ID NO: 592463 - DNA, 15 bp, Homo sapiens
acccagggacaggag

SEQ ID NO: 592464 - DNA, 15 bp, Homo sapiens
cccagggacaggagg

SEQ ID NO: 592465 - DNA, 15 bp, Homo sapiens
ccagggacaggagga

SEQ ID NO: 592466 - DNA, 15 bp, Homo sapiens
cagggacaggaggaa

SEQ ID NO: 592467 - DNA, 15 bp, Homo sapiens
agggacaggaggaaa

SEQ ID NO: 592468 - DNA, 15 bp, Homo sapiens
gggacaggaggaaaa

SEQ ID NO: 592469 - DNA, 15 bp, Homo sapiens
ggacaggaggaaaag

SEQ ID NO: 592470 - DNA, 15 bp, Homo sapiens
gacaggaggaaaagc

SEQ ID NO: 592471 - DNA, 15 bp, Homo sapiens
acaggaggaaaagca

SEQ ID NO: 592472 - DNA, 15 bp, Homo sapiens
caggaggaaaagcag

SEQ ID NO: 592473 - DNA, 15 bp, Homo sapiens
aggaggaaaagcagg

SEQ ID NO: 592474 - DNA, 15 bp, Homo sapiens
ggaggaaaagcagga

SEQ ID NO: 592475 - DNA, 15 bp, Homo sapiens
gaggaaaagcaggag

SEQ ID NO: 592476 - DNA, 15 bp, Homo sapiens
aggaaaagcaggagg

SEQ ID NO: 592477 - DNA, 15 bp, Homo sapiens
ggaaaagcaggaggg

SEQ ID NO: 592478 - DNA, 15 bp, Homo sapiens
gaaaagcaggagggc

SEQ ID NO: 592479 - DNA, 15 bp, Homo sapiens
aaaagcaggagggct

SEQ ID NO: 592480 - DNA, 15 bp, Homo sapiens
aaagcaggagggctg

SEQ ID NO: 592481 - DNA, 15 bp, Homo sapiens
aagcaggagggctgg

SEQ ID NO: 592482 - DNA, 15 bp, Homo sapiens
agcaggagggctggg

SEQ ID NO: 592483 - DNA, 15 bp, Homo sapiens
gcaggagggctgggt

SEQ ID NO: 592484 - DNA, 15 bp, Homo sapiens
caggagggctgggtt

SEQ ID NO: 592485 - DNA, 15 bp, Homo sapiens
aggagggctgggttt

SEQ ID NO: 592486 - DNA, 15 bp, Homo sapiens
ggagggctgggtttg

SEQ ID NO: 592487 - DNA, 15 bp, Homo sapiens
gagggctgggtttgg

SEQ ID NO: 592488 - DNA, 15 bp, Homo sapiens
agggctgggtttgga

SEQ ID NO: 592489 - DNA, 15 bp, Homo sapiens
gggctgggtttggaa

SEQ ID NO: 592490 - DNA, 15 bp, Homo sapiens
ggctgggtttggaag

SEQ ID NO: 592491 - DNA, 15 bp, Homo sapiens
gctgggtttggaaga

SEQ ID NO: 592492 - DNA, 15 bp, Homo sapiens
ctgggtttggaagac

SEQ ID NO: 592493 - DNA, 15 bp, Homo sapiens
tgggtttggaagaca

SEQ ID NO: 592494 - DNA, 15 bp, Homo sapiens
gggtttggaagacag

SEQ ID NO: 592495 - DNA, 15 bp, Homo sapiens
ggtttggaagacagc

SEQ ID NO: 592496 - DNA, 15 bp, Homo sapiens
gtttggaagacagcc

SEQ ID NO: 592497 - DNA, 15 bp, Homo sapiens
tttggaagacagccg

SEQ ID NO: 592498 - DNA, 15 bp, Homo sapiens
ttggaagacagccgg

SEQ ID NO: 592499 - DNA, 15 bp, Homo sapiens
tggaagacagccgga

SEQ ID NO: 592500 - DNA, 15 bp, Homo sapiens
ggaagacagccggat

SEQ ID NO: 592501 - DNA, 15 bp, Homo sapiens
gaagacagccggatt

SEQ ID NO: 592502 - DNA, 15 bp, Homo sapiens
aagacagccggattt

SEQ ID NO: 592503 - DNA, 15 bp, Homo sapiens
agacagccggattta

SEQ ID NO: 592504 - DNA, 15 bp, Homo sapiens
gacagccggatttat

SEQ ID NO: 592505 - DNA, 15 bp, Homo sapiens
acagccggatttatg

SEQ ID NO: 592506 - DNA, 15 bp, Homo sapiens
cagccggatttatgt

SEQ ID NO: 592507 - DNA, 15 bp, Homo sapiens
agccggatttatgtt

SEQ ID NO: 592508 - DNA, 15 bp, Homo sapiens
gccggatttatgttt

SEQ ID NO: 592509 - DNA, 15 bp, Homo sapiens
ccggatttatgtttt

SEQ ID NO: 592510 - DNA, 15 bp, Homo sapiens
cggatttatgttttt

SEQ ID NO: 592511 - DNA, 15 bp, Homo sapiens
ggatttatgtttttg

SEQ ID NO: 592512 - DNA, 15 bp, Homo sapiens
gatttatgtttttga

SEQ ID NO: 592513 - DNA, 15 bp, Homo sapiens
atttatgtttttgaa

SEQ ID NO: 592514 - DNA, 15 bp, Homo sapiens
tttatgtttttgaag

SEQ ID NO: 592515 - DNA, 15 bp, Homo sapiens
ttatgtttttgaaga

SEQ ID NO: 592516 - DNA, 15 bp, Homo sapiens
tatgtttttgaagag

SEQ ID NO: 592517 - DNA, 15 bp, Homo sapiens
atgtttttgaagagg

SEQ ID NO: 592518 - DNA, 15 bp, Homo sapiens
tgtttttgaagaggg

SEQ ID NO: 592519 - DNA, 15 bp, Homo sapiens
gtttttgaagaggga

SEQ ID NO: 592520 - DNA, 15 bp, Homo sapiens
tttttgaagagggaa

SEQ ID NO: 592521 - DNA, 15 bp, Homo sapiens
ttttgaagagggaag

SEQ ID NO: 592522 - DNA, 15 bp, Homo sapiens
tttgaagagggaaga

SEQ ID NO: 592523 - DNA, 15 bp, Homo sapiens
ttgaagagggaagac

SEQ ID NO: 592524 - DNA, 15 bp, Homo sapiens
tgaagagggaagact

SEQ ID NO: 592525 - DNA, 15 bp, Homo sapiens
gaagagggaagacta

SEQ ID NO: 592526 - DNA, 15 bp, Homo sapiens
aagagggaagactag

SEQ ID NO: 592527 - DNA, 15 bp, Homo sapiens
agagggaagactaga

SEQ ID NO: 592528 - DNA, 15 bp, Homo sapiens
gagggaagactagaa

SEQ ID NO: 592529 - DNA, 15 bp, Homo sapiens
agggaagactagaat

SEQ ID NO: 592530 - DNA, 15 bp, Homo sapiens
gggaagactagaata

SEQ ID NO: 592531 - DNA, 15 bp, Homo sapiens
ggaagactagaatat

SEQ ID NO: 592532 - DNA, 15 bp, Homo sapiens
gaagactagaatata

SEQ ID NO: 592533 - DNA, 15 bp, Homo sapiens
aagactagaatataa

SEQ ID NO: 592534 - DNA, 15 bp, Homo sapiens
agactagaatataag

SEQ ID NO: 592535 - DNA, 15 bp, Homo sapiens
gactagaatataagg

SEQ ID NO: 592536 - DNA, 15 bp, Homo sapiens
actagaatataaggg

SEQ ID NO: 592537 - DNA, 15 bp, Homo sapiens
ctagaatataaggga

SEQ ID NO: 592538 - DNA, 15 bp, Homo sapiens
tagaatataagggag

SEQ ID NO: 592539 - DNA, 15 bp, Homo sapiens
agaatataagggagc

SEQ ID NO: 592540 - DNA, 15 bp, Homo sapiens
gaatataagggagca

SEQ ID NO: 592541 - DNA, 15 bp, Homo sapiens
aatataagggagcag

SEQ ID NO: 592542 - DNA, 15 bp, Homo sapiens
atataagggagcagc

SEQ ID NO: 592543 - DNA, 15 bp, Homo sapiens
tataagggagcagcc

SEQ ID NO: 592544 - DNA, 15 bp, Homo sapiens
ataagggagcagccc

SEQ ID NO: 592545 - DNA, 15 bp, Homo sapiens
taagggagcagccct

SEQ ID NO: 592546 - DNA, 15 bp, Homo sapiens
aagggagcagccctt

SEQ ID NO: 592547 - DNA, 15 bp, Homo sapiens
agggagcagcccttc

SEQ ID NO: 592548 - DNA, 15 bp, Homo sapiens
gggagcagcccttct

SEQ ID NO: 592549 - DNA, 15 bp, Homo sapiens
ggagcagcccttctc

SEQ ID NO: 592550 - DNA, 15 bp, Homo sapiens
gagcagcccttctca

SEQ ID NO: 592551 - DNA, 15 bp, Homo sapiens
agcagcccttctcag

SEQ ID NO: 592552 - DNA, 15 bp, Homo sapiens
gcagcccttctcaga

SEQ ID NO: 592553 - DNA, 15 bp, Homo sapiens
cagcccttctcagag

SEQ ID NO: 592554 - DNA, 15 bp, Homo sapiens
agcccttctcagagc

SEQ ID NO: 592555 - DNA, 15 bp, Homo sapiens
gcccttctcagagcc

SEQ ID NO: 592556 - DNA, 15 bp, Homo sapiens
cccttctcagagccc

SEQ ID NO: 592557 - DNA, 15 bp, Homo sapiens
ccttctcagagccct

SEQ ID NO: 592558 - DNA, 15 bp, Homo sapiens
cttctcagagccctc

SEQ ID NO: 592559 - DNA, 15 bp, Homo sapiens
ttctcagagccctcc

SEQ ID NO: 592560 - DNA, 15 bp, Homo sapiens
tctcagagccctcct

SEQ ID NO: 592561 - DNA, 15 bp, Homo sapiens
ctcagagccctcctc

SEQ ID NO: 592562 - DNA, 15 bp, Homo sapiens
tcagagccctcctcc

SEQ ID NO: 592563 - DNA, 15 bp, Homo sapiens
cagagccctcctcct

SEQ ID NO: 592564 - DNA, 15 bp, Homo sapiens
agagccctcctcctc

SEQ ID NO: 592565 - DNA, 15 bp, Homo sapiens
gagccctcctcctcc

SEQ ID NO: 592566 - DNA, 15 bp, Homo sapiens
agccctcctcctccc

SEQ ID NO: 592567 - DNA, 15 bp, Homo sapiens
gccctcctcctccct

SEQ ID NO: 592568 - DNA, 15 bp, Homo sapiens
ccctcctcctccctt

SEQ ID NO: 592569 - DNA, 15 bp, Homo sapiens
cctcctcctcccttc

SEQ ID NO: 592570 - DNA, 15 bp, Homo sapiens
ctcctcctcccttcg

SEQ ID NO: 592571 - DNA, 15 bp, Homo sapiens
tcctcctcccttcgg

SEQ ID NO: 592572 - DNA, 15 bp, Homo sapiens
cctcctcccttcggg

SEQ ID NO: 592573 - DNA, 15 bp, Homo sapiens
ctcctcccttcgggc

SEQ ID NO: 592574 - DNA, 15 bp, Homo sapiens
tcctcccttcgggcc

SEQ ID NO: 592575 - DNA, 15 bp, Homo sapiens
cctcccttcgggccc

SEQ ID NO: 592576 - DNA, 15 bp, Homo sapiens
ctcccttcgggccct

SEQ ID NO: 592577 - DNA, 15 bp, Homo sapiens
tcccttcgggccctg

SEQ ID NO: 592578 - DNA, 15 bp, Homo sapiens
cccttcgggccctgt

SEQ ID NO: 592579 - DNA, 15 bp, Homo sapiens
ccttcgggccctgtg

SEQ ID NO: 592580 - DNA, 15 bp, Homo sapiens
cttcgggccctgtgt

SEQ ID NO: 592581 - DNA, 15 bp, Homo sapiens
ttcgggccctgtgtc

SEQ ID NO: 592582 - DNA, 15 bp, Homo sapiens
tcgggccctgtgtcc

SEQ ID NO: 592583 - DNA, 15 bp, Homo sapiens
cgggccctgtgtcca

SEQ ID NO: 592584 - DNA, 15 bp, Homo sapiens
gggccctgtgtccag

SEQ ID NO: 592585 - DNA, 15 bp, Homo sapiens
ggccctgtgtccagc

SEQ ID NO: 592586 - DNA, 15 bp, Homo sapiens
gccctgtgtccagct

SEQ ID NO: 592587 - DNA, 15 bp, Homo sapiens
ccctgtgtccagctt

SEQ ID NO: 592588 - DNA, 15 bp, Homo sapiens
cctgtgtccagcttt

SEQ ID NO: 592589 - DNA, 15 bp, Homo sapiens
ctgtgtccagctttc

SEQ ID NO: 592590 - DNA, 15 bp, Homo sapiens
tgtgtccagctttcc

SEQ ID NO: 592591 - DNA, 15 bp, Homo sapiens
gtgtccagctttccc

SEQ ID NO: 592592 - DNA, 15 bp, Homo sapiens
tgtccagctttcccc

SEQ ID NO: 592593 - DNA, 15 bp, Homo sapiens
gtccagctttcccca

SEQ ID NO: 592594 - DNA, 15 bp, Homo sapiens
tccagctttccccaa

SEQ ID NO: 592595 - DNA, 15 bp, Homo sapiens
ccagctttccccaaa

SEQ ID NO: 592596 - DNA, 15 bp, Homo sapiens
cagctttccccaaag

SEQ ID NO: 592597 - DNA, 15 bp, Homo sapiens
agctttccccaaagt

SEQ ID NO: 592598 - DNA, 15 bp, Homo sapiens
gctttccccaaagtc

SEQ ID NO: 592599 - DNA, 15 bp, Homo sapiens
ctttccccaaagtcc

SEQ ID NO: 592600 - DNA, 15 bp, Homo sapiens
tttccccaaagtcct

SEQ ID NO: 592601 - DNA, 15 bp, Homo sapiens
ttccccaaagtcctt

SEQ ID NO: 592602 - DNA, 15 bp, Homo sapiens
tccccaaagtccttg

SEQ ID NO: 592603 - DNA, 15 bp, Homo sapiens
ccccaaagtccttgg

SEQ ID NO: 592604 - DNA, 15 bp, Homo sapiens
cccaaagtccttgga

SEQ ID NO: 592605 - DNA, 15 bp, Homo sapiens
ccaaagtccttggat

SEQ ID NO: 592606 - DNA, 15 bp, Homo sapiens
caaagtccttggatc

SEQ ID NO: 592607 - DNA, 15 bp, Homo sapiens
aaagtccttggatct

SEQ ID NO: 592608 - DNA, 15 bp, Homo sapiens
aagtccttggatctt

SEQ ID NO: 592609 - DNA, 15 bp, Homo sapiens
agtccttggatcttt

SEQ ID NO: 592610 - DNA, 15 bp, Homo sapiens
gtccttggatctttc

SEQ ID NO: 592611 - DNA, 15 bp, Homo sapiens
tccttggatctttcc

SEQ ID NO: 592612 - DNA, 15 bp, Homo sapiens
ccttggatctttcct

SEQ ID NO: 592613 - DNA, 15 bp, Homo sapiens
cttggatctttccta

SEQ ID NO: 592614 - DNA, 15 bp, Homo sapiens
ttggatctttcctat

SEQ ID NO: 592615 - DNA, 15 bp, Homo sapiens
tggatctttcctatg

SEQ ID NO: 592616 - DNA, 15 bp, Homo sapiens
ggatctttcctatgc

SEQ ID NO: 592617 - DNA, 15 bp, Homo sapiens
gatctttcctatgca

SEQ ID NO: 592618 - DNA, 15 bp, Homo sapiens
atctttcctatgcaa

SEQ ID NO: 592619 - DNA, 15 bp, Homo sapiens
tctttcctatgcaaa

SEQ ID NO: 592620 - DNA, 15 bp, Homo sapiens
ctttcctatgcaaag

SEQ ID NO: 592621 - DNA, 15 bp, Homo sapiens
tttcctatgcaaagg

SEQ ID NO: 592622 - DNA, 15 bp, Homo sapiens
ttcctatgcaaaggg

SEQ ID NO: 592623 - DNA, 15 bp, Homo sapiens
tcctatgcaaagggg

SEQ ID NO: 592624 - DNA, 15 bp, Homo sapiens
cctatgcaaagggga

SEQ ID NO: 592625 - DNA, 15 bp, Homo sapiens
ctatgcaaaggggag

SEQ ID NO: 592626 - DNA, 15 bp, Homo sapiens
tatgcaaaggggagt

SEQ ID NO: 592627 - DNA, 15 bp, Homo sapiens
atgcaaaggggagtg

SEQ ID NO: 592628 - DNA, 15 bp, Homo sapiens
tgcaaaggggagtga

SEQ ID NO: 592629 - DNA, 15 bp, Homo sapiens
gcaaaggggagtgac

SEQ ID NO: 592630 - DNA, 15 bp, Homo sapiens
caaaggggagtgaca

SEQ ID NO: 592631 - DNA, 15 bp, Homo sapiens
aaaggggagtgacag

SEQ ID NO: 592632 - DNA, 15 bp, Homo sapiens
aaggggagtgacagt

SEQ ID NO: 592633 - DNA, 15 bp, Homo sapiens
aggggagtgacagtg

SEQ ID NO: 592634 - DNA, 15 bp, Homo sapiens
ggggagtgacagtgg

SEQ ID NO: 592635 - DNA, 15 bp, Homo sapiens
gggagtgacagtggg

SEQ ID NO: 592636 - DNA, 15 bp, Homo sapiens
ggagtgacagtgggc

SEQ ID NO: 592637 - DNA, 15 bp, Homo sapiens
gagtgacagtgggca

SEQ ID NO: 592638 - DNA, 15 bp, Homo sapiens
agtgacagtgggcac

SEQ ID NO: 592639 - DNA, 15 bp, Homo sapiens
gtgacagtgggcacc

SEQ ID NO: 592640 - DNA, 15 bp, Homo sapiens
tgacagtgggcacca

SEQ ID NO: 592641 - DNA, 15 bp, Homo sapiens
gacagtgggcaccac

SEQ ID NO: 592642 - DNA, 15 bp, Homo sapiens
acagtgggcaccact

SEQ ID NO: 592643 - DNA, 15 bp, Homo sapiens
cagtgggcaccactc

SEQ ID NO: 592644 - DNA, 15 bp, Homo sapiens
agtgggcaccactct

SEQ ID NO: 592645 - DNA, 15 bp, Homo sapiens
gtgggcaccactctc

SEQ ID NO: 592646 - DNA, 15 bp, Homo sapiens
tgggcaccactctca

SEQ ID NO: 592647 - DNA, 15 bp, Homo sapiens
gggcaccactctcag

SEQ ID NO: 592648 - DNA, 15 bp, Homo sapiens
ggcaccactctcagg

SEQ ID NO: 592649 - DNA, 15 bp, Homo sapiens
gcaccactctcaggg

SEQ ID NO: 592650 - DNA, 15 bp, Homo sapiens
caccactctcaggga

SEQ ID NO: 592651 - DNA, 15 bp, Homo sapiens
accactctcagggaa

SEQ ID NO: 592652 - DNA, 15 bp, Homo sapiens
ccactctcagggaac

SEQ ID NO: 592653 - DNA, 15 bp, Homo sapiens
cactctcagggaacc

SEQ ID NO: 592654 - DNA, 15 bp, Homo sapiens
actctcagggaaccc

SEQ ID NO: 592655 - DNA, 15 bp, Homo sapiens
ctctcagggaaccca

SEQ ID NO: 592656 - DNA, 15 bp, Homo sapiens
tctcagggaacccat

SEQ ID NO: 592657 - DNA, 15 bp, Homo sapiens
ctcagggaacccatt

SEQ ID NO: 592658 - DNA, 15 bp, Homo sapiens
tcagggaacccatta

SEQ ID NO: 592659 - DNA, 15 bp, Homo sapiens
cagggaacccattac

SEQ ID NO: 592660 - DNA, 15 bp, Homo sapiens
agggaacccattact

SEQ ID NO: 592661 - DNA, 15 bp, Homo sapiens
gggaacccattactg

SEQ ID NO: 592662 - DNA, 15 bp, Homo sapiens
ggaacccattactgt

SEQ ID NO: 592663 - DNA, 15 bp, Homo sapiens
gaacccattactgtg

SEQ ID NO: 592664 - DNA, 15 bp, Homo sapiens
aacccattactgtga

SEQ ID NO: 592665 - DNA, 15 bp, Homo sapiens
acccattactgtgag

SEQ ID NO: 592666 - DNA, 15 bp, Homo sapiens
cccattactgtgaga

SEQ ID NO: 592667 - DNA, 15 bp, Homo sapiens
ccattactgtgagag

SEQ ID NO: 592668 - DNA, 15 bp, Homo sapiens
cattactgtgagaga

SEQ ID NO: 592669 - DNA, 15 bp, Homo sapiens
attactgtgagagaa

SEQ ID NO: 592670 - DNA, 15 bp, Homo sapiens
ttactgtgagagaag

SEQ ID NO: 592671 - DNA, 15 bp, Homo sapiens
tactgtgagagaagc

SEQ ID NO: 592672 - DNA, 15 bp, Homo sapiens
actgtgagagaagcc

SEQ ID NO: 592673 - DNA, 15 bp, Homo sapiens
ctgtgagagaagcca

SEQ ID NO: 592674 - DNA, 15 bp, Homo sapiens
tgtgagagaagccac

SEQ ID NO: 592675 - DNA, 15 bp, Homo sapiens
gtgagagaagccact

SEQ ID NO: 592676 - DNA, 15 bp, Homo sapiens
tgagagaagccactg

SEQ ID NO: 592677 - DNA, 15 bp, Homo sapiens
gagagaagccactgt

SEQ ID NO: 592678 - DNA, 15 bp, Homo sapiens
agagaagccactgtg

SEQ ID NO: 592679 - DNA, 15 bp, Homo sapiens
gagaagccactgtgc

SEQ ID NO: 592680 - DNA, 15 bp, Homo sapiens
agaagccactgtgcc

SEQ ID NO: 592681 - DNA, 15 bp, Homo sapiens
gaagccactgtgcca

SEQ ID NO: 592682 - DNA, 15 bp, Homo sapiens
aagccactgtgccac

SEQ ID NO: 592683 - DNA, 15 bp, Homo sapiens
agccactgtgccact

SEQ ID NO: 592684 - DNA, 15 bp, Homo sapiens
gccactgtgccactg

SEQ ID NO: 592685 - DNA, 15 bp, Homo sapiens
ccactgtgccactgt

SEQ ID NO: 592686 - DNA, 15 bp, Homo sapiens
cactgtgccactgtg

SEQ ID NO: 592687 - DNA, 15 bp, Homo sapiens
actgtgccactgtgt

SEQ ID NO: 592688 - DNA, 15 bp, Homo sapiens
ctgtgccactgtgtg

SEQ ID NO: 592689 - DNA, 15 bp, Homo sapiens
tgtgccactgtgtgg

SEQ ID NO: 592690 - DNA, 15 bp, Homo sapiens
gtgccactgtgtggt

SEQ ID NO: 592691 - DNA, 15 bp, Homo sapiens
tgccactgtgtggtc

SEQ ID NO: 592692 - DNA, 15 bp, Homo sapiens
gccactgtgtggtcg

SEQ ID NO: 592693 - DNA, 15 bp, Homo sapiens
ccactgtgtggtcga

SEQ ID NO: 592694 - DNA, 15 bp, Homo sapiens
cactgtgtggtcgaa

SEQ ID NO: 592695 - DNA, 15 bp, Homo sapiens
actgtgtggtcgaac

SEQ ID NO: 592696 - DNA, 15 bp, Homo sapiens
ctgtgtggtcgaact

SEQ ID NO: 592697 - DNA, 15 bp, Homo sapiens
tgtgtggtcgaactt

SEQ ID NO: 592698 - DNA, 15 bp, Homo sapiens
gtgtggtcgaacttc

SEQ ID NO: 592699 - DNA, 15 bp, Homo sapiens
tgtggtcgaacttca

SEQ ID NO: 592700 - DNA, 15 bp, Homo sapiens
gtggtcgaacttcaa

SEQ ID NO: 592701 - DNA, 15 bp, Homo sapiens
tggtcgaacttcaag

SEQ ID NO: 592702 - DNA, 15 bp, Homo sapiens
ggtcgaacttcaaga

SEQ ID NO: 592703 - DNA, 15 bp, Homo sapiens
gtcgaacttcaagac

SEQ ID NO: 592704 - DNA, 15 bp, Homo sapiens
tcgaacttcaagacc

SEQ ID NO: 592705 - DNA, 15 bp, Homo sapiens
cgaacttcaagaccg

SEQ ID NO: 592706 - DNA, 15 bp, Homo sapiens
gaacttcaagaccgg

SEQ ID NO: 592707 - DNA, 15 bp, Homo sapiens
aacttcaagaccggc

SEQ ID NO: 592708 - DNA, 15 bp, Homo sapiens
acttcaagaccggct

SEQ ID NO: 592709 - DNA, 15 bp, Homo sapiens
cttcaagaccggctt

SEQ ID NO: 592710 - DNA, 15 bp, Homo sapiens
ttcaagaccggcttc

SEQ ID NO: 592711 - DNA, 15 bp, Homo sapiens
tcaagaccggcttcc

SEQ ID NO: 592712 - DNA, 15 bp, Homo sapiens
caagaccggcttccc

SEQ ID NO: 592713 - DNA, 15 bp, Homo sapiens
aagaccggcttcccc

SEQ ID NO: 592714 - DNA, 15 bp, Homo sapiens
agaccggcttcccct

SEQ ID NO: 592715 - DNA, 15 bp, Homo sapiens
gaccggcttcccctg

SEQ ID NO: 592716 - DNA, 15 bp, Homo sapiens
accggcttcccctgc

SEQ ID NO: 592717 - DNA, 15 bp, Homo sapiens
ccggcttcccctgcc

SEQ ID NO: 592718 - DNA, 15 bp, Homo sapiens
cggcttcccctgccc

SEQ ID NO: 592719 - DNA, 15 bp, Homo sapiens
ggcttcccctgcccc

SEQ ID NO: 592720 - DNA, 15 bp, Homo sapiens
gcttcccctgcccca

SEQ ID NO: 592721 - DNA, 15 bp, Homo sapiens
cttcccctgccccag

SEQ ID NO: 592722 - DNA, 15 bp, Homo sapiens
ttcccctgccccagc

SEQ ID NO: 592723 - DNA, 15 bp, Homo sapiens
tcccctgccccagct

SEQ ID NO: 592724 - DNA, 15 bp, Homo sapiens
cccctgccccagctg

SEQ ID NO: 592725 - DNA, 15 bp, Homo sapiens
ccctgccccagctgc

SEQ ID NO: 592726 - DNA, 15 bp, Homo sapiens
cctgccccagctgca

SEQ ID NO: 592727 - DNA, 15 bp, Homo sapiens
ctgccccagctgcat

SEQ ID NO: 592728 - DNA, 15 bp, Homo sapiens
tgccccagctgcatg

SEQ ID NO: 592729 - DNA, 15 bp, Homo sapiens
gccccagctgcatgg

SEQ ID NO: 592730 - DNA, 15 bp, Homo sapiens
ccccagctgcatgga

SEQ ID NO: 592731 - DNA, 15 bp, Homo sapiens
cccagctgcatggac

SEQ ID NO: 592732 - DNA, 15 bp, Homo sapiens
ccagctgcatggaca

SEQ ID NO: 592733 - DNA, 15 bp, Homo sapiens
cagctgcatggacag

SEQ ID NO: 592734 - DNA, 15 bp, Homo sapiens
agctgcatggacagg

SEQ ID NO: 592735 - DNA, 15 bp, Homo sapiens
gctgcatggacaggc

SEQ ID NO: 592736 - DNA, 15 bp, Homo sapiens
ctgcatggacaggcc

SEQ ID NO: 592737 - DNA, 15 bp, Homo sapiens
tgcatggacaggcct

SEQ ID NO: 592738 - DNA, 15 bp, Homo sapiens
gcatggacaggcctg

SEQ ID NO: 592739 - DNA, 15 bp, Homo sapiens
catggacaggcctgt

SEQ ID NO: 592740 - DNA, 15 bp, Homo sapiens
atggacaggcctgtg

SEQ ID NO: 592741 - DNA, 15 bp, Homo sapiens
tggacaggcctgtgg

SEQ ID NO: 592742 - DNA, 15 bp, Homo sapiens
ggacaggcctgtggg

SEQ ID NO: 592743 - DNA, 15 bp, Homo sapiens
gacaggcctgtgggg

SEQ ID NO: 592744 - DNA, 15 bp, Homo sapiens
acaggcctgtggggt

SEQ ID NO: 592745 - DNA, 15 bp, Homo sapiens
caggcctgtggggtt

SEQ ID NO: 592746 - DNA, 15 bp, Homo sapiens
aggcctgtggggttg

SEQ ID NO: 592747 - DNA, 15 bp, Homo sapiens
ggcctgtggggttgg

SEQ ID NO: 592748 - DNA, 15 bp, Homo sapiens
gcctgtggggttggc

SEQ ID NO: 592749 - DNA, 15 bp, Homo sapiens
cctgtggggttggcg

SEQ ID NO: 592750 - DNA, 15 bp, Homo sapiens
ctgtggggttggcgc

SEQ ID NO: 592751 - DNA, 15 bp, Homo sapiens
tgtggggttggcgca

SEQ ID NO: 592752 - DNA, 15 bp, Homo sapiens
gtggggttggcgcaa

SEQ ID NO: 592753 - DNA, 15 bp, Homo sapiens
tggggttggcgcaag

SEQ ID NO: 592754 - DNA, 15 bp, Homo sapiens
ggggttggcgcaaga

SEQ ID NO: 592755 - DNA, 15 bp, Homo sapiens
gggttggcgcaagac

SEQ ID NO: 592756 - DNA, 15 bp, Homo sapiens
ggttggcgcaagacc

SEQ ID NO: 592757 - DNA, 15 bp, Homo sapiens
gttggcgcaagaccc

SEQ ID NO: 592758 - DNA, 15 bp, Homo sapiens
ttggcgcaagaccct

SEQ ID NO: 592759 - DNA, 15 bp, Homo sapiens
tggcgcaagaccctt

SEQ ID NO: 592760 - DNA, 15 bp, Homo sapiens
ggcgcaagacccttc

SEQ ID NO: 592761 - DNA, 15 bp, Homo sapiens
gcgcaagacccttcc

SEQ ID NO: 592762 - DNA, 15 bp, Homo sapiens
cgcaagacccttcca

SEQ ID NO: 592763 - DNA, 15 bp, Homo sapiens
gcaagacccttccag

SEQ ID NO: 592764 - DNA, 15 bp, Homo sapiens
caagacccttccaga

SEQ ID NO: 592765 - DNA, 15 bp, Homo sapiens
aagacccttccagag

SEQ ID NO: 592766 - DNA, 15 bp, Homo sapiens
agacccttccagagg

SEQ ID NO: 592767 - DNA, 15 bp, Homo sapiens
gacccttccagagga

SEQ ID NO: 592768 - DNA, 15 bp, Homo sapiens
acccttccagaggaa

SEQ ID NO: 592769 - DNA, 15 bp, Homo sapiens
cccttccagaggaaa

SEQ ID NO: 592770 - DNA, 15 bp, Homo sapiens
ccttccagaggaaac

SEQ ID NO: 592771 - DNA, 15 bp, Homo sapiens
cttccagaggaaact

SEQ ID NO: 592772 - DNA, 15 bp, Homo sapiens
ttccagaggaaacta

SEQ ID NO: 592773 - DNA, 15 bp, Homo sapiens
tccagaggaaactag

SEQ ID NO: 592774 - DNA, 15 bp, Homo sapiens
ccagaggaaactagc

SEQ ID NO: 592775 - DNA, 15 bp, Homo sapiens
cagaggaaactagct

SEQ ID NO: 592776 - DNA, 15 bp, Homo sapiens
agaggaaactagctg

SEQ ID NO: 592777 - DNA, 15 bp, Homo sapiens
gaggaaactagctgc

SEQ ID NO: 592778 - DNA, 15 bp, Homo sapiens
aggaaactagctgca

SEQ ID NO: 592779 - DNA, 15 bp, Homo sapiens
ggaaactagctgcaa

SEQ ID NO: 592780 - DNA, 15 bp, Homo sapiens
gaaactagctgcaac

SEQ ID NO: 592781 - DNA, 15 bp, Homo sapiens
aaactagctgcaaca

SEQ ID NO: 592782 - DNA, 15 bp, Homo sapiens
aactagctgcaacat

SEQ ID NO: 592783 - DNA, 15 bp, Homo sapiens
actagctgcaacata

SEQ ID NO: 592784 - DNA, 15 bp, Homo sapiens
ctagctgcaacataa

SEQ ID NO: 592785 - DNA, 15 bp, Homo sapiens
tagctgcaacataaa

SEQ ID NO: 592786 - DNA, 15 bp, Homo sapiens
agctgcaacataaat

SEQ ID NO: 592787 - DNA, 15 bp, Homo sapiens
gctgcaacataaatc

SEQ ID NO: 592788 - DNA, 15 bp, Homo sapiens
ctgcaacataaatcc

SEQ ID NO: 592789 - DNA, 15 bp, Homo sapiens
tgcaacataaatccg

SEQ ID NO: 592790 - DNA, 15 bp, Homo sapiens
gcaacataaatccgg

SEQ ID NO: 592791 - DNA, 15 bp, Homo sapiens
caacataaatccgga

SEQ ID NO: 592792 - DNA, 15 bp, Homo sapiens
aacataaatccggat

SEQ ID NO: 592793 - DNA, 15 bp, Homo sapiens
acataaatccggata

SEQ ID NO: 592794 - DNA, 15 bp, Homo sapiens
cataaatccggatat

SEQ ID NO: 592795 - DNA, 15 bp, Homo sapiens
ataaatccggatatg

SEQ ID NO: 592796 - DNA, 15 bp, Homo sapiens
taaatccggatatgg

SEQ ID NO: 592797 - DNA, 15 bp, Homo sapiens
aaatccggatatggt

SEQ ID NO: 592798 - DNA, 15 bp, Homo sapiens
aatccggatatggtg

SEQ ID NO: 592799 - DNA, 15 bp, Homo sapiens
atccggatatggtgc

SEQ ID NO: 592800 - DNA, 15 bp, Homo sapiens
tccggatatggtgct

SEQ ID NO: 592801 - DNA, 15 bp, Homo sapiens
ccggatatggtgctg

SEQ ID NO: 592802 - DNA, 15 bp, Homo sapiens
cggatatggtgctgt

SEQ ID NO: 592803 - DNA, 15 bp, Homo sapiens
ggatatggtgctgtt

SEQ ID NO: 592804 - DNA, 15 bp, Homo sapiens
gatatggtgctgttc

SEQ ID NO: 592805 - DNA, 15 bp, Homo sapiens
atatggtgctgttca

SEQ ID NO: 592806 - DNA, 15 bp, Homo sapiens
tatggtgctgttcag

SEQ ID NO: 592807 - DNA, 15 bp, Homo sapiens
atggtgctgttcagg

SEQ ID NO: 592808 - DNA, 15 bp, Homo sapiens
tggtgctgttcaggg

SEQ ID NO: 592809 - DNA, 15 bp, Homo sapiens
ggtgctgttcaggga

SEQ ID NO: 592810 - DNA, 15 bp, Homo sapiens
gtgctgttcagggaa

SEQ ID NO: 592811 - DNA, 15 bp, Homo sapiens
tgctgttcagggaaa

SEQ ID NO: 592812 - DNA, 15 bp, Homo sapiens
gctgttcagggaaag

SEQ ID NO: 592813 - DNA, 15 bp, Homo sapiens
ctgttcagggaaagg

SEQ ID NO: 592814 - DNA, 15 bp, Homo sapiens
tgttcagggaaaggc

SEQ ID NO: 592815 - DNA, 15 bp, Homo sapiens
gttcagggaaaggca

SEQ ID NO: 592816 - DNA, 15 bp, Homo sapiens
ttcagggaaaggcac

SEQ ID NO: 592817 - DNA, 15 bp, Homo sapiens
tcagggaaaggcaca

SEQ ID NO: 592818 - DNA, 15 bp, Homo sapiens
cagggaaaggcacaa

SEQ ID NO: 592819 - DNA, 15 bp, Homo sapiens
agggaaaggcacaac

SEQ ID NO: 592820 - DNA, 15 bp, Homo sapiens
gggaaaggcacaacc

SEQ ID NO: 592821 - DNA, 15 bp, Homo sapiens
ggaaaggcacaacct

SEQ ID NO: 592822 - DNA, 15 bp, Homo sapiens
gaaaggcacaacctg

SEQ ID NO: 592823 - DNA, 15 bp, Homo sapiens
aaaggcacaacctgg

SEQ ID NO: 592824 - DNA, 15 bp, Homo sapiens
aaggcacaacctggg

SEQ ID NO: 592825 - DNA, 15 bp, Homo sapiens
aggcacaacctgggg

SEQ ID NO: 592826 - DNA, 15 bp, Homo sapiens
ggcacaacctgggga

SEQ ID NO: 592827 - DNA, 15 bp, Homo sapiens
gcacaacctggggat

SEQ ID NO: 592828 - DNA, 15 bp, Homo sapiens
cacaacctggggatg

SEQ ID NO: 592829 - DNA, 15 bp, Homo sapiens
acaacctggggatga

SEQ ID NO: 592830 - DNA, 15 bp, Homo sapiens
caacctggggatgag

SEQ ID NO: 592831 - DNA, 15 bp, Homo sapiens
aacctggggatgaga

SEQ ID NO: 592832 - DNA, 15 bp, Homo sapiens
acctggggatgagaa

SEQ ID NO: 592833 - DNA, 15 bp, Homo sapiens
cctggggatgagaag

SEQ ID NO: 592834 - DNA, 15 bp, Homo sapiens
ctggggatgagaagg

SEQ ID NO: 592835 - DNA, 15 bp, Homo sapiens
tggggatgagaaggg

SEQ ID NO: 592836 - DNA, 15 bp, Homo sapiens
ggggatgagaagggt

SEQ ID NO: 592837 - DNA, 15 bp, Homo sapiens
gggatgagaagggtg

SEQ ID NO: 592838 - DNA, 15 bp, Homo sapiens
ggatgagaagggtgg

SEQ ID NO: 592839 - DNA, 15 bp, Homo sapiens
gatgagaagggtggc

SEQ ID NO: 592840 - DNA, 15 bp, Homo sapiens
atgagaagggtggct

SEQ ID NO: 592841 - DNA, 15 bp, Homo sapiens
tgagaagggtggctg

SEQ ID NO: 592842 - DNA, 15 bp, Homo sapiens
gagaagggtggctgt

SEQ ID NO: 592843 - DNA, 15 bp, Homo sapiens
agaagggtggctgtc

SEQ ID NO: 592844 - DNA, 15 bp, Homo sapiens
gaagggtggctgtcc

SEQ ID NO: 592845 - DNA, 15 bp, Homo sapiens
aagggtggctgtcca

SEQ ID NO: 592846 - DNA, 15 bp, Homo sapiens
agggtggctgtccag

SEQ ID NO: 592847 - DNA, 15 bp, Homo sapiens
gggtggctgtccagc

SEQ ID NO: 592848 - DNA, 15 bp, Homo sapiens
ggtggctgtccagca

SEQ ID NO: 592849 - DNA, 15 bp, Homo sapiens
gtggctgtccagcac

SEQ ID NO: 592850 - DNA, 15 bp, Homo sapiens
tggctgtccagcaca

SEQ ID NO: 592851 - DNA, 15 bp, Homo sapiens
ggctgtccagcacac

SEQ ID NO: 592852 - DNA, 15 bp, Homo sapiens
gctgtccagcacaca

SEQ ID NO: 592853 - DNA, 15 bp, Homo sapiens
ctgtccagcacacag

SEQ ID NO: 592854 - DNA, 15 bp, Homo sapiens
tgtccagcacacagg

SEQ ID NO: 592855 - DNA, 15 bp, Homo sapiens
gtccagcacacaggg

SEQ ID NO: 592856 - DNA, 15 bp, Homo sapiens
tccagcacacagggg

SEQ ID NO: 592857 - DNA, 15 bp, Homo sapiens
ccagcacacaggggc

SEQ ID NO: 592858 - DNA, 15 bp, Homo sapiens
cagcacacaggggca

SEQ ID NO: 592859 - DNA, 15 bp, Homo sapiens
agcacacaggggcag

SEQ ID NO: 592860 - DNA, 15 bp, Homo sapiens
gcacacaggggcagg

SEQ ID NO: 592861 - DNA, 15 bp, Homo sapiens
cacacaggggcaggc

SEQ ID NO: 592862 - DNA, 15 bp, Homo sapiens
acacaggggcaggcc

SEQ ID NO: 592863 - DNA, 15 bp, Homo sapiens
cacaggggcaggcct

SEQ ID NO: 592864 - DNA, 15 bp, Homo sapiens
acaggggcaggcctc

SEQ ID NO: 592865 - DNA, 15 bp, Homo sapiens
caggggcaggcctct

SEQ ID NO: 592866 - DNA, 15 bp, Homo sapiens
aggggcaggcctctt

SEQ ID NO: 592867 - DNA, 15 bp, Homo sapiens
ggggcaggcctcttg

SEQ ID NO: 592868 - DNA, 15 bp, Homo sapiens
gggcaggcctcttgg

SEQ ID NO: 592869 - DNA, 15 bp, Homo sapiens
ggcaggcctcttggc

SEQ ID NO: 592870 - DNA, 15 bp, Homo sapiens
gcaggcctcttggcc

SEQ ID NO: 592871 - DNA, 15 bp, Homo sapiens
caggcctcttggcca

SEQ ID NO: 592872 - DNA, 15 bp, Homo sapiens
aggcctcttggccac

SEQ ID NO: 592873 - DNA, 15 bp, Homo sapiens
ggcctcttggccact

SEQ ID NO: 592874 - DNA, 15 bp, Homo sapiens
gcctcttggccactg

SEQ ID NO: 592875 - DNA, 15 bp, Homo sapiens
cctcttggccactgg

SEQ ID NO: 592876 - DNA, 15 bp, Homo sapiens
ctcttggccactggg

SEQ ID NO: 592877 - DNA, 15 bp, Homo sapiens
tcttggccactgggg

SEQ ID NO: 592878 - DNA, 15 bp, Homo sapiens
cttggccactggggg

SEQ ID NO: 592879 - DNA, 15 bp, Homo sapiens
ttggccactggggga

SEQ ID NO: 592880 - DNA, 15 bp, Homo sapiens
tggccactgggggag

SEQ ID NO: 592881 - DNA, 15 bp, Homo sapiens
ggccactgggggagg

SEQ ID NO: 592882 - DNA, 15 bp, Homo sapiens
gccactgggggaggg

SEQ ID NO: 592883 - DNA, 15 bp, Homo sapiens
ccactgggggagggg

SEQ ID NO: 592884 - DNA, 15 bp, Homo sapiens
cactgggggagggga

SEQ ID NO: 592885 - DNA, 15 bp, Homo sapiens
actgggggaggggag

SEQ ID NO: 592886 - DNA, 15 bp, Homo sapiens
ctgggggaggggaga

SEQ ID NO: 592887 - DNA, 15 bp, Homo sapiens
tgggggaggggagaa

SEQ ID NO: 592888 - DNA, 15 bp, Homo sapiens
gggggaggggagaat

SEQ ID NO: 592889 - DNA, 15 bp, Homo sapiens
ggggaggggagaatt

SEQ ID NO: 592890 - DNA, 15 bp, Homo sapiens
gggaggggagaattt

SEQ ID NO: 592891 - DNA, 15 bp, Homo sapiens
ggaggggagaatttg

SEQ ID NO: 592892 - DNA, 15 bp, Homo sapiens
gaggggagaatttgg

SEQ ID NO: 592893 - DNA, 15 bp, Homo sapiens
aggggagaatttgga

SEQ ID NO: 592894 - DNA, 15 bp, Homo sapiens
ggggagaatttggag

SEQ ID NO: 592895 - DNA, 15 bp, Homo sapiens
gggagaatttggaga

SEQ ID NO: 592896 - DNA, 15 bp, Homo sapiens
ggagaatttggagag

SEQ ID NO: 592897 - DNA, 15 bp, Homo sapiens
gagaatttggagagg

SEQ ID NO: 592898 - DNA, 15 bp, Homo sapiens
agaatttggagagga

SEQ ID NO: 592899 - DNA, 15 bp, Homo sapiens
gaatttggagaggaa

SEQ ID NO: 592900 - DNA, 15 bp, Homo sapiens
aatttggagaggaag

SEQ ID NO: 592901 - DNA, 15 bp, Homo sapiens
atttggagaggaaga

SEQ ID NO: 592902 - DNA, 15 bp, Homo sapiens
tttggagaggaagag

SEQ ID NO: 592903 - DNA, 15 bp, Homo sapiens
ttggagaggaagagg

SEQ ID NO: 592904 - DNA, 15 bp, Homo sapiens
tggagaggaagagga

SEQ ID NO: 592905 - DNA, 15 bp, Homo sapiens
ggagaggaagaggat

SEQ ID NO: 592906 - DNA, 15 bp, Homo sapiens
gagaggaagaggatg

SEQ ID NO: 592907 - DNA, 15 bp, Homo sapiens
agaggaagaggatgg

SEQ ID NO: 592908 - DNA, 15 bp, Homo sapiens
gaggaagaggatggg

SEQ ID NO: 592909 - DNA, 15 bp, Homo sapiens
aggaagaggatggga

SEQ ID NO: 592910 - DNA, 15 bp, Homo sapiens
ggaagaggatgggat

SEQ ID NO: 592911 - DNA, 15 bp, Homo sapiens
gaagaggatgggatg

SEQ ID NO: 592912 - DNA, 15 bp, Homo sapiens
aagaggatgggatgc

SEQ ID NO: 592913 - DNA, 15 bp, Homo sapiens
agaggatgggatgcc

SEQ ID NO: 592914 - DNA, 15 bp, Homo sapiens
gaggatgggatgccg

SEQ ID NO: 592915 - DNA, 15 bp, Homo sapiens
aggatgggatgccgt

SEQ ID NO: 592916 - DNA, 15 bp, Homo sapiens
ggatgggatgccgtg

SEQ ID NO: 592917 - DNA, 15 bp, Homo sapiens
gatgggatgccgtgg

SEQ ID NO: 592918 - DNA, 15 bp, Homo sapiens
atgggatgccgtgga

SEQ ID NO: 592919 - DNA, 15 bp, Homo sapiens
tgggatgccgtggaa

SEQ ID NO: 592920 - DNA, 15 bp, Homo sapiens
gggatgccgtggaat

SEQ ID NO: 592921 - DNA, 15 bp, Homo sapiens
ggatgccgtggaatt

SEQ ID NO: 592922 - DNA, 15 bp, Homo sapiens
gatgccgtggaattg

SEQ ID NO: 592923 - DNA, 15 bp, Homo sapiens
atgccgtggaattgg

SEQ ID NO: 592924 - DNA, 15 bp, Homo sapiens
tgccgtggaattggg

SEQ ID NO: 592925 - DNA, 15 bp, Homo sapiens
gccgtggaattggga

SEQ ID NO: 592926 - DNA, 15 bp, Homo sapiens
ccgtggaattgggac

SEQ ID NO: 592927 - DNA, 15 bp, Homo sapiens
cgtggaattgggacc

SEQ ID NO: 592928 - DNA, 15 bp, Homo sapiens
gtggaattgggacca

SEQ ID NO: 592929 - DNA, 15 bp, Homo sapiens
tggaattgggaccag

SEQ ID NO: 592930 - DNA, 15 bp, Homo sapiens
ggaattgggaccagg

SEQ ID NO: 592931 - DNA, 15 bp, Homo sapiens
gaattgggaccagga

SEQ ID NO: 592932 - DNA, 15 bp, Homo sapiens
aattgggaccaggaa

SEQ ID NO: 592933 - DNA, 15 bp, Homo sapiens
attgggaccaggaaa

SEQ ID NO: 592934 - DNA, 15 bp, Homo sapiens
ttgggaccaggaaag

SEQ ID NO: 592935 - DNA, 15 bp, Homo sapiens
tgggaccaggaaaga

SEQ ID NO: 592936 - DNA, 15 bp, Homo sapiens
gggaccaggaaagaa

SEQ ID NO: 592937 - DNA, 15 bp, Homo sapiens
ggaccaggaaagaat

SEQ ID NO: 592938 - DNA, 15 bp, Homo sapiens
gaccaggaaagaatg

SEQ ID NO: 592939 - DNA, 15 bp, Homo sapiens
accaggaaagaatgg

SEQ ID NO: 592940 - DNA, 15 bp, Homo sapiens
ccaggaaagaatggg

SEQ ID NO: 592941 - DNA, 15 bp, Homo sapiens
caggaaagaatgggg

SEQ ID NO: 592942 - DNA, 15 bp, Homo sapiens
aggaaagaatgggga

SEQ ID NO: 592943 - DNA, 15 bp, Homo sapiens
ggaaagaatggggac

SEQ ID NO: 592944 - DNA, 15 bp, Homo sapiens
gaaagaatggggaca

SEQ ID NO: 592945 - DNA, 15 bp, Homo sapiens
aaagaatggggacat

SEQ ID NO: 592946 - DNA, 15 bp, Homo sapiens
aagaatggggacatg

SEQ ID NO: 592947 - DNA, 15 bp, Homo sapiens
agaatggggacatgt

SEQ ID NO: 592948 - DNA, 15 bp, Homo sapiens
gaatggggacatgtg

SEQ ID NO: 592949 - DNA, 15 bp, Homo sapiens
aatggggacatgtga

SEQ ID NO: 592950 - DNA, 15 bp, Homo sapiens
atggggacatgtgat

SEQ ID NO: 592951 - DNA, 15 bp, Homo sapiens
tggggacatgtgatg

SEQ ID NO: 592952 - DNA, 15 bp, Homo sapiens
ggggacatgtgatgg

SEQ ID NO: 592953 - DNA, 15 bp, Homo sapiens
gggacatgtgatggt

SEQ ID NO: 592954 - DNA, 15 bp, Homo sapiens
ggacatgtgatggtt

SEQ ID NO: 592955 - DNA, 15 bp, Homo sapiens
gacatgtgatggtta

SEQ ID NO: 592956 - DNA, 15 bp, Homo sapiens
acatgtgatggttaa

SEQ ID NO: 592957 - DNA, 15 bp, Homo sapiens
catgtgatggttaaa

SEQ ID NO: 592958 - DNA, 15 bp, Homo sapiens
atgtgatggttaaag

SEQ ID NO: 592959 - DNA, 15 bp, Homo sapiens
tgtgatggttaaagc

SEQ ID NO: 592960 - DNA, 15 bp, Homo sapiens
gtgatggttaaagct

SEQ ID NO: 592961 - DNA, 15 bp, Homo sapiens
tgatggttaaagcta

SEQ ID NO: 592962 - DNA, 15 bp, Homo sapiens
gatggttaaagctag

SEQ ID NO: 592963 - DNA, 15 bp, Homo sapiens
atggttaaagctagt

SEQ ID NO: 592964 - DNA, 15 bp, Homo sapiens
tggttaaagctagtt

SEQ ID NO: 592965 - DNA, 15 bp, Homo sapiens
ggttaaagctagtta

SEQ ID NO: 592966 - DNA, 15 bp, Homo sapiens
gttaaagctagttag

SEQ ID NO: 592967 - DNA, 15 bp, Homo sapiens
ttaaagctagttaga

SEQ ID NO: 592968 - DNA, 15 bp, Homo sapiens
taaagctagttagag

SEQ ID NO: 592969 - DNA, 15 bp, Homo sapiens
aaagctagttagaga

SEQ ID NO: 592970 - DNA, 15 bp, Homo sapiens
aagctagttagagaa

SEQ ID NO: 592971 - DNA, 15 bp, Homo sapiens
agctagttagagaag

SEQ ID NO: 592972 - DNA, 15 bp, Homo sapiens
gctagttagagaaga

SEQ ID NO: 592973 - DNA, 15 bp, Homo sapiens
ctagttagagaagaa

SEQ ID NO: 592974 - DNA, 15 bp, Homo sapiens
tagttagagaagaac

SEQ ID NO: 592975 - DNA, 15 bp, Homo sapiens
agttagagaagaact

SEQ ID NO: 592976 - DNA, 15 bp, Homo sapiens
gttagagaagaactg

SEQ ID NO: 592977 - DNA, 15 bp, Homo sapiens
ttagagaagaactgg

SEQ ID NO: 592978 - DNA, 15 bp, Homo sapiens
tagagaagaactggg

SEQ ID NO: 592979 - DNA, 15 bp, Homo sapiens
agagaagaactggga

SEQ ID NO: 592980 - DNA, 15 bp, Homo sapiens
gagaagaactgggag

SEQ ID NO: 592981 - DNA, 15 bp, Homo sapiens
agaagaactgggaga

SEQ ID NO: 592982 - DNA, 15 bp, Homo sapiens
gaagaactgggagat

SEQ ID NO: 592983 - DNA, 15 bp, Homo sapiens
aagaactgggagata

SEQ ID NO: 592984 - DNA, 15 bp, Homo sapiens
agaactgggagataa

SEQ ID NO: 592985 - DNA, 15 bp, Homo sapiens
gaactgggagataaa

SEQ ID NO: 592986 - DNA, 15 bp, Homo sapiens
aactgggagataaac

SEQ ID NO: 592987 - DNA, 15 bp, Homo sapiens
actgggagataaaca

SEQ ID NO: 592988 - DNA, 15 bp, Homo sapiens
ctgggagataaacag

SEQ ID NO: 592989 - DNA, 15 bp, Homo sapiens
tgggagataaacagt

SEQ ID NO: 592990 - DNA, 15 bp, Homo sapiens
gggagataaacagtc

SEQ ID NO: 592991 - DNA, 15 bp, Homo sapiens
ggagataaacagtca

SEQ ID NO: 592992 - DNA, 15 bp, Homo sapiens
gagataaacagtcac

SEQ ID NO: 592993 - DNA, 15 bp, Homo sapiens
agataaacagtcacc

SEQ ID NO: 592994 - DNA, 15 bp, Homo sapiens
gataaacagtcaccc

SEQ ID NO: 592995 - DNA, 15 bp, Homo sapiens
ataaacagtcaccca

SEQ ID NO: 592996 - DNA, 15 bp, Homo sapiens
taaacagtcacccat

SEQ ID NO: 592997 - DNA, 15 bp, Homo sapiens
aaacagtcacccatg

SEQ ID NO: 592998 - DNA, 15 bp, Homo sapiens
aacagtcacccatgc

SEQ ID NO: 592999 - DNA, 15 bp, Homo sapiens
acagtcacccatgcc

SEQ ID NO: 593000 - DNA, 15 bp, Homo sapiens
cagtcacccatgccc

SEQ ID NO: 593001 - DNA, 15 bp, Homo sapiens
agtcacccatgcccc

SEQ ID NO: 593002 - DNA, 15 bp, Homo sapiens
gtcacccatgcccct

SEQ ID NO: 593003 - DNA, 15 bp, Homo sapiens
tcacccatgcccctg

SEQ ID NO: 593004 - DNA, 15 bp, Homo sapiens
cacccatgcccctga

SEQ ID NO: 593005 - DNA, 15 bp, Homo sapiens
acccatgcccctgaa

SEQ ID NO: 593006 - DNA, 15 bp, Homo sapiens
cccatgcccctgaag

SEQ ID NO: 593007 - DNA, 15 bp, Homo sapiens
ccatgcccctgaagc

SEQ ID NO: 593008 - DNA, 15 bp, Homo sapiens
catgcccctgaagca

SEQ ID NO: 593009 - DNA, 15 bp, Homo sapiens
atgcccctgaagcac

SEQ ID NO: 593010 - DNA, 15 bp, Homo sapiens
tgcccctgaagcact

SEQ ID NO: 593011 - DNA, 15 bp, Homo sapiens
gcccctgaagcactc

SEQ ID NO: 593012 - DNA, 15 bp, Homo sapiens
cccctgaagcactcg

SEQ ID NO: 593013 - DNA, 15 bp, Homo sapiens
ccctgaagcactcgg

SEQ ID NO: 593014 - DNA, 15 bp, Homo sapiens
cctgaagcactcggg

SEQ ID NO: 593015 - DNA, 15 bp, Homo sapiens
ctgaagcactcgggg

SEQ ID NO: 593016 - DNA, 15 bp, Homo sapiens
tgaagcactcggggt

SEQ ID NO: 593017 - DNA, 15 bp, Homo sapiens
gaagcactcggggtg

SEQ ID NO: 593018 - DNA, 15 bp, Homo sapiens
aagcactcggggtga

SEQ ID NO: 593019 - DNA, 15 bp, Homo sapiens
agcactcggggtgaa

SEQ ID NO: 593020 - DNA, 15 bp, Homo sapiens
gcactcggggtgaag

SEQ ID NO: 593021 - DNA, 15 bp, Homo sapiens
cactcggggtgaaga

SEQ ID NO: 593022 - DNA, 15 bp, Homo sapiens
actcggggtgaagag

SEQ ID NO: 593023 - DNA, 15 bp, Homo sapiens
ctcggggtgaagaga

SEQ ID NO: 593024 - DNA, 15 bp, Homo sapiens
tcggggtgaagagat

SEQ ID NO: 593025 - DNA, 15 bp, Homo sapiens
cggggtgaagagatt

SEQ ID NO: 593026 - DNA, 15 bp, Homo sapiens
ggggtgaagagattg

SEQ ID NO: 593027 - DNA, 15 bp, Homo sapiens
gggtgaagagattgg

SEQ ID NO: 593028 - DNA, 15 bp, Homo sapiens
ggtgaagagattggc

SEQ ID NO: 593029 - DNA, 15 bp, Homo sapiens
gtgaagagattggca

SEQ ID NO: 593030 - DNA, 15 bp, Homo sapiens
tgaagagattggcat

SEQ ID NO: 593031 - DNA, 15 bp, Homo sapiens
gaagagattggcatt

SEQ ID NO: 593032 - DNA, 15 bp, Homo sapiens
aagagattggcattt

SEQ ID NO: 593033 - DNA, 15 bp, Homo sapiens
agagattggcatttt

SEQ ID NO: 593034 - DNA, 15 bp, Homo sapiens
gagattggcattttc

SEQ ID NO: 593035 - DNA, 15 bp, Homo sapiens
agattggcattttca

SEQ ID NO: 593036 - DNA, 15 bp, Homo sapiens
gattggcattttcac

SEQ ID NO: 593037 - DNA, 15 bp, Homo sapiens
attggcattttcacg

SEQ ID NO: 593038 - DNA, 15 bp, Homo sapiens
ttggcattttcacgc

SEQ ID NO: 593039 - DNA, 15 bp, Homo sapiens
tggcattttcacgca

SEQ ID NO: 593040 - DNA, 15 bp, Homo sapiens
ggcattttcacgcac

SEQ ID NO: 593041 - DNA, 15 bp, Homo sapiens
gcattttcacgcacc

SEQ ID NO: 593042 - DNA, 15 bp, Homo sapiens
cattttcacgcaccc

SEQ ID NO: 593043 - DNA, 15 bp, Homo sapiens
attttcacgcacccc

SEQ ID NO: 593044 - DNA, 15 bp, Homo sapiens
ttttcacgcacccca

SEQ ID NO: 593045 - DNA, 15 bp, Homo sapiens
tttcacgcaccccag

SEQ ID NO: 593046 - DNA, 15 bp, Homo sapiens
ttcacgcaccccagt

SEQ ID NO: 593047 - DNA, 15 bp, Homo sapiens
tcacgcaccccagtg

SEQ ID NO: 593048 - DNA, 15 bp, Homo sapiens
cacgcaccccagtgc

SEQ ID NO: 593049 - DNA, 15 bp, Homo sapiens
acgcaccccagtgct

SEQ ID NO: 593050 - DNA, 15 bp, Homo sapiens
cgcaccccagtgctt

SEQ ID NO: 593051 - DNA, 15 bp, Homo sapiens
gcaccccagtgcttt

SEQ ID NO: 593052 - DNA, 15 bp, Homo sapiens
caccccagtgctttc

SEQ ID NO: 593053 - DNA, 15 bp, Homo sapiens
accccagtgctttcc

SEQ ID NO: 593054 - DNA, 15 bp, Homo sapiens
ccccagtgctttccc

SEQ ID NO: 593055 - DNA, 15 bp, Homo sapiens
cccagtgctttccct

SEQ ID NO: 593056 - DNA, 15 bp, Homo sapiens
ccagtgctttccctt

SEQ ID NO: 593057 - DNA, 15 bp, Homo sapiens
cagtgctttcccttt

SEQ ID NO: 593058 - DNA, 15 bp, Homo sapiens
agtgctttccctttg

SEQ ID NO: 593059 - DNA, 15 bp, Homo sapiens
gtgctttccctttgt

SEQ ID NO: 593060 - DNA, 15 bp, Homo sapiens
tgctttccctttgtg

SEQ ID NO: 593061 - DNA, 15 bp, Homo sapiens
gctttccctttgtgt

SEQ ID NO: 593062 - DNA, 15 bp, Homo sapiens
ctttccctttgtgtt

SEQ ID NO: 593063 - DNA, 15 bp, Homo sapiens
tttccctttgtgttg

SEQ ID NO: 593064 - DNA, 15 bp, Homo sapiens
ttccctttgtgttga

SEQ ID NO: 593065 - DNA, 15 bp, Homo sapiens
tccctttgtgttgaa

SEQ ID NO: 593066 - DNA, 15 bp, Homo sapiens
ccctttgtgttgaag

SEQ ID NO: 593067 - DNA, 15 bp, Homo sapiens
cctttgtgttgaagt

SEQ ID NO: 593068 - DNA, 15 bp, Homo sapiens
ctttgtgttgaagtc

SEQ ID NO: 593069 - DNA, 15 bp, Homo sapiens
tttgtgttgaagtcc

SEQ ID NO: 593070 - DNA, 15 bp, Homo sapiens
ttgtgttgaagtccc

SEQ ID NO: 593071 - DNA, 15 bp, Homo sapiens
tgtgttgaagtccct

SEQ ID NO: 593072 - DNA, 15 bp, Homo sapiens
gtgttgaagtccctt

SEQ ID NO: 593073 - DNA, 15 bp, Homo sapiens
tgttgaagtcccttc

SEQ ID NO: 593074 - DNA, 15 bp, Homo sapiens
gttgaagtcccttcg

SEQ ID NO: 593075 - DNA, 15 bp, Homo sapiens
ttgaagtcccttcgt

SEQ ID NO: 593076 - DNA, 15 bp, Homo sapiens
tgaagtcccttcgta

SEQ ID NO: 593077 - DNA, 15 bp, Homo sapiens
gaagtcccttcgtag

SEQ ID NO: 593078 - DNA, 15 bp, Homo sapiens
aagtcccttcgtaga

SEQ ID NO: 593079 - DNA, 15 bp, Homo sapiens
agtcccttcgtagac

SEQ ID NO: 593080 - DNA, 15 bp, Homo sapiens
gtcccttcgtagaca

SEQ ID NO: 593081 - DNA, 15 bp, Homo sapiens
tcccttcgtagacat

SEQ ID NO: 593082 - DNA, 15 bp, Homo sapiens
cccttcgtagacatc

SEQ ID NO: 593083 - DNA, 15 bp, Homo sapiens
ccttcgtagacatcc

SEQ ID NO: 593084 - DNA, 15 bp, Homo sapiens
cttcgtagacatcca

SEQ ID NO: 593085 - DNA, 15 bp, Homo sapiens
ttcgtagacatccag

SEQ ID NO: 593086 - DNA, 15 bp, Homo sapiens
tcgtagacatccagg

SEQ ID NO: 593087 - DNA, 15 bp, Homo sapiens
cgtagacatccaggc

SEQ ID NO: 593088 - DNA, 15 bp, Homo sapiens
gtagacatccaggcc

SEQ ID NO: 593089 - DNA, 15 bp, Homo sapiens
tagacatccaggccc

SEQ ID NO: 593090 - DNA, 15 bp, Homo sapiens
agacatccaggccca

SEQ ID NO: 593091 - DNA, 15 bp, Homo sapiens
gacatccaggcccat

SEQ ID NO: 593092 - DNA, 15 bp, Homo sapiens
acatccaggcccata

SEQ ID NO: 593093 - DNA, 15 bp, Homo sapiens
catccaggcccataa

SEQ ID NO: 593094 - DNA, 15 bp, Homo sapiens
atccaggcccataag

SEQ ID NO: 593095 - DNA, 15 bp, Homo sapiens
tccaggcccataagg

SEQ ID NO: 593096 - DNA, 15 bp, Homo sapiens
ccaggcccataaggc

SEQ ID NO: 593097 - DNA, 15 bp, Homo sapiens
caggcccataaggct

SEQ ID NO: 593098 - DNA, 15 bp, Homo sapiens
aggcccataaggctc

SEQ ID NO: 593099 - DNA, 15 bp, Homo sapiens
ggcccataaggctct

SEQ ID NO: 593100 - DNA, 15 bp, Homo sapiens
gcccataaggctctt

SEQ ID NO: 593101 - DNA, 15 bp, Homo sapiens
cccataaggctcttc

SEQ ID NO: 593102 - DNA, 15 bp, Homo sapiens
ccataaggctcttct

SEQ ID NO: 593103 - DNA, 15 bp, Homo sapiens
cataaggctcttctc

SEQ ID NO: 593104 - DNA, 15 bp, Homo sapiens
ataaggctcttctct

SEQ ID NO: 593105 - DNA, 15 bp, Homo sapiens
taaggctcttctctg

SEQ ID NO: 593106 - DNA, 15 bp, Homo sapiens
aaggctcttctctgg

SEQ ID NO: 593107 - DNA, 15 bp, Homo sapiens
aggctcttctctggc

SEQ ID NO: 593108 - DNA, 15 bp, Homo sapiens
ggctcttctctggcc

SEQ ID NO: 593109 - DNA, 15 bp, Homo sapiens
gctcttctctggcca

SEQ ID NO: 593110 - DNA, 15 bp, Homo sapiens
ctcttctctggccag

SEQ ID NO: 593111 - DNA, 15 bp, Homo sapiens
tcttctctggccaga

SEQ ID NO: 593112 - DNA, 15 bp, Homo sapiens
cttctctggccagag

SEQ ID NO: 593113 - DNA, 15 bp, Homo sapiens
ttctctggccagagc

SEQ ID NO: 593114 - DNA, 15 bp, Homo sapiens
tctctggccagagcc

SEQ ID NO: 593115 - DNA, 15 bp, Homo sapiens
ctctggccagagcct

SEQ ID NO: 593116 - DNA, 15 bp, Homo sapiens
tctggccagagcctc

SEQ ID NO: 593117 - DNA, 15 bp, Homo sapiens
ctggccagagcctca

SEQ ID NO: 593118 - DNA, 15 bp, Homo sapiens
tggccagagcctcat

SEQ ID NO: 593119 - DNA, 15 bp, Homo sapiens
ggccagagcctcatg

SEQ ID NO: 593120 - DNA, 15 bp, Homo sapiens
gccagagcctcatga

SEQ ID NO: 593121 - DNA, 15 bp, Homo sapiens
ccagagcctcatgaa

SEQ ID NO: 593122 - DNA, 15 bp, Homo sapiens
cagagcctcatgaac

SEQ ID NO: 593123 - DNA, 15 bp, Homo sapiens
agagcctcatgaact

SEQ ID NO: 593124 - DNA, 15 bp, Homo sapiens
gagcctcatgaacta

SEQ ID NO: 593125 - DNA, 15 bp, Homo sapiens
agcctcatgaactat

SEQ ID NO: 593126 - DNA, 15 bp, Homo sapiens
gcctcatgaactata

SEQ ID NO: 593127 - DNA, 15 bp, Homo sapiens
cctcatgaactatag

SEQ ID NO: 593128 - DNA, 15 bp, Homo sapiens
ctcatgaactatagc

SEQ ID NO: 593129 - DNA, 15 bp, Homo sapiens
tcatgaactatagca

SEQ ID NO: 593130 - DNA, 15 bp, Homo sapiens
catgaactatagcac

SEQ ID NO: 593131 - DNA, 15 bp, Homo sapiens
atgaactatagcact

SEQ ID NO: 593132 - DNA, 15 bp, Homo sapiens
tgaactatagcacta

SEQ ID NO: 593133 - DNA, 15 bp, Homo sapiens
gaactatagcactag

SEQ ID NO: 593134 - DNA, 15 bp, Homo sapiens
aactatagcactagc

SEQ ID NO: 593135 - DNA, 15 bp, Homo sapiens
actatagcactagca

SEQ ID NO: 593136 - DNA, 15 bp, Homo sapiens
ctatagcactagcag

SEQ ID NO: 593137 - DNA, 15 bp, Homo sapiens
tatagcactagcagg

SEQ ID NO: 593138 - DNA, 15 bp, Homo sapiens
atagcactagcaggg

SEQ ID NO: 593139 - DNA, 15 bp, Homo sapiens
tagcactagcagggt

SEQ ID NO: 593140 - DNA, 15 bp, Homo sapiens
agcactagcagggtt

SEQ ID NO: 593141 - DNA, 15 bp, Homo sapiens
gcactagcagggttg

SEQ ID NO: 593142 - DNA, 15 bp, Homo sapiens
cactagcagggttga

SEQ ID NO: 593143 - DNA, 15 bp, Homo sapiens
actagcagggttgag

SEQ ID NO: 593144 - DNA, 15 bp, Homo sapiens
ctagcagggttgagg

SEQ ID NO: 593145 - DNA, 15 bp, Homo sapiens
tagcagggttgaggc

SEQ ID NO: 593146 - DNA, 15 bp, Homo sapiens
agcagggttgaggcc

SEQ ID NO: 593147 - DNA, 15 bp, Homo sapiens
gcagggttgaggcca

SEQ ID NO: 593148 - DNA, 15 bp, Homo sapiens
cagggttgaggccaa

SEQ ID NO: 593149 - DNA, 15 bp, Homo sapiens
agggttgaggccaag

SEQ ID NO: 593150 - DNA, 15 bp, Homo sapiens
gggttgaggccaagc

SEQ ID NO: 593151 - DNA, 15 bp, Homo sapiens
ggttgaggccaagca

SEQ ID NO: 593152 - DNA, 15 bp, Homo sapiens
gttgaggccaagcat

SEQ ID NO: 593153 - DNA, 15 bp, Homo sapiens
ttgaggccaagcatt

SEQ ID NO: 593154 - DNA, 15 bp, Homo sapiens
tgaggccaagcattg

SEQ ID NO: 593155 - DNA, 15 bp, Homo sapiens
gaggccaagcattgg

SEQ ID NO: 593156 - DNA, 15 bp, Homo sapiens
aggccaagcattggc

SEQ ID NO: 593157 - DNA, 15 bp, Homo sapiens
ggccaagcattggcc

SEQ ID NO: 593158 - DNA, 15 bp, Homo sapiens
gccaagcattggccc

SEQ ID NO: 593159 - DNA, 15 bp, Homo sapiens
ccaagcattggccct

SEQ ID NO: 593160 - DNA, 15 bp, Homo sapiens
caagcattggccctg

SEQ ID NO: 593161 - DNA, 15 bp, Homo sapiens
aagcattggccctgg

SEQ ID NO: 593162 - DNA, 15 bp, Homo sapiens
agcattggccctgga

SEQ ID NO: 593163 - DNA, 15 bp, Homo sapiens
gcattggccctggaa

SEQ ID NO: 593164 - DNA, 15 bp, Homo sapiens
cattggccctggaag

SEQ ID NO: 593165 - DNA, 15 bp, Homo sapiens
attggccctggaagc

SEQ ID NO: 593166 - DNA, 15 bp, Homo sapiens
ttggccctggaagcc

SEQ ID NO: 593167 - DNA, 15 bp, Homo sapiens
tggccctggaagcca

SEQ ID NO: 593168 - DNA, 15 bp, Homo sapiens
ggccctggaagccag

SEQ ID NO: 593169 - DNA, 15 bp, Homo sapiens
gccctggaagccagc

SEQ ID NO: 593170 - DNA, 15 bp, Homo sapiens
ccctggaagccagcc

SEQ ID NO: 593171 - DNA, 15 bp, Homo sapiens
cctggaagccagccg

SEQ ID NO: 593172 - DNA, 15 bp, Homo sapiens
ctggaagccagccga

SEQ ID NO: 593173 - DNA, 15 bp, Homo sapiens
tggaagccagccgag

SEQ ID NO: 593174 - DNA, 15 bp, Homo sapiens
ggaagccagccgagg

SEQ ID NO: 593175 - DNA, 15 bp, Homo sapiens
gaagccagccgagga

SEQ ID NO: 593176 - DNA, 15 bp, Homo sapiens
aagccagccgaggag

SEQ ID NO: 593177 - DNA, 15 bp, Homo sapiens
agccagccgaggagg

SEQ ID NO: 593178 - DNA, 15 bp, Homo sapiens
gccagccgaggagga

SEQ ID NO: 593179 - DNA, 15 bp, Homo sapiens
ccagccgaggaggag

SEQ ID NO: 593180 - DNA, 15 bp, Homo sapiens
cagccgaggaggagg

SEQ ID NO: 593181 - DNA, 15 bp, Homo sapiens
agccgaggaggaggg

SEQ ID NO: 593182 - DNA, 15 bp, Homo sapiens
gccgaggaggagggt

SEQ ID NO: 593183 - DNA, 15 bp, Homo sapiens
ccgaggaggagggtg

SEQ ID NO: 593184 - DNA, 15 bp, Homo sapiens
cgaggaggagggtgc

SEQ ID NO: 593185 - DNA, 15 bp, Homo sapiens
gaggaggagggtgct

SEQ ID NO: 593186 - DNA, 15 bp, Homo sapiens
aggaggagggtgctt

SEQ ID NO: 593187 - DNA, 15 bp, Homo sapiens
ggaggagggtgcttg

SEQ ID NO: 593188 - DNA, 15 bp, Homo sapiens
gaggagggtgcttgt

SEQ ID NO: 593189 - DNA, 15 bp, Homo sapiens
aggagggtgcttgtg

SEQ ID NO: 593190 - DNA, 15 bp, Homo sapiens
ggagggtgcttgtgt

SEQ ID NO: 593191 - DNA, 15 bp, Homo sapiens
gagggtgcttgtgtg

SEQ ID NO: 593192 - DNA, 15 bp, Homo sapiens
agggtgcttgtgtga

SEQ ID NO: 593193 - DNA, 15 bp, Homo sapiens
gggtgcttgtgtgaa

SEQ ID NO: 593194 - DNA, 15 bp, Homo sapiens
ggtgcttgtgtgaat

SEQ ID NO: 593195 - DNA, 15 bp, Homo sapiens
gtgcttgtgtgaatc

SEQ ID NO: 593196 - DNA, 15 bp, Homo sapiens
tgcttgtgtgaatct

SEQ ID NO: 593197 - DNA, 15 bp, Homo sapiens
gcttgtgtgaatctc

SEQ ID NO: 593198 - DNA, 15 bp, Homo sapiens
cttgtgtgaatctcc

SEQ ID NO: 593199 - DNA, 15 bp, Homo sapiens
ttgtgtgaatctccc

SEQ ID NO: 593200 - DNA, 15 bp, Homo sapiens
tgtgtgaatctccca

SEQ ID NO: 593201 - DNA, 15 bp, Homo sapiens
gtgtgaatctcccag

SEQ ID NO: 593202 - DNA, 15 bp, Homo sapiens
tgtgaatctcccagg

SEQ ID NO: 593203 - DNA, 15 bp, Homo sapiens
gtgaatctcccagga

SEQ ID NO: 593204 - DNA, 15 bp, Homo sapiens
tgaatctcccaggag

SEQ ID NO: 593205 - DNA, 15 bp, Homo sapiens
gaatctcccaggagg

SEQ ID NO: 593206 - DNA, 15 bp, Homo sapiens
aatctcccaggaggg

SEQ ID NO: 593207 - DNA, 15 bp, Homo sapiens
atctcccaggagggg

SEQ ID NO: 593208 - DNA, 15 bp, Homo sapiens
tctcccaggaggggt

SEQ ID NO: 593209 - DNA, 15 bp, Homo sapiens
ctcccaggaggggta

SEQ ID NO: 593210 - DNA, 15 bp, Homo sapiens
tcccaggaggggtaa

SEQ ID NO: 593211 - DNA, 15 bp, Homo sapiens
cccaggaggggtaag

SEQ ID NO: 593212 - DNA, 15 bp, Homo sapiens
ccaggaggggtaaga

SEQ ID NO: 593213 - DNA, 15 bp, Homo sapiens
caggaggggtaagaa

SEQ ID NO: 593214 - DNA, 15 bp, Homo sapiens
aggaggggtaagaat

SEQ ID NO: 593215 - DNA, 15 bp, Homo sapiens
ggaggggtaagaatt

SEQ ID NO: 593216 - DNA, 15 bp, Homo sapiens
gaggggtaagaatta

SEQ ID NO: 593217 - DNA, 15 bp, Homo sapiens
aggggtaagaattat

SEQ ID NO: 593218 - DNA, 15 bp, Homo sapiens
ggggtaagaattata

SEQ ID NO: 593219 - DNA, 15 bp, Homo sapiens
gggtaagaattatat

SEQ ID NO: 593220 - DNA, 15 bp, Homo sapiens
ggtaagaattatatt

SEQ ID NO: 593221 - DNA, 15 bp, Homo sapiens
gtaagaattatatta

SEQ ID NO: 593222 - DNA, 15 bp, Homo sapiens
taagaattatattaa

SEQ ID NO: 593223 - DNA, 15 bp, Homo sapiens
aagaattatattaat

SEQ ID NO: 593224 - DNA, 15 bp, Homo sapiens
agaattatattaatt

SEQ ID NO: 593225 - DNA, 15 bp, Homo sapiens
gaattatattaattc

SEQ ID NO: 593226 - DNA, 15 bp, Homo sapiens
aattatattaattcg

SEQ ID NO: 593227 - DNA, 15 bp, Homo sapiens
attatattaattcga

SEQ ID NO: 593228 - DNA, 15 bp, Homo sapiens
ttatattaattcgat

SEQ ID NO: 593229 - DNA, 15 bp, Homo sapiens
tatattaattcgatc

SEQ ID NO: 593230 - DNA, 15 bp, Homo sapiens
atattaattcgatca

SEQ ID NO: 593231 - DNA, 15 bp, Homo sapiens
tattaattcgatcat

SEQ ID NO: 593232 - DNA, 15 bp, Homo sapiens
attaattcgatcata

SEQ ID NO: 593233 - DNA, 15 bp, Homo sapiens
ttaattcgatcataa

SEQ ID NO: 593234 - DNA, 15 bp, Homo sapiens
taattcgatcataat

SEQ ID NO: 593235 - DNA, 15 bp, Homo sapiens
aattcgatcataata

SEQ ID NO: 593236 - DNA, 15 bp, Homo sapiens
attcgatcataataa

SEQ ID NO: 593237 - DNA, 15 bp, Homo sapiens
ttcgatcataataag

SEQ ID NO: 593238 - DNA, 15 bp, Homo sapiens
tcgatcataataagc

SEQ ID NO: 593239 - DNA, 15 bp, Homo sapiens
cgatcataataagca

SEQ ID NO: 593240 - DNA, 15 bp, Homo sapiens
gatcataataagcat

SEQ ID NO: 593241 - DNA, 15 bp, Homo sapiens
atcataataagcatt

SEQ ID NO: 593242 - DNA, 15 bp, Homo sapiens
tcataataagcattt

SEQ ID NO: 593243 - DNA, 15 bp, Homo sapiens
cataataagcattta

SEQ ID NO: 593244 - DNA, 15 bp, Homo sapiens
ataataagcatttat

SEQ ID NO: 593245 - DNA, 15 bp, Homo sapiens
taataagcatttatt

SEQ ID NO: 593246 - DNA, 15 bp, Homo sapiens
aataagcatttattg

SEQ ID NO: 593247 - DNA, 15 bp, Homo sapiens
ataagcatttattga

SEQ ID NO: 593248 - DNA, 15 bp, Homo sapiens
taagcatttattgag

SEQ ID NO: 593249 - DNA, 15 bp, Homo sapiens
aagcatttattgagt

SEQ ID NO: 593250 - DNA, 15 bp, Homo sapiens
agcatttattgagtg

SEQ ID NO: 593251 - DNA, 15 bp, Homo sapiens
gcatttattgagtgc

SEQ ID NO: 593252 - DNA, 15 bp, Homo sapiens
catttattgagtgct

SEQ ID NO: 593253 - DNA, 15 bp, Homo sapiens
atttattgagtgctg

SEQ ID NO: 593254 - DNA, 15 bp, Homo sapiens
tttattgagtgctgt

SEQ ID NO: 593255 - DNA, 15 bp, Homo sapiens
ttattgagtgctgtt

SEQ ID NO: 593256 - DNA, 15 bp, Homo sapiens
tattgagtgctgttt

SEQ ID NO: 593257 - DNA, 15 bp, Homo sapiens
attgagtgctgtttt

SEQ ID NO: 593258 - DNA, 15 bp, Homo sapiens
ttgagtgctgttttg

SEQ ID NO: 593259 - DNA, 15 bp, Homo sapiens
tgagtgctgttttga

SEQ ID NO: 593260 - DNA, 15 bp, Homo sapiens
gagtgctgttttgag

SEQ ID NO: 593261 - DNA, 15 bp, Homo sapiens
agtgctgttttgagg

SEQ ID NO: 593262 - DNA, 15 bp, Homo sapiens
gtgctgttttgaggc

SEQ ID NO: 593263 - DNA, 15 bp, Homo sapiens
tgctgttttgaggcc

SEQ ID NO: 593264 - DNA, 15 bp, Homo sapiens
gctgttttgaggcct

SEQ ID NO: 593265 - DNA, 15 bp, Homo sapiens
ctgttttgaggcctg

SEQ ID NO: 593266 - DNA, 15 bp, Homo sapiens
tgttttgaggcctgg

SEQ ID NO: 593267 - DNA, 15 bp, Homo sapiens
gttttgaggcctggg

SEQ ID NO: 593268 - DNA, 15 bp, Homo sapiens
ttttgaggcctggga

SEQ ID NO: 593269 - DNA, 15 bp, Homo sapiens
tttgaggcctgggag

SEQ ID NO: 593270 - DNA, 15 bp, Homo sapiens
ttgaggcctgggagc

SEQ ID NO: 593271 - DNA, 15 bp, Homo sapiens
tgaggcctgggagct

SEQ ID NO: 593272 - DNA, 15 bp, Homo sapiens
gaggcctgggagcta

SEQ ID NO: 593273 - DNA, 15 bp, Homo sapiens
aggcctgggagctaa

SEQ ID NO: 593274 - DNA, 15 bp, Homo sapiens
ggcctgggagctaag

SEQ ID NO: 593275 - DNA, 15 bp, Homo sapiens
gcctgggagctaagc

SEQ ID NO: 593276 - DNA, 15 bp, Homo sapiens
cctgggagctaagca

SEQ ID NO: 593277 - DNA, 15 bp, Homo sapiens
ctgggagctaagcac

SEQ ID NO: 593278 - DNA, 15 bp, Homo sapiens
tgggagctaagcact

SEQ ID NO: 593279 - DNA, 15 bp, Homo sapiens
gggagctaagcactt

SEQ ID NO: 593280 - DNA, 15 bp, Homo sapiens
ggagctaagcacttc

SEQ ID NO: 593281 - DNA, 15 bp, Homo sapiens
gagctaagcacttca

SEQ ID NO: 593282 - DNA, 15 bp, Homo sapiens
agctaagcacttcac

SEQ ID NO: 593283 - DNA, 15 bp, Homo sapiens
gctaagcacttcaca

SEQ ID NO: 593284 - DNA, 15 bp, Homo sapiens
ctaagcacttcacat

SEQ ID NO: 593285 - DNA, 15 bp, Homo sapiens
taagcacttcacatt

SEQ ID NO: 593286 - DNA, 15 bp, Homo sapiens
aagcacttcacattc

SEQ ID NO: 593287 - DNA, 15 bp, Homo sapiens
agcacttcacattcc

SEQ ID NO: 593288 - DNA, 15 bp, Homo sapiens
gcacttcacattcct

SEQ ID NO: 593289 - DNA, 15 bp, Homo sapiens
cacttcacattcctt

SEQ ID NO: 593290 - DNA, 15 bp, Homo sapiens
acttcacattcctta

SEQ ID NO: 593291 - DNA, 15 bp, Homo sapiens
cttcacattccttac

SEQ ID NO: 593292 - DNA, 15 bp, Homo sapiens
ttcacattccttacc

SEQ ID NO: 593293 - DNA, 15 bp, Homo sapiens
tcacattccttaccc

SEQ ID NO: 593294 - DNA, 15 bp, Homo sapiens
cacattccttacccc

SEQ ID NO: 593295 - DNA, 15 bp, Homo sapiens
acattccttaccccg

SEQ ID NO: 593296 - DNA, 15 bp, Homo sapiens
cattccttaccccgc

SEQ ID NO: 593297 - DNA, 15 bp, Homo sapiens
attccttaccccgca

SEQ ID NO: 593298 - DNA, 15 bp, Homo sapiens
ttccttaccccgcat

SEQ ID NO: 593299 - DNA, 15 bp, Homo sapiens
tccttaccccgcatc

SEQ ID NO: 593300 - DNA, 15 bp, Homo sapiens
ccttaccccgcatca

SEQ ID NO: 593301 - DNA, 15 bp, Homo sapiens
cttaccccgcatcaa

SEQ ID NO: 593302 - DNA, 15 bp, Homo sapiens
ttaccccgcatcaac

SEQ ID NO: 593303 - DNA, 15 bp, Homo sapiens
taccccgcatcaaca

SEQ ID NO: 593304 - DNA, 15 bp, Homo sapiens
accccgcatcaacaa

SEQ ID NO: 593305 - DNA, 15 bp, Homo sapiens
ccccgcatcaacaat

SEQ ID NO: 593306 - DNA, 15 bp, Homo sapiens
cccgcatcaacaatc

SEQ ID NO: 593307 - DNA, 15 bp, Homo sapiens
ccgcatcaacaatcc

SEQ ID NO: 593308 - DNA, 15 bp, Homo sapiens
cgcatcaacaatcct

SEQ ID NO: 593309 - DNA, 15 bp, Homo sapiens
gcatcaacaatccta

SEQ ID NO: 593310 - DNA, 15 bp, Homo sapiens
catcaacaatcctat

SEQ ID NO: 593311 - DNA, 15 bp, Homo sapiens
atcaacaatcctatg

SEQ ID NO: 593312 - DNA, 15 bp, Homo sapiens
tcaacaatcctatga

SEQ ID NO: 593313 - DNA, 15 bp, Homo sapiens
caacaatcctatgag

SEQ ID NO: 593314 - DNA, 15 bp, Homo sapiens
aacaatcctatgagg

SEQ ID NO: 593315 - DNA, 15 bp, Homo sapiens
acaatcctatgaggt

SEQ ID NO: 593316 - DNA, 15 bp, Homo sapiens
caatcctatgaggta

SEQ ID NO: 593317 - DNA, 15 bp, Homo sapiens
aatcctatgaggtag

SEQ ID NO: 593318 - DNA, 15 bp, Homo sapiens
atcctatgaggtaga

SEQ ID NO: 593319 - DNA, 15 bp, Homo sapiens
tcctatgaggtagat

SEQ ID NO: 593320 - DNA, 15 bp, Homo sapiens
cctatgaggtagatg

SEQ ID NO: 593321 - DNA, 15 bp, Homo sapiens
ctatgaggtagatgt

SEQ ID NO: 593322 - DNA, 15 bp, Homo sapiens
tatgaggtagatgtg

SEQ ID NO: 593323 - DNA, 15 bp, Homo sapiens
atgaggtagatgtgg

SEQ ID NO: 593324 - DNA, 15 bp, Homo sapiens
tgaggtagatgtgga

SEQ ID NO: 593325 - DNA, 15 bp, Homo sapiens
gaggtagatgtggaa

SEQ ID NO: 593326 - DNA, 15 bp, Homo sapiens
aggtagatgtggaaa

SEQ ID NO: 593327 - DNA, 15 bp, Homo sapiens
ggtagatgtggaaaa

SEQ ID NO: 593328 - DNA, 15 bp, Homo sapiens
gtagatgtggaaaat

SEQ ID NO: 593329 - DNA, 15 bp, Homo sapiens
tagatgtggaaaatg

SEQ ID NO: 593330 - DNA, 15 bp, Homo sapiens
agatgtggaaaatgc

SEQ ID NO: 593331 - DNA, 15 bp, Homo sapiens
gatgtggaaaatgca

SEQ ID NO: 593332 - DNA, 15 bp, Homo sapiens
atgtggaaaatgcag

SEQ ID NO: 593333 - DNA, 15 bp, Homo sapiens
tgtggaaaatgcaga

SEQ ID NO: 593334 - DNA, 15 bp, Homo sapiens
gtggaaaatgcagac

SEQ ID NO: 593335 - DNA, 15 bp, Homo sapiens
tggaaaatgcagaca

SEQ ID NO: 593336 - DNA, 15 bp, Homo sapiens
ggaaaatgcagacac

SEQ ID NO: 593337 - DNA, 15 bp, Homo sapiens
gaaaatgcagacacg

SEQ ID NO: 593338 - DNA, 15 bp, Homo sapiens
aaaatgcagacacgg

SEQ ID NO: 593339 - DNA, 15 bp, Homo sapiens
aaatgcagacacggg

SEQ ID NO: 593340 - DNA, 15 bp, Homo sapiens
aatgcagacacgggg

SEQ ID NO: 593341 - DNA, 15 bp, Homo sapiens
atgcagacacgggga

SEQ ID NO: 593342 - DNA, 15 bp, Homo sapiens
tgcagacacggggac

SEQ ID NO: 593343 - DNA, 15 bp, Homo sapiens
gcagacacggggaca

SEQ ID NO: 593344 - DNA, 15 bp, Homo sapiens
cagacacggggacag

SEQ ID NO: 593345 - DNA, 15 bp, Homo sapiens
agacacggggacagg

SEQ ID NO: 593346 - DNA, 15 bp, Homo sapiens
gacacggggacaggc

SEQ ID NO: 593347 - DNA, 15 bp, Homo sapiens
acacggggacaggct

SEQ ID NO: 593348 - DNA, 15 bp, Homo sapiens
cacggggacaggctc

SEQ ID NO: 593349 - DNA, 15 bp, Homo sapiens
acggggacaggctca

SEQ ID NO: 593350 - DNA, 15 bp, Homo sapiens
cggggacaggctcaa

SEQ ID NO: 593351 - DNA, 15 bp, Homo sapiens
ggggacaggctcaat

SEQ ID NO: 593352 - DNA, 15 bp, Homo sapiens
gggacaggctcaatc

SEQ ID NO: 593353 - DNA, 15 bp, Homo sapiens
ggacaggctcaatca

SEQ ID NO: 593354 - DNA, 15 bp, Homo sapiens
gacaggctcaatcac

SEQ ID NO: 593355 - DNA, 15 bp, Homo sapiens
acaggctcaatcact

SEQ ID NO: 593356 - DNA, 15 bp, Homo sapiens
caggctcaatcactt

SEQ ID NO: 593357 - DNA, 15 bp, Homo sapiens
aggctcaatcacttg

SEQ ID NO: 593358 - DNA, 15 bp, Homo sapiens
ggctcaatcacttgc

SEQ ID NO: 593359 - DNA, 15 bp, Homo sapiens
gctcaatcacttgcc

SEQ ID NO: 593360 - DNA, 15 bp, Homo sapiens
ctcaatcacttgccc

SEQ ID NO: 593361 - DNA, 15 bp, Homo sapiens
tcaatcacttgcccc

SEQ ID NO: 593362 - DNA, 15 bp, Homo sapiens
caatcacttgcccca

SEQ ID NO: 593363 - DNA, 15 bp, Homo sapiens
aatcacttgccccaa

SEQ ID NO: 593364 - DNA, 15 bp, Homo sapiens
atcacttgccccaag

SEQ ID NO: 593365 - DNA, 15 bp, Homo sapiens
tcacttgccccaagg

SEQ ID NO: 593366 - DNA, 15 bp, Homo sapiens
cacttgccccaaggt

SEQ ID NO: 593367 - DNA, 15 bp, Homo sapiens
acttgccccaaggtc

SEQ ID NO: 593368 - DNA, 15 bp, Homo sapiens
cttgccccaaggtca

SEQ ID NO: 593369 - DNA, 15 bp, Homo sapiens
ttgccccaaggtcac

SEQ ID NO: 593370 - DNA, 15 bp, Homo sapiens
tgccccaaggtcacc

SEQ ID NO: 593371 - DNA, 15 bp, Homo sapiens
gccccaaggtcacct

SEQ ID NO: 593372 - DNA, 15 bp, Homo sapiens
ccccaaggtcacctt

SEQ ID NO: 593373 - DNA, 15 bp, Homo sapiens
cccaaggtcacctta

SEQ ID NO: 593374 - DNA, 15 bp, Homo sapiens
ccaaggtcaccttaa

SEQ ID NO: 593375 - DNA, 15 bp, Homo sapiens
caaggtcaccttaac

SEQ ID NO: 593376 - DNA, 15 bp, Homo sapiens
aaggtcaccttaact

SEQ ID NO: 593377 - DNA, 15 bp, Homo sapiens
aggtcaccttaactg

SEQ ID NO: 593378 - DNA, 15 bp, Homo sapiens
ggtcaccttaactgt

SEQ ID NO: 593379 - DNA, 15 bp, Homo sapiens
gtcaccttaactgtt

SEQ ID NO: 593380 - DNA, 15 bp, Homo sapiens
tcaccttaactgtta

SEQ ID NO: 593381 - DNA, 15 bp, Homo sapiens
caccttaactgttag

SEQ ID NO: 593382 - DNA, 15 bp, Homo sapiens
accttaactgttagg

SEQ ID NO: 593383 - DNA, 15 bp, Homo sapiens
ccttaactgttaggt

SEQ ID NO: 593384 - DNA, 15 bp, Homo sapiens
cttaactgttaggtg

SEQ ID NO: 593385 - DNA, 15 bp, Homo sapiens
ttaactgttaggtgt

SEQ ID NO: 593386 - DNA, 15 bp, Homo sapiens
taactgttaggtgtt

SEQ ID NO: 593387 - DNA, 15 bp, Homo sapiens
aactgttaggtgttc

SEQ ID NO: 593388 - DNA, 15 bp, Homo sapiens
actgttaggtgttct

SEQ ID NO: 593389 - DNA, 15 bp, Homo sapiens
ctgttaggtgttctt

SEQ ID NO: 593390 - DNA, 15 bp, Homo sapiens
tgttaggtgttcttt

SEQ ID NO: 593391 - DNA, 15 bp, Homo sapiens
gttaggtgttcttta

SEQ ID NO: 593392 - DNA, 15 bp, Homo sapiens
ttaggtgttctttat

SEQ ID NO: 593393 - DNA, 15 bp, Homo sapiens
taggtgttctttatg

SEQ ID NO: 593394 - DNA, 15 bp, Homo sapiens
aggtgttctttatgc

SEQ ID NO: 593395 - DNA, 15 bp, Homo sapiens
ggtgttctttatgcc

SEQ ID NO: 593396 - DNA, 15 bp, Homo sapiens
gtgttctttatgcct

SEQ ID NO: 593397 - DNA, 15 bp, Homo sapiens
tgttctttatgcctc

SEQ ID NO: 593398 - DNA, 15 bp, Homo sapiens
gttctttatgcctcc

SEQ ID NO: 593399 - DNA, 15 bp, Homo sapiens
ttctttatgcctcct

SEQ ID NO: 593400 - DNA, 15 bp, Homo sapiens
tctttatgcctcctt

SEQ ID NO: 593401 - DNA, 15 bp, Homo sapiens
ctttatgcctcctta

SEQ ID NO: 593402 - DNA, 15 bp, Homo sapiens
tttatgcctccttat

SEQ ID NO: 593403 - DNA, 15 bp, Homo sapiens
ttatgcctccttata

SEQ ID NO: 593404 - DNA, 15 bp, Homo sapiens
tatgcctccttataa

SEQ ID NO: 593405 - DNA, 15 bp, Homo sapiens
atgcctccttataaa

SEQ ID NO: 593406 - DNA, 15 bp, Homo sapiens
tgcctccttataaag

SEQ ID NO: 593407 - DNA, 15 bp, Homo sapiens
gcctccttataaaga

SEQ ID NO: 593408 - DNA, 15 bp, Homo sapiens
cctccttataaagaa

SEQ ID NO: 593409 - DNA, 15 bp, Homo sapiens
ctccttataaagaaa

SEQ ID NO: 593410 - DNA, 15 bp, Homo sapiens
tccttataaagaaac

SEQ ID NO: 593411 - DNA, 15 bp, Homo sapiens
ccttataaagaaacc

SEQ ID NO: 593412 - DNA, 15 bp, Homo sapiens
cttataaagaaaccc

SEQ ID NO: 593413 - DNA, 15 bp, Homo sapiens
ttataaagaaaccct

SEQ ID NO: 593414 - DNA, 15 bp, Homo sapiens
tataaagaaaccctg

SEQ ID NO: 593415 - DNA, 15 bp, Homo sapiens
ataaagaaaccctgc

SEQ ID NO: 593416 - DNA, 15 bp, Homo sapiens
taaagaaaccctgct

SEQ ID NO: 593417 - DNA, 15 bp, Homo sapiens
aaagaaaccctgctt

SEQ ID NO: 593418 - DNA, 15 bp, Homo sapiens
aagaaaccctgcttc

SEQ ID NO: 593419 - DNA, 15 bp, Homo sapiens
agaaaccctgcttcc

SEQ ID NO: 593420 - DNA, 15 bp, Homo sapiens
gaaaccctgcttccc

SEQ ID NO: 593421 - DNA, 15 bp, Homo sapiens
aaaccctgcttccca

SEQ ID NO: 593422 - DNA, 15 bp, Homo sapiens
aaccctgcttcccac

SEQ ID NO: 593423 - DNA, 15 bp, Homo sapiens
accctgcttcccaca

SEQ ID NO: 593424 - DNA, 15 bp, Homo sapiens
ccctgcttcccacag

SEQ ID NO: 593425 - DNA, 15 bp, Homo sapiens
cctgcttcccacagg

SEQ ID NO: 593426 - DNA, 15 bp, Homo sapiens
ctgcttcccacaggt

SEQ ID NO: 593427 - DNA, 15 bp, Homo sapiens
tgcttcccacaggtg

SEQ ID NO: 593428 - DNA, 15 bp, Homo sapiens
gcttcccacaggtgt

SEQ ID NO: 593429 - DNA, 15 bp, Homo sapiens
cttcccacaggtgtt

SEQ ID NO: 593430 - DNA, 15 bp, Homo sapiens
ttcccacaggtgttg

SEQ ID NO: 593431 - DNA, 15 bp, Homo sapiens
tcccacaggtgttga

SEQ ID NO: 593432 - DNA, 15 bp, Homo sapiens
cccacaggtgttgag

SEQ ID NO: 593433 - DNA, 15 bp, Homo sapiens
ccacaggtgttgaga

SEQ ID NO: 593434 - DNA, 15 bp, Homo sapiens
cacaggtgttgagag

SEQ ID NO: 593435 - DNA, 15 bp, Homo sapiens
acaggtgttgagagg

SEQ ID NO: 593436 - DNA, 15 bp, Homo sapiens
caggtgttgagagga

SEQ ID NO: 593437 - DNA, 15 bp, Homo sapiens
aggtgttgagaggag

SEQ ID NO: 593438 - DNA, 15 bp, Homo sapiens
ggtgttgagaggagc

SEQ ID NO: 593439 - DNA, 15 bp, Homo sapiens
gtgttgagaggagct

SEQ ID NO: 593440 - DNA, 15 bp, Homo sapiens
tgttgagaggagctg

SEQ ID NO: 593441 - DNA, 15 bp, Homo sapiens
gttgagaggagctgg

SEQ ID NO: 593442 - DNA, 15 bp, Homo sapiens
ttgagaggagctgga

SEQ ID NO: 593443 - DNA, 15 bp, Homo sapiens
tgagaggagctggag

SEQ ID NO: 593444 - DNA, 15 bp, Homo sapiens
gagaggagctggagg

SEQ ID NO: 593445 - DNA, 15 bp, Homo sapiens
agaggagctggaggg

SEQ ID NO: 593446 - DNA, 15 bp, Homo sapiens
gaggagctggaggga

SEQ ID NO: 593447 - DNA, 15 bp, Homo sapiens
aggagctggagggag

SEQ ID NO: 593448 - DNA, 15 bp, Homo sapiens
ggagctggagggagc

SEQ ID NO: 593449 - DNA, 15 bp, Homo sapiens
gagctggagggagct

SEQ ID NO: 593450 - DNA, 15 bp, Homo sapiens
agctggagggagctt

SEQ ID NO: 593451 - DNA, 15 bp, Homo sapiens
gctggagggagcttg

SEQ ID NO: 593452 - DNA, 15 bp, Homo sapiens
ctggagggagcttga

SEQ ID NO: 593453 - DNA, 15 bp, Homo sapiens
tggagggagcttgac

SEQ ID NO: 593454 - DNA, 15 bp, Homo sapiens
ggagggagcttgact

SEQ ID NO: 593455 - DNA, 15 bp, Homo sapiens
gagggagcttgacta

SEQ ID NO: 593456 - DNA, 15 bp, Homo sapiens
agggagcttgactag

SEQ ID NO: 593457 - DNA, 15 bp, Homo sapiens
gggagcttgactagg

SEQ ID NO: 593458 - DNA, 15 bp, Homo sapiens
ggagcttgactaggg

SEQ ID NO: 593459 - DNA, 15 bp, Homo sapiens
gagcttgactagggc

SEQ ID NO: 593460 - DNA, 15 bp, Homo sapiens
agcttgactagggct

SEQ ID NO: 593461 - DNA, 15 bp, Homo sapiens
gcttgactagggctc

SEQ ID NO: 593462 - DNA, 15 bp, Homo sapiens
cttgactagggctca

SEQ ID NO: 593463 - DNA, 15 bp, Homo sapiens
ttgactagggctcat

SEQ ID NO: 593464 - DNA, 15 bp, Homo sapiens
tgactagggctcatc

SEQ ID NO: 593465 - DNA, 15 bp, Homo sapiens
gactagggctcatca

SEQ ID NO: 593466 - DNA, 15 bp, Homo sapiens
actagggctcatcag

SEQ ID NO: 593467 - DNA, 15 bp, Homo sapiens
ctagggctcatcagg

SEQ ID NO: 593468 - DNA, 15 bp, Homo sapiens
tagggctcatcaggc

SEQ ID NO: 593469 - DNA, 15 bp, Homo sapiens
agggctcatcaggca

SEQ ID NO: 593470 - DNA, 15 bp, Homo sapiens
gggctcatcaggcaa

SEQ ID NO: 593471 - DNA, 15 bp, Homo sapiens
ggctcatcaggcaag

SEQ ID NO: 593472 - DNA, 15 bp, Homo sapiens
gctcatcaggcaagc

SEQ ID NO: 593473 - DNA, 15 bp, Homo sapiens
ctcatcaggcaagcc

SEQ ID NO: 593474 - DNA, 15 bp, Homo sapiens
tcatcaggcaagccc

SEQ ID NO: 593475 - DNA, 15 bp, Homo sapiens
catcaggcaagcccc

SEQ ID NO: 593476 - DNA, 15 bp, Homo sapiens
atcaggcaagccccg

SEQ ID NO: 593477 - DNA, 15 bp, Homo sapiens
tcaggcaagccccgg

SEQ ID NO: 593478 - DNA, 15 bp, Homo sapiens
caggcaagccccggc

SEQ ID NO: 593479 - DNA, 15 bp, Homo sapiens
aggcaagccccggca

SEQ ID NO: 593480 - DNA, 15 bp, Homo sapiens
ggcaagccccggcat

SEQ ID NO: 593481 - DNA, 15 bp, Homo sapiens
gcaagccccggcatg

SEQ ID NO: 593482 - DNA, 15 bp, Homo sapiens
caagccccggcatgt

SEQ ID NO: 593483 - DNA, 15 bp, Homo sapiens
aagccccggcatgtg

SEQ ID NO: 593484 - DNA, 15 bp, Homo sapiens
agccccggcatgtgc

SEQ ID NO: 593485 - DNA, 15 bp, Homo sapiens
gccccggcatgtgcc

SEQ ID NO: 593486 - DNA, 15 bp, Homo sapiens
ccccggcatgtgcct

SEQ ID NO: 593487 - DNA, 15 bp, Homo sapiens
cccggcatgtgcctg

SEQ ID NO: 593488 - DNA, 15 bp, Homo sapiens
ccggcatgtgcctgg

SEQ ID NO: 593489 - DNA, 15 bp, Homo sapiens
cggcatgtgcctggc

SEQ ID NO: 593490 - DNA, 15 bp, Homo sapiens
ggcatgtgcctggct

SEQ ID NO: 593491 - DNA, 15 bp, Homo sapiens
gcatgtgcctggctc

SEQ ID NO: 593492 - DNA, 15 bp, Homo sapiens
catgtgcctggctct

SEQ ID NO: 593493 - DNA, 15 bp, Homo sapiens
atgtgcctggctctc

SEQ ID NO: 593494 - DNA, 15 bp, Homo sapiens
tgtgcctggctctcc

SEQ ID NO: 593495 - DNA, 15 bp, Homo sapiens
gtgcctggctctcct

SEQ ID NO: 593496 - DNA, 15 bp, Homo sapiens
tgcctggctctcctc

SEQ ID NO: 593497 - DNA, 15 bp, Homo sapiens
gcctggctctcctct

SEQ ID NO: 593498 - DNA, 15 bp, Homo sapiens
cctggctctcctctt

SEQ ID NO: 593499 - DNA, 15 bp, Homo sapiens
ctggctctcctcttt

SEQ ID NO: 593500 - DNA, 15 bp, Homo sapiens
tggctctcctctttc

SEQ ID NO: 593501 - DNA, 15 bp, Homo sapiens
ggctctcctctttct

SEQ ID NO: 593502 - DNA, 15 bp, Homo sapiens
gctctcctctttcta

SEQ ID NO: 593503 - DNA, 15 bp, Homo sapiens
ctctcctctttctac

SEQ ID NO: 593504 - DNA, 15 bp, Homo sapiens
tctcctctttctacc

SEQ ID NO: 593505 - DNA, 15 bp, Homo sapiens
ctcctctttctacct

SEQ ID NO: 593506 - DNA, 15 bp, Homo sapiens
tcctctttctacctg

SEQ ID NO: 593507 - DNA, 15 bp, Homo sapiens
cctctttctacctgg

SEQ ID NO: 593508 - DNA, 15 bp, Homo sapiens
ctctttctacctgga

SEQ ID NO: 593509 - DNA, 15 bp, Homo sapiens
tctttctacctggag

SEQ ID NO: 593510 - DNA, 15 bp, Homo sapiens
ctttctacctggagc

SEQ ID NO: 593511 - DNA, 15 bp, Homo sapiens
tttctacctggagct

SEQ ID NO: 593512 - DNA, 15 bp, Homo sapiens
ttctacctggagctt

SEQ ID NO: 593513 - DNA, 15 bp, Homo sapiens
tctacctggagcttt

SEQ ID NO: 593514 - DNA, 15 bp, Homo sapiens
ctacctggagctttt

SEQ ID NO: 593515 - DNA, 15 bp, Homo sapiens
tacctggagcttttc

SEQ ID NO: 593516 - DNA, 15 bp, Homo sapiens
acctggagcttttcc

SEQ ID NO: 593517 - DNA, 15 bp, Homo sapiens
cctggagcttttcct

SEQ ID NO: 593518 - DNA, 15 bp, Homo sapiens
ctggagcttttcctg

SEQ ID NO: 593519 - DNA, 15 bp, Homo sapiens
tggagcttttcctgc

SEQ ID NO: 593520 - DNA, 15 bp, Homo sapiens
ggagcttttcctgcc

SEQ ID NO: 593521 - DNA, 15 bp, Homo sapiens
gagcttttcctgccc

SEQ ID NO: 593522 - DNA, 15 bp, Homo sapiens
agcttttcctgccct

SEQ ID NO: 593523 - DNA, 15 bp, Homo sapiens
gcttttcctgccctt

SEQ ID NO: 593524 - DNA, 15 bp, Homo sapiens
cttttcctgccctta

SEQ ID NO: 593525 - DNA, 15 bp, Homo sapiens
ttttcctgcccttaa

SEQ ID NO: 593526 - DNA, 15 bp, Homo sapiens
tttcctgcccttaat

SEQ ID NO: 593527 - DNA, 15 bp, Homo sapiens
ttcctgcccttaatg

SEQ ID NO: 593528 - DNA, 15 bp, Homo sapiens
tcctgcccttaatgg

SEQ ID NO: 593529 - DNA, 15 bp, Homo sapiens
cctgcccttaatggc

SEQ ID NO: 593530 - DNA, 15 bp, Homo sapiens
ctgcccttaatggcc

SEQ ID NO: 593531 - DNA, 15 bp, Homo sapiens
tgcccttaatggccc

SEQ ID NO: 593532 - DNA, 15 bp, Homo sapiens
gcccttaatggcccc

SEQ ID NO: 593533 - DNA, 15 bp, Homo sapiens
cccttaatggcccca

SEQ ID NO: 593534 - DNA, 15 bp, Homo sapiens
ccttaatggccccaa

SEQ ID NO: 593535 - DNA, 15 bp, Homo sapiens
cttaatggccccaac

SEQ ID NO: 593536 - DNA, 15 bp, Homo sapiens
ttaatggccccaact

SEQ ID NO: 593537 - DNA, 15 bp, Homo sapiens
taatggccccaactc

SEQ ID NO: 593538 - DNA, 15 bp, Homo sapiens
aatggccccaactca

SEQ ID NO: 593539 - DNA, 15 bp, Homo sapiens
atggccccaactcat

SEQ ID NO: 593540 - DNA, 15 bp, Homo sapiens
tggccccaactcatt

SEQ ID NO: 593541 - DNA, 15 bp, Homo sapiens
ggccccaactcattt

SEQ ID NO: 593542 - DNA, 15 bp, Homo sapiens
gccccaactcatttc

SEQ ID NO: 593543 - DNA, 15 bp, Homo sapiens
ccccaactcatttct

SEQ ID NO: 593544 - DNA, 15 bp, Homo sapiens
cccaactcatttctc

SEQ ID NO: 593545 - DNA, 15 bp, Homo sapiens
ccaactcatttctct

SEQ ID NO: 593546 - DNA, 15 bp, Homo sapiens
caactcatttctctt

SEQ ID NO: 593547 - DNA, 15 bp, Homo sapiens
aactcatttctctta

SEQ ID NO: 593548 - DNA, 15 bp, Homo sapiens
actcatttctcttag

SEQ ID NO: 593549 - DNA, 15 bp, Homo sapiens
ctcatttctcttagt

SEQ ID NO: 593550 - DNA, 15 bp, Homo sapiens
tcatttctcttagtc

SEQ ID NO: 593551 - DNA, 15 bp, Homo sapiens
catttctcttagtcc

SEQ ID NO: 593552 - DNA, 15 bp, Homo sapiens
atttctcttagtcca

SEQ ID NO: 593553 - DNA, 15 bp, Homo sapiens
tttctcttagtccat

SEQ ID NO: 593554 - DNA, 15 bp, Homo sapiens
ttctcttagtccatg

SEQ ID NO: 593555 - DNA, 15 bp, Homo sapiens
tctcttagtccatgt

SEQ ID NO: 593556 - DNA, 15 bp, Homo sapiens
ctcttagtccatgtc

SEQ ID NO: 593557 - DNA, 15 bp, Homo sapiens
tcttagtccatgtca

SEQ ID NO: 593558 - DNA, 15 bp, Homo sapiens
cttagtccatgtcag

SEQ ID NO: 593559 - DNA, 15 bp, Homo sapiens
ttagtccatgtcagt

SEQ ID NO: 593560 - DNA, 15 bp, Homo sapiens
tagtccatgtcagtg

SEQ ID NO: 593561 - DNA, 15 bp, Homo sapiens
agtccatgtcagtgc

SEQ ID NO: 593562 - DNA, 15 bp, Homo sapiens
gtccatgtcagtgcc

SEQ ID NO: 593563 - DNA, 15 bp, Homo sapiens
tccatgtcagtgccc

SEQ ID NO: 593564 - DNA, 15 bp, Homo sapiens
ccatgtcagtgccct

SEQ ID NO: 593565 - DNA, 15 bp, Homo sapiens
catgtcagtgccctg

SEQ ID NO: 593566 - DNA, 15 bp, Homo sapiens
atgtcagtgccctga

SEQ ID NO: 593567 - DNA, 15 bp, Homo sapiens
tgtcagtgccctgag

SEQ ID NO: 593568 - DNA, 15 bp, Homo sapiens
gtcagtgccctgagc

SEQ ID NO: 593569 - DNA, 15 bp, Homo sapiens
tcagtgccctgagca

SEQ ID NO: 593570 - DNA, 15 bp, Homo sapiens
cagtgccctgagcat

SEQ ID NO: 593571 - DNA, 15 bp, Homo sapiens
agtgccctgagcatc

SEQ ID NO: 593572 - DNA, 15 bp, Homo sapiens
gtgccctgagcatct

SEQ ID NO: 593573 - DNA, 15 bp, Homo sapiens
tgccctgagcatctc

SEQ ID NO: 593574 - DNA, 15 bp, Homo sapiens
gccctgagcatctca

SEQ ID NO: 593575 - DNA, 15 bp, Homo sapiens
ccctgagcatctcag

SEQ ID NO: 593576 - DNA, 15 bp, Homo sapiens
cctgagcatctcagc

SEQ ID NO: 593577 - DNA, 15 bp, Homo sapiens
ctgagcatctcagcc

SEQ ID NO: 593578 - DNA, 15 bp, Homo sapiens
tgagcatctcagccc

SEQ ID NO: 593579 - DNA, 15 bp, Homo sapiens
gagcatctcagccca

SEQ ID NO: 593580 - DNA, 15 bp, Homo sapiens
agcatctcagcccaa

SEQ ID NO: 593581 - DNA, 15 bp, Homo sapiens
gcatctcagcccaag

SEQ ID NO: 593582 - DNA, 15 bp, Homo sapiens
catctcagcccaagc

SEQ ID NO: 593583 - DNA, 15 bp, Homo sapiens
atctcagcccaagct

SEQ ID NO: 593584 - DNA, 15 bp, Homo sapiens
tctcagcccaagctg

SEQ ID NO: 593585 - DNA, 15 bp, Homo sapiens
ctcagcccaagctga

SEQ ID NO: 593586 - DNA, 15 bp, Homo sapiens
tcagcccaagctgag

SEQ ID NO: 593587 - DNA, 15 bp, Homo sapiens
cagcccaagctgaga

SEQ ID NO: 593588 - DNA, 15 bp, Homo sapiens
agcccaagctgagat

SEQ ID NO: 593589 - DNA, 15 bp, Homo sapiens
gcccaagctgagatg

SEQ ID NO: 593590 - DNA, 15 bp, Homo sapiens
cccaagctgagatga

SEQ ID NO: 593591 - DNA, 15 bp, Homo sapiens
ccaagctgagatgat

SEQ ID NO: 593592 - DNA, 15 bp, Homo sapiens
caagctgagatgata

SEQ ID NO: 593593 - DNA, 15 bp, Homo sapiens
aagctgagatgatag

SEQ ID NO: 593594 - DNA, 15 bp, Homo sapiens
agctgagatgataga

SEQ ID NO: 593595 - DNA, 15 bp, Homo sapiens
gctgagatgatagaa

SEQ ID NO: 593596 - DNA, 15 bp, Homo sapiens
ctgagatgatagaaa

SEQ ID NO: 593597 - DNA, 15 bp, Homo sapiens
tgagatgatagaaac

SEQ ID NO: 593598 - DNA, 15 bp, Homo sapiens
gagatgatagaaaca

SEQ ID NO: 593599 - DNA, 15 bp, Homo sapiens
agatgatagaaacac

SEQ ID NO: 593600 - DNA, 15 bp, Homo sapiens
gatgatagaaacacc

SEQ ID NO: 593601 - DNA, 15 bp, Homo sapiens
atgatagaaacaccc

SEQ ID NO: 593602 - DNA, 15 bp, Homo sapiens
tgatagaaacaccca

SEQ ID NO: 593603 - DNA, 15 bp, Homo sapiens
gatagaaacacccag

SEQ ID NO: 593604 - DNA, 15 bp, Homo sapiens
atagaaacacccaga

SEQ ID NO: 593605 - DNA, 15 bp, Homo sapiens
tagaaacacccagag

SEQ ID NO: 593606 - DNA, 15 bp, Homo sapiens
agaaacacccagagg

SEQ ID NO: 593607 - DNA, 15 bp, Homo sapiens
gaaacacccagaggg

SEQ ID NO: 593608 - DNA, 15 bp, Homo sapiens
aaacacccagagggg

SEQ ID NO: 593609 - DNA, 15 bp, Homo sapiens
aacacccagaggggt

SEQ ID NO: 593610 - DNA, 15 bp, Homo sapiens
acacccagaggggtc

SEQ ID NO: 593611 - DNA, 15 bp, Homo sapiens
cacccagaggggtcc

SEQ ID NO: 593612 - DNA, 15 bp, Homo sapiens
acccagaggggtcct

SEQ ID NO: 593613 - DNA, 15 bp, Homo sapiens
cccagaggggtcctc

SEQ ID NO: 593614 - DNA, 15 bp, Homo sapiens
ccagaggggtcctct

SEQ ID NO: 593615 - DNA, 15 bp, Homo sapiens
cagaggggtcctcta

SEQ ID NO: 593616 - DNA, 15 bp, Homo sapiens
agaggggtcctctac

SEQ ID NO: 593617 - DNA, 15 bp, Homo sapiens
gaggggtcctctacc

SEQ ID NO: 593618 - DNA, 15 bp, Homo sapiens
aggggtcctctaccc

SEQ ID NO: 593619 - DNA, 15 bp, Homo sapiens
ggggtcctctaccct

SEQ ID NO: 593620 - DNA, 15 bp, Homo sapiens
gggtcctctaccctg

SEQ ID NO: 593621 - DNA, 15 bp, Homo sapiens
ggtcctctaccctgt

SEQ ID NO: 593622 - DNA, 15 bp, Homo sapiens
gtcctctaccctgtg

SEQ ID NO: 593623 - DNA, 15 bp, Homo sapiens
tcctctaccctgtga

SEQ ID NO: 593624 - DNA, 15 bp, Homo sapiens
cctctaccctgtgac

SEQ ID NO: 593625 - DNA, 15 bp, Homo sapiens
ctctaccctgtgaca

SEQ ID NO: 593626 - DNA, 15 bp, Homo sapiens
tctaccctgtgacag

SEQ ID NO: 593627 - DNA, 15 bp, Homo sapiens
ctaccctgtgacagc

SEQ ID NO: 593628 - DNA, 15 bp, Homo sapiens
taccctgtgacagct

SEQ ID NO: 593629 - DNA, 15 bp, Homo sapiens
accctgtgacagctg

SEQ ID NO: 593630 - DNA, 15 bp, Homo sapiens
ccctgtgacagctgc

SEQ ID NO: 593631 - DNA, 15 bp, Homo sapiens
cctgtgacagctgcg

SEQ ID NO: 593632 - DNA, 15 bp, Homo sapiens
ctgtgacagctgcgg

SEQ ID NO: 593633 - DNA, 15 bp, Homo sapiens
tgtgacagctgcggt

SEQ ID NO: 593634 - DNA, 15 bp, Homo sapiens
gtgacagctgcggtg

SEQ ID NO: 593635 - DNA, 15 bp, Homo sapiens
tgacagctgcggtgt

SEQ ID NO: 593636 - DNA, 15 bp, Homo sapiens
gacagctgcggtgtg

SEQ ID NO: 593637 - DNA, 15 bp, Homo sapiens
acagctgcggtgtgg

SEQ ID NO: 593638 - DNA, 15 bp, Homo sapiens
cagctgcggtgtggg

SEQ ID NO: 593639 - DNA, 15 bp, Homo sapiens
agctgcggtgtggga

SEQ ID NO: 593640 - DNA, 15 bp, Homo sapiens
gctgcggtgtgggaa

SEQ ID NO: 593641 - DNA, 15 bp, Homo sapiens
ctgcggtgtgggaag

SEQ ID NO: 593642 - DNA, 15 bp, Homo sapiens
tgcggtgtgggaaga

SEQ ID NO: 593643 - DNA, 15 bp, Homo sapiens
gcggtgtgggaagag

SEQ ID NO: 593644 - DNA, 15 bp, Homo sapiens
cggtgtgggaagagc

SEQ ID NO: 593645 - DNA, 15 bp, Homo sapiens
ggtgtgggaagagca

SEQ ID NO: 593646 - DNA, 15 bp, Homo sapiens
gtgtgggaagagcac

SEQ ID NO: 593647 - DNA, 15 bp, Homo sapiens
tgtgggaagagcacg

SEQ ID NO: 593648 - DNA, 15 bp, Homo sapiens
gtgggaagagcacgt

SEQ ID NO: 593649 - DNA, 15 bp, Homo sapiens
tgggaagagcacgtg

SEQ ID NO: 593650 - DNA, 15 bp, Homo sapiens
gggaagagcacgtgt

SEQ ID NO: 593651 - DNA, 15 bp, Homo sapiens
ggaagagcacgtgtc

SEQ ID NO: 593652 - DNA, 15 bp, Homo sapiens
gaagagcacgtgtct

SEQ ID NO: 593653 - DNA, 15 bp, Homo sapiens
aagagcacgtgtctc

SEQ ID NO: 593654 - DNA, 15 bp, Homo sapiens
agagcacgtgtctcc

SEQ ID NO: 593655 - DNA, 15 bp, Homo sapiens
gagcacgtgtctcct

SEQ ID NO: 593656 - DNA, 15 bp, Homo sapiens
agcacgtgtctcctc

SEQ ID NO: 593657 - DNA, 15 bp, Homo sapiens
gcacgtgtctcctcc

SEQ ID NO: 593658 - DNA, 15 bp, Homo sapiens
cacgtgtctcctcca

SEQ ID NO: 593659 - DNA, 15 bp, Homo sapiens
acgtgtctcctccaa

SEQ ID NO: 593660 - DNA, 15 bp, Homo sapiens
cgtgtctcctccaat

SEQ ID NO: 593661 - DNA, 15 bp, Homo sapiens
gtgtctcctccaatc

SEQ ID NO: 593662 - DNA, 15 bp, Homo sapiens
tgtctcctccaatcc

SEQ ID NO: 593663 - DNA, 15 bp, Homo sapiens
gtctcctccaatcct

SEQ ID NO: 593664 - DNA, 15 bp, Homo sapiens
tctcctccaatccta

SEQ ID NO: 593665 - DNA, 15 bp, Homo sapiens
ctcctccaatcctag

SEQ ID NO: 593666 - DNA, 15 bp, Homo sapiens
tcctccaatcctaga

SEQ ID NO: 593667 - DNA, 15 bp, Homo sapiens
cctccaatcctagac

SEQ ID NO: 593668 - DNA, 15 bp, Homo sapiens
ctccaatcctagacc

SEQ ID NO: 593669 - DNA, 15 bp, Homo sapiens
tccaatcctagacca

SEQ ID NO: 593670 - DNA, 15 bp, Homo sapiens
ccaatcctagaccag

SEQ ID NO: 593671 - DNA, 15 bp, Homo sapiens
caatcctagaccaga

SEQ ID NO: 593672 - DNA, 15 bp, Homo sapiens
aatcctagaccagag

SEQ ID NO: 593673 - DNA, 15 bp, Homo sapiens
atcctagaccagagt

SEQ ID NO: 593674 - DNA, 15 bp, Homo sapiens
tcctagaccagagtt

SEQ ID NO: 593675 - DNA, 15 bp, Homo sapiens
cctagaccagagttt

SEQ ID NO: 593676 - DNA, 15 bp, Homo sapiens
ctagaccagagtttc

SEQ ID NO: 593677 - DNA, 15 bp, Homo sapiens
tagaccagagtttct

SEQ ID NO: 593678 - DNA, 15 bp, Homo sapiens
agaccagagtttctc

SEQ ID NO: 593679 - DNA, 15 bp, Homo sapiens
gaccagagtttctca

SEQ ID NO: 593680 - DNA, 15 bp, Homo sapiens
accagagtttctcag

SEQ ID NO: 593681 - DNA, 15 bp, Homo sapiens
ccagagtttctcagc

SEQ ID NO: 593682 - DNA, 15 bp, Homo sapiens
cagagtttctcagcc

SEQ ID NO: 593683 - DNA, 15 bp, Homo sapiens
agagtttctcagcct

SEQ ID NO: 593684 - DNA, 15 bp, Homo sapiens
gagtttctcagcctc

SEQ ID NO: 593685 - DNA, 15 bp, Homo sapiens
agtttctcagcctca

SEQ ID NO: 593686 - DNA, 15 bp, Homo sapiens
gtttctcagcctcag

SEQ ID NO: 593687 - DNA, 15 bp, Homo sapiens
tttctcagcctcagc

SEQ ID NO: 593688 - DNA, 15 bp, Homo sapiens
ttctcagcctcagca

SEQ ID NO: 593689 - DNA, 15 bp, Homo sapiens
tctcagcctcagcat

SEQ ID NO: 593690 - DNA, 15 bp, Homo sapiens
ctcagcctcagcatc

SEQ ID NO: 593691 - DNA, 15 bp, Homo sapiens
tcagcctcagcatca

SEQ ID NO: 593692 - DNA, 15 bp, Homo sapiens
cagcctcagcatcac

SEQ ID NO: 593693 - DNA, 15 bp, Homo sapiens
agcctcagcatcact

SEQ ID NO: 593694 - DNA, 15 bp, Homo sapiens
gcctcagcatcactg

SEQ ID NO: 593695 - DNA, 15 bp, Homo sapiens
cctcagcatcactga

SEQ ID NO: 593696 - DNA, 15 bp, Homo sapiens
ctcagcatcactgac

SEQ ID NO: 593697 - DNA, 15 bp, Homo sapiens
tcagcatcactgaca

SEQ ID NO: 593698 - DNA, 15 bp, Homo sapiens
cagcatcactgacac

SEQ ID NO: 593699 - DNA, 15 bp, Homo sapiens
agcatcactgacact

SEQ ID NO: 593700 - DNA, 15 bp, Homo sapiens
gcatcactgacactt

SEQ ID NO: 593701 - DNA, 15 bp, Homo sapiens
catcactgacacttg

SEQ ID NO: 593702 - DNA, 15 bp, Homo sapiens
atcactgacacttgg

SEQ ID NO: 593703 - DNA, 15 bp, Homo sapiens
tcactgacacttggg

SEQ ID NO: 593704 - DNA, 15 bp, Homo sapiens
cactgacacttgggg

SEQ ID NO: 593705 - DNA, 15 bp, Homo sapiens
actgacacttggggc

SEQ ID NO: 593706 - DNA, 15 bp, Homo sapiens
ctgacacttggggct

SEQ ID NO: 593707 - DNA, 15 bp, Homo sapiens
tgacacttggggcta

SEQ ID NO: 593708 - DNA, 15 bp, Homo sapiens
gacacttggggctag

SEQ ID NO: 593709 - DNA, 15 bp, Homo sapiens
acacttggggctaga

SEQ ID NO: 593710 - DNA, 15 bp, Homo sapiens
cacttggggctagat

SEQ ID NO: 593711 - DNA, 15 bp, Homo sapiens
acttggggctagata

SEQ ID NO: 593712 - DNA, 15 bp, Homo sapiens
cttggggctagataa

SEQ ID NO: 593713 - DNA, 15 bp, Homo sapiens
ttggggctagataat

SEQ ID NO: 593714 - DNA, 15 bp, Homo sapiens
tggggctagataatc

SEQ ID NO: 593715 - DNA, 15 bp, Homo sapiens
ggggctagataatcc

SEQ ID NO: 593716 - DNA, 15 bp, Homo sapiens
gggctagataatcct

SEQ ID NO: 593717 - DNA, 15 bp, Homo sapiens
ggctagataatcctt

SEQ ID NO: 593718 - DNA, 15 bp, Homo sapiens
gctagataatccttt

SEQ ID NO: 593719 - DNA, 15 bp, Homo sapiens
ctagataatcctttg

SEQ ID NO: 593720 - DNA, 15 bp, Homo sapiens
tagataatcctttgt

SEQ ID NO: 593721 - DNA, 15 bp, Homo sapiens
agataatcctttgtg

SEQ ID NO: 593722 - DNA, 15 bp, Homo sapiens
gataatcctttgtgt

SEQ ID NO: 593723 - DNA, 15 bp, Homo sapiens
ataatcctttgtgtg

SEQ ID NO: 593724 - DNA, 15 bp, Homo sapiens
taatcctttgtgtgg

SEQ ID NO: 593725 - DNA, 15 bp, Homo sapiens
aatcctttgtgtggg

SEQ ID NO: 593726 - DNA, 15 bp, Homo sapiens
atcctttgtgtgggg

SEQ ID NO: 593727 - DNA, 15 bp, Homo sapiens
tcctttgtgtggggg

SEQ ID NO: 593728 - DNA, 15 bp, Homo sapiens
cctttgtgtggggga

SEQ ID NO: 593729 - DNA, 15 bp, Homo sapiens
ctttgtgtgggggag

SEQ ID NO: 593730 - DNA, 15 bp, Homo sapiens
tttgtgtgggggagg

SEQ ID NO: 593731 - DNA, 15 bp, Homo sapiens
ttgtgtgggggaggg

SEQ ID NO: 593732 - DNA, 15 bp, Homo sapiens
tgtgtgggggaggga

SEQ ID NO: 593733 - DNA, 15 bp, Homo sapiens
gtgtgggggagggag

SEQ ID NO: 593734 - DNA, 15 bp, Homo sapiens
tgtgggggagggagg

SEQ ID NO: 593735 - DNA, 15 bp, Homo sapiens
gtgggggagggagga

SEQ ID NO: 593736 - DNA, 15 bp, Homo sapiens
tgggggagggaggag

SEQ ID NO: 593737 - DNA, 15 bp, Homo sapiens
gggggagggaggagt

SEQ ID NO: 593738 - DNA, 15 bp, Homo sapiens
ggggagggaggagtg

SEQ ID NO: 593739 - DNA, 15 bp, Homo sapiens
gggagggaggagtgt

SEQ ID NO: 593740 - DNA, 15 bp, Homo sapiens
ggagggaggagtgtc

SEQ ID NO: 593741 - DNA, 15 bp, Homo sapiens
gagggaggagtgtct

SEQ ID NO: 593742 - DNA, 15 bp, Homo sapiens
agggaggagtgtctt

SEQ ID NO: 593743 - DNA, 15 bp, Homo sapiens
gggaggagtgtcttg

SEQ ID NO: 593744 - DNA, 15 bp, Homo sapiens
ggaggagtgtcttgg

SEQ ID NO: 593745 - DNA, 15 bp, Homo sapiens
gaggagtgtcttggg

SEQ ID NO: 593746 - DNA, 15 bp, Homo sapiens
aggagtgtcttgggc

SEQ ID NO: 593747 - DNA, 15 bp, Homo sapiens
ggagtgtcttgggcc

SEQ ID NO: 593748 - DNA, 15 bp, Homo sapiens
gagtgtcttgggcct

SEQ ID NO: 593749 - DNA, 15 bp, Homo sapiens
agtgtcttgggcctt

SEQ ID NO: 593750 - DNA, 15 bp, Homo sapiens
gtgtcttgggccttg

SEQ ID NO: 593751 - DNA, 15 bp, Homo sapiens
tgtcttgggccttgc

SEQ ID NO: 593752 - DNA, 15 bp, Homo sapiens
gtcttgggccttgca

SEQ ID NO: 593753 - DNA, 15 bp, Homo sapiens
tcttgggccttgcag

SEQ ID NO: 593754 - DNA, 15 bp, Homo sapiens
cttgggccttgcagg

SEQ ID NO: 593755 - DNA, 15 bp, Homo sapiens
ttgggccttgcagga

SEQ ID NO: 593756 - DNA, 15 bp, Homo sapiens
tgggccttgcaggat

SEQ ID NO: 593757 - DNA, 15 bp, Homo sapiens
gggccttgcaggatg

SEQ ID NO: 593758 - DNA, 15 bp, Homo sapiens
ggccttgcaggatgt

SEQ ID NO: 593759 - DNA, 15 bp, Homo sapiens
gccttgcaggatgtt

SEQ ID NO: 593760 - DNA, 15 bp, Homo sapiens
ccttgcaggatgttt

SEQ ID NO: 593761 - DNA, 15 bp, Homo sapiens
cttgcaggatgttta

SEQ ID NO: 593762 - DNA, 15 bp, Homo sapiens
ttgcaggatgtttag

SEQ ID NO: 593763 - DNA, 15 bp, Homo sapiens
tgcaggatgtttagc

SEQ ID NO: 593764 - DNA, 15 bp, Homo sapiens
gagaggccatcacga

SEQ ID NO: 593765 - DNA, 15 bp, Homo sapiens
agaggccatcacgag

SEQ ID NO: 593766 - DNA, 15 bp, Homo sapiens
gaggccatcacgagg

SEQ ID NO: 593767 - DNA, 15 bp, Homo sapiens
aggccatcacgaggg

SEQ ID NO: 593768 - DNA, 15 bp, Homo sapiens
ggccatcacgagggt

SEQ ID NO: 593769 - DNA, 15 bp, Homo sapiens
gccatcacgagggtt

SEQ ID NO: 593770 - DNA, 15 bp, Homo sapiens
ccatcacgagggttg

SEQ ID NO: 593771 - DNA, 15 bp, Homo sapiens
catcacgagggttgt

SEQ ID NO: 593772 - DNA, 15 bp, Homo sapiens
atcacgagggttgta

SEQ ID NO: 593773 - DNA, 15 bp, Homo sapiens
tcacgagggttgtac

SEQ ID NO: 593774 - DNA, 15 bp, Homo sapiens
cacgagggttgtact

SEQ ID NO: 593775 - DNA, 15 bp, Homo sapiens
acgagggttgtactt

SEQ ID NO: 593776 - DNA, 15 bp, Homo sapiens
cgagggttgtacttc

SEQ ID NO: 593777 - DNA, 15 bp, Homo sapiens
gagggttgtacttca

SEQ ID NO: 593778 - DNA, 15 bp, Homo sapiens
agggttgtacttcaa

SEQ ID NO: 593779 - DNA, 15 bp, Homo sapiens
gggttgtacttcaag

SEQ ID NO: 593780 - DNA, 15 bp, Homo sapiens
ggttgtacttcaaga

SEQ ID NO: 593781 - DNA, 15 bp, Homo sapiens
gttgtacttcaagaa

SEQ ID NO: 593782 - DNA, 15 bp, Homo sapiens
ttgtacttcaagaac

SEQ ID NO: 593783 - DNA, 15 bp, Homo sapiens
tgtacttcaagaacc

SEQ ID NO: 593784 - DNA, 15 bp, Homo sapiens
gtacttcaagaacca

SEQ ID NO: 593785 - DNA, 15 bp, Homo sapiens
tacttcaagaaccac

SEQ ID NO: 593786 - DNA, 15 bp, Homo sapiens
acttcaagaaccact

SEQ ID NO: 593787 - DNA, 15 bp, Homo sapiens
cttcaagaaccacta

SEQ ID NO: 593788 - DNA, 15 bp, Homo sapiens
ttcaagaaccactat

SEQ ID NO: 593789 - DNA, 15 bp, Homo sapiens
tcaagaaccactatc

SEQ ID NO: 593790 - DNA, 15 bp, Homo sapiens
caagaaccactatcc

SEQ ID NO: 593791 - DNA, 15 bp, Homo sapiens
aagaaccactatcct

SEQ ID NO: 593792 - DNA, 15 bp, Homo sapiens
agaaccactatcctt

SEQ ID NO: 593793 - DNA, 15 bp, Homo sapiens
gaaccactatccttg

SEQ ID NO: 593794 - DNA, 15 bp, Homo sapiens
aaccactatccttga

SEQ ID NO: 593795 - DNA, 15 bp, Homo sapiens
accactatccttgag

SEQ ID NO: 593796 - DNA, 15 bp, Homo sapiens
ccactatccttgagc

SEQ ID NO: 593797 - DNA, 15 bp, Homo sapiens
cactatccttgagct

SEQ ID NO: 593798 - DNA, 15 bp, Homo sapiens
actatccttgagcta

SEQ ID NO: 593799 - DNA, 15 bp, Homo sapiens
ctatccttgagctac

SEQ ID NO: 593800 - DNA, 15 bp, Homo sapiens
tatccttgagctacc

SEQ ID NO: 593801 - DNA, 15 bp, Homo sapiens
atccttgagctacct

SEQ ID NO: 593802 - DNA, 15 bp, Homo sapiens
tccttgagctaccta

SEQ ID NO: 593803 - DNA, 15 bp, Homo sapiens
ccttgagctacctag

SEQ ID NO: 593804 - DNA, 15 bp, Homo sapiens
cttgagctacctagg

SEQ ID NO: 593805 - DNA, 15 bp, Homo sapiens
ttgagctacctagga

SEQ ID NO: 593806 - DNA, 15 bp, Homo sapiens
tgagctacctaggag

SEQ ID NO: 593807 - DNA, 15 bp, Homo sapiens
gagctacctaggagc

SEQ ID NO: 593808 - DNA, 15 bp, Homo sapiens
agctacctaggagct

SEQ ID NO: 593809 - DNA, 15 bp, Homo sapiens
gctacctaggagctg

SEQ ID NO: 593810 - DNA, 15 bp, Homo sapiens
ctacctaggagctgc

SEQ ID NO: 593811 - DNA, 15 bp, Homo sapiens
tacctaggagctgca

SEQ ID NO: 593812 - DNA, 15 bp, Homo sapiens
acctaggagctgcag

SEQ ID NO: 593813 - DNA, 15 bp, Homo sapiens
cctaggagctgcaga

SEQ ID NO: 593814 - DNA, 15 bp, Homo sapiens
ctaggagctgcagaa

SEQ ID NO: 593815 - DNA, 15 bp, Homo sapiens
taggagctgcagaat

SEQ ID NO: 593816 - DNA, 15 bp, Homo sapiens
aggagctgcagaatg

SEQ ID NO: 593817 - DNA, 15 bp, Homo sapiens
ggagctgcagaatgt

SEQ ID NO: 593818 - DNA, 15 bp, Homo sapiens
gagctgcagaatgtg

SEQ ID NO: 593819 - DNA, 15 bp, Homo sapiens
agctgcagaatgtgc

SEQ ID NO: 593820 - DNA, 15 bp, Homo sapiens
gctgcagaatgtgca

SEQ ID NO: 593821 - DNA, 15 bp, Homo sapiens
ctgcagaatgtgcac

SEQ ID NO: 593822 - DNA, 15 bp, Homo sapiens
tgcagaatgtgcact

SEQ ID NO: 593823 - DNA, 15 bp, Homo sapiens
gcagaatgtgcactc

SEQ ID NO: 593824 - DNA, 15 bp, Homo sapiens
cagaatgtgcactct

SEQ ID NO: 593825 - DNA, 15 bp, Homo sapiens
agaatgtgcactctg

SEQ ID NO: 593826 - DNA, 15 bp, Homo sapiens
gaatgtgcactctgc

SEQ ID NO: 593827 - DNA, 15 bp, Homo sapiens
aatgtgcactctgca

SEQ ID NO: 593828 - DNA, 15 bp, Homo sapiens
atgtgcactctgcag

SEQ ID NO: 593829 - DNA, 15 bp, Homo sapiens
tgtgcactctgcagg

SEQ ID NO: 593830 - DNA, 15 bp, Homo sapiens
gtgcactctgcaggg

SEQ ID NO: 593831 - DNA, 15 bp, Homo sapiens
tgcactctgcagggc

SEQ ID NO: 593832 - DNA, 15 bp, Homo sapiens
gcactctgcagggct

SEQ ID NO: 593833 - DNA, 15 bp, Homo sapiens
cactctgcagggctt

SEQ ID NO: 593834 - DNA, 15 bp, Homo sapiens
actctgcagggctta

SEQ ID NO: 593835 - DNA, 15 bp, Homo sapiens
ctctgcagggcttag

SEQ ID NO: 593836 - DNA, 15 bp, Homo sapiens
tctgcagggcttagg

SEQ ID NO: 593837 - DNA, 15 bp, Homo sapiens
ctgcagggcttaggg

SEQ ID NO: 593838 - DNA, 15 bp, Homo sapiens
tgcagggcttagggc

SEQ ID NO: 593839 - DNA, 15 bp, Homo sapiens
gcagggcttagggcc

SEQ ID NO: 593840 - DNA, 15 bp, Homo sapiens
cagggcttagggcct

SEQ ID NO: 593841 - DNA, 15 bp, Homo sapiens
agggcttagggcctg

SEQ ID NO: 593842 - DNA, 15 bp, Homo sapiens
gggcttagggcctgc

SEQ ID NO: 593843 - DNA, 15 bp, Homo sapiens
ggcttagggcctgca

SEQ ID NO: 593844 - DNA, 15 bp, Homo sapiens
gcttagggcctgcag

SEQ ID NO: 593845 - DNA, 15 bp, Homo sapiens
cttagggcctgcaga

SEQ ID NO: 593846 - DNA, 15 bp, Homo sapiens
ttagggcctgcagac

SEQ ID NO: 593847 - DNA, 15 bp, Homo sapiens
tagggcctgcagaca

SEQ ID NO: 593848 - DNA, 15 bp, Homo sapiens
agggcctgcagacaa

SEQ ID NO: 593849 - DNA, 15 bp, Homo sapiens
gggcctgcagacaag

SEQ ID NO: 593850 - DNA, 15 bp, Homo sapiens
ggcctgcagacaaga

SEQ ID NO: 593851 - DNA, 15 bp, Homo sapiens
gcctgcagacaagat

SEQ ID NO: 593852 - DNA, 15 bp, Homo sapiens
cctgcagacaagata

SEQ ID NO: 593853 - DNA, 15 bp, Homo sapiens
ctgcagacaagatag

SEQ ID NO: 593854 - DNA, 15 bp, Homo sapiens
tgcagacaagataga

SEQ ID NO: 593855 - DNA, 15 bp, Homo sapiens
gcagacaagatagat

SEQ ID NO: 593856 - DNA, 15 bp, Homo sapiens
cagacaagatagatg

SEQ ID NO: 593857 - DNA, 15 bp, Homo sapiens
agacaagatagatgc

SEQ ID NO: 593858 - DNA, 15 bp, Homo sapiens
gacaagatagatgca

SEQ ID NO: 593859 - DNA, 15 bp, Homo sapiens
acaagatagatgcag

SEQ ID NO: 593860 - DNA, 15 bp, Homo sapiens
caagatagatgcagg

SEQ ID NO: 593861 - DNA, 15 bp, Homo sapiens
aagatagatgcaggg

SEQ ID NO: 593862 - DNA, 15 bp, Homo sapiens
agatagatgcagggt

SEQ ID NO: 593863 - DNA, 15 bp, Homo sapiens
gatagatgcagggtg

SEQ ID NO: 593864 - DNA, 15 bp, Homo sapiens
atagatgcagggtgt

SEQ ID NO: 593865 - DNA, 15 bp, Homo sapiens
tagatgcagggtgtc

SEQ ID NO: 593866 - DNA, 15 bp, Homo sapiens
agatgcagggtgtct

SEQ ID NO: 593867 - DNA, 15 bp, Homo sapiens
gatgcagggtgtcta

SEQ ID NO: 593868 - DNA, 15 bp, Homo sapiens
atgcagggtgtctag

SEQ ID NO: 593869 - DNA, 15 bp, Homo sapiens
tgcagggtgtctagt

SEQ ID NO: 593870 - DNA, 15 bp, Homo sapiens
gcagggtgtctagtt

SEQ ID NO: 593871 - DNA, 15 bp, Homo sapiens
cagggtgtctagtta

SEQ ID NO: 593872 - DNA, 15 bp, Homo sapiens
agggtgtctagttaa

SEQ ID NO: 593873 - DNA, 15 bp, Homo sapiens
gggtgtctagttaaa

SEQ ID NO: 593874 - DNA, 15 bp, Homo sapiens
ggtgtctagttaaat

SEQ ID NO: 593875 - DNA, 15 bp, Homo sapiens
gtgtctagttaaatt

SEQ ID NO: 593876 - DNA, 15 bp, Homo sapiens
tgtctagttaaattc

SEQ ID NO: 593877 - DNA, 15 bp, Homo sapiens
gtctagttaaattcg

SEQ ID NO: 593878 - DNA, 15 bp, Homo sapiens
tctagttaaattcga

SEQ ID NO: 593879 - DNA, 15 bp, Homo sapiens
ctagttaaattcgaa

SEQ ID NO: 593880 - DNA, 15 bp, Homo sapiens
tagttaaattcgaac

SEQ ID NO: 593881 - DNA, 15 bp, Homo sapiens
agttaaattcgaact

SEQ ID NO: 593882 - DNA, 15 bp, Homo sapiens
gttaaattcgaactt

SEQ ID NO: 593883 - DNA, 15 bp, Homo sapiens
ttaaattcgaacttc

SEQ ID NO: 593884 - DNA, 15 bp, Homo sapiens
taaattcgaacttca

SEQ ID NO: 593885 - DNA, 15 bp, Homo sapiens
aaattcgaacttcag

SEQ ID NO: 593886 - DNA, 15 bp, Homo sapiens
aattcgaacttcaga

SEQ ID NO: 593887 - DNA, 15 bp, Homo sapiens
attcgaacttcagat

SEQ ID NO: 593888 - DNA, 15 bp, Homo sapiens
ttcgaacttcagata

SEQ ID NO: 593889 - DNA, 15 bp, Homo sapiens
tcgaacttcagataa

SEQ ID NO: 593890 - DNA, 15 bp, Homo sapiens
cgaacttcagataaa

SEQ ID NO: 593891 - DNA, 15 bp, Homo sapiens
gaacttcagataaac

SEQ ID NO: 593892 - DNA, 15 bp, Homo sapiens
aacttcagataaaca

SEQ ID NO: 593893 - DNA, 15 bp, Homo sapiens
acttcagataaacaa

SEQ ID NO: 593894 - DNA, 15 bp, Homo sapiens
cttcagataaacaac

SEQ ID NO: 593895 - DNA, 15 bp, Homo sapiens
ttcagataaacaaca

SEQ ID NO: 593896 - DNA, 15 bp, Homo sapiens
tcagataaacaacaa

SEQ ID NO: 593897 - DNA, 15 bp, Homo sapiens
cagataaacaacaaa

SEQ ID NO: 593898 - DNA, 15 bp, Homo sapiens
agataaacaacaaat

SEQ ID NO: 593899 - DNA, 15 bp, Homo sapiens
gataaacaacaaata

SEQ ID NO: 593900 - DNA, 15 bp, Homo sapiens
ataaacaacaaataa

SEQ ID NO: 593901 - DNA, 15 bp, Homo sapiens
taaacaacaaataat

SEQ ID NO: 593902 - DNA, 15 bp, Homo sapiens
aaacaacaaataatt

SEQ ID NO: 593903 - DNA, 15 bp, Homo sapiens
aacaacaaataattt

SEQ ID NO: 593904 - DNA, 15 bp, Homo sapiens
acaacaaataatttt

SEQ ID NO: 593905 - DNA, 15 bp, Homo sapiens
caacaaataattttt

SEQ ID NO: 593906 - DNA, 15 bp, Homo sapiens
aacaaataatttttt

SEQ ID NO: 593907 - DNA, 15 bp, Homo sapiens
acaaataattttttc

SEQ ID NO: 593908 - DNA, 15 bp, Homo sapiens
caaataattttttca

SEQ ID NO: 593909 - DNA, 15 bp, Homo sapiens
aaataattttttcaa

SEQ ID NO: 593910 - DNA, 15 bp, Homo sapiens
aataattttttcaaa

SEQ ID NO: 593911 - DNA, 15 bp, Homo sapiens
ataattttttcaaat

SEQ ID NO: 593912 - DNA, 15 bp, Homo sapiens
taattttttcaaata

SEQ ID NO: 593913 - DNA, 15 bp, Homo sapiens
aattttttcaaataa

SEQ ID NO: 593914 - DNA, 15 bp, Homo sapiens
attttttcaaataat

SEQ ID NO: 593915 - DNA, 15 bp, Homo sapiens
ttttttcaaataatt

SEQ ID NO: 593916 - DNA, 15 bp, Homo sapiens
tttttcaaataattg

SEQ ID NO: 593917 - DNA, 15 bp, Homo sapiens
ttttcaaataattgt

SEQ ID NO: 593918 - DNA, 15 bp, Homo sapiens
tttcaaataattgtg

SEQ ID NO: 593919 - DNA, 15 bp, Homo sapiens
ttcaaataattgtgt

SEQ ID NO: 593920 - DNA, 15 bp, Homo sapiens
tcaaataattgtgtt

SEQ ID NO: 593921 - DNA, 15 bp, Homo sapiens
caaataattgtgttc

SEQ ID NO: 593922 - DNA, 15 bp, Homo sapiens
aaataattgtgttct

SEQ ID NO: 593923 - DNA, 15 bp, Homo sapiens
aataattgtgttcta

SEQ ID NO: 593924 - DNA, 15 bp, Homo sapiens
ataattgtgttctat

SEQ ID NO: 593925 - DNA, 15 bp, Homo sapiens
taattgtgttctatt

SEQ ID NO: 593926 - DNA, 15 bp, Homo sapiens
aattgtgttctattc

SEQ ID NO: 593927 - DNA, 15 bp, Homo sapiens
attgtgttctattcg

SEQ ID NO: 593928 - DNA, 15 bp, Homo sapiens
ttgtgttctattcgg

SEQ ID NO: 593929 - DNA, 15 bp, Homo sapiens
tgtgttctattcggt

SEQ ID NO: 593930 - DNA, 15 bp, Homo sapiens
gtgttctattcggtc

SEQ ID NO: 593931 - DNA, 15 bp, Homo sapiens
tgttctattcggtcc

SEQ ID NO: 593932 - DNA, 15 bp, Homo sapiens
gttctattcggtccc

SEQ ID NO: 593933 - DNA, 15 bp, Homo sapiens
ttctattcggtccct

SEQ ID NO: 593934 - DNA, 15 bp, Homo sapiens
tctattcggtcccta

SEQ ID NO: 593935 - DNA, 15 bp, Homo sapiens
ctattcggtccctat

SEQ ID NO: 593936 - DNA, 15 bp, Homo sapiens
tattcggtccctatt

SEQ ID NO: 593937 - DNA, 15 bp, Homo sapiens
attcggtccctattt

SEQ ID NO: 593938 - DNA, 15 bp, Homo sapiens
ttcggtccctatttg

SEQ ID NO: 593939 - DNA, 15 bp, Homo sapiens
tcggtccctatttgg

SEQ ID NO: 593940 - DNA, 15 bp, Homo sapiens
cggtccctatttggg

SEQ ID NO: 593941 - DNA, 15 bp, Homo sapiens
ggtccctatttggga

SEQ ID NO: 593942 - DNA, 15 bp, Homo sapiens
gtccctatttgggac

SEQ ID NO: 593943 - DNA, 15 bp, Homo sapiens
tccctatttgggaca

SEQ ID NO: 593944 - DNA, 15 bp, Homo sapiens
ccctatttgggacat

SEQ ID NO: 593945 - DNA, 15 bp, Homo sapiens
cctatttgggacata

SEQ ID NO: 593946 - DNA, 15 bp, Homo sapiens
ctatttgggacatat

SEQ ID NO: 593947 - DNA, 15 bp, Homo sapiens
tatttgggacatatt

SEQ ID NO: 593948 - DNA, 15 bp, Homo sapiens
atttgggacatattt

SEQ ID NO: 593949 - DNA, 15 bp, Homo sapiens
tttgggacatatttg

SEQ ID NO: 593950 - DNA, 15 bp, Homo sapiens
ttgggacatatttgt

SEQ ID NO: 593951 - DNA, 15 bp, Homo sapiens
tgggacatatttgta

SEQ ID NO: 593952 - DNA, 15 bp, Homo sapiens
gggacatatttgtac

SEQ ID NO: 593953 - DNA, 15 bp, Homo sapiens
ggacatatttgtact

SEQ ID NO: 593954 - DNA, 15 bp, Homo sapiens
gacatatttgtacta

SEQ ID NO: 593955 - DNA, 15 bp, Homo sapiens
acatatttgtactaa

SEQ ID NO: 593956 - DNA, 15 bp, Homo sapiens
catatttgtactaaa

SEQ ID NO: 593957 - DNA, 15 bp, Homo sapiens
atatttgtactaaaa

SEQ ID NO: 593958 - DNA, 15 bp, Homo sapiens
tatttgtactaaaaa

SEQ ID NO: 593959 - DNA, 15 bp, Homo sapiens
atttgtactaaaaag

SEQ ID NO: 593960 - DNA, 15 bp, Homo sapiens
tttgtactaaaaagt

SEQ ID NO: 593961 - DNA, 15 bp, Homo sapiens
ttgtactaaaaagta

SEQ ID NO: 593962 - DNA, 15 bp, Homo sapiens
tgtactaaaaagtat

SEQ ID NO: 593963 - DNA, 15 bp, Homo sapiens
gtactaaaaagtatt

SEQ ID NO: 593964 - DNA, 15 bp, Homo sapiens
tactaaaaagtattc

SEQ ID NO: 593965 - DNA, 15 bp, Homo sapiens
actaaaaagtattca

SEQ ID NO: 593966 - DNA, 15 bp, Homo sapiens
ctaaaaagtattcat

SEQ ID NO: 593967 - DNA, 15 bp, Homo sapiens
taaaaagtattcatt

SEQ ID NO: 593968 - DNA, 15 bp, Homo sapiens
aaaaagtattcattt

SEQ ID NO: 593969 - DNA, 15 bp, Homo sapiens
aaaagtattcattta

SEQ ID NO: 593970 - DNA, 15 bp, Homo sapiens
aaagtattcatttat

SEQ ID NO: 593971 - DNA, 15 bp, Homo sapiens
aagtattcatttatc

SEQ ID NO: 593972 - DNA, 15 bp, Homo sapiens
agtattcatttatct

SEQ ID NO: 593973 - DNA, 15 bp, Homo sapiens
gtattcatttatctg

SEQ ID NO: 593974 - DNA, 15 bp, Homo sapiens
tattcatttatctga

SEQ ID NO: 593975 - DNA, 15 bp, Homo sapiens
attcatttatctgaa

SEQ ID NO: 593976 - DNA, 15 bp, Homo sapiens
ttcatttatctgaaa

SEQ ID NO: 593977 - DNA, 15 bp, Homo sapiens
tcatttatctgaaat

SEQ ID NO: 593978 - DNA, 15 bp, Homo sapiens
catttatctgaaatt

SEQ ID NO: 593979 - DNA, 15 bp, Homo sapiens
atttatctgaaattc

SEQ ID NO: 593980 - DNA, 15 bp, Homo sapiens
tttatctgaaattca

SEQ ID NO: 593981 - DNA, 15 bp, Homo sapiens
ttatctgaaattcag

SEQ ID NO: 593982 - DNA, 15 bp, Homo sapiens
tatctgaaattcaga

SEQ ID NO: 593983 - DNA, 15 bp, Homo sapiens
atctgaaattcagat

SEQ ID NO: 593984 - DNA, 15 bp, Homo sapiens
tctgaaattcagatt

SEQ ID NO: 593985 - DNA, 15 bp, Homo sapiens
ctgaaattcagattc

SEQ ID NO: 593986 - DNA, 15 bp, Homo sapiens
tgaaattcagattcg

SEQ ID NO: 593987 - DNA, 15 bp, Homo sapiens
gaaattcagattcga

SEQ ID NO: 593988 - DNA, 15 bp, Homo sapiens
aaattcagattcgac

SEQ ID NO: 593989 - DNA, 15 bp, Homo sapiens
aattcagattcgact

SEQ ID NO: 593990 - DNA, 15 bp, Homo sapiens
attcagattcgactg

SEQ ID NO: 593991 - DNA, 15 bp, Homo sapiens
ttcagattcgactgg

SEQ ID NO: 593992 - DNA, 15 bp, Homo sapiens
tcagattcgactggg

SEQ ID NO: 593993 - DNA, 15 bp, Homo sapiens
cagattcgactgggc

SEQ ID NO: 593994 - DNA, 15 bp, Homo sapiens
agattcgactgggca

SEQ ID NO: 593995 - DNA, 15 bp, Homo sapiens
gattcgactgggcat

SEQ ID NO: 593996 - DNA, 15 bp, Homo sapiens
attcgactgggcatc

SEQ ID NO: 593997 - DNA, 15 bp, Homo sapiens
ttcgactgggcatct

SEQ ID NO: 593998 - DNA, 15 bp, Homo sapiens
tcgactgggcatctg

SEQ ID NO: 593999 - DNA, 15 bp, Homo sapiens
cgactgggcatctgg

SEQ ID NO: 594000 - DNA, 15 bp, Homo sapiens
gactgggcatctggt

SEQ ID NO: 594001 - DNA, 15 bp, Homo sapiens
actgggcatctggtg

SEQ ID NO: 594002 - DNA, 15 bp, Homo sapiens
ctgggcatctggtgc

SEQ ID NO: 594003 - DNA, 15 bp, Homo sapiens
tgggcatctggtgct

SEQ ID NO: 594004 - DNA, 15 bp, Homo sapiens
gggcatctggtgctt

SEQ ID NO: 594005 - DNA, 15 bp, Homo sapiens
ggcatctggtgcttt

SEQ ID NO: 594006 - DNA, 15 bp, Homo sapiens
gcatctggtgctttt

SEQ ID NO: 594007 - DNA, 15 bp, Homo sapiens
catctggtgcttttg

SEQ ID NO: 594008 - DNA, 15 bp, Homo sapiens
atctggtgcttttgt

SEQ ID NO: 594009 - DNA, 15 bp, Homo sapiens
tctggtgcttttgtt

SEQ ID NO: 594010 - DNA, 15 bp, Homo sapiens
ctggtgcttttgttt

SEQ ID NO: 594011 - DNA, 15 bp, Homo sapiens
tggtgcttttgtttg

SEQ ID NO: 594012 - DNA, 15 bp, Homo sapiens
ggtgcttttgtttgc

SEQ ID NO: 594013 - DNA, 15 bp, Homo sapiens
gtgcttttgtttgct

SEQ ID NO: 594014 - DNA, 15 bp, Homo sapiens
tgcttttgtttgcta

SEQ ID NO: 594015 - DNA, 15 bp, Homo sapiens
gcttttgtttgctaa

SEQ ID NO: 594016 - DNA, 15 bp, Homo sapiens
cttttgtttgctaaa

SEQ ID NO: 594017 - DNA, 15 bp, Homo sapiens
ttttgtttgctaaat

SEQ ID NO: 594018 - DNA, 15 bp, Homo sapiens
tttgtttgctaaatc

SEQ ID NO: 594019 - DNA, 15 bp, Homo sapiens
ttgtttgctaaatcc

SEQ ID NO: 594020 - DNA, 15 bp, Homo sapiens
tgtttgctaaatcca

SEQ ID NO: 594021 - DNA, 15 bp, Homo sapiens
gtttgctaaatccaa

SEQ ID NO: 594022 - DNA, 15 bp, Homo sapiens
tttgctaaatccaag

SEQ ID NO: 594023 - DNA, 15 bp, Homo sapiens
ttgctaaatccaaga

SEQ ID NO: 594024 - DNA, 15 bp, Homo sapiens
tgctaaatccaagag

SEQ ID NO: 594025 - DNA, 15 bp, Homo sapiens
gctaaatccaagagc

SEQ ID NO: 594026 - DNA, 15 bp, Homo sapiens
ctaaatccaagagca

SEQ ID NO: 594027 - DNA, 15 bp, Homo sapiens
taaatccaagagcaa

SEQ ID NO: 594028 - DNA, 15 bp, Homo sapiens
aaatccaagagcaaa

SEQ ID NO: 594029 - DNA, 15 bp, Homo sapiens
aatccaagagcaaat

SEQ ID NO: 594030 - DNA, 15 bp, Homo sapiens
atccaagagcaaatt

SEQ ID NO: 594031 - DNA, 15 bp, Homo sapiens
tccaagagcaaattt

SEQ ID NO: 594032 - DNA, 15 bp, Homo sapiens
ccaagagcaaatttg

SEQ ID NO: 594033 - DNA, 15 bp, Homo sapiens
caagagcaaatttgt

SEQ ID NO: 594034 - DNA, 15 bp, Homo sapiens
aagagcaaatttgtt

SEQ ID NO: 594035 - DNA, 15 bp, Homo sapiens
agagcaaatttgttc

SEQ ID NO: 594036 - DNA, 15 bp, Homo sapiens
gagcaaatttgttct

SEQ ID NO: 594037 - DNA, 15 bp, Homo sapiens
agcaaatttgttcta

SEQ ID NO: 594038 - DNA, 15 bp, Homo sapiens
gcaaatttgttctag

SEQ ID NO: 594039 - DNA, 15 bp, Homo sapiens
caaatttgttctagc

SEQ ID NO: 594040 - DNA, 15 bp, Homo sapiens
aaatttgttctagct

SEQ ID NO: 594041 - DNA, 15 bp, Homo sapiens
aatttgttctagcta

SEQ ID NO: 594042 - DNA, 15 bp, Homo sapiens
atttgttctagctac

SEQ ID NO: 594043 - DNA, 15 bp, Homo sapiens
tttgttctagctact

SEQ ID NO: 594044 - DNA, 15 bp, Homo sapiens
ttgttctagctactt

SEQ ID NO: 594045 - DNA, 15 bp, Homo sapiens
tgttctagctacttc

SEQ ID NO: 594046 - DNA, 15 bp, Homo sapiens
gttctagctacttct

SEQ ID NO: 594047 - DNA, 15 bp, Homo sapiens
ttctagctacttctc

SEQ ID NO: 594048 - DNA, 15 bp, Homo sapiens
tctagctacttctca

SEQ ID NO: 594049 - DNA, 15 bp, Homo sapiens
ctagctacttctcaa

SEQ ID NO: 594050 - DNA, 15 bp, Homo sapiens
tagctacttctcaac

SEQ ID NO: 594051 - DNA, 15 bp, Homo sapiens
agctacttctcaacc

SEQ ID NO: 594052 - DNA, 15 bp, Homo sapiens
gctacttctcaaccc

SEQ ID NO: 594053 - DNA, 15 bp, Homo sapiens
ctacttctcaacccc

SEQ ID NO: 594054 - DNA, 15 bp, Homo sapiens
tacttctcaacccca

SEQ ID NO: 594055 - DNA, 15 bp, Homo sapiens
acttctcaaccccac

SEQ ID NO: 594056 - DNA, 15 bp, Homo sapiens
cttctcaaccccacc

SEQ ID NO: 594057 - DNA, 15 bp, Homo sapiens
ttctcaaccccacct

SEQ ID NO: 594058 - DNA, 15 bp, Homo sapiens
tctcaaccccacctt

SEQ ID NO: 594059 - DNA, 15 bp, Homo sapiens
ctcaaccccaccttc

SEQ ID NO: 594060 - DNA, 15 bp, Homo sapiens
tcaaccccaccttca

SEQ ID NO: 594061 - DNA, 15 bp, Homo sapiens
caaccccaccttcag

SEQ ID NO: 594062 - DNA, 15 bp, Homo sapiens
aaccccaccttcaga

SEQ ID NO: 594063 - DNA, 15 bp, Homo sapiens
accccaccttcagag

SEQ ID NO: 594064 - DNA, 15 bp, Homo sapiens
ccccaccttcagaga

SEQ ID NO: 594065 - DNA, 15 bp, Homo sapiens
cccaccttcagagag

SEQ ID NO: 594066 - DNA, 15 bp, Homo sapiens
ccaccttcagagagg

SEQ ID NO: 594067 - DNA, 15 bp, Homo sapiens
caccttcagagagga

SEQ ID NO: 594068 - DNA, 15 bp, Homo sapiens
accttcagagaggaa

SEQ ID NO: 594069 - DNA, 15 bp, Homo sapiens
ccttcagagaggaag

SEQ ID NO: 594070 - DNA, 15 bp, Homo sapiens
cttcagagaggaagc

SEQ ID NO: 594071 - DNA, 15 bp, Homo sapiens
ttcagagaggaagcc

SEQ ID NO: 594072 - DNA, 15 bp, Homo sapiens
tcagagaggaagcct

SEQ ID NO: 594073 - DNA, 15 bp, Homo sapiens
cagagaggaagcctt

SEQ ID NO: 594074 - DNA, 15 bp, Homo sapiens
agagaggaagccttg

SEQ ID NO: 594075 - DNA, 15 bp, Homo sapiens
gagaggaagccttga

SEQ ID NO: 594076 - DNA, 15 bp, Homo sapiens
agaggaagccttgat

SEQ ID NO: 594077 - DNA, 15 bp, Homo sapiens
gaggaagccttgatg

SEQ ID NO: 594078 - DNA, 15 bp, Homo sapiens
aggaagccttgatgg

SEQ ID NO: 594079 - DNA, 15 bp, Homo sapiens
ggaagccttgatggt

SEQ ID NO: 594080 - DNA, 15 bp, Homo sapiens
gaagccttgatggta

SEQ ID NO: 594081 - DNA, 15 bp, Homo sapiens
aagccttgatggtac

SEQ ID NO: 594082 - DNA, 15 bp, Homo sapiens
agccttgatggtact

SEQ ID NO: 594083 - DNA, 15 bp, Homo sapiens
gccttgatggtactg

SEQ ID NO: 594084 - DNA, 15 bp, Homo sapiens
ccttgatggtactgt

SEQ ID NO: 594085 - DNA, 15 bp, Homo sapiens
cttgatggtactgta

SEQ ID NO: 594086 - DNA, 15 bp, Homo sapiens
ttgatggtactgtaa

SEQ ID NO: 594087 - DNA, 15 bp, Homo sapiens
tgatggtactgtaac

SEQ ID NO: 594088 - DNA, 15 bp, Homo sapiens
gatggtactgtaaca

SEQ ID NO: 594089 - DNA, 15 bp, Homo sapiens
atggtactgtaacat

SEQ ID NO: 594090 - DNA, 15 bp, Homo sapiens
tggtactgtaacatc

SEQ ID NO: 594091 - DNA, 15 bp, Homo sapiens
ggtactgtaacatca

SEQ ID NO: 594092 - DNA, 15 bp, Homo sapiens
gtactgtaacatcat

SEQ ID NO: 594093 - DNA, 15 bp, Homo sapiens
tactgtaacatcatg

SEQ ID NO: 594094 - DNA, 15 bp, Homo sapiens
actgtaacatcatgc

SEQ ID NO: 594095 - DNA, 15 bp, Homo sapiens
ctgtaacatcatgct

SEQ ID NO: 594096 - DNA, 15 bp, Homo sapiens
tgtaacatcatgctg

SEQ ID NO: 594097 - DNA, 15 bp, Homo sapiens
gtaacatcatgctgt

SEQ ID NO: 594098 - DNA, 15 bp, Homo sapiens
taacatcatgctgta

SEQ ID NO: 594099 - DNA, 15 bp, Homo sapiens
aacatcatgctgtaa

SEQ ID NO: 594100 - DNA, 15 bp, Homo sapiens
acatcatgctgtaag

SEQ ID NO: 594101 - DNA, 15 bp, Homo sapiens
catcatgctgtaaga

SEQ ID NO: 594102 - DNA, 15 bp, Homo sapiens
atcatgctgtaagaa

SEQ ID NO: 594103 - DNA, 15 bp, Homo sapiens
tcatgctgtaagaag

SEQ ID NO: 594104 - DNA, 15 bp, Homo sapiens
catgctgtaagaagg

SEQ ID NO: 594105 - DNA, 15 bp, Homo sapiens
atgctgtaagaaggg

SEQ ID NO: 594106 - DNA, 15 bp, Homo sapiens
tgctgtaagaagggg

SEQ ID NO: 594107 - DNA, 15 bp, Homo sapiens
gctgtaagaagggga

SEQ ID NO: 594108 - DNA, 15 bp, Homo sapiens
ctgtaagaaggggat

SEQ ID NO: 594109 - DNA, 15 bp, Homo sapiens
tgtaagaaggggatc

SEQ ID NO: 594110 - DNA, 15 bp, Homo sapiens
gtaagaaggggatcc

SEQ ID NO: 594111 - DNA, 15 bp, Homo sapiens
taagaaggggatccc

SEQ ID NO: 594112 - DNA, 15 bp, Homo sapiens
aagaaggggatccct

SEQ ID NO: 594113 - DNA, 15 bp, Homo sapiens
agaaggggatccctt

SEQ ID NO: 594114 - DNA, 15 bp, Homo sapiens
gaaggggatcccttg

SEQ ID NO: 594115 - DNA, 15 bp, Homo sapiens
aaggggatcccttga

SEQ ID NO: 594116 - DNA, 15 bp, Homo sapiens
aggggatcccttgaa

SEQ ID NO: 594117 - DNA, 15 bp, Homo sapiens
ggggatcccttgaat

SEQ ID NO: 594118 - DNA, 15 bp, Homo sapiens
gggatcccttgaatt

SEQ ID NO: 594119 - DNA, 15 bp, Homo sapiens
ggatcccttgaattg

SEQ ID NO: 594120 - DNA, 15 bp, Homo sapiens
gatcccttgaattgt

SEQ ID NO: 594121 - DNA, 15 bp, Homo sapiens
atcccttgaattgta

SEQ ID NO: 594122 - DNA, 15 bp, Homo sapiens
tcccttgaattgtaa

SEQ ID NO: 594123 - DNA, 15 bp, Homo sapiens
cccttgaattgtaaa

SEQ ID NO: 594124 - DNA, 15 bp, Homo sapiens
ccttgaattgtaaat

SEQ ID NO: 594125 - DNA, 15 bp, Homo sapiens
cttgaattgtaaatg

SEQ ID NO: 594126 - DNA, 15 bp, Homo sapiens
ttgaattgtaaatgg

SEQ ID NO: 594127 - DNA, 15 bp, Homo sapiens
tgaattgtaaatggc

SEQ ID NO: 594128 - DNA, 15 bp, Homo sapiens
gaattgtaaatggca

SEQ ID NO: 594129 - DNA, 15 bp, Homo sapiens
aattgtaaatggcac

SEQ ID NO: 594130 - DNA, 15 bp, Homo sapiens
attgtaaatggcact

SEQ ID NO: 594131 - DNA, 15 bp, Homo sapiens
ttgtaaatggcactc

SEQ ID NO: 594132 - DNA, 15 bp, Homo sapiens
tgtaaatggcactct

SEQ ID NO: 594133 - DNA, 15 bp, Homo sapiens
gtaaatggcactctg

SEQ ID NO: 594134 - DNA, 15 bp, Homo sapiens
taaatggcactctga

SEQ ID NO: 594135 - DNA, 15 bp, Homo sapiens
aaatggcactctgat

SEQ ID NO: 594136 - DNA, 15 bp, Homo sapiens
aatggcactctgata

SEQ ID NO: 594137 - DNA, 15 bp, Homo sapiens
atggcactctgataa

SEQ ID NO: 594138 - DNA, 15 bp, Homo sapiens
tggcactctgataag

SEQ ID NO: 594139 - DNA, 15 bp, Homo sapiens
ggcactctgataaga

SEQ ID NO: 594140 - DNA, 15 bp, Homo sapiens
gcactctgataagat

SEQ ID NO: 594141 - DNA, 15 bp, Homo sapiens
cactctgataagatg

SEQ ID NO: 594142 - DNA, 15 bp, Homo sapiens
actctgataagatga

SEQ ID NO: 594143 - DNA, 15 bp, Homo sapiens
ctctgataagatgag

SEQ ID NO: 594144 - DNA, 15 bp, Homo sapiens
tctgataagatgagg

SEQ ID NO: 594145 - DNA, 15 bp, Homo sapiens
ctgataagatgaggt

SEQ ID NO: 594146 - DNA, 15 bp, Homo sapiens
tgataagatgaggta

SEQ ID NO: 594147 - DNA, 15 bp, Homo sapiens
gataagatgaggtat

SEQ ID NO: 594148 - DNA, 15 bp, Homo sapiens
ataagatgaggtatg

SEQ ID NO: 594149 - DNA, 15 bp, Homo sapiens
taagatgaggtatgg

SEQ ID NO: 594150 - DNA, 15 bp, Homo sapiens
aagatgaggtatggg

SEQ ID NO: 594151 - DNA, 15 bp, Homo sapiens
agatgaggtatgggg

SEQ ID NO: 594152 - DNA, 15 bp, Homo sapiens
gatgaggtatgggga

SEQ ID NO: 594153 - DNA, 15 bp, Homo sapiens
atgaggtatggggat

SEQ ID NO: 594154 - DNA, 15 bp, Homo sapiens
tgaggtatggggatt

SEQ ID NO: 594155 - DNA, 15 bp, Homo sapiens
gaggtatggggattg

SEQ ID NO: 594156 - DNA, 15 bp, Homo sapiens
aggtatggggattgt

SEQ ID NO: 594157 - DNA, 15 bp, Homo sapiens
ggtatggggattgta

SEQ ID NO: 594158 - DNA, 15 bp, Homo sapiens
gtatggggattgtat

SEQ ID NO: 594159 - DNA, 15 bp, Homo sapiens
tatggggattgtatt

SEQ ID NO: 594160 - DNA, 15 bp, Homo sapiens
atggggattgtattg

SEQ ID NO: 594161 - DNA, 15 bp, Homo sapiens
tggggattgtattgg

SEQ ID NO: 594162 - DNA, 15 bp, Homo sapiens
ggggattgtattggt

SEQ ID NO: 594163 - DNA, 15 bp, Homo sapiens
gggattgtattggtt

SEQ ID NO: 594164 - DNA, 15 bp, Homo sapiens
ggattgtattggttt

SEQ ID NO: 594165 - DNA, 15 bp, Homo sapiens
gattgtattggtttc

SEQ ID NO: 594166 - DNA, 15 bp, Homo sapiens
attgtattggtttcc

SEQ ID NO: 594167 - DNA, 15 bp, Homo sapiens
ttgtattggtttcct

SEQ ID NO: 594168 - DNA, 15 bp, Homo sapiens
tgtattggtttcctg

SEQ ID NO: 594169 - DNA, 15 bp, Homo sapiens
gtattggtttcctgt

SEQ ID NO: 594170 - DNA, 15 bp, Homo sapiens
tattggtttcctgtt

SEQ ID NO: 594171 - DNA, 15 bp, Homo sapiens
attggtttcctgttg

SEQ ID NO: 594172 - DNA, 15 bp, Homo sapiens
ttggtttcctgttgc

SEQ ID NO: 594173 - DNA, 15 bp, Homo sapiens
tggtttcctgttgct

SEQ ID NO: 594174 - DNA, 15 bp, Homo sapiens
ggtttcctgttgctg

SEQ ID NO: 594175 - DNA, 15 bp, Homo sapiens
gtttcctgttgctgc

SEQ ID NO: 594176 - DNA, 15 bp, Homo sapiens
tttcctgttgctgct

SEQ ID NO: 594177 - DNA, 15 bp, Homo sapiens
ttcctgttgctgctg

SEQ ID NO: 594178 - DNA, 15 bp, Homo sapiens
tcctgttgctgctgt

SEQ ID NO: 594179 - DNA, 15 bp, Homo sapiens
cctgttgctgctgtc

SEQ ID NO: 594180 - DNA, 15 bp, Homo sapiens
ctgttgctgctgtca

SEQ ID NO: 594181 - DNA, 15 bp, Homo sapiens
tgttgctgctgtcat

SEQ ID NO: 594182 - DNA, 15 bp, Homo sapiens
gttgctgctgtcata

SEQ ID NO: 594183 - DNA, 15 bp, Homo sapiens
ttgctgctgtcataa

SEQ ID NO: 594184 - DNA, 15 bp, Homo sapiens
tgctgctgtcataaa

SEQ ID NO: 594185 - DNA, 15 bp, Homo sapiens
gctgctgtcataaat

SEQ ID NO: 594186 - DNA, 15 bp, Homo sapiens
ctgctgtcataaatt

SEQ ID NO: 594187 - DNA, 15 bp, Homo sapiens
tgctgtcataaatta

SEQ ID NO: 594188 - DNA, 15 bp, Homo sapiens
gctgtcataaattac

SEQ ID NO: 594189 - DNA, 15 bp, Homo sapiens
ctgtcataaattacc

SEQ ID NO: 594190 - DNA, 15 bp, Homo sapiens
tgtcataaattacca

SEQ ID NO: 594191 - DNA, 15 bp, Homo sapiens
gtcataaattaccac

SEQ ID NO: 594192 - DNA, 15 bp, Homo sapiens
tcataaattaccaca

SEQ ID NO: 594193 - DNA, 15 bp, Homo sapiens
cataaattaccacaa

SEQ ID NO: 594194 - DNA, 15 bp, Homo sapiens
ataaattaccacaaa

SEQ ID NO: 594195 - DNA, 15 bp, Homo sapiens
taaattaccacaaac

SEQ ID NO: 594196 - DNA, 15 bp, Homo sapiens
aaattaccacaaact

SEQ ID NO: 594197 - DNA, 15 bp, Homo sapiens
aattaccacaaactt

SEQ ID NO: 594198 - DNA, 15 bp, Homo sapiens
attaccacaaactta

SEQ ID NO: 594199 - DNA, 15 bp, Homo sapiens
ttaccacaaacttag

SEQ ID NO: 594200 - DNA, 15 bp, Homo sapiens
taccacaaacttagt

SEQ ID NO: 594201 - DNA, 15 bp, Homo sapiens
accacaaacttagtg

SEQ ID NO: 594202 - DNA, 15 bp, Homo sapiens
ccacaaacttagtgg

SEQ ID NO: 594203 - DNA, 15 bp, Homo sapiens
cacaaacttagtggc

SEQ ID NO: 594204 - DNA, 15 bp, Homo sapiens
acaaacttagtggct

SEQ ID NO: 594205 - DNA, 15 bp, Homo sapiens
caaacttagtggctt

SEQ ID NO: 594206 - DNA, 15 bp, Homo sapiens
aaacttagtggcttc

SEQ ID NO: 594207 - DNA, 15 bp, Homo sapiens
aacttagtggcttca

SEQ ID NO: 594208 - DNA, 15 bp, Homo sapiens
acttagtggcttcaa

SEQ ID NO: 594209 - DNA, 15 bp, Homo sapiens
cttagtggcttcaaa

SEQ ID NO: 594210 - DNA, 15 bp, Homo sapiens
ttagtggcttcaaac

SEQ ID NO: 594211 - DNA, 15 bp, Homo sapiens
tagtggcttcaaaca

SEQ ID NO: 594212 - DNA, 15 bp, Homo sapiens
agtggcttcaaacaa

SEQ ID NO: 594213 - DNA, 15 bp, Homo sapiens
gtggcttcaaacaac

SEQ ID NO: 594214 - DNA, 15 bp, Homo sapiens
tggcttcaaacaaca

SEQ ID NO: 594215 - DNA, 15 bp, Homo sapiens
ggcttcaaacaacac

SEQ ID NO: 594216 - DNA, 15 bp, Homo sapiens
gcttcaaacaacaca

SEQ ID NO: 594217 - DNA, 15 bp, Homo sapiens
cttcaaacaacacag

SEQ ID NO: 594218 - DNA, 15 bp, Homo sapiens
ttcaaacaacacaga

SEQ ID NO: 594219 - DNA, 15 bp, Homo sapiens
tcaaacaacacagat

SEQ ID NO: 594220 - DNA, 15 bp, Homo sapiens
caaacaacacagatg

SEQ ID NO: 594221 - DNA, 15 bp, Homo sapiens
aaacaacacagatgc

SEQ ID NO: 594222 - DNA, 15 bp, Homo sapiens
aacaacacagatgca

SEQ ID NO: 594223 - DNA, 15 bp, Homo sapiens
acaacacagatgcat

SEQ ID NO: 594224 - DNA, 15 bp, Homo sapiens
caacacagatgcatt

SEQ ID NO: 594225 - DNA, 15 bp, Homo sapiens
aacacagatgcatta

SEQ ID NO: 594226 - DNA, 15 bp, Homo sapiens
acacagatgcattat

SEQ ID NO: 594227 - DNA, 15 bp, Homo sapiens
cacagatgcattatc

SEQ ID NO: 594228 - DNA, 15 bp, Homo sapiens
acagatgcattatct

SEQ ID NO: 594229 - DNA, 15 bp, Homo sapiens
cagatgcattatctt

SEQ ID NO: 594230 - DNA, 15 bp, Homo sapiens
agatgcattatctta

SEQ ID NO: 594231 - DNA, 15 bp, Homo sapiens
gatgcattatcttac

SEQ ID NO: 594232 - DNA, 15 bp, Homo sapiens
atgcattatcttaca

SEQ ID NO: 594233 - DNA, 15 bp, Homo sapiens
tgcattatcttacag

SEQ ID NO: 594234 - DNA, 15 bp, Homo sapiens
gcattatcttacagt

SEQ ID NO: 594235 - DNA, 15 bp, Homo sapiens
cattatcttacagtt

SEQ ID NO: 594236 - DNA, 15 bp, Homo sapiens
attatcttacagttc

SEQ ID NO: 594237 - DNA, 15 bp, Homo sapiens
ttatcttacagttct

SEQ ID NO: 594238 - DNA, 15 bp, Homo sapiens
tatcttacagttctg

SEQ ID NO: 594239 - DNA, 15 bp, Homo sapiens
atcttacagttctgg

SEQ ID NO: 594240 - DNA, 15 bp, Homo sapiens
tcttacagttctgga

SEQ ID NO: 594241 - DNA, 15 bp, Homo sapiens
cttacagttctggag

SEQ ID NO: 594242 - DNA, 15 bp, Homo sapiens
ttacagttctggagg

SEQ ID NO: 594243 - DNA, 15 bp, Homo sapiens
tacagttctggaggt

SEQ ID NO: 594244 - DNA, 15 bp, Homo sapiens
acagttctggaggtc

SEQ ID NO: 594245 - DNA, 15 bp, Homo sapiens
cagttctggaggtca

SEQ ID NO: 594246 - DNA, 15 bp, Homo sapiens
agttctggaggtcac

SEQ ID NO: 594247 - DNA, 15 bp, Homo sapiens
gttctggaggtcaca

SEQ ID NO: 594248 - DNA, 15 bp, Homo sapiens
ttctggaggtcacaa

SEQ ID NO: 594249 - DNA, 15 bp, Homo sapiens
tctggaggtcacaag

SEQ ID NO: 594250 - DNA, 15 bp, Homo sapiens
ctggaggtcacaagt

SEQ ID NO: 594251 - DNA, 15 bp, Homo sapiens
tggaggtcacaagtc

SEQ ID NO: 594252 - DNA, 15 bp, Homo sapiens
ggaggtcacaagtct

SEQ ID NO: 594253 - DNA, 15 bp, Homo sapiens
gaggtcacaagtctg

SEQ ID NO: 594254 - DNA, 15 bp, Homo sapiens
aggtcacaagtctga

SEQ ID NO: 594255 - DNA, 15 bp, Homo sapiens
ggtcacaagtctgaa

SEQ ID NO: 594256 - DNA, 15 bp, Homo sapiens
gtcacaagtctgaaa

SEQ ID NO: 594257 - DNA, 15 bp, Homo sapiens
tcacaagtctgaaag

SEQ ID NO: 594258 - DNA, 15 bp, Homo sapiens
cacaagtctgaaagt

SEQ ID NO: 594259 - DNA, 15 bp, Homo sapiens
acaagtctgaaagtt

SEQ ID NO: 594260 - DNA, 15 bp, Homo sapiens
caagtctgaaagtta

SEQ ID NO: 594261 - DNA, 15 bp, Homo sapiens
aagtctgaaagttag

SEQ ID NO: 594262 - DNA, 15 bp, Homo sapiens
agtctgaaagttagg

SEQ ID NO: 594263 - DNA, 15 bp, Homo sapiens
gtctgaaagttaggg

SEQ ID NO: 594264 - DNA, 15 bp, Homo sapiens
tctgaaagttagggc

SEQ ID NO: 594265 - DNA, 15 bp, Homo sapiens
ctgaaagttagggca

SEQ ID NO: 594266 - DNA, 15 bp, Homo sapiens
tgaaagttagggcat

SEQ ID NO: 594267 - DNA, 15 bp, Homo sapiens
gaaagttagggcatc

SEQ ID NO: 594268 - DNA, 15 bp, Homo sapiens
aaagttagggcatca

SEQ ID NO: 594269 - DNA, 15 bp, Homo sapiens
aagttagggcatcag

SEQ ID NO: 594270 - DNA, 15 bp, Homo sapiens
agttagggcatcagc

SEQ ID NO: 594271 - DNA, 15 bp, Homo sapiens
gttagggcatcagca

SEQ ID NO: 594272 - DNA, 15 bp, Homo sapiens
ttagggcatcagcag

SEQ ID NO: 594273 - DNA, 15 bp, Homo sapiens
tagggcatcagcagg

SEQ ID NO: 594274 - DNA, 15 bp, Homo sapiens
agggcatcagcagga

SEQ ID NO: 594275 - DNA, 15 bp, Homo sapiens
gggcatcagcaggac

SEQ ID NO: 594276 - DNA, 15 bp, Homo sapiens
ggcatcagcaggact

SEQ ID NO: 594277 - DNA, 15 bp, Homo sapiens
gcatcagcaggactg

SEQ ID NO: 594278 - DNA, 15 bp, Homo sapiens
catcagcaggactgc

SEQ ID NO: 594279 - DNA, 15 bp, Homo sapiens
atcagcaggactgca

SEQ ID NO: 594280 - DNA, 15 bp, Homo sapiens
tcagcaggactgcat

SEQ ID NO: 594281 - DNA, 15 bp, Homo sapiens
cagcaggactgcatt

SEQ ID NO: 594282 - DNA, 15 bp, Homo sapiens
agcaggactgcattc

SEQ ID NO: 594283 - DNA, 15 bp, Homo sapiens
gcaggactgcattcc

SEQ ID NO: 594284 - DNA, 15 bp, Homo sapiens
caggactgcattcct

SEQ ID NO: 594285 - DNA, 15 bp, Homo sapiens
aggactgcattcctt

SEQ ID NO: 594286 - DNA, 15 bp, Homo sapiens
ggactgcattcctta

SEQ ID NO: 594287 - DNA, 15 bp, Homo sapiens
gactgcattccttac

SEQ ID NO: 594288 - DNA, 15 bp, Homo sapiens
actgcattccttact

SEQ ID NO: 594289 - DNA, 15 bp, Homo sapiens
ctgcattccttactg

SEQ ID NO: 594290 - DNA, 15 bp, Homo sapiens
tgcattccttactgc

SEQ ID NO: 594291 - DNA, 15 bp, Homo sapiens
gcattccttactgcg

SEQ ID NO: 594292 - DNA, 15 bp, Homo sapiens
cattccttactgcgg

SEQ ID NO: 594293 - DNA, 15 bp, Homo sapiens
attccttactgcgga

SEQ ID NO: 594294 - DNA, 15 bp, Homo sapiens
ttccttactgcggag

SEQ ID NO: 594295 - DNA, 15 bp, Homo sapiens
tccttactgcggagt

SEQ ID NO: 594296 - DNA, 15 bp, Homo sapiens
ccttactgcggagtt

SEQ ID NO: 594297 - DNA, 15 bp, Homo sapiens
cttactgcggagttc

SEQ ID NO: 594298 - DNA, 15 bp, Homo sapiens
ttactgcggagttct

SEQ ID NO: 594299 - DNA, 15 bp, Homo sapiens
tactgcggagttcta

SEQ ID NO: 594300 - DNA, 15 bp, Homo sapiens
actgcggagttctag

SEQ ID NO: 594301 - DNA, 15 bp, Homo sapiens
ctgcggagttctaga

SEQ ID NO: 594302 - DNA, 15 bp, Homo sapiens
tgcggagttctagag

SEQ ID NO: 594303 - DNA, 15 bp, Homo sapiens
gcggagttctagaga

SEQ ID NO: 594304 - DNA, 15 bp, Homo sapiens
cggagttctagagaa

SEQ ID NO: 594305 - DNA, 15 bp, Homo sapiens
ggagttctagagaaa

SEQ ID NO: 594306 - DNA, 15 bp, Homo sapiens
gagttctagagaaaa

SEQ ID NO: 594307 - DNA, 15 bp, Homo sapiens
agttctagagaaaaa

SEQ ID NO: 594308 - DNA, 15 bp, Homo sapiens
gttctagagaaaaat

SEQ ID NO: 594309 - DNA, 15 bp, Homo sapiens
ttctagagaaaaatc

SEQ ID NO: 594310 - DNA, 15 bp, Homo sapiens
tctagagaaaaatcc

SEQ ID NO: 594311 - DNA, 15 bp, Homo sapiens
ctagagaaaaatcca

SEQ ID NO: 594312 - DNA, 15 bp, Homo sapiens
tagagaaaaatccat

SEQ ID NO: 594313 - DNA, 15 bp, Homo sapiens
agagaaaaatccatt

SEQ ID NO: 594314 - DNA, 15 bp, Homo sapiens
gagaaaaatccattt

SEQ ID NO: 594315 - DNA, 15 bp, Homo sapiens
agaaaaatccatttt

SEQ ID NO: 594316 - DNA, 15 bp, Homo sapiens
gaaaaatccattttc

SEQ ID NO: 594317 - DNA, 15 bp, Homo sapiens
aaaaatccattttcc

SEQ ID NO: 594318 - DNA, 15 bp, Homo sapiens
aaaatccattttcct

SEQ ID NO: 594319 - DNA, 15 bp, Homo sapiens
aaatccattttcctg

SEQ ID NO: 594320 - DNA, 15 bp, Homo sapiens
aatccattttcctgc

SEQ ID NO: 594321 - DNA, 15 bp, Homo sapiens
atccattttcctgcc

SEQ ID NO: 594322 - DNA, 15 bp, Homo sapiens
tccattttcctgcct

SEQ ID NO: 594323 - DNA, 15 bp, Homo sapiens
ccattttcctgcctc

SEQ ID NO: 594324 - DNA, 15 bp, Homo sapiens
cattttcctgcctcc

SEQ ID NO: 594325 - DNA, 15 bp, Homo sapiens
attttcctgcctcct

SEQ ID NO: 594326 - DNA, 15 bp, Homo sapiens
ttttcctgcctcctt

SEQ ID NO: 594327 - DNA, 15 bp, Homo sapiens
tttcctgcctccttc

SEQ ID NO: 594328 - DNA, 15 bp, Homo sapiens
ttcctgcctccttca

SEQ ID NO: 594329 - DNA, 15 bp, Homo sapiens
tcctgcctccttcag

SEQ ID NO: 594330 - DNA, 15 bp, Homo sapiens
cctgcctccttcagc

SEQ ID NO: 594331 - DNA, 15 bp, Homo sapiens
ctgcctccttcagcc

SEQ ID NO: 594332 - DNA, 15 bp, Homo sapiens
tgcctccttcagcct

SEQ ID NO: 594333 - DNA, 15 bp, Homo sapiens
gcctccttcagcctc

SEQ ID NO: 594334 - DNA, 15 bp, Homo sapiens
cctccttcagcctcc

SEQ ID NO: 594335 - DNA, 15 bp, Homo sapiens
ctccttcagcctcca

SEQ ID NO: 594336 - DNA, 15 bp, Homo sapiens
tccttcagcctccag

SEQ ID NO: 594337 - DNA, 15 bp, Homo sapiens
ccttcagcctccaga

SEQ ID NO: 594338 - DNA, 15 bp, Homo sapiens
cttcagcctccagag

SEQ ID NO: 594339 - DNA, 15 bp, Homo sapiens
ttcagcctccagaga

SEQ ID NO: 594340 - DNA, 15 bp, Homo sapiens
tcagcctccagagac

SEQ ID NO: 594341 - DNA, 15 bp, Homo sapiens
cagcctccagagaca

SEQ ID NO: 594342 - DNA, 15 bp, Homo sapiens
agcctccagagacac

SEQ ID NO: 594343 - DNA, 15 bp, Homo sapiens
gcctccagagacacg

SEQ ID NO: 594344 - DNA, 15 bp, Homo sapiens
cctccagagacacgc

SEQ ID NO: 594345 - DNA, 15 bp, Homo sapiens
ctccagagacacgcc

SEQ ID NO: 594346 - DNA, 15 bp, Homo sapiens
tccagagacacgcca

SEQ ID NO: 594347 - DNA, 15 bp, Homo sapiens
ccagagacacgccac

SEQ ID NO: 594348 - DNA, 15 bp, Homo sapiens
cagagacacgccaca

SEQ ID NO: 594349 - DNA, 15 bp, Homo sapiens
agagacacgccacat

SEQ ID NO: 594350 - DNA, 15 bp, Homo sapiens
gagacacgccacatt

SEQ ID NO: 594351 - DNA, 15 bp, Homo sapiens
agacacgccacattc

SEQ ID NO: 594352 - DNA, 15 bp, Homo sapiens
gacacgccacattct

SEQ ID NO: 594353 - DNA, 15 bp, Homo sapiens
acacgccacattctt

SEQ ID NO: 594354 - DNA, 15 bp, Homo sapiens
cacgccacattcttt

SEQ ID NO: 594355 - DNA, 15 bp, Homo sapiens
acgccacattctttg

SEQ ID NO: 594356 - DNA, 15 bp, Homo sapiens
cgccacattctttgg

SEQ ID NO: 594357 - DNA, 15 bp, Homo sapiens
gccacattctttggc

SEQ ID NO: 594358 - DNA, 15 bp, Homo sapiens
ccacattctttggct

SEQ ID NO: 594359 - DNA, 15 bp, Homo sapiens
cacattctttggcta

SEQ ID NO: 594360 - DNA, 15 bp, Homo sapiens
acattctttggctag

SEQ ID NO: 594361 - DNA, 15 bp, Homo sapiens
cattctttggctagt

SEQ ID NO: 594362 - DNA, 15 bp, Homo sapiens
attctttggctagtg

SEQ ID NO: 594363 - DNA, 15 bp, Homo sapiens
ttctttggctagtgg

SEQ ID NO: 594364 - DNA, 15 bp, Homo sapiens
tctttggctagtggt

SEQ ID NO: 594365 - DNA, 15 bp, Homo sapiens
ctttggctagtggtc

SEQ ID NO: 594366 - DNA, 15 bp, Homo sapiens
tttggctagtggtct

SEQ ID NO: 594367 - DNA, 15 bp, Homo sapiens
ttggctagtggtctg

SEQ ID NO: 594368 - DNA, 15 bp, Homo sapiens
tggctagtggtctgc

SEQ ID NO: 594369 - DNA, 15 bp, Homo sapiens
ggctagtggtctgct

SEQ ID NO: 594370 - DNA, 15 bp, Homo sapiens
gctagtggtctgctt

SEQ ID NO: 594371 - DNA, 15 bp, Homo sapiens
ctagtggtctgcttc

SEQ ID NO: 594372 - DNA, 15 bp, Homo sapiens
tagtggtctgcttcc

SEQ ID NO: 594373 - DNA, 15 bp, Homo sapiens
agtggtctgcttcca

SEQ ID NO: 594374 - DNA, 15 bp, Homo sapiens
gtggtctgcttccat

SEQ ID NO: 594375 - DNA, 15 bp, Homo sapiens
tggtctgcttccatc

SEQ ID NO: 594376 - DNA, 15 bp, Homo sapiens
ggtctgcttccatct

SEQ ID NO: 594377 - DNA, 15 bp, Homo sapiens
gtctgcttccatctc

SEQ ID NO: 594378 - DNA, 15 bp, Homo sapiens
tctgcttccatctcc

SEQ ID NO: 594379 - DNA, 15 bp, Homo sapiens
ctgcttccatctcca

SEQ ID NO: 594380 - DNA, 15 bp, Homo sapiens
tgcttccatctccaa

SEQ ID NO: 594381 - DNA, 15 bp, Homo sapiens
gcttccatctccaag

SEQ ID NO: 594382 - DNA, 15 bp, Homo sapiens
cttccatctccaagg

SEQ ID NO: 594383 - DNA, 15 bp, Homo sapiens
ttccatctccaaggc

SEQ ID NO: 594384 - DNA, 15 bp, Homo sapiens
tccatctccaaggcc

SEQ ID NO: 594385 - DNA, 15 bp, Homo sapiens
ccatctccaaggcca

SEQ ID NO: 594386 - DNA, 15 bp, Homo sapiens
catctccaaggccag

SEQ ID NO: 594387 - DNA, 15 bp, Homo sapiens
atctccaaggccagt

SEQ ID NO: 594388 - DNA, 15 bp, Homo sapiens
tctccaaggccagtg

SEQ ID NO: 594389 - DNA, 15 bp, Homo sapiens
ctccaaggccagtgg

SEQ ID NO: 594390 - DNA, 15 bp, Homo sapiens
tccaaggccagtggg

SEQ ID NO: 594391 - DNA, 15 bp, Homo sapiens
ccaaggccagtgggg

SEQ ID NO: 594392 - DNA, 15 bp, Homo sapiens
caaggccagtggggg

SEQ ID NO: 594393 - DNA, 15 bp, Homo sapiens
aaggccagtgggggc

SEQ ID NO: 594394 - DNA, 15 bp, Homo sapiens
aggccagtgggggct

SEQ ID NO: 594395 - DNA, 15 bp, Homo sapiens
ggccagtgggggctt

SEQ ID NO: 594396 - DNA, 15 bp, Homo sapiens
gccagtgggggctta

SEQ ID NO: 594397 - DNA, 15 bp, Homo sapiens
ccagtgggggcttat

SEQ ID NO: 594398 - DNA, 15 bp, Homo sapiens
cagtgggggcttatc

SEQ ID NO: 594399 - DNA, 15 bp, Homo sapiens
agtgggggcttatca

SEQ ID NO: 594400 - DNA, 15 bp, Homo sapiens
gtgggggcttatcaa

SEQ ID NO: 594401 - DNA, 15 bp, Homo sapiens
tgggggcttatcaag

SEQ ID NO: 594402 - DNA, 15 bp, Homo sapiens
gggggcttatcaagt

SEQ ID NO: 594403 - DNA, 15 bp, Homo sapiens
ggggcttatcaagtc

SEQ ID NO: 594404 - DNA, 15 bp, Homo sapiens
gggcttatcaagtct

SEQ ID NO: 594405 - DNA, 15 bp, Homo sapiens
ggcttatcaagtctt

SEQ ID NO: 594406 - DNA, 15 bp, Homo sapiens
gcttatcaagtcttt

SEQ ID NO: 594407 - DNA, 15 bp, Homo sapiens
cttatcaagtctttc

SEQ ID NO: 594408 - DNA, 15 bp, Homo sapiens
ttatcaagtctttct

SEQ ID NO: 594409 - DNA, 15 bp, Homo sapiens
tatcaagtctttctc

SEQ ID NO: 594410 - DNA, 15 bp, Homo sapiens
atcaagtctttctca

SEQ ID NO: 594411 - DNA, 15 bp, Homo sapiens
tcaagtctttctcac

SEQ ID NO: 594412 - DNA, 15 bp, Homo sapiens
caagtctttctcaca

SEQ ID NO: 594413 - DNA, 15 bp, Homo sapiens
aagtctttctcacat

SEQ ID NO: 594414 - DNA, 15 bp, Homo sapiens
agtctttctcacatc

SEQ ID NO: 594415 - DNA, 15 bp, Homo sapiens
gtctttctcacatca

SEQ ID NO: 594416 - DNA, 15 bp, Homo sapiens
tctttctcacatcac

SEQ ID NO: 594417 - DNA, 15 bp, Homo sapiens
ctttctcacatcaca

SEQ ID NO: 594418 - DNA, 15 bp, Homo sapiens
tttctcacatcacat

SEQ ID NO: 594419 - DNA, 15 bp, Homo sapiens
ttctcacatcacatg

SEQ ID NO: 594420 - DNA, 15 bp, Homo sapiens
tctcacatcacatga

SEQ ID NO: 594421 - DNA, 15 bp, Homo sapiens
ctcacatcacatgac

SEQ ID NO: 594422 - DNA, 15 bp, Homo sapiens
tcacatcacatgact

SEQ ID NO: 594423 - DNA, 15 bp, Homo sapiens
cacatcacatgactc

SEQ ID NO: 594424 - DNA, 15 bp, Homo sapiens
acatcacatgactct

SEQ ID NO: 594425 - DNA, 15 bp, Homo sapiens
catcacatgactctg

SEQ ID NO: 594426 - DNA, 15 bp, Homo sapiens
atcacatgactctgt

SEQ ID NO: 594427 - DNA, 15 bp, Homo sapiens
tcacatgactctgtt

SEQ ID NO: 594428 - DNA, 15 bp, Homo sapiens
cacatgactctgttt

SEQ ID NO: 594429 - DNA, 15 bp, Homo sapiens
acatgactctgtttc

SEQ ID NO: 594430 - DNA, 15 bp, Homo sapiens
catgactctgtttct

SEQ ID NO: 594431 - DNA, 15 bp, Homo sapiens
atgactctgtttctt

SEQ ID NO: 594432 - DNA, 15 bp, Homo sapiens
tgactctgtttcttc

SEQ ID NO: 594433 - DNA, 15 bp, Homo sapiens
gactctgtttcttct

SEQ ID NO: 594434 - DNA, 15 bp, Homo sapiens
actctgtttcttctg

SEQ ID NO: 594435 - DNA, 15 bp, Homo sapiens
ctctgtttcttctgc

SEQ ID NO: 594436 - DNA, 15 bp, Homo sapiens
tctgtttcttctgcc

SEQ ID NO: 594437 - DNA, 15 bp, Homo sapiens
ctgtttcttctgcct

SEQ ID NO: 594438 - DNA, 15 bp, Homo sapiens
tgtttcttctgcctc

SEQ ID NO: 594439 - DNA, 15 bp, Homo sapiens
gtttcttctgcctcc

SEQ ID NO: 594440 - DNA, 15 bp, Homo sapiens
tttcttctgcctccc

SEQ ID NO: 594441 - DNA, 15 bp, Homo sapiens
ttcttctgcctccct

SEQ ID NO: 594442 - DNA, 15 bp, Homo sapiens
tcttctgcctccctc

SEQ ID NO: 594443 - DNA, 15 bp, Homo sapiens
cttctgcctccctct

SEQ ID NO: 594444 - DNA, 15 bp, Homo sapiens
ttctgcctccctctt

SEQ ID NO: 594445 - DNA, 15 bp, Homo sapiens
tctgcctccctcttc

SEQ ID NO: 594446 - DNA, 15 bp, Homo sapiens
ctgcctccctcttct

SEQ ID NO: 594447 - DNA, 15 bp, Homo sapiens
tgcctccctcttcta

SEQ ID NO: 594448 - DNA, 15 bp, Homo sapiens
gcctccctcttctac

SEQ ID NO: 594449 - DNA, 15 bp, Homo sapiens
cctccctcttctaca

SEQ ID NO: 594450 - DNA, 15 bp, Homo sapiens
ctccctcttctacat

SEQ ID NO: 594451 - DNA, 15 bp, Homo sapiens
tccctcttctacatt

SEQ ID NO: 594452 - DNA, 15 bp, Homo sapiens
ccctcttctacattt

SEQ ID NO: 594453 - DNA, 15 bp, Homo sapiens
cctcttctacattta

SEQ ID NO: 594454 - DNA, 15 bp, Homo sapiens
ctcttctacatttaa

SEQ ID NO: 594455 - DNA, 15 bp, Homo sapiens
tcttctacatttaag

SEQ ID NO: 594456 - DNA, 15 bp, Homo sapiens
cttctacatttaagg

SEQ ID NO: 594457 - DNA, 15 bp, Homo sapiens
ttctacatttaaggg

SEQ ID NO: 594458 - DNA, 15 bp, Homo sapiens
tctacatttaaggga

SEQ ID NO: 594459 - DNA, 15 bp, Homo sapiens
ctacatttaagggac

SEQ ID NO: 594460 - DNA, 15 bp, Homo sapiens
tacatttaagggacc

SEQ ID NO: 594461 - DNA, 15 bp, Homo sapiens
acatttaagggaccc

SEQ ID NO: 594462 - DNA, 15 bp, Homo sapiens
catttaagggaccct

SEQ ID NO: 594463 - DNA, 15 bp, Homo sapiens
atttaagggaccctt

SEQ ID NO: 594464 - DNA, 15 bp, Homo sapiens
tttaagggacccttg

SEQ ID NO: 594465 - DNA, 15 bp, Homo sapiens
ttaagggacccttgt

SEQ ID NO: 594466 - DNA, 15 bp, Homo sapiens
taagggacccttgtg

SEQ ID NO: 594467 - DNA, 15 bp, Homo sapiens
aagggacccttgtga

SEQ ID NO: 594468 - DNA, 15 bp, Homo sapiens
agggacccttgtgat

SEQ ID NO: 594469 - DNA, 15 bp, Homo sapiens
gggacccttgtgatt

SEQ ID NO: 594470 - DNA, 15 bp, Homo sapiens
ggacccttgtgatta

SEQ ID NO: 594471 - DNA, 15 bp, Homo sapiens
gacccttgtgattac

SEQ ID NO: 594472 - DNA, 15 bp, Homo sapiens
acccttgtgattaca

SEQ ID NO: 594473 - DNA, 15 bp, Homo sapiens
cccttgtgattacac

SEQ ID NO: 594474 - DNA, 15 bp, Homo sapiens
ccttgtgattacaca

SEQ ID NO: 594475 - DNA, 15 bp, Homo sapiens
cttgtgattacacag

SEQ ID NO: 594476 - DNA, 15 bp, Homo sapiens
ttgtgattacacagg

SEQ ID NO: 594477 - DNA, 15 bp, Homo sapiens
tgtgattacacaggg

SEQ ID NO: 594478 - DNA, 15 bp, Homo sapiens
gtgattacacagggg

SEQ ID NO: 594479 - DNA, 15 bp, Homo sapiens
tgattacacaggggc

SEQ ID NO: 594480 - DNA, 15 bp, Homo sapiens
gattacacaggggcc

SEQ ID NO: 594481 - DNA, 15 bp, Homo sapiens
attacacaggggccc

SEQ ID NO: 594482 - DNA, 15 bp, Homo sapiens
ttacacaggggccca

SEQ ID NO: 594483 - DNA, 15 bp, Homo sapiens
tacacaggggcccac

SEQ ID NO: 594484 - DNA, 15 bp, Homo sapiens
acacaggggcccacc

SEQ ID NO: 594485 - DNA, 15 bp, Homo sapiens
cacaggggcccacct

SEQ ID NO: 594486 - DNA, 15 bp, Homo sapiens
acaggggcccaccta

SEQ ID NO: 594487 - DNA, 15 bp, Homo sapiens
caggggcccacctag

SEQ ID NO: 594488 - DNA, 15 bp, Homo sapiens
aggggcccacctaga

SEQ ID NO: 594489 - DNA, 15 bp, Homo sapiens
ggggcccacctagaa

SEQ ID NO: 594490 - DNA, 15 bp, Homo sapiens
gggcccacctagaaa

SEQ ID NO: 594491 - DNA, 15 bp, Homo sapiens
ggcccacctagaaaa

SEQ ID NO: 594492 - DNA, 15 bp, Homo sapiens
gcccacctagaaaag

SEQ ID NO: 594493 - DNA, 15 bp, Homo sapiens
cccacctagaaaagc

SEQ ID NO: 594494 - DNA, 15 bp, Homo sapiens
ccacctagaaaagcc

SEQ ID NO: 594495 - DNA, 15 bp, Homo sapiens
cacctagaaaagcca

SEQ ID NO: 594496 - DNA, 15 bp, Homo sapiens
acctagaaaagccaa

SEQ ID NO: 594497 - DNA, 15 bp, Homo sapiens
cctagaaaagccaaa

SEQ ID NO: 594498 - DNA, 15 bp, Homo sapiens
ctagaaaagccaaaa

SEQ ID NO: 594499 - DNA, 15 bp, Homo sapiens
tagaaaagccaaaat

SEQ ID NO: 594500 - DNA, 15 bp, Homo sapiens
agaaaagccaaaata

SEQ ID NO: 594501 - DNA, 15 bp, Homo sapiens
gaaaagccaaaataa

SEQ ID NO: 594502 - DNA, 15 bp, Homo sapiens
aaaagccaaaataat

SEQ ID NO: 594503 - DNA, 15 bp, Homo sapiens
aaagccaaaataatc

SEQ ID NO: 594504 - DNA, 15 bp, Homo sapiens
aagccaaaataatct

SEQ ID NO: 594505 - DNA, 15 bp, Homo sapiens
agccaaaataatctc

SEQ ID NO: 594506 - DNA, 15 bp, Homo sapiens
gccaaaataatctcc

SEQ ID NO: 594507 - DNA, 15 bp, Homo sapiens
ccaaaataatctcct

SEQ ID NO: 594508 - DNA, 15 bp, Homo sapiens
caaaataatctcctt

SEQ ID NO: 594509 - DNA, 15 bp, Homo sapiens
aaaataatctcctta

SEQ ID NO: 594510 - DNA, 15 bp, Homo sapiens
aaataatctccttat

SEQ ID NO: 594511 - DNA, 15 bp, Homo sapiens
aataatctccttatt

SEQ ID NO: 594512 - DNA, 15 bp, Homo sapiens
ataatctccttattt

SEQ ID NO: 594513 - DNA, 15 bp, Homo sapiens
taatctccttatttt

SEQ ID NO: 594514 - DNA, 15 bp, Homo sapiens
aatctccttatttta

SEQ ID NO: 594515 - DNA, 15 bp, Homo sapiens
atctccttattttaa

SEQ ID NO: 594516 - DNA, 15 bp, Homo sapiens
tctccttattttaaa

SEQ ID NO: 594517 - DNA, 15 bp, Homo sapiens
ctccttattttaaaa

SEQ ID NO: 594518 - DNA, 15 bp, Homo sapiens
tccttattttaaaat

SEQ ID NO: 594519 - DNA, 15 bp, Homo sapiens
ccttattttaaaatc

SEQ ID NO: 594520 - DNA, 15 bp, Homo sapiens
cttattttaaaatca

SEQ ID NO: 594521 - DNA, 15 bp, Homo sapiens
ttattttaaaatcag

SEQ ID NO: 594522 - DNA, 15 bp, Homo sapiens
tattttaaaatcagc

SEQ ID NO: 594523 - DNA, 15 bp, Homo sapiens
attttaaaatcagct

SEQ ID NO: 594524 - DNA, 15 bp, Homo sapiens
ttttaaaatcagcta

SEQ ID NO: 594525 - DNA, 15 bp, Homo sapiens
tttaaaatcagctaa

SEQ ID NO: 594526 - DNA, 15 bp, Homo sapiens
ttaaaatcagctaat

SEQ ID NO: 594527 - DNA, 15 bp, Homo sapiens
taaaatcagctaatc

SEQ ID NO: 594528 - DNA, 15 bp, Homo sapiens
aaaatcagctaatca

SEQ ID NO: 594529 - DNA, 15 bp, Homo sapiens
aaatcagctaatcag

SEQ ID NO: 594530 - DNA, 15 bp, Homo sapiens
aatcagctaatcagt

SEQ ID NO: 594531 - DNA, 15 bp, Homo sapiens
atcagctaatcagtg

SEQ ID NO: 594532 - DNA, 15 bp, Homo sapiens
tcagctaatcagtgg

SEQ ID NO: 594533 - DNA, 15 bp, Homo sapiens
cagctaatcagtggc

SEQ ID NO: 594534 - DNA, 15 bp, Homo sapiens
agctaatcagtggct

SEQ ID NO: 594535 - DNA, 15 bp, Homo sapiens
gctaatcagtggctt

SEQ ID NO: 594536 - DNA, 15 bp, Homo sapiens
ctaatcagtggcttt

SEQ ID NO: 594537 - DNA, 15 bp, Homo sapiens
taatcagtggcttta

SEQ ID NO: 594538 - DNA, 15 bp, Homo sapiens
aatcagtggctttaa

SEQ ID NO: 594539 - DNA, 15 bp, Homo sapiens
atcagtggctttaat

SEQ ID NO: 594540 - DNA, 15 bp, Homo sapiens
tcagtggctttaatc

SEQ ID NO: 594541 - DNA, 15 bp, Homo sapiens
cagtggctttaatcc

SEQ ID NO: 594542 - DNA, 15 bp, Homo sapiens
agtggctttaatccc

SEQ ID NO: 594543 - DNA, 15 bp, Homo sapiens
gtggctttaatccca

SEQ ID NO: 594544 - DNA, 15 bp, Homo sapiens
tggctttaatcccat

SEQ ID NO: 594545 - DNA, 15 bp, Homo sapiens
ggctttaatcccatc

SEQ ID NO: 594546 - DNA, 15 bp, Homo sapiens
gctttaatcccatct

SEQ ID NO: 594547 - DNA, 15 bp, Homo sapiens
ctttaatcccatctg

SEQ ID NO: 594548 - DNA, 15 bp, Homo sapiens
tttaatcccatctgc

SEQ ID NO: 594549 - DNA, 15 bp, Homo sapiens
ttaatcccatctgcg

SEQ ID NO: 594550 - DNA, 15 bp, Homo sapiens
taatcccatctgcga

SEQ ID NO: 594551 - DNA, 15 bp, Homo sapiens
aatcccatctgcgat

SEQ ID NO: 594552 - DNA, 15 bp, Homo sapiens
atcccatctgcgatc

SEQ ID NO: 594553 - DNA, 15 bp, Homo sapiens
tcccatctgcgatct

SEQ ID NO: 594554 - DNA, 15 bp, Homo sapiens
cccatctgcgatctt

SEQ ID NO: 594555 - DNA, 15 bp, Homo sapiens
ccatctgcgatctta

SEQ ID NO: 594556 - DNA, 15 bp, Homo sapiens
catctgcgatcttaa

SEQ ID NO: 594557 - DNA, 15 bp, Homo sapiens
atctgcgatcttaat

SEQ ID NO: 594558 - DNA, 15 bp, Homo sapiens
tctgcgatcttaatt

SEQ ID NO: 594559 - DNA, 15 bp, Homo sapiens
ctgcgatcttaattc

SEQ ID NO: 594560 - DNA, 15 bp, Homo sapiens
tgcgatcttaattcc

SEQ ID NO: 594561 - DNA, 15 bp, Homo sapiens
gcgatcttaattcct

SEQ ID NO: 594562 - DNA, 15 bp, Homo sapiens
cgatcttaattcctg

SEQ ID NO: 594563 - DNA, 15 bp, Homo sapiens
gatcttaattcctgt

SEQ ID NO: 594564 - DNA, 15 bp, Homo sapiens
atcttaattcctgtc

SEQ ID NO: 594565 - DNA, 15 bp, Homo sapiens
tcttaattcctgtcg

SEQ ID NO: 594566 - DNA, 15 bp, Homo sapiens
cttaattcctgtcgc

SEQ ID NO: 594567 - DNA, 15 bp, Homo sapiens
ttaattcctgtcgcc

SEQ ID NO: 594568 - DNA, 15 bp, Homo sapiens
taattcctgtcgcca

SEQ ID NO: 594569 - DNA, 15 bp, Homo sapiens
aattcctgtcgccat

SEQ ID NO: 594570 - DNA, 15 bp, Homo sapiens
attcctgtcgccatg

SEQ ID NO: 594571 - DNA, 15 bp, Homo sapiens
ttcctgtcgccatgt

SEQ ID NO: 594572 - DNA, 15 bp, Homo sapiens
tcctgtcgccatgta

SEQ ID NO: 594573 - DNA, 15 bp, Homo sapiens
cctgtcgccatgtaa

SEQ ID NO: 594574 - DNA, 15 bp, Homo sapiens
ctgtcgccatgtaac

SEQ ID NO: 594575 - DNA, 15 bp, Homo sapiens
tgtcgccatgtaaca

SEQ ID NO: 594576 - DNA, 15 bp, Homo sapiens
gtcgccatgtaacac

SEQ ID NO: 594577 - DNA, 15 bp, Homo sapiens
tcgccatgtaacaca

SEQ ID NO: 594578 - DNA, 15 bp, Homo sapiens
cgccatgtaacacaa

SEQ ID NO: 594579 - DNA, 15 bp, Homo sapiens
gccatgtaacacaag

SEQ ID NO: 594580 - DNA, 15 bp, Homo sapiens
ccatgtaacacaagg

SEQ ID NO: 594581 - DNA, 15 bp, Homo sapiens
catgtaacacaaggt

SEQ ID NO: 594582 - DNA, 15 bp, Homo sapiens
atgtaacacaaggta

SEQ ID NO: 594583 - DNA, 15 bp, Homo sapiens
tgtaacacaaggtat

SEQ ID NO: 594584 - DNA, 15 bp, Homo sapiens
gtaacacaaggtatt

SEQ ID NO: 594585 - DNA, 15 bp, Homo sapiens
taacacaaggtattc

SEQ ID NO: 594586 - DNA, 15 bp, Homo sapiens
aacacaaggtattcc

SEQ ID NO: 594587 - DNA, 15 bp, Homo sapiens
acacaaggtattccc

SEQ ID NO: 594588 - DNA, 15 bp, Homo sapiens
cacaaggtattccca

SEQ ID NO: 594589 - DNA, 15 bp, Homo sapiens
acaaggtattcccag

SEQ ID NO: 594590 - DNA, 15 bp, Homo sapiens
caaggtattcccagg

SEQ ID NO: 594591 - DNA, 15 bp, Homo sapiens
aaggtattcccaggt

SEQ ID NO: 594592 - DNA, 15 bp, Homo sapiens
aggtattcccaggtt

SEQ ID NO: 594593 - DNA, 15 bp, Homo sapiens
ggtattcccaggttc

SEQ ID NO: 594594 - DNA, 15 bp, Homo sapiens
gtattcccaggttct

SEQ ID NO: 594595 - DNA, 15 bp, Homo sapiens
tattcccaggttctg

SEQ ID NO: 594596 - DNA, 15 bp, Homo sapiens
attcccaggttctgt

SEQ ID NO: 594597 - DNA, 15 bp, Homo sapiens
ttcccaggttctgtg

SEQ ID NO: 594598 - DNA, 15 bp, Homo sapiens
tcccaggttctgtgg

SEQ ID NO: 594599 - DNA, 15 bp, Homo sapiens
cccaggttctgtggg

SEQ ID NO: 594600 - DNA, 15 bp, Homo sapiens
ccaggttctgtgggt

SEQ ID NO: 594601 - DNA, 15 bp, Homo sapiens
caggttctgtgggtt

SEQ ID NO: 594602 - DNA, 15 bp, Homo sapiens
aggttctgtgggtta

SEQ ID NO: 594603 - DNA, 15 bp, Homo sapiens
ggttctgtgggttag

SEQ ID NO: 594604 - DNA, 15 bp, Homo sapiens
gttctgtgggttagg

SEQ ID NO: 594605 - DNA, 15 bp, Homo sapiens
ttctgtgggttagga

SEQ ID NO: 594606 - DNA, 15 bp, Homo sapiens
tctgtgggttaggac

SEQ ID NO: 594607 - DNA, 15 bp, Homo sapiens
ctgtgggttaggacg

SEQ ID NO: 594608 - DNA, 15 bp, Homo sapiens
tgtgggttaggacgt

SEQ ID NO: 594609 - DNA, 15 bp, Homo sapiens
gtgggttaggacgtg

SEQ ID NO: 594610 - DNA, 15 bp, Homo sapiens
tgggttaggacgtgg

SEQ ID NO: 594611 - DNA, 15 bp, Homo sapiens
gggttaggacgtggg

SEQ ID NO: 594612 - DNA, 15 bp, Homo sapiens
ggttaggacgtgggt

SEQ ID NO: 594613 - DNA, 15 bp, Homo sapiens
gttaggacgtgggtg

SEQ ID NO: 594614 - DNA, 15 bp, Homo sapiens
ttaggacgtgggtgt

SEQ ID NO: 594615 - DNA, 15 bp, Homo sapiens
taggacgtgggtgtc

SEQ ID NO: 594616 - DNA, 15 bp, Homo sapiens
aggacgtgggtgtct

SEQ ID NO: 594617 - DNA, 15 bp, Homo sapiens
ggacgtgggtgtctt

SEQ ID NO: 594618 - DNA, 15 bp, Homo sapiens
gacgtgggtgtcttt

SEQ ID NO: 594619 - DNA, 15 bp, Homo sapiens
acgtgggtgtctttc

SEQ ID NO: 594620 - DNA, 15 bp, Homo sapiens
cgtgggtgtctttcc

SEQ ID NO: 594621 - DNA, 15 bp, Homo sapiens
gtgggtgtctttcct

SEQ ID NO: 594622 - DNA, 15 bp, Homo sapiens
tgggtgtctttccta

SEQ ID NO: 594623 - DNA, 15 bp, Homo sapiens
gggtgtctttcctac

SEQ ID NO: 594624 - DNA, 15 bp, Homo sapiens
ggtgtctttcctacc

SEQ ID NO: 594625 - DNA, 15 bp, Homo sapiens
gtgtctttcctacca

SEQ ID NO: 594626 - DNA, 15 bp, Homo sapiens
tgtctttcctaccac

SEQ ID NO: 594627 - DNA, 15 bp, Homo sapiens
gtctttcctaccaca

SEQ ID NO: 594628 - DNA, 15 bp, Homo sapiens
tctttcctaccacag

SEQ ID NO: 594629 - DNA, 15 bp, Homo sapiens
ctttcctaccacagg

SEQ ID NO: 594630 - DNA, 15 bp, Homo sapiens
tttcctaccacaggg

SEQ ID NO: 594631 - DNA, 15 bp, Homo sapiens
ttcctaccacagggc

SEQ ID NO: 594632 - DNA, 15 bp, Homo sapiens
tcctaccacagggca

SEQ ID NO: 594633 - DNA, 15 bp, Homo sapiens
cctaccacagggcag

SEQ ID NO: 594634 - DNA, 15 bp, Homo sapiens
ctaccacagggcagt

SEQ ID NO: 594635 - DNA, 15 bp, Homo sapiens
taccacagggcagtt

SEQ ID NO: 594636 - DNA, 15 bp, Homo sapiens
accacagggcagttt

SEQ ID NO: 594637 - DNA, 15 bp, Homo sapiens
ccacagggcagtttc

SEQ ID NO: 594638 - DNA, 15 bp, Homo sapiens
cacagggcagtttct

SEQ ID NO: 594639 - DNA, 15 bp, Homo sapiens
acagggcagtttcta

SEQ ID NO: 594640 - DNA, 15 bp, Homo sapiens
cagggcagtttctag

SEQ ID NO: 594641 - DNA, 15 bp, Homo sapiens
agggcagtttctagt

SEQ ID NO: 594642 - DNA, 15 bp, Homo sapiens
gggcagtttctagtg

SEQ ID NO: 594643 - DNA, 15 bp, Homo sapiens
ggcagtttctagtgt

SEQ ID NO: 594644 - DNA, 15 bp, Homo sapiens
gcagtttctagtgtt

SEQ ID NO: 594645 - DNA, 15 bp, Homo sapiens
cagtttctagtgttg

SEQ ID NO: 594646 - DNA, 15 bp, Homo sapiens
agtttctagtgttgc

SEQ ID NO: 594647 - DNA, 15 bp, Homo sapiens
gtttctagtgttgcc

SEQ ID NO: 594648 - DNA, 15 bp, Homo sapiens
tttctagtgttgcct

SEQ ID NO: 594649 - DNA, 15 bp, Homo sapiens
ttctagtgttgcctc

SEQ ID NO: 594650 - DNA, 15 bp, Homo sapiens
tctagtgttgcctct

SEQ ID NO: 594651 - DNA, 15 bp, Homo sapiens
ctagtgttgcctctt

SEQ ID NO: 594652 - DNA, 15 bp, Homo sapiens
tagtgttgcctcttc

SEQ ID NO: 594653 - DNA, 15 bp, Homo sapiens
agtgttgcctcttct

SEQ ID NO: 594654 - DNA, 15 bp, Homo sapiens
gtgttgcctcttctc

SEQ ID NO: 594655 - DNA, 15 bp, Homo sapiens
tgttgcctcttctcc

SEQ ID NO: 594656 - DNA, 15 bp, Homo sapiens
gttgcctcttctccc

SEQ ID NO: 594657 - DNA, 15 bp, Homo sapiens
ttgcctcttctccct

SEQ ID NO: 594658 - DNA, 15 bp, Homo sapiens
tgcctcttctccctg

SEQ ID NO: 594659 - DNA, 15 bp, Homo sapiens
gcctcttctccctgc

SEQ ID NO: 594660 - DNA, 15 bp, Homo sapiens
cctcttctccctgca

SEQ ID NO: 594661 - DNA, 15 bp, Homo sapiens
ctcttctccctgcag

SEQ ID NO: 594662 - DNA, 15 bp, Homo sapiens
tcttctccctgcagt

SEQ ID NO: 594663 - DNA, 15 bp, Homo sapiens
cttctccctgcagtt

SEQ ID NO: 594664 - DNA, 15 bp, Homo sapiens
ttctccctgcagttc

SEQ ID NO: 594665 - DNA, 15 bp, Homo sapiens
tctccctgcagttcg

SEQ ID NO: 594666 - DNA, 15 bp, Homo sapiens
ctccctgcagttcgc

SEQ ID NO: 594667 - DNA, 15 bp, Homo sapiens
tccctgcagttcgct

SEQ ID NO: 594668 - DNA, 15 bp, Homo sapiens
ccctgcagttcgctc

SEQ ID NO: 594669 - DNA, 15 bp, Homo sapiens
cctgcagttcgctca

SEQ ID NO: 594670 - DNA, 15 bp, Homo sapiens
ctgcagttcgctcat

SEQ ID NO: 594671 - DNA, 15 bp, Homo sapiens
tgcagttcgctcatg

SEQ ID NO: 594672 - DNA, 15 bp, Homo sapiens
gcagttcgctcatgg

SEQ ID NO: 594673 - DNA, 15 bp, Homo sapiens
cagttcgctcatgga

SEQ ID NO: 594674 - DNA, 15 bp, Homo sapiens
agttcgctcatggag

SEQ ID NO: 594675 - DNA, 15 bp, Homo sapiens
gttcgctcatggagt

SEQ ID NO: 594676 - DNA, 15 bp, Homo sapiens
ttcgctcatggagtc

SEQ ID NO: 594677 - DNA, 15 bp, Homo sapiens
tcgctcatggagtcc

SEQ ID NO: 594678 - DNA, 15 bp, Homo sapiens
cgctcatggagtccc

SEQ ID NO: 594679 - DNA, 15 bp, Homo sapiens
gctcatggagtcccg

SEQ ID NO: 594680 - DNA, 15 bp, Homo sapiens
ctcatggagtcccgg

SEQ ID NO: 594681 - DNA, 15 bp, Homo sapiens
tcatggagtcccgga

SEQ ID NO: 594682 - DNA, 15 bp, Homo sapiens
catggagtcccggac

SEQ ID NO: 594683 - DNA, 15 bp, Homo sapiens
atggagtcccggacc

SEQ ID NO: 594684 - DNA, 15 bp, Homo sapiens
tggagtcccggacct

SEQ ID NO: 594685 - DNA, 15 bp, Homo sapiens
ggagtcccggacctg

SEQ ID NO: 594686 - DNA, 15 bp, Homo sapiens
gagtcccggacctgg

SEQ ID NO: 594687 - DNA, 15 bp, Homo sapiens
agtcccggacctggc

SEQ ID NO: 594688 - DNA, 15 bp, Homo sapiens
gtcccggacctggcg

SEQ ID NO: 594689 - DNA, 15 bp, Homo sapiens
tcccggacctggcgc

SEQ ID NO: 594690 - DNA, 15 bp, Homo sapiens
cccggacctggcgct

SEQ ID NO: 594691 - DNA, 15 bp, Homo sapiens
ccggacctggcgctg

SEQ ID NO: 594692 - DNA, 15 bp, Homo sapiens
cggacctggcgctga

SEQ ID NO: 594693 - DNA, 15 bp, Homo sapiens
ggacctggcgctgaa

SEQ ID NO: 594694 - DNA, 15 bp, Homo sapiens
gacctggcgctgaag

SEQ ID NO: 594695 - DNA, 15 bp, Homo sapiens
acctggcgctgaagg

SEQ ID NO: 594696 - DNA, 15 bp, Homo sapiens
cctggcgctgaagga

SEQ ID NO: 594697 - DNA, 15 bp, Homo sapiens
ctggcgctgaaggac

SEQ ID NO: 594698 - DNA, 15 bp, Homo sapiens
tggcgctgaaggaca

SEQ ID NO: 594699 - DNA, 15 bp, Homo sapiens
ggcgctgaaggacat

SEQ ID NO: 594700 - DNA, 15 bp, Homo sapiens
gcgctgaaggacatc

SEQ ID NO: 594701 - DNA, 15 bp, Homo sapiens
cgctgaaggacatcg

SEQ ID NO: 594702 - DNA, 15 bp, Homo sapiens
gctgaaggacatcgc

SEQ ID NO: 594703 - DNA, 15 bp, Homo sapiens
ctgaaggacatcgcc

SEQ ID NO: 594704 - DNA, 15 bp, Homo sapiens
tgaaggacatcgcct

SEQ ID NO: 594705 - DNA, 15 bp, Homo sapiens
gaaggacatcgcctg

SEQ ID NO: 594706 - DNA, 15 bp, Homo sapiens
aaggacatcgcctgc

SEQ ID NO: 594707 - DNA, 15 bp, Homo sapiens
aggacatcgcctgca

SEQ ID NO: 594708 - DNA, 15 bp, Homo sapiens
ggacatcgcctgcag

SEQ ID NO: 594709 - DNA, 15 bp, Homo sapiens
gacatcgcctgcagc

SEQ ID NO: 594710 - DNA, 15 bp, Homo sapiens
acatcgcctgcagcg

SEQ ID NO: 594711 - DNA, 15 bp, Homo sapiens
catcgcctgcagcga

SEQ ID NO: 594712 - DNA, 15 bp, Homo sapiens
atcgcctgcagcgag

SEQ ID NO: 594713 - DNA, 15 bp, Homo sapiens
tcgcctgcagcgagg

SEQ ID NO: 594714 - DNA, 15 bp, Homo sapiens
cgcctgcagcgaggc

SEQ ID NO: 594715 - DNA, 15 bp, Homo sapiens
gcctgcagcgaggcc

SEQ ID NO: 594716 - DNA, 15 bp, Homo sapiens
cctgcagcgaggccc

SEQ ID NO: 594717 - DNA, 15 bp, Homo sapiens
ctgcagcgaggccct

SEQ ID NO: 594718 - DNA, 15 bp, Homo sapiens
tgcagcgaggccctc

SEQ ID NO: 594719 - DNA, 15 bp, Homo sapiens
gcagcgaggccctcc

SEQ ID NO: 594720 - DNA, 15 bp, Homo sapiens
cagcgaggccctcct

SEQ ID NO: 594721 - DNA, 15 bp, Homo sapiens
agcgaggccctcctg

SEQ ID NO: 594722 - DNA, 15 bp, Homo sapiens
gcgaggccctcctgg

SEQ ID NO: 594723 - DNA, 15 bp, Homo sapiens
cgaggccctcctgga

SEQ ID NO: 594724 - DNA, 15 bp, Homo sapiens
gaggccctcctggag

SEQ ID NO: 594725 - DNA, 15 bp, Homo sapiens
aggccctcctggagc

SEQ ID NO: 594726 - DNA, 15 bp, Homo sapiens
ggccctcctggagcg

SEQ ID NO: 594727 - DNA, 15 bp, Homo sapiens
gccctcctggagcgc

SEQ ID NO: 594728 - DNA, 15 bp, Homo sapiens
ccctcctggagcgct

SEQ ID NO: 594729 - DNA, 15 bp, Homo sapiens
cctcctggagcgctt

SEQ ID NO: 594730 - DNA, 15 bp, Homo sapiens
ctcctggagcgcttc

SEQ ID NO: 594731 - DNA, 15 bp, Homo sapiens
tcctggagcgcttca

SEQ ID NO: 594732 - DNA, 15 bp, Homo sapiens
cctggagcgcttcat

SEQ ID NO: 594733 - DNA, 15 bp, Homo sapiens
ctggagcgcttcatc

SEQ ID NO: 594734 - DNA, 15 bp, Homo sapiens
tggagcgcttcatca

SEQ ID NO: 594735 - DNA, 15 bp, Homo sapiens
ggagcgcttcatcat

SEQ ID NO: 594736 - DNA, 15 bp, Homo sapiens
gagcgcttcatcatc

SEQ ID NO: 594737 - DNA, 15 bp, Homo sapiens
agcgcttcatcatct

SEQ ID NO: 594738 - DNA, 15 bp, Homo sapiens
gcgcttcatcatctt

SEQ ID NO: 594739 - DNA, 15 bp, Homo sapiens
cgcttcatcatcttc

SEQ ID NO: 594740 - DNA, 15 bp, Homo sapiens
gcttcatcatcttca

SEQ ID NO: 594741 - DNA, 15 bp, Homo sapiens
cttcatcatcttcag

SEQ ID NO: 594742 - DNA, 15 bp, Homo sapiens
tcatcatcttcagcc

SEQ ID NO: 594743 - DNA, 15 bp, Homo sapiens
catcatcttcagcca

SEQ ID NO: 594744 - DNA, 15 bp, Homo sapiens
atcatcttcagccag

SEQ ID NO: 594745 - DNA, 15 bp, Homo sapiens
tcatcttcagccaga

SEQ ID NO: 594746 - DNA, 15 bp, Homo sapiens
catcttcagccagag

SEQ ID NO: 594747 - DNA, 15 bp, Homo sapiens
atcttcagccagaga

SEQ ID NO: 594748 - DNA, 15 bp, Homo sapiens
tcttcagccagagac

SEQ ID NO: 594749 - DNA, 15 bp, Homo sapiens
cttcagccagagacg

SEQ ID NO: 594750 - DNA, 15 bp, Homo sapiens
ttcagccagagacgc

SEQ ID NO: 594751 - DNA, 15 bp, Homo sapiens
tcagccagagacgcg

SEQ ID NO: 594752 - DNA, 15 bp, Homo sapiens
cagccagagacgcgg

SEQ ID NO: 594753 - DNA, 15 bp, Homo sapiens
agccagagacgcggg

SEQ ID NO: 594754 - DNA, 15 bp, Homo sapiens
gccagagacgcgggg

SEQ ID NO: 594755 - DNA, 15 bp, Homo sapiens
ccagagacgcggggc

SEQ ID NO: 594756 - DNA, 15 bp, Homo sapiens
cagagacgcggggca

SEQ ID NO: 594757 - DNA, 15 bp, Homo sapiens
agagacgcggggcaa

SEQ ID NO: 594758 - DNA, 15 bp, Homo sapiens
gagacgcggggcaaa

SEQ ID NO: 594759 - DNA, 15 bp, Homo sapiens
agacgcggggcaaag

SEQ ID NO: 594760 - DNA, 15 bp, Homo sapiens
gacgcggggcaaaga

SEQ ID NO: 594761 - DNA, 15 bp, Homo sapiens
acgcggggcaaagac

SEQ ID NO: 594762 - DNA, 15 bp, Homo sapiens
cgcggggcaaagacg

SEQ ID NO: 594763 - DNA, 15 bp, Homo sapiens
gcggggcaaagacgg

SEQ ID NO: 594764 - DNA, 15 bp, Homo sapiens
cggggcaaagacggt

SEQ ID NO: 594765 - DNA, 15 bp, Homo sapiens
ggggcaaagacggtg

SEQ ID NO: 594766 - DNA, 15 bp, Homo sapiens
gggcaaagacggtgc

SEQ ID NO: 594767 - DNA, 15 bp, Homo sapiens
ggcaaagacggtgcg

SEQ ID NO: 594768 - DNA, 15 bp, Homo sapiens
gcaaagacggtgcgc

SEQ ID NO: 594769 - DNA, 15 bp, Homo sapiens
caaagacggtgcgct

SEQ ID NO: 594770 - DNA, 15 bp, Homo sapiens
aaagacggtgcgcta

SEQ ID NO: 594771 - DNA, 15 bp, Homo sapiens
aagacggtgcgctat

SEQ ID NO: 594772 - DNA, 15 bp, Homo sapiens
agacggtgcgctatg

SEQ ID NO: 594773 - DNA, 15 bp, Homo sapiens
gacggtgcgctatgc

SEQ ID NO: 594774 - DNA, 15 bp, Homo sapiens
acggtgcgctatgcc

SEQ ID NO: 594775 - DNA, 15 bp, Homo sapiens
cggtgcgctatgccc

SEQ ID NO: 594776 - DNA, 15 bp, Homo sapiens
ggtgcgctatgccct

SEQ ID NO: 594777 - DNA, 15 bp, Homo sapiens
gtgcgctatgccctg

SEQ ID NO: 594778 - DNA, 15 bp, Homo sapiens
tgcgctatgccctgt

SEQ ID NO: 594779 - DNA, 15 bp, Homo sapiens
gcgctatgccctgtg

SEQ ID NO: 594780 - DNA, 15 bp, Homo sapiens
cgctatgccctgtgc

SEQ ID NO: 594781 - DNA, 15 bp, Homo sapiens
gctatgccctgtgct

SEQ ID NO: 594782 - DNA, 15 bp, Homo sapiens
ctatgccctgtgctc

SEQ ID NO: 594783 - DNA, 15 bp, Homo sapiens
tatgccctgtgctcc

SEQ ID NO: 594784 - DNA, 15 bp, Homo sapiens
atgccctgtgctccc

SEQ ID NO: 594785 - DNA, 15 bp, Homo sapiens
tgccctgtgctccct

SEQ ID NO: 594786 - DNA, 15 bp, Homo sapiens
gccctgtgctccctc

SEQ ID NO: 594787 - DNA, 15 bp, Homo sapiens
ccctgtgctccctct

SEQ ID NO: 594788 - DNA, 15 bp, Homo sapiens
cctgtgctccctctc

SEQ ID NO: 594789 - DNA, 15 bp, Homo sapiens
ctgtgctccctctcc

SEQ ID NO: 594790 - DNA, 15 bp, Homo sapiens
tgtgctccctctccc

SEQ ID NO: 594791 - DNA, 15 bp, Homo sapiens
gtgctccctctccca

SEQ ID NO: 594792 - DNA, 15 bp, Homo sapiens
tgctccctctcccag

SEQ ID NO: 594793 - DNA, 15 bp, Homo sapiens
gctccctctcccagg

SEQ ID NO: 594794 - DNA, 15 bp, Homo sapiens
ctccctctcccaggg

SEQ ID NO: 594795 - DNA, 15 bp, Homo sapiens
tccctctcccagggc

SEQ ID NO: 594796 - DNA, 15 bp, Homo sapiens
ccctctcccagggca

SEQ ID NO: 594797 - DNA, 15 bp, Homo sapiens
cctctcccagggcac

SEQ ID NO: 594798 - DNA, 15 bp, Homo sapiens
ctctcccagggcacc

SEQ ID NO: 594799 - DNA, 15 bp, Homo sapiens
tctcccagggcaccc

SEQ ID NO: 594800 - DNA, 15 bp, Homo sapiens
ctcccagggcaccct

SEQ ID NO: 594801 - DNA, 15 bp, Homo sapiens
tcccagggcacccta

SEQ ID NO: 594802 - DNA, 15 bp, Homo sapiens
cccagggcaccctac

SEQ ID NO: 594803 - DNA, 15 bp, Homo sapiens
ccagggcaccctaca

SEQ ID NO: 594804 - DNA, 15 bp, Homo sapiens
cagggcaccctacag

SEQ ID NO: 594805 - DNA, 15 bp, Homo sapiens
agggcaccctacagt

SEQ ID NO: 594806 - DNA, 15 bp, Homo sapiens
gggcaccctacagtg

SEQ ID NO: 594807 - DNA, 15 bp, Homo sapiens
ggcaccctacagtgg

SEQ ID NO: 594808 - DNA, 15 bp, Homo sapiens
gcaccctacagtgga

SEQ ID NO: 594809 - DNA, 15 bp, Homo sapiens
caccctacagtggat

SEQ ID NO: 594810 - DNA, 15 bp, Homo sapiens
accctacagtggata

SEQ ID NO: 594811 - DNA, 15 bp, Homo sapiens
ccctacagtggatag

SEQ ID NO: 594812 - DNA, 15 bp, Homo sapiens
cctacagtggataga

SEQ ID NO: 594813 - DNA, 15 bp, Homo sapiens
ctacagtggatagaa

SEQ ID NO: 594814 - DNA, 15 bp, Homo sapiens
tacagtggatagaag

SEQ ID NO: 594815 - DNA, 15 bp, Homo sapiens
acagtggatagaaga

SEQ ID NO: 594816 - DNA, 15 bp, Homo sapiens
cagtggatagaagac

SEQ ID NO: 594817 - DNA, 15 bp, Homo sapiens
agtggatagaagaca

SEQ ID NO: 594818 - DNA, 15 bp, Homo sapiens
gtggatagaagacac

SEQ ID NO: 594819 - DNA, 15 bp, Homo sapiens
tggatagaagacact

SEQ ID NO: 594820 - DNA, 15 bp, Homo sapiens
ggatagaagacactc

SEQ ID NO: 594821 - DNA, 15 bp, Homo sapiens
gatagaagacactct

SEQ ID NO: 594822 - DNA, 15 bp, Homo sapiens
atagaagacactctg

SEQ ID NO: 594823 - DNA, 15 bp, Homo sapiens
tagaagacactctgt

SEQ ID NO: 594824 - DNA, 15 bp, Homo sapiens
agaagacactctgta

SEQ ID NO: 594825 - DNA, 15 bp, Homo sapiens
gaagacactctgtat

SEQ ID NO: 594826 - DNA, 15 bp, Homo sapiens
aagacactctgtatg

SEQ ID NO: 594827 - DNA, 15 bp, Homo sapiens
agacactctgtatgc

SEQ ID NO: 594828 - DNA, 15 bp, Homo sapiens
gacactctgtatgcc

SEQ ID NO: 594829 - DNA, 15 bp, Homo sapiens
acactctgtatgcca

SEQ ID NO: 594830 - DNA, 15 bp, Homo sapiens
cactctgtatgccaa

SEQ ID NO: 594831 - DNA, 15 bp, Homo sapiens
actctgtatgccaac

SEQ ID NO: 594832 - DNA, 15 bp, Homo sapiens
ctctgtatgccaacg

SEQ ID NO: 594833 - DNA, 15 bp, Homo sapiens
tctgtatgccaacgt

SEQ ID NO: 594834 - DNA, 15 bp, Homo sapiens
ctgtatgccaacgtg

SEQ ID NO: 594835 - DNA, 15 bp, Homo sapiens
tgtatgccaacgtgg

SEQ ID NO: 594836 - DNA, 15 bp, Homo sapiens
gtatgccaacgtgga

SEQ ID NO: 594837 - DNA, 15 bp, Homo sapiens
tatgccaacgtggac

SEQ ID NO: 594838 - DNA, 15 bp, Homo sapiens
atgccaacgtggact

SEQ ID NO: 594839 - DNA, 15 bp, Homo sapiens
tgccaacgtggactt

SEQ ID NO: 594840 - DNA, 15 bp, Homo sapiens
gccaacgtggacttc

SEQ ID NO: 594841 - DNA, 15 bp, Homo sapiens
ccaacgtggacttct

SEQ ID NO: 594842 - DNA, 15 bp, Homo sapiens
caacgtggacttctt

SEQ ID NO: 594843 - DNA, 15 bp, Homo sapiens
aacgtggacttcttc

SEQ ID NO: 594844 - DNA, 15 bp, Homo sapiens
acgtggacttcttca

SEQ ID NO: 594845 - DNA, 15 bp, Homo sapiens
cgtggacttcttcaa

SEQ ID NO: 594846 - DNA, 15 bp, Homo sapiens
gtggacttcttcaag

SEQ ID NO: 594847 - DNA, 15 bp, Homo sapiens
tggacttcttcaagc

SEQ ID NO: 594848 - DNA, 15 bp, Homo sapiens
ggacttcttcaagct

SEQ ID NO: 594849 - DNA, 15 bp, Homo sapiens
gacttcttcaagctc

SEQ ID NO: 594850 - DNA, 15 bp, Homo sapiens
acttcttcaagctct

SEQ ID NO: 594851 - DNA, 15 bp, Homo sapiens
cttcttcaagctctt

SEQ ID NO: 594852 - DNA, 15 bp, Homo sapiens
ttcttcaagctcttc

SEQ ID NO: 594853 - DNA, 15 bp, Homo sapiens
tcttcaagctcttcc

SEQ ID NO: 594854 - DNA, 15 bp, Homo sapiens
cttcaagctcttccg

SEQ ID NO: 594855 - DNA, 15 bp, Homo sapiens
ttcaagctcttccgt

SEQ ID NO: 594856 - DNA, 15 bp, Homo sapiens
tcaagctcttccgtg

SEQ ID NO: 594857 - DNA, 15 bp, Homo sapiens
caagctcttccgtgt

SEQ ID NO: 594858 - DNA, 15 bp, Homo sapiens
aagctcttccgtgtg

SEQ ID NO: 594859 - DNA, 15 bp, Homo sapiens
agctcttccgtgtgg

SEQ ID NO: 594860 - DNA, 15 bp, Homo sapiens
gctcttccgtgtggt

SEQ ID NO: 594861 - DNA, 15 bp, Homo sapiens
ctcttccgtgtggta

SEQ ID NO: 594862 - DNA, 15 bp, Homo sapiens
tcttccgtgtggtaa

SEQ ID NO: 594863 - DNA, 15 bp, Homo sapiens
cttccgtgtggtaag

SEQ ID NO: 594864 - DNA, 15 bp, Homo sapiens
ttccgtgtggtaagg

SEQ ID NO: 594865 - DNA, 15 bp, Homo sapiens
tccgtgtggtaaggg

SEQ ID NO: 594866 - DNA, 15 bp, Homo sapiens
ccgtgtggtaaggga

SEQ ID NO: 594867 - DNA, 15 bp, Homo sapiens
cgtgtggtaagggag

SEQ ID NO: 594868 - DNA, 15 bp, Homo sapiens
gtgtggtaagggagg

SEQ ID NO: 594869 - DNA, 15 bp, Homo sapiens
tgtggtaagggaggg

SEQ ID NO: 594870 - DNA, 15 bp, Homo sapiens
gtggtaagggagggg

SEQ ID NO: 594871 - DNA, 15 bp, Homo sapiens
tggtaagggaggggt

SEQ ID NO: 594872 - DNA, 15 bp, Homo sapiens
ggtaagggaggggtt

SEQ ID NO: 594873 - DNA, 15 bp, Homo sapiens
gtaagggaggggttt

SEQ ID NO: 594874 - DNA, 15 bp, Homo sapiens
taagggaggggtttg

SEQ ID NO: 594875 - DNA, 15 bp, Homo sapiens
aagggaggggtttgg

SEQ ID NO: 594876 - DNA, 15 bp, Homo sapiens
agggaggggtttggc

SEQ ID NO: 594877 - DNA, 15 bp, Homo sapiens
gggaggggtttggct

SEQ ID NO: 594878 - DNA, 15 bp, Homo sapiens
ggaggggtttggctg

SEQ ID NO: 594879 - DNA, 15 bp, Homo sapiens
gaggggtttggctgc

SEQ ID NO: 594880 - DNA, 15 bp, Homo sapiens
aggggtttggctgct

SEQ ID NO: 594881 - DNA, 15 bp, Homo sapiens
ggggtttggctgctc

SEQ ID NO: 594882 - DNA, 15 bp, Homo sapiens
gggtttggctgctcg

SEQ ID NO: 594883 - DNA, 15 bp, Homo sapiens
ggtttggctgctcgc

SEQ ID NO: 594884 - DNA, 15 bp, Homo sapiens
gtttggctgctcgcc

SEQ ID NO: 594885 - DNA, 15 bp, Homo sapiens
tttggctgctcgcca

SEQ ID NO: 594886 - DNA, 15 bp, Homo sapiens
ttggctgctcgccaa

SEQ ID NO: 594887 - DNA, 15 bp, Homo sapiens
tggctgctcgccaat

SEQ ID NO: 594888 - DNA, 15 bp, Homo sapiens
ggctgctcgccaatt

SEQ ID NO: 594889 - DNA, 15 bp, Homo sapiens
gctgctcgccaattg

SEQ ID NO: 594890 - DNA, 15 bp, Homo sapiens
ctgctcgccaattgc

SEQ ID NO: 594891 - DNA, 15 bp, Homo sapiens
tgctcgccaattgca

SEQ ID NO: 594892 - DNA, 15 bp, Homo sapiens
gctcgccaattgcaa

SEQ ID NO: 594893 - DNA, 15 bp, Homo sapiens
ctcgccaattgcaag

SEQ ID NO: 594894 - DNA, 15 bp, Homo sapiens
tcgccaattgcaagg

SEQ ID NO: 594895 - DNA, 15 bp, Homo sapiens
cgccaattgcaaggt

SEQ ID NO: 594896 - DNA, 15 bp, Homo sapiens
gccaattgcaaggtg

SEQ ID NO: 594897 - DNA, 15 bp, Homo sapiens
ccaattgcaaggtga

SEQ ID NO: 594898 - DNA, 15 bp, Homo sapiens
caattgcaaggtgat

SEQ ID NO: 594899 - DNA, 15 bp, Homo sapiens
aattgcaaggtgatt

SEQ ID NO: 594900 - DNA, 15 bp, Homo sapiens
attgcaaggtgattc

SEQ ID NO: 594901 - DNA, 15 bp, Homo sapiens
ttgcaaggtgattcc

SEQ ID NO: 594902 - DNA, 15 bp, Homo sapiens
tgcaaggtgattcct

SEQ ID NO: 594903 - DNA, 15 bp, Homo sapiens
gcaaggtgattcctg

SEQ ID NO: 594904 - DNA, 15 bp, Homo sapiens
caaggtgattcctgg

SEQ ID NO: 594905 - DNA, 15 bp, Homo sapiens
aaggtgattcctggg

SEQ ID NO: 594906 - DNA, 15 bp, Homo sapiens
aggtgattcctgggg

SEQ ID NO: 594907 - DNA, 15 bp, Homo sapiens
ggtgattcctggggt

SEQ ID NO: 594908 - DNA, 15 bp, Homo sapiens
gtgattcctggggta

SEQ ID NO: 594909 - DNA, 15 bp, Homo sapiens
tgattcctggggtag

SEQ ID NO: 594910 - DNA, 15 bp, Homo sapiens
gattcctggggtagc

SEQ ID NO: 594911 - DNA, 15 bp, Homo sapiens
attcctggggtagca

SEQ ID NO: 594912 - DNA, 15 bp, Homo sapiens
ttcctggggtagcag

SEQ ID NO: 594913 - DNA, 15 bp, Homo sapiens
tcctggggtagcaga

SEQ ID NO: 594914 - DNA, 15 bp, Homo sapiens
cctggggtagcagag

SEQ ID NO: 594915 - DNA, 15 bp, Homo sapiens
ctggggtagcagagc

SEQ ID NO: 594916 - DNA, 15 bp, Homo sapiens
tggggtagcagagcc

SEQ ID NO: 594917 - DNA, 15 bp, Homo sapiens
ggggtagcagagcct

SEQ ID NO: 594918 - DNA, 15 bp, Homo sapiens
gggtagcagagcctc

SEQ ID NO: 594919 - DNA, 15 bp, Homo sapiens
ggtagcagagcctca

SEQ ID NO: 594920 - DNA, 15 bp, Homo sapiens
gtagcagagcctcac

SEQ ID NO: 594921 - DNA, 15 bp, Homo sapiens
tagcagagcctcacg

SEQ ID NO: 594922 - DNA, 15 bp, Homo sapiens
agcagagcctcacga

SEQ ID NO: 594923 - DNA, 15 bp, Homo sapiens
gcagagcctcacgaa

SEQ ID NO: 594924 - DNA, 15 bp, Homo sapiens
cagagcctcacgaat

SEQ ID NO: 594925 - DNA, 15 bp, Homo sapiens
agagcctcacgaatt

SEQ ID NO: 594926 - DNA, 15 bp, Homo sapiens
gagcctcacgaattg

SEQ ID NO: 594927 - DNA, 15 bp, Homo sapiens
agcctcacgaattga

SEQ ID NO: 594928 - DNA, 15 bp, Homo sapiens
gcctcacgaattgac

SEQ ID NO: 594929 - DNA, 15 bp, Homo sapiens
cctcacgaattgacc

SEQ ID NO: 594930 - DNA, 15 bp, Homo sapiens
ctcacgaattgacct

SEQ ID NO: 594931 - DNA, 15 bp, Homo sapiens
tcacgaattgacctt

SEQ ID NO: 594932 - DNA, 15 bp, Homo sapiens
cacgaattgaccttg

SEQ ID NO: 594933 - DNA, 15 bp, Homo sapiens
acgaattgaccttgg

SEQ ID NO: 594934 - DNA, 15 bp, Homo sapiens
cgaattgaccttggg

SEQ ID NO: 594935 - DNA, 15 bp, Homo sapiens
gaattgaccttgggg

SEQ ID NO: 594936 - DNA, 15 bp, Homo sapiens
aattgaccttgggga

SEQ ID NO: 594937 - DNA, 15 bp, Homo sapiens
attgaccttggggag

SEQ ID NO: 594938 - DNA, 15 bp, Homo sapiens
ttgaccttggggagg

SEQ ID NO: 594939 - DNA, 15 bp, Homo sapiens
tgaccttggggaggg

SEQ ID NO: 594940 - DNA, 15 bp, Homo sapiens
gaccttggggagggc

SEQ ID NO: 594941 - DNA, 15 bp, Homo sapiens
accttggggagggcg

SEQ ID NO: 594942 - DNA, 15 bp, Homo sapiens
ccttggggagggcgt

SEQ ID NO: 594943 - DNA, 15 bp, Homo sapiens
cttggggagggcgtg

SEQ ID NO: 594944 - DNA, 15 bp, Homo sapiens
ttggggagggcgtga

SEQ ID NO: 594945 - DNA, 15 bp, Homo sapiens
tggggagggcgtgag

SEQ ID NO: 594946 - DNA, 15 bp, Homo sapiens
ggggagggcgtgagc

SEQ ID NO: 594947 - DNA, 15 bp, Homo sapiens
gggagggcgtgagcc

SEQ ID NO: 594948 - DNA, 15 bp, Homo sapiens
ggagggcgtgagcct

SEQ ID NO: 594949 - DNA, 15 bp, Homo sapiens
gagggcgtgagcctg

SEQ ID NO: 594950 - DNA, 15 bp, Homo sapiens
agggcgtgagcctgg

SEQ ID NO: 594951 - DNA, 15 bp, Homo sapiens
gggcgtgagcctggt

SEQ ID NO: 594952 - DNA, 15 bp, Homo sapiens
ggcgtgagcctggtg

SEQ ID NO: 594953 - DNA, 15 bp, Homo sapiens
gcgtgagcctggtgt

SEQ ID NO: 594954 - DNA, 15 bp, Homo sapiens
cgtgagcctggtgtt

SEQ ID NO: 594955 - DNA, 15 bp, Homo sapiens
gtgagcctggtgttc

SEQ ID NO: 594956 - DNA, 15 bp, Homo sapiens
tgagcctggtgttct

SEQ ID NO: 594957 - DNA, 15 bp, Homo sapiens
gagcctggtgttctg

SEQ ID NO: 594958 - DNA, 15 bp, Homo sapiens
agcctggtgttctgg

SEQ ID NO: 594959 - DNA, 15 bp, Homo sapiens
gcctggtgttctgga

SEQ ID NO: 594960 - DNA, 15 bp, Homo sapiens
cctggtgttctggac

SEQ ID NO: 594961 - DNA, 15 bp, Homo sapiens
ctggtgttctggaca

SEQ ID NO: 594962 - DNA, 15 bp, Homo sapiens
tggtgttctggacaa

SEQ ID NO: 594963 - DNA, 15 bp, Homo sapiens
ggtgttctggacaat

SEQ ID NO: 594964 - DNA, 15 bp, Homo sapiens
gtgttctggacaatc

SEQ ID NO: 594965 - DNA, 15 bp, Homo sapiens
tgttctggacaatcc

SEQ ID NO: 594966 - DNA, 15 bp, Homo sapiens
gttctggacaatcct

SEQ ID NO: 594967 - DNA, 15 bp, Homo sapiens
ttctggacaatcctt

SEQ ID NO: 594968 - DNA, 15 bp, Homo sapiens
tctggacaatccttg

SEQ ID NO: 594969 - DNA, 15 bp, Homo sapiens
ctggacaatccttgc

SEQ ID NO: 594970 - DNA, 15 bp, Homo sapiens
tggacaatccttgca

SEQ ID NO: 594971 - DNA, 15 bp, Homo sapiens
ggacaatccttgcaa

SEQ ID NO: 594972 - DNA, 15 bp, Homo sapiens
gacaatccttgcaaa

SEQ ID NO: 594973 - DNA, 15 bp, Homo sapiens
acaatccttgcaaaa

SEQ ID NO: 594974 - DNA, 15 bp, Homo sapiens
caatccttgcaaaag

SEQ ID NO: 594975 - DNA, 15 bp, Homo sapiens
aatccttgcaaaagc

SEQ ID NO: 594976 - DNA, 15 bp, Homo sapiens
atccttgcaaaagct

SEQ ID NO: 594977 - DNA, 15 bp, Homo sapiens
tccttgcaaaagctc

SEQ ID NO: 594978 - DNA, 15 bp, Homo sapiens
ccttgcaaaagctcc

SEQ ID NO: 594979 - DNA, 15 bp, Homo sapiens
cttgcaaaagctcca

SEQ ID NO: 594980 - DNA, 15 bp, Homo sapiens
ttgcaaaagctccag

SEQ ID NO: 594981 - DNA, 15 bp, Homo sapiens
tgcaaaagctccagg

SEQ ID NO: 594982 - DNA, 15 bp, Homo sapiens
gcaaaagctccaggc

SEQ ID NO: 594983 - DNA, 15 bp, Homo sapiens
caaaagctccaggct

SEQ ID NO: 594984 - DNA, 15 bp, Homo sapiens
aaaagctccaggctc

SEQ ID NO: 594985 - DNA, 15 bp, Homo sapiens
aaagctccaggctcc

SEQ ID NO: 594986 - DNA, 15 bp, Homo sapiens
aagctccaggctccc

SEQ ID NO: 594987 - DNA, 15 bp, Homo sapiens
agctccaggctccca

SEQ ID NO: 594988 - DNA, 15 bp, Homo sapiens
gctccaggctcccag

SEQ ID NO: 594989 - DNA, 15 bp, Homo sapiens
ctccaggctcccagg

SEQ ID NO: 594990 - DNA, 15 bp, Homo sapiens
tccaggctcccaggg

SEQ ID NO: 594991 - DNA, 15 bp, Homo sapiens
ccaggctcccagggc

SEQ ID NO: 594992 - DNA, 15 bp, Homo sapiens
caggctcccagggct

SEQ ID NO: 594993 - DNA, 15 bp, Homo sapiens
aggctcccagggctc

SEQ ID NO: 594994 - DNA, 15 bp, Homo sapiens
ggctcccagggctca

SEQ ID NO: 594995 - DNA, 15 bp, Homo sapiens
gctcccagggctcaa

SEQ ID NO: 594996 - DNA, 15 bp, Homo sapiens
ctcccagggctcaaa

SEQ ID NO: 594997 - DNA, 15 bp, Homo sapiens
tcccagggctcaaaa

SEQ ID NO: 594998 - DNA, 15 bp, Homo sapiens
cccagggctcaaaaa

SEQ ID NO: 594999 - DNA, 15 bp, Homo sapiens
ccagggctcaaaaaa

SEQ ID NO: 595000 - DNA, 15 bp, Homo sapiens
cagggctcaaaaaat

SEQ ID NO: 595001 - DNA, 15 bp, Homo sapiens
agggctcaaaaaatc

SEQ ID NO: 595002 - DNA, 15 bp, Homo sapiens
gggctcaaaaaatca

SEQ ID NO: 595003 - DNA, 15 bp, Homo sapiens
ggctcaaaaaatcac

SEQ ID NO: 595004 - DNA, 15 bp, Homo sapiens
gctcaaaaaatcaca

SEQ ID NO: 595005 - DNA, 15 bp, Homo sapiens
ctcaaaaaatcacaa

SEQ ID NO: 595006 - DNA, 15 bp, Homo sapiens
tcaaaaaatcacaac

SEQ ID NO: 595007 - DNA, 15 bp, Homo sapiens
caaaaaatcacaact

SEQ ID NO: 595008 - DNA, 15 bp, Homo sapiens
aaaaaatcacaactg

SEQ ID NO: 595009 - DNA, 15 bp, Homo sapiens
aaaaatcacaactga

SEQ ID NO: 595010 - DNA, 15 bp, Homo sapiens
aaaatcacaactgat

SEQ ID NO: 595011 - DNA, 15 bp, Homo sapiens
aaatcacaactgata

SEQ ID NO: 595012 - DNA, 15 bp, Homo sapiens
aatcacaactgatag

SEQ ID NO: 595013 - DNA, 15 bp, Homo sapiens
atcacaactgatagt

SEQ ID NO: 595014 - DNA, 15 bp, Homo sapiens
tcacaactgatagta

SEQ ID NO: 595015 - DNA, 15 bp, Homo sapiens
cacaactgatagtat

SEQ ID NO: 595016 - DNA, 15 bp, Homo sapiens
acaactgatagtatt

SEQ ID NO: 595017 - DNA, 15 bp, Homo sapiens
caactgatagtattt

SEQ ID NO: 595018 - DNA, 15 bp, Homo sapiens
aactgatagtatttc

SEQ ID NO: 595019 - DNA, 15 bp, Homo sapiens
actgatagtatttct

SEQ ID NO: 595020 - DNA, 15 bp, Homo sapiens
ctgatagtatttcta

SEQ ID NO: 595021 - DNA, 15 bp, Homo sapiens
tgatagtatttctag

SEQ ID NO: 595022 - DNA, 15 bp, Homo sapiens
gatagtatttctaga

SEQ ID NO: 595023 - DNA, 15 bp, Homo sapiens
atagtatttctagaa

SEQ ID NO: 595024 - DNA, 15 bp, Homo sapiens
tagtatttctagaac

SEQ ID NO: 595025 - DNA, 15 bp, Homo sapiens
agtatttctagaaca

SEQ ID NO: 595026 - DNA, 15 bp, Homo sapiens
gtatttctagaacag

SEQ ID NO: 595027 - DNA, 15 bp, Homo sapiens
tatttctagaacagt

SEQ ID NO: 595028 - DNA, 15 bp, Homo sapiens
atttctagaacagtg

SEQ ID NO: 595029 - DNA, 15 bp, Homo sapiens
tttctagaacagtgg

SEQ ID NO: 595030 - DNA, 15 bp, Homo sapiens
ttctagaacagtggc

SEQ ID NO: 595031 - DNA, 15 bp, Homo sapiens
tctagaacagtggcc

SEQ ID NO: 595032 - DNA, 15 bp, Homo sapiens
ctagaacagtggccc

SEQ ID NO: 595033 - DNA, 15 bp, Homo sapiens
tagaacagtggccca

SEQ ID NO: 595034 - DNA, 15 bp, Homo sapiens
agaacagtggcccag

SEQ ID NO: 595035 - DNA, 15 bp, Homo sapiens
gaacagtggcccagg

SEQ ID NO: 595036 - DNA, 15 bp, Homo sapiens
aacagtggcccaggg

SEQ ID NO: 595037 - DNA, 15 bp, Homo sapiens
acagtggcccaggga

SEQ ID NO: 595038 - DNA, 15 bp, Homo sapiens
cagtggcccagggac

SEQ ID NO: 595039 - DNA, 15 bp, Homo sapiens
agtggcccagggacc

SEQ ID NO: 595040 - DNA, 15 bp, Homo sapiens
gtggcccagggaccc

SEQ ID NO: 595041 - DNA, 15 bp, Homo sapiens
tggcccagggaccca

SEQ ID NO: 595042 - DNA, 15 bp, Homo sapiens
ggcccagggacccag

SEQ ID NO: 595043 - DNA, 15 bp, Homo sapiens
gcccagggacccaga

SEQ ID NO: 595044 - DNA, 15 bp, Homo sapiens
cccagggacccagaa

SEQ ID NO: 595045 - DNA, 15 bp, Homo sapiens
ccagggacccagaag

SEQ ID NO: 595046 - DNA, 15 bp, Homo sapiens
cagggacccagaagt

SEQ ID NO: 595047 - DNA, 15 bp, Homo sapiens
agggacccagaagtc

SEQ ID NO: 595048 - DNA, 15 bp, Homo sapiens
gggacccagaagtca

SEQ ID NO: 595049 - DNA, 15 bp, Homo sapiens
ggacccagaagtcac

SEQ ID NO: 595050 - DNA, 15 bp, Homo sapiens
gacccagaagtcact

SEQ ID NO: 595051 - DNA, 15 bp, Homo sapiens
acccagaagtcacta

SEQ ID NO: 595052 - DNA, 15 bp, Homo sapiens
cccagaagtcactat

SEQ ID NO: 595053 - DNA, 15 bp, Homo sapiens
ccagaagtcactatg

SEQ ID NO: 595054 - DNA, 15 bp, Homo sapiens
cagaagtcactatga

SEQ ID NO: 595055 - DNA, 15 bp, Homo sapiens
agaagtcactatgag

SEQ ID NO: 595056 - DNA, 15 bp, Homo sapiens
gaagtcactatgagg

SEQ ID NO: 595057 - DNA, 15 bp, Homo sapiens
aagtcactatgaggt

SEQ ID NO: 595058 - DNA, 15 bp, Homo sapiens
agtcactatgaggtt

SEQ ID NO: 595059 - DNA, 15 bp, Homo sapiens
gtcactatgaggttc

SEQ ID NO: 595060 - DNA, 15 bp, Homo sapiens
tcactatgaggttca

SEQ ID NO: 595061 - DNA, 15 bp, Homo sapiens
cactatgaggttcac

SEQ ID NO: 595062 - DNA, 15 bp, Homo sapiens
actatgaggttcacc

SEQ ID NO: 595063 - DNA, 15 bp, Homo sapiens
ctatgaggttcacca

SEQ ID NO: 595064 - DNA, 15 bp, Homo sapiens
tatgaggttcaccat

SEQ ID NO: 595065 - DNA, 15 bp, Homo sapiens
atgaggttcaccatt

SEQ ID NO: 595066 - DNA, 15 bp, Homo sapiens
tgaggttcaccatta

SEQ ID NO: 595067 - DNA, 15 bp, Homo sapiens
gaggttcaccattag

SEQ ID NO: 595068 - DNA, 15 bp, Homo sapiens
aggttcaccattagg

SEQ ID NO: 595069 - DNA, 15 bp, Homo sapiens
ggttcaccattaggt

SEQ ID NO: 595070 - DNA, 15 bp, Homo sapiens
gttcaccattaggta

SEQ ID NO: 595071 - DNA, 15 bp, Homo sapiens
ttcaccattaggtat

SEQ ID NO: 595072 - DNA, 15 bp, Homo sapiens
tcaccattaggtatg

SEQ ID NO: 595073 - DNA, 15 bp, Homo sapiens
caccattaggtatgt

SEQ ID NO: 595074 - DNA, 15 bp, Homo sapiens
accattaggtatgtg

SEQ ID NO: 595075 - DNA, 15 bp, Homo sapiens
ccattaggtatgtgg

SEQ ID NO: 595076 - DNA, 15 bp, Homo sapiens
cattaggtatgtggc

SEQ ID NO: 595077 - DNA, 15 bp, Homo sapiens
attaggtatgtggct

SEQ ID NO: 595078 - DNA, 15 bp, Homo sapiens
ttaggtatgtggctg

SEQ ID NO: 595079 - DNA, 15 bp, Homo sapiens
taggtatgtggctgt

SEQ ID NO: 595080 - DNA, 15 bp, Homo sapiens
aggtatgtggctgtg

SEQ ID NO: 595081 - DNA, 15 bp, Homo sapiens
ggtatgtggctgtgg

SEQ ID NO: 595082 - DNA, 15 bp, Homo sapiens
gtatgtggctgtggc

SEQ ID NO: 595083 - DNA, 15 bp, Homo sapiens
tatgtggctgtggca

SEQ ID NO: 595084 - DNA, 15 bp, Homo sapiens
atgtggctgtggcat

SEQ ID NO: 595085 - DNA, 15 bp, Homo sapiens
tgtggctgtggcatg

SEQ ID NO: 595086 - DNA, 15 bp, Homo sapiens
gtggctgtggcatgt

SEQ ID NO: 595087 - DNA, 15 bp, Homo sapiens
tggctgtggcatgtt

SEQ ID NO: 595088 - DNA, 15 bp, Homo sapiens
ggctgtggcatgttt

SEQ ID NO: 595089 - DNA, 15 bp, Homo sapiens
gctgtggcatgtttg

SEQ ID NO: 595090 - DNA, 15 bp, Homo sapiens
ctgtggcatgtttgt

SEQ ID NO: 595091 - DNA, 15 bp, Homo sapiens
tgtggcatgtttgtg

SEQ ID NO: 595092 - DNA, 15 bp, Homo sapiens
gtggcatgtttgtgt

SEQ ID NO: 595093 - DNA, 15 bp, Homo sapiens
tggcatgtttgtgtc

SEQ ID NO: 595094 - DNA, 15 bp, Homo sapiens
ggcatgtttgtgtcc

SEQ ID NO: 595095 - DNA, 15 bp, Homo sapiens
gcatgtttgtgtcca

SEQ ID NO: 595096 - DNA, 15 bp, Homo sapiens
catgtttgtgtccac

SEQ ID NO: 595097 - DNA, 15 bp, Homo sapiens
atgtttgtgtccact

SEQ ID NO: 595098 - DNA, 15 bp, Homo sapiens
tgtttgtgtccactc

SEQ ID NO: 595099 - DNA, 15 bp, Homo sapiens
gtttgtgtccactct

SEQ ID NO: 595100 - DNA, 15 bp, Homo sapiens
tttgtgtccactcta

SEQ ID NO: 595101 - DNA, 15 bp, Homo sapiens
ttgtgtccactctaa

SEQ ID NO: 595102 - DNA, 15 bp, Homo sapiens
tgtgtccactctaaa

SEQ ID NO: 595103 - DNA, 15 bp, Homo sapiens
gtgtccactctaaat

SEQ ID NO: 595104 - DNA, 15 bp, Homo sapiens
tgtccactctaaatg

SEQ ID NO: 595105 - DNA, 15 bp, Homo sapiens
gtccactctaaatgt

SEQ ID NO: 595106 - DNA, 15 bp, Homo sapiens
tccactctaaatgtg

SEQ ID NO: 595107 - DNA, 15 bp, Homo sapiens
ccactctaaatgtgg

SEQ ID NO: 595108 - DNA, 15 bp, Homo sapiens
cactctaaatgtggg

SEQ ID NO: 595109 - DNA, 15 bp, Homo sapiens
actctaaatgtgggg

SEQ ID NO: 595110 - DNA, 15 bp, Homo sapiens
ctctaaatgtgggga

SEQ ID NO: 595111 - DNA, 15 bp, Homo sapiens
tctaaatgtggggat

SEQ ID NO: 595112 - DNA, 15 bp, Homo sapiens
ctaaatgtggggata

SEQ ID NO: 595113 - DNA, 15 bp, Homo sapiens
taaatgtggggataa

SEQ ID NO: 595114 - DNA, 15 bp, Homo sapiens
aaatgtggggataat

SEQ ID NO: 595115 - DNA, 15 bp, Homo sapiens
aatgtggggataatc

SEQ ID NO: 595116 - DNA, 15 bp, Homo sapiens
atgtggggataatcc

SEQ ID NO: 595117 - DNA, 15 bp, Homo sapiens
tgtggggataatccc

SEQ ID NO: 595118 - DNA, 15 bp, Homo sapiens
gtggggataatcccc

SEQ ID NO: 595119 - DNA, 15 bp, Homo sapiens
tggggataatcccct

SEQ ID NO: 595120 - DNA, 15 bp, Homo sapiens
ggggataatcccctt

SEQ ID NO: 595121 - DNA, 15 bp, Homo sapiens
gggataatccccttt

SEQ ID NO: 595122 - DNA, 15 bp, Homo sapiens
ggataatccccttta

SEQ ID NO: 595123 - DNA, 15 bp, Homo sapiens
gataatcccctttac

SEQ ID NO: 595124 - DNA, 15 bp, Homo sapiens
ataatcccctttacc

SEQ ID NO: 595125 - DNA, 15 bp, Homo sapiens
taatcccctttacct

SEQ ID NO: 595126 - DNA, 15 bp, Homo sapiens
aatcccctttacctc

SEQ ID NO: 595127 - DNA, 15 bp, Homo sapiens
atcccctttacctcc

SEQ ID NO: 595128 - DNA, 15 bp, Homo sapiens
tcccctttacctcct

SEQ ID NO: 595129 - DNA, 15 bp, Homo sapiens
cccctttacctcctc

SEQ ID NO: 595130 - DNA, 15 bp, Homo sapiens
ccctttacctcctct

SEQ ID NO: 595131 - DNA, 15 bp, Homo sapiens
cctttacctcctcta

SEQ ID NO: 595132 - DNA, 15 bp, Homo sapiens
ctttacctcctctaa

SEQ ID NO: 595133 - DNA, 15 bp, Homo sapiens
tttacctcctctaac

SEQ ID NO: 595134 - DNA, 15 bp, Homo sapiens
ttacctcctctaaca

SEQ ID NO: 595135 - DNA, 15 bp, Homo sapiens
tacctcctctaacag

SEQ ID NO: 595136 - DNA, 15 bp, Homo sapiens
acctcctctaacaga

SEQ ID NO: 595137 - DNA, 15 bp, Homo sapiens
cctcctctaacagag

SEQ ID NO: 595138 - DNA, 15 bp, Homo sapiens
ctcctctaacagagt

SEQ ID NO: 595139 - DNA, 15 bp, Homo sapiens
tcctctaacagagtg

SEQ ID NO: 595140 - DNA, 15 bp, Homo sapiens
cctctaacagagtgg

SEQ ID NO: 595141 - DNA, 15 bp, Homo sapiens
ctctaacagagtggt

SEQ ID NO: 595142 - DNA, 15 bp, Homo sapiens
tctaacagagtggta

SEQ ID NO: 595143 - DNA, 15 bp, Homo sapiens
ctaacagagtggtaa

SEQ ID NO: 595144 - DNA, 15 bp, Homo sapiens
taacagagtggtaaa

SEQ ID NO: 595145 - DNA, 15 bp, Homo sapiens
aacagagtggtaaag

SEQ ID NO: 595146 - DNA, 15 bp, Homo sapiens
acagagtggtaaagg

SEQ ID NO: 595147 - DNA, 15 bp, Homo sapiens
cagagtggtaaagga

SEQ ID NO: 595148 - DNA, 15 bp, Homo sapiens
agagtggtaaaggaa

SEQ ID NO: 595149 - DNA, 15 bp, Homo sapiens
gagtggtaaaggaag

SEQ ID NO: 595150 - DNA, 15 bp, Homo sapiens
agtggtaaaggaagg

SEQ ID NO: 595151 - DNA, 15 bp, Homo sapiens
gtggtaaaggaagga

SEQ ID NO: 595152 - DNA, 15 bp, Homo sapiens
tggtaaaggaaggag

SEQ ID NO: 595153 - DNA, 15 bp, Homo sapiens
ggtaaaggaaggagg

SEQ ID NO: 595154 - DNA, 15 bp, Homo sapiens
gtaaaggaaggagga

SEQ ID NO: 595155 - DNA, 15 bp, Homo sapiens
taaaggaaggaggag

SEQ ID NO: 595156 - DNA, 15 bp, Homo sapiens
aaaggaaggaggagg

SEQ ID NO: 595157 - DNA, 15 bp, Homo sapiens
aaggaaggaggaggc

SEQ ID NO: 595158 - DNA, 15 bp, Homo sapiens
aggaaggaggaggcc

SEQ ID NO: 595159 - DNA, 15 bp, Homo sapiens
ggaaggaggaggcct

SEQ ID NO: 595160 - DNA, 15 bp, Homo sapiens
gaaggaggaggcctg

SEQ ID NO: 595161 - DNA, 15 bp, Homo sapiens
aaggaggaggcctgg

SEQ ID NO: 595162 - DNA, 15 bp, Homo sapiens
aggaggaggcctggt

SEQ ID NO: 595163 - DNA, 15 bp, Homo sapiens
ggaggaggcctggtt

SEQ ID NO: 595164 - DNA, 15 bp, Homo sapiens
gaggaggcctggttt

SEQ ID NO: 595165 - DNA, 15 bp, Homo sapiens
aggaggcctggtttg

SEQ ID NO: 595166 - DNA, 15 bp, Homo sapiens
ggaggcctggtttga

SEQ ID NO: 595167 - DNA, 15 bp, Homo sapiens
gaggcctggtttgac

SEQ ID NO: 595168 - DNA, 15 bp, Homo sapiens
aggcctggtttgact

SEQ ID NO: 595169 - DNA, 15 bp, Homo sapiens
ggcctggtttgactc

SEQ ID NO: 595170 - DNA, 15 bp, Homo sapiens
gcctggtttgactcc

SEQ ID NO: 595171 - DNA, 15 bp, Homo sapiens
cctggtttgactccc

SEQ ID NO: 595172 - DNA, 15 bp, Homo sapiens
ctggtttgactccct

SEQ ID NO: 595173 - DNA, 15 bp, Homo sapiens
tggtttgactccctg

SEQ ID NO: 595174 - DNA, 15 bp, Homo sapiens
ggtttgactccctga

SEQ ID NO: 595175 - DNA, 15 bp, Homo sapiens
gtttgactccctgac

SEQ ID NO: 595176 - DNA, 15 bp, Homo sapiens
tttgactccctgacc

SEQ ID NO: 595177 - DNA, 15 bp, Homo sapiens
ttgactccctgacct

SEQ ID NO: 595178 - DNA, 15 bp, Homo sapiens
tgactccctgacctg

SEQ ID NO: 595179 - DNA, 15 bp, Homo sapiens
gactccctgacctgc

SEQ ID NO: 595180 - DNA, 15 bp, Homo sapiens
actccctgacctgct

SEQ ID NO: 595181 - DNA, 15 bp, Homo sapiens
ctccctgacctgcta

SEQ ID NO: 595182 - DNA, 15 bp, Homo sapiens
tccctgacctgctat

SEQ ID NO: 595183 - DNA, 15 bp, Homo sapiens
ccctgacctgctatt

SEQ ID NO: 595184 - DNA, 15 bp, Homo sapiens
cctgacctgctattt

SEQ ID NO: 595185 - DNA, 15 bp, Homo sapiens
ctgacctgctatttc

SEQ ID NO: 595186 - DNA, 15 bp, Homo sapiens
tgacctgctatttcc

SEQ ID NO: 595187 - DNA, 15 bp, Homo sapiens
gacctgctatttcct

SEQ ID NO: 595188 - DNA, 15 bp, Homo sapiens
acctgctatttccta

SEQ ID NO: 595189 - DNA, 15 bp, Homo sapiens
cctgctatttcctag

SEQ ID NO: 595190 - DNA, 15 bp, Homo sapiens
ctgctatttcctagc

SEQ ID NO: 595191 - DNA, 15 bp, Homo sapiens
tgctatttcctagcc

SEQ ID NO: 595192 - DNA, 15 bp, Homo sapiens
gctatttcctagcca

SEQ ID NO: 595193 - DNA, 15 bp, Homo sapiens
ctatttcctagccag

SEQ ID NO: 595194 - DNA, 15 bp, Homo sapiens
tatttcctagccagg

SEQ ID NO: 595195 - DNA, 15 bp, Homo sapiens
atttcctagccaggt

SEQ ID NO: 595196 - DNA, 15 bp, Homo sapiens
tttcctagccaggtg

SEQ ID NO: 595197 - DNA, 15 bp, Homo sapiens
ttcctagccaggtga

SEQ ID NO: 595198 - DNA, 15 bp, Homo sapiens
tcctagccaggtgat

SEQ ID NO: 595199 - DNA, 15 bp, Homo sapiens
cctagccaggtgatc

SEQ ID NO: 595200 - DNA, 15 bp, Homo sapiens
ctagccaggtgatca

SEQ ID NO: 595201 - DNA, 15 bp, Homo sapiens
tagccaggtgatcat

SEQ ID NO: 595202 - DNA, 15 bp, Homo sapiens
agccaggtgatcatg

SEQ ID NO: 595203 - DNA, 15 bp, Homo sapiens
gccaggtgatcatgg

SEQ ID NO: 595204 - DNA, 15 bp, Homo sapiens
ccaggtgatcatggt

SEQ ID NO: 595205 - DNA, 15 bp, Homo sapiens
caggtgatcatggta

SEQ ID NO: 595206 - DNA, 15 bp, Homo sapiens
aggtgatcatggtaa

SEQ ID NO: 595207 - DNA, 15 bp, Homo sapiens
ggtgatcatggtaag

SEQ ID NO: 595208 - DNA, 15 bp, Homo sapiens
gtgatcatggtaaga

SEQ ID NO: 595209 - DNA, 15 bp, Homo sapiens
tgatcatggtaagat

SEQ ID NO: 595210 - DNA, 15 bp, Homo sapiens
gatcatggtaagata

SEQ ID NO: 595211 - DNA, 15 bp, Homo sapiens
atcatggtaagatat

SEQ ID NO: 595212 - DNA, 15 bp, Homo sapiens
tcatggtaagatatt

SEQ ID NO: 595213 - DNA, 15 bp, Homo sapiens
catggtaagatattg

SEQ ID NO: 595214 - DNA, 15 bp, Homo sapiens
atggtaagatattga

SEQ ID NO: 595215 - DNA, 15 bp, Homo sapiens
tggtaagatattgaa

SEQ ID NO: 595216 - DNA, 15 bp, Homo sapiens
ggtaagatattgaac

SEQ ID NO: 595217 - DNA, 15 bp, Homo sapiens
gtaagatattgaacc

SEQ ID NO: 595218 - DNA, 15 bp, Homo sapiens
taagatattgaacct

SEQ ID NO: 595219 - DNA, 15 bp, Homo sapiens
aagatattgaacctt

SEQ ID NO: 595220 - DNA, 15 bp, Homo sapiens
agatattgaaccttt

SEQ ID NO: 595221 - DNA, 15 bp, Homo sapiens
gatattgaacctttt

SEQ ID NO: 595222 - DNA, 15 bp, Homo sapiens
atattgaaccttttc

SEQ ID NO: 595223 - DNA, 15 bp, Homo sapiens
tattgaaccttttct

SEQ ID NO: 595224 - DNA, 15 bp, Homo sapiens
attgaaccttttctg

SEQ ID NO: 595225 - DNA, 15 bp, Homo sapiens
ttgaaccttttctgg

SEQ ID NO: 595226 - DNA, 15 bp, Homo sapiens
tgaaccttttctggt

SEQ ID NO: 595227 - DNA, 15 bp, Homo sapiens
gaaccttttctggtc

SEQ ID NO: 595228 - DNA, 15 bp, Homo sapiens
aaccttttctggtcc

SEQ ID NO: 595229 - DNA, 15 bp, Homo sapiens
accttttctggtccc

SEQ ID NO: 595230 - DNA, 15 bp, Homo sapiens
ccttttctggtccca

SEQ ID NO: 595231 - DNA, 15 bp, Homo sapiens
cttttctggtcccag

SEQ ID NO: 595232 - DNA, 15 bp, Homo sapiens
ttttctggtcccagt

SEQ ID NO: 595233 - DNA, 15 bp, Homo sapiens
tttctggtcccagta

SEQ ID NO: 595234 - DNA, 15 bp, Homo sapiens
ttctggtcccagtac

SEQ ID NO: 595235 - DNA, 15 bp, Homo sapiens
tctggtcccagtact

SEQ ID NO: 595236 - DNA, 15 bp, Homo sapiens
ctggtcccagtactc

SEQ ID NO: 595237 - DNA, 15 bp, Homo sapiens
tggtcccagtactca

SEQ ID NO: 595238 - DNA, 15 bp, Homo sapiens
ggtcccagtactcat

SEQ ID NO: 595239 - DNA, 15 bp, Homo sapiens
gtcccagtactcatc

SEQ ID NO: 595240 - DNA, 15 bp, Homo sapiens
tcccagtactcatct

SEQ ID NO: 595241 - DNA, 15 bp, Homo sapiens
cccagtactcatcta

SEQ ID NO: 595242 - DNA, 15 bp, Homo sapiens
ccagtactcatctat

SEQ ID NO: 595243 - DNA, 15 bp, Homo sapiens
cagtactcatctata

SEQ ID NO: 595244 - DNA, 15 bp, Homo sapiens
agtactcatctataa

SEQ ID NO: 595245 - DNA, 15 bp, Homo sapiens
gtactcatctataaa

SEQ ID NO: 595246 - DNA, 15 bp, Homo sapiens
tactcatctataaaa

SEQ ID NO: 595247 - DNA, 15 bp, Homo sapiens
actcatctataaaac

SEQ ID NO: 595248 - DNA, 15 bp, Homo sapiens
ctcatctataaaaca

SEQ ID NO: 595249 - DNA, 15 bp, Homo sapiens
tcatctataaaacaa

SEQ ID NO: 595250 - DNA, 15 bp, Homo sapiens
catctataaaacaaa

SEQ ID NO: 595251 - DNA, 15 bp, Homo sapiens
atctataaaacaaat

SEQ ID NO: 595252 - DNA, 15 bp, Homo sapiens
tctataaaacaaata

SEQ ID NO: 595253 - DNA, 15 bp, Homo sapiens
ctataaaacaaatat

SEQ ID NO: 595254 - DNA, 15 bp, Homo sapiens
tataaaacaaatata

SEQ ID NO: 595255 - DNA, 15 bp, Homo sapiens
ataaaacaaatataa

SEQ ID NO: 595256 - DNA, 15 bp, Homo sapiens
taaaacaaatataat

SEQ ID NO: 595257 - DNA, 15 bp, Homo sapiens
aaaacaaatataata

SEQ ID NO: 595258 - DNA, 15 bp, Homo sapiens
aaacaaatataatac

SEQ ID NO: 595259 - DNA, 15 bp, Homo sapiens
aacaaatataatact

SEQ ID NO: 595260 - DNA, 15 bp, Homo sapiens
acaaatataatactt

SEQ ID NO: 595261 - DNA, 15 bp, Homo sapiens
caaatataatacttt

SEQ ID NO: 595262 - DNA, 15 bp, Homo sapiens
aaatataatacttta

SEQ ID NO: 595263 - DNA, 15 bp, Homo sapiens
aatataatactttac

SEQ ID NO: 595264 - DNA, 15 bp, Homo sapiens
atataatactttaca

SEQ ID NO: 595265 - DNA, 15 bp, Homo sapiens
tataatactttacag

SEQ ID NO: 595266 - DNA, 15 bp, Homo sapiens
ataatactttacaga

SEQ ID NO: 595267 - DNA, 15 bp, Homo sapiens
taatactttacagag

SEQ ID NO: 595268 - DNA, 15 bp, Homo sapiens
aatactttacagagt

SEQ ID NO: 595269 - DNA, 15 bp, Homo sapiens
atactttacagagtg

SEQ ID NO: 595270 - DNA, 15 bp, Homo sapiens
tactttacagagtgg

SEQ ID NO: 595271 - DNA, 15 bp, Homo sapiens
actttacagagtggt

SEQ ID NO: 595272 - DNA, 15 bp, Homo sapiens
ctttacagagtggta

SEQ ID NO: 595273 - DNA, 15 bp, Homo sapiens
tttacagagtggtag

SEQ ID NO: 595274 - DNA, 15 bp, Homo sapiens
ttacagagtggtagg

SEQ ID NO: 595275 - DNA, 15 bp, Homo sapiens
tacagagtggtagga

SEQ ID NO: 595276 - DNA, 15 bp, Homo sapiens
acagagtggtaggaa

SEQ ID NO: 595277 - DNA, 15 bp, Homo sapiens
cagagtggtaggaat

SEQ ID NO: 595278 - DNA, 15 bp, Homo sapiens
agagtggtaggaatt

SEQ ID NO: 595279 - DNA, 15 bp, Homo sapiens
gagtggtaggaatta

SEQ ID NO: 595280 - DNA, 15 bp, Homo sapiens
agtggtaggaattat

SEQ ID NO: 595281 - DNA, 15 bp, Homo sapiens
gtggtaggaattata

SEQ ID NO: 595282 - DNA, 15 bp, Homo sapiens
tggtaggaattatac

SEQ ID NO: 595283 - DNA, 15 bp, Homo sapiens
ggtaggaattataca

SEQ ID NO: 595284 - DNA, 15 bp, Homo sapiens
gtaggaattatacaa

SEQ ID NO: 595285 - DNA, 15 bp, Homo sapiens
taggaattatacaag

SEQ ID NO: 595286 - DNA, 15 bp, Homo sapiens
aggaattatacaaga

SEQ ID NO: 595287 - DNA, 15 bp, Homo sapiens
ggaattatacaagaa

SEQ ID NO: 595288 - DNA, 15 bp, Homo sapiens
gaattatacaagaaa

SEQ ID NO: 595289 - DNA, 15 bp, Homo sapiens
aattatacaagaaaa

SEQ ID NO: 595290 - DNA, 15 bp, Homo sapiens
attatacaagaaaag

SEQ ID NO: 595291 - DNA, 15 bp, Homo sapiens
ttatacaagaaaagt

SEQ ID NO: 595292 - DNA, 15 bp, Homo sapiens
tatacaagaaaagta

SEQ ID NO: 595293 - DNA, 15 bp, Homo sapiens
atacaagaaaagtat

SEQ ID NO: 595294 - DNA, 15 bp, Homo sapiens
tacaagaaaagtata

SEQ ID NO: 595295 - DNA, 15 bp, Homo sapiens
acaagaaaagtatac

SEQ ID NO: 595296 - DNA, 15 bp, Homo sapiens
caagaaaagtatacg

SEQ ID NO: 595297 - DNA, 15 bp, Homo sapiens
aagaaaagtatacgc

SEQ ID NO: 595298 - DNA, 15 bp, Homo sapiens
agaaaagtatacgca

SEQ ID NO: 595299 - DNA, 15 bp, Homo sapiens
gaaaagtatacgcaa

SEQ ID NO: 595300 - DNA, 15 bp, Homo sapiens
aaaagtatacgcaaa

SEQ ID NO: 595301 - DNA, 15 bp, Homo sapiens
aaagtatacgcaaaa

SEQ ID NO: 595302 - DNA, 15 bp, Homo sapiens
aagtatacgcaaaac

SEQ ID NO: 595303 - DNA, 15 bp, Homo sapiens
agtatacgcaaaaca

SEQ ID NO: 595304 - DNA, 15 bp, Homo sapiens
gtatacgcaaaacat

SEQ ID NO: 595305 - DNA, 15 bp, Homo sapiens
tatacgcaaaacatt

SEQ ID NO: 595306 - DNA, 15 bp, Homo sapiens
atacgcaaaacattt

SEQ ID NO: 595307 - DNA, 15 bp, Homo sapiens
tacgcaaaacatttc

SEQ ID NO: 595308 - DNA, 15 bp, Homo sapiens
acgcaaaacatttca

SEQ ID NO: 595309 - DNA, 15 bp, Homo sapiens
cgcaaaacatttcat

SEQ ID NO: 595310 - DNA, 15 bp, Homo sapiens
gcaaaacatttcata

SEQ ID NO: 595311 - DNA, 15 bp, Homo sapiens
caaaacatttcataa

SEQ ID NO: 595312 - DNA, 15 bp, Homo sapiens
aaaacatttcataaa

SEQ ID NO: 595313 - DNA, 15 bp, Homo sapiens
aaacatttcataaat

SEQ ID NO: 595314 - DNA, 15 bp, Homo sapiens
aacatttcataaatt

SEQ ID NO: 595315 - DNA, 15 bp, Homo sapiens
acatttcataaattt

SEQ ID NO: 595316 - DNA, 15 bp, Homo sapiens
catttcataaatttt

SEQ ID NO: 595317 - DNA, 15 bp, Homo sapiens
atttcataaatttta

SEQ ID NO: 595318 - DNA, 15 bp, Homo sapiens
tttcataaattttaa

SEQ ID NO: 595319 - DNA, 15 bp, Homo sapiens
ttcataaattttaat

SEQ ID NO: 595320 - DNA, 15 bp, Homo sapiens
tcataaattttaata

SEQ ID NO: 595321 - DNA, 15 bp, Homo sapiens
cataaattttaataa

SEQ ID NO: 595322 - DNA, 15 bp, Homo sapiens
ataaattttaataaa

SEQ ID NO: 595323 - DNA, 15 bp, Homo sapiens
taaattttaataaat

SEQ ID NO: 595324 - DNA, 15 bp, Homo sapiens
aaattttaataaatg

SEQ ID NO: 595325 - DNA, 15 bp, Homo sapiens
aattttaataaatga

SEQ ID NO: 595326 - DNA, 15 bp, Homo sapiens
attttaataaatgat

SEQ ID NO: 595327 - DNA, 15 bp, Homo sapiens
ttttaataaatgatg

SEQ ID NO: 595328 - DNA, 15 bp, Homo sapiens
tttaataaatgatgg

SEQ ID NO: 595329 - DNA, 15 bp, Homo sapiens
ttaataaatgatggc

SEQ ID NO: 595330 - DNA, 15 bp, Homo sapiens
taataaatgatggcc

SEQ ID NO: 595331 - DNA, 15 bp, Homo sapiens
aataaatgatggccc

SEQ ID NO: 595332 - DNA, 15 bp, Homo sapiens
ataaatgatggcccc

SEQ ID NO: 595333 - DNA, 15 bp, Homo sapiens
taaatgatggcccca

SEQ ID NO: 595334 - DNA, 15 bp, Homo sapiens
aaatgatggccccat

SEQ ID NO: 595335 - DNA, 15 bp, Homo sapiens
aatgatggccccatg

SEQ ID NO: 595336 - DNA, 15 bp, Homo sapiens
atgatggccccatgc

SEQ ID NO: 595337 - DNA, 15 bp, Homo sapiens
tgatggccccatgct

SEQ ID NO: 595338 - DNA, 15 bp, Homo sapiens
gatggccccatgctt

SEQ ID NO: 595339 - DNA, 15 bp, Homo sapiens
atggccccatgcttc

SEQ ID NO: 595340 - DNA, 15 bp, Homo sapiens
tggccccatgcttct

SEQ ID NO: 595341 - DNA, 15 bp, Homo sapiens
ggccccatgcttctt

SEQ ID NO: 595342 - DNA, 15 bp, Homo sapiens
gccccatgcttcttc

SEQ ID NO: 595343 - DNA, 15 bp, Homo sapiens
ccccatgcttcttcc

SEQ ID NO: 595344 - DNA, 15 bp, Homo sapiens
cccatgcttcttcct

SEQ ID NO: 595345 - DNA, 15 bp, Homo sapiens
ccatgcttcttcctc

SEQ ID NO: 595346 - DNA, 15 bp, Homo sapiens
catgcttcttcctct

SEQ ID NO: 595347 - DNA, 15 bp, Homo sapiens
atgcttcttcctctg

SEQ ID NO: 595348 - DNA, 15 bp, Homo sapiens
tgcttcttcctctgg

SEQ ID NO: 595349 - DNA, 15 bp, Homo sapiens
gcttcttcctctgga

SEQ ID NO: 595350 - DNA, 15 bp, Homo sapiens
cttcttcctctggaa

SEQ ID NO: 595351 - DNA, 15 bp, Homo sapiens
ttcttcctctggaaa

SEQ ID NO: 595352 - DNA, 15 bp, Homo sapiens
tcttcctctggaaat

SEQ ID NO: 595353 - DNA, 15 bp, Homo sapiens
cttcctctggaaatg

SEQ ID NO: 595354 - DNA, 15 bp, Homo sapiens
ttcctctggaaatgg

SEQ ID NO: 595355 - DNA, 15 bp, Homo sapiens
tcctctggaaatggt

SEQ ID NO: 595356 - DNA, 15 bp, Homo sapiens
cctctggaaatggtc

SEQ ID NO: 595357 - DNA, 15 bp, Homo sapiens
ctctggaaatggtct

SEQ ID NO: 595358 - DNA, 15 bp, Homo sapiens
tctggaaatggtctc

SEQ ID NO: 595359 - DNA, 15 bp, Homo sapiens
ctggaaatggtctca

SEQ ID NO: 595360 - DNA, 15 bp, Homo sapiens
tggaaatggtctcaa

SEQ ID NO: 595361 - DNA, 15 bp, Homo sapiens
ggaaatggtctcaac

SEQ ID NO: 595362 - DNA, 15 bp, Homo sapiens
gaaatggtctcaacc

SEQ ID NO: 595363 - DNA, 15 bp, Homo sapiens
aaatggtctcaacct

SEQ ID NO: 595364 - DNA, 15 bp, Homo sapiens
aatggtctcaacctc

SEQ ID NO: 595365 - DNA, 15 bp, Homo sapiens
atggtctcaacctca

SEQ ID NO: 595366 - DNA, 15 bp, Homo sapiens
tggtctcaacctcaa

SEQ ID NO: 595367 - DNA, 15 bp, Homo sapiens
ggtctcaacctcaat

SEQ ID NO: 595368 - DNA, 15 bp, Homo sapiens
gtctcaacctcaatg

SEQ ID NO: 595369 - DNA, 15 bp, Homo sapiens
tctcaacctcaatgg

SEQ ID NO: 595370 - DNA, 15 bp, Homo sapiens
ctcaacctcaatggt

SEQ ID NO: 595371 - DNA, 15 bp, Homo sapiens
tcaacctcaatggtt

SEQ ID NO: 595372 - DNA, 15 bp, Homo sapiens
caacctcaatggttg

SEQ ID NO: 595373 - DNA, 15 bp, Homo sapiens
aacctcaatggttgg

SEQ ID NO: 595374 - DNA, 15 bp, Homo sapiens
acctcaatggttggt

SEQ ID NO: 595375 - DNA, 15 bp, Homo sapiens
cctcaatggttggtg

SEQ ID NO: 595376 - DNA, 15 bp, Homo sapiens
ctcaatggttggtgt

SEQ ID NO: 595377 - DNA, 15 bp, Homo sapiens
tcaatggttggtgtt

SEQ ID NO: 595378 - DNA, 15 bp, Homo sapiens
caatggttggtgttt

SEQ ID NO: 595379 - DNA, 15 bp, Homo sapiens
aatggttggtgtttc

SEQ ID NO: 595380 - DNA, 15 bp, Homo sapiens
atggttggtgtttct

SEQ ID NO: 595381 - DNA, 15 bp, Homo sapiens
tggttggtgtttcta

SEQ ID NO: 595382 - DNA, 15 bp, Homo sapiens
ggttggtgtttctag

SEQ ID NO: 595383 - DNA, 15 bp, Homo sapiens
gttggtgtttctaga

SEQ ID NO: 595384 - DNA, 15 bp, Homo sapiens
ttggtgtttctagag

SEQ ID NO: 595385 - DNA, 15 bp, Homo sapiens
tggtgtttctagaga

SEQ ID NO: 595386 - DNA, 15 bp, Homo sapiens
ggtgtttctagagag

SEQ ID NO: 595387 - DNA, 15 bp, Homo sapiens
gtgtttctagagaga

SEQ ID NO: 595388 - DNA, 15 bp, Homo sapiens
tgtttctagagagaa

SEQ ID NO: 595389 - DNA, 15 bp, Homo sapiens
gtttctagagagaaa

SEQ ID NO: 595390 - DNA, 15 bp, Homo sapiens
tttctagagagaaaa

SEQ ID NO: 595391 - DNA, 15 bp, Homo sapiens
ttctagagagaaaaa

SEQ ID NO: 595392 - DNA, 15 bp, Homo sapiens
tctagagagaaaaaa

SEQ ID NO: 595393 - DNA, 15 bp, Homo sapiens
ctagagagaaaaaac

SEQ ID NO: 595394 - DNA, 15 bp, Homo sapiens
tagagagaaaaaacg

SEQ ID NO: 595395 - DNA, 15 bp, Homo sapiens
agagagaaaaaacga

SEQ ID NO: 595396 - DNA, 15 bp, Homo sapiens
gagagaaaaaacgac

SEQ ID NO: 595397 - DNA, 15 bp, Homo sapiens
agagaaaaaacgaca

SEQ ID NO: 595398 - DNA, 15 bp, Homo sapiens
gagaaaaaacgacag

SEQ ID NO: 595399 - DNA, 15 bp, Homo sapiens
agaaaaaacgacaga

SEQ ID NO: 595400 - DNA, 15 bp, Homo sapiens
gaaaaaacgacagag

SEQ ID NO: 595401 - DNA, 15 bp, Homo sapiens
aaaaaacgacagaga

SEQ ID NO: 595402 - DNA, 15 bp, Homo sapiens
aaaaacgacagagaa

SEQ ID NO: 595403 - DNA, 15 bp, Homo sapiens
aaaacgacagagaaa

SEQ ID NO: 595404 - DNA, 15 bp, Homo sapiens
aaacgacagagaaag

SEQ ID NO: 595405 - DNA, 15 bp, Homo sapiens
aacgacagagaaagt

SEQ ID NO: 595406 - DNA, 15 bp, Homo sapiens
acgacagagaaagtt

SEQ ID NO: 595407 - DNA, 15 bp, Homo sapiens
cgacagagaaagttt

SEQ ID NO: 595408 - DNA, 15 bp, Homo sapiens
gacagagaaagtttc

SEQ ID NO: 595409 - DNA, 15 bp, Homo sapiens
acagagaaagtttca

SEQ ID NO: 595410 - DNA, 15 bp, Homo sapiens
cagagaaagtttcat

SEQ ID NO: 595411 - DNA, 15 bp, Homo sapiens
agagaaagtttcata

SEQ ID NO: 595412 - DNA, 15 bp, Homo sapiens
gagaaagtttcatag

SEQ ID NO: 595413 - DNA, 15 bp, Homo sapiens
agaaagtttcatagt

SEQ ID NO: 595414 - DNA, 15 bp, Homo sapiens
gaaagtttcatagtc

SEQ ID NO: 595415 - DNA, 15 bp, Homo sapiens
aaagtttcatagtct

SEQ ID NO: 595416 - DNA, 15 bp, Homo sapiens
aagtttcatagtctc

SEQ ID NO: 595417 - DNA, 15 bp, Homo sapiens
agtttcatagtctca

SEQ ID NO: 595418 - DNA, 15 bp, Homo sapiens
gtttcatagtctcaa

SEQ ID NO: 595419 - DNA, 15 bp, Homo sapiens
tttcatagtctcaaa

SEQ ID NO: 595420 - DNA, 15 bp, Homo sapiens
ttcatagtctcaaaa

SEQ ID NO: 595421 - DNA, 15 bp, Homo sapiens
tcatagtctcaaaaa

SEQ ID NO: 595422 - DNA, 15 bp, Homo sapiens
catagtctcaaaaat

SEQ ID NO: 595423 - DNA, 15 bp, Homo sapiens
atagtctcaaaaatt

SEQ ID NO: 595424 - DNA, 15 bp, Homo sapiens
tagtctcaaaaattt

SEQ ID NO: 595425 - DNA, 15 bp, Homo sapiens
agtctcaaaaatttg

SEQ ID NO: 595426 - DNA, 15 bp, Homo sapiens
gtctcaaaaatttgg

SEQ ID NO: 595427 - DNA, 15 bp, Homo sapiens
tctcaaaaatttgga

SEQ ID NO: 595428 - DNA, 15 bp, Homo sapiens
ctcaaaaatttggaa

SEQ ID NO: 595429 - DNA, 15 bp, Homo sapiens
tcaaaaatttggaaa

SEQ ID NO: 595430 - DNA, 15 bp, Homo sapiens
caaaaatttggaaag

SEQ ID NO: 595431 - DNA, 15 bp, Homo sapiens
aaaaatttggaaagc

SEQ ID NO: 595432 - DNA, 15 bp, Homo sapiens
aaaatttggaaagcc

SEQ ID NO: 595433 - DNA, 15 bp, Homo sapiens
aaatttggaaagccc

SEQ ID NO: 595434 - DNA, 15 bp, Homo sapiens
aatttggaaagccct

SEQ ID NO: 595435 - DNA, 15 bp, Homo sapiens
atttggaaagccctg

SEQ ID NO: 595436 - DNA, 15 bp, Homo sapiens
tttggaaagccctga

SEQ ID NO: 595437 - DNA, 15 bp, Homo sapiens
ttggaaagccctgat

SEQ ID NO: 595438 - DNA, 15 bp, Homo sapiens
tggaaagccctgatc

SEQ ID NO: 595439 - DNA, 15 bp, Homo sapiens
ggaaagccctgatct

SEQ ID NO: 595440 - DNA, 15 bp, Homo sapiens
gaaagccctgatcta

SEQ ID NO: 595441 - DNA, 15 bp, Homo sapiens
aaagccctgatctag

SEQ ID NO: 595442 - DNA, 15 bp, Homo sapiens
aagccctgatctagc

SEQ ID NO: 595443 - DNA, 15 bp, Homo sapiens
agccctgatctagct

SEQ ID NO: 595444 - DNA, 15 bp, Homo sapiens
gccctgatctagctc

SEQ ID NO: 595445 - DNA, 15 bp, Homo sapiens
ccctgatctagctca

SEQ ID NO: 595446 - DNA, 15 bp, Homo sapiens
cctgatctagctcaa

SEQ ID NO: 595447 - DNA, 15 bp, Homo sapiens
ctgatctagctcaac

SEQ ID NO: 595448 - DNA, 15 bp, Homo sapiens
tgatctagctcaacc

SEQ ID NO: 595449 - DNA, 15 bp, Homo sapiens
gatctagctcaaccc

SEQ ID NO: 595450 - DNA, 15 bp, Homo sapiens
atctagctcaaccct

SEQ ID NO: 595451 - DNA, 15 bp, Homo sapiens
tctagctcaaccctt

SEQ ID NO: 595452 - DNA, 15 bp, Homo sapiens
ctagctcaacccttt

SEQ ID NO: 595453 - DNA, 15 bp, Homo sapiens
tagctcaaccctttg

SEQ ID NO: 595454 - DNA, 15 bp, Homo sapiens
agctcaaccctttgt

SEQ ID NO: 595455 - DNA, 15 bp, Homo sapiens
gctcaaccctttgtt

SEQ ID NO: 595456 - DNA, 15 bp, Homo sapiens
ctcaaccctttgttc

SEQ ID NO: 595457 - DNA, 15 bp, Homo sapiens
tcaaccctttgttct

SEQ ID NO: 595458 - DNA, 15 bp, Homo sapiens
caaccctttgttcta

SEQ ID NO: 595459 - DNA, 15 bp, Homo sapiens
aaccctttgttctag

SEQ ID NO: 595460 - DNA, 15 bp, Homo sapiens
accctttgttctaga

SEQ ID NO: 595461 - DNA, 15 bp, Homo sapiens
ccctttgttctagaa

SEQ ID NO: 595462 - DNA, 15 bp, Homo sapiens
cctttgttctagaac

SEQ ID NO: 595463 - DNA, 15 bp, Homo sapiens
ctttgttctagaact

SEQ ID NO: 595464 - DNA, 15 bp, Homo sapiens
tttgttctagaactg

SEQ ID NO: 595465 - DNA, 15 bp, Homo sapiens
ttgttctagaactgc

SEQ ID NO: 595466 - DNA, 15 bp, Homo sapiens
tgttctagaactgca

SEQ ID NO: 595467 - DNA, 15 bp, Homo sapiens
gttctagaactgcat

SEQ ID NO: 595468 - DNA, 15 bp, Homo sapiens
ttctagaactgcatc

SEQ ID NO: 595469 - DNA, 15 bp, Homo sapiens
tctagaactgcatcc

SEQ ID NO: 595470 - DNA, 15 bp, Homo sapiens
ctagaactgcatccc

SEQ ID NO: 595471 - DNA, 15 bp, Homo sapiens
tagaactgcatccca

SEQ ID NO: 595472 - DNA, 15 bp, Homo sapiens
agaactgcatcccag

SEQ ID NO: 595473 - DNA, 15 bp, Homo sapiens
gaactgcatcccaga

SEQ ID NO: 595474 - DNA, 15 bp, Homo sapiens
aactgcatcccagac

SEQ ID NO: 595475 - DNA, 15 bp, Homo sapiens
actgcatcccagaca

SEQ ID NO: 595476 - DNA, 15 bp, Homo sapiens
ctgcatcccagacag

SEQ ID NO: 595477 - DNA, 15 bp, Homo sapiens
tgcatcccagacaga

SEQ ID NO: 595478 - DNA, 15 bp, Homo sapiens
gcatcccagacagac

SEQ ID NO: 595479 - DNA, 15 bp, Homo sapiens
catcccagacagact

SEQ ID NO: 595480 - DNA, 15 bp, Homo sapiens
atcccagacagactg

SEQ ID NO: 595481 - DNA, 15 bp, Homo sapiens
tcccagacagactgc

SEQ ID NO: 595482 - DNA, 15 bp, Homo sapiens
cccagacagactgct

SEQ ID NO: 595483 - DNA, 15 bp, Homo sapiens
ccagacagactgctt

SEQ ID NO: 595484 - DNA, 15 bp, Homo sapiens
cagacagactgcttg

SEQ ID NO: 595485 - DNA, 15 bp, Homo sapiens
agacagactgcttgg

SEQ ID NO: 595486 - DNA, 15 bp, Homo sapiens
gacagactgcttggg

SEQ ID NO: 595487 - DNA, 15 bp, Homo sapiens
acagactgcttggga

SEQ ID NO: 595488 - DNA, 15 bp, Homo sapiens
cagactgcttgggac

SEQ ID NO: 595489 - DNA, 15 bp, Homo sapiens
agactgcttgggacc

SEQ ID NO: 595490 - DNA, 15 bp, Homo sapiens
gactgcttgggacct

SEQ ID NO: 595491 - DNA, 15 bp, Homo sapiens
actgcttgggacctg

SEQ ID NO: 595492 - DNA, 15 bp, Homo sapiens
ctgcttgggacctga

SEQ ID NO: 595493 - DNA, 15 bp, Homo sapiens
tgcttgggacctgaa

SEQ ID NO: 595494 - DNA, 15 bp, Homo sapiens
gcttgggacctgaaa

SEQ ID NO: 595495 - DNA, 15 bp, Homo sapiens
cttgggacctgaaaa

SEQ ID NO: 595496 - DNA, 15 bp, Homo sapiens
ttgggacctgaaaat

SEQ ID NO: 595497 - DNA, 15 bp, Homo sapiens
tgggacctgaaaata

SEQ ID NO: 595498 - DNA, 15 bp, Homo sapiens
gggacctgaaaatat

SEQ ID NO: 595499 - DNA, 15 bp, Homo sapiens
ggacctgaaaatatc

SEQ ID NO: 595500 - DNA, 15 bp, Homo sapiens
gacctgaaaatatct

SEQ ID NO: 595501 - DNA, 15 bp, Homo sapiens
acctgaaaatatctc

SEQ ID NO: 595502 - DNA, 15 bp, Homo sapiens
cctgaaaatatctcc

SEQ ID NO: 595503 - DNA, 15 bp, Homo sapiens
ctgaaaatatctcct

SEQ ID NO: 595504 - DNA, 15 bp, Homo sapiens
tgaaaatatctcctc

SEQ ID NO: 595505 - DNA, 15 bp, Homo sapiens
gaaaatatctcctcc

SEQ ID NO: 595506 - DNA, 15 bp, Homo sapiens
aaaatatctcctcct

SEQ ID NO: 595507 - DNA, 15 bp, Homo sapiens
aaatatctcctcctt

SEQ ID NO: 595508 - DNA, 15 bp, Homo sapiens
aatatctcctccttt

SEQ ID NO: 595509 - DNA, 15 bp, Homo sapiens
atatctcctcctttg

SEQ ID NO: 595510 - DNA, 15 bp, Homo sapiens
tatctcctcctttgc

SEQ ID NO: 595511 - DNA, 15 bp, Homo sapiens
atctcctcctttgct

SEQ ID NO: 595512 - DNA, 15 bp, Homo sapiens
tctcctcctttgcta

SEQ ID NO: 595513 - DNA, 15 bp, Homo sapiens
ctcctcctttgctag

SEQ ID NO: 595514 - DNA, 15 bp, Homo sapiens
tcctcctttgctaga

SEQ ID NO: 595515 - DNA, 15 bp, Homo sapiens
cctcctttgctagaa

SEQ ID NO: 595516 - DNA, 15 bp, Homo sapiens
ctcctttgctagaag

SEQ ID NO: 595517 - DNA, 15 bp, Homo sapiens
tcctttgctagaagg

SEQ ID NO: 595518 - DNA, 15 bp, Homo sapiens
cctttgctagaagga

SEQ ID NO: 595519 - DNA, 15 bp, Homo sapiens
ctttgctagaaggat

SEQ ID NO: 595520 - DNA, 15 bp, Homo sapiens
tttgctagaaggata

SEQ ID NO: 595521 - DNA, 15 bp, Homo sapiens
ttgctagaaggataa

SEQ ID NO: 595522 - DNA, 15 bp, Homo sapiens
tgctagaaggataag

SEQ ID NO: 595523 - DNA, 15 bp, Homo sapiens
gctagaaggataaga

SEQ ID NO: 595524 - DNA, 15 bp, Homo sapiens
ctagaaggataagat

SEQ ID NO: 595525 - DNA, 15 bp, Homo sapiens
tagaaggataagatg

SEQ ID NO: 595526 - DNA, 15 bp, Homo sapiens
agaaggataagatga

SEQ ID NO: 595527 - DNA, 15 bp, Homo sapiens
gaaggataagatgag

SEQ ID NO: 595528 - DNA, 15 bp, Homo sapiens
aaggataagatgaga

SEQ ID NO: 595529 - DNA, 15 bp, Homo sapiens
aggataagatgagaa

SEQ ID NO: 595530 - DNA, 15 bp, Homo sapiens
ggataagatgagaag

SEQ ID NO: 595531 - DNA, 15 bp, Homo sapiens
gataagatgagaagg

SEQ ID NO: 595532 - DNA, 15 bp, Homo sapiens
ataagatgagaagga

SEQ ID NO: 595533 - DNA, 15 bp, Homo sapiens
taagatgagaaggaa

SEQ ID NO: 595534 - DNA, 15 bp, Homo sapiens
aagatgagaaggaat

SEQ ID NO: 595535 - DNA, 15 bp, Homo sapiens
agatgagaaggaatt

SEQ ID NO: 595536 - DNA, 15 bp, Homo sapiens
gatgagaaggaatta

SEQ ID NO: 595537 - DNA, 15 bp, Homo sapiens
atgagaaggaattag

SEQ ID NO: 595538 - DNA, 15 bp, Homo sapiens
tgagaaggaattaga

SEQ ID NO: 595539 - DNA, 15 bp, Homo sapiens
gagaaggaattagat

SEQ ID NO: 595540 - DNA, 15 bp, Homo sapiens
agaaggaattagata

SEQ ID NO: 595541 - DNA, 15 bp, Homo sapiens
gaaggaattagataa

SEQ ID NO: 595542 - DNA, 15 bp, Homo sapiens
aaggaattagataaa

SEQ ID NO: 595543 - DNA, 15 bp, Homo sapiens
aggaattagataaag

SEQ ID NO: 595544 - DNA, 15 bp, Homo sapiens
ggaattagataaagg

SEQ ID NO: 595545 - DNA, 15 bp, Homo sapiens
gaattagataaagga

SEQ ID NO: 595546 - DNA, 15 bp, Homo sapiens
aattagataaaggag

SEQ ID NO: 595547 - DNA, 15 bp, Homo sapiens
attagataaaggagg

SEQ ID NO: 595548 - DNA, 15 bp, Homo sapiens
ttagataaaggaggt

SEQ ID NO: 595549 - DNA, 15 bp, Homo sapiens
tagataaaggaggtg

SEQ ID NO: 595550 - DNA, 15 bp, Homo sapiens
agataaaggaggtgt

SEQ ID NO: 595551 - DNA, 15 bp, Homo sapiens
gataaaggaggtgta

SEQ ID NO: 595552 - DNA, 15 bp, Homo sapiens
ataaaggaggtgtag

SEQ ID NO: 595553 - DNA, 15 bp, Homo sapiens
taaaggaggtgtaga

SEQ ID NO: 595554 - DNA, 15 bp, Homo sapiens
aaaggaggtgtagag

SEQ ID NO: 595555 - DNA, 15 bp, Homo sapiens
aaggaggtgtagagc

SEQ ID NO: 595556 - DNA, 15 bp, Homo sapiens
aggaggtgtagagca

SEQ ID NO: 595557 - DNA, 15 bp, Homo sapiens
ggaggtgtagagcag

SEQ ID NO: 595558 - DNA, 15 bp, Homo sapiens
gaggtgtagagcaga

SEQ ID NO: 595559 - DNA, 15 bp, Homo sapiens
aggtgtagagcagag

SEQ ID NO: 595560 - DNA, 15 bp, Homo sapiens
ggtgtagagcagagg

SEQ ID NO: 595561 - DNA, 15 bp, Homo sapiens
gtgtagagcagaggt

SEQ ID NO: 595562 - DNA, 15 bp, Homo sapiens
tgtagagcagaggtt

SEQ ID NO: 595563 - DNA, 15 bp, Homo sapiens
gtagagcagaggttt

SEQ ID NO: 595564 - DNA, 15 bp, Homo sapiens
tagagcagaggtttt

SEQ ID NO: 595565 - DNA, 15 bp, Homo sapiens
agagcagaggttttc

SEQ ID NO: 595566 - DNA, 15 bp, Homo sapiens
gagcagaggttttca

SEQ ID NO: 595567 - DNA, 15 bp, Homo sapiens
agcagaggttttcac

SEQ ID NO: 595568 - DNA, 15 bp, Homo sapiens
gcagaggttttcaca

SEQ ID NO: 595569 - DNA, 15 bp, Homo sapiens
cagaggttttcacac

SEQ ID NO: 595570 - DNA, 15 bp, Homo sapiens
agaggttttcacact

SEQ ID NO: 595571 - DNA, 15 bp, Homo sapiens
gaggttttcacactg

SEQ ID NO: 595572 - DNA, 15 bp, Homo sapiens
aggttttcacactgc

SEQ ID NO: 595573 - DNA, 15 bp, Homo sapiens
ggttttcacactgca

SEQ ID NO: 595574 - DNA, 15 bp, Homo sapiens
gttttcacactgcaa

SEQ ID NO: 595575 - DNA, 15 bp, Homo sapiens
ttttcacactgcaaa

SEQ ID NO: 595576 - DNA, 15 bp, Homo sapiens
tttcacactgcaaag

SEQ ID NO: 595577 - DNA, 15 bp, Homo sapiens
ttcacactgcaaagt

SEQ ID NO: 595578 - DNA, 15 bp, Homo sapiens
tcacactgcaaagtg

SEQ ID NO: 595579 - DNA, 15 bp, Homo sapiens
cacactgcaaagtgc

SEQ ID NO: 595580 - DNA, 15 bp, Homo sapiens
acactgcaaagtgca

SEQ ID NO: 595581 - DNA, 15 bp, Homo sapiens
cactgcaaagtgcat

SEQ ID NO: 595582 - DNA, 15 bp, Homo sapiens
actgcaaagtgcata

SEQ ID NO: 595583 - DNA, 15 bp, Homo sapiens
ctgcaaagtgcataa

SEQ ID NO: 595584 - DNA, 15 bp, Homo sapiens
tgcaaagtgcataaa

SEQ ID NO: 595585 - DNA, 15 bp, Homo sapiens
gcaaagtgcataaaa

SEQ ID NO: 595586 - DNA, 15 bp, Homo sapiens
caaagtgcataaaaa

SEQ ID NO: 595587 - DNA, 15 bp, Homo sapiens
aaagtgcataaaaac

SEQ ID NO: 595588 - DNA, 15 bp, Homo sapiens
aagtgcataaaaacc

SEQ ID NO: 595589 - DNA, 15 bp, Homo sapiens
agtgcataaaaacca

SEQ ID NO: 595590 - DNA, 15 bp, Homo sapiens
gtgcataaaaaccat

SEQ ID NO: 595591 - DNA, 15 bp, Homo sapiens
tgcataaaaaccatc

SEQ ID NO: 595592 - DNA, 15 bp, Homo sapiens
gcataaaaaccatca

SEQ ID NO: 595593 - DNA, 15 bp, Homo sapiens
cataaaaaccatcag

SEQ ID NO: 595594 - DNA, 15 bp, Homo sapiens
ataaaaaccatcaga

SEQ ID NO: 595595 - DNA, 15 bp, Homo sapiens
taaaaaccatcagag

SEQ ID NO: 595596 - DNA, 15 bp, Homo sapiens
aaaaaccatcagagg

SEQ ID NO: 595597 - DNA, 15 bp, Homo sapiens
aaaaccatcagaggg

SEQ ID NO: 595598 - DNA, 15 bp, Homo sapiens
aaaccatcagagggc

SEQ ID NO: 595599 - DNA, 15 bp, Homo sapiens
aaccatcagagggcc

SEQ ID NO: 595600 - DNA, 15 bp, Homo sapiens
accatcagagggccg

SEQ ID NO: 595601 - DNA, 15 bp, Homo sapiens
ccatcagagggccgg

SEQ ID NO: 595602 - DNA, 15 bp, Homo sapiens
catcagagggccggg

SEQ ID NO: 595603 - DNA, 15 bp, Homo sapiens
atcagagggccgggc

SEQ ID NO: 595604 - DNA, 15 bp, Homo sapiens
tcagagggccgggcg

SEQ ID NO: 595605 - DNA, 15 bp, Homo sapiens
cagagggccgggcgc

SEQ ID NO: 595606 - DNA, 15 bp, Homo sapiens
agagggccgggcgca

SEQ ID NO: 595607 - DNA, 15 bp, Homo sapiens
gagggccgggcgcag

SEQ ID NO: 595608 - DNA, 15 bp, Homo sapiens
agggccgggcgcagt

SEQ ID NO: 595609 - DNA, 15 bp, Homo sapiens
gggccgggcgcagtg

SEQ ID NO: 595610 - DNA, 15 bp, Homo sapiens
ggccgggcgcagtgg

SEQ ID NO: 595611 - DNA, 15 bp, Homo sapiens
gccgggcgcagtggc

SEQ ID NO: 595612 - DNA, 15 bp, Homo sapiens
ccgggcgcagtggct

SEQ ID NO: 595613 - DNA, 15 bp, Homo sapiens
cgggcgcagtggctc

SEQ ID NO: 595614 - DNA, 15 bp, Homo sapiens
gggcgcagtggctca

SEQ ID NO: 595615 - DNA, 15 bp, Homo sapiens
ggcgcagtggctcac

SEQ ID NO: 595616 - DNA, 15 bp, Homo sapiens
gcgcagtggctcacg

SEQ ID NO: 595617 - DNA, 15 bp, Homo sapiens
cgcagtggctcacgc

SEQ ID NO: 595618 - DNA, 15 bp, Homo sapiens
gcagtggctcacgcc

SEQ ID NO: 595619 - DNA, 15 bp, Homo sapiens
cagtggctcacgcct

SEQ ID NO: 595620 - DNA, 15 bp, Homo sapiens
agtggctcacgcctg

SEQ ID NO: 595621 - DNA, 15 bp, Homo sapiens
cactttgggaggccg

SEQ ID NO: 595622 - DNA, 15 bp, Homo sapiens
actttgggaggccga

SEQ ID NO: 595623 - DNA, 15 bp, Homo sapiens
ctttgggaggccgag

SEQ ID NO: 595624 - DNA, 15 bp, Homo sapiens
tttgggaggccgagg

SEQ ID NO: 595625 - DNA, 15 bp, Homo sapiens
ttgggaggccgaggc

SEQ ID NO: 595626 - DNA, 15 bp, Homo sapiens
tgggaggccgaggcg

SEQ ID NO: 595627 - DNA, 15 bp, Homo sapiens
gggaggccgaggcgg

SEQ ID NO: 595628 - DNA, 15 bp, Homo sapiens
ggaggccgaggcggg

SEQ ID NO: 595629 - DNA, 15 bp, Homo sapiens
gaggccgaggcgggc

SEQ ID NO: 595630 - DNA, 15 bp, Homo sapiens
aggccgaggcgggcg

SEQ ID NO: 595631 - DNA, 15 bp, Homo sapiens
ggccgaggcgggcgg

SEQ ID NO: 595632 - DNA, 15 bp, Homo sapiens
gccgaggcgggcgga

SEQ ID NO: 595633 - DNA, 15 bp, Homo sapiens
ccgaggcgggcggat

SEQ ID NO: 595634 - DNA, 15 bp, Homo sapiens
cgaggcgggcggatc

SEQ ID NO: 595635 - DNA, 15 bp, Homo sapiens
gaggcgggcggatca

SEQ ID NO: 595636 - DNA, 15 bp, Homo sapiens
aggcgggcggatcat

SEQ ID NO: 595637 - DNA, 15 bp, Homo sapiens
ggcgggcggatcatg

SEQ ID NO: 595638 - DNA, 15 bp, Homo sapiens
gcgggcggatcatga

SEQ ID NO: 595639 - DNA, 15 bp, Homo sapiens
cgggcggatcatgag

SEQ ID NO: 595640 - DNA, 15 bp, Homo sapiens
gggcggatcatgagg

SEQ ID NO: 595641 - DNA, 15 bp, Homo sapiens
ggcggatcatgaggt

SEQ ID NO: 595642 - DNA, 15 bp, Homo sapiens
gcggatcatgaggtc

SEQ ID NO: 595643 - DNA, 15 bp, Homo sapiens
cggatcatgaggtca

SEQ ID NO: 595644 - DNA, 15 bp, Homo sapiens
ggatcatgaggtcag

SEQ ID NO: 595645 - DNA, 15 bp, Homo sapiens
gatcatgaggtcagg

SEQ ID NO: 595646 - DNA, 15 bp, Homo sapiens
atcatgaggtcagga

SEQ ID NO: 595647 - DNA, 15 bp, Homo sapiens
tcatgaggtcaggag

SEQ ID NO: 595648 - DNA, 15 bp, Homo sapiens
catgaggtcaggaga

SEQ ID NO: 595649 - DNA, 15 bp, Homo sapiens
atgaggtcaggagat

SEQ ID NO: 595650 - DNA, 15 bp, Homo sapiens
tgaggtcaggagata

SEQ ID NO: 595651 - DNA, 15 bp, Homo sapiens
gaggtcaggagatag

SEQ ID NO: 595652 - DNA, 15 bp, Homo sapiens
aggtcaggagataga

SEQ ID NO: 595653 - DNA, 15 bp, Homo sapiens
ggtcaggagatagag

SEQ ID NO: 595654 - DNA, 15 bp, Homo sapiens
gtcaggagatagaga

SEQ ID NO: 595655 - DNA, 15 bp, Homo sapiens
tcaggagatagagac

SEQ ID NO: 595656 - DNA, 15 bp, Homo sapiens
caggagatagagacc

SEQ ID NO: 595657 - DNA, 15 bp, Homo sapiens
aggagatagagacca

SEQ ID NO: 595658 - DNA, 15 bp, Homo sapiens
ggagatagagaccat

SEQ ID NO: 595659 - DNA, 15 bp, Homo sapiens
gagatagagaccatc

SEQ ID NO: 595660 - DNA, 15 bp, Homo sapiens
agatagagaccatcc

SEQ ID NO: 595661 - DNA, 15 bp, Homo sapiens
gatagagaccatcct

SEQ ID NO: 595662 - DNA, 15 bp, Homo sapiens
atagagaccatcctg

SEQ ID NO: 595663 - DNA, 15 bp, Homo sapiens
tagagaccatcctgg

SEQ ID NO: 595664 - DNA, 15 bp, Homo sapiens
agagaccatcctggc

SEQ ID NO: 595665 - DNA, 15 bp, Homo sapiens
tcctggctaacacgg

SEQ ID NO: 595666 - DNA, 15 bp, Homo sapiens
cctggctaacacggt

SEQ ID NO: 595667 - DNA, 15 bp, Homo sapiens
ctggctaacacggtg

SEQ ID NO: 595668 - DNA, 15 bp, Homo sapiens
tggctaacacggtga

SEQ ID NO: 595669 - DNA, 15 bp, Homo sapiens
ggctaacacggtgaa

SEQ ID NO: 595670 - DNA, 15 bp, Homo sapiens
gctaacacggtgaaa

SEQ ID NO: 595671 - DNA, 15 bp, Homo sapiens
ctaacacggtgaaac

SEQ ID NO: 595672 - DNA, 15 bp, Homo sapiens
taacacggtgaaacc

SEQ ID NO: 595673 - DNA, 15 bp, Homo sapiens
aacacggtgaaaccc

SEQ ID NO: 595674 - DNA, 15 bp, Homo sapiens
acacggtgaaacccc

SEQ ID NO: 595675 - DNA, 15 bp, Homo sapiens
cacggtgaaaccccg

SEQ ID NO: 595676 - DNA, 15 bp, Homo sapiens
acggtgaaaccccgt

SEQ ID NO: 595677 - DNA, 15 bp, Homo sapiens
cggtgaaaccccgtc

SEQ ID NO: 595678 - DNA, 15 bp, Homo sapiens
gtctctactaaaaaa

SEQ ID NO: 595679 - DNA, 15 bp, Homo sapiens
tctctactaaaaaac

SEQ ID NO: 595680 - DNA, 15 bp, Homo sapiens
ctctactaaaaaaca

SEQ ID NO: 595681 - DNA, 15 bp, Homo sapiens
tctactaaaaaacac

SEQ ID NO: 595682 - DNA, 15 bp, Homo sapiens
ctactaaaaaacaca

SEQ ID NO: 595683 - DNA, 15 bp, Homo sapiens
tactaaaaaacacac

SEQ ID NO: 595684 - DNA, 15 bp, Homo sapiens
actaaaaaacacaca

SEQ ID NO: 595685 - DNA, 15 bp, Homo sapiens
ctaaaaaacacacac

SEQ ID NO: 595686 - DNA, 15 bp, Homo sapiens
taaaaaacacacaca

SEQ ID NO: 595687 - DNA, 15 bp, Homo sapiens
aaaaaacacacacac

SEQ ID NO: 595688 - DNA, 15 bp, Homo sapiens
aaaaacacacacaca

SEQ ID NO: 595689 - DNA, 15 bp, Homo sapiens
aaaacacacacacac

SEQ ID NO: 595690 - DNA, 15 bp, Homo sapiens
aaacacacacacaca

SEQ ID NO: 595691 - DNA, 15 bp, Homo sapiens
aacacacacacacaa

SEQ ID NO: 595692 - DNA, 15 bp, Homo sapiens
acacacacacacaaa

SEQ ID NO: 595693 - DNA, 15 bp, Homo sapiens
cacacacacacaaaa

SEQ ID NO: 595694 - DNA, 15 bp, Homo sapiens
acacacacacaaaaa

SEQ ID NO: 595695 - DNA, 15 bp, Homo sapiens
cacacacacaaaaat

SEQ ID NO: 595696 - DNA, 15 bp, Homo sapiens
acacacacaaaaatt

SEQ ID NO: 595697 - DNA, 15 bp, Homo sapiens
cacacacaaaaatta

SEQ ID NO: 595698 - DNA, 15 bp, Homo sapiens
acacacaaaaattag

SEQ ID NO: 595699 - DNA, 15 bp, Homo sapiens
cacacaaaaattagc

SEQ ID NO: 595700 - DNA, 15 bp, Homo sapiens
acacaaaaattagcc

SEQ ID NO: 595701 - DNA, 15 bp, Homo sapiens
cacaaaaattagcca

SEQ ID NO: 595702 - DNA, 15 bp, Homo sapiens
acaaaaattagccag

SEQ ID NO: 595703 - DNA, 15 bp, Homo sapiens
caaaaattagccagg

SEQ ID NO: 595704 - DNA, 15 bp, Homo sapiens
aaaaattagccaggt

SEQ ID NO: 595705 - DNA, 15 bp, Homo sapiens
aaaattagccaggtg

SEQ ID NO: 595706 - DNA, 15 bp, Homo sapiens
aaattagccaggtgt

SEQ ID NO: 595707 - DNA, 15 bp, Homo sapiens
aattagccaggtgtg

SEQ ID NO: 595708 - DNA, 15 bp, Homo sapiens
attagccaggtgtgg

SEQ ID NO: 595709 - DNA, 15 bp, Homo sapiens
ttagccaggtgtggt

SEQ ID NO: 595710 - DNA, 15 bp, Homo sapiens
tagccaggtgtggtg

SEQ ID NO: 595711 - DNA, 15 bp, Homo sapiens
agccaggtgtggtgg

SEQ ID NO: 595712 - DNA, 15 bp, Homo sapiens
gccaggtgtggtggc

SEQ ID NO: 595713 - DNA, 15 bp, Homo sapiens
ccaggtgtggtggcg

SEQ ID NO: 595714 - DNA, 15 bp, Homo sapiens
caggtgtggtggcgg

SEQ ID NO: 595715 - DNA, 15 bp, Homo sapiens
aggtgtggtggcggg

SEQ ID NO: 595716 - DNA, 15 bp, Homo sapiens
ggcgggcgcctgtaa

SEQ ID NO: 595717 - DNA, 15 bp, Homo sapiens
gcgggcgcctgtaat

SEQ ID NO: 595718 - DNA, 15 bp, Homo sapiens
cgggcgcctgtaatc

SEQ ID NO: 595719 - DNA, 15 bp, Homo sapiens
gggcgcctgtaatcc

SEQ ID NO: 595720 - DNA, 15 bp, Homo sapiens
ggcgcctgtaatccc

SEQ ID NO: 595721 - DNA, 15 bp, Homo sapiens
gcgcctgtaatccca

SEQ ID NO: 595722 - DNA, 15 bp, Homo sapiens
cctgtaatcccagct

SEQ ID NO: 595723 - DNA, 15 bp, Homo sapiens
ctgtaatcccagcta

SEQ ID NO: 595724 - DNA, 15 bp, Homo sapiens
tgtaatcccagctac

SEQ ID NO: 595725 - DNA, 15 bp, Homo sapiens
gtaatcccagctact

SEQ ID NO: 595726 - DNA, 15 bp, Homo sapiens
taatcccagctactg

SEQ ID NO: 595727 - DNA, 15 bp, Homo sapiens
aatcccagctactga

SEQ ID NO: 595728 - DNA, 15 bp, Homo sapiens
atcccagctactgag

SEQ ID NO: 595729 - DNA, 15 bp, Homo sapiens
tcccagctactgagg

SEQ ID NO: 595730 - DNA, 15 bp, Homo sapiens
cccagctactgagga

SEQ ID NO: 595731 - DNA, 15 bp, Homo sapiens
ccagctactgaggag

SEQ ID NO: 595732 - DNA, 15 bp, Homo sapiens
cagctactgaggagg

SEQ ID NO: 595733 - DNA, 15 bp, Homo sapiens
agctactgaggaggc

SEQ ID NO: 595734 - DNA, 15 bp, Homo sapiens
gctactgaggaggct

SEQ ID NO: 595735 - DNA, 15 bp, Homo sapiens
ctactgaggaggctg

SEQ ID NO: 595736 - DNA, 15 bp, Homo sapiens
tactgaggaggctga

SEQ ID NO: 595737 - DNA, 15 bp, Homo sapiens
actgaggaggctgag

SEQ ID NO: 595738 - DNA, 15 bp, Homo sapiens
ctgaggaggctgagg

SEQ ID NO: 595739 - DNA, 15 bp, Homo sapiens
tgaggaggctgaggc

SEQ ID NO: 595740 - DNA, 15 bp, Homo sapiens
gaggaggctgaggcc

SEQ ID NO: 595741 - DNA, 15 bp, Homo sapiens
aggaggctgaggccg

SEQ ID NO: 595742 - DNA, 15 bp, Homo sapiens
ggaggctgaggccgg

SEQ ID NO: 595743 - DNA, 15 bp, Homo sapiens
gaggctgaggccgga

SEQ ID NO: 595744 - DNA, 15 bp, Homo sapiens
aggctgaggccggag

SEQ ID NO: 595745 - DNA, 15 bp, Homo sapiens
ggctgaggccggaga

SEQ ID NO: 595746 - DNA, 15 bp, Homo sapiens
gctgaggccggagaa

SEQ ID NO: 595747 - DNA, 15 bp, Homo sapiens
ctgaggccggagaat

SEQ ID NO: 595748 - DNA, 15 bp, Homo sapiens
tgaggccggagaatg

SEQ ID NO: 595749 - DNA, 15 bp, Homo sapiens
gaggccggagaatgg

SEQ ID NO: 595750 - DNA, 15 bp, Homo sapiens
aggccggagaatggc

SEQ ID NO: 595751 - DNA, 15 bp, Homo sapiens
ggccggagaatggcg

SEQ ID NO: 595752 - DNA, 15 bp, Homo sapiens
gccggagaatggcgt

SEQ ID NO: 595753 - DNA, 15 bp, Homo sapiens
ccggagaatggcgtg

SEQ ID NO: 595754 - DNA, 15 bp, Homo sapiens
cggagaatggcgtga

SEQ ID NO: 595755 - DNA, 15 bp, Homo sapiens
ggagaatggcgtgaa

SEQ ID NO: 595756 - DNA, 15 bp, Homo sapiens
gagaatggcgtgaac

SEQ ID NO: 595757 - DNA, 15 bp, Homo sapiens
agaatggcgtgaacc

SEQ ID NO: 595758 - DNA, 15 bp, Homo sapiens
gaatggcgtgaaccc

SEQ ID NO: 595759 - DNA, 15 bp, Homo sapiens
aatggcgtgaacccg

SEQ ID NO: 595760 - DNA, 15 bp, Homo sapiens
atggcgtgaacccgg

SEQ ID NO: 595761 - DNA, 15 bp, Homo sapiens
tggcgtgaacccggg

SEQ ID NO: 595762 - DNA, 15 bp, Homo sapiens
ggcgtgaacccggga

SEQ ID NO: 595763 - DNA, 15 bp, Homo sapiens
gcgtgaacccgggag

SEQ ID NO: 595764 - DNA, 15 bp, Homo sapiens
cgtgaacccgggagg

SEQ ID NO: 595765 - DNA, 15 bp, Homo sapiens
gtgaacccgggaggc

SEQ ID NO: 595766 - DNA, 15 bp, Homo sapiens
tgaacccgggaggcg

SEQ ID NO: 595767 - DNA, 15 bp, Homo sapiens
gaacccgggaggcgg

SEQ ID NO: 595768 - DNA, 15 bp, Homo sapiens
aacccgggaggcgga

SEQ ID NO: 595769 - DNA, 15 bp, Homo sapiens
acccgggaggcggag

SEQ ID NO: 595770 - DNA, 15 bp, Homo sapiens
cccgggaggcggagc

SEQ ID NO: 595771 - DNA, 15 bp, Homo sapiens
ccgggaggcggagct

SEQ ID NO: 595772 - DNA, 15 bp, Homo sapiens
cgggaggcggagctt

SEQ ID NO: 595773 - DNA, 15 bp, Homo sapiens
gggaggcggagcttg

SEQ ID NO: 595774 - DNA, 15 bp, Homo sapiens
ggaggcggagcttgc

SEQ ID NO: 595775 - DNA, 15 bp, Homo sapiens
gaggcggagcttgca

SEQ ID NO: 595776 - DNA, 15 bp, Homo sapiens
aggcggagcttgcag

SEQ ID NO: 595777 - DNA, 15 bp, Homo sapiens
ggcggagcttgcagt

SEQ ID NO: 595778 - DNA, 15 bp, Homo sapiens
gcggagcttgcagtg

SEQ ID NO: 595779 - DNA, 15 bp, Homo sapiens
cggagcttgcagtga

SEQ ID NO: 595780 - DNA, 15 bp, Homo sapiens
ggagcttgcagtgag

SEQ ID NO: 595781 - DNA, 15 bp, Homo sapiens
cagtgagccgagatt

SEQ ID NO: 595782 - DNA, 15 bp, Homo sapiens
agtgagccgagattg

SEQ ID NO: 595783 - DNA, 15 bp, Homo sapiens
gtgagccgagattgc

SEQ ID NO: 595784 - DNA, 15 bp, Homo sapiens
tgagccgagattgcg

SEQ ID NO: 595785 - DNA, 15 bp, Homo sapiens
gagccgagattgcgc

SEQ ID NO: 595786 - DNA, 15 bp, Homo sapiens
agccgagattgcgcc

SEQ ID NO: 595787 - DNA, 15 bp, Homo sapiens
gccgagattgcgcca

SEQ ID NO: 595788 - DNA, 15 bp, Homo sapiens
ccgagattgcgccac

SEQ ID NO: 595789 - DNA, 15 bp, Homo sapiens
cgagattgcgccact

SEQ ID NO: 595790 - DNA, 15 bp, Homo sapiens
gagattgcgccactg

SEQ ID NO: 595791 - DNA, 15 bp, Homo sapiens
agattgcgccactgc

SEQ ID NO: 595792 - DNA, 15 bp, Homo sapiens
gattgcgccactgca

SEQ ID NO: 595793 - DNA, 15 bp, Homo sapiens
attgcgccactgcac

SEQ ID NO: 595794 - DNA, 15 bp, Homo sapiens
ttgcgccactgcact

SEQ ID NO: 595795 - DNA, 15 bp, Homo sapiens
tgcgccactgcactc

SEQ ID NO: 595796 - DNA, 15 bp, Homo sapiens
gcgccactgcactcc

SEQ ID NO: 595797 - DNA, 15 bp, Homo sapiens
ctgggtgacagagca

SEQ ID NO: 595798 - DNA, 15 bp, Homo sapiens
tgggtgacagagcaa

SEQ ID NO: 595799 - DNA, 15 bp, Homo sapiens
gggtgacagagcaag

SEQ ID NO: 595800 - DNA, 15 bp, Homo sapiens
ggtgacagagcaaga

SEQ ID NO: 595801 - DNA, 15 bp, Homo sapiens
gtgacagagcaagac

SEQ ID NO: 595802 - DNA, 15 bp, Homo sapiens
tgacagagcaagact

SEQ ID NO: 595803 - DNA, 15 bp, Homo sapiens
gacagagcaagactc

SEQ ID NO: 595804 - DNA, 15 bp, Homo sapiens
acagagcaagactcc

SEQ ID NO: 595805 - DNA, 15 bp, Homo sapiens
cagagcaagactccg

SEQ ID NO: 595806 - DNA, 15 bp, Homo sapiens
agagcaagactccgt

SEQ ID NO: 595807 - DNA, 15 bp, Homo sapiens
gagcaagactccgtc

SEQ ID NO: 595808 - DNA, 15 bp, Homo sapiens
agcaagactccgtct

SEQ ID NO: 595809 - DNA, 15 bp, Homo sapiens
gcaagactccgtctc

SEQ ID NO: 595810 - DNA, 15 bp, Homo sapiens
caagactccgtctca

SEQ ID NO: 595811 - DNA, 15 bp, Homo sapiens
aagactccgtctcaa

SEQ ID NO: 595812 - DNA, 15 bp, Homo sapiens
agactccgtctcaat

SEQ ID NO: 595813 - DNA, 15 bp, Homo sapiens
gactccgtctcaata

SEQ ID NO: 595814 - DNA, 15 bp, Homo sapiens
actccgtctcaataa

SEQ ID NO: 595815 - DNA, 15 bp, Homo sapiens
ctccgtctcaataaa

SEQ ID NO: 595816 - DNA, 15 bp, Homo sapiens
tccgtctcaataaaa

SEQ ID NO: 595817 - DNA, 15 bp, Homo sapiens
ccgtctcaataaaaa

SEQ ID NO: 595818 - DNA, 15 bp, Homo sapiens
cgtctcaataaaaac

SEQ ID NO: 595819 - DNA, 15 bp, Homo sapiens
gtctcaataaaaaca

SEQ ID NO: 595820 - DNA, 15 bp, Homo sapiens
tctcaataaaaacaa

SEQ ID NO: 595821 - DNA, 15 bp, Homo sapiens
ctcaataaaaacaaa

SEQ ID NO: 595822 - DNA, 15 bp, Homo sapiens
tcaataaaaacaaac

SEQ ID NO: 595823 - DNA, 15 bp, Homo sapiens
caataaaaacaaaca

SEQ ID NO: 595824 - DNA, 15 bp, Homo sapiens
aataaaaacaaacaa

SEQ ID NO: 595825 - DNA, 15 bp, Homo sapiens
ataaaaacaaacaaa

SEQ ID NO: 595826 - DNA, 15 bp, Homo sapiens
taaaaacaaacaaac

SEQ ID NO: 595827 - DNA, 15 bp, Homo sapiens
aaaaacaaacaaaca

SEQ ID NO: 595828 - DNA, 15 bp, Homo sapiens
aaaacaaacaaacaa

SEQ ID NO: 595829 - DNA, 15 bp, Homo sapiens
aaacaaacaaacaaa

SEQ ID NO: 595830 - DNA, 15 bp, Homo sapiens
aacaaacaaacaaac

SEQ ID NO: 595831 - DNA, 15 bp, Homo sapiens
acaaacaaacaaaca

SEQ ID NO: 595832 - DNA, 15 bp, Homo sapiens
caaacaaacaaacaa

SEQ ID NO: 595833 - DNA, 15 bp, Homo sapiens
acaaacaaacaaacc

SEQ ID NO: 595834 - DNA, 15 bp, Homo sapiens
caaacaaacaaacca

SEQ ID NO: 595835 - DNA, 15 bp, Homo sapiens
aaacaaacaaaccaa

SEQ ID NO: 595836 - DNA, 15 bp, Homo sapiens
aacaaacaaaccaaa

SEQ ID NO: 595837 - DNA, 15 bp, Homo sapiens
acaaacaaaccaaaa

SEQ ID NO: 595838 - DNA, 15 bp, Homo sapiens
caaacaaaccaaaaa

SEQ ID NO: 595839 - DNA, 15 bp, Homo sapiens
aaacaaaccaaaaaa

SEQ ID NO: 595840 - DNA, 15 bp, Homo sapiens
aacaaaccaaaaaaa

SEQ ID NO: 595841 - DNA, 15 bp, Homo sapiens
acaaaccaaaaaaac

SEQ ID NO: 595842 - DNA, 15 bp, Homo sapiens
caaaccaaaaaaacc

SEQ ID NO: 595843 - DNA, 15 bp, Homo sapiens
aaaccaaaaaaaccc

SEQ ID NO: 595844 - DNA, 15 bp, Homo sapiens
aaccaaaaaaaccca

SEQ ID NO: 595845 - DNA, 15 bp, Homo sapiens
accaaaaaaacccat

SEQ ID NO: 595846 - DNA, 15 bp, Homo sapiens
ccaaaaaaacccatc

SEQ ID NO: 595847 - DNA, 15 bp, Homo sapiens
caaaaaaacccatca

SEQ ID NO: 595848 - DNA, 15 bp, Homo sapiens
aaaaaaacccatcag

SEQ ID NO: 595849 - DNA, 15 bp, Homo sapiens
aaaaaacccatcaga

SEQ ID NO: 595850 - DNA, 15 bp, Homo sapiens
aaaaacccatcagag

SEQ ID NO: 595851 - DNA, 15 bp, Homo sapiens
aaaacccatcagaga

SEQ ID NO: 595852 - DNA, 15 bp, Homo sapiens
aaacccatcagagaa

SEQ ID NO: 595853 - DNA, 15 bp, Homo sapiens
aacccatcagagaag

SEQ ID NO: 595854 - DNA, 15 bp, Homo sapiens
acccatcagagaagt

SEQ ID NO: 595855 - DNA, 15 bp, Homo sapiens
cccatcagagaagtt

SEQ ID NO: 595856 - DNA, 15 bp, Homo sapiens
ccatcagagaagttg

SEQ ID NO: 595857 - DNA, 15 bp, Homo sapiens
catcagagaagttgg

SEQ ID NO: 595858 - DNA, 15 bp, Homo sapiens
atcagagaagttggt

SEQ ID NO: 595859 - DNA, 15 bp, Homo sapiens
tcagagaagttggta

SEQ ID NO: 595860 - DNA, 15 bp, Homo sapiens
cagagaagttggtaa

SEQ ID NO: 595861 - DNA, 15 bp, Homo sapiens
agagaagttggtaaa

SEQ ID NO: 595862 - DNA, 15 bp, Homo sapiens
gagaagttggtaaaa

SEQ ID NO: 595863 - DNA, 15 bp, Homo sapiens
agaagttggtaaaag

SEQ ID NO: 595864 - DNA, 15 bp, Homo sapiens
gaagttggtaaaaga

SEQ ID NO: 595865 - DNA, 15 bp, Homo sapiens
aagttggtaaaagat

SEQ ID NO: 595866 - DNA, 15 bp, Homo sapiens
agttggtaaaagatg

SEQ ID NO: 595867 - DNA, 15 bp, Homo sapiens
gttggtaaaagatgc

SEQ ID NO: 595868 - DNA, 15 bp, Homo sapiens
ttggtaaaagatgca

SEQ ID NO: 595869 - DNA, 15 bp, Homo sapiens
tggtaaaagatgcaa

SEQ ID NO: 595870 - DNA, 15 bp, Homo sapiens
ggtaaaagatgcaag

SEQ ID NO: 595871 - DNA, 15 bp, Homo sapiens
gtaaaagatgcaagt

SEQ ID NO: 595872 - DNA, 15 bp, Homo sapiens
taaaagatgcaagtg

SEQ ID NO: 595873 - DNA, 15 bp, Homo sapiens
aaaagatgcaagtgc

SEQ ID NO: 595874 - DNA, 15 bp, Homo sapiens
aaagatgcaagtgct

SEQ ID NO: 595875 - DNA, 15 bp, Homo sapiens
aagatgcaagtgcta

SEQ ID NO: 595876 - DNA, 15 bp, Homo sapiens
agatgcaagtgctaa

SEQ ID NO: 595877 - DNA, 15 bp, Homo sapiens
gatgcaagtgctaaa

SEQ ID NO: 595878 - DNA, 15 bp, Homo sapiens
atgcaagtgctaaat

SEQ ID NO: 595879 - DNA, 15 bp, Homo sapiens
tgcaagtgctaaatc

SEQ ID NO: 595880 - DNA, 15 bp, Homo sapiens
gcaagtgctaaatcc

SEQ ID NO: 595881 - DNA, 15 bp, Homo sapiens
caagtgctaaatccc

SEQ ID NO: 595882 - DNA, 15 bp, Homo sapiens
aagtgctaaatcccc

SEQ ID NO: 595883 - DNA, 15 bp, Homo sapiens
agtgctaaatcccca

SEQ ID NO: 595884 - DNA, 15 bp, Homo sapiens
gtgctaaatccccac

SEQ ID NO: 595885 - DNA, 15 bp, Homo sapiens
tgctaaatccccacc

SEQ ID NO: 595886 - DNA, 15 bp, Homo sapiens
gctaaatccccaccc

SEQ ID NO: 595887 - DNA, 15 bp, Homo sapiens
ctaaatccccacccc

SEQ ID NO: 595888 - DNA, 15 bp, Homo sapiens
taaatccccaccccc

SEQ ID NO: 595889 - DNA, 15 bp, Homo sapiens
aaatccccaccccca

SEQ ID NO: 595890 - DNA, 15 bp, Homo sapiens
aatccccacccccaa

SEQ ID NO: 595891 - DNA, 15 bp, Homo sapiens
atccccacccccaat

SEQ ID NO: 595892 - DNA, 15 bp, Homo sapiens
tccccacccccaatc

SEQ ID NO: 595893 - DNA, 15 bp, Homo sapiens
ccccacccccaatca

SEQ ID NO: 595894 - DNA, 15 bp, Homo sapiens
cccacccccaatcac

SEQ ID NO: 595895 - DNA, 15 bp, Homo sapiens
ccacccccaatcact

SEQ ID NO: 595896 - DNA, 15 bp, Homo sapiens
cacccccaatcactg

SEQ ID NO: 595897 - DNA, 15 bp, Homo sapiens
acccccaatcactgt

SEQ ID NO: 595898 - DNA, 15 bp, Homo sapiens
cccccaatcactgtg

SEQ ID NO: 595899 - DNA, 15 bp, Homo sapiens
ccccaatcactgtga

SEQ ID NO: 595900 - DNA, 15 bp, Homo sapiens
cccaatcactgtgat

SEQ ID NO: 595901 - DNA, 15 bp, Homo sapiens
ccaatcactgtgatt

SEQ ID NO: 595902 - DNA, 15 bp, Homo sapiens
caatcactgtgattc

SEQ ID NO: 595903 - DNA, 15 bp, Homo sapiens
aatcactgtgattca

SEQ ID NO: 595904 - DNA, 15 bp, Homo sapiens
atcactgtgattcag

SEQ ID NO: 595905 - DNA, 15 bp, Homo sapiens
tcactgtgattcaga

SEQ ID NO: 595906 - DNA, 15 bp, Homo sapiens
cactgtgattcagaa

SEQ ID NO: 595907 - DNA, 15 bp, Homo sapiens
actgtgattcagaag

SEQ ID NO: 595908 - DNA, 15 bp, Homo sapiens
ctgtgattcagaaga

SEQ ID NO: 595909 - DNA, 15 bp, Homo sapiens
tgtgattcagaagaa

SEQ ID NO: 595910 - DNA, 15 bp, Homo sapiens
gtgattcagaagaac

SEQ ID NO: 595911 - DNA, 15 bp, Homo sapiens
tgattcagaagaacc

SEQ ID NO: 595912 - DNA, 15 bp, Homo sapiens
gattcagaagaacca

SEQ ID NO: 595913 - DNA, 15 bp, Homo sapiens
attcagaagaaccag

SEQ ID NO: 595914 - DNA, 15 bp, Homo sapiens
ttcagaagaaccagg

SEQ ID NO: 595915 - DNA, 15 bp, Homo sapiens
tcagaagaaccaggc

SEQ ID NO: 595916 - DNA, 15 bp, Homo sapiens
cagaagaaccaggcc

SEQ ID NO: 595917 - DNA, 15 bp, Homo sapiens
agaagaaccaggcca

SEQ ID NO: 595918 - DNA, 15 bp, Homo sapiens
gaagaaccaggccag

SEQ ID NO: 595919 - DNA, 15 bp, Homo sapiens
aagaaccaggccagg

SEQ ID NO: 595920 - DNA, 15 bp, Homo sapiens
agaaccaggccaggc

SEQ ID NO: 595921 - DNA, 15 bp, Homo sapiens
gaaccaggccaggcc

SEQ ID NO: 595922 - DNA, 15 bp, Homo sapiens
aaccaggccaggccc

SEQ ID NO: 595923 - DNA, 15 bp, Homo sapiens
accaggccaggccca

SEQ ID NO: 595924 - DNA, 15 bp, Homo sapiens
ccaggccaggcccag

SEQ ID NO: 595925 - DNA, 15 bp, Homo sapiens
caggccaggcccaga

SEQ ID NO: 595926 - DNA, 15 bp, Homo sapiens
aggccaggcccagaa

SEQ ID NO: 595927 - DNA, 15 bp, Homo sapiens
ggccaggcccagaat

SEQ ID NO: 595928 - DNA, 15 bp, Homo sapiens
gccaggcccagaatc

SEQ ID NO: 595929 - DNA, 15 bp, Homo sapiens
ccaggcccagaatct

SEQ ID NO: 595930 - DNA, 15 bp, Homo sapiens
caggcccagaatcta

SEQ ID NO: 595931 - DNA, 15 bp, Homo sapiens
aggcccagaatctat

SEQ ID NO: 595932 - DNA, 15 bp, Homo sapiens
ggcccagaatctatc

SEQ ID NO: 595933 - DNA, 15 bp, Homo sapiens
gcccagaatctatcc

SEQ ID NO: 595934 - DNA, 15 bp, Homo sapiens
cccagaatctatcct

SEQ ID NO: 595935 - DNA, 15 bp, Homo sapiens
ccagaatctatcctg

SEQ ID NO: 595936 - DNA, 15 bp, Homo sapiens
cagaatctatcctgt

SEQ ID NO: 595937 - DNA, 15 bp, Homo sapiens
agaatctatcctgtt

SEQ ID NO: 595938 - DNA, 15 bp, Homo sapiens
gaatctatcctgtta

SEQ ID NO: 595939 - DNA, 15 bp, Homo sapiens
aatctatcctgttac

SEQ ID NO: 595940 - DNA, 15 bp, Homo sapiens
atctatcctgttacc

SEQ ID NO: 595941 - DNA, 15 bp, Homo sapiens
tctatcctgttacct

SEQ ID NO: 595942 - DNA, 15 bp, Homo sapiens
ctatcctgttacctt

SEQ ID NO: 595943 - DNA, 15 bp, Homo sapiens
tatcctgttacctta

SEQ ID NO: 595944 - DNA, 15 bp, Homo sapiens
atcctgttaccttag

SEQ ID NO: 595945 - DNA, 15 bp, Homo sapiens
tcctgttaccttagg

SEQ ID NO: 595946 - DNA, 15 bp, Homo sapiens
cctgttaccttaggc

SEQ ID NO: 595947 - DNA, 15 bp, Homo sapiens
ctgttaccttaggcg

SEQ ID NO: 595948 - DNA, 15 bp, Homo sapiens
tgttaccttaggcga

SEQ ID NO: 595949 - DNA, 15 bp, Homo sapiens
gttaccttaggcgat

SEQ ID NO: 595950 - DNA, 15 bp, Homo sapiens
ttaccttaggcgatt

SEQ ID NO: 595951 - DNA, 15 bp, Homo sapiens
taccttaggcgattc

SEQ ID NO: 595952 - DNA, 15 bp, Homo sapiens
accttaggcgattct

SEQ ID NO: 595953 - DNA, 15 bp, Homo sapiens
ccttaggcgattctg

SEQ ID NO: 595954 - DNA, 15 bp, Homo sapiens
cttaggcgattctga

SEQ ID NO: 595955 - DNA, 15 bp, Homo sapiens
ttaggcgattctgat

SEQ ID NO: 595956 - DNA, 15 bp, Homo sapiens
taggcgattctgatg

SEQ ID NO: 595957 - DNA, 15 bp, Homo sapiens
aggcgattctgatga

SEQ ID NO: 595958 - DNA, 15 bp, Homo sapiens
ggcgattctgatgaa

SEQ ID NO: 595959 - DNA, 15 bp, Homo sapiens
gcgattctgatgaag

SEQ ID NO: 595960 - DNA, 15 bp, Homo sapiens
cgattctgatgaaga

SEQ ID NO: 595961 - DNA, 15 bp, Homo sapiens
gattctgatgaagac

SEQ ID NO: 595962 - DNA, 15 bp, Homo sapiens
attctgatgaagacc

SEQ ID NO: 595963 - DNA, 15 bp, Homo sapiens
ttctgatgaagacca

SEQ ID NO: 595964 - DNA, 15 bp, Homo sapiens
tctgatgaagaccat

SEQ ID NO: 595965 - DNA, 15 bp, Homo sapiens
ctgatgaagaccatt

SEQ ID NO: 595966 - DNA, 15 bp, Homo sapiens
tgatgaagaccattg

SEQ ID NO: 595967 - DNA, 15 bp, Homo sapiens
gatgaagaccattgt

SEQ ID NO: 595968 - DNA, 15 bp, Homo sapiens
atgaagaccattgta

SEQ ID NO: 595969 - DNA, 15 bp, Homo sapiens
tgaagaccattgtag

SEQ ID NO: 595970 - DNA, 15 bp, Homo sapiens
gaagaccattgtagg

SEQ ID NO: 595971 - DNA, 15 bp, Homo sapiens
aagaccattgtaggc

SEQ ID NO: 595972 - DNA, 15 bp, Homo sapiens
agaccattgtaggcc

SEQ ID NO: 595973 - DNA, 15 bp, Homo sapiens
gaccattgtaggcca

SEQ ID NO: 595974 - DNA, 15 bp, Homo sapiens
accattgtaggccac

SEQ ID NO: 595975 - DNA, 15 bp, Homo sapiens
ccattgtaggccaca

SEQ ID NO: 595976 - DNA, 15 bp, Homo sapiens
cattgtaggccacac

SEQ ID NO: 595977 - DNA, 15 bp, Homo sapiens
attgtaggccacact

SEQ ID NO: 595978 - DNA, 15 bp, Homo sapiens
ttgtaggccacactt

SEQ ID NO: 595979 - DNA, 15 bp, Homo sapiens
tgtaggccacacttt

SEQ ID NO: 595980 - DNA, 15 bp, Homo sapiens
gtaggccacactttc

SEQ ID NO: 595981 - DNA, 15 bp, Homo sapiens
taggccacactttca

SEQ ID NO: 595982 - DNA, 15 bp, Homo sapiens
aggccacactttcag

SEQ ID NO: 595983 - DNA, 15 bp, Homo sapiens
ggccacactttcaga

SEQ ID NO: 595984 - DNA, 15 bp, Homo sapiens
gccacactttcagaa

SEQ ID NO: 595985 - DNA, 15 bp, Homo sapiens
ccacactttcagaaa

SEQ ID NO: 595986 - DNA, 15 bp, Homo sapiens
cacactttcagaaac

SEQ ID NO: 595987 - DNA, 15 bp, Homo sapiens
acactttcagaaaca

SEQ ID NO: 595988 - DNA, 15 bp, Homo sapiens
cactttcagaaacac

SEQ ID NO: 595989 - DNA, 15 bp, Homo sapiens
actttcagaaacact

SEQ ID NO: 595990 - DNA, 15 bp, Homo sapiens
ctttcagaaacactc

SEQ ID NO: 595991 - DNA, 15 bp, Homo sapiens
tttcagaaacactca

SEQ ID NO: 595992 - DNA, 15 bp, Homo sapiens
ttcagaaacactcaa

SEQ ID NO: 595993 - DNA, 15 bp, Homo sapiens
tcagaaacactcaaa

SEQ ID NO: 595994 - DNA, 15 bp, Homo sapiens
cagaaacactcaaaa

SEQ ID NO: 595995 - DNA, 15 bp, Homo sapiens
agaaacactcaaaat

SEQ ID NO: 595996 - DNA, 15 bp, Homo sapiens
gaaacactcaaaatt

SEQ ID NO: 595997 - DNA, 15 bp, Homo sapiens
aaacactcaaaatta

SEQ ID NO: 595998 - DNA, 15 bp, Homo sapiens
aacactcaaaattag

SEQ ID NO: 595999 - DNA, 15 bp, Homo sapiens
acactcaaaattaga

SEQ ID NO: 596000 - DNA, 15 bp, Homo sapiens
cactcaaaattagaa

SEQ ID NO: 596001 - DNA, 15 bp, Homo sapiens
actcaaaattagaat

SEQ ID NO: 596002 - DNA, 15 bp, Homo sapiens
ctcaaaattagaatc

SEQ ID NO: 596003 - DNA, 15 bp, Homo sapiens
tcaaaattagaatcc

SEQ ID NO: 596004 - DNA, 15 bp, Homo sapiens
caaaattagaatcct

SEQ ID NO: 596005 - DNA, 15 bp, Homo sapiens
aaaattagaatcctt

SEQ ID NO: 596006 - DNA, 15 bp, Homo sapiens
aaattagaatccttc

SEQ ID NO: 596007 - DNA, 15 bp, Homo sapiens
aattagaatccttca

SEQ ID NO: 596008 - DNA, 15 bp, Homo sapiens
attagaatccttcag

SEQ ID NO: 596009 - DNA, 15 bp, Homo sapiens
ttagaatccttcaga

SEQ ID NO: 596010 - DNA, 15 bp, Homo sapiens
tagaatccttcagag

SEQ ID NO: 596011 - DNA, 15 bp, Homo sapiens
agaatccttcagaga

SEQ ID NO: 596012 - DNA, 15 bp, Homo sapiens
gaatccttcagagaa

SEQ ID NO: 596013 - DNA, 15 bp, Homo sapiens
aatccttcagagaag

SEQ ID NO: 596014 - DNA, 15 bp, Homo sapiens
atccttcagagaagg

SEQ ID NO: 596015 - DNA, 15 bp, Homo sapiens
tccttcagagaaggt

SEQ ID NO: 596016 - DNA, 15 bp, Homo sapiens
ccttcagagaaggtg

SEQ ID NO: 596017 - DNA, 15 bp, Homo sapiens
cttcagagaaggtgg

SEQ ID NO: 596018 - DNA, 15 bp, Homo sapiens
ttcagagaaggtggc

SEQ ID NO: 596019 - DNA, 15 bp, Homo sapiens
tcagagaaggtggca

SEQ ID NO: 596020 - DNA, 15 bp, Homo sapiens
cagagaaggtggcat

SEQ ID NO: 596021 - DNA, 15 bp, Homo sapiens
agagaaggtggcata

SEQ ID NO: 596022 - DNA, 15 bp, Homo sapiens
gagaaggtggcatat

SEQ ID NO: 596023 - DNA, 15 bp, Homo sapiens
agaaggtggcatata

SEQ ID NO: 596024 - DNA, 15 bp, Homo sapiens
gaaggtggcatatat

SEQ ID NO: 596025 - DNA, 15 bp, Homo sapiens
aaggtggcatatata

SEQ ID NO: 596026 - DNA, 15 bp, Homo sapiens
aggtggcatatataa

SEQ ID NO: 596027 - DNA, 15 bp, Homo sapiens
ggtggcatatataat

SEQ ID NO: 596028 - DNA, 15 bp, Homo sapiens
gtggcatatataata

SEQ ID NO: 596029 - DNA, 15 bp, Homo sapiens
tggcatatataatat

SEQ ID NO: 596030 - DNA, 15 bp, Homo sapiens
ggcatatataatatt

SEQ ID NO: 596031 - DNA, 15 bp, Homo sapiens
gcatatataatattt

SEQ ID NO: 596032 - DNA, 15 bp, Homo sapiens
catatataatatttc

SEQ ID NO: 596033 - DNA, 15 bp, Homo sapiens
atatataatatttct

SEQ ID NO: 596034 - DNA, 15 bp, Homo sapiens
tatataatatttcta

SEQ ID NO: 596035 - DNA, 15 bp, Homo sapiens
atataatatttctag

SEQ ID NO: 596036 - DNA, 15 bp, Homo sapiens
tataatatttctagc

SEQ ID NO: 596037 - DNA, 15 bp, Homo sapiens
ataatatttctagca

SEQ ID NO: 596038 - DNA, 15 bp, Homo sapiens
taatatttctagcat

SEQ ID NO: 596039 - DNA, 15 bp, Homo sapiens
aatatttctagcatg

SEQ ID NO: 596040 - DNA, 15 bp, Homo sapiens
atatttctagcatgg

SEQ ID NO: 596041 - DNA, 15 bp, Homo sapiens
tatttctagcatgga

SEQ ID NO: 596042 - DNA, 15 bp, Homo sapiens
atttctagcatggaa

SEQ ID NO: 596043 - DNA, 15 bp, Homo sapiens
tttctagcatggaat

SEQ ID NO: 596044 - DNA, 15 bp, Homo sapiens
ttctagcatggaatt

SEQ ID NO: 596045 - DNA, 15 bp, Homo sapiens
tctagcatggaatta

SEQ ID NO: 596046 - DNA, 15 bp, Homo sapiens
ctagcatggaattat

SEQ ID NO: 596047 - DNA, 15 bp, Homo sapiens
tagcatggaattatg

SEQ ID NO: 596048 - DNA, 15 bp, Homo sapiens
agcatggaattatgt

SEQ ID NO: 596049 - DNA, 15 bp, Homo sapiens
gcatggaattatgtt

SEQ ID NO: 596050 - DNA, 15 bp, Homo sapiens
catggaattatgttt

SEQ ID NO: 596051 - DNA, 15 bp, Homo sapiens
atggaattatgtttt

SEQ ID NO: 596052 - DNA, 15 bp, Homo sapiens
tggaattatgttttt

SEQ ID NO: 596053 - DNA, 15 bp, Homo sapiens
ggaattatgtttttt

SEQ ID NO: 596054 - DNA, 15 bp, Homo sapiens
gaattatgttttttt

SEQ ID NO: 596055 - DNA, 15 bp, Homo sapiens
aattatgtttttttt

SEQ ID NO: 596056 - DNA, 15 bp, Homo sapiens
attatgttttttttc

SEQ ID NO: 596057 - DNA, 15 bp, Homo sapiens
ttatgttttttttct

SEQ ID NO: 596058 - DNA, 15 bp, Homo sapiens
tatgttttttttctt

SEQ ID NO: 596059 - DNA, 15 bp, Homo sapiens
atgttttttttcttt

SEQ ID NO: 596060 - DNA, 15 bp, Homo sapiens
tgttttttttctttt

SEQ ID NO: 596061 - DNA, 15 bp, Homo sapiens
gttttttttcttttg

SEQ ID NO: 596062 - DNA, 15 bp, Homo sapiens
ttttttttcttttgc

SEQ ID NO: 596063 - DNA, 15 bp, Homo sapiens
tttttttcttttgcc

SEQ ID NO: 596064 - DNA, 15 bp, Homo sapiens
ttttttcttttgcct

SEQ ID NO: 596065 - DNA, 15 bp, Homo sapiens
tttttcttttgccta

SEQ ID NO: 596066 - DNA, 15 bp, Homo sapiens
ttttcttttgcctac

SEQ ID NO: 596067 - DNA, 15 bp, Homo sapiens
tttcttttgcctaca

SEQ ID NO: 596068 - DNA, 15 bp, Homo sapiens
ttcttttgcctacat

SEQ ID NO: 596069 - DNA, 15 bp, Homo sapiens
tcttttgcctacatt

SEQ ID NO: 596070 - DNA, 15 bp, Homo sapiens
cttttgcctacattt

SEQ ID NO: 596071 - DNA, 15 bp, Homo sapiens
ttttgcctacatttt

SEQ ID NO: 596072 - DNA, 15 bp, Homo sapiens
tttgcctacatttta

SEQ ID NO: 596073 - DNA, 15 bp, Homo sapiens
ttgcctacattttaa

SEQ ID NO: 596074 - DNA, 15 bp, Homo sapiens
tgcctacattttaat

SEQ ID NO: 596075 - DNA, 15 bp, Homo sapiens
gcctacattttaatt

SEQ ID NO: 596076 - DNA, 15 bp, Homo sapiens
cctacattttaattt

SEQ ID NO: 596077 - DNA, 15 bp, Homo sapiens
ctacattttaatttc

SEQ ID NO: 596078 - DNA, 15 bp, Homo sapiens
tacattttaatttct

SEQ ID NO: 596079 - DNA, 15 bp, Homo sapiens
acattttaatttcta

SEQ ID NO: 596080 - DNA, 15 bp, Homo sapiens
cattttaatttctag

SEQ ID NO: 596081 - DNA, 15 bp, Homo sapiens
attttaatttctaga

SEQ ID NO: 596082 - DNA, 15 bp, Homo sapiens
ttttaatttctagaa

SEQ ID NO: 596083 - DNA, 15 bp, Homo sapiens
tttaatttctagaac

SEQ ID NO: 596084 - DNA, 15 bp, Homo sapiens
ttaatttctagaact

SEQ ID NO: 596085 - DNA, 15 bp, Homo sapiens
taatttctagaactg

SEQ ID NO: 596086 - DNA, 15 bp, Homo sapiens
aatttctagaactgt

SEQ ID NO: 596087 - DNA, 15 bp, Homo sapiens
atttctagaactgtg

SEQ ID NO: 596088 - DNA, 15 bp, Homo sapiens
tttctagaactgtgt

SEQ ID NO: 596089 - DNA, 15 bp, Homo sapiens
ttctagaactgtgtt

SEQ ID NO: 596090 - DNA, 15 bp, Homo sapiens
tctagaactgtgttg

SEQ ID NO: 596091 - DNA, 15 bp, Homo sapiens
ctagaactgtgttgt

SEQ ID NO: 596092 - DNA, 15 bp, Homo sapiens
tagaactgtgttgta

SEQ ID NO: 596093 - DNA, 15 bp, Homo sapiens
agaactgtgttgtag

SEQ ID NO: 596094 - DNA, 15 bp, Homo sapiens
gaactgtgttgtagg

SEQ ID NO: 596095 - DNA, 15 bp, Homo sapiens
aactgtgttgtaggg

SEQ ID NO: 596096 - DNA, 15 bp, Homo sapiens
actgtgttgtaggga

SEQ ID NO: 596097 - DNA, 15 bp, Homo sapiens
ctgtgttgtagggaa

SEQ ID NO: 596098 - DNA, 15 bp, Homo sapiens
tgtgttgtagggaat

SEQ ID NO: 596099 - DNA, 15 bp, Homo sapiens
gtgttgtagggaatg

SEQ ID NO: 596100 - DNA, 15 bp, Homo sapiens
tgttgtagggaatgt

SEQ ID NO: 596101 - DNA, 15 bp, Homo sapiens
gttgtagggaatgtc

SEQ ID NO: 596102 - DNA, 15 bp, Homo sapiens
ttgtagggaatgtca

SEQ ID NO: 596103 - DNA, 15 bp, Homo sapiens
tgtagggaatgtcag

SEQ ID NO: 596104 - DNA, 15 bp, Homo sapiens
gtagggaatgtcagt

SEQ ID NO: 596105 - DNA, 15 bp, Homo sapiens
tagggaatgtcagtc

SEQ ID NO: 596106 - DNA, 15 bp, Homo sapiens
agggaatgtcagtca

SEQ ID NO: 596107 - DNA, 15 bp, Homo sapiens
gggaatgtcagtcac

SEQ ID NO: 596108 - DNA, 15 bp, Homo sapiens
ggaatgtcagtcact

SEQ ID NO: 596109 - DNA, 15 bp, Homo sapiens
gaatgtcagtcacta

SEQ ID NO: 596110 - DNA, 15 bp, Homo sapiens
aatgtcagtcactaa

SEQ ID NO: 596111 - DNA, 15 bp, Homo sapiens
atgtcagtcactaag

SEQ ID NO: 596112 - DNA, 15 bp, Homo sapiens
tgtcagtcactaaga

SEQ ID NO: 596113 - DNA, 15 bp, Homo sapiens
gtcagtcactaagaa

SEQ ID NO: 596114 - DNA, 15 bp, Homo sapiens
tcagtcactaagaac

SEQ ID NO: 596115 - DNA, 15 bp, Homo sapiens
cagtcactaagaact

SEQ ID NO: 596116 - DNA, 15 bp, Homo sapiens
agtcactaagaactt

SEQ ID NO: 596117 - DNA, 15 bp, Homo sapiens
gtcactaagaacttg

SEQ ID NO: 596118 - DNA, 15 bp, Homo sapiens
tcactaagaacttga

SEQ ID NO: 596119 - DNA, 15 bp, Homo sapiens
cactaagaacttgat

SEQ ID NO: 596120 - DNA, 15 bp, Homo sapiens
actaagaacttgatt

SEQ ID NO: 596121 - DNA, 15 bp, Homo sapiens
ctaagaacttgattg

SEQ ID NO: 596122 - DNA, 15 bp, Homo sapiens
taagaacttgattga

SEQ ID NO: 596123 - DNA, 15 bp, Homo sapiens
aagaacttgattgag

SEQ ID NO: 596124 - DNA, 15 bp, Homo sapiens
agaacttgattgagg

SEQ ID NO: 596125 - DNA, 15 bp, Homo sapiens
gaacttgattgagga

SEQ ID NO: 596126 - DNA, 15 bp, Homo sapiens
aacttgattgaggaa

SEQ ID NO: 596127 - DNA, 15 bp, Homo sapiens
acttgattgaggaac

SEQ ID NO: 596128 - DNA, 15 bp, Homo sapiens
cttgattgaggaact

SEQ ID NO: 596129 - DNA, 15 bp, Homo sapiens
ttgattgaggaactg

SEQ ID NO: 596130 - DNA, 15 bp, Homo sapiens
tgattgaggaactgt

SEQ ID NO: 596131 - DNA, 15 bp, Homo sapiens
gattgaggaactgtg

SEQ ID NO: 596132 - DNA, 15 bp, Homo sapiens
attgaggaactgtgt

SEQ ID NO: 596133 - DNA, 15 bp, Homo sapiens
ttgaggaactgtgtt

SEQ ID NO: 596134 - DNA, 15 bp, Homo sapiens
tgaggaactgtgttt

SEQ ID NO: 596135 - DNA, 15 bp, Homo sapiens
gaggaactgtgtttt

SEQ ID NO: 596136 - DNA, 15 bp, Homo sapiens
aggaactgtgttttg

SEQ ID NO: 596137 - DNA, 15 bp, Homo sapiens
ggaactgtgttttgt

SEQ ID NO: 596138 - DNA, 15 bp, Homo sapiens
gaactgtgttttgtc

SEQ ID NO: 596139 - DNA, 15 bp, Homo sapiens
aactgtgttttgtct

SEQ ID NO: 596140 - DNA, 15 bp, Homo sapiens
actgtgttttgtctg

SEQ ID NO: 596141 - DNA, 15 bp, Homo sapiens
ctgtgttttgtctgt

SEQ ID NO: 596142 - DNA, 15 bp, Homo sapiens
tgtgttttgtctgtt

SEQ ID NO: 596143 - DNA, 15 bp, Homo sapiens
gtgttttgtctgttt

SEQ ID NO: 596144 - DNA, 15 bp, Homo sapiens
tgttttgtctgtttc

SEQ ID NO: 596145 - DNA, 15 bp, Homo sapiens
gttttgtctgtttca

SEQ ID NO: 596146 - DNA, 15 bp, Homo sapiens
ttttgtctgtttcat

SEQ ID NO: 596147 - DNA, 15 bp, Homo sapiens
tttgtctgtttcatg

SEQ ID NO: 596148 - DNA, 15 bp, Homo sapiens
ttgtctgtttcatga

SEQ ID NO: 596149 - DNA, 15 bp, Homo sapiens
tgtctgtttcatgac

SEQ ID NO: 596150 - DNA, 15 bp, Homo sapiens
gtctgtttcatgact

SEQ ID NO: 596151 - DNA, 15 bp, Homo sapiens
tctgtttcatgactg

SEQ ID NO: 596152 - DNA, 15 bp, Homo sapiens
ctgtttcatgactgc

SEQ ID NO: 596153 - DNA, 15 bp, Homo sapiens
tgtttcatgactgct

SEQ ID NO: 596154 - DNA, 15 bp, Homo sapiens
gtttcatgactgctc

SEQ ID NO: 596155 - DNA, 15 bp, Homo sapiens
tttcatgactgctct

SEQ ID NO: 596156 - DNA, 15 bp, Homo sapiens
ttcatgactgctctc

SEQ ID NO: 596157 - DNA, 15 bp, Homo sapiens
tcatgactgctctct

SEQ ID NO: 596158 - DNA, 15 bp, Homo sapiens
catgactgctctctc

SEQ ID NO: 596159 - DNA, 15 bp, Homo sapiens
atgactgctctctca

SEQ ID NO: 596160 - DNA, 15 bp, Homo sapiens
tgactgctctctcaa

SEQ ID NO: 596161 - DNA, 15 bp, Homo sapiens
gactgctctctcaag

SEQ ID NO: 596162 - DNA, 15 bp, Homo sapiens
actgctctctcaagt

SEQ ID NO: 596163 - DNA, 15 bp, Homo sapiens
ctgctctctcaagtc

SEQ ID NO: 596164 - DNA, 15 bp, Homo sapiens
tgctctctcaagtcc

SEQ ID NO: 596165 - DNA, 15 bp, Homo sapiens
gctctctcaagtccc

SEQ ID NO: 596166 - DNA, 15 bp, Homo sapiens
ctctctcaagtccca

SEQ ID NO: 596167 - DNA, 15 bp, Homo sapiens
tctctcaagtcccag

SEQ ID NO: 596168 - DNA, 15 bp, Homo sapiens
ctctcaagtcccagg

SEQ ID NO: 596169 - DNA, 15 bp, Homo sapiens
tctcaagtcccagga

SEQ ID NO: 596170 - DNA, 15 bp, Homo sapiens
ctcaagtcccaggaa

SEQ ID NO: 596171 - DNA, 15 bp, Homo sapiens
tcaagtcccaggaaa

SEQ ID NO: 596172 - DNA, 15 bp, Homo sapiens
caagtcccaggaaac

SEQ ID NO: 596173 - DNA, 15 bp, Homo sapiens
aagtcccaggaaact

SEQ ID NO: 596174 - DNA, 15 bp, Homo sapiens
agtcccaggaaactc

SEQ ID NO: 596175 - DNA, 15 bp, Homo sapiens
gtcccaggaaactca

SEQ ID NO: 596176 - DNA, 15 bp, Homo sapiens
tcccaggaaactcac

SEQ ID NO: 596177 - DNA, 15 bp, Homo sapiens
cccaggaaactcact

SEQ ID NO: 596178 - DNA, 15 bp, Homo sapiens
ccaggaaactcactt

SEQ ID NO: 596179 - DNA, 15 bp, Homo sapiens
caggaaactcacttt

SEQ ID NO: 596180 - DNA, 15 bp, Homo sapiens
aggaaactcactttc

SEQ ID NO: 596181 - DNA, 15 bp, Homo sapiens
ggaaactcactttca

SEQ ID NO: 596182 - DNA, 15 bp, Homo sapiens
gaaactcactttcag

SEQ ID NO: 596183 - DNA, 15 bp, Homo sapiens
aaactcactttcagc

SEQ ID NO: 596184 - DNA, 15 bp, Homo sapiens
aactcactttcagct

SEQ ID NO: 596185 - DNA, 15 bp, Homo sapiens
actcactttcagctt

SEQ ID NO: 596186 - DNA, 15 bp, Homo sapiens
ctcactttcagcttg

SEQ ID NO: 596187 - DNA, 15 bp, Homo sapiens
tcactttcagcttgt

SEQ ID NO: 596188 - DNA, 15 bp, Homo sapiens
cactttcagcttgtc

SEQ ID NO: 596189 - DNA, 15 bp, Homo sapiens
actttcagcttgtct

SEQ ID NO: 596190 - DNA, 15 bp, Homo sapiens
ctttcagcttgtctt

SEQ ID NO: 596191 - DNA, 15 bp, Homo sapiens
tttcagcttgtctta

SEQ ID NO: 596192 - DNA, 15 bp, Homo sapiens
ttcagcttgtcttaa

SEQ ID NO: 596193 - DNA, 15 bp, Homo sapiens
tcagcttgtcttaaa

SEQ ID NO: 596194 - DNA, 15 bp, Homo sapiens
cagcttgtcttaaaa

SEQ ID NO: 596195 - DNA, 15 bp, Homo sapiens
agcttgtcttaaaaa

SEQ ID NO: 596196 - DNA, 15 bp, Homo sapiens
gcttgtcttaaaaag

SEQ ID NO: 596197 - DNA, 15 bp, Homo sapiens
cttgtcttaaaaagc

SEQ ID NO: 596198 - DNA, 15 bp, Homo sapiens
ttgtcttaaaaagca

SEQ ID NO: 596199 - DNA, 15 bp, Homo sapiens
tgtcttaaaaagcaa

SEQ ID NO: 596200 - DNA, 15 bp, Homo sapiens
gtcttaaaaagcaag

SEQ ID NO: 596201 - DNA, 15 bp, Homo sapiens
tcttaaaaagcaagc

SEQ ID NO: 596202 - DNA, 15 bp, Homo sapiens
cttaaaaagcaagct

SEQ ID NO: 596203 - DNA, 15 bp, Homo sapiens
ttaaaaagcaagctg

SEQ ID NO: 596204 - DNA, 15 bp, Homo sapiens
taaaaagcaagctga

SEQ ID NO: 596205 - DNA, 15 bp, Homo sapiens
aaaaagcaagctgaa

SEQ ID NO: 596206 - DNA, 15 bp, Homo sapiens
aaaagcaagctgaag

SEQ ID NO: 596207 - DNA, 15 bp, Homo sapiens
aaagcaagctgaagg

SEQ ID NO: 596208 - DNA, 15 bp, Homo sapiens
aagcaagctgaaggc

SEQ ID NO: 596209 - DNA, 15 bp, Homo sapiens
agcaagctgaaggct

SEQ ID NO: 596210 - DNA, 15 bp, Homo sapiens
gcaagctgaaggctt

SEQ ID NO: 596211 - DNA, 15 bp, Homo sapiens
caagctgaaggcttt

SEQ ID NO: 596212 - DNA, 15 bp, Homo sapiens
aagctgaaggctttt

SEQ ID NO: 596213 - DNA, 15 bp, Homo sapiens
agctgaaggctttta

SEQ ID NO: 596214 - DNA, 15 bp, Homo sapiens
gctgaaggcttttaa

SEQ ID NO: 596215 - DNA, 15 bp, Homo sapiens
ctgaaggcttttaaa

SEQ ID NO: 596216 - DNA, 15 bp, Homo sapiens
tgaaggcttttaaaa

SEQ ID NO: 596217 - DNA, 15 bp, Homo sapiens
gaaggcttttaaaaa

SEQ ID NO: 596218 - DNA, 15 bp, Homo sapiens
aaggcttttaaaaat

SEQ ID NO: 596219 - DNA, 15 bp, Homo sapiens
aggcttttaaaaatg

SEQ ID NO: 596220 - DNA, 15 bp, Homo sapiens
ggcttttaaaaatga

SEQ ID NO: 596221 - DNA, 15 bp, Homo sapiens
gcttttaaaaatgaa

SEQ ID NO: 596222 - DNA, 15 bp, Homo sapiens
cttttaaaaatgaag

SEQ ID NO: 596223 - DNA, 15 bp, Homo sapiens
ttttaaaaatgaagc

SEQ ID NO: 596224 - DNA, 15 bp, Homo sapiens
tttaaaaatgaagca

SEQ ID NO: 596225 - DNA, 15 bp, Homo sapiens
ttaaaaatgaagcaa

SEQ ID NO: 596226 - DNA, 15 bp, Homo sapiens
taaaaatgaagcaac

SEQ ID NO: 596227 - DNA, 15 bp, Homo sapiens
aaaaatgaagcaaca

SEQ ID NO: 596228 - DNA, 15 bp, Homo sapiens
aaaatgaagcaacat

SEQ ID NO: 596229 - DNA, 15 bp, Homo sapiens
aaatgaagcaacatg

SEQ ID NO: 596230 - DNA, 15 bp, Homo sapiens
aatgaagcaacatga

SEQ ID NO: 596231 - DNA, 15 bp, Homo sapiens
atgaagcaacatgaa

SEQ ID NO: 596232 - DNA, 15 bp, Homo sapiens
tgaagcaacatgaaa

SEQ ID NO: 596233 - DNA, 15 bp, Homo sapiens
gaagcaacatgaaat

SEQ ID NO: 596234 - DNA, 15 bp, Homo sapiens
aagcaacatgaaata

SEQ ID NO: 596235 - DNA, 15 bp, Homo sapiens
agcaacatgaaataa

SEQ ID NO: 596236 - DNA, 15 bp, Homo sapiens
gcaacatgaaataag

SEQ ID NO: 596237 - DNA, 15 bp, Homo sapiens
caacatgaaataaga

SEQ ID NO: 596238 - DNA, 15 bp, Homo sapiens
aacatgaaataagac

SEQ ID NO: 596239 - DNA, 15 bp, Homo sapiens
acatgaaataagaca

SEQ ID NO: 596240 - DNA, 15 bp, Homo sapiens
catgaaataagacac

SEQ ID NO: 596241 - DNA, 15 bp, Homo sapiens
atgaaataagacacc

SEQ ID NO: 596242 - DNA, 15 bp, Homo sapiens
tgaaataagacaccg

SEQ ID NO: 596243 - DNA, 15 bp, Homo sapiens
gaaataagacaccgc

SEQ ID NO: 596244 - DNA, 15 bp, Homo sapiens
aaataagacaccgca

SEQ ID NO: 596245 - DNA, 15 bp, Homo sapiens
aataagacaccgcag

SEQ ID NO: 596246 - DNA, 15 bp, Homo sapiens
ataagacaccgcagt

SEQ ID NO: 596247 - DNA, 15 bp, Homo sapiens
taagacaccgcagtt

SEQ ID NO: 596248 - DNA, 15 bp, Homo sapiens
aagacaccgcagttt

SEQ ID NO: 596249 - DNA, 15 bp, Homo sapiens
agacaccgcagtttc

SEQ ID NO: 596250 - DNA, 15 bp, Homo sapiens
gacaccgcagtttct

SEQ ID NO: 596251 - DNA, 15 bp, Homo sapiens
acaccgcagtttctg

SEQ ID NO: 596252 - DNA, 15 bp, Homo sapiens
caccgcagtttctgg

SEQ ID NO: 596253 - DNA, 15 bp, Homo sapiens
accgcagtttctggc

SEQ ID NO: 596254 - DNA, 15 bp, Homo sapiens
ccgcagtttctggca

SEQ ID NO: 596255 - DNA, 15 bp, Homo sapiens
cgcagtttctggcac

SEQ ID NO: 596256 - DNA, 15 bp, Homo sapiens
gcagtttctggcacg

SEQ ID NO: 596257 - DNA, 15 bp, Homo sapiens
cagtttctggcacgg

SEQ ID NO: 596258 - DNA, 15 bp, Homo sapiens
agtttctggcacggt

SEQ ID NO: 596259 - DNA, 15 bp, Homo sapiens
gtttctggcacggtc

SEQ ID NO: 596260 - DNA, 15 bp, Homo sapiens
tttctggcacggtcc

SEQ ID NO: 596261 - DNA, 15 bp, Homo sapiens
ttctggcacggtcca

SEQ ID NO: 596262 - DNA, 15 bp, Homo sapiens
tctggcacggtccac

SEQ ID NO: 596263 - DNA, 15 bp, Homo sapiens
ctggcacggtccacg

SEQ ID NO: 596264 - DNA, 15 bp, Homo sapiens
tggcacggtccacgc

SEQ ID NO: 596265 - DNA, 15 bp, Homo sapiens
ggcacggtccacgct

SEQ ID NO: 596266 - DNA, 15 bp, Homo sapiens
gcacggtccacgctt

SEQ ID NO: 596267 - DNA, 15 bp, Homo sapiens
cacggtccacgctta

SEQ ID NO: 596268 - DNA, 15 bp, Homo sapiens
acggtccacgcttaa

SEQ ID NO: 596269 - DNA, 15 bp, Homo sapiens
cggtccacgcttaat

SEQ ID NO: 596270 - DNA, 15 bp, Homo sapiens
ggtccacgcttaatc

SEQ ID NO: 596271 - DNA, 15 bp, Homo sapiens
gtccacgcttaatcc

SEQ ID NO: 596272 - DNA, 15 bp, Homo sapiens
tccacgcttaatccc

SEQ ID NO: 596273 - DNA, 15 bp, Homo sapiens
ccacgcttaatcccc

SEQ ID NO: 596274 - DNA, 15 bp, Homo sapiens
cacgcttaatcccct

SEQ ID NO: 596275 - DNA, 15 bp, Homo sapiens
acgcttaatcccctt

SEQ ID NO: 596276 - DNA, 15 bp, Homo sapiens
cgcttaatccccttc

SEQ ID NO: 596277 - DNA, 15 bp, Homo sapiens
gcttaatccccttca

SEQ ID NO: 596278 - DNA, 15 bp, Homo sapiens
cttaatccccttcaa

SEQ ID NO: 596279 - DNA, 15 bp, Homo sapiens
ttaatccccttcaat

SEQ ID NO: 596280 - DNA, 15 bp, Homo sapiens
taatccccttcaatg

SEQ ID NO: 596281 - DNA, 15 bp, Homo sapiens
aatccccttcaatgt

SEQ ID NO: 596282 - DNA, 15 bp, Homo sapiens
atccccttcaatgtg

SEQ ID NO: 596283 - DNA, 15 bp, Homo sapiens
tccccttcaatgtgt

SEQ ID NO: 596284 - DNA, 15 bp, Homo sapiens
ccccttcaatgtgtg

SEQ ID NO: 596285 - DNA, 15 bp, Homo sapiens
cccttcaatgtgtga

SEQ ID NO: 596286 - DNA, 15 bp, Homo sapiens
ccttcaatgtgtgac

SEQ ID NO: 596287 - DNA, 15 bp, Homo sapiens
cttcaatgtgtgact

SEQ ID NO: 596288 - DNA, 15 bp, Homo sapiens
ttcaatgtgtgactt

SEQ ID NO: 596289 - DNA, 15 bp, Homo sapiens
tcaatgtgtgacttt

SEQ ID NO: 596290 - DNA, 15 bp, Homo sapiens
caatgtgtgactttc

SEQ ID NO: 596291 - DNA, 15 bp, Homo sapiens
aatgtgtgactttcc

SEQ ID NO: 596292 - DNA, 15 bp, Homo sapiens
atgtgtgactttccg

SEQ ID NO: 596293 - DNA, 15 bp, Homo sapiens
tgtgtgactttccgt

SEQ ID NO: 596294 - DNA, 15 bp, Homo sapiens
gtgtgactttccgtg

SEQ ID NO: 596295 - DNA, 15 bp, Homo sapiens
tgtgactttccgtgg

SEQ ID NO: 596296 - DNA, 15 bp, Homo sapiens
gtgactttccgtgga

SEQ ID NO: 596297 - DNA, 15 bp, Homo sapiens
tgactttccgtggaa

SEQ ID NO: 596298 - DNA, 15 bp, Homo sapiens
gactttccgtggaaa

SEQ ID NO: 596299 - DNA, 15 bp, Homo sapiens
actttccgtggaaag

SEQ ID NO: 596300 - DNA, 15 bp, Homo sapiens
ctttccgtggaaagt

SEQ ID NO: 596301 - DNA, 15 bp, Homo sapiens
tttccgtggaaagtt

SEQ ID NO: 596302 - DNA, 15 bp, Homo sapiens
ttccgtggaaagtta

SEQ ID NO: 596303 - DNA, 15 bp, Homo sapiens
tccgtggaaagttac

SEQ ID NO: 596304 - DNA, 15 bp, Homo sapiens
ccgtggaaagttact

SEQ ID NO: 596305 - DNA, 15 bp, Homo sapiens
cgtggaaagttactc

SEQ ID NO: 596306 - DNA, 15 bp, Homo sapiens
gtggaaagttactct

SEQ ID NO: 596307 - DNA, 15 bp, Homo sapiens
tggaaagttactcta

SEQ ID NO: 596308 - DNA, 15 bp, Homo sapiens
ggaaagttactctac

SEQ ID NO: 596309 - DNA, 15 bp, Homo sapiens
gaaagttactctacg

SEQ ID NO: 596310 - DNA, 15 bp, Homo sapiens
aaagttactctacga

SEQ ID NO: 596311 - DNA, 15 bp, Homo sapiens
aagttactctacgat

SEQ ID NO: 596312 - DNA, 15 bp, Homo sapiens
agttactctacgatt

SEQ ID NO: 596313 - DNA, 15 bp, Homo sapiens
gttactctacgattt

SEQ ID NO: 596314 - DNA, 15 bp, Homo sapiens
ttactctacgatttt

SEQ ID NO: 596315 - DNA, 15 bp, Homo sapiens
tactctacgattttc

SEQ ID NO: 596316 - DNA, 15 bp, Homo sapiens
actctacgattttcc

SEQ ID NO: 596317 - DNA, 15 bp, Homo sapiens
ctctacgattttccc

SEQ ID NO: 596318 - DNA, 15 bp, Homo sapiens
tctacgattttccca

SEQ ID NO: 596319 - DNA, 15 bp, Homo sapiens
ctacgattttcccag

SEQ ID NO: 596320 - DNA, 15 bp, Homo sapiens
tacgattttcccagc

SEQ ID NO: 596321 - DNA, 15 bp, Homo sapiens
acgattttcccagct

SEQ ID NO: 596322 - DNA, 15 bp, Homo sapiens
cgattttcccagctc

SEQ ID NO: 596323 - DNA, 15 bp, Homo sapiens
gattttcccagctcg

SEQ ID NO: 596324 - DNA, 15 bp, Homo sapiens
attttcccagctcgt

SEQ ID NO: 596325 - DNA, 15 bp, Homo sapiens
ttttcccagctcgtc

SEQ ID NO: 596326 - DNA, 15 bp, Homo sapiens
tttcccagctcgtca

SEQ ID NO: 596327 - DNA, 15 bp, Homo sapiens
ttcccagctcgtcag

SEQ ID NO: 596328 - DNA, 15 bp, Homo sapiens
tcccagctcgtcagg

SEQ ID NO: 596329 - DNA, 15 bp, Homo sapiens
cccagctcgtcaggg

SEQ ID NO: 596330 - DNA, 15 bp, Homo sapiens
ccagctcgtcagggt

SEQ ID NO: 596331 - DNA, 15 bp, Homo sapiens
cagctcgtcagggtg

SEQ ID NO: 596332 - DNA, 15 bp, Homo sapiens
agctcgtcagggtgg

SEQ ID NO: 596333 - DNA, 15 bp, Homo sapiens
gctcgtcagggtggg

SEQ ID NO: 596334 - DNA, 15 bp, Homo sapiens
ctcgtcagggtgggg

SEQ ID NO: 596335 - DNA, 15 bp, Homo sapiens
tcgtcagggtggggc

SEQ ID NO: 596336 - DNA, 15 bp, Homo sapiens
cgtcagggtggggcc

SEQ ID NO: 596337 - DNA, 15 bp, Homo sapiens
gtcagggtggggccc

SEQ ID NO: 596338 - DNA, 15 bp, Homo sapiens
tcagggtggggcccc

SEQ ID NO: 596339 - DNA, 15 bp, Homo sapiens
cagggtggggcccca

SEQ ID NO: 596340 - DNA, 15 bp, Homo sapiens
agggtggggccccag

SEQ ID NO: 596341 - DNA, 15 bp, Homo sapiens
gggtggggccccaga

SEQ ID NO: 596342 - DNA, 15 bp, Homo sapiens
ggtggggccccagag

SEQ ID NO: 596343 - DNA, 15 bp, Homo sapiens
gtggggccccagagt

SEQ ID NO: 596344 - DNA, 15 bp, Homo sapiens
tggggccccagagtg

SEQ ID NO: 596345 - DNA, 15 bp, Homo sapiens
ggggccccagagtga

SEQ ID NO: 596346 - DNA, 15 bp, Homo sapiens
gggccccagagtgag

SEQ ID NO: 596347 - DNA, 15 bp, Homo sapiens
ggccccagagtgagt

SEQ ID NO: 596348 - DNA, 15 bp, Homo sapiens
gccccagagtgagta

SEQ ID NO: 596349 - DNA, 15 bp, Homo sapiens
ccccagagtgagtat

SEQ ID NO: 596350 - DNA, 15 bp, Homo sapiens
cccagagtgagtatg

SEQ ID NO: 596351 - DNA, 15 bp, Homo sapiens
ccagagtgagtatga

SEQ ID NO: 596352 - DNA, 15 bp, Homo sapiens
cagagtgagtatgaa

SEQ ID NO: 596353 - DNA, 15 bp, Homo sapiens
agagtgagtatgaag

SEQ ID NO: 596354 - DNA, 15 bp, Homo sapiens
gagtgagtatgaagg

SEQ ID NO: 596355 - DNA, 15 bp, Homo sapiens
agtgagtatgaaggg

SEQ ID NO: 596356 - DNA, 15 bp, Homo sapiens
gtgagtatgaagggt

SEQ ID NO: 596357 - DNA, 15 bp, Homo sapiens
tgagtatgaagggtc

SEQ ID NO: 596358 - DNA, 15 bp, Homo sapiens
gagtatgaagggtca

SEQ ID NO: 596359 - DNA, 15 bp, Homo sapiens
agtatgaagggtcag

SEQ ID NO: 596360 - DNA, 15 bp, Homo sapiens
gtatgaagggtcaga

SEQ ID NO: 596361 - DNA, 15 bp, Homo sapiens
tatgaagggtcagag

SEQ ID NO: 596362 - DNA, 15 bp, Homo sapiens
atgaagggtcagagc

SEQ ID NO: 596363 - DNA, 15 bp, Homo sapiens
tgaagggtcagagcc

SEQ ID NO: 596364 - DNA, 15 bp, Homo sapiens
gaagggtcagagcct

SEQ ID NO: 596365 - DNA, 15 bp, Homo sapiens
aagggtcagagccta

SEQ ID NO: 596366 - DNA, 15 bp, Homo sapiens
agggtcagagcctag

SEQ ID NO: 596367 - DNA, 15 bp, Homo sapiens
gggtcagagcctagg

SEQ ID NO: 596368 - DNA, 15 bp, Homo sapiens
ggtcagagcctaggg

SEQ ID NO: 596369 - DNA, 15 bp, Homo sapiens
gtcagagcctaggga

SEQ ID NO: 596370 - DNA, 15 bp, Homo sapiens
tcagagcctagggat

SEQ ID NO: 596371 - DNA, 15 bp, Homo sapiens
cagagcctagggatg

SEQ ID NO: 596372 - DNA, 15 bp, Homo sapiens
agagcctagggatgc

SEQ ID NO: 596373 - DNA, 15 bp, Homo sapiens
gagcctagggatgcc

SEQ ID NO: 596374 - DNA, 15 bp, Homo sapiens
agcctagggatgcca

SEQ ID NO: 596375 - DNA, 15 bp, Homo sapiens
gcctagggatgccac

SEQ ID NO: 596376 - DNA, 15 bp, Homo sapiens
cctagggatgccacc

SEQ ID NO: 596377 - DNA, 15 bp, Homo sapiens
ctagggatgccacca

SEQ ID NO: 596378 - DNA, 15 bp, Homo sapiens
tagggatgccaccat

SEQ ID NO: 596379 - DNA, 15 bp, Homo sapiens
agggatgccaccatc

SEQ ID NO: 596380 - DNA, 15 bp, Homo sapiens
gggatgccaccatca

SEQ ID NO: 596381 - DNA, 15 bp, Homo sapiens
ggatgccaccatcag

SEQ ID NO: 596382 - DNA, 15 bp, Homo sapiens
gatgccaccatcagt

SEQ ID NO: 596383 - DNA, 15 bp, Homo sapiens
atgccaccatcagtg

SEQ ID NO: 596384 - DNA, 15 bp, Homo sapiens
tgccaccatcagtga

SEQ ID NO: 596385 - DNA, 15 bp, Homo sapiens
gccaccatcagtgag

SEQ ID NO: 596386 - DNA, 15 bp, Homo sapiens
ccaccatcagtgaga

SEQ ID NO: 596387 - DNA, 15 bp, Homo sapiens
caccatcagtgagag

SEQ ID NO: 596388 - DNA, 15 bp, Homo sapiens
accatcagtgagagc

SEQ ID NO: 596389 - DNA, 15 bp, Homo sapiens
ccatcagtgagagcc

SEQ ID NO: 596390 - DNA, 15 bp, Homo sapiens
catcagtgagagccc

SEQ ID NO: 596391 - DNA, 15 bp, Homo sapiens
atcagtgagagccca

SEQ ID NO: 596392 - DNA, 15 bp, Homo sapiens
tcagtgagagcccag

SEQ ID NO: 596393 - DNA, 15 bp, Homo sapiens
cagtgagagcccagg

SEQ ID NO: 596394 - DNA, 15 bp, Homo sapiens
agtgagagcccagga

SEQ ID NO: 596395 - DNA, 15 bp, Homo sapiens
gtgagagcccaggac

SEQ ID NO: 596396 - DNA, 15 bp, Homo sapiens
tgagagcccaggacc

SEQ ID NO: 596397 - DNA, 15 bp, Homo sapiens
gagagcccaggaccc

SEQ ID NO: 596398 - DNA, 15 bp, Homo sapiens
agagcccaggacccc

SEQ ID NO: 596399 - DNA, 15 bp, Homo sapiens
gagcccaggacccca

SEQ ID NO: 596400 - DNA, 15 bp, Homo sapiens
agcccaggaccccag

SEQ ID NO: 596401 - DNA, 15 bp, Homo sapiens
gcccaggaccccaga

SEQ ID NO: 596402 - DNA, 15 bp, Homo sapiens
cccaggaccccagaa

SEQ ID NO: 596403 - DNA, 15 bp, Homo sapiens
ccaggaccccagaaa

SEQ ID NO: 596404 - DNA, 15 bp, Homo sapiens
caggaccccagaaaa

SEQ ID NO: 596405 - DNA, 15 bp, Homo sapiens
aggaccccagaaaag

SEQ ID NO: 596406 - DNA, 15 bp, Homo sapiens
ggaccccagaaaagg

SEQ ID NO: 596407 - DNA, 15 bp, Homo sapiens
gaccccagaaaaggt

SEQ ID NO: 596408 - DNA, 15 bp, Homo sapiens
accccagaaaaggtc

SEQ ID NO: 596409 - DNA, 15 bp, Homo sapiens
ccccagaaaaggtct

SEQ ID NO: 596410 - DNA, 15 bp, Homo sapiens
cccagaaaaggtctc

SEQ ID NO: 596411 - DNA, 15 bp, Homo sapiens
ccagaaaaggtctct

SEQ ID NO: 596412 - DNA, 15 bp, Homo sapiens
cagaaaaggtctctt

SEQ ID NO: 596413 - DNA, 15 bp, Homo sapiens
agaaaaggtctcttg

SEQ ID NO: 596414 - DNA, 15 bp, Homo sapiens
gaaaaggtctcttgg

SEQ ID NO: 596415 - DNA, 15 bp, Homo sapiens
aaaaggtctcttggc

SEQ ID NO: 596416 - DNA, 15 bp, Homo sapiens
aaaggtctcttggct

SEQ ID NO: 596417 - DNA, 15 bp, Homo sapiens
aaggtctcttggctc

SEQ ID NO: 596418 - DNA, 15 bp, Homo sapiens
aggtctcttggctca

SEQ ID NO: 596419 - DNA, 15 bp, Homo sapiens
ggtctcttggctcac

SEQ ID NO: 596420 - DNA, 15 bp, Homo sapiens
gtctcttggctcacc

SEQ ID NO: 596421 - DNA, 15 bp, Homo sapiens
tctcttggctcacca

SEQ ID NO: 596422 - DNA, 15 bp, Homo sapiens
ctcttggctcaccac

SEQ ID NO: 596423 - DNA, 15 bp, Homo sapiens
tcttggctcaccaca

SEQ ID NO: 596424 - DNA, 15 bp, Homo sapiens
cttggctcaccacac

SEQ ID NO: 596425 - DNA, 15 bp, Homo sapiens
ttggctcaccacact

SEQ ID NO: 596426 - DNA, 15 bp, Homo sapiens
tggctcaccacactg

SEQ ID NO: 596427 - DNA, 15 bp, Homo sapiens
ggctcaccacactgt

SEQ ID NO: 596428 - DNA, 15 bp, Homo sapiens
gctcaccacactgta

SEQ ID NO: 596429 - DNA, 15 bp, Homo sapiens
ctcaccacactgtag

SEQ ID NO: 596430 - DNA, 15 bp, Homo sapiens
tcaccacactgtagg

SEQ ID NO: 596431 - DNA, 15 bp, Homo sapiens
caccacactgtagga

SEQ ID NO: 596432 - DNA, 15 bp, Homo sapiens
accacactgtaggaa

SEQ ID NO: 596433 - DNA, 15 bp, Homo sapiens
ccacactgtaggaaa

SEQ ID NO: 596434 - DNA, 15 bp, Homo sapiens
cacactgtaggaaaa

SEQ ID NO: 596435 - DNA, 15 bp, Homo sapiens
actgtaggaaaaata

SEQ ID NO: 596436 - DNA, 15 bp, Homo sapiens
ctgtaggaaaaataa

SEQ ID NO: 596437 - DNA, 15 bp, Homo sapiens
tgtaggaaaaataaa

SEQ ID NO: 596438 - DNA, 15 bp, Homo sapiens
gtaggaaaaataaaa

SEQ ID NO: 596439 - DNA, 15 bp, Homo sapiens
taggaaaaataaaaa

SEQ ID NO: 596440 - DNA, 15 bp, Homo sapiens
aggaaaaataaaaag

SEQ ID NO: 596441 - DNA, 15 bp, Homo sapiens
ggaaaaataaaaagc

SEQ ID NO: 596442 - DNA, 15 bp, Homo sapiens
gaaaaataaaaagca

SEQ ID NO: 596443 - DNA, 15 bp, Homo sapiens
aaaaataaaaagcaa

SEQ ID NO: 596444 - DNA, 15 bp, Homo sapiens
aaaataaaaagcaat

SEQ ID NO: 596445 - DNA, 15 bp, Homo sapiens
aaataaaaagcaatg

SEQ ID NO: 596446 - DNA, 15 bp, Homo sapiens
aataaaaagcaatgt

SEQ ID NO: 596447 - DNA, 15 bp, Homo sapiens
ataaaaagcaatgta

SEQ ID NO: 596448 - DNA, 15 bp, Homo sapiens
taaaaagcaatgtag

SEQ ID NO: 596449 - DNA, 15 bp, Homo sapiens
aaaaagcaatgtagt

SEQ ID NO: 596450 - DNA, 15 bp, Homo sapiens
aaaagcaatgtagtc

SEQ ID NO: 596451 - DNA, 15 bp, Homo sapiens
aaagcaatgtagtcc

SEQ ID NO: 596452 - DNA, 15 bp, Homo sapiens
aagcaatgtagtcca

SEQ ID NO: 596453 - DNA, 15 bp, Homo sapiens
agcaatgtagtccaa

SEQ ID NO: 596454 - DNA, 15 bp, Homo sapiens
gcaatgtagtccaaa

SEQ ID NO: 596455 - DNA, 15 bp, Homo sapiens
caatgtagtccaaat

SEQ ID NO: 596456 - DNA, 15 bp, Homo sapiens
aatgtagtccaaatg

SEQ ID NO: 596457 - DNA, 15 bp, Homo sapiens
atgtagtccaaatgt

SEQ ID NO: 596458 - DNA, 15 bp, Homo sapiens
tgtagtccaaatgtc

SEQ ID NO: 596459 - DNA, 15 bp, Homo sapiens
gtagtccaaatgtct

SEQ ID NO: 596460 - DNA, 15 bp, Homo sapiens
tagtccaaatgtctc

SEQ ID NO: 596461 - DNA, 15 bp, Homo sapiens
agtccaaatgtctct

SEQ ID NO: 596462 - DNA, 15 bp, Homo sapiens
gtccaaatgtctcta

SEQ ID NO: 596463 - DNA, 15 bp, Homo sapiens
tccaaatgtctctat

SEQ ID NO: 596464 - DNA, 15 bp, Homo sapiens
ccaaatgtctctatc

SEQ ID NO: 596465 - DNA, 15 bp, Homo sapiens
caaatgtctctatcc

SEQ ID NO: 596466 - DNA, 15 bp, Homo sapiens
aaatgtctctatcca

SEQ ID NO: 596467 - DNA, 15 bp, Homo sapiens
aatgtctctatccaa

SEQ ID NO: 596468 - DNA, 15 bp, Homo sapiens
atgtctctatccaaa

SEQ ID NO: 596469 - DNA, 15 bp, Homo sapiens
tgtctctatccaaag

SEQ ID NO: 596470 - DNA, 15 bp, Homo sapiens
gtctctatccaaagt

SEQ ID NO: 596471 - DNA, 15 bp, Homo sapiens
tctctatccaaagtt

SEQ ID NO: 596472 - DNA, 15 bp, Homo sapiens
ctctatccaaagttt

SEQ ID NO: 596473 - DNA, 15 bp, Homo sapiens
tctatccaaagtttc

SEQ ID NO: 596474 - DNA, 15 bp, Homo sapiens
ctatccaaagtttca

SEQ ID NO: 596475 - DNA, 15 bp, Homo sapiens
tatccaaagtttcaa

SEQ ID NO: 596476 - DNA, 15 bp, Homo sapiens
atccaaagtttcaaa

SEQ ID NO: 596477 - DNA, 15 bp, Homo sapiens
tccaaagtttcaaaa

SEQ ID NO: 596478 - DNA, 15 bp, Homo sapiens
ccaaagtttcaaaaa

SEQ ID NO: 596479 - DNA, 15 bp, Homo sapiens
caaagtttcaaaaag

SEQ ID NO: 596480 - DNA, 15 bp, Homo sapiens
aaagtttcaaaaaga

SEQ ID NO: 596481 - DNA, 15 bp, Homo sapiens
aagtttcaaaaagaa

SEQ ID NO: 596482 - DNA, 15 bp, Homo sapiens
agtttcaaaaagaac

SEQ ID NO: 596483 - DNA, 15 bp, Homo sapiens
gtttcaaaaagaact

SEQ ID NO: 596484 - DNA, 15 bp, Homo sapiens
tttcaaaaagaactt

SEQ ID NO: 596485 - DNA, 15 bp, Homo sapiens
ttcaaaaagaacttg

SEQ ID NO: 596486 - DNA, 15 bp, Homo sapiens
tcaaaaagaacttga

SEQ ID NO: 596487 - DNA, 15 bp, Homo sapiens
caaaaagaacttgat

SEQ ID NO: 596488 - DNA, 15 bp, Homo sapiens
aaaaagaacttgatt

SEQ ID NO: 596489 - DNA, 15 bp, Homo sapiens
aaaagaacttgattt

SEQ ID NO: 596490 - DNA, 15 bp, Homo sapiens
aaagaacttgatttt

SEQ ID NO: 596491 - DNA, 15 bp, Homo sapiens
aagaacttgatttta

SEQ ID NO: 596492 - DNA, 15 bp, Homo sapiens
agaacttgattttag

SEQ ID NO: 596493 - DNA, 15 bp, Homo sapiens
gaacttgattttaga

SEQ ID NO: 596494 - DNA, 15 bp, Homo sapiens
aacttgattttagac

SEQ ID NO: 596495 - DNA, 15 bp, Homo sapiens
acttgattttagaca

SEQ ID NO: 596496 - DNA, 15 bp, Homo sapiens
cttgattttagacac

SEQ ID NO: 596497 - DNA, 15 bp, Homo sapiens
ttgattttagacacg

SEQ ID NO: 596498 - DNA, 15 bp, Homo sapiens
tgattttagacacgc

SEQ ID NO: 596499 - DNA, 15 bp, Homo sapiens
gattttagacacgct

SEQ ID NO: 596500 - DNA, 15 bp, Homo sapiens
attttagacacgctc

SEQ ID NO: 596501 - DNA, 15 bp, Homo sapiens
ttttagacacgctcc

SEQ ID NO: 596502 - DNA, 15 bp, Homo sapiens
tttagacacgctcct

SEQ ID NO: 596503 - DNA, 15 bp, Homo sapiens
ttagacacgctcctt

SEQ ID NO: 596504 - DNA, 15 bp, Homo sapiens
tagacacgctccttg

SEQ ID NO: 596505 - DNA, 15 bp, Homo sapiens
agacacgctccttga

SEQ ID NO: 596506 - DNA, 15 bp, Homo sapiens
gacacgctccttgac

SEQ ID NO: 596507 - DNA, 15 bp, Homo sapiens
acacgctccttgact

SEQ ID NO: 596508 - DNA, 15 bp, Homo sapiens
cacgctccttgactt

SEQ ID NO: 596509 - DNA, 15 bp, Homo sapiens
acgctccttgacttg

SEQ ID NO: 596510 - DNA, 15 bp, Homo sapiens
cgctccttgacttgt

SEQ ID NO: 596511 - DNA, 15 bp, Homo sapiens
gctccttgacttgtt

SEQ ID NO: 596512 - DNA, 15 bp, Homo sapiens
ctccttgacttgttt

SEQ ID NO: 596513 - DNA, 15 bp, Homo sapiens
tccttgacttgtttt

SEQ ID NO: 596514 - DNA, 15 bp, Homo sapiens
ccttgacttgttttc

SEQ ID NO: 596515 - DNA, 15 bp, Homo sapiens
cttgacttgttttca

SEQ ID NO: 596516 - DNA, 15 bp, Homo sapiens
ttgacttgttttcag

SEQ ID NO: 596517 - DNA, 15 bp, Homo sapiens
tgacttgttttcaga

SEQ ID NO: 596518 - DNA, 15 bp, Homo sapiens
gacttgttttcagaa

SEQ ID NO: 596519 - DNA, 15 bp, Homo sapiens
acttgttttcagaat

SEQ ID NO: 596520 - DNA, 15 bp, Homo sapiens
cttgttttcagaatc

SEQ ID NO: 596521 - DNA, 15 bp, Homo sapiens
ttgttttcagaatca

SEQ ID NO: 596522 - DNA, 15 bp, Homo sapiens
tgttttcagaatcag

SEQ ID NO: 596523 - DNA, 15 bp, Homo sapiens
gttttcagaatcaga

SEQ ID NO: 596524 - DNA, 15 bp, Homo sapiens
ttttcagaatcagac

SEQ ID NO: 596525 - DNA, 15 bp, Homo sapiens
tttcagaatcagaca

SEQ ID NO: 596526 - DNA, 15 bp, Homo sapiens
ttcagaatcagacag

SEQ ID NO: 596527 - DNA, 15 bp, Homo sapiens
tcagaatcagacaga

SEQ ID NO: 596528 - DNA, 15 bp, Homo sapiens
cagaatcagacagaa

SEQ ID NO: 596529 - DNA, 15 bp, Homo sapiens
agaatcagacagaag

SEQ ID NO: 596530 - DNA, 15 bp, Homo sapiens
gaatcagacagaaga

SEQ ID NO: 596531 - DNA, 15 bp, Homo sapiens
aatcagacagaagag

SEQ ID NO: 596532 - DNA, 15 bp, Homo sapiens
atcagacagaagagt

SEQ ID NO: 596533 - DNA, 15 bp, Homo sapiens
tcagacagaagagtg

SEQ ID NO: 596534 - DNA, 15 bp, Homo sapiens
cagacagaagagtga

SEQ ID NO: 596535 - DNA, 15 bp, Homo sapiens
agacagaagagtgag

SEQ ID NO: 596536 - DNA, 15 bp, Homo sapiens
gacagaagagtgagg

SEQ ID NO: 596537 - DNA, 15 bp, Homo sapiens
acagaagagtgaggc

SEQ ID NO: 596538 - DNA, 15 bp, Homo sapiens
cagaagagtgaggca

SEQ ID NO: 596539 - DNA, 15 bp, Homo sapiens
agaagagtgaggcaa

SEQ ID NO: 596540 - DNA, 15 bp, Homo sapiens
gaagagtgaggcaac

SEQ ID NO: 596541 - DNA, 15 bp, Homo sapiens
aagagtgaggcaaca

SEQ ID NO: 596542 - DNA, 15 bp, Homo sapiens
agagtgaggcaacaa

SEQ ID NO: 596543 - DNA, 15 bp, Homo sapiens
gagtgaggcaacaaa

SEQ ID NO: 596544 - DNA, 15 bp, Homo sapiens
agtgaggcaacaaag

SEQ ID NO: 596545 - DNA, 15 bp, Homo sapiens
gtgaggcaacaaagg

SEQ ID NO: 596546 - DNA, 15 bp, Homo sapiens
tgaggcaacaaaggt

SEQ ID NO: 596547 - DNA, 15 bp, Homo sapiens
gaggcaacaaaggtc

SEQ ID NO: 596548 - DNA, 15 bp, Homo sapiens
aggcaacaaaggtcc

SEQ ID NO: 596549 - DNA, 15 bp, Homo sapiens
ggcaacaaaggtccc

SEQ ID NO: 596550 - DNA, 15 bp, Homo sapiens
gcaacaaaggtccct

SEQ ID NO: 596551 - DNA, 15 bp, Homo sapiens
caacaaaggtccctt

SEQ ID NO: 596552 - DNA, 15 bp, Homo sapiens
aacaaaggtccctta

SEQ ID NO: 596553 - DNA, 15 bp, Homo sapiens
acaaaggtcccttat

SEQ ID NO: 596554 - DNA, 15 bp, Homo sapiens
caaaggtcccttatt

SEQ ID NO: 596555 - DNA, 15 bp, Homo sapiens
aaaggtcccttattc

SEQ ID NO: 596556 - DNA, 15 bp, Homo sapiens
aaggtcccttattcc

SEQ ID NO: 596557 - DNA, 15 bp, Homo sapiens
aggtcccttattcca

SEQ ID NO: 596558 - DNA, 15 bp, Homo sapiens
ggtcccttattccag

SEQ ID NO: 596559 - DNA, 15 bp, Homo sapiens
gtcccttattccagg

SEQ ID NO: 596560 - DNA, 15 bp, Homo sapiens
tcccttattccaggc

SEQ ID NO: 596561 - DNA, 15 bp, Homo sapiens
cccttattccaggca

SEQ ID NO: 596562 - DNA, 15 bp, Homo sapiens
ccttattccaggcag

SEQ ID NO: 596563 - DNA, 15 bp, Homo sapiens
cttattccaggcagc

SEQ ID NO: 596564 - DNA, 15 bp, Homo sapiens
ttattccaggcagct

SEQ ID NO: 596565 - DNA, 15 bp, Homo sapiens
tattccaggcagctg

SEQ ID NO: 596566 - DNA, 15 bp, Homo sapiens
attccaggcagctga

SEQ ID NO: 596567 - DNA, 15 bp, Homo sapiens
ttccaggcagctgaa

SEQ ID NO: 596568 - DNA, 15 bp, Homo sapiens
tccaggcagctgaat

SEQ ID NO: 596569 - DNA, 15 bp, Homo sapiens
ccaggcagctgaata

SEQ ID NO: 596570 - DNA, 15 bp, Homo sapiens
caggcagctgaatac

SEQ ID NO: 596571 - DNA, 15 bp, Homo sapiens
aggcagctgaatacc

SEQ ID NO: 596572 - DNA, 15 bp, Homo sapiens
ggcagctgaatacca

SEQ ID NO: 596573 - DNA, 15 bp, Homo sapiens
gcagctgaataccag

SEQ ID NO: 596574 - DNA, 15 bp, Homo sapiens
cagctgaataccagc

SEQ ID NO: 596575 - DNA, 15 bp, Homo sapiens
agctgaataccagca

SEQ ID NO: 596576 - DNA, 15 bp, Homo sapiens
gctgaataccagcac

SEQ ID NO: 596577 - DNA, 15 bp, Homo sapiens
ctgaataccagcaca

SEQ ID NO: 596578 - DNA, 15 bp, Homo sapiens
tgaataccagcacag

SEQ ID NO: 596579 - DNA, 15 bp, Homo sapiens
gaataccagcacagc

SEQ ID NO: 596580 - DNA, 15 bp, Homo sapiens
aataccagcacagcc

SEQ ID NO: 596581 - DNA, 15 bp, Homo sapiens
ataccagcacagcca

SEQ ID NO: 596582 - DNA, 15 bp, Homo sapiens
taccagcacagccag

SEQ ID NO: 596583 - DNA, 15 bp, Homo sapiens
accagcacagccagg

SEQ ID NO: 596584 - DNA, 15 bp, Homo sapiens
ccagcacagccagga

SEQ ID NO: 596585 - DNA, 15 bp, Homo sapiens
cagcacagccaggag

SEQ ID NO: 596586 - DNA, 15 bp, Homo sapiens
agcacagccaggagt

SEQ ID NO: 596587 - DNA, 15 bp, Homo sapiens
gcacagccaggagtc

SEQ ID NO: 596588 - DNA, 15 bp, Homo sapiens
cacagccaggagtcc

SEQ ID NO: 596589 - DNA, 15 bp, Homo sapiens
acagccaggagtcca

SEQ ID NO: 596590 - DNA, 15 bp, Homo sapiens
cagccaggagtccag

SEQ ID NO: 596591 - DNA, 15 bp, Homo sapiens
agccaggagtccagt

SEQ ID NO: 596592 - DNA, 15 bp, Homo sapiens
gccaggagtccagtg

SEQ ID NO: 596593 - DNA, 15 bp, Homo sapiens
ccaggagtccagtgc

SEQ ID NO: 596594 - DNA, 15 bp, Homo sapiens
caggagtccagtgct

SEQ ID NO: 596595 - DNA, 15 bp, Homo sapiens
aggagtccagtgctg

SEQ ID NO: 596596 - DNA, 15 bp, Homo sapiens
ggagtccagtgctgg

SEQ ID NO: 596597 - DNA, 15 bp, Homo sapiens
gagtccagtgctggt

SEQ ID NO: 596598 - DNA, 15 bp, Homo sapiens
agtccagtgctggtg

SEQ ID NO: 596599 - DNA, 15 bp, Homo sapiens
gtccagtgctggtgt

SEQ ID NO: 596600 - DNA, 15 bp, Homo sapiens
tccagtgctggtgtt

SEQ ID NO: 596601 - DNA, 15 bp, Homo sapiens
ccagtgctggtgttt

SEQ ID NO: 596602 - DNA, 15 bp, Homo sapiens
cagtgctggtgtttg

SEQ ID NO: 596603 - DNA, 15 bp, Homo sapiens
agtgctggtgtttgc

SEQ ID NO: 596604 - DNA, 15 bp, Homo sapiens
gtgctggtgtttgca

SEQ ID NO: 596605 - DNA, 15 bp, Homo sapiens
tgctggtgtttgcag

SEQ ID NO: 596606 - DNA, 15 bp, Homo sapiens
gctggtgtttgcaga

SEQ ID NO: 596607 - DNA, 15 bp, Homo sapiens
ctggtgtttgcagag

SEQ ID NO: 596608 - DNA, 15 bp, Homo sapiens
tggtgtttgcagagc

SEQ ID NO: 596609 - DNA, 15 bp, Homo sapiens
ggtgtttgcagagcc

SEQ ID NO: 596610 - DNA, 15 bp, Homo sapiens
gtgtttgcagagcca

SEQ ID NO: 596611 - DNA, 15 bp, Homo sapiens
tgtttgcagagccac

SEQ ID NO: 596612 - DNA, 15 bp, Homo sapiens
gtttgcagagccacc

SEQ ID NO: 596613 - DNA, 15 bp, Homo sapiens
tttgcagagccacca

SEQ ID NO: 596614 - DNA, 15 bp, Homo sapiens
ttgcagagccaccag

SEQ ID NO: 596615 - DNA, 15 bp, Homo sapiens
tgcagagccaccaga

SEQ ID NO: 596616 - DNA, 15 bp, Homo sapiens
gcagagccaccagag

SEQ ID NO: 596617 - DNA, 15 bp, Homo sapiens
cagagccaccagagg

SEQ ID NO: 596618 - DNA, 15 bp, Homo sapiens
agagccaccagaggc

SEQ ID NO: 596619 - DNA, 15 bp, Homo sapiens
gagccaccagaggct

SEQ ID NO: 596620 - DNA, 15 bp, Homo sapiens
agccaccagaggctc

SEQ ID NO: 596621 - DNA, 15 bp, Homo sapiens
gccaccagaggctcc

SEQ ID NO: 596622 - DNA, 15 bp, Homo sapiens
ccaccagaggctccc

SEQ ID NO: 596623 - DNA, 15 bp, Homo sapiens
caccagaggctccct

SEQ ID NO: 596624 - DNA, 15 bp, Homo sapiens
accagaggctccctc

SEQ ID NO: 596625 - DNA, 15 bp, Homo sapiens
ccagaggctccctct

SEQ ID NO: 596626 - DNA, 15 bp, Homo sapiens
cagaggctccctctc

SEQ ID NO: 596627 - DNA, 15 bp, Homo sapiens
agaggctccctctca

SEQ ID NO: 596628 - DNA, 15 bp, Homo sapiens
gaggctccctctcag

SEQ ID NO: 596629 - DNA, 15 bp, Homo sapiens
aggctccctctcagg

SEQ ID NO: 596630 - DNA, 15 bp, Homo sapiens
ggctccctctcaggt

SEQ ID NO: 596631 - DNA, 15 bp, Homo sapiens
gctccctctcaggtg

SEQ ID NO: 596632 - DNA, 15 bp, Homo sapiens
ctccctctcaggtgt

SEQ ID NO: 596633 - DNA, 15 bp, Homo sapiens
tccctctcaggtgtc

SEQ ID NO: 596634 - DNA, 15 bp, Homo sapiens
ccctctcaggtgtcc

SEQ ID NO: 596635 - DNA, 15 bp, Homo sapiens
cctctcaggtgtcca

SEQ ID NO: 596636 - DNA, 15 bp, Homo sapiens
ctctcaggtgtccag

SEQ ID NO: 596637 - DNA, 15 bp, Homo sapiens
tctcaggtgtccagg

SEQ ID NO: 596638 - DNA, 15 bp, Homo sapiens
ctcaggtgtccaggg

SEQ ID NO: 596639 - DNA, 15 bp, Homo sapiens
tcaggtgtccagggc

SEQ ID NO: 596640 - DNA, 15 bp, Homo sapiens
caggtgtccagggcc

SEQ ID NO: 596641 - DNA, 15 bp, Homo sapiens
aggtgtccagggccc

SEQ ID NO: 596642 - DNA, 15 bp, Homo sapiens
ggtgtccagggcccg

SEQ ID NO: 596643 - DNA, 15 bp, Homo sapiens
gtgtccagggcccgc

SEQ ID NO: 596644 - DNA, 15 bp, Homo sapiens
tgtccagggcccgca

SEQ ID NO: 596645 - DNA, 15 bp, Homo sapiens
gtccagggcccgcat

SEQ ID NO: 596646 - DNA, 15 bp, Homo sapiens
tccagggcccgcatg

SEQ ID NO: 596647 - DNA, 15 bp, Homo sapiens
ccagggcccgcatgc

SEQ ID NO: 596648 - DNA, 15 bp, Homo sapiens
cagggcccgcatgct

SEQ ID NO: 596649 - DNA, 15 bp, Homo sapiens
agggcccgcatgctt

SEQ ID NO: 596650 - DNA, 15 bp, Homo sapiens
gggcccgcatgcttt

SEQ ID NO: 596651 - DNA, 15 bp, Homo sapiens
ggcccgcatgctttg

SEQ ID NO: 596652 - DNA, 15 bp, Homo sapiens
gcccgcatgctttgt

SEQ ID NO: 596653 - DNA, 15 bp, Homo sapiens
cccgcatgctttgta

SEQ ID NO: 596654 - DNA, 15 bp, Homo sapiens
ccgcatgctttgtag

SEQ ID NO: 596655 - DNA, 15 bp, Homo sapiens
cgcatgctttgtaga

SEQ ID NO: 596656 - DNA, 15 bp, Homo sapiens
gcatgctttgtagaa

SEQ ID NO: 596657 - DNA, 15 bp, Homo sapiens
catgctttgtagaat

SEQ ID NO: 596658 - DNA, 15 bp, Homo sapiens
atgctttgtagaatg

SEQ ID NO: 596659 - DNA, 15 bp, Homo sapiens
tgctttgtagaatgg

SEQ ID NO: 596660 - DNA, 15 bp, Homo sapiens
gctttgtagaatggg

SEQ ID NO: 596661 - DNA, 15 bp, Homo sapiens
ctttgtagaatgggc

SEQ ID NO: 596662 - DNA, 15 bp, Homo sapiens
tttgtagaatgggca

SEQ ID NO: 596663 - DNA, 15 bp, Homo sapiens
ttgtagaatgggcag

SEQ ID NO: 596664 - DNA, 15 bp, Homo sapiens
tgtagaatgggcaga

SEQ ID NO: 596665 - DNA, 15 bp, Homo sapiens
gtagaatgggcagaa

SEQ ID NO: 596666 - DNA, 15 bp, Homo sapiens
tagaatgggcagaat

SEQ ID NO: 596667 - DNA, 15 bp, Homo sapiens
agaatgggcagaatg

SEQ ID NO: 596668 - DNA, 15 bp, Homo sapiens
gaatgggcagaatga

SEQ ID NO: 596669 - DNA, 15 bp, Homo sapiens
aatgggcagaatgag

SEQ ID NO: 596670 - DNA, 15 bp, Homo sapiens
atgggcagaatgagc

SEQ ID NO: 596671 - DNA, 15 bp, Homo sapiens
tgggcagaatgagca

SEQ ID NO: 596672 - DNA, 15 bp, Homo sapiens
gggcagaatgagcaa

SEQ ID NO: 596673 - DNA, 15 bp, Homo sapiens
ggcagaatgagcaat

SEQ ID NO: 596674 - DNA, 15 bp, Homo sapiens
gcagaatgagcaatg

SEQ ID NO: 596675 - DNA, 15 bp, Homo sapiens
cagaatgagcaatgt

SEQ ID NO: 596676 - DNA, 15 bp, Homo sapiens
agaatgagcaatgtc

SEQ ID NO: 596677 - DNA, 15 bp, Homo sapiens
gaatgagcaatgtct

SEQ ID NO: 596678 - DNA, 15 bp, Homo sapiens
aatgagcaatgtctg

SEQ ID NO: 596679 - DNA, 15 bp, Homo sapiens
atgagcaatgtctgt

SEQ ID NO: 596680 - DNA, 15 bp, Homo sapiens
tgagcaatgtctgtg

SEQ ID NO: 596681 - DNA, 15 bp, Homo sapiens
gagcaatgtctgtgc

SEQ ID NO: 596682 - DNA, 15 bp, Homo sapiens
agcaatgtctgtgca

SEQ ID NO: 596683 - DNA, 15 bp, Homo sapiens
gcaatgtctgtgcac

SEQ ID NO: 596684 - DNA, 15 bp, Homo sapiens
caatgtctgtgcacc

SEQ ID NO: 596685 - DNA, 15 bp, Homo sapiens
aatgtctgtgcacct

SEQ ID NO: 596686 - DNA, 15 bp, Homo sapiens
atgtctgtgcacctg

SEQ ID NO: 596687 - DNA, 15 bp, Homo sapiens
tgtctgtgcacctgg

SEQ ID NO: 596688 - DNA, 15 bp, Homo sapiens
gtctgtgcacctggg

SEQ ID NO: 596689 - DNA, 15 bp, Homo sapiens
tctgtgcacctgggc

SEQ ID NO: 596690 - DNA, 15 bp, Homo sapiens
ctgtgcacctgggct

SEQ ID NO: 596691 - DNA, 15 bp, Homo sapiens
tgtgcacctgggctt

SEQ ID NO: 596692 - DNA, 15 bp, Homo sapiens
gtgcacctgggcttt

SEQ ID NO: 596693 - DNA, 15 bp, Homo sapiens
tgcacctgggctttg

SEQ ID NO: 596694 - DNA, 15 bp, Homo sapiens
gcacctgggctttgc

SEQ ID NO: 596695 - DNA, 15 bp, Homo sapiens
cacctgggctttgca

SEQ ID NO: 596696 - DNA, 15 bp, Homo sapiens
acctgggctttgcag

SEQ ID NO: 596697 - DNA, 15 bp, Homo sapiens
cctgggctttgcagg

SEQ ID NO: 596698 - DNA, 15 bp, Homo sapiens
ctgggctttgcaggc

SEQ ID NO: 596699 - DNA, 15 bp, Homo sapiens
tgggctttgcaggca

SEQ ID NO: 596700 - DNA, 15 bp, Homo sapiens
gggctttgcaggcag

SEQ ID NO: 596701 - DNA, 15 bp, Homo sapiens
ggctttgcaggcagg

SEQ ID NO: 596702 - DNA, 15 bp, Homo sapiens
gctttgcaggcaggg

SEQ ID NO: 596703 - DNA, 15 bp, Homo sapiens
ctttgcaggcagggc

SEQ ID NO: 596704 - DNA, 15 bp, Homo sapiens
tttgcaggcagggcc

SEQ ID NO: 596705 - DNA, 15 bp, Homo sapiens
ttgcaggcagggcct

SEQ ID NO: 596706 - DNA, 15 bp, Homo sapiens
tgcaggcagggcctg

SEQ ID NO: 596707 - DNA, 15 bp, Homo sapiens
gcaggcagggcctgg

SEQ ID NO: 596708 - DNA, 15 bp, Homo sapiens
caggcagggcctggg

SEQ ID NO: 596709 - DNA, 15 bp, Homo sapiens
aggcagggcctgggt

SEQ ID NO: 596710 - DNA, 15 bp, Homo sapiens
ggcagggcctgggta

SEQ ID NO: 596711 - DNA, 15 bp, Homo sapiens
gcagggcctgggtac

SEQ ID NO: 596712 - DNA, 15 bp, Homo sapiens
cagggcctgggtacc

SEQ ID NO: 596713 - DNA, 15 bp, Homo sapiens
agggcctgggtaccc

SEQ ID NO: 596714 - DNA, 15 bp, Homo sapiens
gggcctgggtaccca

SEQ ID NO: 596715 - DNA, 15 bp, Homo sapiens
ggcctgggtacccag

SEQ ID NO: 596716 - DNA, 15 bp, Homo sapiens
gcctgggtacccagg

SEQ ID NO: 596717 - DNA, 15 bp, Homo sapiens
cctgggtacccaggt

SEQ ID NO: 596718 - DNA, 15 bp, Homo sapiens
ctgggtacccaggtt

SEQ ID NO: 596719 - DNA, 15 bp, Homo sapiens
tgggtacccaggttc

SEQ ID NO: 596720 - DNA, 15 bp, Homo sapiens
gggtacccaggttcg

SEQ ID NO: 596721 - DNA, 15 bp, Homo sapiens
ggtacccaggttcgt

SEQ ID NO: 596722 - DNA, 15 bp, Homo sapiens
gtacccaggttcgtg

SEQ ID NO: 596723 - DNA, 15 bp, Homo sapiens
tacccaggttcgtgc

SEQ ID NO: 596724 - DNA, 15 bp, Homo sapiens
acccaggttcgtgca

SEQ ID NO: 596725 - DNA, 15 bp, Homo sapiens
cccaggttcgtgcaa

SEQ ID NO: 596726 - DNA, 15 bp, Homo sapiens
ccaggttcgtgcaat

SEQ ID NO: 596727 - DNA, 15 bp, Homo sapiens
caggttcgtgcaatc

SEQ ID NO: 596728 - DNA, 15 bp, Homo sapiens
aggttcgtgcaatcc

SEQ ID NO: 596729 - DNA, 15 bp, Homo sapiens
ggttcgtgcaatcct

SEQ ID NO: 596730 - DNA, 15 bp, Homo sapiens
gttcgtgcaatcctc

SEQ ID NO: 596731 - DNA, 15 bp, Homo sapiens
ttcgtgcaatcctct

SEQ ID NO: 596732 - DNA, 15 bp, Homo sapiens
tcgtgcaatcctctc

SEQ ID NO: 596733 - DNA, 15 bp, Homo sapiens
cgtgcaatcctctcg

SEQ ID NO: 596734 - DNA, 15 bp, Homo sapiens
gtgcaatcctctcgt

SEQ ID NO: 596735 - DNA, 15 bp, Homo sapiens
tgcaatcctctcgtc

SEQ ID NO: 596736 - DNA, 15 bp, Homo sapiens
gcaatcctctcgtca

SEQ ID NO: 596737 - DNA, 15 bp, Homo sapiens
caatcctctcgtcac

SEQ ID NO: 596738 - DNA, 15 bp, Homo sapiens
aatcctctcgtcacc

SEQ ID NO: 596739 - DNA, 15 bp, Homo sapiens
atcctctcgtcacca

SEQ ID NO: 596740 - DNA, 15 bp, Homo sapiens
tcctctcgtcaccat

SEQ ID NO: 596741 - DNA, 15 bp, Homo sapiens
cctctcgtcaccatg

SEQ ID NO: 596742 - DNA, 15 bp, Homo sapiens
ctctcgtcaccatga

SEQ ID NO: 596743 - DNA, 15 bp, Homo sapiens
tctcgtcaccatgaa

SEQ ID NO: 596744 - DNA, 15 bp, Homo sapiens
ctcgtcaccatgaag

SEQ ID NO: 596745 - DNA, 15 bp, Homo sapiens
tcgtcaccatgaagg

SEQ ID NO: 596746 - DNA, 15 bp, Homo sapiens
cgtcaccatgaaggg

SEQ ID NO: 596747 - DNA, 15 bp, Homo sapiens
gtcaccatgaaggga

SEQ ID NO: 596748 - DNA, 15 bp, Homo sapiens
tcaccatgaagggag

SEQ ID NO: 596749 - DNA, 15 bp, Homo sapiens
caccatgaagggagc

SEQ ID NO: 596750 - DNA, 15 bp, Homo sapiens
accatgaagggagca

SEQ ID NO: 596751 - DNA, 15 bp, Homo sapiens
ccatgaagggagcag

SEQ ID NO: 596752 - DNA, 15 bp, Homo sapiens
catgaagggagcagc

SEQ ID NO: 596753 - DNA, 15 bp, Homo sapiens
atgaagggagcagca

SEQ ID NO: 596754 - DNA, 15 bp, Homo sapiens
tgaagggagcagcat

SEQ ID NO: 596755 - DNA, 15 bp, Homo sapiens
gaagggagcagcatc

SEQ ID NO: 596756 - DNA, 15 bp, Homo sapiens
aagggagcagcatca

SEQ ID NO: 596757 - DNA, 15 bp, Homo sapiens
agggagcagcatcat

SEQ ID NO: 596758 - DNA, 15 bp, Homo sapiens
gggagcagcatcatt

SEQ ID NO: 596759 - DNA, 15 bp, Homo sapiens
ggagcagcatcattc

SEQ ID NO: 596760 - DNA, 15 bp, Homo sapiens
gagcagcatcattct

SEQ ID NO: 596761 - DNA, 15 bp, Homo sapiens
agcagcatcattctt

SEQ ID NO: 596762 - DNA, 15 bp, Homo sapiens
gcagcatcattcttc

SEQ ID NO: 596763 - DNA, 15 bp, Homo sapiens
cagcatcattcttcc

SEQ ID NO: 596764 - DNA, 15 bp, Homo sapiens
agcatcattcttccc

SEQ ID NO: 596765 - DNA, 15 bp, Homo sapiens
gcatcattcttccct

SEQ ID NO: 596766 - DNA, 15 bp, Homo sapiens
catcattcttccctt

SEQ ID NO: 596767 - DNA, 15 bp, Homo sapiens
atcattcttcccttc

SEQ ID NO: 596768 - DNA, 15 bp, Homo sapiens
tcattcttcccttct

SEQ ID NO: 596769 - DNA, 15 bp, Homo sapiens
cattcttcccttctt

SEQ ID NO: 596770 - DNA, 15 bp, Homo sapiens
attcttcccttcttg

SEQ ID NO: 596771 - DNA, 15 bp, Homo sapiens
ttcttcccttcttga

SEQ ID NO: 596772 - DNA, 15 bp, Homo sapiens
tcttcccttcttgaa

SEQ ID NO: 596773 - DNA, 15 bp, Homo sapiens
cttcccttcttgaag

SEQ ID NO: 596774 - DNA, 15 bp, Homo sapiens
ttcccttcttgaagc

SEQ ID NO: 596775 - DNA, 15 bp, Homo sapiens
tcccttcttgaagca

SEQ ID NO: 596776 - DNA, 15 bp, Homo sapiens
cccttcttgaagcac

SEQ ID NO: 596777 - DNA, 15 bp, Homo sapiens
ccttcttgaagcacc

SEQ ID NO: 596778 - DNA, 15 bp, Homo sapiens
cttcttgaagcacct

SEQ ID NO: 596779 - DNA, 15 bp, Homo sapiens
ttcttgaagcacctt

SEQ ID NO: 596780 - DNA, 15 bp, Homo sapiens
tcttgaagcaccttg

SEQ ID NO: 596781 - DNA, 15 bp, Homo sapiens
cttgaagcaccttgg

SEQ ID NO: 596782 - DNA, 15 bp, Homo sapiens
ttgaagcaccttggc

SEQ ID NO: 596783 - DNA, 15 bp, Homo sapiens
tgaagcaccttggcc

SEQ ID NO: 596784 - DNA, 15 bp, Homo sapiens
gaagcaccttggcca

SEQ ID NO: 596785 - DNA, 15 bp, Homo sapiens
aagcaccttggccac

SEQ ID NO: 596786 - DNA, 15 bp, Homo sapiens
agcaccttggccacc

SEQ ID NO: 596787 - DNA, 15 bp, Homo sapiens
gcaccttggccacca

SEQ ID NO: 596788 - DNA, 15 bp, Homo sapiens
caccttggccaccag

SEQ ID NO: 596789 - DNA, 15 bp, Homo sapiens
accttggccaccagt

SEQ ID NO: 596790 - DNA, 15 bp, Homo sapiens
ccttggccaccagta

SEQ ID NO: 596791 - DNA, 15 bp, Homo sapiens
cttggccaccagtat

SEQ ID NO: 596792 - DNA, 15 bp, Homo sapiens
ttggccaccagtata

SEQ ID NO: 596793 - DNA, 15 bp, Homo sapiens
tggccaccagtatag

SEQ ID NO: 596794 - DNA, 15 bp, Homo sapiens
ggccaccagtatagg

SEQ ID NO: 596795 - DNA, 15 bp, Homo sapiens
gccaccagtataggt

SEQ ID NO: 596796 - DNA, 15 bp, Homo sapiens
ccaccagtataggta

SEQ ID NO: 596797 - DNA, 15 bp, Homo sapiens
caccagtataggtaa

SEQ ID NO: 596798 - DNA, 15 bp, Homo sapiens
accagtataggtaaa

SEQ ID NO: 596799 - DNA, 15 bp, Homo sapiens
ccagtataggtaaat

SEQ ID NO: 596800 - DNA, 15 bp, Homo sapiens
cagtataggtaaatt

SEQ ID NO: 596801 - DNA, 15 bp, Homo sapiens
agtataggtaaattt

SEQ ID NO: 596802 - DNA, 15 bp, Homo sapiens
gtataggtaaattta

SEQ ID NO: 596803 - DNA, 15 bp, Homo sapiens
tataggtaaatttac

SEQ ID NO: 596804 - DNA, 15 bp, Homo sapiens
ataggtaaatttacc

SEQ ID NO: 596805 - DNA, 15 bp, Homo sapiens
taggtaaatttacct

SEQ ID NO: 596806 - DNA, 15 bp, Homo sapiens
aggtaaatttacctc

SEQ ID NO: 596807 - DNA, 15 bp, Homo sapiens
ggtaaatttacctcc

SEQ ID NO: 596808 - DNA, 15 bp, Homo sapiens
gtaaatttacctccc

SEQ ID NO: 596809 - DNA, 15 bp, Homo sapiens
taaatttacctccca

SEQ ID NO: 596810 - DNA, 15 bp, Homo sapiens
aaatttacctcccag

SEQ ID NO: 596811 - DNA, 15 bp, Homo sapiens
aatttacctcccagg

SEQ ID NO: 596812 - DNA, 15 bp, Homo sapiens
atttacctcccagga

SEQ ID NO: 596813 - DNA, 15 bp, Homo sapiens
tttacctcccaggac

SEQ ID NO: 596814 - DNA, 15 bp, Homo sapiens
ttacctcccaggaca

SEQ ID NO: 596815 - DNA, 15 bp, Homo sapiens
tacctcccaggacat

SEQ ID NO: 596816 - DNA, 15 bp, Homo sapiens
acctcccaggacatg

SEQ ID NO: 596817 - DNA, 15 bp, Homo sapiens
cctcccaggacatga

SEQ ID NO: 596818 - DNA, 15 bp, Homo sapiens
ctcccaggacatgac

SEQ ID NO: 596819 - DNA, 15 bp, Homo sapiens
tcccaggacatgacc

SEQ ID NO: 596820 - DNA, 15 bp, Homo sapiens
cccaggacatgacca

SEQ ID NO: 596821 - DNA, 15 bp, Homo sapiens
ccaggacatgaccat

SEQ ID NO: 596822 - DNA, 15 bp, Homo sapiens
caggacatgaccatt

SEQ ID NO: 596823 - DNA, 15 bp, Homo sapiens
aggacatgaccattg

SEQ ID NO: 596824 - DNA, 15 bp, Homo sapiens
ggacatgaccattga

SEQ ID NO: 596825 - DNA, 15 bp, Homo sapiens
gacatgaccattgat

SEQ ID NO: 596826 - DNA, 15 bp, Homo sapiens
acatgaccattgatt

SEQ ID NO: 596827 - DNA, 15 bp, Homo sapiens
catgaccattgattc

SEQ ID NO: 596828 - DNA, 15 bp, Homo sapiens
atgaccattgattct

SEQ ID NO: 596829 - DNA, 15 bp, Homo sapiens
tgaccattgattctg

SEQ ID NO: 596830 - DNA, 15 bp, Homo sapiens
gaccattgattctgg

SEQ ID NO: 596831 - DNA, 15 bp, Homo sapiens
accattgattctggg

SEQ ID NO: 596832 - DNA, 15 bp, Homo sapiens
ccattgattctggga

SEQ ID NO: 596833 - DNA, 15 bp, Homo sapiens
cattgattctgggat

SEQ ID NO: 596834 - DNA, 15 bp, Homo sapiens
attgattctgggatg

SEQ ID NO: 596835 - DNA, 15 bp, Homo sapiens
ttgattctgggatgt

SEQ ID NO: 596836 - DNA, 15 bp, Homo sapiens
tgattctgggatgtc

SEQ ID NO: 596837 - DNA, 15 bp, Homo sapiens
gattctgggatgtca

SEQ ID NO: 596838 - DNA, 15 bp, Homo sapiens
attctgggatgtcaa

SEQ ID NO: 596839 - DNA, 15 bp, Homo sapiens
ttctgggatgtcaat

SEQ ID NO: 596840 - DNA, 15 bp, Homo sapiens
tctgggatgtcaatg

SEQ ID NO: 596841 - DNA, 15 bp, Homo sapiens
ctgggatgtcaatgc

SEQ ID NO: 596842 - DNA, 15 bp, Homo sapiens
tgggatgtcaatgcc

SEQ ID NO: 596843 - DNA, 15 bp, Homo sapiens
gggatgtcaatgcca

SEQ ID NO: 596844 - DNA, 15 bp, Homo sapiens
ggatgtcaatgccag

SEQ ID NO: 596845 - DNA, 15 bp, Homo sapiens
gatgtcaatgccaga

SEQ ID NO: 596846 - DNA, 15 bp, Homo sapiens
atgtcaatgccagag

SEQ ID NO: 596847 - DNA, 15 bp, Homo sapiens
tgtcaatgccagaga

SEQ ID NO: 596848 - DNA, 15 bp, Homo sapiens
gtcaatgccagagat

SEQ ID NO: 596849 - DNA, 15 bp, Homo sapiens
tcaatgccagagata

SEQ ID NO: 596850 - DNA, 15 bp, Homo sapiens
caatgccagagatag

SEQ ID NO: 596851 - DNA, 15 bp, Homo sapiens
aatgccagagatagt

SEQ ID NO: 596852 - DNA, 15 bp, Homo sapiens
atgccagagatagta

SEQ ID NO: 596853 - DNA, 15 bp, Homo sapiens
tgccagagatagtag

SEQ ID NO: 596854 - DNA, 15 bp, Homo sapiens
gccagagatagtagg

SEQ ID NO: 596855 - DNA, 15 bp, Homo sapiens
ccagagatagtaggg

SEQ ID NO: 596856 - DNA, 15 bp, Homo sapiens
cagagatagtagggt

SEQ ID NO: 596857 - DNA, 15 bp, Homo sapiens
agagatagtagggta

SEQ ID NO: 596858 - DNA, 15 bp, Homo sapiens
gagatagtagggtaa

SEQ ID NO: 596859 - DNA, 15 bp, Homo sapiens
agatagtagggtaaa

SEQ ID NO: 596860 - DNA, 15 bp, Homo sapiens
gatagtagggtaaat

SEQ ID NO: 596861 - DNA, 15 bp, Homo sapiens
atagtagggtaaatc

SEQ ID NO: 596862 - DNA, 15 bp, Homo sapiens
tagtagggtaaatcg

SEQ ID NO: 596863 - DNA, 15 bp, Homo sapiens
agtagggtaaatcgg

SEQ ID NO: 596864 - DNA, 15 bp, Homo sapiens
gtagggtaaatcggc

SEQ ID NO: 596865 - DNA, 15 bp, Homo sapiens
tagggtaaatcggca

SEQ ID NO: 596866 - DNA, 15 bp, Homo sapiens
agggtaaatcggcac

SEQ ID NO: 596867 - DNA, 15 bp, Homo sapiens
gggtaaatcggcacc

SEQ ID NO: 596868 - DNA, 15 bp, Homo sapiens
ggtaaatcggcacct

SEQ ID NO: 596869 - DNA, 15 bp, Homo sapiens
gtaaatcggcacctg

SEQ ID NO: 596870 - DNA, 15 bp, Homo sapiens
taaatcggcacctgg

SEQ ID NO: 596871 - DNA, 15 bp, Homo sapiens
aaatcggcacctggg

SEQ ID NO: 596872 - DNA, 15 bp, Homo sapiens
aatcggcacctgggt

SEQ ID NO: 596873 - DNA, 15 bp, Homo sapiens
atcggcacctgggta

SEQ ID NO: 596874 - DNA, 15 bp, Homo sapiens
tcggcacctgggtaa

SEQ ID NO: 596875 - DNA, 15 bp, Homo sapiens
cggcacctgggtaaa

SEQ ID NO: 596876 - DNA, 15 bp, Homo sapiens
ggcacctgggtaaaa

SEQ ID NO: 596877 - DNA, 15 bp, Homo sapiens
gcacctgggtaaaac

SEQ ID NO: 596878 - DNA, 15 bp, Homo sapiens
cacctgggtaaaact

SEQ ID NO: 596879 - DNA, 15 bp, Homo sapiens
acctgggtaaaactt

SEQ ID NO: 596880 - DNA, 15 bp, Homo sapiens
cctgggtaaaacttt

SEQ ID NO: 596881 - DNA, 15 bp, Homo sapiens
ctgggtaaaactttc

SEQ ID NO: 596882 - DNA, 15 bp, Homo sapiens
tgggtaaaactttcc

SEQ ID NO: 596883 - DNA, 15 bp, Homo sapiens
gggtaaaactttcca

SEQ ID NO: 596884 - DNA, 15 bp, Homo sapiens
ggtaaaactttccat

SEQ ID NO: 596885 - DNA, 15 bp, Homo sapiens
gtaaaactttccatt

SEQ ID NO: 596886 - DNA, 15 bp, Homo sapiens
taaaactttccattg

SEQ ID NO: 596887 - DNA, 15 bp, Homo sapiens
aaaactttccattgg

SEQ ID NO: 596888 - DNA, 15 bp, Homo sapiens
aaactttccattgga

SEQ ID NO: 596889 - DNA, 15 bp, Homo sapiens
aactttccattggag

SEQ ID NO: 596890 - DNA, 15 bp, Homo sapiens
actttccattggaga

SEQ ID NO: 596891 - DNA, 15 bp, Homo sapiens
ctttccattggagac

SEQ ID NO: 596892 - DNA, 15 bp, Homo sapiens
tttccattggagact

SEQ ID NO: 596893 - DNA, 15 bp, Homo sapiens
ttccattggagacta

SEQ ID NO: 596894 - DNA, 15 bp, Homo sapiens
tccattggagactag

SEQ ID NO: 596895 - DNA, 15 bp, Homo sapiens
ccattggagactaga

SEQ ID NO: 596896 - DNA, 15 bp, Homo sapiens
cattggagactagaa

SEQ ID NO: 596897 - DNA, 15 bp, Homo sapiens
attggagactagaac

SEQ ID NO: 596898 - DNA, 15 bp, Homo sapiens
ttggagactagaacc

SEQ ID NO: 596899 - DNA, 15 bp, Homo sapiens
tggagactagaacca

SEQ ID NO: 596900 - DNA, 15 bp, Homo sapiens
ggagactagaaccaa

SEQ ID NO: 596901 - DNA, 15 bp, Homo sapiens
gagactagaaccaaa

SEQ ID NO: 596902 - DNA, 15 bp, Homo sapiens
agactagaaccaaaa

SEQ ID NO: 596903 - DNA, 15 bp, Homo sapiens
gactagaaccaaaac

SEQ ID NO: 596904 - DNA, 15 bp, Homo sapiens
actagaaccaaaact

SEQ ID NO: 596905 - DNA, 15 bp, Homo sapiens
ctagaaccaaaactc

SEQ ID NO: 596906 - DNA, 15 bp, Homo sapiens
tagaaccaaaactca

SEQ ID NO: 596907 - DNA, 15 bp, Homo sapiens
agaaccaaaactcag

SEQ ID NO: 596908 - DNA, 15 bp, Homo sapiens
gaaccaaaactcagg

SEQ ID NO: 596909 - DNA, 15 bp, Homo sapiens
aaccaaaactcagga

SEQ ID NO: 596910 - DNA, 15 bp, Homo sapiens
accaaaactcaggac

SEQ ID NO: 596911 - DNA, 15 bp, Homo sapiens
ccaaaactcaggaca

SEQ ID NO: 596912 - DNA, 15 bp, Homo sapiens
caaaactcaggacac

SEQ ID NO: 596913 - DNA, 15 bp, Homo sapiens
aaaactcaggacact

SEQ ID NO: 596914 - DNA, 15 bp, Homo sapiens
aaactcaggacactg

SEQ ID NO: 596915 - DNA, 15 bp, Homo sapiens
aactcaggacactgg

SEQ ID NO: 596916 - DNA, 15 bp, Homo sapiens
actcaggacactggc

SEQ ID NO: 596917 - DNA, 15 bp, Homo sapiens
ctcaggacactggct

SEQ ID NO: 596918 - DNA, 15 bp, Homo sapiens
tcaggacactggctt

SEQ ID NO: 596919 - DNA, 15 bp, Homo sapiens
caggacactggcttc

SEQ ID NO: 596920 - DNA, 15 bp, Homo sapiens
aggacactggcttcc

SEQ ID NO: 596921 - DNA, 15 bp, Homo sapiens
ggacactggcttcca

SEQ ID NO: 596922 - DNA, 15 bp, Homo sapiens
gacactggcttccaa

SEQ ID NO: 596923 - DNA, 15 bp, Homo sapiens
acactggcttccaaa

SEQ ID NO: 596924 - DNA, 15 bp, Homo sapiens
cactggcttccaaat

SEQ ID NO: 596925 - DNA, 15 bp, Homo sapiens
actggcttccaaatg

SEQ ID NO: 596926 - DNA, 15 bp, Homo sapiens
ctggcttccaaatgt

SEQ ID NO: 596927 - DNA, 15 bp, Homo sapiens
tggcttccaaatgtt

SEQ ID NO: 596928 - DNA, 15 bp, Homo sapiens
ggcttccaaatgttt

SEQ ID NO: 596929 - DNA, 15 bp, Homo sapiens
gcttccaaatgtttc

SEQ ID NO: 596930 - DNA, 15 bp, Homo sapiens
cttccaaatgtttct

SEQ ID NO: 596931 - DNA, 15 bp, Homo sapiens
ttccaaatgtttctt

SEQ ID NO: 596932 - DNA, 15 bp, Homo sapiens
tccaaatgtttcttt

SEQ ID NO: 596933 - DNA, 15 bp, Homo sapiens
ccaaatgtttcttta

SEQ ID NO: 596934 - DNA, 15 bp, Homo sapiens
caaatgtttctttat

SEQ ID NO: 596935 - DNA, 15 bp, Homo sapiens
aaatgtttctttatc

SEQ ID NO: 596936 - DNA, 15 bp, Homo sapiens
aatgtttctttatca

SEQ ID NO: 596937 - DNA, 15 bp, Homo sapiens
atgtttctttatcag

SEQ ID NO: 596938 - DNA, 15 bp, Homo sapiens
tgtttctttatcaga

SEQ ID NO: 596939 - DNA, 15 bp, Homo sapiens
gtttctttatcagac

SEQ ID NO: 596940 - DNA, 15 bp, Homo sapiens
tttctttatcagaca

SEQ ID NO: 596941 - DNA, 15 bp, Homo sapiens
ttctttatcagacaa

SEQ ID NO: 596942 - DNA, 15 bp, Homo sapiens
tctttatcagacaag

SEQ ID NO: 596943 - DNA, 15 bp, Homo sapiens
ctttatcagacaaga

SEQ ID NO: 596944 - DNA, 15 bp, Homo sapiens
tttatcagacaagaa

SEQ ID NO: 596945 - DNA, 15 bp, Homo sapiens
ttatcagacaagaaa

SEQ ID NO: 596946 - DNA, 15 bp, Homo sapiens
tatcagacaagaaag

SEQ ID NO: 596947 - DNA, 15 bp, Homo sapiens
atcagacaagaaaga

SEQ ID NO: 596948 - DNA, 15 bp, Homo sapiens
tcagacaagaaagac

SEQ ID NO: 596949 - DNA, 15 bp, Homo sapiens
cagacaagaaagacc

SEQ ID NO: 596950 - DNA, 15 bp, Homo sapiens
agacaagaaagacca

SEQ ID NO: 596951 - DNA, 15 bp, Homo sapiens
gacaagaaagaccaa

SEQ ID NO: 596952 - DNA, 15 bp, Homo sapiens
acaagaaagaccaag

SEQ ID NO: 596953 - DNA, 15 bp, Homo sapiens
caagaaagaccaagt

SEQ ID NO: 596954 - DNA, 15 bp, Homo sapiens
aagaaagaccaagtc

SEQ ID NO: 596955 - DNA, 15 bp, Homo sapiens
agaaagaccaagtct

SEQ ID NO: 596956 - DNA, 15 bp, Homo sapiens
gaaagaccaagtctt

SEQ ID NO: 596957 - DNA, 15 bp, Homo sapiens
aaagaccaagtcttt

SEQ ID NO: 596958 - DNA, 15 bp, Homo sapiens
aagaccaagtctttc

SEQ ID NO: 596959 - DNA, 15 bp, Homo sapiens
agaccaagtctttcc

SEQ ID NO: 596960 - DNA, 15 bp, Homo sapiens
gaccaagtctttcct

SEQ ID NO: 596961 - DNA, 15 bp, Homo sapiens
accaagtctttcctt

SEQ ID NO: 596962 - DNA, 15 bp, Homo sapiens
ccaagtctttcctta

SEQ ID NO: 596963 - DNA, 15 bp, Homo sapiens
caagtctttccttac

SEQ ID NO: 596964 - DNA, 15 bp, Homo sapiens
aagtctttccttacg

SEQ ID NO: 596965 - DNA, 15 bp, Homo sapiens
agtctttccttacgt

SEQ ID NO: 596966 - DNA, 15 bp, Homo sapiens
gtctttccttacgtc

SEQ ID NO: 596967 - DNA, 15 bp, Homo sapiens
tctttccttacgtct

SEQ ID NO: 596968 - DNA, 15 bp, Homo sapiens
ctttccttacgtctt

SEQ ID NO: 596969 - DNA, 15 bp, Homo sapiens
tttccttacgtcttc

SEQ ID NO: 596970 - DNA, 15 bp, Homo sapiens
ttccttacgtcttca

SEQ ID NO: 596971 - DNA, 15 bp, Homo sapiens
tccttacgtcttcac

SEQ ID NO: 596972 - DNA, 15 bp, Homo sapiens
ccttacgtcttcaca

SEQ ID NO: 596973 - DNA, 15 bp, Homo sapiens
cttacgtcttcacat

SEQ ID NO: 596974 - DNA, 15 bp, Homo sapiens
ttacgtcttcacatg

SEQ ID NO: 596975 - DNA, 15 bp, Homo sapiens
tacgtcttcacatgc

SEQ ID NO: 596976 - DNA, 15 bp, Homo sapiens
acgtcttcacatgct

SEQ ID NO: 596977 - DNA, 15 bp, Homo sapiens
cgtcttcacatgctg

SEQ ID NO: 596978 - DNA, 15 bp, Homo sapiens
gtcttcacatgctgc

SEQ ID NO: 596979 - DNA, 15 bp, Homo sapiens
tcttcacatgctgcc

SEQ ID NO: 596980 - DNA, 15 bp, Homo sapiens
cttcacatgctgcct

SEQ ID NO: 596981 - DNA, 15 bp, Homo sapiens
ttcacatgctgcctt

SEQ ID NO: 596982 - DNA, 15 bp, Homo sapiens
tcacatgctgccttg

SEQ ID NO: 596983 - DNA, 15 bp, Homo sapiens
cacatgctgccttgg

SEQ ID NO: 596984 - DNA, 15 bp, Homo sapiens
acatgctgccttggc

SEQ ID NO: 596985 - DNA, 15 bp, Homo sapiens
catgctgccttggca

SEQ ID NO: 596986 - DNA, 15 bp, Homo sapiens
atgctgccttggcaa

SEQ ID NO: 596987 - DNA, 15 bp, Homo sapiens
tgctgccttggcaaa

SEQ ID NO: 596988 - DNA, 15 bp, Homo sapiens
gctgccttggcaaat

SEQ ID NO: 596989 - DNA, 15 bp, Homo sapiens
ctgccttggcaaatg

SEQ ID NO: 596990 - DNA, 15 bp, Homo sapiens
tgccttggcaaatgc

SEQ ID NO: 596991 - DNA, 15 bp, Homo sapiens
gccttggcaaatgct

SEQ ID NO: 596992 - DNA, 15 bp, Homo sapiens
ccttggcaaatgcta

SEQ ID NO: 596993 - DNA, 15 bp, Homo sapiens
cttggcaaatgctag

SEQ ID NO: 596994 - DNA, 15 bp, Homo sapiens
ttggcaaatgctagc

SEQ ID NO: 596995 - DNA, 15 bp, Homo sapiens
tggcaaatgctagca

SEQ ID NO: 596996 - DNA, 15 bp, Homo sapiens
ggcaaatgctagcat

SEQ ID NO: 596997 - DNA, 15 bp, Homo sapiens
gcaaatgctagcatt

SEQ ID NO: 596998 - DNA, 15 bp, Homo sapiens
caaatgctagcattc

SEQ ID NO: 596999 - DNA, 15 bp, Homo sapiens
aaatgctagcattca

SEQ ID NO: 597000 - DNA, 15 bp, Homo sapiens
aatgctagcattcac

SEQ ID NO: 597001 - DNA, 15 bp, Homo sapiens
atgctagcattcaca

SEQ ID NO: 597002 - DNA, 15 bp, Homo sapiens
tgctagcattcacaa

SEQ ID NO: 597003 - DNA, 15 bp, Homo sapiens
gctagcattcacaaa

SEQ ID NO: 597004 - DNA, 15 bp, Homo sapiens
ctagcattcacaaac

SEQ ID NO: 597005 - DNA, 15 bp, Homo sapiens
tagcattcacaaacc

SEQ ID NO: 597006 - DNA, 15 bp, Homo sapiens
agcattcacaaaccc

SEQ ID NO: 597007 - DNA, 15 bp, Homo sapiens
gcattcacaaaccct

SEQ ID NO: 597008 - DNA, 15 bp, Homo sapiens
cattcacaaaccctg

SEQ ID NO: 597009 - DNA, 15 bp, Homo sapiens
attcacaaaccctgg

SEQ ID NO: 597010 - DNA, 15 bp, Homo sapiens
ttcacaaaccctggg

SEQ ID NO: 597011 - DNA, 15 bp, Homo sapiens
tcacaaaccctgggc

SEQ ID NO: 597012 - DNA, 15 bp, Homo sapiens
cacaaaccctgggct

SEQ ID NO: 597013 - DNA, 15 bp, Homo sapiens
acaaaccctgggcta

SEQ ID NO: 597014 - DNA, 15 bp, Homo sapiens
caaaccctgggctac

SEQ ID NO: 597015 - DNA, 15 bp, Homo sapiens
aaaccctgggctacc

SEQ ID NO: 597016 - DNA, 15 bp, Homo sapiens
aaccctgggctacct

SEQ ID NO: 597017 - DNA, 15 bp, Homo sapiens
accctgggctacctt

SEQ ID NO: 597018 - DNA, 15 bp, Homo sapiens
ccctgggctaccttg

SEQ ID NO: 597019 - DNA, 15 bp, Homo sapiens
cctgggctaccttga

SEQ ID NO: 597020 - DNA, 15 bp, Homo sapiens
ctgggctaccttgac

SEQ ID NO: 597021 - DNA, 15 bp, Homo sapiens
tgggctaccttgacc

SEQ ID NO: 597022 - DNA, 15 bp, Homo sapiens
gggctaccttgacct

SEQ ID NO: 597023 - DNA, 15 bp, Homo sapiens
ggctaccttgacctg

SEQ ID NO: 597024 - DNA, 15 bp, Homo sapiens
gctaccttgacctgt

SEQ ID NO: 597025 - DNA, 15 bp, Homo sapiens
ctaccttgacctgtc

SEQ ID NO: 597026 - DNA, 15 bp, Homo sapiens
taccttgacctgtca

SEQ ID NO: 597027 - DNA, 15 bp, Homo sapiens
accttgacctgtcac

SEQ ID NO: 597028 - DNA, 15 bp, Homo sapiens
ccttgacctgtcacc

SEQ ID NO: 597029 - DNA, 15 bp, Homo sapiens
cttgacctgtcaccc

SEQ ID NO: 597030 - DNA, 15 bp, Homo sapiens
ttgacctgtcaccct

SEQ ID NO: 597031 - DNA, 15 bp, Homo sapiens
tgacctgtcaccctt

SEQ ID NO: 597032 - DNA, 15 bp, Homo sapiens
gacctgtcacccttg

SEQ ID NO: 597033 - DNA, 15 bp, Homo sapiens
acctgtcacccttgc

SEQ ID NO: 597034 - DNA, 15 bp, Homo sapiens
cctgtcacccttgca

SEQ ID NO: 597035 - DNA, 15 bp, Homo sapiens
ctgtcacccttgcag

SEQ ID NO: 597036 - DNA, 15 bp, Homo sapiens
tgtcacccttgcaga

SEQ ID NO: 597037 - DNA, 15 bp, Homo sapiens
gtcacccttgcagac

SEQ ID NO: 597038 - DNA, 15 bp, Homo sapiens
tcacccttgcagacc

SEQ ID NO: 597039 - DNA, 15 bp, Homo sapiens
cacccttgcagacct

SEQ ID NO: 597040 - DNA, 15 bp, Homo sapiens
acccttgcagacctc

SEQ ID NO: 597041 - DNA, 15 bp, Homo sapiens
cccttgcagacctca

SEQ ID NO: 597042 - DNA, 15 bp, Homo sapiens
ccttgcagacctcag

SEQ ID NO: 597043 - DNA, 15 bp, Homo sapiens
cttgcagacctcaga

SEQ ID NO: 597044 - DNA, 15 bp, Homo sapiens
ttgcagacctcagac

SEQ ID NO: 597045 - DNA, 15 bp, Homo sapiens
tgcagacctcagacg

SEQ ID NO: 597046 - DNA, 15 bp, Homo sapiens
gcagacctcagacgg

SEQ ID NO: 597047 - DNA, 15 bp, Homo sapiens
cagacctcagacggg

SEQ ID NO: 597048 - DNA, 15 bp, Homo sapiens
agacctcagacgggt

SEQ ID NO: 597049 - DNA, 15 bp, Homo sapiens
gacctcagacgggtc

SEQ ID NO: 597050 - DNA, 15 bp, Homo sapiens
acctcagacgggtcc

SEQ ID NO: 597051 - DNA, 15 bp, Homo sapiens
cctcagacgggtcct

SEQ ID NO: 597052 - DNA, 15 bp, Homo sapiens
ctcagacgggtcctg

SEQ ID NO: 597053 - DNA, 15 bp, Homo sapiens
tcagacgggtcctgg

SEQ ID NO: 597054 - DNA, 15 bp, Homo sapiens
cagacgggtcctggg

SEQ ID NO: 597055 - DNA, 15 bp, Homo sapiens
agacgggtcctgggg

SEQ ID NO: 597056 - DNA, 15 bp, Homo sapiens
gacgggtcctggggg

SEQ ID NO: 597057 - DNA, 15 bp, Homo sapiens
acgggtcctgggggc

SEQ ID NO: 597058 - DNA, 15 bp, Homo sapiens
cgggtcctgggggct

SEQ ID NO: 597059 - DNA, 15 bp, Homo sapiens
gggtcctgggggctt

SEQ ID NO: 597060 - DNA, 15 bp, Homo sapiens
ggtcctgggggcttg

SEQ ID NO: 597061 - DNA, 15 bp, Homo sapiens
gtcctgggggcttgc

SEQ ID NO: 597062 - DNA, 15 bp, Homo sapiens
tcctgggggcttgct

SEQ ID NO: 597063 - DNA, 15 bp, Homo sapiens
cctgggggcttgctt

SEQ ID NO: 597064 - DNA, 15 bp, Homo sapiens
ctgggggcttgcttt

SEQ ID NO: 597065 - DNA, 15 bp, Homo sapiens
tgggggcttgctttc

SEQ ID NO: 597066 - DNA, 15 bp, Homo sapiens
gggggcttgctttct

SEQ ID NO: 597067 - DNA, 15 bp, Homo sapiens
ggggcttgctttctc

SEQ ID NO: 597068 - DNA, 15 bp, Homo sapiens
gggcttgctttctcg

SEQ ID NO: 597069 - DNA, 15 bp, Homo sapiens
ggcttgctttctcgg

SEQ ID NO: 597070 - DNA, 15 bp, Homo sapiens
gcttgctttctcggt

SEQ ID NO: 597071 - DNA, 15 bp, Homo sapiens
cttgctttctcggtt

SEQ ID NO: 597072 - DNA, 15 bp, Homo sapiens
ttgctttctcggttt

SEQ ID NO: 597073 - DNA, 15 bp, Homo sapiens
tgctttctcggtttc

SEQ ID NO: 597074 - DNA, 15 bp, Homo sapiens
gctttctcggtttct

SEQ ID NO: 597075 - DNA, 15 bp, Homo sapiens
ctttctcggtttctg

SEQ ID NO: 597076 - DNA, 15 bp, Homo sapiens
tttctcggtttctgt

SEQ ID NO: 597077 - DNA, 15 bp, Homo sapiens
ttctcggtttctgta

SEQ ID NO: 597078 - DNA, 15 bp, Homo sapiens
tctcggtttctgtat

SEQ ID NO: 597079 - DNA, 15 bp, Homo sapiens
ctcggtttctgtatg

SEQ ID NO: 597080 - DNA, 15 bp, Homo sapiens
tcggtttctgtatgc

SEQ ID NO: 597081 - DNA, 15 bp, Homo sapiens
cggtttctgtatgca

SEQ ID NO: 597082 - DNA, 15 bp, Homo sapiens
ggtttctgtatgcag

SEQ ID NO: 597083 - DNA, 15 bp, Homo sapiens
gtttctgtatgcagg

SEQ ID NO: 597084 - DNA, 15 bp, Homo sapiens
tttctgtatgcaggc

SEQ ID NO: 597085 - DNA, 15 bp, Homo sapiens
ttctgtatgcaggca

SEQ ID NO: 597086 - DNA, 15 bp, Homo sapiens
tctgtatgcaggcac

SEQ ID NO: 597087 - DNA, 15 bp, Homo sapiens
ctgtatgcaggcact

SEQ ID NO: 597088 - DNA, 15 bp, Homo sapiens
tgtatgcaggcactc

SEQ ID NO: 597089 - DNA, 15 bp, Homo sapiens
gtatgcaggcactca

SEQ ID NO: 597090 - DNA, 15 bp, Homo sapiens
tatgcaggcactcaa

SEQ ID NO: 597091 - DNA, 15 bp, Homo sapiens
atgcaggcactcaaa

SEQ ID NO: 597092 - DNA, 15 bp, Homo sapiens
tgcaggcactcaaac

SEQ ID NO: 597093 - DNA, 15 bp, Homo sapiens
gcaggcactcaaacc

SEQ ID NO: 597094 - DNA, 15 bp, Homo sapiens
caggcactcaaacct

SEQ ID NO: 597095 - DNA, 15 bp, Homo sapiens
aggcactcaaacctg

SEQ ID NO: 597096 - DNA, 15 bp, Homo sapiens
ggcactcaaacctgc

SEQ ID NO: 597097 - DNA, 15 bp, Homo sapiens
gcactcaaacctgca

SEQ ID NO: 597098 - DNA, 15 bp, Homo sapiens
cactcaaacctgcat

SEQ ID NO: 597099 - DNA, 15 bp, Homo sapiens
actcaaacctgcatc

SEQ ID NO: 597100 - DNA, 15 bp, Homo sapiens
ctcaaacctgcatca

SEQ ID NO: 597101 - DNA, 15 bp, Homo sapiens
tcaaacctgcatcag

SEQ ID NO: 597102 - DNA, 15 bp, Homo sapiens
caaacctgcatcagg

SEQ ID NO: 597103 - DNA, 15 bp, Homo sapiens
aaacctgcatcaggc

SEQ ID NO: 597104 - DNA, 15 bp, Homo sapiens
aacctgcatcaggca

SEQ ID NO: 597105 - DNA, 15 bp, Homo sapiens
acctgcatcaggcac

SEQ ID NO: 597106 - DNA, 15 bp, Homo sapiens
cctgcatcaggcacc

SEQ ID NO: 597107 - DNA, 15 bp, Homo sapiens
ctgcatcaggcacct

SEQ ID NO: 597108 - DNA, 15 bp, Homo sapiens
tgcatcaggcacctg

SEQ ID NO: 597109 - DNA, 15 bp, Homo sapiens
gcatcaggcacctgt

SEQ ID NO: 597110 - DNA, 15 bp, Homo sapiens
catcaggcacctgtg

SEQ ID NO: 597111 - DNA, 15 bp, Homo sapiens
atcaggcacctgtga

SEQ ID NO: 597112 - DNA, 15 bp, Homo sapiens
tcaggcacctgtgaa

SEQ ID NO: 597113 - DNA, 15 bp, Homo sapiens
caggcacctgtgaag

SEQ ID NO: 597114 - DNA, 15 bp, Homo sapiens
aggcacctgtgaagg

SEQ ID NO: 597115 - DNA, 15 bp, Homo sapiens
ggcacctgtgaaggg

SEQ ID NO: 597116 - DNA, 15 bp, Homo sapiens
gcacctgtgaagggc

SEQ ID NO: 597117 - DNA, 15 bp, Homo sapiens
cacctgtgaagggcc

SEQ ID NO: 597118 - DNA, 15 bp, Homo sapiens
acctgtgaagggccg

SEQ ID NO: 597119 - DNA, 15 bp, Homo sapiens
cctgtgaagggccgg

SEQ ID NO: 597120 - DNA, 15 bp, Homo sapiens
ctgtgaagggccggg

SEQ ID NO: 597121 - DNA, 15 bp, Homo sapiens
tgtgaagggccgggc

SEQ ID NO: 597122 - DNA, 15 bp, Homo sapiens
gtgaagggccgggca

SEQ ID NO: 597123 - DNA, 15 bp, Homo sapiens
tgaagggccgggcac

SEQ ID NO: 597124 - DNA, 15 bp, Homo sapiens
gaagggccgggcact

SEQ ID NO: 597125 - DNA, 15 bp, Homo sapiens
aagggccgggcactg

SEQ ID NO: 597126 - DNA, 15 bp, Homo sapiens
agggccgggcactgt

SEQ ID NO: 597127 - DNA, 15 bp, Homo sapiens
gggccgggcactgtg

SEQ ID NO: 597128 - DNA, 15 bp, Homo sapiens
ggccgggcactgtgc

SEQ ID NO: 597129 - DNA, 15 bp, Homo sapiens
gccgggcactgtgct

SEQ ID NO: 597130 - DNA, 15 bp, Homo sapiens
ccgggcactgtgctg

SEQ ID NO: 597131 - DNA, 15 bp, Homo sapiens
cgggcactgtgctga

SEQ ID NO: 597132 - DNA, 15 bp, Homo sapiens
gggcactgtgctgag

SEQ ID NO: 597133 - DNA, 15 bp, Homo sapiens
ggcactgtgctgagg

SEQ ID NO: 597134 - DNA, 15 bp, Homo sapiens
gcactgtgctgaggc

SEQ ID NO: 597135 - DNA, 15 bp, Homo sapiens
cactgtgctgaggcc

SEQ ID NO: 597136 - DNA, 15 bp, Homo sapiens
actgtgctgaggcca

SEQ ID NO: 597137 - DNA, 15 bp, Homo sapiens
ctgtgctgaggccaa

SEQ ID NO: 597138 - DNA, 15 bp, Homo sapiens
tgtgctgaggccaag

SEQ ID NO: 597139 - DNA, 15 bp, Homo sapiens
gtgctgaggccaagg

SEQ ID NO: 597140 - DNA, 15 bp, Homo sapiens
tgctgaggccaaggc

SEQ ID NO: 597141 - DNA, 15 bp, Homo sapiens
gctgaggccaaggct

SEQ ID NO: 597142 - DNA, 15 bp, Homo sapiens
ctgaggccaaggctc

SEQ ID NO: 597143 - DNA, 15 bp, Homo sapiens
tgaggccaaggctcc

SEQ ID NO: 597144 - DNA, 15 bp, Homo sapiens
gaggccaaggctcca

SEQ ID NO: 597145 - DNA, 15 bp, Homo sapiens
aggccaaggctccaa

SEQ ID NO: 597146 - DNA, 15 bp, Homo sapiens
ggccaaggctccaaa

SEQ ID NO: 597147 - DNA, 15 bp, Homo sapiens
gccaaggctccaaat

SEQ ID NO: 597148 - DNA, 15 bp, Homo sapiens
ccaaggctccaaatg

SEQ ID NO: 597149 - DNA, 15 bp, Homo sapiens
caaggctccaaatgt

SEQ ID NO: 597150 - DNA, 15 bp, Homo sapiens
aaggctccaaatgtg

SEQ ID NO: 597151 - DNA, 15 bp, Homo sapiens
aggctccaaatgtga

SEQ ID NO: 597152 - DNA, 15 bp, Homo sapiens
ggctccaaatgtgaa

SEQ ID NO: 597153 - DNA, 15 bp, Homo sapiens
gctccaaatgtgaac

SEQ ID NO: 597154 - DNA, 15 bp, Homo sapiens
ctccaaatgtgaacc

SEQ ID NO: 597155 - DNA, 15 bp, Homo sapiens
tccaaatgtgaacct

SEQ ID NO: 597156 - DNA, 15 bp, Homo sapiens
ccaaatgtgaacctt

SEQ ID NO: 597157 - DNA, 15 bp, Homo sapiens
caaatgtgaaccttc

SEQ ID NO: 597158 - DNA, 15 bp, Homo sapiens
aaatgtgaaccttcc

SEQ ID NO: 597159 - DNA, 15 bp, Homo sapiens
aatgtgaaccttcca

SEQ ID NO: 597160 - DNA, 15 bp, Homo sapiens
atgtgaaccttccac

SEQ ID NO: 597161 - DNA, 15 bp, Homo sapiens
tgtgaaccttccacc

SEQ ID NO: 597162 - DNA, 15 bp, Homo sapiens
gtgaaccttccaccc

SEQ ID NO: 597163 - DNA, 15 bp, Homo sapiens
tgaaccttccaccct

SEQ ID NO: 597164 - DNA, 15 bp, Homo sapiens
gaaccttccaccctc

SEQ ID NO: 597165 - DNA, 15 bp, Homo sapiens
aaccttccaccctca

SEQ ID NO: 597166 - DNA, 15 bp, Homo sapiens
accttccaccctcac

SEQ ID NO: 597167 - DNA, 15 bp, Homo sapiens
ccttccaccctcact

SEQ ID NO: 597168 - DNA, 15 bp, Homo sapiens
cttccaccctcactg

SEQ ID NO: 597169 - DNA, 15 bp, Homo sapiens
ttccaccctcactga

SEQ ID NO: 597170 - DNA, 15 bp, Homo sapiens
tccaccctcactgaa

SEQ ID NO: 597171 - DNA, 15 bp, Homo sapiens
ccaccctcactgaac

SEQ ID NO: 597172 - DNA, 15 bp, Homo sapiens
caccctcactgaact

SEQ ID NO: 597173 - DNA, 15 bp, Homo sapiens
accctcactgaactc

SEQ ID NO: 597174 - DNA, 15 bp, Homo sapiens
ccctcactgaactca

SEQ ID NO: 597175 - DNA, 15 bp, Homo sapiens
cctcactgaactcac

SEQ ID NO: 597176 - DNA, 15 bp, Homo sapiens
ctcactgaactcaca

SEQ ID NO: 597177 - DNA, 15 bp, Homo sapiens
tcactgaactcacag

SEQ ID NO: 597178 - DNA, 15 bp, Homo sapiens
cactgaactcacagc

SEQ ID NO: 597179 - DNA, 15 bp, Homo sapiens
actgaactcacagcc

SEQ ID NO: 597180 - DNA, 15 bp, Homo sapiens
ctgaactcacagcca

SEQ ID NO: 597181 - DNA, 15 bp, Homo sapiens
tgaactcacagccag

SEQ ID NO: 597182 - DNA, 15 bp, Homo sapiens
gaactcacagccaga

SEQ ID NO: 597183 - DNA, 15 bp, Homo sapiens
aactcacagccagac

SEQ ID NO: 597184 - DNA, 15 bp, Homo sapiens
actcacagccagacc

SEQ ID NO: 597185 - DNA, 15 bp, Homo sapiens
ctcacagccagacca

SEQ ID NO: 597186 - DNA, 15 bp, Homo sapiens
tcacagccagaccag

SEQ ID NO: 597187 - DNA, 15 bp, Homo sapiens
cacagccagaccaga

SEQ ID NO: 597188 - DNA, 15 bp, Homo sapiens
acagccagaccagag

SEQ ID NO: 597189 - DNA, 15 bp, Homo sapiens
cagccagaccagaga

SEQ ID NO: 597190 - DNA, 15 bp, Homo sapiens
agccagaccagagac

SEQ ID NO: 597191 - DNA, 15 bp, Homo sapiens
gccagaccagagaca

SEQ ID NO: 597192 - DNA, 15 bp, Homo sapiens
ccagaccagagacaa

SEQ ID NO: 597193 - DNA, 15 bp, Homo sapiens
cagaccagagacaag

SEQ ID NO: 597194 - DNA, 15 bp, Homo sapiens
agaccagagacaagc

SEQ ID NO: 597195 - DNA, 15 bp, Homo sapiens
gaccagagacaagca

SEQ ID NO: 597196 - DNA, 15 bp, Homo sapiens
accagagacaagcaa

SEQ ID NO: 597197 - DNA, 15 bp, Homo sapiens
ccagagacaagcaaa

SEQ ID NO: 597198 - DNA, 15 bp, Homo sapiens
cagagacaagcaaac

SEQ ID NO: 597199 - DNA, 15 bp, Homo sapiens
agagacaagcaaaca

SEQ ID NO: 597200 - DNA, 15 bp, Homo sapiens
gagacaagcaaacag

SEQ ID NO: 597201 - DNA, 15 bp, Homo sapiens
agacaagcaaacagg

SEQ ID NO: 597202 - DNA, 15 bp, Homo sapiens
gacaagcaaacagga

SEQ ID NO: 597203 - DNA, 15 bp, Homo sapiens
acaagcaaacaggac

SEQ ID NO: 597204 - DNA, 15 bp, Homo sapiens
caagcaaacaggaca

SEQ ID NO: 597205 - DNA, 15 bp, Homo sapiens
aagcaaacaggacat

SEQ ID NO: 597206 - DNA, 15 bp, Homo sapiens
agcaaacaggacatt

SEQ ID NO: 597207 - DNA, 15 bp, Homo sapiens
gcaaacaggacattt

SEQ ID NO: 597208 - DNA, 15 bp, Homo sapiens
caaacaggacatttc

SEQ ID NO: 597209 - DNA, 15 bp, Homo sapiens
aaacaggacatttca

SEQ ID NO: 597210 - DNA, 15 bp, Homo sapiens
aacaggacatttcac

SEQ ID NO: 597211 - DNA, 15 bp, Homo sapiens
acaggacatttcaca

SEQ ID NO: 597212 - DNA, 15 bp, Homo sapiens
caggacatttcacag

SEQ ID NO: 597213 - DNA, 15 bp, Homo sapiens
aggacatttcacagc

SEQ ID NO: 597214 - DNA, 15 bp, Homo sapiens
ggacatttcacagca

SEQ ID NO: 597215 - DNA, 15 bp, Homo sapiens
gacatttcacagcag

SEQ ID NO: 597216 - DNA, 15 bp, Homo sapiens
acatttcacagcagt

SEQ ID NO: 597217 - DNA, 15 bp, Homo sapiens
catttcacagcagtg

SEQ ID NO: 597218 - DNA, 15 bp, Homo sapiens
atttcacagcagtgc

SEQ ID NO: 597219 - DNA, 15 bp, Homo sapiens
tttcacagcagtgca

SEQ ID NO: 597220 - DNA, 15 bp, Homo sapiens
ttcacagcagtgcag

SEQ ID NO: 597221 - DNA, 15 bp, Homo sapiens
tcacagcagtgcagc

SEQ ID NO: 597222 - DNA, 15 bp, Homo sapiens
cacagcagtgcagcc

SEQ ID NO: 597223 - DNA, 15 bp, Homo sapiens
acagcagtgcagcct

SEQ ID NO: 597224 - DNA, 15 bp, Homo sapiens
cagcagtgcagccta

SEQ ID NO: 597225 - DNA, 15 bp, Homo sapiens
agcagtgcagcctag

SEQ ID NO: 597226 - DNA, 15 bp, Homo sapiens
gcagtgcagcctaga

SEQ ID NO: 597227 - DNA, 15 bp, Homo sapiens
cagtgcagcctagaa

SEQ ID NO: 597228 - DNA, 15 bp, Homo sapiens
agtgcagcctagaaa

SEQ ID NO: 597229 - DNA, 15 bp, Homo sapiens
gtgcagcctagaaag

SEQ ID NO: 597230 - DNA, 15 bp, Homo sapiens
tgcagcctagaaagg

SEQ ID NO: 597231 - DNA, 15 bp, Homo sapiens
gcagcctagaaaggg

SEQ ID NO: 597232 - DNA, 15 bp, Homo sapiens
cagcctagaaagggc

SEQ ID NO: 597233 - DNA, 15 bp, Homo sapiens
agcctagaaagggcc

SEQ ID NO: 597234 - DNA, 15 bp, Homo sapiens
gcctagaaagggcca

SEQ ID NO: 597235 - DNA, 15 bp, Homo sapiens
cctagaaagggccaa

SEQ ID NO: 597236 - DNA, 15 bp, Homo sapiens
ctagaaagggccaac

SEQ ID NO: 597237 - DNA, 15 bp, Homo sapiens
tagaaagggccaaca

SEQ ID NO: 597238 - DNA, 15 bp, Homo sapiens
agaaagggccaacac

SEQ ID NO: 597239 - DNA, 15 bp, Homo sapiens
gaaagggccaacacc

SEQ ID NO: 597240 - DNA, 15 bp, Homo sapiens
aaagggccaacacca

SEQ ID NO: 597241 - DNA, 15 bp, Homo sapiens
aagggccaacaccag

SEQ ID NO: 597242 - DNA, 15 bp, Homo sapiens
agggccaacaccagc

SEQ ID NO: 597243 - DNA, 15 bp, Homo sapiens
gggccaacaccagca

SEQ ID NO: 597244 - DNA, 15 bp, Homo sapiens
ggccaacaccagcag

SEQ ID NO: 597245 - DNA, 15 bp, Homo sapiens
gccaacaccagcagc

SEQ ID NO: 597246 - DNA, 15 bp, Homo sapiens
ccaacaccagcagca

SEQ ID NO: 597247 - DNA, 15 bp, Homo sapiens
caacaccagcagcat

SEQ ID NO: 597248 - DNA, 15 bp, Homo sapiens
aacaccagcagcatt

SEQ ID NO: 597249 - DNA, 15 bp, Homo sapiens
acaccagcagcattt

SEQ ID NO: 597250 - DNA, 15 bp, Homo sapiens
caccagcagcatttg

SEQ ID NO: 597251 - DNA, 15 bp, Homo sapiens
accagcagcatttgt

SEQ ID NO: 597252 - DNA, 15 bp, Homo sapiens
ccagcagcatttgtc

SEQ ID NO: 597253 - DNA, 15 bp, Homo sapiens
cagcagcatttgtcc

SEQ ID NO: 597254 - DNA, 15 bp, Homo sapiens
agcagcatttgtccc

SEQ ID NO: 597255 - DNA, 15 bp, Homo sapiens
gcagcatttgtcccc

SEQ ID NO: 597256 - DNA, 15 bp, Homo sapiens
cagcatttgtccccc

SEQ ID NO: 597257 - DNA, 15 bp, Homo sapiens
agcatttgtcccccc

SEQ ID NO: 597258 - DNA, 15 bp, Homo sapiens
gcatttgtccccccg

SEQ ID NO: 597259 - DNA, 15 bp, Homo sapiens
catttgtccccccga

SEQ ID NO: 597260 - DNA, 15 bp, Homo sapiens
atttgtccccccgag

SEQ ID NO: 597261 - DNA, 15 bp, Homo sapiens
tttgtccccccgagc

SEQ ID NO: 597262 - DNA, 15 bp, Homo sapiens
ttgtccccccgagcg

SEQ ID NO: 597263 - DNA, 15 bp, Homo sapiens
tgtccccccgagcgg

SEQ ID NO: 597264 - DNA, 15 bp, Homo sapiens
gtccccccgagcggt

SEQ ID NO: 597265 - DNA, 15 bp, Homo sapiens
tccccccgagcggta

SEQ ID NO: 597266 - DNA, 15 bp, Homo sapiens
ccccccgagcggtag

SEQ ID NO: 597267 - DNA, 15 bp, Homo sapiens
cccccgagcggtagc

SEQ ID NO: 597268 - DNA, 15 bp, Homo sapiens
ccccgagcggtagct

SEQ ID NO: 597269 - DNA, 15 bp, Homo sapiens
cccgagcggtagctt

SEQ ID NO: 597270 - DNA, 15 bp, Homo sapiens
ccgagcggtagcttt

SEQ ID NO: 597271 - DNA, 15 bp, Homo sapiens
cgagcggtagctttt

SEQ ID NO: 597272 - DNA, 15 bp, Homo sapiens
gagcggtagctttta

SEQ ID NO: 597273 - DNA, 15 bp, Homo sapiens
agcggtagcttttag

SEQ ID NO: 597274 - DNA, 15 bp, Homo sapiens
gcggtagcttttaga

SEQ ID NO: 597275 - DNA, 15 bp, Homo sapiens
cggtagcttttagaa

SEQ ID NO: 597276 - DNA, 15 bp, Homo sapiens
ggtagcttttagaag

SEQ ID NO: 597277 - DNA, 15 bp, Homo sapiens
gtagcttttagaagc

SEQ ID NO: 597278 - DNA, 15 bp, Homo sapiens
tagcttttagaagct

SEQ ID NO: 597279 - DNA, 15 bp, Homo sapiens
agcttttagaagctt

SEQ ID NO: 597280 - DNA, 15 bp, Homo sapiens
gcttttagaagcttc

SEQ ID NO: 597281 - DNA, 15 bp, Homo sapiens
cttttagaagcttcc

SEQ ID NO: 597282 - DNA, 15 bp, Homo sapiens
ttttagaagcttccc

SEQ ID NO: 597283 - DNA, 15 bp, Homo sapiens
tttagaagcttcccc

SEQ ID NO: 597284 - DNA, 15 bp, Homo sapiens
ttagaagcttcccca

SEQ ID NO: 597285 - DNA, 15 bp, Homo sapiens
tagaagcttccccag

SEQ ID NO: 597286 - DNA, 15 bp, Homo sapiens
agaagcttccccagt

SEQ ID NO: 597287 - DNA, 15 bp, Homo sapiens
gaagcttccccagtg

SEQ ID NO: 597288 - DNA, 15 bp, Homo sapiens
aagcttccccagtga

SEQ ID NO: 597289 - DNA, 15 bp, Homo sapiens
agcttccccagtgat

SEQ ID NO: 597290 - DNA, 15 bp, Homo sapiens
gcttccccagtgatt

SEQ ID NO: 597291 - DNA, 15 bp, Homo sapiens
cttccccagtgattc

SEQ ID NO: 597292 - DNA, 15 bp, Homo sapiens
ttccccagtgattca

SEQ ID NO: 597293 - DNA, 15 bp, Homo sapiens
tccccagtgattcaa

SEQ ID NO: 597294 - DNA, 15 bp, Homo sapiens
ccccagtgattcaat

SEQ ID NO: 597295 - DNA, 15 bp, Homo sapiens
cccagtgattcaatg

SEQ ID NO: 597296 - DNA, 15 bp, Homo sapiens
ccagtgattcaatgt

SEQ ID NO: 597297 - DNA, 15 bp, Homo sapiens
cagtgattcaatgtg

SEQ ID NO: 597298 - DNA, 15 bp, Homo sapiens
agtgattcaatgtgt

SEQ ID NO: 597299 - DNA, 15 bp, Homo sapiens
gtgattcaatgtgtc

SEQ ID NO: 597300 - DNA, 15 bp, Homo sapiens
tgattcaatgtgtcc

SEQ ID NO: 597301 - DNA, 15 bp, Homo sapiens
gattcaatgtgtcct

SEQ ID NO: 597302 - DNA, 15 bp, Homo sapiens
attcaatgtgtccta

SEQ ID NO: 597303 - DNA, 15 bp, Homo sapiens
ttcaatgtgtcctac

SEQ ID NO: 597304 - DNA, 15 bp, Homo sapiens
tcaatgtgtcctaca

SEQ ID NO: 597305 - DNA, 15 bp, Homo sapiens
caatgtgtcctacaa

SEQ ID NO: 597306 - DNA, 15 bp, Homo sapiens
aatgtgtcctacaaa

SEQ ID NO: 597307 - DNA, 15 bp, Homo sapiens
atgtgtcctacaaat

SEQ ID NO: 597308 - DNA, 15 bp, Homo sapiens
tgtgtcctacaaatg

SEQ ID NO: 597309 - DNA, 15 bp, Homo sapiens
gtgtcctacaaatgc

SEQ ID NO: 597310 - DNA, 15 bp, Homo sapiens
tgtcctacaaatgcc

SEQ ID NO: 597311 - DNA, 15 bp, Homo sapiens
gtcctacaaatgcct

SEQ ID NO: 597312 - DNA, 15 bp, Homo sapiens
tcctacaaatgcctg

SEQ ID NO: 597313 - DNA, 15 bp, Homo sapiens
cctacaaatgcctgg

SEQ ID NO: 597314 - DNA, 15 bp, Homo sapiens
ctacaaatgcctggc

SEQ ID NO: 597315 - DNA, 15 bp, Homo sapiens
tacaaatgcctggcc

SEQ ID NO: 597316 - DNA, 15 bp, Homo sapiens
acaaatgcctggccc

SEQ ID NO: 597317 - DNA, 15 bp, Homo sapiens
caaatgcctggcccc

SEQ ID NO: 597318 - DNA, 15 bp, Homo sapiens
aaatgcctggccccc

SEQ ID NO: 597319 - DNA, 15 bp, Homo sapiens
aatgcctggccccca

SEQ ID NO: 597320 - DNA, 15 bp, Homo sapiens
atgcctggcccccac

SEQ ID NO: 597321 - DNA, 15 bp, Homo sapiens
tgcctggcccccact

SEQ ID NO: 597322 - DNA, 15 bp, Homo sapiens
gcctggcccccactc

SEQ ID NO: 597323 - DNA, 15 bp, Homo sapiens
cctggcccccactcc

SEQ ID NO: 597324 - DNA, 15 bp, Homo sapiens
ctggcccccactccc

SEQ ID NO: 597325 - DNA, 15 bp, Homo sapiens
tggcccccactccca

SEQ ID NO: 597326 - DNA, 15 bp, Homo sapiens
ggcccccactcccag

SEQ ID NO: 597327 - DNA, 15 bp, Homo sapiens
gcccccactcccaga

SEQ ID NO: 597328 - DNA, 15 bp, Homo sapiens
cccccactcccagag

SEQ ID NO: 597329 - DNA, 15 bp, Homo sapiens
ccccactcccagaga

SEQ ID NO: 597330 - DNA, 15 bp, Homo sapiens
cccactcccagagat

SEQ ID NO: 597331 - DNA, 15 bp, Homo sapiens
ccactcccagagatt

SEQ ID NO: 597332 - DNA, 15 bp, Homo sapiens
cactcccagagattc

SEQ ID NO: 597333 - DNA, 15 bp, Homo sapiens
actcccagagattct

SEQ ID NO: 597334 - DNA, 15 bp, Homo sapiens
ctcccagagattctg

SEQ ID NO: 597335 - DNA, 15 bp, Homo sapiens
tcccagagattctga

SEQ ID NO: 597336 - DNA, 15 bp, Homo sapiens
cccagagattctgag

SEQ ID NO: 597337 - DNA, 15 bp, Homo sapiens
ccagagattctgagt

SEQ ID NO: 597338 - DNA, 15 bp, Homo sapiens
cagagattctgagtc

SEQ ID NO: 597339 - DNA, 15 bp, Homo sapiens
agagattctgagtca

SEQ ID NO: 597340 - DNA, 15 bp, Homo sapiens
gagattctgagtcag

SEQ ID NO: 597341 - DNA, 15 bp, Homo sapiens
agattctgagtcagc

SEQ ID NO: 597342 - DNA, 15 bp, Homo sapiens
gattctgagtcagct

SEQ ID NO: 597343 - DNA, 15 bp, Homo sapiens
attctgagtcagctg

SEQ ID NO: 597344 - DNA, 15 bp, Homo sapiens
ttctgagtcagctgg

SEQ ID NO: 597345 - DNA, 15 bp, Homo sapiens
tctgagtcagctggc

SEQ ID NO: 597346 - DNA, 15 bp, Homo sapiens
ctgagtcagctggcc

SEQ ID NO: 597347 - DNA, 15 bp, Homo sapiens
tgagtcagctggcct

SEQ ID NO: 597348 - DNA, 15 bp, Homo sapiens
gagtcagctggccta

SEQ ID NO: 597349 - DNA, 15 bp, Homo sapiens
agtcagctggcctag

SEQ ID NO: 597350 - DNA, 15 bp, Homo sapiens
gtcagctggcctagg

SEQ ID NO: 597351 - DNA, 15 bp, Homo sapiens
tcagctggcctaggg

SEQ ID NO: 597352 - DNA, 15 bp, Homo sapiens
cagctggcctagggt

SEQ ID NO: 597353 - DNA, 15 bp, Homo sapiens
agctggcctagggtg

SEQ ID NO: 597354 - DNA, 15 bp, Homo sapiens
gctggcctagggtgc

SEQ ID NO: 597355 - DNA, 15 bp, Homo sapiens
ctggcctagggtgca

SEQ ID NO: 597356 - DNA, 15 bp, Homo sapiens
tggcctagggtgcag

SEQ ID NO: 597357 - DNA, 15 bp, Homo sapiens
ggcctagggtgcagc

SEQ ID NO: 597358 - DNA, 15 bp, Homo sapiens
gcctagggtgcagcc

SEQ ID NO: 597359 - DNA, 15 bp, Homo sapiens
cctagggtgcagcct

SEQ ID NO: 597360 - DNA, 15 bp, Homo sapiens
ctagggtgcagcctt

SEQ ID NO: 597361 - DNA, 15 bp, Homo sapiens
tagggtgcagccttg

SEQ ID NO: 597362 - DNA, 15 bp, Homo sapiens
agggtgcagccttga

SEQ ID NO: 597363 - DNA, 15 bp, Homo sapiens
gggtgcagccttgac

SEQ ID NO: 597364 - DNA, 15 bp, Homo sapiens
ggtgcagccttgact

SEQ ID NO: 597365 - DNA, 15 bp, Homo sapiens
gtgcagccttgactt

SEQ ID NO: 597366 - DNA, 15 bp, Homo sapiens
tgcagccttgacttc

SEQ ID NO: 597367 - DNA, 15 bp, Homo sapiens
gcagccttgacttca

SEQ ID NO: 597368 - DNA, 15 bp, Homo sapiens
cagccttgacttcac

SEQ ID NO: 597369 - DNA, 15 bp, Homo sapiens
agccttgacttcact

SEQ ID NO: 597370 - DNA, 15 bp, Homo sapiens
gccttgacttcactg

SEQ ID NO: 597371 - DNA, 15 bp, Homo sapiens
ccttgacttcactgt

SEQ ID NO: 597372 - DNA, 15 bp, Homo sapiens
cttgacttcactgtg

SEQ ID NO: 597373 - DNA, 15 bp, Homo sapiens
ttgacttcactgtgt

SEQ ID NO: 597374 - DNA, 15 bp, Homo sapiens
tgacttcactgtgtt

SEQ ID NO: 597375 - DNA, 15 bp, Homo sapiens
gacttcactgtgtta

SEQ ID NO: 597376 - DNA, 15 bp, Homo sapiens
acttcactgtgttaa

SEQ ID NO: 597377 - DNA, 15 bp, Homo sapiens
cttcactgtgttaaa

SEQ ID NO: 597378 - DNA, 15 bp, Homo sapiens
ttcactgtgttaaaa

SEQ ID NO: 597379 - DNA, 15 bp, Homo sapiens
tcactgtgttaaaaa

SEQ ID NO: 597380 - DNA, 15 bp, Homo sapiens
cactgtgttaaaaag

SEQ ID NO: 597381 - DNA, 15 bp, Homo sapiens
actgtgttaaaaagc

SEQ ID NO: 597382 - DNA, 15 bp, Homo sapiens
ctgtgttaaaaagct

SEQ ID NO: 597383 - DNA, 15 bp, Homo sapiens
tgtgttaaaaagctt

SEQ ID NO: 597384 - DNA, 15 bp, Homo sapiens
gtgttaaaaagcttc

SEQ ID NO: 597385 - DNA, 15 bp, Homo sapiens
tgttaaaaagcttcc

SEQ ID NO: 597386 - DNA, 15 bp, Homo sapiens
gttaaaaagcttccc

SEQ ID NO: 597387 - DNA, 15 bp, Homo sapiens
ttaaaaagcttccca

SEQ ID NO: 597388 - DNA, 15 bp, Homo sapiens
taaaaagcttcccag

SEQ ID NO: 597389 - DNA, 15 bp, Homo sapiens
aaaaagcttcccaga

SEQ ID NO: 597390 - DNA, 15 bp, Homo sapiens
aaaagcttcccagat

SEQ ID NO: 597391 - DNA, 15 bp, Homo sapiens
aaagcttcccagata

SEQ ID NO: 597392 - DNA, 15 bp, Homo sapiens
aagcttcccagataa

SEQ ID NO: 597393 - DNA, 15 bp, Homo sapiens
agcttcccagataag

SEQ ID NO: 597394 - DNA, 15 bp, Homo sapiens
gcttcccagataagt

SEQ ID NO: 597395 - DNA, 15 bp, Homo sapiens
cttcccagataagtc

SEQ ID NO: 597396 - DNA, 15 bp, Homo sapiens
ttcccagataagtcc

SEQ ID NO: 597397 - DNA, 15 bp, Homo sapiens
tcccagataagtcca

SEQ ID NO: 597398 - DNA, 15 bp, Homo sapiens
cccagataagtccaa

SEQ ID NO: 597399 - DNA, 15 bp, Homo sapiens
ccagataagtccaat

SEQ ID NO: 597400 - DNA, 15 bp, Homo sapiens
cagataagtccaatg

SEQ ID NO: 597401 - DNA, 15 bp, Homo sapiens
agataagtccaatgt

SEQ ID NO: 597402 - DNA, 15 bp, Homo sapiens
gataagtccaatgtc

SEQ ID NO: 597403 - DNA, 15 bp, Homo sapiens
ataagtccaatgtcc

SEQ ID NO: 597404 - DNA, 15 bp, Homo sapiens
taagtccaatgtccg

SEQ ID NO: 597405 - DNA, 15 bp, Homo sapiens
aagtccaatgtccgg

SEQ ID NO: 597406 - DNA, 15 bp, Homo sapiens
agtccaatgtccggc

SEQ ID NO: 597407 - DNA, 15 bp, Homo sapiens
gtccaatgtccggcc

SEQ ID NO: 597408 - DNA, 15 bp, Homo sapiens
tccaatgtccggcca

SEQ ID NO: 597409 - DNA, 15 bp, Homo sapiens
ccaatgtccggccaa

SEQ ID NO: 597410 - DNA, 15 bp, Homo sapiens
caatgtccggccaag

SEQ ID NO: 597411 - DNA, 15 bp, Homo sapiens
aatgtccggccaaga

SEQ ID NO: 597412 - DNA, 15 bp, Homo sapiens
atgtccggccaagat

SEQ ID NO: 597413 - DNA, 15 bp, Homo sapiens
tgtccggccaagatt

SEQ ID NO: 597414 - DNA, 15 bp, Homo sapiens
gtccggccaagattg

SEQ ID NO: 597415 - DNA, 15 bp, Homo sapiens
tccggccaagattga

SEQ ID NO: 597416 - DNA, 15 bp, Homo sapiens
ccggccaagattgag

SEQ ID NO: 597417 - DNA, 15 bp, Homo sapiens
cggccaagattgaga

SEQ ID NO: 597418 - DNA, 15 bp, Homo sapiens
ggccaagattgagaa

SEQ ID NO: 597419 - DNA, 15 bp, Homo sapiens
gccaagattgagaat

SEQ ID NO: 597420 - DNA, 15 bp, Homo sapiens
ccaagattgagaatc

SEQ ID NO: 597421 - DNA, 15 bp, Homo sapiens
caagattgagaatca

SEQ ID NO: 597422 - DNA, 15 bp, Homo sapiens
aagattgagaatcac

SEQ ID NO: 597423 - DNA, 15 bp, Homo sapiens
agattgagaatcact

SEQ ID NO: 597424 - DNA, 15 bp, Homo sapiens
gattgagaatcactg

SEQ ID NO: 597425 - DNA, 15 bp, Homo sapiens
attgagaatcactga

SEQ ID NO: 597426 - DNA, 15 bp, Homo sapiens
ttgagaatcactgac

SEQ ID NO: 597427 - DNA, 15 bp, Homo sapiens
tgagaatcactgacc

SEQ ID NO: 597428 - DNA, 15 bp, Homo sapiens
gagaatcactgacct

SEQ ID NO: 597429 - DNA, 15 bp, Homo sapiens
agaatcactgaccta

SEQ ID NO: 597430 - DNA, 15 bp, Homo sapiens
gaatcactgacctag

SEQ ID NO: 597431 - DNA, 15 bp, Homo sapiens
aatcactgacctaga

SEQ ID NO: 597432 - DNA, 15 bp, Homo sapiens
atcactgacctagag

SEQ ID NO: 597433 - DNA, 15 bp, Homo sapiens
tcactgacctagagt

SEQ ID NO: 597434 - DNA, 15 bp, Homo sapiens
cactgacctagagtt

SEQ ID NO: 597435 - DNA, 15 bp, Homo sapiens
actgacctagagttt

SEQ ID NO: 597436 - DNA, 15 bp, Homo sapiens
ctgacctagagttta

SEQ ID NO: 597437 - DNA, 15 bp, Homo sapiens
tgacctagagtttaa

SEQ ID NO: 597438 - DNA, 15 bp, Homo sapiens
gacctagagtttaat

SEQ ID NO: 597439 - DNA, 15 bp, Homo sapiens
acctagagtttaatt

SEQ ID NO: 597440 - DNA, 15 bp, Homo sapiens
cctagagtttaattt

SEQ ID NO: 597441 - DNA, 15 bp, Homo sapiens
ctagagtttaattta

SEQ ID NO: 597442 - DNA, 15 bp, Homo sapiens
tagagtttaatttac

SEQ ID NO: 597443 - DNA, 15 bp, Homo sapiens
agagtttaatttacc

SEQ ID NO: 597444 - DNA, 15 bp, Homo sapiens
gagtttaatttacca

SEQ ID NO: 597445 - DNA, 15 bp, Homo sapiens
agtttaatttaccac

SEQ ID NO: 597446 - DNA, 15 bp, Homo sapiens
gtttaatttaccacc

SEQ ID NO: 597447 - DNA, 15 bp, Homo sapiens
tttaatttaccacct

SEQ ID NO: 597448 - DNA, 15 bp, Homo sapiens
ttaatttaccacctc

SEQ ID NO: 597449 - DNA, 15 bp, Homo sapiens
taatttaccacctca

SEQ ID NO: 597450 - DNA, 15 bp, Homo sapiens
aatttaccacctcag

SEQ ID NO: 597451 - DNA, 15 bp, Homo sapiens
atttaccacctcagt

SEQ ID NO: 597452 - DNA, 15 bp, Homo sapiens
tttaccacctcagtc

SEQ ID NO: 597453 - DNA, 15 bp, Homo sapiens
ttaccacctcagtct

SEQ ID NO: 597454 - DNA, 15 bp, Homo sapiens
taccacctcagtctc

SEQ ID NO: 597455 - DNA, 15 bp, Homo sapiens
accacctcagtctct

SEQ ID NO: 597456 - DNA, 15 bp, Homo sapiens
ccacctcagtctcta

SEQ ID NO: 597457 - DNA, 15 bp, Homo sapiens
cacctcagtctctat

SEQ ID NO: 597458 - DNA, 15 bp, Homo sapiens
acctcagtctctata

SEQ ID NO: 597459 - DNA, 15 bp, Homo sapiens
cctcagtctctatag

SEQ ID NO: 597460 - DNA, 15 bp, Homo sapiens
ctcagtctctataga

SEQ ID NO: 597461 - DNA, 15 bp, Homo sapiens
tcagtctctatagac

SEQ ID NO: 597462 - DNA, 15 bp, Homo sapiens
cagtctctatagacc

SEQ ID NO: 597463 - DNA, 15 bp, Homo sapiens
agtctctatagacca

SEQ ID NO: 597464 - DNA, 15 bp, Homo sapiens
gtctctatagaccac

SEQ ID NO: 597465 - DNA, 15 bp, Homo sapiens
tctctatagaccacg

SEQ ID NO: 597466 - DNA, 15 bp, Homo sapiens
ctctatagaccacgc

SEQ ID NO: 597467 - DNA, 15 bp, Homo sapiens
tctatagaccacgca

SEQ ID NO: 597468 - DNA, 15 bp, Homo sapiens
ctatagaccacgcat

SEQ ID NO: 597469 - DNA, 15 bp, Homo sapiens
tatagaccacgcata

SEQ ID NO: 597470 - DNA, 15 bp, Homo sapiens
atagaccacgcataa

SEQ ID NO: 597471 - DNA, 15 bp, Homo sapiens
tagaccacgcataat

SEQ ID NO: 597472 - DNA, 15 bp, Homo sapiens
agaccacgcataata

SEQ ID NO: 597473 - DNA, 15 bp, Homo sapiens
gaccacgcataataa

SEQ ID NO: 597474 - DNA, 15 bp, Homo sapiens
accacgcataataat

SEQ ID NO: 597475 - DNA, 15 bp, Homo sapiens
ccacgcataataata

SEQ ID NO: 597476 - DNA, 15 bp, Homo sapiens
cacgcataataatag

SEQ ID NO: 597477 - DNA, 15 bp, Homo sapiens
acgcataataatagt

SEQ ID NO: 597478 - DNA, 15 bp, Homo sapiens
cgcataataatagta

SEQ ID NO: 597479 - DNA, 15 bp, Homo sapiens
gcataataatagtac

SEQ ID NO: 597480 - DNA, 15 bp, Homo sapiens
cataataatagtacc

SEQ ID NO: 597481 - DNA, 15 bp, Homo sapiens
ataataatagtaccc

SEQ ID NO: 597482 - DNA, 15 bp, Homo sapiens
taataatagtacccc

SEQ ID NO: 597483 - DNA, 15 bp, Homo sapiens
aataatagtacccca

SEQ ID NO: 597484 - DNA, 15 bp, Homo sapiens
ataatagtaccccac

SEQ ID NO: 597485 - DNA, 15 bp, Homo sapiens
taatagtaccccaca

SEQ ID NO: 597486 - DNA, 15 bp, Homo sapiens
aatagtaccccacac

SEQ ID NO: 597487 - DNA, 15 bp, Homo sapiens
atagtaccccacaca

SEQ ID NO: 597488 - DNA, 15 bp, Homo sapiens
tagtaccccacacac

SEQ ID NO: 597489 - DNA, 15 bp, Homo sapiens
agtaccccacacacc

SEQ ID NO: 597490 - DNA, 15 bp, Homo sapiens
gtaccccacacacct

SEQ ID NO: 597491 - DNA, 15 bp, Homo sapiens
taccccacacacctc

SEQ ID NO: 597492 - DNA, 15 bp, Homo sapiens
accccacacacctct

SEQ ID NO: 597493 - DNA, 15 bp, Homo sapiens
ccccacacacctctg

SEQ ID NO: 597494 - DNA, 15 bp, Homo sapiens
cccacacacctctga

SEQ ID NO: 597495 - DNA, 15 bp, Homo sapiens
ccacacacctctgag

SEQ ID NO: 597496 - DNA, 15 bp, Homo sapiens
cacacacctctgagg

SEQ ID NO: 597497 - DNA, 15 bp, Homo sapiens
acacacctctgaggg

SEQ ID NO: 597498 - DNA, 15 bp, Homo sapiens
cacacctctgagggt

SEQ ID NO: 597499 - DNA, 15 bp, Homo sapiens
acacctctgagggtc

SEQ ID NO: 597500 - DNA, 15 bp, Homo sapiens
cacctctgagggtcc

SEQ ID NO: 597501 - DNA, 15 bp, Homo sapiens
acctctgagggtcca

SEQ ID NO: 597502 - DNA, 15 bp, Homo sapiens
cctctgagggtccaa

SEQ ID NO: 597503 - DNA, 15 bp, Homo sapiens
ctctgagggtccaaa

SEQ ID NO: 597504 - DNA, 15 bp, Homo sapiens
tctgagggtccaaag

SEQ ID NO: 597505 - DNA, 15 bp, Homo sapiens
ctgagggtccaaaga

SEQ ID NO: 597506 - DNA, 15 bp, Homo sapiens
tgagggtccaaagaa

SEQ ID NO: 597507 - DNA, 15 bp, Homo sapiens
gagggtccaaagaac

SEQ ID NO: 597508 - DNA, 15 bp, Homo sapiens
agggtccaaagaact

SEQ ID NO: 597509 - DNA, 15 bp, Homo sapiens
gggtccaaagaactt

SEQ ID NO: 597510 - DNA, 15 bp, Homo sapiens
ggtccaaagaacttt

SEQ ID NO: 597511 - DNA, 15 bp, Homo sapiens
gtccaaagaactttc

SEQ ID NO: 597512 - DNA, 15 bp, Homo sapiens
tccaaagaactttca

SEQ ID NO: 597513 - DNA, 15 bp, Homo sapiens
ccaaagaactttcat

SEQ ID NO: 597514 - DNA, 15 bp, Homo sapiens
caaagaactttcatt

SEQ ID NO: 597515 - DNA, 15 bp, Homo sapiens
aaagaactttcattt

SEQ ID NO: 597516 - DNA, 15 bp, Homo sapiens
aagaactttcatttg

SEQ ID NO: 597517 - DNA, 15 bp, Homo sapiens
agaactttcatttga

SEQ ID NO: 597518 - DNA, 15 bp, Homo sapiens
gaactttcatttgat

SEQ ID NO: 597519 - DNA, 15 bp, Homo sapiens
aactttcatttgatc

SEQ ID NO: 597520 - DNA, 15 bp, Homo sapiens
actttcatttgatca

SEQ ID NO: 597521 - DNA, 15 bp, Homo sapiens
ctttcatttgatcac

SEQ ID NO: 597522 - DNA, 15 bp, Homo sapiens
tttcatttgatcacc

SEQ ID NO: 597523 - DNA, 15 bp, Homo sapiens
ttcatttgatcaccc

SEQ ID NO: 597524 - DNA, 15 bp, Homo sapiens
tcatttgatcaccca

SEQ ID NO: 597525 - DNA, 15 bp, Homo sapiens
catttgatcacccat

SEQ ID NO: 597526 - DNA, 15 bp, Homo sapiens
atttgatcacccatg

SEQ ID NO: 597527 - DNA, 15 bp, Homo sapiens
tttgatcacccatga

SEQ ID NO: 597528 - DNA, 15 bp, Homo sapiens
ttgatcacccatgag

SEQ ID NO: 597529 - DNA, 15 bp, Homo sapiens
tgatcacccatgaga

SEQ ID NO: 597530 - DNA, 15 bp, Homo sapiens
gatcacccatgagac

SEQ ID NO: 597531 - DNA, 15 bp, Homo sapiens
atcacccatgagacc

SEQ ID NO: 597532 - DNA, 15 bp, Homo sapiens
tcacccatgagacca

SEQ ID NO: 597533 - DNA, 15 bp, Homo sapiens
cacccatgagaccac

SEQ ID NO: 597534 - DNA, 15 bp, Homo sapiens
acccatgagaccacc

SEQ ID NO: 597535 - DNA, 15 bp, Homo sapiens
cccatgagaccaccg

SEQ ID NO: 597536 - DNA, 15 bp, Homo sapiens
ccatgagaccaccgt

SEQ ID NO: 597537 - DNA, 15 bp, Homo sapiens
catgagaccaccgtg

SEQ ID NO: 597538 - DNA, 15 bp, Homo sapiens
atgagaccaccgtgg

SEQ ID NO: 597539 - DNA, 15 bp, Homo sapiens
tgagaccaccgtggt

SEQ ID NO: 597540 - DNA, 15 bp, Homo sapiens
gagaccaccgtggtg

SEQ ID NO: 597541 - DNA, 15 bp, Homo sapiens
agaccaccgtggtgt

SEQ ID NO: 597542 - DNA, 15 bp, Homo sapiens
gaccaccgtggtgtg

SEQ ID NO: 597543 - DNA, 15 bp, Homo sapiens
accaccgtggtgtgg

SEQ ID NO: 597544 - DNA, 15 bp, Homo sapiens
ccaccgtggtgtgga

SEQ ID NO: 597545 - DNA, 15 bp, Homo sapiens
caccgtggtgtggag

SEQ ID NO: 597546 - DNA, 15 bp, Homo sapiens
accgtggtgtggaga

SEQ ID NO: 597547 - DNA, 15 bp, Homo sapiens
ccgtggtgtggagat

SEQ ID NO: 597548 - DNA, 15 bp, Homo sapiens
cgtggtgtggagatg

SEQ ID NO: 597549 - DNA, 15 bp, Homo sapiens
gtggtgtggagatgc

SEQ ID NO: 597550 - DNA, 15 bp, Homo sapiens
tggtgtggagatgct

SEQ ID NO: 597551 - DNA, 15 bp, Homo sapiens
ggtgtggagatgctt

SEQ ID NO: 597552 - DNA, 15 bp, Homo sapiens
gtgtggagatgcttt

SEQ ID NO: 597553 - DNA, 15 bp, Homo sapiens
tgtggagatgctttc

SEQ ID NO: 597554 - DNA, 15 bp, Homo sapiens
gtggagatgctttct

SEQ ID NO: 597555 - DNA, 15 bp, Homo sapiens
tggagatgctttctc

SEQ ID NO: 597556 - DNA, 15 bp, Homo sapiens
ggagatgctttctct

SEQ ID NO: 597557 - DNA, 15 bp, Homo sapiens
gagatgctttctctc

SEQ ID NO: 597558 - DNA, 15 bp, Homo sapiens
agatgctttctctct

SEQ ID NO: 597559 - DNA, 15 bp, Homo sapiens
gatgctttctctctc

SEQ ID NO: 597560 - DNA, 15 bp, Homo sapiens
atgctttctctctcc

SEQ ID NO: 597561 - DNA, 15 bp, Homo sapiens
tgctttctctctcct

SEQ ID NO: 597562 - DNA, 15 bp, Homo sapiens
gctttctctctcctg

SEQ ID NO: 597563 - DNA, 15 bp, Homo sapiens
ctttctctctcctgt

SEQ ID NO: 597564 - DNA, 15 bp, Homo sapiens
tttctctctcctgtt

SEQ ID NO: 597565 - DNA, 15 bp, Homo sapiens
ttctctctcctgttc

SEQ ID NO: 597566 - DNA, 15 bp, Homo sapiens
tctctctcctgttct

SEQ ID NO: 597567 - DNA, 15 bp, Homo sapiens
ctctctcctgttctc

SEQ ID NO: 597568 - DNA, 15 bp, Homo sapiens
tctctcctgttctct

SEQ ID NO: 597569 - DNA, 15 bp, Homo sapiens
ctctcctgttctctt

SEQ ID NO: 597570 - DNA, 15 bp, Homo sapiens
tctcctgttctctta

SEQ ID NO: 597571 - DNA, 15 bp, Homo sapiens
ctcctgttctcttaa

SEQ ID NO: 597572 - DNA, 15 bp, Homo sapiens
tcctgttctcttaac

SEQ ID NO: 597573 - DNA, 15 bp, Homo sapiens
cctgttctcttaaca

SEQ ID NO: 597574 - DNA, 15 bp, Homo sapiens
ctgttctcttaacaa

SEQ ID NO: 597575 - DNA, 15 bp, Homo sapiens
tgttctcttaacaaa

SEQ ID NO: 597576 - DNA, 15 bp, Homo sapiens
gttctcttaacaaag

SEQ ID NO: 597577 - DNA, 15 bp, Homo sapiens
ttctcttaacaaagc

SEQ ID NO: 597578 - DNA, 15 bp, Homo sapiens
tctcttaacaaagct

SEQ ID NO: 597579 - DNA, 15 bp, Homo sapiens
ctcttaacaaagctg

SEQ ID NO: 597580 - DNA, 15 bp, Homo sapiens
tcttaacaaagctgg

SEQ ID NO: 597581 - DNA, 15 bp, Homo sapiens
cttaacaaagctggt

SEQ ID NO: 597582 - DNA, 15 bp, Homo sapiens
ttaacaaagctggtg

SEQ ID NO: 597583 - DNA, 15 bp, Homo sapiens
taacaaagctggtga

SEQ ID NO: 597584 - DNA, 15 bp, Homo sapiens
aacaaagctggtgag

SEQ ID NO: 597585 - DNA, 15 bp, Homo sapiens
acaaagctggtgagc

SEQ ID NO: 597586 - DNA, 15 bp, Homo sapiens
caaagctggtgagcg

SEQ ID NO: 597587 - DNA, 15 bp, Homo sapiens
aaagctggtgagcga

SEQ ID NO: 597588 - DNA, 15 bp, Homo sapiens
aagctggtgagcgac

SEQ ID NO: 597589 - DNA, 15 bp, Homo sapiens
agctggtgagcgaca

SEQ ID NO: 597590 - DNA, 15 bp, Homo sapiens
gctggtgagcgacag

SEQ ID NO: 597591 - DNA, 15 bp, Homo sapiens
ctggtgagcgacaga

SEQ ID NO: 597592 - DNA, 15 bp, Homo sapiens
tggtgagcgacagag

SEQ ID NO: 597593 - DNA, 15 bp, Homo sapiens
ggtgagcgacagagc

SEQ ID NO: 597594 - DNA, 15 bp, Homo sapiens
gtgagcgacagagcc

SEQ ID NO: 597595 - DNA, 15 bp, Homo sapiens
tgagcgacagagcct

SEQ ID NO: 597596 - DNA, 15 bp, Homo sapiens
gagcgacagagcctg

SEQ ID NO: 597597 - DNA, 15 bp, Homo sapiens
agcgacagagcctgc

SEQ ID NO: 597598 - DNA, 15 bp, Homo sapiens
gcgacagagcctgca

SEQ ID NO: 597599 - DNA, 15 bp, Homo sapiens
cgacagagcctgcag

SEQ ID NO: 597600 - DNA, 15 bp, Homo sapiens
gacagagcctgcagt

SEQ ID NO: 597601 - DNA, 15 bp, Homo sapiens
acagagcctgcagtg

SEQ ID NO: 597602 - DNA, 15 bp, Homo sapiens
cagagcctgcagtgg

SEQ ID NO: 597603 - DNA, 15 bp, Homo sapiens
agagcctgcagtgga

SEQ ID NO: 597604 - DNA, 15 bp, Homo sapiens
gagcctgcagtggac

SEQ ID NO: 597605 - DNA, 15 bp, Homo sapiens
agcctgcagtggacc

SEQ ID NO: 597606 - DNA, 15 bp, Homo sapiens
gcctgcagtggaccg

SEQ ID NO: 597607 - DNA, 15 bp, Homo sapiens
cctgcagtggaccgg

SEQ ID NO: 597608 - DNA, 15 bp, Homo sapiens
ctgcagtggaccggg

SEQ ID NO: 597609 - DNA, 15 bp, Homo sapiens
tgcagtggaccggga

SEQ ID NO: 597610 - DNA, 15 bp, Homo sapiens
gcagtggaccgggag

SEQ ID NO: 597611 - DNA, 15 bp, Homo sapiens
cagtggaccgggaga

SEQ ID NO: 597612 - DNA, 15 bp, Homo sapiens
agtggaccgggagat

SEQ ID NO: 597613 - DNA, 15 bp, Homo sapiens
gtggaccgggagatg

SEQ ID NO: 597614 - DNA, 15 bp, Homo sapiens
tggaccgggagatgg

SEQ ID NO: 597615 - DNA, 15 bp, Homo sapiens
ggaccgggagatggc

SEQ ID NO: 597616 - DNA, 15 bp, Homo sapiens
gaccgggagatggcc

SEQ ID NO: 597617 - DNA, 15 bp, Homo sapiens
accgggagatggccc

SEQ ID NO: 597618 - DNA, 15 bp, Homo sapiens
ccgggagatggccca

SEQ ID NO: 597619 - DNA, 15 bp, Homo sapiens
cgggagatggcccag

SEQ ID NO: 597620 - DNA, 15 bp, Homo sapiens
gggagatggcccaga

SEQ ID NO: 597621 - DNA, 15 bp, Homo sapiens
ggagatggcccagag

SEQ ID NO: 597622 - DNA, 15 bp, Homo sapiens
gagatggcccagagg

SEQ ID NO: 597623 - DNA, 15 bp, Homo sapiens
agatggcccagagga

SEQ ID NO: 597624 - DNA, 15 bp, Homo sapiens
gatggcccagaggag

SEQ ID NO: 597625 - DNA, 15 bp, Homo sapiens
atggcccagaggaga

SEQ ID NO: 597626 - DNA, 15 bp, Homo sapiens
tggcccagaggagaa

SEQ ID NO: 597627 - DNA, 15 bp, Homo sapiens
ggcccagaggagaaa

SEQ ID NO: 597628 - DNA, 15 bp, Homo sapiens
gcccagaggagaaag

SEQ ID NO: 597629 - DNA, 15 bp, Homo sapiens
cccagaggagaaagc

SEQ ID NO: 597630 - DNA, 15 bp, Homo sapiens
ccagaggagaaagct

SEQ ID NO: 597631 - DNA, 15 bp, Homo sapiens
cagaggagaaagctc

SEQ ID NO: 597632 - DNA, 15 bp, Homo sapiens
agaggagaaagctct

SEQ ID NO: 597633 - DNA, 15 bp, Homo sapiens
gaggagaaagctctg

SEQ ID NO: 597634 - DNA, 15 bp, Homo sapiens
aggagaaagctctgc

SEQ ID NO: 597635 - DNA, 15 bp, Homo sapiens
ggagaaagctctgcc

SEQ ID NO: 597636 - DNA, 15 bp, Homo sapiens
gagaaagctctgccg

SEQ ID NO: 597637 - DNA, 15 bp, Homo sapiens
agaaagctctgccgt

SEQ ID NO: 597638 - DNA, 15 bp, Homo sapiens
gaaagctctgccgta

SEQ ID NO: 597639 - DNA, 15 bp, Homo sapiens
aaagctctgccgtag

SEQ ID NO: 597640 - DNA, 15 bp, Homo sapiens
aagctctgccgtagt

SEQ ID NO: 597641 - DNA, 15 bp, Homo sapiens
agctctgccgtagtc

SEQ ID NO: 597642 - DNA, 15 bp, Homo sapiens
gctctgccgtagtcg

SEQ ID NO: 597643 - DNA, 15 bp, Homo sapiens
ctctgccgtagtcgg

SEQ ID NO: 597644 - DNA, 15 bp, Homo sapiens
tctgccgtagtcggc

SEQ ID NO: 597645 - DNA, 15 bp, Homo sapiens
ctgccgtagtcggcc

SEQ ID NO: 597646 - DNA, 15 bp, Homo sapiens
tgccgtagtcggcct

SEQ ID NO: 597647 - DNA, 15 bp, Homo sapiens
gccgtagtcggcctc

SEQ ID NO: 597648 - DNA, 15 bp, Homo sapiens
ccgtagtcggcctca

SEQ ID NO: 597649 - DNA, 15 bp, Homo sapiens
cgtagtcggcctcag

SEQ ID NO: 597650 - DNA, 15 bp, Homo sapiens
gtagtcggcctcagt

SEQ ID NO: 597651 - DNA, 15 bp, Homo sapiens
tagtcggcctcagtt

SEQ ID NO: 597652 - DNA, 15 bp, Homo sapiens
agtcggcctcagtta

SEQ ID NO: 597653 - DNA, 15 bp, Homo sapiens
gtcggcctcagttaa

SEQ ID NO: 597654 - DNA, 15 bp, Homo sapiens
tcggcctcagttaac

SEQ ID NO: 597655 - DNA, 15 bp, Homo sapiens
cggcctcagttaacc

SEQ ID NO: 597656 - DNA, 15 bp, Homo sapiens
ggcctcagttaacca

SEQ ID NO: 597657 - DNA, 15 bp, Homo sapiens
gcctcagttaaccac

SEQ ID NO: 597658 - DNA, 15 bp, Homo sapiens
cctcagttaaccacg

SEQ ID NO: 597659 - DNA, 15 bp, Homo sapiens
ctcagttaaccacgg

SEQ ID NO: 597660 - DNA, 15 bp, Homo sapiens
tcagttaaccacgga

SEQ ID NO: 597661 - DNA, 15 bp, Homo sapiens
cagttaaccacggag

SEQ ID NO: 597662 - DNA, 15 bp, Homo sapiens
agttaaccacggagc

SEQ ID NO: 597663 - DNA, 15 bp, Homo sapiens
gttaaccacggagca

SEQ ID NO: 597664 - DNA, 15 bp, Homo sapiens
ttaaccacggagcac

SEQ ID NO: 597665 - DNA, 15 bp, Homo sapiens
taaccacggagcacc

SEQ ID NO: 597666 - DNA, 15 bp, Homo sapiens
aaccacggagcacca

SEQ ID NO: 597667 - DNA, 15 bp, Homo sapiens
accacggagcaccac

SEQ ID NO: 597668 - DNA, 15 bp, Homo sapiens
ccacggagcaccacc

SEQ ID NO: 597669 - DNA, 15 bp, Homo sapiens
cacggagcaccaccc

SEQ ID NO: 597670 - DNA, 15 bp, Homo sapiens
acggagcaccacccc

SEQ ID NO: 597671 - DNA, 15 bp, Homo sapiens
cggagcaccacccct

SEQ ID NO: 597672 - DNA, 15 bp, Homo sapiens
ggagcaccaccccta

SEQ ID NO: 597673 - DNA, 15 bp, Homo sapiens
gagcaccacccctac

SEQ ID NO: 597674 - DNA, 15 bp, Homo sapiens
agcaccacccctacc

SEQ ID NO: 597675 - DNA, 15 bp, Homo sapiens
gcaccacccctacct

SEQ ID NO: 597676 - DNA, 15 bp, Homo sapiens
caccacccctacctg

SEQ ID NO: 597677 - DNA, 15 bp, Homo sapiens
accacccctacctgc

SEQ ID NO: 597678 - DNA, 15 bp, Homo sapiens
ccacccctacctgct

SEQ ID NO: 597679 - DNA, 15 bp, Homo sapiens
cacccctacctgctc

SEQ ID NO: 597680 - DNA, 15 bp, Homo sapiens
acccctacctgctct

SEQ ID NO: 597681 - DNA, 15 bp, Homo sapiens
cccctacctgctctc

SEQ ID NO: 597682 - DNA, 15 bp, Homo sapiens
ccctacctgctctcc

SEQ ID NO: 597683 - DNA, 15 bp, Homo sapiens
cctacctgctctcct

SEQ ID NO: 597684 - DNA, 15 bp, Homo sapiens
ctacctgctctcctc

SEQ ID NO: 597685 - DNA, 15 bp, Homo sapiens
tacctgctctcctct

SEQ ID NO: 597686 - DNA, 15 bp, Homo sapiens
acctgctctcctctc

SEQ ID NO: 597687 - DNA, 15 bp, Homo sapiens
cctgctctcctctca

SEQ ID NO: 597688 - DNA, 15 bp, Homo sapiens
ctgctctcctctcac

SEQ ID NO: 597689 - DNA, 15 bp, Homo sapiens
tgctctcctctcact

SEQ ID NO: 597690 - DNA, 15 bp, Homo sapiens
gctctcctctcactc

SEQ ID NO: 597691 - DNA, 15 bp, Homo sapiens
ctctcctctcactcc

SEQ ID NO: 597692 - DNA, 15 bp, Homo sapiens
tctcctctcactcct

SEQ ID NO: 597693 - DNA, 15 bp, Homo sapiens
ctcctctcactcctg

SEQ ID NO: 597694 - DNA, 15 bp, Homo sapiens
tcctctcactcctgc

SEQ ID NO: 597695 - DNA, 15 bp, Homo sapiens
cctctcactcctgct

SEQ ID NO: 597696 - DNA, 15 bp, Homo sapiens
ctctcactcctgctt

SEQ ID NO: 597697 - DNA, 15 bp, Homo sapiens
tctcactcctgcttc

SEQ ID NO: 597698 - DNA, 15 bp, Homo sapiens
ctcactcctgcttcc

SEQ ID NO: 597699 - DNA, 15 bp, Homo sapiens
tcactcctgcttccg

SEQ ID NO: 597700 - DNA, 15 bp, Homo sapiens
cactcctgcttccgt

SEQ ID NO: 597701 - DNA, 15 bp, Homo sapiens
actcctgcttccgtc

SEQ ID NO: 597702 - DNA, 15 bp, Homo sapiens
ctcctgcttccgtct

SEQ ID NO: 597703 - DNA, 15 bp, Homo sapiens
tcctgcttccgtctc

SEQ ID NO: 597704 - DNA, 15 bp, Homo sapiens
cctgcttccgtctcg

SEQ ID NO: 597705 - DNA, 15 bp, Homo sapiens
ctgcttccgtctcgg

SEQ ID NO: 597706 - DNA, 15 bp, Homo sapiens
tgcttccgtctcggt

SEQ ID NO: 597707 - DNA, 15 bp, Homo sapiens
gcttccgtctcggtg

SEQ ID NO: 597708 - DNA, 15 bp, Homo sapiens
cttccgtctcggtgg

SEQ ID NO: 597709 - DNA, 15 bp, Homo sapiens
ttccgtctcggtgga

SEQ ID NO: 597710 - DNA, 15 bp, Homo sapiens
tccgtctcggtggag

SEQ ID NO: 597711 - DNA, 15 bp, Homo sapiens
ccgtctcggtggaga

SEQ ID NO: 597712 - DNA, 15 bp, Homo sapiens
cgtctcggtggagaa

SEQ ID NO: 597713 - DNA, 15 bp, Homo sapiens
gtctcggtggagaaa

SEQ ID NO: 597714 - DNA, 15 bp, Homo sapiens
tctcggtggagaaag

SEQ ID NO: 597715 - DNA, 15 bp, Homo sapiens
ctcggtggagaaaga

SEQ ID NO: 597716 - DNA, 15 bp, Homo sapiens
tcggtggagaaagat

SEQ ID NO: 597717 - DNA, 15 bp, Homo sapiens
cggtggagaaagatc

SEQ ID NO: 597718 - DNA, 15 bp, Homo sapiens
ggtggagaaagatcc

SEQ ID NO: 597719 - DNA, 15 bp, Homo sapiens
gtggagaaagatcca

SEQ ID NO: 597720 - DNA, 15 bp, Homo sapiens
tggagaaagatccaa

SEQ ID NO: 597721 - DNA, 15 bp, Homo sapiens
ggagaaagatccaac

SEQ ID NO: 597722 - DNA, 15 bp, Homo sapiens
gagaaagatccaacc

SEQ ID NO: 597723 - DNA, 15 bp, Homo sapiens
agaaagatccaaccg

SEQ ID NO: 597724 - DNA, 15 bp, Homo sapiens
gaaagatccaaccga

SEQ ID NO: 597725 - DNA, 15 bp, Homo sapiens
aaagatccaaccgaa

SEQ ID NO: 597726 - DNA, 15 bp, Homo sapiens
aagatccaaccgaag

SEQ ID NO: 597727 - DNA, 15 bp, Homo sapiens
agatccaaccgaagc

SEQ ID NO: 597728 - DNA, 15 bp, Homo sapiens
gatccaaccgaagca

SEQ ID NO: 597729 - DNA, 15 bp, Homo sapiens
atccaaccgaagcag

SEQ ID NO: 597730 - DNA, 15 bp, Homo sapiens
tccaaccgaagcagg

SEQ ID NO: 597731 - DNA, 15 bp, Homo sapiens
ccaaccgaagcagga

SEQ ID NO: 597732 - DNA, 15 bp, Homo sapiens
caaccgaagcaggac

SEQ ID NO: 597733 - DNA, 15 bp, Homo sapiens
aaccgaagcaggaca

SEQ ID NO: 597734 - DNA, 15 bp, Homo sapiens
accgaagcaggacac

SEQ ID NO: 597735 - DNA, 15 bp, Homo sapiens
ccgaagcaggacaca

SEQ ID NO: 597736 - DNA, 15 bp, Homo sapiens
cgaagcaggacacat

SEQ ID NO: 597737 - DNA, 15 bp, Homo sapiens
gaagcaggacacatc

SEQ ID NO: 597738 - DNA, 15 bp, Homo sapiens
aagcaggacacatct

SEQ ID NO: 597739 - DNA, 15 bp, Homo sapiens
agcaggacacatcta

SEQ ID NO: 597740 - DNA, 15 bp, Homo sapiens
gcaggacacatctag

SEQ ID NO: 597741 - DNA, 15 bp, Homo sapiens
caggacacatctagt

SEQ ID NO: 597742 - DNA, 15 bp, Homo sapiens
aggacacatctagtc

SEQ ID NO: 597743 - DNA, 15 bp, Homo sapiens
ggacacatctagtct

SEQ ID NO: 597744 - DNA, 15 bp, Homo sapiens
gacacatctagtctt

SEQ ID NO: 597745 - DNA, 15 bp, Homo sapiens
acacatctagtcttc

SEQ ID NO: 597746 - DNA, 15 bp, Homo sapiens
cacatctagtcttct

SEQ ID NO: 597747 - DNA, 15 bp, Homo sapiens
acatctagtcttctg

SEQ ID NO: 597748 - DNA, 15 bp, Homo sapiens
catctagtcttctgg

SEQ ID NO: 597749 - DNA, 15 bp, Homo sapiens
atctagtcttctggt

SEQ ID NO: 597750 - DNA, 15 bp, Homo sapiens
tctagtcttctggtg

SEQ ID NO: 597751 - DNA, 15 bp, Homo sapiens
ctagtcttctggtgc

SEQ ID NO: 597752 - DNA, 15 bp, Homo sapiens
tagtcttctggtgcc

SEQ ID NO: 597753 - DNA, 15 bp, Homo sapiens
agtcttctggtgcct

SEQ ID NO: 597754 - DNA, 15 bp, Homo sapiens
gtcttctggtgcctt

SEQ ID NO: 597755 - DNA, 15 bp, Homo sapiens
tcttctggtgccttt

SEQ ID NO: 597756 - DNA, 15 bp, Homo sapiens
cttctggtgccttta

SEQ ID NO: 597757 - DNA, 15 bp, Homo sapiens
ttctggtgcctttaa

SEQ ID NO: 597758 - DNA, 15 bp, Homo sapiens
tctggtgcctttaaa

SEQ ID NO: 597759 - DNA, 15 bp, Homo sapiens
ctggtgcctttaaaa

SEQ ID NO: 597760 - DNA, 15 bp, Homo sapiens
tggtgcctttaaaat

SEQ ID NO: 597761 - DNA, 15 bp, Homo sapiens
ggtgcctttaaaatg

SEQ ID NO: 597762 - DNA, 15 bp, Homo sapiens
gtgcctttaaaatgt

SEQ ID NO: 597763 - DNA, 15 bp, Homo sapiens
tgcctttaaaatgta

SEQ ID NO: 597764 - DNA, 15 bp, Homo sapiens
gcctttaaaatgtac

SEQ ID NO: 597765 - DNA, 15 bp, Homo sapiens
cctttaaaatgtact

SEQ ID NO: 597766 - DNA, 15 bp, Homo sapiens
ctttaaaatgtactt

SEQ ID NO: 597767 - DNA, 15 bp, Homo sapiens
tttaaaatgtacttt

SEQ ID NO: 597768 - DNA, 15 bp, Homo sapiens
ttaaaatgtactttt

SEQ ID NO: 597769 - DNA, 15 bp, Homo sapiens
taaaatgtacttttc

SEQ ID NO: 597770 - DNA, 15 bp, Homo sapiens
aaaatgtacttttcc

SEQ ID NO: 597771 - DNA, 15 bp, Homo sapiens
aaatgtacttttcca

SEQ ID NO: 597772 - DNA, 15 bp, Homo sapiens
aatgtacttttccat

SEQ ID NO: 597773 - DNA, 15 bp, Homo sapiens
atgtacttttccatt

SEQ ID NO: 597774 - DNA, 15 bp, Homo sapiens
tgtacttttccattt

SEQ ID NO: 597775 - DNA, 15 bp, Homo sapiens
gtacttttccatttg

SEQ ID NO: 597776 - DNA, 15 bp, Homo sapiens
tacttttccatttga

SEQ ID NO: 597777 - DNA, 15 bp, Homo sapiens
acttttccatttgac

SEQ ID NO: 597778 - DNA, 15 bp, Homo sapiens
cttttccatttgaca

SEQ ID NO: 597779 - DNA, 15 bp, Homo sapiens
ttttccatttgacaa

SEQ ID NO: 597780 - DNA, 15 bp, Homo sapiens
tttccatttgacaaa

SEQ ID NO: 597781 - DNA, 15 bp, Homo sapiens
ttccatttgacaaat

SEQ ID NO: 597782 - DNA, 15 bp, Homo sapiens
tccatttgacaaatg

SEQ ID NO: 597783 - DNA, 15 bp, Homo sapiens
ccatttgacaaatgg

SEQ ID NO: 597784 - DNA, 15 bp, Homo sapiens
catttgacaaatgga

SEQ ID NO: 597785 - DNA, 15 bp, Homo sapiens
atttgacaaatggat

SEQ ID NO: 597786 - DNA, 15 bp, Homo sapiens
tttgacaaatggatt

SEQ ID NO: 597787 - DNA, 15 bp, Homo sapiens
ttgacaaatggatta

SEQ ID NO: 597788 - DNA, 15 bp, Homo sapiens
tgacaaatggattac

SEQ ID NO: 597789 - DNA, 15 bp, Homo sapiens
gacaaatggattaca

SEQ ID NO: 597790 - DNA, 15 bp, Homo sapiens
acaaatggattacac

SEQ ID NO: 597791 - DNA, 15 bp, Homo sapiens
caaatggattacact

SEQ ID NO: 597792 - DNA, 15 bp, Homo sapiens
aaatggattacacta

SEQ ID NO: 597793 - DNA, 15 bp, Homo sapiens
aatggattacactaa

SEQ ID NO: 597794 - DNA, 15 bp, Homo sapiens
atggattacactaaa

SEQ ID NO: 597795 - DNA, 15 bp, Homo sapiens
tggattacactaaaa

SEQ ID NO: 597796 - DNA, 15 bp, Homo sapiens
ggattacactaaaaa

SEQ ID NO: 597797 - DNA, 15 bp, Homo sapiens
gattacactaaaaac

SEQ ID NO: 597798 - DNA, 15 bp, Homo sapiens
attacactaaaaaca

SEQ ID NO: 597799 - DNA, 15 bp, Homo sapiens
ttacactaaaaacaa

SEQ ID NO: 597800 - DNA, 15 bp, Homo sapiens
tacactaaaaacaaa

SEQ ID NO: 597801 - DNA, 15 bp, Homo sapiens
acactaaaaacaaaa

SEQ ID NO: 597802 - DNA, 15 bp, Homo sapiens
cactaaaaacaaaaa

SEQ ID NO: 597803 - DNA, 15 bp, Homo sapiens
actaaaaacaaaaat

SEQ ID NO: 597804 - DNA, 15 bp, Homo sapiens
ctaaaaacaaaaatt

SEQ ID NO: 597805 - DNA, 15 bp, Homo sapiens
taaaaacaaaaattt

SEQ ID NO: 597806 - DNA, 15 bp, Homo sapiens
aaaaacaaaaattta

SEQ ID NO: 597807 - DNA, 15 bp, Homo sapiens
aaaacaaaaatttac

SEQ ID NO: 597808 - DNA, 15 bp, Homo sapiens
aaacaaaaatttaca

SEQ ID NO: 597809 - DNA, 15 bp, Homo sapiens
aacaaaaatttacaa

SEQ ID NO: 597810 - DNA, 15 bp, Homo sapiens
acaaaaatttacaaa

SEQ ID NO: 597811 - DNA, 15 bp, Homo sapiens
caaaaatttacaaaa

SEQ ID NO: 597812 - DNA, 15 bp, Homo sapiens
aaaaatttacaaaaa

SEQ ID NO: 597813 - DNA, 15 bp, Homo sapiens
aaaatttacaaaaaa

SEQ ID NO: 597814 - DNA, 15 bp, Homo sapiens
aaatttacaaaaaaa

SEQ ID NO: 597815 - DNA, 15 bp, Homo sapiens
aatttacaaaaaaaa

SEQ ID NO: 597816 - DNA, 15 bp, Homo sapiens
atttacaaaaaaaaa

SEQ ID NO: 597817 - DNA, 15 bp, Homo sapiens
tttacaaaaaaaaaa

SEQ ID NO: 597818 - DNA, 15 bp, Homo sapiens
ttacaaaaaaaaaaa

SEQ ID NO: 597819 - DNA, 15 bp, Homo sapiens
tacaaaaaaaaaaaa

SEQ ID NO: 597820 - DNA, 15 bp, Homo sapiens
acaaaaaaaaaaaaa

SEQ ID NO: 597821 - DNA, 15 bp, Homo sapiens
aaaaaaaaaaaaaaa

SEQ ID NO: 597822 - DNA, 15 bp, Homo sapiens
aaaaaaaaaaaaacc

SEQ ID NO: 597823 - DNA, 15 bp, Homo sapiens
aaaaaaaaaaaacct

SEQ ID NO: 597824 - DNA, 15 bp, Homo sapiens
aaaaaaaaaaacctg

SEQ ID NO: 597825 - DNA, 15 bp, Homo sapiens
aaaaaaaaaacctga

SEQ ID NO: 597826 - DNA, 15 bp, Homo sapiens
aaaaaaaaacctgaa

SEQ ID NO: 597827 - DNA, 15 bp, Homo sapiens
aaaaaaaacctgaaa

SEQ ID NO: 597828 - DNA, 15 bp, Homo sapiens
aaaaaaacctgaaag

SEQ ID NO: 597829 - DNA, 15 bp, Homo sapiens
aaaaaacctgaaaga

SEQ ID NO: 597830 - DNA, 15 bp, Homo sapiens
aaaaacctgaaagaa

SEQ ID NO: 597831 - DNA, 15 bp, Homo sapiens
aaaacctgaaagaaa

SEQ ID NO: 597832 - DNA, 15 bp, Homo sapiens
aaacctgaaagaaat

SEQ ID NO: 597833 - DNA, 15 bp, Homo sapiens
aacctgaaagaaatt

SEQ ID NO: 597834 - DNA, 15 bp, Homo sapiens
acctgaaagaaattg

SEQ ID NO: 597835 - DNA, 15 bp, Homo sapiens
cctgaaagaaattgc

SEQ ID NO: 597836 - DNA, 15 bp, Homo sapiens
ctgaaagaaattgca

SEQ ID NO: 597837 - DNA, 15 bp, Homo sapiens
tgaaagaaattgcag

SEQ ID NO: 597838 - DNA, 15 bp, Homo sapiens
gaaagaaattgcagg

SEQ ID NO: 597839 - DNA, 15 bp, Homo sapiens
aaagaaattgcaggc

SEQ ID NO: 597840 - DNA, 15 bp, Homo sapiens
aagaaattgcaggca

SEQ ID NO: 597841 - DNA, 15 bp, Homo sapiens
agaaattgcaggcat

SEQ ID NO: 597842 - DNA, 15 bp, Homo sapiens
gaaattgcaggcatt

SEQ ID NO: 597843 - DNA, 15 bp, Homo sapiens
aaattgcaggcatta

SEQ ID NO: 597844 - DNA, 15 bp, Homo sapiens
aattgcaggcattaa

SEQ ID NO: 597845 - DNA, 15 bp, Homo sapiens
attgcaggcattaaa

SEQ ID NO: 597846 - DNA, 15 bp, Homo sapiens
ttgcaggcattaaaa

SEQ ID NO: 597847 - DNA, 15 bp, Homo sapiens
tgcaggcattaaaat

SEQ ID NO: 597848 - DNA, 15 bp, Homo sapiens
gcaggcattaaaatg

SEQ ID NO: 597849 - DNA, 15 bp, Homo sapiens
caggcattaaaatgg

SEQ ID NO: 597850 - DNA, 15 bp, Homo sapiens
aggcattaaaatggg

SEQ ID NO: 597851 - DNA, 15 bp, Homo sapiens
ggcattaaaatggga

SEQ ID NO: 597852 - DNA, 15 bp, Homo sapiens
gcattaaaatgggac

SEQ ID NO: 597853 - DNA, 15 bp, Homo sapiens
cattaaaatgggact

SEQ ID NO: 597854 - DNA, 15 bp, Homo sapiens
attaaaatgggactt

SEQ ID NO: 597855 - DNA, 15 bp, Homo sapiens
ttaaaatgggacttt

SEQ ID NO: 597856 - DNA, 15 bp, Homo sapiens
taaaatgggactttg

SEQ ID NO: 597857 - DNA, 15 bp, Homo sapiens
aaaatgggactttgc

SEQ ID NO: 597858 - DNA, 15 bp, Homo sapiens
aaatgggactttgcc

SEQ ID NO: 597859 - DNA, 15 bp, Homo sapiens
aatgggactttgcct

SEQ ID NO: 597860 - DNA, 15 bp, Homo sapiens
atgggactttgcctt

SEQ ID NO: 597861 - DNA, 15 bp, Homo sapiens
tgggactttgccttt

SEQ ID NO: 597862 - DNA, 15 bp, Homo sapiens
gggactttgccttta

SEQ ID NO: 597863 - DNA, 15 bp, Homo sapiens
ggactttgcctttat

SEQ ID NO: 597864 - DNA, 15 bp, Homo sapiens
gactttgcctttatt

SEQ ID NO: 597865 - DNA, 15 bp, Homo sapiens
actttgcctttattg

SEQ ID NO: 597866 - DNA, 15 bp, Homo sapiens
ctttgcctttattgc

SEQ ID NO: 597867 - DNA, 15 bp, Homo sapiens
tttgcctttattgct

SEQ ID NO: 597868 - DNA, 15 bp, Homo sapiens
ttgcctttattgctc

SEQ ID NO: 597869 - DNA, 15 bp, Homo sapiens
tgcctttattgctcc

SEQ ID NO: 597870 - DNA, 15 bp, Homo sapiens
gcctttattgctcct

SEQ ID NO: 597871 - DNA, 15 bp, Homo sapiens
cctttattgctcctg

SEQ ID NO: 597872 - DNA, 15 bp, Homo sapiens
ctttattgctcctgg

SEQ ID NO: 597873 - DNA, 15 bp, Homo sapiens
tttattgctcctggg

SEQ ID NO: 597874 - DNA, 15 bp, Homo sapiens
ttattgctcctgggc

SEQ ID NO: 597875 - DNA, 15 bp, Homo sapiens
tattgctcctgggcc

SEQ ID NO: 597876 - DNA, 15 bp, Homo sapiens
attgctcctgggccc

SEQ ID NO: 597877 - DNA, 15 bp, Homo sapiens
ttgctcctgggccca

SEQ ID NO: 597878 - DNA, 15 bp, Homo sapiens
tgctcctgggcccat

SEQ ID NO: 597879 - DNA, 15 bp, Homo sapiens
gctcctgggcccatc

SEQ ID NO: 597880 - DNA, 15 bp, Homo sapiens
ctcctgggcccatcc

SEQ ID NO: 597881 - DNA, 15 bp, Homo sapiens
tcctgggcccatcct

SEQ ID NO: 597882 - DNA, 15 bp, Homo sapiens
cctgggcccatccta

SEQ ID NO: 597883 - DNA, 15 bp, Homo sapiens
ctgggcccatcctat

SEQ ID NO: 597884 - DNA, 15 bp, Homo sapiens
tgggcccatcctatt

SEQ ID NO: 597885 - DNA, 15 bp, Homo sapiens
gggcccatcctattt

SEQ ID NO: 597886 - DNA, 15 bp, Homo sapiens
ggcccatcctatttg

SEQ ID NO: 597887 - DNA, 15 bp, Homo sapiens
gcccatcctatttgg

SEQ ID NO: 597888 - DNA, 15 bp, Homo sapiens
cccatcctatttggg

SEQ ID NO: 597889 - DNA, 15 bp, Homo sapiens
ccatcctatttgggt

SEQ ID NO: 597890 - DNA, 15 bp, Homo sapiens
catcctatttgggtt

SEQ ID NO: 597891 - DNA, 15 bp, Homo sapiens
atcctatttgggttt

SEQ ID NO: 597892 - DNA, 15 bp, Homo sapiens
tcctatttgggtttt

SEQ ID NO: 597893 - DNA, 15 bp, Homo sapiens
cctatttgggttttt

SEQ ID NO: 597894 - DNA, 15 bp, Homo sapiens
ctatttgggttttta

SEQ ID NO: 597895 - DNA, 15 bp, Homo sapiens
tatttgggtttttag

SEQ ID NO: 597896 - DNA, 15 bp, Homo sapiens
atttgggtttttaga

SEQ ID NO: 597897 - DNA, 15 bp, Homo sapiens
tttgggtttttagaa

SEQ ID NO: 597898 - DNA, 15 bp, Homo sapiens
ttgggtttttagaaa

SEQ ID NO: 597899 - DNA, 15 bp, Homo sapiens
tgggtttttagaaaa

SEQ ID NO: 597900 - DNA, 15 bp, Homo sapiens
gggtttttagaaaaa

SEQ ID NO: 597901 - DNA, 15 bp, Homo sapiens
ggtttttagaaaaac

SEQ ID NO: 597902 - DNA, 15 bp, Homo sapiens
gtttttagaaaaaca

SEQ ID NO: 597903 - DNA, 15 bp, Homo sapiens
tttttagaaaaacaa

SEQ ID NO: 597904 - DNA, 15 bp, Homo sapiens
ttttagaaaaacaag

SEQ ID NO: 597905 - DNA, 15 bp, Homo sapiens
tttagaaaaacaagc

SEQ ID NO: 597906 - DNA, 15 bp, Homo sapiens
ttagaaaaacaagcc

SEQ ID NO: 597907 - DNA, 15 bp, Homo sapiens
tagaaaaacaagcct

SEQ ID NO: 597908 - DNA, 15 bp, Homo sapiens
agaaaaacaagcctg

SEQ ID NO: 597909 - DNA, 15 bp, Homo sapiens
gaaaaacaagcctga

SEQ ID NO: 597910 - DNA, 15 bp, Homo sapiens
aaaaacaagcctgag

SEQ ID NO: 597911 - DNA, 15 bp, Homo sapiens
aaaacaagcctgagg

SEQ ID NO: 597912 - DNA, 15 bp, Homo sapiens
aaacaagcctgaggc

SEQ ID NO: 597913 - DNA, 15 bp, Homo sapiens
aacaagcctgaggca

SEQ ID NO: 597914 - DNA, 15 bp, Homo sapiens
acaagcctgaggcag

SEQ ID NO: 597915 - DNA, 15 bp, Homo sapiens
caagcctgaggcagg

SEQ ID NO: 597916 - DNA, 15 bp, Homo sapiens
aagcctgaggcaggc

SEQ ID NO: 597917 - DNA, 15 bp, Homo sapiens
agcctgaggcaggcc

SEQ ID NO: 597918 - DNA, 15 bp, Homo sapiens
gcctgaggcaggccc

SEQ ID NO: 597919 - DNA, 15 bp, Homo sapiens
cctgaggcaggccca

SEQ ID NO: 597920 - DNA, 15 bp, Homo sapiens
ctgaggcaggcccag

SEQ ID NO: 597921 - DNA, 15 bp, Homo sapiens
tgaggcaggcccaga

SEQ ID NO: 597922 - DNA, 15 bp, Homo sapiens
gaggcaggcccagaa

SEQ ID NO: 597923 - DNA, 15 bp, Homo sapiens
aggcaggcccagaaa

SEQ ID NO: 597924 - DNA, 15 bp, Homo sapiens
ggcaggcccagaaag

SEQ ID NO: 597925 - DNA, 15 bp, Homo sapiens
gcaggcccagaaagg

SEQ ID NO: 597926 - DNA, 15 bp, Homo sapiens
caggcccagaaaggc

SEQ ID NO: 597927 - DNA, 15 bp, Homo sapiens
aggcccagaaaggct

SEQ ID NO: 597928 - DNA, 15 bp, Homo sapiens
ggcccagaaaggctc

SEQ ID NO: 597929 - DNA, 15 bp, Homo sapiens
gcccagaaaggctca

SEQ ID NO: 597930 - DNA, 15 bp, Homo sapiens
cccagaaaggctcag

SEQ ID NO: 597931 - DNA, 15 bp, Homo sapiens
ccagaaaggctcagg

SEQ ID NO: 597932 - DNA, 15 bp, Homo sapiens
cagaaaggctcaggg

SEQ ID NO: 597933 - DNA, 15 bp, Homo sapiens
agaaaggctcagggc

SEQ ID NO: 597934 - DNA, 15 bp, Homo sapiens
gaaaggctcagggca

SEQ ID NO: 597935 - DNA, 15 bp, Homo sapiens
aaaggctcagggcag

SEQ ID NO: 597936 - DNA, 15 bp, Homo sapiens
aaggctcagggcaga

SEQ ID NO: 597937 - DNA, 15 bp, Homo sapiens
aggctcagggcagac

SEQ ID NO: 597938 - DNA, 15 bp, Homo sapiens
ggctcagggcagacc

SEQ ID NO: 597939 - DNA, 15 bp, Homo sapiens
gctcagggcagaccc

SEQ ID NO: 597940 - DNA, 15 bp, Homo sapiens
ctcagggcagaccct

SEQ ID NO: 597941 - DNA, 15 bp, Homo sapiens
tcagggcagaccctc

SEQ ID NO: 597942 - DNA, 15 bp, Homo sapiens
cagggcagaccctcc

SEQ ID NO: 597943 - DNA, 15 bp, Homo sapiens
agggcagaccctccg

SEQ ID NO: 597944 - DNA, 15 bp, Homo sapiens
gggcagaccctccga

SEQ ID NO: 597945 - DNA, 15 bp, Homo sapiens
ggcagaccctccgat

SEQ ID NO: 597946 - DNA, 15 bp, Homo sapiens
gcagaccctccgatc

SEQ ID NO: 597947 - DNA, 15 bp, Homo sapiens
cagaccctccgatcc

SEQ ID NO: 597948 - DNA, 15 bp, Homo sapiens
agaccctccgatcct

SEQ ID NO: 597949 - DNA, 15 bp, Homo sapiens
gaccctccgatcctc

SEQ ID NO: 597950 - DNA, 15 bp, Homo sapiens
accctccgatcctct

SEQ ID NO: 597951 - DNA, 15 bp, Homo sapiens
ccctccgatcctctg

SEQ ID NO: 597952 - DNA, 15 bp, Homo sapiens
cctccgatcctctga

SEQ ID NO: 597953 - DNA, 15 bp, Homo sapiens
ctccgatcctctgaa

SEQ ID NO: 597954 - DNA, 15 bp, Homo sapiens
tccgatcctctgaaa

SEQ ID NO: 597955 - DNA, 15 bp, Homo sapiens
ccgatcctctgaaag

SEQ ID NO: 597956 - DNA, 15 bp, Homo sapiens
cgatcctctgaaagg

SEQ ID NO: 597957 - DNA, 15 bp, Homo sapiens
gatcctctgaaagga

SEQ ID NO: 597958 - DNA, 15 bp, Homo sapiens
atcctctgaaaggag

SEQ ID NO: 597959 - DNA, 15 bp, Homo sapiens
tcctctgaaaggagc

SEQ ID NO: 597960 - DNA, 15 bp, Homo sapiens
cctctgaaaggagca

SEQ ID NO: 597961 - DNA, 15 bp, Homo sapiens
ctctgaaaggagcat

SEQ ID NO: 597962 - DNA, 15 bp, Homo sapiens
tctgaaaggagcatc

SEQ ID NO: 597963 - DNA, 15 bp, Homo sapiens
ctgaaaggagcatca

SEQ ID NO: 597964 - DNA, 15 bp, Homo sapiens
tgaaaggagcatcag

SEQ ID NO: 597965 - DNA, 15 bp, Homo sapiens
gaaaggagcatcagg

SEQ ID NO: 597966 - DNA, 15 bp, Homo sapiens
aaaggagcatcaggc

SEQ ID NO: 597967 - DNA, 15 bp, Homo sapiens
aaggagcatcaggca

SEQ ID NO: 597968 - DNA, 15 bp, Homo sapiens
aggagcatcaggcag

SEQ ID NO: 597969 - DNA, 15 bp, Homo sapiens
ggagcatcaggcagg

SEQ ID NO: 597970 - DNA, 15 bp, Homo sapiens
gagcatcaggcaggc

SEQ ID NO: 597971 - DNA, 15 bp, Homo sapiens
agcatcaggcaggca

SEQ ID NO: 597972 - DNA, 15 bp, Homo sapiens
gcatcaggcaggcag

SEQ ID NO: 597973 - DNA, 15 bp, Homo sapiens
catcaggcaggcagg

SEQ ID NO: 597974 - DNA, 15 bp, Homo sapiens
atcaggcaggcaggg

SEQ ID NO: 597975 - DNA, 15 bp, Homo sapiens
tcaggcaggcagggg

SEQ ID NO: 597976 - DNA, 15 bp, Homo sapiens
caggcaggcaggggt

SEQ ID NO: 597977 - DNA, 15 bp, Homo sapiens
aggcaggcaggggtt

SEQ ID NO: 597978 - DNA, 15 bp, Homo sapiens
ggcaggcaggggttg

SEQ ID NO: 597979 - DNA, 15 bp, Homo sapiens
gcaggcaggggttgc

SEQ ID NO: 597980 - DNA, 15 bp, Homo sapiens
caggcaggggttgct

SEQ ID NO: 597981 - DNA, 15 bp, Homo sapiens
aggcaggggttgctc

SEQ ID NO: 597982 - DNA, 15 bp, Homo sapiens
ggcaggggttgctcc

SEQ ID NO: 597983 - DNA, 15 bp, Homo sapiens
gcaggggttgctccg

SEQ ID NO: 597984 - DNA, 15 bp, Homo sapiens
caggggttgctccgg

SEQ ID NO: 597985 - DNA, 15 bp, Homo sapiens
aggggttgctccggg

SEQ ID NO: 597986 - DNA, 15 bp, Homo sapiens
ggggttgctccgggg

SEQ ID NO: 597987 - DNA, 15 bp, Homo sapiens
gggttgctccggggc

SEQ ID NO: 597988 - DNA, 15 bp, Homo sapiens
ggttgctccggggcc

SEQ ID NO: 597989 - DNA, 15 bp, Homo sapiens
gttgctccggggcca

SEQ ID NO: 597990 - DNA, 15 bp, Homo sapiens
ttgctccggggccag

SEQ ID NO: 597991 - DNA, 15 bp, Homo sapiens
tgctccggggccagg

SEQ ID NO: 597992 - DNA, 15 bp, Homo sapiens
gctccggggccaggg

SEQ ID NO: 597993 - DNA, 15 bp, Homo sapiens
ctccggggccaggga

SEQ ID NO: 597994 - DNA, 15 bp, Homo sapiens
tccggggccagggaa

SEQ ID NO: 597995 - DNA, 15 bp, Homo sapiens
ccggggccagggaag

SEQ ID NO: 597996 - DNA, 15 bp, Homo sapiens
cggggccagggaagg

SEQ ID NO: 597997 - DNA, 15 bp, Homo sapiens
ggggccagggaaggg

SEQ ID NO: 597998 - DNA, 15 bp, Homo sapiens
gggccagggaagggg

SEQ ID NO: 597999 - DNA, 15 bp, Homo sapiens
ggccagggaaggggc

SEQ ID NO: 598000 - DNA, 15 bp, Homo sapiens
gccagggaaggggcc

SEQ ID NO: 598001 - DNA, 15 bp, Homo sapiens
ccagggaaggggccc

SEQ ID NO: 598002 - DNA, 15 bp, Homo sapiens
cagggaaggggcccc

SEQ ID NO: 598003 - DNA, 15 bp, Homo sapiens
agggaaggggccccg

SEQ ID NO: 598004 - DNA, 15 bp, Homo sapiens
gggaaggggccccgc

SEQ ID NO: 598005 - DNA, 15 bp, Homo sapiens
ggaaggggccccgct

SEQ ID NO: 598006 - DNA, 15 bp, Homo sapiens
gaaggggccccgctg

SEQ ID NO: 598007 - DNA, 15 bp, Homo sapiens
aaggggccccgctgg

SEQ ID NO: 598008 - DNA, 15 bp, Homo sapiens
aggggccccgctggg

SEQ ID NO: 598009 - DNA, 15 bp, Homo sapiens
ggggccccgctggga

SEQ ID NO: 598010 - DNA, 15 bp, Homo sapiens
gggccccgctgggac

SEQ ID NO: 598011 - DNA, 15 bp, Homo sapiens
ggccccgctgggacg

SEQ ID NO: 598012 - DNA, 15 bp, Homo sapiens
gccccgctgggacgc

SEQ ID NO: 598013 - DNA, 15 bp, Homo sapiens
ccccgctgggacgcg

SEQ ID NO: 598014 - DNA, 15 bp, Homo sapiens
cccgctgggacgcgg

SEQ ID NO: 598015 - DNA, 15 bp, Homo sapiens
ccgctgggacgcggc

SEQ ID NO: 598016 - DNA, 15 bp, Homo sapiens
cgctgggacgcggct

SEQ ID NO: 598017 - DNA, 15 bp, Homo sapiens
gctgggacgcggctg

SEQ ID NO: 598018 - DNA, 15 bp, Homo sapiens
ctgggacgcggctgt

SEQ ID NO: 598019 - DNA, 15 bp, Homo sapiens
tgggacgcggctgtt

SEQ ID NO: 598020 - DNA, 15 bp, Homo sapiens
gggacgcggctgtta

SEQ ID NO: 598021 - DNA, 15 bp, Homo sapiens
ggacgcggctgttat

SEQ ID NO: 598022 - DNA, 15 bp, Homo sapiens
gacgcggctgttatt

SEQ ID NO: 598023 - DNA, 15 bp, Homo sapiens
acgcggctgttattg

SEQ ID NO: 598024 - DNA, 15 bp, Homo sapiens
cgcggctgttattgc

SEQ ID NO: 598025 - DNA, 15 bp, Homo sapiens
gcggctgttattgca

SEQ ID NO: 598026 - DNA, 15 bp, Homo sapiens
cggctgttattgcag

SEQ ID NO: 598027 - DNA, 15 bp, Homo sapiens
ggctgttattgcagc

SEQ ID NO: 598028 - DNA, 15 bp, Homo sapiens
gctgttattgcagct

SEQ ID NO: 598029 - DNA, 15 bp, Homo sapiens
ctgttattgcagctg

SEQ ID NO: 598030 - DNA, 15 bp, Homo sapiens
tgttattgcagctgg

SEQ ID NO: 598031 - DNA, 15 bp, Homo sapiens
gttattgcagctggt

SEQ ID NO: 598032 - DNA, 15 bp, Homo sapiens
ttattgcagctggtt

SEQ ID NO: 598033 - DNA, 15 bp, Homo sapiens
tattgcagctggttg

SEQ ID NO: 598034 - DNA, 15 bp, Homo sapiens
attgcagctggttgg

SEQ ID NO: 598035 - DNA, 15 bp, Homo sapiens
ttgcagctggttggc

SEQ ID NO: 598036 - DNA, 15 bp, Homo sapiens
tgcagctggttggcg

SEQ ID NO: 598037 - DNA, 15 bp, Homo sapiens
gcagctggttggcgc

SEQ ID NO: 598038 - DNA, 15 bp, Homo sapiens
cagctggttggcgcg

SEQ ID NO: 598039 - DNA, 15 bp, Homo sapiens
agctggttggcgcgc

SEQ ID NO: 598040 - DNA, 15 bp, Homo sapiens
gctggttggcgcgca

SEQ ID NO: 598041 - DNA, 15 bp, Homo sapiens
ctggttggcgcgcag

SEQ ID NO: 598042 - DNA, 15 bp, Homo sapiens
tggttggcgcgcagc

SEQ ID NO: 598043 - DNA, 15 bp, Homo sapiens
ggttggcgcgcagcc

SEQ ID NO: 598044 - DNA, 15 bp, Homo sapiens
gttggcgcgcagcca

SEQ ID NO: 598045 - DNA, 15 bp, Homo sapiens
ttggcgcgcagccat

SEQ ID NO: 598046 - DNA, 15 bp, Homo sapiens
tggcgcgcagccatg

SEQ ID NO: 598047 - DNA, 15 bp, Homo sapiens
ggcgcgcagccatgc

SEQ ID NO: 598048 - DNA, 15 bp, Homo sapiens
gcgcgcagccatgct

SEQ ID NO: 598049 - DNA, 15 bp, Homo sapiens
cgcgcagccatgctt

SEQ ID NO: 598050 - DNA, 15 bp, Homo sapiens
gcgcagccatgctta

SEQ ID NO: 598051 - DNA, 15 bp, Homo sapiens
cgcagccatgcttag

SEQ ID NO: 598052 - DNA, 15 bp, Homo sapiens
gcagccatgcttagc

SEQ ID NO: 598053 - DNA, 15 bp, Homo sapiens
cagccatgcttagct

SEQ ID NO: 598054 - DNA, 15 bp, Homo sapiens
agccatgcttagctg

SEQ ID NO: 598055 - DNA, 15 bp, Homo sapiens
gccatgcttagctgc

SEQ ID NO: 598056 - DNA, 15 bp, Homo sapiens
ccatgcttagctgca

SEQ ID NO: 598057 - DNA, 15 bp, Homo sapiens
catgcttagctgcag

SEQ ID NO: 598058 - DNA, 15 bp, Homo sapiens
atgcttagctgcagt

SEQ ID NO: 598059 - DNA, 15 bp, Homo sapiens
tgcttagctgcagtg

SEQ ID NO: 598060 - DNA, 15 bp, Homo sapiens
gcttagctgcagtgc

SEQ ID NO: 598061 - DNA, 15 bp, Homo sapiens
cttagctgcagtgcg

SEQ ID NO: 598062 - DNA, 15 bp, Homo sapiens
ttagctgcagtgcgg

SEQ ID NO: 598063 - DNA, 15 bp, Homo sapiens
tagctgcagtgcggg

SEQ ID NO: 598064 - DNA, 15 bp, Homo sapiens
agctgcagtgcggga

SEQ ID NO: 598065 - DNA, 15 bp, Homo sapiens
gctgcagtgcgggaa

SEQ ID NO: 598066 - DNA, 15 bp, Homo sapiens
ctgcagtgcgggaat

SEQ ID NO: 598067 - DNA, 15 bp, Homo sapiens
tgcagtgcgggaatg

SEQ ID NO: 598068 - DNA, 15 bp, Homo sapiens
gcagtgcgggaatgc

SEQ ID NO: 598069 - DNA, 15 bp, Homo sapiens
cagtgcgggaatgct

SEQ ID NO: 598070 - DNA, 15 bp, Homo sapiens
agtgcgggaatgctg

SEQ ID NO: 598071 - DNA, 15 bp, Homo sapiens
gtgcgggaatgctgg

SEQ ID NO: 598072 - DNA, 15 bp, Homo sapiens
tgcgggaatgctggg

SEQ ID NO: 598073 - DNA, 15 bp, Homo sapiens
gcgggaatgctgggc

SEQ ID NO: 598074 - DNA, 15 bp, Homo sapiens
cgggaatgctgggcc

SEQ ID NO: 598075 - DNA, 15 bp, Homo sapiens
gggaatgctgggcct

SEQ ID NO: 598076 - DNA, 15 bp, Homo sapiens
ggaatgctgggcctt

SEQ ID NO: 598077 - DNA, 15 bp, Homo sapiens
gaatgctgggccttc

SEQ ID NO: 598078 - DNA, 15 bp, Homo sapiens
aatgctgggccttct

SEQ ID NO: 598079 - DNA, 15 bp, Homo sapiens
atgctgggccttctg

SEQ ID NO: 598080 - DNA, 15 bp, Homo sapiens
tgctgggccttctgt

SEQ ID NO: 598081 - DNA, 15 bp, Homo sapiens
gctgggccttctgtt

SEQ ID NO: 598082 - DNA, 15 bp, Homo sapiens
ctgggccttctgttc

SEQ ID NO: 598083 - DNA, 15 bp, Homo sapiens
tgggccttctgttct

SEQ ID NO: 598084 - DNA, 15 bp, Homo sapiens
gggccttctgttctg

SEQ ID NO: 598085 - DNA, 15 bp, Homo sapiens
ggccttctgttctgg

SEQ ID NO: 598086 - DNA, 15 bp, Homo sapiens
gccttctgttctggg

SEQ ID NO: 598087 - DNA, 15 bp, Homo sapiens
ccttctgttctgggc

SEQ ID NO: 598088 - DNA, 15 bp, Homo sapiens
cttctgttctgggct

SEQ ID NO: 598089 - DNA, 15 bp, Homo sapiens
ttctgttctgggctg

SEQ ID NO: 598090 - DNA, 15 bp, Homo sapiens
tctgttctgggctgt

SEQ ID NO: 598091 - DNA, 15 bp, Homo sapiens
ctgttctgggctgtt

SEQ ID NO: 598092 - DNA, 15 bp, Homo sapiens
tgttctgggctgttt

SEQ ID NO: 598093 - DNA, 15 bp, Homo sapiens
gttctgggctgtttc

SEQ ID NO: 598094 - DNA, 15 bp, Homo sapiens
ttctgggctgtttct

SEQ ID NO: 598095 - DNA, 15 bp, Homo sapiens
tctgggctgtttctc

SEQ ID NO: 598096 - DNA, 15 bp, Homo sapiens
ctgggctgtttctca

SEQ ID NO: 598097 - DNA, 15 bp, Homo sapiens
tgggctgtttctcat

SEQ ID NO: 598098 - DNA, 15 bp, Homo sapiens
gggctgtttctcata

SEQ ID NO: 598099 - DNA, 15 bp, Homo sapiens
ggctgtttctcatac

SEQ ID NO: 598100 - DNA, 15 bp, Homo sapiens
gctgtttctcatacg

SEQ ID NO: 598101 - DNA, 15 bp, Homo sapiens
ctgtttctcatacgc

SEQ ID NO: 598102 - DNA, 15 bp, Homo sapiens
tgtttctcatacgca

SEQ ID NO: 598103 - DNA, 15 bp, Homo sapiens
gtttctcatacgcac

SEQ ID NO: 598104 - DNA, 15 bp, Homo sapiens
tttctcatacgcacg

SEQ ID NO: 598105 - DNA, 15 bp, Homo sapiens
ttctcatacgcacgt

SEQ ID NO: 598106 - DNA, 15 bp, Homo sapiens
tctcatacgcacgta

SEQ ID NO: 598107 - DNA, 15 bp, Homo sapiens
ctcatacgcacgtag

SEQ ID NO: 598108 - DNA, 15 bp, Homo sapiens
tcatacgcacgtagg

SEQ ID NO: 598109 - DNA, 15 bp, Homo sapiens
catacgcacgtaggc

SEQ ID NO: 598110 - DNA, 15 bp, Homo sapiens
atacgcacgtaggcc

SEQ ID NO: 598111 - DNA, 15 bp, Homo sapiens
tacgcacgtaggcca

SEQ ID NO: 598112 - DNA, 15 bp, Homo sapiens
acgcacgtaggccag

SEQ ID NO: 598113 - DNA, 15 bp, Homo sapiens
cgcacgtaggccagt

SEQ ID NO: 598114 - DNA, 15 bp, Homo sapiens
gcacgtaggccagtg

SEQ ID NO: 598115 - DNA, 15 bp, Homo sapiens
cacgtaggccagtgt

SEQ ID NO: 598116 - DNA, 15 bp, Homo sapiens
acgtaggccagtgta

SEQ ID NO: 598117 - DNA, 15 bp, Homo sapiens
cgtaggccagtgtat

SEQ ID NO: 598118 - DNA, 15 bp, Homo sapiens
gtaggccagtgtata

SEQ ID NO: 598119 - DNA, 15 bp, Homo sapiens
taggccagtgtataa

SEQ ID NO: 598120 - DNA, 15 bp, Homo sapiens
aggccagtgtataaa

SEQ ID NO: 598121 - DNA, 15 bp, Homo sapiens
ggccagtgtataaat

SEQ ID NO: 598122 - DNA, 15 bp, Homo sapiens
gccagtgtataaata

SEQ ID NO: 598123 - DNA, 15 bp, Homo sapiens
ccagtgtataaataa

SEQ ID NO: 598124 - DNA, 15 bp, Homo sapiens
cagtgtataaataag

SEQ ID NO: 598125 - DNA, 15 bp, Homo sapiens
agtgtataaataagg

SEQ ID NO: 598126 - DNA, 15 bp, Homo sapiens
gtgtataaataaggt

SEQ ID NO: 598127 - DNA, 15 bp, Homo sapiens
tgtataaataaggtt

SEQ ID NO: 598128 - DNA, 15 bp, Homo sapiens
gtataaataaggttt

SEQ ID NO: 598129 - DNA, 15 bp, Homo sapiens
tataaataaggtttt

SEQ ID NO: 598130 - DNA, 15 bp, Homo sapiens
ataaataaggtttta

SEQ ID NO: 598131 - DNA, 15 bp, Homo sapiens
taaataaggttttat

SEQ ID NO: 598132 - DNA, 15 bp, Homo sapiens
aaataaggttttatt

SEQ ID NO: 598133 - DNA, 15 bp, Homo sapiens
aataaggttttatta

SEQ ID NO: 598134 - DNA, 15 bp, Homo sapiens
ataaggttttattaa

SEQ ID NO: 598135 - DNA, 15 bp, Homo sapiens
taaggttttattaaa

SEQ ID NO: 598136 - DNA, 15 bp, Homo sapiens
aaggttttattaaat

SEQ ID NO: 598137 - DNA, 15 bp, Homo sapiens
aggttttattaaatg

SEQ ID NO: 598138 - DNA, 15 bp, Homo sapiens
ggttttattaaatgc

SEQ ID NO: 598139 - DNA, 15 bp, Homo sapiens
gttttattaaatgcc

SEQ ID NO: 598140 - DNA, 15 bp, Homo sapiens
ttttattaaatgcca

SEQ ID NO: 598141 - DNA, 15 bp, Homo sapiens
tttattaaatgccaa

SEQ ID NO: 598142 - DNA, 15 bp, Homo sapiens
ttattaaatgccaaa

SEQ ID NO: 598143 - DNA, 15 bp, Homo sapiens
tattaaatgccaaat

SEQ ID NO: 598144 - DNA, 15 bp, Homo sapiens
attaaatgccaaatg

SEQ ID NO: 598145 - DNA, 15 bp, Homo sapiens
ttaaatgccaaatga

SEQ ID NO: 598146 - DNA, 15 bp, Homo sapiens
taaatgccaaatgag

SEQ ID NO: 598147 - DNA, 15 bp, Homo sapiens
aaatgccaaatgagt

SEQ ID NO: 598148 - DNA, 15 bp, Homo sapiens
aatgccaaatgagtt

SEQ ID NO: 598149 - DNA, 15 bp, Homo sapiens
atgccaaatgagttc

SEQ ID NO: 598150 - DNA, 15 bp, Homo sapiens
tgccaaatgagttct

SEQ ID NO: 598151 - DNA, 15 bp, Homo sapiens
gccaaatgagttctc

SEQ ID NO: 598152 - DNA, 15 bp, Homo sapiens
ccaaatgagttctca

SEQ ID NO: 598153 - DNA, 15 bp, Homo sapiens
caaatgagttctcat

SEQ ID NO: 598154 - DNA, 15 bp, Homo sapiens
aaatgagttctcatt

SEQ ID NO: 598155 - DNA, 15 bp, Homo sapiens
aatgagttctcatta

SEQ ID NO: 598156 - DNA, 15 bp, Homo sapiens
atgagttctcattaa

SEQ ID NO: 598157 - DNA, 15 bp, Homo sapiens
tgagttctcattaac

SEQ ID NO: 598158 - DNA, 15 bp, Homo sapiens
gagttctcattaaca

SEQ ID NO: 598159 - DNA, 15 bp, Homo sapiens
agttctcattaacaa

SEQ ID NO: 598160 - DNA, 15 bp, Homo sapiens
gttctcattaacaaa

SEQ ID NO: 598161 - DNA, 15 bp, Homo sapiens
ttctcattaacaaag

SEQ ID NO: 598162 - DNA, 15 bp, Homo sapiens
tctcattaacaaaga

SEQ ID NO: 598163 - DNA, 15 bp, Homo sapiens
ctcattaacaaagaa

SEQ ID NO: 598164 - DNA, 15 bp, Homo sapiens
tcattaacaaagaaa

SEQ ID NO: 598165 - DNA, 15 bp, Homo sapiens
cattaacaaagaaag

SEQ ID NO: 598166 - DNA, 15 bp, Homo sapiens
attaacaaagaaaga

SEQ ID NO: 598167 - DNA, 15 bp, Homo sapiens
ttaacaaagaaagag

SEQ ID NO: 598168 - DNA, 15 bp, Homo sapiens
taacaaagaaagagg

SEQ ID NO: 598169 - DNA, 15 bp, Homo sapiens
aacaaagaaagaggg

SEQ ID NO: 598170 - DNA, 15 bp, Homo sapiens
acaaagaaagaggga

SEQ ID NO: 598171 - DNA, 15 bp, Homo sapiens
caaagaaagagggaa

SEQ ID NO: 598172 - DNA, 15 bp, Homo sapiens
aaagaaagagggaaa

SEQ ID NO: 598173 - DNA, 15 bp, Homo sapiens
aagaaagagggaaaa

SEQ ID NO: 598174 - DNA, 15 bp, Homo sapiens
agaaagagggaaaat

SEQ ID NO: 598175 - DNA, 15 bp, Homo sapiens
gaaagagggaaaatc

SEQ ID NO: 598176 - DNA, 15 bp, Homo sapiens
aaagagggaaaatct

SEQ ID NO: 598177 - DNA, 15 bp, Homo sapiens
aagagggaaaatctc

SEQ ID NO: 598178 - DNA, 15 bp, Homo sapiens
agagggaaaatctca

SEQ ID NO: 598179 - DNA, 15 bp, Homo sapiens
gagggaaaatctcag

SEQ ID NO: 598180 - DNA, 15 bp, Homo sapiens
agggaaaatctcagt

SEQ ID NO: 598181 - DNA, 15 bp, Homo sapiens
gggaaaatctcagta

SEQ ID NO: 598182 - DNA, 15 bp, Homo sapiens
ggaaaatctcagtaa

SEQ ID NO: 598183 - DNA, 15 bp, Homo sapiens
gaaaatctcagtaaa

SEQ ID NO: 598184 - DNA, 15 bp, Homo sapiens
aaaatctcagtaaac

SEQ ID NO: 598185 - DNA, 15 bp, Homo sapiens
aaatctcagtaaacc

SEQ ID NO: 598186 - DNA, 15 bp, Homo sapiens
aatctcagtaaacca

SEQ ID NO: 598187 - DNA, 15 bp, Homo sapiens
atctcagtaaaccac

SEQ ID NO: 598188 - DNA, 15 bp, Homo sapiens
tctcagtaaaccacc

SEQ ID NO: 598189 - DNA, 15 bp, Homo sapiens
ctcagtaaaccaccg

SEQ ID NO: 598190 - DNA, 15 bp, Homo sapiens
tcagtaaaccaccgt

SEQ ID NO: 598191 - DNA, 15 bp, Homo sapiens
cagtaaaccaccgtg

SEQ ID NO: 598192 - DNA, 15 bp, Homo sapiens
agtaaaccaccgtga

SEQ ID NO: 598193 - DNA, 15 bp, Homo sapiens
gtaaaccaccgtgac

SEQ ID NO: 598194 - DNA, 15 bp, Homo sapiens
taaaccaccgtgacg

SEQ ID NO: 598195 - DNA, 15 bp, Homo sapiens
aaaccaccgtgacgg

SEQ ID NO: 598196 - DNA, 15 bp, Homo sapiens
aaccaccgtgacggc

SEQ ID NO: 598197 - DNA, 15 bp, Homo sapiens
accaccgtgacggca

SEQ ID NO: 598198 - DNA, 15 bp, Homo sapiens
ccaccgtgacggcat

SEQ ID NO: 598199 - DNA, 15 bp, Homo sapiens
caccgtgacggcatc

SEQ ID NO: 598200 - DNA, 15 bp, Homo sapiens
accgtgacggcatct

SEQ ID NO: 598201 - DNA, 15 bp, Homo sapiens
ccgtgacggcatcta

SEQ ID NO: 598202 - DNA, 15 bp, Homo sapiens
cgtgacggcatctac

SEQ ID NO: 598203 - DNA, 15 bp, Homo sapiens
gtgacggcatctacc

SEQ ID NO: 598204 - DNA, 15 bp, Homo sapiens
tgacggcatctaccc

SEQ ID NO: 598205 - DNA, 15 bp, Homo sapiens
gacggcatctaccca

SEQ ID NO: 598206 - DNA, 15 bp, Homo sapiens
acggcatctacccac

SEQ ID NO: 598207 - DNA, 15 bp, Homo sapiens
cggcatctacccact

SEQ ID NO: 598208 - DNA, 15 bp, Homo sapiens
ggcatctacccactt

SEQ ID NO: 598209 - DNA, 15 bp, Homo sapiens
gcatctacccacttt

SEQ ID NO: 598210 - DNA, 15 bp, Homo sapiens
catctacccactttg

SEQ ID NO: 598211 - DNA, 15 bp, Homo sapiens
atctacccactttga

SEQ ID NO: 598212 - DNA, 15 bp, Homo sapiens
tctacccactttgag

SEQ ID NO: 598213 - DNA, 15 bp, Homo sapiens
ctacccactttgagt

SEQ ID NO: 598214 - DNA, 15 bp, Homo sapiens
tacccactttgagtc

SEQ ID NO: 598215 - DNA, 15 bp, Homo sapiens
acccactttgagtca

SEQ ID NO: 598216 - DNA, 15 bp, Homo sapiens
cccactttgagtcag

SEQ ID NO: 598217 - DNA, 15 bp, Homo sapiens
ccactttgagtcagg

SEQ ID NO: 598218 - DNA, 15 bp, Homo sapiens
cactttgagtcagga

SEQ ID NO: 598219 - DNA, 15 bp, Homo sapiens
actttgagtcaggag

SEQ ID NO: 598220 - DNA, 15 bp, Homo sapiens
ctttgagtcaggagc

SEQ ID NO: 598221 - DNA, 15 bp, Homo sapiens
tttgagtcaggagct

SEQ ID NO: 598222 - DNA, 15 bp, Homo sapiens
ttgagtcaggagctg

SEQ ID NO: 598223 - DNA, 15 bp, Homo sapiens
tgagtcaggagctgg

SEQ ID NO: 598224 - DNA, 15 bp, Homo sapiens
gagtcaggagctggg

SEQ ID NO: 598225 - DNA, 15 bp, Homo sapiens
agtcaggagctgggg

SEQ ID NO: 598226 - DNA, 15 bp, Homo sapiens
gtcaggagctggggg

SEQ ID NO: 598227 - DNA, 15 bp, Homo sapiens
tcaggagctgggggt

SEQ ID NO: 598228 - DNA, 15 bp, Homo sapiens
caggagctgggggtg

SEQ ID NO: 598229 - DNA, 15 bp, Homo sapiens
aggagctgggggtgt

SEQ ID NO: 598230 - DNA, 15 bp, Homo sapiens
ggagctgggggtgtg

SEQ ID NO: 598231 - DNA, 15 bp, Homo sapiens
gagctgggggtgtga

SEQ ID NO: 598232 - DNA, 15 bp, Homo sapiens
agctgggggtgtgag

SEQ ID NO: 598233 - DNA, 15 bp, Homo sapiens
gctgggggtgtgagt

SEQ ID NO: 598234 - DNA, 15 bp, Homo sapiens
ctgggggtgtgagtg

SEQ ID NO: 598235 - DNA, 15 bp, Homo sapiens
tgggggtgtgagtgc

SEQ ID NO: 598236 - DNA, 15 bp, Homo sapiens
gggggtgtgagtgca

SEQ ID NO: 598237 - DNA, 15 bp, Homo sapiens
ggggtgtgagtgcaa

SEQ ID NO: 598238 - DNA, 15 bp, Homo sapiens
gggtgtgagtgcaac

SEQ ID NO: 598239 - DNA, 15 bp, Homo sapiens
ggtgtgagtgcaacc

SEQ ID NO: 598240 - DNA, 15 bp, Homo sapiens
gtgtgagtgcaacct

SEQ ID NO: 598241 - DNA, 15 bp, Homo sapiens
tgtgagtgcaacctc

SEQ ID NO: 598242 - DNA, 15 bp, Homo sapiens
gtgagtgcaacctcc

SEQ ID NO: 598243 - DNA, 15 bp, Homo sapiens
tgagtgcaacctccg

SEQ ID NO: 598244 - DNA, 15 bp, Homo sapiens
gagtgcaacctccga

SEQ ID NO: 598245 - DNA, 15 bp, Homo sapiens
agtgcaacctccgag

SEQ ID NO: 598246 - DNA, 15 bp, Homo sapiens
gtgcaacctccgaga

SEQ ID NO: 598247 - DNA, 15 bp, Homo sapiens
tgcaacctccgagac

SEQ ID NO: 598248 - DNA, 15 bp, Homo sapiens
gcaacctccgagaca

SEQ ID NO: 598249 - DNA, 15 bp, Homo sapiens
caacctccgagacaa

SEQ ID NO: 598250 - DNA, 15 bp, Homo sapiens
aacctccgagacaag

SEQ ID NO: 598251 - DNA, 15 bp, Homo sapiens
acctccgagacaagg

SEQ ID NO: 598252 - DNA, 15 bp, Homo sapiens
cctccgagacaaggg

SEQ ID NO: 598253 - DNA, 15 bp, Homo sapiens
ctccgagacaaggga

SEQ ID NO: 598254 - DNA, 15 bp, Homo sapiens
tccgagacaagggaa

SEQ ID NO: 598255 - DNA, 15 bp, Homo sapiens
ccgagacaagggaac

SEQ ID NO: 598256 - DNA, 15 bp, Homo sapiens
cgagacaagggaacc

SEQ ID NO: 598257 - DNA, 15 bp, Homo sapiens
gagacaagggaacct

SEQ ID NO: 598258 - DNA, 15 bp, Homo sapiens
agacaagggaacctg

SEQ ID NO: 598259 - DNA, 15 bp, Homo sapiens
gacaagggaacctgt

SEQ ID NO: 598260 - DNA, 15 bp, Homo sapiens
acaagggaacctgtg

SEQ ID NO: 598261 - DNA, 15 bp, Homo sapiens
caagggaacctgtgg

SEQ ID NO: 598262 - DNA, 15 bp, Homo sapiens
aagggaacctgtgga

SEQ ID NO: 598263 - DNA, 15 bp, Homo sapiens
agggaacctgtggag

SEQ ID NO: 598264 - DNA, 15 bp, Homo sapiens
gggaacctgtggagc

SEQ ID NO: 598265 - DNA, 15 bp, Homo sapiens
ggaacctgtggagcc

SEQ ID NO: 598266 - DNA, 15 bp, Homo sapiens
gaacctgtggagccc

SEQ ID NO: 598267 - DNA, 15 bp, Homo sapiens
aacctgtggagccca

SEQ ID NO: 598268 - DNA, 15 bp, Homo sapiens
acctgtggagcccag

SEQ ID NO: 598269 - DNA, 15 bp, Homo sapiens
cctgtggagcccaga

SEQ ID NO: 598270 - DNA, 15 bp, Homo sapiens
ctgtggagcccagag

SEQ ID NO: 598271 - DNA, 15 bp, Homo sapiens
tgtggagcccagaga

SEQ ID NO: 598272 - DNA, 15 bp, Homo sapiens
gtggagcccagagaa

SEQ ID NO: 598273 - DNA, 15 bp, Homo sapiens
tggagcccagagaat

SEQ ID NO: 598274 - DNA, 15 bp, Homo sapiens
ggagcccagagaatc

SEQ ID NO: 598275 - DNA, 15 bp, Homo sapiens
gagcccagagaatcg

SEQ ID NO: 598276 - DNA, 15 bp, Homo sapiens
agcccagagaatcgg

SEQ ID NO: 598277 - DNA, 15 bp, Homo sapiens
gcccagagaatcgga

SEQ ID NO: 598278 - DNA, 15 bp, Homo sapiens
cccagagaatcggag

SEQ ID NO: 598279 - DNA, 15 bp, Homo sapiens
ccagagaatcggagg

SEQ ID NO: 598280 - DNA, 15 bp, Homo sapiens
cagagaatcggaggg

SEQ ID NO: 598281 - DNA, 15 bp, Homo sapiens
agagaatcggagggg

SEQ ID NO: 598282 - DNA, 15 bp, Homo sapiens
gagaatcggaggggg

SEQ ID NO: 598283 - DNA, 15 bp, Homo sapiens
agaatcggagggggg

SEQ ID NO: 598284 - DNA, 15 bp, Homo sapiens
gaatcggaggggggc

SEQ ID NO: 598285 - DNA, 15 bp, Homo sapiens
aatcggaggggggcg

SEQ ID NO: 598286 - DNA, 15 bp, Homo sapiens
atcggaggggggcgc

SEQ ID NO: 598287 - DNA, 15 bp, Homo sapiens
tcggaggggggcgct

SEQ ID NO: 598288 - DNA, 15 bp, Homo sapiens
cggaggggggcgctg

SEQ ID NO: 598289 - DNA, 15 bp, Homo sapiens
ggaggggggcgctgg

SEQ ID NO: 598290 - DNA, 15 bp, Homo sapiens
gaggggggcgctggg

SEQ ID NO: 598291 - DNA, 15 bp, Homo sapiens
aggggggcgctgggg

SEQ ID NO: 598292 - DNA, 15 bp, Homo sapiens
ggggggcgctggggt

SEQ ID NO: 598293 - DNA, 15 bp, Homo sapiens
gggggcgctggggtt

SEQ ID NO: 598294 - DNA, 15 bp, Homo sapiens
ggggcgctggggtta

SEQ ID NO: 598295 - DNA, 15 bp, Homo sapiens
gggcgctggggttag

SEQ ID NO: 598296 - DNA, 15 bp, Homo sapiens
ggcgctggggttagc

SEQ ID NO: 598297 - DNA, 15 bp, Homo sapiens
gcgctggggttagca

SEQ ID NO: 598298 - DNA, 15 bp, Homo sapiens
cgctggggttagcac

SEQ ID NO: 598299 - DNA, 15 bp, Homo sapiens
gctggggttagcacc

SEQ ID NO: 598300 - DNA, 15 bp, Homo sapiens
ctggggttagcaccg

SEQ ID NO: 598301 - DNA, 15 bp, Homo sapiens
tggggttagcaccga

SEQ ID NO: 598302 - DNA, 15 bp, Homo sapiens
ggggttagcaccgac

SEQ ID NO: 598303 - DNA, 15 bp, Homo sapiens
gggttagcaccgact

SEQ ID NO: 598304 - DNA, 15 bp, Homo sapiens
ggttagcaccgactg

SEQ ID NO: 598305 - DNA, 15 bp, Homo sapiens
gttagcaccgactga

SEQ ID NO: 598306 - DNA, 15 bp, Homo sapiens
ttagcaccgactgag

SEQ ID NO: 598307 - DNA, 15 bp, Homo sapiens
tagcaccgactgaga

SEQ ID NO: 598308 - DNA, 15 bp, Homo sapiens
agcaccgactgagac

SEQ ID NO: 598309 - DNA, 15 bp, Homo sapiens
gcaccgactgagacc

SEQ ID NO: 598310 - DNA, 15 bp, Homo sapiens
caccgactgagacca

SEQ ID NO: 598311 - DNA, 15 bp, Homo sapiens
accgactgagaccag

SEQ ID NO: 598312 - DNA, 15 bp, Homo sapiens
ccgactgagaccagc

SEQ ID NO: 598313 - DNA, 15 bp, Homo sapiens
cgactgagaccagct

SEQ ID NO: 598314 - DNA, 15 bp, Homo sapiens
gactgagaccagctg

SEQ ID NO: 598315 - DNA, 15 bp, Homo sapiens
actgagaccagctgt

SEQ ID NO: 598316 - DNA, 15 bp, Homo sapiens
ctgagaccagctgtg

SEQ ID NO: 598317 - DNA, 15 bp, Homo sapiens
tgagaccagctgtgt

SEQ ID NO: 598318 - DNA, 15 bp, Homo sapiens
gagaccagctgtgtt

SEQ ID NO: 598319 - DNA, 15 bp, Homo sapiens
agaccagctgtgttt

SEQ ID NO: 598320 - DNA, 15 bp, Homo sapiens
gaccagctgtgtttt

SEQ ID NO: 598321 - DNA, 15 bp, Homo sapiens
accagctgtgttttc

SEQ ID NO: 598322 - DNA, 15 bp, Homo sapiens
ccagctgtgttttct

SEQ ID NO: 598323 - DNA, 15 bp, Homo sapiens
cagctgtgttttctc

SEQ ID NO: 598324 - DNA, 15 bp, Homo sapiens
agctgtgttttctct

SEQ ID NO: 598325 - DNA, 15 bp, Homo sapiens
gctgtgttttctctc

SEQ ID NO: 598326 - DNA, 15 bp, Homo sapiens
ctgtgttttctctcg

SEQ ID NO: 598327 - DNA, 15 bp, Homo sapiens
tgtgttttctctcgg

SEQ ID NO: 598328 - DNA, 15 bp, Homo sapiens
gtgttttctctcggt

SEQ ID NO: 598329 - DNA, 15 bp, Homo sapiens
tgttttctctcggtt

SEQ ID NO: 598330 - DNA, 15 bp, Homo sapiens
gttttctctcggttc

SEQ ID NO: 598331 - DNA, 15 bp, Homo sapiens
ttttctctcggttcc

SEQ ID NO: 598332 - DNA, 15 bp, Homo sapiens
tttctctcggttcct

SEQ ID NO: 598333 - DNA, 15 bp, Homo sapiens
ttctctcggttcctt

SEQ ID NO: 598334 - DNA, 15 bp, Homo sapiens
tctctcggttccttg

SEQ ID NO: 598335 - DNA, 15 bp, Homo sapiens
ctctcggttccttgg

SEQ ID NO: 598336 - DNA, 15 bp, Homo sapiens
tctcggttccttgga

SEQ ID NO: 598337 - DNA, 15 bp, Homo sapiens
ctcggttccttggag

SEQ ID NO: 598338 - DNA, 15 bp, Homo sapiens
tcggttccttggaga

SEQ ID NO: 598339 - DNA, 15 bp, Homo sapiens
cggttccttggagat

SEQ ID NO: 598340 - DNA, 15 bp, Homo sapiens
ggttccttggagatc

SEQ ID NO: 598341 - DNA, 15 bp, Homo sapiens
gttccttggagatca

SEQ ID NO: 598342 - DNA, 15 bp, Homo sapiens
ttccttggagatcag

SEQ ID NO: 598343 - DNA, 15 bp, Homo sapiens
tccttggagatcaga

SEQ ID NO: 598344 - DNA, 15 bp, Homo sapiens
ccttggagatcagaa

SEQ ID NO: 598345 - DNA, 15 bp, Homo sapiens
cttggagatcagaag

SEQ ID NO: 598346 - DNA, 15 bp, Homo sapiens
ttggagatcagaagt

SEQ ID NO: 598347 - DNA, 15 bp, Homo sapiens
tggagatcagaagtg

SEQ ID NO: 598348 - DNA, 15 bp, Homo sapiens
ggagatcagaagtga

SEQ ID NO: 598349 - DNA, 15 bp, Homo sapiens
gagatcagaagtgag

SEQ ID NO: 598350 - DNA, 15 bp, Homo sapiens
agatcagaagtgagt

SEQ ID NO: 598351 - DNA, 15 bp, Homo sapiens
gatcagaagtgagtg

SEQ ID NO: 598352 - DNA, 15 bp, Homo sapiens
atcagaagtgagtgt

SEQ ID NO: 598353 - DNA, 15 bp, Homo sapiens
tcagaagtgagtgtt

SEQ ID NO: 598354 - DNA, 15 bp, Homo sapiens
cagaagtgagtgttg

SEQ ID NO: 598355 - DNA, 15 bp, Homo sapiens
agaagtgagtgttgt

SEQ ID NO: 598356 - DNA, 15 bp, Homo sapiens
gaagtgagtgttgtc

SEQ ID NO: 598357 - DNA, 15 bp, Homo sapiens
aagtgagtgttgtca

SEQ ID NO: 598358 - DNA, 15 bp, Homo sapiens
agtgagtgttgtcat

SEQ ID NO: 598359 - DNA, 15 bp, Homo sapiens
gtgagtgttgtcatc

SEQ ID NO: 598360 - DNA, 15 bp, Homo sapiens
tgagtgttgtcatct

SEQ ID NO: 598361 - DNA, 15 bp, Homo sapiens
gagtgttgtcatctt

SEQ ID NO: 598362 - DNA, 15 bp, Homo sapiens
agtgttgtcatcttc

SEQ ID NO: 598363 - DNA, 15 bp, Homo sapiens
gtgttgtcatcttca

SEQ ID NO: 598364 - DNA, 15 bp, Homo sapiens
tgttgtcatcttcaa

SEQ ID NO: 598365 - DNA, 15 bp, Homo sapiens
gttgtcatcttcaaa

SEQ ID NO: 598366 - DNA, 15 bp, Homo sapiens
ttgtcatcttcaaac

SEQ ID NO: 598367 - DNA, 15 bp, Homo sapiens
tgtcatcttcaaaca

SEQ ID NO: 598368 - DNA, 15 bp, Homo sapiens
gtcatcttcaaacaa

SEQ ID NO: 598369 - DNA, 15 bp, Homo sapiens
tcatcttcaaacaat

SEQ ID NO: 598370 - DNA, 15 bp, Homo sapiens
catcttcaaacaatc

SEQ ID NO: 598371 - DNA, 15 bp, Homo sapiens
atcttcaaacaatcc

SEQ ID NO: 598372 - DNA, 15 bp, Homo sapiens
tcttcaaacaatcca

SEQ ID NO: 598373 - DNA, 15 bp, Homo sapiens
cttcaaacaatccaa

SEQ ID NO: 598374 - DNA, 15 bp, Homo sapiens
ttcaaacaatccaaa

SEQ ID NO: 598375 - DNA, 15 bp, Homo sapiens
tcaaacaatccaaag

SEQ ID NO: 598376 - DNA, 15 bp, Homo sapiens
caaacaatccaaagg

SEQ ID NO: 598377 - DNA, 15 bp, Homo sapiens
aaacaatccaaaggc

SEQ ID NO: 598378 - DNA, 15 bp, Homo sapiens
aacaatccaaaggca

SEQ ID NO: 598379 - DNA, 15 bp, Homo sapiens
acaatccaaaggcag

SEQ ID NO: 598380 - DNA, 15 bp, Homo sapiens
caatccaaaggcagt

SEQ ID NO: 598381 - DNA, 15 bp, Homo sapiens
aatccaaaggcagta

SEQ ID NO: 598382 - DNA, 15 bp, Homo sapiens
atccaaaggcagtac

SEQ ID NO: 598383 - DNA, 15 bp, Homo sapiens
tccaaaggcagtacc

SEQ ID NO: 598384 - DNA, 15 bp, Homo sapiens
ccaaaggcagtaccc

SEQ ID NO: 598385 - DNA, 15 bp, Homo sapiens
caaaggcagtaccca

SEQ ID NO: 598386 - DNA, 15 bp, Homo sapiens
aaaggcagtacccat

SEQ ID NO: 598387 - DNA, 15 bp, Homo sapiens
aaggcagtacccatg

SEQ ID NO: 598388 - DNA, 15 bp, Homo sapiens
aggcagtacccatgg

SEQ ID NO: 598389 - DNA, 15 bp, Homo sapiens
ggcagtacccatggc

SEQ ID NO: 598390 - DNA, 15 bp, Homo sapiens
gcagtacccatggcc

SEQ ID NO: 598391 - DNA, 15 bp, Homo sapiens
cagtacccatggcct

SEQ ID NO: 598392 - DNA, 15 bp, Homo sapiens
agtacccatggcctt

SEQ ID NO: 598393 - DNA, 15 bp, Homo sapiens
gtacccatggcctta

SEQ ID NO: 598394 - DNA, 15 bp, Homo sapiens
tacccatggccttac

SEQ ID NO: 598395 - DNA, 15 bp, Homo sapiens
acccatggccttact

SEQ ID NO: 598396 - DNA, 15 bp, Homo sapiens
cccatggccttacta

SEQ ID NO: 598397 - DNA, 15 bp, Homo sapiens
ccatggccttactac

SEQ ID NO: 598398 - DNA, 15 bp, Homo sapiens
catggccttactaca

SEQ ID NO: 598399 - DNA, 15 bp, Homo sapiens
atggccttactacat

SEQ ID NO: 598400 - DNA, 15 bp, Homo sapiens
tggccttactacatc

SEQ ID NO: 598401 - DNA, 15 bp, Homo sapiens
ggccttactacatcc

SEQ ID NO: 598402 - DNA, 15 bp, Homo sapiens
gccttactacatccc

SEQ ID NO: 598403 - DNA, 15 bp, Homo sapiens
ccttactacatccct

SEQ ID NO: 598404 - DNA, 15 bp, Homo sapiens
cttactacatccctc

SEQ ID NO: 598405 - DNA, 15 bp, Homo sapiens
ttactacatccctcc

SEQ ID NO: 598406 - DNA, 15 bp, Homo sapiens
tactacatccctccc

SEQ ID NO: 598407 - DNA, 15 bp, Homo sapiens
actacatccctccca

SEQ ID NO: 598408 - DNA, 15 bp, Homo sapiens
ctacatccctcccac

SEQ ID NO: 598409 - DNA, 15 bp, Homo sapiens
tacatccctcccaca

SEQ ID NO: 598410 - DNA, 15 bp, Homo sapiens
acatccctcccacac

SEQ ID NO: 598411 - DNA, 15 bp, Homo sapiens
catccctcccacacc

SEQ ID NO: 598412 - DNA, 15 bp, Homo sapiens
atccctcccacacca

SEQ ID NO: 598413 - DNA, 15 bp, Homo sapiens
tccctcccacaccat

SEQ ID NO: 598414 - DNA, 15 bp, Homo sapiens
ccctcccacaccatc

SEQ ID NO: 598415 - DNA, 15 bp, Homo sapiens
cctcccacaccatcc

SEQ ID NO: 598416 - DNA, 15 bp, Homo sapiens
ctcccacaccatccc

SEQ ID NO: 598417 - DNA, 15 bp, Homo sapiens
tcccacaccatccca

SEQ ID NO: 598418 - DNA, 15 bp, Homo sapiens
cccacaccatcccac

SEQ ID NO: 598419 - DNA, 15 bp, Homo sapiens
ccacaccatcccacc

SEQ ID NO: 598420 - DNA, 15 bp, Homo sapiens
cacaccatcccaccc

SEQ ID NO: 598421 - DNA, 15 bp, Homo sapiens
acaccatcccaccca

SEQ ID NO: 598422 - DNA, 15 bp, Homo sapiens
caccatcccacccat

SEQ ID NO: 598423 - DNA, 15 bp, Homo sapiens
accatcccacccatc

SEQ ID NO: 598424 - DNA, 15 bp, Homo sapiens
ccatcccacccatcc

SEQ ID NO: 598425 - DNA, 15 bp, Homo sapiens
catcccacccatccc

SEQ ID NO: 598426 - DNA, 15 bp, Homo sapiens
atcccacccatcccc

SEQ ID NO: 598427 - DNA, 15 bp, Homo sapiens
tcccacccatccccg

SEQ ID NO: 598428 - DNA, 15 bp, Homo sapiens
cccacccatccccgc

SEQ ID NO: 598429 - DNA, 15 bp, Homo sapiens
ccacccatccccgcg

SEQ ID NO: 598430 - DNA, 15 bp, Homo sapiens
cacccatccccgcgc

SEQ ID NO: 598431 - DNA, 15 bp, Homo sapiens
acccatccccgcgcg

SEQ ID NO: 598432 - DNA, 15 bp, Homo sapiens
cccatccccgcgcgt

SEQ ID NO: 598433 - DNA, 15 bp, Homo sapiens
ccatccccgcgcgta

SEQ ID NO: 598434 - DNA, 15 bp, Homo sapiens
catccccgcgcgtac

SEQ ID NO: 598435 - DNA, 15 bp, Homo sapiens
atccccgcgcgtaca

SEQ ID NO: 598436 - DNA, 15 bp, Homo sapiens
tccccgcgcgtacac

SEQ ID NO: 598437 - DNA, 15 bp, Homo sapiens
ccccgcgcgtacact

SEQ ID NO: 598438 - DNA, 15 bp, Homo sapiens
cccgcgcgtacactc

SEQ ID NO: 598439 - DNA, 15 bp, Homo sapiens
ccgcgcgtacactca

SEQ ID NO: 598440 - DNA, 15 bp, Homo sapiens
cgcgcgtacactcac

SEQ ID NO: 598441 - DNA, 15 bp, Homo sapiens
gcgcgtacactcaca

SEQ ID NO: 598442 - DNA, 15 bp, Homo sapiens
cgcgtacactcacac

SEQ ID NO: 598443 - DNA, 15 bp, Homo sapiens
gcgtacactcacacg

SEQ ID NO: 598444 - DNA, 15 bp, Homo sapiens
cgtacactcacacgc

SEQ ID NO: 598445 - DNA, 15 bp, Homo sapiens
gtacactcacacgct

SEQ ID NO: 598446 - DNA, 15 bp, Homo sapiens
tacactcacacgctc

SEQ ID NO: 598447 - DNA, 15 bp, Homo sapiens
acactcacacgctca

SEQ ID NO: 598448 - DNA, 15 bp, Homo sapiens
cactcacacgctcat

SEQ ID NO: 598449 - DNA, 15 bp, Homo sapiens
actcacacgctcatt

SEQ ID NO: 598450 - DNA, 15 bp, Homo sapiens
ctcacacgctcattt

SEQ ID NO: 598451 - DNA, 15 bp, Homo sapiens
tcacacgctcatttg

SEQ ID NO: 598452 - DNA, 15 bp, Homo sapiens
cacacgctcatttgc

SEQ ID NO: 598453 - DNA, 15 bp, Homo sapiens
acacgctcatttgca

SEQ ID NO: 598454 - DNA, 15 bp, Homo sapiens
cacgctcatttgcac

SEQ ID NO: 598455 - DNA, 15 bp, Homo sapiens
acgctcatttgcaca

SEQ ID NO: 598456 - DNA, 15 bp, Homo sapiens
cgctcatttgcacac

SEQ ID NO: 598457 - DNA, 15 bp, Homo sapiens
gctcatttgcacact

SEQ ID NO: 598458 - DNA, 15 bp, Homo sapiens
ctcatttgcacacta

SEQ ID NO: 598459 - DNA, 15 bp, Homo sapiens
tcatttgcacactat

SEQ ID NO: 598460 - DNA, 15 bp, Homo sapiens
catttgcacactatc

SEQ ID NO: 598461 - DNA, 15 bp, Homo sapiens
atttgcacactatcg

SEQ ID NO: 598462 - DNA, 15 bp, Homo sapiens
tttgcacactatcgc

SEQ ID NO: 598463 - DNA, 15 bp, Homo sapiens
ttgcacactatcgca

SEQ ID NO: 598464 - DNA, 15 bp, Homo sapiens
tgcacactatcgcac

SEQ ID NO: 598465 - DNA, 15 bp, Homo sapiens
gcacactatcgcaca

SEQ ID NO: 598466 - DNA, 15 bp, Homo sapiens
cacactatcgcacac

SEQ ID NO: 598467 - DNA, 15 bp, Homo sapiens
acactatcgcacacg

SEQ ID NO: 598468 - DNA, 15 bp, Homo sapiens
cactatcgcacacgc

SEQ ID NO: 598469 - DNA, 15 bp, Homo sapiens
actatcgcacacgct

SEQ ID NO: 598470 - DNA, 15 bp, Homo sapiens
ctatcgcacacgctc

SEQ ID NO: 598471 - DNA, 15 bp, Homo sapiens
tatcgcacacgctca

SEQ ID NO: 598472 - DNA, 15 bp, Homo sapiens
atcgcacacgctcac

SEQ ID NO: 598473 - DNA, 15 bp, Homo sapiens
tcgcacacgctcact

SEQ ID NO: 598474 - DNA, 15 bp, Homo sapiens
cgcacacgctcactt

SEQ ID NO: 598475 - DNA, 15 bp, Homo sapiens
gcacacgctcacttg

SEQ ID NO: 598476 - DNA, 15 bp, Homo sapiens
cacacgctcacttgc

SEQ ID NO: 598477 - DNA, 15 bp, Homo sapiens
acacgctcacttgcg

SEQ ID NO: 598478 - DNA, 15 bp, Homo sapiens
cacgctcacttgcgt

SEQ ID NO: 598479 - DNA, 15 bp, Homo sapiens
acgctcacttgcgtg

SEQ ID NO: 598480 - DNA, 15 bp, Homo sapiens
cgctcacttgcgtgc

SEQ ID NO: 598481 - DNA, 15 bp, Homo sapiens
gctcacttgcgtgcg

SEQ ID NO: 598482 - DNA, 15 bp, Homo sapiens
ctcacttgcgtgcgc

SEQ ID NO: 598483 - DNA, 15 bp, Homo sapiens
tcacttgcgtgcgca

SEQ ID NO: 598484 - DNA, 15 bp, Homo sapiens
cacttgcgtgcgcac

SEQ ID NO: 598485 - DNA, 15 bp, Homo sapiens
acttgcgtgcgcaca

SEQ ID NO: 598486 - DNA, 15 bp, Homo sapiens
cttgcgtgcgcacac

SEQ ID NO: 598487 - DNA, 15 bp, Homo sapiens
ttgcgtgcgcacaca

SEQ ID NO: 598488 - DNA, 15 bp, Homo sapiens
tgcgtgcgcacacac

SEQ ID NO: 598489 - DNA, 15 bp, Homo sapiens
gcgtgcgcacacaca

SEQ ID NO: 598490 - DNA, 15 bp, Homo sapiens
cgtgcgcacacacag

SEQ ID NO: 598491 - DNA, 15 bp, Homo sapiens
gtgcgcacacacaga

SEQ ID NO: 598492 - DNA, 15 bp, Homo sapiens
tgcgcacacacagat

SEQ ID NO: 598493 - DNA, 15 bp, Homo sapiens
gcgcacacacagatt

SEQ ID NO: 598494 - DNA, 15 bp, Homo sapiens
cgcacacacagattg

SEQ ID NO: 598495 - DNA, 15 bp, Homo sapiens
gcacacacagattgg

SEQ ID NO: 598496 - DNA, 15 bp, Homo sapiens
cacacacagattggt

SEQ ID NO: 598497 - DNA, 15 bp, Homo sapiens
acacacagattggtg

SEQ ID NO: 598498 - DNA, 15 bp, Homo sapiens
cacacagattggtga

SEQ ID NO: 598499 - DNA, 15 bp, Homo sapiens
acacagattggtgac

SEQ ID NO: 598500 - DNA, 15 bp, Homo sapiens
cacagattggtgacc

SEQ ID NO: 598501 - DNA, 15 bp, Homo sapiens
acagattggtgacct

SEQ ID NO: 598502 - DNA, 15 bp, Homo sapiens
cagattggtgaccta

SEQ ID NO: 598503 - DNA, 15 bp, Homo sapiens
agattggtgacctag

SEQ ID NO: 598504 - DNA, 15 bp, Homo sapiens
gattggtgacctagg

SEQ ID NO: 598505 - DNA, 15 bp, Homo sapiens
attggtgacctaggt

SEQ ID NO: 598506 - DNA, 15 bp, Homo sapiens
ttggtgacctaggtg

SEQ ID NO: 598507 - DNA, 15 bp, Homo sapiens
tggtgacctaggtgg

SEQ ID NO: 598508 - DNA, 15 bp, Homo sapiens
ggtgacctaggtgga

SEQ ID NO: 598509 - DNA, 15 bp, Homo sapiens
gtgacctaggtggac

SEQ ID NO: 598510 - DNA, 15 bp, Homo sapiens
tgacctaggtggact

SEQ ID NO: 598511 - DNA, 15 bp, Homo sapiens
gacctaggtggactg

SEQ ID NO: 598512 - DNA, 15 bp, Homo sapiens
acctaggtggactgg

SEQ ID NO: 598513 - DNA, 15 bp, Homo sapiens
cctaggtggactggg

SEQ ID NO: 598514 - DNA, 15 bp, Homo sapiens
ctaggtggactggga

SEQ ID NO: 598515 - DNA, 15 bp, Homo sapiens
taggtggactgggag

SEQ ID NO: 598516 - DNA, 15 bp, Homo sapiens
aggtggactgggaga

SEQ ID NO: 598517 - DNA, 15 bp, Homo sapiens
ggtggactgggagag

SEQ ID NO: 598518 - DNA, 15 bp, Homo sapiens
gtggactgggagaga

SEQ ID NO: 598519 - DNA, 15 bp, Homo sapiens
tggactgggagagaa

SEQ ID NO: 598520 - DNA, 15 bp, Homo sapiens
ggactgggagagaaa

SEQ ID NO: 598521 - DNA, 15 bp, Homo sapiens
gactgggagagaaat

SEQ ID NO: 598522 - DNA, 15 bp, Homo sapiens
actgggagagaaata

SEQ ID NO: 598523 - DNA, 15 bp, Homo sapiens
ctgggagagaaataa

SEQ ID NO: 598524 - DNA, 15 bp, Homo sapiens
tgggagagaaataag

SEQ ID NO: 598525 - DNA, 15 bp, Homo sapiens
gggagagaaataaga

SEQ ID NO: 598526 - DNA, 15 bp, Homo sapiens
ggagagaaataagag

SEQ ID NO: 598527 - DNA, 15 bp, Homo sapiens
gagagaaataagagc

SEQ ID NO: 598528 - DNA, 15 bp, Homo sapiens
agagaaataagagcc

SEQ ID NO: 598529 - DNA, 15 bp, Homo sapiens
gagaaataagagcca

SEQ ID NO: 598530 - DNA, 15 bp, Homo sapiens
agaaataagagccaa

SEQ ID NO: 598531 - DNA, 15 bp, Homo sapiens
gaaataagagccaaa

SEQ ID NO: 598532 - DNA, 15 bp, Homo sapiens
aaataagagccaaat

SEQ ID NO: 598533 - DNA, 15 bp, Homo sapiens
aataagagccaaatg

SEQ ID NO: 598534 - DNA, 15 bp, Homo sapiens
ataagagccaaatga

SEQ ID NO: 598535 - DNA, 15 bp, Homo sapiens
taagagccaaatgac

SEQ ID NO: 598536 - DNA, 15 bp, Homo sapiens
aagagccaaatgact

SEQ ID NO: 598537 - DNA, 15 bp, Homo sapiens
agagccaaatgactg

SEQ ID NO: 598538 - DNA, 15 bp, Homo sapiens
gagccaaatgactgg

SEQ ID NO: 598539 - DNA, 15 bp, Homo sapiens
agccaaatgactgga

SEQ ID NO: 598540 - DNA, 15 bp, Homo sapiens
gccaaatgactggat

SEQ ID NO: 598541 - DNA, 15 bp, Homo sapiens
ccaaatgactggatt

SEQ ID NO: 598542 - DNA, 15 bp, Homo sapiens
caaatgactggattt

SEQ ID NO: 598543 - DNA, 15 bp, Homo sapiens
aaatgactggatttt

SEQ ID NO: 598544 - DNA, 15 bp, Homo sapiens
aatgactggattttc

SEQ ID NO: 598545 - DNA, 15 bp, Homo sapiens
atgactggattttct

SEQ ID NO: 598546 - DNA, 15 bp, Homo sapiens
tgactggattttctc

SEQ ID NO: 598547 - DNA, 15 bp, Homo sapiens
gactggattttctcc

SEQ ID NO: 598548 - DNA, 15 bp, Homo sapiens
actggattttctcca

SEQ ID NO: 598549 - DNA, 15 bp, Homo sapiens
ctggattttctccaa

SEQ ID NO: 598550 - DNA, 15 bp, Homo sapiens
tggattttctccaag

SEQ ID NO: 598551 - DNA, 15 bp, Homo sapiens
ggattttctccaagg

SEQ ID NO: 598552 - DNA, 15 bp, Homo sapiens
gattttctccaagga

SEQ ID NO: 598553 - DNA, 15 bp, Homo sapiens
attttctccaaggaa

SEQ ID NO: 598554 - DNA, 15 bp, Homo sapiens
ttttctccaaggaaa

SEQ ID NO: 598555 - DNA, 15 bp, Homo sapiens
tttctccaaggaaat

SEQ ID NO: 598556 - DNA, 15 bp, Homo sapiens
ttctccaaggaaatt

SEQ ID NO: 598557 - DNA, 15 bp, Homo sapiens
tctccaaggaaattt

SEQ ID NO: 598558 - DNA, 15 bp, Homo sapiens
ctccaaggaaattta

SEQ ID NO: 598559 - DNA, 15 bp, Homo sapiens
tccaaggaaatttat

SEQ ID NO: 598560 - DNA, 15 bp, Homo sapiens
ccaaggaaatttatt

SEQ ID NO: 598561 - DNA, 15 bp, Homo sapiens
caaggaaatttatta

SEQ ID NO: 598562 - DNA, 15 bp, Homo sapiens
aaggaaatttattaa

SEQ ID NO: 598563 - DNA, 15 bp, Homo sapiens
aggaaatttattaat

SEQ ID NO: 598564 - DNA, 15 bp, Homo sapiens
ggaaatttattaata

SEQ ID NO: 598565 - DNA, 15 bp, Homo sapiens
gaaatttattaatag

SEQ ID NO: 598566 - DNA, 15 bp, Homo sapiens
aaatttattaatagc

SEQ ID NO: 598567 - DNA, 15 bp, Homo sapiens
aatttattaatagcc

SEQ ID NO: 598568 - DNA, 15 bp, Homo sapiens
atttattaatagccc

SEQ ID NO: 598569 - DNA, 15 bp, Homo sapiens
tttattaatagcccc

SEQ ID NO: 598570 - DNA, 15 bp, Homo sapiens
ttattaatagcccct

SEQ ID NO: 598571 - DNA, 15 bp, Homo sapiens
tattaatagcccctc

SEQ ID NO: 598572 - DNA, 15 bp, Homo sapiens
attaatagcccctct

SEQ ID NO: 598573 - DNA, 15 bp, Homo sapiens
ttaatagcccctctt

SEQ ID NO: 598574 - DNA, 15 bp, Homo sapiens
taatagcccctcttg

SEQ ID NO: 598575 - DNA, 15 bp, Homo sapiens
aatagcccctcttgg

SEQ ID NO: 598576 - DNA, 15 bp, Homo sapiens
atagcccctcttggt

SEQ ID NO: 598577 - DNA, 15 bp, Homo sapiens
tagcccctcttggtt

SEQ ID NO: 598578 - DNA, 15 bp, Homo sapiens
agcccctcttggttt

SEQ ID NO: 598579 - DNA, 15 bp, Homo sapiens
gcccctcttggtttc

SEQ ID NO: 598580 - DNA, 15 bp, Homo sapiens
cccctcttggtttca

SEQ ID NO: 598581 - DNA, 15 bp, Homo sapiens
ccctcttggtttcac

SEQ ID NO: 598582 - DNA, 15 bp, Homo sapiens
cctcttggtttcacc

SEQ ID NO: 598583 - DNA, 15 bp, Homo sapiens
ctcttggtttcacct

SEQ ID NO: 598584 - DNA, 15 bp, Homo sapiens
tcttggtttcacctg

SEQ ID NO: 598585 - DNA, 15 bp, Homo sapiens
cttggtttcacctga

SEQ ID NO: 598586 - DNA, 15 bp, Homo sapiens
ttggtttcacctgaa

SEQ ID NO: 598587 - DNA, 15 bp, Homo sapiens
tggtttcacctgaag

SEQ ID NO: 598588 - DNA, 15 bp, Homo sapiens
ggtttcacctgaagg

SEQ ID NO: 598589 - DNA, 15 bp, Homo sapiens
gtttcacctgaagga

SEQ ID NO: 598590 - DNA, 15 bp, Homo sapiens
tttcacctgaaggag

SEQ ID NO: 598591 - DNA, 15 bp, Homo sapiens
ttcacctgaaggagc

SEQ ID NO: 598592 - DNA, 15 bp, Homo sapiens
tcacctgaaggagct

SEQ ID NO: 598593 - DNA, 15 bp, Homo sapiens
cacctgaaggagctt

SEQ ID NO: 598594 - DNA, 15 bp, Homo sapiens
acctgaaggagcttg

SEQ ID NO: 598595 - DNA, 15 bp, Homo sapiens
cctgaaggagcttgt

SEQ ID NO: 598596 - DNA, 15 bp, Homo sapiens
ctgaaggagcttgtc

SEQ ID NO: 598597 - DNA, 15 bp, Homo sapiens
tgaaggagcttgtct

SEQ ID NO: 598598 - DNA, 15 bp, Homo sapiens
gaaggagcttgtctt

SEQ ID NO: 598599 - DNA, 15 bp, Homo sapiens
aaggagcttgtcttc

SEQ ID NO: 598600 - DNA, 15 bp, Homo sapiens
aggagcttgtcttca

SEQ ID NO: 598601 - DNA, 15 bp, Homo sapiens
ggagcttgtcttcac

SEQ ID NO: 598602 - DNA, 15 bp, Homo sapiens
gagcttgtcttcacc

SEQ ID NO: 598603 - DNA, 15 bp, Homo sapiens
agcttgtcttcacct

SEQ ID NO: 598604 - DNA, 15 bp, Homo sapiens
gcttgtcttcacctg

SEQ ID NO: 598605 - DNA, 15 bp, Homo sapiens
cttgtcttcacctgc

SEQ ID NO: 598606 - DNA, 15 bp, Homo sapiens
ttgtcttcacctgcg

SEQ ID NO: 598607 - DNA, 15 bp, Homo sapiens
tgtcttcacctgcgg

SEQ ID NO: 598608 - DNA, 15 bp, Homo sapiens
gtcttcacctgcggc

SEQ ID NO: 598609 - DNA, 15 bp, Homo sapiens
tcttcacctgcggcc

SEQ ID NO: 598610 - DNA, 15 bp, Homo sapiens
cttcacctgcggcct

SEQ ID NO: 598611 - DNA, 15 bp, Homo sapiens
ttcacctgcggcctt

SEQ ID NO: 598612 - DNA, 15 bp, Homo sapiens
tcacctgcggccttt

SEQ ID NO: 598613 - DNA, 15 bp, Homo sapiens
cacctgcggcctttg

SEQ ID NO: 598614 - DNA, 15 bp, Homo sapiens
acctgcggcctttgc

SEQ ID NO: 598615 - DNA, 15 bp, Homo sapiens
cctgcggcctttgca

SEQ ID NO: 598616 - DNA, 15 bp, Homo sapiens
ctgcggcctttgcag

SEQ ID NO: 598617 - DNA, 15 bp, Homo sapiens
tgcggcctttgcagg

SEQ ID NO: 598618 - DNA, 15 bp, Homo sapiens
gcggcctttgcaggc

SEQ ID NO: 598619 - DNA, 15 bp, Homo sapiens
cggcctttgcaggct

SEQ ID NO: 598620 - DNA, 15 bp, Homo sapiens
ggcctttgcaggctt

SEQ ID NO: 598621 - DNA, 15 bp, Homo sapiens
gcctttgcaggctta

SEQ ID NO: 598622 - DNA, 15 bp, Homo sapiens
cctttgcaggcttaa

SEQ ID NO: 598623 - DNA, 15 bp, Homo sapiens
ctttgcaggcttaac

SEQ ID NO: 598624 - DNA, 15 bp, Homo sapiens
tttgcaggcttaacg

SEQ ID NO: 598625 - DNA, 15 bp, Homo sapiens
ttgcaggcttaacgc

SEQ ID NO: 598626 - DNA, 15 bp, Homo sapiens
tgcaggcttaacgcc

SEQ ID NO: 598627 - DNA, 15 bp, Homo sapiens
gcaggcttaacgccc

SEQ ID NO: 598628 - DNA, 15 bp, Homo sapiens
caggcttaacgcccc

SEQ ID NO: 598629 - DNA, 15 bp, Homo sapiens
aggcttaacgccccc

SEQ ID NO: 598630 - DNA, 15 bp, Homo sapiens
ggcttaacgccccca

SEQ ID NO: 598631 - DNA, 15 bp, Homo sapiens
gcttaacgcccccag

SEQ ID NO: 598632 - DNA, 15 bp, Homo sapiens
cttaacgcccccagc

SEQ ID NO: 598633 - DNA, 15 bp, Homo sapiens
ttaacgcccccagct

SEQ ID NO: 598634 - DNA, 15 bp, Homo sapiens
taacgcccccagctt

SEQ ID NO: 598635 - DNA, 15 bp, Homo sapiens
aacgcccccagcttg

SEQ ID NO: 598636 - DNA, 15 bp, Homo sapiens
acgcccccagcttga

SEQ ID NO: 598637 - DNA, 15 bp, Homo sapiens
cgcccccagcttgaa

SEQ ID NO: 598638 - DNA, 15 bp, Homo sapiens
gcccccagcttgaaa

SEQ ID NO: 598639 - DNA, 15 bp, Homo sapiens
cccccagcttgaaac

SEQ ID NO: 598640 - DNA, 15 bp, Homo sapiens
ccccagcttgaaacc

SEQ ID NO: 598641 - DNA, 15 bp, Homo sapiens
cccagcttgaaaccc

SEQ ID NO: 598642 - DNA, 15 bp, Homo sapiens
ccagcttgaaaccca

SEQ ID NO: 598643 - DNA, 15 bp, Homo sapiens
cagcttgaaacccag

SEQ ID NO: 598644 - DNA, 15 bp, Homo sapiens
agcttgaaacccaga

SEQ ID NO: 598645 - DNA, 15 bp, Homo sapiens
gcttgaaacccagaa

SEQ ID NO: 598646 - DNA, 15 bp, Homo sapiens
cttgaaacccagaag

SEQ ID NO: 598647 - DNA, 15 bp, Homo sapiens
ttgaaacccagaagc

SEQ ID NO: 598648 - DNA, 15 bp, Homo sapiens
tgaaacccagaagct

SEQ ID NO: 598649 - DNA, 15 bp, Homo sapiens
gaaacccagaagctc

SEQ ID NO: 598650 - DNA, 15 bp, Homo sapiens
aaacccagaagctca

SEQ ID NO: 598651 - DNA, 15 bp, Homo sapiens
aacccagaagctcag

SEQ ID NO: 598652 - DNA, 15 bp, Homo sapiens
acccagaagctcaga

SEQ ID NO: 598653 - DNA, 15 bp, Homo sapiens
cccagaagctcagac

SEQ ID NO: 598654 - DNA, 15 bp, Homo sapiens
ccagaagctcagact

SEQ ID NO: 598655 - DNA, 15 bp, Homo sapiens
cagaagctcagactt

SEQ ID NO: 598656 - DNA, 15 bp, Homo sapiens
agaagctcagacttg

SEQ ID NO: 598657 - DNA, 15 bp, Homo sapiens
gaagctcagacttgg

SEQ ID NO: 598658 - DNA, 15 bp, Homo sapiens
aagctcagacttggg

SEQ ID NO: 598659 - DNA, 15 bp, Homo sapiens
agctcagacttgggc

SEQ ID NO: 598660 - DNA, 15 bp, Homo sapiens
gctcagacttgggcc

SEQ ID NO: 598661 - DNA, 15 bp, Homo sapiens
ctcagacttgggccc

SEQ ID NO: 598662 - DNA, 15 bp, Homo sapiens
tcagacttgggccca

SEQ ID NO: 598663 - DNA, 15 bp, Homo sapiens
cagacttgggcccaa

SEQ ID NO: 598664 - DNA, 15 bp, Homo sapiens
agacttgggcccaag

SEQ ID NO: 598665 - DNA, 15 bp, Homo sapiens
gacttgggcccaagg

SEQ ID NO: 598666 - DNA, 15 bp, Homo sapiens
acttgggcccaaggt

SEQ ID NO: 598667 - DNA, 15 bp, Homo sapiens
cttgggcccaaggta

SEQ ID NO: 598668 - DNA, 15 bp, Homo sapiens
ttgggcccaaggtat

SEQ ID NO: 598669 - DNA, 15 bp, Homo sapiens
tgggcccaaggtatt

SEQ ID NO: 598670 - DNA, 15 bp, Homo sapiens
gggcccaaggtatta

SEQ ID NO: 598671 - DNA, 15 bp, Homo sapiens
ggcccaaggtattat

SEQ ID NO: 598672 - DNA, 15 bp, Homo sapiens
gcccaaggtattatt

SEQ ID NO: 598673 - DNA, 15 bp, Homo sapiens
cccaaggtattatta

SEQ ID NO: 598674 - DNA, 15 bp, Homo sapiens
ccaaggtattattag

SEQ ID NO: 598675 - DNA, 15 bp, Homo sapiens
caaggtattattagt

SEQ ID NO: 598676 - DNA, 15 bp, Homo sapiens
aaggtattattagtg

SEQ ID NO: 598677 - DNA, 15 bp, Homo sapiens
aggtattattagtgc

SEQ ID NO: 598678 - DNA, 15 bp, Homo sapiens
ggtattattagtgcc

SEQ ID NO: 598679 - DNA, 15 bp, Homo sapiens
gtattattagtgcca

SEQ ID NO: 598680 - DNA, 15 bp, Homo sapiens
tattattagtgccaa

SEQ ID NO: 598681 - DNA, 15 bp, Homo sapiens
attattagtgccaac

SEQ ID NO: 598682 - DNA, 15 bp, Homo sapiens
ttattagtgccaaca

SEQ ID NO: 598683 - DNA, 15 bp, Homo sapiens
tattagtgccaacac

SEQ ID NO: 598684 - DNA, 15 bp, Homo sapiens
attagtgccaacact

SEQ ID NO: 598685 - DNA, 15 bp, Homo sapiens
ttagtgccaacacta

SEQ ID NO: 598686 - DNA, 15 bp, Homo sapiens
tagtgccaacactac

SEQ ID NO: 598687 - DNA, 15 bp, Homo sapiens
agtgccaacactacc

SEQ ID NO: 598688 - DNA, 15 bp, Homo sapiens
gtgccaacactacct

SEQ ID NO: 598689 - DNA, 15 bp, Homo sapiens
tgccaacactacctg

SEQ ID NO: 598690 - DNA, 15 bp, Homo sapiens
gccaacactacctga

SEQ ID NO: 598691 - DNA, 15 bp, Homo sapiens
ccaacactacctgaa

SEQ ID NO: 598692 - DNA, 15 bp, Homo sapiens
caacactacctgaaa

SEQ ID NO: 598693 - DNA, 15 bp, Homo sapiens
aacactacctgaaat

SEQ ID NO: 598694 - DNA, 15 bp, Homo sapiens
acactacctgaaatg

SEQ ID NO: 598695 - DNA, 15 bp, Homo sapiens
cactacctgaaatgt

SEQ ID NO: 598696 - DNA, 15 bp, Homo sapiens
actacctgaaatgtt

SEQ ID NO: 598697 - DNA, 15 bp, Homo sapiens
ctacctgaaatgttt

SEQ ID NO: 598698 - DNA, 15 bp, Homo sapiens
tacctgaaatgtttc

SEQ ID NO: 598699 - DNA, 15 bp, Homo sapiens
acctgaaatgtttcg

SEQ ID NO: 598700 - DNA, 15 bp, Homo sapiens
cctgaaatgtttcgc

SEQ ID NO: 598701 - DNA, 15 bp, Homo sapiens
ctgaaatgtttcgca

SEQ ID NO: 598702 - DNA, 15 bp, Homo sapiens
tgaaatgtttcgcac

SEQ ID NO: 598703 - DNA, 15 bp, Homo sapiens
gaaatgtttcgcacc

SEQ ID NO: 598704 - DNA, 15 bp, Homo sapiens
aaatgtttcgcacct

SEQ ID NO: 598705 - DNA, 15 bp, Homo sapiens
aatgtttcgcacctc

SEQ ID NO: 598706 - DNA, 15 bp, Homo sapiens
atgtttcgcacctca

SEQ ID NO: 598707 - DNA, 15 bp, Homo sapiens
tgtttcgcacctcat

SEQ ID NO: 598708 - DNA, 15 bp, Homo sapiens
gtttcgcacctcata

SEQ ID NO: 598709 - DNA, 15 bp, Homo sapiens
tttcgcacctcataa

SEQ ID NO: 598710 - DNA, 15 bp, Homo sapiens
ttcgcacctcataaa

SEQ ID NO: 598711 - DNA, 15 bp, Homo sapiens
tcgcacctcataaaa

SEQ ID NO: 598712 - DNA, 15 bp, Homo sapiens
cgcacctcataaaaa

SEQ ID NO: 598713 - DNA, 15 bp, Homo sapiens
gcacctcataaaaat

SEQ ID NO: 598714 - DNA, 15 bp, Homo sapiens
cacctcataaaaatg

SEQ ID NO: 598715 - DNA, 15 bp, Homo sapiens
acctcataaaaatgg

SEQ ID NO: 598716 - DNA, 15 bp, Homo sapiens
cctcataaaaatggt

SEQ ID NO: 598717 - DNA, 15 bp, Homo sapiens
ctcataaaaatggtg

SEQ ID NO: 598718 - DNA, 15 bp, Homo sapiens
tcataaaaatggtgt

SEQ ID NO: 598719 - DNA, 15 bp, Homo sapiens
cataaaaatggtgtg

SEQ ID NO: 598720 - DNA, 15 bp, Homo sapiens
ataaaaatggtgtgt

SEQ ID NO: 598721 - DNA, 15 bp, Homo sapiens
taaaaatggtgtgtc

SEQ ID NO: 598722 - DNA, 15 bp, Homo sapiens
aaaaatggtgtgtca

SEQ ID NO: 598723 - DNA, 15 bp, Homo sapiens
aaaatggtgtgtcag

SEQ ID NO: 598724 - DNA, 15 bp, Homo sapiens
aaatggtgtgtcagt

SEQ ID NO: 598725 - DNA, 15 bp, Homo sapiens
aatggtgtgtcagtt

SEQ ID NO: 598726 - DNA, 15 bp, Homo sapiens
atggtgtgtcagttt

SEQ ID NO: 598727 - DNA, 15 bp, Homo sapiens
tggtgtgtcagtttc

SEQ ID NO: 598728 - DNA, 15 bp, Homo sapiens
ggtgtgtcagtttcg

SEQ ID NO: 598729 - DNA, 15 bp, Homo sapiens
gtgtgtcagtttcgg

SEQ ID NO: 598730 - DNA, 15 bp, Homo sapiens
tgtgtcagtttcggg

SEQ ID NO: 598731 - DNA, 15 bp, Homo sapiens
gtgtcagtttcgggt

SEQ ID NO: 598732 - DNA, 15 bp, Homo sapiens
tgtcagtttcgggtg

SEQ ID NO: 598733 - DNA, 15 bp, Homo sapiens
gtcagtttcgggtga

SEQ ID NO: 598734 - DNA, 15 bp, Homo sapiens
tcagtttcgggtgag

SEQ ID NO: 598735 - DNA, 15 bp, Homo sapiens
cagtttcgggtgaga

SEQ ID NO: 598736 - DNA, 15 bp, Homo sapiens
agtttcgggtgagag

SEQ ID NO: 598737 - DNA, 15 bp, Homo sapiens
gtttcgggtgagagg

SEQ ID NO: 598738 - DNA, 15 bp, Homo sapiens
tttcgggtgagaggt

SEQ ID NO: 598739 - DNA, 15 bp, Homo sapiens
ttcgggtgagaggtt

SEQ ID NO: 598740 - DNA, 15 bp, Homo sapiens
tcgggtgagaggttg

SEQ ID NO: 598741 - DNA, 15 bp, Homo sapiens
cgggtgagaggttgg

SEQ ID NO: 598742 - DNA, 15 bp, Homo sapiens
gggtgagaggttggg

SEQ ID NO: 598743 - DNA, 15 bp, Homo sapiens
ggtgagaggttggga

SEQ ID NO: 598744 - DNA, 15 bp, Homo sapiens
gtgagaggttgggac

SEQ ID NO: 598745 - DNA, 15 bp, Homo sapiens
tgagaggttgggacg

SEQ ID NO: 598746 - DNA, 15 bp, Homo sapiens
gagaggttgggacgc

SEQ ID NO: 598747 - DNA, 15 bp, Homo sapiens
agaggttgggacgct

SEQ ID NO: 598748 - DNA, 15 bp, Homo sapiens
gaggttgggacgctt

SEQ ID NO: 598749 - DNA, 15 bp, Homo sapiens
aggttgggacgcttc

SEQ ID NO: 598750 - DNA, 15 bp, Homo sapiens
ggttgggacgcttcc

SEQ ID NO: 598751 - DNA, 15 bp, Homo sapiens
gttgggacgcttccc

SEQ ID NO: 598752 - DNA, 15 bp, Homo sapiens
ttgggacgcttccca

SEQ ID NO: 598753 - DNA, 15 bp, Homo sapiens
tgggacgcttcccat

SEQ ID NO: 598754 - DNA, 15 bp, Homo sapiens
gggacgcttcccatc

SEQ ID NO: 598755 - DNA, 15 bp, Homo sapiens
ggacgcttcccatct

SEQ ID NO: 598756 - DNA, 15 bp, Homo sapiens
gacgcttcccatctg

SEQ ID NO: 598757 - DNA, 15 bp, Homo sapiens
acgcttcccatctga

SEQ ID NO: 598758 - DNA, 15 bp, Homo sapiens
cgcttcccatctgat

SEQ ID NO: 598759 - DNA, 15 bp, Homo sapiens
gcttcccatctgatt

SEQ ID NO: 598760 - DNA, 15 bp, Homo sapiens
cttcccatctgattt

SEQ ID NO: 598761 - DNA, 15 bp, Homo sapiens
ttcccatctgatttg

SEQ ID NO: 598762 - DNA, 15 bp, Homo sapiens
tcccatctgatttgg

SEQ ID NO: 598763 - DNA, 15 bp, Homo sapiens
cccatctgatttggc

SEQ ID NO: 598764 - DNA, 15 bp, Homo sapiens
ccatctgatttggcc

SEQ ID NO: 598765 - DNA, 15 bp, Homo sapiens
catctgatttggccc

SEQ ID NO: 598766 - DNA, 15 bp, Homo sapiens
atctgatttggccca

SEQ ID NO: 598767 - DNA, 15 bp, Homo sapiens
tctgatttggcccaa

SEQ ID NO: 598768 - DNA, 15 bp, Homo sapiens
ctgatttggcccaag

SEQ ID NO: 598769 - DNA, 15 bp, Homo sapiens
tgatttggcccaagg

SEQ ID NO: 598770 - DNA, 15 bp, Homo sapiens
gatttggcccaaggc

SEQ ID NO: 598771 - DNA, 15 bp, Homo sapiens
atttggcccaaggca

SEQ ID NO: 598772 - DNA, 15 bp, Homo sapiens
tttggcccaaggcat

SEQ ID NO: 598773 - DNA, 15 bp, Homo sapiens
ttggcccaaggcatg

SEQ ID NO: 598774 - DNA, 15 bp, Homo sapiens
tggcccaaggcatgc

SEQ ID NO: 598775 - DNA, 15 bp, Homo sapiens
ggcccaaggcatgca

SEQ ID NO: 598776 - DNA, 15 bp, Homo sapiens
gcccaaggcatgcat

SEQ ID NO: 598777 - DNA, 15 bp, Homo sapiens
cccaaggcatgcatg

SEQ ID NO: 598778 - DNA, 15 bp, Homo sapiens
ccaaggcatgcatgc

SEQ ID NO: 598779 - DNA, 15 bp, Homo sapiens
caaggcatgcatgcc

SEQ ID NO: 598780 - DNA, 15 bp, Homo sapiens
aaggcatgcatgccc

SEQ ID NO: 598781 - DNA, 15 bp, Homo sapiens
aggcatgcatgcccc

SEQ ID NO: 598782 - DNA, 15 bp, Homo sapiens
ggcatgcatgcccct

SEQ ID NO: 598783 - DNA, 15 bp, Homo sapiens
gcatgcatgcccctc

SEQ ID NO: 598784 - DNA, 15 bp, Homo sapiens
catgcatgcccctcc

SEQ ID NO: 598785 - DNA, 15 bp, Homo sapiens
atgcatgcccctcct

SEQ ID NO: 598786 - DNA, 15 bp, Homo sapiens
tgcatgcccctcctt

SEQ ID NO: 598787 - DNA, 15 bp, Homo sapiens
gcatgcccctccttc

SEQ ID NO: 598788 - DNA, 15 bp, Homo sapiens
catgcccctccttct

SEQ ID NO: 598789 - DNA, 15 bp, Homo sapiens
atgcccctccttctc

SEQ ID NO: 598790 - DNA, 15 bp, Homo sapiens
tgcccctccttctcc

SEQ ID NO: 598791 - DNA, 15 bp, Homo sapiens
gcccctccttctcct

SEQ ID NO: 598792 - DNA, 15 bp, Homo sapiens
cccctccttctcctt

SEQ ID NO: 598793 - DNA, 15 bp, Homo sapiens
ccctccttctccttc

SEQ ID NO: 598794 - DNA, 15 bp, Homo sapiens
cctccttctccttcc

SEQ ID NO: 598795 - DNA, 15 bp, Homo sapiens
ctccttctccttccc

SEQ ID NO: 598796 - DNA, 15 bp, Homo sapiens
tccttctccttcccc

SEQ ID NO: 598797 - DNA, 15 bp, Homo sapiens
ccttctccttcccct

SEQ ID NO: 598798 - DNA, 15 bp, Homo sapiens
cttctccttcccctc

SEQ ID NO: 598799 - DNA, 15 bp, Homo sapiens
ttctccttcccctcc

SEQ ID NO: 598800 - DNA, 15 bp, Homo sapiens
tctccttcccctcct

SEQ ID NO: 598801 - DNA, 15 bp, Homo sapiens
ctccttcccctcctc

SEQ ID NO: 598802 - DNA, 15 bp, Homo sapiens
tccttcccctcctcc

SEQ ID NO: 598803 - DNA, 15 bp, Homo sapiens
ccttcccctcctcct

SEQ ID NO: 598804 - DNA, 15 bp, Homo sapiens
cttcccctcctcctc

SEQ ID NO: 598805 - DNA, 15 bp, Homo sapiens
ttcccctcctcctcc

SEQ ID NO: 598806 - DNA, 15 bp, Homo sapiens
tcccctcctcctccc

SEQ ID NO: 598807 - DNA, 15 bp, Homo sapiens
cccctcctcctcccc

SEQ ID NO: 598808 - DNA, 15 bp, Homo sapiens
ccctcctcctccccc

SEQ ID NO: 598809 - DNA, 15 bp, Homo sapiens
cctcctcctccccct

SEQ ID NO: 598810 - DNA, 15 bp, Homo sapiens
ctcctcctccccctc

SEQ ID NO: 598811 - DNA, 15 bp, Homo sapiens
tcctcctccccctct

SEQ ID NO: 598812 - DNA, 15 bp, Homo sapiens
cctcctccccctctt

SEQ ID NO: 598813 - DNA, 15 bp, Homo sapiens
ctcctccccctcttc

SEQ ID NO: 598814 - DNA, 15 bp, Homo sapiens
tcctccccctcttcc

SEQ ID NO: 598815 - DNA, 15 bp, Homo sapiens
cctccccctcttccc

SEQ ID NO: 598816 - DNA, 15 bp, Homo sapiens
ctccccctcttcccc

SEQ ID NO: 598817 - DNA, 15 bp, Homo sapiens
tccccctcttccccc

SEQ ID NO: 598818 - DNA, 15 bp, Homo sapiens
ccccctcttccccct

SEQ ID NO: 598819 - DNA, 15 bp, Homo sapiens
cccctcttcccccta

SEQ ID NO: 598820 - DNA, 15 bp, Homo sapiens
ccctcttccccctac

SEQ ID NO: 598821 - DNA, 15 bp, Homo sapiens
cctcttccccctacc

SEQ ID NO: 598822 - DNA, 15 bp, Homo sapiens
ctcttccccctacca

SEQ ID NO: 598823 - DNA, 15 bp, Homo sapiens
tcttccccctaccat

SEQ ID NO: 598824 - DNA, 15 bp, Homo sapiens
cttccccctaccatc

SEQ ID NO: 598825 - DNA, 15 bp, Homo sapiens
ttccccctaccatcc

SEQ ID NO: 598826 - DNA, 15 bp, Homo sapiens
tccccctaccatcct

SEQ ID NO: 598827 - DNA, 15 bp, Homo sapiens
ccccctaccatcctt

SEQ ID NO: 598828 - DNA, 15 bp, Homo sapiens
cccctaccatccttc

SEQ ID NO: 598829 - DNA, 15 bp, Homo sapiens
ccctaccatccttcc

SEQ ID NO: 598830 - DNA, 15 bp, Homo sapiens
cctaccatccttcct

SEQ ID NO: 598831 - DNA, 15 bp, Homo sapiens
ctaccatccttcctg

SEQ ID NO: 598832 - DNA, 15 bp, Homo sapiens
taccatccttcctgt

SEQ ID NO: 598833 - DNA, 15 bp, Homo sapiens
accatccttcctgtt

SEQ ID NO: 598834 - DNA, 15 bp, Homo sapiens
ccatccttcctgttt

SEQ ID NO: 598835 - DNA, 15 bp, Homo sapiens
catccttcctgtttt

SEQ ID NO: 598836 - DNA, 15 bp, Homo sapiens
atccttcctgttttc

SEQ ID NO: 598837 - DNA, 15 bp, Homo sapiens
tccttcctgttttct

SEQ ID NO: 598838 - DNA, 15 bp, Homo sapiens
ccttcctgttttctc

SEQ ID NO: 598839 - DNA, 15 bp, Homo sapiens
cttcctgttttctct

SEQ ID NO: 598840 - DNA, 15 bp, Homo sapiens
ttcctgttttctctc

SEQ ID NO: 598841 - DNA, 15 bp, Homo sapiens
tcctgttttctctcc

SEQ ID NO: 598842 - DNA, 15 bp, Homo sapiens
cctgttttctctcca

SEQ ID NO: 598843 - DNA, 15 bp, Homo sapiens
ctgttttctctccaa

SEQ ID NO: 598844 - DNA, 15 bp, Homo sapiens
tgttttctctccaac

SEQ ID NO: 598845 - DNA, 15 bp, Homo sapiens
gttttctctccaact

SEQ ID NO: 598846 - DNA, 15 bp, Homo sapiens
ttttctctccaactc

SEQ ID NO: 598847 - DNA, 15 bp, Homo sapiens
tttctctccaactct

SEQ ID NO: 598848 - DNA, 15 bp, Homo sapiens
ttctctccaactctg

SEQ ID NO: 598849 - DNA, 15 bp, Homo sapiens
tctctccaactctgg

SEQ ID NO: 598850 - DNA, 15 bp, Homo sapiens
ctctccaactctggt

SEQ ID NO: 598851 - DNA, 15 bp, Homo sapiens
tctccaactctggtg

SEQ ID NO: 598852 - DNA, 15 bp, Homo sapiens
ctccaactctggtgc

SEQ ID NO: 598853 - DNA, 15 bp, Homo sapiens
tccaactctggtgca

SEQ ID NO: 598854 - DNA, 15 bp, Homo sapiens
ccaactctggtgcac

SEQ ID NO: 598855 - DNA, 15 bp, Homo sapiens
caactctggtgcaca

SEQ ID NO: 598856 - DNA, 15 bp, Homo sapiens
aactctggtgcacag

SEQ ID NO: 598857 - DNA, 15 bp, Homo sapiens
actctggtgcacagc

SEQ ID NO: 598858 - DNA, 15 bp, Homo sapiens
ctctggtgcacagct

SEQ ID NO: 598859 - DNA, 15 bp, Homo sapiens
tctggtgcacagctt

SEQ ID NO: 598860 - DNA, 15 bp, Homo sapiens
ctggtgcacagcttt

SEQ ID NO: 598861 - DNA, 15 bp, Homo sapiens
tggtgcacagctttg

SEQ ID NO: 598862 - DNA, 15 bp, Homo sapiens
ggtgcacagctttga

SEQ ID NO: 598863 - DNA, 15 bp, Homo sapiens
gtgcacagctttgaa

SEQ ID NO: 598864 - DNA, 15 bp, Homo sapiens
tgcacagctttgaaa

SEQ ID NO: 598865 - DNA, 15 bp, Homo sapiens
gcacagctttgaaat

SEQ ID NO: 598866 - DNA, 15 bp, Homo sapiens
cacagctttgaaatc

SEQ ID NO: 598867 - DNA, 15 bp, Homo sapiens
acagctttgaaatct

SEQ ID NO: 598868 - DNA, 15 bp, Homo sapiens
cagctttgaaatctt

SEQ ID NO: 598869 - DNA, 15 bp, Homo sapiens
agctttgaaatcttg

SEQ ID NO: 598870 - DNA, 15 bp, Homo sapiens
gctttgaaatcttgc

SEQ ID NO: 598871 - DNA, 15 bp, Homo sapiens
ctttgaaatcttgct

SEQ ID NO: 598872 - DNA, 15 bp, Homo sapiens
tttgaaatcttgctg

SEQ ID NO: 598873 - DNA, 15 bp, Homo sapiens
ttgaaatcttgctga

SEQ ID NO: 598874 - DNA, 15 bp, Homo sapiens
tgaaatcttgctgag

SEQ ID NO: 598875 - DNA, 15 bp, Homo sapiens
gaaatcttgctgaga

SEQ ID NO: 598876 - DNA, 15 bp, Homo sapiens
aaatcttgctgagaa

SEQ ID NO: 598877 - DNA, 15 bp, Homo sapiens
aatcttgctgagaag

SEQ ID NO: 598878 - DNA, 15 bp, Homo sapiens
atcttgctgagaagc

SEQ ID NO: 598879 - DNA, 15 bp, Homo sapiens
tcttgctgagaagca

SEQ ID NO: 598880 - DNA, 15 bp, Homo sapiens
cttgctgagaagcaa

SEQ ID NO: 598881 - DNA, 15 bp, Homo sapiens
ttgctgagaagcaaa

SEQ ID NO: 598882 - DNA, 15 bp, Homo sapiens
tgctgagaagcaaat

SEQ ID NO: 598883 - DNA, 15 bp, Homo sapiens
gctgagaagcaaatc

SEQ ID NO: 598884 - DNA, 15 bp, Homo sapiens
ctgagaagcaaatct

SEQ ID NO: 598885 - DNA, 15 bp, Homo sapiens
tgagaagcaaatctg

SEQ ID NO: 598886 - DNA, 15 bp, Homo sapiens
gagaagcaaatctgt

SEQ ID NO: 598887 - DNA, 15 bp, Homo sapiens
agaagcaaatctgtc

SEQ ID NO: 598888 - DNA, 15 bp, Homo sapiens
gaagcaaatctgtcc

SEQ ID NO: 598889 - DNA, 15 bp, Homo sapiens
aagcaaatctgtccc

SEQ ID NO: 598890 - DNA, 15 bp, Homo sapiens
agcaaatctgtccct

SEQ ID NO: 598891 - DNA, 15 bp, Homo sapiens
gcaaatctgtccctt

SEQ ID NO: 598892 - DNA, 15 bp, Homo sapiens
caaatctgtcccttc

SEQ ID NO: 598893 - DNA, 15 bp, Homo sapiens
aaatctgtcccttct

SEQ ID NO: 598894 - DNA, 15 bp, Homo sapiens
aatctgtcccttctg

SEQ ID NO: 598895 - DNA, 15 bp, Homo sapiens
atctgtcccttctgc

SEQ ID NO: 598896 - DNA, 15 bp, Homo sapiens
tctgtcccttctgct

SEQ ID NO: 598897 - DNA, 15 bp, Homo sapiens
ctgtcccttctgctt

SEQ ID NO: 598898 - DNA, 15 bp, Homo sapiens
tgtcccttctgcttt

SEQ ID NO: 598899 - DNA, 15 bp, Homo sapiens
gtcccttctgctttg

SEQ ID NO: 598900 - DNA, 15 bp, Homo sapiens
tcccttctgctttga

SEQ ID NO: 598901 - DNA, 15 bp, Homo sapiens
cccttctgctttgaa

SEQ ID NO: 598902 - DNA, 15 bp, Homo sapiens
ccttctgctttgaat

SEQ ID NO: 598903 - DNA, 15 bp, Homo sapiens
cttctgctttgaatg

SEQ ID NO: 598904 - DNA, 15 bp, Homo sapiens
ttctgctttgaatgt

SEQ ID NO: 598905 - DNA, 15 bp, Homo sapiens
tctgctttgaatgtt

SEQ ID NO: 598906 - DNA, 15 bp, Homo sapiens
ctgctttgaatgttt

SEQ ID NO: 598907 - DNA, 15 bp, Homo sapiens
tgctttgaatgttta

SEQ ID NO: 598908 - DNA, 15 bp, Homo sapiens
gctttgaatgtttat

SEQ ID NO: 598909 - DNA, 15 bp, Homo sapiens
ctttgaatgtttatt

SEQ ID NO: 598910 - DNA, 15 bp, Homo sapiens
tttgaatgtttattt

SEQ ID NO: 598911 - DNA, 15 bp, Homo sapiens
ttgaatgtttatttg

SEQ ID NO: 598912 - DNA, 15 bp, Homo sapiens
tgaatgtttatttgt

SEQ ID NO: 598913 - DNA, 15 bp, Homo sapiens
gaatgtttatttgtg

SEQ ID NO: 598914 - DNA, 15 bp, Homo sapiens
aatgtttatttgtgg

SEQ ID NO: 598915 - DNA, 15 bp, Homo sapiens
atgtttatttgtgga

SEQ ID NO: 598916 - DNA, 15 bp, Homo sapiens
tgtttatttgtggaa

SEQ ID NO: 598917 - DNA, 15 bp, Homo sapiens
gtttatttgtggaag

SEQ ID NO: 598918 - DNA, 15 bp, Homo sapiens
tttatttgtggaagt

SEQ ID NO: 598919 - DNA, 15 bp, Homo sapiens
ttatttgtggaagtt

SEQ ID NO: 598920 - DNA, 15 bp, Homo sapiens
tatttgtggaagttc

SEQ ID NO: 598921 - DNA, 15 bp, Homo sapiens
atttgtggaagttcg

SEQ ID NO: 598922 - DNA, 15 bp, Homo sapiens
tttgtggaagttcgg

SEQ ID NO: 598923 - DNA, 15 bp, Homo sapiens
ttgtggaagttcggc

SEQ ID NO: 598924 - DNA, 15 bp, Homo sapiens
tgtggaagttcggca

SEQ ID NO: 598925 - DNA, 15 bp, Homo sapiens
gtggaagttcggcag

SEQ ID NO: 598926 - DNA, 15 bp, Homo sapiens
tggaagttcggcagg

SEQ ID NO: 598927 - DNA, 15 bp, Homo sapiens
ggaagttcggcaggg

SEQ ID NO: 598928 - DNA, 15 bp, Homo sapiens
gaagttcggcagggg

SEQ ID NO: 598929 - DNA, 15 bp, Homo sapiens
aagttcggcagggga

SEQ ID NO: 598930 - DNA, 15 bp, Homo sapiens
agttcggcaggggaa

SEQ ID NO: 598931 - DNA, 15 bp, Homo sapiens
gttcggcaggggaac

SEQ ID NO: 598932 - DNA, 15 bp, Homo sapiens
ttcggcaggggaacc

SEQ ID NO: 598933 - DNA, 15 bp, Homo sapiens
tcggcaggggaaccg

SEQ ID NO: 598934 - DNA, 15 bp, Homo sapiens
cggcaggggaaccga

SEQ ID NO: 598935 - DNA, 15 bp, Homo sapiens
ggcaggggaaccgag

SEQ ID NO: 598936 - DNA, 15 bp, Homo sapiens
gcaggggaaccgagg

SEQ ID NO: 598937 - DNA, 15 bp, Homo sapiens
caggggaaccgaggc

SEQ ID NO: 598938 - DNA, 15 bp, Homo sapiens
aggggaaccgaggcg

SEQ ID NO: 598939 - DNA, 15 bp, Homo sapiens
ggggaaccgaggcgg

SEQ ID NO: 598940 - DNA, 15 bp, Homo sapiens
gggaaccgaggcggg

SEQ ID NO: 598941 - DNA, 15 bp, Homo sapiens
ggaaccgaggcgggt

SEQ ID NO: 598942 - DNA, 15 bp, Homo sapiens
gaaccgaggcgggtg

SEQ ID NO: 598943 - DNA, 15 bp, Homo sapiens
aaccgaggcgggtgc

SEQ ID NO: 598944 - DNA, 15 bp, Homo sapiens
accgaggcgggtgcc

SEQ ID NO: 598945 - DNA, 15 bp, Homo sapiens
ccgaggcgggtgcca

SEQ ID NO: 598946 - DNA, 15 bp, Homo sapiens
cgaggcgggtgccaa

SEQ ID NO: 598947 - DNA, 15 bp, Homo sapiens
gaggcgggtgccaag

SEQ ID NO: 598948 - DNA, 15 bp, Homo sapiens
aggcgggtgccaaga

SEQ ID NO: 598949 - DNA, 15 bp, Homo sapiens
ggcgggtgccaagac

SEQ ID NO: 598950 - DNA, 15 bp, Homo sapiens
gcgggtgccaagacc

SEQ ID NO: 598951 - DNA, 15 bp, Homo sapiens
cgggtgccaagacct

SEQ ID NO: 598952 - DNA, 15 bp, Homo sapiens
gggtgccaagacctg

SEQ ID NO: 598953 - DNA, 15 bp, Homo sapiens
ggtgccaagacctgc

SEQ ID NO: 598954 - DNA, 15 bp, Homo sapiens
gtgccaagacctgcc

SEQ ID NO: 598955 - DNA, 15 bp, Homo sapiens
tgccaagacctgcca

SEQ ID NO: 598956 - DNA, 15 bp, Homo sapiens
gccaagacctgccat

SEQ ID NO: 598957 - DNA, 15 bp, Homo sapiens
ccaagacctgccatg

SEQ ID NO: 598958 - DNA, 15 bp, Homo sapiens
caagacctgccatgc

SEQ ID NO: 598959 - DNA, 15 bp, Homo sapiens
aagacctgccatgct

SEQ ID NO: 598960 - DNA, 15 bp, Homo sapiens
agacctgccatgctg

SEQ ID NO: 598961 - DNA, 15 bp, Homo sapiens
gacctgccatgctgc

SEQ ID NO: 598962 - DNA, 15 bp, Homo sapiens
acctgccatgctgct

SEQ ID NO: 598963 - DNA, 15 bp, Homo sapiens
cctgccatgctgctg

SEQ ID NO: 598964 - DNA, 15 bp, Homo sapiens
ctgccatgctgctgg

SEQ ID NO: 598965 - DNA, 15 bp, Homo sapiens
tgccatgctgctggg

SEQ ID NO: 598966 - DNA, 15 bp, Homo sapiens
gccatgctgctggga

SEQ ID NO: 598967 - DNA, 15 bp, Homo sapiens
ccatgctgctgggaa

SEQ ID NO: 598968 - DNA, 15 bp, Homo sapiens
catgctgctgggaag

SEQ ID NO: 598969 - DNA, 15 bp, Homo sapiens
atgctgctgggaagt

SEQ ID NO: 598970 - DNA, 15 bp, Homo sapiens
tgctgctgggaagtc

SEQ ID NO: 598971 - DNA, 15 bp, Homo sapiens
gctgctgggaagtct

SEQ ID NO: 598972 - DNA, 15 bp, Homo sapiens
ctgctgggaagtctg

SEQ ID NO: 598973 - DNA, 15 bp, Homo sapiens
tgctgggaagtctga

SEQ ID NO: 598974 - DNA, 15 bp, Homo sapiens
gctgggaagtctgag

SEQ ID NO: 598975 - DNA, 15 bp, Homo sapiens
ctgggaagtctgagt

SEQ ID NO: 598976 - DNA, 15 bp, Homo sapiens
tgggaagtctgagtc

SEQ ID NO: 598977 - DNA, 15 bp, Homo sapiens
gggaagtctgagtct

SEQ ID NO: 598978 - DNA, 15 bp, Homo sapiens
ggaagtctgagtctc

SEQ ID NO: 598979 - DNA, 15 bp, Homo sapiens
gaagtctgagtctcc

SEQ ID NO: 598980 - DNA, 15 bp, Homo sapiens
aagtctgagtctccc

SEQ ID NO: 598981 - DNA, 15 bp, Homo sapiens
agtctgagtctccct

SEQ ID NO: 598982 - DNA, 15 bp, Homo sapiens
gtctgagtctccctc

SEQ ID NO: 598983 - DNA, 15 bp, Homo sapiens
tctgagtctccctcc

SEQ ID NO: 598984 - DNA, 15 bp, Homo sapiens
ctgagtctccctccc

SEQ ID NO: 598985 - DNA, 15 bp, Homo sapiens
tgagtctccctccct

SEQ ID NO: 598986 - DNA, 15 bp, Homo sapiens
gagtctccctccctt

SEQ ID NO: 598987 - DNA, 15 bp, Homo sapiens
agtctccctcccttc

SEQ ID NO: 598988 - DNA, 15 bp, Homo sapiens
gtctccctcccttcc

SEQ ID NO: 598989 - DNA, 15 bp, Homo sapiens
tctccctcccttccc

SEQ ID NO: 598990 - DNA, 15 bp, Homo sapiens
ctccctcccttcccc

SEQ ID NO: 598991 - DNA, 15 bp, Homo sapiens
tccctcccttccccc

SEQ ID NO: 598992 - DNA, 15 bp, Homo sapiens
ccctcccttccccct

SEQ ID NO: 598993 - DNA, 15 bp, Homo sapiens
cctcccttccccctc

SEQ ID NO: 598994 - DNA, 15 bp, Homo sapiens
ctcccttccccctcc

SEQ ID NO: 598995 - DNA, 15 bp, Homo sapiens
tcccttccccctcct

SEQ ID NO: 598996 - DNA, 15 bp, Homo sapiens
cccttccccctccta

SEQ ID NO: 598997 - DNA, 15 bp, Homo sapiens
ccttccccctcctaa

SEQ ID NO: 598998 - DNA, 15 bp, Homo sapiens
cttccccctcctaaa

SEQ ID NO: 598999 - DNA, 15 bp, Homo sapiens
ttccccctcctaaat

SEQ ID NO: 599000 - DNA, 15 bp, Homo sapiens
tccccctcctaaatg

SEQ ID NO: 599001 - DNA, 15 bp, Homo sapiens
ccccctcctaaatgc

SEQ ID NO: 599002 - DNA, 15 bp, Homo sapiens
cccctcctaaatgct

SEQ ID NO: 599003 - DNA, 15 bp, Homo sapiens
ccctcctaaatgctt

SEQ ID NO: 599004 - DNA, 15 bp, Homo sapiens
cctcctaaatgcttg

SEQ ID NO: 599005 - DNA, 15 bp, Homo sapiens
ctcctaaatgcttgt

SEQ ID NO: 599006 - DNA, 15 bp, Homo sapiens
tcctaaatgcttgtt

SEQ ID NO: 599007 - DNA, 15 bp, Homo sapiens
cctaaatgcttgttg

SEQ ID NO: 599008 - DNA, 15 bp, Homo sapiens
ctaaatgcttgttga

SEQ ID NO: 599009 - DNA, 15 bp, Homo sapiens
taaatgcttgttgat

SEQ ID NO: 599010 - DNA, 15 bp, Homo sapiens
aaatgcttgttgata

SEQ ID NO: 599011 - DNA, 15 bp, Homo sapiens
aatgcttgttgatag

SEQ ID NO: 599012 - DNA, 15 bp, Homo sapiens
atgcttgttgataga

SEQ ID NO: 599013 - DNA, 15 bp, Homo sapiens
tgcttgttgatagag

SEQ ID NO: 599014 - DNA, 15 bp, Homo sapiens
gcttgttgatagaga

SEQ ID NO: 599015 - DNA, 15 bp, Homo sapiens
cttgttgatagagaa

SEQ ID NO: 599016 - DNA, 15 bp, Homo sapiens
ttgttgatagagaaa

SEQ ID NO: 599017 - DNA, 15 bp, Homo sapiens
tgttgatagagaaaa

SEQ ID NO: 599018 - DNA, 15 bp, Homo sapiens
gttgatagagaaaag

SEQ ID NO: 599019 - DNA, 15 bp, Homo sapiens
ttgatagagaaaagt

SEQ ID NO: 599020 - DNA, 15 bp, Homo sapiens
tgatagagaaaagtc

SEQ ID NO: 599021 - DNA, 15 bp, Homo sapiens
gatagagaaaagtca

SEQ ID NO: 599022 - DNA, 15 bp, Homo sapiens
atagagaaaagtcag

SEQ ID NO: 599023 - DNA, 15 bp, Homo sapiens
tagagaaaagtcagc

SEQ ID NO: 599024 - DNA, 15 bp, Homo sapiens
agagaaaagtcagcc

SEQ ID NO: 599025 - DNA, 15 bp, Homo sapiens
gagaaaagtcagcct

SEQ ID NO: 599026 - DNA, 15 bp, Homo sapiens
agaaaagtcagcctc

SEQ ID NO: 599027 - DNA, 15 bp, Homo sapiens
gaaaagtcagcctcc

SEQ ID NO: 599028 - DNA, 15 bp, Homo sapiens
aaaagtcagcctcct

SEQ ID NO: 599029 - DNA, 15 bp, Homo sapiens
aaagtcagcctcctc

SEQ ID NO: 599030 - DNA, 15 bp, Homo sapiens
aagtcagcctcctcg

SEQ ID NO: 599031 - DNA, 15 bp, Homo sapiens
agtcagcctcctcgg

SEQ ID NO: 599032 - DNA, 15 bp, Homo sapiens
gtcagcctcctcggc

SEQ ID NO: 599033 - DNA, 15 bp, Homo sapiens
tcagcctcctcggca

SEQ ID NO: 599034 - DNA, 15 bp, Homo sapiens
cagcctcctcggcat

SEQ ID NO: 599035 - DNA, 15 bp, Homo sapiens
agcctcctcggcatt

SEQ ID NO: 599036 - DNA, 15 bp, Homo sapiens
gcctcctcggcattt

SEQ ID NO: 599037 - DNA, 15 bp, Homo sapiens
cctcctcggcatttg

SEQ ID NO: 599038 - DNA, 15 bp, Homo sapiens
ctcctcggcatttgg

SEQ ID NO: 599039 - DNA, 15 bp, Homo sapiens
tcctcggcatttggg

SEQ ID NO: 599040 - DNA, 15 bp, Homo sapiens
cctcggcatttgggc

SEQ ID NO: 599041 - DNA, 15 bp, Homo sapiens
ctcggcatttgggct

SEQ ID NO: 599042 - DNA, 15 bp, Homo sapiens
tcggcatttgggctc

SEQ ID NO: 599043 - DNA, 15 bp, Homo sapiens
cggcatttgggctca

SEQ ID NO: 599044 - DNA, 15 bp, Homo sapiens
ggcatttgggctcac

SEQ ID NO: 599045 - DNA, 15 bp, Homo sapiens
gcatttgggctcacg

SEQ ID NO: 599046 - DNA, 15 bp, Homo sapiens
catttgggctcacgg

SEQ ID NO: 599047 - DNA, 15 bp, Homo sapiens
atttgggctcacggt

SEQ ID NO: 599048 - DNA, 15 bp, Homo sapiens
tttgggctcacggtt

SEQ ID NO: 599049 - DNA, 15 bp, Homo sapiens
ttgggctcacggttt

SEQ ID NO: 599050 - DNA, 15 bp, Homo sapiens
tgggctcacggtttt

SEQ ID NO: 599051 - DNA, 15 bp, Homo sapiens
gggctcacggttttc

SEQ ID NO: 599052 - DNA, 15 bp, Homo sapiens
ggctcacggttttcc

SEQ ID NO: 599053 - DNA, 15 bp, Homo sapiens
gctcacggttttcct

SEQ ID NO: 599054 - DNA, 15 bp, Homo sapiens
ctcacggttttcctt

SEQ ID NO: 599055 - DNA, 15 bp, Homo sapiens
tcacggttttccttt

SEQ ID NO: 599056 - DNA, 15 bp, Homo sapiens
cacggttttcctttg

SEQ ID NO: 599057 - DNA, 15 bp, Homo sapiens
acggttttcctttga

SEQ ID NO: 599058 - DNA, 15 bp, Homo sapiens
cggttttcctttgaa

SEQ ID NO: 599059 - DNA, 15 bp, Homo sapiens
ggttttcctttgaaa

SEQ ID NO: 599060 - DNA, 15 bp, Homo sapiens
gttttcctttgaaaa

SEQ ID NO: 599061 - DNA, 15 bp, Homo sapiens
ttttcctttgaaaat

SEQ ID NO: 599062 - DNA, 15 bp, Homo sapiens
tttcctttgaaaatg

SEQ ID NO: 599063 - DNA, 15 bp, Homo sapiens
ttcctttgaaaatgc

SEQ ID NO: 599064 - DNA, 15 bp, Homo sapiens
tcctttgaaaatgct

SEQ ID NO: 599065 - DNA, 15 bp, Homo sapiens
cctttgaaaatgctt

SEQ ID NO: 599066 - DNA, 15 bp, Homo sapiens
ctttgaaaatgcttc

SEQ ID NO: 599067 - DNA, 15 bp, Homo sapiens
tttgaaaatgcttcc

SEQ ID NO: 599068 - DNA, 15 bp, Homo sapiens
ttgaaaatgcttcca

SEQ ID NO: 599069 - DNA, 15 bp, Homo sapiens
tgaaaatgcttccag

SEQ ID NO: 599070 - DNA, 15 bp, Homo sapiens
gaaaatgcttccagt

SEQ ID NO: 599071 - DNA, 15 bp, Homo sapiens
aaaatgcttccagtg

SEQ ID NO: 599072 - DNA, 15 bp, Homo sapiens
aaatgcttccagtgt

SEQ ID NO: 599073 - DNA, 15 bp, Homo sapiens
aatgcttccagtgtg

SEQ ID NO: 599074 - DNA, 15 bp, Homo sapiens
atgcttccagtgtgg

SEQ ID NO: 599075 - DNA, 15 bp, Homo sapiens
tgcttccagtgtggc

SEQ ID NO: 599076 - DNA, 15 bp, Homo sapiens
gcttccagtgtggca

SEQ ID NO: 599077 - DNA, 15 bp, Homo sapiens
cttccagtgtggcat

SEQ ID NO: 599078 - DNA, 15 bp, Homo sapiens
ttccagtgtggcatg

SEQ ID NO: 599079 - DNA, 15 bp, Homo sapiens
tccagtgtggcatga

SEQ ID NO: 599080 - DNA, 15 bp, Homo sapiens
ccagtgtggcatgat

SEQ ID NO: 599081 - DNA, 15 bp, Homo sapiens
cagtgtggcatgatt

SEQ ID NO: 599082 - DNA, 15 bp, Homo sapiens
agtgtggcatgattc

SEQ ID NO: 599083 - DNA, 15 bp, Homo sapiens
gtgtggcatgattca

SEQ ID NO: 599084 - DNA, 15 bp, Homo sapiens
tgtggcatgattcag

SEQ ID NO: 599085 - DNA, 15 bp, Homo sapiens
gtggcatgattcagc

SEQ ID NO: 599086 - DNA, 15 bp, Homo sapiens
tggcatgattcagct

SEQ ID NO: 599087 - DNA, 15 bp, Homo sapiens
ggcatgattcagctt

SEQ ID NO: 599088 - DNA, 15 bp, Homo sapiens
gcatgattcagcttt

SEQ ID NO: 599089 - DNA, 15 bp, Homo sapiens
catgattcagctttc

SEQ ID NO: 599090 - DNA, 15 bp, Homo sapiens
atgattcagctttct

SEQ ID NO: 599091 - DNA, 15 bp, Homo sapiens
tgattcagctttctt

SEQ ID NO: 599092 - DNA, 15 bp, Homo sapiens
gattcagctttcttt

SEQ ID NO: 599093 - DNA, 15 bp, Homo sapiens
attcagctttctttt

SEQ ID NO: 599094 - DNA, 15 bp, Homo sapiens
ttcagctttcttttc

SEQ ID NO: 599095 - DNA, 15 bp, Homo sapiens
tcagctttcttttct

SEQ ID NO: 599096 - DNA, 15 bp, Homo sapiens
cagctttcttttctg

SEQ ID NO: 599097 - DNA, 15 bp, Homo sapiens
agctttcttttctgt

SEQ ID NO: 599098 - DNA, 15 bp, Homo sapiens
gctttcttttctgtc

SEQ ID NO: 599099 - DNA, 15 bp, Homo sapiens
ctttcttttctgtcc

SEQ ID NO: 599100 - DNA, 15 bp, Homo sapiens
tttcttttctgtccc

SEQ ID NO: 599101 - DNA, 15 bp, Homo sapiens
ttcttttctgtcccc

SEQ ID NO: 599102 - DNA, 15 bp, Homo sapiens
tcttttctgtccccc

SEQ ID NO: 599103 - DNA, 15 bp, Homo sapiens
cttttctgtccccca

SEQ ID NO: 599104 - DNA, 15 bp, Homo sapiens
ttttctgtcccccaa

SEQ ID NO: 599105 - DNA, 15 bp, Homo sapiens
tttctgtcccccaac

SEQ ID NO: 599106 - DNA, 15 bp, Homo sapiens
ttctgtcccccaacc

SEQ ID NO: 599107 - DNA, 15 bp, Homo sapiens
tctgtcccccaacca

SEQ ID NO: 599108 - DNA, 15 bp, Homo sapiens
ctgtcccccaaccac

SEQ ID NO: 599109 - DNA, 15 bp, Homo sapiens
tgtcccccaaccact

SEQ ID NO: 599110 - DNA, 15 bp, Homo sapiens
gtcccccaaccactg

SEQ ID NO: 599111 - DNA, 15 bp, Homo sapiens
tcccccaaccactgc

SEQ ID NO: 599112 - DNA, 15 bp, Homo sapiens
cccccaaccactgct

SEQ ID NO: 599113 - DNA, 15 bp, Homo sapiens
ccccaaccactgctc

SEQ ID NO: 599114 - DNA, 15 bp, Homo sapiens
cccaaccactgctct

SEQ ID NO: 599115 - DNA, 15 bp, Homo sapiens
ccaaccactgctctg

SEQ ID NO: 599116 - DNA, 15 bp, Homo sapiens
caaccactgctctgt

SEQ ID NO: 599117 - DNA, 15 bp, Homo sapiens
aaccactgctctgtt

SEQ ID NO: 599118 - DNA, 15 bp, Homo sapiens
accactgctctgttg

SEQ ID NO: 599119 - DNA, 15 bp, Homo sapiens
ccactgctctgttgt

SEQ ID NO: 599120 - DNA, 15 bp, Homo sapiens
cactgctctgttgtc

SEQ ID NO: 599121 - DNA, 15 bp, Homo sapiens
actgctctgttgtca

SEQ ID NO: 599122 - DNA, 15 bp, Homo sapiens
ctgctctgttgtcat

SEQ ID NO: 599123 - DNA, 15 bp, Homo sapiens
tgctctgttgtcatt

SEQ ID NO: 599124 - DNA, 15 bp, Homo sapiens
gctctgttgtcattt

SEQ ID NO: 599125 - DNA, 15 bp, Homo sapiens
ctctgttgtcatttt

SEQ ID NO: 599126 - DNA, 15 bp, Homo sapiens
tctgttgtcattttt

SEQ ID NO: 599127 - DNA, 15 bp, Homo sapiens
ctgttgtcattttta

SEQ ID NO: 599128 - DNA, 15 bp, Homo sapiens
tgttgtcatttttac

SEQ ID NO: 599129 - DNA, 15 bp, Homo sapiens
gttgtcatttttact

SEQ ID NO: 599130 - DNA, 15 bp, Homo sapiens
ttgtcatttttactt

SEQ ID NO: 599131 - DNA, 15 bp, Homo sapiens
tgtcatttttacttt

SEQ ID NO: 599132 - DNA, 15 bp, Homo sapiens
gtcatttttactttt

SEQ ID NO: 599133 - DNA, 15 bp, Homo sapiens
tcatttttacttttc

SEQ ID NO: 599134 - DNA, 15 bp, Homo sapiens
catttttacttttct

SEQ ID NO: 599135 - DNA, 15 bp, Homo sapiens
atttttacttttctg

SEQ ID NO: 599136 - DNA, 15 bp, Homo sapiens
tttttacttttctga

SEQ ID NO: 599137 - DNA, 15 bp, Homo sapiens
ttttacttttctgat

SEQ ID NO: 599138 - DNA, 15 bp, Homo sapiens
tttacttttctgatt

SEQ ID NO: 599139 - DNA, 15 bp, Homo sapiens
ttacttttctgattg

SEQ ID NO: 599140 - DNA, 15 bp, Homo sapiens
tacttttctgattgc

SEQ ID NO: 599141 - DNA, 15 bp, Homo sapiens
acttttctgattgca

SEQ ID NO: 599142 - DNA, 15 bp, Homo sapiens
cttttctgattgcat

SEQ ID NO: 599143 - DNA, 15 bp, Homo sapiens
ttttctgattgcatt

SEQ ID NO: 599144 - DNA, 15 bp, Homo sapiens
tttctgattgcattt

SEQ ID NO: 599145 - DNA, 15 bp, Homo sapiens
ttctgattgcatttt

SEQ ID NO: 599146 - DNA, 15 bp, Homo sapiens
tctgattgcatttta

SEQ ID NO: 599147 - DNA, 15 bp, Homo sapiens
ctgattgcattttat

SEQ ID NO: 599148 - DNA, 15 bp, Homo sapiens
tgattgcattttatc

SEQ ID NO: 599149 - DNA, 15 bp, Homo sapiens
gattgcattttatcc

SEQ ID NO: 599150 - DNA, 15 bp, Homo sapiens
attgcattttatccg

SEQ ID NO: 599151 - DNA, 15 bp, Homo sapiens
ttgcattttatccgt

SEQ ID NO: 599152 - DNA, 15 bp, Homo sapiens
tgcattttatccgtg

SEQ ID NO: 599153 - DNA, 15 bp, Homo sapiens
gcattttatccgtgt

SEQ ID NO: 599154 - DNA, 15 bp, Homo sapiens
cattttatccgtgtc

SEQ ID NO: 599155 - DNA, 15 bp, Homo sapiens
attttatccgtgtct

SEQ ID NO: 599156 - DNA, 15 bp, Homo sapiens
ttttatccgtgtctc

SEQ ID NO: 599157 - DNA, 15 bp, Homo sapiens
tttatccgtgtctct

SEQ ID NO: 599158 - DNA, 15 bp, Homo sapiens
ttatccgtgtctctt

SEQ ID NO: 599159 - DNA, 15 bp, Homo sapiens
tatccgtgtctcttt

SEQ ID NO: 599160 - DNA, 15 bp, Homo sapiens
atccgtgtctctttg

SEQ ID NO: 599161 - DNA, 15 bp, Homo sapiens
tccgtgtctctttga

SEQ ID NO: 599162 - DNA, 15 bp, Homo sapiens
ccgtgtctctttgac

SEQ ID NO: 599163 - DNA, 15 bp, Homo sapiens
cgtgtctctttgact

SEQ ID NO: 599164 - DNA, 15 bp, Homo sapiens
gtgtctctttgacta

SEQ ID NO: 599165 - DNA, 15 bp, Homo sapiens
tgtctctttgactac

SEQ ID NO: 599166 - DNA, 15 bp, Homo sapiens
gtctctttgactacg

SEQ ID NO: 599167 - DNA, 15 bp, Homo sapiens
tctctttgactacgg

SEQ ID NO: 599168 - DNA, 15 bp, Homo sapiens
ctctttgactacggg

SEQ ID NO: 599169 - DNA, 15 bp, Homo sapiens
tctttgactacgggg

SEQ ID NO: 599170 - DNA, 15 bp, Homo sapiens
ctttgactacggggt

SEQ ID NO: 599171 - DNA, 15 bp, Homo sapiens
tttgactacggggtg

SEQ ID NO: 599172 - DNA, 15 bp, Homo sapiens
ttgactacggggtgg

SEQ ID NO: 599173 - DNA, 15 bp, Homo sapiens
tgactacggggtggc

SEQ ID NO: 599174 - DNA, 15 bp, Homo sapiens
gactacggggtggct

SEQ ID NO: 599175 - DNA, 15 bp, Homo sapiens
actacggggtggctg

SEQ ID NO: 599176 - DNA, 15 bp, Homo sapiens
ctacggggtggctgg

SEQ ID NO: 599177 - DNA, 15 bp, Homo sapiens
tacggggtggctgga

SEQ ID NO: 599178 - DNA, 15 bp, Homo sapiens
acggggtggctggac

SEQ ID NO: 599179 - DNA, 15 bp, Homo sapiens
cggggtggctggacg

SEQ ID NO: 599180 - DNA, 15 bp, Homo sapiens
ggggtggctggacgt

SEQ ID NO: 599181 - DNA, 15 bp, Homo sapiens
gggtggctggacgtt

SEQ ID NO: 599182 - DNA, 15 bp, Homo sapiens
ggtggctggacgttg

SEQ ID NO: 599183 - DNA, 15 bp, Homo sapiens
gtggctggacgttga

SEQ ID NO: 599184 - DNA, 15 bp, Homo sapiens
tggctggacgttgag

SEQ ID NO: 599185 - DNA, 15 bp, Homo sapiens
ggctggacgttgagt

SEQ ID NO: 599186 - DNA, 15 bp, Homo sapiens
gctggacgttgagtt

SEQ ID NO: 599187 - DNA, 15 bp, Homo sapiens
ctggacgttgagttc

SEQ ID NO: 599188 - DNA, 15 bp, Homo sapiens
tggacgttgagttcc

SEQ ID NO: 599189 - DNA, 15 bp, Homo sapiens
ggacgttgagttcca

SEQ ID NO: 599190 - DNA, 15 bp, Homo sapiens
gacgttgagttccag

SEQ ID NO: 599191 - DNA, 15 bp, Homo sapiens
acgttgagttccagg

SEQ ID NO: 599192 - DNA, 15 bp, Homo sapiens
cgttgagttccagga

SEQ ID NO: 599193 - DNA, 15 bp, Homo sapiens
gttgagttccaggaa

SEQ ID NO: 599194 - DNA, 15 bp, Homo sapiens
ttgagttccaggaag

SEQ ID NO: 599195 - DNA, 15 bp, Homo sapiens
tgagttccaggaaga

SEQ ID NO: 599196 - DNA, 15 bp, Homo sapiens
gagttccaggaagaa

SEQ ID NO: 599197 - DNA, 15 bp, Homo sapiens
agttccaggaagaaa

SEQ ID NO: 599198 - DNA, 15 bp, Homo sapiens
gttccaggaagaaaa

SEQ ID NO: 599199 - DNA, 15 bp, Homo sapiens
ttccaggaagaaaag

SEQ ID NO: 599200 - DNA, 15 bp, Homo sapiens
tccaggaagaaaagg

SEQ ID NO: 599201 - DNA, 15 bp, Homo sapiens
ccaggaagaaaaggg

SEQ ID NO: 599202 - DNA, 15 bp, Homo sapiens
caggaagaaaagggc

SEQ ID NO: 599203 - DNA, 15 bp, Homo sapiens
aggaagaaaagggcc

SEQ ID NO: 599204 - DNA, 15 bp, Homo sapiens
ggaagaaaagggccc

SEQ ID NO: 599205 - DNA, 15 bp, Homo sapiens
gaagaaaagggccca

SEQ ID NO: 599206 - DNA, 15 bp, Homo sapiens
aagaaaagggcccaa

SEQ ID NO: 599207 - DNA, 15 bp, Homo sapiens
agaaaagggcccaat

SEQ ID NO: 599208 - DNA, 15 bp, Homo sapiens
gaaaagggcccaatc

SEQ ID NO: 599209 - DNA, 15 bp, Homo sapiens
aaaagggcccaatct

SEQ ID NO: 599210 - DNA, 15 bp, Homo sapiens
aaagggcccaatctt

SEQ ID NO: 599211 - DNA, 15 bp, Homo sapiens
aagggcccaatcttg

SEQ ID NO: 599212 - DNA, 15 bp, Homo sapiens
agggcccaatcttgg

SEQ ID NO: 599213 - DNA, 15 bp, Homo sapiens
gggcccaatcttggg

SEQ ID NO: 599214 - DNA, 15 bp, Homo sapiens
ggcccaatcttgggg

SEQ ID NO: 599215 - DNA, 15 bp, Homo sapiens
gcccaatcttggggt

SEQ ID NO: 599216 - DNA, 15 bp, Homo sapiens
cccaatcttggggtt

SEQ ID NO: 599217 - DNA, 15 bp, Homo sapiens
ccaatcttggggttc

SEQ ID NO: 599218 - DNA, 15 bp, Homo sapiens
caatcttggggttct

SEQ ID NO: 599219 - DNA, 15 bp, Homo sapiens
aatcttggggttctg

SEQ ID NO: 599220 - DNA, 15 bp, Homo sapiens
atcttggggttctga

SEQ ID NO: 599221 - DNA, 15 bp, Homo sapiens
tcttggggttctgac

SEQ ID NO: 599222 - DNA, 15 bp, Homo sapiens
cttggggttctgact

SEQ ID NO: 599223 - DNA, 15 bp, Homo sapiens
ttggggttctgacta

SEQ ID NO: 599224 - DNA, 15 bp, Homo sapiens
tggggttctgactac

SEQ ID NO: 599225 - DNA, 15 bp, Homo sapiens
ggggttctgactaca

SEQ ID NO: 599226 - DNA, 15 bp, Homo sapiens
gggttctgactacat

SEQ ID NO: 599227 - DNA, 15 bp, Homo sapiens
ggttctgactacatg

SEQ ID NO: 599228 - DNA, 15 bp, Homo sapiens
gttctgactacatgc

SEQ ID NO: 599229 - DNA, 15 bp, Homo sapiens
ttctgactacatgcg

SEQ ID NO: 599230 - DNA, 15 bp, Homo sapiens
tctgactacatgcgc

SEQ ID NO: 599231 - DNA, 15 bp, Homo sapiens
ctgactacatgcgcc

SEQ ID NO: 599232 - DNA, 15 bp, Homo sapiens
tgactacatgcgccc

SEQ ID NO: 599233 - DNA, 15 bp, Homo sapiens
gactacatgcgccca

SEQ ID NO: 599234 - DNA, 15 bp, Homo sapiens
actacatgcgcccat

SEQ ID NO: 599235 - DNA, 15 bp, Homo sapiens
ctacatgcgcccatc

SEQ ID NO: 599236 - DNA, 15 bp, Homo sapiens
tacatgcgcccatca

SEQ ID NO: 599237 - DNA, 15 bp, Homo sapiens
acatgcgcccatcaa

SEQ ID NO: 599238 - DNA, 15 bp, Homo sapiens
catgcgcccatcaat

SEQ ID NO: 599239 - DNA, 15 bp, Homo sapiens
atgcgcccatcaatg

SEQ ID NO: 599240 - DNA, 15 bp, Homo sapiens
tgcgcccatcaatgt

SEQ ID NO: 599241 - DNA, 15 bp, Homo sapiens
gcgcccatcaatgtc

SEQ ID NO: 599242 - DNA, 15 bp, Homo sapiens
cgcccatcaatgtcc

SEQ ID NO: 599243 - DNA, 15 bp, Homo sapiens
gcccatcaatgtcct

SEQ ID NO: 599244 - DNA, 15 bp, Homo sapiens
cccatcaatgtcctg

SEQ ID NO: 599245 - DNA, 15 bp, Homo sapiens
ccatcaatgtcctgt

SEQ ID NO: 599246 - DNA, 15 bp, Homo sapiens
catcaatgtcctgtt

SEQ ID NO: 599247 - DNA, 15 bp, Homo sapiens
atcaatgtcctgttt

SEQ ID NO: 599248 - DNA, 15 bp, Homo sapiens
tcaatgtcctgtttc

SEQ ID NO: 599249 - DNA, 15 bp, Homo sapiens
caatgtcctgtttca

SEQ ID NO: 599250 - DNA, 15 bp, Homo sapiens
aatgtcctgtttcat

SEQ ID NO: 599251 - DNA, 15 bp, Homo sapiens
atgtcctgtttcatt

SEQ ID NO: 599252 - DNA, 15 bp, Homo sapiens
tgtcctgtttcattc

SEQ ID NO: 599253 - DNA, 15 bp, Homo sapiens
gtcctgtttcattct

SEQ ID NO: 599254 - DNA, 15 bp, Homo sapiens
tcctgtttcattctt

SEQ ID NO: 599255 - DNA, 15 bp, Homo sapiens
cctgtttcattcttg

SEQ ID NO: 599256 - DNA, 15 bp, Homo sapiens
ctgtttcattcttgg

SEQ ID NO: 599257 - DNA, 15 bp, Homo sapiens
tgtttcattcttggc

SEQ ID NO: 599258 - DNA, 15 bp, Homo sapiens
gtttcattcttggct

SEQ ID NO: 599259 - DNA, 15 bp, Homo sapiens
tttcattcttggctc

SEQ ID NO: 599260 - DNA, 15 bp, Homo sapiens
ttcattcttggctct

SEQ ID NO: 599261 - DNA, 15 bp, Homo sapiens
tcattcttggctctg

SEQ ID NO: 599262 - DNA, 15 bp, Homo sapiens
cattcttggctctgg

SEQ ID NO: 599263 - DNA, 15 bp, Homo sapiens
attcttggctctggc

SEQ ID NO: 599264 - DNA, 15 bp, Homo sapiens
ttcttggctctggct

SEQ ID NO: 599265 - DNA, 15 bp, Homo sapiens
tcttggctctggctc

SEQ ID NO: 599266 - DNA, 15 bp, Homo sapiens
cttggctctggctcc

SEQ ID NO: 599267 - DNA, 15 bp, Homo sapiens
ttggctctggctccc

SEQ ID NO: 599268 - DNA, 15 bp, Homo sapiens
tggctctggctccct

SEQ ID NO: 599269 - DNA, 15 bp, Homo sapiens
ggctctggctccctg

SEQ ID NO: 599270 - DNA, 15 bp, Homo sapiens
gctctggctccctga

SEQ ID NO: 599271 - DNA, 15 bp, Homo sapiens
ctctggctccctgaa

SEQ ID NO: 599272 - DNA, 15 bp, Homo sapiens
tctggctccctgaat

SEQ ID NO: 599273 - DNA, 15 bp, Homo sapiens
ctggctccctgaatt

SEQ ID NO: 599274 - DNA, 15 bp, Homo sapiens
tggctccctgaattc

SEQ ID NO: 599275 - DNA, 15 bp, Homo sapiens
ggctccctgaattcc

SEQ ID NO: 599276 - DNA, 15 bp, Homo sapiens
gctccctgaattcct

SEQ ID NO: 599277 - DNA, 15 bp, Homo sapiens
ctccctgaattcctg

SEQ ID NO: 599278 - DNA, 15 bp, Homo sapiens
tccctgaattcctga

SEQ ID NO: 599279 - DNA, 15 bp, Homo sapiens
ccctgaattcctgag

SEQ ID NO: 599280 - DNA, 15 bp, Homo sapiens
cctgaattcctgagt

SEQ ID NO: 599281 - DNA, 15 bp, Homo sapiens
ctgaattcctgagtc

SEQ ID NO: 599282 - DNA, 15 bp, Homo sapiens
tgaattcctgagtca

SEQ ID NO: 599283 - DNA, 15 bp, Homo sapiens
gaattcctgagtcac

SEQ ID NO: 599284 - DNA, 15 bp, Homo sapiens
aattcctgagtcact

SEQ ID NO: 599285 - DNA, 15 bp, Homo sapiens
attcctgagtcactg

SEQ ID NO: 599286 - DNA, 15 bp, Homo sapiens
ttcctgagtcactgg

SEQ ID NO: 599287 - DNA, 15 bp, Homo sapiens
tcctgagtcactggg

SEQ ID NO: 599288 - DNA, 15 bp, Homo sapiens
cctgagtcactgggg

SEQ ID NO: 599289 - DNA, 15 bp, Homo sapiens
ctgagtcactgggga

SEQ ID NO: 599290 - DNA, 15 bp, Homo sapiens
tgagtcactggggag

SEQ ID NO: 599291 - DNA, 15 bp, Homo sapiens
gagtcactggggaga

SEQ ID NO: 599292 - DNA, 15 bp, Homo sapiens
agtcactggggagaa

SEQ ID NO: 599293 - DNA, 15 bp, Homo sapiens
gtcactggggagaag

SEQ ID NO: 599294 - DNA, 15 bp, Homo sapiens
tcactggggagaagc

SEQ ID NO: 599295 - DNA, 15 bp, Homo sapiens
cactggggagaagcg

SEQ ID NO: 599296 - DNA, 15 bp, Homo sapiens
actggggagaagcgt

SEQ ID NO: 599297 - DNA, 15 bp, Homo sapiens
ctggggagaagcgtg

SEQ ID NO: 599298 - DNA, 15 bp, Homo sapiens
tggggagaagcgtgg

SEQ ID NO: 599299 - DNA, 15 bp, Homo sapiens
ggggagaagcgtggg

SEQ ID NO: 599300 - DNA, 15 bp, Homo sapiens
gggagaagcgtgggt

SEQ ID NO: 599301 - DNA, 15 bp, Homo sapiens
ggagaagcgtgggtg

SEQ ID NO: 599302 - DNA, 15 bp, Homo sapiens
gagaagcgtgggtgg

SEQ ID NO: 599303 - DNA, 15 bp, Homo sapiens
agaagcgtgggtgga

SEQ ID NO: 599304 - DNA, 15 bp, Homo sapiens
gaagcgtgggtggac

SEQ ID NO: 599305 - DNA, 15 bp, Homo sapiens
aagcgtgggtggacc

SEQ ID NO: 599306 - DNA, 15 bp, Homo sapiens
agcgtgggtggaccg

SEQ ID NO: 599307 - DNA, 15 bp, Homo sapiens
gcgtgggtggaccgc

SEQ ID NO: 599308 - DNA, 15 bp, Homo sapiens
cgtgggtggaccgcc

SEQ ID NO: 599309 - DNA, 15 bp, Homo sapiens
gtgggtggaccgccc

SEQ ID NO: 599310 - DNA, 15 bp, Homo sapiens
tgggtggaccgcccc

SEQ ID NO: 599311 - DNA, 15 bp, Homo sapiens
gggtggaccgccccc

SEQ ID NO: 599312 - DNA, 15 bp, Homo sapiens
ggtggaccgccccct

SEQ ID NO: 599313 - DNA, 15 bp, Homo sapiens
gtggaccgcccccta

SEQ ID NO: 599314 - DNA, 15 bp, Homo sapiens
tggaccgccccctac

SEQ ID NO: 599315 - DNA, 15 bp, Homo sapiens
ggaccgccccctacc

SEQ ID NO: 599316 - DNA, 15 bp, Homo sapiens
gaccgccccctaccc

SEQ ID NO: 599317 - DNA, 15 bp, Homo sapiens
accgccccctaccca

SEQ ID NO: 599318 - DNA, 15 bp, Homo sapiens
ccgccccctacccag

SEQ ID NO: 599319 - DNA, 15 bp, Homo sapiens
cgccccctacccagt

SEQ ID NO: 599320 - DNA, 15 bp, Homo sapiens
gccccctacccagtg

SEQ ID NO: 599321 - DNA, 15 bp, Homo sapiens
ccccctacccagtga

SEQ ID NO: 599322 - DNA, 15 bp, Homo sapiens
cccctacccagtgag

SEQ ID NO: 599323 - DNA, 15 bp, Homo sapiens
ccctacccagtgaga

SEQ ID NO: 599324 - DNA, 15 bp, Homo sapiens
cctacccagtgagag

SEQ ID NO: 599325 - DNA, 15 bp, Homo sapiens
ctacccagtgagagt

SEQ ID NO: 599326 - DNA, 15 bp, Homo sapiens
tacccagtgagagtt

SEQ ID NO: 599327 - DNA, 15 bp, Homo sapiens
acccagtgagagttg

SEQ ID NO: 599328 - DNA, 15 bp, Homo sapiens
cccagtgagagttgc

SEQ ID NO: 599329 - DNA, 15 bp, Homo sapiens
ccagtgagagttgcc

SEQ ID NO: 599330 - DNA, 15 bp, Homo sapiens
cagtgagagttgcca

SEQ ID NO: 599331 - DNA, 15 bp, Homo sapiens
agtgagagttgccac

SEQ ID NO: 599332 - DNA, 15 bp, Homo sapiens
gtgagagttgccaca

SEQ ID NO: 599333 - DNA, 15 bp, Homo sapiens
tgagagttgccacag

SEQ ID NO: 599334 - DNA, 15 bp, Homo sapiens
gagagttgccacagt

SEQ ID NO: 599335 - DNA, 15 bp, Homo sapiens
agagttgccacagtt

SEQ ID NO: 599336 - DNA, 15 bp, Homo sapiens
gagttgccacagttg

SEQ ID NO: 599337 - DNA, 15 bp, Homo sapiens
agttgccacagttgc

SEQ ID NO: 599338 - DNA, 15 bp, Homo sapiens
gttgccacagttgct

SEQ ID NO: 599339 - DNA, 15 bp, Homo sapiens
ttgccacagttgctg

SEQ ID NO: 599340 - DNA, 15 bp, Homo sapiens
tgccacagttgctgc

SEQ ID NO: 599341 - DNA, 15 bp, Homo sapiens
gccacagttgctgct

SEQ ID NO: 599342 - DNA, 15 bp, Homo sapiens
ccacagttgctgctc

SEQ ID NO: 599343 - DNA, 15 bp, Homo sapiens
cacagttgctgctct

SEQ ID NO: 599344 - DNA, 15 bp, Homo sapiens
acagttgctgctctc

SEQ ID NO: 599345 - DNA, 15 bp, Homo sapiens
cagttgctgctctcc

SEQ ID NO: 599346 - DNA, 15 bp, Homo sapiens
agttgctgctctcct

SEQ ID NO: 599347 - DNA, 15 bp, Homo sapiens
gttgctgctctcctg

SEQ ID NO: 599348 - DNA, 15 bp, Homo sapiens
ttgctgctctcctgg

SEQ ID NO: 599349 - DNA, 15 bp, Homo sapiens
tgctgctctcctggg

SEQ ID NO: 599350 - DNA, 15 bp, Homo sapiens
gctgctctcctgggt

SEQ ID NO: 599351 - DNA, 15 bp, Homo sapiens
ctgctctcctgggtc

SEQ ID NO: 599352 - DNA, 15 bp, Homo sapiens
tgctctcctgggtca

SEQ ID NO: 599353 - DNA, 15 bp, Homo sapiens
gctctcctgggtcat

SEQ ID NO: 599354 - DNA, 15 bp, Homo sapiens
ctctcctgggtcatt

SEQ ID NO: 599355 - DNA, 15 bp, Homo sapiens
tctcctgggtcattg

SEQ ID NO: 599356 - DNA, 15 bp, Homo sapiens
ctcctgggtcattgg

SEQ ID NO: 599357 - DNA, 15 bp, Homo sapiens
tcctgggtcattggt

SEQ ID NO: 599358 - DNA, 15 bp, Homo sapiens
cctgggtcattggtt

SEQ ID NO: 599359 - DNA, 15 bp, Homo sapiens
ctgggtcattggttg

SEQ ID NO: 599360 - DNA, 15 bp, Homo sapiens
tgggtcattggttgc

SEQ ID NO: 599361 - DNA, 15 bp, Homo sapiens
gggtcattggttgca

SEQ ID NO: 599362 - DNA, 15 bp, Homo sapiens
ggtcattggttgcag

SEQ ID NO: 599363 - DNA, 15 bp, Homo sapiens
gtcattggttgcaga

SEQ ID NO: 599364 - DNA, 15 bp, Homo sapiens
tcattggttgcagat

SEQ ID NO: 599365 - DNA, 15 bp, Homo sapiens
cattggttgcagatt

SEQ ID NO: 599366 - DNA, 15 bp, Homo sapiens
attggttgcagattg

SEQ ID NO: 599367 - DNA, 15 bp, Homo sapiens
ttggttgcagattgt

SEQ ID NO: 599368 - DNA, 15 bp, Homo sapiens
tggttgcagattgtt

SEQ ID NO: 599369 - DNA, 15 bp, Homo sapiens
ggttgcagattgtta

SEQ ID NO: 599370 - DNA, 15 bp, Homo sapiens
gttgcagattgttaa

SEQ ID NO: 599371 - DNA, 15 bp, Homo sapiens
ttgcagattgttaaa

SEQ ID NO: 599372 - DNA, 15 bp, Homo sapiens
tgcagattgttaaac

SEQ ID NO: 599373 - DNA, 15 bp, Homo sapiens
gcagattgttaaact

SEQ ID NO: 599374 - DNA, 15 bp, Homo sapiens
cagattgttaaactt

SEQ ID NO: 599375 - DNA, 15 bp, Homo sapiens
agattgttaaacttc

SEQ ID NO: 599376 - DNA, 15 bp, Homo sapiens
gattgttaaacttca

SEQ ID NO: 599377 - DNA, 15 bp, Homo sapiens
attgttaaacttcac

SEQ ID NO: 599378 - DNA, 15 bp, Homo sapiens
ttgttaaacttcacc

SEQ ID NO: 599379 - DNA, 15 bp, Homo sapiens
tgttaaacttcacct

SEQ ID NO: 599380 - DNA, 15 bp, Homo sapiens
gttaaacttcaccta

SEQ ID NO: 599381 - DNA, 15 bp, Homo sapiens
ttaaacttcacctat

SEQ ID NO: 599382 - DNA, 15 bp, Homo sapiens
taaacttcacctatg

SEQ ID NO: 599383 - DNA, 15 bp, Homo sapiens
aaacttcacctatgc

SEQ ID NO: 599384 - DNA, 15 bp, Homo sapiens
aacttcacctatgca

SEQ ID NO: 599385 - DNA, 15 bp, Homo sapiens
acttcacctatgcat

SEQ ID NO: 599386 - DNA, 15 bp, Homo sapiens
cttcacctatgcatt

SEQ ID NO: 599387 - DNA, 15 bp, Homo sapiens
ttcacctatgcattt

SEQ ID NO: 599388 - DNA, 15 bp, Homo sapiens
tcacctatgcatttc

SEQ ID NO: 599389 - DNA, 15 bp, Homo sapiens
cacctatgcatttca

SEQ ID NO: 599390 - DNA, 15 bp, Homo sapiens
acctatgcatttcaa

SEQ ID NO: 599391 - DNA, 15 bp, Homo sapiens
cctatgcatttcaac

SEQ ID NO: 599392 - DNA, 15 bp, Homo sapiens
ctatgcatttcaact

SEQ ID NO: 599393 - DNA, 15 bp, Homo sapiens
tatgcatttcaactt

SEQ ID NO: 599394 - DNA, 15 bp, Homo sapiens
atgcatttcaacttt

SEQ ID NO: 599395 - DNA, 15 bp, Homo sapiens
tgcatttcaactttc

SEQ ID NO: 599396 - DNA, 15 bp, Homo sapiens
gcatttcaactttcg

SEQ ID NO: 599397 - DNA, 15 bp, Homo sapiens
catttcaactttcgg

SEQ ID NO: 599398 - DNA, 15 bp, Homo sapiens
atttcaactttcggg

SEQ ID NO: 599399 - DNA, 15 bp, Homo sapiens
tttcaactttcgggt

SEQ ID NO: 599400 - DNA, 15 bp, Homo sapiens
ttcaactttcgggtg

SEQ ID NO: 599401 - DNA, 15 bp, Homo sapiens
tcaactttcgggtgg

SEQ ID NO: 599402 - DNA, 15 bp, Homo sapiens
caactttcgggtgga

SEQ ID NO: 599403 - DNA, 15 bp, Homo sapiens
aactttcgggtggat

SEQ ID NO: 599404 - DNA, 15 bp, Homo sapiens
actttcgggtggata

SEQ ID NO: 599405 - DNA, 15 bp, Homo sapiens
ctttcgggtggatat

SEQ ID NO: 599406 - DNA, 15 bp, Homo sapiens
tttcgggtggatatt

SEQ ID NO: 599407 - DNA, 15 bp, Homo sapiens
ttcgggtggatattg

SEQ ID NO: 599408 - DNA, 15 bp, Homo sapiens
tcgggtggatattgc

SEQ ID NO: 599409 - DNA, 15 bp, Homo sapiens
cgggtggatattgct

SEQ ID NO: 599410 - DNA, 15 bp, Homo sapiens
gggtggatattgcta

SEQ ID NO: 599411 - DNA, 15 bp, Homo sapiens
ggtggatattgctac

SEQ ID NO: 599412 - DNA, 15 bp, Homo sapiens
gtggatattgctacg

SEQ ID NO: 599413 - DNA, 15 bp, Homo sapiens
tggatattgctacgt

SEQ ID NO: 599414 - DNA, 15 bp, Homo sapiens
ggatattgctacgtc

SEQ ID NO: 599415 - DNA, 15 bp, Homo sapiens
gatattgctacgtca

SEQ ID NO: 599416 - DNA, 15 bp, Homo sapiens
atattgctacgtcaa

SEQ ID NO: 599417 - DNA, 15 bp, Homo sapiens
tattgctacgtcaag

SEQ ID NO: 599418 - DNA, 15 bp, Homo sapiens
attgctacgtcaagt

SEQ ID NO: 599419 - DNA, 15 bp, Homo sapiens
ttgctacgtcaagtg

SEQ ID NO: 599420 - DNA, 15 bp, Homo sapiens
tgctacgtcaagtgt

SEQ ID NO: 599421 - DNA, 15 bp, Homo sapiens
gctacgtcaagtgtc

SEQ ID NO: 599422 - DNA, 15 bp, Homo sapiens
ctacgtcaagtgtct

SEQ ID NO: 599423 - DNA, 15 bp, Homo sapiens
tacgtcaagtgtctg

SEQ ID NO: 599424 - DNA, 15 bp, Homo sapiens
acgtcaagtgtctgg

SEQ ID NO: 599425 - DNA, 15 bp, Homo sapiens
cgtcaagtgtctggg

SEQ ID NO: 599426 - DNA, 15 bp, Homo sapiens
gtcaagtgtctggga

SEQ ID NO: 599427 - DNA, 15 bp, Homo sapiens
tcaagtgtctgggaa

SEQ ID NO: 599428 - DNA, 15 bp, Homo sapiens
caagtgtctgggaaa

SEQ ID NO: 599429 - DNA, 15 bp, Homo sapiens
aagtgtctgggaaag

SEQ ID NO: 599430 - DNA, 15 bp, Homo sapiens
agtgtctgggaaagc

SEQ ID NO: 599431 - DNA, 15 bp, Homo sapiens
gtgtctgggaaagcc

SEQ ID NO: 599432 - DNA, 15 bp, Homo sapiens
tgtctgggaaagccc

SEQ ID NO: 599433 - DNA, 15 bp, Homo sapiens
gtctgggaaagcccc

SEQ ID NO: 599434 - DNA, 15 bp, Homo sapiens
tctgggaaagccccc

SEQ ID NO: 599435 - DNA, 15 bp, Homo sapiens
ctgggaaagccccca

SEQ ID NO: 599436 - DNA, 15 bp, Homo sapiens
tgggaaagcccccac

SEQ ID NO: 599437 - DNA, 15 bp, Homo sapiens
gggaaagcccccaca

SEQ ID NO: 599438 - DNA, 15 bp, Homo sapiens
ggaaagcccccacag

SEQ ID NO: 599439 - DNA, 15 bp, Homo sapiens
gaaagcccccacagc

SEQ ID NO: 599440 - DNA, 15 bp, Homo sapiens
aaagcccccacagct

SEQ ID NO: 599441 - DNA, 15 bp, Homo sapiens
aagcccccacagcta

SEQ ID NO: 599442 - DNA, 15 bp, Homo sapiens
agcccccacagctac

SEQ ID NO: 599443 - DNA, 15 bp, Homo sapiens
gcccccacagctaca

SEQ ID NO: 599444 - DNA, 15 bp, Homo sapiens
cccccacagctacag

SEQ ID NO: 599445 - DNA, 15 bp, Homo sapiens
ccccacagctacagg

SEQ ID NO: 599446 - DNA, 15 bp, Homo sapiens
cccacagctacagga

SEQ ID NO: 599447 - DNA, 15 bp, Homo sapiens
ccacagctacaggat

SEQ ID NO: 599448 - DNA, 15 bp, Homo sapiens
cacagctacaggatt

SEQ ID NO: 599449 - DNA, 15 bp, Homo sapiens
acagctacaggattt

SEQ ID NO: 599450 - DNA, 15 bp, Homo sapiens
cagctacaggatttt

SEQ ID NO: 599451 - DNA, 15 bp, Homo sapiens
agctacaggatttta

SEQ ID NO: 599452 - DNA, 15 bp, Homo sapiens
gctacaggattttac

SEQ ID NO: 599453 - DNA, 15 bp, Homo sapiens
ctacaggattttaca

SEQ ID NO: 599454 - DNA, 15 bp, Homo sapiens
tacaggattttacag

SEQ ID NO: 599455 - DNA, 15 bp, Homo sapiens
acaggattttacagt

SEQ ID NO: 599456 - DNA, 15 bp, Homo sapiens
caggattttacagtg

SEQ ID NO: 599457 - DNA, 15 bp, Homo sapiens
aggattttacagtga

SEQ ID NO: 599458 - DNA, 15 bp, Homo sapiens
ggattttacagtgag

SEQ ID NO: 599459 - DNA, 15 bp, Homo sapiens
gattttacagtgagg

SEQ ID NO: 599460 - DNA, 15 bp, Homo sapiens
attttacagtgaggt

SEQ ID NO: 599461 - DNA, 15 bp, Homo sapiens
ttttacagtgaggtc

SEQ ID NO: 599462 - DNA, 15 bp, Homo sapiens
tttacagtgaggtcc

SEQ ID NO: 599463 - DNA, 15 bp, Homo sapiens
ttacagtgaggtccc

SEQ ID NO: 599464 - DNA, 15 bp, Homo sapiens
tacagtgaggtccca

SEQ ID NO: 599465 - DNA, 15 bp, Homo sapiens
acagtgaggtcccac

SEQ ID NO: 599466 - DNA, 15 bp, Homo sapiens
cagtgaggtcccact

SEQ ID NO: 599467 - DNA, 15 bp, Homo sapiens
agtgaggtcccacta

SEQ ID NO: 599468 - DNA, 15 bp, Homo sapiens
gtgaggtcccactaa

SEQ ID NO: 599469 - DNA, 15 bp, Homo sapiens
tgaggtcccactaat

SEQ ID NO: 599470 - DNA, 15 bp, Homo sapiens
gaggtcccactaatg

SEQ ID NO: 599471 - DNA, 15 bp, Homo sapiens
aggtcccactaatga

SEQ ID NO: 599472 - DNA, 15 bp, Homo sapiens
ggtcccactaatgac

SEQ ID NO: 599473 - DNA, 15 bp, Homo sapiens
gtcccactaatgact

SEQ ID NO: 599474 - DNA, 15 bp, Homo sapiens
tcccactaatgactt

SEQ ID NO: 599475 - DNA, 15 bp, Homo sapiens
cccactaatgacttg

SEQ ID NO: 599476 - DNA, 15 bp, Homo sapiens
ccactaatgacttga

SEQ ID NO: 599477 - DNA, 15 bp, Homo sapiens
cactaatgacttgat

SEQ ID NO: 599478 - DNA, 15 bp, Homo sapiens
actaatgacttgatg

SEQ ID NO: 599479 - DNA, 15 bp, Homo sapiens
ctaatgacttgatgt

SEQ ID NO: 599480 - DNA, 15 bp, Homo sapiens
taatgacttgatgtc

SEQ ID NO: 599481 - DNA, 15 bp, Homo sapiens
aatgacttgatgtca

SEQ ID NO: 599482 - DNA, 15 bp, Homo sapiens
atgacttgatgtcat

SEQ ID NO: 599483 - DNA, 15 bp, Homo sapiens
tgacttgatgtcatg

SEQ ID NO: 599484 - DNA, 15 bp, Homo sapiens
gacttgatgtcatga

SEQ ID NO: 599485 - DNA, 15 bp, Homo sapiens
acttgatgtcatgac

SEQ ID NO: 599486 - DNA, 15 bp, Homo sapiens
cttgatgtcatgact

SEQ ID NO: 599487 - DNA, 15 bp, Homo sapiens
ttgatgtcatgactt

SEQ ID NO: 599488 - DNA, 15 bp, Homo sapiens
tgatgtcatgacttc

SEQ ID NO: 599489 - DNA, 15 bp, Homo sapiens
gatgtcatgacttcc

SEQ ID NO: 599490 - DNA, 15 bp, Homo sapiens
atgtcatgacttcct

SEQ ID NO: 599491 - DNA, 15 bp, Homo sapiens
tgtcatgacttcctc

SEQ ID NO: 599492 - DNA, 15 bp, Homo sapiens
gtcatgacttcctca

SEQ ID NO: 599493 - DNA, 15 bp, Homo sapiens
tcatgacttcctcat

SEQ ID NO: 599494 - DNA, 15 bp, Homo sapiens
catgacttcctcatt

SEQ ID NO: 599495 - DNA, 15 bp, Homo sapiens
atgacttcctcattc

SEQ ID NO: 599496 - DNA, 15 bp, Homo sapiens
tgacttcctcattct

SEQ ID NO: 599497 - DNA, 15 bp, Homo sapiens
gacttcctcattctt

SEQ ID NO: 599498 - DNA, 15 bp, Homo sapiens
acttcctcattcttt

SEQ ID NO: 599499 - DNA, 15 bp, Homo sapiens
cttcctcattctttc

SEQ ID NO: 599500 - DNA, 15 bp, Homo sapiens
ttcctcattctttcc

SEQ ID NO: 599501 - DNA, 15 bp, Homo sapiens
tcctcattctttcca

SEQ ID NO: 599502 - DNA, 15 bp, Homo sapiens
cctcattctttccaa

SEQ ID NO: 599503 - DNA, 15 bp, Homo sapiens
ctcattctttccaat

SEQ ID NO: 599504 - DNA, 15 bp, Homo sapiens
tcattctttccaatt

SEQ ID NO: 599505 - DNA, 15 bp, Homo sapiens
cattctttccaattt

SEQ ID NO: 599506 - DNA, 15 bp, Homo sapiens
attctttccaatttc

SEQ ID NO: 599507 - DNA, 15 bp, Homo sapiens
ttctttccaatttct

SEQ ID NO: 599508 - DNA, 15 bp, Homo sapiens
tctttccaatttctc

SEQ ID NO: 599509 - DNA, 15 bp, Homo sapiens
ctttccaatttctcc

SEQ ID NO: 599510 - DNA, 15 bp, Homo sapiens
tttccaatttctccc

SEQ ID NO: 599511 - DNA, 15 bp, Homo sapiens
ttccaatttctccca

SEQ ID NO: 599512 - DNA, 15 bp, Homo sapiens
tccaatttctcccac

SEQ ID NO: 599513 - DNA, 15 bp, Homo sapiens
ccaatttctcccact

SEQ ID NO: 599514 - DNA, 15 bp, Homo sapiens
caatttctcccactt

SEQ ID NO: 599515 - DNA, 15 bp, Homo sapiens
aatttctcccacttc

SEQ ID NO: 599516 - DNA, 15 bp, Homo sapiens
atttctcccacttct

SEQ ID NO: 599517 - DNA, 15 bp, Homo sapiens
tttctcccacttctc

SEQ ID NO: 599518 - DNA, 15 bp, Homo sapiens
ttctcccacttctcc

SEQ ID NO: 599519 - DNA, 15 bp, Homo sapiens
tctcccacttctcca

SEQ ID NO: 599520 - DNA, 15 bp, Homo sapiens
ctcccacttctccat

SEQ ID NO: 599521 - DNA, 15 bp, Homo sapiens
tcccacttctccata

SEQ ID NO: 599522 - DNA, 15 bp, Homo sapiens
cccacttctccataa

SEQ ID NO: 599523 - DNA, 15 bp, Homo sapiens
ccacttctccataag

SEQ ID NO: 599524 - DNA, 15 bp, Homo sapiens
cacttctccataagg

SEQ ID NO: 599525 - DNA, 15 bp, Homo sapiens
acttctccataaggg

SEQ ID NO: 599526 - DNA, 15 bp, Homo sapiens
cttctccataagggt

SEQ ID NO: 599527 - DNA, 15 bp, Homo sapiens
ttctccataagggtt

SEQ ID NO: 599528 - DNA, 15 bp, Homo sapiens
tctccataagggttt

SEQ ID NO: 599529 - DNA, 15 bp, Homo sapiens
ctccataagggtttt

SEQ ID NO: 599530 - DNA, 15 bp, Homo sapiens
tccataagggttttg

SEQ ID NO: 599531 - DNA, 15 bp, Homo sapiens
ccataagggttttgg

SEQ ID NO: 599532 - DNA, 15 bp, Homo sapiens
cataagggttttggg

SEQ ID NO: 599533 - DNA, 15 bp, Homo sapiens
ataagggttttggga

SEQ ID NO: 599534 - DNA, 15 bp, Homo sapiens
taagggttttgggaa

SEQ ID NO: 599535 - DNA, 15 bp, Homo sapiens
aagggttttgggaag

SEQ ID NO: 599536 - DNA, 15 bp, Homo sapiens
agggttttgggaagg

SEQ ID NO: 599537 - DNA, 15 bp, Homo sapiens
gggttttgggaaggg

SEQ ID NO: 599538 - DNA, 15 bp, Homo sapiens
ggttttgggaagggg

SEQ ID NO: 599539 - DNA, 15 bp, Homo sapiens
gttttgggaagggga

SEQ ID NO: 599540 - DNA, 15 bp, Homo sapiens
ttttgggaaggggag

SEQ ID NO: 599541 - DNA, 15 bp, Homo sapiens
tttgggaaggggaga

SEQ ID NO: 599542 - DNA, 15 bp, Homo sapiens
ttgggaaggggagaa

SEQ ID NO: 599543 - DNA, 15 bp, Homo sapiens
tgggaaggggagaag

SEQ ID NO: 599544 - DNA, 15 bp, Homo sapiens
gggaaggggagaaga

SEQ ID NO: 599545 - DNA, 15 bp, Homo sapiens
ggaaggggagaagag

SEQ ID NO: 599546 - DNA, 15 bp, Homo sapiens
gaaggggagaagaga

SEQ ID NO: 599547 - DNA, 15 bp, Homo sapiens
aaggggagaagagaa

SEQ ID NO: 599548 - DNA, 15 bp, Homo sapiens
aggggagaagagaaa

SEQ ID NO: 599549 - DNA, 15 bp, Homo sapiens
ggggagaagagaaag

SEQ ID NO: 599550 - DNA, 15 bp, Homo sapiens
gggagaagagaaagg

SEQ ID NO: 599551 - DNA, 15 bp, Homo sapiens
ggagaagagaaagga

SEQ ID NO: 599552 - DNA, 15 bp, Homo sapiens
gagaagagaaaggag

SEQ ID NO: 599553 - DNA, 15 bp, Homo sapiens
agaagagaaaggagt

SEQ ID NO: 599554 - DNA, 15 bp, Homo sapiens
gaagagaaaggagtg

SEQ ID NO: 599555 - DNA, 15 bp, Homo sapiens
aagagaaaggagtga

SEQ ID NO: 599556 - DNA, 15 bp, Homo sapiens
agagaaaggagtgat

SEQ ID NO: 599557 - DNA, 15 bp, Homo sapiens
gagaaaggagtgatt

SEQ ID NO: 599558 - DNA, 15 bp, Homo sapiens
agaaaggagtgattc

SEQ ID NO: 599559 - DNA, 15 bp, Homo sapiens
gaaaggagtgattcc

SEQ ID NO: 599560 - DNA, 15 bp, Homo sapiens
aaaggagtgattcct

SEQ ID NO: 599561 - DNA, 15 bp, Homo sapiens
aaggagtgattcctg

SEQ ID NO: 599562 - DNA, 15 bp, Homo sapiens
aggagtgattcctga

SEQ ID NO: 599563 - DNA, 15 bp, Homo sapiens
ggagtgattcctgag

SEQ ID NO: 599564 - DNA, 15 bp, Homo sapiens
gagtgattcctgagt

SEQ ID NO: 599565 - DNA, 15 bp, Homo sapiens
agtgattcctgagtg

SEQ ID NO: 599566 - DNA, 15 bp, Homo sapiens
gtgattcctgagtgc

SEQ ID NO: 599567 - DNA, 15 bp, Homo sapiens
tgattcctgagtgcc

SEQ ID NO: 599568 - DNA, 15 bp, Homo sapiens
gattcctgagtgcca

SEQ ID NO: 599569 - DNA, 15 bp, Homo sapiens
attcctgagtgccag

SEQ ID NO: 599570 - DNA, 15 bp, Homo sapiens
ttcctgagtgccagt

SEQ ID NO: 599571 - DNA, 15 bp, Homo sapiens
tcctgagtgccagta

SEQ ID NO: 599572 - DNA, 15 bp, Homo sapiens
cctgagtgccagtac

SEQ ID NO: 599573 - DNA, 15 bp, Homo sapiens
ctgagtgccagtacc

SEQ ID NO: 599574 - DNA, 15 bp, Homo sapiens
tgagtgccagtacca

SEQ ID NO: 599575 - DNA, 15 bp, Homo sapiens
gagtgccagtaccag

SEQ ID NO: 599576 - DNA, 15 bp, Homo sapiens
agtgccagtaccagg

SEQ ID NO: 599577 - DNA, 15 bp, Homo sapiens
gtgccagtaccaggg

SEQ ID NO: 599578 - DNA, 15 bp, Homo sapiens
tgccagtaccaggga

SEQ ID NO: 599579 - DNA, 15 bp, Homo sapiens
gccagtaccagggaa

SEQ ID NO: 599580 - DNA, 15 bp, Homo sapiens
ccagtaccagggaac

SEQ ID NO: 599581 - DNA, 15 bp, Homo sapiens
cagtaccagggaaca

SEQ ID NO: 599582 - DNA, 15 bp, Homo sapiens
agtaccagggaacag

SEQ ID NO: 599583 - DNA, 15 bp, Homo sapiens
gtaccagggaacagc

SEQ ID NO: 599584 - DNA, 15 bp, Homo sapiens
taccagggaacagca

SEQ ID NO: 599585 - DNA, 15 bp, Homo sapiens
accagggaacagcag

SEQ ID NO: 599586 - DNA, 15 bp, Homo sapiens
ccagggaacagcagg

SEQ ID NO: 599587 - DNA, 15 bp, Homo sapiens
cagggaacagcaggg

SEQ ID NO: 599588 - DNA, 15 bp, Homo sapiens
agggaacagcagggc

SEQ ID NO: 599589 - DNA, 15 bp, Homo sapiens
gggaacagcagggct

SEQ ID NO: 599590 - DNA, 15 bp, Homo sapiens
ggaacagcagggctg

SEQ ID NO: 599591 - DNA, 15 bp, Homo sapiens
gaacagcagggctgt

SEQ ID NO: 599592 - DNA, 15 bp, Homo sapiens
aacagcagggctgtt

SEQ ID NO: 599593 - DNA, 15 bp, Homo sapiens
acagcagggctgttg

SEQ ID NO: 599594 - DNA, 15 bp, Homo sapiens
cagcagggctgttgg

SEQ ID NO: 599595 - DNA, 15 bp, Homo sapiens
agcagggctgttggg

SEQ ID NO: 599596 - DNA, 15 bp, Homo sapiens
gcagggctgttggga

SEQ ID NO: 599597 - DNA, 15 bp, Homo sapiens
cagggctgttgggag

SEQ ID NO: 599598 - DNA, 15 bp, Homo sapiens
agggctgttgggagg

SEQ ID NO: 599599 - DNA, 15 bp, Homo sapiens
gggctgttgggagga

SEQ ID NO: 599600 - DNA, 15 bp, Homo sapiens
ggctgttgggaggaa

SEQ ID NO: 599601 - DNA, 15 bp, Homo sapiens
gctgttgggaggaaa

SEQ ID NO: 599602 - DNA, 15 bp, Homo sapiens
ctgttgggaggaaac

SEQ ID NO: 599603 - DNA, 15 bp, Homo sapiens
tgttgggaggaaaca

SEQ ID NO: 599604 - DNA, 15 bp, Homo sapiens
gttgggaggaaacaa

SEQ ID NO: 599605 - DNA, 15 bp, Homo sapiens
ttgggaggaaacaaa

SEQ ID NO: 599606 - DNA, 15 bp, Homo sapiens
tgggaggaaacaaaa

SEQ ID NO: 599607 - DNA, 15 bp, Homo sapiens
gggaggaaacaaaac

SEQ ID NO: 599608 - DNA, 15 bp, Homo sapiens
ggaggaaacaaaact

SEQ ID NO: 599609 - DNA, 15 bp, Homo sapiens
gaggaaacaaaacta

SEQ ID NO: 599610 - DNA, 15 bp, Homo sapiens
aggaaacaaaactaa

SEQ ID NO: 599611 - DNA, 15 bp, Homo sapiens
ggaaacaaaactaaa

SEQ ID NO: 599612 - DNA, 15 bp, Homo sapiens
gaaacaaaactaaat

SEQ ID NO: 599613 - DNA, 15 bp, Homo sapiens
aaacaaaactaaatc

SEQ ID NO: 599614 - DNA, 15 bp, Homo sapiens
aacaaaactaaatca

SEQ ID NO: 599615 - DNA, 15 bp, Homo sapiens
acaaaactaaatcag

SEQ ID NO: 599616 - DNA, 15 bp, Homo sapiens
caaaactaaatcagg

SEQ ID NO: 599617 - DNA, 15 bp, Homo sapiens
aaaactaaatcagga

SEQ ID NO: 599618 - DNA, 15 bp, Homo sapiens
aaactaaatcaggaa

SEQ ID NO: 599619 - DNA, 15 bp, Homo sapiens
aactaaatcaggaag

SEQ ID NO: 599620 - DNA, 15 bp, Homo sapiens
actaaatcaggaagg

SEQ ID NO: 599621 - DNA, 15 bp, Homo sapiens
ctaaatcaggaaggt

SEQ ID NO: 599622 - DNA, 15 bp, Homo sapiens
taaatcaggaaggtt

SEQ ID NO: 599623 - DNA, 15 bp, Homo sapiens
aaatcaggaaggttt

SEQ ID NO: 599624 - DNA, 15 bp, Homo sapiens
aatcaggaaggtttt

SEQ ID NO: 599625 - DNA, 15 bp, Homo sapiens
atcaggaaggttttt

SEQ ID NO: 599626 - DNA, 15 bp, Homo sapiens
tcaggaaggtttttg

SEQ ID NO: 599627 - DNA, 15 bp, Homo sapiens
caggaaggtttttgt

SEQ ID NO: 599628 - DNA, 15 bp, Homo sapiens
aggaaggtttttgtt

SEQ ID NO: 599629 - DNA, 15 bp, Homo sapiens
ggaaggtttttgttg

SEQ ID NO: 599630 - DNA, 15 bp, Homo sapiens
gaaggtttttgttgt

SEQ ID NO: 599631 - DNA, 15 bp, Homo sapiens
aaggtttttgttgtt

SEQ ID NO: 599632 - DNA, 15 bp, Homo sapiens
aggtttttgttgttg

SEQ ID NO: 599633 - DNA, 15 bp, Homo sapiens
ggtttttgttgttgt

SEQ ID NO: 599634 - DNA, 15 bp, Homo sapiens
gtttttgttgttgtt

SEQ ID NO: 599635 - DNA, 15 bp, Homo sapiens
tttttgttgttgttt

SEQ ID NO: 599636 - DNA, 15 bp, Homo sapiens
ttttgttgttgtttt

SEQ ID NO: 599637 - DNA, 15 bp, Homo sapiens
tttgttgttgttttt

SEQ ID NO: 599638 - DNA, 15 bp, Homo sapiens
ttgttgttgtttttg

SEQ ID NO: 599639 - DNA, 15 bp, Homo sapiens
tgttgttgtttttgg

SEQ ID NO: 599640 - DNA, 15 bp, Homo sapiens
gttgttgtttttggg

SEQ ID NO: 599641 - DNA, 15 bp, Homo sapiens
ttgttgtttttgggg

SEQ ID NO: 599642 - DNA, 15 bp, Homo sapiens
tgttgtttttggggg

SEQ ID NO: 599643 - DNA, 15 bp, Homo sapiens
gttgtttttgggggg

SEQ ID NO: 599644 - DNA, 15 bp, Homo sapiens
ttgtttttggggggt

SEQ ID NO: 599645 - DNA, 15 bp, Homo sapiens
tgtttttggggggtt

SEQ ID NO: 599646 - DNA, 15 bp, Homo sapiens
gtttttggggggttt

SEQ ID NO: 599647 - DNA, 15 bp, Homo sapiens
tttttggggggtttt

SEQ ID NO: 599648 - DNA, 15 bp, Homo sapiens
ttttggggggtttta

SEQ ID NO: 599649 - DNA, 15 bp, Homo sapiens
tttggggggttttat

SEQ ID NO: 599650 - DNA, 15 bp, Homo sapiens
ttggggggttttatg

SEQ ID NO: 599651 - DNA, 15 bp, Homo sapiens
tggggggttttatga

SEQ ID NO: 599652 - DNA, 15 bp, Homo sapiens
ggggggttttatgaa

SEQ ID NO: 599653 - DNA, 15 bp, Homo sapiens
gggggttttatgaaa

SEQ ID NO: 599654 - DNA, 15 bp, Homo sapiens
ggggttttatgaaaa

SEQ ID NO: 599655 - DNA, 15 bp, Homo sapiens
gggttttatgaaaat

SEQ ID NO: 599656 - DNA, 15 bp, Homo sapiens
ggttttatgaaaata

SEQ ID NO: 599657 - DNA, 15 bp, Homo sapiens
gttttatgaaaatat

SEQ ID NO: 599658 - DNA, 15 bp, Homo sapiens
ttttatgaaaatatt

SEQ ID NO: 599659 - DNA, 15 bp, Homo sapiens
tttatgaaaatattc

SEQ ID NO: 599660 - DNA, 15 bp, Homo sapiens
ttatgaaaatattca

SEQ ID NO: 599661 - DNA, 15 bp, Homo sapiens
tatgaaaatattcaa

SEQ ID NO: 599662 - DNA, 15 bp, Homo sapiens
atgaaaatattcaag

SEQ ID NO: 599663 - DNA, 15 bp, Homo sapiens
tgaaaatattcaagc

SEQ ID NO: 599664 - DNA, 15 bp, Homo sapiens
gaaaatattcaagcc

SEQ ID NO: 599665 - DNA, 15 bp, Homo sapiens
aaaatattcaagcca

SEQ ID NO: 599666 - DNA, 15 bp, Homo sapiens
aaatattcaagccac

SEQ ID NO: 599667 - DNA, 15 bp, Homo sapiens
aatattcaagccaca

SEQ ID NO: 599668 - DNA, 15 bp, Homo sapiens
atattcaagccacag

SEQ ID NO: 599669 - DNA, 15 bp, Homo sapiens
tattcaagccacagc

SEQ ID NO: 599670 - DNA, 15 bp, Homo sapiens
attcaagccacagca

SEQ ID NO: 599671 - DNA, 15 bp, Homo sapiens
ttcaagccacagcaa

SEQ ID NO: 599672 - DNA, 15 bp, Homo sapiens
tcaagccacagcaaa

SEQ ID NO: 599673 - DNA, 15 bp, Homo sapiens
caagccacagcaaat

SEQ ID NO: 599674 - DNA, 15 bp, Homo sapiens
aagccacagcaaata

SEQ ID NO: 599675 - DNA, 15 bp, Homo sapiens
agccacagcaaatat

SEQ ID NO: 599676 - DNA, 15 bp, Homo sapiens
gccacagcaaatata

SEQ ID NO: 599677 - DNA, 15 bp, Homo sapiens
ccacagcaaatatat

SEQ ID NO: 599678 - DNA, 15 bp, Homo sapiens
cacagcaaatatatt

SEQ ID NO: 599679 - DNA, 15 bp, Homo sapiens
acagcaaatatattt

SEQ ID NO: 599680 - DNA, 15 bp, Homo sapiens
cagcaaatatatttg

SEQ ID NO: 599681 - DNA, 15 bp, Homo sapiens
agcaaatatatttga

SEQ ID NO: 599682 - DNA, 15 bp, Homo sapiens
gcaaatatatttgat

SEQ ID NO: 599683 - DNA, 15 bp, Homo sapiens
caaatatatttgatt

SEQ ID NO: 599684 - DNA, 15 bp, Homo sapiens
aaatatatttgattt

SEQ ID NO: 599685 - DNA, 15 bp, Homo sapiens
aatatatttgattta

SEQ ID NO: 599686 - DNA, 15 bp, Homo sapiens
atatatttgatttat

SEQ ID NO: 599687 - DNA, 15 bp, Homo sapiens
tatatttgatttata

SEQ ID NO: 599688 - DNA, 15 bp, Homo sapiens
atatttgatttatag

SEQ ID NO: 599689 - DNA, 15 bp, Homo sapiens
tatttgatttatagc

SEQ ID NO: 599690 - DNA, 15 bp, Homo sapiens
atttgatttatagca

SEQ ID NO: 599691 - DNA, 15 bp, Homo sapiens
tttgatttatagcat

SEQ ID NO: 599692 - DNA, 15 bp, Homo sapiens
ttgatttatagcatt

SEQ ID NO: 599693 - DNA, 15 bp, Homo sapiens
tgatttatagcatta

SEQ ID NO: 599694 - DNA, 15 bp, Homo sapiens
gatttatagcattag

SEQ ID NO: 599695 - DNA, 15 bp, Homo sapiens
atttatagcattagt

SEQ ID NO: 599696 - DNA, 15 bp, Homo sapiens
tttatagcattagta

SEQ ID NO: 599697 - DNA, 15 bp, Homo sapiens
ttatagcattagtat

SEQ ID NO: 599698 - DNA, 15 bp, Homo sapiens
tatagcattagtatt

SEQ ID NO: 599699 - DNA, 15 bp, Homo sapiens
atagcattagtattt

SEQ ID NO: 599700 - DNA, 15 bp, Homo sapiens
tagcattagtatttt

SEQ ID NO: 599701 - DNA, 15 bp, Homo sapiens
agcattagtattttt

SEQ ID NO: 599702 - DNA, 15 bp, Homo sapiens
gcattagtatttttt

SEQ ID NO: 599703 - DNA, 15 bp, Homo sapiens
cattagtattttttc

SEQ ID NO: 599704 - DNA, 15 bp, Homo sapiens
attagtattttttct

SEQ ID NO: 599705 - DNA, 15 bp, Homo sapiens
ttagtattttttctg

SEQ ID NO: 599706 - DNA, 15 bp, Homo sapiens
tagtattttttctgc

SEQ ID NO: 599707 - DNA, 15 bp, Homo sapiens
agtattttttctgcc

SEQ ID NO: 599708 - DNA, 15 bp, Homo sapiens
gtattttttctgcct

SEQ ID NO: 599709 - DNA, 15 bp, Homo sapiens
tattttttctgcctg

SEQ ID NO: 599710 - DNA, 15 bp, Homo sapiens
attttttctgcctgc

SEQ ID NO: 599711 - DNA, 15 bp, Homo sapiens
ttttttctgcctgca

SEQ ID NO: 599712 - DNA, 15 bp, Homo sapiens
tttttctgcctgcat

SEQ ID NO: 599713 - DNA, 15 bp, Homo sapiens
ttttctgcctgcatc

SEQ ID NO: 599714 - DNA, 15 bp, Homo sapiens
tttctgcctgcatct

SEQ ID NO: 599715 - DNA, 15 bp, Homo sapiens
ttctgcctgcatcta

SEQ ID NO: 599716 - DNA, 15 bp, Homo sapiens
tctgcctgcatctac

SEQ ID NO: 599717 - DNA, 15 bp, Homo sapiens
ctgcctgcatctaca

SEQ ID NO: 599718 - DNA, 15 bp, Homo sapiens
tgcctgcatctacaa

SEQ ID NO: 599719 - DNA, 15 bp, Homo sapiens
gcctgcatctacaaa

SEQ ID NO: 599720 - DNA, 15 bp, Homo sapiens
cctgcatctacaaaa

SEQ ID NO: 599721 - DNA, 15 bp, Homo sapiens
ctgcatctacaaaaa

SEQ ID NO: 599722 - DNA, 15 bp, Homo sapiens
tgcatctacaaaaat

SEQ ID NO: 599723 - DNA, 15 bp, Homo sapiens
gcatctacaaaaatc

SEQ ID NO: 599724 - DNA, 15 bp, Homo sapiens
catctacaaaaatct

SEQ ID NO: 599725 - DNA, 15 bp, Homo sapiens
atctacaaaaatctt

SEQ ID NO: 599726 - DNA, 15 bp, Homo sapiens
tctacaaaaatcttt

SEQ ID NO: 599727 - DNA, 15 bp, Homo sapiens
ctacaaaaatcttta

SEQ ID NO: 599728 - DNA, 15 bp, Homo sapiens
tacaaaaatctttac

SEQ ID NO: 599729 - DNA, 15 bp, Homo sapiens
acaaaaatctttacc

SEQ ID NO: 599730 - DNA, 15 bp, Homo sapiens
caaaaatctttacct

SEQ ID NO: 599731 - DNA, 15 bp, Homo sapiens
aaaaatctttaccta

SEQ ID NO: 599732 - DNA, 15 bp, Homo sapiens
aaaatctttacctat

SEQ ID NO: 599733 - DNA, 15 bp, Homo sapiens
aaatctttacctatt

SEQ ID NO: 599734 - DNA, 15 bp, Homo sapiens
aatctttacctatta

SEQ ID NO: 599735 - DNA, 15 bp, Homo sapiens
atctttacctattac

SEQ ID NO: 599736 - DNA, 15 bp, Homo sapiens
tctttacctattacc

SEQ ID NO: 599737 - DNA, 15 bp, Homo sapiens
ctttacctattacca

SEQ ID NO: 599738 - DNA, 15 bp, Homo sapiens
tttacctattaccat

SEQ ID NO: 599739 - DNA, 15 bp, Homo sapiens
ttacctattaccatc

SEQ ID NO: 599740 - DNA, 15 bp, Homo sapiens
tacctattaccatca

SEQ ID NO: 599741 - DNA, 15 bp, Homo sapiens
acctattaccatcaa

SEQ ID NO: 599742 - DNA, 15 bp, Homo sapiens
cctattaccatcaaa

SEQ ID NO: 599743 - DNA, 15 bp, Homo sapiens
ctattaccatcaaaa

SEQ ID NO: 599744 - DNA, 15 bp, Homo sapiens
tattaccatcaaaat

SEQ ID NO: 599745 - DNA, 15 bp, Homo sapiens
attaccatcaaaata

SEQ ID NO: 599746 - DNA, 15 bp, Homo sapiens
ttaccatcaaaatat

SEQ ID NO: 599747 - DNA, 15 bp, Homo sapiens
taccatcaaaatatc

SEQ ID NO: 599748 - DNA, 15 bp, Homo sapiens
accatcaaaatatcc

SEQ ID NO: 599749 - DNA, 15 bp, Homo sapiens
ccatcaaaatatcct

SEQ ID NO: 599750 - DNA, 15 bp, Homo sapiens
catcaaaatatcctc

SEQ ID NO: 599751 - DNA, 15 bp, Homo sapiens
atcaaaatatcctct

SEQ ID NO: 599752 - DNA, 15 bp, Homo sapiens
tcaaaatatcctctg

SEQ ID NO: 599753 - DNA, 15 bp, Homo sapiens
caaaatatcctctgg

SEQ ID NO: 599754 - DNA, 15 bp, Homo sapiens
aaaatatcctctggg

SEQ ID NO: 599755 - DNA, 15 bp, Homo sapiens
aaatatcctctgggt

SEQ ID NO: 599756 - DNA, 15 bp, Homo sapiens
aatatcctctgggtg

SEQ ID NO: 599757 - DNA, 15 bp, Homo sapiens
atatcctctgggtga

SEQ ID NO: 599758 - DNA, 15 bp, Homo sapiens
tatcctctgggtgaa

SEQ ID NO: 599759 - DNA, 15 bp, Homo sapiens
atcctctgggtgaat

SEQ ID NO: 599760 - DNA, 15 bp, Homo sapiens
tcctctgggtgaatg

SEQ ID NO: 599761 - DNA, 15 bp, Homo sapiens
cctctgggtgaatgg

SEQ ID NO: 599762 - DNA, 15 bp, Homo sapiens
ctctgggtgaatgga

SEQ ID NO: 599763 - DNA, 15 bp, Homo sapiens
tctgggtgaatggat

SEQ ID NO: 599764 - DNA, 15 bp, Homo sapiens
ctgggtgaatggatt

SEQ ID NO: 599765 - DNA, 15 bp, Homo sapiens
tgggtgaatggattt

SEQ ID NO: 599766 - DNA, 15 bp, Homo sapiens
gggtgaatggatttc

SEQ ID NO: 599767 - DNA, 15 bp, Homo sapiens
ggtgaatggatttca

SEQ ID NO: 599768 - DNA, 15 bp, Homo sapiens
gtgaatggatttcaa

SEQ ID NO: 599769 - DNA, 15 bp, Homo sapiens
tgaatggatttcaac

SEQ ID NO: 599770 - DNA, 15 bp, Homo sapiens
gaatggatttcaaca

SEQ ID NO: 599771 - DNA, 15 bp, Homo sapiens
aatggatttcaacaa

SEQ ID NO: 599772 - DNA, 15 bp, Homo sapiens
atggatttcaacaaa

SEQ ID NO: 599773 - DNA, 15 bp, Homo sapiens
tggatttcaacaaag

SEQ ID NO: 599774 - DNA, 15 bp, Homo sapiens
ggatttcaacaaaga

SEQ ID NO: 599775 - DNA, 15 bp, Homo sapiens
gatttcaacaaagaa

SEQ ID NO: 599776 - DNA, 15 bp, Homo sapiens
atttcaacaaagaag

SEQ ID NO: 599777 - DNA, 15 bp, Homo sapiens
tttcaacaaagaaga

SEQ ID NO: 599778 - DNA, 15 bp, Homo sapiens
ttcaacaaagaagaa

SEQ ID NO: 599779 - DNA, 15 bp, Homo sapiens
tcaacaaagaagaaa

SEQ ID NO: 599780 - DNA, 15 bp, Homo sapiens
caacaaagaagaaat

SEQ ID NO: 599781 - DNA, 15 bp, Homo sapiens
aacaaagaagaaata

SEQ ID NO: 599782 - DNA, 15 bp, Homo sapiens
acaaagaagaaataa

SEQ ID NO: 599783 - DNA, 15 bp, Homo sapiens
caaagaagaaataaa

SEQ ID NO: 599784 - DNA, 15 bp, Homo sapiens
aaagaagaaataaaa

SEQ ID NO: 599785 - DNA, 15 bp, Homo sapiens
aagaagaaataaaaa

SEQ ID NO: 599786 - DNA, 15 bp, Homo sapiens
agaagaaataaaaat

SEQ ID NO: 599787 - DNA, 15 bp, Homo sapiens
gaagaaataaaaatg

SEQ ID NO: 599788 - DNA, 15 bp, Homo sapiens
aagaaataaaaatga

SEQ ID NO: 599789 - DNA, 15 bp, Homo sapiens
agaaataaaaatgaa

SEQ ID NO: 599790 - DNA, 15 bp, Homo sapiens
gaaataaaaatgaaa

SEQ ID NO: 599791 - DNA, 15 bp, Homo sapiens
aaataaaaatgaaat

SEQ ID NO: 599792 - DNA, 15 bp, Homo sapiens
aataaaaatgaaata

SEQ ID NO: 599793 - DNA, 15 bp, Homo sapiens
ataaaaatgaaatag

SEQ ID NO: 599794 - DNA, 15 bp, Homo sapiens
taaaaatgaaataga

SEQ ID NO: 599795 - DNA, 15 bp, Homo sapiens
aaaaatgaaatagaa

SEQ ID NO: 599796 - DNA, 15 bp, Homo sapiens
aaaatgaaatagaag

SEQ ID NO: 599797 - DNA, 15 bp, Homo sapiens
aaatgaaatagaaga

SEQ ID NO: 599798 - DNA, 15 bp, Homo sapiens
aatgaaatagaagag

SEQ ID NO: 599799 - DNA, 15 bp, Homo sapiens
atgaaatagaagaga

SEQ ID NO: 599800 - DNA, 15 bp, Homo sapiens
tgaaatagaagagag

SEQ ID NO: 599801 - DNA, 15 bp, Homo sapiens
gaaatagaagagagg

SEQ ID NO: 599802 - DNA, 15 bp, Homo sapiens
aaatagaagagaggc

SEQ ID NO: 599803 - DNA, 15 bp, Homo sapiens
aatagaagagaggcc

SEQ ID NO: 599804 - DNA, 15 bp, Homo sapiens
atagaagagaggccc

SEQ ID NO: 599805 - DNA, 15 bp, Homo sapiens
tagaagagaggcccc

SEQ ID NO: 599806 - DNA, 15 bp, Homo sapiens
agaagagaggcccct

SEQ ID NO: 599807 - DNA, 15 bp, Homo sapiens
gaagagaggcccctt

SEQ ID NO: 599808 - DNA, 15 bp, Homo sapiens
aagagaggccccttc

SEQ ID NO: 599809 - DNA, 15 bp, Homo sapiens
agagaggccccttcg

SEQ ID NO: 599810 - DNA, 15 bp, Homo sapiens
gagaggccccttcgt

SEQ ID NO: 599811 - DNA, 15 bp, Homo sapiens
agaggccccttcgtg

SEQ ID NO: 599812 - DNA, 15 bp, Homo sapiens
gaggccccttcgtgc

SEQ ID NO: 599813 - DNA, 15 bp, Homo sapiens
aggccccttcgtgca

SEQ ID NO: 599814 - DNA, 15 bp, Homo sapiens
ggccccttcgtgcac

SEQ ID NO: 599815 - DNA, 15 bp, Homo sapiens
gccccttcgtgcaca

SEQ ID NO: 599816 - DNA, 15 bp, Homo sapiens
ccccttcgtgcacat

SEQ ID NO: 599817 - DNA, 15 bp, Homo sapiens
cccttcgtgcacatt

SEQ ID NO: 599818 - DNA, 15 bp, Homo sapiens
ccttcgtgcacattg

SEQ ID NO: 599819 - DNA, 15 bp, Homo sapiens
cttcgtgcacattga

SEQ ID NO: 599820 - DNA, 15 bp, Homo sapiens
ttcgtgcacattgag

SEQ ID NO: 599821 - DNA, 15 bp, Homo sapiens
tcgtgcacattgagc

SEQ ID NO: 599822 - DNA, 15 bp, Homo sapiens
cgtgcacattgagcc

SEQ ID NO: 599823 - DNA, 15 bp, Homo sapiens
gtgcacattgagcct

SEQ ID NO: 599824 - DNA, 15 bp, Homo sapiens
tgcacattgagccta

SEQ ID NO: 599825 - DNA, 15 bp, Homo sapiens
gcacattgagcctac

SEQ ID NO: 599826 - DNA, 15 bp, Homo sapiens
cacattgagcctact

SEQ ID NO: 599827 - DNA, 15 bp, Homo sapiens
acattgagcctactg

SEQ ID NO: 599828 - DNA, 15 bp, Homo sapiens
cattgagcctactgg

SEQ ID NO: 599829 - DNA, 15 bp, Homo sapiens
attgagcctactggc

SEQ ID NO: 599830 - DNA, 15 bp, Homo sapiens
ttgagcctactggct

SEQ ID NO: 599831 - DNA, 15 bp, Homo sapiens
tgagcctactggctg

SEQ ID NO: 599832 - DNA, 15 bp, Homo sapiens
gagcctactggctgg

SEQ ID NO: 599833 - DNA, 15 bp, Homo sapiens
agcctactggctgga

SEQ ID NO: 599834 - DNA, 15 bp, Homo sapiens
gcctactggctggat

SEQ ID NO: 599835 - DNA, 15 bp, Homo sapiens
cctactggctggatt

SEQ ID NO: 599836 - DNA, 15 bp, Homo sapiens
ctactggctggattg

SEQ ID NO: 599837 - DNA, 15 bp, Homo sapiens
tactggctggattgt

SEQ ID NO: 599838 - DNA, 15 bp, Homo sapiens
actggctggattgtc

SEQ ID NO: 599839 - DNA, 15 bp, Homo sapiens
ctggctggattgtca

SEQ ID NO: 599840 - DNA, 15 bp, Homo sapiens
tggctggattgtcac

SEQ ID NO: 599841 - DNA, 15 bp, Homo sapiens
ggctggattgtcact

SEQ ID NO: 599842 - DNA, 15 bp, Homo sapiens
gctggattgtcactt

SEQ ID NO: 599843 - DNA, 15 bp, Homo sapiens
ctggattgtcacttg

SEQ ID NO: 599844 - DNA, 15 bp, Homo sapiens
tggattgtcacttgc

SEQ ID NO: 599845 - DNA, 15 bp, Homo sapiens
ggattgtcacttgcc

SEQ ID NO: 599846 - DNA, 15 bp, Homo sapiens
gattgtcacttgcct

SEQ ID NO: 599847 - DNA, 15 bp, Homo sapiens
attgtcacttgcctg

SEQ ID NO: 599848 - DNA, 15 bp, Homo sapiens
ttgtcacttgcctgc

SEQ ID NO: 599849 - DNA, 15 bp, Homo sapiens
tgtcacttgcctgcc

SEQ ID NO: 599850 - DNA, 15 bp, Homo sapiens
gtcacttgcctgcct

SEQ ID NO: 599851 - DNA, 15 bp, Homo sapiens
tcacttgcctgcctt

SEQ ID NO: 599852 - DNA, 15 bp, Homo sapiens
cacttgcctgccttg

SEQ ID NO: 599853 - DNA, 15 bp, Homo sapiens
acttgcctgccttga

SEQ ID NO: 599854 - DNA, 15 bp, Homo sapiens
cttgcctgccttgat

SEQ ID NO: 599855 - DNA, 15 bp, Homo sapiens
ttgcctgccttgatg

SEQ ID NO: 599856 - DNA, 15 bp, Homo sapiens
tgcctgccttgatgt

SEQ ID NO: 599857 - DNA, 15 bp, Homo sapiens
gcctgccttgatgtc

SEQ ID NO: 599858 - DNA, 15 bp, Homo sapiens
cctgccttgatgtct

SEQ ID NO: 599859 - DNA, 15 bp, Homo sapiens
ctgccttgatgtctt

SEQ ID NO: 599860 - DNA, 15 bp, Homo sapiens
tgccttgatgtcttt

SEQ ID NO: 599861 - DNA, 15 bp, Homo sapiens
gccttgatgtctttt

SEQ ID NO: 599862 - DNA, 15 bp, Homo sapiens
ccttgatgtcttttc

SEQ ID NO: 599863 - DNA, 15 bp, Homo sapiens
cttgatgtcttttca

SEQ ID NO: 599864 - DNA, 15 bp, Homo sapiens
ttgatgtcttttcag

SEQ ID NO: 599865 - DNA, 15 bp, Homo sapiens
tgatgtcttttcagc

SEQ ID NO: 599866 - DNA, 15 bp, Homo sapiens
gatgtcttttcagct

SEQ ID NO: 599867 - DNA, 15 bp, Homo sapiens
atgtcttttcagctc

SEQ ID NO: 599868 - DNA, 15 bp, Homo sapiens
tgtcttttcagctcc

SEQ ID NO: 599869 - DNA, 15 bp, Homo sapiens
gtcttttcagctcca

SEQ ID NO: 599870 - DNA, 15 bp, Homo sapiens
tcttttcagctccag

SEQ ID NO: 599871 - DNA, 15 bp, Homo sapiens
cttttcagctccagg

SEQ ID NO: 599872 - DNA, 15 bp, Homo sapiens
ttttcagctccaggc

SEQ ID NO: 599873 - DNA, 15 bp, Homo sapiens
tttcagctccaggca

SEQ ID NO: 599874 - DNA, 15 bp, Homo sapiens
ttcagctccaggcag

SEQ ID NO: 599875 - DNA, 15 bp, Homo sapiens
tcagctccaggcagg

SEQ ID NO: 599876 - DNA, 15 bp, Homo sapiens
cagctccaggcaggc

SEQ ID NO: 599877 - DNA, 15 bp, Homo sapiens
agctccaggcaggca

SEQ ID NO: 599878 - DNA, 15 bp, Homo sapiens
gctccaggcaggcag

SEQ ID NO: 599879 - DNA, 15 bp, Homo sapiens
ctccaggcaggcagt

SEQ ID NO: 599880 - DNA, 15 bp, Homo sapiens
tccaggcaggcagta

SEQ ID NO: 599881 - DNA, 15 bp, Homo sapiens
ccaggcaggcagtag

SEQ ID NO: 599882 - DNA, 15 bp, Homo sapiens
caggcaggcagtagg

SEQ ID NO: 599883 - DNA, 15 bp, Homo sapiens
aggcaggcagtaggc

SEQ ID NO: 599884 - DNA, 15 bp, Homo sapiens
ggcaggcagtaggcc

SEQ ID NO: 599885 - DNA, 15 bp, Homo sapiens
gcaggcagtaggcca

SEQ ID NO: 599886 - DNA, 15 bp, Homo sapiens
caggcagtaggccag

SEQ ID NO: 599887 - DNA, 15 bp, Homo sapiens
aggcagtaggccagg

SEQ ID NO: 599888 - DNA, 15 bp, Homo sapiens
ggcagtaggccaggg

SEQ ID NO: 599889 - DNA, 15 bp, Homo sapiens
gcagtaggccagggc

SEQ ID NO: 599890 - DNA, 15 bp, Homo sapiens
cagtaggccagggct

SEQ ID NO: 599891 - DNA, 15 bp, Homo sapiens
agtaggccagggctt

SEQ ID NO: 599892 - DNA, 15 bp, Homo sapiens
gtaggccagggctta

SEQ ID NO: 599893 - DNA, 15 bp, Homo sapiens
taggccagggcttat

SEQ ID NO: 599894 - DNA, 15 bp, Homo sapiens
aggccagggcttatt

SEQ ID NO: 599895 - DNA, 15 bp, Homo sapiens
ggccagggcttattt

SEQ ID NO: 599896 - DNA, 15 bp, Homo sapiens
gccagggcttatttt

SEQ ID NO: 599897 - DNA, 15 bp, Homo sapiens
ccagggcttattttc

SEQ ID NO: 599898 - DNA, 15 bp, Homo sapiens
cagggcttattttca

SEQ ID NO: 599899 - DNA, 15 bp, Homo sapiens
agggcttattttcat

SEQ ID NO: 599900 - DNA, 15 bp, Homo sapiens
gggcttattttcatg

SEQ ID NO: 599901 - DNA, 15 bp, Homo sapiens
ggcttattttcatga

SEQ ID NO: 599902 - DNA, 15 bp, Homo sapiens
gcttattttcatgac

SEQ ID NO: 599903 - DNA, 15 bp, Homo sapiens
cttattttcatgaca

SEQ ID NO: 599904 - DNA, 15 bp, Homo sapiens
ttattttcatgacag

SEQ ID NO: 599905 - DNA, 15 bp, Homo sapiens
tattttcatgacaga

SEQ ID NO: 599906 - DNA, 15 bp, Homo sapiens
attttcatgacagat

SEQ ID NO: 599907 - DNA, 15 bp, Homo sapiens
ttttcatgacagatc

SEQ ID NO: 599908 - DNA, 15 bp, Homo sapiens
tttcatgacagatca

SEQ ID NO: 599909 - DNA, 15 bp, Homo sapiens
ttcatgacagatcag

SEQ ID NO: 599910 - DNA, 15 bp, Homo sapiens
tcatgacagatcaga

SEQ ID NO: 599911 - DNA, 15 bp, Homo sapiens
catgacagatcagat

SEQ ID NO: 599912 - DNA, 15 bp, Homo sapiens
atgacagatcagatg

SEQ ID NO: 599913 - DNA, 15 bp, Homo sapiens
tgacagatcagatgt

SEQ ID NO: 599914 - DNA, 15 bp, Homo sapiens
gacagatcagatgtt

SEQ ID NO: 599915 - DNA, 15 bp, Homo sapiens
acagatcagatgttc

SEQ ID NO: 599916 - DNA, 15 bp, Homo sapiens
cagatcagatgttct

SEQ ID NO: 599917 - DNA, 15 bp, Homo sapiens
agatcagatgttctt

SEQ ID NO: 599918 - DNA, 15 bp, Homo sapiens
gatcagatgttcttt

SEQ ID NO: 599919 - DNA, 15 bp, Homo sapiens
atcagatgttctttt

SEQ ID NO: 599920 - DNA, 15 bp, Homo sapiens
tcagatgttctttta

SEQ ID NO: 599921 - DNA, 15 bp, Homo sapiens
cagatgttcttttat

SEQ ID NO: 599922 - DNA, 15 bp, Homo sapiens
agatgttcttttatg

SEQ ID NO: 599923 - DNA, 15 bp, Homo sapiens
gatgttcttttatgg

SEQ ID NO: 599924 - DNA, 15 bp, Homo sapiens
atgttcttttatgga

SEQ ID NO: 599925 - DNA, 15 bp, Homo sapiens
tgttcttttatggat

SEQ ID NO: 599926 - DNA, 15 bp, Homo sapiens
gttcttttatggatt

SEQ ID NO: 599927 - DNA, 15 bp, Homo sapiens
ttcttttatggattt

SEQ ID NO: 599928 - DNA, 15 bp, Homo sapiens
tcttttatggattta

SEQ ID NO: 599929 - DNA, 15 bp, Homo sapiens
cttttatggatttac

SEQ ID NO: 599930 - DNA, 15 bp, Homo sapiens
ttttatggatttaca

SEQ ID NO: 599931 - DNA, 15 bp, Homo sapiens
tttatggatttacaa

SEQ ID NO: 599932 - DNA, 15 bp, Homo sapiens
ttatggatttacaaa

SEQ ID NO: 599933 - DNA, 15 bp, Homo sapiens
tatggatttacaaag

SEQ ID NO: 599934 - DNA, 15 bp, Homo sapiens
atggatttacaaaga

SEQ ID NO: 599935 - DNA, 15 bp, Homo sapiens
tggatttacaaagaa

SEQ ID NO: 599936 - DNA, 15 bp, Homo sapiens
ggatttacaaagaaa

SEQ ID NO: 599937 - DNA, 15 bp, Homo sapiens
gatttacaaagaaag

SEQ ID NO: 599938 - DNA, 15 bp, Homo sapiens
atttacaaagaaaga

SEQ ID NO: 599939 - DNA, 15 bp, Homo sapiens
tttacaaagaaagaa

SEQ ID NO: 599940 - DNA, 15 bp, Homo sapiens
ttacaaagaaagaaa

SEQ ID NO: 599941 - DNA, 15 bp, Homo sapiens
tacaaagaaagaaat

SEQ ID NO: 599942 - DNA, 15 bp, Homo sapiens
acaaagaaagaaata

SEQ ID NO: 599943 - DNA, 15 bp, Homo sapiens
caaagaaagaaatac

SEQ ID NO: 599944 - DNA, 15 bp, Homo sapiens
aaagaaagaaatact

SEQ ID NO: 599945 - DNA, 15 bp, Homo sapiens
aagaaagaaatactg

SEQ ID NO: 599946 - DNA, 15 bp, Homo sapiens
agaaagaaatactga

SEQ ID NO: 599947 - DNA, 15 bp, Homo sapiens
gaaagaaatactgag

SEQ ID NO: 599948 - DNA, 15 bp, Homo sapiens
aaagaaatactgaga

SEQ ID NO: 599949 - DNA, 15 bp, Homo sapiens
aagaaatactgagaa

SEQ ID NO: 599950 - DNA, 15 bp, Homo sapiens
agaaatactgagaag

SEQ ID NO: 599951 - DNA, 15 bp, Homo sapiens
gaaatactgagaagt

SEQ ID NO: 599952 - DNA, 15 bp, Homo sapiens
aaatactgagaagtc

SEQ ID NO: 599953 - DNA, 15 bp, Homo sapiens
aatactgagaagtca

SEQ ID NO: 599954 - DNA, 15 bp, Homo sapiens
atactgagaagtcaa

SEQ ID NO: 599955 - DNA, 15 bp, Homo sapiens
tactgagaagtcaaa

SEQ ID NO: 599956 - DNA, 15 bp, Homo sapiens
actgagaagtcaaaa

SEQ ID NO: 599957 - DNA, 15 bp, Homo sapiens
ctgagaagtcaaaac

SEQ ID NO: 599958 - DNA, 15 bp, Homo sapiens
tgagaagtcaaaact

SEQ ID NO: 599959 - DNA, 15 bp, Homo sapiens
gagaagtcaaaactg

SEQ ID NO: 599960 - DNA, 15 bp, Homo sapiens
agaagtcaaaactga

SEQ ID NO: 599961 - DNA, 15 bp, Homo sapiens
gaagtcaaaactgaa

SEQ ID NO: 599962 - DNA, 15 bp, Homo sapiens
aagtcaaaactgaag

SEQ ID NO: 599963 - DNA, 15 bp, Homo sapiens
agtcaaaactgaagt

SEQ ID NO: 599964 - DNA, 15 bp, Homo sapiens
gtcaaaactgaagtc

SEQ ID NO: 599965 - DNA, 15 bp, Homo sapiens
tcaaaactgaagtca

SEQ ID NO: 599966 - DNA, 15 bp, Homo sapiens
caaaactgaagtcac

SEQ ID NO: 599967 - DNA, 15 bp, Homo sapiens
aaaactgaagtcact

SEQ ID NO: 599968 - DNA, 15 bp, Homo sapiens
aaactgaagtcactt

SEQ ID NO: 599969 - DNA, 15 bp, Homo sapiens
aactgaagtcactta

SEQ ID NO: 599970 - DNA, 15 bp, Homo sapiens
actgaagtcacttaa

SEQ ID NO: 599971 - DNA, 15 bp, Homo sapiens
ctgaagtcacttaag

SEQ ID NO: 599972 - DNA, 15 bp, Homo sapiens
tgaagtcacttaaga

SEQ ID NO: 599973 - DNA, 15 bp, Homo sapiens
gaagtcacttaagac

SEQ ID NO: 599974 - DNA, 15 bp, Homo sapiens
aagtcacttaagaca

SEQ ID NO: 599975 - DNA, 15 bp, Homo sapiens
agtcacttaagacaa

SEQ ID NO: 599976 - DNA, 15 bp, Homo sapiens
gtcacttaagacaag

SEQ ID NO: 599977 - DNA, 15 bp, Homo sapiens
tcacttaagacaaga

SEQ ID NO: 599978 - DNA, 15 bp, Homo sapiens
cacttaagacaagag

SEQ ID NO: 599979 - DNA, 15 bp, Homo sapiens
acttaagacaagagc

SEQ ID NO: 599980 - DNA, 15 bp, Homo sapiens
cttaagacaagagca

SEQ ID NO: 599981 - DNA, 15 bp, Homo sapiens
ttaagacaagagcag

SEQ ID NO: 599982 - DNA, 15 bp, Homo sapiens
taagacaagagcagg

SEQ ID NO: 599983 - DNA, 15 bp, Homo sapiens
aagacaagagcaggc

SEQ ID NO: 599984 - DNA, 15 bp, Homo sapiens
agacaagagcaggcc

SEQ ID NO: 599985 - DNA, 15 bp, Homo sapiens
gacaagagcaggccc

SEQ ID NO: 599986 - DNA, 15 bp, Homo sapiens
acaagagcaggcccc

SEQ ID NO: 599987 - DNA, 15 bp, Homo sapiens
caagagcaggcccct

SEQ ID NO: 599988 - DNA, 15 bp, Homo sapiens
aagagcaggcccctg

SEQ ID NO: 599989 - DNA, 15 bp, Homo sapiens
agagcaggcccctgg

SEQ ID NO: 599990 - DNA, 15 bp, Homo sapiens
gagcaggcccctggg

SEQ ID NO: 599991 - DNA, 15 bp, Homo sapiens
agcaggcccctggga

SEQ ID NO: 599992 - DNA, 15 bp, Homo sapiens
gcaggcccctgggaa

SEQ ID NO: 599993 - DNA, 15 bp, Homo sapiens
caggcccctgggaag

SEQ ID NO: 599994 - DNA, 15 bp, Homo sapiens
aggcccctgggaagg

SEQ ID NO: 599995 - DNA, 15 bp, Homo sapiens
ggcccctgggaaggc

SEQ ID NO: 599996 - DNA, 15 bp, Homo sapiens
gcccctgggaaggct

SEQ ID NO: 599997 - DNA, 15 bp, Homo sapiens
cccctgggaaggctg

SEQ ID NO: 599998 - DNA, 15 bp, Homo sapiens
ccctgggaaggctgc

SEQ ID NO: 599999 - DNA, 15 bp, Homo sapiens
cctgggaaggctgcc

SEQ ID NO: 600000 - DNA, 15 bp, Homo sapiens
ctgggaaggctgcca

SEQ ID NO: 600001 - DNA, 15 bp, Homo sapiens
tgggaaggctgccat

SEQ ID NO: 600002 - DNA, 15 bp, Homo sapiens
gggaaggctgccatt

SEQ ID NO: 600003 - DNA, 15 bp, Homo sapiens
ggaaggctgccattg

SEQ ID NO: 600004 - DNA, 15 bp, Homo sapiens
gaaggctgccattga

SEQ ID NO: 600005 - DNA, 15 bp, Homo sapiens
aaggctgccattgag

SEQ ID NO: 600006 - DNA, 15 bp, Homo sapiens
aggctgccattgagg

SEQ ID NO: 600007 - DNA, 15 bp, Homo sapiens
ggctgccattgagga

SEQ ID NO: 600008 - DNA, 15 bp, Homo sapiens
gctgccattgaggat

SEQ ID NO: 600009 - DNA, 15 bp, Homo sapiens
ctgccattgaggata

SEQ ID NO: 600010 - DNA, 15 bp, Homo sapiens
tgccattgaggataa

SEQ ID NO: 600011 - DNA, 15 bp, Homo sapiens
gccattgaggataat

SEQ ID NO: 600012 - DNA, 15 bp, Homo sapiens
ccattgaggataatg

SEQ ID NO: 600013 - DNA, 15 bp, Homo sapiens
cattgaggataatga

SEQ ID NO: 600014 - DNA, 15 bp, Homo sapiens
attgaggataatgag

SEQ ID NO: 600015 - DNA, 15 bp, Homo sapiens
ttgaggataatgagt

SEQ ID NO: 600016 - DNA, 15 bp, Homo sapiens
tgaggataatgagtc

SEQ ID NO: 600017 - DNA, 15 bp, Homo sapiens
gaggataatgagtcc

SEQ ID NO: 600018 - DNA, 15 bp, Homo sapiens
aggataatgagtcct

SEQ ID NO: 600019 - DNA, 15 bp, Homo sapiens
ggataatgagtcctg

SEQ ID NO: 600020 - DNA, 15 bp, Homo sapiens
gataatgagtcctgg

SEQ ID NO: 600021 - DNA, 15 bp, Homo sapiens
ataatgagtcctggg

SEQ ID NO: 600022 - DNA, 15 bp, Homo sapiens
taatgagtcctgggg

SEQ ID NO: 600023 - DNA, 15 bp, Homo sapiens
aatgagtcctggggt

SEQ ID NO: 600024 - DNA, 15 bp, Homo sapiens
atgagtcctggggtc

SEQ ID NO: 600025 - DNA, 15 bp, Homo sapiens
tgagtcctggggtcc

SEQ ID NO: 600026 - DNA, 15 bp, Homo sapiens
gagtcctggggtcct

SEQ ID NO: 600027 - DNA, 15 bp, Homo sapiens
agtcctggggtcctg

SEQ ID NO: 600028 - DNA, 15 bp, Homo sapiens
gtcctggggtcctgg

SEQ ID NO: 600029 - DNA, 15 bp, Homo sapiens
tcctggggtcctggc

SEQ ID NO: 600030 - DNA, 15 bp, Homo sapiens
cctggggtcctggcc

SEQ ID NO: 600031 - DNA, 15 bp, Homo sapiens
ctggggtcctggcct

SEQ ID NO: 600032 - DNA, 15 bp, Homo sapiens
tggggtcctggcctt

SEQ ID NO: 600033 - DNA, 15 bp, Homo sapiens
ggggtcctggccttt

SEQ ID NO: 600034 - DNA, 15 bp, Homo sapiens
gggtcctggcctttg

SEQ ID NO: 600035 - DNA, 15 bp, Homo sapiens
ggtcctggcctttgt

SEQ ID NO: 600036 - DNA, 15 bp, Homo sapiens
gtcctggcctttgtt

SEQ ID NO: 600037 - DNA, 15 bp, Homo sapiens
tcctggcctttgttc

SEQ ID NO: 600038 - DNA, 15 bp, Homo sapiens
cctggcctttgttca

SEQ ID NO: 600039 - DNA, 15 bp, Homo sapiens
ctggcctttgttcag

SEQ ID NO: 600040 - DNA, 15 bp, Homo sapiens
tggcctttgttcagt

SEQ ID NO: 600041 - DNA, 15 bp, Homo sapiens
ggcctttgttcagta

SEQ ID NO: 600042 - DNA, 15 bp, Homo sapiens
gcctttgttcagtaa

SEQ ID NO: 600043 - DNA, 15 bp, Homo sapiens
cctttgttcagtaaa

SEQ ID NO: 600044 - DNA, 15 bp, Homo sapiens
ctttgttcagtaaat

SEQ ID NO: 600045 - DNA, 15 bp, Homo sapiens
tttgttcagtaaata

SEQ ID NO: 600046 - DNA, 15 bp, Homo sapiens
ttgttcagtaaatac

SEQ ID NO: 600047 - DNA, 15 bp, Homo sapiens
tgttcagtaaatacg

SEQ ID NO: 600048 - DNA, 15 bp, Homo sapiens
gttcagtaaatacgc

SEQ ID NO: 600049 - DNA, 15 bp, Homo sapiens
ttcagtaaatacgca

SEQ ID NO: 600050 - DNA, 15 bp, Homo sapiens
tcagtaaatacgcac

SEQ ID NO: 600051 - DNA, 15 bp, Homo sapiens
cagtaaatacgcact

SEQ ID NO: 600052 - DNA, 15 bp, Homo sapiens
agtaaatacgcacta

SEQ ID NO: 600053 - DNA, 15 bp, Homo sapiens
gtaaatacgcactag

SEQ ID NO: 600054 - DNA, 15 bp, Homo sapiens
taaatacgcactagg

SEQ ID NO: 600055 - DNA, 15 bp, Homo sapiens
aaatacgcactaggc

SEQ ID NO: 600056 - DNA, 15 bp, Homo sapiens
aatacgcactaggcg

SEQ ID NO: 600057 - DNA, 15 bp, Homo sapiens
atacgcactaggcgc

SEQ ID NO: 600058 - DNA, 15 bp, Homo sapiens
tacgcactaggcgcc

SEQ ID NO: 600059 - DNA, 15 bp, Homo sapiens
acgcactaggcgcct

SEQ ID NO: 600060 - DNA, 15 bp, Homo sapiens
cgcactaggcgccta

SEQ ID NO: 600061 - DNA, 15 bp, Homo sapiens
gcactaggcgcctac

SEQ ID NO: 600062 - DNA, 15 bp, Homo sapiens
cactaggcgcctaca

SEQ ID NO: 600063 - DNA, 15 bp, Homo sapiens
actaggcgcctacaa

SEQ ID NO: 600064 - DNA, 15 bp, Homo sapiens
ctaggcgcctacaat

SEQ ID NO: 600065 - DNA, 15 bp, Homo sapiens
taggcgcctacaatg

SEQ ID NO: 600066 - DNA, 15 bp, Homo sapiens
aggcgcctacaatgt

SEQ ID NO: 600067 - DNA, 15 bp, Homo sapiens
ggcgcctacaatgtg

SEQ ID NO: 600068 - DNA, 15 bp, Homo sapiens
gcgcctacaatgtgt

SEQ ID NO: 600069 - DNA, 15 bp, Homo sapiens
cgcctacaatgtgtg

SEQ ID NO: 600070 - DNA, 15 bp, Homo sapiens
gcctacaatgtgtgc

SEQ ID NO: 600071 - DNA, 15 bp, Homo sapiens
cctacaatgtgtgca

SEQ ID NO: 600072 - DNA, 15 bp, Homo sapiens
ctacaatgtgtgcac

SEQ ID NO: 600073 - DNA, 15 bp, Homo sapiens
tacaatgtgtgcacc

SEQ ID NO: 600074 - DNA, 15 bp, Homo sapiens
acaatgtgtgcacca

SEQ ID NO: 600075 - DNA, 15 bp, Homo sapiens
caatgtgtgcaccaa

SEQ ID NO: 600076 - DNA, 15 bp, Homo sapiens
aatgtgtgcaccaat

SEQ ID NO: 600077 - DNA, 15 bp, Homo sapiens
atgtgtgcaccaatg

SEQ ID NO: 600078 - DNA, 15 bp, Homo sapiens
tgtgtgcaccaatgt

SEQ ID NO: 600079 - DNA, 15 bp, Homo sapiens
gtgtgcaccaatgtg

SEQ ID NO: 600080 - DNA, 15 bp, Homo sapiens
tgtgcaccaatgtgt

SEQ ID NO: 600081 - DNA, 15 bp, Homo sapiens
gtgcaccaatgtgtg

SEQ ID NO: 600082 - DNA, 15 bp, Homo sapiens
tgcaccaatgtgtga

SEQ ID NO: 600083 - DNA, 15 bp, Homo sapiens
gcaccaatgtgtgag

SEQ ID NO: 600084 - DNA, 15 bp, Homo sapiens
caccaatgtgtgagg

SEQ ID NO: 600085 - DNA, 15 bp, Homo sapiens
accaatgtgtgaggc

SEQ ID NO: 600086 - DNA, 15 bp, Homo sapiens
ccaatgtgtgaggcg

SEQ ID NO: 600087 - DNA, 15 bp, Homo sapiens
caatgtgtgaggcgt

SEQ ID NO: 600088 - DNA, 15 bp, Homo sapiens
aatgtgtgaggcgtc

SEQ ID NO: 600089 - DNA, 15 bp, Homo sapiens
atgtgtgaggcgtca

SEQ ID NO: 600090 - DNA, 15 bp, Homo sapiens
tgtgtgaggcgtcag

SEQ ID NO: 600091 - DNA, 15 bp, Homo sapiens
gtgtgaggcgtcagg

SEQ ID NO: 600092 - DNA, 15 bp, Homo sapiens
tgtgaggcgtcaggt

SEQ ID NO: 600093 - DNA, 15 bp, Homo sapiens
gtgaggcgtcaggtt

SEQ ID NO: 600094 - DNA, 15 bp, Homo sapiens
tgaggcgtcaggttc

SEQ ID NO: 600095 - DNA, 15 bp, Homo sapiens
gaggcgtcaggttct

SEQ ID NO: 600096 - DNA, 15 bp, Homo sapiens
aggcgtcaggttctc

SEQ ID NO: 600097 - DNA, 15 bp, Homo sapiens
ggcgtcaggttctct

SEQ ID NO: 600098 - DNA, 15 bp, Homo sapiens
gcgtcaggttctctc

SEQ ID NO: 600099 - DNA, 15 bp, Homo sapiens
cgtcaggttctctcc

SEQ ID NO: 600100 - DNA, 15 bp, Homo sapiens
gtcaggttctctcca

SEQ ID NO: 600101 - DNA, 15 bp, Homo sapiens
tcaggttctctccag

SEQ ID NO: 600102 - DNA, 15 bp, Homo sapiens
caggttctctccagg

SEQ ID NO: 600103 - DNA, 15 bp, Homo sapiens
aggttctctccaggg

SEQ ID NO: 600104 - DNA, 15 bp, Homo sapiens
ggttctctccagggt

SEQ ID NO: 600105 - DNA, 15 bp, Homo sapiens
gttctctccagggtc

SEQ ID NO: 600106 - DNA, 15 bp, Homo sapiens
ttctctccagggtca

SEQ ID NO: 600107 - DNA, 15 bp, Homo sapiens
tctctccagggtcag

SEQ ID NO: 600108 - DNA, 15 bp, Homo sapiens
ctctccagggtcagt

SEQ ID NO: 600109 - DNA, 15 bp, Homo sapiens
tctccagggtcagtt

SEQ ID NO: 600110 - DNA, 15 bp, Homo sapiens
ctccagggtcagttg

SEQ ID NO: 600111 - DNA, 15 bp, Homo sapiens
tccagggtcagttgg

SEQ ID NO: 600112 - DNA, 15 bp, Homo sapiens
ccagggtcagttggt

SEQ ID NO: 600113 - DNA, 15 bp, Homo sapiens
cagggtcagttggtt

SEQ ID NO: 600114 - DNA, 15 bp, Homo sapiens
agggtcagttggttt

SEQ ID NO: 600115 - DNA, 15 bp, Homo sapiens
gggtcagttggtttt

SEQ ID NO: 600116 - DNA, 15 bp, Homo sapiens
ggtcagttggtttta

SEQ ID NO: 600117 - DNA, 15 bp, Homo sapiens
gtcagttggttttaa

SEQ ID NO: 600118 - DNA, 15 bp, Homo sapiens
tcagttggttttaag

SEQ ID NO: 600119 - DNA, 15 bp, Homo sapiens
cagttggttttaaga

SEQ ID NO: 600120 - DNA, 15 bp, Homo sapiens
agttggttttaagaa

SEQ ID NO: 600121 - DNA, 15 bp, Homo sapiens
gttggttttaagaaa

SEQ ID NO: 600122 - DNA, 15 bp, Homo sapiens
ttggttttaagaaag

SEQ ID NO: 600123 - DNA, 15 bp, Homo sapiens
tggttttaagaaagg

SEQ ID NO: 600124 - DNA, 15 bp, Homo sapiens
ggttttaagaaaggt

SEQ ID NO: 600125 - DNA, 15 bp, Homo sapiens
gttttaagaaaggtt

SEQ ID NO: 600126 - DNA, 15 bp, Homo sapiens
ttttaagaaaggttt

SEQ ID NO: 600127 - DNA, 15 bp, Homo sapiens
tttaagaaaggtttt

SEQ ID NO: 600128 - DNA, 15 bp, Homo sapiens
ttaagaaaggttttg

SEQ ID NO: 600129 - DNA, 15 bp, Homo sapiens
taagaaaggttttgg

SEQ ID NO: 600130 - DNA, 15 bp, Homo sapiens
aagaaaggttttggc

SEQ ID NO: 600131 - DNA, 15 bp, Homo sapiens
agaaaggttttggct

SEQ ID NO: 600132 - DNA, 15 bp, Homo sapiens
gaaaggttttggctt

SEQ ID NO: 600133 - DNA, 15 bp, Homo sapiens
aaaggttttggcttc

SEQ ID NO: 600134 - DNA, 15 bp, Homo sapiens
aaggttttggcttct

SEQ ID NO: 600135 - DNA, 15 bp, Homo sapiens
aggttttggcttctg

SEQ ID NO: 600136 - DNA, 15 bp, Homo sapiens
ggttttggcttctga

SEQ ID NO: 600137 - DNA, 15 bp, Homo sapiens
gttttggcttctgat

SEQ ID NO: 600138 - DNA, 15 bp, Homo sapiens
ttttggcttctgata

SEQ ID NO: 600139 - DNA, 15 bp, Homo sapiens
tttggcttctgatat

SEQ ID NO: 600140 - DNA, 15 bp, Homo sapiens
ttggcttctgatatg

SEQ ID NO: 600141 - DNA, 15 bp, Homo sapiens
tggcttctgatatgt

SEQ ID NO: 600142 - DNA, 15 bp, Homo sapiens
ggcttctgatatgtt

SEQ ID NO: 600143 - DNA, 15 bp, Homo sapiens
gcttctgatatgttt

SEQ ID NO: 600144 - DNA, 15 bp, Homo sapiens
cttctgatatgtttt

SEQ ID NO: 600145 - DNA, 15 bp, Homo sapiens
ttctgatatgtttta

SEQ ID NO: 600146 - DNA, 15 bp, Homo sapiens
tctgatatgttttat

SEQ ID NO: 600147 - DNA, 15 bp, Homo sapiens
ctgatatgttttatc

SEQ ID NO: 600148 - DNA, 15 bp, Homo sapiens
tgatatgttttatct

SEQ ID NO: 600149 - DNA, 15 bp, Homo sapiens
gatatgttttatctc

SEQ ID NO: 600150 - DNA, 15 bp, Homo sapiens
atatgttttatctct

SEQ ID NO: 600151 - DNA, 15 bp, Homo sapiens
tatgttttatctcta

SEQ ID NO: 600152 - DNA, 15 bp, Homo sapiens
atgttttatctctac

SEQ ID NO: 600153 - DNA, 15 bp, Homo sapiens
tgttttatctctaca

SEQ ID NO: 600154 - DNA, 15 bp, Homo sapiens
gttttatctctacag

SEQ ID NO: 600155 - DNA, 15 bp, Homo sapiens
ttttatctctacaga

SEQ ID NO: 600156 - DNA, 15 bp, Homo sapiens
tttatctctacagaa

SEQ ID NO: 600157 - DNA, 15 bp, Homo sapiens
ttatctctacagaac

SEQ ID NO: 600158 - DNA, 15 bp, Homo sapiens
tatctctacagaaca

SEQ ID NO: 600159 - DNA, 15 bp, Homo sapiens
atctctacagaacag

SEQ ID NO: 600160 - DNA, 15 bp, Homo sapiens
tctctacagaacagt

SEQ ID NO: 600161 - DNA, 15 bp, Homo sapiens
ctctacagaacagta

SEQ ID NO: 600162 - DNA, 15 bp, Homo sapiens
tctacagaacagtag

SEQ ID NO: 600163 - DNA, 15 bp, Homo sapiens
ctacagaacagtagc

SEQ ID NO: 600164 - DNA, 15 bp, Homo sapiens
tacagaacagtagct

SEQ ID NO: 600165 - DNA, 15 bp, Homo sapiens
acagaacagtagctc

SEQ ID NO: 600166 - DNA, 15 bp, Homo sapiens
cagaacagtagctct

SEQ ID NO: 600167 - DNA, 15 bp, Homo sapiens
agaacagtagctctt

SEQ ID NO: 600168 - DNA, 15 bp, Homo sapiens
gaacagtagctctta

SEQ ID NO: 600169 - DNA, 15 bp, Homo sapiens
aacagtagctcttaa

SEQ ID NO: 600170 - DNA, 15 bp, Homo sapiens
acagtagctcttaac

SEQ ID NO: 600171 - DNA, 15 bp, Homo sapiens
cagtagctcttaacc

SEQ ID NO: 600172 - DNA, 15 bp, Homo sapiens
agtagctcttaacct

SEQ ID NO: 600173 - DNA, 15 bp, Homo sapiens
gtagctcttaacctt

SEQ ID NO: 600174 - DNA, 15 bp, Homo sapiens
tagctcttaaccttt

SEQ ID NO: 600175 - DNA, 15 bp, Homo sapiens
agctcttaacctttc

SEQ ID NO: 600176 - DNA, 15 bp, Homo sapiens
gctcttaacctttct

SEQ ID NO: 600177 - DNA, 15 bp, Homo sapiens
ctcttaacctttctt

SEQ ID NO: 600178 - DNA, 15 bp, Homo sapiens
tcttaacctttctta

SEQ ID NO: 600179 - DNA, 15 bp, Homo sapiens
cttaacctttcttat

SEQ ID NO: 600180 - DNA, 15 bp, Homo sapiens
ttaacctttcttatg

SEQ ID NO: 600181 - DNA, 15 bp, Homo sapiens
taacctttcttatgg

SEQ ID NO: 600182 - DNA, 15 bp, Homo sapiens
aacctttcttatggg

SEQ ID NO: 600183 - DNA, 15 bp, Homo sapiens
acctttcttatgggt

SEQ ID NO: 600184 - DNA, 15 bp, Homo sapiens
cctttcttatgggtt

SEQ ID NO: 600185 - DNA, 15 bp, Homo sapiens
ctttcttatgggtta

SEQ ID NO: 600186 - DNA, 15 bp, Homo sapiens
tttcttatgggttag

SEQ ID NO: 600187 - DNA, 15 bp, Homo sapiens
ttcttatgggttagg

SEQ ID NO: 600188 - DNA, 15 bp, Homo sapiens
tcttatgggttagga

SEQ ID NO: 600189 - DNA, 15 bp, Homo sapiens
cttatgggttaggat

SEQ ID NO: 600190 - DNA, 15 bp, Homo sapiens
ttatgggttaggatt

SEQ ID NO: 600191 - DNA, 15 bp, Homo sapiens
tatgggttaggatta

SEQ ID NO: 600192 - DNA, 15 bp, Homo sapiens
atgggttaggattac

SEQ ID NO: 600193 - DNA, 15 bp, Homo sapiens
tgggttaggattacc

SEQ ID NO: 600194 - DNA, 15 bp, Homo sapiens
gggttaggattacct

SEQ ID NO: 600195 - DNA, 15 bp, Homo sapiens
ggttaggattacctt

SEQ ID NO: 600196 - DNA, 15 bp, Homo sapiens
gttaggattaccttc

SEQ ID NO: 600197 - DNA, 15 bp, Homo sapiens
ttaggattaccttcg

SEQ ID NO: 600198 - DNA, 15 bp, Homo sapiens
taggattaccttcga

SEQ ID NO: 600199 - DNA, 15 bp, Homo sapiens
aggattaccttcgag

SEQ ID NO: 600200 - DNA, 15 bp, Homo sapiens
ggattaccttcgaga

SEQ ID NO: 600201 - DNA, 15 bp, Homo sapiens
gattaccttcgagaa

SEQ ID NO: 600202 - DNA, 15 bp, Homo sapiens
attaccttcgagaat

SEQ ID NO: 600203 - DNA, 15 bp, Homo sapiens
ttaccttcgagaatc

SEQ ID NO: 600204 - DNA, 15 bp, Homo sapiens
taccttcgagaatct

SEQ ID NO: 600205 - DNA, 15 bp, Homo sapiens
accttcgagaatctg

SEQ ID NO: 600206 - DNA, 15 bp, Homo sapiens
ccttcgagaatctga

SEQ ID NO: 600207 - DNA, 15 bp, Homo sapiens
cttcgagaatctgac

SEQ ID NO: 600208 - DNA, 15 bp, Homo sapiens
ttcgagaatctgact

SEQ ID NO: 600209 - DNA, 15 bp, Homo sapiens
tcgagaatctgacta

SEQ ID NO: 600210 - DNA, 15 bp, Homo sapiens
cgagaatctgactac

SEQ ID NO: 600211 - DNA, 15 bp, Homo sapiens
gagaatctgactaca

SEQ ID NO: 600212 - DNA, 15 bp, Homo sapiens
agaatctgactacag

SEQ ID NO: 600213 - DNA, 15 bp, Homo sapiens
gaatctgactacagc

SEQ ID NO: 600214 - DNA, 15 bp, Homo sapiens
aatctgactacagct

SEQ ID NO: 600215 - DNA, 15 bp, Homo sapiens
atctgactacagctc

SEQ ID NO: 600216 - DNA, 15 bp, Homo sapiens
tctgactacagctct

SEQ ID NO: 600217 - DNA, 15 bp, Homo sapiens
ctgactacagctcta

SEQ ID NO: 600218 - DNA, 15 bp, Homo sapiens
tgactacagctctag

SEQ ID NO: 600219 - DNA, 15 bp, Homo sapiens
gactacagctctaga

SEQ ID NO: 600220 - DNA, 15 bp, Homo sapiens
actacagctctagac

SEQ ID NO: 600221 - DNA, 15 bp, Homo sapiens
ctacagctctagacc

SEQ ID NO: 600222 - DNA, 15 bp, Homo sapiens
tacagctctagacct

SEQ ID NO: 600223 - DNA, 15 bp, Homo sapiens
acagctctagacctg

SEQ ID NO: 600224 - DNA, 15 bp, Homo sapiens
cagctctagacctgt

SEQ ID NO: 600225 - DNA, 15 bp, Homo sapiens
agctctagacctgtt

SEQ ID NO: 600226 - DNA, 15 bp, Homo sapiens
gctctagacctgttc

SEQ ID NO: 600227 - DNA, 15 bp, Homo sapiens
ctctagacctgttcc

SEQ ID NO: 600228 - DNA, 15 bp, Homo sapiens
tctagacctgttccc

SEQ ID NO: 600229 - DNA, 15 bp, Homo sapiens
ctagacctgttccct

SEQ ID NO: 600230 - DNA, 15 bp, Homo sapiens
tagacctgttcccta

SEQ ID NO: 600231 - DNA, 15 bp, Homo sapiens
agacctgttccctaa

SEQ ID NO: 600232 - DNA, 15 bp, Homo sapiens
gacctgttccctaaa

SEQ ID NO: 600233 - DNA, 15 bp, Homo sapiens
acctgttccctaaag

SEQ ID NO: 600234 - DNA, 15 bp, Homo sapiens
cctgttccctaaaga

SEQ ID NO: 600235 - DNA, 15 bp, Homo sapiens
ctgttccctaaagaa

SEQ ID NO: 600236 - DNA, 15 bp, Homo sapiens
tgttccctaaagaaa

SEQ ID NO: 600237 - DNA, 15 bp, Homo sapiens
gttccctaaagaaaa

SEQ ID NO: 600238 - DNA, 15 bp, Homo sapiens
ttccctaaagaaaac

SEQ ID NO: 600239 - DNA, 15 bp, Homo sapiens
tccctaaagaaaact

SEQ ID NO: 600240 - DNA, 15 bp, Homo sapiens
ccctaaagaaaacta

SEQ ID NO: 600241 - DNA, 15 bp, Homo sapiens
cctaaagaaaactaa

SEQ ID NO: 600242 - DNA, 15 bp, Homo sapiens
ctaaagaaaactaag

SEQ ID NO: 600243 - DNA, 15 bp, Homo sapiens
taaagaaaactaagt

SEQ ID NO: 600244 - DNA, 15 bp, Homo sapiens
aaagaaaactaagtt

SEQ ID NO: 600245 - DNA, 15 bp, Homo sapiens
aagaaaactaagttc

SEQ ID NO: 600246 - DNA, 15 bp, Homo sapiens
agaaaactaagttca

SEQ ID NO: 600247 - DNA, 15 bp, Homo sapiens
gaaaactaagttcac

SEQ ID NO: 600248 - DNA, 15 bp, Homo sapiens
aaaactaagttcaca

SEQ ID NO: 600249 - DNA, 15 bp, Homo sapiens
aaactaagttcacag

SEQ ID NO: 600250 - DNA, 15 bp, Homo sapiens
aactaagttcacagg

SEQ ID NO: 600251 - DNA, 15 bp, Homo sapiens
actaagttcacaggg

SEQ ID NO: 600252 - DNA, 15 bp, Homo sapiens
ctaagttcacaggga

SEQ ID NO: 600253 - DNA, 15 bp, Homo sapiens
taagttcacagggac

SEQ ID NO: 600254 - DNA, 15 bp, Homo sapiens
aagttcacagggaca

SEQ ID NO: 600255 - DNA, 15 bp, Homo sapiens
agttcacagggacac

SEQ ID NO: 600256 - DNA, 15 bp, Homo sapiens
gttcacagggacaca

SEQ ID NO: 600257 - DNA, 15 bp, Homo sapiens
ttcacagggacacac

SEQ ID NO: 600258 - DNA, 15 bp, Homo sapiens
tcacagggacacaca

SEQ ID NO: 600259 - DNA, 15 bp, Homo sapiens
cacagggacacacag

SEQ ID NO: 600260 - DNA, 15 bp, Homo sapiens
acagggacacacagg

SEQ ID NO: 600261 - DNA, 15 bp, Homo sapiens
cagggacacacagga

SEQ ID NO: 600262 - DNA, 15 bp, Homo sapiens
agggacacacaggat

SEQ ID NO: 600263 - DNA, 15 bp, Homo sapiens
gggacacacaggatg

SEQ ID NO: 600264 - DNA, 15 bp, Homo sapiens
ggacacacaggatgg

SEQ ID NO: 600265 - DNA, 15 bp, Homo sapiens
gacacacaggatggg

SEQ ID NO: 600266 - DNA, 15 bp, Homo sapiens
acacacaggatgggg

SEQ ID NO: 600267 - DNA, 15 bp, Homo sapiens
cacacaggatggggc

SEQ ID NO: 600268 - DNA, 15 bp, Homo sapiens
acacaggatggggct

SEQ ID NO: 600269 - DNA, 15 bp, Homo sapiens
cacaggatggggctc

SEQ ID NO: 600270 - DNA, 15 bp, Homo sapiens
acaggatggggctca

SEQ ID NO: 600271 - DNA, 15 bp, Homo sapiens
caggatggggctcat

SEQ ID NO: 600272 - DNA, 15 bp, Homo sapiens
aggatggggctcatg

SEQ ID NO: 600273 - DNA, 15 bp, Homo sapiens
ggatggggctcatgg

SEQ ID NO: 600274 - DNA, 15 bp, Homo sapiens
gatggggctcatgga

SEQ ID NO: 600275 - DNA, 15 bp, Homo sapiens
atggggctcatggag

SEQ ID NO: 600276 - DNA, 15 bp, Homo sapiens
tggggctcatggagc

SEQ ID NO: 600277 - DNA, 15 bp, Homo sapiens
ggggctcatggagca

SEQ ID NO: 600278 - DNA, 15 bp, Homo sapiens
gggctcatggagcag

SEQ ID NO: 600279 - DNA, 15 bp, Homo sapiens
ggctcatggagcagc

SEQ ID NO: 600280 - DNA, 15 bp, Homo sapiens
gctcatggagcagct

SEQ ID NO: 600281 - DNA, 15 bp, Homo sapiens
ctcatggagcagctg

SEQ ID NO: 600282 - DNA, 15 bp, Homo sapiens
tcatggagcagctga

SEQ ID NO: 600283 - DNA, 15 bp, Homo sapiens
catggagcagctgaa

SEQ ID NO: 600284 - DNA, 15 bp, Homo sapiens
atggagcagctgaag

SEQ ID NO: 600285 - DNA, 15 bp, Homo sapiens
tggagcagctgaagc

SEQ ID NO: 600286 - DNA, 15 bp, Homo sapiens
ggagcagctgaagcc

SEQ ID NO: 600287 - DNA, 15 bp, Homo sapiens
gagcagctgaagcca

SEQ ID NO: 600288 - DNA, 15 bp, Homo sapiens
agcagctgaagccag

SEQ ID NO: 600289 - DNA, 15 bp, Homo sapiens
gcagctgaagccaga

SEQ ID NO: 600290 - DNA, 15 bp, Homo sapiens
cagctgaagccagac

SEQ ID NO: 600291 - DNA, 15 bp, Homo sapiens
agctgaagccagacc

SEQ ID NO: 600292 - DNA, 15 bp, Homo sapiens
gctgaagccagaccc

SEQ ID NO: 600293 - DNA, 15 bp, Homo sapiens
ctgaagccagacccc

SEQ ID NO: 600294 - DNA, 15 bp, Homo sapiens
tgaagccagacccca

SEQ ID NO: 600295 - DNA, 15 bp, Homo sapiens
gaagccagaccccag

SEQ ID NO: 600296 - DNA, 15 bp, Homo sapiens
aagccagaccccagg

SEQ ID NO: 600297 - DNA, 15 bp, Homo sapiens
agccagaccccaggt

SEQ ID NO: 600298 - DNA, 15 bp, Homo sapiens
gccagaccccaggtt

SEQ ID NO: 600299 - DNA, 15 bp, Homo sapiens
ccagaccccaggtta

SEQ ID NO: 600300 - DNA, 15 bp, Homo sapiens
cagaccccaggttaa

SEQ ID NO: 600301 - DNA, 15 bp, Homo sapiens
agaccccaggttaat

SEQ ID NO: 600302 - DNA, 15 bp, Homo sapiens
gaccccaggttaata

SEQ ID NO: 600303 - DNA, 15 bp, Homo sapiens
accccaggttaatag

SEQ ID NO: 600304 - DNA, 15 bp, Homo sapiens
ccccaggttaatagc

SEQ ID NO: 600305 - DNA, 15 bp, Homo sapiens
cccaggttaatagcc

SEQ ID NO: 600306 - DNA, 15 bp, Homo sapiens
ccaggttaatagcct

SEQ ID NO: 600307 - DNA, 15 bp, Homo sapiens
caggttaatagcctt

SEQ ID NO: 600308 - DNA, 15 bp, Homo sapiens
aggttaatagccttt

SEQ ID NO: 600309 - DNA, 15 bp, Homo sapiens
ggttaatagccttta

SEQ ID NO: 600310 - DNA, 15 bp, Homo sapiens
gttaatagcctttac

SEQ ID NO: 600311 - DNA, 15 bp, Homo sapiens
ttaatagcctttaca

SEQ ID NO: 600312 - DNA, 15 bp, Homo sapiens
taatagcctttacat

SEQ ID NO: 600313 - DNA, 15 bp, Homo sapiens
aatagcctttacatt

SEQ ID NO: 600314 - DNA, 15 bp, Homo sapiens
atagcctttacatta

SEQ ID NO: 600315 - DNA, 15 bp, Homo sapiens
tagcctttacattaa

SEQ ID NO: 600316 - DNA, 15 bp, Homo sapiens
agcctttacattaaa

SEQ ID NO: 600317 - DNA, 15 bp, Homo sapiens
gcctttacattaaaa

SEQ ID NO: 600318 - DNA, 15 bp, Homo sapiens
cctttacattaaaat

SEQ ID NO: 600319 - DNA, 15 bp, Homo sapiens
ctttacattaaaatg

SEQ ID NO: 600320 - DNA, 15 bp, Homo sapiens
tttacattaaaatgt

SEQ ID NO: 600321 - DNA, 15 bp, Homo sapiens
ttacattaaaatgtt

SEQ ID NO: 600322 - DNA, 15 bp, Homo sapiens
tacattaaaatgttt

SEQ ID NO: 600323 - DNA, 15 bp, Homo sapiens
acattaaaatgtttt

SEQ ID NO: 600324 - DNA, 15 bp, Homo sapiens
cattaaaatgttttt

SEQ ID NO: 600325 - DNA, 15 bp, Homo sapiens
attaaaatgtttttc

SEQ ID NO: 600326 - DNA, 15 bp, Homo sapiens
ttaaaatgtttttct

SEQ ID NO: 600327 - DNA, 15 bp, Homo sapiens
taaaatgtttttcta

SEQ ID NO: 600328 - DNA, 15 bp, Homo sapiens
aaaatgtttttctac

SEQ ID NO: 600329 - DNA, 15 bp, Homo sapiens
aaatgtttttctacc

SEQ ID NO: 600330 - DNA, 15 bp, Homo sapiens
aatgtttttctacct

SEQ ID NO: 600331 - DNA, 15 bp, Homo sapiens
atgtttttctaccta

SEQ ID NO: 600332 - DNA, 15 bp, Homo sapiens
tgtttttctacctac

SEQ ID NO: 600333 - DNA, 15 bp, Homo sapiens
gtttttctacctacc

SEQ ID NO: 600334 - DNA, 15 bp, Homo sapiens
tttttctacctacca

SEQ ID NO: 600335 - DNA, 15 bp, Homo sapiens
ttttctacctaccac

SEQ ID NO: 600336 - DNA, 15 bp, Homo sapiens
tttctacctaccact

SEQ ID NO: 600337 - DNA, 15 bp, Homo sapiens
ttctacctaccacta

SEQ ID NO: 600338 - DNA, 15 bp, Homo sapiens
tctacctaccactaa

SEQ ID NO: 600339 - DNA, 15 bp, Homo sapiens
ctacctaccactaat

SEQ ID NO: 600340 - DNA, 15 bp, Homo sapiens
tacctaccactaata

SEQ ID NO: 600341 - DNA, 15 bp, Homo sapiens
acctaccactaatat

SEQ ID NO: 600342 - DNA, 15 bp, Homo sapiens
cctaccactaatatg

SEQ ID NO: 600343 - DNA, 15 bp, Homo sapiens
ctaccactaatatgc

SEQ ID NO: 600344 - DNA, 15 bp, Homo sapiens
taccactaatatgca

SEQ ID NO: 600345 - DNA, 15 bp, Homo sapiens
accactaatatgcat

SEQ ID NO: 600346 - DNA, 15 bp, Homo sapiens
ccactaatatgcatt

SEQ ID NO: 600347 - DNA, 15 bp, Homo sapiens
cactaatatgcattc

SEQ ID NO: 600348 - DNA, 15 bp, Homo sapiens
actaatatgcattct

SEQ ID NO: 600349 - DNA, 15 bp, Homo sapiens
ctaatatgcattctt

SEQ ID NO: 600350 - DNA, 15 bp, Homo sapiens
taatatgcattcttt

SEQ ID NO: 600351 - DNA, 15 bp, Homo sapiens
aatatgcattcttta

SEQ ID NO: 600352 - DNA, 15 bp, Homo sapiens
atatgcattctttag

SEQ ID NO: 600353 - DNA, 15 bp, Homo sapiens
tatgcattctttagt

SEQ ID NO: 600354 - DNA, 15 bp, Homo sapiens
atgcattctttagta

SEQ ID NO: 600355 - DNA, 15 bp, Homo sapiens
tgcattctttagtaa

SEQ ID NO: 600356 - DNA, 15 bp, Homo sapiens
gcattctttagtaag

SEQ ID NO: 600357 - DNA, 15 bp, Homo sapiens
cattctttagtaagc

SEQ ID NO: 600358 - DNA, 15 bp, Homo sapiens
attctttagtaagcg

SEQ ID NO: 600359 - DNA, 15 bp, Homo sapiens
ttctttagtaagcgg

SEQ ID NO: 600360 - DNA, 15 bp, Homo sapiens
tctttagtaagcggt

SEQ ID NO: 600361 - DNA, 15 bp, Homo sapiens
ctttagtaagcggtc

SEQ ID NO: 600362 - DNA, 15 bp, Homo sapiens
tttagtaagcggtct

SEQ ID NO: 600363 - DNA, 15 bp, Homo sapiens
ttagtaagcggtctc

SEQ ID NO: 600364 - DNA, 15 bp, Homo sapiens
tagtaagcggtctca

SEQ ID NO: 600365 - DNA, 15 bp, Homo sapiens
agtaagcggtctcaa

SEQ ID NO: 600366 - DNA, 15 bp, Homo sapiens
gtaagcggtctcaat

SEQ ID NO: 600367 - DNA, 15 bp, Homo sapiens
taagcggtctcaata

SEQ ID NO: 600368 - DNA, 15 bp, Homo sapiens
aagcggtctcaatat

SEQ ID NO: 600369 - DNA, 15 bp, Homo sapiens
agcggtctcaatata

SEQ ID NO: 600370 - DNA, 15 bp, Homo sapiens
gcggtctcaatatac

SEQ ID NO: 600371 - DNA, 15 bp, Homo sapiens
cggtctcaatataca

SEQ ID NO: 600372 - DNA, 15 bp, Homo sapiens
ggtctcaatatacac

SEQ ID NO: 600373 - DNA, 15 bp, Homo sapiens
gtctcaatatacacc

SEQ ID NO: 600374 - DNA, 15 bp, Homo sapiens
tctcaatatacaccg

SEQ ID NO: 600375 - DNA, 15 bp, Homo sapiens
ctcaatatacaccga

SEQ ID NO: 600376 - DNA, 15 bp, Homo sapiens
tcaatatacaccgat

SEQ ID NO: 600377 - DNA, 15 bp, Homo sapiens
caatatacaccgatt

SEQ ID NO: 600378 - DNA, 15 bp, Homo sapiens
aatatacaccgattc

SEQ ID NO: 600379 - DNA, 15 bp, Homo sapiens
atatacaccgattct

SEQ ID NO: 600380 - DNA, 15 bp, Homo sapiens
tatacaccgattctt

SEQ ID NO: 600381 - DNA, 15 bp, Homo sapiens
atacaccgattcttc

SEQ ID NO: 600382 - DNA, 15 bp, Homo sapiens
tacaccgattcttcc

SEQ ID NO: 600383 - DNA, 15 bp, Homo sapiens
acaccgattcttcct

SEQ ID NO: 600384 - DNA, 15 bp, Homo sapiens
caccgattcttcctt

SEQ ID NO: 600385 - DNA, 15 bp, Homo sapiens
accgattcttcctta

SEQ ID NO: 600386 - DNA, 15 bp, Homo sapiens
ccgattcttccttaa

SEQ ID NO: 600387 - DNA, 15 bp, Homo sapiens
cgattcttccttaac

SEQ ID NO: 600388 - DNA, 15 bp, Homo sapiens
gattcttccttaact

SEQ ID NO: 600389 - DNA, 15 bp, Homo sapiens
attcttccttaactc

SEQ ID NO: 600390 - DNA, 15 bp, Homo sapiens
ttcttccttaactct

SEQ ID NO: 600391 - DNA, 15 bp, Homo sapiens
tcttccttaactctg

SEQ ID NO: 600392 - DNA, 15 bp, Homo sapiens
cttccttaactctgt

SEQ ID NO: 600393 - DNA, 15 bp, Homo sapiens
ttccttaactctgtt

SEQ ID NO: 600394 - DNA, 15 bp, Homo sapiens
tccttaactctgttt

SEQ ID NO: 600395 - DNA, 15 bp, Homo sapiens
ccttaactctgttta

SEQ ID NO: 600396 - DNA, 15 bp, Homo sapiens
cttaactctgtttat

SEQ ID NO: 600397 - DNA, 15 bp, Homo sapiens
ttaactctgtttatg

SEQ ID NO: 600398 - DNA, 15 bp, Homo sapiens
taactctgtttatga

SEQ ID NO: 600399 - DNA, 15 bp, Homo sapiens
aactctgtttatgaa

SEQ ID NO: 600400 - DNA, 15 bp, Homo sapiens
actctgtttatgaag

SEQ ID NO: 600401 - DNA, 15 bp, Homo sapiens
ctctgtttatgaagt

SEQ ID NO: 600402 - DNA, 15 bp, Homo sapiens
tctgtttatgaagta

SEQ ID NO: 600403 - DNA, 15 bp, Homo sapiens
ctgtttatgaagtat

SEQ ID NO: 600404 - DNA, 15 bp, Homo sapiens
tgtttatgaagtatt

SEQ ID NO: 600405 - DNA, 15 bp, Homo sapiens
gtttatgaagtattc

SEQ ID NO: 600406 - DNA, 15 bp, Homo sapiens
tttatgaagtattca

SEQ ID NO: 600407 - DNA, 15 bp, Homo sapiens
ttatgaagtattcag

SEQ ID NO: 600408 - DNA, 15 bp, Homo sapiens
tatgaagtattcagc

SEQ ID NO: 600409 - DNA, 15 bp, Homo sapiens
atgaagtattcagca

SEQ ID NO: 600410 - DNA, 15 bp, Homo sapiens
tgaagtattcagcat

SEQ ID NO: 600411 - DNA, 15 bp, Homo sapiens
gaagtattcagcatc

SEQ ID NO: 600412 - DNA, 15 bp, Homo sapiens
aagtattcagcatcc

SEQ ID NO: 600413 - DNA, 15 bp, Homo sapiens
agtattcagcatcct

SEQ ID NO: 600414 - DNA, 15 bp, Homo sapiens
gtattcagcatcctc

SEQ ID NO: 600415 - DNA, 15 bp, Homo sapiens
tattcagcatcctcc

SEQ ID NO: 600416 - DNA, 15 bp, Homo sapiens
attcagcatcctccc

SEQ ID NO: 600417 - DNA, 15 bp, Homo sapiens
ttcagcatcctccct

SEQ ID NO: 600418 - DNA, 15 bp, Homo sapiens
tcagcatcctccctg

SEQ ID NO: 600419 - DNA, 15 bp, Homo sapiens
cagcatcctccctgc

SEQ ID NO: 600420 - DNA, 15 bp, Homo sapiens
agcatcctccctgcc

SEQ ID NO: 600421 - DNA, 15 bp, Homo sapiens
gcatcctccctgccc

SEQ ID NO: 600422 - DNA, 15 bp, Homo sapiens
catcctccctgcccc

SEQ ID NO: 600423 - DNA, 15 bp, Homo sapiens
atcctccctgccccc

SEQ ID NO: 600424 - DNA, 15 bp, Homo sapiens
tcctccctgccccct

SEQ ID NO: 600425 - DNA, 15 bp, Homo sapiens
cctccctgccccctt

SEQ ID NO: 600426 - DNA, 15 bp, Homo sapiens
ctccctgcccccttc

SEQ ID NO: 600427 - DNA, 15 bp, Homo sapiens
tccctgcccccttca

SEQ ID NO: 600428 - DNA, 15 bp, Homo sapiens
ccctgcccccttcag

SEQ ID NO: 600429 - DNA, 15 bp, Homo sapiens
cctgcccccttcagc

SEQ ID NO: 600430 - DNA, 15 bp, Homo sapiens
ctgcccccttcagca

SEQ ID NO: 600431 - DNA, 15 bp, Homo sapiens
tgcccccttcagcat

SEQ ID NO: 600432 - DNA, 15 bp, Homo sapiens
gcccccttcagcatc

SEQ ID NO: 600433 - DNA, 15 bp, Homo sapiens
cccccttcagcatcc

SEQ ID NO: 600434 - DNA, 15 bp, Homo sapiens
ccccttcagcatcct

SEQ ID NO: 600435 - DNA, 15 bp, Homo sapiens
cccttcagcatcctc

SEQ ID NO: 600436 - DNA, 15 bp, Homo sapiens
ccttcagcatcctcc

SEQ ID NO: 600437 - DNA, 15 bp, Homo sapiens
cttcagcatcctccc

SEQ ID NO: 600438 - DNA, 15 bp, Homo sapiens
atcctccctgcccct

SEQ ID NO: 600439 - DNA, 15 bp, Homo sapiens
tcctccctgcccctg

SEQ ID NO: 600440 - DNA, 15 bp, Homo sapiens
cctccctgcccctga

SEQ ID NO: 600441 - DNA, 15 bp, Homo sapiens
ctccctgcccctgag

SEQ ID NO: 600442 - DNA, 15 bp, Homo sapiens
tccctgcccctgagc

SEQ ID NO: 600443 - DNA, 15 bp, Homo sapiens
ccctgcccctgagca

SEQ ID NO: 600444 - DNA, 15 bp, Homo sapiens
cctgcccctgagcac

SEQ ID NO: 600445 - DNA, 15 bp, Homo sapiens
ctgcccctgagcaca

SEQ ID NO: 600446 - DNA, 15 bp, Homo sapiens
tgcccctgagcacag

SEQ ID NO: 600447 - DNA, 15 bp, Homo sapiens
gcccctgagcacagg

SEQ ID NO: 600448 - DNA, 15 bp, Homo sapiens
cccctgagcacagga

SEQ ID NO: 600449 - DNA, 15 bp, Homo sapiens
ccctgagcacaggat

SEQ ID NO: 600450 - DNA, 15 bp, Homo sapiens
cctgagcacaggatc

SEQ ID NO: 600451 - DNA, 15 bp, Homo sapiens
ctgagcacaggatcc

SEQ ID NO: 600452 - DNA, 15 bp, Homo sapiens
tgagcacaggatcca

SEQ ID NO: 600453 - DNA, 15 bp, Homo sapiens
gagcacaggatccaa

SEQ ID NO: 600454 - DNA, 15 bp, Homo sapiens
agcacaggatccaat

SEQ ID NO: 600455 - DNA, 15 bp, Homo sapiens
gcacaggatccaatg

SEQ ID NO: 600456 - DNA, 15 bp, Homo sapiens
cacaggatccaatgg

SEQ ID NO: 600457 - DNA, 15 bp, Homo sapiens
acaggatccaatggc

SEQ ID NO: 600458 - DNA, 15 bp, Homo sapiens
caggatccaatggcg

SEQ ID NO: 600459 - DNA, 15 bp, Homo sapiens
aggatccaatggcgt

SEQ ID NO: 600460 - DNA, 15 bp, Homo sapiens
ggatccaatggcgtg

SEQ ID NO: 600461 - DNA, 15 bp, Homo sapiens
gatccaatggcgtga

SEQ ID NO: 600462 - DNA, 15 bp, Homo sapiens
atccaatggcgtgag

SEQ ID NO: 600463 - DNA, 15 bp, Homo sapiens
tccaatggcgtgagg

SEQ ID NO: 600464 - DNA, 15 bp, Homo sapiens
ccaatggcgtgagga

SEQ ID NO: 600465 - DNA, 15 bp, Homo sapiens
caatggcgtgaggac

SEQ ID NO: 600466 - DNA, 15 bp, Homo sapiens
aatggcgtgaggacc

SEQ ID NO: 600467 - DNA, 15 bp, Homo sapiens
atggcgtgaggacca

SEQ ID NO: 600468 - DNA, 15 bp, Homo sapiens
tggcgtgaggaccac

SEQ ID NO: 600469 - DNA, 15 bp, Homo sapiens
ggcgtgaggaccaca

SEQ ID NO: 600470 - DNA, 15 bp, Homo sapiens
gcgtgaggaccacag

SEQ ID NO: 600471 - DNA, 15 bp, Homo sapiens
cgtgaggaccacagg

SEQ ID NO: 600472 - DNA, 15 bp, Homo sapiens
gtgaggaccacaggc

SEQ ID NO: 600473 - DNA, 15 bp, Homo sapiens
tgaggaccacaggcc

SEQ ID NO: 600474 - DNA, 15 bp, Homo sapiens
gaggaccacaggcct

SEQ ID NO: 600475 - DNA, 15 bp, Homo sapiens
aggaccacaggcctg

SEQ ID NO: 600476 - DNA, 15 bp, Homo sapiens
ggaccacaggcctgg

SEQ ID NO: 600477 - DNA, 15 bp, Homo sapiens
gaccacaggcctggg

SEQ ID NO: 600478 - DNA, 15 bp, Homo sapiens
accacaggcctgggc

SEQ ID NO: 600479 - DNA, 15 bp, Homo sapiens
ccacaggcctgggca

SEQ ID NO: 600480 - DNA, 15 bp, Homo sapiens
cacaggcctgggcag

SEQ ID NO: 600481 - DNA, 15 bp, Homo sapiens
acaggcctgggcagc

SEQ ID NO: 600482 - DNA, 15 bp, Homo sapiens
caggcctgggcagct

SEQ ID NO: 600483 - DNA, 15 bp, Homo sapiens
aggcctgggcagctg

SEQ ID NO: 600484 - DNA, 15 bp, Homo sapiens
ggcctgggcagctgc

SEQ ID NO: 600485 - DNA, 15 bp, Homo sapiens
gcctgggcagctgct

SEQ ID NO: 600486 - DNA, 15 bp, Homo sapiens
cctgggcagctgctg

SEQ ID NO: 600487 - DNA, 15 bp, Homo sapiens
ctgggcagctgctgg

SEQ ID NO: 600488 - DNA, 15 bp, Homo sapiens
tgggcagctgctggg

SEQ ID NO: 600489 - DNA, 15 bp, Homo sapiens
gggcagctgctgggg

SEQ ID NO: 600490 - DNA, 15 bp, Homo sapiens
ggcagctgctggggc

SEQ ID NO: 600491 - DNA, 15 bp, Homo sapiens
gcagctgctggggca

SEQ ID NO: 600492 - DNA, 15 bp, Homo sapiens
cagctgctggggcat

SEQ ID NO: 600493 - DNA, 15 bp, Homo sapiens
agctgctggggcata

SEQ ID NO: 600494 - DNA, 15 bp, Homo sapiens
gctgctggggcatac

SEQ ID NO: 600495 - DNA, 15 bp, Homo sapiens
ctgctggggcataca

SEQ ID NO: 600496 - DNA, 15 bp, Homo sapiens
tgctggggcatacag

SEQ ID NO: 600497 - DNA, 15 bp, Homo sapiens
gctggggcatacagg

SEQ ID NO: 600498 - DNA, 15 bp, Homo sapiens
ctggggcatacaggc

SEQ ID NO: 600499 - DNA, 15 bp, Homo sapiens
tggggcatacaggca

SEQ ID NO: 600500 - DNA, 15 bp, Homo sapiens
ggggcatacaggcat

SEQ ID NO: 600501 - DNA, 15 bp, Homo sapiens
gggcatacaggcatc

SEQ ID NO: 600502 - DNA, 15 bp, Homo sapiens
ggcatacaggcatct

SEQ ID NO: 600503 - DNA, 15 bp, Homo sapiens
gcatacaggcatctc

SEQ ID NO: 600504 - DNA, 15 bp, Homo sapiens
catacaggcatctct

SEQ ID NO: 600505 - DNA, 15 bp, Homo sapiens
atacaggcatctctt

SEQ ID NO: 600506 - DNA, 15 bp, Homo sapiens
tacaggcatctctta

SEQ ID NO: 600507 - DNA, 15 bp, Homo sapiens
acaggcatctcttag

SEQ ID NO: 600508 - DNA, 15 bp, Homo sapiens
caggcatctcttagt

SEQ ID NO: 600509 - DNA, 15 bp, Homo sapiens
aggcatctcttagtg

SEQ ID NO: 600510 - DNA, 15 bp, Homo sapiens
ggcatctcttagtgg

SEQ ID NO: 600511 - DNA, 15 bp, Homo sapiens
gcatctcttagtggc

SEQ ID NO: 600512 - DNA, 15 bp, Homo sapiens
catctcttagtggct

SEQ ID NO: 600513 - DNA, 15 bp, Homo sapiens
atctcttagtggctg

SEQ ID NO: 600514 - DNA, 15 bp, Homo sapiens
tctcttagtggctga

SEQ ID NO: 600515 - DNA, 15 bp, Homo sapiens
ctcttagtggctgag

SEQ ID NO: 600516 - DNA, 15 bp, Homo sapiens
tcttagtggctgaga

SEQ ID NO: 600517 - DNA, 15 bp, Homo sapiens
cttagtggctgagag

SEQ ID NO: 600518 - DNA, 15 bp, Homo sapiens
ttagtggctgagaga

SEQ ID NO: 600519 - DNA, 15 bp, Homo sapiens
tagtggctgagagac

SEQ ID NO: 600520 - DNA, 15 bp, Homo sapiens
agtggctgagagact

SEQ ID NO: 600521 - DNA, 15 bp, Homo sapiens
gtggctgagagactg

SEQ ID NO: 600522 - DNA, 15 bp, Homo sapiens
tggctgagagactgg

SEQ ID NO: 600523 - DNA, 15 bp, Homo sapiens
ggctgagagactggg

SEQ ID NO: 600524 - DNA, 15 bp, Homo sapiens
aaaccagatgttcac

SEQ ID NO: 600525 - DNA, 15 bp, Homo sapiens
aaccagatgttcaca

SEQ ID NO: 600526 - DNA, 15 bp, Homo sapiens
accagatgttcacat

SEQ ID NO: 600527 - DNA, 15 bp, Homo sapiens
ccagatgttcacatc

SEQ ID NO: 600528 - DNA, 15 bp, Homo sapiens
cagatgttcacatca

SEQ ID NO: 600529 - DNA, 15 bp, Homo sapiens
agatgttcacatcag

SEQ ID NO: 600530 - DNA, 15 bp, Homo sapiens
gatgttcacatcagt

SEQ ID NO: 600531 - DNA, 15 bp, Homo sapiens
atgttcacatcagtc

SEQ ID NO: 600532 - DNA, 15 bp, Homo sapiens
tgttcacatcagtct

SEQ ID NO: 600533 - DNA, 15 bp, Homo sapiens
gttcacatcagtctc

SEQ ID NO: 600534 - DNA, 15 bp, Homo sapiens
ttcacatcagtctct

SEQ ID NO: 600535 - DNA, 15 bp, Homo sapiens
tcacatcagtctctg

SEQ ID NO: 600536 - DNA, 15 bp, Homo sapiens
cacatcagtctctgg

SEQ ID NO: 600537 - DNA, 15 bp, Homo sapiens
acatcagtctctgga

SEQ ID NO: 600538 - DNA, 15 bp, Homo sapiens
catcagtctctggag

SEQ ID NO: 600539 - DNA, 15 bp, Homo sapiens
atcagtctctggagc

SEQ ID NO: 600540 - DNA, 15 bp, Homo sapiens
tcagtctctggagct

SEQ ID NO: 600541 - DNA, 15 bp, Homo sapiens
cagtctctggagctt

SEQ ID NO: 600542 - DNA, 15 bp, Homo sapiens
agtctctggagcttg

SEQ ID NO: 600543 - DNA, 15 bp, Homo sapiens
gtctctggagcttgg

SEQ ID NO: 600544 - DNA, 15 bp, Homo sapiens
tctctggagcttgga

SEQ ID NO: 600545 - DNA, 15 bp, Homo sapiens
ctctggagcttggag

SEQ ID NO: 600546 - DNA, 15 bp, Homo sapiens
tctggagcttggagg

SEQ ID NO: 600547 - DNA, 15 bp, Homo sapiens
ctggagcttggaggc

SEQ ID NO: 600548 - DNA, 15 bp, Homo sapiens
tggagcttggaggca

SEQ ID NO: 600549 - DNA, 15 bp, Homo sapiens
ggagcttggaggcag

SEQ ID NO: 600550 - DNA, 15 bp, Homo sapiens
gagcttggaggcagc

SEQ ID NO: 600551 - DNA, 15 bp, Homo sapiens
agcttggaggcagca

SEQ ID NO: 600552 - DNA, 15 bp, Homo sapiens
gcttggaggcagcac

SEQ ID NO: 600553 - DNA, 15 bp, Homo sapiens
cttggaggcagcaca

SEQ ID NO: 600554 - DNA, 15 bp, Homo sapiens
ttggaggcagcacac

SEQ ID NO: 600555 - DNA, 15 bp, Homo sapiens
tggaggcagcacacc

SEQ ID NO: 600556 - DNA, 15 bp, Homo sapiens
ggaggcagcacacct

SEQ ID NO: 600557 - DNA, 15 bp, Homo sapiens
gaggcagcacacctg

SEQ ID NO: 600558 - DNA, 15 bp, Homo sapiens
aggcagcacacctgg

SEQ ID NO: 600559 - DNA, 15 bp, Homo sapiens
ggcagcacacctggg

SEQ ID NO: 600560 - DNA, 15 bp, Homo sapiens
gcagcacacctgggg

SEQ ID NO: 600561 - DNA, 15 bp, Homo sapiens
cagcacacctgggga

SEQ ID NO: 600562 - DNA, 15 bp, Homo sapiens
agcacacctggggac

SEQ ID NO: 600563 - DNA, 15 bp, Homo sapiens
gcacacctggggact

SEQ ID NO: 600564 - DNA, 15 bp, Homo sapiens
cacacctggggactt

SEQ ID NO: 600565 - DNA, 15 bp, Homo sapiens
acacctggggacttc

SEQ ID NO: 600566 - DNA, 15 bp, Homo sapiens
cacctggggacttcc

SEQ ID NO: 600567 - DNA, 15 bp, Homo sapiens
acctggggacttcca

SEQ ID NO: 600568 - DNA, 15 bp, Homo sapiens
cctggggacttccac

SEQ ID NO: 600569 - DNA, 15 bp, Homo sapiens
ctggggacttccaca

SEQ ID NO: 600570 - DNA, 15 bp, Homo sapiens
tggggacttccacat

SEQ ID NO: 600571 - DNA, 15 bp, Homo sapiens
ggggacttccacatc

SEQ ID NO: 600572 - DNA, 15 bp, Homo sapiens
gggacttccacatcc

SEQ ID NO: 600573 - DNA, 15 bp, Homo sapiens
ggacttccacatccc

SEQ ID NO: 600574 - DNA, 15 bp, Homo sapiens
gacttccacatcccc

SEQ ID NO: 600575 - DNA, 15 bp, Homo sapiens
acttccacatcccct

SEQ ID NO: 600576 - DNA, 15 bp, Homo sapiens
cttccacatcccctg

SEQ ID NO: 600577 - DNA, 15 bp, Homo sapiens
ttccacatcccctgc

SEQ ID NO: 600578 - DNA, 15 bp, Homo sapiens
tccacatcccctgcc

SEQ ID NO: 600579 - DNA, 15 bp, Homo sapiens
ccacatcccctgccg

SEQ ID NO: 600580 - DNA, 15 bp, Homo sapiens
cacatcccctgccga

SEQ ID NO: 600581 - DNA, 15 bp, Homo sapiens
acatcccctgccgag

SEQ ID NO: 600582 - DNA, 15 bp, Homo sapiens
catcccctgccgagg

SEQ ID NO: 600583 - DNA, 15 bp, Homo sapiens
atcccctgccgaggt

SEQ ID NO: 600584 - DNA, 15 bp, Homo sapiens
tcccctgccgaggtg

SEQ ID NO: 600585 - DNA, 15 bp, Homo sapiens
cccctgccgaggtgg

SEQ ID NO: 600586 - DNA, 15 bp, Homo sapiens
ccctgccgaggtggc

SEQ ID NO: 600587 - DNA, 15 bp, Homo sapiens
cctgccgaggtggca

SEQ ID NO: 600588 - DNA, 15 bp, Homo sapiens
ctgccgaggtggcaa

SEQ ID NO: 600589 - DNA, 15 bp, Homo sapiens
tgccgaggtggcaaa

SEQ ID NO: 600590 - DNA, 15 bp, Homo sapiens
gccgaggtggcaaaa

SEQ ID NO: 600591 - DNA, 15 bp, Homo sapiens
ccgaggtggcaaaag

SEQ ID NO: 600592 - DNA, 15 bp, Homo sapiens
cgaggtggcaaaagc

SEQ ID NO: 600593 - DNA, 15 bp, Homo sapiens
gaggtggcaaaagca

SEQ ID NO: 600594 - DNA, 15 bp, Homo sapiens
aggtggcaaaagcag

SEQ ID NO: 600595 - DNA, 15 bp, Homo sapiens
ggtggcaaaagcagg

SEQ ID NO: 600596 - DNA, 15 bp, Homo sapiens
gtggcaaaagcagga

SEQ ID NO: 600597 - DNA, 15 bp, Homo sapiens
tggcaaaagcaggag

SEQ ID NO: 600598 - DNA, 15 bp, Homo sapiens
ggcaaaagcaggagc

SEQ ID NO: 600599 - DNA, 15 bp, Homo sapiens
gcaaaagcaggagca

SEQ ID NO: 600600 - DNA, 15 bp, Homo sapiens
caaaagcaggagcag

SEQ ID NO: 600601 - DNA, 15 bp, Homo sapiens
aaaagcaggagcagt

SEQ ID NO: 600602 - DNA, 15 bp, Homo sapiens
aaagcaggagcagtg

SEQ ID NO: 600603 - DNA, 15 bp, Homo sapiens
aagcaggagcagtgg

SEQ ID NO: 600604 - DNA, 15 bp, Homo sapiens
agcaggagcagtggt

SEQ ID NO: 600605 - DNA, 15 bp, Homo sapiens
gcaggagcagtggtg

SEQ ID NO: 600606 - DNA, 15 bp, Homo sapiens
caggagcagtggtga

SEQ ID NO: 600607 - DNA, 15 bp, Homo sapiens
aggagcagtggtgag

SEQ ID NO: 600608 - DNA, 15 bp, Homo sapiens
ggagcagtggtgagt

SEQ ID NO: 600609 - DNA, 15 bp, Homo sapiens
gagcagtggtgagtt

SEQ ID NO: 600610 - DNA, 15 bp, Homo sapiens
agcagtggtgagttc

SEQ ID NO: 600611 - DNA, 15 bp, Homo sapiens
gcagtggtgagttca

SEQ ID NO: 600612 - DNA, 15 bp, Homo sapiens
cagtggtgagttcac

SEQ ID NO: 600613 - DNA, 15 bp, Homo sapiens
agtggtgagttcaca

SEQ ID NO: 600614 - DNA, 15 bp, Homo sapiens
gtggtgagttcacat

SEQ ID NO: 600615 - DNA, 15 bp, Homo sapiens
tggtgagttcacatg

SEQ ID NO: 600616 - DNA, 15 bp, Homo sapiens
ggtgagttcacatgg

SEQ ID NO: 600617 - DNA, 15 bp, Homo sapiens
gtgagttcacatggg

SEQ ID NO: 600618 - DNA, 15 bp, Homo sapiens
tgagttcacatgggc

SEQ ID NO: 600619 - DNA, 15 bp, Homo sapiens
gagttcacatgggct

SEQ ID NO: 600620 - DNA, 15 bp, Homo sapiens
agttcacatgggctg

SEQ ID NO: 600621 - DNA, 15 bp, Homo sapiens
gttcacatgggctgg

SEQ ID NO: 600622 - DNA, 15 bp, Homo sapiens
ttcacatgggctggg

SEQ ID NO: 600623 - DNA, 15 bp, Homo sapiens
tcacatgggctgggg

SEQ ID NO: 600624 - DNA, 15 bp, Homo sapiens
cacatgggctggggt

SEQ ID NO: 600625 - DNA, 15 bp, Homo sapiens
acatgggctggggtt

SEQ ID NO: 600626 - DNA, 15 bp, Homo sapiens
catgggctggggttt

SEQ ID NO: 600627 - DNA, 15 bp, Homo sapiens
atgggctggggtttc

SEQ ID NO: 600628 - DNA, 15 bp, Homo sapiens
tgggctggggtttcc

SEQ ID NO: 600629 - DNA, 15 bp, Homo sapiens
gggctggggtttcct

SEQ ID NO: 600630 - DNA, 15 bp, Homo sapiens
ggctggggtttcctg

SEQ ID NO: 600631 - DNA, 15 bp, Homo sapiens
gctggggtttcctga

SEQ ID NO: 600632 - DNA, 15 bp, Homo sapiens
ctggggtttcctgaa

SEQ ID NO: 600633 - DNA, 15 bp, Homo sapiens
tggggtttcctgaac

SEQ ID NO: 600634 - DNA, 15 bp, Homo sapiens
ggggtttcctgaaca

SEQ ID NO: 600635 - DNA, 15 bp, Homo sapiens
gggtttcctgaacac

SEQ ID NO: 600636 - DNA, 15 bp, Homo sapiens
ggtttcctgaacact

SEQ ID NO: 600637 - DNA, 15 bp, Homo sapiens
gtttcctgaacactg

SEQ ID NO: 600638 - DNA, 15 bp, Homo sapiens
tttcctgaacactgc

SEQ ID NO: 600639 - DNA, 15 bp, Homo sapiens
ttcctgaacactgct

SEQ ID NO: 600640 - DNA, 15 bp, Homo sapiens
tcctgaacactgctg

SEQ ID NO: 600641 - DNA, 15 bp, Homo sapiens
cctgaacactgctgg

SEQ ID NO: 600642 - DNA, 15 bp, Homo sapiens
ctgaacactgctggc

SEQ ID NO: 600643 - DNA, 15 bp, Homo sapiens
tgaacactgctggca

SEQ ID NO: 600644 - DNA, 15 bp, Homo sapiens
gaacactgctggcaa

SEQ ID NO: 600645 - DNA, 15 bp, Homo sapiens
aacactgctggcaat

SEQ ID NO: 600646 - DNA, 15 bp, Homo sapiens
acactgctggcaatt

SEQ ID NO: 600647 - DNA, 15 bp, Homo sapiens
cactgctggcaattg

SEQ ID NO: 600648 - DNA, 15 bp, Homo sapiens
actgctggcaattgg

SEQ ID NO: 600649 - DNA, 15 bp, Homo sapiens
ctgctggcaattgga

SEQ ID NO: 600650 - DNA, 15 bp, Homo sapiens
tgctggcaattggag

SEQ ID NO: 600651 - DNA, 15 bp, Homo sapiens
gctggcaattggaga

SEQ ID NO: 600652 - DNA, 15 bp, Homo sapiens
ctggcaattggagaa

SEQ ID NO: 600653 - DNA, 15 bp, Homo sapiens
tggcaattggagaat

SEQ ID NO: 600654 - DNA, 15 bp, Homo sapiens
ggcaattggagaatc

SEQ ID NO: 600655 - DNA, 15 bp, Homo sapiens
gcaattggagaatct

SEQ ID NO: 600656 - DNA, 15 bp, Homo sapiens
caattggagaatctg

SEQ ID NO: 600657 - DNA, 15 bp, Homo sapiens
aattggagaatctgc

SEQ ID NO: 600658 - DNA, 15 bp, Homo sapiens
attggagaatctgca

SEQ ID NO: 600659 - DNA, 15 bp, Homo sapiens
ttggagaatctgcaa

SEQ ID NO: 600660 - DNA, 15 bp, Homo sapiens
tggagaatctgcaag

SEQ ID NO: 600661 - DNA, 15 bp, Homo sapiens
ggagaatctgcaagg

SEQ ID NO: 600662 - DNA, 15 bp, Homo sapiens
gagaatctgcaaggg

SEQ ID NO: 600663 - DNA, 15 bp, Homo sapiens
agaatctgcaaggga

SEQ ID NO: 600664 - DNA, 15 bp, Homo sapiens
gaatctgcaagggaa

SEQ ID NO: 600665 - DNA, 15 bp, Homo sapiens
aatctgcaagggaac

SEQ ID NO: 600666 - DNA, 15 bp, Homo sapiens
atctgcaagggaact

SEQ ID NO: 600667 - DNA, 15 bp, Homo sapiens
tctgcaagggaactt

SEQ ID NO: 600668 - DNA, 15 bp, Homo sapiens
ctgcaagggaacttc

SEQ ID NO: 600669 - DNA, 15 bp, Homo sapiens
tgcaagggaacttct

SEQ ID NO: 600670 - DNA, 15 bp, Homo sapiens
gcaagggaacttctc

SEQ ID NO: 600671 - DNA, 15 bp, Homo sapiens
caagggaacttctcc

SEQ ID NO: 600672 - DNA, 15 bp, Homo sapiens
aagggaacttctccg

SEQ ID NO: 600673 - DNA, 15 bp, Homo sapiens
agggaacttctccga

SEQ ID NO: 600674 - DNA, 15 bp, Homo sapiens
gggaacttctccgac

SEQ ID NO: 600675 - DNA, 15 bp, Homo sapiens
ggaacttctccgact

SEQ ID NO: 600676 - DNA, 15 bp, Homo sapiens
gaacttctccgactc

SEQ ID NO: 600677 - DNA, 15 bp, Homo sapiens
aacttctccgactcc

SEQ ID NO: 600678 - DNA, 15 bp, Homo sapiens
acttctccgactcct

SEQ ID NO: 600679 - DNA, 15 bp, Homo sapiens
cttctccgactccta

SEQ ID NO: 600680 - DNA, 15 bp, Homo sapiens
ttctccgactcctac

SEQ ID NO: 600681 - DNA, 15 bp, Homo sapiens
tctccgactcctacc

SEQ ID NO: 600682 - DNA, 15 bp, Homo sapiens
ctccgactcctacca

SEQ ID NO: 600683 - DNA, 15 bp, Homo sapiens
tccgactcctaccag

SEQ ID NO: 600684 - DNA, 15 bp, Homo sapiens
ccgactcctaccagc

SEQ ID NO: 600685 - DNA, 15 bp, Homo sapiens
cgactcctaccagca

SEQ ID NO: 600686 - DNA, 15 bp, Homo sapiens
gactcctaccagcag

SEQ ID NO: 600687 - DNA, 15 bp, Homo sapiens
actcctaccagcagc

SEQ ID NO: 600688 - DNA, 15 bp, Homo sapiens
ctcctaccagcagct

SEQ ID NO: 600689 - DNA, 15 bp, Homo sapiens
tcctaccagcagctg

SEQ ID NO: 600690 - DNA, 15 bp, Homo sapiens
cctaccagcagctgc

SEQ ID NO: 600691 - DNA, 15 bp, Homo sapiens
ctaccagcagctgct

SEQ ID NO: 600692 - DNA, 15 bp, Homo sapiens
taccagcagctgctt

SEQ ID NO: 600693 - DNA, 15 bp, Homo sapiens
accagcagctgcttt

SEQ ID NO: 600694 - DNA, 15 bp, Homo sapiens
ccagcagctgcttta

SEQ ID NO: 600695 - DNA, 15 bp, Homo sapiens
cagcagctgctttaa

SEQ ID NO: 600696 - DNA, 15 bp, Homo sapiens
agcagctgctttaaa

SEQ ID NO: 600697 - DNA, 15 bp, Homo sapiens
gcagctgctttaaaa

SEQ ID NO: 600698 - DNA, 15 bp, Homo sapiens
cagctgctttaaaat

SEQ ID NO: 600699 - DNA, 15 bp, Homo sapiens
agctgctttaaaata

SEQ ID NO: 600700 - DNA, 15 bp, Homo sapiens
gctgctttaaaataa

SEQ ID NO: 600701 - DNA, 15 bp, Homo sapiens
ctgctttaaaataaa

SEQ ID NO: 600702 - DNA, 15 bp, Homo sapiens
tgctttaaaataaag

SEQ ID NO: 600703 - DNA, 15 bp, Homo sapiens
gctttaaaataaagg

SEQ ID NO: 600704 - DNA, 15 bp, Homo sapiens
ctttaaaataaaggt

SEQ ID NO: 600705 - DNA, 15 bp, Homo sapiens
tttaaaataaaggtg

SEQ ID NO: 600706 - DNA, 15 bp, Homo sapiens
ttaaaataaaggtga

SEQ ID NO: 600707 - DNA, 15 bp, Homo sapiens
taaaataaaggtgat

SEQ ID NO: 600708 - DNA, 15 bp, Homo sapiens
aaaataaaggtgatg

SEQ ID NO: 600709 - DNA, 15 bp, Homo sapiens
aaataaaggtgatgt

SEQ ID NO: 600710 - DNA, 15 bp, Homo sapiens
aataaaggtgatgta

SEQ ID NO: 600711 - DNA, 15 bp, Homo sapiens
ataaaggtgatgtag

SEQ ID NO: 600712 - DNA, 15 bp, Homo sapiens
taaaggtgatgtagc

SEQ ID NO: 600713 - DNA, 15 bp, Homo sapiens
aaaggtgatgtagct

SEQ ID NO: 600714 - DNA, 15 bp, Homo sapiens
aaggtgatgtagctg

SEQ ID NO: 600715 - DNA, 15 bp, Homo sapiens
aggtgatgtagctgg

SEQ ID NO: 600716 - DNA, 15 bp, Homo sapiens
ggtgatgtagctggt

SEQ ID NO: 600717 - DNA, 15 bp, Homo sapiens
gtgatgtagctggtc

SEQ ID NO: 600718 - DNA, 15 bp, Homo sapiens
tgatgtagctggtca

SEQ ID NO: 600719 - DNA, 15 bp, Homo sapiens
gatgtagctggtcaa

SEQ ID NO: 600720 - DNA, 15 bp, Homo sapiens
atgtagctggtcaaa

SEQ ID NO: 600721 - DNA, 15 bp, Homo sapiens
tgtagctggtcaaat

SEQ ID NO: 600722 - DNA, 15 bp, Homo sapiens
gtagctggtcaaatc

SEQ ID NO: 600723 - DNA, 15 bp, Homo sapiens
tagctggtcaaatcc

SEQ ID NO: 600724 - DNA, 15 bp, Homo sapiens
agctggtcaaatcct

SEQ ID NO: 600725 - DNA, 15 bp, Homo sapiens
gctggtcaaatcctc

SEQ ID NO: 600726 - DNA, 15 bp, Homo sapiens
ctggtcaaatcctcc

SEQ ID NO: 600727 - DNA, 15 bp, Homo sapiens
tggtcaaatcctcca

SEQ ID NO: 600728 - DNA, 15 bp, Homo sapiens
ggtcaaatcctccat

SEQ ID NO: 600729 - DNA, 15 bp, Homo sapiens
gtcaaatcctccatg

SEQ ID NO: 600730 - DNA, 15 bp, Homo sapiens
tcaaatcctccatga

SEQ ID NO: 600731 - DNA, 15 bp, Homo sapiens
caaatcctccatgag

SEQ ID NO: 600732 - DNA, 15 bp, Homo sapiens
aaatcctccatgaga

SEQ ID NO: 600733 - DNA, 15 bp, Homo sapiens
aatcctccatgagag

SEQ ID NO: 600734 - DNA, 15 bp, Homo sapiens
atcctccatgagaga

SEQ ID NO: 600735 - DNA, 15 bp, Homo sapiens
tcctccatgagagag

SEQ ID NO: 600736 - DNA, 15 bp, Homo sapiens
cctccatgagagagc

SEQ ID NO: 600737 - DNA, 15 bp, Homo sapiens
ctccatgagagagca

SEQ ID NO: 600738 - DNA, 15 bp, Homo sapiens
tccatgagagagcag

SEQ ID NO: 600739 - DNA, 15 bp, Homo sapiens
ccatgagagagcagt

SEQ ID NO: 600740 - DNA, 15 bp, Homo sapiens
catgagagagcagtg

SEQ ID NO: 600741 - DNA, 15 bp, Homo sapiens
atgagagagcagtgt

SEQ ID NO: 600742 - DNA, 15 bp, Homo sapiens
tgagagagcagtgtt

SEQ ID NO: 600743 - DNA, 15 bp, Homo sapiens
gagagagcagtgttg

SEQ ID NO: 600744 - DNA, 15 bp, Homo sapiens
agagagcagtgttga

SEQ ID NO: 600745 - DNA, 15 bp, Homo sapiens
gagagcagtgttgaa

SEQ ID NO: 600746 - DNA, 15 bp, Homo sapiens
agagcagtgttgaat

SEQ ID NO: 600747 - DNA, 15 bp, Homo sapiens
gagcagtgttgaatg

SEQ ID NO: 600748 - DNA, 15 bp, Homo sapiens
agcagtgttgaatgg

SEQ ID NO: 600749 - DNA, 15 bp, Homo sapiens
gcagtgttgaatgga

SEQ ID NO: 600750 - DNA, 15 bp, Homo sapiens
cagtgttgaatggag

SEQ ID NO: 600751 - DNA, 15 bp, Homo sapiens
agtgttgaatggagg

SEQ ID NO: 600752 - DNA, 15 bp, Homo sapiens
gtgttgaatggagga

SEQ ID NO: 600753 - DNA, 15 bp, Homo sapiens
tgttgaatggaggaa

SEQ ID NO: 600754 - DNA, 15 bp, Homo sapiens
gttgaatggaggaag

SEQ ID NO: 600755 - DNA, 15 bp, Homo sapiens
ttgaatggaggaaga

SEQ ID NO: 600756 - DNA, 15 bp, Homo sapiens
tgaatggaggaagag

SEQ ID NO: 600757 - DNA, 15 bp, Homo sapiens
gaatggaggaagaga

SEQ ID NO: 600758 - DNA, 15 bp, Homo sapiens
aatggaggaagagac

SEQ ID NO: 600759 - DNA, 15 bp, Homo sapiens
atggaggaagagaca

SEQ ID NO: 600760 - DNA, 15 bp, Homo sapiens
tggaggaagagacac

SEQ ID NO: 600761 - DNA, 15 bp, Homo sapiens
ggaggaagagacaca

SEQ ID NO: 600762 - DNA, 15 bp, Homo sapiens
gaggaagagacacaa

SEQ ID NO: 600763 - DNA, 15 bp, Homo sapiens
aggaagagacacaac

SEQ ID NO: 600764 - DNA, 15 bp, Homo sapiens
ggaagagacacaacc

SEQ ID NO: 600765 - DNA, 15 bp, Homo sapiens
gaagagacacaacct

SEQ ID NO: 600766 - DNA, 15 bp, Homo sapiens
aagagacacaacctg

SEQ ID NO: 600767 - DNA, 15 bp, Homo sapiens
agagacacaacctgt

SEQ ID NO: 600768 - DNA, 15 bp, Homo sapiens
gagacacaacctgtc

SEQ ID NO: 600769 - DNA, 15 bp, Homo sapiens
agacacaacctgtct

SEQ ID NO: 600770 - DNA, 15 bp, Homo sapiens
gacacaacctgtctg

SEQ ID NO: 600771 - DNA, 15 bp, Homo sapiens
acacaacctgtctga

SEQ ID NO: 600772 - DNA, 15 bp, Homo sapiens
cacaacctgtctgaa

SEQ ID NO: 600773 - DNA, 15 bp, Homo sapiens
acaacctgtctgaaa

SEQ ID NO: 600774 - DNA, 15 bp, Homo sapiens
caacctgtctgaaaa

SEQ ID NO: 600775 - DNA, 15 bp, Homo sapiens
aacctgtctgaaaat

SEQ ID NO: 600776 - DNA, 15 bp, Homo sapiens
acctgtctgaaaatg

SEQ ID NO: 600777 - DNA, 15 bp, Homo sapiens
cctgtctgaaaatgg

SEQ ID NO: 600778 - DNA, 15 bp, Homo sapiens
ctgtctgaaaatggc

SEQ ID NO: 600779 - DNA, 15 bp, Homo sapiens
tgtctgaaaatggca

SEQ ID NO: 600780 - DNA, 15 bp, Homo sapiens
gtctgaaaatggcac

SEQ ID NO: 600781 - DNA, 15 bp, Homo sapiens
tctgaaaatggcaca

SEQ ID NO: 600782 - DNA, 15 bp, Homo sapiens
ctgaaaatggcacaa

SEQ ID NO: 600783 - DNA, 15 bp, Homo sapiens
tgaaaatggcacaaa

SEQ ID NO: 600784 - DNA, 15 bp, Homo sapiens
gaaaatggcacaaag

SEQ ID NO: 600785 - DNA, 15 bp, Homo sapiens
aaaatggcacaaagg

SEQ ID NO: 600786 - DNA, 15 bp, Homo sapiens
aaatggcacaaagga

SEQ ID NO: 600787 - DNA, 15 bp, Homo sapiens
aatggcacaaaggaa

SEQ ID NO: 600788 - DNA, 15 bp, Homo sapiens
atggcacaaaggaag

SEQ ID NO: 600789 - DNA, 15 bp, Homo sapiens
tggcacaaaggaaga

SEQ ID NO: 600790 - DNA, 15 bp, Homo sapiens
ggcacaaaggaagaa

SEQ ID NO: 600791 - DNA, 15 bp, Homo sapiens
gcacaaaggaagaaa

SEQ ID NO: 600792 - DNA, 15 bp, Homo sapiens
cacaaaggaagaaag

SEQ ID NO: 600793 - DNA, 15 bp, Homo sapiens
acaaaggaagaaaga

SEQ ID NO: 600794 - DNA, 15 bp, Homo sapiens
caaaggaagaaagat

SEQ ID NO: 600795 - DNA, 15 bp, Homo sapiens
aaaggaagaaagatg

SEQ ID NO: 600796 - DNA, 15 bp, Homo sapiens
aaggaagaaagatgt

SEQ ID NO: 600797 - DNA, 15 bp, Homo sapiens
aggaagaaagatgta

SEQ ID NO: 600798 - DNA, 15 bp, Homo sapiens
ggaagaaagatgtaa

SEQ ID NO: 600799 - DNA, 15 bp, Homo sapiens
gaagaaagatgtaaa

SEQ ID NO: 600800 - DNA, 15 bp, Homo sapiens
aagaaagatgtaaac

SEQ ID NO: 600801 - DNA, 15 bp, Homo sapiens
agaaagatgtaaaca

SEQ ID NO: 600802 - DNA, 15 bp, Homo sapiens
gaaagatgtaaacaa

SEQ ID NO: 600803 - DNA, 15 bp, Homo sapiens
aaagatgtaaacaat

SEQ ID NO: 600804 - DNA, 15 bp, Homo sapiens
aagatgtaaacaatg

SEQ ID NO: 600805 - DNA, 15 bp, Homo sapiens
agatgtaaacaatga

SEQ ID NO: 600806 - DNA, 15 bp, Homo sapiens
gatgtaaacaatgac

SEQ ID NO: 600807 - DNA, 15 bp, Homo sapiens
atgtaaacaatgacg

SEQ ID NO: 600808 - DNA, 15 bp, Homo sapiens
tgtaaacaatgacga

SEQ ID NO: 600809 - DNA, 15 bp, Homo sapiens
gtaaacaatgacgag

SEQ ID NO: 600810 - DNA, 15 bp, Homo sapiens
taaacaatgacgaga

SEQ ID NO: 600811 - DNA, 15 bp, Homo sapiens
aaacaatgacgagaa

SEQ ID NO: 600812 - DNA, 15 bp, Homo sapiens
aacaatgacgagaag

SEQ ID NO: 600813 - DNA, 15 bp, Homo sapiens
acaatgacgagaaga

SEQ ID NO: 600814 - DNA, 15 bp, Homo sapiens
caatgacgagaagac

SEQ ID NO: 600815 - DNA, 15 bp, Homo sapiens
aatgacgagaagact

SEQ ID NO: 600816 - DNA, 15 bp, Homo sapiens
atgacgagaagactg

SEQ ID NO: 600817 - DNA, 15 bp, Homo sapiens
tgacgagaagactgc

SEQ ID NO: 600818 - DNA, 15 bp, Homo sapiens
gacgagaagactgca

SEQ ID NO: 600819 - DNA, 15 bp, Homo sapiens
acgagaagactgcag

SEQ ID NO: 600820 - DNA, 15 bp, Homo sapiens
cgagaagactgcagt

SEQ ID NO: 600821 - DNA, 15 bp, Homo sapiens
gagaagactgcagtg

SEQ ID NO: 600822 - DNA, 15 bp, Homo sapiens
agaagactgcagtgt

SEQ ID NO: 600823 - DNA, 15 bp, Homo sapiens
gaagactgcagtgtc

SEQ ID NO: 600824 - DNA, 15 bp, Homo sapiens
aagactgcagtgtct

SEQ ID NO: 600825 - DNA, 15 bp, Homo sapiens
agactgcagtgtcta

SEQ ID NO: 600826 - DNA, 15 bp, Homo sapiens
gactgcagtgtctac

SEQ ID NO: 600827 - DNA, 15 bp, Homo sapiens
actgcagtgtctaca

SEQ ID NO: 600828 - DNA, 15 bp, Homo sapiens
ctgcagtgtctacaa

SEQ ID NO: 600829 - DNA, 15 bp, Homo sapiens
tgcagtgtctacaaa

SEQ ID NO: 600830 - DNA, 15 bp, Homo sapiens
gcagtgtctacaaag

SEQ ID NO: 600831 - DNA, 15 bp, Homo sapiens
cagtgtctacaaagc

SEQ ID NO: 600832 - DNA, 15 bp, Homo sapiens
agtgtctacaaagct

SEQ ID NO: 600833 - DNA, 15 bp, Homo sapiens
gtgtctacaaagctc

SEQ ID NO: 600834 - DNA, 15 bp, Homo sapiens
tgtctacaaagctcc

SEQ ID NO: 600835 - DNA, 15 bp, Homo sapiens
gtctacaaagctccg

SEQ ID NO: 600836 - DNA, 15 bp, Homo sapiens
tctacaaagctccga

SEQ ID NO: 600837 - DNA, 15 bp, Homo sapiens
ctacaaagctccgag

SEQ ID NO: 600838 - DNA, 15 bp, Homo sapiens
tacaaagctccgagg

SEQ ID NO: 600839 - DNA, 15 bp, Homo sapiens
acaaagctccgaggt

SEQ ID NO: 600840 - DNA, 15 bp, Homo sapiens
caaagctccgaggtg

SEQ ID NO: 600841 - DNA, 15 bp, Homo sapiens
aaagctccgaggtga

SEQ ID NO: 600842 - DNA, 15 bp, Homo sapiens
aagctccgaggtgaa

SEQ ID NO: 600843 - DNA, 15 bp, Homo sapiens
agctccgaggtgaac

SEQ ID NO: 600844 - DNA, 15 bp, Homo sapiens
gctccgaggtgaaca

SEQ ID NO: 600845 - DNA, 15 bp, Homo sapiens
ctccgaggtgaacag

SEQ ID NO: 600846 - DNA, 15 bp, Homo sapiens
tccgaggtgaacaga

SEQ ID NO: 600847 - DNA, 15 bp, Homo sapiens
ccgaggtgaacagat

SEQ ID NO: 600848 - DNA, 15 bp, Homo sapiens
cgaggtgaacagatg

SEQ ID NO: 600849 - DNA, 15 bp, Homo sapiens
gaggtgaacagatgg

SEQ ID NO: 600850 - DNA, 15 bp, Homo sapiens
aggtgaacagatggg

SEQ ID NO: 600851 - DNA, 15 bp, Homo sapiens
ggtgaacagatgggc

SEQ ID NO: 600852 - DNA, 15 bp, Homo sapiens
gtgaacagatgggca

SEQ ID NO: 600853 - DNA, 15 bp, Homo sapiens
tgaacagatgggcac

SEQ ID NO: 600854 - DNA, 15 bp, Homo sapiens
gaacagatgggcacc

SEQ ID NO: 600855 - DNA, 15 bp, Homo sapiens
aacagatgggcaccc

SEQ ID NO: 600856 - DNA, 15 bp, Homo sapiens
acagatgggcacccc

SEQ ID NO: 600857 - DNA, 15 bp, Homo sapiens
cagatgggcacccca

SEQ ID NO: 600858 - DNA, 15 bp, Homo sapiens
agatgggcaccccag

SEQ ID NO: 600859 - DNA, 15 bp, Homo sapiens
gatgggcaccccagg

SEQ ID NO: 600860 - DNA, 15 bp, Homo sapiens
atgggcaccccaggc

SEQ ID NO: 600861 - DNA, 15 bp, Homo sapiens
tgggcaccccaggcc

SEQ ID NO: 600862 - DNA, 15 bp, Homo sapiens
gggcaccccaggccc

SEQ ID NO: 600863 - DNA, 15 bp, Homo sapiens
ggcaccccaggcccg

SEQ ID NO: 600864 - DNA, 15 bp, Homo sapiens
gcaccccaggcccgc

SEQ ID NO: 600865 - DNA, 15 bp, Homo sapiens
caccccaggcccgca

SEQ ID NO: 600866 - DNA, 15 bp, Homo sapiens
accccaggcccgcag

SEQ ID NO: 600867 - DNA, 15 bp, Homo sapiens
ccccaggcccgcagc

SEQ ID NO: 600868 - DNA, 15 bp, Homo sapiens
cccaggcccgcagca

SEQ ID NO: 600869 - DNA, 15 bp, Homo sapiens
ccaggcccgcagcac

SEQ ID NO: 600870 - DNA, 15 bp, Homo sapiens
caggcccgcagcact

SEQ ID NO: 600871 - DNA, 15 bp, Homo sapiens
aggcccgcagcactt

SEQ ID NO: 600872 - DNA, 15 bp, Homo sapiens
ggcccgcagcacttc

SEQ ID NO: 600873 - DNA, 15 bp, Homo sapiens
gcccgcagcacttcc

SEQ ID NO: 600874 - DNA, 15 bp, Homo sapiens
cccgcagcacttcct

SEQ ID NO: 600875 - DNA, 15 bp, Homo sapiens
ccgcagcacttcctt

SEQ ID NO: 600876 - DNA, 15 bp, Homo sapiens
cgcagcacttccttc

SEQ ID NO: 600877 - DNA, 15 bp, Homo sapiens
gcagcacttccttca

SEQ ID NO: 600878 - DNA, 15 bp, Homo sapiens
cagcacttccttcag

SEQ ID NO: 600879 - DNA, 15 bp, Homo sapiens
agcacttccttcagt

SEQ ID NO: 600880 - DNA, 15 bp, Homo sapiens
gcacttccttcagtc

SEQ ID NO: 600881 - DNA, 15 bp, Homo sapiens
cacttccttcagtct

SEQ ID NO: 600882 - DNA, 15 bp, Homo sapiens
acttccttcagtctc

SEQ ID NO: 600883 - DNA, 15 bp, Homo sapiens
cttccttcagtctct

SEQ ID NO: 600884 - DNA, 15 bp, Homo sapiens
ttccttcagtctctg

SEQ ID NO: 600885 - DNA, 15 bp, Homo sapiens
tccttcagtctctgc

SEQ ID NO: 600886 - DNA, 15 bp, Homo sapiens
ccttcagtctctgcc

SEQ ID NO: 600887 - DNA, 15 bp, Homo sapiens
cttcagtctctgcca

SEQ ID NO: 600888 - DNA, 15 bp, Homo sapiens
ttcagtctctgccag

SEQ ID NO: 600889 - DNA, 15 bp, Homo sapiens
tcagtctctgccagc

SEQ ID NO: 600890 - DNA, 15 bp, Homo sapiens
cagtctctgccagct

SEQ ID NO: 600891 - DNA, 15 bp, Homo sapiens
agtctctgccagctg

SEQ ID NO: 600892 - DNA, 15 bp, Homo sapiens
gtctctgccagctgc

SEQ ID NO: 600893 - DNA, 15 bp, Homo sapiens
tctctgccagctgca

SEQ ID NO: 600894 - DNA, 15 bp, Homo sapiens
ctctgccagctgcac

SEQ ID NO: 600895 - DNA, 15 bp, Homo sapiens
tctgccagctgcact

SEQ ID NO: 600896 - DNA, 15 bp, Homo sapiens
ctgccagctgcactc

SEQ ID NO: 600897 - DNA, 15 bp, Homo sapiens
tgccagctgcactct

SEQ ID NO: 600898 - DNA, 15 bp, Homo sapiens
gccagctgcactctg

SEQ ID NO: 600899 - DNA, 15 bp, Homo sapiens
ccagctgcactctgt

SEQ ID NO: 600900 - DNA, 15 bp, Homo sapiens
cagctgcactctgtt

SEQ ID NO: 600901 - DNA, 15 bp, Homo sapiens
agctgcactctgttt

SEQ ID NO: 600902 - DNA, 15 bp, Homo sapiens
gctgcactctgtttt

SEQ ID NO: 600903 - DNA, 15 bp, Homo sapiens
ctgcactctgttttc

SEQ ID NO: 600904 - DNA, 15 bp, Homo sapiens
tgcactctgttttcc

SEQ ID NO: 600905 - DNA, 15 bp, Homo sapiens
gcactctgttttcct

SEQ ID NO: 600906 - DNA, 15 bp, Homo sapiens
cactctgttttcctt

SEQ ID NO: 600907 - DNA, 15 bp, Homo sapiens
actctgttttccttc

SEQ ID NO: 600908 - DNA, 15 bp, Homo sapiens
ctctgttttccttcc

SEQ ID NO: 600909 - DNA, 15 bp, Homo sapiens
tctgttttccttcct

SEQ ID NO: 600910 - DNA, 15 bp, Homo sapiens
ctgttttccttcctc

SEQ ID NO: 600911 - DNA, 15 bp, Homo sapiens
tgttttccttcctcc

SEQ ID NO: 600912 - DNA, 15 bp, Homo sapiens
gttttccttcctcca

SEQ ID NO: 600913 - DNA, 15 bp, Homo sapiens
ttttccttcctccag

SEQ ID NO: 600914 - DNA, 15 bp, Homo sapiens
tttccttcctccagg

SEQ ID NO: 600915 - DNA, 15 bp, Homo sapiens
ttccttcctccagga

SEQ ID NO: 600916 - DNA, 15 bp, Homo sapiens
tccttcctccaggaa

SEQ ID NO: 600917 - DNA, 15 bp, Homo sapiens
ccttcctccaggaat

SEQ ID NO: 600918 - DNA, 15 bp, Homo sapiens
cttcctccaggaatc

SEQ ID NO: 600919 - DNA, 15 bp, Homo sapiens
ttcctccaggaatct

SEQ ID NO: 600920 - DNA, 15 bp, Homo sapiens
tcctccaggaatctt

SEQ ID NO: 600921 - DNA, 15 bp, Homo sapiens
cctccaggaatcttg

SEQ ID NO: 600922 - DNA, 15 bp, Homo sapiens
ctccaggaatcttgt

SEQ ID NO: 600923 - DNA, 15 bp, Homo sapiens
tccaggaatcttgtt

SEQ ID NO: 600924 - DNA, 15 bp, Homo sapiens
ccaggaatcttgttt

SEQ ID NO: 600925 - DNA, 15 bp, Homo sapiens
caggaatcttgtttg

SEQ ID NO: 600926 - DNA, 15 bp, Homo sapiens
aggaatcttgtttgg

SEQ ID NO: 600927 - DNA, 15 bp, Homo sapiens
ggaatcttgtttggt

SEQ ID NO: 600928 - DNA, 15 bp, Homo sapiens
gaatcttgtttggtg

SEQ ID NO: 600929 - DNA, 15 bp, Homo sapiens
aatcttgtttggtgt

SEQ ID NO: 600930 - DNA, 15 bp, Homo sapiens
atcttgtttggtgtc

SEQ ID NO: 600931 - DNA, 15 bp, Homo sapiens
tcttgtttggtgtca

SEQ ID NO: 600932 - DNA, 15 bp, Homo sapiens
cttgtttggtgtcac

SEQ ID NO: 600933 - DNA, 15 bp, Homo sapiens
ttgtttggtgtcact

SEQ ID NO: 600934 - DNA, 15 bp, Homo sapiens
tgtttggtgtcacta

SEQ ID NO: 600935 - DNA, 15 bp, Homo sapiens
gtttggtgtcactaa

SEQ ID NO: 600936 - DNA, 15 bp, Homo sapiens
tttggtgtcactaaa

SEQ ID NO: 600937 - DNA, 15 bp, Homo sapiens
ttggtgtcactaaaa

SEQ ID NO: 600938 - DNA, 15 bp, Homo sapiens
tggtgtcactaaaac

SEQ ID NO: 600939 - DNA, 15 bp, Homo sapiens
ggtgtcactaaaaca

SEQ ID NO: 600940 - DNA, 15 bp, Homo sapiens
gtgtcactaaaacag

SEQ ID NO: 600941 - DNA, 15 bp, Homo sapiens
tgtcactaaaacagc

SEQ ID NO: 600942 - DNA, 15 bp, Homo sapiens
gtcactaaaacagca

SEQ ID NO: 600943 - DNA, 15 bp, Homo sapiens
tcactaaaacagcaa

SEQ ID NO: 600944 - DNA, 15 bp, Homo sapiens
cactaaaacagcaat

SEQ ID NO: 600945 - DNA, 15 bp, Homo sapiens
actaaaacagcaatt

SEQ ID NO: 600946 - DNA, 15 bp, Homo sapiens
ctaaaacagcaatta

SEQ ID NO: 600947 - DNA, 15 bp, Homo sapiens
taaaacagcaattag

SEQ ID NO: 600948 - DNA, 15 bp, Homo sapiens
aaaacagcaattaga

SEQ ID NO: 600949 - DNA, 15 bp, Homo sapiens
aaacagcaattagaa

SEQ ID NO: 600950 - DNA, 15 bp, Homo sapiens
aacagcaattagaat

SEQ ID NO: 600951 - DNA, 15 bp, Homo sapiens
acagcaattagaatc

SEQ ID NO: 600952 - DNA, 15 bp, Homo sapiens
cagcaattagaatca

SEQ ID NO: 600953 - DNA, 15 bp, Homo sapiens
agcaattagaatcac

SEQ ID NO: 600954 - DNA, 15 bp, Homo sapiens
gcaattagaatcact

SEQ ID NO: 600955 - DNA, 15 bp, Homo sapiens
caattagaatcactt

SEQ ID NO: 600956 - DNA, 15 bp, Homo sapiens
aattagaatcacttt

SEQ ID NO: 600957 - DNA, 15 bp, Homo sapiens
attagaatcactttg

SEQ ID NO: 600958 - DNA, 15 bp, Homo sapiens
ttagaatcactttga

SEQ ID NO: 600959 - DNA, 15 bp, Homo sapiens
tagaatcactttgaa

SEQ ID NO: 600960 - DNA, 15 bp, Homo sapiens
agaatcactttgaaa

SEQ ID NO: 600961 - DNA, 15 bp, Homo sapiens
gaatcactttgaaat

SEQ ID NO: 600962 - DNA, 15 bp, Homo sapiens
aatcactttgaaata

SEQ ID NO: 600963 - DNA, 15 bp, Homo sapiens
atcactttgaaatag

SEQ ID NO: 600964 - DNA, 15 bp, Homo sapiens
tcactttgaaatagt

SEQ ID NO: 600965 - DNA, 15 bp, Homo sapiens
cactttgaaatagtg

SEQ ID NO: 600966 - DNA, 15 bp, Homo sapiens
actttgaaatagtga

SEQ ID NO: 600967 - DNA, 15 bp, Homo sapiens
ctttgaaatagtgat

SEQ ID NO: 600968 - DNA, 15 bp, Homo sapiens
tttgaaatagtgata

SEQ ID NO: 600969 - DNA, 15 bp, Homo sapiens
ttgaaatagtgatag

SEQ ID NO: 600970 - DNA, 15 bp, Homo sapiens
tgaaatagtgatagt

SEQ ID NO: 600971 - DNA, 15 bp, Homo sapiens
gaaatagtgatagta

SEQ ID NO: 600972 - DNA, 15 bp, Homo sapiens
aaatagtgatagtat

SEQ ID NO: 600973 - DNA, 15 bp, Homo sapiens
aatagtgatagtatt

SEQ ID NO: 600974 - DNA, 15 bp, Homo sapiens
atagtgatagtattt

SEQ ID NO: 600975 - DNA, 15 bp, Homo sapiens
tagtgatagtattta

SEQ ID NO: 600976 - DNA, 15 bp, Homo sapiens
agtgatagtatttaa

SEQ ID NO: 600977 - DNA, 15 bp, Homo sapiens
gtgatagtatttaat

SEQ ID NO: 600978 - DNA, 15 bp, Homo sapiens
tgatagtatttaata

SEQ ID NO: 600979 - DNA, 15 bp, Homo sapiens
gatagtatttaatat

SEQ ID NO: 600980 - DNA, 15 bp, Homo sapiens
atagtatttaatata

SEQ ID NO: 600981 - DNA, 15 bp, Homo sapiens
tagtatttaatataa

SEQ ID NO: 600982 - DNA, 15 bp, Homo sapiens
agtatttaatataac

SEQ ID NO: 600983 - DNA, 15 bp, Homo sapiens
gtatttaatataact

SEQ ID NO: 600984 - DNA, 15 bp, Homo sapiens
tatttaatataacta

SEQ ID NO: 600985 - DNA, 15 bp, Homo sapiens
atttaatataactat

SEQ ID NO: 600986 - DNA, 15 bp, Homo sapiens
tttaatataactatg

SEQ ID NO: 600987 - DNA, 15 bp, Homo sapiens
ttaatataactatga

SEQ ID NO: 600988 - DNA, 15 bp, Homo sapiens
taatataactatgaa

SEQ ID NO: 600989 - DNA, 15 bp, Homo sapiens
aatataactatgaaa

SEQ ID NO: 600990 - DNA, 15 bp, Homo sapiens
atataactatgaaac

SEQ ID NO: 600991 - DNA, 15 bp, Homo sapiens
tataactatgaaact

SEQ ID NO: 600992 - DNA, 15 bp, Homo sapiens
ataactatgaaacta

SEQ ID NO: 600993 - DNA, 15 bp, Homo sapiens
taactatgaaactat

SEQ ID NO: 600994 - DNA, 15 bp, Homo sapiens
aactatgaaactatc

SEQ ID NO: 600995 - DNA, 15 bp, Homo sapiens
actatgaaactatct

SEQ ID NO: 600996 - DNA, 15 bp, Homo sapiens
ctatgaaactatctg

SEQ ID NO: 600997 - DNA, 15 bp, Homo sapiens
tatgaaactatctgt

SEQ ID NO: 600998 - DNA, 15 bp, Homo sapiens
atgaaactatctgtg

SEQ ID NO: 600999 - DNA, 15 bp, Homo sapiens
tgaaactatctgtga

SEQ ID NO: 601000 - DNA, 15 bp, Homo sapiens
gaaactatctgtgat

SEQ ID NO: 601001 - DNA, 15 bp, Homo sapiens
aaactatctgtgatt

SEQ ID NO: 601002 - DNA, 15 bp, Homo sapiens
aactatctgtgattg

SEQ ID NO: 601003 - DNA, 15 bp, Homo sapiens
actatctgtgattga

SEQ ID NO: 601004 - DNA, 15 bp, Homo sapiens
ctatctgtgattgac

SEQ ID NO: 601005 - DNA, 15 bp, Homo sapiens
tatctgtgattgaca

SEQ ID NO: 601006 - DNA, 15 bp, Homo sapiens
atctgtgattgacaa

SEQ ID NO: 601007 - DNA, 15 bp, Homo sapiens
tctgtgattgacaag

SEQ ID NO: 601008 - DNA, 15 bp, Homo sapiens
ctgtgattgacaagt

SEQ ID NO: 601009 - DNA, 15 bp, Homo sapiens
tgtgattgacaagtg

SEQ ID NO: 601010 - DNA, 15 bp, Homo sapiens
gtgattgacaagtgc

SEQ ID NO: 601011 - DNA, 15 bp, Homo sapiens
tgattgacaagtgca

SEQ ID NO: 601012 - DNA, 15 bp, Homo sapiens
gattgacaagtgcag

SEQ ID NO: 601013 - DNA, 15 bp, Homo sapiens
attgacaagtgcagc

SEQ ID NO: 601014 - DNA, 15 bp, Homo sapiens
ttgacaagtgcagca

SEQ ID NO: 601015 - DNA, 15 bp, Homo sapiens
tgacaagtgcagcaa

SEQ ID NO: 601016 - DNA, 15 bp, Homo sapiens
gacaagtgcagcaag

SEQ ID NO: 601017 - DNA, 15 bp, Homo sapiens
acaagtgcagcaagg

SEQ ID NO: 601018 - DNA, 15 bp, Homo sapiens
caagtgcagcaagga

SEQ ID NO: 601019 - DNA, 15 bp, Homo sapiens
aagtgcagcaaggag

SEQ ID NO: 601020 - DNA, 15 bp, Homo sapiens
agtgcagcaaggagt

SEQ ID NO: 601021 - DNA, 15 bp, Homo sapiens
gtgcagcaaggagtc

SEQ ID NO: 601022 - DNA, 15 bp, Homo sapiens
tgcagcaaggagtct

SEQ ID NO: 601023 - DNA, 15 bp, Homo sapiens
gcagcaaggagtctt

SEQ ID NO: 601024 - DNA, 15 bp, Homo sapiens
cagcaaggagtcttg

SEQ ID NO: 601025 - DNA, 15 bp, Homo sapiens
agcaaggagtcttgg

SEQ ID NO: 601026 - DNA, 15 bp, Homo sapiens
gcaaggagtcttgga

SEQ ID NO: 601027 - DNA, 15 bp, Homo sapiens
caaggagtcttggaa

SEQ ID NO: 601028 - DNA, 15 bp, Homo sapiens
aaggagtcttggaat

SEQ ID NO: 601029 - DNA, 15 bp, Homo sapiens
aggagtcttggaatg

SEQ ID NO: 601030 - DNA, 15 bp, Homo sapiens
ggagtcttggaatga

SEQ ID NO: 601031 - DNA, 15 bp, Homo sapiens
gagtcttggaatgag

SEQ ID NO: 601032 - DNA, 15 bp, Homo sapiens
agtcttggaatgaga

SEQ ID NO: 601033 - DNA, 15 bp, Homo sapiens
gtcttggaatgagag

SEQ ID NO: 601034 - DNA, 15 bp, Homo sapiens
tcttggaatgagagc

SEQ ID NO: 601035 - DNA, 15 bp, Homo sapiens
cttggaatgagagcc

SEQ ID NO: 601036 - DNA, 15 bp, Homo sapiens
ttggaatgagagcct

SEQ ID NO: 601037 - DNA, 15 bp, Homo sapiens
tggaatgagagcctt

SEQ ID NO: 601038 - DNA, 15 bp, Homo sapiens
ggaatgagagccttt

SEQ ID NO: 601039 - DNA, 15 bp, Homo sapiens
gaatgagagccttta

SEQ ID NO: 601040 - DNA, 15 bp, Homo sapiens
aatgagagcctttat

SEQ ID NO: 601041 - DNA, 15 bp, Homo sapiens
atgagagcctttatt

SEQ ID NO: 601042 - DNA, 15 bp, Homo sapiens
tgagagcctttattt

SEQ ID NO: 601043 - DNA, 15 bp, Homo sapiens
gagagcctttatttt

SEQ ID NO: 601044 - DNA, 15 bp, Homo sapiens
agagcctttattttt

SEQ ID NO: 601045 - DNA, 15 bp, Homo sapiens
gagcctttatttttt

SEQ ID NO: 601046 - DNA, 15 bp, Homo sapiens
agcctttattttttc

SEQ ID NO: 601047 - DNA, 15 bp, Homo sapiens
gcctttattttttca

SEQ ID NO: 601048 - DNA, 15 bp, Homo sapiens
cctttattttttcaa

SEQ ID NO: 601049 - DNA, 15 bp, Homo sapiens
ctttattttttcaat

SEQ ID NO: 601050 - DNA, 15 bp, Homo sapiens
tttattttttcaatt

SEQ ID NO: 601051 - DNA, 15 bp, Homo sapiens
ttattttttcaatta

SEQ ID NO: 601052 - DNA, 15 bp, Homo sapiens
tattttttcaattaa

SEQ ID NO: 601053 - DNA, 15 bp, Homo sapiens
attttttcaattaaa

SEQ ID NO: 601054 - DNA, 15 bp, Homo sapiens
ttttttcaattaaat

SEQ ID NO: 601055 - DNA, 15 bp, Homo sapiens
tttttcaattaaata

SEQ ID NO: 601056 - DNA, 15 bp, Homo sapiens
ttttcaattaaataa

SEQ ID NO: 601057 - DNA, 15 bp, Homo sapiens
tttcaattaaataaa

SEQ ID NO: 601058 - DNA, 15 bp, Homo sapiens
ttcaattaaataaaa

SEQ ID NO: 601059 - DNA, 15 bp, Homo sapiens
tcaattaaataaaag

SEQ ID NO: 601060 - DNA, 15 bp, Homo sapiens
caattaaataaaaga

SEQ ID NO: 601061 - DNA, 15 bp, Homo sapiens
aattaaataaaagag

SEQ ID NO: 601062 - DNA, 15 bp, Homo sapiens
attaaataaaagagt

SEQ ID NO: 601063 - DNA, 15 bp, Homo sapiens
ttaaataaaagagtt

SEQ ID NO: 601064 - DNA, 15 bp, Homo sapiens
taaataaaagagttt

SEQ ID NO: 601065 - DNA, 15 bp, Homo sapiens
aaataaaagagtttt

SEQ ID NO: 601066 - DNA, 15 bp, Homo sapiens
aataaaagagttttt

SEQ ID NO: 601067 - DNA, 15 bp, Homo sapiens
ataaaagagtttttt

SEQ ID NO: 601068 - DNA, 15 bp, Homo sapiens
taaaagagttttttg

SEQ ID NO: 601069 - DNA, 15 bp, Homo sapiens
aaaagagttttttgt

SEQ ID NO: 601070 - DNA, 15 bp, Homo sapiens
aaagagttttttgtt

SEQ ID NO: 601071 - DNA, 15 bp, Homo sapiens
aagagttttttgttt

SEQ ID NO: 601072 - DNA, 15 bp, Homo sapiens
agagttttttgtttc

SEQ ID NO: 601073 - DNA, 15 bp, Homo sapiens
gagttttttgtttct

SEQ ID NO: 601074 - DNA, 15 bp, Homo sapiens
agttttttgtttcta

SEQ ID NO: 601075 - DNA, 15 bp, Homo sapiens
gttttttgtttctaa

SEQ ID NO: 601076 - DNA, 15 bp, Homo sapiens
ttttttgtttctaaa

SEQ ID NO: 601077 - DNA, 15 bp, Homo sapiens
tttttgtttctaaaa

SEQ ID NO: 601078 - DNA, 15 bp, Homo sapiens
ttttgtttctaaaag

SEQ ID NO: 601079 - DNA, 15 bp, Homo sapiens
tttgtttctaaaagt

SEQ ID NO: 601080 - DNA, 15 bp, Homo sapiens
ttgtttctaaaagta

SEQ ID NO: 601081 - DNA, 15 bp, Homo sapiens
tgtttctaaaagtaa

SEQ ID NO: 601082 - DNA, 15 bp, Homo sapiens
gtttctaaaagtaat

SEQ ID NO: 601083 - DNA, 15 bp, Homo sapiens
tttctaaaagtaatc

SEQ ID NO: 601084 - DNA, 15 bp, Homo sapiens
ttctaaaagtaatct

SEQ ID NO: 601085 - DNA, 15 bp, Homo sapiens
tctaaaagtaatctt

SEQ ID NO: 601086 - DNA, 15 bp, Homo sapiens
ctaaaagtaatcttg

SEQ ID NO: 601087 - DNA, 15 bp, Homo sapiens
taaaagtaatcttgc

SEQ ID NO: 601088 - DNA, 15 bp, Homo sapiens
aaaagtaatcttgca

SEQ ID NO: 601089 - DNA, 15 bp, Homo sapiens
aaagtaatcttgcag

SEQ ID NO: 601090 - DNA, 15 bp, Homo sapiens
aagtaatcttgcaga

SEQ ID NO: 601091 - DNA, 15 bp, Homo sapiens
agtaatcttgcagaa

SEQ ID NO: 601092 - DNA, 15 bp, Homo sapiens
gtaatcttgcagaaa

SEQ ID NO: 601093 - DNA, 15 bp, Homo sapiens
taatcttgcagaaaa

SEQ ID NO: 601094 - DNA, 15 bp, Homo sapiens
aatcttgcagaaaag

SEQ ID NO: 601095 - DNA, 15 bp, Homo sapiens
atcttgcagaaaaga

SEQ ID NO: 601096 - DNA, 15 bp, Homo sapiens
tcttgcagaaaagat

SEQ ID NO: 601097 - DNA, 15 bp, Homo sapiens
cttgcagaaaagatc

SEQ ID NO: 601098 - DNA, 15 bp, Homo sapiens
ttgcagaaaagatcc

SEQ ID NO: 601099 - DNA, 15 bp, Homo sapiens
tgcagaaaagatcct

SEQ ID NO: 601100 - DNA, 15 bp, Homo sapiens
gcagaaaagatcctg

SEQ ID NO: 601101 - DNA, 15 bp, Homo sapiens
cagaaaagatcctgc

SEQ ID NO: 601102 - DNA, 15 bp, Homo sapiens
agaaaagatcctgcg

SEQ ID NO: 601103 - DNA, 15 bp, Homo sapiens
gaaaagatcctgcga

SEQ ID NO: 601104 - DNA, 15 bp, Homo sapiens
aaaagatcctgcgat

SEQ ID NO: 601105 - DNA, 15 bp, Homo sapiens
aaagatcctgcgatc

SEQ ID NO: 601106 - DNA, 15 bp, Homo sapiens
aagatcctgcgatca

SEQ ID NO: 601107 - DNA, 15 bp, Homo sapiens
agatcctgcgatcag

SEQ ID NO: 601108 - DNA, 15 bp, Homo sapiens
gatcctgcgatcaga

SEQ ID NO: 601109 - DNA, 15 bp, Homo sapiens
atcctgcgatcagaa

SEQ ID NO: 601110 - DNA, 15 bp, Homo sapiens
tcctgcgatcagaaa

SEQ ID NO: 601111 - DNA, 15 bp, Homo sapiens
cctgcgatcagaaag

SEQ ID NO: 601112 - DNA, 15 bp, Homo sapiens
ctgcgatcagaaaga

SEQ ID NO: 601113 - DNA, 15 bp, Homo sapiens
tgcgatcagaaagaa

SEQ ID NO: 601114 - DNA, 15 bp, Homo sapiens
gcgatcagaaagaag

SEQ ID NO: 601115 - DNA, 15 bp, Homo sapiens
cgatcagaaagaagg

SEQ ID NO: 601116 - DNA, 15 bp, Homo sapiens
gatcagaaagaagga

SEQ ID NO: 601117 - DNA, 15 bp, Homo sapiens
atcagaaagaaggag

SEQ ID NO: 601118 - DNA, 15 bp, Homo sapiens
tcagaaagaaggagg

SEQ ID NO: 601119 - DNA, 15 bp, Homo sapiens
cagaaagaaggaggg

SEQ ID NO: 601120 - DNA, 15 bp, Homo sapiens
agaaagaaggagggg

SEQ ID NO: 601121 - DNA, 15 bp, Homo sapiens
gaaagaaggaggggg

SEQ ID NO: 601122 - DNA, 15 bp, Homo sapiens
aaagaaggagggggg

SEQ ID NO: 601123 - DNA, 15 bp, Homo sapiens
aagaaggaggggggg

SEQ ID NO: 601124 - DNA, 15 bp, Homo sapiens
agaaggaggggggga

SEQ ID NO: 601125 - DNA, 15 bp, Homo sapiens
gaaggagggggggag

SEQ ID NO: 601126 - DNA, 15 bp, Homo sapiens
aaggagggggggagt

SEQ ID NO: 601127 - DNA, 15 bp, Homo sapiens
aggagggggggagtt

SEQ ID NO: 601128 - DNA, 15 bp, Homo sapiens
ggagggggggagttt

SEQ ID NO: 601129 - DNA, 15 bp, Homo sapiens
gagggggggagtttt

SEQ ID NO: 601130 - DNA, 15 bp, Homo sapiens
agggggggagttttc

SEQ ID NO: 601131 - DNA, 15 bp, Homo sapiens
gggggggagttttca

SEQ ID NO: 601132 - DNA, 15 bp, Homo sapiens
ggggggagttttcaa

SEQ ID NO: 601133 - DNA, 15 bp, Homo sapiens
gggggagttttcaaa

SEQ ID NO: 601134 - DNA, 15 bp, Homo sapiens
ggggagttttcaaac

SEQ ID NO: 601135 - DNA, 15 bp, Homo sapiens
gggagttttcaaaca

SEQ ID NO: 601136 - DNA, 15 bp, Homo sapiens
ggagttttcaaacat

SEQ ID NO: 601137 - DNA, 15 bp, Homo sapiens
gagttttcaaacata

SEQ ID NO: 601138 - DNA, 15 bp, Homo sapiens
agttttcaaacatat

SEQ ID NO: 601139 - DNA, 15 bp, Homo sapiens
gttttcaaacatata

SEQ ID NO: 601140 - DNA, 15 bp, Homo sapiens
ttttcaaacatatag

SEQ ID NO: 601141 - DNA, 15 bp, Homo sapiens
tttcaaacatatagg

SEQ ID NO: 601142 - DNA, 15 bp, Homo sapiens
ttcaaacatatagga

SEQ ID NO: 601143 - DNA, 15 bp, Homo sapiens
tcaaacatataggag

SEQ ID NO: 601144 - DNA, 15 bp, Homo sapiens
caaacatataggaga

SEQ ID NO: 601145 - DNA, 15 bp, Homo sapiens
aaacatataggagat

SEQ ID NO: 601146 - DNA, 15 bp, Homo sapiens
aacatataggagatc

SEQ ID NO: 601147 - DNA, 15 bp, Homo sapiens
acatataggagatca

SEQ ID NO: 601148 - DNA, 15 bp, Homo sapiens
catataggagatcag

SEQ ID NO: 601149 - DNA, 15 bp, Homo sapiens
atataggagatcaga

SEQ ID NO: 601150 - DNA, 15 bp, Homo sapiens
tataggagatcagac

SEQ ID NO: 601151 - DNA, 15 bp, Homo sapiens
ataggagatcagact

SEQ ID NO: 601152 - DNA, 15 bp, Homo sapiens
taggagatcagactg

SEQ ID NO: 601153 - DNA, 15 bp, Homo sapiens
aggagatcagactgt

SEQ ID NO: 601154 - DNA, 15 bp, Homo sapiens
ggagatcagactgtg

SEQ ID NO: 601155 - DNA, 15 bp, Homo sapiens
gagatcagactgtgc

SEQ ID NO: 601156 - DNA, 15 bp, Homo sapiens
agatcagactgtgcc

SEQ ID NO: 601157 - DNA, 15 bp, Homo sapiens
gatcagactgtgcct

SEQ ID NO: 601158 - DNA, 15 bp, Homo sapiens
atcagactgtgccta

SEQ ID NO: 601159 - DNA, 15 bp, Homo sapiens
tcagactgtgcctat

SEQ ID NO: 601160 - DNA, 15 bp, Homo sapiens
cagactgtgcctatg

SEQ ID NO: 601161 - DNA, 15 bp, Homo sapiens
agactgtgcctatgt

SEQ ID NO: 601162 - DNA, 15 bp, Homo sapiens
gactgtgcctatgtg

SEQ ID NO: 601163 - DNA, 15 bp, Homo sapiens
actgtgcctatgtgt

SEQ ID NO: 601164 - DNA, 15 bp, Homo sapiens
ctgtgcctatgtgtg

SEQ ID NO: 601165 - DNA, 15 bp, Homo sapiens
tgtgcctatgtgtgt

SEQ ID NO: 601166 - DNA, 15 bp, Homo sapiens
gtgcctatgtgtgta

SEQ ID NO: 601167 - DNA, 15 bp, Homo sapiens
tgcctatgtgtgtat

SEQ ID NO: 601168 - DNA, 15 bp, Homo sapiens
gcctatgtgtgtata

SEQ ID NO: 601169 - DNA, 15 bp, Homo sapiens
cctatgtgtgtatat

SEQ ID NO: 601170 - DNA, 15 bp, Homo sapiens
ctatgtgtgtatata

SEQ ID NO: 601171 - DNA, 15 bp, Homo sapiens
tatgtgtgtatatac

SEQ ID NO: 601172 - DNA, 15 bp, Homo sapiens
atgtgtgtatatacc

SEQ ID NO: 601173 - DNA, 15 bp, Homo sapiens
tgtgtgtatatacct

SEQ ID NO: 601174 - DNA, 15 bp, Homo sapiens
gtgtgtatataccta

SEQ ID NO: 601175 - DNA, 15 bp, Homo sapiens
tgtgtatatacctac

SEQ ID NO: 601176 - DNA, 15 bp, Homo sapiens
gtgtatatacctaca

SEQ ID NO: 601177 - DNA, 15 bp, Homo sapiens
tgtatatacctacaa

SEQ ID NO: 601178 - DNA, 15 bp, Homo sapiens
gtatatacctacaaa

SEQ ID NO: 601179 - DNA, 15 bp, Homo sapiens
tatatacctacaaac

SEQ ID NO: 601180 - DNA, 15 bp, Homo sapiens
atatacctacaaaca

SEQ ID NO: 601181 - DNA, 15 bp, Homo sapiens
tatacctacaaacat

SEQ ID NO: 601182 - DNA, 15 bp, Homo sapiens
atacctacaaacata

SEQ ID NO: 601183 - DNA, 15 bp, Homo sapiens
tacctacaaacatat

SEQ ID NO: 601184 - DNA, 15 bp, Homo sapiens
acctacaaacatata

SEQ ID NO: 601185 - DNA, 15 bp, Homo sapiens
cctacaaacatatat

SEQ ID NO: 601186 - DNA, 15 bp, Homo sapiens
ctacaaacatatata

SEQ ID NO: 601187 - DNA, 15 bp, Homo sapiens
tacaaacatatatat

SEQ ID NO: 601188 - DNA, 15 bp, Homo sapiens
acaaacatatatata

SEQ ID NO: 601189 - DNA, 15 bp, Homo sapiens
caaacatatatatat

SEQ ID NO: 601190 - DNA, 15 bp, Homo sapiens
aaacatatatatatt

SEQ ID NO: 601191 - DNA, 15 bp, Homo sapiens
aacatatatatattt

SEQ ID NO: 601192 - DNA, 15 bp, Homo sapiens
acatatatatattta

SEQ ID NO: 601193 - DNA, 15 bp, Homo sapiens
catatatatatttaa

SEQ ID NO: 601194 - DNA, 15 bp, Homo sapiens
atatatatatttaaa

SEQ ID NO: 601195 - DNA, 15 bp, Homo sapiens
tatatatatttaaaa

SEQ ID NO: 601196 - DNA, 15 bp, Homo sapiens
atatatatttaaaaa

SEQ ID NO: 601197 - DNA, 15 bp, Homo sapiens
tatatatttaaaaaa

SEQ ID NO: 601198 - DNA, 15 bp, Homo sapiens
atatatttaaaaaat

SEQ ID NO: 601199 - DNA, 15 bp, Homo sapiens
tatatttaaaaaatt

SEQ ID NO: 601200 - DNA, 15 bp, Homo sapiens
atatttaaaaaattg

SEQ ID NO: 601201 - DNA, 15 bp, Homo sapiens
tatttaaaaaattgt

SEQ ID NO: 601202 - DNA, 15 bp, Homo sapiens
atttaaaaaattgtt

SEQ ID NO: 601203 - DNA, 15 bp, Homo sapiens
tttaaaaaattgttt

SEQ ID NO: 601204 - DNA, 15 bp, Homo sapiens
ttaaaaaattgtttt

SEQ ID NO: 601205 - DNA, 15 bp, Homo sapiens
taaaaaattgtttta

SEQ ID NO: 601206 - DNA, 15 bp, Homo sapiens
aaaaaattgttttac

SEQ ID NO: 601207 - DNA, 15 bp, Homo sapiens
aaaaattgttttact

SEQ ID NO: 601208 - DNA, 15 bp, Homo sapiens
aaaattgttttactg

SEQ ID NO: 601209 - DNA, 15 bp, Homo sapiens
aaattgttttactgt

SEQ ID NO: 601210 - DNA, 15 bp, Homo sapiens
aattgttttactgtc

SEQ ID NO: 601211 - DNA, 15 bp, Homo sapiens
attgttttactgtca

SEQ ID NO: 601212 - DNA, 15 bp, Homo sapiens
ttgttttactgtcaa

SEQ ID NO: 601213 - DNA, 15 bp, Homo sapiens
tgttttactgtcaat

SEQ ID NO: 601214 - DNA, 15 bp, Homo sapiens
gttttactgtcaatt

SEQ ID NO: 601215 - DNA, 15 bp, Homo sapiens
ttttactgtcaatta

SEQ ID NO: 601216 - DNA, 15 bp, Homo sapiens
tttactgtcaattac

SEQ ID NO: 601217 - DNA, 15 bp, Homo sapiens
ttactgtcaattaca

SEQ ID NO: 601218 - DNA, 15 bp, Homo sapiens
tactgtcaattacag

SEQ ID NO: 601219 - DNA, 15 bp, Homo sapiens
actgtcaattacagc

SEQ ID NO: 601220 - DNA, 15 bp, Homo sapiens
ctgtcaattacagct

SEQ ID NO: 601221 - DNA, 15 bp, Homo sapiens
tgtcaattacagctt

SEQ ID NO: 601222 - DNA, 15 bp, Homo sapiens
gtcaattacagcttc

SEQ ID NO: 601223 - DNA, 15 bp, Homo sapiens
tcaattacagcttcc

SEQ ID NO: 601224 - DNA, 15 bp, Homo sapiens
caattacagcttccc

SEQ ID NO: 601225 - DNA, 15 bp, Homo sapiens
aattacagcttccca

SEQ ID NO: 601226 - DNA, 15 bp, Homo sapiens
attacagcttcccac

SEQ ID NO: 601227 - DNA, 15 bp, Homo sapiens
ttacagcttcccaca

SEQ ID NO: 601228 - DNA, 15 bp, Homo sapiens
tacagcttcccacac

SEQ ID NO: 601229 - DNA, 15 bp, Homo sapiens
acagcttcccacact

SEQ ID NO: 601230 - DNA, 15 bp, Homo sapiens
cagcttcccacactc

SEQ ID NO: 601231 - DNA, 15 bp, Homo sapiens
agcttcccacactcc

SEQ ID NO: 601232 - DNA, 15 bp, Homo sapiens
gcttcccacactcct

SEQ ID NO: 601233 - DNA, 15 bp, Homo sapiens
cttcccacactccta

SEQ ID NO: 601234 - DNA, 15 bp, Homo sapiens
ttcccacactcctag

SEQ ID NO: 601235 - DNA, 15 bp, Homo sapiens
tcccacactcctaga

SEQ ID NO: 601236 - DNA, 15 bp, Homo sapiens
cccacactcctagac

SEQ ID NO: 601237 - DNA, 15 bp, Homo sapiens
ccacactcctagaca

SEQ ID NO: 601238 - DNA, 15 bp, Homo sapiens
cacactcctagacag

SEQ ID NO: 601239 - DNA, 15 bp, Homo sapiens
acactcctagacagc

SEQ ID NO: 601240 - DNA, 15 bp, Homo sapiens
cactcctagacagcc

SEQ ID NO: 601241 - DNA, 15 bp, Homo sapiens
actcctagacagccg

SEQ ID NO: 601242 - DNA, 15 bp, Homo sapiens
ctcctagacagccgt

SEQ ID NO: 601243 - DNA, 15 bp, Homo sapiens
tcctagacagccgtt

SEQ ID NO: 601244 - DNA, 15 bp, Homo sapiens
cctagacagccgttc

SEQ ID NO: 601245 - DNA, 15 bp, Homo sapiens
ctagacagccgttct

SEQ ID NO: 601246 - DNA, 15 bp, Homo sapiens
tagacagccgttctc

SEQ ID NO: 601247 - DNA, 15 bp, Homo sapiens
agacagccgttctca

SEQ ID NO: 601248 - DNA, 15 bp, Homo sapiens
gacagccgttctcaa

SEQ ID NO: 601249 - DNA, 15 bp, Homo sapiens
acagccgttctcaag

SEQ ID NO: 601250 - DNA, 15 bp, Homo sapiens
cagccgttctcaagg

SEQ ID NO: 601251 - DNA, 15 bp, Homo sapiens
agccgttctcaaggt

SEQ ID NO: 601252 - DNA, 15 bp, Homo sapiens
gccgttctcaaggta

SEQ ID NO: 601253 - DNA, 15 bp, Homo sapiens
ccgttctcaaggtat

SEQ ID NO: 601254 - DNA, 15 bp, Homo sapiens
cgttctcaaggtatc

SEQ ID NO: 601255 - DNA, 15 bp, Homo sapiens
gttctcaaggtatca

SEQ ID NO: 601256 - DNA, 15 bp, Homo sapiens
ttctcaaggtatcaa

SEQ ID NO: 601257 - DNA, 15 bp, Homo sapiens
tctcaaggtatcaat

SEQ ID NO: 601258 - DNA, 15 bp, Homo sapiens
ctcaaggtatcaatc

SEQ ID NO: 601259 - DNA, 15 bp, Homo sapiens
tcaaggtatcaatct

SEQ ID NO: 601260 - DNA, 15 bp, Homo sapiens
caaggtatcaatctg

SEQ ID NO: 601261 - DNA, 15 bp, Homo sapiens
aaggtatcaatctga

SEQ ID NO: 601262 - DNA, 15 bp, Homo sapiens
aggtatcaatctgag

SEQ ID NO: 601263 - DNA, 15 bp, Homo sapiens
ggtatcaatctgaga

SEQ ID NO: 601264 - DNA, 15 bp, Homo sapiens
gtatcaatctgagat

SEQ ID NO: 601265 - DNA, 15 bp, Homo sapiens
tatcaatctgagatc

SEQ ID NO: 601266 - DNA, 15 bp, Homo sapiens
atcaatctgagatct

SEQ ID NO: 601267 - DNA, 15 bp, Homo sapiens
tcaatctgagatctt

SEQ ID NO: 601268 - DNA, 15 bp, Homo sapiens
caatctgagatcttg

SEQ ID NO: 601269 - DNA, 15 bp, Homo sapiens
aatctgagatcttgg

SEQ ID NO: 601270 - DNA, 15 bp, Homo sapiens
atctgagatcttggg

SEQ ID NO: 601271 - DNA, 15 bp, Homo sapiens
tctgagatcttgggg

SEQ ID NO: 601272 - DNA, 15 bp, Homo sapiens
ctgagatcttgggga

SEQ ID NO: 601273 - DNA, 15 bp, Homo sapiens
tgagatcttggggag

SEQ ID NO: 601274 - DNA, 15 bp, Homo sapiens
gagatcttggggagg

SEQ ID NO: 601275 - DNA, 15 bp, Homo sapiens
agatcttggggagga

SEQ ID NO: 601276 - DNA, 15 bp, Homo sapiens
gatcttggggaggaa

SEQ ID NO: 601277 - DNA, 15 bp, Homo sapiens
atcttggggaggaat

SEQ ID NO: 601278 - DNA, 15 bp, Homo sapiens
tcttggggaggaata

SEQ ID NO: 601279 - DNA, 15 bp, Homo sapiens
cttggggaggaatat

SEQ ID NO: 601280 - DNA, 15 bp, Homo sapiens
ttggggaggaatatt

SEQ ID NO: 601281 - DNA, 15 bp, Homo sapiens
tggggaggaatatta

SEQ ID NO: 601282 - DNA, 15 bp, Homo sapiens
ggggaggaatattat

SEQ ID NO: 601283 - DNA, 15 bp, Homo sapiens
gggaggaatattatc

SEQ ID NO: 601284 - DNA, 15 bp, Homo sapiens
ggaggaatattatct

SEQ ID NO: 601285 - DNA, 15 bp, Homo sapiens
gaggaatattatctg

SEQ ID NO: 601286 - DNA, 15 bp, Homo sapiens
aggaatattatctga

SEQ ID NO: 601287 - DNA, 15 bp, Homo sapiens
ggaatattatctgat

SEQ ID NO: 601288 - DNA, 15 bp, Homo sapiens
gaatattatctgata

SEQ ID NO: 601289 - DNA, 15 bp, Homo sapiens
aatattatctgatat

SEQ ID NO: 601290 - DNA, 15 bp, Homo sapiens
atattatctgatatg

SEQ ID NO: 601291 - DNA, 15 bp, Homo sapiens
tattatctgatatgt

SEQ ID NO: 601292 - DNA, 15 bp, Homo sapiens
attatctgatatgtc

SEQ ID NO: 601293 - DNA, 15 bp, Homo sapiens
ttatctgatatgtca

SEQ ID NO: 601294 - DNA, 15 bp, Homo sapiens
tatctgatatgtcac

SEQ ID NO: 601295 - DNA, 15 bp, Homo sapiens
atctgatatgtcacc

SEQ ID NO: 601296 - DNA, 15 bp, Homo sapiens
tctgatatgtcacca

SEQ ID NO: 601297 - DNA, 15 bp, Homo sapiens
ctgatatgtcaccaa

SEQ ID NO: 601298 - DNA, 15 bp, Homo sapiens
tgatatgtcaccaag

SEQ ID NO: 601299 - DNA, 15 bp, Homo sapiens
gatatgtcaccaaga

SEQ ID NO: 601300 - DNA, 15 bp, Homo sapiens
atatgtcaccaagaa

SEQ ID NO: 601301 - DNA, 15 bp, Homo sapiens
tatgtcaccaagaat

SEQ ID NO: 601302 - DNA, 15 bp, Homo sapiens
atgtcaccaagaatt

SEQ ID NO: 601303 - DNA, 15 bp, Homo sapiens
tgtcaccaagaattc

SEQ ID NO: 601304 - DNA, 15 bp, Homo sapiens
gtcaccaagaattca

SEQ ID NO: 601305 - DNA, 15 bp, Homo sapiens
tcaccaagaattcaa

SEQ ID NO: 601306 - DNA, 15 bp, Homo sapiens
caccaagaattcaag

SEQ ID NO: 601307 - DNA, 15 bp, Homo sapiens
accaagaattcaaga

SEQ ID NO: 601308 - DNA, 15 bp, Homo sapiens
ccaagaattcaagag

SEQ ID NO: 601309 - DNA, 15 bp, Homo sapiens
caagaattcaagagg

SEQ ID NO: 601310 - DNA, 15 bp, Homo sapiens
aagaattcaagaggt

SEQ ID NO: 601311 - DNA, 15 bp, Homo sapiens
agaattcaagaggtg

SEQ ID NO: 601312 - DNA, 15 bp, Homo sapiens
gaattcaagaggtga

SEQ ID NO: 601313 - DNA, 15 bp, Homo sapiens
aattcaagaggtgag

SEQ ID NO: 601314 - DNA, 15 bp, Homo sapiens
attcaagaggtgagt

SEQ ID NO: 601315 - DNA, 15 bp, Homo sapiens
ttcaagaggtgagta

SEQ ID NO: 601316 - DNA, 15 bp, Homo sapiens
tcaagaggtgagtag

SEQ ID NO: 601317 - DNA, 15 bp, Homo sapiens
caagaggtgagtagc

SEQ ID NO: 601318 - DNA, 15 bp, Homo sapiens
aagaggtgagtagcc

SEQ ID NO: 601319 - DNA, 15 bp, Homo sapiens
agaggtgagtagcct

SEQ ID NO: 601320 - DNA, 15 bp, Homo sapiens
gaggtgagtagcctg

SEQ ID NO: 601321 - DNA, 15 bp, Homo sapiens
aggtgagtagcctga

SEQ ID NO: 601322 - DNA, 15 bp, Homo sapiens
ggtgagtagcctgat

SEQ ID NO: 601323 - DNA, 15 bp, Homo sapiens
gtgagtagcctgatg

SEQ ID NO: 601324 - DNA, 15 bp, Homo sapiens
tgagtagcctgatgg

SEQ ID NO: 601325 - DNA, 15 bp, Homo sapiens
gagtagcctgatggt

SEQ ID NO: 601326 - DNA, 15 bp, Homo sapiens
agtagcctgatggta

SEQ ID NO: 601327 - DNA, 15 bp, Homo sapiens
gtagcctgatggtag

SEQ ID NO: 601328 - DNA, 15 bp, Homo sapiens
tagcctgatggtagt

SEQ ID NO: 601329 - DNA, 15 bp, Homo sapiens
agcctgatggtagta

SEQ ID NO: 601330 - DNA, 15 bp, Homo sapiens
gcctgatggtagtaa

SEQ ID NO: 601331 - DNA, 15 bp, Homo sapiens
cctgatggtagtaat

SEQ ID NO: 601332 - DNA, 15 bp, Homo sapiens
ctgatggtagtaatt

SEQ ID NO: 601333 - DNA, 15 bp, Homo sapiens
tgatggtagtaatta

SEQ ID NO: 601334 - DNA, 15 bp, Homo sapiens
gatggtagtaattat

SEQ ID NO: 601335 - DNA, 15 bp, Homo sapiens
atggtagtaattata

SEQ ID NO: 601336 - DNA, 15 bp, Homo sapiens
tggtagtaattataa

SEQ ID NO: 601337 - DNA, 15 bp, Homo sapiens
ggtagtaattataat

SEQ ID NO: 601338 - DNA, 15 bp, Homo sapiens
gtagtaattataatt

SEQ ID NO: 601339 - DNA, 15 bp, Homo sapiens
tagtaattataattt

SEQ ID NO: 601340 - DNA, 15 bp, Homo sapiens
agtaattataatttc

SEQ ID NO: 601341 - DNA, 15 bp, Homo sapiens
gtaattataatttca

SEQ ID NO: 601342 - DNA, 15 bp, Homo sapiens
taattataatttcat

SEQ ID NO: 601343 - DNA, 15 bp, Homo sapiens
aattataatttcatt

SEQ ID NO: 601344 - DNA, 15 bp, Homo sapiens
attataatttcatta

SEQ ID NO: 601345 - DNA, 15 bp, Homo sapiens
ttataatttcattat

SEQ ID NO: 601346 - DNA, 15 bp, Homo sapiens
tataatttcattatg

SEQ ID NO: 601347 - DNA, 15 bp, Homo sapiens
ataatttcattatgt

SEQ ID NO: 601348 - DNA, 15 bp, Homo sapiens
taatttcattatgtc

SEQ ID NO: 601349 - DNA, 15 bp, Homo sapiens
aatttcattatgtct

SEQ ID NO: 601350 - DNA, 15 bp, Homo sapiens
atttcattatgtctt

SEQ ID NO: 601351 - DNA, 15 bp, Homo sapiens
tttcattatgtcttt

SEQ ID NO: 601352 - DNA, 15 bp, Homo sapiens
ttcattatgtctttc

SEQ ID NO: 601353 - DNA, 15 bp, Homo sapiens
tcattatgtctttcc

SEQ ID NO: 601354 - DNA, 15 bp, Homo sapiens
cattatgtctttcca

SEQ ID NO: 601355 - DNA, 15 bp, Homo sapiens
attatgtctttccac

SEQ ID NO: 601356 - DNA, 15 bp, Homo sapiens
ttatgtctttccacc

SEQ ID NO: 601357 - DNA, 15 bp, Homo sapiens
tatgtctttccacca

SEQ ID NO: 601358 - DNA, 15 bp, Homo sapiens
atgtctttccaccat

SEQ ID NO: 601359 - DNA, 15 bp, Homo sapiens
tgtctttccaccatt

SEQ ID NO: 601360 - DNA, 15 bp, Homo sapiens
gtctttccaccattt

SEQ ID NO: 601361 - DNA, 15 bp, Homo sapiens
tctttccaccattta

SEQ ID NO: 601362 - DNA, 15 bp, Homo sapiens
ctttccaccatttac

SEQ ID NO: 601363 - DNA, 15 bp, Homo sapiens
tttccaccatttacc

SEQ ID NO: 601364 - DNA, 15 bp, Homo sapiens
ttccaccatttaccc

SEQ ID NO: 601365 - DNA, 15 bp, Homo sapiens
tccaccatttacccc

SEQ ID NO: 601366 - DNA, 15 bp, Homo sapiens
ccaccatttacccca

SEQ ID NO: 601367 - DNA, 15 bp, Homo sapiens
caccatttaccccac

SEQ ID NO: 601368 - DNA, 15 bp, Homo sapiens
accatttaccccact

SEQ ID NO: 601369 - DNA, 15 bp, Homo sapiens
ccatttaccccactt

SEQ ID NO: 601370 - DNA, 15 bp, Homo sapiens
catttaccccactta

SEQ ID NO: 601371 - DNA, 15 bp, Homo sapiens
atttaccccacttat

SEQ ID NO: 601372 - DNA, 15 bp, Homo sapiens
tttaccccacttatg

SEQ ID NO: 601373 - DNA, 15 bp, Homo sapiens
ttaccccacttatgt

SEQ ID NO: 601374 - DNA, 15 bp, Homo sapiens
taccccacttatgtc

SEQ ID NO: 601375 - DNA, 15 bp, Homo sapiens
accccacttatgtca

SEQ ID NO: 601376 - DNA, 15 bp, Homo sapiens
ccccacttatgtcaa

SEQ ID NO: 601377 - DNA, 15 bp, Homo sapiens
cccacttatgtcaaa

SEQ ID NO: 601378 - DNA, 15 bp, Homo sapiens
ccacttatgtcaaat

SEQ ID NO: 601379 - DNA, 15 bp, Homo sapiens
cacttatgtcaaata

SEQ ID NO: 601380 - DNA, 15 bp, Homo sapiens
acttatgtcaaataa

SEQ ID NO: 601381 - DNA, 15 bp, Homo sapiens
cttatgtcaaataat

SEQ ID NO: 601382 - DNA, 15 bp, Homo sapiens
ttatgtcaaataatt

SEQ ID NO: 601383 - DNA, 15 bp, Homo sapiens
tatgtcaaataattt

SEQ ID NO: 601384 - DNA, 15 bp, Homo sapiens
atgtcaaataattta

SEQ ID NO: 601385 - DNA, 15 bp, Homo sapiens
tgtcaaataatttaa

SEQ ID NO: 601386 - DNA, 15 bp, Homo sapiens
gtcaaataatttaat

SEQ ID NO: 601387 - DNA, 15 bp, Homo sapiens
tcaaataatttaatt

SEQ ID NO: 601388 - DNA, 15 bp, Homo sapiens
caaataatttaattg

SEQ ID NO: 601389 - DNA, 15 bp, Homo sapiens
aaataatttaattgt

SEQ ID NO: 601390 - DNA, 15 bp, Homo sapiens
aataatttaattgta

SEQ ID NO: 601391 - DNA, 15 bp, Homo sapiens
ataatttaattgtat

SEQ ID NO: 601392 - DNA, 15 bp, Homo sapiens
taatttaattgtatt

SEQ ID NO: 601393 - DNA, 15 bp, Homo sapiens
aatttaattgtattt

SEQ ID NO: 601394 - DNA, 15 bp, Homo sapiens
atttaattgtatttc

SEQ ID NO: 601395 - DNA, 15 bp, Homo sapiens
tttaattgtatttca

SEQ ID NO: 601396 - DNA, 15 bp, Homo sapiens
ttaattgtatttcaa

SEQ ID NO: 601397 - DNA, 15 bp, Homo sapiens
taattgtatttcaaa

SEQ ID NO: 601398 - DNA, 15 bp, Homo sapiens
aattgtatttcaaac

SEQ ID NO: 601399 - DNA, 15 bp, Homo sapiens
attgtatttcaaacc

SEQ ID NO: 601400 - DNA, 15 bp, Homo sapiens
ttgtatttcaaacct

SEQ ID NO: 601401 - DNA, 15 bp, Homo sapiens
tgtatttcaaacctg

SEQ ID NO: 601402 - DNA, 15 bp, Homo sapiens
gtatttcaaacctgt

SEQ ID NO: 601403 - DNA, 15 bp, Homo sapiens
tatttcaaacctgtt

SEQ ID NO: 601404 - DNA, 15 bp, Homo sapiens
atttcaaacctgttc

SEQ ID NO: 601405 - DNA, 15 bp, Homo sapiens
tttcaaacctgttca

SEQ ID NO: 601406 - DNA, 15 bp, Homo sapiens
ttcaaacctgttcaa

SEQ ID NO: 601407 - DNA, 15 bp, Homo sapiens
tcaaacctgttcaag

SEQ ID NO: 601408 - DNA, 15 bp, Homo sapiens
caaacctgttcaagg

SEQ ID NO: 601409 - DNA, 15 bp, Homo sapiens
aaacctgttcaagga

SEQ ID NO: 601410 - DNA, 15 bp, Homo sapiens
aacctgttcaaggaa

SEQ ID NO: 601411 - DNA, 15 bp, Homo sapiens
acctgttcaaggaaa

SEQ ID NO: 601412 - DNA, 15 bp, Homo sapiens
cctgttcaaggaaaa

SEQ ID NO: 601413 - DNA, 15 bp, Homo sapiens
ctgttcaaggaaaag

SEQ ID NO: 601414 - DNA, 15 bp, Homo sapiens
tgttcaaggaaaagt

SEQ ID NO: 601415 - DNA, 15 bp, Homo sapiens
gttcaaggaaaagta

SEQ ID NO: 601416 - DNA, 15 bp, Homo sapiens
ttcaaggaaaagtac

SEQ ID NO: 601417 - DNA, 15 bp, Homo sapiens
tcaaggaaaagtaca

SEQ ID NO: 601418 - DNA, 15 bp, Homo sapiens
caaggaaaagtacat

SEQ ID NO: 601419 - DNA, 15 bp, Homo sapiens
aaggaaaagtacatt

SEQ ID NO: 601420 - DNA, 15 bp, Homo sapiens
aggaaaagtacattt

SEQ ID NO: 601421 - DNA, 15 bp, Homo sapiens
ggaaaagtacatttg

SEQ ID NO: 601422 - DNA, 15 bp, Homo sapiens
gaaaagtacatttga

SEQ ID NO: 601423 - DNA, 15 bp, Homo sapiens
aaaagtacatttgat

SEQ ID NO: 601424 - DNA, 15 bp, Homo sapiens
aaagtacatttgatc

SEQ ID NO: 601425 - DNA, 15 bp, Homo sapiens
aagtacatttgatct

SEQ ID NO: 601426 - DNA, 15 bp, Homo sapiens
agtacatttgatctt

SEQ ID NO: 601427 - DNA, 15 bp, Homo sapiens
gtacatttgatcttt

SEQ ID NO: 601428 - DNA, 15 bp, Homo sapiens
tacatttgatctttc

SEQ ID NO: 601429 - DNA, 15 bp, Homo sapiens
acatttgatctttcc

SEQ ID NO: 601430 - DNA, 15 bp, Homo sapiens
catttgatctttcca

SEQ ID NO: 601431 - DNA, 15 bp, Homo sapiens
atttgatctttccat

SEQ ID NO: 601432 - DNA, 15 bp, Homo sapiens
tttgatctttccatc

SEQ ID NO: 601433 - DNA, 15 bp, Homo sapiens
ttgatctttccatct

SEQ ID NO: 601434 - DNA, 15 bp, Homo sapiens
tgatctttccatcta

SEQ ID NO: 601435 - DNA, 15 bp, Homo sapiens
gatctttccatctag

SEQ ID NO: 601436 - DNA, 15 bp, Homo sapiens
atctttccatctagc

SEQ ID NO: 601437 - DNA, 15 bp, Homo sapiens
tctttccatctagca

SEQ ID NO: 601438 - DNA, 15 bp, Homo sapiens
ctttccatctagcaa

SEQ ID NO: 601439 - DNA, 15 bp, Homo sapiens
tttccatctagcaat

SEQ ID NO: 601440 - DNA, 15 bp, Homo sapiens
ttccatctagcaatt

SEQ ID NO: 601441 - DNA, 15 bp, Homo sapiens
tccatctagcaattt

SEQ ID NO: 601442 - DNA, 15 bp, Homo sapiens
ccatctagcaatttc

SEQ ID NO: 601443 - DNA, 15 bp, Homo sapiens
catctagcaatttca

SEQ ID NO: 601444 - DNA, 15 bp, Homo sapiens
atctagcaatttcaa

SEQ ID NO: 601445 - DNA, 15 bp, Homo sapiens
tctagcaatttcaaa

SEQ ID NO: 601446 - DNA, 15 bp, Homo sapiens
ctagcaatttcaaag

SEQ ID NO: 601447 - DNA, 15 bp, Homo sapiens
tagcaatttcaaagc

SEQ ID NO: 601448 - DNA, 15 bp, Homo sapiens
agcaatttcaaagca

SEQ ID NO: 601449 - DNA, 15 bp, Homo sapiens
gcaatttcaaagcac

SEQ ID NO: 601450 - DNA, 15 bp, Homo sapiens
caatttcaaagcacc

SEQ ID NO: 601451 - DNA, 15 bp, Homo sapiens
aatttcaaagcacct

SEQ ID NO: 601452 - DNA, 15 bp, Homo sapiens
atttcaaagcacctg

SEQ ID NO: 601453 - DNA, 15 bp, Homo sapiens
tttcaaagcacctgt

SEQ ID NO: 601454 - DNA, 15 bp, Homo sapiens
ttcaaagcacctgtt

SEQ ID NO: 601455 - DNA, 15 bp, Homo sapiens
tcaaagcacctgttc

SEQ ID NO: 601456 - DNA, 15 bp, Homo sapiens
caaagcacctgttca

SEQ ID NO: 601457 - DNA, 15 bp, Homo sapiens
aaagcacctgttcac

SEQ ID NO: 601458 - DNA, 15 bp, Homo sapiens
aagcacctgttcaca

SEQ ID NO: 601459 - DNA, 15 bp, Homo sapiens
agcacctgttcacat

SEQ ID NO: 601460 - DNA, 15 bp, Homo sapiens
gcacctgttcacatc

SEQ ID NO: 601461 - DNA, 15 bp, Homo sapiens
cacctgttcacatcc

SEQ ID NO: 601462 - DNA, 15 bp, Homo sapiens
acctgttcacatccc

SEQ ID NO: 601463 - DNA, 15 bp, Homo sapiens
cctgttcacatccca

SEQ ID NO: 601464 - DNA, 15 bp, Homo sapiens
ctgttcacatcccaa

SEQ ID NO: 601465 - DNA, 15 bp, Homo sapiens
tgttcacatcccaaa

SEQ ID NO: 601466 - DNA, 15 bp, Homo sapiens
gttcacatcccaaat

SEQ ID NO: 601467 - DNA, 15 bp, Homo sapiens
ttcacatcccaaatt

SEQ ID NO: 601468 - DNA, 15 bp, Homo sapiens
tcacatcccaaatta

SEQ ID NO: 601469 - DNA, 15 bp, Homo sapiens
cacatcccaaattat

SEQ ID NO: 601470 - DNA, 15 bp, Homo sapiens
acatcccaaattatc

SEQ ID NO: 601471 - DNA, 15 bp, Homo sapiens
catcccaaattatct

SEQ ID NO: 601472 - DNA, 15 bp, Homo sapiens
atcccaaattatctg

SEQ ID NO: 601473 - DNA, 15 bp, Homo sapiens
tcccaaattatctgt

SEQ ID NO: 601474 - DNA, 15 bp, Homo sapiens
cccaaattatctgtg

SEQ ID NO: 601475 - DNA, 15 bp, Homo sapiens
ccaaattatctgtgc

SEQ ID NO: 601476 - DNA, 15 bp, Homo sapiens
caaattatctgtgct

SEQ ID NO: 601477 - DNA, 15 bp, Homo sapiens
aaattatctgtgctc

SEQ ID NO: 601478 - DNA, 15 bp, Homo sapiens
aattatctgtgctct

SEQ ID NO: 601479 - DNA, 15 bp, Homo sapiens
attatctgtgctctt

SEQ ID NO: 601480 - DNA, 15 bp, Homo sapiens
ttatctgtgctctta

SEQ ID NO: 601481 - DNA, 15 bp, Homo sapiens
tatctgtgctcttaa

SEQ ID NO: 601482 - DNA, 15 bp, Homo sapiens
atctgtgctcttaag

SEQ ID NO: 601483 - DNA, 15 bp, Homo sapiens
tctgtgctcttaagt

SEQ ID NO: 601484 - DNA, 15 bp, Homo sapiens
ctgtgctcttaagta

SEQ ID NO: 601485 - DNA, 15 bp, Homo sapiens
tgtgctcttaagtaa

SEQ ID NO: 601486 - DNA, 15 bp, Homo sapiens
gtgctcttaagtaag

SEQ ID NO: 601487 - DNA, 15 bp, Homo sapiens
tgctcttaagtaaga

SEQ ID NO: 601488 - DNA, 15 bp, Homo sapiens
gctcttaagtaagag

SEQ ID NO: 601489 - DNA, 15 bp, Homo sapiens
ctcttaagtaagagg

SEQ ID NO: 601490 - DNA, 15 bp, Homo sapiens
tcttaagtaagaggc

SEQ ID NO: 601491 - DNA, 15 bp, Homo sapiens
cttaagtaagaggca

SEQ ID NO: 601492 - DNA, 15 bp, Homo sapiens
ttaagtaagaggcag

SEQ ID NO: 601493 - DNA, 15 bp, Homo sapiens
taagtaagaggcaga

SEQ ID NO: 601494 - DNA, 15 bp, Homo sapiens
aagtaagaggcagaa

SEQ ID NO: 601495 - DNA, 15 bp, Homo sapiens
agtaagaggcagaaa

SEQ ID NO: 601496 - DNA, 15 bp, Homo sapiens
gtaagaggcagaaag

SEQ ID NO: 601497 - DNA, 15 bp, Homo sapiens
taagaggcagaaaga

SEQ ID NO: 601498 - DNA, 15 bp, Homo sapiens
aagaggcagaaagaa

SEQ ID NO: 601499 - DNA, 15 bp, Homo sapiens
agaggcagaaagaaa

SEQ ID NO: 601500 - DNA, 15 bp, Homo sapiens
gaggcagaaagaaag

SEQ ID NO: 601501 - DNA, 15 bp, Homo sapiens
aggcagaaagaaagg

SEQ ID NO: 601502 - DNA, 15 bp, Homo sapiens
ggcagaaagaaagga

SEQ ID NO: 601503 - DNA, 15 bp, Homo sapiens
gcagaaagaaaggaa

SEQ ID NO: 601504 - DNA, 15 bp, Homo sapiens
cagaaagaaaggaac

SEQ ID NO: 601505 - DNA, 15 bp, Homo sapiens
agaaagaaaggaacc

SEQ ID NO: 601506 - DNA, 15 bp, Homo sapiens
gaaagaaaggaacca

SEQ ID NO: 601507 - DNA, 15 bp, Homo sapiens
aaagaaaggaaccac

SEQ ID NO: 601508 - DNA, 15 bp, Homo sapiens
aagaaaggaaccacc

SEQ ID NO: 601509 - DNA, 15 bp, Homo sapiens
agaaaggaaccaccc

SEQ ID NO: 601510 - DNA, 15 bp, Homo sapiens
gaaaggaaccaccct

SEQ ID NO: 601511 - DNA, 15 bp, Homo sapiens
aaaggaaccaccctt

SEQ ID NO: 601512 - DNA, 15 bp, Homo sapiens
aaggaaccacccttc

SEQ ID NO: 601513 - DNA, 15 bp, Homo sapiens
aggaaccacccttct

SEQ ID NO: 601514 - DNA, 15 bp, Homo sapiens
ggaaccacccttctg

SEQ ID NO: 601515 - DNA, 15 bp, Homo sapiens
gaaccacccttctga

SEQ ID NO: 601516 - DNA, 15 bp, Homo sapiens
aaccacccttctgat

SEQ ID NO: 601517 - DNA, 15 bp, Homo sapiens
accacccttctgatt

SEQ ID NO: 601518 - DNA, 15 bp, Homo sapiens
ccacccttctgattt

SEQ ID NO: 601519 - DNA, 15 bp, Homo sapiens
cacccttctgatttc

SEQ ID NO: 601520 - DNA, 15 bp, Homo sapiens
acccttctgatttca

SEQ ID NO: 601521 - DNA, 15 bp, Homo sapiens
cccttctgatttcac

SEQ ID NO: 601522 - DNA, 15 bp, Homo sapiens
ccttctgatttcaca

SEQ ID NO: 601523 - DNA, 15 bp, Homo sapiens
cttctgatttcacat

SEQ ID NO: 601524 - DNA, 15 bp, Homo sapiens
ttctgatttcacatc

SEQ ID NO: 601525 - DNA, 15 bp, Homo sapiens
tctgatttcacatca

SEQ ID NO: 601526 - DNA, 15 bp, Homo sapiens
ctgatttcacatcaa

SEQ ID NO: 601527 - DNA, 15 bp, Homo sapiens
tgatttcacatcaaa

SEQ ID NO: 601528 - DNA, 15 bp, Homo sapiens
gatttcacatcaaaa

SEQ ID NO: 601529 - DNA, 15 bp, Homo sapiens
atttcacatcaaaaa

SEQ ID NO: 601530 - DNA, 15 bp, Homo sapiens
tttcacatcaaaaaa

SEQ ID NO: 601531 - DNA, 15 bp, Homo sapiens
ttcacatcaaaaaag

SEQ ID NO: 601532 - DNA, 15 bp, Homo sapiens
tcacatcaaaaaaga

SEQ ID NO: 601533 - DNA, 15 bp, Homo sapiens
cacatcaaaaaagaa

SEQ ID NO: 601534 - DNA, 15 bp, Homo sapiens
acatcaaaaaagaaa

SEQ ID NO: 601535 - DNA, 15 bp, Homo sapiens
catcaaaaaagaaat

SEQ ID NO: 601536 - DNA, 15 bp, Homo sapiens
atcaaaaaagaaatg

SEQ ID NO: 601537 - DNA, 15 bp, Homo sapiens
tcaaaaaagaaatgc

SEQ ID NO: 601538 - DNA, 15 bp, Homo sapiens
caaaaaagaaatgcc

SEQ ID NO: 601539 - DNA, 15 bp, Homo sapiens
aaaaaagaaatgcca

SEQ ID NO: 601540 - DNA, 15 bp, Homo sapiens
aaaaagaaatgccac

SEQ ID NO: 601541 - DNA, 15 bp, Homo sapiens
aaaagaaatgccact

SEQ ID NO: 601542 - DNA, 15 bp, Homo sapiens
aaagaaatgccactg

SEQ ID NO: 601543 - DNA, 15 bp, Homo sapiens
aagaaatgccactgg

SEQ ID NO: 601544 - DNA, 15 bp, Homo sapiens
agaaatgccactggc

SEQ ID NO: 601545 - DNA, 15 bp, Homo sapiens
gaaatgccactggca

SEQ ID NO: 601546 - DNA, 15 bp, Homo sapiens
aaatgccactggcaa

SEQ ID NO: 601547 - DNA, 15 bp, Homo sapiens
aatgccactggcaat

SEQ ID NO: 601548 - DNA, 15 bp, Homo sapiens
atgccactggcaata

SEQ ID NO: 601549 - DNA, 15 bp, Homo sapiens
tgccactggcaataa

SEQ ID NO: 601550 - DNA, 15 bp, Homo sapiens
gccactggcaataag

SEQ ID NO: 601551 - DNA, 15 bp, Homo sapiens
ccactggcaataagc

SEQ ID NO: 601552 - DNA, 15 bp, Homo sapiens
cactggcaataagca

SEQ ID NO: 601553 - DNA, 15 bp, Homo sapiens
actggcaataagcaa

SEQ ID NO: 601554 - DNA, 15 bp, Homo sapiens
ctggcaataagcaac

SEQ ID NO: 601555 - DNA, 15 bp, Homo sapiens
tggcaataagcaact

SEQ ID NO: 601556 - DNA, 15 bp, Homo sapiens
ggcaataagcaactt

SEQ ID NO: 601557 - DNA, 15 bp, Homo sapiens
gcaataagcaacttg

SEQ ID NO: 601558 - DNA, 15 bp, Homo sapiens
caataagcaacttgc

SEQ ID NO: 601559 - DNA, 15 bp, Homo sapiens
aataagcaacttgcc

SEQ ID NO: 601560 - DNA, 15 bp, Homo sapiens
ataagcaacttgcct

SEQ ID NO: 601561 - DNA, 15 bp, Homo sapiens
taagcaacttgcctg

SEQ ID NO: 601562 - DNA, 15 bp, Homo sapiens
aagcaacttgcctgg

SEQ ID NO: 601563 - DNA, 15 bp, Homo sapiens
agcaacttgcctggt

SEQ ID NO: 601564 - DNA, 15 bp, Homo sapiens
gcaacttgcctggtg

SEQ ID NO: 601565 - DNA, 15 bp, Homo sapiens
caacttgcctggtgt

SEQ ID NO: 601566 - DNA, 15 bp, Homo sapiens
aacttgcctggtgtg

SEQ ID NO: 601567 - DNA, 15 bp, Homo sapiens
acttgcctggtgtgg

SEQ ID NO: 601568 - DNA, 15 bp, Homo sapiens
cttgcctggtgtggc

SEQ ID NO: 601569 - DNA, 15 bp, Homo sapiens
ttgcctggtgtggca

SEQ ID NO: 601570 - DNA, 15 bp, Homo sapiens
tgcctggtgtggcat

SEQ ID NO: 601571 - DNA, 15 bp, Homo sapiens
gcctggtgtggcata

SEQ ID NO: 601572 - DNA, 15 bp, Homo sapiens
cctggtgtggcataa

SEQ ID NO: 601573 - DNA, 15 bp, Homo sapiens
ctggtgtggcataaa

SEQ ID NO: 601574 - DNA, 15 bp, Homo sapiens
tggtgtggcataaat

SEQ ID NO: 601575 - DNA, 15 bp, Homo sapiens
ggtgtggcataaatc

SEQ ID NO: 601576 - DNA, 15 bp, Homo sapiens
gtgtggcataaatca

SEQ ID NO: 601577 - DNA, 15 bp, Homo sapiens
tgtggcataaatcat

SEQ ID NO: 601578 - DNA, 15 bp, Homo sapiens
gtggcataaatcatc

SEQ ID NO: 601579 - DNA, 15 bp, Homo sapiens
tggcataaatcatca

SEQ ID NO: 601580 - DNA, 15 bp, Homo sapiens
ggcataaatcatcag

SEQ ID NO: 601581 - DNA, 15 bp, Homo sapiens
gcataaatcatcaga

SEQ ID NO: 601582 - DNA, 15 bp, Homo sapiens
cataaatcatcagaa

SEQ ID NO: 601583 - DNA, 15 bp, Homo sapiens
ataaatcatcagaag

SEQ ID NO: 601584 - DNA, 15 bp, Homo sapiens
taaatcatcagaaga

SEQ ID NO: 601585 - DNA, 15 bp, Homo sapiens
aaatcatcagaagac

SEQ ID NO: 601586 - DNA, 15 bp, Homo sapiens
aatcatcagaagact

SEQ ID NO: 601587 - DNA, 15 bp, Homo sapiens
atcatcagaagactt

SEQ ID NO: 601588 - DNA, 15 bp, Homo sapiens
tcatcagaagactta

SEQ ID NO: 601589 - DNA, 15 bp, Homo sapiens
catcagaagacttac

SEQ ID NO: 601590 - DNA, 15 bp, Homo sapiens
atcagaagacttaca

SEQ ID NO: 601591 - DNA, 15 bp, Homo sapiens
tcagaagacttacag

SEQ ID NO: 601592 - DNA, 15 bp, Homo sapiens
cagaagacttacagt

SEQ ID NO: 601593 - DNA, 15 bp, Homo sapiens
agaagacttacagtt

SEQ ID NO: 601594 - DNA, 15 bp, Homo sapiens
gaagacttacagttg

SEQ ID NO: 601595 - DNA, 15 bp, Homo sapiens
aagacttacagttga

SEQ ID NO: 601596 - DNA, 15 bp, Homo sapiens
agacttacagttgaa

SEQ ID NO: 601597 - DNA, 15 bp, Homo sapiens
gacttacagttgaat

SEQ ID NO: 601598 - DNA, 15 bp, Homo sapiens
acttacagttgaatc

SEQ ID NO: 601599 - DNA, 15 bp, Homo sapiens
cttacagttgaatct

SEQ ID NO: 601600 - DNA, 15 bp, Homo sapiens
ttacagttgaatcta

SEQ ID NO: 601601 - DNA, 15 bp, Homo sapiens
tacagttgaatctaa

SEQ ID NO: 601602 - DNA, 15 bp, Homo sapiens
acagttgaatctaag

SEQ ID NO: 601603 - DNA, 15 bp, Homo sapiens
cagttgaatctaagt

SEQ ID NO: 601604 - DNA, 15 bp, Homo sapiens
agttgaatctaagtc

SEQ ID NO: 601605 - DNA, 15 bp, Homo sapiens
gttgaatctaagtct

SEQ ID NO: 601606 - DNA, 15 bp, Homo sapiens
ttgaatctaagtctt

SEQ ID NO: 601607 - DNA, 15 bp, Homo sapiens
tgaatctaagtcttt

SEQ ID NO: 601608 - DNA, 15 bp, Homo sapiens
gaatctaagtctttt

SEQ ID NO: 601609 - DNA, 15 bp, Homo sapiens
aatctaagtcttttc

SEQ ID NO: 601610 - DNA, 15 bp, Homo sapiens
atctaagtcttttca

SEQ ID NO: 601611 - DNA, 15 bp, Homo sapiens
tctaagtcttttcag

SEQ ID NO: 601612 - DNA, 15 bp, Homo sapiens
ctaagtcttttcagt

SEQ ID NO: 601613 - DNA, 15 bp, Homo sapiens
taagtcttttcagta

SEQ ID NO: 601614 - DNA, 15 bp, Homo sapiens
aagtcttttcagtac

SEQ ID NO: 601615 - DNA, 15 bp, Homo sapiens
agtcttttcagtact

SEQ ID NO: 601616 - DNA, 15 bp, Homo sapiens
gtcttttcagtactg

SEQ ID NO: 601617 - DNA, 15 bp, Homo sapiens
tcttttcagtactga

SEQ ID NO: 601618 - DNA, 15 bp, Homo sapiens
cttttcagtactgag

SEQ ID NO: 601619 - DNA, 15 bp, Homo sapiens
ttttcagtactgagg

SEQ ID NO: 601620 - DNA, 15 bp, Homo sapiens
tttcagtactgaggt

SEQ ID NO: 601621 - DNA, 15 bp, Homo sapiens
ttcagtactgaggtg

SEQ ID NO: 601622 - DNA, 15 bp, Homo sapiens
tcagtactgaggtgg

SEQ ID NO: 601623 - DNA, 15 bp, Homo sapiens
cagtactgaggtggt

SEQ ID NO: 601624 - DNA, 15 bp, Homo sapiens
agtactgaggtggtt

SEQ ID NO: 601625 - DNA, 15 bp, Homo sapiens
gtactgaggtggttc

SEQ ID NO: 601626 - DNA, 15 bp, Homo sapiens
tactgaggtggttca

SEQ ID NO: 601627 - DNA, 15 bp, Homo sapiens
actgaggtggttcat

SEQ ID NO: 601628 - DNA, 15 bp, Homo sapiens
ctgaggtggttcatt

SEQ ID NO: 601629 - DNA, 15 bp, Homo sapiens
tgaggtggttcatta

SEQ ID NO: 601630 - DNA, 15 bp, Homo sapiens
gaggtggttcattat

SEQ ID NO: 601631 - DNA, 15 bp, Homo sapiens
aggtggttcattatt

SEQ ID NO: 601632 - DNA, 15 bp, Homo sapiens
ggtggttcattattc

SEQ ID NO: 601633 - DNA, 15 bp, Homo sapiens
gtggttcattattct

SEQ ID NO: 601634 - DNA, 15 bp, Homo sapiens
tggttcattattctg

SEQ ID NO: 601635 - DNA, 15 bp, Homo sapiens
ggttcattattctgt

SEQ ID NO: 601636 - DNA, 15 bp, Homo sapiens
gttcattattctgtt

SEQ ID NO: 601637 - DNA, 15 bp, Homo sapiens
ttcattattctgtta

SEQ ID NO: 601638 - DNA, 15 bp, Homo sapiens
tcattattctgttac

SEQ ID NO: 601639 - DNA, 15 bp, Homo sapiens
cattattctgttaca

SEQ ID NO: 601640 - DNA, 15 bp, Homo sapiens
attattctgttacag

SEQ ID NO: 601641 - DNA, 15 bp, Homo sapiens
ttattctgttacagt

SEQ ID NO: 601642 - DNA, 15 bp, Homo sapiens
tattctgttacagtc

SEQ ID NO: 601643 - DNA, 15 bp, Homo sapiens
attctgttacagtct

SEQ ID NO: 601644 - DNA, 15 bp, Homo sapiens
ttctgttacagtctt

SEQ ID NO: 601645 - DNA, 15 bp, Homo sapiens
tctgttacagtctta

SEQ ID NO: 601646 - DNA, 15 bp, Homo sapiens
ctgttacagtcttaa

SEQ ID NO: 601647 - DNA, 15 bp, Homo sapiens
tgttacagtcttaaa

SEQ ID NO: 601648 - DNA, 15 bp, Homo sapiens
gttacagtcttaaaa

SEQ ID NO: 601649 - DNA, 15 bp, Homo sapiens
ttacagtcttaaaat

SEQ ID NO: 601650 - DNA, 15 bp, Homo sapiens
tacagtcttaaaatt

SEQ ID NO: 601651 - DNA, 15 bp, Homo sapiens
acagtcttaaaattc

SEQ ID NO: 601652 - DNA, 15 bp, Homo sapiens
cagtcttaaaattca

SEQ ID NO: 601653 - DNA, 15 bp, Homo sapiens
agtcttaaaattcac

SEQ ID NO: 601654 - DNA, 15 bp, Homo sapiens
gtcttaaaattcaca

SEQ ID NO: 601655 - DNA, 15 bp, Homo sapiens
tcttaaaattcacat

SEQ ID NO: 601656 - DNA, 15 bp, Homo sapiens
cttaaaattcacata

SEQ ID NO: 601657 - DNA, 15 bp, Homo sapiens
ttaaaattcacataa

SEQ ID NO: 601658 - DNA, 15 bp, Homo sapiens
taaaattcacataaa

SEQ ID NO: 601659 - DNA, 15 bp, Homo sapiens
aaaattcacataaat

SEQ ID NO: 601660 - DNA, 15 bp, Homo sapiens
aaattcacataaata

SEQ ID NO: 601661 - DNA, 15 bp, Homo sapiens
aattcacataaatat

SEQ ID NO: 601662 - DNA, 15 bp, Homo sapiens
attcacataaatata

SEQ ID NO: 601663 - DNA, 15 bp, Homo sapiens
ttcacataaatatat

SEQ ID NO: 601664 - DNA, 15 bp, Homo sapiens
tcacataaatatata

SEQ ID NO: 601665 - DNA, 15 bp, Homo sapiens
cacataaatatatac

SEQ ID NO: 601666 - DNA, 15 bp, Homo sapiens
acataaatatatact

SEQ ID NO: 601667 - DNA, 15 bp, Homo sapiens
cataaatatatactg

SEQ ID NO: 601668 - DNA, 15 bp, Homo sapiens
ataaatatatactgc

SEQ ID NO: 601669 - DNA, 15 bp, Homo sapiens
taaatatatactgcc

SEQ ID NO: 601670 - DNA, 15 bp, Homo sapiens
aaatatatactgcca

SEQ ID NO: 601671 - DNA, 15 bp, Homo sapiens
aatatatactgccaa

SEQ ID NO: 601672 - DNA, 15 bp, Homo sapiens
atatatactgccaat

SEQ ID NO: 601673 - DNA, 15 bp, Homo sapiens
tatatactgccaata

SEQ ID NO: 601674 - DNA, 15 bp, Homo sapiens
atatactgccaataa

SEQ ID NO: 601675 - DNA, 15 bp, Homo sapiens
tatactgccaataat

SEQ ID NO: 601676 - DNA, 15 bp, Homo sapiens
atactgccaataata

SEQ ID NO: 601677 - DNA, 15 bp, Homo sapiens
tactgccaataataa

SEQ ID NO: 601678 - DNA, 15 bp, Homo sapiens
actgccaataataat

SEQ ID NO: 601679 - DNA, 15 bp, Homo sapiens
ctgccaataataata

SEQ ID NO: 601680 - DNA, 15 bp, Homo sapiens
tgccaataataatag

SEQ ID NO: 601681 - DNA, 15 bp, Homo sapiens
gccaataataatagc

SEQ ID NO: 601682 - DNA, 15 bp, Homo sapiens
ccaataataatagca

SEQ ID NO: 601683 - DNA, 15 bp, Homo sapiens
caataataatagcat

SEQ ID NO: 601684 - DNA, 15 bp, Homo sapiens
aataataatagcata

SEQ ID NO: 601685 - DNA, 15 bp, Homo sapiens
ataataatagcatac

SEQ ID NO: 601686 - DNA, 15 bp, Homo sapiens
taataatagcataca

SEQ ID NO: 601687 - DNA, 15 bp, Homo sapiens
aataatagcatacac

SEQ ID NO: 601688 - DNA, 15 bp, Homo sapiens
ataatagcatacacc

SEQ ID NO: 601689 - DNA, 15 bp, Homo sapiens
taatagcatacacct

SEQ ID NO: 601690 - DNA, 15 bp, Homo sapiens
aatagcatacacctt

SEQ ID NO: 601691 - DNA, 15 bp, Homo sapiens
atagcatacaccttt

SEQ ID NO: 601692 - DNA, 15 bp, Homo sapiens
tagcatacaccttta

SEQ ID NO: 601693 - DNA, 15 bp, Homo sapiens
agcatacacctttat

SEQ ID NO: 601694 - DNA, 15 bp, Homo sapiens
gcatacacctttata

SEQ ID NO: 601695 - DNA, 15 bp, Homo sapiens
catacacctttatag

SEQ ID NO: 601696 - DNA, 15 bp, Homo sapiens
atacacctttatagc

SEQ ID NO: 601697 - DNA, 15 bp, Homo sapiens
tacacctttatagct

SEQ ID NO: 601698 - DNA, 15 bp, Homo sapiens
acacctttatagctt

SEQ ID NO: 601699 - DNA, 15 bp, Homo sapiens
cacctttatagctta

SEQ ID NO: 601700 - DNA, 15 bp, Homo sapiens
acctttatagcttac

SEQ ID NO: 601701 - DNA, 15 bp, Homo sapiens
cctttatagcttaca

SEQ ID NO: 601702 - DNA, 15 bp, Homo sapiens
ctttatagcttacag

SEQ ID NO: 601703 - DNA, 15 bp, Homo sapiens
tttatagcttacagg

SEQ ID NO: 601704 - DNA, 15 bp, Homo sapiens
ttatagcttacaggc

SEQ ID NO: 601705 - DNA, 15 bp, Homo sapiens
tatagcttacaggca

SEQ ID NO: 601706 - DNA, 15 bp, Homo sapiens
atagcttacaggcac

SEQ ID NO: 601707 - DNA, 15 bp, Homo sapiens
tagcttacaggcact

SEQ ID NO: 601708 - DNA, 15 bp, Homo sapiens
agcttacaggcactc

SEQ ID NO: 601709 - DNA, 15 bp, Homo sapiens
gcttacaggcactct

SEQ ID NO: 601710 - DNA, 15 bp, Homo sapiens
cttacaggcactctt

SEQ ID NO: 601711 - DNA, 15 bp, Homo sapiens
ttacaggcactcttc

SEQ ID NO: 601712 - DNA, 15 bp, Homo sapiens
tacaggcactcttct

SEQ ID NO: 601713 - DNA, 15 bp, Homo sapiens
acaggcactcttctt

SEQ ID NO: 601714 - DNA, 15 bp, Homo sapiens
caggcactcttcttc

SEQ ID NO: 601715 - DNA, 15 bp, Homo sapiens
aggcactcttcttct

SEQ ID NO: 601716 - DNA, 15 bp, Homo sapiens
ggcactcttcttcta

SEQ ID NO: 601717 - DNA, 15 bp, Homo sapiens
gcactcttcttctaa

SEQ ID NO: 601718 - DNA, 15 bp, Homo sapiens
cactcttcttctaag

SEQ ID NO: 601719 - DNA, 15 bp, Homo sapiens
actcttcttctaagt

SEQ ID NO: 601720 - DNA, 15 bp, Homo sapiens
ctcttcttctaagtg

SEQ ID NO: 601721 - DNA, 15 bp, Homo sapiens
tcttcttctaagtgt

SEQ ID NO: 601722 - DNA, 15 bp, Homo sapiens
cttcttctaagtgtt

SEQ ID NO: 601723 - DNA, 15 bp, Homo sapiens
ttcttctaagtgttt

SEQ ID NO: 601724 - DNA, 15 bp, Homo sapiens
tcttctaagtgtttt

SEQ ID NO: 601725 - DNA, 15 bp, Homo sapiens
cttctaagtgtttta

SEQ ID NO: 601726 - DNA, 15 bp, Homo sapiens
ttctaagtgttttac

SEQ ID NO: 601727 - DNA, 15 bp, Homo sapiens
tctaagtgttttacc

SEQ ID NO: 601728 - DNA, 15 bp, Homo sapiens
ctaagtgttttacct

SEQ ID NO: 601729 - DNA, 15 bp, Homo sapiens
taagtgttttaccta

SEQ ID NO: 601730 - DNA, 15 bp, Homo sapiens
aagtgttttacctat

SEQ ID NO: 601731 - DNA, 15 bp, Homo sapiens
agtgttttacctatg

SEQ ID NO: 601732 - DNA, 15 bp, Homo sapiens
gtgttttacctatgt

SEQ ID NO: 601733 - DNA, 15 bp, Homo sapiens
tgttttacctatgtt

SEQ ID NO: 601734 - DNA, 15 bp, Homo sapiens
gttttacctatgttg

SEQ ID NO: 601735 - DNA, 15 bp, Homo sapiens
ttttacctatgttgg

SEQ ID NO: 601736 - DNA, 15 bp, Homo sapiens
tttacctatgttggc

SEQ ID NO: 601737 - DNA, 15 bp, Homo sapiens
ttacctatgttggct

SEQ ID NO: 601738 - DNA, 15 bp, Homo sapiens
tacctatgttggctt

SEQ ID NO: 601739 - DNA, 15 bp, Homo sapiens
acctatgttggctta

SEQ ID NO: 601740 - DNA, 15 bp, Homo sapiens
cctatgttggcttat

SEQ ID NO: 601741 - DNA, 15 bp, Homo sapiens
ctatgttggcttatt

SEQ ID NO: 601742 - DNA, 15 bp, Homo sapiens
tatgttggcttattt

SEQ ID NO: 601743 - DNA, 15 bp, Homo sapiens
atgttggcttatttc

SEQ ID NO: 601744 - DNA, 15 bp, Homo sapiens
tgttggcttatttca

SEQ ID NO: 601745 - DNA, 15 bp, Homo sapiens
gttggcttatttcat

SEQ ID NO: 601746 - DNA, 15 bp, Homo sapiens
ttggcttatttcatc

SEQ ID NO: 601747 - DNA, 15 bp, Homo sapiens
tggcttatttcatca

SEQ ID NO: 601748 - DNA, 15 bp, Homo sapiens
ggcttatttcatcat

SEQ ID NO: 601749 - DNA, 15 bp, Homo sapiens
gcttatttcatcata

SEQ ID NO: 601750 - DNA, 15 bp, Homo sapiens
cttatttcatcataa

SEQ ID NO: 601751 - DNA, 15 bp, Homo sapiens
ttatttcatcataaa

SEQ ID NO: 601752 - DNA, 15 bp, Homo sapiens
tatttcatcataaag

SEQ ID NO: 601753 - DNA, 15 bp, Homo sapiens
atttcatcataaaga

SEQ ID NO: 601754 - DNA, 15 bp, Homo sapiens
tttcatcataaagaa

SEQ ID NO: 601755 - DNA, 15 bp, Homo sapiens
ttcatcataaagaaa

SEQ ID NO: 601756 - DNA, 15 bp, Homo sapiens
tcatcataaagaaaa

SEQ ID NO: 601757 - DNA, 15 bp, Homo sapiens
catcataaagaaaac

SEQ ID NO: 601758 - DNA, 15 bp, Homo sapiens
atcataaagaaaaca

SEQ ID NO: 601759 - DNA, 15 bp, Homo sapiens
tcataaagaaaacaa

SEQ ID NO: 601760 - DNA, 15 bp, Homo sapiens
cataaagaaaacaat

SEQ ID NO: 601761 - DNA, 15 bp, Homo sapiens
ataaagaaaacaatg

SEQ ID NO: 601762 - DNA, 15 bp, Homo sapiens
taaagaaaacaatgg

SEQ ID NO: 601763 - DNA, 15 bp, Homo sapiens
aaagaaaacaatgga

SEQ ID NO: 601764 - DNA, 15 bp, Homo sapiens
aagaaaacaatggac

SEQ ID NO: 601765 - DNA, 15 bp, Homo sapiens
agaaaacaatggact

SEQ ID NO: 601766 - DNA, 15 bp, Homo sapiens
gaaaacaatggactt

SEQ ID NO: 601767 - DNA, 15 bp, Homo sapiens
aaaacaatggacttt

SEQ ID NO: 601768 - DNA, 15 bp, Homo sapiens
aaacaatggactttt

SEQ ID NO: 601769 - DNA, 15 bp, Homo sapiens
aacaatggacttttg

SEQ ID NO: 601770 - DNA, 15 bp, Homo sapiens
acaatggacttttgt

SEQ ID NO: 601771 - DNA, 15 bp, Homo sapiens
caatggacttttgtg

SEQ ID NO: 601772 - DNA, 15 bp, Homo sapiens
aatggacttttgtgt

SEQ ID NO: 601773 - DNA, 15 bp, Homo sapiens
atggacttttgtgtt

SEQ ID NO: 601774 - DNA, 15 bp, Homo sapiens
tggacttttgtgttg

SEQ ID NO: 601775 - DNA, 15 bp, Homo sapiens
ggacttttgtgttgt

SEQ ID NO: 601776 - DNA, 15 bp, Homo sapiens
gacttttgtgttgtt

SEQ ID NO: 601777 - DNA, 15 bp, Homo sapiens
acttttgtgttgttt

SEQ ID NO: 601778 - DNA, 15 bp, Homo sapiens
cttttgtgttgtttt

SEQ ID NO: 601779 - DNA, 15 bp, Homo sapiens
ttttgtgttgttttg

SEQ ID NO: 601780 - DNA, 15 bp, Homo sapiens
tttgtgttgttttgt

SEQ ID NO: 601781 - DNA, 15 bp, Homo sapiens
ttgtgttgttttgta

SEQ ID NO: 601782 - DNA, 15 bp, Homo sapiens
tgtgttgttttgtaa

SEQ ID NO: 601783 - DNA, 15 bp, Homo sapiens
gtgttgttttgtaaa

SEQ ID NO: 601784 - DNA, 15 bp, Homo sapiens
tgttgttttgtaaaa

SEQ ID NO: 601785 - DNA, 15 bp, Homo sapiens
gttgttttgtaaaaa

SEQ ID NO: 601786 - DNA, 15 bp, Homo sapiens
ttgttttgtaaaaag

SEQ ID NO: 601787 - DNA, 15 bp, Homo sapiens
tgttttgtaaaaaga

SEQ ID NO: 601788 - DNA, 15 bp, Homo sapiens
gttttgtaaaaagat

SEQ ID NO: 601789 - DNA, 15 bp, Homo sapiens
ttttgtaaaaagatg

SEQ ID NO: 601790 - DNA, 15 bp, Homo sapiens
tttgtaaaaagatgc

SEQ ID NO: 601791 - DNA, 15 bp, Homo sapiens
ttgtaaaaagatgcg

SEQ ID NO: 601792 - DNA, 15 bp, Homo sapiens
tgtaaaaagatgcgc

SEQ ID NO: 601793 - DNA, 15 bp, Homo sapiens
gtaaaaagatgcgca

SEQ ID NO: 601794 - DNA, 15 bp, Homo sapiens
taaaaagatgcgcac

SEQ ID NO: 601795 - DNA, 15 bp, Homo sapiens
aaaaagatgcgcaca

SEQ ID NO: 601796 - DNA, 15 bp, Homo sapiens
aaaagatgcgcacat

SEQ ID NO: 601797 - DNA, 15 bp, Homo sapiens
aaagatgcgcacatt

SEQ ID NO: 601798 - DNA, 15 bp, Homo sapiens
aagatgcgcacattt

SEQ ID NO: 601799 - DNA, 15 bp, Homo sapiens
agatgcgcacatttt

SEQ ID NO: 601800 - DNA, 15 bp, Homo sapiens
gatgcgcacatttta

SEQ ID NO: 601801 - DNA, 15 bp, Homo sapiens
atgcgcacattttaa

SEQ ID NO: 601802 - DNA, 15 bp, Homo sapiens
tgcgcacattttaat

SEQ ID NO: 601803 - DNA, 15 bp, Homo sapiens
gcgcacattttaatt

SEQ ID NO: 601804 - DNA, 15 bp, Homo sapiens
cgcacattttaatta

SEQ ID NO: 601805 - DNA, 15 bp, Homo sapiens
gcacattttaattaa

SEQ ID NO: 601806 - DNA, 15 bp, Homo sapiens
cacattttaattaac

SEQ ID NO: 601807 - DNA, 15 bp, Homo sapiens
acattttaattaaca

SEQ ID NO: 601808 - DNA, 15 bp, Homo sapiens
cattttaattaacat

SEQ ID NO: 601809 - DNA, 15 bp, Homo sapiens
attttaattaacatc

SEQ ID NO: 601810 - DNA, 15 bp, Homo sapiens
ttttaattaacatct

SEQ ID NO: 601811 - DNA, 15 bp, Homo sapiens
tttaattaacatctg

SEQ ID NO: 601812 - DNA, 15 bp, Homo sapiens
ttaattaacatctga

SEQ ID NO: 601813 - DNA, 15 bp, Homo sapiens
taattaacatctgat

SEQ ID NO: 601814 - DNA, 15 bp, Homo sapiens
aattaacatctgatt

SEQ ID NO: 601815 - DNA, 15 bp, Homo sapiens
attaacatctgattg

SEQ ID NO: 601816 - DNA, 15 bp, Homo sapiens
ttaacatctgattgc

SEQ ID NO: 601817 - DNA, 15 bp, Homo sapiens
taacatctgattgca

SEQ ID NO: 601818 - DNA, 15 bp, Homo sapiens
aacatctgattgcac

SEQ ID NO: 601819 - DNA, 15 bp, Homo sapiens
acatctgattgcaca

SEQ ID NO: 601820 - DNA, 15 bp, Homo sapiens
catctgattgcacaa

SEQ ID NO: 601821 - DNA, 15 bp, Homo sapiens
atctgattgcacaag

SEQ ID NO: 601822 - DNA, 15 bp, Homo sapiens
tctgattgcacaagt

SEQ ID NO: 601823 - DNA, 15 bp, Homo sapiens
ctgattgcacaagtc

SEQ ID NO: 601824 - DNA, 15 bp, Homo sapiens
tgattgcacaagtct

SEQ ID NO: 601825 - DNA, 15 bp, Homo sapiens
gattgcacaagtctc

SEQ ID NO: 601826 - DNA, 15 bp, Homo sapiens
attgcacaagtctcc

SEQ ID NO: 601827 - DNA, 15 bp, Homo sapiens
ttgcacaagtctcct

SEQ ID NO: 601828 - DNA, 15 bp, Homo sapiens
tgcacaagtctcctc

SEQ ID NO: 601829 - DNA, 15 bp, Homo sapiens
gcacaagtctcctcc

SEQ ID NO: 601830 - DNA, 15 bp, Homo sapiens
cacaagtctcctccc

SEQ ID NO: 601831 - DNA, 15 bp, Homo sapiens
acaagtctcctccca

SEQ ID NO: 601832 - DNA, 15 bp, Homo sapiens
caagtctcctcccat

SEQ ID NO: 601833 - DNA, 15 bp, Homo sapiens
aagtctcctcccata

SEQ ID NO: 601834 - DNA, 15 bp, Homo sapiens
agtctcctcccatat

SEQ ID NO: 601835 - DNA, 15 bp, Homo sapiens
gtctcctcccatata

SEQ ID NO: 601836 - DNA, 15 bp, Homo sapiens
tctcctcccatatag

SEQ ID NO: 601837 - DNA, 15 bp, Homo sapiens
ctcctcccatataga

SEQ ID NO: 601838 - DNA, 15 bp, Homo sapiens
tcctcccatatagaa

SEQ ID NO: 601839 - DNA, 15 bp, Homo sapiens
cctcccatatagaaa

SEQ ID NO: 601840 - DNA, 15 bp, Homo sapiens
ctcccatatagaaat

SEQ ID NO: 601841 - DNA, 15 bp, Homo sapiens
tcccatatagaaatg

SEQ ID NO: 601842 - DNA, 15 bp, Homo sapiens
cccatatagaaatgg

SEQ ID NO: 601843 - DNA, 15 bp, Homo sapiens
ccatatagaaatgga

SEQ ID NO: 601844 - DNA, 15 bp, Homo sapiens
catatagaaatggat

SEQ ID NO: 601845 - DNA, 15 bp, Homo sapiens
atatagaaatggatt

SEQ ID NO: 601846 - DNA, 15 bp, Homo sapiens
tatagaaatggattc

SEQ ID NO: 601847 - DNA, 15 bp, Homo sapiens
atagaaatggattct

SEQ ID NO: 601848 - DNA, 15 bp, Homo sapiens
tagaaatggattctt

SEQ ID NO: 601849 - DNA, 15 bp, Homo sapiens
agaaatggattcttc

SEQ ID NO: 601850 - DNA, 15 bp, Homo sapiens
gaaatggattcttcc

SEQ ID NO: 601851 - DNA, 15 bp, Homo sapiens
aaatggattcttcca

SEQ ID NO: 601852 - DNA, 15 bp, Homo sapiens
aatggattcttccac

SEQ ID NO: 601853 - DNA, 15 bp, Homo sapiens
atggattcttccacg

SEQ ID NO: 601854 - DNA, 15 bp, Homo sapiens
tggattcttccacgc

SEQ ID NO: 601855 - DNA, 15 bp, Homo sapiens
ggattcttccacgca

SEQ ID NO: 601856 - DNA, 15 bp, Homo sapiens
gattcttccacgcaa

SEQ ID NO: 601857 - DNA, 15 bp, Homo sapiens
attcttccacgcaat

SEQ ID NO: 601858 - DNA, 15 bp, Homo sapiens
ttcttccacgcaata

SEQ ID NO: 601859 - DNA, 15 bp, Homo sapiens
tcttccacgcaatag

SEQ ID NO: 601860 - DNA, 15 bp, Homo sapiens
cttccacgcaataga

SEQ ID NO: 601861 - DNA, 15 bp, Homo sapiens
ttccacgcaatagat

SEQ ID NO: 601862 - DNA, 15 bp, Homo sapiens
tccacgcaatagata

SEQ ID NO: 601863 - DNA, 15 bp, Homo sapiens
ccacgcaatagataa

SEQ ID NO: 601864 - DNA, 15 bp, Homo sapiens
cacgcaatagataag

SEQ ID NO: 601865 - DNA, 15 bp, Homo sapiens
acgcaatagataaga

SEQ ID NO: 601866 - DNA, 15 bp, Homo sapiens
cgcaatagataagag

SEQ ID NO: 601867 - DNA, 15 bp, Homo sapiens
gcaatagataagagg

SEQ ID NO: 601868 - DNA, 15 bp, Homo sapiens
caatagataagaggt

SEQ ID NO: 601869 - DNA, 15 bp, Homo sapiens
aatagataagaggtg

SEQ ID NO: 601870 - DNA, 15 bp, Homo sapiens
atagataagaggtgc

SEQ ID NO: 601871 - DNA, 15 bp, Homo sapiens
tagataagaggtgct

SEQ ID NO: 601872 - DNA, 15 bp, Homo sapiens
agataagaggtgctg

SEQ ID NO: 601873 - DNA, 15 bp, Homo sapiens
gataagaggtgctgg

SEQ ID NO: 601874 - DNA, 15 bp, Homo sapiens
ataagaggtgctggg

SEQ ID NO: 601875 - DNA, 15 bp, Homo sapiens
taagaggtgctgggg

SEQ ID NO: 601876 - DNA, 15 bp, Homo sapiens
aagaggtgctgggga

SEQ ID NO: 601877 - DNA, 15 bp, Homo sapiens
agaggtgctggggat

SEQ ID NO: 601878 - DNA, 15 bp, Homo sapiens
gaggtgctggggata

SEQ ID NO: 601879 - DNA, 15 bp, Homo sapiens
aggtgctggggatat

SEQ ID NO: 601880 - DNA, 15 bp, Homo sapiens
ggtgctggggatatg

SEQ ID NO: 601881 - DNA, 15 bp, Homo sapiens
gtgctggggatatga

SEQ ID NO: 601882 - DNA, 15 bp, Homo sapiens
tgctggggatatgat

SEQ ID NO: 601883 - DNA, 15 bp, Homo sapiens
gctggggatatgatg

SEQ ID NO: 601884 - DNA, 15 bp, Homo sapiens
ctggggatatgatga

SEQ ID NO: 601885 - DNA, 15 bp, Homo sapiens
tggggatatgatgat

SEQ ID NO: 601886 - DNA, 15 bp, Homo sapiens
ggggatatgatgatg

SEQ ID NO: 601887 - DNA, 15 bp, Homo sapiens
gggatatgatgatga

SEQ ID NO: 601888 - DNA, 15 bp, Homo sapiens
ggatatgatgatgaa

SEQ ID NO: 601889 - DNA, 15 bp, Homo sapiens
gatatgatgatgaac

SEQ ID NO: 601890 - DNA, 15 bp, Homo sapiens
atatgatgatgaaca

SEQ ID NO: 601891 - DNA, 15 bp, Homo sapiens
tatgatgatgaacac

SEQ ID NO: 601892 - DNA, 15 bp, Homo sapiens
atgatgatgaacaca

SEQ ID NO: 601893 - DNA, 15 bp, Homo sapiens
tgatgatgaacacac

SEQ ID NO: 601894 - DNA, 15 bp, Homo sapiens
gatgatgaacacaca

SEQ ID NO: 601895 - DNA, 15 bp, Homo sapiens
atgatgaacacacag

SEQ ID NO: 601896 - DNA, 15 bp, Homo sapiens
tgatgaacacacaga

SEQ ID NO: 601897 - DNA, 15 bp, Homo sapiens
gatgaacacacagat

SEQ ID NO: 601898 - DNA, 15 bp, Homo sapiens
atgaacacacagatt

SEQ ID NO: 601899 - DNA, 15 bp, Homo sapiens
tgaacacacagattt

SEQ ID NO: 601900 - DNA, 15 bp, Homo sapiens
gaacacacagatttg

SEQ ID NO: 601901 - DNA, 15 bp, Homo sapiens
aacacacagatttgg

SEQ ID NO: 601902 - DNA, 15 bp, Homo sapiens
acacacagatttggt

SEQ ID NO: 601903 - DNA, 15 bp, Homo sapiens
cacacagatttggtc

SEQ ID NO: 601904 - DNA, 15 bp, Homo sapiens
acacagatttggtca

SEQ ID NO: 601905 - DNA, 15 bp, Homo sapiens
cacagatttggtcat

SEQ ID NO: 601906 - DNA, 15 bp, Homo sapiens
acagatttggtcatg

SEQ ID NO: 601907 - DNA, 15 bp, Homo sapiens
cagatttggtcatga

SEQ ID NO: 601908 - DNA, 15 bp, Homo sapiens
agatttggtcatgac

SEQ ID NO: 601909 - DNA, 15 bp, Homo sapiens
gatttggtcatgacc

SEQ ID NO: 601910 - DNA, 15 bp, Homo sapiens
atttggtcatgaccc

SEQ ID NO: 601911 - DNA, 15 bp, Homo sapiens
tttggtcatgaccct

SEQ ID NO: 601912 - DNA, 15 bp, Homo sapiens
ttggtcatgaccctg

SEQ ID NO: 601913 - DNA, 15 bp, Homo sapiens
tggtcatgaccctgt

SEQ ID NO: 601914 - DNA, 15 bp, Homo sapiens
ggtcatgaccctgtg

SEQ ID NO: 601915 - DNA, 15 bp, Homo sapiens
gtcatgaccctgtgg

SEQ ID NO: 601916 - DNA, 15 bp, Homo sapiens
tcatgaccctgtggg

SEQ ID NO: 601917 - DNA, 15 bp, Homo sapiens
catgaccctgtggga

SEQ ID NO: 601918 - DNA, 15 bp, Homo sapiens
atgaccctgtgggaa

SEQ ID NO: 601919 - DNA, 15 bp, Homo sapiens
tgaccctgtgggaaa

SEQ ID NO: 601920 - DNA, 15 bp, Homo sapiens
gaccctgtgggaaag

SEQ ID NO: 601921 - DNA, 15 bp, Homo sapiens
accctgtgggaaaga

SEQ ID NO: 601922 - DNA, 15 bp, Homo sapiens
ccctgtgggaaagag

SEQ ID NO: 601923 - DNA, 15 bp, Homo sapiens
cctgtgggaaagaga

SEQ ID NO: 601924 - DNA, 15 bp, Homo sapiens
ctgtgggaaagagag

SEQ ID NO: 601925 - DNA, 15 bp, Homo sapiens
tgtgggaaagagaga

SEQ ID NO: 601926 - DNA, 15 bp, Homo sapiens
gtgggaaagagagat

SEQ ID NO: 601927 - DNA, 15 bp, Homo sapiens
tgggaaagagagatg

SEQ ID NO: 601928 - DNA, 15 bp, Homo sapiens
gggaaagagagatgg

SEQ ID NO: 601929 - DNA, 15 bp, Homo sapiens
ggaaagagagatggg

SEQ ID NO: 601930 - DNA, 15 bp, Homo sapiens
gaaagagagatggga

SEQ ID NO: 601931 - DNA, 15 bp, Homo sapiens
aaagagagatgggaa

SEQ ID NO: 601932 - DNA, 15 bp, Homo sapiens
aagagagatgggaaa

SEQ ID NO: 601933 - DNA, 15 bp, Homo sapiens
agagagatgggaaaa

SEQ ID NO: 601934 - DNA, 15 bp, Homo sapiens
gagagatgggaaaaa

SEQ ID NO: 601935 - DNA, 15 bp, Homo sapiens
agagatgggaaaaaa

SEQ ID NO: 601936 - DNA, 15 bp, Homo sapiens
gagatgggaaaaaaa

SEQ ID NO: 601937 - DNA, 15 bp, Homo sapiens
agatgggaaaaaaac

SEQ ID NO: 601938 - DNA, 15 bp, Homo sapiens
gatgggaaaaaaaca

SEQ ID NO: 601939 - DNA, 15 bp, Homo sapiens
atgggaaaaaaacaa

SEQ ID NO: 601940 - DNA, 15 bp, Homo sapiens
tgggaaaaaaacaat

SEQ ID NO: 601941 - DNA, 15 bp, Homo sapiens
gggaaaaaaacaatt

SEQ ID NO: 601942 - DNA, 15 bp, Homo sapiens
ggaaaaaaacaattc

SEQ ID NO: 601943 - DNA, 15 bp, Homo sapiens
gaaaaaaacaattct

SEQ ID NO: 601944 - DNA, 15 bp, Homo sapiens
aaaaaaacaattctc

SEQ ID NO: 601945 - DNA, 15 bp, Homo sapiens
aaaaaacaattctct

SEQ ID NO: 601946 - DNA, 15 bp, Homo sapiens
aaaaacaattctctt

SEQ ID NO: 601947 - DNA, 15 bp, Homo sapiens
aaaacaattctcttc

SEQ ID NO: 601948 - DNA, 15 bp, Homo sapiens
aaacaattctcttca

SEQ ID NO: 601949 - DNA, 15 bp, Homo sapiens
aacaattctcttcaa

SEQ ID NO: 601950 - DNA, 15 bp, Homo sapiens
acaattctcttcaag

SEQ ID NO: 601951 - DNA, 15 bp, Homo sapiens
caattctcttcaagt

SEQ ID NO: 601952 - DNA, 15 bp, Homo sapiens
aattctcttcaagtg

SEQ ID NO: 601953 - DNA, 15 bp, Homo sapiens
attctcttcaagtgt

SEQ ID NO: 601954 - DNA, 15 bp, Homo sapiens
ttctcttcaagtgtg

SEQ ID NO: 601955 - DNA, 15 bp, Homo sapiens
tctcttcaagtgtga

SEQ ID NO: 601956 - DNA, 15 bp, Homo sapiens
ctcttcaagtgtgat

SEQ ID NO: 601957 - DNA, 15 bp, Homo sapiens
tcttcaagtgtgatg

SEQ ID NO: 601958 - DNA, 15 bp, Homo sapiens
cttcaagtgtgatga

SEQ ID NO: 601959 - DNA, 15 bp, Homo sapiens
ttcaagtgtgatgag

SEQ ID NO: 601960 - DNA, 15 bp, Homo sapiens
tcaagtgtgatgagt

SEQ ID NO: 601961 - DNA, 15 bp, Homo sapiens
caagtgtgatgagtg

SEQ ID NO: 601962 - DNA, 15 bp, Homo sapiens
aagtgtgatgagtgt

SEQ ID NO: 601963 - DNA, 15 bp, Homo sapiens
agtgtgatgagtgtt

SEQ ID NO: 601964 - DNA, 15 bp, Homo sapiens
gtgtgatgagtgtta

SEQ ID NO: 601965 - DNA, 15 bp, Homo sapiens
tgtgatgagtgttac

SEQ ID NO: 601966 - DNA, 15 bp, Homo sapiens
gtgatgagtgttacg

SEQ ID NO: 601967 - DNA, 15 bp, Homo sapiens
tgatgagtgttacga

SEQ ID NO: 601968 - DNA, 15 bp, Homo sapiens
gatgagtgttacgaa

SEQ ID NO: 601969 - DNA, 15 bp, Homo sapiens
atgagtgttacgaaa

SEQ ID NO: 601970 - DNA, 15 bp, Homo sapiens
tgagtgttacgaaag

SEQ ID NO: 601971 - DNA, 15 bp, Homo sapiens
gagtgttacgaaagg

SEQ ID NO: 601972 - DNA, 15 bp, Homo sapiens
agtgttacgaaaggg

SEQ ID NO: 601973 - DNA, 15 bp, Homo sapiens
gtgttacgaaaggga

SEQ ID NO: 601974 - DNA, 15 bp, Homo sapiens
tgttacgaaagggag

SEQ ID NO: 601975 - DNA, 15 bp, Homo sapiens
gttacgaaagggagg

SEQ ID NO: 601976 - DNA, 15 bp, Homo sapiens
ttacgaaagggaggg

SEQ ID NO: 601977 - DNA, 15 bp, Homo sapiens
tacgaaagggaggga

SEQ ID NO: 601978 - DNA, 15 bp, Homo sapiens
acgaaagggagggaa

SEQ ID NO: 601979 - DNA, 15 bp, Homo sapiens
cgaaagggagggaaa

SEQ ID NO: 601980 - DNA, 15 bp, Homo sapiens
gaaagggagggaaaa

SEQ ID NO: 601981 - DNA, 15 bp, Homo sapiens
aaagggagggaaaag

SEQ ID NO: 601982 - DNA, 15 bp, Homo sapiens
aagggagggaaaagt

SEQ ID NO: 601983 - DNA, 15 bp, Homo sapiens
agggagggaaaagtt

SEQ ID NO: 601984 - DNA, 15 bp, Homo sapiens
gggagggaaaagttg

SEQ ID NO: 601985 - DNA, 15 bp, Homo sapiens
ggagggaaaagttga

SEQ ID NO: 601986 - DNA, 15 bp, Homo sapiens
gagggaaaagttgaa

SEQ ID NO: 601987 - DNA, 15 bp, Homo sapiens
agggaaaagttgaaa

SEQ ID NO: 601988 - DNA, 15 bp, Homo sapiens
gggaaaagttgaaac

SEQ ID NO: 601989 - DNA, 15 bp, Homo sapiens
ggaaaagttgaaaca

SEQ ID NO: 601990 - DNA, 15 bp, Homo sapiens
gaaaagttgaaacag

SEQ ID NO: 601991 - DNA, 15 bp, Homo sapiens
aaaagttgaaacagg

SEQ ID NO: 601992 - DNA, 15 bp, Homo sapiens
aaagttgaaacaggt

SEQ ID NO: 601993 - DNA, 15 bp, Homo sapiens
aagttgaaacaggtt

SEQ ID NO: 601994 - DNA, 15 bp, Homo sapiens
agttgaaacaggttt

SEQ ID NO: 601995 - DNA, 15 bp, Homo sapiens
gttgaaacaggtttt

SEQ ID NO: 601996 - DNA, 15 bp, Homo sapiens
ttgaaacaggttttt

SEQ ID NO: 601997 - DNA, 15 bp, Homo sapiens
tgaaacaggtttttt

SEQ ID NO: 601998 - DNA, 15 bp, Homo sapiens
gaaacaggttttttt

SEQ ID NO: 601999 - DNA, 15 bp, Homo sapiens
aaacaggtttttttc

SEQ ID NO: 602000 - DNA, 15 bp, Homo sapiens
aacaggtttttttcc

SEQ ID NO: 602001 - DNA, 15 bp, Homo sapiens
acaggtttttttcca

SEQ ID NO: 602002 - DNA, 15 bp, Homo sapiens
caggtttttttccaa

SEQ ID NO: 602003 - DNA, 15 bp, Homo sapiens
aggtttttttccaaa

SEQ ID NO: 602004 - DNA, 15 bp, Homo sapiens
ggtttttttccaaac

SEQ ID NO: 602005 - DNA, 15 bp, Homo sapiens
gtttttttccaaact

SEQ ID NO: 602006 - DNA, 15 bp, Homo sapiens
tttttttccaaactt

SEQ ID NO: 602007 - DNA, 15 bp, Homo sapiens
ttttttccaaacttt

SEQ ID NO: 602008 - DNA, 15 bp, Homo sapiens
tttttccaaactttt

SEQ ID NO: 602009 - DNA, 15 bp, Homo sapiens
ttttccaaacttttc

SEQ ID NO: 602010 - DNA, 15 bp, Homo sapiens
tttccaaacttttct

SEQ ID NO: 602011 - DNA, 15 bp, Homo sapiens
ttccaaacttttctc

SEQ ID NO: 602012 - DNA, 15 bp, Homo sapiens
tccaaacttttctcc

SEQ ID NO: 602013 - DNA, 15 bp, Homo sapiens
ccaaacttttctccc

SEQ ID NO: 602014 - DNA, 15 bp, Homo sapiens
caaacttttctccct

SEQ ID NO: 602015 - DNA, 15 bp, Homo sapiens
aaacttttctccctc

SEQ ID NO: 602016 - DNA, 15 bp, Homo sapiens
aacttttctccctcc

SEQ ID NO: 602017 - DNA, 15 bp, Homo sapiens
acttttctccctcca

SEQ ID NO: 602018 - DNA, 15 bp, Homo sapiens
cttttctccctccat

SEQ ID NO: 602019 - DNA, 15 bp, Homo sapiens
ttttctccctccatt

SEQ ID NO: 602020 - DNA, 15 bp, Homo sapiens
tttctccctccatta

SEQ ID NO: 602021 - DNA, 15 bp, Homo sapiens
ttctccctccattat

SEQ ID NO: 602022 - DNA, 15 bp, Homo sapiens
tctccctccattatt

SEQ ID NO: 602023 - DNA, 15 bp, Homo sapiens
ctccctccattattc

SEQ ID NO: 602024 - DNA, 15 bp, Homo sapiens
tccctccattattcg

SEQ ID NO: 602025 - DNA, 15 bp, Homo sapiens
ccctccattattcgc

SEQ ID NO: 602026 - DNA, 15 bp, Homo sapiens
cctccattattcgca

SEQ ID NO: 602027 - DNA, 15 bp, Homo sapiens
ctccattattcgcag

SEQ ID NO: 602028 - DNA, 15 bp, Homo sapiens
tccattattcgcagc

SEQ ID NO: 602029 - DNA, 15 bp, Homo sapiens
ccattattcgcagct

SEQ ID NO: 602030 - DNA, 15 bp, Homo sapiens
cattattcgcagctg

SEQ ID NO: 602031 - DNA, 15 bp, Homo sapiens
attattcgcagctga

SEQ ID NO: 602032 - DNA, 15 bp, Homo sapiens
ttattcgcagctgac

SEQ ID NO: 602033 - DNA, 15 bp, Homo sapiens
tattcgcagctgact

SEQ ID NO: 602034 - DNA, 15 bp, Homo sapiens
attcgcagctgactt

SEQ ID NO: 602035 - DNA, 15 bp, Homo sapiens
ttcgcagctgacttg

SEQ ID NO: 602036 - DNA, 15 bp, Homo sapiens
tcgcagctgacttgg

SEQ ID NO: 602037 - DNA, 15 bp, Homo sapiens
cgcagctgacttggg

SEQ ID NO: 602038 - DNA, 15 bp, Homo sapiens
gcagctgacttgggc

SEQ ID NO: 602039 - DNA, 15 bp, Homo sapiens
cagctgacttgggct

SEQ ID NO: 602040 - DNA, 15 bp, Homo sapiens
agctgacttgggctc

SEQ ID NO: 602041 - DNA, 15 bp, Homo sapiens
gctgacttgggctcc

SEQ ID NO: 602042 - DNA, 15 bp, Homo sapiens
ctgacttgggctcca

SEQ ID NO: 602043 - DNA, 15 bp, Homo sapiens
tgacttgggctccac

SEQ ID NO: 602044 - DNA, 15 bp, Homo sapiens
gacttgggctccacc

SEQ ID NO: 602045 - DNA, 15 bp, Homo sapiens
acttgggctccacca

SEQ ID NO: 602046 - DNA, 15 bp, Homo sapiens
cttgggctccaccaa

SEQ ID NO: 602047 - DNA, 15 bp, Homo sapiens
ttgggctccaccaac

SEQ ID NO: 602048 - DNA, 15 bp, Homo sapiens
tgggctccaccaacc

SEQ ID NO: 602049 - DNA, 15 bp, Homo sapiens
gggctccaccaacct

SEQ ID NO: 602050 - DNA, 15 bp, Homo sapiens
ggctccaccaacctg

SEQ ID NO: 602051 - DNA, 15 bp, Homo sapiens
gctccaccaacctgg

SEQ ID NO: 602052 - DNA, 15 bp, Homo sapiens
ctccaccaacctgga

SEQ ID NO: 602053 - DNA, 15 bp, Homo sapiens
tccaccaacctggaa

SEQ ID NO: 602054 - DNA, 15 bp, Homo sapiens
ccaccaacctggaaa

SEQ ID NO: 602055 - DNA, 15 bp, Homo sapiens
caccaacctggaaaa

SEQ ID NO: 602056 - DNA, 15 bp, Homo sapiens
accaacctggaaaac

SEQ ID NO: 602057 - DNA, 15 bp, Homo sapiens
ccaacctggaaaact

SEQ ID NO: 602058 - DNA, 15 bp, Homo sapiens
caacctggaaaactg

SEQ ID NO: 602059 - DNA, 15 bp, Homo sapiens
aacctggaaaactgc

SEQ ID NO: 602060 - DNA, 15 bp, Homo sapiens
acctggaaaactgca

SEQ ID NO: 602061 - DNA, 15 bp, Homo sapiens
cctggaaaactgcat

SEQ ID NO: 602062 - DNA, 15 bp, Homo sapiens
ctggaaaactgcatg

SEQ ID NO: 602063 - DNA, 15 bp, Homo sapiens
tggaaaactgcatgg

SEQ ID NO: 602064 - DNA, 15 bp, Homo sapiens
ggaaaactgcatggt

SEQ ID NO: 602065 - DNA, 15 bp, Homo sapiens
gaaaactgcatggtt

SEQ ID NO: 602066 - DNA, 15 bp, Homo sapiens
aaaactgcatggttg

SEQ ID NO: 602067 - DNA, 15 bp, Homo sapiens
aaactgcatggttgg

SEQ ID NO: 602068 - DNA, 15 bp, Homo sapiens
aactgcatggttgga

SEQ ID NO: 602069 - DNA, 15 bp, Homo sapiens
actgcatggttggaa

SEQ ID NO: 602070 - DNA, 15 bp, Homo sapiens
ctgcatggttggaat

SEQ ID NO: 602071 - DNA, 15 bp, Homo sapiens
tgcatggttggaatc

SEQ ID NO: 602072 - DNA, 15 bp, Homo sapiens
gcatggttggaatct

SEQ ID NO: 602073 - DNA, 15 bp, Homo sapiens
catggttggaatctg

SEQ ID NO: 602074 - DNA, 15 bp, Homo sapiens
atggttggaatctgt

SEQ ID NO: 602075 - DNA, 15 bp, Homo sapiens
tggttggaatctgtc

SEQ ID NO: 602076 - DNA, 15 bp, Homo sapiens
ggttggaatctgtct

SEQ ID NO: 602077 - DNA, 15 bp, Homo sapiens
gttggaatctgtctt

SEQ ID NO: 602078 - DNA, 15 bp, Homo sapiens
ttggaatctgtcttt

SEQ ID NO: 602079 - DNA, 15 bp, Homo sapiens
tggaatctgtcttta

SEQ ID NO: 602080 - DNA, 15 bp, Homo sapiens
ggaatctgtctttat

SEQ ID NO: 602081 - DNA, 15 bp, Homo sapiens
gaatctgtctttata

SEQ ID NO: 602082 - DNA, 15 bp, Homo sapiens
aatctgtctttataa

SEQ ID NO: 602083 - DNA, 15 bp, Homo sapiens
atctgtctttataaa

SEQ ID NO: 602084 - DNA, 15 bp, Homo sapiens
tctgtctttataaaa

SEQ ID NO: 602085 - DNA, 15 bp, Homo sapiens
ctgtctttataaaac

SEQ ID NO: 602086 - DNA, 15 bp, Homo sapiens
tgtctttataaaacg

SEQ ID NO: 602087 - DNA, 15 bp, Homo sapiens
gtctttataaaacgc

SEQ ID NO: 602088 - DNA, 15 bp, Homo sapiens
tctttataaaacgca

SEQ ID NO: 602089 - DNA, 15 bp, Homo sapiens
ctttataaaacgcat

SEQ ID NO: 602090 - DNA, 15 bp, Homo sapiens
tttataaaacgcatc

SEQ ID NO: 602091 - DNA, 15 bp, Homo sapiens
ttataaaacgcatct

SEQ ID NO: 602092 - DNA, 15 bp, Homo sapiens
tataaaacgcatctc

SEQ ID NO: 602093 - DNA, 15 bp, Homo sapiens
ataaaacgcatctca

SEQ ID NO: 602094 - DNA, 15 bp, Homo sapiens
taaaacgcatctcaa

SEQ ID NO: 602095 - DNA, 15 bp, Homo sapiens
aaaacgcatctcaac

SEQ ID NO: 602096 - DNA, 15 bp, Homo sapiens
aaacgcatctcaacc

SEQ ID NO: 602097 - DNA, 15 bp, Homo sapiens
aacgcatctcaacct

SEQ ID NO: 602098 - DNA, 15 bp, Homo sapiens
acgcatctcaacctg

SEQ ID NO: 602099 - DNA, 15 bp, Homo sapiens
cgcatctcaacctgg

SEQ ID NO: 602100 - DNA, 15 bp, Homo sapiens
gcatctcaacctggg

SEQ ID NO: 602101 - DNA, 15 bp, Homo sapiens
catctcaacctgggc

SEQ ID NO: 602102 - DNA, 15 bp, Homo sapiens
atctcaacctgggcc

SEQ ID NO: 602103 - DNA, 15 bp, Homo sapiens
tctcaacctgggccg

SEQ ID NO: 602104 - DNA, 15 bp, Homo sapiens
ctcaacctgggccga

SEQ ID NO: 602105 - DNA, 15 bp, Homo sapiens
tcaacctgggccgag

SEQ ID NO: 602106 - DNA, 15 bp, Homo sapiens
caacctgggccgagt

SEQ ID NO: 602107 - DNA, 15 bp, Homo sapiens
aacctgggccgagta

SEQ ID NO: 602108 - DNA, 15 bp, Homo sapiens
acctgggccgagtat

SEQ ID NO: 602109 - DNA, 15 bp, Homo sapiens
cctgggccgagtatg

SEQ ID NO: 602110 - DNA, 15 bp, Homo sapiens
ctgggccgagtatgc

SEQ ID NO: 602111 - DNA, 15 bp, Homo sapiens
tgggccgagtatgca

SEQ ID NO: 602112 - DNA, 15 bp, Homo sapiens
gggccgagtatgcac

SEQ ID NO: 602113 - DNA, 15 bp, Homo sapiens
ggccgagtatgcaca

SEQ ID NO: 602114 - DNA, 15 bp, Homo sapiens
gccgagtatgcacac

SEQ ID NO: 602115 - DNA, 15 bp, Homo sapiens
ccgagtatgcacact

SEQ ID NO: 602116 - DNA, 15 bp, Homo sapiens
cgagtatgcacactg

SEQ ID NO: 602117 - DNA, 15 bp, Homo sapiens
gagtatgcacactga

SEQ ID NO: 602118 - DNA, 15 bp, Homo sapiens
agtatgcacactgat

SEQ ID NO: 602119 - DNA, 15 bp, Homo sapiens
gtatgcacactgatg

SEQ ID NO: 602120 - DNA, 15 bp, Homo sapiens
tatgcacactgatgt

SEQ ID NO: 602121 - DNA, 15 bp, Homo sapiens
atgcacactgatgtg

SEQ ID NO: 602122 - DNA, 15 bp, Homo sapiens
tgcacactgatgtgg

SEQ ID NO: 602123 - DNA, 15 bp, Homo sapiens
gcacactgatgtggg

SEQ ID NO: 602124 - DNA, 15 bp, Homo sapiens
cacactgatgtggga

SEQ ID NO: 602125 - DNA, 15 bp, Homo sapiens
acactgatgtgggaa

SEQ ID NO: 602126 - DNA, 15 bp, Homo sapiens
cactgatgtgggaaa

SEQ ID NO: 602127 - DNA, 15 bp, Homo sapiens
actgatgtgggaaag

SEQ ID NO: 602128 - DNA, 15 bp, Homo sapiens
ctgatgtgggaaagt

SEQ ID NO: 602129 - DNA, 15 bp, Homo sapiens
tgatgtgggaaagtt

SEQ ID NO: 602130 - DNA, 15 bp, Homo sapiens
gatgtgggaaagtta

SEQ ID NO: 602131 - DNA, 15 bp, Homo sapiens
atgtgggaaagttag

SEQ ID NO: 602132 - DNA, 15 bp, Homo sapiens
tgtgggaaagttaga

SEQ ID NO: 602133 - DNA, 15 bp, Homo sapiens
gtgggaaagttagag

SEQ ID NO: 602134 - DNA, 15 bp, Homo sapiens
tgggaaagttagaga

SEQ ID NO: 602135 - DNA, 15 bp, Homo sapiens
gggaaagttagagaa

SEQ ID NO: 602136 - DNA, 15 bp, Homo sapiens
ggaaagttagagaag

SEQ ID NO: 602137 - DNA, 15 bp, Homo sapiens
gaaagttagagaaga

SEQ ID NO: 602138 - DNA, 15 bp, Homo sapiens
aaagttagagaagag

SEQ ID NO: 602139 - DNA, 15 bp, Homo sapiens
aagttagagaagagc

SEQ ID NO: 602140 - DNA, 15 bp, Homo sapiens
agttagagaagagcc

SEQ ID NO: 602141 - DNA, 15 bp, Homo sapiens
gttagagaagagccc

SEQ ID NO: 602142 - DNA, 15 bp, Homo sapiens
ttagagaagagccca

SEQ ID NO: 602143 - DNA, 15 bp, Homo sapiens
tagagaagagcccat

SEQ ID NO: 602144 - DNA, 15 bp, Homo sapiens
agagaagagcccatt

SEQ ID NO: 602145 - DNA, 15 bp, Homo sapiens
gagaagagcccattg

SEQ ID NO: 602146 - DNA, 15 bp, Homo sapiens
agaagagcccattgt

SEQ ID NO: 602147 - DNA, 15 bp, Homo sapiens
gaagagcccattgta

SEQ ID NO: 602148 - DNA, 15 bp, Homo sapiens
aagagcccattgtac

SEQ ID NO: 602149 - DNA, 15 bp, Homo sapiens
agagcccattgtact

SEQ ID NO: 602150 - DNA, 15 bp, Homo sapiens
gagcccattgtacta

SEQ ID NO: 602151 - DNA, 15 bp, Homo sapiens
agcccattgtactaa

SEQ ID NO: 602152 - DNA, 15 bp, Homo sapiens
gcccattgtactaat

SEQ ID NO: 602153 - DNA, 15 bp, Homo sapiens
cccattgtactaatg

SEQ ID NO: 602154 - DNA, 15 bp, Homo sapiens
ccattgtactaatgc

SEQ ID NO: 602155 - DNA, 15 bp, Homo sapiens
cattgtactaatgct

SEQ ID NO: 602156 - DNA, 15 bp, Homo sapiens
attgtactaatgctc

SEQ ID NO: 602157 - DNA, 15 bp, Homo sapiens
ttgtactaatgctca

SEQ ID NO: 602158 - DNA, 15 bp, Homo sapiens
tgtactaatgctcac

SEQ ID NO: 602159 - DNA, 15 bp, Homo sapiens
gtactaatgctcacc

SEQ ID NO: 602160 - DNA, 15 bp, Homo sapiens
tactaatgctcacct

SEQ ID NO: 602161 - DNA, 15 bp, Homo sapiens
actaatgctcacctg

SEQ ID NO: 602162 - DNA, 15 bp, Homo sapiens
ctaatgctcacctgc

SEQ ID NO: 602163 - DNA, 15 bp, Homo sapiens
taatgctcacctgct

SEQ ID NO: 602164 - DNA, 15 bp, Homo sapiens
aatgctcacctgcta

SEQ ID NO: 602165 - DNA, 15 bp, Homo sapiens
atgctcacctgctac

SEQ ID NO: 602166 - DNA, 15 bp, Homo sapiens
tgctcacctgctaca

SEQ ID NO: 602167 - DNA, 15 bp, Homo sapiens
gctcacctgctacag

SEQ ID NO: 602168 - DNA, 15 bp, Homo sapiens
ctcacctgctacagt

SEQ ID NO: 602169 - DNA, 15 bp, Homo sapiens
tcacctgctacagtg

SEQ ID NO: 602170 - DNA, 15 bp, Homo sapiens
cacctgctacagtgg

SEQ ID NO: 602171 - DNA, 15 bp, Homo sapiens
acctgctacagtggg

SEQ ID NO: 602172 - DNA, 15 bp, Homo sapiens
cctgctacagtggga

SEQ ID NO: 602173 - DNA, 15 bp, Homo sapiens
ctgctacagtgggag

SEQ ID NO: 602174 - DNA, 15 bp, Homo sapiens
tgctacagtgggagt

SEQ ID NO: 602175 - DNA, 15 bp, Homo sapiens
gctacagtgggagtc

SEQ ID NO: 602176 - DNA, 15 bp, Homo sapiens
ctacagtgggagtct

SEQ ID NO: 602177 - DNA, 15 bp, Homo sapiens
tacagtgggagtctc

SEQ ID NO: 602178 - DNA, 15 bp, Homo sapiens
acagtgggagtctct

SEQ ID NO: 602179 - DNA, 15 bp, Homo sapiens
cagtgggagtctctg

SEQ ID NO: 602180 - DNA, 15 bp, Homo sapiens
agtgggagtctctgt

SEQ ID NO: 602181 - DNA, 15 bp, Homo sapiens
gtgggagtctctgtt

SEQ ID NO: 602182 - DNA, 15 bp, Homo sapiens
tgggagtctctgtta

SEQ ID NO: 602183 - DNA, 15 bp, Homo sapiens
gggagtctctgttaa

SEQ ID NO: 602184 - DNA, 15 bp, Homo sapiens
ggagtctctgttaaa

SEQ ID NO: 602185 - DNA, 15 bp, Homo sapiens
gagtctctgttaaac

SEQ ID NO: 602186 - DNA, 15 bp, Homo sapiens
agtctctgttaaaca

SEQ ID NO: 602187 - DNA, 15 bp, Homo sapiens
gtctctgttaaacag

SEQ ID NO: 602188 - DNA, 15 bp, Homo sapiens
tctctgttaaacagt

SEQ ID NO: 602189 - DNA, 15 bp, Homo sapiens
ctctgttaaacagtc

SEQ ID NO: 602190 - DNA, 15 bp, Homo sapiens
tctgttaaacagtct

SEQ ID NO: 602191 - DNA, 15 bp, Homo sapiens
ctgttaaacagtctt

SEQ ID NO: 602192 - DNA, 15 bp, Homo sapiens
tgttaaacagtcttt

SEQ ID NO: 602193 - DNA, 15 bp, Homo sapiens
gttaaacagtctttt

SEQ ID NO: 602194 - DNA, 15 bp, Homo sapiens
ttaaacagtcttttc

SEQ ID NO: 602195 - DNA, 15 bp, Homo sapiens
taaacagtcttttct

SEQ ID NO: 602196 - DNA, 15 bp, Homo sapiens
aaacagtcttttctt

SEQ ID NO: 602197 - DNA, 15 bp, Homo sapiens
aacagtcttttcttc

SEQ ID NO: 602198 - DNA, 15 bp, Homo sapiens
acagtcttttcttca

SEQ ID NO: 602199 - DNA, 15 bp, Homo sapiens
cagtcttttcttcat

SEQ ID NO: 602200 - DNA, 15 bp, Homo sapiens
agtcttttcttcata

SEQ ID NO: 602201 - DNA, 15 bp, Homo sapiens
gtcttttcttcatag

SEQ ID NO: 602202 - DNA, 15 bp, Homo sapiens
tcttttcttcatagc

SEQ ID NO: 602203 - DNA, 15 bp, Homo sapiens
cttttcttcatagca

SEQ ID NO: 602204 - DNA, 15 bp, Homo sapiens
ttttcttcatagcat

SEQ ID NO: 602205 - DNA, 15 bp, Homo sapiens
tttcttcatagcatt

SEQ ID NO: 602206 - DNA, 15 bp, Homo sapiens
ttcttcatagcatta

SEQ ID NO: 602207 - DNA, 15 bp, Homo sapiens
tcttcatagcattaa

SEQ ID NO: 602208 - DNA, 15 bp, Homo sapiens
cttcatagcattaaa

SEQ ID NO: 602209 - DNA, 15 bp, Homo sapiens
ttcatagcattaaaa

SEQ ID NO: 602210 - DNA, 15 bp, Homo sapiens
tcatagcattaaaaa

SEQ ID NO: 602211 - DNA, 15 bp, Homo sapiens
catagcattaaaaaa

SEQ ID NO: 602212 - DNA, 15 bp, Homo sapiens
atagcattaaaaaaa

SEQ ID NO: 602213 - DNA, 15 bp, Homo sapiens
tagcattaaaaaaat

SEQ ID NO: 602214 - DNA, 15 bp, Homo sapiens
agcattaaaaaaatt

SEQ ID NO: 602215 - DNA, 15 bp, Homo sapiens
gcattaaaaaaattt

SEQ ID NO: 602216 - DNA, 15 bp, Homo sapiens
cattaaaaaaattta

SEQ ID NO: 602217 - DNA, 15 bp, Homo sapiens
attaaaaaaatttat

SEQ ID NO: 602218 - DNA, 15 bp, Homo sapiens
ttaaaaaaatttata

SEQ ID NO: 602219 - DNA, 15 bp, Homo sapiens
taaaaaaatttatat

SEQ ID NO: 602220 - DNA, 15 bp, Homo sapiens
aaaaaaatttatatc

SEQ ID NO: 602221 - DNA, 15 bp, Homo sapiens
aaaaaatttatatca

SEQ ID NO: 602222 - DNA, 15 bp, Homo sapiens
aaaaatttatatcac

SEQ ID NO: 602223 - DNA, 15 bp, Homo sapiens
aaaatttatatcact

SEQ ID NO: 602224 - DNA, 15 bp, Homo sapiens
aaatttatatcacta

SEQ ID NO: 602225 - DNA, 15 bp, Homo sapiens
aatttatatcactac

SEQ ID NO: 602226 - DNA, 15 bp, Homo sapiens
atttatatcactaca

SEQ ID NO: 602227 - DNA, 15 bp, Homo sapiens
tttatatcactacaa

SEQ ID NO: 602228 - DNA, 15 bp, Homo sapiens
ttatatcactacaat

SEQ ID NO: 602229 - DNA, 15 bp, Homo sapiens
tatatcactacaata

SEQ ID NO: 602230 - DNA, 15 bp, Homo sapiens
atatcactacaataa

SEQ ID NO: 602231 - DNA, 15 bp, Homo sapiens
tatcactacaataag

SEQ ID NO: 602232 - DNA, 15 bp, Homo sapiens
atcactacaataagg

SEQ ID NO: 602233 - DNA, 15 bp, Homo sapiens
tcactacaataaggt

SEQ ID NO: 602234 - DNA, 15 bp, Homo sapiens
cactacaataaggtt

SEQ ID NO: 602235 - DNA, 15 bp, Homo sapiens
actacaataaggttg

SEQ ID NO: 602236 - DNA, 15 bp, Homo sapiens
ctacaataaggttga

SEQ ID NO: 602237 - DNA, 15 bp, Homo sapiens
tacaataaggttgaa

SEQ ID NO: 602238 - DNA, 15 bp, Homo sapiens
acaataaggttgaaa

SEQ ID NO: 602239 - DNA, 15 bp, Homo sapiens
caataaggttgaaat

SEQ ID NO: 602240 - DNA, 15 bp, Homo sapiens
aataaggttgaaatt

SEQ ID NO: 602241 - DNA, 15 bp, Homo sapiens
ataaggttgaaattg

SEQ ID NO: 602242 - DNA, 15 bp, Homo sapiens
taaggttgaaattga

SEQ ID NO: 602243 - DNA, 15 bp, Homo sapiens
aaggttgaaattgat

SEQ ID NO: 602244 - DNA, 15 bp, Homo sapiens
aggttgaaattgata

SEQ ID NO: 602245 - DNA, 15 bp, Homo sapiens
ggttgaaattgatag

SEQ ID NO: 602246 - DNA, 15 bp, Homo sapiens
gttgaaattgataga

SEQ ID NO: 602247 - DNA, 15 bp, Homo sapiens
ttgaaattgatagag

SEQ ID NO: 602248 - DNA, 15 bp, Homo sapiens
tgaaattgatagaga

SEQ ID NO: 602249 - DNA, 15 bp, Homo sapiens
gaaattgatagagaa

SEQ ID NO: 602250 - DNA, 15 bp, Homo sapiens
aaattgatagagaat

SEQ ID NO: 602251 - DNA, 15 bp, Homo sapiens
aattgatagagaatg

SEQ ID NO: 602252 - DNA, 15 bp, Homo sapiens
attgatagagaatgt

SEQ ID NO: 602253 - DNA, 15 bp, Homo sapiens
ttgatagagaatgta

SEQ ID NO: 602254 - DNA, 15 bp, Homo sapiens
tgatagagaatgtac

SEQ ID NO: 602255 - DNA, 15 bp, Homo sapiens
gatagagaatgtaca

SEQ ID NO: 602256 - DNA, 15 bp, Homo sapiens
atagagaatgtacaa

SEQ ID NO: 602257 - DNA, 15 bp, Homo sapiens
tagagaatgtacaaa

SEQ ID NO: 602258 - DNA, 15 bp, Homo sapiens
agagaatgtacaaac

SEQ ID NO: 602259 - DNA, 15 bp, Homo sapiens
gagaatgtacaaaca

SEQ ID NO: 602260 - DNA, 15 bp, Homo sapiens
agaatgtacaaacaa

SEQ ID NO: 602261 - DNA, 15 bp, Homo sapiens
gaatgtacaaacaat

SEQ ID NO: 602262 - DNA, 15 bp, Homo sapiens
aatgtacaaacaatc

SEQ ID NO: 602263 - DNA, 15 bp, Homo sapiens
atgtacaaacaatcc

SEQ ID NO: 602264 - DNA, 15 bp, Homo sapiens
tgtacaaacaatccc

SEQ ID NO: 602265 - DNA, 15 bp, Homo sapiens
gtacaaacaatcccc

SEQ ID NO: 602266 - DNA, 15 bp, Homo sapiens
tacaaacaatcccca

SEQ ID NO: 602267 - DNA, 15 bp, Homo sapiens
acaaacaatccccaa

SEQ ID NO: 602268 - DNA, 15 bp, Homo sapiens
caaacaatccccaaa

SEQ ID NO: 602269 - DNA, 15 bp, Homo sapiens
aaacaatccccaaag

SEQ ID NO: 602270 - DNA, 15 bp, Homo sapiens
aacaatccccaaagt

SEQ ID NO: 602271 - DNA, 15 bp, Homo sapiens
acaatccccaaagta

SEQ ID NO: 602272 - DNA, 15 bp, Homo sapiens
caatccccaaagtat

SEQ ID NO: 602273 - DNA, 15 bp, Homo sapiens
aatccccaaagtata

SEQ ID NO: 602274 - DNA, 15 bp, Homo sapiens
atccccaaagtatat

SEQ ID NO: 602275 - DNA, 15 bp, Homo sapiens
tccccaaagtatatc

SEQ ID NO: 602276 - DNA, 15 bp, Homo sapiens
ccccaaagtatatca

SEQ ID NO: 602277 - DNA, 15 bp, Homo sapiens
cccaaagtatatcaa

SEQ ID NO: 602278 - DNA, 15 bp, Homo sapiens
ccaaagtatatcaac

SEQ ID NO: 602279 - DNA, 15 bp, Homo sapiens
caaagtatatcaaca

SEQ ID NO: 602280 - DNA, 15 bp, Homo sapiens
aaagtatatcaacac

SEQ ID NO: 602281 - DNA, 15 bp, Homo sapiens
aagtatatcaacact

SEQ ID NO: 602282 - DNA, 15 bp, Homo sapiens
agtatatcaacactc

SEQ ID NO: 602283 - DNA, 15 bp, Homo sapiens
gtatatcaacactct

SEQ ID NO: 602284 - DNA, 15 bp, Homo sapiens
tatatcaacactctt

SEQ ID NO: 602285 - DNA, 15 bp, Homo sapiens
atatcaacactctta

SEQ ID NO: 602286 - DNA, 15 bp, Homo sapiens
tatcaacactcttag

SEQ ID NO: 602287 - DNA, 15 bp, Homo sapiens
atcaacactcttagt

SEQ ID NO: 602288 - DNA, 15 bp, Homo sapiens
tcaacactcttagtt

SEQ ID NO: 602289 - DNA, 15 bp, Homo sapiens
caacactcttagttc

SEQ ID NO: 602290 - DNA, 15 bp, Homo sapiens
aacactcttagttct

SEQ ID NO: 602291 - DNA, 15 bp, Homo sapiens
acactcttagttctg

SEQ ID NO: 602292 - DNA, 15 bp, Homo sapiens
cactcttagttctga

SEQ ID NO: 602293 - DNA, 15 bp, Homo sapiens
actcttagttctgag

SEQ ID NO: 602294 - DNA, 15 bp, Homo sapiens
ctcttagttctgagt

SEQ ID NO: 602295 - DNA, 15 bp, Homo sapiens
tcttagttctgagta

SEQ ID NO: 602296 - DNA, 15 bp, Homo sapiens
cttagttctgagtag

SEQ ID NO: 602297 - DNA, 15 bp, Homo sapiens
ttagttctgagtaga

SEQ ID NO: 602298 - DNA, 15 bp, Homo sapiens
tagttctgagtagaa

SEQ ID NO: 602299 - DNA, 15 bp, Homo sapiens
agttctgagtagaag

SEQ ID NO: 602300 - DNA, 15 bp, Homo sapiens
gttctgagtagaagt

SEQ ID NO: 602301 - DNA, 15 bp, Homo sapiens
ttctgagtagaagtt

SEQ ID NO: 602302 - DNA, 15 bp, Homo sapiens
tctgagtagaagttc

SEQ ID NO: 602303 - DNA, 15 bp, Homo sapiens
ctgagtagaagttcc

SEQ ID NO: 602304 - DNA, 15 bp, Homo sapiens
tgagtagaagttcca

SEQ ID NO: 602305 - DNA, 15 bp, Homo sapiens
gagtagaagttccag

SEQ ID NO: 602306 - DNA, 15 bp, Homo sapiens
agtagaagttccaga

SEQ ID NO: 602307 - DNA, 15 bp, Homo sapiens
gtagaagttccagaa

SEQ ID NO: 602308 - DNA, 15 bp, Homo sapiens
tagaagttccagaag

SEQ ID NO: 602309 - DNA, 15 bp, Homo sapiens
agaagttccagaagg

SEQ ID NO: 602310 - DNA, 15 bp, Homo sapiens
gaagttccagaaggc

SEQ ID NO: 602311 - DNA, 15 bp, Homo sapiens
aagttccagaaggct

SEQ ID NO: 602312 - DNA, 15 bp, Homo sapiens
agttccagaaggctt

SEQ ID NO: 602313 - DNA, 15 bp, Homo sapiens
gttccagaaggcttc

SEQ ID NO: 602314 - DNA, 15 bp, Homo sapiens
ttccagaaggcttct

SEQ ID NO: 602315 - DNA, 15 bp, Homo sapiens
tccagaaggcttctt

SEQ ID NO: 602316 - DNA, 15 bp, Homo sapiens
ccagaaggcttcttg

SEQ ID NO: 602317 - DNA, 15 bp, Homo sapiens
cagaaggcttcttga

SEQ ID NO: 602318 - DNA, 15 bp, Homo sapiens
agaaggcttcttgac

SEQ ID NO: 602319 - DNA, 15 bp, Homo sapiens
gaaggcttcttgact

SEQ ID NO: 602320 - DNA, 15 bp, Homo sapiens
aaggcttcttgactg

SEQ ID NO: 602321 - DNA, 15 bp, Homo sapiens
aggcttcttgactgt

SEQ ID NO: 602322 - DNA, 15 bp, Homo sapiens
ggcttcttgactgtc

SEQ ID NO: 602323 - DNA, 15 bp, Homo sapiens
gcttcttgactgtct

SEQ ID NO: 602324 - DNA, 15 bp, Homo sapiens
cttcttgactgtcta

SEQ ID NO: 602325 - DNA, 15 bp, Homo sapiens
ttcttgactgtctag

SEQ ID NO: 602326 - DNA, 15 bp, Homo sapiens
tcttgactgtctaga

SEQ ID NO: 602327 - DNA, 15 bp, Homo sapiens
cttgactgtctagat

SEQ ID NO: 602328 - DNA, 15 bp, Homo sapiens
ttgactgtctagata

SEQ ID NO: 602329 - DNA, 15 bp, Homo sapiens
tgactgtctagatag

SEQ ID NO: 602330 - DNA, 15 bp, Homo sapiens
gactgtctagatagc

SEQ ID NO: 602331 - DNA, 15 bp, Homo sapiens
actgtctagatagca

SEQ ID NO: 602332 - DNA, 15 bp, Homo sapiens
ctgtctagatagcaa

SEQ ID NO: 602333 - DNA, 15 bp, Homo sapiens
tgtctagatagcaag

SEQ ID NO: 602334 - DNA, 15 bp, Homo sapiens
gtctagatagcaagt

SEQ ID NO: 602335 - DNA, 15 bp, Homo sapiens
tctagatagcaagtc

SEQ ID NO: 602336 - DNA, 15 bp, Homo sapiens
ctagatagcaagtct

SEQ ID NO: 602337 - DNA, 15 bp, Homo sapiens
tagatagcaagtcta

SEQ ID NO: 602338 - DNA, 15 bp, Homo sapiens
agatagcaagtctaa

SEQ ID NO: 602339 - DNA, 15 bp, Homo sapiens
gatagcaagtctaat

SEQ ID NO: 602340 - DNA, 15 bp, Homo sapiens
atagcaagtctaatc

SEQ ID NO: 602341 - DNA, 15 bp, Homo sapiens
tagcaagtctaatca

SEQ ID NO: 602342 - DNA, 15 bp, Homo sapiens
agcaagtctaatcat

SEQ ID NO: 602343 - DNA, 15 bp, Homo sapiens
gcaagtctaatcatt

SEQ ID NO: 602344 - DNA, 15 bp, Homo sapiens
caagtctaatcattt

SEQ ID NO: 602345 - DNA, 15 bp, Homo sapiens
aagtctaatcatttg

SEQ ID NO: 602346 - DNA, 15 bp, Homo sapiens
agtctaatcatttgt

SEQ ID NO: 602347 - DNA, 15 bp, Homo sapiens
gtctaatcatttgtg

SEQ ID NO: 602348 - DNA, 15 bp, Homo sapiens
tctaatcatttgtga

SEQ ID NO: 602349 - DNA, 15 bp, Homo sapiens
ctaatcatttgtgaa

SEQ ID NO: 602350 - DNA, 15 bp, Homo sapiens
taatcatttgtgaac

SEQ ID NO: 602351 - DNA, 15 bp, Homo sapiens
aatcatttgtgaact

SEQ ID NO: 602352 - DNA, 15 bp, Homo sapiens
atcatttgtgaacta

SEQ ID NO: 602353 - DNA, 15 bp, Homo sapiens
tcatttgtgaactaa

SEQ ID NO: 602354 - DNA, 15 bp, Homo sapiens
catttgtgaactaag

SEQ ID NO: 602355 - DNA, 15 bp, Homo sapiens
atttgtgaactaagt

SEQ ID NO: 602356 - DNA, 15 bp, Homo sapiens
tttgtgaactaagtt

SEQ ID NO: 602357 - DNA, 15 bp, Homo sapiens
ttgtgaactaagtta

SEQ ID NO: 602358 - DNA, 15 bp, Homo sapiens
tgtgaactaagttaa

SEQ ID NO: 602359 - DNA, 15 bp, Homo sapiens
gtgaactaagttaaa

SEQ ID NO: 602360 - DNA, 15 bp, Homo sapiens
tgaactaagttaaag

SEQ ID NO: 602361 - DNA, 15 bp, Homo sapiens
gaactaagttaaagc

SEQ ID NO: 602362 - DNA, 15 bp, Homo sapiens
aactaagttaaagca

SEQ ID NO: 602363 - DNA, 15 bp, Homo sapiens
actaagttaaagcag

SEQ ID NO: 602364 - DNA, 15 bp, Homo sapiens
ctaagttaaagcaga

SEQ ID NO: 602365 - DNA, 15 bp, Homo sapiens
taagttaaagcagaa

SEQ ID NO: 602366 - DNA, 15 bp, Homo sapiens
aagttaaagcagaag

SEQ ID NO: 602367 - DNA, 15 bp, Homo sapiens
agttaaagcagaagg

SEQ ID NO: 602368 - DNA, 15 bp, Homo sapiens
gttaaagcagaaggc

SEQ ID NO: 602369 - DNA, 15 bp, Homo sapiens
ttaaagcagaaggcc

SEQ ID NO: 602370 - DNA, 15 bp, Homo sapiens
taaagcagaaggccc

SEQ ID NO: 602371 - DNA, 15 bp, Homo sapiens
aaagcagaaggccca

SEQ ID NO: 602372 - DNA, 15 bp, Homo sapiens
aagcagaaggcccag

SEQ ID NO: 602373 - DNA, 15 bp, Homo sapiens
agcagaaggcccagt

SEQ ID NO: 602374 - DNA, 15 bp, Homo sapiens
gcagaaggcccagtt

SEQ ID NO: 602375 - DNA, 15 bp, Homo sapiens
cagaaggcccagttt

SEQ ID NO: 602376 - DNA, 15 bp, Homo sapiens
agaaggcccagttta

SEQ ID NO: 602377 - DNA, 15 bp, Homo sapiens
gaaggcccagtttat

SEQ ID NO: 602378 - DNA, 15 bp, Homo sapiens
aaggcccagtttata

SEQ ID NO: 602379 - DNA, 15 bp, Homo sapiens
aggcccagtttatat

SEQ ID NO: 602380 - DNA, 15 bp, Homo sapiens
ggcccagtttatatg

SEQ ID NO: 602381 - DNA, 15 bp, Homo sapiens
gcccagtttatatga

SEQ ID NO: 602382 - DNA, 15 bp, Homo sapiens
cccagtttatatgaa

SEQ ID NO: 602383 - DNA, 15 bp, Homo sapiens
ccagtttatatgaat

SEQ ID NO: 602384 - DNA, 15 bp, Homo sapiens
cagtttatatgaatt

SEQ ID NO: 602385 - DNA, 15 bp, Homo sapiens
agtttatatgaattg

SEQ ID NO: 602386 - DNA, 15 bp, Homo sapiens
gtttatatgaattgg

SEQ ID NO: 602387 - DNA, 15 bp, Homo sapiens
tttatatgaattggt

SEQ ID NO: 602388 - DNA, 15 bp, Homo sapiens
ttatatgaattggta

SEQ ID NO: 602389 - DNA, 15 bp, Homo sapiens
tatatgaattggtat

SEQ ID NO: 602390 - DNA, 15 bp, Homo sapiens
atatgaattggtatt

SEQ ID NO: 602391 - DNA, 15 bp, Homo sapiens
tatgaattggtatta

SEQ ID NO: 602392 - DNA, 15 bp, Homo sapiens
atgaattggtattac

SEQ ID NO: 602393 - DNA, 15 bp, Homo sapiens
tgaattggtattaca

SEQ ID NO: 602394 - DNA, 15 bp, Homo sapiens
gaattggtattacac

SEQ ID NO: 602395 - DNA, 15 bp, Homo sapiens
aattggtattacacc

SEQ ID NO: 602396 - DNA, 15 bp, Homo sapiens
attggtattacacca

SEQ ID NO: 602397 - DNA, 15 bp, Homo sapiens
ttggtattacaccat

SEQ ID NO: 602398 - DNA, 15 bp, Homo sapiens
tggtattacaccatt

SEQ ID NO: 602399 - DNA, 15 bp, Homo sapiens
ggtattacaccattt

SEQ ID NO: 602400 - DNA, 15 bp, Homo sapiens
gtattacaccatttg

SEQ ID NO: 602401 - DNA, 15 bp, Homo sapiens
tattacaccatttga

SEQ ID NO: 602402 - DNA, 15 bp, Homo sapiens
attacaccatttgac

SEQ ID NO: 602403 - DNA, 15 bp, Homo sapiens
ttacaccatttgacc

SEQ ID NO: 602404 - DNA, 15 bp, Homo sapiens
tacaccatttgacct

SEQ ID NO: 602405 - DNA, 15 bp, Homo sapiens
acaccatttgacctg

SEQ ID NO: 602406 - DNA, 15 bp, Homo sapiens
caccatttgacctga

SEQ ID NO: 602407 - DNA, 15 bp, Homo sapiens
accatttgacctgag

SEQ ID NO: 602408 - DNA, 15 bp, Homo sapiens
ccatttgacctgaga

SEQ ID NO: 602409 - DNA, 15 bp, Homo sapiens
catttgacctgagaa

SEQ ID NO: 602410 - DNA, 15 bp, Homo sapiens
atttgacctgagaac

SEQ ID NO: 602411 - DNA, 15 bp, Homo sapiens
tttgacctgagaaca

SEQ ID NO: 602412 - DNA, 15 bp, Homo sapiens
ttgacctgagaacag

SEQ ID NO: 602413 - DNA, 15 bp, Homo sapiens
tgacctgagaacagc

SEQ ID NO: 602414 - DNA, 15 bp, Homo sapiens
gacctgagaacagcc

SEQ ID NO: 602415 - DNA, 15 bp, Homo sapiens
acctgagaacagccc

SEQ ID NO: 602416 - DNA, 15 bp, Homo sapiens
cctgagaacagcccc

SEQ ID NO: 602417 - DNA, 15 bp, Homo sapiens
ctgagaacagcccct

SEQ ID NO: 602418 - DNA, 15 bp, Homo sapiens
tgagaacagcccctt

SEQ ID NO: 602419 - DNA, 15 bp, Homo sapiens
gagaacagccccttc

SEQ ID NO: 602420 - DNA, 15 bp, Homo sapiens
agaacagccccttca

SEQ ID NO: 602421 - DNA, 15 bp, Homo sapiens
gaacagccccttcat

SEQ ID NO: 602422 - DNA, 15 bp, Homo sapiens
aacagccccttcatc

SEQ ID NO: 602423 - DNA, 15 bp, Homo sapiens
acagccccttcatct

SEQ ID NO: 602424 - DNA, 15 bp, Homo sapiens
cagccccttcatctc

SEQ ID NO: 602425 - DNA, 15 bp, Homo sapiens
agccccttcatctct

SEQ ID NO: 602426 - DNA, 15 bp, Homo sapiens
gccccttcatctctg

SEQ ID NO: 602427 - DNA, 15 bp, Homo sapiens
ccccttcatctctga

SEQ ID NO: 602428 - DNA, 15 bp, Homo sapiens
cccttcatctctgag

SEQ ID NO: 602429 - DNA, 15 bp, Homo sapiens
ccttcatctctgagt

SEQ ID NO: 602430 - DNA, 15 bp, Homo sapiens
cttcatctctgagtg

SEQ ID NO: 602431 - DNA, 15 bp, Homo sapiens
ttcatctctgagtgc

SEQ ID NO: 602432 - DNA, 15 bp, Homo sapiens
tcatctctgagtgct

SEQ ID NO: 602433 - DNA, 15 bp, Homo sapiens
catctctgagtgctt

SEQ ID NO: 602434 - DNA, 15 bp, Homo sapiens
atctctgagtgcttt

SEQ ID NO: 602435 - DNA, 15 bp, Homo sapiens
tctctgagtgctttg

SEQ ID NO: 602436 - DNA, 15 bp, Homo sapiens
ctctgagtgctttga

SEQ ID NO: 602437 - DNA, 15 bp, Homo sapiens
tctgagtgctttgac

SEQ ID NO: 602438 - DNA, 15 bp, Homo sapiens
ctgagtgctttgact

SEQ ID NO: 602439 - DNA, 15 bp, Homo sapiens
tgagtgctttgacta

SEQ ID NO: 602440 - DNA, 15 bp, Homo sapiens
gagtgctttgactaa

SEQ ID NO: 602441 - DNA, 15 bp, Homo sapiens
agtgctttgactaaa

SEQ ID NO: 602442 - DNA, 15 bp, Homo sapiens
gtgctttgactaaat

SEQ ID NO: 602443 - DNA, 15 bp, Homo sapiens
tgctttgactaaatg

SEQ ID NO: 602444 - DNA, 15 bp, Homo sapiens
gctttgactaaatga

SEQ ID NO: 602445 - DNA, 15 bp, Homo sapiens
ctttgactaaatgag

SEQ ID NO: 602446 - DNA, 15 bp, Homo sapiens
tttgactaaatgagc

SEQ ID NO: 602447 - DNA, 15 bp, Homo sapiens
ttgactaaatgagca

SEQ ID NO: 602448 - DNA, 15 bp, Homo sapiens
tgactaaatgagcaa

SEQ ID NO: 602449 - DNA, 15 bp, Homo sapiens
gactaaatgagcaac

SEQ ID NO: 602450 - DNA, 15 bp, Homo sapiens
actaaatgagcaaca

SEQ ID NO: 602451 - DNA, 15 bp, Homo sapiens
ctaaatgagcaacat

SEQ ID NO: 602452 - DNA, 15 bp, Homo sapiens
taaatgagcaacata

SEQ ID NO: 602453 - DNA, 15 bp, Homo sapiens
aaatgagcaacataa

SEQ ID NO: 602454 - DNA, 15 bp, Homo sapiens
aatgagcaacataat

SEQ ID NO: 602455 - DNA, 15 bp, Homo sapiens
atgagcaacataata

SEQ ID NO: 602456 - DNA, 15 bp, Homo sapiens
tgagcaacataataa

SEQ ID NO: 602457 - DNA, 15 bp, Homo sapiens
gagcaacataataat

SEQ ID NO: 602458 - DNA, 15 bp, Homo sapiens
agcaacataataata

SEQ ID NO: 602459 - DNA, 15 bp, Homo sapiens
gcaacataataatag

SEQ ID NO: 602460 - DNA, 15 bp, Homo sapiens
caacataataatagt

SEQ ID NO: 602461 - DNA, 15 bp, Homo sapiens
aacataataatagta

SEQ ID NO: 602462 - DNA, 15 bp, Homo sapiens
acataataatagtaa

SEQ ID NO: 602463 - DNA, 15 bp, Homo sapiens
cataataatagtaat

SEQ ID NO: 602464 - DNA, 15 bp, Homo sapiens
ataataatagtaata

SEQ ID NO: 602465 - DNA, 15 bp, Homo sapiens
taataatagtaataa

SEQ ID NO: 602466 - DNA, 15 bp, Homo sapiens
aataatagtaataac

SEQ ID NO: 602467 - DNA, 15 bp, Homo sapiens
ataatagtaataacc

SEQ ID NO: 602468 - DNA, 15 bp, Homo sapiens
taatagtaataaccc

SEQ ID NO: 602469 - DNA, 15 bp, Homo sapiens
aatagtaataacccc

SEQ ID NO: 602470 - DNA, 15 bp, Homo sapiens
atagtaataacccct

SEQ ID NO: 602471 - DNA, 15 bp, Homo sapiens
tagtaataacccctt

SEQ ID NO: 602472 - DNA, 15 bp, Homo sapiens
agtaataacccctta

SEQ ID NO: 602473 - DNA, 15 bp, Homo sapiens
gtaataaccccttac

SEQ ID NO: 602474 - DNA, 15 bp, Homo sapiens
taataaccccttaca

SEQ ID NO: 602475 - DNA, 15 bp, Homo sapiens
aataaccccttacaa

SEQ ID NO: 602476 - DNA, 15 bp, Homo sapiens
ataaccccttacaag

SEQ ID NO: 602477 - DNA, 15 bp, Homo sapiens
taaccccttacaaga

SEQ ID NO: 602478 - DNA, 15 bp, Homo sapiens
aaccccttacaagat

SEQ ID NO: 602479 - DNA, 15 bp, Homo sapiens
accccttacaagatg

SEQ ID NO: 602480 - DNA, 15 bp, Homo sapiens
ccccttacaagatgt

SEQ ID NO: 602481 - DNA, 15 bp, Homo sapiens
cccttacaagatgtc

SEQ ID NO: 602482 - DNA, 15 bp, Homo sapiens
ccttacaagatgtca

SEQ ID NO: 602483 - DNA, 15 bp, Homo sapiens
cttacaagatgtcat

SEQ ID NO: 602484 - DNA, 15 bp, Homo sapiens
ttacaagatgtcata

SEQ ID NO: 602485 - DNA, 15 bp, Homo sapiens
tacaagatgtcataa

SEQ ID NO: 602486 - DNA, 15 bp, Homo sapiens
acaagatgtcataag

SEQ ID NO: 602487 - DNA, 15 bp, Homo sapiens
caagatgtcataaga

SEQ ID NO: 602488 - DNA, 15 bp, Homo sapiens
aagatgtcataagac

SEQ ID NO: 602489 - DNA, 15 bp, Homo sapiens
agatgtcataagact

SEQ ID NO: 602490 - DNA, 15 bp, Homo sapiens
gatgtcataagactc

SEQ ID NO: 602491 - DNA, 15 bp, Homo sapiens
atgtcataagactca

SEQ ID NO: 602492 - DNA, 15 bp, Homo sapiens
tgtcataagactcac

SEQ ID NO: 602493 - DNA, 15 bp, Homo sapiens
gtcataagactcact

SEQ ID NO: 602494 - DNA, 15 bp, Homo sapiens
tcataagactcactg

SEQ ID NO: 602495 - DNA, 15 bp, Homo sapiens
cataagactcactgt

SEQ ID NO: 602496 - DNA, 15 bp, Homo sapiens
ataagactcactgtt

SEQ ID NO: 602497 - DNA, 15 bp, Homo sapiens
taagactcactgttg

SEQ ID NO: 602498 - DNA, 15 bp, Homo sapiens
aagactcactgttgt

SEQ ID NO: 602499 - DNA, 15 bp, Homo sapiens
agactcactgttgtt

SEQ ID NO: 602500 - DNA, 15 bp, Homo sapiens
gactcactgttgttg

SEQ ID NO: 602501 - DNA, 15 bp, Homo sapiens
actcactgttgttga

SEQ ID NO: 602502 - DNA, 15 bp, Homo sapiens
ctcactgttgttgaa

SEQ ID NO: 602503 - DNA, 15 bp, Homo sapiens
tcactgttgttgaag

SEQ ID NO: 602504 - DNA, 15 bp, Homo sapiens
cactgttgttgaagc

SEQ ID NO: 602505 - DNA, 15 bp, Homo sapiens
actgttgttgaagca

SEQ ID NO: 602506 - DNA, 15 bp, Homo sapiens
ctgttgttgaagcaa

SEQ ID NO: 602507 - DNA, 15 bp, Homo sapiens
tgttgttgaagcaat

SEQ ID NO: 602508 - DNA, 15 bp, Homo sapiens
gttgttgaagcaatt

SEQ ID NO: 602509 - DNA, 15 bp, Homo sapiens
ttgttgaagcaattt

SEQ ID NO: 602510 - DNA, 15 bp, Homo sapiens
tgttgaagcaatttg

SEQ ID NO: 602511 - DNA, 15 bp, Homo sapiens
gttgaagcaatttga

SEQ ID NO: 602512 - DNA, 15 bp, Homo sapiens
ttgaagcaatttgag

SEQ ID NO: 602513 - DNA, 15 bp, Homo sapiens
tgaagcaatttgaga

SEQ ID NO: 602514 - DNA, 15 bp, Homo sapiens
gaagcaatttgagat

SEQ ID NO: 602515 - DNA, 15 bp, Homo sapiens
aagcaatttgagatt

SEQ ID NO: 602516 - DNA, 15 bp, Homo sapiens
agcaatttgagattt

SEQ ID NO: 602517 - DNA, 15 bp, Homo sapiens
gcaatttgagatttt

SEQ ID NO: 602518 - DNA, 15 bp, Homo sapiens
caatttgagattttg

SEQ ID NO: 602519 - DNA, 15 bp, Homo sapiens
aatttgagattttga

SEQ ID NO: 602520 - DNA, 15 bp, Homo sapiens
atttgagattttgac

SEQ ID NO: 602521 - DNA, 15 bp, Homo sapiens
tttgagattttgact

SEQ ID NO: 602522 - DNA, 15 bp, Homo sapiens
ttgagattttgactt

SEQ ID NO: 602523 - DNA, 15 bp, Homo sapiens
tgagattttgacttt

SEQ ID NO: 602524 - DNA, 15 bp, Homo sapiens
gagattttgacttta

SEQ ID NO: 602525 - DNA, 15 bp, Homo sapiens
agattttgactttat

SEQ ID NO: 602526 - DNA, 15 bp, Homo sapiens
gattttgactttatt

SEQ ID NO: 602527 - DNA, 15 bp, Homo sapiens
attttgactttattg

SEQ ID NO: 602528 - DNA, 15 bp, Homo sapiens
ttttgactttattga

SEQ ID NO: 602529 - DNA, 15 bp, Homo sapiens
tttgactttattgaa

SEQ ID NO: 602530 - DNA, 15 bp, Homo sapiens
ttgactttattgaag

SEQ ID NO: 602531 - DNA, 15 bp, Homo sapiens
tgactttattgaagc

SEQ ID NO: 602532 - DNA, 15 bp, Homo sapiens
gactttattgaagca

SEQ ID NO: 602533 - DNA, 15 bp, Homo sapiens
actttattgaagcat

SEQ ID NO: 602534 - DNA, 15 bp, Homo sapiens
ctttattgaagcata

SEQ ID NO: 602535 - DNA, 15 bp, Homo sapiens
tttattgaagcatag

SEQ ID NO: 602536 - DNA, 15 bp, Homo sapiens
ttattgaagcataga

SEQ ID NO: 602537 - DNA, 15 bp, Homo sapiens
tattgaagcatagat

SEQ ID NO: 602538 - DNA, 15 bp, Homo sapiens
attgaagcatagatg

SEQ ID NO: 602539 - DNA, 15 bp, Homo sapiens
ttgaagcatagatgg

SEQ ID NO: 602540 - DNA, 15 bp, Homo sapiens
tgaagcatagatggt

SEQ ID NO: 602541 - DNA, 15 bp, Homo sapiens
gaagcatagatggtg

SEQ ID NO: 602542 - DNA, 15 bp, Homo sapiens
aagcatagatggtga

SEQ ID NO: 602543 - DNA, 15 bp, Homo sapiens
agcatagatggtgat

SEQ ID NO: 602544 - DNA, 15 bp, Homo sapiens
gcatagatggtgatt

SEQ ID NO: 602545 - DNA, 15 bp, Homo sapiens
catagatggtgatta

SEQ ID NO: 602546 - DNA, 15 bp, Homo sapiens
atagatggtgattat

SEQ ID NO: 602547 - DNA, 15 bp, Homo sapiens
tagatggtgattata

SEQ ID NO: 602548 - DNA, 15 bp, Homo sapiens
agatggtgattatag

SEQ ID NO: 602549 - DNA, 15 bp, Homo sapiens
gatggtgattatagg

SEQ ID NO: 602550 - DNA, 15 bp, Homo sapiens
atggtgattataggc

SEQ ID NO: 602551 - DNA, 15 bp, Homo sapiens
tggtgattataggca

SEQ ID NO: 602552 - DNA, 15 bp, Homo sapiens
ggtgattataggcat

SEQ ID NO: 602553 - DNA, 15 bp, Homo sapiens
gtgattataggcatg

SEQ ID NO: 602554 - DNA, 15 bp, Homo sapiens
tgattataggcatga

SEQ ID NO: 602555 - DNA, 15 bp, Homo sapiens
gattataggcatgac

SEQ ID NO: 602556 - DNA, 15 bp, Homo sapiens
attataggcatgact

SEQ ID NO: 602557 - DNA, 15 bp, Homo sapiens
ttataggcatgactc

SEQ ID NO: 602558 - DNA, 15 bp, Homo sapiens
tataggcatgactca

SEQ ID NO: 602559 - DNA, 15 bp, Homo sapiens
ataggcatgactcac

SEQ ID NO: 602560 - DNA, 15 bp, Homo sapiens
taggcatgactcact

SEQ ID NO: 602561 - DNA, 15 bp, Homo sapiens
aggcatgactcactg

SEQ ID NO: 602562 - DNA, 15 bp, Homo sapiens
ggcatgactcactgt

SEQ ID NO: 602563 - DNA, 15 bp, Homo sapiens
gcatgactcactgtg

SEQ ID NO: 602564 - DNA, 15 bp, Homo sapiens
catgactcactgtgt

SEQ ID NO: 602565 - DNA, 15 bp, Homo sapiens
atgactcactgtgtg

SEQ ID NO: 602566 - DNA, 15 bp, Homo sapiens
tgactcactgtgtgg

SEQ ID NO: 602567 - DNA, 15 bp, Homo sapiens
gactcactgtgtgga

SEQ ID NO: 602568 - DNA, 15 bp, Homo sapiens
actcactgtgtggat

SEQ ID NO: 602569 - DNA, 15 bp, Homo sapiens
ctcactgtgtggatt

SEQ ID NO: 602570 - DNA, 15 bp, Homo sapiens
tcactgtgtggattc

SEQ ID NO: 602571 - DNA, 15 bp, Homo sapiens
cactgtgtggattct

SEQ ID NO: 602572 - DNA, 15 bp, Homo sapiens
actgtgtggattctc

SEQ ID NO: 602573 - DNA, 15 bp, Homo sapiens
ctgtgtggattctcc

SEQ ID NO: 602574 - DNA, 15 bp, Homo sapiens
tgtgtggattctccc

SEQ ID NO: 602575 - DNA, 15 bp, Homo sapiens
gtgtggattctccct

SEQ ID NO: 602576 - DNA, 15 bp, Homo sapiens
tgtggattctccctg

SEQ ID NO: 602577 - DNA, 15 bp, Homo sapiens
gtggattctccctgg

SEQ ID NO: 602578 - DNA, 15 bp, Homo sapiens
tggattctccctggg

SEQ ID NO: 602579 - DNA, 15 bp, Homo sapiens
ggattctccctgggc

SEQ ID NO: 602580 - DNA, 15 bp, Homo sapiens
gattctccctgggct

SEQ ID NO: 602581 - DNA, 15 bp, Homo sapiens
attctccctgggctc

SEQ ID NO: 602582 - DNA, 15 bp, Homo sapiens
ttctccctgggctca

SEQ ID NO: 602583 - DNA, 15 bp, Homo sapiens
tctccctgggctcat

SEQ ID NO: 602584 - DNA, 15 bp, Homo sapiens
ctccctgggctcatc

SEQ ID NO: 602585 - DNA, 15 bp, Homo sapiens
tccctgggctcatca

SEQ ID NO: 602586 - DNA, 15 bp, Homo sapiens
ccctgggctcatcag

SEQ ID NO: 602587 - DNA, 15 bp, Homo sapiens
cctgggctcatcagt

SEQ ID NO: 602588 - DNA, 15 bp, Homo sapiens
ctgggctcatcagtt

SEQ ID NO: 602589 - DNA, 15 bp, Homo sapiens
tgggctcatcagttt

SEQ ID NO: 602590 - DNA, 15 bp, Homo sapiens
gggctcatcagtttc

SEQ ID NO: 602591 - DNA, 15 bp, Homo sapiens
ggctcatcagtttca

SEQ ID NO: 602592 - DNA, 15 bp, Homo sapiens
gctcatcagtttcag

SEQ ID NO: 602593 - DNA, 15 bp, Homo sapiens
ctcatcagtttcaga

SEQ ID NO: 602594 - DNA, 15 bp, Homo sapiens
tcatcagtttcagag

SEQ ID NO: 602595 - DNA, 15 bp, Homo sapiens
catcagtttcagagg

SEQ ID NO: 602596 - DNA, 15 bp, Homo sapiens
atcagtttcagaggg

SEQ ID NO: 602597 - DNA, 15 bp, Homo sapiens
tcagtttcagagggc

SEQ ID NO: 602598 - DNA, 15 bp, Homo sapiens
cagtttcagagggca

SEQ ID NO: 602599 - DNA, 15 bp, Homo sapiens
agtttcagagggcaa

SEQ ID NO: 602600 - DNA, 15 bp, Homo sapiens
gtttcagagggcaag

SEQ ID NO: 602601 - DNA, 15 bp, Homo sapiens
tttcagagggcaagt

SEQ ID NO: 602602 - DNA, 15 bp, Homo sapiens
ttcagagggcaagtg

SEQ ID NO: 602603 - DNA, 15 bp, Homo sapiens
tcagagggcaagtgt

SEQ ID NO: 602604 - DNA, 15 bp, Homo sapiens
cagagggcaagtgtt

SEQ ID NO: 602605 - DNA, 15 bp, Homo sapiens
agagggcaagtgttg

SEQ ID NO: 602606 - DNA, 15 bp, Homo sapiens
gagggcaagtgttgg

SEQ ID NO: 602607 - DNA, 15 bp, Homo sapiens
agggcaagtgttggc

SEQ ID NO: 602608 - DNA, 15 bp, Homo sapiens
gggcaagtgttggca

SEQ ID NO: 602609 - DNA, 15 bp, Homo sapiens
ggcaagtgttggcat

SEQ ID NO: 602610 - DNA, 15 bp, Homo sapiens
gcaagtgttggcatg

SEQ ID NO: 602611 - DNA, 15 bp, Homo sapiens
caagtgttggcatgt

SEQ ID NO: 602612 - DNA, 15 bp, Homo sapiens
aagtgttggcatgtg

SEQ ID NO: 602613 - DNA, 15 bp, Homo sapiens
agtgttggcatgtgg

SEQ ID NO: 602614 - DNA, 15 bp, Homo sapiens
gtgttggcatgtgga

SEQ ID NO: 602615 - DNA, 15 bp, Homo sapiens
tgttggcatgtggac

SEQ ID NO: 602616 - DNA, 15 bp, Homo sapiens
gttggcatgtggaca

SEQ ID NO: 602617 - DNA, 15 bp, Homo sapiens
ttggcatgtggacaa

SEQ ID NO: 602618 - DNA, 15 bp, Homo sapiens
tggcatgtggacaaa

SEQ ID NO: 602619 - DNA, 15 bp, Homo sapiens
ggcatgtggacaaag

SEQ ID NO: 602620 - DNA, 15 bp, Homo sapiens
gcatgtggacaaaga

SEQ ID NO: 602621 - DNA, 15 bp, Homo sapiens
catgtggacaaagag

SEQ ID NO: 602622 - DNA, 15 bp, Homo sapiens
atgtggacaaagaga

SEQ ID NO: 602623 - DNA, 15 bp, Homo sapiens
tgtggacaaagagag

SEQ ID NO: 602624 - DNA, 15 bp, Homo sapiens
gtggacaaagagagg

SEQ ID NO: 602625 - DNA, 15 bp, Homo sapiens
tggacaaagagaggg

SEQ ID NO: 602626 - DNA, 15 bp, Homo sapiens
ggacaaagagaggga

SEQ ID NO: 602627 - DNA, 15 bp, Homo sapiens
gacaaagagagggat

SEQ ID NO: 602628 - DNA, 15 bp, Homo sapiens
acaaagagagggatg

SEQ ID NO: 602629 - DNA, 15 bp, Homo sapiens
caaagagagggatga

SEQ ID NO: 602630 - DNA, 15 bp, Homo sapiens
aaagagagggatgac

SEQ ID NO: 602631 - DNA, 15 bp, Homo sapiens
aagagagggatgaca

SEQ ID NO: 602632 - DNA, 15 bp, Homo sapiens
agagagggatgacac

SEQ ID NO: 602633 - DNA, 15 bp, Homo sapiens
gagagggatgacacg

SEQ ID NO: 602634 - DNA, 15 bp, Homo sapiens
agagggatgacacgt

SEQ ID NO: 602635 - DNA, 15 bp, Homo sapiens
gagggatgacacgta

SEQ ID NO: 602636 - DNA, 15 bp, Homo sapiens
agggatgacacgtaa

SEQ ID NO: 602637 - DNA, 15 bp, Homo sapiens
gggatgacacgtaaa

SEQ ID NO: 602638 - DNA, 15 bp, Homo sapiens
ggatgacacgtaaac

SEQ ID NO: 602639 - DNA, 15 bp, Homo sapiens
gatgacacgtaaaca

SEQ ID NO: 602640 - DNA, 15 bp, Homo sapiens
atgacacgtaaacat

SEQ ID NO: 602641 - DNA, 15 bp, Homo sapiens
tgacacgtaaacatg

SEQ ID NO: 602642 - DNA, 15 bp, Homo sapiens
gacacgtaaacatgg

SEQ ID NO: 602643 - DNA, 15 bp, Homo sapiens
acacgtaaacatggc

SEQ ID NO: 602644 - DNA, 15 bp, Homo sapiens
cacgtaaacatggct

SEQ ID NO: 602645 - DNA, 15 bp, Homo sapiens
acgtaaacatggctt

SEQ ID NO: 602646 - DNA, 15 bp, Homo sapiens
cgtaaacatggctta

SEQ ID NO: 602647 - DNA, 15 bp, Homo sapiens
gtaaacatggcttat

SEQ ID NO: 602648 - DNA, 15 bp, Homo sapiens
taaacatggcttatt

SEQ ID NO: 602649 - DNA, 15 bp, Homo sapiens
aaacatggcttattg

SEQ ID NO: 602650 - DNA, 15 bp, Homo sapiens
aacatggcttattgc

SEQ ID NO: 602651 - DNA, 15 bp, Homo sapiens
acatggcttattgca

SEQ ID NO: 602652 - DNA, 15 bp, Homo sapiens
catggcttattgcaa

SEQ ID NO: 602653 - DNA, 15 bp, Homo sapiens
atggcttattgcaat

SEQ ID NO: 602654 - DNA, 15 bp, Homo sapiens
tggcttattgcaatg

SEQ ID NO: 602655 - DNA, 15 bp, Homo sapiens
ggcttattgcaatgg

SEQ ID NO: 602656 - DNA, 15 bp, Homo sapiens
gcttattgcaatggg

SEQ ID NO: 602657 - DNA, 15 bp, Homo sapiens
cttattgcaatgggg

SEQ ID NO: 602658 - DNA, 15 bp, Homo sapiens
ttattgcaatgggga

SEQ ID NO: 602659 - DNA, 15 bp, Homo sapiens
tattgcaatggggaa

SEQ ID NO: 602660 - DNA, 15 bp, Homo sapiens
attgcaatggggaaa

SEQ ID NO: 602661 - DNA, 15 bp, Homo sapiens
ttgcaatggggaaat

SEQ ID NO: 602662 - DNA, 15 bp, Homo sapiens
tgcaatggggaaata

SEQ ID NO: 602663 - DNA, 15 bp, Homo sapiens
gcaatggggaaatat

SEQ ID NO: 602664 - DNA, 15 bp, Homo sapiens
caatggggaaatatt

SEQ ID NO: 602665 - DNA, 15 bp, Homo sapiens
aatggggaaatattt

SEQ ID NO: 602666 - DNA, 15 bp, Homo sapiens
atggggaaatatttt

SEQ ID NO: 602667 - DNA, 15 bp, Homo sapiens
tggggaaatattttc

SEQ ID NO: 602668 - DNA, 15 bp, Homo sapiens
ggggaaatattttca

SEQ ID NO: 602669 - DNA, 15 bp, Homo sapiens
gggaaatattttcag

SEQ ID NO: 602670 - DNA, 15 bp, Homo sapiens
ggaaatattttcagt

SEQ ID NO: 602671 - DNA, 15 bp, Homo sapiens
gaaatattttcagtc

SEQ ID NO: 602672 - DNA, 15 bp, Homo sapiens
aaatattttcagtct

SEQ ID NO: 602673 - DNA, 15 bp, Homo sapiens
aatattttcagtctc

SEQ ID NO: 602674 - DNA, 15 bp, Homo sapiens
atattttcagtctca

SEQ ID NO: 602675 - DNA, 15 bp, Homo sapiens
tattttcagtctcac

SEQ ID NO: 602676 - DNA, 15 bp, Homo sapiens
attttcagtctcact

SEQ ID NO: 602677 - DNA, 15 bp, Homo sapiens
ttttcagtctcactg

SEQ ID NO: 602678 - DNA, 15 bp, Homo sapiens
tttcagtctcactga

SEQ ID NO: 602679 - DNA, 15 bp, Homo sapiens
ttcagtctcactgat

SEQ ID NO: 602680 - DNA, 15 bp, Homo sapiens
tcagtctcactgatt

SEQ ID NO: 602681 - DNA, 15 bp, Homo sapiens
cagtctcactgattg

SEQ ID NO: 602682 - DNA, 15 bp, Homo sapiens
agtctcactgattga

SEQ ID NO: 602683 - DNA, 15 bp, Homo sapiens
gtctcactgattgaa

SEQ ID NO: 602684 - DNA, 15 bp, Homo sapiens
tctcactgattgaat

SEQ ID NO: 602685 - DNA, 15 bp, Homo sapiens
ctcactgattgaatc

SEQ ID NO: 602686 - DNA, 15 bp, Homo sapiens
tcactgattgaatcc

SEQ ID NO: 602687 - DNA, 15 bp, Homo sapiens
cactgattgaatcct

SEQ ID NO: 602688 - DNA, 15 bp, Homo sapiens
actgattgaatccta

SEQ ID NO: 602689 - DNA, 15 bp, Homo sapiens
ctgattgaatcctaa

SEQ ID NO: 602690 - DNA, 15 bp, Homo sapiens
tgattgaatcctaat

SEQ ID NO: 602691 - DNA, 15 bp, Homo sapiens
gattgaatcctaatg

SEQ ID NO: 602692 - DNA, 15 bp, Homo sapiens
attgaatcctaatgg

SEQ ID NO: 602693 - DNA, 15 bp, Homo sapiens
ttgaatcctaatggt

SEQ ID NO: 602694 - DNA, 15 bp, Homo sapiens
tgaatcctaatggtt

SEQ ID NO: 602695 - DNA, 15 bp, Homo sapiens
gaatcctaatggttt

SEQ ID NO: 602696 - DNA, 15 bp, Homo sapiens
aatcctaatggtttt

SEQ ID NO: 602697 - DNA, 15 bp, Homo sapiens
atcctaatggtttta

SEQ ID NO: 602698 - DNA, 15 bp, Homo sapiens
tcctaatggttttat

SEQ ID NO: 602699 - DNA, 15 bp, Homo sapiens
cctaatggttttata

SEQ ID NO: 602700 - DNA, 15 bp, Homo sapiens
ctaatggttttataa

SEQ ID NO: 602701 - DNA, 15 bp, Homo sapiens
taatggttttataaa

SEQ ID NO: 602702 - DNA, 15 bp, Homo sapiens
aatggttttataaat

SEQ ID NO: 602703 - DNA, 15 bp, Homo sapiens
atggttttataaatt

SEQ ID NO: 602704 - DNA, 15 bp, Homo sapiens
tggttttataaattc

SEQ ID NO: 602705 - DNA, 15 bp, Homo sapiens
ggttttataaattcc

SEQ ID NO: 602706 - DNA, 15 bp, Homo sapiens
gttttataaattccc

SEQ ID NO: 602707 - DNA, 15 bp, Homo sapiens
ttttataaattcccc

SEQ ID NO: 602708 - DNA, 15 bp, Homo sapiens
tttataaattcccca

SEQ ID NO: 602709 - DNA, 15 bp, Homo sapiens
ttataaattccccag

SEQ ID NO: 602710 - DNA, 15 bp, Homo sapiens
tataaattccccagt

SEQ ID NO: 602711 - DNA, 15 bp, Homo sapiens
ataaattccccagta

SEQ ID NO: 602712 - DNA, 15 bp, Homo sapiens
taaattccccagtac

SEQ ID NO: 602713 - DNA, 15 bp, Homo sapiens
aaattccccagtacc

SEQ ID NO: 602714 - DNA, 15 bp, Homo sapiens
aattccccagtacca

SEQ ID NO: 602715 - DNA, 15 bp, Homo sapiens
attccccagtaccac

SEQ ID NO: 602716 - DNA, 15 bp, Homo sapiens
ttccccagtaccact

SEQ ID NO: 602717 - DNA, 15 bp, Homo sapiens
tccccagtaccactg

SEQ ID NO: 602718 - DNA, 15 bp, Homo sapiens
ccccagtaccactga

SEQ ID NO: 602719 - DNA, 15 bp, Homo sapiens
cccagtaccactgaa

SEQ ID NO: 602720 - DNA, 15 bp, Homo sapiens
ccagtaccactgaaa

SEQ ID NO: 602721 - DNA, 15 bp, Homo sapiens
cagtaccactgaaag

SEQ ID NO: 602722 - DNA, 15 bp, Homo sapiens
agtaccactgaaagc

SEQ ID NO: 602723 - DNA, 15 bp, Homo sapiens
gtaccactgaaagca

SEQ ID NO: 602724 - DNA, 15 bp, Homo sapiens
taccactgaaagcaa

SEQ ID NO: 602725 - DNA, 15 bp, Homo sapiens
accactgaaagcaaa

SEQ ID NO: 602726 - DNA, 15 bp, Homo sapiens
ccactgaaagcaaag

SEQ ID NO: 602727 - DNA, 15 bp, Homo sapiens
cactgaaagcaaagc

SEQ ID NO: 602728 - DNA, 15 bp, Homo sapiens
actgaaagcaaagca

SEQ ID NO: 602729 - DNA, 15 bp, Homo sapiens
ctgaaagcaaagcaa

SEQ ID NO: 602730 - DNA, 15 bp, Homo sapiens
tgaaagcaaagcaag

SEQ ID NO: 602731 - DNA, 15 bp, Homo sapiens
gaaagcaaagcaagt

SEQ ID NO: 602732 - DNA, 15 bp, Homo sapiens
aaagcaaagcaagta

SEQ ID NO: 602733 - DNA, 15 bp, Homo sapiens
aagcaaagcaagtaa

SEQ ID NO: 602734 - DNA, 15 bp, Homo sapiens
agcaaagcaagtaat

SEQ ID NO: 602735 - DNA, 15 bp, Homo sapiens
gcaaagcaagtaatc

SEQ ID NO: 602736 - DNA, 15 bp, Homo sapiens
caaagcaagtaatca

SEQ ID NO: 602737 - DNA, 15 bp, Homo sapiens
aaagcaagtaatcag

SEQ ID NO: 602738 - DNA, 15 bp, Homo sapiens
aagcaagtaatcagg

SEQ ID NO: 602739 - DNA, 15 bp, Homo sapiens
agcaagtaatcaggt

SEQ ID NO: 602740 - DNA, 15 bp, Homo sapiens
gcaagtaatcaggtg

SEQ ID NO: 602741 - DNA, 15 bp, Homo sapiens
caagtaatcaggtgt

SEQ ID NO: 602742 - DNA, 15 bp, Homo sapiens
aagtaatcaggtgtg

SEQ ID NO: 602743 - DNA, 15 bp, Homo sapiens
agtaatcaggtgtgt

SEQ ID NO: 602744 - DNA, 15 bp, Homo sapiens
gtaatcaggtgtgtt

SEQ ID NO: 602745 - DNA, 15 bp, Homo sapiens
taatcaggtgtgttt

SEQ ID NO: 602746 - DNA, 15 bp, Homo sapiens
aatcaggtgtgtttt

SEQ ID NO: 602747 - DNA, 15 bp, Homo sapiens
atcaggtgtgtttta

SEQ ID NO: 602748 - DNA, 15 bp, Homo sapiens
tcaggtgtgttttag

SEQ ID NO: 602749 - DNA, 15 bp, Homo sapiens
caggtgtgttttagg

SEQ ID NO: 602750 - DNA, 15 bp, Homo sapiens
aggtgtgttttagga

SEQ ID NO: 602751 - DNA, 15 bp, Homo sapiens
ggtgtgttttaggaa

SEQ ID NO: 602752 - DNA, 15 bp, Homo sapiens
gtgtgttttaggaat

SEQ ID NO: 602753 - DNA, 15 bp, Homo sapiens
tgtgttttaggaata

SEQ ID NO: 602754 - DNA, 15 bp, Homo sapiens
gtgttttaggaataa

SEQ ID NO: 602755 - DNA, 15 bp, Homo sapiens
tgttttaggaataaa

SEQ ID NO: 602756 - DNA, 15 bp, Homo sapiens
gttttaggaataaaa

SEQ ID NO: 602757 - DNA, 15 bp, Homo sapiens
ttttaggaataaaag

SEQ ID NO: 602758 - DNA, 15 bp, Homo sapiens
tttaggaataaaagc

SEQ ID NO: 602759 - DNA, 15 bp, Homo sapiens
ttaggaataaaagca

SEQ ID NO: 602760 - DNA, 15 bp, Homo sapiens
taggaataaaagcag

SEQ ID NO: 602761 - DNA, 15 bp, Homo sapiens
aggaataaaagcagc

SEQ ID NO: 602762 - DNA, 15 bp, Homo sapiens
ggaataaaagcagca

SEQ ID NO: 602763 - DNA, 15 bp, Homo sapiens
gaataaaagcagcat

SEQ ID NO: 602764 - DNA, 15 bp, Homo sapiens
aataaaagcagcatt

SEQ ID NO: 602765 - DNA, 15 bp, Homo sapiens
ataaaagcagcatta

SEQ ID NO: 602766 - DNA, 15 bp, Homo sapiens
taaaagcagcattat

SEQ ID NO: 602767 - DNA, 15 bp, Homo sapiens
aaaagcagcattatt

SEQ ID NO: 602768 - DNA, 15 bp, Homo sapiens
aaagcagcattattt

SEQ ID NO: 602769 - DNA, 15 bp, Homo sapiens
aagcagcattatttt

SEQ ID NO: 602770 - DNA, 15 bp, Homo sapiens
agcagcattatttta

SEQ ID NO: 602771 - DNA, 15 bp, Homo sapiens
gcagcattattttaa

SEQ ID NO: 602772 - DNA, 15 bp, Homo sapiens
cagcattattttaat

SEQ ID NO: 602773 - DNA, 15 bp, Homo sapiens
agcattattttaatt

SEQ ID NO: 602774 - DNA, 15 bp, Homo sapiens
gcattattttaattt

SEQ ID NO: 602775 - DNA, 15 bp, Homo sapiens
cattattttaatttc

SEQ ID NO: 602776 - DNA, 15 bp, Homo sapiens
attattttaatttcg

SEQ ID NO: 602777 - DNA, 15 bp, Homo sapiens
ttattttaatttcgt

SEQ ID NO: 602778 - DNA, 15 bp, Homo sapiens
tattttaatttcgta

SEQ ID NO: 602779 - DNA, 15 bp, Homo sapiens
attttaatttcgtat

SEQ ID NO: 602780 - DNA, 15 bp, Homo sapiens
ttttaatttcgtatt

SEQ ID NO: 602781 - DNA, 15 bp, Homo sapiens
tttaatttcgtattt

SEQ ID NO: 602782 - DNA, 15 bp, Homo sapiens
ttaatttcgtatttt

SEQ ID NO: 602783 - DNA, 15 bp, Homo sapiens
taatttcgtattttc

SEQ ID NO: 602784 - DNA, 15 bp, Homo sapiens
aatttcgtattttcc

SEQ ID NO: 602785 - DNA, 15 bp, Homo sapiens
atttcgtattttccc

SEQ ID NO: 602786 - DNA, 15 bp, Homo sapiens
tttcgtattttcccc

SEQ ID NO: 602787 - DNA, 15 bp, Homo sapiens
ttcgtattttcccct

SEQ ID NO: 602788 - DNA, 15 bp, Homo sapiens
tcgtattttccccta

SEQ ID NO: 602789 - DNA, 15 bp, Homo sapiens
cgtattttcccctaa

SEQ ID NO: 602790 - DNA, 15 bp, Homo sapiens
gtattttcccctaaa

SEQ ID NO: 602791 - DNA, 15 bp, Homo sapiens
tattttcccctaaag

SEQ ID NO: 602792 - DNA, 15 bp, Homo sapiens
attttcccctaaagc

SEQ ID NO: 602793 - DNA, 15 bp, Homo sapiens
ttttcccctaaagca

SEQ ID NO: 602794 - DNA, 15 bp, Homo sapiens
tttcccctaaagcaa

SEQ ID NO: 602795 - DNA, 15 bp, Homo sapiens
ttcccctaaagcaaa

SEQ ID NO: 602796 - DNA, 15 bp, Homo sapiens
tcccctaaagcaaag

SEQ ID NO: 602797 - DNA, 15 bp, Homo sapiens
cccctaaagcaaagc

SEQ ID NO: 602798 - DNA, 15 bp, Homo sapiens
ccctaaagcaaagcc

SEQ ID NO: 602799 - DNA, 15 bp, Homo sapiens
cctaaagcaaagcca

SEQ ID NO: 602800 - DNA, 15 bp, Homo sapiens
ctaaagcaaagccaa

SEQ ID NO: 602801 - DNA, 15 bp, Homo sapiens
taaagcaaagccaaa

SEQ ID NO: 602802 - DNA, 15 bp, Homo sapiens
aaagcaaagccaaat

SEQ ID NO: 602803 - DNA, 15 bp, Homo sapiens
aagcaaagccaaatg

SEQ ID NO: 602804 - DNA, 15 bp, Homo sapiens
agcaaagccaaatgg

SEQ ID NO: 602805 - DNA, 15 bp, Homo sapiens
gcaaagccaaatggc

SEQ ID NO: 602806 - DNA, 15 bp, Homo sapiens
caaagccaaatggca

SEQ ID NO: 602807 - DNA, 15 bp, Homo sapiens
aaagccaaatggcat

SEQ ID NO: 602808 - DNA, 15 bp, Homo sapiens
aagccaaatggcatt

SEQ ID NO: 602809 - DNA, 15 bp, Homo sapiens
agccaaatggcatta

SEQ ID NO: 602810 - DNA, 15 bp, Homo sapiens
gccaaatggcattat

SEQ ID NO: 602811 - DNA, 15 bp, Homo sapiens
ccaaatggcattatg

SEQ ID NO: 602812 - DNA, 15 bp, Homo sapiens
caaatggcattatgg

SEQ ID NO: 602813 - DNA, 15 bp, Homo sapiens
aaatggcattatggg

SEQ ID NO: 602814 - DNA, 15 bp, Homo sapiens
aatggcattatggga

SEQ ID NO: 602815 - DNA, 15 bp, Homo sapiens
atggcattatgggag

SEQ ID NO: 602816 - DNA, 15 bp, Homo sapiens
tggcattatgggagc

SEQ ID NO: 602817 - DNA, 15 bp, Homo sapiens
ggcattatgggagcc

SEQ ID NO: 602818 - DNA, 15 bp, Homo sapiens
gcattatgggagcca

SEQ ID NO: 602819 - DNA, 15 bp, Homo sapiens
cattatgggagccaa

SEQ ID NO: 602820 - DNA, 15 bp, Homo sapiens
attatgggagccaag

SEQ ID NO: 602821 - DNA, 15 bp, Homo sapiens
ttatgggagccaagc

SEQ ID NO: 602822 - DNA, 15 bp, Homo sapiens
tatgggagccaagct

SEQ ID NO: 602823 - DNA, 15 bp, Homo sapiens
atgggagccaagcta

SEQ ID NO: 602824 - DNA, 15 bp, Homo sapiens
tgggagccaagctac

SEQ ID NO: 602825 - DNA, 15 bp, Homo sapiens
gggagccaagctact

SEQ ID NO: 602826 - DNA, 15 bp, Homo sapiens
ggagccaagctactg

SEQ ID NO: 602827 - DNA, 15 bp, Homo sapiens
gagccaagctactgg

SEQ ID NO: 602828 - DNA, 15 bp, Homo sapiens
agccaagctactggc

SEQ ID NO: 602829 - DNA, 15 bp, Homo sapiens
gccaagctactggca

SEQ ID NO: 602830 - DNA, 15 bp, Homo sapiens
ccaagctactggcag

SEQ ID NO: 602831 - DNA, 15 bp, Homo sapiens
caagctactggcagc

SEQ ID NO: 602832 - DNA, 15 bp, Homo sapiens
aagctactggcagct

SEQ ID NO: 602833 - DNA, 15 bp, Homo sapiens
agctactggcagctc

SEQ ID NO: 602834 - DNA, 15 bp, Homo sapiens
gctactggcagctcc

SEQ ID NO: 602835 - DNA, 15 bp, Homo sapiens
ctactggcagctcca

SEQ ID NO: 602836 - DNA, 15 bp, Homo sapiens
tactggcagctccac

SEQ ID NO: 602837 - DNA, 15 bp, Homo sapiens
actggcagctccacc

SEQ ID NO: 602838 - DNA, 15 bp, Homo sapiens
ctggcagctccacca

SEQ ID NO: 602839 - DNA, 15 bp, Homo sapiens
tggcagctccaccag

SEQ ID NO: 602840 - DNA, 15 bp, Homo sapiens
ggcagctccaccagc

SEQ ID NO: 602841 - DNA, 15 bp, Homo sapiens
gcagctccaccagcc

SEQ ID NO: 602842 - DNA, 15 bp, Homo sapiens
cagctccaccagcct

SEQ ID NO: 602843 - DNA, 15 bp, Homo sapiens
agctccaccagcctt

SEQ ID NO: 602844 - DNA, 15 bp, Homo sapiens
gctccaccagccttc

SEQ ID NO: 602845 - DNA, 15 bp, Homo sapiens
ctccaccagccttct

SEQ ID NO: 602846 - DNA, 15 bp, Homo sapiens
tccaccagccttctc

SEQ ID NO: 602847 - DNA, 15 bp, Homo sapiens
ccaccagccttctcc

SEQ ID NO: 602848 - DNA, 15 bp, Homo sapiens
caccagccttctcct

SEQ ID NO: 602849 - DNA, 15 bp, Homo sapiens
accagccttctcctg

SEQ ID NO: 602850 - DNA, 15 bp, Homo sapiens
ccagccttctcctga

SEQ ID NO: 602851 - DNA, 15 bp, Homo sapiens
cagccttctcctgag

SEQ ID NO: 602852 - DNA, 15 bp, Homo sapiens
agccttctcctgagt

SEQ ID NO: 602853 - DNA, 15 bp, Homo sapiens
gccttctcctgagtt

SEQ ID NO: 602854 - DNA, 15 bp, Homo sapiens
ccttctcctgagttc

SEQ ID NO: 602855 - DNA, 15 bp, Homo sapiens
cttctcctgagttct

SEQ ID NO: 602856 - DNA, 15 bp, Homo sapiens
ttctcctgagttctc

SEQ ID NO: 602857 - DNA, 15 bp, Homo sapiens
tctcctgagttctcg

SEQ ID NO: 602858 - DNA, 15 bp, Homo sapiens
ctcctgagttctcgg

SEQ ID NO: 602859 - DNA, 15 bp, Homo sapiens
tcctgagttctcggc

SEQ ID NO: 602860 - DNA, 15 bp, Homo sapiens
cctgagttctcggca

SEQ ID NO: 602861 - DNA, 15 bp, Homo sapiens
ctgagttctcggcat

SEQ ID NO: 602862 - DNA, 15 bp, Homo sapiens
tgagttctcggcatt

SEQ ID NO: 602863 - DNA, 15 bp, Homo sapiens
gagttctcggcatta

SEQ ID NO: 602864 - DNA, 15 bp, Homo sapiens
agttctcggcattac

SEQ ID NO: 602865 - DNA, 15 bp, Homo sapiens
gttctcggcattaca

SEQ ID NO: 602866 - DNA, 15 bp, Homo sapiens
ttctcggcattacag

SEQ ID NO: 602867 - DNA, 15 bp, Homo sapiens
tctcggcattacaga

SEQ ID NO: 602868 - DNA, 15 bp, Homo sapiens
ctcggcattacagat

SEQ ID NO: 602869 - DNA, 15 bp, Homo sapiens
tcggcattacagatc

SEQ ID NO: 602870 - DNA, 15 bp, Homo sapiens
cggcattacagatct

SEQ ID NO: 602871 - DNA, 15 bp, Homo sapiens
ggcattacagatcta

SEQ ID NO: 602872 - DNA, 15 bp, Homo sapiens
gcattacagatctac

SEQ ID NO: 602873 - DNA, 15 bp, Homo sapiens
cattacagatctacc

SEQ ID NO: 602874 - DNA, 15 bp, Homo sapiens
attacagatctaccc

SEQ ID NO: 602875 - DNA, 15 bp, Homo sapiens
ttacagatctaccct

SEQ ID NO: 602876 - DNA, 15 bp, Homo sapiens
tacagatctaccctc

SEQ ID NO: 602877 - DNA, 15 bp, Homo sapiens
acagatctaccctca

SEQ ID NO: 602878 - DNA, 15 bp, Homo sapiens
cagatctaccctcaa

SEQ ID NO: 602879 - DNA, 15 bp, Homo sapiens
agatctaccctcaaa

SEQ ID NO: 602880 - DNA, 15 bp, Homo sapiens
gatctaccctcaaag

SEQ ID NO: 602881 - DNA, 15 bp, Homo sapiens
atctaccctcaaagg

SEQ ID NO: 602882 - DNA, 15 bp, Homo sapiens
tctaccctcaaagga

SEQ ID NO: 602883 - DNA, 15 bp, Homo sapiens
ctaccctcaaaggat

SEQ ID NO: 602884 - DNA, 15 bp, Homo sapiens
taccctcaaaggatg

SEQ ID NO: 602885 - DNA, 15 bp, Homo sapiens
accctcaaaggatga

SEQ ID NO: 602886 - DNA, 15 bp, Homo sapiens
ccctcaaaggatgag

SEQ ID NO: 602887 - DNA, 15 bp, Homo sapiens
cctcaaaggatgagg

SEQ ID NO: 602888 - DNA, 15 bp, Homo sapiens
ctcaaaggatgaggc

SEQ ID NO: 602889 - DNA, 15 bp, Homo sapiens
tcaaaggatgaggcc

SEQ ID NO: 602890 - DNA, 15 bp, Homo sapiens
caaaggatgaggcca

SEQ ID NO: 602891 - DNA, 15 bp, Homo sapiens
aaaggatgaggccag

SEQ ID NO: 602892 - DNA, 15 bp, Homo sapiens
aaggatgaggccagc

SEQ ID NO: 602893 - DNA, 15 bp, Homo sapiens
aggatgaggccagca

SEQ ID NO: 602894 - DNA, 15 bp, Homo sapiens
ggatgaggccagcaa

SEQ ID NO: 602895 - DNA, 15 bp, Homo sapiens
gatgaggccagcaag

SEQ ID NO: 602896 - DNA, 15 bp, Homo sapiens
atgaggccagcaagc

SEQ ID NO: 602897 - DNA, 15 bp, Homo sapiens
tgaggccagcaagca

SEQ ID NO: 602898 - DNA, 15 bp, Homo sapiens
gaggccagcaagcac

SEQ ID NO: 602899 - DNA, 15 bp, Homo sapiens
aggccagcaagcacc

SEQ ID NO: 602900 - DNA, 15 bp, Homo sapiens
ggccagcaagcacca

SEQ ID NO: 602901 - DNA, 15 bp, Homo sapiens
gccagcaagcaccac

SEQ ID NO: 602902 - DNA, 15 bp, Homo sapiens
ccagcaagcaccaca

SEQ ID NO: 602903 - DNA, 15 bp, Homo sapiens
cagcaagcaccacag

SEQ ID NO: 602904 - DNA, 15 bp, Homo sapiens
agcaagcaccacagg

SEQ ID NO: 602905 - DNA, 15 bp, Homo sapiens
gcaagcaccacaggg

SEQ ID NO: 602906 - DNA, 15 bp, Homo sapiens
caagcaccacagggt

SEQ ID NO: 602907 - DNA, 15 bp, Homo sapiens
aagcaccacagggtg

SEQ ID NO: 602908 - DNA, 15 bp, Homo sapiens
agcaccacagggtgc

SEQ ID NO: 602909 - DNA, 15 bp, Homo sapiens
gcaccacagggtgcc

SEQ ID NO: 602910 - DNA, 15 bp, Homo sapiens
caccacagggtgccc

SEQ ID NO: 602911 - DNA, 15 bp, Homo sapiens
accacagggtgccca

SEQ ID NO: 602912 - DNA, 15 bp, Homo sapiens
ccacagggtgcccac

SEQ ID NO: 602913 - DNA, 15 bp, Homo sapiens
cacagggtgcccaca

SEQ ID NO: 602914 - DNA, 15 bp, Homo sapiens
acagggtgcccacat

SEQ ID NO: 602915 - DNA, 15 bp, Homo sapiens
cagggtgcccacatg

SEQ ID NO: 602916 - DNA, 15 bp, Homo sapiens
agggtgcccacatgg

SEQ ID NO: 602917 - DNA, 15 bp, Homo sapiens
gggtgcccacatgga

SEQ ID NO: 602918 - DNA, 15 bp, Homo sapiens
ggtgcccacatggag

SEQ ID NO: 602919 - DNA, 15 bp, Homo sapiens
gtgcccacatggaga

SEQ ID NO: 602920 - DNA, 15 bp, Homo sapiens
tgcccacatggagaa

SEQ ID NO: 602921 - DNA, 15 bp, Homo sapiens
gcccacatggagaag

SEQ ID NO: 602922 - DNA, 15 bp, Homo sapiens
cccacatggagaaga

SEQ ID NO: 602923 - DNA, 15 bp, Homo sapiens
ccacatggagaagag

SEQ ID NO: 602924 - DNA, 15 bp, Homo sapiens
cacatggagaagaga

SEQ ID NO: 602925 - DNA, 15 bp, Homo sapiens
acatggagaagagaa

SEQ ID NO: 602926 - DNA, 15 bp, Homo sapiens
catggagaagagaag

SEQ ID NO: 602927 - DNA, 15 bp, Homo sapiens
atggagaagagaagg

SEQ ID NO: 602928 - DNA, 15 bp, Homo sapiens
tggagaagagaaggc

SEQ ID NO: 602929 - DNA, 15 bp, Homo sapiens
ggagaagagaaggcc

SEQ ID NO: 602930 - DNA, 15 bp, Homo sapiens
gagaagagaaggcca

SEQ ID NO: 602931 - DNA, 15 bp, Homo sapiens
agaagagaaggccac

SEQ ID NO: 602932 - DNA, 15 bp, Homo sapiens
gaagagaaggccacc

SEQ ID NO: 602933 - DNA, 15 bp, Homo sapiens
aagagaaggccacca

SEQ ID NO: 602934 - DNA, 15 bp, Homo sapiens
agagaaggccaccaa

SEQ ID NO: 602935 - DNA, 15 bp, Homo sapiens
gagaaggccaccaac

SEQ ID NO: 602936 - DNA, 15 bp, Homo sapiens
agaaggccaccaacc

SEQ ID NO: 602937 - DNA, 15 bp, Homo sapiens
gaaggccaccaacct

SEQ ID NO: 602938 - DNA, 15 bp, Homo sapiens
aaggccaccaacctc

SEQ ID NO: 602939 - DNA, 15 bp, Homo sapiens
aggccaccaacctcc

SEQ ID NO: 602940 - DNA, 15 bp, Homo sapiens
ggccaccaacctcct

SEQ ID NO: 602941 - DNA, 15 bp, Homo sapiens
gccaccaacctcctc

SEQ ID NO: 602942 - DNA, 15 bp, Homo sapiens
ccaccaacctcctct

SEQ ID NO: 602943 - DNA, 15 bp, Homo sapiens
caccaacctcctctt

SEQ ID NO: 602944 - DNA, 15 bp, Homo sapiens
accaacctcctctta

SEQ ID NO: 602945 - DNA, 15 bp, Homo sapiens
ccaacctcctcttag

SEQ ID NO: 602946 - DNA, 15 bp, Homo sapiens
caacctcctcttagc

SEQ ID NO: 602947 - DNA, 15 bp, Homo sapiens
aacctcctcttagct

SEQ ID NO: 602948 - DNA, 15 bp, Homo sapiens
acctcctcttagctg

SEQ ID NO: 602949 - DNA, 15 bp, Homo sapiens
cctcctcttagctgg

SEQ ID NO: 602950 - DNA, 15 bp, Homo sapiens
ctcctcttagctggc

SEQ ID NO: 602951 - DNA, 15 bp, Homo sapiens
tcctcttagctggca

SEQ ID NO: 602952 - DNA, 15 bp, Homo sapiens
cctcttagctggcac

SEQ ID NO: 602953 - DNA, 15 bp, Homo sapiens
ctcttagctggcaca

SEQ ID NO: 602954 - DNA, 15 bp, Homo sapiens
tcttagctggcacag

SEQ ID NO: 602955 - DNA, 15 bp, Homo sapiens
cttagctggcacaga

SEQ ID NO: 602956 - DNA, 15 bp, Homo sapiens
ttagctggcacagaa

SEQ ID NO: 602957 - DNA, 15 bp, Homo sapiens
tagctggcacagaat

SEQ ID NO: 602958 - DNA, 15 bp, Homo sapiens
agctggcacagaatt

SEQ ID NO: 602959 - DNA, 15 bp, Homo sapiens
gctggcacagaattg

SEQ ID NO: 602960 - DNA, 15 bp, Homo sapiens
ctggcacagaattga

SEQ ID NO: 602961 - DNA, 15 bp, Homo sapiens
tggcacagaattgaa

SEQ ID NO: 602962 - DNA, 15 bp, Homo sapiens
ggcacagaattgaaa

SEQ ID NO: 602963 - DNA, 15 bp, Homo sapiens
gcacagaattgaaaa

SEQ ID NO: 602964 - DNA, 15 bp, Homo sapiens
cacagaattgaaaaa

SEQ ID NO: 602965 - DNA, 15 bp, Homo sapiens
acagaattgaaaaag

SEQ ID NO: 602966 - DNA, 15 bp, Homo sapiens
cagaattgaaaaagt

SEQ ID NO: 602967 - DNA, 15 bp, Homo sapiens
agaattgaaaaagtg

SEQ ID NO: 602968 - DNA, 15 bp, Homo sapiens
gaattgaaaaagtgt

SEQ ID NO: 602969 - DNA, 15 bp, Homo sapiens
aattgaaaaagtgtt

SEQ ID NO: 602970 - DNA, 15 bp, Homo sapiens
attgaaaaagtgttt

SEQ ID NO: 602971 - DNA, 15 bp, Homo sapiens
ttgaaaaagtgtttt

SEQ ID NO: 602972 - DNA, 15 bp, Homo sapiens
tgaaaaagtgttttt

SEQ ID NO: 602973 - DNA, 15 bp, Homo sapiens
gaaaaagtgtttttc

SEQ ID NO: 602974 - DNA, 15 bp, Homo sapiens
aaaaagtgtttttcc

SEQ ID NO: 602975 - DNA, 15 bp, Homo sapiens
aaaagtgtttttcca

SEQ ID NO: 602976 - DNA, 15 bp, Homo sapiens
aaagtgtttttccag

SEQ ID NO: 602977 - DNA, 15 bp, Homo sapiens
aagtgtttttccagg

SEQ ID NO: 602978 - DNA, 15 bp, Homo sapiens
agtgtttttccagga

SEQ ID NO: 602979 - DNA, 15 bp, Homo sapiens
gtgtttttccaggaa

SEQ ID NO: 602980 - DNA, 15 bp, Homo sapiens
tgtttttccaggaat

SEQ ID NO: 602981 - DNA, 15 bp, Homo sapiens
gtttttccaggaatg

SEQ ID NO: 602982 - DNA, 15 bp, Homo sapiens
tttttccaggaatgg

SEQ ID NO: 602983 - DNA, 15 bp, Homo sapiens
ttttccaggaatgga

SEQ ID NO: 602984 - DNA, 15 bp, Homo sapiens
tttccaggaatggat

SEQ ID NO: 602985 - DNA, 15 bp, Homo sapiens
ttccaggaatggata

SEQ ID NO: 602986 - DNA, 15 bp, Homo sapiens
tccaggaatggatac

SEQ ID NO: 602987 - DNA, 15 bp, Homo sapiens
ccaggaatggatact

SEQ ID NO: 602988 - DNA, 15 bp, Homo sapiens
caggaatggatactt

SEQ ID NO: 602989 - DNA, 15 bp, Homo sapiens
aggaatggatacttc

SEQ ID NO: 602990 - DNA, 15 bp, Homo sapiens
ggaatggatacttca

SEQ ID NO: 602991 - DNA, 15 bp, Homo sapiens
gaatggatacttcat

SEQ ID NO: 602992 - DNA, 15 bp, Homo sapiens
aatggatacttcatc

SEQ ID NO: 602993 - DNA, 15 bp, Homo sapiens
atggatacttcatct

SEQ ID NO: 602994 - DNA, 15 bp, Homo sapiens
tggatacttcatctg

SEQ ID NO: 602995 - DNA, 15 bp, Homo sapiens
ggatacttcatctgt

SEQ ID NO: 602996 - DNA, 15 bp, Homo sapiens
gatacttcatctgtt

SEQ ID NO: 602997 - DNA, 15 bp, Homo sapiens
atacttcatctgttc

SEQ ID NO: 602998 - DNA, 15 bp, Homo sapiens
tacttcatctgttct

SEQ ID NO: 602999 - DNA, 15 bp, Homo sapiens
acttcatctgttctg

SEQ ID NO: 603000 - DNA, 15 bp, Homo sapiens
cttcatctgttctgt

SEQ ID NO: 603001 - DNA, 15 bp, Homo sapiens
ttcatctgttctgta

SEQ ID NO: 603002 - DNA, 15 bp, Homo sapiens
tcatctgttctgtat

SEQ ID NO: 603003 - DNA, 15 bp, Homo sapiens
catctgttctgtatt

SEQ ID NO: 603004 - DNA, 15 bp, Homo sapiens
atctgttctgtattt

SEQ ID NO: 603005 - DNA, 15 bp, Homo sapiens
tctgttctgtatttg

SEQ ID NO: 603006 - DNA, 15 bp, Homo sapiens
ctgttctgtatttgc

SEQ ID NO: 603007 - DNA, 15 bp, Homo sapiens
tgttctgtatttgct

SEQ ID NO: 603008 - DNA, 15 bp, Homo sapiens
gttctgtatttgcta

SEQ ID NO: 603009 - DNA, 15 bp, Homo sapiens
ttctgtatttgctag

SEQ ID NO: 603010 - DNA, 15 bp, Homo sapiens
tctgtatttgctaga

SEQ ID NO: 603011 - DNA, 15 bp, Homo sapiens
ctgtatttgctagaa

SEQ ID NO: 603012 - DNA, 15 bp, Homo sapiens
tgtatttgctagaat

SEQ ID NO: 603013 - DNA, 15 bp, Homo sapiens
gtatttgctagaatt

SEQ ID NO: 603014 - DNA, 15 bp, Homo sapiens
tatttgctagaattt

SEQ ID NO: 603015 - DNA, 15 bp, Homo sapiens
atttgctagaatttt

SEQ ID NO: 603016 - DNA, 15 bp, Homo sapiens
tttgctagaatttta

SEQ ID NO: 603017 - DNA, 15 bp, Homo sapiens
ttgctagaattttaa

SEQ ID NO: 603018 - DNA, 15 bp, Homo sapiens
tgctagaattttaaa

SEQ ID NO: 603019 - DNA, 15 bp, Homo sapiens
gctagaattttaaaa

SEQ ID NO: 603020 - DNA, 15 bp, Homo sapiens
ctagaattttaaaac

SEQ ID NO: 603021 - DNA, 15 bp, Homo sapiens
tagaattttaaaacg

SEQ ID NO: 603022 - DNA, 15 bp, Homo sapiens
agaattttaaaacgc

SEQ ID NO: 603023 - DNA, 15 bp, Homo sapiens
gaattttaaaacgca

SEQ ID NO: 603024 - DNA, 15 bp, Homo sapiens
aattttaaaacgcac

SEQ ID NO: 603025 - DNA, 15 bp, Homo sapiens
attttaaaacgcaca

SEQ ID NO: 603026 - DNA, 15 bp, Homo sapiens
ttttaaaacgcacac

SEQ ID NO: 603027 - DNA, 15 bp, Homo sapiens
tttaaaacgcacaca

SEQ ID NO: 603028 - DNA, 15 bp, Homo sapiens
ttaaaacgcacacac

SEQ ID NO: 603029 - DNA, 15 bp, Homo sapiens
taaaacgcacacaca

SEQ ID NO: 603030 - DNA, 15 bp, Homo sapiens
aaaacgcacacacag

SEQ ID NO: 603031 - DNA, 15 bp, Homo sapiens
aaacgcacacacaga

SEQ ID NO: 603032 - DNA, 15 bp, Homo sapiens
aacgcacacacagac

SEQ ID NO: 603033 - DNA, 15 bp, Homo sapiens
acgcacacacagaca

SEQ ID NO: 603034 - DNA, 15 bp, Homo sapiens
cgcacacacagacac

SEQ ID NO: 603035 - DNA, 15 bp, Homo sapiens
gcacacacagacaca

SEQ ID NO: 603036 - DNA, 15 bp, Homo sapiens
cacacacagacacac

SEQ ID NO: 603037 - DNA, 15 bp, Homo sapiens
acacacagacacaca

SEQ ID NO: 603038 - DNA, 15 bp, Homo sapiens
cacacagacacacac

SEQ ID NO: 603039 - DNA, 15 bp, Homo sapiens
acacagacacacaca

SEQ ID NO: 603040 - DNA, 15 bp, Homo sapiens
cacagacacacacag

SEQ ID NO: 603041 - DNA, 15 bp, Homo sapiens
acagacacacacagg

SEQ ID NO: 603042 - DNA, 15 bp, Homo sapiens
cagacacacacaggc

SEQ ID NO: 603043 - DNA, 15 bp, Homo sapiens
agacacacacaggcg

SEQ ID NO: 603044 - DNA, 15 bp, Homo sapiens
gacacacacaggcgt

SEQ ID NO: 603045 - DNA, 15 bp, Homo sapiens
acacacacaggcgtg

SEQ ID NO: 603046 - DNA, 15 bp, Homo sapiens
cacacacaggcgtgc

SEQ ID NO: 603047 - DNA, 15 bp, Homo sapiens
acacacaggcgtgca

SEQ ID NO: 603048 - DNA, 15 bp, Homo sapiens
cacacaggcgtgcac

SEQ ID NO: 603049 - DNA, 15 bp, Homo sapiens
acacaggcgtgcaca

SEQ ID NO: 603050 - DNA, 15 bp, Homo sapiens
cacaggcgtgcacac

SEQ ID NO: 603051 - DNA, 15 bp, Homo sapiens
acaggcgtgcacaca

SEQ ID NO: 603052 - DNA, 15 bp, Homo sapiens
caggcgtgcacacac

SEQ ID NO: 603053 - DNA, 15 bp, Homo sapiens
aggcgtgcacacaca

SEQ ID NO: 603054 - DNA, 15 bp, Homo sapiens
ggcgtgcacacacac

SEQ ID NO: 603055 - DNA, 15 bp, Homo sapiens
gcgtgcacacacaca

SEQ ID NO: 603056 - DNA, 15 bp, Homo sapiens
cgtgcacacacacac

SEQ ID NO: 603057 - DNA, 15 bp, Homo sapiens
gtgcacacacacacg

SEQ ID NO: 603058 - DNA, 15 bp, Homo sapiens
tgcacacacacacgc

SEQ ID NO: 603059 - DNA, 15 bp, Homo sapiens
gcacacacacacgca

SEQ ID NO: 603060 - DNA, 15 bp, Homo sapiens
cacacacacacgcac

SEQ ID NO: 603061 - DNA, 15 bp, Homo sapiens
acacacacacgcaca

SEQ ID NO: 603062 - DNA, 15 bp, Homo sapiens
cacacacacgcacac

SEQ ID NO: 603063 - DNA, 15 bp, Homo sapiens
acacacacgcacaca

SEQ ID NO: 603064 - DNA, 15 bp, Homo sapiens
cacacacgcacacac

SEQ ID NO: 603065 - DNA, 15 bp, Homo sapiens
acacacgcacacaca

SEQ ID NO: 603066 - DNA, 15 bp, Homo sapiens
cacacgcacacacac

SEQ ID NO: 603067 - DNA, 15 bp, Homo sapiens
acacgcacacacaca

SEQ ID NO: 603068 - DNA, 15 bp, Homo sapiens
cacgcacacacacac

SEQ ID NO: 603069 - DNA, 15 bp, Homo sapiens
acgcacacacacacg

SEQ ID NO: 603070 - DNA, 15 bp, Homo sapiens
cgcacacacacacga

SEQ ID NO: 603071 - DNA, 15 bp, Homo sapiens
gcacacacacacgag

SEQ ID NO: 603072 - DNA, 15 bp, Homo sapiens
cacacacacacgaga

SEQ ID NO: 603073 - DNA, 15 bp, Homo sapiens
acacacacacgagaa

SEQ ID NO: 603074 - DNA, 15 bp, Homo sapiens
cacacacacgagaaa

SEQ ID NO: 603075 - DNA, 15 bp, Homo sapiens
acacacacgagaaaa

SEQ ID NO: 603076 - DNA, 15 bp, Homo sapiens
cacacacgagaaaac

SEQ ID NO: 603077 - DNA, 15 bp, Homo sapiens
acacacgagaaaacc

SEQ ID NO: 603078 - DNA, 15 bp, Homo sapiens
cacacgagaaaacca

SEQ ID NO: 603079 - DNA, 15 bp, Homo sapiens
acacgagaaaaccac

SEQ ID NO: 603080 - DNA, 15 bp, Homo sapiens
cacgagaaaaccaca

SEQ ID NO: 603081 - DNA, 15 bp, Homo sapiens
acgagaaaaccacaa

SEQ ID NO: 603082 - DNA, 15 bp, Homo sapiens
cgagaaaaccacaaa

SEQ ID NO: 603083 - DNA, 15 bp, Homo sapiens
gagaaaaccacaaac

SEQ ID NO: 603084 - DNA, 15 bp, Homo sapiens
agaaaaccacaaacc

SEQ ID NO: 603085 - DNA, 15 bp, Homo sapiens
gaaaaccacaaacca

SEQ ID NO: 603086 - DNA, 15 bp, Homo sapiens
aaaaccacaaaccac

SEQ ID NO: 603087 - DNA, 15 bp, Homo sapiens
aaaccacaaaccaca

SEQ ID NO: 603088 - DNA, 15 bp, Homo sapiens
aaccacaaaccacac

SEQ ID NO: 603089 - DNA, 15 bp, Homo sapiens
accacaaaccacaca

SEQ ID NO: 603090 - DNA, 15 bp, Homo sapiens
ccacaaaccacacat

SEQ ID NO: 603091 - DNA, 15 bp, Homo sapiens
cacaaaccacacatt

SEQ ID NO: 603092 - DNA, 15 bp, Homo sapiens
acaaaccacacattt

SEQ ID NO: 603093 - DNA, 15 bp, Homo sapiens
caaaccacacatttc

SEQ ID NO: 603094 - DNA, 15 bp, Homo sapiens
aaaccacacatttca

SEQ ID NO: 603095 - DNA, 15 bp, Homo sapiens
aaccacacatttcaa

SEQ ID NO: 603096 - DNA, 15 bp, Homo sapiens
accacacatttcaag

SEQ ID NO: 603097 - DNA, 15 bp, Homo sapiens
ccacacatttcaagg

SEQ ID NO: 603098 - DNA, 15 bp, Homo sapiens
cacacatttcaagga

SEQ ID NO: 603099 - DNA, 15 bp, Homo sapiens
acacatttcaaggaa

SEQ ID NO: 603100 - DNA, 15 bp, Homo sapiens
cacatttcaaggaaa

SEQ ID NO: 603101 - DNA, 15 bp, Homo sapiens
acatttcaaggaaat

SEQ ID NO: 603102 - DNA, 15 bp, Homo sapiens
catttcaaggaaatg

SEQ ID NO: 603103 - DNA, 15 bp, Homo sapiens
atttcaaggaaatgg

SEQ ID NO: 603104 - DNA, 15 bp, Homo sapiens
tttcaaggaaatgga

SEQ ID NO: 603105 - DNA, 15 bp, Homo sapiens
ttcaaggaaatggaa

SEQ ID NO: 603106 - DNA, 15 bp, Homo sapiens
tcaaggaaatggaag

SEQ ID NO: 603107 - DNA, 15 bp, Homo sapiens
caaggaaatggaaga

SEQ ID NO: 603108 - DNA, 15 bp, Homo sapiens
aaggaaatggaagaa

SEQ ID NO: 603109 - DNA, 15 bp, Homo sapiens
aggaaatggaagaat

SEQ ID NO: 603110 - DNA, 15 bp, Homo sapiens
ggaaatggaagaatt

SEQ ID NO: 603111 - DNA, 15 bp, Homo sapiens
gaaatggaagaattc

SEQ ID NO: 603112 - DNA, 15 bp, Homo sapiens
aaatggaagaattca

SEQ ID NO: 603113 - DNA, 15 bp, Homo sapiens
aatggaagaattcat

SEQ ID NO: 603114 - DNA, 15 bp, Homo sapiens
atggaagaattcatt

SEQ ID NO: 603115 - DNA, 15 bp, Homo sapiens
tggaagaattcattg

SEQ ID NO: 603116 - DNA, 15 bp, Homo sapiens
ggaagaattcattgg

SEQ ID NO: 603117 - DNA, 15 bp, Homo sapiens
gaagaattcattggt

SEQ ID NO: 603118 - DNA, 15 bp, Homo sapiens
aagaattcattggta

SEQ ID NO: 603119 - DNA, 15 bp, Homo sapiens
agaattcattggtaa

SEQ ID NO: 603120 - DNA, 15 bp, Homo sapiens
gaattcattggtaaa

SEQ ID NO: 603121 - DNA, 15 bp, Homo sapiens
aattcattggtaaaa

SEQ ID NO: 603122 - DNA, 15 bp, Homo sapiens
attcattggtaaaat

SEQ ID NO: 603123 - DNA, 15 bp, Homo sapiens
ttcattggtaaaatt

SEQ ID NO: 603124 - DNA, 15 bp, Homo sapiens
tcattggtaaaatta

SEQ ID NO: 603125 - DNA, 15 bp, Homo sapiens
cattggtaaaattaa

SEQ ID NO: 603126 - DNA, 15 bp, Homo sapiens
attggtaaaattaag

SEQ ID NO: 603127 - DNA, 15 bp, Homo sapiens
ttggtaaaattaagc

SEQ ID NO: 603128 - DNA, 15 bp, Homo sapiens
tggtaaaattaagct

SEQ ID NO: 603129 - DNA, 15 bp, Homo sapiens
ggtaaaattaagcta

SEQ ID NO: 603130 - DNA, 15 bp, Homo sapiens
gtaaaattaagctaa

SEQ ID NO: 603131 - DNA, 15 bp, Homo sapiens
taaaattaagctaat

SEQ ID NO: 603132 - DNA, 15 bp, Homo sapiens
aaaattaagctaata

SEQ ID NO: 603133 - DNA, 15 bp, Homo sapiens
aaattaagctaataa

SEQ ID NO: 603134 - DNA, 15 bp, Homo sapiens
aattaagctaataag

SEQ ID NO: 603135 - DNA, 15 bp, Homo sapiens
attaagctaataaga

SEQ ID NO: 603136 - DNA, 15 bp, Homo sapiens
ttaagctaataagat

SEQ ID NO: 603137 - DNA, 15 bp, Homo sapiens
taagctaataagatt

SEQ ID NO: 603138 - DNA, 15 bp, Homo sapiens
aagctaataagatta

SEQ ID NO: 603139 - DNA, 15 bp, Homo sapiens
agctaataagattat

SEQ ID NO: 603140 - DNA, 15 bp, Homo sapiens
gctaataagattatt

SEQ ID NO: 603141 - DNA, 15 bp, Homo sapiens
ctaataagattattt

SEQ ID NO: 603142 - DNA, 15 bp, Homo sapiens
taataagattatttt

SEQ ID NO: 603143 - DNA, 15 bp, Homo sapiens
aataagattattttc

SEQ ID NO: 603144 - DNA, 15 bp, Homo sapiens
ataagattattttcc

SEQ ID NO: 603145 - DNA, 15 bp, Homo sapiens
taagattattttcca

SEQ ID NO: 603146 - DNA, 15 bp, Homo sapiens
aagattattttccaa

SEQ ID NO: 603147 - DNA, 15 bp, Homo sapiens
agattattttccaaa

SEQ ID NO: 603148 - DNA, 15 bp, Homo sapiens
gattattttccaaat

SEQ ID NO: 603149 - DNA, 15 bp, Homo sapiens
attattttccaaata

SEQ ID NO: 603150 - DNA, 15 bp, Homo sapiens
ttattttccaaatat

SEQ ID NO: 603151 - DNA, 15 bp, Homo sapiens
tattttccaaatata

SEQ ID NO: 603152 - DNA, 15 bp, Homo sapiens
attttccaaatataa

SEQ ID NO: 603153 - DNA, 15 bp, Homo sapiens
ttttccaaatataag

SEQ ID NO: 603154 - DNA, 15 bp, Homo sapiens
tttccaaatataaga

SEQ ID NO: 603155 - DNA, 15 bp, Homo sapiens
ttccaaatataagaa

SEQ ID NO: 603156 - DNA, 15 bp, Homo sapiens
tccaaatataagaaa

SEQ ID NO: 603157 - DNA, 15 bp, Homo sapiens
ccaaatataagaaac

SEQ ID NO: 603158 - DNA, 15 bp, Homo sapiens
caaatataagaaact

SEQ ID NO: 603159 - DNA, 15 bp, Homo sapiens
aaatataagaaacta

SEQ ID NO: 603160 - DNA, 15 bp, Homo sapiens
aatataagaaactaa

SEQ ID NO: 603161 - DNA, 15 bp, Homo sapiens
atataagaaactaaa

SEQ ID NO: 603162 - DNA, 15 bp, Homo sapiens
tataagaaactaaat

SEQ ID NO: 603163 - DNA, 15 bp, Homo sapiens
ataagaaactaaatt

SEQ ID NO: 603164 - DNA, 15 bp, Homo sapiens
taagaaactaaattt

SEQ ID NO: 603165 - DNA, 15 bp, Homo sapiens
aagaaactaaatttt

SEQ ID NO: 603166 - DNA, 15 bp, Homo sapiens
agaaactaaatttta

SEQ ID NO: 603167 - DNA, 15 bp, Homo sapiens
gaaactaaattttag

SEQ ID NO: 603168 - DNA, 15 bp, Homo sapiens
aaactaaattttaga

SEQ ID NO: 603169 - DNA, 15 bp, Homo sapiens
aactaaattttagac

SEQ ID NO: 603170 - DNA, 15 bp, Homo sapiens
actaaattttagact

SEQ ID NO: 603171 - DNA, 15 bp, Homo sapiens
ctaaattttagacta

SEQ ID NO: 603172 - DNA, 15 bp, Homo sapiens
taaattttagactat

SEQ ID NO: 603173 - DNA, 15 bp, Homo sapiens
aaattttagactatt

SEQ ID NO: 603174 - DNA, 15 bp, Homo sapiens
aattttagactattt

SEQ ID NO: 603175 - DNA, 15 bp, Homo sapiens
attttagactattta

SEQ ID NO: 603176 - DNA, 15 bp, Homo sapiens
ttttagactatttag

SEQ ID NO: 603177 - DNA, 15 bp, Homo sapiens
tttagactatttagc

SEQ ID NO: 603178 - DNA, 15 bp, Homo sapiens
ttagactatttagcc

SEQ ID NO: 603179 - DNA, 15 bp, Homo sapiens
tagactatttagcca

SEQ ID NO: 603180 - DNA, 15 bp, Homo sapiens
agactatttagccaa

SEQ ID NO: 603181 - DNA, 15 bp, Homo sapiens
gactatttagccaaa

SEQ ID NO: 603182 - DNA, 15 bp, Homo sapiens
actatttagccaaag

SEQ ID NO: 603183 - DNA, 15 bp, Homo sapiens
ctatttagccaaaga

SEQ ID NO: 603184 - DNA, 15 bp, Homo sapiens
tatttagccaaagaa

SEQ ID NO: 603185 - DNA, 15 bp, Homo sapiens
atttagccaaagaaa

SEQ ID NO: 603186 - DNA, 15 bp, Homo sapiens
tttagccaaagaaat

SEQ ID NO: 603187 - DNA, 15 bp, Homo sapiens
ttagccaaagaaatt

SEQ ID NO: 603188 - DNA, 15 bp, Homo sapiens
tagccaaagaaattt

SEQ ID NO: 603189 - DNA, 15 bp, Homo sapiens
agccaaagaaatttg

SEQ ID NO: 603190 - DNA, 15 bp, Homo sapiens
gccaaagaaatttgc

SEQ ID NO: 603191 - DNA, 15 bp, Homo sapiens
ccaaagaaatttgct

SEQ ID NO: 603192 - DNA, 15 bp, Homo sapiens
caaagaaatttgctc

SEQ ID NO: 603193 - DNA, 15 bp, Homo sapiens
aaagaaatttgctct

SEQ ID NO: 603194 - DNA, 15 bp, Homo sapiens
aagaaatttgctctg

SEQ ID NO: 603195 - DNA, 15 bp, Homo sapiens
agaaatttgctctga

SEQ ID NO: 603196 - DNA, 15 bp, Homo sapiens
gaaatttgctctgat

SEQ ID NO: 603197 - DNA, 15 bp, Homo sapiens
aaatttgctctgatc

SEQ ID NO: 603198 - DNA, 15 bp, Homo sapiens
aatttgctctgatct

SEQ ID NO: 603199 - DNA, 15 bp, Homo sapiens
atttgctctgatctt

SEQ ID NO: 603200 - DNA, 15 bp, Homo sapiens
tttgctctgatcttg

SEQ ID NO: 603201 - DNA, 15 bp, Homo sapiens
ttgctctgatcttgc

SEQ ID NO: 603202 - DNA, 15 bp, Homo sapiens
tgctctgatcttgct

SEQ ID NO: 603203 - DNA, 15 bp, Homo sapiens
gctctgatcttgctt

SEQ ID NO: 603204 - DNA, 15 bp, Homo sapiens
ctctgatcttgcttt

SEQ ID NO: 603205 - DNA, 15 bp, Homo sapiens
tctgatcttgctttt

SEQ ID NO: 603206 - DNA, 15 bp, Homo sapiens
ctgatcttgcttttc

SEQ ID NO: 603207 - DNA, 15 bp, Homo sapiens
tgatcttgcttttct

SEQ ID NO: 603208 - DNA, 15 bp, Homo sapiens
gatcttgcttttcta

SEQ ID NO: 603209 - DNA, 15 bp, Homo sapiens
atcttgcttttctac

SEQ ID NO: 603210 - DNA, 15 bp, Homo sapiens
tcttgcttttctaca

SEQ ID NO: 603211 - DNA, 15 bp, Homo sapiens
cttgcttttctacaa

SEQ ID NO: 603212 - DNA, 15 bp, Homo sapiens
ttgcttttctacaac

SEQ ID NO: 603213 - DNA, 15 bp, Homo sapiens
tgcttttctacaaca

SEQ ID NO: 603214 - DNA, 15 bp, Homo sapiens
gcttttctacaacag

SEQ ID NO: 603215 - DNA, 15 bp, Homo sapiens
cttttctacaacaga

SEQ ID NO: 603216 - DNA, 15 bp, Homo sapiens
ttttctacaacagaa

SEQ ID NO: 603217 - DNA, 15 bp, Homo sapiens
tttctacaacagaat

SEQ ID NO: 603218 - DNA, 15 bp, Homo sapiens
ttctacaacagaatc

SEQ ID NO: 603219 - DNA, 15 bp, Homo sapiens
tctacaacagaatca

SEQ ID NO: 603220 - DNA, 15 bp, Homo sapiens
ctacaacagaatcat

SEQ ID NO: 603221 - DNA, 15 bp, Homo sapiens
tacaacagaatcatt

SEQ ID NO: 603222 - DNA, 15 bp, Homo sapiens
acaacagaatcattc

SEQ ID NO: 603223 - DNA, 15 bp, Homo sapiens
caacagaatcattcc

SEQ ID NO: 603224 - DNA, 15 bp, Homo sapiens
aacagaatcattccc

SEQ ID NO: 603225 - DNA, 15 bp, Homo sapiens
acagaatcattcccc

SEQ ID NO: 603226 - DNA, 15 bp, Homo sapiens
cagaatcattcccca

SEQ ID NO: 603227 - DNA, 15 bp, Homo sapiens
agaatcattccccaa

SEQ ID NO: 603228 - DNA, 15 bp, Homo sapiens
gaatcattccccaat

SEQ ID NO: 603229 - DNA, 15 bp, Homo sapiens
aatcattccccaatc

SEQ ID NO: 603230 - DNA, 15 bp, Homo sapiens
atcattccccaatca

SEQ ID NO: 603231 - DNA, 15 bp, Homo sapiens
tcattccccaatcat

SEQ ID NO: 603232 - DNA, 15 bp, Homo sapiens
cattccccaatcatt

SEQ ID NO: 603233 - DNA, 15 bp, Homo sapiens
attccccaatcattt

SEQ ID NO: 603234 - DNA, 15 bp, Homo sapiens
ttccccaatcatttt

SEQ ID NO: 603235 - DNA, 15 bp, Homo sapiens
tccccaatcatttta

SEQ ID NO: 603236 - DNA, 15 bp, Homo sapiens
ccccaatcattttat

SEQ ID NO: 603237 - DNA, 15 bp, Homo sapiens
cccaatcattttatt

SEQ ID NO: 603238 - DNA, 15 bp, Homo sapiens
ccaatcattttattt

SEQ ID NO: 603239 - DNA, 15 bp, Homo sapiens
caatcattttatttc

SEQ ID NO: 603240 - DNA, 15 bp, Homo sapiens
aatcattttatttcc

SEQ ID NO: 603241 - DNA, 15 bp, Homo sapiens
atcattttatttccc

SEQ ID NO: 603242 - DNA, 15 bp, Homo sapiens
tcattttatttccct

SEQ ID NO: 603243 - DNA, 15 bp, Homo sapiens
cattttatttccctc

SEQ ID NO: 603244 - DNA, 15 bp, Homo sapiens
attttatttccctct

SEQ ID NO: 603245 - DNA, 15 bp, Homo sapiens
ttttatttccctctt

SEQ ID NO: 603246 - DNA, 15 bp, Homo sapiens
tttatttccctcttt

SEQ ID NO: 603247 - DNA, 15 bp, Homo sapiens
ttatttccctctttt

SEQ ID NO: 603248 - DNA, 15 bp, Homo sapiens
tatttccctcttttt

SEQ ID NO: 603249 - DNA, 15 bp, Homo sapiens
atttccctctttttc

SEQ ID NO: 603250 - DNA, 15 bp, Homo sapiens
tttccctctttttct

SEQ ID NO: 603251 - DNA, 15 bp, Homo sapiens
ttccctctttttctc

SEQ ID NO: 603252 - DNA, 15 bp, Homo sapiens
tccctctttttctcc

SEQ ID NO: 603253 - DNA, 15 bp, Homo sapiens
ccctctttttctccc

SEQ ID NO: 603254 - DNA, 15 bp, Homo sapiens
cctctttttctcccc

SEQ ID NO: 603255 - DNA, 15 bp, Homo sapiens
ctctttttctcccca

SEQ ID NO: 603256 - DNA, 15 bp, Homo sapiens
tctttttctccccag

SEQ ID NO: 603257 - DNA, 15 bp, Homo sapiens
ctttttctccccagt

SEQ ID NO: 603258 - DNA, 15 bp, Homo sapiens
tttttctccccagta

SEQ ID NO: 603259 - DNA, 15 bp, Homo sapiens
ttttctccccagtat

SEQ ID NO: 603260 - DNA, 15 bp, Homo sapiens
tttctccccagtatc

SEQ ID NO: 603261 - DNA, 15 bp, Homo sapiens
ttctccccagtatcc

SEQ ID NO: 603262 - DNA, 15 bp, Homo sapiens
tctccccagtatccc

SEQ ID NO: 603263 - DNA, 15 bp, Homo sapiens
ctccccagtatcccc

SEQ ID NO: 603264 - DNA, 15 bp, Homo sapiens
tccccagtatcccca

SEQ ID NO: 603265 - DNA, 15 bp, Homo sapiens
ccccagtatccccat

SEQ ID NO: 603266 - DNA, 15 bp, Homo sapiens
cccagtatccccatc

SEQ ID NO: 603267 - DNA, 15 bp, Homo sapiens
ccagtatccccatct

SEQ ID NO: 603268 - DNA, 15 bp, Homo sapiens
cagtatccccatctt

SEQ ID NO: 603269 - DNA, 15 bp, Homo sapiens
agtatccccatcttg

SEQ ID NO: 603270 - DNA, 15 bp, Homo sapiens
gtatccccatcttgg

SEQ ID NO: 603271 - DNA, 15 bp, Homo sapiens
tatccccatcttggt

SEQ ID NO: 603272 - DNA, 15 bp, Homo sapiens
atccccatcttggtg

SEQ ID NO: 603273 - DNA, 15 bp, Homo sapiens
tccccatcttggtgg

SEQ ID NO: 603274 - DNA, 15 bp, Homo sapiens
ccccatcttggtggg

SEQ ID NO: 603275 - DNA, 15 bp, Homo sapiens
cccatcttggtggga

SEQ ID NO: 603276 - DNA, 15 bp, Homo sapiens
ccatcttggtgggac

SEQ ID NO: 603277 - DNA, 15 bp, Homo sapiens
catcttggtgggaca

SEQ ID NO: 603278 - DNA, 15 bp, Homo sapiens
atcttggtgggacaa

SEQ ID NO: 603279 - DNA, 15 bp, Homo sapiens
tcttggtgggacaac

SEQ ID NO: 603280 - DNA, 15 bp, Homo sapiens
cttggtgggacaaca

SEQ ID NO: 603281 - DNA, 15 bp, Homo sapiens
ttggtgggacaacag

SEQ ID NO: 603282 - DNA, 15 bp, Homo sapiens
tggtgggacaacaga

SEQ ID NO: 603283 - DNA, 15 bp, Homo sapiens
ggtgggacaacagaa

SEQ ID NO: 603284 - DNA, 15 bp, Homo sapiens
gtgggacaacagaac

SEQ ID NO: 603285 - DNA, 15 bp, Homo sapiens
tgggacaacagaacc

SEQ ID NO: 603286 - DNA, 15 bp, Homo sapiens
gggacaacagaaccc

SEQ ID NO: 603287 - DNA, 15 bp, Homo sapiens
ggacaacagaaccca

SEQ ID NO: 603288 - DNA, 15 bp, Homo sapiens
gacaacagaacccaa

SEQ ID NO: 603289 - DNA, 15 bp, Homo sapiens
acaacagaacccaag

SEQ ID NO: 603290 - DNA, 15 bp, Homo sapiens
caacagaacccaaga

SEQ ID NO: 603291 - DNA, 15 bp, Homo sapiens
aacagaacccaagaa

SEQ ID NO: 603292 - DNA, 15 bp, Homo sapiens
acagaacccaagaac

SEQ ID NO: 603293 - DNA, 15 bp, Homo sapiens
cagaacccaagaact

SEQ ID NO: 603294 - DNA, 15 bp, Homo sapiens
agaacccaagaactg

SEQ ID NO: 603295 - DNA, 15 bp, Homo sapiens
gaacccaagaactgg

SEQ ID NO: 603296 - DNA, 15 bp, Homo sapiens
aacccaagaactggc

SEQ ID NO: 603297 - DNA, 15 bp, Homo sapiens
acccaagaactggct

SEQ ID NO: 603298 - DNA, 15 bp, Homo sapiens
cccaagaactggctt

SEQ ID NO: 603299 - DNA, 15 bp, Homo sapiens
ccaagaactggctta

SEQ ID NO: 603300 - DNA, 15 bp, Homo sapiens
caagaactggcttaa

SEQ ID NO: 603301 - DNA, 15 bp, Homo sapiens
aagaactggcttaac

SEQ ID NO: 603302 - DNA, 15 bp, Homo sapiens
agaactggcttaaca

SEQ ID NO: 603303 - DNA, 15 bp, Homo sapiens
gaactggcttaacag

SEQ ID NO: 603304 - DNA, 15 bp, Homo sapiens
aactggcttaacagt

SEQ ID NO: 603305 - DNA, 15 bp, Homo sapiens
actggcttaacagta

SEQ ID NO: 603306 - DNA, 15 bp, Homo sapiens
ctggcttaacagtaa

SEQ ID NO: 603307 - DNA, 15 bp, Homo sapiens
tggcttaacagtaaa

SEQ ID NO: 603308 - DNA, 15 bp, Homo sapiens
ggcttaacagtaaaa

SEQ ID NO: 603309 - DNA, 15 bp, Homo sapiens
gcttaacagtaaaat

SEQ ID NO: 603310 - DNA, 15 bp, Homo sapiens
cttaacagtaaaata

SEQ ID NO: 603311 - DNA, 15 bp, Homo sapiens
ttaacagtaaaatat

SEQ ID NO: 603312 - DNA, 15 bp, Homo sapiens
taacagtaaaatatt

SEQ ID NO: 603313 - DNA, 15 bp, Homo sapiens
aacagtaaaatattt

SEQ ID NO: 603314 - DNA, 15 bp, Homo sapiens
acagtaaaatatttt

SEQ ID NO: 603315 - DNA, 15 bp, Homo sapiens
cagtaaaatattttc

SEQ ID NO: 603316 - DNA, 15 bp, Homo sapiens
agtaaaatattttct

SEQ ID NO: 603317 - DNA, 15 bp, Homo sapiens
gtaaaatattttctg

SEQ ID NO: 603318 - DNA, 15 bp, Homo sapiens
taaaatattttctgc

SEQ ID NO: 603319 - DNA, 15 bp, Homo sapiens
aaaatattttctgca

SEQ ID NO: 603320 - DNA, 15 bp, Homo sapiens
aaatattttctgcat

SEQ ID NO: 603321 - DNA, 15 bp, Homo sapiens
aatattttctgcatt

SEQ ID NO: 603322 - DNA, 15 bp, Homo sapiens
atattttctgcattt

SEQ ID NO: 603323 - DNA, 15 bp, Homo sapiens
tattttctgcatttg

SEQ ID NO: 603324 - DNA, 15 bp, Homo sapiens
attttctgcatttgc

SEQ ID NO: 603325 - DNA, 15 bp, Homo sapiens
ttttctgcatttgcc

SEQ ID NO: 603326 - DNA, 15 bp, Homo sapiens
tttctgcatttgccc

SEQ ID NO: 603327 - DNA, 15 bp, Homo sapiens
ttctgcatttgccca

SEQ ID NO: 603328 - DNA, 15 bp, Homo sapiens
tctgcatttgcccaa

SEQ ID NO: 603329 - DNA, 15 bp, Homo sapiens
ctgcatttgcccaag

SEQ ID NO: 603330 - DNA, 15 bp, Homo sapiens
tgcatttgcccaagg

SEQ ID NO: 603331 - DNA, 15 bp, Homo sapiens
gcatttgcccaagga

SEQ ID NO: 603332 - DNA, 15 bp, Homo sapiens
catttgcccaaggac

SEQ ID NO: 603333 - DNA, 15 bp, Homo sapiens
atttgcccaaggaca

SEQ ID NO: 603334 - DNA, 15 bp, Homo sapiens
tttgcccaaggacac

SEQ ID NO: 603335 - DNA, 15 bp, Homo sapiens
ttgcccaaggacaca

SEQ ID NO: 603336 - DNA, 15 bp, Homo sapiens
tgcccaaggacacat

SEQ ID NO: 603337 - DNA, 15 bp, Homo sapiens
gcccaaggacacatt

SEQ ID NO: 603338 - DNA, 15 bp, Homo sapiens
cccaaggacacattc

SEQ ID NO: 603339 - DNA, 15 bp, Homo sapiens
ccaaggacacattcc

SEQ ID NO: 603340 - DNA, 15 bp, Homo sapiens
caaggacacattccc

SEQ ID NO: 603341 - DNA, 15 bp, Homo sapiens
aaggacacattccca

SEQ ID NO: 603342 - DNA, 15 bp, Homo sapiens
aggacacattcccaa

SEQ ID NO: 603343 - DNA, 15 bp, Homo sapiens
ggacacattcccaac

SEQ ID NO: 603344 - DNA, 15 bp, Homo sapiens
gacacattcccaacg

SEQ ID NO: 603345 - DNA, 15 bp, Homo sapiens
acacattcccaacga

SEQ ID NO: 603346 - DNA, 15 bp, Homo sapiens
cacattcccaacgaa

SEQ ID NO: 603347 - DNA, 15 bp, Homo sapiens
acattcccaacgaat

SEQ ID NO: 603348 - DNA, 15 bp, Homo sapiens
cattcccaacgaatt

SEQ ID NO: 603349 - DNA, 15 bp, Homo sapiens
attcccaacgaattc

SEQ ID NO: 603350 - DNA, 15 bp, Homo sapiens
ttcccaacgaattca

SEQ ID NO: 603351 - DNA, 15 bp, Homo sapiens
tcccaacgaattcaa

SEQ ID NO: 603352 - DNA, 15 bp, Homo sapiens
cccaacgaattcaaa

SEQ ID NO: 603353 - DNA, 15 bp, Homo sapiens
ccaacgaattcaaat

SEQ ID NO: 603354 - DNA, 15 bp, Homo sapiens
caacgaattcaaata

SEQ ID NO: 603355 - DNA, 15 bp, Homo sapiens
aacgaattcaaataa

SEQ ID NO: 603356 - DNA, 15 bp, Homo sapiens
acgaattcaaataaa

SEQ ID NO: 603357 - DNA, 15 bp, Homo sapiens
cgaattcaaataaag

SEQ ID NO: 603358 - DNA, 15 bp, Homo sapiens
gaattcaaataaagg

SEQ ID NO: 603359 - DNA, 15 bp, Homo sapiens
aattcaaataaagga

SEQ ID NO: 603360 - DNA, 15 bp, Homo sapiens
attcaaataaaggag

SEQ ID NO: 603361 - DNA, 15 bp, Homo sapiens
ttcaaataaaggaga

SEQ ID NO: 603362 - DNA, 15 bp, Homo sapiens
tcaaataaaggagac

SEQ ID NO: 603363 - DNA, 15 bp, Homo sapiens
caaataaaggagact

SEQ ID NO: 603364 - DNA, 15 bp, Homo sapiens
aaataaaggagacta

SEQ ID NO: 603365 - DNA, 15 bp, Homo sapiens
aataaaggagactag

SEQ ID NO: 603366 - DNA, 15 bp, Homo sapiens
ataaaggagactaga

SEQ ID NO: 603367 - DNA, 15 bp, Homo sapiens
taaaggagactagaa

SEQ ID NO: 603368 - DNA, 15 bp, Homo sapiens
aaaggagactagaag

SEQ ID NO: 603369 - DNA, 15 bp, Homo sapiens
aaggagactagaaga

SEQ ID NO: 603370 - DNA, 15 bp, Homo sapiens
aggagactagaagaa

SEQ ID NO: 603371 - DNA, 15 bp, Homo sapiens
ggagactagaagaag

SEQ ID NO: 603372 - DNA, 15 bp, Homo sapiens
gagactagaagaaga

SEQ ID NO: 603373 - DNA, 15 bp, Homo sapiens
agactagaagaagag

SEQ ID NO: 603374 - DNA, 15 bp, Homo sapiens
gactagaagaagaga

SEQ ID NO: 603375 - DNA, 15 bp, Homo sapiens
actagaagaagagag

SEQ ID NO: 603376 - DNA, 15 bp, Homo sapiens
ctagaagaagagagg

SEQ ID NO: 603377 - DNA, 15 bp, Homo sapiens
tagaagaagagaggc

SEQ ID NO: 603378 - DNA, 15 bp, Homo sapiens
agaagaagagaggct

SEQ ID NO: 603379 - DNA, 15 bp, Homo sapiens
gaagaagagaggcta

SEQ ID NO: 603380 - DNA, 15 bp, Homo sapiens
aagaagagaggctat

SEQ ID NO: 603381 - DNA, 15 bp, Homo sapiens
agaagagaggctata

SEQ ID NO: 603382 - DNA, 15 bp, Homo sapiens
gaagagaggctatac

SEQ ID NO: 603383 - DNA, 15 bp, Homo sapiens
aagagaggctatact

SEQ ID NO: 603384 - DNA, 15 bp, Homo sapiens
agagaggctatacta

SEQ ID NO: 603385 - DNA, 15 bp, Homo sapiens
gagaggctatactac

SEQ ID NO: 603386 - DNA, 15 bp, Homo sapiens
agaggctatactaca

SEQ ID NO: 603387 - DNA, 15 bp, Homo sapiens
gaggctatactacag

SEQ ID NO: 603388 - DNA, 15 bp, Homo sapiens
aggctatactacagt

SEQ ID NO: 603389 - DNA, 15 bp, Homo sapiens
ggctatactacagtg

SEQ ID NO: 603390 - DNA, 15 bp, Homo sapiens
gctatactacagtgc

SEQ ID NO: 603391 - DNA, 15 bp, Homo sapiens
ctatactacagtgct

SEQ ID NO: 603392 - DNA, 15 bp, Homo sapiens
tatactacagtgctc

SEQ ID NO: 603393 - DNA, 15 bp, Homo sapiens
atactacagtgctct

SEQ ID NO: 603394 - DNA, 15 bp, Homo sapiens
tactacagtgctcta

SEQ ID NO: 603395 - DNA, 15 bp, Homo sapiens
actacagtgctctag

SEQ ID NO: 603396 - DNA, 15 bp, Homo sapiens
ctacagtgctctagg

SEQ ID NO: 603397 - DNA, 15 bp, Homo sapiens
tacagtgctctaggg

SEQ ID NO: 603398 - DNA, 15 bp, Homo sapiens
acagtgctctagggg

SEQ ID NO: 603399 - DNA, 15 bp, Homo sapiens
cagtgctctaggggt

SEQ ID NO: 603400 - DNA, 15 bp, Homo sapiens
agtgctctaggggtc

SEQ ID NO: 603401 - DNA, 15 bp, Homo sapiens
gtgctctaggggtca

SEQ ID NO: 603402 - DNA, 15 bp, Homo sapiens
tgctctaggggtcac

SEQ ID NO: 603403 - DNA, 15 bp, Homo sapiens
gctctaggggtcact

SEQ ID NO: 603404 - DNA, 15 bp, Homo sapiens
ctctaggggtcactc

SEQ ID NO: 603405 - DNA, 15 bp, Homo sapiens
tctaggggtcactct

SEQ ID NO: 603406 - DNA, 15 bp, Homo sapiens
ctaggggtcactctg

SEQ ID NO: 603407 - DNA, 15 bp, Homo sapiens
taggggtcactctgt

SEQ ID NO: 603408 - DNA, 15 bp, Homo sapiens
aggggtcactctgtg

SEQ ID NO: 603409 - DNA, 15 bp, Homo sapiens
ggggtcactctgtga

SEQ ID NO: 603410 - DNA, 15 bp, Homo sapiens
gggtcactctgtgat

SEQ ID NO: 603411 - DNA, 15 bp, Homo sapiens
ggtcactctgtgatt

SEQ ID NO: 603412 - DNA, 15 bp, Homo sapiens
gtcactctgtgattt

SEQ ID NO: 603413 - DNA, 15 bp, Homo sapiens
tcactctgtgatttg

SEQ ID NO: 603414 - DNA, 15 bp, Homo sapiens
cactctgtgatttgt

SEQ ID NO: 603415 - DNA, 15 bp, Homo sapiens
actctgtgatttgtt

SEQ ID NO: 603416 - DNA, 15 bp, Homo sapiens
ctctgtgatttgttg

SEQ ID NO: 603417 - DNA, 15 bp, Homo sapiens
tctgtgatttgttgt

SEQ ID NO: 603418 - DNA, 15 bp, Homo sapiens
ctgtgatttgttgtt

SEQ ID NO: 603419 - DNA, 15 bp, Homo sapiens
tgtgatttgttgttg

SEQ ID NO: 603420 - DNA, 15 bp, Homo sapiens
gtgatttgttgttgt

SEQ ID NO: 603421 - DNA, 15 bp, Homo sapiens
tgatttgttgttgtt

SEQ ID NO: 603422 - DNA, 15 bp, Homo sapiens
gatttgttgttgttg

SEQ ID NO: 603423 - DNA, 15 bp, Homo sapiens
atttgttgttgttgt

SEQ ID NO: 603424 - DNA, 15 bp, Homo sapiens
tttgttgttgttgtt

SEQ ID NO: 603425 - DNA, 15 bp, Homo sapiens
tgttgttttgagacg

SEQ ID NO: 603426 - DNA, 15 bp, Homo sapiens
gttgttttgagacgg

SEQ ID NO: 603427 - DNA, 15 bp, Homo sapiens
ttgttttgagacgga

SEQ ID NO: 603428 - DNA, 15 bp, Homo sapiens
tgttttgagacggag

SEQ ID NO: 603429 - DNA, 15 bp, Homo sapiens
gttttgagacggagt

SEQ ID NO: 603430 - DNA, 15 bp, Homo sapiens
ttttgagacggagta

SEQ ID NO: 603431 - DNA, 15 bp, Homo sapiens
tttgagacggagtat

SEQ ID NO: 603432 - DNA, 15 bp, Homo sapiens
ttgagacggagtatt

SEQ ID NO: 603433 - DNA, 15 bp, Homo sapiens
tgagacggagtattg

SEQ ID NO: 603434 - DNA, 15 bp, Homo sapiens
gagacggagtattgc

SEQ ID NO: 603435 - DNA, 15 bp, Homo sapiens
agacggagtattgct

SEQ ID NO: 603436 - DNA, 15 bp, Homo sapiens
gacggagtattgctc

SEQ ID NO: 603437 - DNA, 15 bp, Homo sapiens
acggagtattgctca

SEQ ID NO: 603438 - DNA, 15 bp, Homo sapiens
cggagtattgctcag

SEQ ID NO: 603439 - DNA, 15 bp, Homo sapiens
ggagtattgctcagt

SEQ ID NO: 603440 - DNA, 15 bp, Homo sapiens
gagtattgctcagtc

SEQ ID NO: 603441 - DNA, 15 bp, Homo sapiens
agtattgctcagtcg

SEQ ID NO: 603442 - DNA, 15 bp, Homo sapiens
gtattgctcagtcgc

SEQ ID NO: 603443 - DNA, 15 bp, Homo sapiens
tattgctcagtcgcc

SEQ ID NO: 603444 - DNA, 15 bp, Homo sapiens
attgctcagtcgccc

SEQ ID NO: 603445 - DNA, 15 bp, Homo sapiens
ttgctcagtcgccca

SEQ ID NO: 603446 - DNA, 15 bp, Homo sapiens
tgctcagtcgcccag

SEQ ID NO: 603447 - DNA, 15 bp, Homo sapiens
gctcagtcgcccagg

SEQ ID NO: 603448 - DNA, 15 bp, Homo sapiens
ctcagtcgcccaggc

SEQ ID NO: 603449 - DNA, 15 bp, Homo sapiens
tcagtcgcccaggct

SEQ ID NO: 603450 - DNA, 15 bp, Homo sapiens
cagtcgcccaggctg

SEQ ID NO: 603451 - DNA, 15 bp, Homo sapiens
agtcgcccaggctgg

SEQ ID NO: 603452 - DNA, 15 bp, Homo sapiens
tgcagtggcacgatg

SEQ ID NO: 603453 - DNA, 15 bp, Homo sapiens
gcagtggcacgatgt

SEQ ID NO: 603454 - DNA, 15 bp, Homo sapiens
cagtggcacgatgtc

SEQ ID NO: 603455 - DNA, 15 bp, Homo sapiens
agtggcacgatgtct

SEQ ID NO: 603456 - DNA, 15 bp, Homo sapiens
gtggcacgatgtcta

SEQ ID NO: 603457 - DNA, 15 bp, Homo sapiens
tggcacgatgtctac

SEQ ID NO: 603458 - DNA, 15 bp, Homo sapiens
ggcacgatgtctact

SEQ ID NO: 603459 - DNA, 15 bp, Homo sapiens
gcacgatgtctactc

SEQ ID NO: 603460 - DNA, 15 bp, Homo sapiens
cacgatgtctactca

SEQ ID NO: 603461 - DNA, 15 bp, Homo sapiens
acgatgtctactcac

SEQ ID NO: 603462 - DNA, 15 bp, Homo sapiens
cgatgtctactcact

SEQ ID NO: 603463 - DNA, 15 bp, Homo sapiens
gatgtctactcactg

SEQ ID NO: 603464 - DNA, 15 bp, Homo sapiens
atgtctactcactgt

SEQ ID NO: 603465 - DNA, 15 bp, Homo sapiens
tgtctactcactgta

SEQ ID NO: 603466 - DNA, 15 bp, Homo sapiens
gtctactcactgtaa

SEQ ID NO: 603467 - DNA, 15 bp, Homo sapiens
tctactcactgtaag

SEQ ID NO: 603468 - DNA, 15 bp, Homo sapiens
ctactcactgtaagc

SEQ ID NO: 603469 - DNA, 15 bp, Homo sapiens
tactcactgtaagct

SEQ ID NO: 603470 - DNA, 15 bp, Homo sapiens
actcactgtaagctc

SEQ ID NO: 603471 - DNA, 15 bp, Homo sapiens
ctcactgtaagctct

SEQ ID NO: 603472 - DNA, 15 bp, Homo sapiens
tcactgtaagctctg

SEQ ID NO: 603473 - DNA, 15 bp, Homo sapiens
cactgtaagctctgc

SEQ ID NO: 603474 - DNA, 15 bp, Homo sapiens
actgtaagctctgcc

SEQ ID NO: 603475 - DNA, 15 bp, Homo sapiens
ctgtaagctctgccc

SEQ ID NO: 603476 - DNA, 15 bp, Homo sapiens
tgtaagctctgcccc

SEQ ID NO: 603477 - DNA, 15 bp, Homo sapiens
gtaagctctgccccc

SEQ ID NO: 603478 - DNA, 15 bp, Homo sapiens
taagctctgcccccc

SEQ ID NO: 603479 - DNA, 15 bp, Homo sapiens
aagctctgcccccca

SEQ ID NO: 603480 - DNA, 15 bp, Homo sapiens
agctctgccccccag

SEQ ID NO: 603481 - DNA, 15 bp, Homo sapiens
gctctgccccccagg

SEQ ID NO: 603482 - DNA, 15 bp, Homo sapiens
ctctgccccccaggt

SEQ ID NO: 603483 - DNA, 15 bp, Homo sapiens
tctgccccccaggtt

SEQ ID NO: 603484 - DNA, 15 bp, Homo sapiens
ctgccccccaggttc

SEQ ID NO: 603485 - DNA, 15 bp, Homo sapiens
tgccccccaggttca

SEQ ID NO: 603486 - DNA, 15 bp, Homo sapiens
gccccccaggttcac

SEQ ID NO: 603487 - DNA, 15 bp, Homo sapiens
ccccccaggttcacg

SEQ ID NO: 603488 - DNA, 15 bp, Homo sapiens
cccccaggttcacgc

SEQ ID NO: 603489 - DNA, 15 bp, Homo sapiens
ccccaggttcacgcc

SEQ ID NO: 603490 - DNA, 15 bp, Homo sapiens
cccaggttcacgcca

SEQ ID NO: 603491 - DNA, 15 bp, Homo sapiens
ccaggttcacgccat

SEQ ID NO: 603492 - DNA, 15 bp, Homo sapiens
caggttcacgccatt

SEQ ID NO: 603493 - DNA, 15 bp, Homo sapiens
aggttcacgccattc

SEQ ID NO: 603494 - DNA, 15 bp, Homo sapiens
ggttcacgccattct

SEQ ID NO: 603495 - DNA, 15 bp, Homo sapiens
gttcacgccattctc

SEQ ID NO: 603496 - DNA, 15 bp, Homo sapiens
ttcacgccattctcc

SEQ ID NO: 603497 - DNA, 15 bp, Homo sapiens
tcacgccattctcct

SEQ ID NO: 603498 - DNA, 15 bp, Homo sapiens
cacgccattctcctg

SEQ ID NO: 603499 - DNA, 15 bp, Homo sapiens
acgccattctcctgc

SEQ ID NO: 603500 - DNA, 15 bp, Homo sapiens
tgcctcagcctcccg

SEQ ID NO: 603501 - DNA, 15 bp, Homo sapiens
gcctcagcctcccga

SEQ ID NO: 603502 - DNA, 15 bp, Homo sapiens
cctcagcctcccgaa

SEQ ID NO: 603503 - DNA, 15 bp, Homo sapiens
ctcagcctcccgaat

SEQ ID NO: 603504 - DNA, 15 bp, Homo sapiens
tcagcctcccgaata

SEQ ID NO: 603505 - DNA, 15 bp, Homo sapiens
cagcctcccgaatag

SEQ ID NO: 603506 - DNA, 15 bp, Homo sapiens
agcctcccgaatagc

SEQ ID NO: 603507 - DNA, 15 bp, Homo sapiens
gcctcccgaatagct

SEQ ID NO: 603508 - DNA, 15 bp, Homo sapiens
cctcccgaatagctg

SEQ ID NO: 603509 - DNA, 15 bp, Homo sapiens
ctcccgaatagctgg

SEQ ID NO: 603510 - DNA, 15 bp, Homo sapiens
tcccgaatagctggg

SEQ ID NO: 603511 - DNA, 15 bp, Homo sapiens
cccgaatagctggga

SEQ ID NO: 603512 - DNA, 15 bp, Homo sapiens
ccgaatagctgggag

SEQ ID NO: 603513 - DNA, 15 bp, Homo sapiens
cgaatagctgggagt

SEQ ID NO: 603514 - DNA, 15 bp, Homo sapiens
gaatagctgggagta

SEQ ID NO: 603515 - DNA, 15 bp, Homo sapiens
aatagctgggagtac

SEQ ID NO: 603516 - DNA, 15 bp, Homo sapiens
atagctgggagtaca

SEQ ID NO: 603517 - DNA, 15 bp, Homo sapiens
tagctgggagtacag

SEQ ID NO: 603518 - DNA, 15 bp, Homo sapiens
agctgggagtacagg

SEQ ID NO: 603519 - DNA, 15 bp, Homo sapiens
gctgggagtacaggg

SEQ ID NO: 603520 - DNA, 15 bp, Homo sapiens
ctgggagtacagggg

SEQ ID NO: 603521 - DNA, 15 bp, Homo sapiens
tgggagtacaggggc

SEQ ID NO: 603522 - DNA, 15 bp, Homo sapiens
gggagtacaggggcc

SEQ ID NO: 603523 - DNA, 15 bp, Homo sapiens
ggagtacaggggccc

SEQ ID NO: 603524 - DNA, 15 bp, Homo sapiens
gagtacaggggcccg

SEQ ID NO: 603525 - DNA, 15 bp, Homo sapiens
agtacaggggcccgc

SEQ ID NO: 603526 - DNA, 15 bp, Homo sapiens
gtacaggggcccgcc

SEQ ID NO: 603527 - DNA, 15 bp, Homo sapiens
tacaggggcccgcca

SEQ ID NO: 603528 - DNA, 15 bp, Homo sapiens
acaggggcccgccac

SEQ ID NO: 603529 - DNA, 15 bp, Homo sapiens
caggggcccgccacc

SEQ ID NO: 603530 - DNA, 15 bp, Homo sapiens
aggggcccgccacca

SEQ ID NO: 603531 - DNA, 15 bp, Homo sapiens
ggggcccgccaccat

SEQ ID NO: 603532 - DNA, 15 bp, Homo sapiens
gggcccgccaccatg

SEQ ID NO: 603533 - DNA, 15 bp, Homo sapiens
ggcccgccaccatgt

SEQ ID NO: 603534 - DNA, 15 bp, Homo sapiens
gcccgccaccatgtc

SEQ ID NO: 603535 - DNA, 15 bp, Homo sapiens
cccgccaccatgtcc

SEQ ID NO: 603536 - DNA, 15 bp, Homo sapiens
ccgccaccatgtccg

SEQ ID NO: 603537 - DNA, 15 bp, Homo sapiens
cgccaccatgtccgg

SEQ ID NO: 603538 - DNA, 15 bp, Homo sapiens
gccaccatgtccggc

SEQ ID NO: 603539 - DNA, 15 bp, Homo sapiens
ccaccatgtccggct

SEQ ID NO: 603540 - DNA, 15 bp, Homo sapiens
caccatgtccggcta

SEQ ID NO: 603541 - DNA, 15 bp, Homo sapiens
accatgtccggctaa

SEQ ID NO: 603542 - DNA, 15 bp, Homo sapiens
ccatgtccggctaat

SEQ ID NO: 603543 - DNA, 15 bp, Homo sapiens
catgtccggctaatt

SEQ ID NO: 603544 - DNA, 15 bp, Homo sapiens
atgtccggctaattt

SEQ ID NO: 603545 - DNA, 15 bp, Homo sapiens
tgtccggctaatttt

SEQ ID NO: 603546 - DNA, 15 bp, Homo sapiens
gtccggctaattttt

SEQ ID NO: 603547 - DNA, 15 bp, Homo sapiens
tccggctaatttttt

SEQ ID NO: 603548 - DNA, 15 bp, Homo sapiens
cggctaatttttttg

SEQ ID NO: 603549 - DNA, 15 bp, Homo sapiens
ggctaatttttttgt

SEQ ID NO: 603550 - DNA, 15 bp, Homo sapiens
gctaatttttttgta

SEQ ID NO: 603551 - DNA, 15 bp, Homo sapiens
ctaatttttttgtat

SEQ ID NO: 603552 - DNA, 15 bp, Homo sapiens
taatttttttgtatt

SEQ ID NO: 603553 - DNA, 15 bp, Homo sapiens
aatttttttgtattt

SEQ ID NO: 603554 - DNA, 15 bp, Homo sapiens
atttttttgtatttt

SEQ ID NO: 603555 - DNA, 15 bp, Homo sapiens
tttttgtatttttaa

SEQ ID NO: 603556 - DNA, 15 bp, Homo sapiens
ttttgtatttttaat

SEQ ID NO: 603557 - DNA, 15 bp, Homo sapiens
tttgtatttttaata

SEQ ID NO: 603558 - DNA, 15 bp, Homo sapiens
ttgtatttttaatag

SEQ ID NO: 603559 - DNA, 15 bp, Homo sapiens
tgtatttttaataga

SEQ ID NO: 603560 - DNA, 15 bp, Homo sapiens
gtatttttaatagag

SEQ ID NO: 603561 - DNA, 15 bp, Homo sapiens
tatttttaatagaga

SEQ ID NO: 603562 - DNA, 15 bp, Homo sapiens
atttttaatagagac

SEQ ID NO: 603563 - DNA, 15 bp, Homo sapiens
tttttaatagagacg

SEQ ID NO: 603564 - DNA, 15 bp, Homo sapiens
ttttaatagagacgg

SEQ ID NO: 603565 - DNA, 15 bp, Homo sapiens
tttaatagagacggg

SEQ ID NO: 603566 - DNA, 15 bp, Homo sapiens
ttaatagagacgggg

SEQ ID NO: 603567 - DNA, 15 bp, Homo sapiens
taatagagacggggt

SEQ ID NO: 603568 - DNA, 15 bp, Homo sapiens
aatagagacggggtt

SEQ ID NO: 603569 - DNA, 15 bp, Homo sapiens
atagagacggggttt

SEQ ID NO: 603570 - DNA, 15 bp, Homo sapiens
ggtttcaccatgttc

SEQ ID NO: 603571 - DNA, 15 bp, Homo sapiens
gtttcaccatgttcg

SEQ ID NO: 603572 - DNA, 15 bp, Homo sapiens
tttcaccatgttcgc

SEQ ID NO: 603573 - DNA, 15 bp, Homo sapiens
ttcaccatgttcgcc

SEQ ID NO: 603574 - DNA, 15 bp, Homo sapiens
tcaccatgttcgcca

SEQ ID NO: 603575 - DNA, 15 bp, Homo sapiens
caccatgttcgccag

SEQ ID NO: 603576 - DNA, 15 bp, Homo sapiens
accatgttcgccagg

SEQ ID NO: 603577 - DNA, 15 bp, Homo sapiens
ccatgttcgccagga

SEQ ID NO: 603578 - DNA, 15 bp, Homo sapiens
catgttcgccaggat

SEQ ID NO: 603579 - DNA, 15 bp, Homo sapiens
atgttcgccaggatg

SEQ ID NO: 603580 - DNA, 15 bp, Homo sapiens
tgttcgccaggatgg

SEQ ID NO: 603581 - DNA, 15 bp, Homo sapiens
gttcgccaggatggt

SEQ ID NO: 603582 - DNA, 15 bp, Homo sapiens
ttcgccaggatggtc

SEQ ID NO: 603583 - DNA, 15 bp, Homo sapiens
tcgccaggatggtct

SEQ ID NO: 603584 - DNA, 15 bp, Homo sapiens
cgccaggatggtctc

SEQ ID NO: 603585 - DNA, 15 bp, Homo sapiens
gatctcctgacctcg

SEQ ID NO: 603586 - DNA, 15 bp, Homo sapiens
atctcctgacctcgt

SEQ ID NO: 603587 - DNA, 15 bp, Homo sapiens
tctcctgacctcgtg

SEQ ID NO: 603588 - DNA, 15 bp, Homo sapiens
ctcctgacctcgtga

SEQ ID NO: 603589 - DNA, 15 bp, Homo sapiens
tcctgacctcgtgat

SEQ ID NO: 603590 - DNA, 15 bp, Homo sapiens
cctgacctcgtgatc

SEQ ID NO: 603591 - DNA, 15 bp, Homo sapiens
ctgacctcgtgatcc

SEQ ID NO: 603592 - DNA, 15 bp, Homo sapiens
tgacctcgtgatccg

SEQ ID NO: 603593 - DNA, 15 bp, Homo sapiens
gacctcgtgatccgc

SEQ ID NO: 603594 - DNA, 15 bp, Homo sapiens
acctcgtgatccgcc

SEQ ID NO: 603595 - DNA, 15 bp, Homo sapiens
cctcgtgatccgccc

SEQ ID NO: 603596 - DNA, 15 bp, Homo sapiens
ctcgtgatccgcccg

SEQ ID NO: 603597 - DNA, 15 bp, Homo sapiens
tcgtgatccgcccgc

SEQ ID NO: 603598 - DNA, 15 bp, Homo sapiens
cgtgatccgcccgcc

SEQ ID NO: 603599 - DNA, 15 bp, Homo sapiens
gtgatccgcccgcct

SEQ ID NO: 603600 - DNA, 15 bp, Homo sapiens
tgatccgcccgcctc

SEQ ID NO: 603601 - DNA, 15 bp, Homo sapiens
gatccgcccgcctcg

SEQ ID NO: 603602 - DNA, 15 bp, Homo sapiens
atccgcccgcctcgg

SEQ ID NO: 603603 - DNA, 15 bp, Homo sapiens
tccgcccgcctcggc

SEQ ID NO: 603604 - DNA, 15 bp, Homo sapiens
ccgcccgcctcggcc

SEQ ID NO: 603605 - DNA, 15 bp, Homo sapiens
cgcccgcctcggcct

SEQ ID NO: 603606 - DNA, 15 bp, Homo sapiens
cctcccaaagtgcta

SEQ ID NO: 603607 - DNA, 15 bp, Homo sapiens
ctcccaaagtgctag

SEQ ID NO: 603608 - DNA, 15 bp, Homo sapiens
tcccaaagtgctagg

SEQ ID NO: 603609 - DNA, 15 bp, Homo sapiens
cccaaagtgctagga

SEQ ID NO: 603610 - DNA, 15 bp, Homo sapiens
ccaaagtgctaggat

SEQ ID NO: 603611 - DNA, 15 bp, Homo sapiens
caaagtgctaggatt

SEQ ID NO: 603612 - DNA, 15 bp, Homo sapiens
aaagtgctaggatta

SEQ ID NO: 603613 - DNA, 15 bp, Homo sapiens
aagtgctaggattac

SEQ ID NO: 603614 - DNA, 15 bp, Homo sapiens
agtgctaggattaca

SEQ ID NO: 603615 - DNA, 15 bp, Homo sapiens
gtgctaggattacag

SEQ ID NO: 603616 - DNA, 15 bp, Homo sapiens
tgctaggattacagg

SEQ ID NO: 603617 - DNA, 15 bp, Homo sapiens
gctaggattacaggc

SEQ ID NO: 603618 - DNA, 15 bp, Homo sapiens
ctaggattacaggca

SEQ ID NO: 603619 - DNA, 15 bp, Homo sapiens
taggattacaggcat

SEQ ID NO: 603620 - DNA, 15 bp, Homo sapiens
aggattacaggcatg

SEQ ID NO: 603621 - DNA, 15 bp, Homo sapiens
caggcatgagccact

SEQ ID NO: 603622 - DNA, 15 bp, Homo sapiens
gcatgagccactgcg

SEQ ID NO: 603623 - DNA, 15 bp, Homo sapiens
catgagccactgcgc

SEQ ID NO: 603624 - DNA, 15 bp, Homo sapiens
atgagccactgcgcc

SEQ ID NO: 603625 - DNA, 15 bp, Homo sapiens
tgagccactgcgccc

SEQ ID NO: 603626 - DNA, 15 bp, Homo sapiens
gagccactgcgcccg

SEQ ID NO: 603627 - DNA, 15 bp, Homo sapiens
agccactgcgcccgg

SEQ ID NO: 603628 - DNA, 15 bp, Homo sapiens
gccactgcgcccggc

SEQ ID NO: 603629 - DNA, 15 bp, Homo sapiens
ccactgcgcccggcc

SEQ ID NO: 603630 - DNA, 15 bp, Homo sapiens
cactgcgcccggcca

SEQ ID NO: 603631 - DNA, 15 bp, Homo sapiens
actgcgcccggccac

SEQ ID NO: 603632 - DNA, 15 bp, Homo sapiens
ctgcgcccggccact

SEQ ID NO: 603633 - DNA, 15 bp, Homo sapiens
tgcgcccggccactc

SEQ ID NO: 603634 - DNA, 15 bp, Homo sapiens
gcgcccggccactct

SEQ ID NO: 603635 - DNA, 15 bp, Homo sapiens
cgcccggccactctg

SEQ ID NO: 603636 - DNA, 15 bp, Homo sapiens
gcccggccactctgt

SEQ ID NO: 603637 - DNA, 15 bp, Homo sapiens
cccggccactctgtg

SEQ ID NO: 603638 - DNA, 15 bp, Homo sapiens
ccggccactctgtga

SEQ ID NO: 603639 - DNA, 15 bp, Homo sapiens
cggccactctgtgat

SEQ ID NO: 603640 - DNA, 15 bp, Homo sapiens
ggccactctgtgatt

SEQ ID NO: 603641 - DNA, 15 bp, Homo sapiens
gccactctgtgattt

SEQ ID NO: 603642 - DNA, 15 bp, Homo sapiens
ccactctgtgatttt

SEQ ID NO: 603643 - DNA, 15 bp, Homo sapiens
cactctgtgattttc

SEQ ID NO: 603644 - DNA, 15 bp, Homo sapiens
actctgtgattttct

SEQ ID NO: 603645 - DNA, 15 bp, Homo sapiens
ctctgtgattttctt

SEQ ID NO: 603646 - DNA, 15 bp, Homo sapiens
tctgtgattttcttt

SEQ ID NO: 603647 - DNA, 15 bp, Homo sapiens
ctgtgattttcttta

SEQ ID NO: 603648 - DNA, 15 bp, Homo sapiens
tgtgattttctttaa

SEQ ID NO: 603649 - DNA, 15 bp, Homo sapiens
gtgattttctttaag

SEQ ID NO: 603650 - DNA, 15 bp, Homo sapiens
tgattttctttaagg

SEQ ID NO: 603651 - DNA, 15 bp, Homo sapiens
gattttctttaaggc

SEQ ID NO: 603652 - DNA, 15 bp, Homo sapiens
attttctttaaggct

SEQ ID NO: 603653 - DNA, 15 bp, Homo sapiens
ttttctttaaggctc

SEQ ID NO: 603654 - DNA, 15 bp, Homo sapiens
tttctttaaggctca

SEQ ID NO: 603655 - DNA, 15 bp, Homo sapiens
ttctttaaggctcat

SEQ ID NO: 603656 - DNA, 15 bp, Homo sapiens
tctttaaggctcatc

SEQ ID NO: 603657 - DNA, 15 bp, Homo sapiens
ctttaaggctcatcc

SEQ ID NO: 603658 - DNA, 15 bp, Homo sapiens
tttaaggctcatcct

SEQ ID NO: 603659 - DNA, 15 bp, Homo sapiens
ttaaggctcatccta

SEQ ID NO: 603660 - DNA, 15 bp, Homo sapiens
taaggctcatcctag

SEQ ID NO: 603661 - DNA, 15 bp, Homo sapiens
aaggctcatcctagt

SEQ ID NO: 603662 - DNA, 15 bp, Homo sapiens
aggctcatcctagta

SEQ ID NO: 603663 - DNA, 15 bp, Homo sapiens
ggctcatcctagtat

SEQ ID NO: 603664 - DNA, 15 bp, Homo sapiens
gctcatcctagtatt

SEQ ID NO: 603665 - DNA, 15 bp, Homo sapiens
ctcatcctagtattc

SEQ ID NO: 603666 - DNA, 15 bp, Homo sapiens
tcatcctagtattct

SEQ ID NO: 603667 - DNA, 15 bp, Homo sapiens
catcctagtattctc

SEQ ID NO: 603668 - DNA, 15 bp, Homo sapiens
atcctagtattctcc

SEQ ID NO: 603669 - DNA, 15 bp, Homo sapiens
tcctagtattctcct

SEQ ID NO: 603670 - DNA, 15 bp, Homo sapiens
cctagtattctccta

SEQ ID NO: 603671 - DNA, 15 bp, Homo sapiens
ctagtattctcctag

SEQ ID NO: 603672 - DNA, 15 bp, Homo sapiens
tagtattctcctagt

SEQ ID NO: 603673 - DNA, 15 bp, Homo sapiens
agtattctcctagtc

SEQ ID NO: 603674 - DNA, 15 bp, Homo sapiens
gtattctcctagtcc

SEQ ID NO: 603675 - DNA, 15 bp, Homo sapiens
tattctcctagtccc

SEQ ID NO: 603676 - DNA, 15 bp, Homo sapiens
attctcctagtccct

SEQ ID NO: 603677 - DNA, 15 bp, Homo sapiens
ttctcctagtcccta

SEQ ID NO: 603678 - DNA, 15 bp, Homo sapiens
tctcctagtccctaa

SEQ ID NO: 603679 - DNA, 15 bp, Homo sapiens
ctcctagtccctaag

SEQ ID NO: 603680 - DNA, 15 bp, Homo sapiens
tcctagtccctaagt

SEQ ID NO: 603681 - DNA, 15 bp, Homo sapiens
cctagtccctaagta

SEQ ID NO: 603682 - DNA, 15 bp, Homo sapiens
ctagtccctaagtag

SEQ ID NO: 603683 - DNA, 15 bp, Homo sapiens
tagtccctaagtaga

SEQ ID NO: 603684 - DNA, 15 bp, Homo sapiens
agtccctaagtagat

SEQ ID NO: 603685 - DNA, 15 bp, Homo sapiens
gtccctaagtagatg

SEQ ID NO: 603686 - DNA, 15 bp, Homo sapiens
tccctaagtagatgg

SEQ ID NO: 603687 - DNA, 15 bp, Homo sapiens
ccctaagtagatggc

SEQ ID NO: 603688 - DNA, 15 bp, Homo sapiens
cctaagtagatggca

SEQ ID NO: 603689 - DNA, 15 bp, Homo sapiens
ctaagtagatggcag

SEQ ID NO: 603690 - DNA, 15 bp, Homo sapiens
taagtagatggcagt

SEQ ID NO: 603691 - DNA, 15 bp, Homo sapiens
aagtagatggcagta

SEQ ID NO: 603692 - DNA, 15 bp, Homo sapiens
agtagatggcagtag

SEQ ID NO: 603693 - DNA, 15 bp, Homo sapiens
gtagatggcagtagg

SEQ ID NO: 603694 - DNA, 15 bp, Homo sapiens
tagatggcagtaggt

SEQ ID NO: 603695 - DNA, 15 bp, Homo sapiens
agatggcagtaggtt

SEQ ID NO: 603696 - DNA, 15 bp, Homo sapiens
gatggcagtaggttt

SEQ ID NO: 603697 - DNA, 15 bp, Homo sapiens
atggcagtaggtttt

SEQ ID NO: 603698 - DNA, 15 bp, Homo sapiens
tggcagtaggttttg

SEQ ID NO: 603699 - DNA, 15 bp, Homo sapiens
ggcagtaggttttgt

SEQ ID NO: 603700 - DNA, 15 bp, Homo sapiens
gcagtaggttttgtt

SEQ ID NO: 603701 - DNA, 15 bp, Homo sapiens
cagtaggttttgttt

SEQ ID NO: 603702 - DNA, 15 bp, Homo sapiens
agtaggttttgtttt

SEQ ID NO: 603703 - DNA, 15 bp, Homo sapiens
gtaggttttgttttt

SEQ ID NO: 603704 - DNA, 15 bp, Homo sapiens
taggttttgtttttt

SEQ ID NO: 603705 - DNA, 15 bp, Homo sapiens
aggttttgttttttg

SEQ ID NO: 603706 - DNA, 15 bp, Homo sapiens
ggttttgttttttgt

SEQ ID NO: 603707 - DNA, 15 bp, Homo sapiens
gttttgttttttgtt

SEQ ID NO: 603708 - DNA, 15 bp, Homo sapiens
ttttgttttttgttt

SEQ ID NO: 603709 - DNA, 15 bp, Homo sapiens
tttgttttttgtttt

SEQ ID NO: 603710 - DNA, 15 bp, Homo sapiens
ttgttttttgttttt

SEQ ID NO: 603711 - DNA, 15 bp, Homo sapiens
tgttttttgtttttc

SEQ ID NO: 603712 - DNA, 15 bp, Homo sapiens
gttttttgtttttcg

SEQ ID NO: 603713 - DNA, 15 bp, Homo sapiens
ttttttgtttttcgc

SEQ ID NO: 603714 - DNA, 15 bp, Homo sapiens
tttttgtttttcgca

SEQ ID NO: 603715 - DNA, 15 bp, Homo sapiens
ttttgtttttcgcag

SEQ ID NO: 603716 - DNA, 15 bp, Homo sapiens
tttgtttttcgcagc

SEQ ID NO: 603717 - DNA, 15 bp, Homo sapiens
ttgtttttcgcagct

SEQ ID NO: 603718 - DNA, 15 bp, Homo sapiens
tgtttttcgcagctg

SEQ ID NO: 603719 - DNA, 15 bp, Homo sapiens
gtttttcgcagctgg

SEQ ID NO: 603720 - DNA, 15 bp, Homo sapiens
tttttcgcagctgga

SEQ ID NO: 603721 - DNA, 15 bp, Homo sapiens
ttttcgcagctggat

SEQ ID NO: 603722 - DNA, 15 bp, Homo sapiens
tttcgcagctggatt

SEQ ID NO: 603723 - DNA, 15 bp, Homo sapiens
ttcgcagctggatta

SEQ ID NO: 603724 - DNA, 15 bp, Homo sapiens
tcgcagctggattaa

SEQ ID NO: 603725 - DNA, 15 bp, Homo sapiens
cgcagctggattaag

SEQ ID NO: 603726 - DNA, 15 bp, Homo sapiens
gcagctggattaagg

SEQ ID NO: 603727 - DNA, 15 bp, Homo sapiens
cagctggattaagga

SEQ ID NO: 603728 - DNA, 15 bp, Homo sapiens
agctggattaaggat

SEQ ID NO: 603729 - DNA, 15 bp, Homo sapiens
gctggattaaggatt

SEQ ID NO: 603730 - DNA, 15 bp, Homo sapiens
ctggattaaggattg

SEQ ID NO: 603731 - DNA, 15 bp, Homo sapiens
tggattaaggattgc

SEQ ID NO: 603732 - DNA, 15 bp, Homo sapiens
ggattaaggattgct

SEQ ID NO: 603733 - DNA, 15 bp, Homo sapiens
gattaaggattgctg

SEQ ID NO: 603734 - DNA, 15 bp, Homo sapiens
attaaggattgctga

SEQ ID NO: 603735 - DNA, 15 bp, Homo sapiens
ttaaggattgctgag

SEQ ID NO: 603736 - DNA, 15 bp, Homo sapiens
taaggattgctgaga

SEQ ID NO: 603737 - DNA, 15 bp, Homo sapiens
aaggattgctgagaa

SEQ ID NO: 603738 - DNA, 15 bp, Homo sapiens
aggattgctgagaat

SEQ ID NO: 603739 - DNA, 15 bp, Homo sapiens
ggattgctgagaata

SEQ ID NO: 603740 - DNA, 15 bp, Homo sapiens
gattgctgagaatat

SEQ ID NO: 603741 - DNA, 15 bp, Homo sapiens
attgctgagaatata

SEQ ID NO: 603742 - DNA, 15 bp, Homo sapiens
ttgctgagaatatat

SEQ ID NO: 603743 - DNA, 15 bp, Homo sapiens
tgctgagaatatatg

SEQ ID NO: 603744 - DNA, 15 bp, Homo sapiens
gctgagaatatatgg

SEQ ID NO: 603745 - DNA, 15 bp, Homo sapiens
ctgagaatatatgga

SEQ ID NO: 603746 - DNA, 15 bp, Homo sapiens
tgagaatatatggat

SEQ ID NO: 603747 - DNA, 15 bp, Homo sapiens
gagaatatatggatg

SEQ ID NO: 603748 - DNA, 15 bp, Homo sapiens
agaatatatggatgt

SEQ ID NO: 603749 - DNA, 15 bp, Homo sapiens
gaatatatggatgtt

SEQ ID NO: 603750 - DNA, 15 bp, Homo sapiens
aatatatggatgttt

SEQ ID NO: 603751 - DNA, 15 bp, Homo sapiens
atatatggatgtttt

SEQ ID NO: 603752 - DNA, 15 bp, Homo sapiens
tatatggatgttttc

SEQ ID NO: 603753 - DNA, 15 bp, Homo sapiens
atatggatgttttct

SEQ ID NO: 603754 - DNA, 15 bp, Homo sapiens
tatggatgttttctt

SEQ ID NO: 603755 - DNA, 15 bp, Homo sapiens
atggatgttttcttt

SEQ ID NO: 603756 - DNA, 15 bp, Homo sapiens
tggatgttttctttt

SEQ ID NO: 603757 - DNA, 15 bp, Homo sapiens
ggatgttttctttta

SEQ ID NO: 603758 - DNA, 15 bp, Homo sapiens
gatgttttcttttaa

SEQ ID NO: 603759 - DNA, 15 bp, Homo sapiens
atgttttcttttaaa

SEQ ID NO: 603760 - DNA, 15 bp, Homo sapiens
tgttttcttttaaat

SEQ ID NO: 603761 - DNA, 15 bp, Homo sapiens
gttttcttttaaatg

SEQ ID NO: 603762 - DNA, 15 bp, Homo sapiens
ttttcttttaaatgt

SEQ ID NO: 603763 - DNA, 15 bp, Homo sapiens
tttcttttaaatgtg

SEQ ID NO: 603764 - DNA, 15 bp, Homo sapiens
ttcttttaaatgtgg

SEQ ID NO: 603765 - DNA, 15 bp, Homo sapiens
tcttttaaatgtgga

SEQ ID NO: 603766 - DNA, 15 bp, Homo sapiens
cttttaaatgtggaa

SEQ ID NO: 603767 - DNA, 15 bp, Homo sapiens
ttttaaatgtggaag

SEQ ID NO: 603768 - DNA, 15 bp, Homo sapiens
tttaaatgtggaagt

SEQ ID NO: 603769 - DNA, 15 bp, Homo sapiens
ttaaatgtggaagtc

SEQ ID NO: 603770 - DNA, 15 bp, Homo sapiens
taaatgtggaagtca

SEQ ID NO: 603771 - DNA, 15 bp, Homo sapiens
aaatgtggaagtcaa

SEQ ID NO: 603772 - DNA, 15 bp, Homo sapiens
aatgtggaagtcaaa

SEQ ID NO: 603773 - DNA, 15 bp, Homo sapiens
atgtggaagtcaaac

SEQ ID NO: 603774 - DNA, 15 bp, Homo sapiens
tgtggaagtcaaacc

SEQ ID NO: 603775 - DNA, 15 bp, Homo sapiens
gtggaagtcaaacca

SEQ ID NO: 603776 - DNA, 15 bp, Homo sapiens
tggaagtcaaaccaa

SEQ ID NO: 603777 - DNA, 15 bp, Homo sapiens
ggaagtcaaaccaaa

SEQ ID NO: 603778 - DNA, 15 bp, Homo sapiens
gaagtcaaaccaaac

SEQ ID NO: 603779 - DNA, 15 bp, Homo sapiens
aagtcaaaccaaacg

SEQ ID NO: 603780 - DNA, 15 bp, Homo sapiens
agtcaaaccaaacgt

SEQ ID NO: 603781 - DNA, 15 bp, Homo sapiens
gtcaaaccaaacgtt

SEQ ID NO: 603782 - DNA, 15 bp, Homo sapiens
tcaaaccaaacgttg

SEQ ID NO: 603783 - DNA, 15 bp, Homo sapiens
caaaccaaacgttgg

SEQ ID NO: 603784 - DNA, 15 bp, Homo sapiens
aaaccaaacgttgga

SEQ ID NO: 603785 - DNA, 15 bp, Homo sapiens
aaccaaacgttggag

SEQ ID NO: 603786 - DNA, 15 bp, Homo sapiens
accaaacgttggagc

SEQ ID NO: 603787 - DNA, 15 bp, Homo sapiens
ccaaacgttggagca

SEQ ID NO: 603788 - DNA, 15 bp, Homo sapiens
caaacgttggagcat

SEQ ID NO: 603789 - DNA, 15 bp, Homo sapiens
aaacgttggagcatt

SEQ ID NO: 603790 - DNA, 15 bp, Homo sapiens
aacgttggagcattg

SEQ ID NO: 603791 - DNA, 15 bp, Homo sapiens
acgttggagcattgg

SEQ ID NO: 603792 - DNA, 15 bp, Homo sapiens
cgttggagcattggc

SEQ ID NO: 603793 - DNA, 15 bp, Homo sapiens
gttggagcattggcc

SEQ ID NO: 603794 - DNA, 15 bp, Homo sapiens
ttggagcattggcct

SEQ ID NO: 603795 - DNA, 15 bp, Homo sapiens
tggagcattggcctc

SEQ ID NO: 603796 - DNA, 15 bp, Homo sapiens
ggagcattggcctca

SEQ ID NO: 603797 - DNA, 15 bp, Homo sapiens
gagcattggcctcac

SEQ ID NO: 603798 - DNA, 15 bp, Homo sapiens
agcattggcctcaca

SEQ ID NO: 603799 - DNA, 15 bp, Homo sapiens
gcattggcctcacag

SEQ ID NO: 603800 - DNA, 15 bp, Homo sapiens
cattggcctcacagc

SEQ ID NO: 603801 - DNA, 15 bp, Homo sapiens
attggcctcacagca

SEQ ID NO: 603802 - DNA, 15 bp, Homo sapiens
ttggcctcacagcag

SEQ ID NO: 603803 - DNA, 15 bp, Homo sapiens
tggcctcacagcaga

SEQ ID NO: 603804 - DNA, 15 bp, Homo sapiens
ggcctcacagcagat

SEQ ID NO: 603805 - DNA, 15 bp, Homo sapiens
gcctcacagcagatt

SEQ ID NO: 603806 - DNA, 15 bp, Homo sapiens
cctcacagcagatta

SEQ ID NO: 603807 - DNA, 15 bp, Homo sapiens
ctcacagcagattat

SEQ ID NO: 603808 - DNA, 15 bp, Homo sapiens
tcacagcagattatg

SEQ ID NO: 603809 - DNA, 15 bp, Homo sapiens
cacagcagattatga

SEQ ID NO: 603810 - DNA, 15 bp, Homo sapiens
acagcagattatgac

SEQ ID NO: 603811 - DNA, 15 bp, Homo sapiens
cagcagattatgact

SEQ ID NO: 603812 - DNA, 15 bp, Homo sapiens
agcagattatgactc

SEQ ID NO: 603813 - DNA, 15 bp, Homo sapiens
gcagattatgactct

SEQ ID NO: 603814 - DNA, 15 bp, Homo sapiens
cagattatgactcta

SEQ ID NO: 603815 - DNA, 15 bp, Homo sapiens
agattatgactctag

SEQ ID NO: 603816 - DNA, 15 bp, Homo sapiens
gattatgactctagc

SEQ ID NO: 603817 - DNA, 15 bp, Homo sapiens
attatgactctagct

SEQ ID NO: 603818 - DNA, 15 bp, Homo sapiens
ttatgactctagctg

SEQ ID NO: 603819 - DNA, 15 bp, Homo sapiens
tatgactctagctgc

SEQ ID NO: 603820 - DNA, 15 bp, Homo sapiens
atgactctagctgcc

SEQ ID NO: 603821 - DNA, 15 bp, Homo sapiens
tgactctagctgcct

SEQ ID NO: 603822 - DNA, 15 bp, Homo sapiens
gactctagctgcctt

SEQ ID NO: 603823 - DNA, 15 bp, Homo sapiens
actctagctgcctta

SEQ ID NO: 603824 - DNA, 15 bp, Homo sapiens
ctctagctgccttaa

SEQ ID NO: 603825 - DNA, 15 bp, Homo sapiens
tctagctgccttaaa

SEQ ID NO: 603826 - DNA, 15 bp, Homo sapiens
ctagctgccttaaaa

SEQ ID NO: 603827 - DNA, 15 bp, Homo sapiens
tagctgccttaaaat

SEQ ID NO: 603828 - DNA, 15 bp, Homo sapiens
agctgccttaaaata

SEQ ID NO: 603829 - DNA, 15 bp, Homo sapiens
gctgccttaaaataa

SEQ ID NO: 603830 - DNA, 15 bp, Homo sapiens
ctgccttaaaataac

SEQ ID NO: 603831 - DNA, 15 bp, Homo sapiens
tgccttaaaataacc

SEQ ID NO: 603832 - DNA, 15 bp, Homo sapiens
gccttaaaataacct

SEQ ID NO: 603833 - DNA, 15 bp, Homo sapiens
ccttaaaataacctg

SEQ ID NO: 603834 - DNA, 15 bp, Homo sapiens
cttaaaataacctga

SEQ ID NO: 603835 - DNA, 15 bp, Homo sapiens
ttaaaataacctgaa

SEQ ID NO: 603836 - DNA, 15 bp, Homo sapiens
taaaataacctgaag

SEQ ID NO: 603837 - DNA, 15 bp, Homo sapiens
aaaataacctgaaga

SEQ ID NO: 603838 - DNA, 15 bp, Homo sapiens
aaataacctgaagac

SEQ ID NO: 603839 - DNA, 15 bp, Homo sapiens
aataacctgaagact

SEQ ID NO: 603840 - DNA, 15 bp, Homo sapiens
ataacctgaagactt

SEQ ID NO: 603841 - DNA, 15 bp, Homo sapiens
taacctgaagacttt

SEQ ID NO: 603842 - DNA, 15 bp, Homo sapiens
aacctgaagactttg

SEQ ID NO: 603843 - DNA, 15 bp, Homo sapiens
acctgaagactttgc

SEQ ID NO: 603844 - DNA, 15 bp, Homo sapiens
cctgaagactttgcc

SEQ ID NO: 603845 - DNA, 15 bp, Homo sapiens
ctgaagactttgcct

SEQ ID NO: 603846 - DNA, 15 bp, Homo sapiens
tgaagactttgcctt

SEQ ID NO: 603847 - DNA, 15 bp, Homo sapiens
gaagactttgccttg

SEQ ID NO: 603848 - DNA, 15 bp, Homo sapiens
aagactttgccttgc

SEQ ID NO: 603849 - DNA, 15 bp, Homo sapiens
agactttgccttgcc

SEQ ID NO: 603850 - DNA, 15 bp, Homo sapiens
gactttgccttgccc

SEQ ID NO: 603851 - DNA, 15 bp, Homo sapiens
actttgccttgccct

SEQ ID NO: 603852 - DNA, 15 bp, Homo sapiens
ctttgccttgcccta

SEQ ID NO: 603853 - DNA, 15 bp, Homo sapiens
tttgccttgccctag

SEQ ID NO: 603854 - DNA, 15 bp, Homo sapiens
ttgccttgccctagt

SEQ ID NO: 603855 - DNA, 15 bp, Homo sapiens
tgccttgccctagtt

SEQ ID NO: 603856 - DNA, 15 bp, Homo sapiens
gccttgccctagttt

SEQ ID NO: 603857 - DNA, 15 bp, Homo sapiens
ccttgccctagttta

SEQ ID NO: 603858 - DNA, 15 bp, Homo sapiens
cttgccctagtttat

SEQ ID NO: 603859 - DNA, 15 bp, Homo sapiens
ttgccctagtttatc

SEQ ID NO: 603860 - DNA, 15 bp, Homo sapiens
tgccctagtttatcc

SEQ ID NO: 603861 - DNA, 15 bp, Homo sapiens
gccctagtttatcca

SEQ ID NO: 603862 - DNA, 15 bp, Homo sapiens
ccctagtttatccat

SEQ ID NO: 603863 - DNA, 15 bp, Homo sapiens
cctagtttatccatc

SEQ ID NO: 603864 - DNA, 15 bp, Homo sapiens
ctagtttatccatcg

SEQ ID NO: 603865 - DNA, 15 bp, Homo sapiens
tagtttatccatcgg

SEQ ID NO: 603866 - DNA, 15 bp, Homo sapiens
agtttatccatcggc

SEQ ID NO: 603867 - DNA, 15 bp, Homo sapiens
gtttatccatcggcc

SEQ ID NO: 603868 - DNA, 15 bp, Homo sapiens
tttatccatcggccg

SEQ ID NO: 603869 - DNA, 15 bp, Homo sapiens
ttatccatcggccga

SEQ ID NO: 603870 - DNA, 15 bp, Homo sapiens
tatccatcggccgag

SEQ ID NO: 603871 - DNA, 15 bp, Homo sapiens
atccatcggccgagt

SEQ ID NO: 603872 - DNA, 15 bp, Homo sapiens
tccatcggccgagta

SEQ ID NO: 603873 - DNA, 15 bp, Homo sapiens
ccatcggccgagtat

SEQ ID NO: 603874 - DNA, 15 bp, Homo sapiens
catcggccgagtatg

SEQ ID NO: 603875 - DNA, 15 bp, Homo sapiens
atcggccgagtatgc

SEQ ID NO: 603876 - DNA, 15 bp, Homo sapiens
tcggccgagtatgca

SEQ ID NO: 603877 - DNA, 15 bp, Homo sapiens
cggccgagtatgcag

SEQ ID NO: 603878 - DNA, 15 bp, Homo sapiens
ggccgagtatgcagg

SEQ ID NO: 603879 - DNA, 15 bp, Homo sapiens
gccgagtatgcagga

SEQ ID NO: 603880 - DNA, 15 bp, Homo sapiens
ccgagtatgcaggac

SEQ ID NO: 603881 - DNA, 15 bp, Homo sapiens
cgagtatgcaggact

SEQ ID NO: 603882 - DNA, 15 bp, Homo sapiens
gagtatgcaggactt

SEQ ID NO: 603883 - DNA, 15 bp, Homo sapiens
agtatgcaggacttg

SEQ ID NO: 603884 - DNA, 15 bp, Homo sapiens
gtatgcaggacttgc

SEQ ID NO: 603885 - DNA, 15 bp, Homo sapiens
tatgcaggacttgct

SEQ ID NO: 603886 - DNA, 15 bp, Homo sapiens
atgcaggacttgctg

SEQ ID NO: 603887 - DNA, 15 bp, Homo sapiens
tgcaggacttgctgt

SEQ ID NO: 603888 - DNA, 15 bp, Homo sapiens
gcaggacttgctgtg

SEQ ID NO: 603889 - DNA, 15 bp, Homo sapiens
caggacttgctgtgg

SEQ ID NO: 603890 - DNA, 15 bp, Homo sapiens
aggacttgctgtggg

SEQ ID NO: 603891 - DNA, 15 bp, Homo sapiens
ggacttgctgtgggt

SEQ ID NO: 603892 - DNA, 15 bp, Homo sapiens
gacttgctgtgggtg

SEQ ID NO: 603893 - DNA, 15 bp, Homo sapiens
acttgctgtgggtga

SEQ ID NO: 603894 - DNA, 15 bp, Homo sapiens
cttgctgtgggtgac

SEQ ID NO: 603895 - DNA, 15 bp, Homo sapiens
ttgctgtgggtgacc

SEQ ID NO: 603896 - DNA, 15 bp, Homo sapiens
tgctgtgggtgacca

SEQ ID NO: 603897 - DNA, 15 bp, Homo sapiens
gctgtgggtgaccag

SEQ ID NO: 603898 - DNA, 15 bp, Homo sapiens
ctgtgggtgaccagg

SEQ ID NO: 603899 - DNA, 15 bp, Homo sapiens
tgtgggtgaccaggc

SEQ ID NO: 603900 - DNA, 15 bp, Homo sapiens
gtgggtgaccaggcc

SEQ ID NO: 603901 - DNA, 15 bp, Homo sapiens
tgggtgaccaggccc

SEQ ID NO: 603902 - DNA, 15 bp, Homo sapiens
gggtgaccaggcccc

SEQ ID NO: 603903 - DNA, 15 bp, Homo sapiens
ggtgaccaggcccct

SEQ ID NO: 603904 - DNA, 15 bp, Homo sapiens
gtgaccaggcccctc

SEQ ID NO: 603905 - DNA, 15 bp, Homo sapiens
tgaccaggcccctca

SEQ ID NO: 603906 - DNA, 15 bp, Homo sapiens
gaccaggcccctcat

SEQ ID NO: 603907 - DNA, 15 bp, Homo sapiens
accaggcccctcatg

SEQ ID NO: 603908 - DNA, 15 bp, Homo sapiens
ccaggcccctcatgc

SEQ ID NO: 603909 - DNA, 15 bp, Homo sapiens
caggcccctcatgca

SEQ ID NO: 603910 - DNA, 15 bp, Homo sapiens
aggcccctcatgcag

SEQ ID NO: 603911 - DNA, 15 bp, Homo sapiens
ggcccctcatgcaga

SEQ ID NO: 603912 - DNA, 15 bp, Homo sapiens
gcccctcatgcagaa

SEQ ID NO: 603913 - DNA, 15 bp, Homo sapiens
cccctcatgcagaat

SEQ ID NO: 603914 - DNA, 15 bp, Homo sapiens
ccctcatgcagaatg

SEQ ID NO: 603915 - DNA, 15 bp, Homo sapiens
cctcatgcagaatgg

SEQ ID NO: 603916 - DNA, 15 bp, Homo sapiens
ctcatgcagaatggt

SEQ ID NO: 603917 - DNA, 15 bp, Homo sapiens
tcatgcagaatggtg

SEQ ID NO: 603918 - DNA, 15 bp, Homo sapiens
catgcagaatggtgg

SEQ ID NO: 603919 - DNA, 15 bp, Homo sapiens
atgcagaatggtggt

SEQ ID NO: 603920 - DNA, 15 bp, Homo sapiens
tgcagaatggtggtc

SEQ ID NO: 603921 - DNA, 15 bp, Homo sapiens
gcagaatggtggtcc

SEQ ID NO: 603922 - DNA, 15 bp, Homo sapiens
cagaatggtggtcca

SEQ ID NO: 603923 - DNA, 15 bp, Homo sapiens
agaatggtggtccag

SEQ ID NO: 603924 - DNA, 15 bp, Homo sapiens
gaatggtggtccaga

SEQ ID NO: 603925 - DNA, 15 bp, Homo sapiens
aatggtggtccagag

SEQ ID NO: 603926 - DNA, 15 bp, Homo sapiens
atggtggtccagaga

SEQ ID NO: 603927 - DNA, 15 bp, Homo sapiens
tggtggtccagagac

SEQ ID NO: 603928 - DNA, 15 bp, Homo sapiens
ggtggtccagagacc

SEQ ID NO: 603929 - DNA, 15 bp, Homo sapiens
gtggtccagagacct

SEQ ID NO: 603930 - DNA, 15 bp, Homo sapiens
tggtccagagacctt

SEQ ID NO: 603931 - DNA, 15 bp, Homo sapiens
ggtccagagaccttt

SEQ ID NO: 603932 - DNA, 15 bp, Homo sapiens
gtccagagaccttta

SEQ ID NO: 603933 - DNA, 15 bp, Homo sapiens
tccagagacctttac

SEQ ID NO: 603934 - DNA, 15 bp, Homo sapiens
ccagagacctttaca

SEQ ID NO: 603935 - DNA, 15 bp, Homo sapiens
cagagacctttacaa

SEQ ID NO: 603936 - DNA, 15 bp, Homo sapiens
agagacctttacaaa

SEQ ID NO: 603937 - DNA, 15 bp, Homo sapiens
gagacctttacaaag

SEQ ID NO: 603938 - DNA, 15 bp, Homo sapiens
agacctttacaaagc

SEQ ID NO: 603939 - DNA, 15 bp, Homo sapiens
gacctttacaaagct

SEQ ID NO: 603940 - DNA, 15 bp, Homo sapiens
acctttacaaagctg

SEQ ID NO: 603941 - DNA, 15 bp, Homo sapiens
cctttacaaagctga

SEQ ID NO: 603942 - DNA, 15 bp, Homo sapiens
ctttacaaagctgat

SEQ ID NO: 603943 - DNA, 15 bp, Homo sapiens
tttacaaagctgatg

SEQ ID NO: 603944 - DNA, 15 bp, Homo sapiens
ttacaaagctgatgg

SEQ ID NO: 603945 - DNA, 15 bp, Homo sapiens
tacaaagctgatggg

SEQ ID NO: 603946 - DNA, 15 bp, Homo sapiens
acaaagctgatgggc

SEQ ID NO: 603947 - DNA, 15 bp, Homo sapiens
caaagctgatgggca

SEQ ID NO: 603948 - DNA, 15 bp, Homo sapiens
aaagctgatgggcat

SEQ ID NO: 603949 - DNA, 15 bp, Homo sapiens
aagctgatgggcatc

SEQ ID NO: 603950 - DNA, 15 bp, Homo sapiens
agctgatgggcatcc

SEQ ID NO: 603951 - DNA, 15 bp, Homo sapiens
gctgatgggcatcct

SEQ ID NO: 603952 - DNA, 15 bp, Homo sapiens
ctgatgggcatcctg

SEQ ID NO: 603953 - DNA, 15 bp, Homo sapiens
tgatgggcatcctgt

SEQ ID NO: 603954 - DNA, 15 bp, Homo sapiens
gatgggcatcctgtc

SEQ ID NO: 603955 - DNA, 15 bp, Homo sapiens
atgggcatcctgtct

SEQ ID NO: 603956 - DNA, 15 bp, Homo sapiens
tgggcatcctgtctg

SEQ ID NO: 603957 - DNA, 15 bp, Homo sapiens
gggcatcctgtctga

SEQ ID NO: 603958 - DNA, 15 bp, Homo sapiens
ggcatcctgtctgac

SEQ ID NO: 603959 - DNA, 15 bp, Homo sapiens
gcatcctgtctgacc

SEQ ID NO: 603960 - DNA, 15 bp, Homo sapiens
catcctgtctgacct

SEQ ID NO: 603961 - DNA, 15 bp, Homo sapiens
atcctgtctgacctc

SEQ ID NO: 603962 - DNA, 15 bp, Homo sapiens
tcctgtctgacctcc

SEQ ID NO: 603963 - DNA, 15 bp, Homo sapiens
cctgtctgacctcct

SEQ ID NO: 603964 - DNA, 15 bp, Homo sapiens
ctgtctgacctcctg

SEQ ID NO: 603965 - DNA, 15 bp, Homo sapiens
tgtctgacctcctgt

SEQ ID NO: 603966 - DNA, 15 bp, Homo sapiens
gtctgacctcctgtg

SEQ ID NO: 603967 - DNA, 15 bp, Homo sapiens
tctgacctcctgtgt

SEQ ID NO: 603968 - DNA, 15 bp, Homo sapiens
ctgacctcctgtgtg

SEQ ID NO: 603969 - DNA, 15 bp, Homo sapiens
tgacctcctgtgtgg

SEQ ID NO: 603970 - DNA, 15 bp, Homo sapiens
gacctcctgtgtggc

SEQ ID NO: 603971 - DNA, 15 bp, Homo sapiens
acctcctgtgtggct

SEQ ID NO: 603972 - DNA, 15 bp, Homo sapiens
cctcctgtgtggcta

SEQ ID NO: 603973 - DNA, 15 bp, Homo sapiens
ctcctgtgtggctac

SEQ ID NO: 603974 - DNA, 15 bp, Homo sapiens
tcctgtgtggctacc

SEQ ID NO: 603975 - DNA, 15 bp, Homo sapiens
cctgtgtggctaccc

SEQ ID NO: 603976 - DNA, 15 bp, Homo sapiens
ctgtgtggctacccc

SEQ ID NO: 603977 - DNA, 15 bp, Homo sapiens
tgtgtggctaccccg

SEQ ID NO: 603978 - DNA, 15 bp, Homo sapiens
gtgtggctaccccga

SEQ ID NO: 603979 - DNA, 15 bp, Homo sapiens
tgtggctaccccgag

SEQ ID NO: 603980 - DNA, 15 bp, Homo sapiens
gtggctaccccgagg

SEQ ID NO: 603981 - DNA, 15 bp, Homo sapiens
tggctaccccgaggg

SEQ ID NO: 603982 - DNA, 15 bp, Homo sapiens
ggctaccccgaggga

SEQ ID NO: 603983 - DNA, 15 bp, Homo sapiens
gctaccccgagggag

SEQ ID NO: 603984 - DNA, 15 bp, Homo sapiens
ctaccccgagggagg

SEQ ID NO: 603985 - DNA, 15 bp, Homo sapiens
taccccgagggaggt

SEQ ID NO: 603986 - DNA, 15 bp, Homo sapiens
accccgagggaggtg

SEQ ID NO: 603987 - DNA, 15 bp, Homo sapiens
ccccgagggaggtgg

SEQ ID NO: 603988 - DNA, 15 bp, Homo sapiens
cccgagggaggtggc

SEQ ID NO: 603989 - DNA, 15 bp, Homo sapiens
ccgagggaggtggct

SEQ ID NO: 603990 - DNA, 15 bp, Homo sapiens
cgagggaggtggctc

SEQ ID NO: 603991 - DNA, 15 bp, Homo sapiens
gagggaggtggctct

SEQ ID NO: 603992 - DNA, 15 bp, Homo sapiens
agggaggtggctctc

SEQ ID NO: 603993 - DNA, 15 bp, Homo sapiens
gggaggtggctctcg

SEQ ID NO: 603994 - DNA, 15 bp, Homo sapiens
ggaggtggctctcgg

SEQ ID NO: 603995 - DNA, 15 bp, Homo sapiens
gaggtggctctcggg

SEQ ID NO: 603996 - DNA, 15 bp, Homo sapiens
aggtggctctcgggt

SEQ ID NO: 603997 - DNA, 15 bp, Homo sapiens
ggtggctctcgggtg

SEQ ID NO: 603998 - DNA, 15 bp, Homo sapiens
gtggctctcgggtgc

SEQ ID NO: 603999 - DNA, 15 bp, Homo sapiens
tggctctcgggtgct

SEQ ID NO: 604000 - DNA, 15 bp, Homo sapiens
ggctctcgggtgctc

SEQ ID NO: 604001 - DNA, 15 bp, Homo sapiens
gctctcgggtgctct

SEQ ID NO: 604002 - DNA, 15 bp, Homo sapiens
ctctcgggtgctctc

SEQ ID NO: 604003 - DNA, 15 bp, Homo sapiens
tctcgggtgctctcc

SEQ ID NO: 604004 - DNA, 15 bp, Homo sapiens
ctcgggtgctctcct

SEQ ID NO: 604005 - DNA, 15 bp, Homo sapiens
tcgggtgctctcctt

SEQ ID NO: 604006 - DNA, 15 bp, Homo sapiens
cgggtgctctccttc

SEQ ID NO: 604007 - DNA, 15 bp, Homo sapiens
gggtgctctccttca

SEQ ID NO: 604008 - DNA, 15 bp, Homo sapiens
ggtgctctccttcaa

SEQ ID NO: 604009 - DNA, 15 bp, Homo sapiens
gtgctctccttcaac

SEQ ID NO: 604010 - DNA, 15 bp, Homo sapiens
tgctctccttcaact

SEQ ID NO: 604011 - DNA, 15 bp, Homo sapiens
gctctccttcaactg

SEQ ID NO: 604012 - DNA, 15 bp, Homo sapiens
ctctccttcaactgg

SEQ ID NO: 604013 - DNA, 15 bp, Homo sapiens
tctccttcaactggt

SEQ ID NO: 604014 - DNA, 15 bp, Homo sapiens
ctccttcaactggta

SEQ ID NO: 604015 - DNA, 15 bp, Homo sapiens
tccttcaactggtat

SEQ ID NO: 604016 - DNA, 15 bp, Homo sapiens
ccttcaactggtatg

SEQ ID NO: 604017 - DNA, 15 bp, Homo sapiens
cttcaactggtatga

SEQ ID NO: 604018 - DNA, 15 bp, Homo sapiens
ttcaactggtatgaa

SEQ ID NO: 604019 - DNA, 15 bp, Homo sapiens
tcaactggtatgaag

SEQ ID NO: 604020 - DNA, 15 bp, Homo sapiens
caactggtatgaaga

SEQ ID NO: 604021 - DNA, 15 bp, Homo sapiens
aactggtatgaagac

SEQ ID NO: 604022 - DNA, 15 bp, Homo sapiens
actggtatgaagaca

SEQ ID NO: 604023 - DNA, 15 bp, Homo sapiens
ctggtatgaagacaa

SEQ ID NO: 604024 - DNA, 15 bp, Homo sapiens
tggtatgaagacaat

SEQ ID NO: 604025 - DNA, 15 bp, Homo sapiens
ggtatgaagacaata

SEQ ID NO: 604026 - DNA, 15 bp, Homo sapiens
gtatgaagacaataa

SEQ ID NO: 604027 - DNA, 15 bp, Homo sapiens
tatgaagacaataac

SEQ ID NO: 604028 - DNA, 15 bp, Homo sapiens
atgaagacaataact

SEQ ID NO: 604029 - DNA, 15 bp, Homo sapiens
tgaagacaataacta

SEQ ID NO: 604030 - DNA, 15 bp, Homo sapiens
gaagacaataactat

SEQ ID NO: 604031 - DNA, 15 bp, Homo sapiens
aagacaataactata

SEQ ID NO: 604032 - DNA, 15 bp, Homo sapiens
agacaataactataa

SEQ ID NO: 604033 - DNA, 15 bp, Homo sapiens
gacaataactataag

SEQ ID NO: 604034 - DNA, 15 bp, Homo sapiens
acaataactataagg

SEQ ID NO: 604035 - DNA, 15 bp, Homo sapiens
caataactataaggc

SEQ ID NO: 604036 - DNA, 15 bp, Homo sapiens
aataactataaggcc

SEQ ID NO: 604037 - DNA, 15 bp, Homo sapiens
ataactataaggcct

SEQ ID NO: 604038 - DNA, 15 bp, Homo sapiens
taactataaggcctt

SEQ ID NO: 604039 - DNA, 15 bp, Homo sapiens
aactataaggccttt

SEQ ID NO: 604040 - DNA, 15 bp, Homo sapiens
actataaggcctttc

SEQ ID NO: 604041 - DNA, 15 bp, Homo sapiens
ctataaggcctttct

SEQ ID NO: 604042 - DNA, 15 bp, Homo sapiens
tataaggcctttctg

SEQ ID NO: 604043 - DNA, 15 bp, Homo sapiens
ataaggcctttctgg

SEQ ID NO: 604044 - DNA, 15 bp, Homo sapiens
taaggcctttctggg

SEQ ID NO: 604045 - DNA, 15 bp, Homo sapiens
aaggcctttctgggg

SEQ ID NO: 604046 - DNA, 15 bp, Homo sapiens
aggcctttctgggga

SEQ ID NO: 604047 - DNA, 15 bp, Homo sapiens
ggcctttctggggat

SEQ ID NO: 604048 - DNA, 15 bp, Homo sapiens
gcctttctggggatt

SEQ ID NO: 604049 - DNA, 15 bp, Homo sapiens
cctttctggggattg

SEQ ID NO: 604050 - DNA, 15 bp, Homo sapiens
ctttctggggattga

SEQ ID NO: 604051 - DNA, 15 bp, Homo sapiens
tttctggggattgac

SEQ ID NO: 604052 - DNA, 15 bp, Homo sapiens
ttctggggattgact

SEQ ID NO: 604053 - DNA, 15 bp, Homo sapiens
tctggggattgactc

SEQ ID NO: 604054 - DNA, 15 bp, Homo sapiens
ctggggattgactcc

SEQ ID NO: 604055 - DNA, 15 bp, Homo sapiens
tggggattgactcca

SEQ ID NO: 604056 - DNA, 15 bp, Homo sapiens
ggggattgactccac

SEQ ID NO: 604057 - DNA, 15 bp, Homo sapiens
gggattgactccaca

SEQ ID NO: 604058 - DNA, 15 bp, Homo sapiens
ggattgactccacaa

SEQ ID NO: 604059 - DNA, 15 bp, Homo sapiens
gattgactccacaag

SEQ ID NO: 604060 - DNA, 15 bp, Homo sapiens
attgactccacaagg

SEQ ID NO: 604061 - DNA, 15 bp, Homo sapiens
ttgactccacaagga

SEQ ID NO: 604062 - DNA, 15 bp, Homo sapiens
tgactccacaaggaa

SEQ ID NO: 604063 - DNA, 15 bp, Homo sapiens
gactccacaaggaag

SEQ ID NO: 604064 - DNA, 15 bp, Homo sapiens
actccacaaggaagg

SEQ ID NO: 604065 - DNA, 15 bp, Homo sapiens
ctccacaaggaagga

SEQ ID NO: 604066 - DNA, 15 bp, Homo sapiens
tccacaaggaaggat

SEQ ID NO: 604067 - DNA, 15 bp, Homo sapiens
ccacaaggaaggatc

SEQ ID NO: 604068 - DNA, 15 bp, Homo sapiens
cacaaggaaggatcc

SEQ ID NO: 604069 - DNA, 15 bp, Homo sapiens
acaaggaaggatcct

SEQ ID NO: 604070 - DNA, 15 bp, Homo sapiens
caaggaaggatccta

SEQ ID NO: 604071 - DNA, 15 bp, Homo sapiens
aaggaaggatcctat

SEQ ID NO: 604072 - DNA, 15 bp, Homo sapiens
aggaaggatcctatc

SEQ ID NO: 604073 - DNA, 15 bp, Homo sapiens
ggaaggatcctatct

SEQ ID NO: 604074 - DNA, 15 bp, Homo sapiens
gaaggatcctatcta

SEQ ID NO: 604075 - DNA, 15 bp, Homo sapiens
aaggatcctatctat

SEQ ID NO: 604076 - DNA, 15 bp, Homo sapiens
aggatcctatctatt

SEQ ID NO: 604077 - DNA, 15 bp, Homo sapiens
ggatcctatctattc

SEQ ID NO: 604078 - DNA, 15 bp, Homo sapiens
gatcctatctattct

SEQ ID NO: 604079 - DNA, 15 bp, Homo sapiens
atcctatctattctt

SEQ ID NO: 604080 - DNA, 15 bp, Homo sapiens
tcctatctattctta

SEQ ID NO: 604081 - DNA, 15 bp, Homo sapiens
cctatctattcttat

SEQ ID NO: 604082 - DNA, 15 bp, Homo sapiens
ctatctattcttatg

SEQ ID NO: 604083 - DNA, 15 bp, Homo sapiens
tatctattcttatga

SEQ ID NO: 604084 - DNA, 15 bp, Homo sapiens
atctattcttatgac

SEQ ID NO: 604085 - DNA, 15 bp, Homo sapiens
tctattcttatgaca

SEQ ID NO: 604086 - DNA, 15 bp, Homo sapiens
ctattcttatgacag

SEQ ID NO: 604087 - DNA, 15 bp, Homo sapiens
tattcttatgacaga

SEQ ID NO: 604088 - DNA, 15 bp, Homo sapiens
attcttatgacagaa

SEQ ID NO: 604089 - DNA, 15 bp, Homo sapiens
ttcttatgacagaag

SEQ ID NO: 604090 - DNA, 15 bp, Homo sapiens
tcttatgacagaaga

SEQ ID NO: 604091 - DNA, 15 bp, Homo sapiens
cttatgacagaagaa

SEQ ID NO: 604092 - DNA, 15 bp, Homo sapiens
ttatgacagaagaac

SEQ ID NO: 604093 - DNA, 15 bp, Homo sapiens
tatgacagaagaaca

SEQ ID NO: 604094 - DNA, 15 bp, Homo sapiens
atgacagaagaacaa

SEQ ID NO: 604095 - DNA, 15 bp, Homo sapiens
tgacagaagaacaag

SEQ ID NO: 604096 - DNA, 15 bp, Homo sapiens
gacagaagaacaagt

SEQ ID NO: 604097 - DNA, 15 bp, Homo sapiens
acagaagaacaagta

SEQ ID NO: 604098 - DNA, 15 bp, Homo sapiens
cagaagaacaagtaa

SEQ ID NO: 604099 - DNA, 15 bp, Homo sapiens
agaagaacaagtaag

SEQ ID NO: 604100 - DNA, 15 bp, Homo sapiens
gaagaacaagtaagt

SEQ ID NO: 604101 - DNA, 15 bp, Homo sapiens
aagaacaagtaagtt

SEQ ID NO: 604102 - DNA, 15 bp, Homo sapiens
agaacaagtaagttt

SEQ ID NO: 604103 - DNA, 15 bp, Homo sapiens
gaacaagtaagtttt

SEQ ID NO: 604104 - DNA, 15 bp, Homo sapiens
aacaagtaagttttc

SEQ ID NO: 604105 - DNA, 15 bp, Homo sapiens
acaagtaagttttct

SEQ ID NO: 604106 - DNA, 15 bp, Homo sapiens
caagtaagttttctg

SEQ ID NO: 604107 - DNA, 15 bp, Homo sapiens
aagtaagttttctga

SEQ ID NO: 604108 - DNA, 15 bp, Homo sapiens
agtaagttttctgag

SEQ ID NO: 604109 - DNA, 15 bp, Homo sapiens
gtaagttttctgagt

SEQ ID NO: 604110 - DNA, 15 bp, Homo sapiens
taagttttctgagtc

SEQ ID NO: 604111 - DNA, 15 bp, Homo sapiens
aagttttctgagtcc

SEQ ID NO: 604112 - DNA, 15 bp, Homo sapiens
agttttctgagtcct

SEQ ID NO: 604113 - DNA, 15 bp, Homo sapiens
gttttctgagtcctg

SEQ ID NO: 604114 - DNA, 15 bp, Homo sapiens
ttttctgagtcctgc

SEQ ID NO: 604115 - DNA, 15 bp, Homo sapiens
tttctgagtcctgct

SEQ ID NO: 604116 - DNA, 15 bp, Homo sapiens
ttctgagtcctgctt

SEQ ID NO: 604117 - DNA, 15 bp, Homo sapiens
tctgagtcctgctta

SEQ ID NO: 604118 - DNA, 15 bp, Homo sapiens
ctgagtcctgcttat

SEQ ID NO: 604119 - DNA, 15 bp, Homo sapiens
tgagtcctgcttata

SEQ ID NO: 604120 - DNA, 15 bp, Homo sapiens
gagtcctgcttataa

SEQ ID NO: 604121 - DNA, 15 bp, Homo sapiens
agtcctgcttataaa

SEQ ID NO: 604122 - DNA, 15 bp, Homo sapiens
gtcctgcttataaat

SEQ ID NO: 604123 - DNA, 15 bp, Homo sapiens
tcctgcttataaatt

SEQ ID NO: 604124 - DNA, 15 bp, Homo sapiens
cctgcttataaattg

SEQ ID NO: 604125 - DNA, 15 bp, Homo sapiens
ctgcttataaattgg

SEQ ID NO: 604126 - DNA, 15 bp, Homo sapiens
tgcttataaattggc

SEQ ID NO: 604127 - DNA, 15 bp, Homo sapiens
gcttataaattggcc

SEQ ID NO: 604128 - DNA, 15 bp, Homo sapiens
cttataaattggcct

SEQ ID NO: 604129 - DNA, 15 bp, Homo sapiens
ttataaattggcctc

SEQ ID NO: 604130 - DNA, 15 bp, Homo sapiens
tataaattggcctct

SEQ ID NO: 604131 - DNA, 15 bp, Homo sapiens
ataaattggcctctc

SEQ ID NO: 604132 - DNA, 15 bp, Homo sapiens
taaattggcctctca

SEQ ID NO: 604133 - DNA, 15 bp, Homo sapiens
aaattggcctctcat

SEQ ID NO: 604134 - DNA, 15 bp, Homo sapiens
aattggcctctcatg

SEQ ID NO: 604135 - DNA, 15 bp, Homo sapiens
attggcctctcatgt

SEQ ID NO: 604136 - DNA, 15 bp, Homo sapiens
ttggcctctcatgtt

SEQ ID NO: 604137 - DNA, 15 bp, Homo sapiens
tggcctctcatgttg

SEQ ID NO: 604138 - DNA, 15 bp, Homo sapiens
ggcctctcatgttgg

SEQ ID NO: 604139 - DNA, 15 bp, Homo sapiens
gcctctcatgttggt

SEQ ID NO: 604140 - DNA, 15 bp, Homo sapiens
cctctcatgttggtt

SEQ ID NO: 604141 - DNA, 15 bp, Homo sapiens
ctctcatgttggtta

SEQ ID NO: 604142 - DNA, 15 bp, Homo sapiens
tctcatgttggttaa

SEQ ID NO: 604143 - DNA, 15 bp, Homo sapiens
ctcatgttggttaag

SEQ ID NO: 604144 - DNA, 15 bp, Homo sapiens
tcatgttggttaagt

SEQ ID NO: 604145 - DNA, 15 bp, Homo sapiens
catgttggttaagtt

SEQ ID NO: 604146 - DNA, 15 bp, Homo sapiens
atgttggttaagttg

SEQ ID NO: 604147 - DNA, 15 bp, Homo sapiens
tgttggttaagttga

SEQ ID NO: 604148 - DNA, 15 bp, Homo sapiens
gttggttaagttgat

SEQ ID NO: 604149 - DNA, 15 bp, Homo sapiens
ttggttaagttgatg

SEQ ID NO: 604150 - DNA, 15 bp, Homo sapiens
tggttaagttgatgg

SEQ ID NO: 604151 - DNA, 15 bp, Homo sapiens
ggttaagttgatggt

SEQ ID NO: 604152 - DNA, 15 bp, Homo sapiens
gttaagttgatggtt

SEQ ID NO: 604153 - DNA, 15 bp, Homo sapiens
ttaagttgatggttt

SEQ ID NO: 604154 - DNA, 15 bp, Homo sapiens
taagttgatggttta

SEQ ID NO: 604155 - DNA, 15 bp, Homo sapiens
aagttgatggtttaa

SEQ ID NO: 604156 - DNA, 15 bp, Homo sapiens
agttgatggtttaac

SEQ ID NO: 604157 - DNA, 15 bp, Homo sapiens
gttgatggtttaaca

SEQ ID NO: 604158 - DNA, 15 bp, Homo sapiens
ttgatggtttaacac

SEQ ID NO: 604159 - DNA, 15 bp, Homo sapiens
tgatggtttaacact

SEQ ID NO: 604160 - DNA, 15 bp, Homo sapiens
gatggtttaacactt

SEQ ID NO: 604161 - DNA, 15 bp, Homo sapiens
atggtttaacacttc

SEQ ID NO: 604162 - DNA, 15 bp, Homo sapiens
tggtttaacacttct

SEQ ID NO: 604163 - DNA, 15 bp, Homo sapiens
ggtttaacacttcta

SEQ ID NO: 604164 - DNA, 15 bp, Homo sapiens
gtttaacacttctag

SEQ ID NO: 604165 - DNA, 15 bp, Homo sapiens
tttaacacttctagg

SEQ ID NO: 604166 - DNA, 15 bp, Homo sapiens
ttaacacttctaggt

SEQ ID NO: 604167 - DNA, 15 bp, Homo sapiens
taacacttctaggtg

SEQ ID NO: 604168 - DNA, 15 bp, Homo sapiens
aacacttctaggtga

SEQ ID NO: 604169 - DNA, 15 bp, Homo sapiens
acacttctaggtgaa

SEQ ID NO: 604170 - DNA, 15 bp, Homo sapiens
cacttctaggtgaaa

SEQ ID NO: 604171 - DNA, 15 bp, Homo sapiens
acttctaggtgaaac

SEQ ID NO: 604172 - DNA, 15 bp, Homo sapiens
cttctaggtgaaacc

SEQ ID NO: 604173 - DNA, 15 bp, Homo sapiens
ttctaggtgaaacca

SEQ ID NO: 604174 - DNA, 15 bp, Homo sapiens
tctaggtgaaaccaa

SEQ ID NO: 604175 - DNA, 15 bp, Homo sapiens
ctaggtgaaaccaaa

SEQ ID NO: 604176 - DNA, 15 bp, Homo sapiens
taggtgaaaccaaac

SEQ ID NO: 604177 - DNA, 15 bp, Homo sapiens
aggtgaaaccaaacc

SEQ ID NO: 604178 - DNA, 15 bp, Homo sapiens
ggtgaaaccaaacct

SEQ ID NO: 604179 - DNA, 15 bp, Homo sapiens
gtgaaaccaaacctg

SEQ ID NO: 604180 - DNA, 15 bp, Homo sapiens
tgaaaccaaacctgg

SEQ ID NO: 604181 - DNA, 15 bp, Homo sapiens
gaaaccaaacctggg

SEQ ID NO: 604182 - DNA, 15 bp, Homo sapiens
aaaccaaacctgggg

SEQ ID NO: 604183 - DNA, 15 bp, Homo sapiens
aaccaaacctggggt

SEQ ID NO: 604184 - DNA, 15 bp, Homo sapiens
accaaacctggggtt

SEQ ID NO: 604185 - DNA, 15 bp, Homo sapiens
ccaaacctggggttg

SEQ ID NO: 604186 - DNA, 15 bp, Homo sapiens
caaacctggggttgc

SEQ ID NO: 604187 - DNA, 15 bp, Homo sapiens
aaacctggggttgca

SEQ ID NO: 604188 - DNA, 15 bp, Homo sapiens
aacctggggttgcat

SEQ ID NO: 604189 - DNA, 15 bp, Homo sapiens
acctggggttgcatc

SEQ ID NO: 604190 - DNA, 15 bp, Homo sapiens
cctggggttgcatct

SEQ ID NO: 604191 - DNA, 15 bp, Homo sapiens
ctggggttgcatctg

SEQ ID NO: 604192 - DNA, 15 bp, Homo sapiens
tggggttgcatctgt

SEQ ID NO: 604193 - DNA, 15 bp, Homo sapiens
ggggttgcatctgtc

SEQ ID NO: 604194 - DNA, 15 bp, Homo sapiens
gggttgcatctgtct

SEQ ID NO: 604195 - DNA, 15 bp, Homo sapiens
ggttgcatctgtctt

SEQ ID NO: 604196 - DNA, 15 bp, Homo sapiens
gttgcatctgtcttg

SEQ ID NO: 604197 - DNA, 15 bp, Homo sapiens
ttgcatctgtcttgt

SEQ ID NO: 604198 - DNA, 15 bp, Homo sapiens
tgcatctgtcttgtc

SEQ ID NO: 604199 - DNA, 15 bp, Homo sapiens
gcatctgtcttgtct

SEQ ID NO: 604200 - DNA, 15 bp, Homo sapiens
catctgtcttgtctt

SEQ ID NO: 604201 - DNA, 15 bp, Homo sapiens
atctgtcttgtcttg

SEQ ID NO: 604202 - DNA, 15 bp, Homo sapiens
tctgtcttgtcttgc

SEQ ID NO: 604203 - DNA, 15 bp, Homo sapiens
ctgtcttgtcttgct

SEQ ID NO: 604204 - DNA, 15 bp, Homo sapiens
tgtcttgtcttgctg

SEQ ID NO: 604205 - DNA, 15 bp, Homo sapiens
gtcttgtcttgctga

SEQ ID NO: 604206 - DNA, 15 bp, Homo sapiens
tcttgtcttgctgag

SEQ ID NO: 604207 - DNA, 15 bp, Homo sapiens
cttgtcttgctgagt

SEQ ID NO: 604208 - DNA, 15 bp, Homo sapiens
ttgtcttgctgagtg

SEQ ID NO: 604209 - DNA, 15 bp, Homo sapiens
tgtcttgctgagtgg

SEQ ID NO: 604210 - DNA, 15 bp, Homo sapiens
gtcttgctgagtggc

SEQ ID NO: 604211 - DNA, 15 bp, Homo sapiens
tcttgctgagtggcc

SEQ ID NO: 604212 - DNA, 15 bp, Homo sapiens
cttgctgagtggcct

SEQ ID NO: 604213 - DNA, 15 bp, Homo sapiens
ttgctgagtggcctt

SEQ ID NO: 604214 - DNA, 15 bp, Homo sapiens
tgctgagtggcctta

SEQ ID NO: 604215 - DNA, 15 bp, Homo sapiens
gctgagtggccttag

SEQ ID NO: 604216 - DNA, 15 bp, Homo sapiens
ctgagtggccttagg

SEQ ID NO: 604217 - DNA, 15 bp, Homo sapiens
tgagtggccttaggt

SEQ ID NO: 604218 - DNA, 15 bp, Homo sapiens
gagtggccttaggta

SEQ ID NO: 604219 - DNA, 15 bp, Homo sapiens
agtggccttaggtaa

SEQ ID NO: 604220 - DNA, 15 bp, Homo sapiens
gtggccttaggtaaa

SEQ ID NO: 604221 - DNA, 15 bp, Homo sapiens
tggccttaggtaaag

SEQ ID NO: 604222 - DNA, 15 bp, Homo sapiens
ggccttaggtaaaga

SEQ ID NO: 604223 - DNA, 15 bp, Homo sapiens
gccttaggtaaagag

SEQ ID NO: 604224 - DNA, 15 bp, Homo sapiens
ccttaggtaaagaga

SEQ ID NO: 604225 - DNA, 15 bp, Homo sapiens
cttaggtaaagagac

SEQ ID NO: 604226 - DNA, 15 bp, Homo sapiens
ttaggtaaagagact

SEQ ID NO: 604227 - DNA, 15 bp, Homo sapiens
taggtaaagagactt

SEQ ID NO: 604228 - DNA, 15 bp, Homo sapiens
aggtaaagagacttc

SEQ ID NO: 604229 - DNA, 15 bp, Homo sapiens
ggtaaagagacttct

SEQ ID NO: 604230 - DNA, 15 bp, Homo sapiens
gtaaagagacttctc

SEQ ID NO: 604231 - DNA, 15 bp, Homo sapiens
taaagagacttctcc

SEQ ID NO: 604232 - DNA, 15 bp, Homo sapiens
aaagagacttctccc

SEQ ID NO: 604233 - DNA, 15 bp, Homo sapiens
aagagacttctccca

SEQ ID NO: 604234 - DNA, 15 bp, Homo sapiens
agagacttctcccag

SEQ ID NO: 604235 - DNA, 15 bp, Homo sapiens
gagacttctcccaga

SEQ ID NO: 604236 - DNA, 15 bp, Homo sapiens
agacttctcccagaa

SEQ ID NO: 604237 - DNA, 15 bp, Homo sapiens
gacttctcccagaaa

SEQ ID NO: 604238 - DNA, 15 bp, Homo sapiens
acttctcccagaaag

SEQ ID NO: 604239 - DNA, 15 bp, Homo sapiens
cttctcccagaaagt

SEQ ID NO: 604240 - DNA, 15 bp, Homo sapiens
ttctcccagaaagtc

SEQ ID NO: 604241 - DNA, 15 bp, Homo sapiens
tctcccagaaagtcc

SEQ ID NO: 604242 - DNA, 15 bp, Homo sapiens
ctcccagaaagtcca

SEQ ID NO: 604243 - DNA, 15 bp, Homo sapiens
tcccagaaagtccac

SEQ ID NO: 604244 - DNA, 15 bp, Homo sapiens
cccagaaagtccact

SEQ ID NO: 604245 - DNA, 15 bp, Homo sapiens
ccagaaagtccactt

SEQ ID NO: 604246 - DNA, 15 bp, Homo sapiens
cagaaagtccacttc

SEQ ID NO: 604247 - DNA, 15 bp, Homo sapiens
agaaagtccacttcc

SEQ ID NO: 604248 - DNA, 15 bp, Homo sapiens
gaaagtccacttccc

SEQ ID NO: 604249 - DNA, 15 bp, Homo sapiens
aaagtccacttcccc

SEQ ID NO: 604250 - DNA, 15 bp, Homo sapiens
aagtccacttcccct

SEQ ID NO: 604251 - DNA, 15 bp, Homo sapiens
agtccacttcccctt

SEQ ID NO: 604252 - DNA, 15 bp, Homo sapiens
gtccacttccccttg

SEQ ID NO: 604253 - DNA, 15 bp, Homo sapiens
tccacttccccttgc

SEQ ID NO: 604254 - DNA, 15 bp, Homo sapiens
ccacttccccttgca

SEQ ID NO: 604255 - DNA, 15 bp, Homo sapiens
cacttccccttgcag

SEQ ID NO: 604256 - DNA, 15 bp, Homo sapiens
acttccccttgcaga

SEQ ID NO: 604257 - DNA, 15 bp, Homo sapiens
cttccccttgcagaa

SEQ ID NO: 604258 - DNA, 15 bp, Homo sapiens
ttccccttgcagaaa

SEQ ID NO: 604259 - DNA, 15 bp, Homo sapiens
tccccttgcagaaag

SEQ ID NO: 604260 - DNA, 15 bp, Homo sapiens
ccccttgcagaaagg

SEQ ID NO: 604261 - DNA, 15 bp, Homo sapiens
cccttgcagaaaggg

SEQ ID NO: 604262 - DNA, 15 bp, Homo sapiens
ccttgcagaaagggg

SEQ ID NO: 604263 - DNA, 15 bp, Homo sapiens
cttgcagaaaggggg

SEQ ID NO: 604264 - DNA, 15 bp, Homo sapiens
ttgcagaaagggggc

SEQ ID NO: 604265 - DNA, 15 bp, Homo sapiens
tgcagaaagggggca

SEQ ID NO: 604266 - DNA, 15 bp, Homo sapiens
gcagaaagggggcat

SEQ ID NO: 604267 - DNA, 15 bp, Homo sapiens
cagaaagggggcatt

SEQ ID NO: 604268 - DNA, 15 bp, Homo sapiens
agaaagggggcattg

SEQ ID NO: 604269 - DNA, 15 bp, Homo sapiens
gaaagggggcattgc

SEQ ID NO: 604270 - DNA, 15 bp, Homo sapiens
aaagggggcattgct

SEQ ID NO: 604271 - DNA, 15 bp, Homo sapiens
aagggggcattgctt

SEQ ID NO: 604272 - DNA, 15 bp, Homo sapiens
agggggcattgctta

SEQ ID NO: 604273 - DNA, 15 bp, Homo sapiens
gggggcattgcttat

SEQ ID NO: 604274 - DNA, 15 bp, Homo sapiens
ggggcattgcttata

SEQ ID NO: 604275 - DNA, 15 bp, Homo sapiens
gggcattgcttataa

SEQ ID NO: 604276 - DNA, 15 bp, Homo sapiens
ggcattgcttataag

SEQ ID NO: 604277 - DNA, 15 bp, Homo sapiens
gcattgcttataagc

SEQ ID NO: 604278 - DNA, 15 bp, Homo sapiens
cattgcttataagca

SEQ ID NO: 604279 - DNA, 15 bp, Homo sapiens
attgcttataagcaa

SEQ ID NO: 604280 - DNA, 15 bp, Homo sapiens
ttgcttataagcaat

SEQ ID NO: 604281 - DNA, 15 bp, Homo sapiens
tgcttataagcaatt

SEQ ID NO: 604282 - DNA, 15 bp, Homo sapiens
gcttataagcaattc

SEQ ID NO: 604283 - DNA, 15 bp, Homo sapiens
cttataagcaattct

SEQ ID NO: 604284 - DNA, 15 bp, Homo sapiens
ttataagcaattctg

SEQ ID NO: 604285 - DNA, 15 bp, Homo sapiens
tataagcaattctgg

SEQ ID NO: 604286 - DNA, 15 bp, Homo sapiens
ataagcaattctgga

SEQ ID NO: 604287 - DNA, 15 bp, Homo sapiens
taagcaattctggac

SEQ ID NO: 604288 - DNA, 15 bp, Homo sapiens
aagcaattctggaca

SEQ ID NO: 604289 - DNA, 15 bp, Homo sapiens
agcaattctggacat

SEQ ID NO: 604290 - DNA, 15 bp, Homo sapiens
gcaattctggacatg

SEQ ID NO: 604291 - DNA, 15 bp, Homo sapiens
caattctggacatga

SEQ ID NO: 604292 - DNA, 15 bp, Homo sapiens
aattctggacatgaa

SEQ ID NO: 604293 - DNA, 15 bp, Homo sapiens
attctggacatgaac

SEQ ID NO: 604294 - DNA, 15 bp, Homo sapiens
ttctggacatgaacc

SEQ ID NO: 604295 - DNA, 15 bp, Homo sapiens
tctggacatgaacca

SEQ ID NO: 604296 - DNA, 15 bp, Homo sapiens
ctggacatgaaccac

SEQ ID NO: 604297 - DNA, 15 bp, Homo sapiens
tggacatgaaccaca

SEQ ID NO: 604298 - DNA, 15 bp, Homo sapiens
ggacatgaaccacag

SEQ ID NO: 604299 - DNA, 15 bp, Homo sapiens
gacatgaaccacaga

SEQ ID NO: 604300 - DNA, 15 bp, Homo sapiens
acatgaaccacagaa

SEQ ID NO: 604301 - DNA, 15 bp, Homo sapiens
catgaaccacagaaa

SEQ ID NO: 604302 - DNA, 15 bp, Homo sapiens
atgaaccacagaaag

SEQ ID NO: 604303 - DNA, 15 bp, Homo sapiens
tgaaccacagaaaga

SEQ ID NO: 604304 - DNA, 15 bp, Homo sapiens
gaaccacagaaagaa

SEQ ID NO: 604305 - DNA, 15 bp, Homo sapiens
aaccacagaaagaac

SEQ ID NO: 604306 - DNA, 15 bp, Homo sapiens
accacagaaagaact

SEQ ID NO: 604307 - DNA, 15 bp, Homo sapiens
ccacagaaagaactg

SEQ ID NO: 604308 - DNA, 15 bp, Homo sapiens
cacagaaagaactga

SEQ ID NO: 604309 - DNA, 15 bp, Homo sapiens
acagaaagaactgag

SEQ ID NO: 604310 - DNA, 15 bp, Homo sapiens
cagaaagaactgagg

SEQ ID NO: 604311 - DNA, 15 bp, Homo sapiens
agaaagaactgaggc

SEQ ID NO: 604312 - DNA, 15 bp, Homo sapiens
gaaagaactgaggcc

SEQ ID NO: 604313 - DNA, 15 bp, Homo sapiens
aaagaactgaggccc

SEQ ID NO: 604314 - DNA, 15 bp, Homo sapiens
aagaactgaggccca

SEQ ID NO: 604315 - DNA, 15 bp, Homo sapiens
agaactgaggcccac

SEQ ID NO: 604316 - DNA, 15 bp, Homo sapiens
gaactgaggcccact

SEQ ID NO: 604317 - DNA, 15 bp, Homo sapiens
aactgaggcccactt

SEQ ID NO: 604318 - DNA, 15 bp, Homo sapiens
actgaggcccacttg

SEQ ID NO: 604319 - DNA, 15 bp, Homo sapiens
ctgaggcccacttgg

SEQ ID NO: 604320 - DNA, 15 bp, Homo sapiens
tgaggcccacttgga

SEQ ID NO: 604321 - DNA, 15 bp, Homo sapiens
gaggcccacttggaa

SEQ ID NO: 604322 - DNA, 15 bp, Homo sapiens
aggcccacttggaaa

SEQ ID NO: 604323 - DNA, 15 bp, Homo sapiens
ggcccacttggaaag

SEQ ID NO: 604324 - DNA, 15 bp, Homo sapiens
gcccacttggaaagg

SEQ ID NO: 604325 - DNA, 15 bp, Homo sapiens
cccacttggaaaggg

SEQ ID NO: 604326 - DNA, 15 bp, Homo sapiens
ccacttggaaaggga

SEQ ID NO: 604327 - DNA, 15 bp, Homo sapiens
cacttggaaagggaa

SEQ ID NO: 604328 - DNA, 15 bp, Homo sapiens
acttggaaagggaac

SEQ ID NO: 604329 - DNA, 15 bp, Homo sapiens
cttggaaagggaaca

SEQ ID NO: 604330 - DNA, 15 bp, Homo sapiens
ttggaaagggaacag

SEQ ID NO: 604331 - DNA, 15 bp, Homo sapiens
tggaaagggaacaga

SEQ ID NO: 604332 - DNA, 15 bp, Homo sapiens
ggaaagggaacagag

SEQ ID NO: 604333 - DNA, 15 bp, Homo sapiens
gaaagggaacagagg

SEQ ID NO: 604334 - DNA, 15 bp, Homo sapiens
aaagggaacagaggg

SEQ ID NO: 604335 - DNA, 15 bp, Homo sapiens
aagggaacagagggg

SEQ ID NO: 604336 - DNA, 15 bp, Homo sapiens
agggaacagaggggc

SEQ ID NO: 604337 - DNA, 15 bp, Homo sapiens
gggaacagaggggcc

SEQ ID NO: 604338 - DNA, 15 bp, Homo sapiens
ggaacagaggggcca

SEQ ID NO: 604339 - DNA, 15 bp, Homo sapiens
gaacagaggggccat

SEQ ID NO: 604340 - DNA, 15 bp, Homo sapiens
aacagaggggccatt

SEQ ID NO: 604341 - DNA, 15 bp, Homo sapiens
acagaggggccattt

SEQ ID NO: 604342 - DNA, 15 bp, Homo sapiens
cagaggggccatttc

SEQ ID NO: 604343 - DNA, 15 bp, Homo sapiens
agaggggccatttcc

SEQ ID NO: 604344 - DNA, 15 bp, Homo sapiens
gaggggccatttccc

SEQ ID NO: 604345 - DNA, 15 bp, Homo sapiens
aggggccatttccca

SEQ ID NO: 604346 - DNA, 15 bp, Homo sapiens
ggggccatttcccac

SEQ ID NO: 604347 - DNA, 15 bp, Homo sapiens
gggccatttcccact

SEQ ID NO: 604348 - DNA, 15 bp, Homo sapiens
ggccatttcccactg

SEQ ID NO: 604349 - DNA, 15 bp, Homo sapiens
gccatttcccactga

SEQ ID NO: 604350 - DNA, 15 bp, Homo sapiens
ccatttcccactgat

SEQ ID NO: 604351 - DNA, 15 bp, Homo sapiens
catttcccactgatg

SEQ ID NO: 604352 - DNA, 15 bp, Homo sapiens
atttcccactgatgt

SEQ ID NO: 604353 - DNA, 15 bp, Homo sapiens
tttcccactgatgta

SEQ ID NO: 604354 - DNA, 15 bp, Homo sapiens
ttcccactgatgtaa

SEQ ID NO: 604355 - DNA, 15 bp, Homo sapiens
tcccactgatgtaat

SEQ ID NO: 604356 - DNA, 15 bp, Homo sapiens
cccactgatgtaatt

SEQ ID NO: 604357 - DNA, 15 bp, Homo sapiens
ccactgatgtaattg

SEQ ID NO: 604358 - DNA, 15 bp, Homo sapiens
cactgatgtaattga

SEQ ID NO: 604359 - DNA, 15 bp, Homo sapiens
actgatgtaattgaa

SEQ ID NO: 604360 - DNA, 15 bp, Homo sapiens
ctgatgtaattgaac

SEQ ID NO: 604361 - DNA, 15 bp, Homo sapiens
tgatgtaattgaact

SEQ ID NO: 604362 - DNA, 15 bp, Homo sapiens
gatgtaattgaacta

SEQ ID NO: 604363 - DNA, 15 bp, Homo sapiens
atgtaattgaactag

SEQ ID NO: 604364 - DNA, 15 bp, Homo sapiens
tgtaattgaactagg

SEQ ID NO: 604365 - DNA, 15 bp, Homo sapiens
gtaattgaactaggg

SEQ ID NO: 604366 - DNA, 15 bp, Homo sapiens
taattgaactagggc

SEQ ID NO: 604367 - DNA, 15 bp, Homo sapiens
aattgaactagggct

SEQ ID NO: 604368 - DNA, 15 bp, Homo sapiens
attgaactagggcta

SEQ ID NO: 604369 - DNA, 15 bp, Homo sapiens
ttgaactagggctaa

SEQ ID NO: 604370 - DNA, 15 bp, Homo sapiens
tgaactagggctaag

SEQ ID NO: 604371 - DNA, 15 bp, Homo sapiens
gaactagggctaagt

SEQ ID NO: 604372 - DNA, 15 bp, Homo sapiens
aactagggctaagtt

SEQ ID NO: 604373 - DNA, 15 bp, Homo sapiens
actagggctaagttc

SEQ ID NO: 604374 - DNA, 15 bp, Homo sapiens
ctagggctaagttca

SEQ ID NO: 604375 - DNA, 15 bp, Homo sapiens
tagggctaagttcaa

SEQ ID NO: 604376 - DNA, 15 bp, Homo sapiens
agggctaagttcaag

SEQ ID NO: 604377 - DNA, 15 bp, Homo sapiens
gggctaagttcaaga

SEQ ID NO: 604378 - DNA, 15 bp, Homo sapiens
ggctaagttcaagag

SEQ ID NO: 604379 - DNA, 15 bp, Homo sapiens
gctaagttcaagagg

SEQ ID NO: 604380 - DNA, 15 bp, Homo sapiens
ctaagttcaagagga

SEQ ID NO: 604381 - DNA, 15 bp, Homo sapiens
taagttcaagaggaa

SEQ ID NO: 604382 - DNA, 15 bp, Homo sapiens
aagttcaagaggaag

SEQ ID NO: 604383 - DNA, 15 bp, Homo sapiens
agttcaagaggaaga

SEQ ID NO: 604384 - DNA, 15 bp, Homo sapiens
gttcaagaggaagag

SEQ ID NO: 604385 - DNA, 15 bp, Homo sapiens
ttcaagaggaagaga

SEQ ID NO: 604386 - DNA, 15 bp, Homo sapiens
tcaagaggaagagaa

SEQ ID NO: 604387 - DNA, 15 bp, Homo sapiens
caagaggaagagaat

SEQ ID NO: 604388 - DNA, 15 bp, Homo sapiens
aagaggaagagaatg

SEQ ID NO: 604389 - DNA, 15 bp, Homo sapiens
agaggaagagaatga

SEQ ID NO: 604390 - DNA, 15 bp, Homo sapiens
gaggaagagaatgat

SEQ ID NO: 604391 - DNA, 15 bp, Homo sapiens
aggaagagaatgatc

SEQ ID NO: 604392 - DNA, 15 bp, Homo sapiens
ggaagagaatgatcc

SEQ ID NO: 604393 - DNA, 15 bp, Homo sapiens
gaagagaatgatccg

SEQ ID NO: 604394 - DNA, 15 bp, Homo sapiens
aagagaatgatccgc

SEQ ID NO: 604395 - DNA, 15 bp, Homo sapiens
agagaatgatccgca

SEQ ID NO: 604396 - DNA, 15 bp, Homo sapiens
gagaatgatccgcaa

SEQ ID NO: 604397 - DNA, 15 bp, Homo sapiens
agaatgatccgcaag

SEQ ID NO: 604398 - DNA, 15 bp, Homo sapiens
gaatgatccgcaagg

SEQ ID NO: 604399 - DNA, 15 bp, Homo sapiens
aatgatccgcaagga

SEQ ID NO: 604400 - DNA, 15 bp, Homo sapiens
atgatccgcaaggaa

SEQ ID NO: 604401 - DNA, 15 bp, Homo sapiens
tgatccgcaaggaag

SEQ ID NO: 604402 - DNA, 15 bp, Homo sapiens
gatccgcaaggaagc

SEQ ID NO: 604403 - DNA, 15 bp, Homo sapiens
atccgcaaggaagca

SEQ ID NO: 604404 - DNA, 15 bp, Homo sapiens
tccgcaaggaagcaa

SEQ ID NO: 604405 - DNA, 15 bp, Homo sapiens
ccgcaaggaagcaac

SEQ ID NO: 604406 - DNA, 15 bp, Homo sapiens
cgcaaggaagcaacc

SEQ ID NO: 604407 - DNA, 15 bp, Homo sapiens
gcaaggaagcaaccc

SEQ ID NO: 604408 - DNA, 15 bp, Homo sapiens
caaggaagcaaccca

SEQ ID NO: 604409 - DNA, 15 bp, Homo sapiens
aaggaagcaacccag

SEQ ID NO: 604410 - DNA, 15 bp, Homo sapiens
aggaagcaacccaga

SEQ ID NO: 604411 - DNA, 15 bp, Homo sapiens
ggaagcaacccagag

SEQ ID NO: 604412 - DNA, 15 bp, Homo sapiens
gaagcaacccagagt

SEQ ID NO: 604413 - DNA, 15 bp, Homo sapiens
aagcaacccagagtt

SEQ ID NO: 604414 - DNA, 15 bp, Homo sapiens
agcaacccagagttc

SEQ ID NO: 604415 - DNA, 15 bp, Homo sapiens
gcaacccagagttcc

SEQ ID NO: 604416 - DNA, 15 bp, Homo sapiens
caacccagagttcca

SEQ ID NO: 604417 - DNA, 15 bp, Homo sapiens
aacccagagttccag

SEQ ID NO: 604418 - DNA, 15 bp, Homo sapiens
acccagagttccagg

SEQ ID NO: 604419 - DNA, 15 bp, Homo sapiens
cccagagttccaggt

SEQ ID NO: 604420 - DNA, 15 bp, Homo sapiens
ccagagttccaggtg

SEQ ID NO: 604421 - DNA, 15 bp, Homo sapiens
cagagttccaggtga

SEQ ID NO: 604422 - DNA, 15 bp, Homo sapiens
agagttccaggtgaa

SEQ ID NO: 604423 - DNA, 15 bp, Homo sapiens
gagttccaggtgaag

SEQ ID NO: 604424 - DNA, 15 bp, Homo sapiens
agttccaggtgaagc

SEQ ID NO: 604425 - DNA, 15 bp, Homo sapiens
gttccaggtgaagct

SEQ ID NO: 604426 - DNA, 15 bp, Homo sapiens
ttccaggtgaagctc

SEQ ID NO: 604427 - DNA, 15 bp, Homo sapiens
tccaggtgaagctca

SEQ ID NO: 604428 - DNA, 15 bp, Homo sapiens
ccaggtgaagctcag

SEQ ID NO: 604429 - DNA, 15 bp, Homo sapiens
caggtgaagctcagg

SEQ ID NO: 604430 - DNA, 15 bp, Homo sapiens
aggtgaagctcaggt

SEQ ID NO: 604431 - DNA, 15 bp, Homo sapiens
ggtgaagctcaggtc

SEQ ID NO: 604432 - DNA, 15 bp, Homo sapiens
gtgaagctcaggtca

SEQ ID NO: 604433 - DNA, 15 bp, Homo sapiens
tgaagctcaggtcag

SEQ ID NO: 604434 - DNA, 15 bp, Homo sapiens
gaagctcaggtcaga

SEQ ID NO: 604435 - DNA, 15 bp, Homo sapiens
aagctcaggtcagaa

SEQ ID NO: 604436 - DNA, 15 bp, Homo sapiens
agctcaggtcagaag

SEQ ID NO: 604437 - DNA, 15 bp, Homo sapiens
gctcaggtcagaagg

SEQ ID NO: 604438 - DNA, 15 bp, Homo sapiens
ctcaggtcagaaggg

SEQ ID NO: 604439 - DNA, 15 bp, Homo sapiens
tcaggtcagaagggc

SEQ ID NO: 604440 - DNA, 15 bp, Homo sapiens
caggtcagaagggcc

SEQ ID NO: 604441 - DNA, 15 bp, Homo sapiens
aggtcagaagggccc

SEQ ID NO: 604442 - DNA, 15 bp, Homo sapiens
ggtcagaagggccct

SEQ ID NO: 604443 - DNA, 15 bp, Homo sapiens
gtcagaagggccctg

SEQ ID NO: 604444 - DNA, 15 bp, Homo sapiens
tcagaagggccctgg

SEQ ID NO: 604445 - DNA, 15 bp, Homo sapiens
cagaagggccctggc

SEQ ID NO: 604446 - DNA, 15 bp, Homo sapiens
agaagggccctggca

SEQ ID NO: 604447 - DNA, 15 bp, Homo sapiens
gaagggccctggcaa

SEQ ID NO: 604448 - DNA, 15 bp, Homo sapiens
aagggccctggcaag

SEQ ID NO: 604449 - DNA, 15 bp, Homo sapiens
agggccctggcaagt

SEQ ID NO: 604450 - DNA, 15 bp, Homo sapiens
gggccctggcaagta

SEQ ID NO: 604451 - DNA, 15 bp, Homo sapiens
ggccctggcaagtaa

SEQ ID NO: 604452 - DNA, 15 bp, Homo sapiens
gccctggcaagtaaa

SEQ ID NO: 604453 - DNA, 15 bp, Homo sapiens
ccctggcaagtaaac

SEQ ID NO: 604454 - DNA, 15 bp, Homo sapiens
cctggcaagtaaaca

SEQ ID NO: 604455 - DNA, 15 bp, Homo sapiens
ctggcaagtaaacac

SEQ ID NO: 604456 - DNA, 15 bp, Homo sapiens
tggcaagtaaacacg

SEQ ID NO: 604457 - DNA, 15 bp, Homo sapiens
ggcaagtaaacacgg

SEQ ID NO: 604458 - DNA, 15 bp, Homo sapiens
gcaagtaaacacggc

SEQ ID NO: 604459 - DNA, 15 bp, Homo sapiens
caagtaaacacggct

SEQ ID NO: 604460 - DNA, 15 bp, Homo sapiens
aagtaaacacggctg

SEQ ID NO: 604461 - DNA, 15 bp, Homo sapiens
agtaaacacggctgt

SEQ ID NO: 604462 - DNA, 15 bp, Homo sapiens
gtaaacacggctgtg

SEQ ID NO: 604463 - DNA, 15 bp, Homo sapiens
taaacacggctgtgg

SEQ ID NO: 604464 - DNA, 15 bp, Homo sapiens
aaacacggctgtggg

SEQ ID NO: 604465 - DNA, 15 bp, Homo sapiens
aacacggctgtggga

SEQ ID NO: 604466 - DNA, 15 bp, Homo sapiens
acacggctgtgggat

SEQ ID NO: 604467 - DNA, 15 bp, Homo sapiens
cacggctgtgggatg

SEQ ID NO: 604468 - DNA, 15 bp, Homo sapiens
acggctgtgggatgc

SEQ ID NO: 604469 - DNA, 15 bp, Homo sapiens
cggctgtgggatgct

SEQ ID NO: 604470 - DNA, 15 bp, Homo sapiens
ggctgtgggatgctt

SEQ ID NO: 604471 - DNA, 15 bp, Homo sapiens
gctgtgggatgcttt

SEQ ID NO: 604472 - DNA, 15 bp, Homo sapiens
ctgtgggatgctttt

SEQ ID NO: 604473 - DNA, 15 bp, Homo sapiens
tgtgggatgctttta

SEQ ID NO: 604474 - DNA, 15 bp, Homo sapiens
gtgggatgcttttac

SEQ ID NO: 604475 - DNA, 15 bp, Homo sapiens
tgggatgcttttaca

SEQ ID NO: 604476 - DNA, 15 bp, Homo sapiens
gggatgcttttacaa

SEQ ID NO: 604477 - DNA, 15 bp, Homo sapiens
ggatgcttttacaaa

SEQ ID NO: 604478 - DNA, 15 bp, Homo sapiens
gatgcttttacaaac

SEQ ID NO: 604479 - DNA, 15 bp, Homo sapiens
atgcttttacaaaca

SEQ ID NO: 604480 - DNA, 15 bp, Homo sapiens
tgcttttacaaacac

SEQ ID NO: 604481 - DNA, 15 bp, Homo sapiens
gcttttacaaacaca

SEQ ID NO: 604482 - DNA, 15 bp, Homo sapiens
cttttacaaacacaa

SEQ ID NO: 604483 - DNA, 15 bp, Homo sapiens
ttttacaaacacaat

SEQ ID NO: 604484 - DNA, 15 bp, Homo sapiens
tttacaaacacaata

SEQ ID NO: 604485 - DNA, 15 bp, Homo sapiens
ttacaaacacaatat

SEQ ID NO: 604486 - DNA, 15 bp, Homo sapiens
tacaaacacaatatc

SEQ ID NO: 604487 - DNA, 15 bp, Homo sapiens
acaaacacaatatcg

SEQ ID NO: 604488 - DNA, 15 bp, Homo sapiens
caaacacaatatcgt

SEQ ID NO: 604489 - DNA, 15 bp, Homo sapiens
aaacacaatatcgtg

SEQ ID NO: 604490 - DNA, 15 bp, Homo sapiens
aacacaatatcgtga

SEQ ID NO: 604491 - DNA, 15 bp, Homo sapiens
acacaatatcgtgaa

SEQ ID NO: 604492 - DNA, 15 bp, Homo sapiens
cacaatatcgtgaaa

SEQ ID NO: 604493 - DNA, 15 bp, Homo sapiens
acaatatcgtgaaaa

SEQ ID NO: 604494 - DNA, 15 bp, Homo sapiens
caatatcgtgaaaat

SEQ ID NO: 604495 - DNA, 15 bp, Homo sapiens
aatatcgtgaaaatc

SEQ ID NO: 604496 - DNA, 15 bp, Homo sapiens
ccaccaatgcctgaa

SEQ ID NO: 604497 - DNA, 15 bp, Homo sapiens
caccaatgcctgaaa

SEQ ID NO: 604498 - DNA, 15 bp, Homo sapiens
accaatgcctgaaat

SEQ ID NO: 604499 - DNA, 15 bp, Homo sapiens
ccaatgcctgaaatg

SEQ ID NO: 604500 - DNA, 15 bp, Homo sapiens
caatgcctgaaatga

SEQ ID NO: 604501 - DNA, 15 bp, Homo sapiens
aatgcctgaaatgac

SEQ ID NO: 604502 - DNA, 15 bp, Homo sapiens
atgcctgaaatgact

SEQ ID NO: 604503 - DNA, 15 bp, Homo sapiens
tgcctgaaatgactg

SEQ ID NO: 604504 - DNA, 15 bp, Homo sapiens
gcctgaaatgactgt

SEQ ID NO: 604505 - DNA, 15 bp, Homo sapiens
cctgaaatgactgtc

SEQ ID NO: 604506 - DNA, 15 bp, Homo sapiens
ctgaaatgactgtcc

SEQ ID NO: 604507 - DNA, 15 bp, Homo sapiens
tgaaatgactgtccc

SEQ ID NO: 604508 - DNA, 15 bp, Homo sapiens
gaaatgactgtccct

SEQ ID NO: 604509 - DNA, 15 bp, Homo sapiens
aaatgactgtccctt

SEQ ID NO: 604510 - DNA, 15 bp, Homo sapiens
aatgactgtcccttt

SEQ ID NO: 604511 - DNA, 15 bp, Homo sapiens
atgactgtccctttc

SEQ ID NO: 604512 - DNA, 15 bp, Homo sapiens
tgactgtccctttcc

SEQ ID NO: 604513 - DNA, 15 bp, Homo sapiens
gactgtccctttcct

SEQ ID NO: 604514 - DNA, 15 bp, Homo sapiens
actgtccctttcctc

SEQ ID NO: 604515 - DNA, 15 bp, Homo sapiens
ctgtccctttcctca

SEQ ID NO: 604516 - DNA, 15 bp, Homo sapiens
tgtccctttcctcat

SEQ ID NO: 604517 - DNA, 15 bp, Homo sapiens
gtccctttcctcatc

SEQ ID NO: 604518 - DNA, 15 bp, Homo sapiens
tccctttcctcatct

SEQ ID NO: 604519 - DNA, 15 bp, Homo sapiens
ccctttcctcatctg

SEQ ID NO: 604520 - DNA, 15 bp, Homo sapiens
cctttcctcatctgc

SEQ ID NO: 604521 - DNA, 15 bp, Homo sapiens
ctttcctcatctgct

SEQ ID NO: 604522 - DNA, 15 bp, Homo sapiens
tttcctcatctgctg

SEQ ID NO: 604523 - DNA, 15 bp, Homo sapiens
ttcctcatctgctga

SEQ ID NO: 604524 - DNA, 15 bp, Homo sapiens
tcctcatctgctgag

SEQ ID NO: 604525 - DNA, 15 bp, Homo sapiens
cctcatctgctgagc

SEQ ID NO: 604526 - DNA, 15 bp, Homo sapiens
ctcatctgctgagct

SEQ ID NO: 604527 - DNA, 15 bp, Homo sapiens
tcatctgctgagctt

SEQ ID NO: 604528 - DNA, 15 bp, Homo sapiens
catctgctgagcttc

SEQ ID NO: 604529 - DNA, 15 bp, Homo sapiens
atctgctgagcttct

SEQ ID NO: 604530 - DNA, 15 bp, Homo sapiens
tctgctgagcttcta

SEQ ID NO: 604531 - DNA, 15 bp, Homo sapiens
ctgctgagcttctac

SEQ ID NO: 604532 - DNA, 15 bp, Homo sapiens
tgctgagcttctact

SEQ ID NO: 604533 - DNA, 15 bp, Homo sapiens
gctgagcttctactc

SEQ ID NO: 604534 - DNA, 15 bp, Homo sapiens
ctgagcttctactca

SEQ ID NO: 604535 - DNA, 15 bp, Homo sapiens
tgagcttctactcat

SEQ ID NO: 604536 - DNA, 15 bp, Homo sapiens
gagcttctactcatt

SEQ ID NO: 604537 - DNA, 15 bp, Homo sapiens
agcttctactcattc

SEQ ID NO: 604538 - DNA, 15 bp, Homo sapiens
gcttctactcattca

SEQ ID NO: 604539 - DNA, 15 bp, Homo sapiens
cttctactcattcat

SEQ ID NO: 604540 - DNA, 15 bp, Homo sapiens
ttctactcattcatt

SEQ ID NO: 604541 - DNA, 15 bp, Homo sapiens
tctactcattcattc

SEQ ID NO: 604542 - DNA, 15 bp, Homo sapiens
ctactcattcattct

SEQ ID NO: 604543 - DNA, 15 bp, Homo sapiens
tactcattcattctt

SEQ ID NO: 604544 - DNA, 15 bp, Homo sapiens
actcattcattcttt

SEQ ID NO: 604545 - DNA, 15 bp, Homo sapiens
ctcattcattctttg

SEQ ID NO: 604546 - DNA, 15 bp, Homo sapiens
tcattcattctttga

SEQ ID NO: 604547 - DNA, 15 bp, Homo sapiens
cattcattctttgag

SEQ ID NO: 604548 - DNA, 15 bp, Homo sapiens
attcattctttgaga

SEQ ID NO: 604549 - DNA, 15 bp, Homo sapiens
ttcattctttgagac

SEQ ID NO: 604550 - DNA, 15 bp, Homo sapiens
tcattctttgagact

SEQ ID NO: 604551 - DNA, 15 bp, Homo sapiens
cattctttgagactc

SEQ ID NO: 604552 - DNA, 15 bp, Homo sapiens
attctttgagactca

SEQ ID NO: 604553 - DNA, 15 bp, Homo sapiens
ttctttgagactcag

SEQ ID NO: 604554 - DNA, 15 bp, Homo sapiens
tctttgagactcagc

SEQ ID NO: 604555 - DNA, 15 bp, Homo sapiens
ctttgagactcagca

SEQ ID NO: 604556 - DNA, 15 bp, Homo sapiens
tttgagactcagcac

SEQ ID NO: 604557 - DNA, 15 bp, Homo sapiens
ttgagactcagcact

SEQ ID NO: 604558 - DNA, 15 bp, Homo sapiens
tgagactcagcactc

SEQ ID NO: 604559 - DNA, 15 bp, Homo sapiens
gagactcagcactca

SEQ ID NO: 604560 - DNA, 15 bp, Homo sapiens
agactcagcactcag

SEQ ID NO: 604561 - DNA, 15 bp, Homo sapiens
gactcagcactcagc

SEQ ID NO: 604562 - DNA, 15 bp, Homo sapiens
actcagcactcagct

SEQ ID NO: 604563 - DNA, 15 bp, Homo sapiens
ctcagcactcagctc

SEQ ID NO: 604564 - DNA, 15 bp, Homo sapiens
tcagcactcagctct

SEQ ID NO: 604565 - DNA, 15 bp, Homo sapiens
cagcactcagctctt

SEQ ID NO: 604566 - DNA, 15 bp, Homo sapiens
agcactcagctctta

SEQ ID NO: 604567 - DNA, 15 bp, Homo sapiens
gcactcagctcttaa

SEQ ID NO: 604568 - DNA, 15 bp, Homo sapiens
cactcagctcttaaa

SEQ ID NO: 604569 - DNA, 15 bp, Homo sapiens
actcagctcttaaat

SEQ ID NO: 604570 - DNA, 15 bp, Homo sapiens
ctcagctcttaaatg

SEQ ID NO: 604571 - DNA, 15 bp, Homo sapiens
tcagctcttaaatgt

SEQ ID NO: 604572 - DNA, 15 bp, Homo sapiens
cagctcttaaatgtc

SEQ ID NO: 604573 - DNA, 15 bp, Homo sapiens
agctcttaaatgtca

SEQ ID NO: 604574 - DNA, 15 bp, Homo sapiens
gctcttaaatgtcac

SEQ ID NO: 604575 - DNA, 15 bp, Homo sapiens
ctcttaaatgtcact

SEQ ID NO: 604576 - DNA, 15 bp, Homo sapiens
tcttaaatgtcactt

SEQ ID NO: 604577 - DNA, 15 bp, Homo sapiens
cttaaatgtcacttc

SEQ ID NO: 604578 - DNA, 15 bp, Homo sapiens
ttaaatgtcacttct

SEQ ID NO: 604579 - DNA, 15 bp, Homo sapiens
taaatgtcacttctg

SEQ ID NO: 604580 - DNA, 15 bp, Homo sapiens
aaatgtcacttctgc

SEQ ID NO: 604581 - DNA, 15 bp, Homo sapiens
aatgtcacttctgct

SEQ ID NO: 604582 - DNA, 15 bp, Homo sapiens
atgtcacttctgctt

SEQ ID NO: 604583 - DNA, 15 bp, Homo sapiens
tgtcacttctgcttt

SEQ ID NO: 604584 - DNA, 15 bp, Homo sapiens
gtcacttctgctttg

SEQ ID NO: 604585 - DNA, 15 bp, Homo sapiens
tcacttctgctttga

SEQ ID NO: 604586 - DNA, 15 bp, Homo sapiens
cacttctgctttgat

SEQ ID NO: 604587 - DNA, 15 bp, Homo sapiens
acttctgctttgatg

SEQ ID NO: 604588 - DNA, 15 bp, Homo sapiens
cttctgctttgatgg

SEQ ID NO: 604589 - DNA, 15 bp, Homo sapiens
ttctgctttgatgga

SEQ ID NO: 604590 - DNA, 15 bp, Homo sapiens
tctgctttgatggag

SEQ ID NO: 604591 - DNA, 15 bp, Homo sapiens
ctgctttgatggagg

SEQ ID NO: 604592 - DNA, 15 bp, Homo sapiens
tgctttgatggaggt

SEQ ID NO: 604593 - DNA, 15 bp, Homo sapiens
gctttgatggaggtt

SEQ ID NO: 604594 - DNA, 15 bp, Homo sapiens
ctttgatggaggttt

SEQ ID NO: 604595 - DNA, 15 bp, Homo sapiens
tttgatggaggttta

SEQ ID NO: 604596 - DNA, 15 bp, Homo sapiens
ttgatggaggtttag

SEQ ID NO: 604597 - DNA, 15 bp, Homo sapiens
tgatggaggtttagt

SEQ ID NO: 604598 - DNA, 15 bp, Homo sapiens
gatggaggtttagtc

SEQ ID NO: 604599 - DNA, 15 bp, Homo sapiens
atggaggtttagtca

SEQ ID NO: 604600 - DNA, 15 bp, Homo sapiens
tggaggtttagtcat

SEQ ID NO: 604601 - DNA, 15 bp, Homo sapiens
ggaggtttagtcatt

SEQ ID NO: 604602 - DNA, 15 bp, Homo sapiens
gaggtttagtcattc

SEQ ID NO: 604603 - DNA, 15 bp, Homo sapiens
aggtttagtcattca

SEQ ID NO: 604604 - DNA, 15 bp, Homo sapiens
ggtttagtcattcac

SEQ ID NO: 604605 - DNA, 15 bp, Homo sapiens
gtttagtcattcact

SEQ ID NO: 604606 - DNA, 15 bp, Homo sapiens
tttagtcattcactc

SEQ ID NO: 604607 - DNA, 15 bp, Homo sapiens
ttagtcattcactcc

SEQ ID NO: 604608 - DNA, 15 bp, Homo sapiens
tagtcattcactcct

SEQ ID NO: 604609 - DNA, 15 bp, Homo sapiens
agtcattcactcctc

SEQ ID NO: 604610 - DNA, 15 bp, Homo sapiens
gtcattcactcctct

SEQ ID NO: 604611 - DNA, 15 bp, Homo sapiens
tcattcactcctctg

SEQ ID NO: 604612 - DNA, 15 bp, Homo sapiens
cattcactcctctgt

SEQ ID NO: 604613 - DNA, 15 bp, Homo sapiens
attcactcctctgtg

SEQ ID NO: 604614 - DNA, 15 bp, Homo sapiens
ttcactcctctgtgc

SEQ ID NO: 604615 - DNA, 15 bp, Homo sapiens
tcactcctctgtgct

SEQ ID NO: 604616 - DNA, 15 bp, Homo sapiens
cactcctctgtgctt

SEQ ID NO: 604617 - DNA, 15 bp, Homo sapiens
actcctctgtgcttc

SEQ ID NO: 604618 - DNA, 15 bp, Homo sapiens
ctcctctgtgcttcc

SEQ ID NO: 604619 - DNA, 15 bp, Homo sapiens
tcctctgtgcttcct

SEQ ID NO: 604620 - DNA, 15 bp, Homo sapiens
cctctgtgcttcctg

SEQ ID NO: 604621 - DNA, 15 bp, Homo sapiens
ctctgtgcttcctgg

SEQ ID NO: 604622 - DNA, 15 bp, Homo sapiens
tctgtgcttcctggc

SEQ ID NO: 604623 - DNA, 15 bp, Homo sapiens
ctgtgcttcctggcc

SEQ ID NO: 604624 - DNA, 15 bp, Homo sapiens
tgtgcttcctggccc

SEQ ID NO: 604625 - DNA, 15 bp, Homo sapiens
gtgcttcctggccct

SEQ ID NO: 604626 - DNA, 15 bp, Homo sapiens
tgcttcctggccctc

SEQ ID NO: 604627 - DNA, 15 bp, Homo sapiens
gcttcctggccctct

SEQ ID NO: 604628 - DNA, 15 bp, Homo sapiens
cttcctggccctctc

SEQ ID NO: 604629 - DNA, 15 bp, Homo sapiens
ttcctggccctctct

SEQ ID NO: 604630 - DNA, 15 bp, Homo sapiens
tcctggccctctctt

SEQ ID NO: 604631 - DNA, 15 bp, Homo sapiens
cctggccctctcttc

SEQ ID NO: 604632 - DNA, 15 bp, Homo sapiens
ctggccctctcttca

SEQ ID NO: 604633 - DNA, 15 bp, Homo sapiens
tggccctctcttcac

SEQ ID NO: 604634 - DNA, 15 bp, Homo sapiens
ggccctctcttcaca

SEQ ID NO: 604635 - DNA, 15 bp, Homo sapiens
gccctctcttcacac

SEQ ID NO: 604636 - DNA, 15 bp, Homo sapiens
ccctctcttcacacc

SEQ ID NO: 604637 - DNA, 15 bp, Homo sapiens
cctctcttcacacct

SEQ ID NO: 604638 - DNA, 15 bp, Homo sapiens
ctctcttcacacctc

SEQ ID NO: 604639 - DNA, 15 bp, Homo sapiens
tctcttcacacctct

SEQ ID NO: 604640 - DNA, 15 bp, Homo sapiens
ctcttcacacctctc

SEQ ID NO: 604641 - DNA, 15 bp, Homo sapiens
tcttcacacctctct

SEQ ID NO: 604642 - DNA, 15 bp, Homo sapiens
cttcacacctctctc

SEQ ID NO: 604643 - DNA, 15 bp, Homo sapiens
ttcacacctctctca

SEQ ID NO: 604644 - DNA, 15 bp, Homo sapiens
tcacacctctctcag

SEQ ID NO: 604645 - DNA, 15 bp, Homo sapiens
cacacctctctcaga

SEQ ID NO: 604646 - DNA, 15 bp, Homo sapiens
acacctctctcagac

SEQ ID NO: 604647 - DNA, 15 bp, Homo sapiens
cacctctctcagacc

SEQ ID NO: 604648 - DNA, 15 bp, Homo sapiens
acctctctcagaccc

SEQ ID NO: 604649 - DNA, 15 bp, Homo sapiens
cctctctcagacccc

SEQ ID NO: 604650 - DNA, 15 bp, Homo sapiens
ctctctcagacccct

SEQ ID NO: 604651 - DNA, 15 bp, Homo sapiens
tctctcagacccctc

SEQ ID NO: 604652 - DNA, 15 bp, Homo sapiens
ctctcagacccctct

SEQ ID NO: 604653 - DNA, 15 bp, Homo sapiens
tctcagacccctctc

SEQ ID NO: 604654 - DNA, 15 bp, Homo sapiens
ctcagacccctctcc

SEQ ID NO: 604655 - DNA, 15 bp, Homo sapiens
tcagacccctctccc

SEQ ID NO: 604656 - DNA, 15 bp, Homo sapiens
cagacccctctccca

SEQ ID NO: 604657 - DNA, 15 bp, Homo sapiens
agacccctctcccag

SEQ ID NO: 604658 - DNA, 15 bp, Homo sapiens
gacccctctcccaga

SEQ ID NO: 604659 - DNA, 15 bp, Homo sapiens
acccctctcccagat

SEQ ID NO: 604660 - DNA, 15 bp, Homo sapiens
cccctctcccagata

SEQ ID NO: 604661 - DNA, 15 bp, Homo sapiens
ccctctcccagatag

SEQ ID NO: 604662 - DNA, 15 bp, Homo sapiens
tctcccagatagatt

SEQ ID NO: 604663 - DNA, 15 bp, Homo sapiens
ctcccagatagatta

SEQ ID NO: 604664 - DNA, 15 bp, Homo sapiens
tcccagatagattag

SEQ ID NO: 604665 - DNA, 15 bp, Homo sapiens
cccagatagattaga

SEQ ID NO: 604666 - DNA, 15 bp, Homo sapiens
ccagatagattagag

SEQ ID NO: 604667 - DNA, 15 bp, Homo sapiens
cagatagattagagt

SEQ ID NO: 604668 - DNA, 15 bp, Homo sapiens
agatagattagagtt

SEQ ID NO: 604669 - DNA, 15 bp, Homo sapiens
gatagattagagttg

SEQ ID NO: 604670 - DNA, 15 bp, Homo sapiens
atagattagagttgg

SEQ ID NO: 604671 - DNA, 15 bp, Homo sapiens
tagattagagttggc

SEQ ID NO: 604672 - DNA, 15 bp, Homo sapiens
agattagagttggct

SEQ ID NO: 604673 - DNA, 15 bp, Homo sapiens
gattagagttggctg

SEQ ID NO: 604674 - DNA, 15 bp, Homo sapiens
attagagttggctgt

SEQ ID NO: 604675 - DNA, 15 bp, Homo sapiens
ttagagttggctgtt

SEQ ID NO: 604676 - DNA, 15 bp, Homo sapiens
tagagttggctgttg

SEQ ID NO: 604677 - DNA, 15 bp, Homo sapiens
agagttggctgttga

SEQ ID NO: 604678 - DNA, 15 bp, Homo sapiens
gagttggctgttgac

SEQ ID NO: 604679 - DNA, 15 bp, Homo sapiens
agttggctgttgaca

SEQ ID NO: 604680 - DNA, 15 bp, Homo sapiens
gttggctgttgacat

SEQ ID NO: 604681 - DNA, 15 bp, Homo sapiens
ttggctgttgacatg

SEQ ID NO: 604682 - DNA, 15 bp, Homo sapiens
tggctgttgacatgt

SEQ ID NO: 604683 - DNA, 15 bp, Homo sapiens
ggctgttgacatgtc

SEQ ID NO: 604684 - DNA, 15 bp, Homo sapiens
gctgttgacatgtcc

SEQ ID NO: 604685 - DNA, 15 bp, Homo sapiens
ctgttgacatgtcca

SEQ ID NO: 604686 - DNA, 15 bp, Homo sapiens
tgttgacatgtccat

SEQ ID NO: 604687 - DNA, 15 bp, Homo sapiens
gttgacatgtccatc

SEQ ID NO: 604688 - DNA, 15 bp, Homo sapiens
ttgacatgtccatct

SEQ ID NO: 604689 - DNA, 15 bp, Homo sapiens
tgacatgtccatctc

SEQ ID NO: 604690 - DNA, 15 bp, Homo sapiens
gacatgtccatctct

SEQ ID NO: 604691 - DNA, 15 bp, Homo sapiens
acatgtccatctctg

SEQ ID NO: 604692 - DNA, 15 bp, Homo sapiens
catgtccatctctgg

SEQ ID NO: 604693 - DNA, 15 bp, Homo sapiens
atgtccatctctggc

SEQ ID NO: 604694 - DNA, 15 bp, Homo sapiens
tgtccatctctggct

SEQ ID NO: 604695 - DNA, 15 bp, Homo sapiens
gtccatctctggctg

SEQ ID NO: 604696 - DNA, 15 bp, Homo sapiens
tccatctctggctgg

SEQ ID NO: 604697 - DNA, 15 bp, Homo sapiens
ccatctctggctggg

SEQ ID NO: 604698 - DNA, 15 bp, Homo sapiens
catctctggctgggc

SEQ ID NO: 604699 - DNA, 15 bp, Homo sapiens
atctctggctgggca

SEQ ID NO: 604700 - DNA, 15 bp, Homo sapiens
tctctggctgggcag

SEQ ID NO: 604701 - DNA, 15 bp, Homo sapiens
ctctggctgggcagc

SEQ ID NO: 604702 - DNA, 15 bp, Homo sapiens
tctggctgggcagct

SEQ ID NO: 604703 - DNA, 15 bp, Homo sapiens
ctggctgggcagcta

SEQ ID NO: 604704 - DNA, 15 bp, Homo sapiens
tggctgggcagctaa

SEQ ID NO: 604705 - DNA, 15 bp, Homo sapiens
ggctgggcagctaaa

SEQ ID NO: 604706 - DNA, 15 bp, Homo sapiens
gctgggcagctaaac

SEQ ID NO: 604707 - DNA, 15 bp, Homo sapiens
ctgggcagctaaact

SEQ ID NO: 604708 - DNA, 15 bp, Homo sapiens
tgggcagctaaactg

SEQ ID NO: 604709 - DNA, 15 bp, Homo sapiens
gggcagctaaactgg

SEQ ID NO: 604710 - DNA, 15 bp, Homo sapiens
ggcagctaaactgga

SEQ ID NO: 604711 - DNA, 15 bp, Homo sapiens
gcagctaaactggag

SEQ ID NO: 604712 - DNA, 15 bp, Homo sapiens
cagctaaactggagt

SEQ ID NO: 604713 - DNA, 15 bp, Homo sapiens
agctaaactggagtt

SEQ ID NO: 604714 - DNA, 15 bp, Homo sapiens
gctaaactggagtta

SEQ ID NO: 604715 - DNA, 15 bp, Homo sapiens
ctaaactggagttat

SEQ ID NO: 604716 - DNA, 15 bp, Homo sapiens
taaactggagttatt

SEQ ID NO: 604717 - DNA, 15 bp, Homo sapiens
aaactggagttattt

SEQ ID NO: 604718 - DNA, 15 bp, Homo sapiens
aactggagttattta

SEQ ID NO: 604719 - DNA, 15 bp, Homo sapiens
actggagttatttag

SEQ ID NO: 604720 - DNA, 15 bp, Homo sapiens
ctggagttatttaga

SEQ ID NO: 604721 - DNA, 15 bp, Homo sapiens
tggagttatttagaa

SEQ ID NO: 604722 - DNA, 15 bp, Homo sapiens
ggagttatttagaat

SEQ ID NO: 604723 - DNA, 15 bp, Homo sapiens
gagttatttagaatc

SEQ ID NO: 604724 - DNA, 15 bp, Homo sapiens
agttatttagaatca

SEQ ID NO: 604725 - DNA, 15 bp, Homo sapiens
gttatttagaatcag

SEQ ID NO: 604726 - DNA, 15 bp, Homo sapiens
ttatttagaatcagg

SEQ ID NO: 604727 - DNA, 15 bp, Homo sapiens
tatttagaatcaggg

SEQ ID NO: 604728 - DNA, 15 bp, Homo sapiens
atttagaatcaggga

SEQ ID NO: 604729 - DNA, 15 bp, Homo sapiens
tttagaatcagggag

SEQ ID NO: 604730 - DNA, 15 bp, Homo sapiens
ttagaatcagggagc

SEQ ID NO: 604731 - DNA, 15 bp, Homo sapiens
tagaatcagggagca

SEQ ID NO: 604732 - DNA, 15 bp, Homo sapiens
agaatcagggagcac

SEQ ID NO: 604733 - DNA, 15 bp, Homo sapiens
gaatcagggagcaca

SEQ ID NO: 604734 - DNA, 15 bp, Homo sapiens
aatcagggagcacat

SEQ ID NO: 604735 - DNA, 15 bp, Homo sapiens
atcagggagcacatg

SEQ ID NO: 604736 - DNA, 15 bp, Homo sapiens
tcagggagcacatgt

SEQ ID NO: 604737 - DNA, 15 bp, Homo sapiens
cagggagcacatgtc

SEQ ID NO: 604738 - DNA, 15 bp, Homo sapiens
agggagcacatgtca

SEQ ID NO: 604739 - DNA, 15 bp, Homo sapiens
gggagcacatgtcag

SEQ ID NO: 604740 - DNA, 15 bp, Homo sapiens
ggagcacatgtcagt

SEQ ID NO: 604741 - DNA, 15 bp, Homo sapiens
gagcacatgtcagtc

SEQ ID NO: 604742 - DNA, 15 bp, Homo sapiens
agcacatgtcagtca

SEQ ID NO: 604743 - DNA, 15 bp, Homo sapiens
gcacatgtcagtcat

SEQ ID NO: 604744 - DNA, 15 bp, Homo sapiens
cacatgtcagtcatt

SEQ ID NO: 604745 - DNA, 15 bp, Homo sapiens
acatgtcagtcattt

SEQ ID NO: 604746 - DNA, 15 bp, Homo sapiens
catgtcagtcatttt

SEQ ID NO: 604747 - DNA, 15 bp, Homo sapiens
atgtcagtcattttc

SEQ ID NO: 604748 - DNA, 15 bp, Homo sapiens
tgtcagtcattttca

SEQ ID NO: 604749 - DNA, 15 bp, Homo sapiens
gtcagtcattttcaa

SEQ ID NO: 604750 - DNA, 15 bp, Homo sapiens
tcagtcattttcaaa

SEQ ID NO: 604751 - DNA, 15 bp, Homo sapiens
cagtcattttcaaat

SEQ ID NO: 604752 - DNA, 15 bp, Homo sapiens
agtcattttcaaatt

SEQ ID NO: 604753 - DNA, 15 bp, Homo sapiens
gtcattttcaaattc

SEQ ID NO: 604754 - DNA, 15 bp, Homo sapiens
tcattttcaaattct

SEQ ID NO: 604755 - DNA, 15 bp, Homo sapiens
cattttcaaattctc

SEQ ID NO: 604756 - DNA, 15 bp, Homo sapiens
attttcaaattctca

SEQ ID NO: 604757 - DNA, 15 bp, Homo sapiens
ttttcaaattctcaa

SEQ ID NO: 604758 - DNA, 15 bp, Homo sapiens
tttcaaattctcaac

SEQ ID NO: 604759 - DNA, 15 bp, Homo sapiens
ttcaaattctcaacc

SEQ ID NO: 604760 - DNA, 15 bp, Homo sapiens
tcaaattctcaacct

SEQ ID NO: 604761 - DNA, 15 bp, Homo sapiens
caaattctcaacctc

SEQ ID NO: 604762 - DNA, 15 bp, Homo sapiens
aaattctcaacctca

SEQ ID NO: 604763 - DNA, 15 bp, Homo sapiens
aattctcaacctcat

SEQ ID NO: 604764 - DNA, 15 bp, Homo sapiens
attctcaacctcata

SEQ ID NO: 604765 - DNA, 15 bp, Homo sapiens
ttctcaacctcatac

SEQ ID NO: 604766 - DNA, 15 bp, Homo sapiens
tctcaacctcatact

SEQ ID NO: 604767 - DNA, 15 bp, Homo sapiens
ctcaacctcatactc

SEQ ID NO: 604768 - DNA, 15 bp, Homo sapiens
tcaacctcatactcc

SEQ ID NO: 604769 - DNA, 15 bp, Homo sapiens
caacctcatactccc

SEQ ID NO: 604770 - DNA, 15 bp, Homo sapiens
aacctcatactccca

SEQ ID NO: 604771 - DNA, 15 bp, Homo sapiens
acctcatactcccag

SEQ ID NO: 604772 - DNA, 15 bp, Homo sapiens
cctcatactcccagt

SEQ ID NO: 604773 - DNA, 15 bp, Homo sapiens
ctcatactcccagta

SEQ ID NO: 604774 - DNA, 15 bp, Homo sapiens
tcatactcccagtaa

SEQ ID NO: 604775 - DNA, 15 bp, Homo sapiens
catactcccagtaaa

SEQ ID NO: 604776 - DNA, 15 bp, Homo sapiens
atactcccagtaaat

SEQ ID NO: 604777 - DNA, 15 bp, Homo sapiens
tactcccagtaaatg

SEQ ID NO: 604778 - DNA, 15 bp, Homo sapiens
actcccagtaaatga

SEQ ID NO: 604779 - DNA, 15 bp, Homo sapiens
ctcccagtaaatgac

SEQ ID NO: 604780 - DNA, 15 bp, Homo sapiens
tcccagtaaatgact

SEQ ID NO: 604781 - DNA, 15 bp, Homo sapiens
cccagtaaatgactc

SEQ ID NO: 604782 - DNA, 15 bp, Homo sapiens
ccagtaaatgactcc

SEQ ID NO: 604783 - DNA, 15 bp, Homo sapiens
cagtaaatgactcca

SEQ ID NO: 604784 - DNA, 15 bp, Homo sapiens
agtaaatgactccat

SEQ ID NO: 604785 - DNA, 15 bp, Homo sapiens
gtaaatgactccatc

SEQ ID NO: 604786 - DNA, 15 bp, Homo sapiens
taaatgactccatct

SEQ ID NO: 604787 - DNA, 15 bp, Homo sapiens
aaatgactccatcta

SEQ ID NO: 604788 - DNA, 15 bp, Homo sapiens
aatgactccatctaa

SEQ ID NO: 604789 - DNA, 15 bp, Homo sapiens
atgactccatctaag

SEQ ID NO: 604790 - DNA, 15 bp, Homo sapiens
tgactccatctaagg

SEQ ID NO: 604791 - DNA, 15 bp, Homo sapiens
gactccatctaaggg

SEQ ID NO: 604792 - DNA, 15 bp, Homo sapiens
actccatctaagggt

SEQ ID NO: 604793 - DNA, 15 bp, Homo sapiens
ctccatctaagggtg

SEQ ID NO: 604794 - DNA, 15 bp, Homo sapiens
tccatctaagggtgg

SEQ ID NO: 604795 - DNA, 15 bp, Homo sapiens
ccatctaagggtgga

SEQ ID NO: 604796 - DNA, 15 bp, Homo sapiens
catctaagggtggac

SEQ ID NO: 604797 - DNA, 15 bp, Homo sapiens
atctaagggtggacc

SEQ ID NO: 604798 - DNA, 15 bp, Homo sapiens
tctaagggtggacca

SEQ ID NO: 604799 - DNA, 15 bp, Homo sapiens
ctaagggtggaccac

SEQ ID NO: 604800 - DNA, 15 bp, Homo sapiens
taagggtggaccact

SEQ ID NO: 604801 - DNA, 15 bp, Homo sapiens
aagggtggaccactc

SEQ ID NO: 604802 - DNA, 15 bp, Homo sapiens
agggtggaccactct

SEQ ID NO: 604803 - DNA, 15 bp, Homo sapiens
gggtggaccactctt

SEQ ID NO: 604804 - DNA, 15 bp, Homo sapiens
ggtggaccactcttg

SEQ ID NO: 604805 - DNA, 15 bp, Homo sapiens
gtggaccactcttgc

SEQ ID NO: 604806 - DNA, 15 bp, Homo sapiens
tggaccactcttgcc

SEQ ID NO: 604807 - DNA, 15 bp, Homo sapiens
ggaccactcttgccc

SEQ ID NO: 604808 - DNA, 15 bp, Homo sapiens
gaccactcttgccca

SEQ ID NO: 604809 - DNA, 15 bp, Homo sapiens
accactcttgcccat

SEQ ID NO: 604810 - DNA, 15 bp, Homo sapiens
ccactcttgcccatg

SEQ ID NO: 604811 - DNA, 15 bp, Homo sapiens
cactcttgcccatgg

SEQ ID NO: 604812 - DNA, 15 bp, Homo sapiens
actcttgcccatggg

SEQ ID NO: 604813 - DNA, 15 bp, Homo sapiens
ctcttgcccatgggc

SEQ ID NO: 604814 - DNA, 15 bp, Homo sapiens
tcttgcccatgggcc

SEQ ID NO: 604815 - DNA, 15 bp, Homo sapiens
cttgcccatgggcca

SEQ ID NO: 604816 - DNA, 15 bp, Homo sapiens
ttgcccatgggccag

SEQ ID NO: 604817 - DNA, 15 bp, Homo sapiens
tgcccatgggccagg

SEQ ID NO: 604818 - DNA, 15 bp, Homo sapiens
gcccatgggccaggt

SEQ ID NO: 604819 - DNA, 15 bp, Homo sapiens
cccatgggccaggtc

SEQ ID NO: 604820 - DNA, 15 bp, Homo sapiens
ccatgggccaggtct

SEQ ID NO: 604821 - DNA, 15 bp, Homo sapiens
catgggccaggtctg

SEQ ID NO: 604822 - DNA, 15 bp, Homo sapiens
atgggccaggtctgg

SEQ ID NO: 604823 - DNA, 15 bp, Homo sapiens
tgggccaggtctggg

SEQ ID NO: 604824 - DNA, 15 bp, Homo sapiens
gggccaggtctgggt

SEQ ID NO: 604825 - DNA, 15 bp, Homo sapiens
ggccaggtctgggtc

SEQ ID NO: 604826 - DNA, 15 bp, Homo sapiens
gccaggtctgggtct

SEQ ID NO: 604827 - DNA, 15 bp, Homo sapiens
ccaggtctgggtctg

SEQ ID NO: 604828 - DNA, 15 bp, Homo sapiens
caggtctgggtctgt

SEQ ID NO: 604829 - DNA, 15 bp, Homo sapiens
aggtctgggtctgtg

SEQ ID NO: 604830 - DNA, 15 bp, Homo sapiens
ggtctgggtctgtgt

SEQ ID NO: 604831 - DNA, 15 bp, Homo sapiens
gtctgggtctgtgtc

SEQ ID NO: 604832 - DNA, 15 bp, Homo sapiens
tctgggtctgtgtca

SEQ ID NO: 604833 - DNA, 15 bp, Homo sapiens
ctgggtctgtgtcat

SEQ ID NO: 604834 - DNA, 15 bp, Homo sapiens
tgggtctgtgtcatc

SEQ ID NO: 604835 - DNA, 15 bp, Homo sapiens
gggtctgtgtcatct

SEQ ID NO: 604836 - DNA, 15 bp, Homo sapiens
ggtctgtgtcatcta

SEQ ID NO: 604837 - DNA, 15 bp, Homo sapiens
gtctgtgtcatctag

SEQ ID NO: 604838 - DNA, 15 bp, Homo sapiens
tctgtgtcatctaga

SEQ ID NO: 604839 - DNA, 15 bp, Homo sapiens
ctgtgtcatctagaa

SEQ ID NO: 604840 - DNA, 15 bp, Homo sapiens
tgtgtcatctagaac

SEQ ID NO: 604841 - DNA, 15 bp, Homo sapiens
gtgtcatctagaact

SEQ ID NO: 604842 - DNA, 15 bp, Homo sapiens
tgtcatctagaactg

SEQ ID NO: 604843 - DNA, 15 bp, Homo sapiens
gtcatctagaactgt

SEQ ID NO: 604844 - DNA, 15 bp, Homo sapiens
tcatctagaactgtt

SEQ ID NO: 604845 - DNA, 15 bp, Homo sapiens
catctagaactgttg

SEQ ID NO: 604846 - DNA, 15 bp, Homo sapiens
atctagaactgttgg

SEQ ID NO: 604847 - DNA, 15 bp, Homo sapiens
tctagaactgttgga

SEQ ID NO: 604848 - DNA, 15 bp, Homo sapiens
ctagaactgttggaa

SEQ ID NO: 604849 - DNA, 15 bp, Homo sapiens
tagaactgttggaag

SEQ ID NO: 604850 - DNA, 15 bp, Homo sapiens
agaactgttggaagg

SEQ ID NO: 604851 - DNA, 15 bp, Homo sapiens
gaactgttggaaggt

SEQ ID NO: 604852 - DNA, 15 bp, Homo sapiens
aactgttggaaggta

SEQ ID NO: 604853 - DNA, 15 bp, Homo sapiens
actgttggaaggtag

SEQ ID NO: 604854 - DNA, 15 bp, Homo sapiens
ctgttggaaggtagg

SEQ ID NO: 604855 - DNA, 15 bp, Homo sapiens
tgttggaaggtaggg

SEQ ID NO: 604856 - DNA, 15 bp, Homo sapiens
gttggaaggtagggg

SEQ ID NO: 604857 - DNA, 15 bp, Homo sapiens
ttggaaggtaggggc

SEQ ID NO: 604858 - DNA, 15 bp, Homo sapiens
tggaaggtaggggct

SEQ ID NO: 604859 - DNA, 15 bp, Homo sapiens
ggaaggtaggggctt

SEQ ID NO: 604860 - DNA, 15 bp, Homo sapiens
gaaggtaggggcttc

SEQ ID NO: 604861 - DNA, 15 bp, Homo sapiens
aaggtaggggcttct

SEQ ID NO: 604862 - DNA, 15 bp, Homo sapiens
aggtaggggcttctg

SEQ ID NO: 604863 - DNA, 15 bp, Homo sapiens
ggtaggggcttctgt

SEQ ID NO: 604864 - DNA, 15 bp, Homo sapiens
gtaggggcttctgtg

SEQ ID NO: 604865 - DNA, 15 bp, Homo sapiens
taggggcttctgtga

SEQ ID NO: 604866 - DNA, 15 bp, Homo sapiens
aggggcttctgtgag

SEQ ID NO: 604867 - DNA, 15 bp, Homo sapiens
ggggcttctgtgagc

SEQ ID NO: 604868 - DNA, 15 bp, Homo sapiens
gggcttctgtgagca

SEQ ID NO: 604869 - DNA, 15 bp, Homo sapiens
ggcttctgtgagcag

SEQ ID NO: 604870 - DNA, 15 bp, Homo sapiens
gcttctgtgagcagt

SEQ ID NO: 604871 - DNA, 15 bp, Homo sapiens
cttctgtgagcagta

SEQ ID NO: 604872 - DNA, 15 bp, Homo sapiens
ttctgtgagcagtag

SEQ ID NO: 604873 - DNA, 15 bp, Homo sapiens
tctgtgagcagtagg

SEQ ID NO: 604874 - DNA, 15 bp, Homo sapiens
ctgtgagcagtagga

SEQ ID NO: 604875 - DNA, 15 bp, Homo sapiens
tgtgagcagtaggag

SEQ ID NO: 604876 - DNA, 15 bp, Homo sapiens
gtgagcagtaggaga

SEQ ID NO: 604877 - DNA, 15 bp, Homo sapiens
tgagcagtaggagag

SEQ ID NO: 604878 - DNA, 15 bp, Homo sapiens
gagcagtaggagagg

SEQ ID NO: 604879 - DNA, 15 bp, Homo sapiens
agcagtaggagaggg

SEQ ID NO: 604880 - DNA, 15 bp, Homo sapiens
gcagtaggagaggga

SEQ ID NO: 604881 - DNA, 15 bp, Homo sapiens
cagtaggagagggaa

SEQ ID NO: 604882 - DNA, 15 bp, Homo sapiens
agtaggagagggaat

SEQ ID NO: 604883 - DNA, 15 bp, Homo sapiens
gtaggagagggaata

SEQ ID NO: 604884 - DNA, 15 bp, Homo sapiens
taggagagggaataa

SEQ ID NO: 604885 - DNA, 15 bp, Homo sapiens
aggagagggaataaa

SEQ ID NO: 604886 - DNA, 15 bp, Homo sapiens
ggagagggaataaac

SEQ ID NO: 604887 - DNA, 15 bp, Homo sapiens
gagagggaataaact

SEQ ID NO: 604888 - DNA, 15 bp, Homo sapiens
agagggaataaactc

SEQ ID NO: 604889 - DNA, 15 bp, Homo sapiens
gagggaataaactcg

SEQ ID NO: 604890 - DNA, 15 bp, Homo sapiens
agggaataaactcga

SEQ ID NO: 604891 - DNA, 15 bp, Homo sapiens
gggaataaactcgag

SEQ ID NO: 604892 - DNA, 15 bp, Homo sapiens
ggaataaactcgagg

SEQ ID NO: 604893 - DNA, 15 bp, Homo sapiens
gaataaactcgaggg

SEQ ID NO: 604894 - DNA, 15 bp, Homo sapiens
aataaactcgagggc

SEQ ID NO: 604895 - DNA, 15 bp, Homo sapiens
ataaactcgagggcc

SEQ ID NO: 604896 - DNA, 15 bp, Homo sapiens
taaactcgagggccc

SEQ ID NO: 604897 - DNA, 15 bp, Homo sapiens
aaactcgagggccct

SEQ ID NO: 604898 - DNA, 15 bp, Homo sapiens
aactcgagggccctc

SEQ ID NO: 604899 - DNA, 15 bp, Homo sapiens
actcgagggccctcg

SEQ ID NO: 604900 - DNA, 15 bp, Homo sapiens
ctcgagggccctcgg

SEQ ID NO: 604901 - DNA, 15 bp, Homo sapiens
tcgagggccctcggg

SEQ ID NO: 604902 - DNA, 15 bp, Homo sapiens
cgagggccctcggga

SEQ ID NO: 604903 - DNA, 15 bp, Homo sapiens
gagggccctcgggag

SEQ ID NO: 604904 - DNA, 15 bp, Homo sapiens
agggccctcgggagc

SEQ ID NO: 604905 - DNA, 15 bp, Homo sapiens
gggccctcgggagca

SEQ ID NO: 604906 - DNA, 15 bp, Homo sapiens
ggccctcgggagcat

SEQ ID NO: 604907 - DNA, 15 bp, Homo sapiens
gccctcgggagcatg

SEQ ID NO: 604908 - DNA, 15 bp, Homo sapiens
ccctcgggagcatgc

SEQ ID NO: 604909 - DNA, 15 bp, Homo sapiens
cctcgggagcatgcc

SEQ ID NO: 604910 - DNA, 15 bp, Homo sapiens
ctcgggagcatgccc

SEQ ID NO: 604911 - DNA, 15 bp, Homo sapiens
tcgggagcatgccct

SEQ ID NO: 604912 - DNA, 15 bp, Homo sapiens
cgggagcatgccctc

SEQ ID NO: 604913 - DNA, 15 bp, Homo sapiens
gggagcatgccctct

SEQ ID NO: 604914 - DNA, 15 bp, Homo sapiens
ggagcatgccctctt

SEQ ID NO: 604915 - DNA, 15 bp, Homo sapiens
gagcatgccctcttg

SEQ ID NO: 604916 - DNA, 15 bp, Homo sapiens
agcatgccctcttgt

SEQ ID NO: 604917 - DNA, 15 bp, Homo sapiens
gcatgccctcttgtc

SEQ ID NO: 604918 - DNA, 15 bp, Homo sapiens
catgccctcttgtct

SEQ ID NO: 604919 - DNA, 15 bp, Homo sapiens
atgccctcttgtctc

SEQ ID NO: 604920 - DNA, 15 bp, Homo sapiens
tgccctcttgtctca

SEQ ID NO: 604921 - DNA, 15 bp, Homo sapiens
gccctcttgtctcag

SEQ ID NO: 604922 - DNA, 15 bp, Homo sapiens
ccctcttgtctcaga

SEQ ID NO: 604923 - DNA, 15 bp, Homo sapiens
cctcttgtctcagac

SEQ ID NO: 604924 - DNA, 15 bp, Homo sapiens
ctcttgtctcagact

SEQ ID NO: 604925 - DNA, 15 bp, Homo sapiens
tcttgtctcagactt

SEQ ID NO: 604926 - DNA, 15 bp, Homo sapiens
cttgtctcagacttg

SEQ ID NO: 604927 - DNA, 15 bp, Homo sapiens
ttgtctcagacttgt

SEQ ID NO: 604928 - DNA, 15 bp, Homo sapiens
tgtctcagacttgtg

SEQ ID NO: 604929 - DNA, 15 bp, Homo sapiens
gtctcagacttgtga

SEQ ID NO: 604930 - DNA, 15 bp, Homo sapiens
tctcagacttgtgag

SEQ ID NO: 604931 - DNA, 15 bp, Homo sapiens
ctcagacttgtgagt

SEQ ID NO: 604932 - DNA, 15 bp, Homo sapiens
tcagacttgtgagtc

SEQ ID NO: 604933 - DNA, 15 bp, Homo sapiens
cagacttgtgagtcc

SEQ ID NO: 604934 - DNA, 15 bp, Homo sapiens
agacttgtgagtcct

SEQ ID NO: 604935 - DNA, 15 bp, Homo sapiens
gacttgtgagtcctg

SEQ ID NO: 604936 - DNA, 15 bp, Homo sapiens
acttgtgagtcctga

SEQ ID NO: 604937 - DNA, 15 bp, Homo sapiens
cttgtgagtcctgag

SEQ ID NO: 604938 - DNA, 15 bp, Homo sapiens
ttgtgagtcctgagg

SEQ ID NO: 604939 - DNA, 15 bp, Homo sapiens
tgtgagtcctgagga

SEQ ID NO: 604940 - DNA, 15 bp, Homo sapiens
gtgagtcctgaggat

SEQ ID NO: 604941 - DNA, 15 bp, Homo sapiens
tgagtcctgaggata

SEQ ID NO: 604942 - DNA, 15 bp, Homo sapiens
gagtcctgaggataa

SEQ ID NO: 604943 - DNA, 15 bp, Homo sapiens
agtcctgaggataac

SEQ ID NO: 604944 - DNA, 15 bp, Homo sapiens
gtcctgaggataaca

SEQ ID NO: 604945 - DNA, 15 bp, Homo sapiens
tcctgaggataacaa

SEQ ID NO: 604946 - DNA, 15 bp, Homo sapiens
cctgaggataacaaa

SEQ ID NO: 604947 - DNA, 15 bp, Homo sapiens
ctgaggataacaaac

SEQ ID NO: 604948 - DNA, 15 bp, Homo sapiens
tgaggataacaaact

SEQ ID NO: 604949 - DNA, 15 bp, Homo sapiens
gaggataacaaacta

SEQ ID NO: 604950 - DNA, 15 bp, Homo sapiens
aggataacaaactag

SEQ ID NO: 604951 - DNA, 15 bp, Homo sapiens
ggataacaaactagt

SEQ ID NO: 604952 - DNA, 15 bp, Homo sapiens
gataacaaactagtg

SEQ ID NO: 604953 - DNA, 15 bp, Homo sapiens
ataacaaactagtga

SEQ ID NO: 604954 - DNA, 15 bp, Homo sapiens
taacaaactagtgaa

SEQ ID NO: 604955 - DNA, 15 bp, Homo sapiens
aacaaactagtgaag

SEQ ID NO: 604956 - DNA, 15 bp, Homo sapiens
acaaactagtgaaga

SEQ ID NO: 604957 - DNA, 15 bp, Homo sapiens
caaactagtgaagaa

SEQ ID NO: 604958 - DNA, 15 bp, Homo sapiens
aaactagtgaagaaa

SEQ ID NO: 604959 - DNA, 15 bp, Homo sapiens
aactagtgaagaaaa

SEQ ID NO: 604960 - DNA, 15 bp, Homo sapiens
actagtgaagaaaag

SEQ ID NO: 604961 - DNA, 15 bp, Homo sapiens
ctagtgaagaaaagc

SEQ ID NO: 604962 - DNA, 15 bp, Homo sapiens
tagtgaagaaaagcc

SEQ ID NO: 604963 - DNA, 15 bp, Homo sapiens
agtgaagaaaagcct

SEQ ID NO: 604964 - DNA, 15 bp, Homo sapiens
gtgaagaaaagcctc

SEQ ID NO: 604965 - DNA, 15 bp, Homo sapiens
tgaagaaaagcctcg

SEQ ID NO: 604966 - DNA, 15 bp, Homo sapiens
gaagaaaagcctcgt

SEQ ID NO: 604967 - DNA, 15 bp, Homo sapiens
aagaaaagcctcgtt

SEQ ID NO: 604968 - DNA, 15 bp, Homo sapiens
agaaaagcctcgttc

SEQ ID NO: 604969 - DNA, 15 bp, Homo sapiens
gaaaagcctcgttct

SEQ ID NO: 604970 - DNA, 15 bp, Homo sapiens
aaaagcctcgttcta

SEQ ID NO: 604971 - DNA, 15 bp, Homo sapiens
aaagcctcgttctat

SEQ ID NO: 604972 - DNA, 15 bp, Homo sapiens
aagcctcgttctatc

SEQ ID NO: 604973 - DNA, 15 bp, Homo sapiens
agcctcgttctatct

SEQ ID NO: 604974 - DNA, 15 bp, Homo sapiens
gcctcgttctatctg

SEQ ID NO: 604975 - DNA, 15 bp, Homo sapiens
cctcgttctatctgt

SEQ ID NO: 604976 - DNA, 15 bp, Homo sapiens
ctcgttctatctgtc

SEQ ID NO: 604977 - DNA, 15 bp, Homo sapiens
tcgttctatctgtca

SEQ ID NO: 604978 - DNA, 15 bp, Homo sapiens
cgttctatctgtcac

SEQ ID NO: 604979 - DNA, 15 bp, Homo sapiens
gttctatctgtcacc

SEQ ID NO: 604980 - DNA, 15 bp, Homo sapiens
ttctatctgtcacct

SEQ ID NO: 604981 - DNA, 15 bp, Homo sapiens
tctatctgtcacctg

SEQ ID NO: 604982 - DNA, 15 bp, Homo sapiens
ctatctgtcacctgg

SEQ ID NO: 604983 - DNA, 15 bp, Homo sapiens
tatctgtcacctggt

SEQ ID NO: 604984 - DNA, 15 bp, Homo sapiens
atctgtcacctggtg

SEQ ID NO: 604985 - DNA, 15 bp, Homo sapiens
tctgtcacctggtgc

SEQ ID NO: 604986 - DNA, 15 bp, Homo sapiens
ctgtcacctggtgct

SEQ ID NO: 604987 - DNA, 15 bp, Homo sapiens
tgtcacctggtgctc

SEQ ID NO: 604988 - DNA, 15 bp, Homo sapiens
gtcacctggtgctct

SEQ ID NO: 604989 - DNA, 15 bp, Homo sapiens
tcacctggtgctctt

SEQ ID NO: 604990 - DNA, 15 bp, Homo sapiens
cacctggtgctcttg

SEQ ID NO: 604991 - DNA, 15 bp, Homo sapiens
acctggtgctcttga

SEQ ID NO: 604992 - DNA, 15 bp, Homo sapiens
cctggtgctcttgag

SEQ ID NO: 604993 - DNA, 15 bp, Homo sapiens
ctggtgctcttgagg

SEQ ID NO: 604994 - DNA, 15 bp, Homo sapiens
tggtgctcttgagga

SEQ ID NO: 604995 - DNA, 15 bp, Homo sapiens
ggtgctcttgaggac

SEQ ID NO: 604996 - DNA, 15 bp, Homo sapiens
gtgctcttgaggact

SEQ ID NO: 604997 - DNA, 15 bp, Homo sapiens
tgctcttgaggactt

SEQ ID NO: 604998 - DNA, 15 bp, Homo sapiens
gctcttgaggacttt

SEQ ID NO: 604999 - DNA, 15 bp, Homo sapiens
ctcttgaggactttc

SEQ ID NO: 605000 - DNA, 15 bp, Homo sapiens
tcttgaggactttct

SEQ ID NO: 605001 - DNA, 15 bp, Homo sapiens
cttgaggactttctg

SEQ ID NO: 605002 - DNA, 15 bp, Homo sapiens
ttgaggactttctgt

SEQ ID NO: 605003 - DNA, 15 bp, Homo sapiens
tgaggactttctgtt

SEQ ID NO: 605004 - DNA, 15 bp, Homo sapiens
gaggactttctgttg

SEQ ID NO: 605005 - DNA, 15 bp, Homo sapiens
aggactttctgttgc

SEQ ID NO: 605006 - DNA, 15 bp, Homo sapiens
ggactttctgttgcc

SEQ ID NO: 605007 - DNA, 15 bp, Homo sapiens
gactttctgttgccc

SEQ ID NO: 605008 - DNA, 15 bp, Homo sapiens
actttctgttgccct

SEQ ID NO: 605009 - DNA, 15 bp, Homo sapiens
ctttctgttgccctg

SEQ ID NO: 605010 - DNA, 15 bp, Homo sapiens
tttctgttgccctgg

SEQ ID NO: 605011 - DNA, 15 bp, Homo sapiens
ttctgttgccctggt

SEQ ID NO: 605012 - DNA, 15 bp, Homo sapiens
tctgttgccctggtg

SEQ ID NO: 605013 - DNA, 15 bp, Homo sapiens
ctgttgccctggtgc

SEQ ID NO: 605014 - DNA, 15 bp, Homo sapiens
tgttgccctggtgcc

SEQ ID NO: 605015 - DNA, 15 bp, Homo sapiens
gttgccctggtgcca

SEQ ID NO: 605016 - DNA, 15 bp, Homo sapiens
ttgccctggtgccac

SEQ ID NO: 605017 - DNA, 15 bp, Homo sapiens
tgccctggtgccacc

SEQ ID NO: 605018 - DNA, 15 bp, Homo sapiens
gccctggtgccacca

SEQ ID NO: 605019 - DNA, 15 bp, Homo sapiens
ccctggtgccaccac

SEQ ID NO: 605020 - DNA, 15 bp, Homo sapiens
cctggtgccaccaca

SEQ ID NO: 605021 - DNA, 15 bp, Homo sapiens
ctggtgccaccacaa

SEQ ID NO: 605022 - DNA, 15 bp, Homo sapiens
tggtgccaccacaat

SEQ ID NO: 605023 - DNA, 15 bp, Homo sapiens
ggtgccaccacaatt

SEQ ID NO: 605024 - DNA, 15 bp, Homo sapiens
gtgccaccacaattt

SEQ ID NO: 605025 - DNA, 15 bp, Homo sapiens
tgccaccacaatttt

SEQ ID NO: 605026 - DNA, 15 bp, Homo sapiens
gccaccacaattttc

SEQ ID NO: 605027 - DNA, 15 bp, Homo sapiens
ccaccacaattttcc

SEQ ID NO: 605028 - DNA, 15 bp, Homo sapiens
caccacaattttcca

SEQ ID NO: 605029 - DNA, 15 bp, Homo sapiens
accacaattttccag

SEQ ID NO: 605030 - DNA, 15 bp, Homo sapiens
ccacaattttccaga

SEQ ID NO: 605031 - DNA, 15 bp, Homo sapiens
cacaattttccagag

SEQ ID NO: 605032 - DNA, 15 bp, Homo sapiens
acaattttccagagt

SEQ ID NO: 605033 - DNA, 15 bp, Homo sapiens
caattttccagagtg

SEQ ID NO: 605034 - DNA, 15 bp, Homo sapiens
aattttccagagtgt

SEQ ID NO: 605035 - DNA, 15 bp, Homo sapiens
attttccagagtgtg

SEQ ID NO: 605036 - DNA, 15 bp, Homo sapiens
ttttccagagtgtgt

SEQ ID NO: 605037 - DNA, 15 bp, Homo sapiens
tttccagagtgtgtg

SEQ ID NO: 605038 - DNA, 15 bp, Homo sapiens
ttccagagtgtgtga

SEQ ID NO: 605039 - DNA, 15 bp, Homo sapiens
tccagagtgtgtgac

SEQ ID NO: 605040 - DNA, 15 bp, Homo sapiens
ccagagtgtgtgacc

SEQ ID NO: 605041 - DNA, 15 bp, Homo sapiens
cagagtgtgtgaccc

SEQ ID NO: 605042 - DNA, 15 bp, Homo sapiens
agagtgtgtgaccct

SEQ ID NO: 605043 - DNA, 15 bp, Homo sapiens
gagtgtgtgaccctc

SEQ ID NO: 605044 - DNA, 15 bp, Homo sapiens
agtgtgtgaccctcg

SEQ ID NO: 605045 - DNA, 15 bp, Homo sapiens
gtgtgtgaccctcgc

SEQ ID NO: 605046 - DNA, 15 bp, Homo sapiens
tgtgtgaccctcgct

SEQ ID NO: 605047 - DNA, 15 bp, Homo sapiens
gtgtgaccctcgctc

SEQ ID NO: 605048 - DNA, 15 bp, Homo sapiens
tgtgaccctcgctct

SEQ ID NO: 605049 - DNA, 15 bp, Homo sapiens
gtgaccctcgctctc

SEQ ID NO: 605050 - DNA, 15 bp, Homo sapiens
tgaccctcgctctcc

SEQ ID NO: 605051 - DNA, 15 bp, Homo sapiens
gaccctcgctctcca

SEQ ID NO: 605052 - DNA, 15 bp, Homo sapiens
accctcgctctccaa

SEQ ID NO: 605053 - DNA, 15 bp, Homo sapiens
ccctcgctctccaaa

SEQ ID NO: 605054 - DNA, 15 bp, Homo sapiens
cctcgctctccaaac

SEQ ID NO: 605055 - DNA, 15 bp, Homo sapiens
ctcgctctccaaact

SEQ ID NO: 605056 - DNA, 15 bp, Homo sapiens
tcgctctccaaactc

SEQ ID NO: 605057 - DNA, 15 bp, Homo sapiens
cgctctccaaactct

SEQ ID NO: 605058 - DNA, 15 bp, Homo sapiens
gctctccaaactctg

SEQ ID NO: 605059 - DNA, 15 bp, Homo sapiens
ctctccaaactctgg

SEQ ID NO: 605060 - DNA, 15 bp, Homo sapiens
tctccaaactctgga

SEQ ID NO: 605061 - DNA, 15 bp, Homo sapiens
ctccaaactctggaa

SEQ ID NO: 605062 - DNA, 15 bp, Homo sapiens
tccaaactctggaag

SEQ ID NO: 605063 - DNA, 15 bp, Homo sapiens
ccaaactctggaagt

SEQ ID NO: 605064 - DNA, 15 bp, Homo sapiens
caaactctggaagtg

SEQ ID NO: 605065 - DNA, 15 bp, Homo sapiens
aaactctggaagtgg

SEQ ID NO: 605066 - DNA, 15 bp, Homo sapiens
aactctggaagtggc

SEQ ID NO: 605067 - DNA, 15 bp, Homo sapiens
actctggaagtggca

SEQ ID NO: 605068 - DNA, 15 bp, Homo sapiens
ctctggaagtggcag

SEQ ID NO: 605069 - DNA, 15 bp, Homo sapiens
tctggaagtggcagc

SEQ ID NO: 605070 - DNA, 15 bp, Homo sapiens
ctggaagtggcagcc

SEQ ID NO: 605071 - DNA, 15 bp, Homo sapiens
tggaagtggcagccg

SEQ ID NO: 605072 - DNA, 15 bp, Homo sapiens
ggaagtggcagccga

SEQ ID NO: 605073 - DNA, 15 bp, Homo sapiens
gaagtggcagccgag

SEQ ID NO: 605074 - DNA, 15 bp, Homo sapiens
aagtggcagccgagg

SEQ ID NO: 605075 - DNA, 15 bp, Homo sapiens
agtggcagccgaggc

SEQ ID NO: 605076 - DNA, 15 bp, Homo sapiens
gtggcagccgaggct

SEQ ID NO: 605077 - DNA, 15 bp, Homo sapiens
tggcagccgaggctc

SEQ ID NO: 605078 - DNA, 15 bp, Homo sapiens
ggcagccgaggctcc

SEQ ID NO: 605079 - DNA, 15 bp, Homo sapiens
gcagccgaggctccc

SEQ ID NO: 605080 - DNA, 15 bp, Homo sapiens
cagccgaggctcccc

SEQ ID NO: 605081 - DNA, 15 bp, Homo sapiens
agccgaggctcccca

SEQ ID NO: 605082 - DNA, 15 bp, Homo sapiens
gccgaggctccccag

SEQ ID NO: 605083 - DNA, 15 bp, Homo sapiens
ccgaggctccccagt

SEQ ID NO: 605084 - DNA, 15 bp, Homo sapiens
cgaggctccccagtg

SEQ ID NO: 605085 - DNA, 15 bp, Homo sapiens
gaggctccccagtgg

SEQ ID NO: 605086 - DNA, 15 bp, Homo sapiens
aggctccccagtggc

SEQ ID NO: 605087 - DNA, 15 bp, Homo sapiens
ggctccccagtggcc

SEQ ID NO: 605088 - DNA, 15 bp, Homo sapiens
gctccccagtggcct

SEQ ID NO: 605089 - DNA, 15 bp, Homo sapiens
ctccccagtggcctt

SEQ ID NO: 605090 - DNA, 15 bp, Homo sapiens
tccccagtggccttt

SEQ ID NO: 605091 - DNA, 15 bp, Homo sapiens
ccccagtggcctttc

SEQ ID NO: 605092 - DNA, 15 bp, Homo sapiens
cccagtggcctttca

SEQ ID NO: 605093 - DNA, 15 bp, Homo sapiens
ccagtggcctttcag

SEQ ID NO: 605094 - DNA, 15 bp, Homo sapiens
cagtggcctttcaga

SEQ ID NO: 605095 - DNA, 15 bp, Homo sapiens
agtggcctttcagaa

SEQ ID NO: 605096 - DNA, 15 bp, Homo sapiens
gtggcctttcagaag

SEQ ID NO: 605097 - DNA, 15 bp, Homo sapiens
tggcctttcagaagg

SEQ ID NO: 605098 - DNA, 15 bp, Homo sapiens
ggcctttcagaaggt

SEQ ID NO: 605099 - DNA, 15 bp, Homo sapiens
gcctttcagaaggtg

SEQ ID NO: 605100 - DNA, 15 bp, Homo sapiens
cctttcagaaggtgc

SEQ ID NO: 605101 - DNA, 15 bp, Homo sapiens
ctttcagaaggtgcc

SEQ ID NO: 605102 - DNA, 15 bp, Homo sapiens
tttcagaaggtgcca

SEQ ID NO: 605103 - DNA, 15 bp, Homo sapiens
ttcagaaggtgccag

SEQ ID NO: 605104 - DNA, 15 bp, Homo sapiens
tcagaaggtgccagt

SEQ ID NO: 605105 - DNA, 15 bp, Homo sapiens
cagaaggtgccagtc

SEQ ID NO: 605106 - DNA, 15 bp, Homo sapiens
agaaggtgccagtca

SEQ ID NO: 605107 - DNA, 15 bp, Homo sapiens
gaaggtgccagtcat

SEQ ID NO: 605108 - DNA, 15 bp, Homo sapiens
aaggtgccagtcatg

SEQ ID NO: 605109 - DNA, 15 bp, Homo sapiens
aggtgccagtcatga

SEQ ID NO: 605110 - DNA, 15 bp, Homo sapiens
ggtgccagtcatgac

SEQ ID NO: 605111 - DNA, 15 bp, Homo sapiens
gtgccagtcatgaca

SEQ ID NO: 605112 - DNA, 15 bp, Homo sapiens
tgccagtcatgacag

SEQ ID NO: 605113 - DNA, 15 bp, Homo sapiens
gccagtcatgacagc

SEQ ID NO: 605114 - DNA, 15 bp, Homo sapiens
ccagtcatgacagca

SEQ ID NO: 605115 - DNA, 15 bp, Homo sapiens
cagtcatgacagcag

SEQ ID NO: 605116 - DNA, 15 bp, Homo sapiens
agtcatgacagcagc

SEQ ID NO: 605117 - DNA, 15 bp, Homo sapiens
gtcatgacagcagca

SEQ ID NO: 605118 - DNA, 15 bp, Homo sapiens
tcatgacagcagcac

SEQ ID NO: 605119 - DNA, 15 bp, Homo sapiens
catgacagcagcacc

SEQ ID NO: 605120 - DNA, 15 bp, Homo sapiens
atgacagcagcacca

SEQ ID NO: 605121 - DNA, 15 bp, Homo sapiens
tgacagcagcaccaa

SEQ ID NO: 605122 - DNA, 15 bp, Homo sapiens
gacagcagcaccaaa

SEQ ID NO: 605123 - DNA, 15 bp, Homo sapiens
acagcagcaccaaac

SEQ ID NO: 605124 - DNA, 15 bp, Homo sapiens
cagcagcaccaaact

SEQ ID NO: 605125 - DNA, 15 bp, Homo sapiens
agcagcaccaaactg

SEQ ID NO: 605126 - DNA, 15 bp, Homo sapiens
gcagcaccaaactgc

SEQ ID NO: 605127 - DNA, 15 bp, Homo sapiens
cagcaccaaactgca

SEQ ID NO: 605128 - DNA, 15 bp, Homo sapiens
agcaccaaactgcag

SEQ ID NO: 605129 - DNA, 15 bp, Homo sapiens
gcaccaaactgcagg

SEQ ID NO: 605130 - DNA, 15 bp, Homo sapiens
caccaaactgcaggc

SEQ ID NO: 605131 - DNA, 15 bp, Homo sapiens
accaaactgcaggca

SEQ ID NO: 605132 - DNA, 15 bp, Homo sapiens
ccaaactgcaggcaa

SEQ ID NO: 605133 - DNA, 15 bp, Homo sapiens
caaactgcaggcaac

SEQ ID NO: 605134 - DNA, 15 bp, Homo sapiens
aaactgcaggcaact

SEQ ID NO: 605135 - DNA, 15 bp, Homo sapiens
aactgcaggcaacta

SEQ ID NO: 605136 - DNA, 15 bp, Homo sapiens
actgcaggcaactac

SEQ ID NO: 605137 - DNA, 15 bp, Homo sapiens
ctgcaggcaactact

SEQ ID NO: 605138 - DNA, 15 bp, Homo sapiens
tgcaggcaactacta

SEQ ID NO: 605139 - DNA, 15 bp, Homo sapiens
gcaggcaactactaa

SEQ ID NO: 605140 - DNA, 15 bp, Homo sapiens
caggcaactactaag

SEQ ID NO: 605141 - DNA, 15 bp, Homo sapiens
aggcaactactaagc

SEQ ID NO: 605142 - DNA, 15 bp, Homo sapiens
ggcaactactaagcg

SEQ ID NO: 605143 - DNA, 15 bp, Homo sapiens
gcaactactaagcga

SEQ ID NO: 605144 - DNA, 15 bp, Homo sapiens
caactactaagcgat

SEQ ID NO: 605145 - DNA, 15 bp, Homo sapiens
aactactaagcgatc

SEQ ID NO: 605146 - DNA, 15 bp, Homo sapiens
actactaagcgatca

SEQ ID NO: 605147 - DNA, 15 bp, Homo sapiens
ctactaagcgatcac

SEQ ID NO: 605148 - DNA, 15 bp, Homo sapiens
tactaagcgatcacc

SEQ ID NO: 605149 - DNA, 15 bp, Homo sapiens
actaagcgatcacca

SEQ ID NO: 605150 - DNA, 15 bp, Homo sapiens
ctaagcgatcaccaa

SEQ ID NO: 605151 - DNA, 15 bp, Homo sapiens
taagcgatcaccaac

SEQ ID NO: 605152 - DNA, 15 bp, Homo sapiens
aagcgatcaccaact

SEQ ID NO: 605153 - DNA, 15 bp, Homo sapiens
agcgatcaccaactt

SEQ ID NO: 605154 - DNA, 15 bp, Homo sapiens
gcgatcaccaacttg

SEQ ID NO: 605155 - DNA, 15 bp, Homo sapiens
cgatcaccaacttgt

SEQ ID NO: 605156 - DNA, 15 bp, Homo sapiens
gatcaccaacttgtc

SEQ ID NO: 605157 - DNA, 15 bp, Homo sapiens
atcaccaacttgtct

SEQ ID NO: 605158 - DNA, 15 bp, Homo sapiens
tcaccaacttgtctg

SEQ ID NO: 605159 - DNA, 15 bp, Homo sapiens
caccaacttgtctga

SEQ ID NO: 605160 - DNA, 15 bp, Homo sapiens
accaacttgtctgaa

SEQ ID NO: 605161 - DNA, 15 bp, Homo sapiens
ccaacttgtctgaag

SEQ ID NO: 605162 - DNA, 15 bp, Homo sapiens
caacttgtctgaaga

SEQ ID NO: 605163 - DNA, 15 bp, Homo sapiens
aacttgtctgaagat

SEQ ID NO: 605164 - DNA, 15 bp, Homo sapiens
acttgtctgaagata

SEQ ID NO: 605165 - DNA, 15 bp, Homo sapiens
cttgtctgaagataa

SEQ ID NO: 605166 - DNA, 15 bp, Homo sapiens
ttgtctgaagataag

SEQ ID NO: 605167 - DNA, 15 bp, Homo sapiens
tgtctgaagataaga

SEQ ID NO: 605168 - DNA, 15 bp, Homo sapiens
gtctgaagataagaa

SEQ ID NO: 605169 - DNA, 15 bp, Homo sapiens
tctgaagataagaat

SEQ ID NO: 605170 - DNA, 15 bp, Homo sapiens
ctgaagataagaatg

SEQ ID NO: 605171 - DNA, 15 bp, Homo sapiens
tgaagataagaatga

SEQ ID NO: 605172 - DNA, 15 bp, Homo sapiens
gaagataagaatgac

SEQ ID NO: 605173 - DNA, 15 bp, Homo sapiens
aagataagaatgacc

SEQ ID NO: 605174 - DNA, 15 bp, Homo sapiens
agataagaatgacct

SEQ ID NO: 605175 - DNA, 15 bp, Homo sapiens
gataagaatgacctt

SEQ ID NO: 605176 - DNA, 15 bp, Homo sapiens
ataagaatgaccttg

SEQ ID NO: 605177 - DNA, 15 bp, Homo sapiens
taagaatgaccttga

SEQ ID NO: 605178 - DNA, 15 bp, Homo sapiens
aagaatgaccttgaa

SEQ ID NO: 605179 - DNA, 15 bp, Homo sapiens
agaatgaccttgaat

SEQ ID NO: 605180 - DNA, 15 bp, Homo sapiens
gaatgaccttgaatg

SEQ ID NO: 605181 - DNA, 15 bp, Homo sapiens
aatgaccttgaatgc

SEQ ID NO: 605182 - DNA, 15 bp, Homo sapiens
atgaccttgaatgca

SEQ ID NO: 605183 - DNA, 15 bp, Homo sapiens
tgaccttgaatgcat

SEQ ID NO: 605184 - DNA, 15 bp, Homo sapiens
gaccttgaatgcatt

SEQ ID NO: 605185 - DNA, 15 bp, Homo sapiens
accttgaatgcattt

SEQ ID NO: 605186 - DNA, 15 bp, Homo sapiens
ccttgaatgcatttt

SEQ ID NO: 605187 - DNA, 15 bp, Homo sapiens
cttgaatgcatttta

SEQ ID NO: 605188 - DNA, 15 bp, Homo sapiens
ttgaatgcattttat

SEQ ID NO: 605189 - DNA, 15 bp, Homo sapiens
tgaatgcattttata

SEQ ID NO: 605190 - DNA, 15 bp, Homo sapiens
gaatgcattttataa

SEQ ID NO: 605191 - DNA, 15 bp, Homo sapiens
aatgcattttataaa

SEQ ID NO: 605192 - DNA, 15 bp, Homo sapiens
atgcattttataaaa

SEQ ID NO: 605193 - DNA, 15 bp, Homo sapiens
tgcattttataaaac

SEQ ID NO: 605194 - DNA, 15 bp, Homo sapiens
gcattttataaaaca

SEQ ID NO: 605195 - DNA, 15 bp, Homo sapiens
cattttataaaacag

SEQ ID NO: 605196 - DNA, 15 bp, Homo sapiens
attttataaaacagg

SEQ ID NO: 605197 - DNA, 15 bp, Homo sapiens
ttttataaaacagga

SEQ ID NO: 605198 - DNA, 15 bp, Homo sapiens
tttataaaacaggat

SEQ ID NO: 605199 - DNA, 15 bp, Homo sapiens
ttataaaacaggatt

SEQ ID NO: 605200 - DNA, 15 bp, Homo sapiens
tataaaacaggattt

SEQ ID NO: 605201 - DNA, 15 bp, Homo sapiens
ataaaacaggatttt

SEQ ID NO: 605202 - DNA, 15 bp, Homo sapiens
taaaacaggattttt

SEQ ID NO: 605203 - DNA, 15 bp, Homo sapiens
aaaacaggatttttt

SEQ ID NO: 605204 - DNA, 15 bp, Homo sapiens
aaacaggattttttt

SEQ ID NO: 605205 - DNA, 15 bp, Homo sapiens
aacaggatttttttt

SEQ ID NO: 605206 - DNA, 15 bp, Homo sapiens
acaggattttttttt

SEQ ID NO: 605207 - DNA, 15 bp, Homo sapiens
caggatttttttttt

SEQ ID NO: 605208 - DNA, 15 bp, Homo sapiens
aggatttttttttta

SEQ ID NO: 605209 - DNA, 15 bp, Homo sapiens
ggattttttttttaa

SEQ ID NO: 605210 - DNA, 15 bp, Homo sapiens
gattttttttttaat

SEQ ID NO: 605211 - DNA, 15 bp, Homo sapiens
attttttttttaatt

SEQ ID NO: 605212 - DNA, 15 bp, Homo sapiens
ttttttttttaattt

SEQ ID NO: 605213 - DNA, 15 bp, Homo sapiens
tttttttttaatttt

SEQ ID NO: 605214 - DNA, 15 bp, Homo sapiens
ttttttttaattttt

SEQ ID NO: 605215 - DNA, 15 bp, Homo sapiens
tttttttaattttta

SEQ ID NO: 605216 - DNA, 15 bp, Homo sapiens
ttttttaatttttag

SEQ ID NO: 605217 - DNA, 15 bp, Homo sapiens
tttttaatttttaga

SEQ ID NO: 605218 - DNA, 15 bp, Homo sapiens
ttttaatttttagat

SEQ ID NO: 605219 - DNA, 15 bp, Homo sapiens
tttaatttttagatt

SEQ ID NO: 605220 - DNA, 15 bp, Homo sapiens
ttaatttttagattt

SEQ ID NO: 605221 - DNA, 15 bp, Homo sapiens
taatttttagatttt

SEQ ID NO: 605222 - DNA, 15 bp, Homo sapiens
aatttttagattttc

SEQ ID NO: 605223 - DNA, 15 bp, Homo sapiens
atttttagattttct

SEQ ID NO: 605224 - DNA, 15 bp, Homo sapiens
tttttagattttctt

SEQ ID NO: 605225 - DNA, 15 bp, Homo sapiens
ttttagattttcttt

SEQ ID NO: 605226 - DNA, 15 bp, Homo sapiens
tttagattttctttc

SEQ ID NO: 605227 - DNA, 15 bp, Homo sapiens
ttagattttctttct

SEQ ID NO: 605228 - DNA, 15 bp, Homo sapiens
tagattttctttctt

SEQ ID NO: 605229 - DNA, 15 bp, Homo sapiens
agattttctttcttt

SEQ ID NO: 605230 - DNA, 15 bp, Homo sapiens
gattttctttcttta

SEQ ID NO: 605231 - DNA, 15 bp, Homo sapiens
attttctttctttat

SEQ ID NO: 605232 - DNA, 15 bp, Homo sapiens
ttttctttctttatt

SEQ ID NO: 605233 - DNA, 15 bp, Homo sapiens
tttctttctttattt

SEQ ID NO: 605234 - DNA, 15 bp, Homo sapiens
ttctttctttatttt

SEQ ID NO: 605235 - DNA, 15 bp, Homo sapiens
tctttctttatttta

SEQ ID NO: 605236 - DNA, 15 bp, Homo sapiens
ctttctttattttac

SEQ ID NO: 605237 - DNA, 15 bp, Homo sapiens
tttctttattttacc

SEQ ID NO: 605238 - DNA, 15 bp, Homo sapiens
ttctttattttacct

SEQ ID NO: 605239 - DNA, 15 bp, Homo sapiens
tctttattttacctt

SEQ ID NO: 605240 - DNA, 15 bp, Homo sapiens
ctttattttacctta

SEQ ID NO: 605241 - DNA, 15 bp, Homo sapiens
tttattttaccttaa

SEQ ID NO: 605242 - DNA, 15 bp, Homo sapiens
ttattttaccttaag

SEQ ID NO: 605243 - DNA, 15 bp, Homo sapiens
tattttaccttaagt

SEQ ID NO: 605244 - DNA, 15 bp, Homo sapiens
attttaccttaagtt

SEQ ID NO: 605245 - DNA, 15 bp, Homo sapiens
ttttaccttaagttc

SEQ ID NO: 605246 - DNA, 15 bp, Homo sapiens
tttaccttaagttct

SEQ ID NO: 605247 - DNA, 15 bp, Homo sapiens
ttaccttaagttctg

SEQ ID NO: 605248 - DNA, 15 bp, Homo sapiens
taccttaagttctgg

SEQ ID NO: 605249 - DNA, 15 bp, Homo sapiens
accttaagttctggg

SEQ ID NO: 605250 - DNA, 15 bp, Homo sapiens
ccttaagttctggga

SEQ ID NO: 605251 - DNA, 15 bp, Homo sapiens
cttaagttctgggat

SEQ ID NO: 605252 - DNA, 15 bp, Homo sapiens
ttaagttctgggata

SEQ ID NO: 605253 - DNA, 15 bp, Homo sapiens
taagttctgggatac

SEQ ID NO: 605254 - DNA, 15 bp, Homo sapiens
aagttctgggataca

SEQ ID NO: 605255 - DNA, 15 bp, Homo sapiens
agttctgggatacaa

SEQ ID NO: 605256 - DNA, 15 bp, Homo sapiens
gttctgggatacaag

SEQ ID NO: 605257 - DNA, 15 bp, Homo sapiens
ttctgggatacaagt

SEQ ID NO: 605258 - DNA, 15 bp, Homo sapiens
tctgggatacaagtg

SEQ ID NO: 605259 - DNA, 15 bp, Homo sapiens
ctgggatacaagtgc

SEQ ID NO: 605260 - DNA, 15 bp, Homo sapiens
tgggatacaagtgca

SEQ ID NO: 605261 - DNA, 15 bp, Homo sapiens
gggatacaagtgcag

SEQ ID NO: 605262 - DNA, 15 bp, Homo sapiens
ggatacaagtgcaga

SEQ ID NO: 605263 - DNA, 15 bp, Homo sapiens
gatacaagtgcagaa

SEQ ID NO: 605264 - DNA, 15 bp, Homo sapiens
atacaagtgcagaat

SEQ ID NO: 605265 - DNA, 15 bp, Homo sapiens
tacaagtgcagaatg

SEQ ID NO: 605266 - DNA, 15 bp, Homo sapiens
acaagtgcagaatgt

SEQ ID NO: 605267 - DNA, 15 bp, Homo sapiens
caagtgcagaatgtg

SEQ ID NO: 605268 - DNA, 15 bp, Homo sapiens
aagtgcagaatgtgt

SEQ ID NO: 605269 - DNA, 15 bp, Homo sapiens
agtgcagaatgtgta

SEQ ID NO: 605270 - DNA, 15 bp, Homo sapiens
gtgcagaatgtgtag

SEQ ID NO: 605271 - DNA, 15 bp, Homo sapiens
tgcagaatgtgtagg

SEQ ID NO: 605272 - DNA, 15 bp, Homo sapiens
gcagaatgtgtaggt

SEQ ID NO: 605273 - DNA, 15 bp, Homo sapiens
cagaatgtgtaggtt

SEQ ID NO: 605274 - DNA, 15 bp, Homo sapiens
agaatgtgtaggttt

SEQ ID NO: 605275 - DNA, 15 bp, Homo sapiens
gaatgtgtaggtttg

SEQ ID NO: 605276 - DNA, 15 bp, Homo sapiens
aatgtgtaggtttgt

SEQ ID NO: 605277 - DNA, 15 bp, Homo sapiens
atgtgtaggtttgtt

SEQ ID NO: 605278 - DNA, 15 bp, Homo sapiens
tgtgtaggtttgtta

SEQ ID NO: 605279 - DNA, 15 bp, Homo sapiens
gtgtaggtttgttac

SEQ ID NO: 605280 - DNA, 15 bp, Homo sapiens
tgtaggtttgttaca

SEQ ID NO: 605281 - DNA, 15 bp, Homo sapiens
gtaggtttgttacat

SEQ ID NO: 605282 - DNA, 15 bp, Homo sapiens
taggtttgttacata

SEQ ID NO: 605283 - DNA, 15 bp, Homo sapiens
aggtttgttacatag

SEQ ID NO: 605284 - DNA, 15 bp, Homo sapiens
ggtttgttacatagg

SEQ ID NO: 605285 - DNA, 15 bp, Homo sapiens
gtttgttacataggt

SEQ ID NO: 605286 - DNA, 15 bp, Homo sapiens
tttgttacataggta

SEQ ID NO: 605287 - DNA, 15 bp, Homo sapiens
ttgttacataggtat

SEQ ID NO: 605288 - DNA, 15 bp, Homo sapiens
tgttacataggtata

SEQ ID NO: 605289 - DNA, 15 bp, Homo sapiens
gttacataggtatat

SEQ ID NO: 605290 - DNA, 15 bp, Homo sapiens
ttacataggtatatg

SEQ ID NO: 605291 - DNA, 15 bp, Homo sapiens
tacataggtatatgt

SEQ ID NO: 605292 - DNA, 15 bp, Homo sapiens
acataggtatatgtg

SEQ ID NO: 605293 - DNA, 15 bp, Homo sapiens
cataggtatatgtgt

SEQ ID NO: 605294 - DNA, 15 bp, Homo sapiens
ataggtatatgtgtg

SEQ ID NO: 605295 - DNA, 15 bp, Homo sapiens
taggtatatgtgtgc

SEQ ID NO: 605296 - DNA, 15 bp, Homo sapiens
aggtatatgtgtgcc

SEQ ID NO: 605297 - DNA, 15 bp, Homo sapiens
ggtatatgtgtgcca

SEQ ID NO: 605298 - DNA, 15 bp, Homo sapiens
gtatatgtgtgccat

SEQ ID NO: 605299 - DNA, 15 bp, Homo sapiens
tatatgtgtgccatg

SEQ ID NO: 605300 - DNA, 15 bp, Homo sapiens
atatgtgtgccatgg

SEQ ID NO: 605301 - DNA, 15 bp, Homo sapiens
tatgtgtgccatggt

SEQ ID NO: 605302 - DNA, 15 bp, Homo sapiens
atgtgtgccatggtg

SEQ ID NO: 605303 - DNA, 15 bp, Homo sapiens
tgtgtgccatggtgg

SEQ ID NO: 605304 - DNA, 15 bp, Homo sapiens
gtgtgccatggtggt

SEQ ID NO: 605305 - DNA, 15 bp, Homo sapiens
tgtgccatggtggtt

SEQ ID NO: 605306 - DNA, 15 bp, Homo sapiens
gtgccatggtggttt

SEQ ID NO: 605307 - DNA, 15 bp, Homo sapiens
tgccatggtggtttg

SEQ ID NO: 605308 - DNA, 15 bp, Homo sapiens
gccatggtggtttgc

SEQ ID NO: 605309 - DNA, 15 bp, Homo sapiens
ccatggtggtttgct

SEQ ID NO: 605310 - DNA, 15 bp, Homo sapiens
catggtggtttgctg

SEQ ID NO: 605311 - DNA, 15 bp, Homo sapiens
atggtggtttgctgc

SEQ ID NO: 605312 - DNA, 15 bp, Homo sapiens
tggtggtttgctgca

SEQ ID NO: 605313 - DNA, 15 bp, Homo sapiens
ggtggtttgctgcac

SEQ ID NO: 605314 - DNA, 15 bp, Homo sapiens
gtggtttgctgcact

SEQ ID NO: 605315 - DNA, 15 bp, Homo sapiens
tggtttgctgcactt

SEQ ID NO: 605316 - DNA, 15 bp, Homo sapiens
ggtttgctgcacttg

SEQ ID NO: 605317 - DNA, 15 bp, Homo sapiens
gtttgctgcacttgt

SEQ ID NO: 605318 - DNA, 15 bp, Homo sapiens
tttgctgcacttgtc

SEQ ID NO: 605319 - DNA, 15 bp, Homo sapiens
ttgctgcacttgtca

SEQ ID NO: 605320 - DNA, 15 bp, Homo sapiens
tgctgcacttgtcaa

SEQ ID NO: 605321 - DNA, 15 bp, Homo sapiens
gctgcacttgtcaac

SEQ ID NO: 605322 - DNA, 15 bp, Homo sapiens
ctgcacttgtcaacc

SEQ ID NO: 605323 - DNA, 15 bp, Homo sapiens
tgcacttgtcaaccc

SEQ ID NO: 605324 - DNA, 15 bp, Homo sapiens
gcacttgtcaaccca

SEQ ID NO: 605325 - DNA, 15 bp, Homo sapiens
cacttgtcaacccat

SEQ ID NO: 605326 - DNA, 15 bp, Homo sapiens
acttgtcaacccatc

SEQ ID NO: 605327 - DNA, 15 bp, Homo sapiens
cttgtcaacccatca

SEQ ID NO: 605328 - DNA, 15 bp, Homo sapiens
ttgtcaacccatcat

SEQ ID NO: 605329 - DNA, 15 bp, Homo sapiens
tgtcaacccatcatc

SEQ ID NO: 605330 - DNA, 15 bp, Homo sapiens
gtcaacccatcatct

SEQ ID NO: 605331 - DNA, 15 bp, Homo sapiens
tcaacccatcatcta

SEQ ID NO: 605332 - DNA, 15 bp, Homo sapiens
caacccatcatctag

SEQ ID NO: 605333 - DNA, 15 bp, Homo sapiens
aacccatcatctagg

SEQ ID NO: 605334 - DNA, 15 bp, Homo sapiens
acccatcatctaggt

SEQ ID NO: 605335 - DNA, 15 bp, Homo sapiens
cccatcatctaggtt

SEQ ID NO: 605336 - DNA, 15 bp, Homo sapiens
ccatcatctaggttt

SEQ ID NO: 605337 - DNA, 15 bp, Homo sapiens
catcatctaggtttt

SEQ ID NO: 605338 - DNA, 15 bp, Homo sapiens
atcatctaggtttta

SEQ ID NO: 605339 - DNA, 15 bp, Homo sapiens
tcatctaggttttaa

SEQ ID NO: 605340 - DNA, 15 bp, Homo sapiens
catctaggttttaag

SEQ ID NO: 605341 - DNA, 15 bp, Homo sapiens
atctaggttttaagc

SEQ ID NO: 605342 - DNA, 15 bp, Homo sapiens
tctaggttttaagcc

SEQ ID NO: 605343 - DNA, 15 bp, Homo sapiens
ctaggttttaagccc

SEQ ID NO: 605344 - DNA, 15 bp, Homo sapiens
taggttttaagcccc

SEQ ID NO: 605345 - DNA, 15 bp, Homo sapiens
aggttttaagcccca

SEQ ID NO: 605346 - DNA, 15 bp, Homo sapiens
ggttttaagccccac

SEQ ID NO: 605347 - DNA, 15 bp, Homo sapiens
gttttaagccccaca

SEQ ID NO: 605348 - DNA, 15 bp, Homo sapiens
ttttaagccccacat

SEQ ID NO: 605349 - DNA, 15 bp, Homo sapiens
tttaagccccacatg

SEQ ID NO: 605350 - DNA, 15 bp, Homo sapiens
ttaagccccacatgc

SEQ ID NO: 605351 - DNA, 15 bp, Homo sapiens
taagccccacatgca

SEQ ID NO: 605352 - DNA, 15 bp, Homo sapiens
aagccccacatgcat

SEQ ID NO: 605353 - DNA, 15 bp, Homo sapiens
agccccacatgcatt

SEQ ID NO: 605354 - DNA, 15 bp, Homo sapiens
gccccacatgcatta

SEQ ID NO: 605355 - DNA, 15 bp, Homo sapiens
ccccacatgcattag

SEQ ID NO: 605356 - DNA, 15 bp, Homo sapiens
cccacatgcattagc

SEQ ID NO: 605357 - DNA, 15 bp, Homo sapiens
ccacatgcattagct

SEQ ID NO: 605358 - DNA, 15 bp, Homo sapiens
cacatgcattagcta

SEQ ID NO: 605359 - DNA, 15 bp, Homo sapiens
acatgcattagctat

SEQ ID NO: 605360 - DNA, 15 bp, Homo sapiens
catgcattagctatt

SEQ ID NO: 605361 - DNA, 15 bp, Homo sapiens
atgcattagctattt

SEQ ID NO: 605362 - DNA, 15 bp, Homo sapiens
tgcattagctatttg

SEQ ID NO: 605363 - DNA, 15 bp, Homo sapiens
gcattagctatttgt

SEQ ID NO: 605364 - DNA, 15 bp, Homo sapiens
cattagctatttgtc

SEQ ID NO: 605365 - DNA, 15 bp, Homo sapiens
attagctatttgtcc

SEQ ID NO: 605366 - DNA, 15 bp, Homo sapiens
ttagctatttgtcct

SEQ ID NO: 605367 - DNA, 15 bp, Homo sapiens
tagctatttgtccta
